United States Patent Application Publication US 2007/0042381 A1 - sequence listing, part 20

SEQ ID NO: 861598 - RNA, 22 nt, Human
agaggaugauuuuaaggacacu

SEQ ID NO: 861599 - RNA, 22 nt, Human
ucaggauguccaaaauccagcc

SEQ ID NO: 861600 - RNA, 23 nt, Human
uuagagaugauuaaaaaaucuug

SEQ ID NO: 861601 - RNA, 22 nt, Human
gugacagucaaagacaugacuu

SEQ ID NO: 861602 - RNA, 22 nt, Human
gcagcugaauguccauugcugc

SEQ ID NO: 861603 - RNA, 22 nt, Human
gauggcagcagcagccagggau

SEQ ID NO: 861604 - RNA, 22 nt, Human
cauagaaaagaguagguaaugu

SEQ ID NO: 861605 - RNA, 22 nt, Human
gcccaggaaagauagggccuca

SEQ ID NO: 861606 - RNA, 22 nt, Human
auuccaaagccugaauaaugga

SEQ ID NO: 861607 - RNA, 22 nt, Human
aaggcagcaggauuuggugacu

SEQ ID NO: 861608 - RNA, 22 nt, Human
uucaggauggaguaccuuuuau

SEQ ID NO: 861609 - RNA, 22 nt, Human
cugcugugaguuuggaggucua

SEQ ID NO: 861610 - RNA, 22 nt, Human
uaaagcaguguugggucggacg

SEQ ID NO: 861611 - RNA, 23 nt, Human
uggcagcuguguaagagaaagca

SEQ ID NO: 861612 - RNA, 22 nt, Human
aguaaacauagaauguucuucc

SEQ ID NO: 861613 - RNA, 22 nt, Human
agcugaugccauguggaacagu

SEQ ID NO: 861614 - RNA, 22 nt, Human
uaucagaaacucuggggcaggg

SEQ ID NO: 861615 - RNA, 22 nt, Human
ggccuuuaagcaauugaaaaga

SEQ ID NO: 861616 - RNA, 22 nt, Human
aaaggagacuucagaucuccuu

SEQ ID NO: 861617 - RNA, 22 nt, Human
cuacagaagaaacuaucacuau

SEQ ID NO: 861618 - RNA, 22 nt, Human
gaggccaggagugcuguaaguu

SEQ ID NO: 861619 - RNA, 22 nt, Human
gaaggccauuuuuagguagaau

SEQ ID NO: 861620 - RNA, 20 nt, Human
cugcccagccacugagggau

SEQ ID NO: 861621 - RNA, 22 nt, Human
uucccaugccuggccccuaucc

SEQ ID NO: 861622 - RNA, 22 nt, Human
acaacuuugacccuuguucuua

SEQ ID NO: 861623 - RNA, 22 nt, Human
uucuucuuuaucucaguauccu

SEQ ID NO: 861624 - RNA, 22 nt, Human
uaucuaaauggaauauuccaga

SEQ ID NO: 861625 - RNA, 22 nt, Human
agagggauaauauguauuguaa

SEQ ID NO: 861626 - RNA, 22 nt, Human
aaguauaagcuauucuucauga

SEQ ID NO: 861627 - RNA, 22 nt, Human
uuaauaaaguaugaauuggaaa

SEQ ID NO: 861628 - RNA, 22 nt, Human
acccaggagcaggcugggcagu

SEQ ID NO: 861629 - RNA, 22 nt, Human
cccagcaguaaccaguggaaau

SEQ ID NO: 861630 - RNA, 22 nt, Human
gcugcaggcauuuuccugggca

SEQ ID NO: 861631 - RNA, 22 nt, Human
gggcagcucuuugguauccuuc

SEQ ID NO: 861632 - RNA, 22 nt, Human
auuucaacauucucaguuguag

SEQ ID NO: 861633 - RNA, 22 nt, Human
uggccaggcagguagaacggcc

SEQ ID NO: 861634 - RNA, 22 nt, Human
gaauacaugauacaugaacugc

SEQ ID NO: 861635 - RNA, 22 nt, Human
acuucacagaaauuuuaugagg

SEQ ID NO: 861636 - RNA, 22 nt, Human
agucucagaaaagaagcaugga

SEQ ID NO: 861637 - RNA, 22 nt, Human
gcaucuaaauaaacgugggagu

SEQ ID NO: 861638 - RNA, 22 nt, Human
cuggcuuuggucaugugaucau

SEQ ID NO: 861639 - RNA, 20 nt, Human
caguccaaucagaggccacc

SEQ ID NO: 861640 - RNA, 22 nt, Human
gcagggaagaucuuggagcugc

SEQ ID NO: 861641 - RNA, 22 nt, Human
auuucaacguuagauguaauag

SEQ ID NO: 861642 - RNA, 17 nt, Human
uugaacugcugagucag

SEQ ID NO: 861643 - RNA, 22 nt, Human
acauaauaaaaauaacagcuca

SEQ ID NO: 861644 - RNA, 22 nt, Human
aucugcagaggacaggcgagga

SEQ ID NO: 861645 - RNA, 22 nt, Human
aggccagcgcugcuagcucccg

SEQ ID NO: 861646 - RNA, 23 nt, Human
aggauguaggauguauggcagag

SEQ ID NO: 861647 - RNA, 20 nt, Human
uaggcagcuugacccuuggu

SEQ ID NO: 861648 - RNA, 22 nt, Human
ccaggacaaguguggccauggc

SEQ ID NO: 861649 - RNA, 22 nt, Human
augcugugccuggaaagcggcu

SEQ ID NO: 861650 - RNA, 22 nt, Human
uguucauuuggcccuuuuguau

SEQ ID NO: 861651 - RNA, 22 nt, Human
ucaggauguuaauauagcauua

SEQ ID NO: 861652 - RNA, 22 nt, Human
gugcauuugacgaauacucacu

SEQ ID NO: 861653 - RNA, 22 nt, Human
uccagaaacuuuuccagucuca

SEQ ID NO: 861654 - RNA, 22 nt, Human
aaacuuuguucgucugaugugg

SEQ ID NO: 861655 - RNA, 22 nt, Human
uagauauaucugucauacuggu

SEQ ID NO: 861656 - RNA, 22 nt, Human
uaaacauguugacaucuuaccu

SEQ ID NO: 861657 - RNA, 23 nt, Human
aaucuauacuuaggcugguaaua

SEQ ID NO: 861658 - RNA, 22 nt, Human
uuaaauauuauguugucugcaa

SEQ ID NO: 861659 - RNA, 22 nt, Human
uaucagaaggcacauggagucu

SEQ ID NO: 861660 - RNA, 22 nt, Human
cagucaccuagacagaacuuac

SEQ ID NO: 861661 - RNA, 20 nt, Human
uuucaguugguuaauggcau

SEQ ID NO: 861662 - RNA, 22 nt, Human
aauauaugagggagcuauuuga

SEQ ID NO: 861663 - RNA, 22 nt, Human
caucagaaagaguccuggacuu

SEQ ID NO: 861664 - RNA, 22 nt, Human
uagcaucuguucuuucauuaaa

SEQ ID NO: 861665 - RNA, 22 nt, Human
uagcagaagaacaacaugaucu

SEQ ID NO: 861666 - RNA, 22 nt, Human
aggcaguuguagagagggcucu

SEQ ID NO: 861667 - RNA, 22 nt, Human
agggcagcccuucugggagggc

SEQ ID NO: 861668 - RNA, 22 nt, Human
ccagcagagucuaggaaggagg

SEQ ID NO: 861669 - RNA, 22 nt, Human
gagggagggccaggucccaacc

SEQ ID NO: 861670 - RNA, 22 nt, Human
uuauuuauggcccucaccugau

SEQ ID NO: 861671 - RNA, 22 nt, Human
uggcauuucuguuagacucuca

SEQ ID NO: 861672 - RNA, 22 nt, Human
agaggauguucuaggcacucau

SEQ ID NO: 861673 - RNA, 22 nt, Human
cugcuguguuagcagguuuagu

SEQ ID NO: 861674 - RNA, 22 nt, Human
auguagagcaguguuguccaau

SEQ ID NO: 861675 - RNA, 22 nt, Human
cuugaaagauuuggccucugug

SEQ ID NO: 861676 - RNA, 22 nt, Human
ccuggacucaggcugugggcac

SEQ ID NO: 861677 - RNA, 22 nt, Human
uucucagguagugcugaugcug

SEQ ID NO: 861678 - RNA, 22 nt, Human
gugcuuucugcugcauuccucu

SEQ ID NO: 861679 - RNA, 22 nt, Human
uaagaaacccaggaauuucuua

SEQ ID NO: 861680 - RNA, 22 nt, Human
gcugccagcuuuccuuggcuga

SEQ ID NO: 861681 - RNA, 22 nt, Human
uuacagaagugaaggccuuuaa

SEQ ID NO: 861682 - RNA, 22 nt, Human
gaccauuuuuacagagcauuca

SEQ ID NO: 861683 - RNA, 22 nt, Human
agcccagggacagggcggaugu

SEQ ID NO: 861684 - RNA, 22 nt, Human
ggacagcucugccaggagcuca

SEQ ID NO: 861685 - RNA, 22 nt, Human
ggaggacacuggcucugccuuc

SEQ ID NO: 861686 - RNA, 22 nt, Human
gucuuucuaugaugaacuguug

SEQ ID NO: 861687 - RNA, 22 nt, Human
agucaccaucuguggcagccug

SEQ ID NO: 861688 - RNA, 22 nt, Human
cugucauuuaagacauucugga

SEQ ID NO: 861689 - RNA, 22 nt, Human
caaggccagagccagcgauaag

SEQ ID NO: 861690 - RNA, 22 nt, Human
cugaauaauguucucuuguaug

SEQ ID NO: 861691 - RNA, 22 nt, Human
uugagaagaaauaguuugcaau

SEQ ID NO: 861692 - RNA, 22 nt, Human
gaccuggaggauccucuucuug

SEQ ID NO: 861693 - RNA, 22 nt, Human
gagucaccacacggugcugacu

SEQ ID NO: 861694 - RNA, 22 nt, Human
uuccuuagggaaagggauaagg

SEQ ID NO: 861695 - RNA, 18 nt, Human
uuugcaaaggaaguaugg

SEQ ID NO: 861696 - RNA, 22 nt, Human
acagcauugcuccaucucaaga

SEQ ID NO: 861697 - RNA, 22 nt, Human
ggccagaaguuggaaaagagcc

SEQ ID NO: 861698 - RNA, 22 nt, Human
acauacauauguuuaaaugcau

SEQ ID NO: 861699 - RNA, 22 nt, Human
auuucacaucuaucucagauuu

SEQ ID NO: 861700 - RNA, 22 nt, Human
ggagccuggucagguuggcucc

SEQ ID NO: 861701 - RNA, 22 nt, Human
uucauugugauucuuggcuagc

SEQ ID NO: 861702 - RNA, 22 nt, Human
auuaaagacagcagauggaugg

SEQ ID NO: 861703 - RNA, 22 nt, Human
guaaacaacacaaaucauuuga

SEQ ID NO: 861704 - RNA, 22 nt, Human
uuagacaagggcuccuuaaaag

SEQ ID NO: 861705 - RNA, 22 nt, Human
ccaaacaaauccccauucuuag

SEQ ID NO: 861706 - RNA, 22 nt, Human
uaucaauacauguuaucagugu

SEQ ID NO: 861707 - RNA, 22 nt, Human
agcgagggaggucugaggacag

SEQ ID NO: 861708 - RNA, 22 nt, Human
uacuuuuuagcacagugugugc

SEQ ID NO: 861709 - RNA, 22 nt, Human
uuaaagaauagugccccuauug

SEQ ID NO: 861710 - RNA, 22 nt, Human
cucauacauaugccauuccugc

SEQ ID NO: 861711 - RNA, 22 nt, Human
uggcuuuacacauccacugccu

SEQ ID NO: 861712 - RNA, 22 nt, Human
ccagugcuucuuugcuagcugg

SEQ ID NO: 861713 - RNA, 22 nt, Human
uggauuaguuaagaaauguuag

SEQ ID NO: 861714 - RNA, 22 nt, Human
uguacaaugccgagacuaacuc

SEQ ID NO: 861715 - RNA, 22 nt, Human
caaaugauaccuauuacuaggc

SEQ ID NO: 861716 - RNA, 22 nt, Human
gcuugaaaauucauagguauuu

SEQ ID NO: 861717 - RNA, 22 nt, Human
auuccaaacgccucgcggacuu

SEQ ID NO: 861718 - RNA, 22 nt, Human
cagaaaauaaaguuucuacgca

SEQ ID NO: 861719 - RNA, 22 nt, Human
cccuggaguccuggcaguugau

SEQ ID NO: 861720 - RNA, 22 nt, Human
auuugcuucugugaaaucaagu

SEQ ID NO: 861721 - RNA, 22 nt, Human
gaaggccacaaaaaaugucaua

SEQ ID NO: 861722 - RNA, 20 nt, Human
caggaugauuggacacgaug

SEQ ID NO: 861723 - RNA, 22 nt, Human
gugggagcuuuggcaucaggcu

SEQ ID NO: 861724 - RNA, 22 nt, Human
uuuccuaguucuaagaaaugua

SEQ ID NO: 861725 - RNA, 22 nt, Human
augcuuaaugaggguauauaug

SEQ ID NO: 861726 - RNA, 22 nt, Human
uuacagaaaggaaggacugacu

SEQ ID NO: 861727 - RNA, 22 nt, Human
augcuuaagcucaguuauauau

SEQ ID NO: 861728 - RNA, 22 nt, Human
auuccaaacucuuucccugucg

SEQ ID NO: 861729 - RNA, 22 nt, Human
ucagaauuuuuguuacccuuga

SEQ ID NO: 861730 - RNA, 22 nt, Human
gcuccucuucucccacugaaug

SEQ ID NO: 861731 - RNA, 22 nt, Human
aaugccaacuuggauauacauu

SEQ ID NO: 861732 - RNA, 22 nt, Human
cuuaggcagacugcugaugcag

SEQ ID NO: 861733 - RNA, 22 nt, Human
uuuggaaugguaccuucaguug

SEQ ID NO: 861734 - RNA, 22 nt, Human
uccaugagcuagggauucauca

SEQ ID NO: 861735 - RNA, 22 nt, Human
caaggccaguucaccaagggca

SEQ ID NO: 861736 - RNA, 22 nt, Human
cucaggaugcaauuccaucaag

SEQ ID NO: 861737 - RNA, 22 nt, Human
caggcagcuagauuuauaacaa

SEQ ID NO: 861738 - RNA, 23 nt, Human
auuugagaaaguauuuuuaagac

SEQ ID NO: 861739 - RNA, 22 nt, Human
uugcagcuuagugauguuaucu

SEQ ID NO: 861740 - RNA, 22 nt, Human
gacccaggcucgugggacggcu

SEQ ID NO: 861741 - RNA, 23 nt, Human
ccacagagcugccaauuccugug

SEQ ID NO: 861742 - RNA, 22 nt, Human
uccaugagcuagcuuuccaaag

SEQ ID NO: 861743 - RNA, 22 nt, Human
uccucagacuucccuuugugua

SEQ ID NO: 861744 - RNA, 22 nt, Human
aucuuucaguuucauaccaauu

SEQ ID NO: 861745 - RNA, 22 nt, Human
guuaucaugcuucaucaucacu

SEQ ID NO: 861746 - RNA, 22 nt, Human
gccagucugcucccacaaguuc

SEQ ID NO: 861747 - RNA, 22 nt, Human
ugcauguguguguauuuauaaa

SEQ ID NO: 861748 - RNA, 22 nt, Human
gcuggcagggacagcugcgugu

SEQ ID NO: 861749 - RNA, 22 nt, Human
cagucaccauagaauaaaacau

SEQ ID NO: 861750 - RNA, 18 nt, Human
auagaaaccuuuaaucag

SEQ ID NO: 861751 - RNA, 22 nt, Human
cuuuguagcugcuucugauuua

SEQ ID NO: 861752 - RNA, 22 nt, Human
uuucaacuugaagaauugauac

SEQ ID NO: 861753 - RNA, 22 nt, Human
auaucacaguaguuguuuaguu

SEQ ID NO: 861754 - RNA, 22 nt, Human
aggcagcuuaagcccuggccca

SEQ ID NO: 861755 - RNA, 22 nt, Human
uauuuccaagcugaauccaaug

SEQ ID NO: 861756 - RNA, 21 nt, Human
ucacaucuauguuaagcaaac

SEQ ID NO: 861757 - RNA, 18 nt, Human
uuccaugauuccuuucac

SEQ ID NO: 861758 - RNA, 22 nt, Human
auuuaaaugcuuaagaggguuu

SEQ ID NO: 861759 - RNA, 22 nt, Human
cagaaggcuggcagauugagau

SEQ ID NO: 861760 - RNA, 22 nt, Human
acaauacaggcuucuggacuua

SEQ ID NO: 861761 - RNA, 22 nt, Human
gauaaaauucuuauuuuacccg

SEQ ID NO: 861762 - RNA, 22 nt, Human
guucuucaggccauccucccag

SEQ ID NO: 861763 - RNA, 22 nt, Human
uauuucagcccuacuacuuggc

SEQ ID NO: 861764 - RNA, 22 nt, Human
uuucuuaguccuagagugauuu

SEQ ID NO: 861765 - RNA, 19 nt, Human
uuucagacucaucuccagc

SEQ ID NO: 861766 - RNA, 22 nt, Human
aggcaguggcugagaccagggg

SEQ ID NO: 861767 - RNA, 22 nt, Human
cuacagaaacacuggacaugug

SEQ ID NO: 861768 - RNA, 22 nt, Human
gcagagaagaugcccaggcuuc

SEQ ID NO: 861769 - RNA, 22 nt, Human
uacugaaauacuaagaaguuaa

SEQ ID NO: 861770 - RNA, 22 nt, Human
agaauucauaggaaguuuccua

SEQ ID NO: 861771 - RNA, 22 nt, Human
agcccaggugagggguucgaaa

SEQ ID NO: 861772 - RNA, 22 nt, Human
ugcacaaacuugugucccaggg

SEQ ID NO: 861773 - RNA, 22 nt, Human
uuuauuugaaucaggggagaau

SEQ ID NO: 861774 - RNA, 22 nt, Human
gcucaggacccaggugugaccu

SEQ ID NO: 861775 - RNA, 22 nt, Human
uuccaugaagggcagccucuca

SEQ ID NO: 861776 - RNA, 22 nt, Human
aaaauaacuucuacuauuugca

SEQ ID NO: 861777 - RNA, 18 nt, Human
guaggucaguaccaagca

SEQ ID NO: 861778 - RNA, 22 nt, Human
augaggcauuccacucaaacuc

SEQ ID NO: 861779 - RNA, 17 nt, Human
ucaggauguagcaguag

SEQ ID NO: 861780 - RNA, 22 nt, Human
ucaauaaaauuguuuuccuauc

SEQ ID NO: 861781 - RNA, 22 nt, Human
aaggcagcagugcacgacugau

SEQ ID NO: 861782 - RNA, 22 nt, Human
ggacagcugcuuucaggccaca

SEQ ID NO: 861783 - RNA, 22 nt, Human
ugcuauacggagcaucuucagg

SEQ ID NO: 861784 - RNA, 22 nt, Human
cauauaaauacaacauguguua

SEQ ID NO: 861785 - RNA, 21 nt, Human
agucccauccgguaagcaagc

SEQ ID NO: 861786 - RNA, 22 nt, Human
aggcaagcauugggaacagggc

SEQ ID NO: 861787 - RNA, 22 nt, Human
uuuccucauuuaucugcuggga

SEQ ID NO: 861788 - RNA, 22 nt, Human
uagucaccuuuggcaccugcaa

SEQ ID NO: 861789 - RNA, 22 nt, Human
gaggcagcaaaauauaucauaa

SEQ ID NO: 861790 - RNA, 20 nt, Human
uguuaaaggacacuugcuuu

SEQ ID NO: 861791 - RNA, 22 nt, Human
uuucauugcagagucugugugc

SEQ ID NO: 861792 - RNA, 22 nt, Human
aucaggauccaccuugagccug

SEQ ID NO: 861793 - RNA, 22 nt, Human
gcucaggaucagccaccucuuu

SEQ ID NO: 861794 - RNA, 18 nt, Human
uaaauauauuucccccuu

SEQ ID NO: 861795 - RNA, 22 nt, Human
aagcaccugcaguugacaaaaa

SEQ ID NO: 861796 - RNA, 22 nt, Human
auucaaguucuucugucuuugc

SEQ ID NO: 861797 - RNA, 22 nt, Human
uucacauuggugauauguuucu

SEQ ID NO: 861798 - RNA, 22 nt, Human
uugaaaguuaucuagauucuga

SEQ ID NO: 861799 - RNA, 22 nt, Human
agagggcagggcgguaaguccu

SEQ ID NO: 861800 - RNA, 22 nt, Human
cugcugugucagaguccagggg

SEQ ID NO: 861801 - RNA, 22 nt, Human
acauuguuugagaauacagaug

SEQ ID NO: 861802 - RNA, 22 nt, Human
agucaauuaucucuaggucauc

SEQ ID NO: 861803 - RNA, 22 nt, Human
gaggcagagugcaccccaggag

SEQ ID NO: 861804 - RNA, 22 nt, Human
gagccaaggguugccauggaga

SEQ ID NO: 861805 - RNA, 22 nt, Human
ggagaggguguggaaaguuauc

SEQ ID NO: 861806 - RNA, 22 nt, Human
cucuucuugaaagaggaauuca

SEQ ID NO: 861807 - RNA, 22 nt, Human
ccuggauucaagucuuucuuuc

SEQ ID NO: 861808 - RNA, 22 nt, Human
aaguccuucccaagcauguacc

SEQ ID NO: 861809 - RNA, 22 nt, Human
agcagagccugggcuaggggug

SEQ ID NO: 861810 - RNA, 22 nt, Human
aaucaguguguaaaguggcugc

SEQ ID NO: 861811 - RNA, 22 nt, Human
augaaggcuguguggagccccc

SEQ ID NO: 861812 - RNA, 22 nt, Human
gcaggagagucugugccagguu

SEQ ID NO: 861813 - RNA, 22 nt, Human
gcugaaugaauguauuuuaaaa

SEQ ID NO: 861814 - RNA, 22 nt, Human
cuguaugaggaucagacuggac

SEQ ID NO: 861815 - RNA, 22 nt, Human
cuugcacacauguacaugugua

SEQ ID NO: 861816 - RNA, 22 nt, Human
uuauuauuggugaguuaaggaa

SEQ ID NO: 861817 - RNA, 23 nt, Human
uguaacaauuucauauacaugca

SEQ ID NO: 861818 - RNA, 22 nt, Human
auguucuuguucaaaugucagu

SEQ ID NO: 861819 - RNA, 22 nt, Human
auaucagacagaaagcauugac

SEQ ID NO: 861820 - RNA, 22 nt, Human
gccaggaggcuuaacuggacag

SEQ ID NO: 861821 - RNA, 22 nt, Human
ugcuugugagaguuuuuucaga

SEQ ID NO: 861822 - RNA, 22 nt, Human
auaugcuugggacugauacagu

SEQ ID NO: 861823 - RNA, 22 nt, Human
ggguacuuaauauuuacggggu

SEQ ID NO: 861824 - RNA, 22 nt, Human
uagaauucauguuacuguuagc

SEQ ID NO: 861825 - RNA, 20 nt, Human
gcccaagguccagaaggggg

SEQ ID NO: 861826 - RNA, 22 nt, Human
ugaggcagugugagauaauaaa

SEQ ID NO: 861827 - RNA, 22 nt, Human
aaauuguugaucuacaguaagg

SEQ ID NO: 861828 - RNA, 22 nt, Human
auuauauaggacuugcccuucc

SEQ ID NO: 861829 - RNA, 18 nt, Human
agcuucccucugagaggg

SEQ ID NO: 861830 - RNA, 22 nt, Human
aagaggaggacgguucccagaa

SEQ ID NO: 861831 - RNA, 22 nt, Human
agagacagaggcaauauagcuu

SEQ ID NO: 861832 - RNA, 22 nt, Human
gcagggcaaacccagguguuca

SEQ ID NO: 861833 - RNA, 22 nt, Human
aaacauguuuucugaauauuuu

SEQ ID NO: 861834 - RNA, 22 nt, Human
agaaaugaagagagucaagguu

SEQ ID NO: 861835 - RNA, 22 nt, Human
uucaggauuguguuuuuccuga

SEQ ID NO: 861836 - RNA, 17 nt, Human
agauggcaggaggcaga

SEQ ID NO: 861837 - RNA, 22 nt, Human
aucuucucauguguaaugaggu

SEQ ID NO: 861838 - RNA, 22 nt, Human
cugcaucacagcaggaggcaca

SEQ ID NO: 861839 - RNA, 22 nt, Human
gaaggggacuggcagcugcaga

SEQ ID NO: 861840 - RNA, 22 nt, Human
ggagguggcagagggacauucu

SEQ ID NO: 861841 - RNA, 22 nt, Human
aacaugcugccuuucuacgagu

SEQ ID NO: 861842 - RNA, 22 nt, Human
ggccagcucugcacagcagcug

SEQ ID NO: 861843 - RNA, 22 nt, Human
uggcagcuccggguaggggcug

SEQ ID NO: 861844 - RNA, 22 nt, Human
uuugacaucuaagaauucuuac

SEQ ID NO: 861845 - RNA, 15 nt, Human
uucaggauaugacuc

SEQ ID NO: 861846 - RNA, 22 nt, Human
uucuucuuuccuauaauuaauu

SEQ ID NO: 861847 - RNA, 18 nt, Human
ugaaacaagaauggugca

SEQ ID NO: 861848 - RNA, 20 nt, Human
uguuccaagcuaaugaauga

SEQ ID NO: 861849 - RNA, 23 nt, Human
auucuucauuaucuucuagaaaa

SEQ ID NO: 861850 - RNA, 22 nt, Human
uuccuuagacagagguggucau

SEQ ID NO: 861851 - RNA, 22 nt, Human
ucacauaaauuauacaauuuca

SEQ ID NO: 861852 - RNA, 22 nt, Human
cuggcugggagcgagcugcuca

SEQ ID NO: 861853 - RNA, 22 nt, Human
augcuguguccuagugaaagaa

SEQ ID NO: 861854 - RNA, 22 nt, Human
gcccaggagccuggagaugugu

SEQ ID NO: 861855 - RNA, 22 nt, Human
agucaauucuuuucaacucaag

SEQ ID NO: 861856 - RNA, 22 nt, Human
ccugccugcaccuucucugggg

SEQ ID NO: 861857 - RNA, 22 nt, Human
gaaacugugaucguguucuggg

SEQ ID NO: 861858 - RNA, 22 nt, Human
ucuuagaaguucauguuccagc

SEQ ID NO: 861859 - RNA, 22 nt, Human
cauacuuugggauaagagugga

SEQ ID NO: 861860 - RNA, 18 nt, Human
uacagauuauagauacau

SEQ ID NO: 861861 - RNA, 22 nt, Human
aggcggcugguguccugcaggu

SEQ ID NO: 861862 - RNA, 22 nt, Human
acauuuuuuagagucccacauu

SEQ ID NO: 861863 - RNA, 23 nt, Human
gugcugugagccccuuggccucc

SEQ ID NO: 861864 - RNA, 22 nt, Human
uucaaguuuugccuccccaucc

SEQ ID NO: 861865 - RNA, 20 nt, Human
aagagaggaaguuauacuag

SEQ ID NO: 861866 - RNA, 22 nt, Human
aaaggugacugcagcagcuauu

SEQ ID NO: 861867 - RNA, 22 nt, Human
auuuacugagguaaauaaacug

SEQ ID NO: 861868 - RNA, 22 nt, Human
guuuucaaggggauuuaacuga

SEQ ID NO: 861869 - RNA, 22 nt, Human
acugguuuuccagguuacuucu

SEQ ID NO: 861870 - RNA, 22 nt, Human
uggcaaggcugugggggcagag

SEQ ID NO: 861871 - RNA, 22 nt, Human
cugcuguguuggcauuggauag

SEQ ID NO: 861872 - RNA, 22 nt, Human
cccaagagcuucuaggacgcug

SEQ ID NO: 861873 - RNA, 22 nt, Human
uuuauucaucaucuguucauau

SEQ ID NO: 861874 - RNA, 22 nt, Human
gcauucuuuuuaggagguuccu

SEQ ID NO: 861875 - RNA, 22 nt, Human
aaaauacuguggaguguugaaa

SEQ ID NO: 861876 - RNA, 22 nt, Human
uugcucaggcuggugugcagug

SEQ ID NO: 861877 - RNA, 22 nt, Human
aaucccagcuacucaggaaguu

SEQ ID NO: 861878 - RNA, 22 nt, Human
gaaauauuguacuggagauguu

SEQ ID NO: 861879 - RNA, 22 nt, Human
ucagcugcucaaauuuauguca

SEQ ID NO: 861880 - RNA, 22 nt, Human
uugcugugaaaccaugggaagu

SEQ ID NO: 861881 - RNA, 22 nt, Human
gauuucuuugcaagcuguguuc

SEQ ID NO: 861882 - RNA, 22 nt, Human
agaggacagguuuuccaugggc

SEQ ID NO: 861883 - RNA, 22 nt, Human
agcauauaaauggacauauuug

SEQ ID NO: 861884 - RNA, 22 nt, Human
cccaggaaaucaggcuuucuag

SEQ ID NO: 861885 - RNA, 22 nt, Human
ugaggcaggacauggacaacug

SEQ ID NO: 861886 - RNA, 22 nt, Human
agcccagguucuaaagccaaac

SEQ ID NO: 861887 - RNA, 18 nt, Human
agucuucugauccauuuu

SEQ ID NO: 861888 - RNA, 22 nt, Human
uuucugcugugcuuucuugcgu

SEQ ID NO: 861889 - RNA, 22 nt, Human
uuuuuguagucauuagaagagg

SEQ ID NO: 861890 - RNA, 22 nt, Human
cagagcucuauguucauggagg

SEQ ID NO: 861891 - RNA, 22 nt, Human
gggagucugggcuagacuccuu

SEQ ID NO: 861892 - RNA, 20 nt, Human
uccaggagaacugggagccg

SEQ ID NO: 861893 - RNA, 22 nt, Human
cugauacauaguagcaugucau

SEQ ID NO: 861894 - RNA, 22 nt, Human
guacagaaggauuucuaguagu

SEQ ID NO: 861895 - RNA, 15 nt, Human
cccaggaguucgaga

SEQ ID NO: 861896 - RNA, 22 nt, Human
uuaaaaucuaaagcaguugucu

SEQ ID NO: 861897 - RNA, 22 nt, Human
acuucacacagcaaauuuaucu

SEQ ID NO: 861898 - RNA, 22 nt, Human
gucuccugagccuugacugcaa

SEQ ID NO: 861899 - RNA, 22 nt, Human
caagaucagggugccagaaugg

SEQ ID NO: 861900 - RNA, 22 nt, Human
aagacuguacauuuuccagucu

SEQ ID NO: 861901 - RNA, 22 nt, Human
acauaauagcauuucuaauuug

SEQ ID NO: 861902 - RNA, 22 nt, Human
cagaaacauguauaaaguugua

SEQ ID NO: 861903 - RNA, 22 nt, Human
gcuuggcauugaccauuaucau

SEQ ID NO: 861904 - RNA, 22 nt, Human
augaaacagugaauuagucaag

SEQ ID NO: 861905 - RNA, 21 nt, Human
agggagcuggccacacagccu

SEQ ID NO: 861906 - RNA, 22 nt, Human
auuucaggauagccuaguuuug

SEQ ID NO: 861907 - RNA, 22 nt, Human
ucugucuucaucagcaugugau

SEQ ID NO: 861908 - RNA, 22 nt, Human
cagcugcuuuaguuuuccaucc

SEQ ID NO: 861909 - RNA, 22 nt, Human
augguuuugaagggaggucaaa

SEQ ID NO: 861910 - RNA, 22 nt, Human
ugguaaauauguccauucucuu

SEQ ID NO: 861911 - RNA, 22 nt, Human
uaauauauuucugcuaagcuca

SEQ ID NO: 861912 - RNA, 22 nt, Human
aggcagucuaguccccaggcaa

SEQ ID NO: 861913 - RNA, 21 nt, Human
auccuuagcacuuagaagagu

SEQ ID NO: 861914 - RNA, 22 nt, Human
ucagagagugcaaaauauagcu

SEQ ID NO: 861915 - RNA, 22 nt, Human
cauuuacaauguacagguugug

SEQ ID NO: 861916 - RNA, 21 nt, Human
uagggcaggcauuggaagaga

SEQ ID NO: 861917 - RNA, 22 nt, Human
cagucucucugaaguauuaaga

SEQ ID NO: 861918 - RNA, 22 nt, Human
uuacagaagagaaagaauucag

SEQ ID NO: 861919 - RNA, 22 nt, Human
auguguaugcaugcacuaagau

SEQ ID NO: 861920 - RNA, 22 nt, Human
uuucaaagucaauaucauuacc

SEQ ID NO: 861921 - RNA, 22 nt, Human
cuggcuuucuauuuggugcuau

SEQ ID NO: 861922 - RNA, 22 nt, Human
acaguuaucuuugaaauagaga

SEQ ID NO: 861923 - RNA, 22 nt, Human
uugaacaguccuaagagacccu

SEQ ID NO: 861924 - RNA, 22 nt, Human
uuccaugagcucugaguucaca

SEQ ID NO: 861925 - RNA, 22 nt, Human
auucuucaucacuaccuuguga

SEQ ID NO: 861926 - RNA, 22 nt, Human
gagcaccucaauuugcuauuug

SEQ ID NO: 861927 - RNA, 22 nt, Human
caaauucaaugaacauguuuaa

SEQ ID NO: 861928 - RNA, 22 nt, Human
ccuggaucagagccagagaagc

SEQ ID NO: 861929 - RNA, 22 nt, Human
ggugaguugggguucacagguc

SEQ ID NO: 861930 - RNA, 22 nt, Human
aggaagcuggugugaggaugaa

SEQ ID NO: 861931 - RNA, 22 nt, Human
agaccgagaaguucuccaggcc

SEQ ID NO: 861932 - RNA, 22 nt, Human
uucugaaagccaauucauugaa

SEQ ID NO: 861933 - RNA, 22 nt, Human
uuucucaguuacuagcuguggu

SEQ ID NO: 861934 - RNA, 22 nt, Human
ggcagcauauauucagugggca

SEQ ID NO: 861935 - RNA, 22 nt, Human
gcucacugcaaccucugcuucc

SEQ ID NO: 861936 - RNA, 22 nt, Human
ggauggcagucugcaugagaaa

SEQ ID NO: 861937 - RNA, 22 nt, Human
augugucuuugagacucugcua

SEQ ID NO: 861938 - RNA, 22 nt, Human
ccuugcugaccaucaccuuuga

SEQ ID NO: 861939 - RNA, 22 nt, Human
ccaggagaagcaucugagugua

SEQ ID NO: 861940 - RNA, 22 nt, Human
ucaguucaguauacacuauucu

SEQ ID NO: 861941 - RNA, 22 nt, Human
cagaauggcuuuuauggcucag

SEQ ID NO: 861942 - RNA, 22 nt, Human
cuuaagauuugcgauaccuaau

SEQ ID NO: 861943 - RNA, 22 nt, Human
acaaaugucuccucuuuuguua

SEQ ID NO: 861944 - RNA, 23 nt, Human
aaggccagaauuucaauggugcc

SEQ ID NO: 861945 - RNA, 22 nt, Human
gagggaggcaucaugaauccag

SEQ ID NO: 861946 - RNA, 19 nt, Human
uuugaaagaguuuuauugg

SEQ ID NO: 861947 - RNA, 22 nt, Human
cuuaggcagggcuggaagaucu

SEQ ID NO: 861948 - RNA, 22 nt, Human
uauuucaacguaugaaaagcug

SEQ ID NO: 861949 - RNA, 22 nt, Human
cugcugugggcaggguagcugg

SEQ ID NO: 861950 - RNA, 22 nt, Human
uaaauaugcauguauccuuauc

SEQ ID NO: 861951 - RNA, 22 nt, Human
uggauuuaauggaugaggggca

SEQ ID NO: 861952 - RNA, 22 nt, Human
uccauuuucuugcucuagguaa

SEQ ID NO: 861953 - RNA, 22 nt, Human
aaugggauaggucuucaggaau

SEQ ID NO: 861954 - RNA, 22 nt, Human
gcagcuaccacccaggaaggac

SEQ ID NO: 861955 - RNA, 21 nt, Human
uacugagaccucacagugugc

SEQ ID NO: 861956 - RNA, 22 nt, Human
uaacagaagaaaacauauugga

SEQ ID NO: 861957 - RNA, 22 nt, Human
uugaacugguaguuggaaaucu

SEQ ID NO: 861958 - RNA, 22 nt, Human
ucuucaauuagauuuaccaauu

SEQ ID NO: 861959 - RNA, 22 nt, Human
uuacagaaaagggguuguccuu

SEQ ID NO: 861960 - RNA, 22 nt, Human
cuggcaaguacugggccagcuc

SEQ ID NO: 861961 - RNA, 20 nt, Human
ugugcaggagagugaggcug

SEQ ID NO: 861962 - RNA, 22 nt, Human
ccugcucagagcgucuugugug

SEQ ID NO: 861963 - RNA, 22 nt, Human
ucuacccagagcuaugaccuga

SEQ ID NO: 861964 - RNA, 22 nt, Human
uggcagcuacagacagagguga

SEQ ID NO: 861965 - RNA, 22 nt, Human
ccuggaucagucacuguugcug

SEQ ID NO: 861966 - RNA, 22 nt, Human
ucugucucaaguucuugcacuc

SEQ ID NO: 861967 - RNA, 22 nt, Human
cugcaucaguggauaugauggu

SEQ ID NO: 861968 - RNA, 22 nt, Human
ugcuuauucuuuccacaauuca

SEQ ID NO: 861969 - RNA, 22 nt, Human
augcuguguggucaaguuaauu

SEQ ID NO: 861970 - RNA, 22 nt, Human
uaacagaaaggggacagaaaua

SEQ ID NO: 861971 - RNA, 22 nt, Human
uccaugagacagauacuguaag

SEQ ID NO: 861972 - RNA, 22 nt, Human
ccuugcugcgugcuagcacaga

SEQ ID NO: 861973 - RNA, 22 nt, Human
ucugcagggaugugagggguga

SEQ ID NO: 861974 - RNA, 23 nt, Human
cugcuguuuucuguaccugaagc

SEQ ID NO: 861975 - RNA, 22 nt, Human
gcucaggacuggaggagcgggg

SEQ ID NO: 861976 - RNA, 22 nt, Human
ugucuucagcaaaugccuuucu

SEQ ID NO: 861977 - RNA, 20 nt, Human
ucagaugggagugagccauc

SEQ ID NO: 861978 - RNA, 17 nt, Human
uaucagaauguguuuac

SEQ ID NO: 861979 - RNA, 22 nt, Human
uuggcagugucugcaaaaugga

SEQ ID NO: 861980 - RNA, 22 nt, Human
gaaugaaaaccuuggcucaaau

SEQ ID NO: 861981 - RNA, 23 nt, Human
aauaucaaggugauguucccaga

SEQ ID NO: 861982 - RNA, 22 nt, Human
cucuuucugauucgcugggacc

SEQ ID NO: 861983 - RNA, 22 nt, Human
cugcuuccauaaauaaugugcu

SEQ ID NO: 861984 - RNA, 22 nt, Human
acuuuaucaggaaucacacagc

SEQ ID NO: 861985 - RNA, 22 nt, Human
uuguugguggaauugaugcuag

SEQ ID NO: 861986 - RNA, 22 nt, Human
ucauagaaugaguuaaugaacu

SEQ ID NO: 861987 - RNA, 22 nt, Human
aaguuucauuguucauguaaca

SEQ ID NO: 861988 - RNA, 22 nt, Human
uuacagaaggaacacuacucag

SEQ ID NO: 861989 - RNA, 19 nt, Human
cauuuuaagcauccccagu

SEQ ID NO: 861990 - RNA, 22 nt, Human
uccuuguugcugcagucaccug

SEQ ID NO: 861991 - RNA, 22 nt, Human
caggcagcgcucguggccuggc

SEQ ID NO: 861992 - RNA, 22 nt, Human
ugaaaugagagcacagaauaaa

SEQ ID NO: 861993 - RNA, 22 nt, Human
cucucagacugaagggccugug

SEQ ID NO: 861994 - RNA, 22 nt, Human
uuaaauuuuagaaacagacucu

SEQ ID NO: 861995 - RNA, 22 nt, Human
ugggagcccaagggagcugccg

SEQ ID NO: 861996 - RNA, 22 nt, Human
ggugaaggucagagcaggaaaa

SEQ ID NO: 861997 - RNA, 22 nt, Human
cauuuguagcuauuuacuguau

SEQ ID NO: 861998 - RNA, 23 nt, Human
ugcaugugaauucauacuuguuu

SEQ ID NO: 861999 - RNA, 22 nt, Human
uuggaucauggaaugucugcuu

SEQ ID NO: 862000 - RNA, 22 nt, Human
aggcagucuaucucuggagccu

SEQ ID NO: 862001 - RNA, 18 nt, Human
ccucagggagagagacgc

SEQ ID NO: 862002 - RNA, 22 nt, Human
guuccaaauuuggaucuuuagg

SEQ ID NO: 862003 - RNA, 22 nt, Human
augguuuaguuagggcuuuuca

SEQ ID NO: 862004 - RNA, 22 nt, Human
aguccuuacucgggggcccaga

SEQ ID NO: 862005 - RNA, 22 nt, Human
gcuauacacauuucuugguagu

SEQ ID NO: 862006 - RNA, 22 nt, Human
uugaaggacauccuauuucuag

SEQ ID NO: 862007 - RNA, 22 nt, Human
uuaacagagugccuggcaugua

SEQ ID NO: 862008 - RNA, 22 nt, Human
aaauaucauuuauaacuuuuaa

SEQ ID NO: 862009 - RNA, 19 nt, Human
agcaaauacaucaaaauug

SEQ ID NO: 862010 - RNA, 21 nt, Human
uuucuuaggcucuaaaaugac

SEQ ID NO: 862011 - RNA, 22 nt, Human
caggaugggauguagugggccc

SEQ ID NO: 862012 - RNA, 22 nt, Human
gaauuucauugcucugcugugu

SEQ ID NO: 862013 - RNA, 22 nt, Human
gaggcugaggguuagagaguca

SEQ ID NO: 862014 - RNA, 22 nt, Human
cagcacagggacaauagcagau

SEQ ID NO: 862015 - RNA, 22 nt, Human
guuccaaagucucugagcugag

SEQ ID NO: 862016 - RNA, 22 nt, Human
acaaaugugucuaauugugccu

SEQ ID NO: 862017 - RNA, 19 nt, Human
uugaaauuguuugauaugg

SEQ ID NO: 862018 - RNA, 22 nt, Human
cuucccagaccuuagagugcag

SEQ ID NO: 862019 - RNA, 22 nt, Human
acucagaaccauuuacucugag

SEQ ID NO: 862020 - RNA, 22 nt, Human
gccuuaauuuuuuauaaucucu

SEQ ID NO: 862021 - RNA, 22 nt, Human
gcugguuuccuuaucuauaaag

SEQ ID NO: 862022 - RNA, 22 nt, Human
uccaggaggcaccuuuggacca

SEQ ID NO: 862023 - RNA, 22 nt, Human
ugaaauaauaucuggaucaauc

SEQ ID NO: 862024 - RNA, 22 nt, Human
cuuaggcauccaggguucuucc

SEQ ID NO: 862025 - RNA, 22 nt, Human
aacuuuguguguuuaauauggc

SEQ ID NO: 862026 - RNA, 22 nt, Human
uugacaauguccuuugaauuuc

SEQ ID NO: 862027 - RNA, 22 nt, Human
ugaauaauccacagucauucau

SEQ ID NO: 862028 - RNA, 23 nt, Human
uuugaaaguaucaacucgccuga

SEQ ID NO: 862029 - RNA, 22 nt, Human
agacugaauaacaagcaaauaa

SEQ ID NO: 862030 - RNA, 22 nt, Human
auugaaagcacaaagaacaagu

SEQ ID NO: 862031 - RNA, 22 nt, Human
ucauaauacaaagaguucugca

SEQ ID NO: 862032 - RNA, 22 nt, Human
cugccaggcgauggauuggcug

SEQ ID NO: 862033 - RNA, 22 nt, Human
cugcuguggccagccaggucaa

SEQ ID NO: 862034 - RNA, 22 nt, Human
auucuucacauggauaggaucu

SEQ ID NO: 862035 - RNA, 22 nt, Human
cuagccaugggcauuaaaggua

SEQ ID NO: 862036 - RNA, 22 nt, Human
uugagaagaggcuuuguaggaa

SEQ ID NO: 862037 - RNA, 21 nt, Human
aggcaucuaaagagaguagac

SEQ ID NO: 862038 - RNA, 22 nt, Human
gaggcagugucgguggcaggau

SEQ ID NO: 862039 - RNA, 22 nt, Human
uggcagcuguuaauguuuuguu

SEQ ID NO: 862040 - RNA, 22 nt, Human
cugcuguggaugcaggaccuca

SEQ ID NO: 862041 - RNA, 22 nt, Human
aggcaguguguagcuggaagag

SEQ ID NO: 862042 - RNA, 22 nt, Human
ggagaaugauauauagcucagu

SEQ ID NO: 862043 - RNA, 22 nt, Human
cacauacuuguguguacauaug

SEQ ID NO: 862044 - RNA, 22 nt, Human
gagugcagaugaacagaagauu

SEQ ID NO: 862045 - RNA, 22 nt, Human
gaaguacaguuuuaucuagcca

SEQ ID NO: 862046 - RNA, 22 nt, Human
uuucuaggcacagugucuuccc

SEQ ID NO: 862047 - RNA, 22 nt, Human
cacaauacuauuuuuaggucuu

SEQ ID NO: 862048 - RNA, 22 nt, Human
agugcuguaacaacuuauuugg

SEQ ID NO: 862049 - RNA, 20 nt, Human
uugauaggcagcuugucagg

SEQ ID NO: 862050 - RNA, 22 nt, Human
acucaggaaaugagaggcucuc

SEQ ID NO: 862051 - RNA, 21 nt, Human
cccaggaggcugagaagagca

SEQ ID NO: 862052 - RNA, 22 nt, Human
uuauuccauucaguucaacaag

SEQ ID NO: 862053 - RNA, 22 nt, Human
aaggaaccuggaguagagggag

SEQ ID NO: 862054 - RNA, 22 nt, Human
aaggcagccuuuguuugauuga

SEQ ID NO: 862055 - RNA, 22 nt, Human
guuuauaaggcccaauauuucu

SEQ ID NO: 862056 - RNA, 23 nt, Human
ggcagcucucaucugaugacuga

SEQ ID NO: 862057 - RNA, 22 nt, Human
uccauucauucauugaugaaca

SEQ ID NO: 862058 - RNA, 21 nt, Human
gggugggaggacacagcaggc

SEQ ID NO: 862059 - RNA, 22 nt, Human
agcauccaacaggagggaaggg

SEQ ID NO: 862060 - RNA, 21 nt, Human
cgcagagcgaacuugcggcgc

SEQ ID NO: 862061 - RNA, 22 nt, Human
cggcagcuccgcgccguaggac

SEQ ID NO: 862062 - RNA, 22 nt, Human
uggcagcuggcucugcgcaggc

SEQ ID NO: 862063 - RNA, 22 nt, Human
aggcuagcuuuggcucaguaaa

SEQ ID NO: 862064 - RNA, 22 nt, Human
ggcagacuguaauaggagaauu

SEQ ID NO: 862065 - RNA, 22 nt, Human
ccugcuguaaugugucuuuauu

SEQ ID NO: 862066 - RNA, 22 nt, Human
accaggagaggcacuugcaaug

SEQ ID NO: 862067 - RNA, 22 nt, Human
uccucagaaaccccugugaggu

SEQ ID NO: 862068 - RNA, 22 nt, Human
uuugcaaagugacuauuauaug

SEQ ID NO: 862069 - RNA, 22 nt, Human
caacuuucuguuaaauguuagu

SEQ ID NO: 862070 - RNA, 22 nt, Human
aagcgccaugguuccugcgcag

SEQ ID NO: 862071 - RNA, 22 nt, Human
aguuugaaaguauugacagaag

SEQ ID NO: 862072 - RNA, 22 nt, Human
caaaggcaggcccccugugcag

SEQ ID NO: 862073 - RNA, 22 nt, Human
uaacauuagguagacauaagcc

SEQ ID NO: 862074 - RNA, 17 nt, Human
ucauuuguugugacuag

SEQ ID NO: 862075 - RNA, 22 nt, Human
agaaaucaugucuuauuucuau

SEQ ID NO: 862076 - RNA, 22 nt, Human
uggcaggcagugugggagcugg

SEQ ID NO: 862077 - RNA, 22 nt, Human
caaaugauacuguuuuuagucu

SEQ ID NO: 862078 - RNA, 22 nt, Human
aggaagcuccaugaaggcagag

SEQ ID NO: 862079 - RNA, 22 nt, Human
ucuucacauggaacaugaagcu

SEQ ID NO: 862080 - RNA, 22 nt, Human
ugugauauuugaguauugucaa

SEQ ID NO: 862081 - RNA, 22 nt, Human
caguccuugcucugggaugaug

SEQ ID NO: 862082 - RNA, 22 nt, Human
aaugaacauauaaagagaucuu

SEQ ID NO: 862083 - RNA, 22 nt, Human
caaguccaucagauaagcaaga

SEQ ID NO: 862084 - RNA, 22 nt, Human
gaggagcugggucagggagaca

SEQ ID NO: 862085 - RNA, 22 nt, Human
uccaggagguaugaguggcccc

SEQ ID NO: 862086 - RNA, 22 nt, Human
gauggcagucaaccaggugagg

SEQ ID NO: 862087 - RNA, 22 nt, Human
ucaguucuuuauuucacaguga

SEQ ID NO: 862088 - RNA, 22 nt, Human
ugagccuguccugugcauguga

SEQ ID NO: 862089 - RNA, 22 nt, Human
gaaggccauuagagccugugcc

SEQ ID NO: 862090 - RNA, 22 nt, Human
cccaggaggguggccucugccc

SEQ ID NO: 862091 - RNA, 22 nt, Human
aaggcagcuucaccacagcauu

SEQ ID NO: 862092 - RNA, 22 nt, Human
cagcuacuccucccaugacuuc

SEQ ID NO: 862093 - RNA, 22 nt, Human
caguccuuucaauggugaccuu

SEQ ID NO: 862094 - RNA, 22 nt, Human
augccaaagcccaaguucauca

SEQ ID NO: 862095 - RNA, 22 nt, Human
uguccucagauaugucuacucu

SEQ ID NO: 862096 - RNA, 22 nt, Human
cccaggaaguggagguugcagu

SEQ ID NO: 862097 - RNA, 22 nt, Human
ucucuucuagcuucuugugguu

SEQ ID NO: 862098 - RNA, 23 nt, Human
cagaaaucugaaaucuagaaaug

SEQ ID NO: 862099 - RNA, 22 nt, Human
ucucacuggguauaaaugagua

SEQ ID NO: 862100 - RNA, 22 nt, Human
uuccuuagauccuucaaucacg

SEQ ID NO: 862101 - RNA, 22 nt, Human
caggagaucuuaggaauucuua

SEQ ID NO: 862102 - RNA, 22 nt, Human
uucacagacuuuccauagauug

SEQ ID NO: 862103 - RNA, 19 nt, Human
uccaggaggcugccauuga

SEQ ID NO: 862104 - RNA, 22 nt, Human
aauauuuguuaguguuuuaaug

SEQ ID NO: 862105 - RNA, 22 nt, Human
gagaggagguggcuaugacagc

SEQ ID NO: 862106 - RNA, 22 nt, Human
cccauugugguuguugaggaua

SEQ ID NO: 862107 - RNA, 22 nt, Human
cccaggagaucuggaucucguc

SEQ ID NO: 862108 - RNA, 22 nt, Human
ucuuuaauuguggaagagcagc

SEQ ID NO: 862109 - RNA, 22 nt, Human
ucauuuguucucauucucuacu

SEQ ID NO: 862110 - RNA, 21 nt, Human
ccaagacucccaucuaguggu

SEQ ID NO: 862111 - RNA, 22 nt, Human
agucuccuuggccucaaugccu

SEQ ID NO: 862112 - RNA, 22 nt, Human
gcuguguuggugaagcuguagc

SEQ ID NO: 862113 - RNA, 22 nt, Human
aggcacaggaaugucauccagu

SEQ ID NO: 862114 - RNA, 22 nt, Human
ucaggagaacuuccuucuaccc

SEQ ID NO: 862115 - RNA, 22 nt, Human
aaggccagacaggaccacaucu

SEQ ID NO: 862116 - RNA, 22 nt, Human
cacaauuuccuugcuucacuuu

SEQ ID NO: 862117 - RNA, 22 nt, Human
uggcauuuggcuuacuuauguu

SEQ ID NO: 862118 - RNA, 22 nt, Human
ucagaauucagagggagugggg

SEQ ID NO: 862119 - RNA, 22 nt, Human
aucuauacccaucaugauuuaa

SEQ ID NO: 862120 - RNA, 22 nt, Human
agcugcccagcuaggaagaagg

SEQ ID NO: 862121 - RNA, 22 nt, Human
ucagccaguuuguuuauuccgg

SEQ ID NO: 862122 - RNA, 22 nt, Human
gaguccuuuucauagcaguggg

SEQ ID NO: 862123 - RNA, 22 nt, Human
aggccagaaaugucagggagug

SEQ ID NO: 862124 - RNA, 22 nt, Human
aacauaauguggccaaagucac

SEQ ID NO: 862125 - RNA, 22 nt, Human
ccaugagccaggcugaggaagc

SEQ ID NO: 862126 - RNA, 22 nt, Human
aagcaaaggcaggagcuuguga

SEQ ID NO: 862127 - RNA, 22 nt, Human
uagcuaucuguguccagaucca

SEQ ID NO: 862128 - RNA, 22 nt, Human
agcaccugccugcauuggcuau

SEQ ID NO: 862129 - RNA, 22 nt, Human
acaaaauuaccuaguuauuuuc

SEQ ID NO: 862130 - RNA, 21 nt, Human
auggagggaccagggaagcag

SEQ ID NO: 862131 - RNA, 22 nt, Human
auucuucauacagacaaguccu

SEQ ID NO: 862132 - RNA, 22 nt, Human
ucaguguauggagugcuggauu

SEQ ID NO: 862133 - RNA, 22 nt, Human
uuuucagugggcaaugauguga

SEQ ID NO: 862134 - RNA, 22 nt, Human
uucuuaacuggaaaaugucaga

SEQ ID NO: 862135 - RNA, 22 nt, Human
ucuuuuggaaaugaugugcagg

SEQ ID NO: 862136 - RNA, 23 nt, Human
ucccaggaaucugcauuuuuaac

SEQ ID NO: 862137 - RNA, 21 nt, Human
gcaaauguucaggaaaaaaga

SEQ ID NO: 862138 - RNA, 22 nt, Human
gaagugaagagauuagaaauca

SEQ ID NO: 862139 - RNA, 22 nt, Human
uggaggaaguggcuggccagaa

SEQ ID NO: 862140 - RNA, 22 nt, Human
ggcagcuuucaauaggguuaug

SEQ ID NO: 862141 - RNA, 22 nt, Human
gaggacagagccgccuggcaag

SEQ ID NO: 862142 - RNA, 22 nt, Human
uucacacacagcuuccuauugu

SEQ ID NO: 862143 - RNA, 20 nt, Human
cuucuucaguaguuuguucu

SEQ ID NO: 862144 - RNA, 22 nt, Human
uuauccuggauuauauauguga

SEQ ID NO: 862145 - RNA, 22 nt, Human
auucuucacaccuguuccuguu

SEQ ID NO: 862146 - RNA, 22 nt, Human
cucuucuugucucugguuagaa

SEQ ID NO: 862147 - RNA, 22 nt, Human
cugcuuugggcagcuuuguggc

SEQ ID NO: 862148 - RNA, 22 nt, Human
ucaggagaaggcaauguggaaa

SEQ ID NO: 862149 - RNA, 22 nt, Human
agauauaauaauuuacaagugu

SEQ ID NO: 862150 - RNA, 21 nt, Human
aggcagcucaggcccagagag

SEQ ID NO: 862151 - RNA, 22 nt, Human
augaaaauucuaugcaggccag

SEQ ID NO: 862152 - RNA, 22 nt, Human
gaagaauccuguccucuuuagg

SEQ ID NO: 862153 - RNA, 22 nt, Human
uaucagaaggaagugccuuuaa

SEQ ID NO: 862154 - RNA, 22 nt, Human
uguccuuagggauauaaaauau

SEQ ID NO: 862155 - RNA, 22 nt, Human
gcugucccgcugacuuccagcu

SEQ ID NO: 862156 - RNA, 19 nt, Human
accaggaguaucagagcug

SEQ ID NO: 862157 - RNA, 22 nt, Human
auuucauugaaguuaauucuuc

SEQ ID NO: 862158 - RNA, 22 nt, Human
uccaggagggguaggcaguaug

SEQ ID NO: 862159 - RNA, 22 nt, Human
aguugcagacgcagagauguug

SEQ ID NO: 862160 - RNA, 22 nt, Human
ggauucagugucuguuaauagu

SEQ ID NO: 862161 - RNA, 22 nt, Human
ucagccaguuugauucuauuug

SEQ ID NO: 862162 - RNA, 22 nt, Human
cuacagaauggagggucagaga

SEQ ID NO: 862163 - RNA, 22 nt, Human
cuagaaauucugauucaguagg

SEQ ID NO: 862164 - RNA, 22 nt, Human
gaagcagcaaguauaggacagg

SEQ ID NO: 862165 - RNA, 22 nt, Human
agaggccacuuugccugugaug

SEQ ID NO: 862166 - RNA, 22 nt, Human
caaguccucaaagggcucugcu

SEQ ID NO: 862167 - RNA, 22 nt, Human
caugauuuugucuuguguuaau

SEQ ID NO: 862168 - RNA, 22 nt, Human
auacagaauuugcccuuuucau

SEQ ID NO: 862169 - RNA, 22 nt, Human
uuugcaguagacaucuuauuuu

SEQ ID NO: 862170 - RNA, 22 nt, Human
agaaaugaauauguagugguua

SEQ ID NO: 862171 - RNA, 18 nt, Human
uugagggaggggcagagu

SEQ ID NO: 862172 - RNA, 22 nt, Human
cagagccacuuggagaugagaa

SEQ ID NO: 862173 - RNA, 22 nt, Human
gggcagcucagccaccaugcag

SEQ ID NO: 862174 - RNA, 20 nt, Human
aggcucagcugagcucuugg

SEQ ID NO: 862175 - RNA, 22 nt, Human
cagaggcaaaagagguggaggu

SEQ ID NO: 862176 - RNA, 22 nt, Human
gauuucaaguaucuugggcgag

SEQ ID NO: 862177 - RNA, 22 nt, Human
gaaacuguauguaguuuuuggg

SEQ ID NO: 862178 - RNA, 22 nt, Human
gggagagguuacccgagcaacu

SEQ ID NO: 862179 - RNA, 22 nt, Human
aaagaaucguguguaguuugaa

SEQ ID NO: 862180 - RNA, 22 nt, Human
uaugccugauaacugugucucu

SEQ ID NO: 862181 - RNA, 22 nt, Human
ucucaggaucuaauacauggua

SEQ ID NO: 862182 - RNA, 22 nt, Human
uuuaaaauuuagaccucuccac

SEQ ID NO: 862183 - RNA, 22 nt, Human
uuagaaagcuuuccauagucaa

SEQ ID NO: 862184 - RNA, 21 nt, Human
agcagaggcugccuggugacu

SEQ ID NO: 862185 - RNA, 22 nt, Human
cagaggcaggauaagaacugcg

SEQ ID NO: 862186 - RNA, 22 nt, Human
aagcuggcaugucaccugagaa

SEQ ID NO: 862187 - RNA, 22 nt, Human
uaacagaagaugaaacuucuuu

SEQ ID NO: 862188 - RNA, 22 nt, Human
acagaauuaaugaaaauuacaa

SEQ ID NO: 862189 - RNA, 22 nt, Human
uuucaacguguaaucuuauuua

SEQ ID NO: 862190 - RNA, 22 nt, Human
uugaaaguuuauggagucugca

SEQ ID NO: 862191 - RNA, 22 nt, Human
uggcagcuagcuguuuucaugc

SEQ ID NO: 862192 - RNA, 23 nt, Human
ucucaggacacacaugucuauca

SEQ ID NO: 862193 - RNA, 22 nt, Human
cucagaagaacaaaggcucuac

SEQ ID NO: 862194 - RNA, 22 nt, Human
ugcugagaucugccaguagaug

SEQ ID NO: 862195 - RNA, 22 nt, Human
aacauucuauuuugcuaaaaca

SEQ ID NO: 862196 - RNA, 22 nt, Human
uuuauuauguacaggcacuaua

SEQ ID NO: 862197 - RNA, 21 nt, Human
agcagaggcagaauguaugca

SEQ ID NO: 862198 - RNA, 22 nt, Human
uuugaaugcaggacauacagaa

SEQ ID NO: 862199 - RNA, 22 nt, Human
cugucccuucauuauucacuac

SEQ ID NO: 862200 - RNA, 22 nt, Human
uuugcaaagaaauuauugcugu

SEQ ID NO: 862201 - RNA, 22 nt, Human
uuccaaacugccaauucagaag

SEQ ID NO: 862202 - RNA, 22 nt, Human
uuugcaaauaccaugaaacuug

SEQ ID NO: 862203 - RNA, 22 nt, Human
ugaaaugauuauaugguguuug

SEQ ID NO: 862204 - RNA, 22 nt, Human
uacucagagucauugcccuucu

SEQ ID NO: 862205 - RNA, 22 nt, Human
acaccauacucauguugguucc

SEQ ID NO: 862206 - RNA, 22 nt, Human
uuagaaaucugcugccaugcaa

SEQ ID NO: 862207 - RNA, 22 nt, Human
ggcauuuaauccaucugauuga

SEQ ID NO: 862208 - RNA, 22 nt, Human
gauuuccaggucauuaauaaag

SEQ ID NO: 862209 - RNA, 22 nt, Human
aaagcaguauauugguaguugu

SEQ ID NO: 862210 - RNA, 22 nt, Human
uuuucauuguuccucgagcauu

SEQ ID NO: 862211 - RNA, 22 nt, Human
uggucuuuaagguagcugucau

SEQ ID NO: 862212 - RNA, 22 nt, Human
ugaaagcagcaccaauaccauu

SEQ ID NO: 862213 - RNA, 22 nt, Human
aacauacauauuucagugucca

SEQ ID NO: 862214 - RNA, 22 nt, Human
aaaguccuuuuugccaugcaag

SEQ ID NO: 862215 - RNA, 22 nt, Human
ccagcugucagugugaaaauaa

SEQ ID NO: 862216 - RNA, 22 nt, Human
gagugcagaugccagccccagu

SEQ ID NO: 862217 - RNA, 22 nt, Human
auuaggcauucaugcagcuccu

SEQ ID NO: 862218 - RNA, 22 nt, Human
auacauacauguaugcacauac

SEQ ID NO: 862219 - RNA, 22 nt, Human
ugaaaugauguacaagaaggca

SEQ ID NO: 862220 - RNA, 22 nt, Human
augguuuaaagaguaugacuuu

SEQ ID NO: 862221 - RNA, 22 nt, Human
gccaggagagcuccuucagguu

SEQ ID NO: 862222 - RNA, 22 nt, Human
agacagcugggaaauggagugu

SEQ ID NO: 862223 - RNA, 22 nt, Human
uuugaaaguccuaggagagucc

SEQ ID NO: 862224 - RNA, 22 nt, Human
cuugaaagcuuugcgucuucua

SEQ ID NO: 862225 - RNA, 17 nt, Human
gccucugcuugugucau

SEQ ID NO: 862226 - RNA, 22 nt, Human
uaaucuaccacuauugcaauau

SEQ ID NO: 862227 - RNA, 22 nt, Human
aggcuucugcugauauuucauu

SEQ ID NO: 862228 - RNA, 22 nt, Human
auugaaaggcaaaguaggaagc

SEQ ID NO: 862229 - RNA, 22 nt, Human
cauuuauuggcauguaguaggu

SEQ ID NO: 862230 - RNA, 22 nt, Human
uguugagacugagggagucagc

SEQ ID NO: 862231 - RNA, 22 nt, Human
uuauggcauauuccucauugua

SEQ ID NO: 862232 - RNA, 21 nt, Human
ucauucacaggguauuguaua

SEQ ID NO: 862233 - RNA, 22 nt, Human
ccaggagagcaggcgugcagcu

SEQ ID NO: 862234 - RNA, 23 nt, Human
uaauucacauauacauugcuuca

SEQ ID NO: 862235 - RNA, 22 nt, Human
uuccuuagugccucuuccgcug

SEQ ID NO: 862236 - RNA, 22 nt, Human
agaggucagauuucuccuggug

SEQ ID NO: 862237 - RNA, 22 nt, Human
acuggcaguagagggagcgcau

SEQ ID NO: 862238 - RNA, 22 nt, Human
augugcuucauucuacaugaca

SEQ ID NO: 862239 - RNA, 19 nt, Human
acuguaaggcauuuuuuuc

SEQ ID NO: 862240 - RNA, 17 nt, Human
ggcagcugugugcaugc

SEQ ID NO: 862241 - RNA, 22 nt, Human
acuguagcugccacuggaugca

SEQ ID NO: 862242 - RNA, 22 nt, Human
ggcaggcugggugucauggagu

SEQ ID NO: 862243 - RNA, 20 nt, Human
cccagguaggugccaugagu

SEQ ID NO: 862244 - RNA, 22 nt, Human
gagcgauguggguauguagaag

SEQ ID NO: 862245 - RNA, 22 nt, Human
uaaucugaagaaacaggacuug

SEQ ID NO: 862246 - RNA, 22 nt, Human
uucuucuuucccccugugguac

SEQ ID NO: 862247 - RNA, 22 nt, Human
ucucuucuaauuuucccgagua

SEQ ID NO: 862248 - RNA, 22 nt, Human
accauguguuuuacacauggua

SEQ ID NO: 862249 - RNA, 20 nt, Human
ucauuucuugggguuccaag

SEQ ID NO: 862250 - RNA, 22 nt, Human
aaaggccacugcaagggaaggu

SEQ ID NO: 862251 - RNA, 22 nt, Human
ucugucccugagagcucaggag

SEQ ID NO: 862252 - RNA, 22 nt, Human
cccaggaaacccgaaggcgacc

SEQ ID NO: 862253 - RNA, 22 nt, Human
uauacagauuaacagauuuaaa

SEQ ID NO: 862254 - RNA, 22 nt, Human
ucuuuccaaggacucuguagca

SEQ ID NO: 862255 - RNA, 22 nt, Human
cuucagaagaaaagcagugugu

SEQ ID NO: 862256 - RNA, 22 nt, Human
ccuggaucuccucuauucauau

SEQ ID NO: 862257 - RNA, 22 nt, Human
aggguagguguaagauagcccu

SEQ ID NO: 862258 - RNA, 22 nt, Human
caggagaggcuguacguuucuc

SEQ ID NO: 862259 - RNA, 22 nt, Human
aaaacugaaauacgauccaaug

SEQ ID NO: 862260 - RNA, 22 nt, Human
ucuuugaauuucugacugucuu

SEQ ID NO: 862261 - RNA, 22 nt, Human
accaggaguugggggugggacc

SEQ ID NO: 862262 - RNA, 22 nt, Human
uucaggaucacuaaacccucca

SEQ ID NO: 862263 - RNA, 22 nt, Human
auucuaacacaugcucuaagaa

SEQ ID NO: 862264 - RNA, 22 nt, Human
aauuucaaagcucacuggcaua

SEQ ID NO: 862265 - RNA, 17 nt, Human
gcuguaguuugauaaga

SEQ ID NO: 862266 - RNA, 22 nt, Human
auucuucauaccuacugagguu

SEQ ID NO: 862267 - RNA, 22 nt, Human
caguaaauuaucucaucucugu

SEQ ID NO: 862268 - RNA, 22 nt, Human
ccuuuaauuuacaauguuaauu

SEQ ID NO: 862269 - RNA, 22 nt, Human
cuguuucaagugaagucagaca

SEQ ID NO: 862270 - RNA, 22 nt, Human
cuguaaauaugaagaauauaug

SEQ ID NO: 862271 - RNA, 22 nt, Human
uaauuauuaugacaacaauugc

SEQ ID NO: 862272 - RNA, 22 nt, Human
gcccaggacucagggugucgcg

SEQ ID NO: 862273 - RNA, 22 nt, Human
auucuucagcaggggacacuau

SEQ ID NO: 862274 - RNA, 22 nt, Human
uauuucagcaagaagaaugugg

SEQ ID NO: 862275 - RNA, 22 nt, Human
uggauuuauggagaccgaaagu

SEQ ID NO: 862276 - RNA, 22 nt, Human
ugugcaggugcaggaagggggc

SEQ ID NO: 862277 - RNA, 22 nt, Human
aaaguccagagggcacacugaa

SEQ ID NO: 862278 - RNA, 22 nt, Human
ugaucugagagcagaucaccau

SEQ ID NO: 862279 - RNA, 22 nt, Human
aagggcaggaaaagauggaugu

SEQ ID NO: 862280 - RNA, 22 nt, Human
ucaaaauuaaaccaacguccag

SEQ ID NO: 862281 - RNA, 22 nt, Human
gaaauagacacuuucuaugaau

SEQ ID NO: 862282 - RNA, 22 nt, Human
ugcugugagguugagaaggaag

SEQ ID NO: 862283 - RNA, 22 nt, Human
uggcagcuuuuuguuucaggcu

SEQ ID NO: 862284 - RNA, 22 nt, Human
ccagagagauugcuucuaaaga

SEQ ID NO: 862285 - RNA, 23 nt, Human
uugauuucaaaugcagagaacac

SEQ ID NO: 862286 - RNA, 22 nt, Human
ccuggaucuuuguuguaaauau

SEQ ID NO: 862287 - RNA, 22 nt, Human
ugcuuuaaauaugaauuagcau

SEQ ID NO: 862288 - RNA, 22 nt, Human
caugcuguguguuuuagcucca

SEQ ID NO: 862289 - RNA, 22 nt, Human
ggaggugggauuaggaccuaaa

SEQ ID NO: 862290 - RNA, 22 nt, Human
cuucagaaugggacuguguuug

SEQ ID NO: 862291 - RNA, 22 nt, Human
cuauacaguaaccacagugauu

SEQ ID NO: 862292 - RNA, 20 nt, Human
uuuacauuuugaaacaguga

SEQ ID NO: 862293 - RNA, 22 nt, Human
auacagauguugaauguuauau

SEQ ID NO: 862294 - RNA, 22 nt, Human
acuggcagcagcagcccuuggg

SEQ ID NO: 862295 - RNA, 22 nt, Human
cagagacauucaguaaauuauc

SEQ ID NO: 862296 - RNA, 22 nt, Human
aggaagcuuagugaaaggacca

SEQ ID NO: 862297 - RNA, 22 nt, Human
ccacuucaucagugcuccauuu

SEQ ID NO: 862298 - RNA, 22 nt, Human
uucacagaguuauuuuuaugcu

SEQ ID NO: 862299 - RNA, 22 nt, Human
acaggagaaaucuggucaaaag

SEQ ID NO: 862300 - RNA, 22 nt, Human
uugaauaggacucagcagugau

SEQ ID NO: 862301 - RNA, 22 nt, Human
cccaggagaccuagaucuguuu

SEQ ID NO: 862302 - RNA, 22 nt, Human
gaggcagcaggcugaggaggau

SEQ ID NO: 862303 - RNA, 22 nt, Human
gacagcuggcaguggaaaggug

SEQ ID NO: 862304 - RNA, 22 nt, Human
auuucagauucagaaauguagg

SEQ ID NO: 862305 - RNA, 22 nt, Human
uaaagaucuuaggaagauuuuc

SEQ ID NO: 862306 - RNA, 22 nt, Human
uggaggaaaaaaccaggcagag

SEQ ID NO: 862307 - RNA, 22 nt, Human
uacuuugaagacaauaucugga

SEQ ID NO: 862308 - RNA, 22 nt, Human
aggcagcccugugcuggaugcu

SEQ ID NO: 862309 - RNA, 19 nt, Human
ggcaggcuggauagagagg

SEQ ID NO: 862310 - RNA, 22 nt, Human
uuuaggcagaacauggacuuug

SEQ ID NO: 862311 - RNA, 22 nt, Human
uuuuccagagcugucucuugca

SEQ ID NO: 862312 - RNA, 22 nt, Human
auggcuuuguuccaauaaaacu

SEQ ID NO: 862313 - RNA, 22 nt, Human
agugagaguauuaaugugaacu

SEQ ID NO: 862314 - RNA, 23 nt, Human
accaggagccaagaucucccugg

SEQ ID NO: 862315 - RNA, 22 nt, Human
uucccaauauucugcuuuuaug

SEQ ID NO: 862316 - RNA, 22 nt, Human
gcagggcagaccuccagccuau

SEQ ID NO: 862317 - RNA, 19 nt, Human
uggagacugagagugagca

SEQ ID NO: 862318 - RNA, 22 nt, Human
uugcuguguaacuccuggccug

SEQ ID NO: 862319 - RNA, 22 nt, Human
gaugagcauuguuucauguguu

SEQ ID NO: 862320 - RNA, 22 nt, Human
aucauuucccuuuagaucacaa

SEQ ID NO: 862321 - RNA, 22 nt, Human
agucuuuccugcuugacuguuc

SEQ ID NO: 862322 - RNA, 22 nt, Human
aaggccagcuuguagggcuggu

SEQ ID NO: 862323 - RNA, 22 nt, Human
gugauuuugagaccuauauagu

SEQ ID NO: 862324 - RNA, 22 nt, Human
uuacagaaaauguguuuuaacu

SEQ ID NO: 862325 - RNA, 22 nt, Human
cuuaaauuggaugaguuaaguu

SEQ ID NO: 862326 - RNA, 22 nt, Human
uucaaauacauucuuugccacu

SEQ ID NO: 862327 - RNA, 22 nt, Human
aagggcaggagaagacggauau

SEQ ID NO: 862328 - RNA, 22 nt, Human
uauagccauuuccaguggcauc

SEQ ID NO: 862329 - RNA, 22 nt, Human
ucagaauugcagggagggcagg

SEQ ID NO: 862330 - RNA, 22 nt, Human
uuauuauugugguugcauuauc

SEQ ID NO: 862331 - RNA, 22 nt, Human
aggcaggcacacuuccuccagg

SEQ ID NO: 862332 - RNA, 22 nt, Human
cuuugaauugccguuucaucug

SEQ ID NO: 862333 - RNA, 22 nt, Human
uuacacaacaucuguauuauua

SEQ ID NO: 862334 - RNA, 22 nt, Human
cauuucaauacaguuuguaaau

SEQ ID NO: 862335 - RNA, 22 nt, Human
aagaauucacugguagagucaa

SEQ ID NO: 862336 - RNA, 22 nt, Human
ugcugaugcuguucuguuagga

SEQ ID NO: 862337 - RNA, 22 nt, Human
ucuuuucaucauuuaauaggua

SEQ ID NO: 862338 - RNA, 22 nt, Human
gcucaggaaauaguuuaguguu

SEQ ID NO: 862339 - RNA, 22 nt, Human
aggaagcugcuggaguagugug

SEQ ID NO: 862340 - RNA, 22 nt, Human
acacaaguucuaaagauugcgc

SEQ ID NO: 862341 - RNA, 22 nt, Human
uagggcaggggaggaaucugaa

SEQ ID NO: 862342 - RNA, 22 nt, Human
aagggcagaauagagaagaugg

SEQ ID NO: 862343 - RNA, 21 nt, Human
gcugcaucaaucuacccaggg

SEQ ID NO: 862344 - RNA, 22 nt, Human
ugaaauagaaaaacaggcuucu

SEQ ID NO: 862345 - RNA, 22 nt, Human
ugacaguuaagguauacauuca

SEQ ID NO: 862346 - RNA, 22 nt, Human
uucuccucuguuggccuucccu

SEQ ID NO: 862347 - RNA, 22 nt, Human
ugaaacauuugaugaucuuugg

SEQ ID NO: 862348 - RNA, 20 nt, Human
cagagccaagagcagcaucu

SEQ ID NO: 862349 - RNA, 22 nt, Human
ucugcugugggucuauauuuua

SEQ ID NO: 862350 - RNA, 22 nt, Human
aggccagcuuccagaggggcag

SEQ ID NO: 862351 - RNA, 22 nt, Human
uuuguaaauagcaguacucaug

SEQ ID NO: 862352 - RNA, 22 nt, Human
ggagugggaacaaugacauggu

SEQ ID NO: 862353 - RNA, 22 nt, Human
ucagguggcuuggagggggacg

SEQ ID NO: 862354 - RNA, 18 nt, Human
aggcaggugcuggaaguc

SEQ ID NO: 862355 - RNA, 21 nt, Human
cuacagaaucgagcauucugg

SEQ ID NO: 862356 - RNA, 22 nt, Human
auacaaagacaaaucucaaucu

SEQ ID NO: 862357 - RNA, 22 nt, Human
aaguucuaauuuugcauucagg

SEQ ID NO: 862358 - RNA, 22 nt, Human
guccaugacugugacucacaug

SEQ ID NO: 862359 - RNA, 22 nt, Human
cuugcaggccuuucuagcucua

SEQ ID NO: 862360 - RNA, 22 nt, Human
caauuucagucucagagaguuc

SEQ ID NO: 862361 - RNA, 22 nt, Human
ccacagcugaccgcaggugagc

SEQ ID NO: 862362 - RNA, 22 nt, Human
ucuccucucuuaccugguacaa

SEQ ID NO: 862363 - RNA, 22 nt, Human
cucaggaugcaggucacaggac

SEQ ID NO: 862364 - RNA, 22 nt, Human
aauauccacacugugucccugc

SEQ ID NO: 862365 - RNA, 22 nt, Human
caggcgagugaacagacucuca

SEQ ID NO: 862366 - RNA, 22 nt, Human
agagcagcuggggcagagacca

SEQ ID NO: 862367 - RNA, 22 nt, Human
cucuucuugcuagacugagugc

SEQ ID NO: 862368 - RNA, 22 nt, Human
gggcaguugauggaggucugga

SEQ ID NO: 862369 - RNA, 20 nt, Human
uuucaguuaucuugaccuuc

SEQ ID NO: 862370 - RNA, 22 nt, Human
auuacaagaugcauccauauuu

SEQ ID NO: 862371 - RNA, 20 nt, Human
augcuuucuugugugcugcu

SEQ ID NO: 862372 - RNA, 22 nt, Human
cagcuggcaaguggagcagggu

SEQ ID NO: 862373 - RNA, 22 nt, Human
uugacacagaucaauauucaac

SEQ ID NO: 862374 - RNA, 22 nt, Human
uaacaauaguguuugcuaguca

SEQ ID NO: 862375 - RNA, 22 nt, Human
caggauggagggagggcuguua

SEQ ID NO: 862376 - RNA, 22 nt, Human
aggcaggccccugagaauagac

SEQ ID NO: 862377 - RNA, 22 nt, Human
ugcuuuggccacuagaauucag

SEQ ID NO: 862378 - RNA, 20 nt, Human
caauuucaucauuuccugug

SEQ ID NO: 862379 - RNA, 22 nt, Human
caggcagcaggagcccugcucg

SEQ ID NO: 862380 - RNA, 22 nt, Human
gaggcugcuguuagcccugggc

SEQ ID NO: 862381 - RNA, 22 nt, Human
cuggcaguguccagcucgugau

SEQ ID NO: 862382 - RNA, 22 nt, Human
uccaggagauacacugcaccag

SEQ ID NO: 862383 - RNA, 22 nt, Human
ugaaaugagauagauaaucagg

SEQ ID NO: 862384 - RNA, 22 nt, Human
aaaguauucuugacuguuuuuc

SEQ ID NO: 862385 - RNA, 22 nt, Human
augaaacaguguguauagcaaa

SEQ ID NO: 862386 - RNA, 22 nt, Human
gaucugaaucaauagaauaacu

SEQ ID NO: 862387 - RNA, 22 nt, Human
acauuuaaauaccuauguuucu

SEQ ID NO: 862388 - RNA, 22 nt, Human
aggcagcuggcaaauucuagag

SEQ ID NO: 862389 - RNA, 22 nt, Human
acacagauuuuacauguuaugc

SEQ ID NO: 862390 - RNA, 20 nt, Human
gggugggagagucugagggu

SEQ ID NO: 862391 - RNA, 22 nt, Human
aagugaagaaauacaugagaau

SEQ ID NO: 862392 - RNA, 22 nt, Human
auggccuuagugaugauuaaua

SEQ ID NO: 862393 - RNA, 22 nt, Human
aauuuguuaaaagugagugaca

SEQ ID NO: 862394 - RNA, 22 nt, Human
uguauuuuuagaccuuuagacc

SEQ ID NO: 862395 - RNA, 22 nt, Human
cacauuuaauccuuuauaagua

SEQ ID NO: 862396 - RNA, 22 nt, Human
aggcagugcucaagacagcagc

SEQ ID NO: 862397 - RNA, 22 nt, Human
agucuucucauuucacaugcuu

SEQ ID NO: 862398 - RNA, 17 nt, Human
aaucuguuuacagucag

SEQ ID NO: 862399 - RNA, 22 nt, Human
uuacagaagaguaacuuggcaa

SEQ ID NO: 862400 - RNA, 22 nt, Human
ccaggaugacccccacuuuccu

SEQ ID NO: 862401 - RNA, 22 nt, Human
auuggcaguuagugacgaggcu

SEQ ID NO: 862402 - RNA, 22 nt, Human
uuugaagugggcauuagaaccu

SEQ ID NO: 862403 - RNA, 22 nt, Human
uuuuagauaguuuaacugcacu

SEQ ID NO: 862404 - RNA, 22 nt, Human
aagcagaggguauggccagguu

SEQ ID NO: 862405 - RNA, 22 nt, Human
acagaaauugggcaaauggaag

SEQ ID NO: 862406 - RNA, 22 nt, Human
gagggugggccagauaugaggg

SEQ ID NO: 862407 - RNA, 22 nt, Human
gaauuucacaaggugaggauaa

SEQ ID NO: 862408 - RNA, 22 nt, Human
augcuuuagugucaaguuuggg

SEQ ID NO: 862409 - RNA, 22 nt, Human
cauagaaaucaggugagaaucu

SEQ ID NO: 862410 - RNA, 22 nt, Human
cccaggaguuugaguucagcau

SEQ ID NO: 862411 - RNA, 22 nt, Human
cccaucacagacacuggguuau

SEQ ID NO: 862412 - RNA, 22 nt, Human
aaggagagguuguccguguugu

SEQ ID NO: 862413 - RNA, 22 nt, Human
guuaaauucgaugauggauaaa

SEQ ID NO: 862414 - RNA, 19 nt, Human
uggcaucuguaaaauggug

SEQ ID NO: 862415 - RNA, 19 nt, Human
uucauucucuuauuguugu

SEQ ID NO: 862416 - RNA, 22 nt, Human
aagcagaggaccgacggaggga

SEQ ID NO: 862417 - RNA, 22 nt, Human
aucacauucuuucaaagcaguc

SEQ ID NO: 862418 - RNA, 22 nt, Human
aggauuuacuagcaaggauucu

SEQ ID NO: 862419 - RNA, 22 nt, Human
aauuuacaguugcugaugguac

SEQ ID NO: 862420 - RNA, 22 nt, Human
caguaaagcauguaugucuuca

SEQ ID NO: 862421 - RNA, 22 nt, Human
auguacaaaauguuuugaaaug

SEQ ID NO: 862422 - RNA, 22 nt, Human
uuuacauuucccucugucaguu

SEQ ID NO: 862423 - RNA, 22 nt, Human
gggcagcuguaucugagcuuau

SEQ ID NO: 862424 - RNA, 17 nt, Human
cuuuuaauuuacuuccc

SEQ ID NO: 862425 - RNA, 22 nt, Human
uauuucagggagaauaaauuug

SEQ ID NO: 862426 - RNA, 22 nt, Human
agaauuccuccucugggacacu

SEQ ID NO: 862427 - RNA, 18 nt, Human
ggcagcuugacuagcaac

SEQ ID NO: 862428 - RNA, 20 nt, Human
uggcaucucucaauuguagg

SEQ ID NO: 862429 - RNA, 22 nt, Human
ugaacaaacugcauucuucacu

SEQ ID NO: 862430 - RNA, 22 nt, Human
caucagaauguuagagaaggga

SEQ ID NO: 862431 - RNA, 19 nt, Human
aguggcagaucuggaagua

SEQ ID NO: 862432 - RNA, 22 nt, Human
ugucucugauaaguaguucagu

SEQ ID NO: 862433 - RNA, 22 nt, Human
uugcaauagccuuauuuccaaa

SEQ ID NO: 862434 - RNA, 22 nt, Human
uuucacagguacaaacacuccu

SEQ ID NO: 862435 - RNA, 22 nt, Human
ugcuuucaaaggcuuucuagau

SEQ ID NO: 862436 - RNA, 22 nt, Human
cagaggcaggaagaugggcagu

SEQ ID NO: 862437 - RNA, 22 nt, Human
uaaauuauguuccauguccuuu

SEQ ID NO: 862438 - RNA, 20 nt, Human
augauuuugcacuaacuuca

SEQ ID NO: 862439 - RNA, 22 nt, Human
aggucagcaggccaggggcgaa

SEQ ID NO: 862440 - RNA, 22 nt, Human
uugaaaggaauacagaggccua

SEQ ID NO: 862441 - RNA, 20 nt, Human
cuucuucagccuaugcuuca

SEQ ID NO: 862442 - RNA, 22 nt, Human
auguuuccagguucuuccuaug

SEQ ID NO: 862443 - RNA, 22 nt, Human
ucauuugugugagugauuugac

SEQ ID NO: 862444 - RNA, 22 nt, Human
ucuucucuacaccagcagcccc

SEQ ID NO: 862445 - RNA, 22 nt, Human
gugaauaaaacaccugccaaga

SEQ ID NO: 862446 - RNA, 22 nt, Human
gcauuuccugugcuuggcauau

SEQ ID NO: 862447 - RNA, 22 nt, Human
acuugcugguggcauuuacagu

SEQ ID NO: 862448 - RNA, 22 nt, Human
uauuucuucgggauucaagcua

SEQ ID NO: 862449 - RNA, 22 nt, Human
ugcuuaauauugugauguaaua

SEQ ID NO: 862450 - RNA, 22 nt, Human
agugcuuuagcauccaacuguc

SEQ ID NO: 862451 - RNA, 22 nt, Human
auuaaauuggaucugcauaguu

SEQ ID NO: 862452 - RNA, 22 nt, Human
gauggcagguaguggucucauc

SEQ ID NO: 862453 - RNA, 22 nt, Human
cauuuguaguuaaaaaugucuc

SEQ ID NO: 862454 - RNA, 22 nt, Human
gcuggaucauauggugguucua

SEQ ID NO: 862455 - RNA, 22 nt, Human
caguccuuagucuggauggcuu

SEQ ID NO: 862456 - RNA, 22 nt, Human
uggcuuuauaaauccacugguu

SEQ ID NO: 862457 - RNA, 22 nt, Human
uuauccaaacuggugaaucauu

SEQ ID NO: 862458 - RNA, 22 nt, Human
aggguggcugaguagauggaag

SEQ ID NO: 862459 - RNA, 22 nt, Human
auggcuuucagauuucuauguu

SEQ ID NO: 862460 - RNA, 22 nt, Human
cuuaauuacccaaugugguagg

SEQ ID NO: 862461 - RNA, 22 nt, Human
aaaucaguaaauguucauuaac

SEQ ID NO: 862462 - RNA, 22 nt, Human
cccuguacagucucuguggcac

SEQ ID NO: 862463 - RNA, 22 nt, Human
uuaauuaaauucaugagcauug

SEQ ID NO: 862464 - RNA, 22 nt, Human
gccaggaguguguggcuauguu

SEQ ID NO: 862465 - RNA, 18 nt, Human
ugaauagggguuugcaga

SEQ ID NO: 862466 - RNA, 20 nt, Human
ugugaaagcaguagaaugac

SEQ ID NO: 862467 - RNA, 22 nt, Human
guucuucacauuucauugagga

SEQ ID NO: 862468 - RNA, 22 nt, Human
ugauuuccccagucuugcugcu

SEQ ID NO: 862469 - RNA, 22 nt, Human
uuugaagacauauuguuacaua

SEQ ID NO: 862470 - RNA, 22 nt, Human
ugaacuccaaauacugcugauu

SEQ ID NO: 862471 - RNA, 22 nt, Human
ugaauaaucuuggguauuaaua

SEQ ID NO: 862472 - RNA, 22 nt, Human
ugucugugaccucuuaggcaag

SEQ ID NO: 862473 - RNA, 22 nt, Human
uucaauucugcucugaucuuag

SEQ ID NO: 862474 - RNA, 22 nt, Human
uucauacucacuccaauaacug

SEQ ID NO: 862475 - RNA, 22 nt, Human
gugcagcugugguggagccagg

SEQ ID NO: 862476 - RNA, 22 nt, Human
cccagggaagccauuucugacu

SEQ ID NO: 862477 - RNA, 22 nt, Human
gauuucaaaaguagauccauca

SEQ ID NO: 862478 - RNA, 22 nt, Human
uuucaugagauuccuccacauc

SEQ ID NO: 862479 - RNA, 22 nt, Human
uaggaggguuagagggaaauau

SEQ ID NO: 862480 - RNA, 21 nt, Human
ucacagacuggucagugaggc

SEQ ID NO: 862481 - RNA, 22 nt, Human
uauuuuaaagugaagggucuug

SEQ ID NO: 862482 - RNA, 22 nt, Human
auuucaggagcaguuucagugg

SEQ ID NO: 862483 - RNA, 22 nt, Human
uggaguucauccaugacagcuu

SEQ ID NO: 862484 - RNA, 22 nt, Human
aaguccaugaucaagauguggc

SEQ ID NO: 862485 - RNA, 20 nt, Human
cccaggagcugugccccauc

SEQ ID NO: 862486 - RNA, 22 nt, Human
augacaguucuacacuuaaucu

SEQ ID NO: 862487 - RNA, 22 nt, Human
acucagaaugacugaugcugug

SEQ ID NO: 862488 - RNA, 22 nt, Human
ucuauacugaugggauacuauu

SEQ ID NO: 862489 - RNA, 22 nt, Human
auuauuauuguugauguuaggg

SEQ ID NO: 862490 - RNA, 22 nt, Human
cuggcagucugccucuucacug

SEQ ID NO: 862491 - RNA, 22 nt, Human
caggcagcucuaauggaaagug

SEQ ID NO: 862492 - RNA, 22 nt, Human
uucauucuugucuuuguauagu

SEQ ID NO: 862493 - RNA, 22 nt, Human
guuuucaauuauaagauggcuu

SEQ ID NO: 862494 - RNA, 22 nt, Human
auuuagaacuuuguuugccaau

SEQ ID NO: 862495 - RNA, 22 nt, Human
ggcagcucacgggcauggggug

SEQ ID NO: 862496 - RNA, 22 nt, Human
caggaaaggugugucaugaugg

SEQ ID NO: 862497 - RNA, 22 nt, Human
cccaagagguggagguugcagu

SEQ ID NO: 862498 - RNA, 22 nt, Human
cauuuaguuauacuaaaacauu

SEQ ID NO: 862499 - RNA, 22 nt, Human
cauggcuucuaagugauaacgu

SEQ ID NO: 862500 - RNA, 22 nt, Human
aggacaggauugagcugaacug

SEQ ID NO: 862501 - RNA, 22 nt, Human
aaugucugagucucuguauccc

SEQ ID NO: 862502 - RNA, 22 nt, Human
aggguggccaugagggagagau

SEQ ID NO: 862503 - RNA, 20 nt, Human
uuccuuaggcauuggaagaa

SEQ ID NO: 862504 - RNA, 22 nt, Human
acaacuuuagucuggagggaaa

SEQ ID NO: 862505 - RNA, 22 nt, Human
aguccuuaugagaugcugccuu

SEQ ID NO: 862506 - RNA, 20 nt, Human
ccucaggaugagggugagca

SEQ ID NO: 862507 - RNA, 20 nt, Human
ggaggguggaagaaagcaag

SEQ ID NO: 862508 - RNA, 22 nt, Human
agugcuguuagguuaauauagu

SEQ ID NO: 862509 - RNA, 22 nt, Human
uucaggaucauuuguuuuaucu

SEQ ID NO: 862510 - RNA, 22 nt, Human
guucuucaguaaaauuaaaugu

SEQ ID NO: 862511 - RNA, 22 nt, Human
auagaauucguguuuguaauuc

SEQ ID NO: 862512 - RNA, 22 nt, Human
uucuucucagggucccacaugg

SEQ ID NO: 862513 - RNA, 22 nt, Human
auauaggcuaacaacuauugag

SEQ ID NO: 862514 - RNA, 22 nt, Human
uuugcaguuucauugcugaaau

SEQ ID NO: 862515 - RNA, 22 nt, Human
uugcauuucccauugaguaaug

SEQ ID NO: 862516 - RNA, 22 nt, Human
acuuuugguucuguaacuguga

SEQ ID NO: 862517 - RNA, 22 nt, Human
aggcagcuuuguaguaaagcua

SEQ ID NO: 862518 - RNA, 22 nt, Human
aucuucucaagcagcauccugu

SEQ ID NO: 862519 - RNA, 22 nt, Human
aucaggauggguuuggcuuagg

SEQ ID NO: 862520 - RNA, 22 nt, Human
uaaguccuauuccaggucucuc

SEQ ID NO: 862521 - RNA, 22 nt, Human
gugauuuagauguugaaaguga

SEQ ID NO: 862522 - RNA, 22 nt, Human
ucagaauaugcuaaugacauuu

SEQ ID NO: 862523 - RNA, 22 nt, Human
uuugaagugcaaugaggauucu

SEQ ID NO: 862524 - RNA, 22 nt, Human
ucacugucugaaagaaauggcc

SEQ ID NO: 862525 - RNA, 22 nt, Human
auguauuucuauguagugaaga

SEQ ID NO: 862526 - RNA, 22 nt, Human
uugaaauaucaaguuauuagug

SEQ ID NO: 862527 - RNA, 23 nt, Human
uccaugagaugugggcuucuagu

SEQ ID NO: 862528 - RNA, 22 nt, Human
uagcacauuguugaccagaagg

SEQ ID NO: 862529 - RNA, 22 nt, Human
uacagaaaaacuggcauugaag

SEQ ID NO: 862530 - RNA, 22 nt, Human
uuucauaauacuguacaugaaa

SEQ ID NO: 862531 - RNA, 20 nt, Human
caccagucaugagucaauac

SEQ ID NO: 862532 - RNA, 22 nt, Human
auagacauagccguaauuuauu

SEQ ID NO: 862533 - RNA, 22 nt, Human
gauuuacagaucuaagggucac

SEQ ID NO: 862534 - RNA, 22 nt, Human
uuagccaugcccuagaagagga

SEQ ID NO: 862535 - RNA, 22 nt, Human
gauuucaauccagcuuucuucu

SEQ ID NO: 862536 - RNA, 22 nt, Human
ugccuugcacauaauauacauu

SEQ ID NO: 862537 - RNA, 22 nt, Human
aauagcucacugauuucucuuu

SEQ ID NO: 862538 - RNA, 22 nt, Human
cagggaggaugggcuguuuugc

SEQ ID NO: 862539 - RNA, 22 nt, Human
cccaggagaauauaauguucuu

SEQ ID NO: 862540 - RNA, 22 nt, Human
ccagcagagcauggggaggaag

SEQ ID NO: 862541 - RNA, 22 nt, Human
aauuccaaguagcaucccauca

SEQ ID NO: 862542 - RNA, 22 nt, Human
uauuuccaggccccacucuaga

SEQ ID NO: 862543 - RNA, 22 nt, Human
caacugugaauuuuaugauacc

SEQ ID NO: 862544 - RNA, 22 nt, Human
uuucucugcugccugugucgau

SEQ ID NO: 862545 - RNA, 22 nt, Human
ucucagaguuuagagcugagcc

SEQ ID NO: 862546 - RNA, 22 nt, Human
ucugaaggugcuagagaaagcu

SEQ ID NO: 862547 - RNA, 22 nt, Human
gacuucuauuaauaccucuacu

SEQ ID NO: 862548 - RNA, 22 nt, Human
uuucagacaggacuucauaugu

SEQ ID NO: 862549 - RNA, 22 nt, Human
aaauuuucagagcacuagagaa

SEQ ID NO: 862550 - RNA, 22 nt, Human
auucucuuuguauaacaucuug

SEQ ID NO: 862551 - RNA, 22 nt, Human
ucccaggacaggccacauggaa

SEQ ID NO: 862552 - RNA, 22 nt, Human
cauuuacauuuaagguuaauau

SEQ ID NO: 862553 - RNA, 22 nt, Human
ugaggcaguucuuacuuguauu

SEQ ID NO: 862554 - RNA, 22 nt, Human
cauuuacacacagaggugugcu

SEQ ID NO: 862555 - RNA, 22 nt, Human
uggcagcuccuggggccagcac

SEQ ID NO: 862556 - RNA, 22 nt, Human
caaugaaauugagauccagaga

SEQ ID NO: 862557 - RNA, 22 nt, Human
cuuccaaauguaaauaaguuuc

SEQ ID NO: 862558 - RNA, 22 nt, Human
auugaaaguccuaucuaaggga

SEQ ID NO: 862559 - RNA, 22 nt, Human
auguaaaucaagcagugcuggu

SEQ ID NO: 862560 - RNA, 18 nt, Human
acucaggaaaugaugaca

SEQ ID NO: 862561 - RNA, 22 nt, Human
ucucacuuuccagacuuuucaa

SEQ ID NO: 862562 - RNA, 22 nt, Human
auuaaacugagcaaauuaacau

SEQ ID NO: 862563 - RNA, 22 nt, Human
gagaaaugcaugcaugucauca

SEQ ID NO: 862564 - RNA, 22 nt, Human
cuugaaagcacuccuuugacug

SEQ ID NO: 862565 - RNA, 22 nt, Human
ugcaggaaauuccaggguggcc

SEQ ID NO: 862566 - RNA, 22 nt, Human
ucuucaucucagauuaacagga

SEQ ID NO: 862567 - RNA, 22 nt, Human
ucugggaacacacgucacuuca

SEQ ID NO: 862568 - RNA, 21 nt, Human
uucucagagucuauuacaguu

SEQ ID NO: 862569 - RNA, 22 nt, Human
cuagaaauauuuuacagucaag

SEQ ID NO: 862570 - RNA, 22 nt, Human
ggccagcagucacagggucaga

SEQ ID NO: 862571 - RNA, 22 nt, Human
aaggcagcaacuaauggaucuc

SEQ ID NO: 862572 - RNA, 22 nt, Human
aaguggacuaauacaaggacua

SEQ ID NO: 862573 - RNA, 22 nt, Human
uuuccauguuggugaaaugagg

SEQ ID NO: 862574 - RNA, 22 nt, Human
uuuguuaauucuuauguuagag

SEQ ID NO: 862575 - RNA, 22 nt, Human
gaggggaaagugugaggcugcg

SEQ ID NO: 862576 - RNA, 22 nt, Human
cugaacucuuuaugacagcuug

SEQ ID NO: 862577 - RNA, 22 nt, Human
cauaauuacugauaugcugauu

SEQ ID NO: 862578 - RNA, 22 nt, Human
gaguccuuuucucuguccacug

SEQ ID NO: 862579 - RNA, 22 nt, Human
uccaggagucagacagauggug

SEQ ID NO: 862580 - RNA, 22 nt, Human
agugcuuugugcucucacugca

SEQ ID NO: 862581 - RNA, 22 nt, Human
uaucuguuugcucacagguguu

SEQ ID NO: 862582 - RNA, 22 nt, Human
cagagagagucaaaucuuugcu

SEQ ID NO: 862583 - RNA, 22 nt, Human
aggcagcuuucuggugcaccau

SEQ ID NO: 862584 - RNA, 21 nt, Human
caauuucaugggaagauggga

SEQ ID NO: 862585 - RNA, 22 nt, Human
guaaaauagaauaacguggcua

SEQ ID NO: 862586 - RNA, 22 nt, Human
auacagaagaccccuccgucau

SEQ ID NO: 862587 - RNA, 22 nt, Human
uucuuuuccuacacagcgauuu

SEQ ID NO: 862588 - RNA, 22 nt, Human
uuuauauuucccaggauuggcc

SEQ ID NO: 862589 - RNA, 22 nt, Human
aauuaaauugguuuagagagga

SEQ ID NO: 862590 - RNA, 22 nt, Human
uucuucaguguagcaacuguau

SEQ ID NO: 862591 - RNA, 20 nt, Human
cucaggauacugcaaaguug

SEQ ID NO: 862592 - RNA, 22 nt, Human
acauauauuacuaguaaagaca

SEQ ID NO: 862593 - RNA, 22 nt, Human
gaugccucuuuuggcugaauua

SEQ ID NO: 862594 - RNA, 20 nt, Human
ggggcugcaugcagagaaga

SEQ ID NO: 862595 - RNA, 22 nt, Human
aggagaggguggcauuaaguuu

SEQ ID NO: 862596 - RNA, 22 nt, Human
ugaugaaacugagguuccaaga

SEQ ID NO: 862597 - RNA, 22 nt, Human
uacugaaaagccacaaggacca

SEQ ID NO: 862598 - RNA, 22 nt, Human
aggcagcuggaaaacuccaggc

SEQ ID NO: 862599 - RNA, 22 nt, Human
aagauggagcacgagcagaagc

SEQ ID NO: 862600 - RNA, 22 nt, Human
uuucaguuuuugcucgauguau

SEQ ID NO: 862601 - RNA, 22 nt, Human
uuuuccagauuggacuuagucc

SEQ ID NO: 862602 - RNA, 22 nt, Human
uugaaagucacaauggcauuaa

SEQ ID NO: 862603 - RNA, 22 nt, Human
uagaaaugaauguuuaaaaguc

SEQ ID NO: 862604 - RNA, 22 nt, Human
ugcauuuccagauuucuggagu

SEQ ID NO: 862605 - RNA, 22 nt, Human
auuucacucauucauguuacuu

SEQ ID NO: 862606 - RNA, 22 nt, Human
gaagcagcagcuggggacaguu

SEQ ID NO: 862607 - RNA, 22 nt, Human
ugcugcugaucauuuauagucu

SEQ ID NO: 862608 - RNA, 22 nt, Human
uuacagauggaucuagcaaaau

SEQ ID NO: 862609 - RNA, 22 nt, Human
ucagaaaugaucguuauucauu

SEQ ID NO: 862610 - RNA, 22 nt, Human
uucaggauucugugucugacaa

SEQ ID NO: 862611 - RNA, 22 nt, Human
aaaguccuguuugaaggaccug

SEQ ID NO: 862612 - RNA, 22 nt, Human
cugcugugagcacuccagccug

SEQ ID NO: 862613 - RNA, 20 nt, Human
gggcagcuccccucauucug

SEQ ID NO: 862614 - RNA, 22 nt, Human
gcccaggaaguugaggcugccg

SEQ ID NO: 862615 - RNA, 22 nt, Human
ggagugucagaaacaguguccu

SEQ ID NO: 862616 - RNA, 22 nt, Human
agugcuuuccuucuugugacau

SEQ ID NO: 862617 - RNA, 22 nt, Human
guacaauagucccuguuuggau

SEQ ID NO: 862618 - RNA, 22 nt, Human
aggagggagaugcccauccugg

SEQ ID NO: 862619 - RNA, 20 nt, Human
acaauacagguugugucuga

SEQ ID NO: 862620 - RNA, 22 nt, Human
cacaauuuccaagucauguuau

SEQ ID NO: 862621 - RNA, 22 nt, Human
aucauucuauuguugagcugcc

SEQ ID NO: 862622 - RNA, 22 nt, Human
aacauucugguucuaaaaaccu

SEQ ID NO: 862623 - RNA, 22 nt, Human
agaggagguccuuuucugaugu

SEQ ID NO: 862624 - RNA, 22 nt, Human
ugaggggagaagcagcagccug

SEQ ID NO: 862625 - RNA, 19 nt, Human
uucacaauuaugaaauuag

SEQ ID NO: 862626 - RNA, 22 nt, Human
uuauuuaaaagugguaagauuc

SEQ ID NO: 862627 - RNA, 19 nt, Human
ggucagcugggcuagaggc

SEQ ID NO: 862628 - RNA, 22 nt, Human
cuucucagaucucagcuuugag

SEQ ID NO: 862629 - RNA, 22 nt, Human
gguacaauccacuguggguuag

SEQ ID NO: 862630 - RNA, 22 nt, Human
cauuuguuggucagauuguagu

SEQ ID NO: 862631 - RNA, 22 nt, Human
cagcuggccaaucagggcgccc

SEQ ID NO: 862632 - RNA, 18 nt, Human
aagaggaggaaacccagg

SEQ ID NO: 862633 - RNA, 22 nt, Human
aucagaauaauuagauuucaga

SEQ ID NO: 862634 - RNA, 20 nt, Human
aggcagcugggaaaugaggg

SEQ ID NO: 862635 - RNA, 22 nt, Human
ugcauggacucaucagacaaga

SEQ ID NO: 862636 - RNA, 22 nt, Human
aacagaauaguugauguacagu

SEQ ID NO: 862637 - RNA, 22 nt, Human
cuugaaguugcaaaacauuaau

SEQ ID NO: 862638 - RNA, 22 nt, Human
cagaugaggcaaccucauugcu

SEQ ID NO: 862639 - RNA, 22 nt, Human
gaugaaaaauugcugugucaua

SEQ ID NO: 862640 - RNA, 22 nt, Human
cuuuuccacugagccucacaaa

SEQ ID NO: 862641 - RNA, 22 nt, Human
cuaaaauuaucaagauaauucc

SEQ ID NO: 862642 - RNA, 21 nt, Human
uaucagaagagaaagaaugau

SEQ ID NO: 862643 - RNA, 22 nt, Human
aaugauuuccccuacacagaag

SEQ ID NO: 862644 - RNA, 23 nt, Human
uccaggagaaccccugucugucc

SEQ ID NO: 862645 - RNA, 22 nt, Human
uuacagaaaagggcuuuaagag

SEQ ID NO: 862646 - RNA, 22 nt, Human
gcccaggaggucaaguagcuau

SEQ ID NO: 862647 - RNA, 22 nt, Human
guggcagcaaaugccuggacua

SEQ ID NO: 862648 - RNA, 22 nt, Human
guucuucagcauuagaagucau

SEQ ID NO: 862649 - RNA, 22 nt, Human
agacaaaugguaauuaugucua

SEQ ID NO: 862650 - RNA, 22 nt, Human
gugcauuuaggucacaugaugu

SEQ ID NO: 862651 - RNA, 21 nt, Human
aucacauuggcuguuauuauu

SEQ ID NO: 862652 - RNA, 17 nt, Human
ucccaggaacagggaau

SEQ ID NO: 862653 - RNA, 22 nt, Human
uggaaagcgaggaguuggcauu

SEQ ID NO: 862654 - RNA, 22 nt, Human
aagacuuucaaguaugcaugca

SEQ ID NO: 862655 - RNA, 20 nt, Human
uuacagaaaugauguuauuu

SEQ ID NO: 862656 - RNA, 22 nt, Human
acccaggaggcagagguugcag

SEQ ID NO: 862657 - RNA, 22 nt, Human
ucaaauaccagcaauuucaugu

SEQ ID NO: 862658 - RNA, 22 nt, Human
ucauuuuucacacagggucacc

SEQ ID NO: 862659 - RNA, 22 nt, Human
caguccuuggcaaguucucagu

SEQ ID NO: 862660 - RNA, 22 nt, Human
caguccuugcuaugacccugag

SEQ ID NO: 862661 - RNA, 22 nt, Human
gaaucucaguggaagcaggaag

SEQ ID NO: 862662 - RNA, 22 nt, Human
aaacugcugguugcuggccagc

SEQ ID NO: 862663 - RNA, 21 nt, Human
ugaggcaggggugcuuuuguc

SEQ ID NO: 862664 - RNA, 22 nt, Human
gaucuguuauaaucucuuuuau

SEQ ID NO: 862665 - RNA, 22 nt, Human
auguuaaaugguuuauuauuaa

SEQ ID NO: 862666 - RNA, 22 nt, Human
uuuacagagagagaacuggacu

SEQ ID NO: 862667 - RNA, 19 nt, Human
uacuaaacaugcauauugg

SEQ ID NO: 862668 - RNA, 22 nt, Human
gugguaauuuaauccuacacug

SEQ ID NO: 862669 - RNA, 22 nt, Human
agcuaccuggcuuaucacuguc

SEQ ID NO: 862670 - RNA, 22 nt, Human
ucauaaaaugcuccugauauug

SEQ ID NO: 862671 - RNA, 22 nt, Human
ucugcuguucauucuuuuagcu

SEQ ID NO: 862672 - RNA, 22 nt, Human
gccugcagauauauaggauggu

SEQ ID NO: 862673 - RNA, 22 nt, Human
caauauauaggaacaacuuagg

SEQ ID NO: 862674 - RNA, 22 nt, Human
cucagaagccuucagucuuggc

SEQ ID NO: 862675 - RNA, 22 nt, Human
aaaggccagguuggcugguauu

SEQ ID NO: 862676 - RNA, 22 nt, Human
acccaggacucucuuccaguag

SEQ ID NO: 862677 - RNA, 19 nt, Human
uuucccagcccuugcugug

SEQ ID NO: 862678 - RNA, 22 nt, Human
caauuucaucuugugcuucaau

SEQ ID NO: 862679 - RNA, 22 nt, Human
uuccagcaggcagacaggagau

SEQ ID NO: 862680 - RNA, 22 nt, Human
uuucuagugguuaagauuuaca

SEQ ID NO: 862681 - RNA, 22 nt, Human
cuacagaaaaucagccacaggc

SEQ ID NO: 862682 - RNA, 22 nt, Human
agucaccaacaugguucccagg

SEQ ID NO: 862683 - RNA, 22 nt, Human
aggcagcugaccacaguaugau

SEQ ID NO: 862684 - RNA, 22 nt, Human
guccucuguuagaaaugugcuu

SEQ ID NO: 862685 - RNA, 22 nt, Human
uucucagaauugacugggagca

SEQ ID NO: 862686 - RNA, 22 nt, Human
ucuuagaaguuuauggcacgga

SEQ ID NO: 862687 - RNA, 22 nt, Human
auauuucaugggguuccauacu

SEQ ID NO: 862688 - RNA, 22 nt, Human
cggcagcucgagggccacccgu

SEQ ID NO: 862689 - RNA, 22 nt, Human
auuuucaucauggguuuaacau

SEQ ID NO: 862690 - RNA, 22 nt, Human
cuggccaggcuugggacagaca

SEQ ID NO: 862691 - RNA, 22 nt, Human
ccaggagauuuuuccauagcac

SEQ ID NO: 862692 - RNA, 22 nt, Human
uuucaguguaucuuccaaaagc

SEQ ID NO: 862693 - RNA, 22 nt, Human
acucagaagauauaaugacuca

SEQ ID NO: 862694 - RNA, 19 nt, Human
gugcuuuuuaagagcucag

SEQ ID NO: 862695 - RNA, 22 nt, Human
auuuccaagaaagcuuuaggau

SEQ ID NO: 862696 - RNA, 22 nt, Human
ucaguaaacagguuuaaguccu

SEQ ID NO: 862697 - RNA, 22 nt, Human
gaaguccugguccucucauuca

SEQ ID NO: 862698 - RNA, 22 nt, Human
auagcuguuagauuggggucga

SEQ ID NO: 862699 - RNA, 22 nt, Human
aucuaaaaggagcucuuuaucu

SEQ ID NO: 862700 - RNA, 22 nt, Human
gcaguucuacuuauccauagac

SEQ ID NO: 862701 - RNA, 22 nt, Human
uucuacaauaugaauaaugaag

SEQ ID NO: 862702 - RNA, 22 nt, Human
ugaggggagguuggggcacauc

SEQ ID NO: 862703 - RNA, 22 nt, Human
caguugccuacuacauggcagg

SEQ ID NO: 862704 - RNA, 22 nt, Human
guuaggcaaauaacuguggagc

SEQ ID NO: 862705 - RNA, 23 nt, Human
cccaggagccugaguccucucug

SEQ ID NO: 862706 - RNA, 22 nt, Human
aaaacuaaauacgcuuugccuc

SEQ ID NO: 862707 - RNA, 20 nt, Human
agcugccccugggcacugcc

SEQ ID NO: 862708 - RNA, 21 nt, Human
auacagaacauugauccaaga

SEQ ID NO: 862709 - RNA, 22 nt, Human
uuccuuagaguuuccagaaagc

SEQ ID NO: 862710 - RNA, 22 nt, Human
uaaguaaauuuauaaugugauu

SEQ ID NO: 862711 - RNA, 22 nt, Human
augcuguguuugagaaccuagg

SEQ ID NO: 862712 - RNA, 22 nt, Human
cuagaaauacaggcacgugcca

SEQ ID NO: 862713 - RNA, 21 nt, Human
auuucagagcacacaaguaaa

SEQ ID NO: 862714 - RNA, 22 nt, Human
uucuucaugcuguugcugcuug

SEQ ID NO: 862715 - RNA, 22 nt, Human
aacaugcucuguuucuuggaug

SEQ ID NO: 862716 - RNA, 22 nt, Human
ucaccagucuuucuuaccauug

SEQ ID NO: 862717 - RNA, 22 nt, Human
cgcagggauuucaaggggccuu

SEQ ID NO: 862718 - RNA, 22 nt, Human
agccagucggggccaugcuggg

SEQ ID NO: 862719 - RNA, 22 nt, Human
auguuuuugagauacaaacaga

SEQ ID NO: 862720 - RNA, 22 nt, Human
caaguccucugguuucaaauag

SEQ ID NO: 862721 - RNA, 22 nt, Human
caguuucuauggcugggcucug

SEQ ID NO: 862722 - RNA, 23 nt, Human
acuuuauccuauaucuuuguucu

SEQ ID NO: 862723 - RNA, 22 nt, Human
auacagaaaaguggauagccag

SEQ ID NO: 862724 - RNA, 22 nt, Human
uuuuuaguagagguggguuuca

SEQ ID NO: 862725 - RNA, 22 nt, Human
gccaggaguucagaugcauguu

SEQ ID NO: 862726 - RNA, 22 nt, Human
guacagaaauggggccccaggu

SEQ ID NO: 862727 - RNA, 22 nt, Human
uaugaaaagguggccaauguag

SEQ ID NO: 862728 - RNA, 22 nt, Human
ccaggagaugggagcaucuaaa

SEQ ID NO: 862729 - RNA, 22 nt, Human
uuucacagcuggguggcagagu

SEQ ID NO: 862730 - RNA, 22 nt, Human
uugugguuaaccgcacauuuuu

SEQ ID NO: 862731 - RNA, 22 nt, Human
auugucuuuccacugagaaguu

SEQ ID NO: 862732 - RNA, 22 nt, Human
uccaugaguuugaggaaaagag

SEQ ID NO: 862733 - RNA, 22 nt, Human
cagcuuccauaagagauggaga

SEQ ID NO: 862734 - RNA, 22 nt, Human
gauagaaagaauauagauucca

SEQ ID NO: 862735 - RNA, 22 nt, Human
auagucacugccuuccauuugu

SEQ ID NO: 862736 - RNA, 22 nt, Human
aaagccauugaacuguacuuua

SEQ ID NO: 862737 - RNA, 22 nt, Human
aguaaaaauugaggugcaaaau

SEQ ID NO: 862738 - RNA, 22 nt, Human
ugcuuuaaaauggacuguuuug

SEQ ID NO: 862739 - RNA, 22 nt, Human
gagaggggcccaagccacauag

SEQ ID NO: 862740 - RNA, 22 nt, Human
uguccuuauauuguggaagggg

SEQ ID NO: 862741 - RNA, 22 nt, Human
uuggaucagaugauaucuuugu

SEQ ID NO: 862742 - RNA, 22 nt, Human
ucauuucccuccuacaaagagg

SEQ ID NO: 862743 - RNA, 22 nt, Human
uuccucagaaaauacuguccaa

SEQ ID NO: 862744 - RNA, 21 nt, Human
uaaggccaagucuauuucugu

SEQ ID NO: 862745 - RNA, 22 nt, Human
augguuuacugaucuuuuuggu

SEQ ID NO: 862746 - RNA, 22 nt, Human
cuagcaucagaugagaagcugu

SEQ ID NO: 862747 - RNA, 22 nt, Human
ucaggagagaaagaauacaauu

SEQ ID NO: 862748 - RNA, 22 nt, Human
uuuccagguauuaauacuguau

SEQ ID NO: 862749 - RNA, 22 nt, Human
aggauuuaucaggaacucucuu

SEQ ID NO: 862750 - RNA, 22 nt, Human
cagugucuccagaugcuccaau

SEQ ID NO: 862751 - RNA, 22 nt, Human
auucacaaaaugauauagauac

SEQ ID NO: 862752 - RNA, 22 nt, Human
aagacuuucaaaccuauguuug

SEQ ID NO: 862753 - RNA, 22 nt, Human
ccuccuuuccuguuuuccugag

SEQ ID NO: 862754 - RNA, 20 nt, Human
aucaggauucuugcuuuguu

SEQ ID NO: 862755 - RNA, 22 nt, Human
aucaggauuauuaaaucuggau

SEQ ID NO: 862756 - RNA, 22 nt, Human
guggcaggagacuggaagaugg

SEQ ID NO: 862757 - RNA, 22 nt, Human
agucuugcucuugcaucugcuu

SEQ ID NO: 862758 - RNA, 22 nt, Human
gcagagcuucuguccuucagga

SEQ ID NO: 862759 - RNA, 22 nt, Human
aaagauuugaguucugcuuaua

SEQ ID NO: 862760 - RNA, 22 nt, Human
uccaggagggggagccgugccg

SEQ ID NO: 862761 - RNA, 22 nt, Human
caaaucuauauguugauauucu

SEQ ID NO: 862762 - RNA, 22 nt, Human
cauuucaaaagaauugccagaa

SEQ ID NO: 862763 - RNA, 22 nt, Human
aaggcagcaugaaucccuguac

SEQ ID NO: 862764 - RNA, 22 nt, Human
uggagagguugaauaacuuguc

SEQ ID NO: 862765 - RNA, 22 nt, Human
uucucugaucuugcuagacuga

SEQ ID NO: 862766 - RNA, 22 nt, Human
cucaggauagauuguccucuca

SEQ ID NO: 862767 - RNA, 22 nt, Human
aaaauugagagucuugugcaag

SEQ ID NO: 862768 - RNA, 22 nt, Human
gaggagagagggacugucugca

SEQ ID NO: 862769 - RNA, 22 nt, Human
cuggaggcacccuuagagaggc

SEQ ID NO: 862770 - RNA, 22 nt, Human
ggcagcuguaagaugagugaau

SEQ ID NO: 862771 - RNA, 21 nt, Human
gccaggaguagauuacauuua

SEQ ID NO: 862772 - RNA, 22 nt, Human
agaggccggccgagcccauggg

SEQ ID NO: 862773 - RNA, 22 nt, Human
uccaggagugcugguuagagua

SEQ ID NO: 862774 - RNA, 22 nt, Human
acaugcuuugauguauuuugca

SEQ ID NO: 862775 - RNA, 22 nt, Human
aggagcagaauuuaaugugcag

SEQ ID NO: 862776 - RNA, 21 nt, Human
cuacagaagcucuccuaucca

SEQ ID NO: 862777 - RNA, 22 nt, Human
gaauuacaugacccugaguaga

SEQ ID NO: 862778 - RNA, 22 nt, Human
gauuuacagcuauacccaaugg

SEQ ID NO: 862779 - RNA, 22 nt, Human
uauuugcaacauaaaacucuga

SEQ ID NO: 862780 - RNA, 22 nt, Human
uugaacauuggcaauuucauau

SEQ ID NO: 862781 - RNA, 22 nt, Human
ugaggcagggaguuuaauuguc

SEQ ID NO: 862782 - RNA, 22 nt, Human
uggcagcugguacagugggucu

SEQ ID NO: 862783 - RNA, 22 nt, Human
gcuucccagcagaggaaagacu

SEQ ID NO: 862784 - RNA, 22 nt, Human
ucugggaacagccuggcugugu

SEQ ID NO: 862785 - RNA, 22 nt, Human
aggaaaggccuuugcauuuggu

SEQ ID NO: 862786 - RNA, 22 nt, Human
acuugcauuauauuuaucacaa

SEQ ID NO: 862787 - RNA, 22 nt, Human
gcugugcuugggaagaaucucu

SEQ ID NO: 862788 - RNA, 20 nt, Human
agcaagaguaaggacagcga

SEQ ID NO: 862789 - RNA, 23 nt, Human
cccagggacacgaugacaccucc

SEQ ID NO: 862790 - RNA, 22 nt, Human
ccuggaucuuucugacugacaa

SEQ ID NO: 862791 - RNA, 22 nt, Human
uucuacaugguugcucagaggg

SEQ ID NO: 862792 - RNA, 22 nt, Human
uucucuuugacauuauucaggu

SEQ ID NO: 862793 - RNA, 22 nt, Human
caaauagugucacauugugagg

SEQ ID NO: 862794 - RNA, 22 nt, Human
gauaucauaucagacaaccucu

SEQ ID NO: 862795 - RNA, 22 nt, Human
aggcagacaaggucccuggucu

SEQ ID NO: 862796 - RNA, 22 nt, Human
uuucauggcuaggacuagagug

SEQ ID NO: 862797 - RNA, 22 nt, Human
aauuuuaagcauaugacugguu

SEQ ID NO: 862798 - RNA, 22 nt, Human
agaggcaguauacaauccgagc

SEQ ID NO: 862799 - RNA, 22 nt, Human
auguuuccauuuucuuguauca

SEQ ID NO: 862800 - RNA, 22 nt, Human
uaauuucaaguuuagggcucua

SEQ ID NO: 862801 - RNA, 23 nt, Human
uucauuugucuacuucacuuguu

SEQ ID NO: 862802 - RNA, 22 nt, Human
ucaggagacauucuuaaaguag

SEQ ID NO: 862803 - RNA, 22 nt, Human
gcugcugugccuggcguccugu

SEQ ID NO: 862804 - RNA, 22 nt, Human
cagucuuuguucccauuacuga

SEQ ID NO: 862805 - RNA, 22 nt, Human
caggcagcugggucaccguccc

SEQ ID NO: 862806 - RNA, 22 nt, Human
aagugggaauagaaaugaaggu

SEQ ID NO: 862807 - RNA, 22 nt, Human
aaaggccaugguuggaguguuu

SEQ ID NO: 862808 - RNA, 22 nt, Human
uccaaaaaacguuugaauaguu

SEQ ID NO: 862809 - RNA, 22 nt, Human
cagaucuagagcuuuuccaucu

SEQ ID NO: 862810 - RNA, 22 nt, Human
cauuucaaguaacagauugcuu

SEQ ID NO: 862811 - RNA, 22 nt, Human
uaaggccaaacuauuauaguuc

SEQ ID NO: 862812 - RNA, 22 nt, Human
cuagggaguggcagagcuggga

SEQ ID NO: 862813 - RNA, 22 nt, Human
agagggaucacccuguuucugg

SEQ ID NO: 862814 - RNA, 22 nt, Human
ucaaguuucucucagauuaugg

SEQ ID NO: 862815 - RNA, 22 nt, Human
gaggcagcugaagcuucaaaga

SEQ ID NO: 862816 - RNA, 22 nt, Human
caugcuuaugauuugcuaagcc

SEQ ID NO: 862817 - RNA, 23 nt, Human
cagaaaacccagagcucaguccc

SEQ ID NO: 862818 - RNA, 22 nt, Human
ucucacuuuguugcccagacuu

SEQ ID NO: 862819 - RNA, 22 nt, Human
uuauagaacagccuccucuaga

SEQ ID NO: 862820 - RNA, 22 nt, Human
acaaugaacacacaaggaauuc

SEQ ID NO: 862821 - RNA, 22 nt, Human
caucagaaggccagaggguagc

SEQ ID NO: 862822 - RNA, 19 nt, Human
caaggccaccauuucuccg

SEQ ID NO: 862823 - RNA, 22 nt, Human
uucauacuguguuuccaaguuu

SEQ ID NO: 862824 - RNA, 22 nt, Human
aauuuccagaucagaugacuca

SEQ ID NO: 862825 - RNA, 22 nt, Human
aaaauuauggaguaucccaaag

SEQ ID NO: 862826 - RNA, 22 nt, Human
caaauacuggguaaguuaauuu

SEQ ID NO: 862827 - RNA, 22 nt, Human
uggcagcagacaaaaggccauu

SEQ ID NO: 862828 - RNA, 22 nt, Human
gauuucaaggaguuuucacagu

SEQ ID NO: 862829 - RNA, 22 nt, Human
uccuggauaucaaacaaacauu

SEQ ID NO: 862830 - RNA, 22 nt, Human
uccaggagaaaacugacggugg

SEQ ID NO: 862831 - RNA, 22 nt, Human
ugccaggagucaggccaggcag

SEQ ID NO: 862832 - RNA, 22 nt, Human
gaaugaaagauuugcauucuau

SEQ ID NO: 862833 - RNA, 22 nt, Human
gcccaggaguuugcauuuuaac

SEQ ID NO: 862834 - RNA, 22 nt, Human
gcccaggauaaugcugucccug

SEQ ID NO: 862835 - RNA, 22 nt, Human
gaccauuugcuaguaaauugca

SEQ ID NO: 862836 - RNA, 22 nt, Human
ucuccucuauuucuguauguau

SEQ ID NO: 862837 - RNA, 22 nt, Human
auuaggcauucugaaugagguc

SEQ ID NO: 862838 - RNA, 22 nt, Human
ucagugugaggucuuccacccg

SEQ ID NO: 862839 - RNA, 22 nt, Human
aucagcaucuuuaacaauuacc

SEQ ID NO: 862840 - RNA, 22 nt, Human
aaguccuuuaauaucacauagu

SEQ ID NO: 862841 - RNA, 22 nt, Human
gagagcaggaggcagcgggacg

SEQ ID NO: 862842 - RNA, 22 nt, Human
ucucauugguauauacaugugu

SEQ ID NO: 862843 - RNA, 22 nt, Human
aauuaaaugacaggggaagaug

SEQ ID NO: 862844 - RNA, 22 nt, Human
ucuucauuccguagauauuuau

SEQ ID NO: 862845 - RNA, 22 nt, Human
uucagaaaggauaauuggaagg

SEQ ID NO: 862846 - RNA, 22 nt, Human
ucauuucucccggccaaaaacu

SEQ ID NO: 862847 - RNA, 22 nt, Human
ccucugcucugguccaugugcu

SEQ ID NO: 862848 - RNA, 22 nt, Human
acaggagacccugcugguucug

SEQ ID NO: 862849 - RNA, 22 nt, Human
uaaagccaauauaccuagcaua

SEQ ID NO: 862850 - RNA, 22 nt, Human
cccuuagcucaauuucuugccc

SEQ ID NO: 862851 - RNA, 22 nt, Human
gcagcugcaauaggcaucaagc

SEQ ID NO: 862852 - RNA, 22 nt, Human
auucaaguggcugcuauguuaa

SEQ ID NO: 862853 - RNA, 22 nt, Human
ugagauguaagguaugcuuacu

SEQ ID NO: 862854 - RNA, 23 nt, Human
ucaggauauugugugccaaggug

SEQ ID NO: 862855 - RNA, 22 nt, Human
uuuaaagaaauuccucaucuuu

SEQ ID NO: 862856 - RNA, 22 nt, Human
guuccaaaguuagaguguauug

SEQ ID NO: 862857 - RNA, 22 nt, Human
uccaugagagguaacuuuacaa

SEQ ID NO: 862858 - RNA, 19 nt, Human
ucucuacacuacauuucua

SEQ ID NO: 862859 - RNA, 22 nt, Human
uucaugugaauauauuugucuu

SEQ ID NO: 862860 - RNA, 22 nt, Human
ucccaggacaugggcucugcuc

SEQ ID NO: 862861 - RNA, 22 nt, Human
aucaggaugacaacugcugggu

SEQ ID NO: 862862 - RNA, 22 nt, Human
acccaggaggcaagguugcagu

SEQ ID NO: 862863 - RNA, 22 nt, Human
gaggggaagacuucuggacagu

SEQ ID NO: 862864 - RNA, 22 nt, Human
cuuaacagagagaaguguugcu

SEQ ID NO: 862865 - RNA, 22 nt, Human
ucuacuguagugaugcugcagu

SEQ ID NO: 862866 - RNA, 22 nt, Human
ggcauuuaguuuucauauucug

SEQ ID NO: 862867 - RNA, 22 nt, Human
auuccaaagacagaagcagcug

SEQ ID NO: 862868 - RNA, 20 nt, Human
agaagucagcucagaaguga

SEQ ID NO: 862869 - RNA, 22 nt, Human
aguucacagccauguucaugug

SEQ ID NO: 862870 - RNA, 22 nt, Human
ucucuucuaauuaggguccaug

SEQ ID NO: 862871 - RNA, 22 nt, Human
ucaggaugguccuuuaugagaa

SEQ ID NO: 862872 - RNA, 17 nt, Human
gcccaggaaggacggcc

SEQ ID NO: 862873 - RNA, 23 nt, Human
uccaggagaauuccagggcccgg

SEQ ID NO: 862874 - RNA, 22 nt, Human
ccaggagacaaagaugacugcu

SEQ ID NO: 862875 - RNA, 22 nt, Human
cugcuguguggugaaacucagu

SEQ ID NO: 862876 - RNA, 22 nt, Human
gaggcagcugaaggagugacag

SEQ ID NO: 862877 - RNA, 22 nt, Human
acaauucugaugguuucccagu

SEQ ID NO: 862878 - RNA, 22 nt, Human
auaaagauuucuuuuucucuac

SEQ ID NO: 862879 - RNA, 22 nt, Human
auuccaaacagugcugcagacu

SEQ ID NO: 862880 - RNA, 18 nt, Human
aagaggaggagcagguug

SEQ ID NO: 862881 - RNA, 22 nt, Human rhinovirus 89
cauuuguuccugauugccaugu

SEQ ID NO: 862882 - RNA, 23 nt, Human
cagggaggagauacuguguaucu

SEQ ID NO: 862883 - RNA, 22 nt, Human
ugaggcagggagaguggauaug

SEQ ID NO: 862884 - RNA, 22 nt, Human
auacagaaguuuuccacuuauu

SEQ ID NO: 862885 - RNA, 22 nt, Human
ucuucucucauguaggagggaa

SEQ ID NO: 862886 - RNA, 22 nt, Human
uggaguuccuuugaaaggcucu

SEQ ID NO: 862887 - RNA, 22 nt, Human
cagggagggacaauugucaccu

SEQ ID NO: 862888 - RNA, 22 nt, Human
gcagcugagcgugaggaagagu

SEQ ID NO: 862889 - RNA, 22 nt, Human
aauacauauggaauuccauguu

SEQ ID NO: 862890 - RNA, 21 nt, Human
cucuugugucagagccagagg

SEQ ID NO: 862891 - RNA, 22 nt, Human
cuagcaucagaugagaagcugu

SEQ ID NO: 862892 - RNA, 22 nt, Human
gcucaggacccaggugugaccu

SEQ ID NO: 862893 - RNA, 22 nt, Human
uucucagaggagucgggagcug

SEQ ID NO: 862894 - RNA, 22 nt, Human
aaagccauugaacuguacuuua

SEQ ID NO: 862895 - RNA, 22 nt, Human
ccacagcugaccgcaggugagc

SEQ ID NO: 862896 - RNA, 22 nt, Human
agaaaugaauauguagugguua

SEQ ID NO: 862897 - RNA, 20 nt, Human
gggcaguucaaugccacucu

SEQ ID NO: 862898 - RNA, 22 nt, Human
aagagggcagcacagguggguc

SEQ ID NO: 862899 - RNA, 22 nt, Human
ugcccagggauaagccuagaga

SEQ ID NO: 862900 - RNA, 22 nt, Human
acagaauuaaugaaaauuacaa

SEQ ID NO: 862901 - RNA, 22 nt, Human
gcagagaagaugcccaggcuuc

SEQ ID NO: 862902 - RNA, 22 nt, Human
gcuucacaggcaaguuaagccu

SEQ ID NO: 862903 - RNA, 22 nt, Human
aaaggccaauaaagacaagcug

SEQ ID NO: 862904 - RNA, 19 nt, Human
agucuuucccacucgucuu

SEQ ID NO: 862905 - RNA, 23 nt, Human
uugcauagacauccucauagauu

SEQ ID NO: 862906 - RNA, 22 nt, Human
gucaggaucucccaguacauau

SEQ ID NO: 862907 - RNA, 22 nt, Human
gaggcugccccuuccucagcug

SEQ ID NO: 862908 - RNA, 22 nt, Human
uucagggagagcgggacgggug

SEQ ID NO: 862909 - RNA, 22 nt, Human
aggcagacaaggacacaguggg

SEQ ID NO: 862910 - RNA, 22 nt, Human
uucuucucggcugucagauagu

SEQ ID NO: 862911 - RNA, 22 nt, Human
uauggcuuuucauuccuaugug

SEQ ID NO: 862912 - RNA, 22 nt, Human
ggcagcaucucuggcagcagcu

SEQ ID NO: 862913 - RNA, 22 nt, Human
aucuauacuacaaauggcuggu

SEQ ID NO: 862914 - RNA, 22 nt, Human
agauaaaaugguucaaaggcua

SEQ ID NO: 862915 - RNA, 22 nt, Human
gaggggaaagugugaggcugcg

SEQ ID NO: 862916 - RNA, 22 nt, Human
aguucucaagacaauuaccugu

SEQ ID NO: 862917 - RNA, 22 nt, Human
cagagagagucaaaucuuugcu

SEQ ID NO: 862918 - RNA, 22 nt, Human
aagaggaggacgguucccagaa

SEQ ID NO: 862919 - RNA, 22 nt, Human
aaauagcagccuuuaguuaaca

SEQ ID NO: 862920 - RNA, 22 nt, Human
aaaugcauggcuguuuuaaagc

SEQ ID NO: 862921 - RNA, 20 nt, Human
acuugcugggcuuuguuacc

SEQ ID NO: 862922 - RNA, 22 nt, Human
cagcaggaggugaguagcaggu

SEQ ID NO: 862923 - RNA, 22 nt, Human
gagagaaaugugcaguuugggc

SEQ ID NO: 862924 - RNA, 22 nt, Human
aauuuccagaccccauccacag

SEQ ID NO: 862925 - RNA, 23 nt, Human
aggcccaacucugugagggcugc

SEQ ID NO: 862926 - RNA, 22 nt, Human
auuguucaaagugcuuugcaug

SEQ ID NO: 862927 - RNA, 22 nt, Human
aagccagauuucacucuuaauu

SEQ ID NO: 862928 - RNA, 17 nt, Human
ugcuuaauuuugacugg

SEQ ID NO: 862929 - RNA, 22 nt, Human
gauuuacagcuauacccaaugg

SEQ ID NO: 862930 - RNA, 22 nt, Human
ucacagacacagggagaagcau

SEQ ID NO: 862931 - RNA, 22 nt, Human
auuaggcagggcaugguggcuc

SEQ ID NO: 862932 - RNA, 22 nt, Human
auuacaguaacagcuacaaugc

SEQ ID NO: 862933 - RNA, 22 nt, Human
augcugugccuggaaagcggcu

SEQ ID NO: 862934 - RNA, 20 nt, Human
gaaguccuguuauauccuuu

SEQ ID NO: 862935 - RNA, 22 nt, Human
ccacagagacaggguccuugcu

SEQ ID NO: 862936 - RNA, 22 nt, Human
aggacagggauucaaacuccca

SEQ ID NO: 862937 - RNA, 22 nt, Human
ucuucacaggagccugccugcc

SEQ ID NO: 862938 - RNA, 22 nt, Human
augcuuuuccaggagaaauaua

SEQ ID NO: 862939 - RNA, 16 nt, Human
cuuccucuucacuggc

SEQ ID NO: 862940 - RNA, 22 nt, Human
ggccagcagucacagggucaga

SEQ ID NO: 862941 - RNA, 22 nt, Human
cccaggcagugugugcaugcgu

SEQ ID NO: 862942 - RNA, 22 nt, Human
cugagagugcucuuugauguca

SEQ ID NO: 862943 - RNA, 22 nt, Human
cugauacauaguagcaugucau

SEQ ID NO: 862944 - RNA, 22 nt, Human
gaauuucauuuguuuccuacca

SEQ ID NO: 862945 - RNA, 22 nt, Human
ggcagcuucuuaauauggagac

SEQ ID NO: 862946 - RNA, 22 nt, Human
gcugcccaggguggagccggcu

SEQ ID NO: 862947 - RNA, 22 nt, Human
aaaaucugcuuccuuuuacaga

SEQ ID NO: 862948 - RNA, 22 nt, Human
cccaggaauuggaggcugcagu

SEQ ID NO: 862949 - RNA, 22 nt, Human
caugcuuaugauuugcuaagcc

SEQ ID NO: 862950 - RNA, 22 nt, Human
ggcagggaagcuggcaucacgg

SEQ ID NO: 862951 - RNA, 22 nt, Human
uaacaagucauuuuaaauuaug

SEQ ID NO: 862952 - RNA, 22 nt, Human
auauccaagaaacaauuaauuc

SEQ ID NO: 862953 - RNA, 22 nt, Human
aggcagcuggcaaauucuagag

SEQ ID NO: 862954 - RNA, 22 nt, Human
auagaauuauggaaagcaucuu

SEQ ID NO: 862955 - RNA, 22 nt, Human
caguccuuauuccuauauuccu

SEQ ID NO: 862956 - RNA, 22 nt, Human
ucacagaaauaagauaguuauu

SEQ ID NO: 862957 - RNA, 23 nt, Human
uauggcuuacagugcuuuaggua

SEQ ID NO: 862958 - RNA, 20 nt, Human
agaaucugacccagagagac

SEQ ID NO: 862959 - RNA, 22 nt, Human
aucacaaaggucucagagcaca

SEQ ID NO: 862960 - RNA, 22 nt, Human
ugauugaacugagcuucaagau

SEQ ID NO: 862961 - RNA, 22 nt, Human
augcugugccuucucugugcca

SEQ ID NO: 862962 - RNA, 21 nt, Human
augucaaaugcuuuauuuuau

SEQ ID NO: 862963 - RNA, 22 nt, Human
auuuagccucauuuuugacaua

SEQ ID NO: 862964 - RNA, 21 nt, Human
uucuucaaagaagaaggcaca

SEQ ID NO: 862965 - RNA, 22 nt, Human
acuggcagagacccugauggcc

SEQ ID NO: 862966 - RNA, 22 nt, Human
ggcagcuuucucacccaugacc

SEQ ID NO: 862967 - RNA, 22 nt, Human
auuucccaugugaaucaauugg

SEQ ID NO: 862968 - RNA, 22 nt, Human
caguaaauuaucucaucucugu

SEQ ID NO: 862969 - RNA, 22 nt, Human
ugaggcaguauucuccauucca

SEQ ID NO: 862970 - RNA, 22 nt, Human
ugaauaaucuuggguauuaaua

SEQ ID NO: 862971 - RNA, 22 nt, Human
aaguaaauaucuguuuauagca

SEQ ID NO: 862972 - RNA, 22 nt, Human
aaguuugcauagauuaagcauu

SEQ ID NO: 862973 - RNA, 22 nt, Human
auuauauaggacuugcccuucc

SEQ ID NO: 862974 - RNA, 22 nt, Human
gaucagaaucuucauuuucagu

SEQ ID NO: 862975 - RNA, 22 nt, Human
acuuaaaaagaaucuuuucacg

SEQ ID NO: 862976 - RNA, 22 nt, Human
acagaaauugggcaaauggaag

SEQ ID NO: 862977 - RNA, 22 nt, Human
uuugcagucuggccugcuuugg

SEQ ID NO: 862978 - RNA, 22 nt, Human
uaggcagcgcuuggcugugcuu

SEQ ID NO: 862979 - RNA, 22 nt, Human
aagaaaucauaucauuucuugg

SEQ ID NO: 862980 - RNA, 22 nt, Human
guuguuuugcaggauccuuaca

SEQ ID NO: 862981 - RNA, 22 nt, Human
uagggaggcuacuucuuguagg

SEQ ID NO: 862982 - RNA, 22 nt, Human
uuuccagguauuaauacuguau

SEQ ID NO: 862983 - RNA, 22 nt, Human
uaauuucaaauuucuuagcgug

SEQ ID NO: 862984 - RNA, 22 nt, Human
uucaugugaucacagauuguaa

SEQ ID NO: 862985 - RNA, 22 nt, Human
aucauucuagcuguuguguuga

SEQ ID NO: 862986 - RNA, 22 nt, Human
cuucccagaccuuagagugcag

SEQ ID NO: 862987 - RNA, 22 nt, Human
ugaaggccagggauuugcagcc

SEQ ID NO: 862988 - RNA, 22 nt, Human
cugcuguguugccagugucacc

SEQ ID NO: 862989 - RNA, 22 nt, Human
uaagcugugggagauuggcaua

SEQ ID NO: 862990 - RNA, 22 nt, Human
ucuaaacacuaagucuugaugc

SEQ ID NO: 862991 - RNA, 21 nt, Human
ggagggcagcccagacuggcu

SEQ ID NO: 862992 - RNA, 23 nt, Human
cugcccugaucuugaucuauugu

SEQ ID NO: 862993 - RNA, 22 nt, Human
ggccagagaauaugccuuacgu

SEQ ID NO: 862994 - RNA, 22 nt, Human
gggugggacugaagucugaggg

SEQ ID NO: 862995 - RNA, 22 nt, Human
uggaaauguauuugggcaugcc

SEQ ID NO: 862996 - RNA, 22 nt, Human
aguucuuuugugaacauaugcu

SEQ ID NO: 862997 - RNA, 22 nt, Human
gaucuucucuuuaguagaaaca

SEQ ID NO: 862998 - RNA, 22 nt, Human
aaggccagacaggaccacaucu

SEQ ID NO: 862999 - RNA, 22 nt, Human
uuaagcaacacacauuaauuau

SEQ ID NO: 863000 - RNA, 22 nt, Human
auuuccauagagcgucucacag

SEQ ID NO: 863001 - RNA, 22 nt, Human
cauuuauucauuugcuagggcu

SEQ ID NO: 863002 - RNA, 20 nt, Human
gagauggacagaugaagggg

SEQ ID NO: 863003 - RNA, 22 nt, Human
uaaugucagcauaguuuauuuu

SEQ ID NO: 863004 - RNA, 23 nt, Human
acaacuuuacagauacauuuugu

SEQ ID NO: 863005 - RNA, 22 nt, Human
uggcagcugauuagauggugcc

SEQ ID NO: 863006 - RNA, 22 nt, Human
aguauaauuagauaucaaaagu

SEQ ID NO: 863007 - RNA, 22 nt, Human
agcuaccuggcuuaucacuguc

SEQ ID NO: 863008 - RNA, 22 nt, Human
augaacaaguauuugcaugagc

SEQ ID NO: 863009 - RNA, 22 nt, Human
cauuuucaugaguuucuguuca

SEQ ID NO: 863010 - RNA, 22 nt, Human
ucagagagccucaggcacugcc

SEQ ID NO: 863011 - RNA, 20 nt, Human
cagaggcaaggagacuugga

SEQ ID NO: 863012 - RNA, 22 nt, Human
uaguacaguuuaaauauuaaua

SEQ ID NO: 863013 - RNA, 22 nt, Human
aggggagguggcagaaaugugc

SEQ ID NO: 863014 - RNA, 22 nt, Human
auuaggcauucugaaugagguc

SEQ ID NO: 863015 - RNA, 22 nt, Human
ggaaaugacuuggugcuucguu

SEQ ID NO: 863016 - RNA, 19 nt, Human
uauuucaaagugccgucua

SEQ ID NO: 863017 - RNA, 22 nt, Human
agauuuacuggagucuuuggug

SEQ ID NO: 863018 - RNA, 22 nt, Human
aucuccaggcauuucaagagac

SEQ ID NO: 863019 - RNA, 22 nt, Human
cagaaauguacugacaugcagu

SEQ ID NO: 863020 - RNA, 22 nt, Human
uauuuguugaguuguuaugucu

SEQ ID NO: 863021 - RNA, 22 nt, Human
ggauuugaauuguugaaaugau

SEQ ID NO: 863022 - RNA, 22 nt, Human
cccaggagagggaaccaaaugu

SEQ ID NO: 863023 - RNA, 22 nt, Human
uuacacaacaucuguauuauua

SEQ ID NO: 863024 - RNA, 22 nt, Human
uugaauaguguuuucaguauac

SEQ ID NO: 863025 - RNA, 22 nt, Human
uucauagaucucaauuuugagg

SEQ ID NO: 863026 - RNA, 22 nt, Human
ucagggugaaccaggcaggaau

SEQ ID NO: 863027 - RNA, 22 nt, Human
gcaggagagccagcaggcuucc

SEQ ID NO: 863028 - RNA, 22 nt, Human
agaggccaggcugcagagggau

SEQ ID NO: 863029 - RNA, 22 nt, Human
uugaauaauaugcuucguucuc

SEQ ID NO: 863030 - RNA, 22 nt, Human
cccaggaaccuaccagcucgag

SEQ ID NO: 863031 - RNA, 22 nt, Human
uuauuucauguaaaauuuaugu

SEQ ID NO: 863032 - RNA, 22 nt, Human
ucaggagauguaaccuuagcug

SEQ ID NO: 863033 - RNA, 22 nt, Human
aagcaccugcaguugacaaaaa

SEQ ID NO: 863034 - RNA, 22 nt, Human
caacauuucaaggucuuuagga

SEQ ID NO: 863035 - RNA, 22 nt, Human
ucaguaaaugagcaaaaauuuc

SEQ ID NO: 863036 - RNA, 22 nt, Human
caggaaaggugugucaugaugg

SEQ ID NO: 863037 - RNA, 22 nt, Human
uucauugucucuguuugccuuc

SEQ ID NO: 863038 - RNA, 18 nt, Human
uggcagcuagguaaagaa

SEQ ID NO: 863039 - RNA, 22 nt, Human
uaaguccuggcugguuugaagc

SEQ ID NO: 863040 - RNA, 19 nt, Human
auacagauguauccaugau

SEQ ID NO: 863041 - RNA, 22 nt, Human
gaggccagaguuccccgaguca

SEQ ID NO: 863042 - RNA, 22 nt, Human
gucauucuuaacaacucaguag

SEQ ID NO: 863043 - RNA, 22 nt, Human
ugaggcaguauuuuagugacuu

SEQ ID NO: 863044 - RNA, 21 nt, Human
ugaaaugagaaugcugagcac

SEQ ID NO: 863045 - RNA, 22 nt, Human
gaggcugauucggggaacagca

SEQ ID NO: 863046 - RNA, 22 nt, Human
gauuucaaggauguuagaggug

SEQ ID NO: 863047 - RNA, 22 nt, Human
caugcuguguguuuuagcucca

SEQ ID NO: 863048 - RNA, 20 nt, Human
cuucuucagccuaugcuuca

SEQ ID NO: 863049 - RNA, 22 nt, Human
ucuccucuauuucuguauguau

SEQ ID NO: 863050 - RNA, 22 nt, Human
uugcugugaaaccaugggaagu

SEQ ID NO: 863051 - RNA, 22 nt, Human
gcugcugugaauuuuuuaaaug

SEQ ID NO: 863052 - RNA, 22 nt, Human
ucauuuaauagcuuuugucuuu

SEQ ID NO: 863053 - RNA, 22 nt, Human
ggaggagguggguuaaguugua

SEQ ID NO: 863054 - RNA, 22 nt, Human
acccaggagacggaggugcagu

SEQ ID NO: 863055 - RNA, 22 nt, Human
aggcagcugaccacaguaugau

SEQ ID NO: 863056 - RNA, 22 nt, Human
uucuucagucccacuagccaca

SEQ ID NO: 863057 - RNA, 22 nt, Human
ucagugugaguaccaugcucag

SEQ ID NO: 863058 - RNA, 22 nt, Human
agguacaaaagaguauaugaga

SEQ ID NO: 863059 - RNA, 22 nt, Human
ggcagaagauaggacagggaau

SEQ ID NO: 863060 - RNA, 22 nt, Human
gagagggauacugaguuuuggu

SEQ ID NO: 863061 - RNA, 22 nt, Human
cacaaauggccguguucaaaga

SEQ ID NO: 863062 - RNA, 21 nt, Human
aggaggggucuuucccacuga

SEQ ID NO: 863063 - RNA, 22 nt, Human
cugcugugauugggagaaaccg

SEQ ID NO: 863064 - RNA, 22 nt, Human
aaagacuuggcuuaugauuugc

SEQ ID NO: 863065 - RNA, 22 nt, Human
guuaggcaaauaacuguggagc

SEQ ID NO: 863066 - RNA, 22 nt, Human
aucaguuaguuacugcuaagau

SEQ ID NO: 863067 - RNA, 19 nt, Human
aguggcagaucuggaagua

SEQ ID NO: 863068 - RNA, 22 nt, Human
cagaggauucccuagugaccug

SEQ ID NO: 863069 - RNA, 22 nt, Human
caguugcuggaugugcagcucu

SEQ ID NO: 863070 - RNA, 22 nt, Human
uucuccucuguuggccuucccu

SEQ ID NO: 863071 - RNA, 22 nt, Human
aaugcauauguaggcaagcagu

SEQ ID NO: 863072 - RNA, 22 nt, Human
gcagagcuccccaagacaccaa

SEQ ID NO: 863073 - RNA, 22 nt, Human
cugccuccugccgugcagcuuc

SEQ ID NO: 863074 - RNA, 22 nt, Human
cugccaucugagccaaaagugc

SEQ ID NO: 863075 - RNA, 22 nt, Human
agaaggggagaagcuaccagga

SEQ ID NO: 863076 - RNA, 22 nt, Human
aggccagcucuacccuuggacu

SEQ ID NO: 863077 - RNA, 22 nt, Human
auuaaauuuucacuaggcuccc

SEQ ID NO: 863078 - RNA, 22 nt, Human
auguuuuugagauacaaacaga

SEQ ID NO: 863079 - RNA, 22 nt, Human
uucucugaaggccaugcucacu

SEQ ID NO: 863080 - RNA, 22 nt, Human
aaguugagaugucauaggagac

SEQ ID NO: 863081 - RNA, 22 nt, Human
auuguuaugaaaauaagauguu

SEQ ID NO: 863082 - RNA, 22 nt, Human
cuauuucaaggcccagauauga

SEQ ID NO: 863083 - RNA, 22 nt, Human
cccaggaggcagagcuugcagu

SEQ ID NO: 863084 - RNA, 22 nt, Human
gacccaggagagaggguugcau

SEQ ID NO: 863085 - RNA, 22 nt, Human
caugguuuugagccuauuaugc

SEQ ID NO: 863086 - RNA, 22 nt, Human
gauuucaaaaguagauccauca

SEQ ID NO: 863087 - RNA, 22 nt, Human
auucuucauaccuacugagguu

SEQ ID NO: 863088 - RNA, 22 nt, Human
uggcuuuacugucauucuuaug

SEQ ID NO: 863089 - RNA, 22 nt, Human
gucuccugagccuugacugcaa

SEQ ID NO: 863090 - RNA, 22 nt, Human
gauuuccauuuucaacuccugc

SEQ ID NO: 863091 - RNA, 22 nt, Human
cccaggaggguggccucugccc

SEQ ID NO: 863092 - RNA, 22 nt, Human
uugagaagaauguguugaguuu

SEQ ID NO: 863093 - RNA, 19 nt, Human
uccuucagucagaucuggg

SEQ ID NO: 863094 - RNA, 22 nt, Human
agauggagaaugacaauuaagg

SEQ ID NO: 863095 - RNA, 22 nt, Human
ugcaggaaauuccaggguggcc

SEQ ID NO: 863096 - RNA, 22 nt, Human
uucuuacagaguuuacagagcc

SEQ ID NO: 863097 - RNA, 22 nt, Human
aacugcuguggccuaguacuua

SEQ ID NO: 863098 - RNA, 22 nt, Human
gaaagccagagagaaagggcuc

SEQ ID NO: 863099 - RNA, 22 nt, Human
cccagaaggucgaggcugcagu

SEQ ID NO: 863100 - RNA, 22 nt, Human
cccaggaggucgaagcugcagu

SEQ ID NO: 863101 - RNA, 22 nt, Human
gaauauauuggugaaaauaguu

SEQ ID NO: 863102 - RNA, 22 nt, Human
ucagccagaggcuucuugguuu

SEQ ID NO: 863103 - RNA, 22 nt, Human
uucugggagagaaagggccuug

SEQ ID NO: 863104 - RNA, 22 nt, Human
guuaggcauuugccuuaauuuu

SEQ ID NO: 863105 - RNA, 17 nt, Human
uuucuccuuccaucuca

SEQ ID NO: 863106 - RNA, 22 nt, Human
aaaguucaugguguuauagaaa

SEQ ID NO: 863107 - RNA, 22 nt, Human
agaggccggccgagcccauggg

SEQ ID NO: 863108 - RNA, 23 nt, Human
cuccccaguguccucaugcaucu

SEQ ID NO: 863109 - RNA, 22 nt, Human
ucucauugguauauacaugugu

SEQ ID NO: 863110 - RNA, 22 nt, Human
ucagccaguuuguuuauuccgg

SEQ ID NO: 863111 - RNA, 22 nt, Human
ucauuuaauaauuuuugaguag

SEQ ID NO: 863112 - RNA, 22 nt, Human
uucuaacaaguggcuuguuagu

SEQ ID NO: 863113 - RNA, 22 nt, Human
uaaggccagcaugaaugcagca

SEQ ID NO: 863114 - RNA, 22 nt, Human
uugcaaaggggaauaaagcaau

SEQ ID NO: 863115 - RNA, 22 nt, Human
gauggcaggcaggugaguagag

SEQ ID NO: 863116 - RNA, 22 nt, Human
gucaacuuuaagaugaucuuuu

SEQ ID NO: 863117 - RNA, 19 nt, Human
uaucuguuuccugcuuguc

SEQ ID NO: 863118 - RNA, 22 nt, Human
uggcauuuucuccuuugaguuu

SEQ ID NO: 863119 - RNA, 22 nt, Human
ucacuguugaccuggaaguggg

SEQ ID NO: 863120 - RNA, 22 nt, Human
ccuugcauauauuauaucuuug

SEQ ID NO: 863121 - RNA, 22 nt, Human
cacaauacuauuuuuaggucuu

SEQ ID NO: 863122 - RNA, 22 nt, Human
auggagacgcaagggaccuagg

SEQ ID NO: 863123 - RNA, 22 nt, Human
aacauacauauuucagugucca

SEQ ID NO: 863124 - RNA, 22 nt, Human
uagcagaagaacaacaugaucu

SEQ ID NO: 863125 - RNA, 22 nt, Human
auacagaaaaugaugcagaguu

SEQ ID NO: 863126 - RNA, 22 nt, Human
caggcagcagccacucugguau

SEQ ID NO: 863127 - RNA, 21 nt, Human
gacaaagugaagcaggcagga

SEQ ID NO: 863128 - RNA, 22 nt, Human
uuuggacuuagccugcagaauu

SEQ ID NO: 863129 - RNA, 22 nt, Human
ggaggacaggggcugcagcaca

SEQ ID NO: 863130 - RNA, 22 nt, Human
ccuggagaccagaggauacuuc

SEQ ID NO: 863131 - RNA, 22 nt, Human
ugguaauuuacgcauuucugua

SEQ ID NO: 863132 - RNA, 22 nt, Human
ucauuucuccgaccugcugucc

SEQ ID NO: 863133 - RNA, 22 nt, Human
cucuucuuauggccguggcuga

SEQ ID NO: 863134 - RNA, 22 nt, Human
gcucaggaaauaguuuaguguu

SEQ ID NO: 863135 - RNA, 22 nt, Human
agcccagggaaccaggaagugg

SEQ ID NO: 863136 - RNA, 22 nt, Human
uucuucaaauagcagggaguca

SEQ ID NO: 863137 - RNA, 22 nt, Human
uacucagagucauugcccuucu

SEQ ID NO: 863138 - RNA, 22 nt, Human
guagaaauguaaccaggagaua

SEQ ID NO: 863139 - RNA, 22 nt, Human
ccaauacacuuuauagaagaaa

SEQ ID NO: 863140 - RNA, 22 nt, Human
uggaaggaagccaaggaagguu

SEQ ID NO: 863141 - RNA, 22 nt, Human
uuggcagugucugcaaaaugga

SEQ ID NO: 863142 - RNA, 22 nt, Human
uauugaugcuuggauugggcca

SEQ ID NO: 863143 - RNA, 17 nt, Human
acagagcacaucaagau

SEQ ID NO: 863144 - RNA, 22 nt, Human
auuucauacuaaggcucaaaaa

SEQ ID NO: 863145 - RNA, 22 nt, Human
acaauguguuuuuauacauuug

SEQ ID NO: 863146 - RNA, 22 nt, Human
agaggggacagccaccugcccg

SEQ ID NO: 863147 - RNA, 22 nt, Human
uaugauuuguagacauuugauu

SEQ ID NO: 863148 - RNA, 22 nt, Human
aacaaaugaccugauuucuucc

SEQ ID NO: 863149 - RNA, 22 nt, Human
cauggcugcgagaagagugggu

SEQ ID NO: 863150 - RNA, 22 nt, Human
caguccuuggcaaguucucagu

SEQ ID NO: 863151 - RNA, 22 nt, Human
caaguccaucagauaagcaaga

SEQ ID NO: 863152 - RNA, 21 nt, Human
aggauuuacuauuaacugugu

SEQ ID NO: 863153 - RNA, 22 nt, Human
guguguuucagaagccaggugu

SEQ ID NO: 863154 - RNA, 22 nt, Human
augcuguguuuuaaauggaaau

SEQ ID NO: 863155 - RNA, 22 nt, Human
agaauaauacugaaaugcugaa

SEQ ID NO: 863156 - RNA, 22 nt, Human
caggauggagggagggcuguua

SEQ ID NO: 863157 - RNA, 22 nt, Human
gguacaauucugggguaugcuc

SEQ ID NO: 863158 - RNA, 22 nt, Human
uccauuuucuugcucuagguaa

SEQ ID NO: 863159 - RNA, 22 nt, Human
aguguguccagaaaucuguauu

SEQ ID NO: 863160 - RNA, 22 nt, Human
cagcuggcaaguggagcagggu

SEQ ID NO: 863161 - RNA, 22 nt, Human
ugaggggaaggcaugauaaaua

SEQ ID NO: 863162 - RNA, 22 nt, Human
cccuggagguggagguugcagg

SEQ ID NO: 863163 - RNA, 22 nt, Human
uugcaauagccuuauuuccaaa

SEQ ID NO: 863164 - RNA, 22 nt, Human
uucucagagcacugcugacaaa

SEQ ID NO: 863165 - RNA, 22 nt, Human
ucagucucuggggcuucuguuu

SEQ ID NO: 863166 - RNA, 22 nt, Human
ugaguucuaguggcugcagauu

SEQ ID NO: 863167 - RNA, 22 nt, Human
uugcugaauugaauccuuuggu

SEQ ID NO: 863168 - RNA, 22 nt, Human
cuugauguauaaguugauaugu

SEQ ID NO: 863169 - RNA, 22 nt, Human
ggcagcuguaagaugagugaau

SEQ ID NO: 863170 - RNA, 22 nt, Human
cgcagggauuucaaggggccuu

SEQ ID NO: 863171 - RNA, 22 nt, Human
gucuucuuuaaccuacuaaagc

SEQ ID NO: 863172 - RNA, 22 nt, Human
ggagcuguuggcagcuaucuug

SEQ ID NO: 863173 - RNA, 22 nt, Human
cagugucuccagaugcuccaau

SEQ ID NO: 863174 - RNA, 22 nt, Human
ucagagagugcaaaauauagcu

SEQ ID NO: 863175 - RNA, 22 nt, Human
auacacauguguaugugcaugc

SEQ ID NO: 863176 - RNA, 22 nt, Human
ggacagaggguugacagaguau

SEQ ID NO: 863177 - RNA, 22 nt, Human
cauuuacacuucuaaccacaag

SEQ ID NO: 863178 - RNA, 22 nt, Human
gucuaacaagcauuaggaaccc

SEQ ID NO: 863179 - RNA, 22 nt, Human
ggcagcucugcuccacaugagu

SEQ ID NO: 863180 - RNA, 20 nt, Human
cuguaucagguuacaaagua

SEQ ID NO: 863181 - RNA, 22 nt, Human
cauagaaaagaguagguaaugu

SEQ ID NO: 863182 - RNA, 22 nt, Human
ugaggcaggaaguuauauaaug

SEQ ID NO: 863183 - RNA, 22 nt, Human
uuucacuagaacguucuuguuu

SEQ ID NO: 863184 - RNA, 22 nt, Human
uucccaauauucugcuuuuaug

SEQ ID NO: 863185 - RNA, 22 nt, Human
uccuggauaucaaacaaacauu

SEQ ID NO: 863186 - RNA, 22 nt, Human
acaggagaauuaucuggaacaa

SEQ ID NO: 863187 - RNA, 22 nt, Human
augugcuuuauuaaguaaaaau

SEQ ID NO: 863188 - RNA, 22 nt, Human
uuccucagaaaauacuguccaa

SEQ ID NO: 863189 - RNA, 22 nt, Human
uggauuuaccacagggccacag

SEQ ID NO: 863190 - RNA, 20 nt, Human
ggaggguggaagaaagcaag

SEQ ID NO: 863191 - RNA, 22 nt, Human
ucuuugcagaauuuaacuuugc

SEQ ID NO: 863192 - RNA, 22 nt, Human
aaggcagcagugcacgacugau

SEQ ID NO: 863193 - RNA, 22 nt, Human
ucagccaguuugauucuauuug

SEQ ID NO: 863194 - RNA, 22 nt, Human
uuucuucauagaccuugucuug

SEQ ID NO: 863195 - RNA, 22 nt, Human
aaggaaccuggaguagagggag

SEQ ID NO: 863196 - RNA, 22 nt, Human
cuugcacacauguacaugugua

SEQ ID NO: 863197 - RNA, 22 nt, Human
gaguccuuccagcaggcauuua

SEQ ID NO: 863198 - RNA, 22 nt, Human
uuuaauauucugcauucuccuu

SEQ ID NO: 863199 - RNA, 22 nt, Human
auaauaaaccaggaugggucug

SEQ ID NO: 863200 - RNA, 21 nt, Human
aacugguucaauucaacuaga

SEQ ID NO: 863201 - RNA, 22 nt, Human
agaggccaugcuagaggccugg

SEQ ID NO: 863202 - RNA, 22 nt, Human
cauucuuacacaauauuuuaau

SEQ ID NO: 863203 - RNA, 22 nt, Human
uaaagcacauaucuuacaauaa

SEQ ID NO: 863204 - RNA, 22 nt, Human
augaaacaugcuuuguggauga

SEQ ID NO: 863205 - RNA, 22 nt, Human
caggaaagggaugggcugccac

SEQ ID NO: 863206 - RNA, 22 nt, Human
gcagagcuucuguccuucagga

SEQ ID NO: 863207 - RNA, 22 nt, Human
cagucaccauagaauaaaacau

SEQ ID NO: 863208 - RNA, 22 nt, Human
uaaacauggauucugaucacag

SEQ ID NO: 863209 - RNA, 22 nt, Human
agucucugggcaugguugugac

SEQ ID NO: 863210 - RNA, 22 nt, Human
ucagccucucugaguccagacc

SEQ ID NO: 863211 - RNA, 19 nt, Human
cccaggagucuggcugguu

SEQ ID NO: 863212 - RNA, 22 nt, Human
uucaggauucuuucagacuggg

SEQ ID NO: 863213 - RNA, 22 nt, Human
aaguccuuucucauggaggaau

SEQ ID NO: 863214 - RNA, 22 nt, Human
ccucaggggucacugugaggag

SEQ ID NO: 863215 - RNA, 22 nt, Human
gaauuucaagcagugcaauguu

SEQ ID NO: 863216 - RNA, 22 nt, Human
agcugcccugguaagauugaug

SEQ ID NO: 863217 - RNA, 22 nt, Human
aucaggaucacagaaacuuuua

SEQ ID NO: 863218 - RNA, 22 nt, Human
ugaaaagacugcaagagagcau

SEQ ID NO: 863219 - RNA, 22 nt, Human
cagcugacccgugggaggcggg

SEQ ID NO: 863220 - RNA, 22 nt, Human
cucaacagcucugccauacucc

SEQ ID NO: 863221 - RNA, 19 nt, Human
aaucagaaauaucgaggcc

SEQ ID NO: 863222 - RNA, 22 nt, Human
uuuugugagcccauaaaugcca

SEQ ID NO: 863223 - RNA, 22 nt, Human
auaucaguaucuauguauuugu

SEQ ID NO: 863224 - RNA, 22 nt, Human
uuccuuagaguuuccagaaagc

SEQ ID NO: 863225 - RNA, 22 nt, Human
gggaagcaggugcagcucgccu

SEQ ID NO: 863226 - RNA, 22 nt, Human
caauuucauuaauagauauaga

SEQ ID NO: 863227 - RNA, 22 nt, Human
gaucagaaugggacauauccug

SEQ ID NO: 863228 - RNA, 22 nt, Human
ucauuuguucucauucucuacu

SEQ ID NO: 863229 - RNA, 22 nt, Human
uucaggauaugugauaucugaa

SEQ ID NO: 863230 - RNA, 21 nt, Human
uccaggaguggcugggcaggg

SEQ ID NO: 863231 - RNA, 22 nt, Human
agggagugguuaagaaggugca

SEQ ID NO: 863232 - RNA, 22 nt, Human
gagucaccacacggugcugacu

SEQ ID NO: 863233 - RNA, 22 nt, Human
uuggaugaagucuagcuuuagu

SEQ ID NO: 863234 - RNA, 22 nt, Human
acagaauuaucaggaaauguua

SEQ ID NO: 863235 - RNA, 22 nt, Human
uguccauggauagagcugcucg

SEQ ID NO: 863236 - RNA, 22 nt, Human
gccaugcuugguaugcugugag

SEQ ID NO: 863237 - RNA, 22 nt, Human
uucagaaacagagugagugagu

SEQ ID NO: 863238 - RNA, 22 nt, Human
cgaggcagaggcugaaacggcu

SEQ ID NO: 863239 - RNA, 22 nt, Human
uucauucuuauuugugaucugg

SEQ ID NO: 863240 - RNA, 22 nt, Human
ugaggcaguugagcuuccugag

SEQ ID NO: 863241 - RNA, 22 nt, Human
uuucaacguguaaucuuauuua

SEQ ID NO: 863242 - RNA, 22 nt, Human
aguaaacauuuucauauuuucu

SEQ ID NO: 863243 - RNA, 22 nt, Human
uuuggaauuggcauucuauucu

SEQ ID NO: 863244 - RNA, 22 nt, Human
cagcuggcuggucagugcacaa

SEQ ID NO: 863245 - RNA, 22 nt, Human
aauauaugagggagcuauuuga

SEQ ID NO: 863246 - RNA, 22 nt, Human
aucagcuuuucucaucagaaau

SEQ ID NO: 863247 - RNA, 22 nt, Human
cccaggagauggagguugcagu

SEQ ID NO: 863248 - RNA, 22 nt, Human
uuuaggcagcacgggcagcccu

SEQ ID NO: 863249 - RNA, 22 nt, Human
gaggagagaacauuccuccaua

SEQ ID NO: 863250 - RNA, 22 nt, Human
aaguccuugaagaaacaguucu

SEQ ID NO: 863251 - RNA, 22 nt, Human
caaagucauggggaugcagguc

SEQ ID NO: 863252 - RNA, 22 nt, Human
uugaacuguaagcaugucugcc

SEQ ID NO: 863253 - RNA, 22 nt, Human
aucauucuauuguugagcugcc

SEQ ID NO: 863254 - RNA, 22 nt, Human
guuaggcagugugguauagcag

SEQ ID NO: 863255 - RNA, 22 nt, Human
cuacagaaucuaccucaagcca

SEQ ID NO: 863256 - RNA, 22 nt, Human
cuagaaauucugauucaguagg

SEQ ID NO: 863257 - RNA, 22 nt, Human
cucuucucugcagccuuugaag

SEQ ID NO: 863258 - RNA, 22 nt, Human
agucugucuacuuaaagucugu

SEQ ID NO: 863259 - RNA, 22 nt, Human
gagagcuggguucaaguagcug

SEQ ID NO: 863260 - RNA, 22 nt, Human
ccacuguuuuucaguuaacuuu

SEQ ID NO: 863261 - RNA, 22 nt, Human
gacagcugugcaggagaagggg

SEQ ID NO: 863262 - RNA, 22 nt, Human
aacauucuauuuugcuaaaaca

SEQ ID NO: 863263 - RNA, 22 nt, Human
gugaauaagaccuaaggaugaa

SEQ ID NO: 863264 - RNA, 22 nt, Human
uaaucauggccucaaauuuuau

SEQ ID NO: 863265 - RNA, 20 nt, Human
auaaaauaacugccacaaga

SEQ ID NO: 863266 - RNA, 22 nt, Human
agucucagaaaagaagcaugga

SEQ ID NO: 863267 - RNA, 22 nt, Human
cagcugacgccagaguggaauu

SEQ ID NO: 863268 - RNA, 22 nt, Human
agggaguuagaaauccaggaua

SEQ ID NO: 863269 - RNA, 22 nt, Human
augaggcaaucaugguccaguu

SEQ ID NO: 863270 - RNA, 22 nt, Human
ucaggagagaguuggguaggcu

SEQ ID NO: 863271 - RNA, 22 nt, Human
uuggcagugaugcagcuuguuc

SEQ ID NO: 863272 - RNA, 22 nt, Human
ugaaagcagcaccaauaccauu

SEQ ID NO: 863273 - RNA, 22 nt, Human
uuccaugacaccgagggaaguc

SEQ ID NO: 863274 - RNA, 22 nt, Human
cagcugacccagugaggaggca

SEQ ID NO: 863275 - RNA, 22 nt, Human
gcuucccagcagaggaaagacu

SEQ ID NO: 863276 - RNA, 22 nt, Human
ucuccucucuuaccugguacaa

SEQ ID NO: 863277 - RNA, 23 nt, Human
agaggggagcaucugcuggcuga

SEQ ID NO: 863278 - RNA, 22 nt, Human
gaggcagcgggucaggaccgug

SEQ ID NO: 863279 - RNA, 22 nt, Human
gguuugaacagcuuuggagaag

SEQ ID NO: 863280 - RNA, 22 nt, Human
gaggcacuggaggaaaggagaa

SEQ ID NO: 863281 - RNA, 22 nt, Human
cccaggagaugcacuccauugg

SEQ ID NO: 863282 - RNA, 22 nt, Human
uuugaaugcaggacauacagaa

SEQ ID NO: 863283 - RNA, 22 nt, Human
cuguuaauugugaauuuuacau

SEQ ID NO: 863284 - RNA, 22 nt, Human
gagggagggccaggucccaacc

SEQ ID NO: 863285 - RNA, 22 nt, Human
caguaaauuugagggaucuaau

SEQ ID NO: 863286 - RNA, 22 nt, Human
cauuuaguuauacuaaaacauu

SEQ ID NO: 863287 - RNA, 23 nt, Human
uuugaaguugacugccuuccaga

SEQ ID NO: 863288 - RNA, 22 nt, Human
caaauagugucacauugugagg

SEQ ID NO: 863289 - RNA, 16 nt, Human
ccuggauccccugugg

SEQ ID NO: 863290 - RNA, 22 nt, Human
gaggagagggcugcgggcccac

SEQ ID NO: 863291 - RNA, 22 nt, Human
uucaauucugcucugaucuuag

SEQ ID NO: 863292 - RNA, 22 nt, Human
uccauuuuguagguaugcuaca

SEQ ID NO: 863293 - RNA, 21 nt, Human
auacacauacacauaaaugug

SEQ ID NO: 863294 - RNA, 22 nt, Human
aaauauaauuucugccucaaua

SEQ ID NO: 863295 - RNA, 22 nt, Human
agagauucauguuuacuguagg

SEQ ID NO: 863296 - RNA, 22 nt, Human
uuauuacacugaaagaauugcg

SEQ ID NO: 863297 - RNA, 22 nt, Human
cuaaucaucuuucucuuaaagc

SEQ ID NO: 863298 - RNA, 22 nt, Human
uacuuccuguuuccaugucugu

SEQ ID NO: 863299 - RNA, 22 nt, Human
aggcaggcugcuauggaguaga

SEQ ID NO: 863300 - RNA, 22 nt, Human
ucaggagaacuuccuucuaccc

SEQ ID NO: 863301 - RNA, 22 nt, Human
accagcugcugauugcuaaaug

SEQ ID NO: 863302 - RNA, 22 nt, Human
gauggcuucacuuacauggcug

SEQ ID NO: 863303 - RNA, 22 nt, Human
uuacagaaaauguguuuuaacu

SEQ ID NO: 863304 - RNA, 18 nt, Human
gaaagccaugcagcagug

SEQ ID NO: 863305 - RNA, 22 nt, Human
aucacugucgucaucugagauu

SEQ ID NO: 863306 - RNA, 22 nt, Human
uggagagguugaauaacuuguc

SEQ ID NO: 863307 - RNA, 22 nt, Human
uucacagauguauuggaacucc

SEQ ID NO: 863308 - RNA, 22 nt, Human
cccaggagauggugcguggucu

SEQ ID NO: 863309 - RNA, 20 nt, Human
uuugucuguuaaguguuucu

SEQ ID NO: 863310 - RNA, 22 nt, Human
gcagcugaaagggaucucuaca

SEQ ID NO: 863311 - RNA, 22 nt, Human
ugaggcaggacauggacaacug

SEQ ID NO: 863312 - RNA, 22 nt, Human
acaggauuagcaaguaaucagg

SEQ ID NO: 863313 - RNA, 22 nt, Human
uugcagcugcaguaaauguuca

SEQ ID NO: 863314 - RNA, 22 nt, Human
uuacaagauaaccugaugcugu

SEQ ID NO: 863315 - RNA, 21 nt, Human
ucuuccuccacagcgugccac

SEQ ID NO: 863316 - RNA, 22 nt, Human
aguaaagcagaguugcaguaca

SEQ ID NO: 863317 - RNA, 22 nt, Human
ucugcugucacucauuugcuuc

SEQ ID NO: 863318 - RNA, 22 nt, Human
auguuucaaugcacuuuagccu

SEQ ID NO: 863319 - RNA, 21 nt, Human
agccagcuaucacacagcauu

SEQ ID NO: 863320 - RNA, 22 nt, Human
gaguccuuuucucuguccacug

SEQ ID NO: 863321 - RNA, 22 nt, Human
guugaaagagcauggacuugaa

SEQ ID NO: 863322 - RNA, 22 nt, Human
ggagaaugauauauagcucagu

SEQ ID NO: 863323 - RNA, 22 nt, Human
caggaggaagaacucugcaaca

SEQ ID NO: 863324 - RNA, 17 nt, Human
aggccagaugaggcaag

SEQ ID NO: 863325 - RNA, 22 nt, Human
uugcauuuaaguagauguuaca

SEQ ID NO: 863326 - RNA, 22 nt, Human
aagacauugucauuuuauaauu

SEQ ID NO: 863327 - RNA, 22 nt, Human
gagcgauguggguauguagaag

SEQ ID NO: 863328 - RNA, 22 nt, Human
cugcuguguuccuccugcaucu

SEQ ID NO: 863329 - RNA, 22 nt, Human
uucucagaauugacugggagca

SEQ ID NO: 863330 - RNA, 17 nt, Human
gccaggagguuugagcu

SEQ ID NO: 863331 - RNA, 22 nt, Human
aggguggcuggaggaaucagaa

SEQ ID NO: 863332 - RNA, 22 nt, Human
aacaguaaagacagaauuuauc

SEQ ID NO: 863333 - RNA, 22 nt, Human
gaaggggacuggcagcugcaga

SEQ ID NO: 863334 - RNA, 22 nt, Human
uuaaaauuauggcccauuugga

SEQ ID NO: 863335 - RNA, 22 nt, Human
uuaugauuugccacagauuggu

SEQ ID NO: 863336 - RNA, 22 nt, Human
agaggggaggcgaaccagaguc

SEQ ID NO: 863337 - RNA, 22 nt, Human
uuugacauggaauaacucauuu

SEQ ID NO: 863338 - RNA, 22 nt, Human
auugauggcggccucuccauau

SEQ ID NO: 863339 - RNA, 21 nt, Human
uucuucuuggacuguuuuggc

SEQ ID NO: 863340 - RNA, 22 nt, Human
ggagcaggagucucuugaauuu

SEQ ID NO: 863341 - RNA, 22 nt, Human
ugguuuaauuuccauuuccuug

SEQ ID NO: 863342 - RNA, 22 nt, Human
cccaggauggggcugcaguuau

SEQ ID NO: 863343 - RNA, 22 nt, Human
cauuuacauaacaguaacgcug

SEQ ID NO: 863344 - RNA, 22 nt, Human
cuugcugucuugcauuuagagc

SEQ ID NO: 863345 - RNA, 22 nt, Human
cagcuuccauaagagauggaga

SEQ ID NO: 863346 - RNA, 20 nt, Human
uucaggauucuagaccacac

SEQ ID NO: 863347 - RNA, 22 nt, Human
gaaaggcaguacagcugagccu

SEQ ID NO: 863348 - RNA, 22 nt, Human
aauacaguaauuuugaugaguu

SEQ ID NO: 863349 - RNA, 22 nt, Human
ccucaugguacuuacuguagcu

SEQ ID NO: 863350 - RNA, 20 nt, Human
uacagacaugacaauaaugg

SEQ ID NO: 863351 - RNA, 22 nt, Human
cacauauuguaguucaccagga

SEQ ID NO: 863352 - RNA, 22 nt, Human
augcuuaacuuccuagucuaua

SEQ ID NO: 863353 - RNA, 22 nt, Human
uuuccagagcaugucugcucag

SEQ ID NO: 863354 - RNA, 22 nt, Human
guacagaaggauuucuaguagu

SEQ ID NO: 863355 - RNA, 22 nt, Human
aaggagaaaugguagaugugca

SEQ ID NO: 863356 - RNA, 19 nt, Human
uucaggauugacccuacug

SEQ ID NO: 863357 - RNA, 22 nt, Human
ugcugaugaguccuucuaucgc

SEQ ID NO: 863358 - RNA, 22 nt, Human
caaucaguuucuguuguauaau

SEQ ID NO: 863359 - RNA, 22 nt, Human
aggagagcuggugucuggaauc

SEQ ID NO: 863360 - RNA, 23 nt, Human
aaggccagaauuucaauggugcc

SEQ ID NO: 863361 - RNA, 22 nt, Human
cuguucucuggcgguggcuguu

SEQ ID NO: 863362 - RNA, 22 nt, Human
cccaggaugucgaggcugcagu

SEQ ID NO: 863363 - RNA, 18 nt, Human
aggcaggugcuggaaguc

SEQ ID NO: 863364 - RNA, 22 nt, Human
gggcagcucagccaccaugcag

SEQ ID NO: 863365 - RNA, 22 nt, Human
aaguccauucuuccagccagcu

SEQ ID NO: 863366 - RNA, 22 nt, Human
acuuugaaacuaaaauucauua

SEQ ID NO: 863367 - RNA, 22 nt, Human
caagaucagggugccagaaugg

SEQ ID NO: 863368 - RNA, 22 nt, Human
augcuguguauuuuacucuuuc

SEQ ID NO: 863369 - RNA, 22 nt, Human
uuuccaaagguggcaggaacaa

SEQ ID NO: 863370 - RNA, 22 nt, Human
ggagcuguucaggacugcuuca

SEQ ID NO: 863371 - RNA, 22 nt, Human
uauuuucuggacagucuugcuu

SEQ ID NO: 863372 - RNA, 23 nt, Human
aagucaccaagaggaaggcggag

SEQ ID NO: 863373 - RNA, 22 nt, Human
guucuaauauuuuaaaagccaa

SEQ ID NO: 863374 - RNA, 22 nt, Human
aggggcucaaagugugcaggga

SEQ ID NO: 863375 - RNA, 17 nt, Human
uccaugagacaugaaga

SEQ ID NO: 863376 - RNA, 17 nt, Human
agaacuguaguagcucc

SEQ ID NO: 863377 - RNA, 22 nt, Human
accuugaugccuuuccaagaug

SEQ ID NO: 863378 - RNA, 22 nt, Human
uuccuuagcugucccuggaaau

SEQ ID NO: 863379 - RNA, 22 nt, Human
gaguccuuuugugccacaggga

SEQ ID NO: 863380 - RNA, 22 nt, Human
caggacagagcccagacugugu

SEQ ID NO: 863381 - RNA, 22 nt, Human
caacugugaauuuuaugauacc

SEQ ID NO: 863382 - RNA, 22 nt, Human
gaaggccaguuuugagauaggu

SEQ ID NO: 863383 - RNA, 22 nt, Human
cuuaggcaguuuaggaaagaga

SEQ ID NO: 863384 - RNA, 22 nt, Human
uugaaaguagcagcugcauaug

SEQ ID NO: 863385 - RNA, 22 nt, Human
uugugguuaaccgcacauuuuu

SEQ ID NO: 863386 - RNA, 22 nt, Human
ucccaggaauugaagccagugu

SEQ ID NO: 863387 - RNA, 22 nt, Human
ugaauaauuccuuuuugucaag

SEQ ID NO: 863388 - RNA, 22 nt, Human
ugaaaugacaaagguuuuucuu

SEQ ID NO: 863389 - RNA, 22 nt, Human
cauuuguuggucagauuguagu

SEQ ID NO: 863390 - RNA, 22 nt, Human
gugguaaucggauucuuaccgg

SEQ ID NO: 863391 - RNA, 22 nt, Human
aaucaugugggauagucugcuc

SEQ ID NO: 863392 - RNA, 20 nt, Human
aggaggcauagucuggaaag

SEQ ID NO: 863393 - RNA, 22 nt, Human
ucaguucuuuauuucacaguga

SEQ ID NO: 863394 - RNA, 22 nt, Human
aggaagcuccaugaaggcagag

SEQ ID NO: 863395 - RNA, 22 nt, Human
gcucaggaccgaggggugggaa

SEQ ID NO: 863396 - RNA, 22 nt, Human
aggcagcuucugauuagcagcg

SEQ ID NO: 863397 - RNA, 22 nt, Human
ugaaauaggaaacagauguuuc

SEQ ID NO: 863398 - RNA, 22 nt, Human
aauacaguagguaauaguucau

SEQ ID NO: 863399 - RNA, 22 nt, Human
gaauuucaggacaacuggaagg

SEQ ID NO: 863400 - RNA, 22 nt, Human
ucacauucucagcaucuauaca

SEQ ID NO: 863401 - RNA, 22 nt, Human
ugccuggauucgguuguuguca

SEQ ID NO: 863402 - RNA, 22 nt, Human
acuauacaagauuagggauuug

SEQ ID NO: 863403 - RNA, 22 nt, Human
acaacuuuagucuggagggaaa

SEQ ID NO: 863404 - RNA, 22 nt, Human
ugucaccaccggaagaaacugc

SEQ ID NO: 863405 - RNA, 22 nt, Human
cauggcuuuguucauauaauuu

SEQ ID NO: 863406 - RNA, 21 nt, Human
uucuucaugaugauuaauggc

SEQ ID NO: 863407 - RNA, 22 nt, Human
uuucaaaccuacuuguauguuu

SEQ ID NO: 863408 - RNA, 21 nt, Human
ggcagcucagcagauggggac

SEQ ID NO: 863409 - RNA, 22 nt, Human
caggauagaaaggccauggagu

SEQ ID NO: 863410 - RNA, 22 nt, Human
caucagaaggccagaggguagc

SEQ ID NO: 863411 - RNA, 22 nt, Human
gcagcugcaauaggcaucaagc

SEQ ID NO: 863412 - RNA, 22 nt, Human
ggcugaaggaugaaagcugcag

SEQ ID NO: 863413 - RNA, 22 nt, Human
ccccaggaagccucagauuugc

SEQ ID NO: 863414 - RNA, 22 nt, Human
aucuaaaaggagcucuuuaucu

SEQ ID NO: 863415 - RNA, 22 nt, Human
uggcagucuggguuggcaguua

SEQ ID NO: 863416 - RNA, 22 nt, Human
acaagcaugggcuuugacauca

SEQ ID NO: 863417 - RNA, 22 nt, Human
ucucacuggguauaaaugagua

SEQ ID NO: 863418 - RNA, 22 nt, Human
ugaggcagccugcauuaaagag

SEQ ID NO: 863419 - RNA, 22 nt, Human
aggccagacagcuagaaacagg

SEQ ID NO: 863420 - RNA, 22 nt, Human
uaaggccauuauggugggcccg

SEQ ID NO: 863421 - RNA, 22 nt, Human
acauuccaaaaacuagcagaua

SEQ ID NO: 863422 - RNA, 22 nt, Human
gagaggauccacaaaccaggaa

SEQ ID NO: 863423 - RNA, 22 nt, Human
ugcuuuaaccaucuuguuugga

SEQ ID NO: 863424 - RNA, 22 nt, Human
cacucaggcugugucaggagga

SEQ ID NO: 863425 - RNA, 22 nt, Human
uggcagagcaaaaagauagaau

SEQ ID NO: 863426 - RNA, 22 nt, Human
aaaauuauucauggcuuuugga

SEQ ID NO: 863427 - RNA, 22 nt, Human
uuuggaauuggaaagugcugug

SEQ ID NO: 863428 - RNA, 22 nt, Human
ccagcagagucuaggaaggagg

SEQ ID NO: 863429 - RNA, 22 nt, Human
aggcaguggagcuggaauaggc

SEQ ID NO: 863430 - RNA, 22 nt, Human
acaaauguggacauggauaaug

SEQ ID NO: 863431 - RNA, 22 nt, Human
cauuuauuggcauguaguaggu

SEQ ID NO: 863432 - RNA, 22 nt, Human
aaagaaucagaagucucaaaca

SEQ ID NO: 863433 - RNA, 22 nt, Human
caucagucuagauucuaguacc

SEQ ID NO: 863434 - RNA, 22 nt, Human
gaugaaaaucuugagaugucga

SEQ ID NO: 863435 - RNA, 22 nt, Human
auacagaagaccccuccgucau

SEQ ID NO: 863436 - RNA, 23 nt, Human
ucuauacauacugcagccucugg

SEQ ID NO: 863437 - RNA, 22 nt, Human
gaggcaugcagagcuggagcag

SEQ ID NO: 863438 - RNA, 21 nt, Human
gcuauacagaauggccagagg

SEQ ID NO: 863439 - RNA, 22 nt, Human
uaaguccuaacagacugggggc

SEQ ID NO: 863440 - RNA, 23 nt, Human
cugcuguuuucuguaccugaagc

SEQ ID NO: 863441 - RNA, 22 nt, Human
cuucucagcauuuugucagucu

SEQ ID NO: 863442 - RNA, 22 nt, Human
auagaauucuuugaaauuuaug

SEQ ID NO: 863443 - RNA, 22 nt, Human
acagguuuuuguggauauaugu

SEQ ID NO: 863444 - RNA, 22 nt, Human
acagaaauaacuuuuuauguuu

SEQ ID NO: 863445 - RNA, 22 nt, Human
uccauucauucauugaugaaca

SEQ ID NO: 863446 - RNA, 22 nt, Human
agucaccaacaugguucccagg

SEQ ID NO: 863447 - RNA, 22 nt, Human
uccaggagacacccuugugugu

SEQ ID NO: 863448 - RNA, 22 nt, Human
ugacccauggucugaucauagg

SEQ ID NO: 863449 - RNA, 22 nt, Human
aguccuuacucgggggcccaga

SEQ ID NO: 863450 - RNA, 17 nt, Human
ccaggagagaugcuugu

SEQ ID NO: 863451 - RNA, 20 nt, Human
ucucagcauaagaacccuuc

SEQ ID NO: 863452 - RNA, 22 nt, Human
uuccucagcuggccugauuggg

SEQ ID NO: 863453 - RNA, 22 nt, Human
aaauauaguaaaugcauaguuc

SEQ ID NO: 863454 - RNA, 22 nt, Human
agaaaugaagcaggaguuauua

SEQ ID NO: 863455 - RNA, 22 nt, Human
cugcugugcauauuuaucuagg

SEQ ID NO: 863456 - RNA, 22 nt, Human
acaacauuauacauagaaagcu

SEQ ID NO: 863457 - RNA, 20 nt, Human
ugcugucguguuuucugcuu

SEQ ID NO: 863458 - RNA, 20 nt, Human
uucuucucuaguuaucuuca

SEQ ID NO: 863459 - RNA, 22 nt, Human
agaggaggaagagcuuuaaaau

SEQ ID NO: 863460 - RNA, 22 nt, Human
uguacauacauagauauacaca

SEQ ID NO: 863461 - RNA, 22 nt, Human
auuccaaagccugaauaaugga

SEQ ID NO: 863462 - RNA, 22 nt, Human
caucagaaagaguccuggacuu

SEQ ID NO: 863463 - RNA, 22 nt, Human
ugcuagugcaggguuuucaguu

SEQ ID NO: 863464 - RNA, 22 nt, Human
uucuucuucuggcugcaccugg

SEQ ID NO: 863465 - RNA, 22 nt, Human
ucagaaaagagaaaaucuuaua

SEQ ID NO: 863466 - RNA, 22 nt, Human
ucuuuuggaaaugaugugcagg

SEQ ID NO: 863467 - RNA, 22 nt, Human
auuucucuuagcaagacauuac

SEQ ID NO: 863468 - RNA, 22 nt, Human
uucuacaugguugcucagaggg

SEQ ID NO: 863469 - RNA, 22 nt, Human
gaggcagcaauaaaaagaauuu

SEQ ID NO: 863470 - RNA, 23 nt, Human
uugaaagguagcuggcagcuaga

SEQ ID NO: 863471 - RNA, 22 nt, Human
uucucuuugacauuauucaggu

SEQ ID NO: 863472 - RNA, 22 nt, Human
ggagugucagaaacaguguccu

SEQ ID NO: 863473 - RNA, 22 nt, Human
accaggaggccuugguucugag

SEQ ID NO: 863474 - RNA, 22 nt, Human
uuuauuaugauggacaccuucg

SEQ ID NO: 863475 - RNA, 22 nt, Human
cugccaggcgauggauuggcug

SEQ ID NO: 863476 - RNA, 22 nt, Human
cgaggcagacaaaaguuggaag

SEQ ID NO: 863477 - RNA, 19 nt, Human
ugcuuaauuccuaguaggu

SEQ ID NO: 863478 - RNA, 22 nt, Human
uggggcucaccuaggcuggaag

SEQ ID NO: 863479 - RNA, 20 nt, Human
ugugcaggagagugaggcug

SEQ ID NO: 863480 - RNA, 22 nt, Human
auccagucaaaauuaguaaggu

SEQ ID NO: 863481 - RNA, 22 nt, Human
caggauggucagaugcauuguc

SEQ ID NO: 863482 - RNA, 22 nt, Human
ucuucaaguuccaaagugcagg

SEQ ID NO: 863483 - RNA, 22 nt, Human
auuaggcauucaugcagcuccu

SEQ ID NO: 863484 - RNA, 23 nt, Human
uagaauucaaucuguuccacauc

SEQ ID NO: 863485 - RNA, 22 nt, Human
aaaguccuuuuugccaugcaag

SEQ ID NO: 863486 - RNA, 22 nt, Human
aaaucaguuagugguaggauug

SEQ ID NO: 863487 - RNA, 22 nt, Human
acagugacguuuauuugagacg

SEQ ID NO: 863488 - RNA, 19 nt, Human
cuauacagccucugaggaa

SEQ ID NO: 863489 - RNA, 22 nt, Human
uaguccuugguaaaauucuaug

SEQ ID NO: 863490 - RNA, 22 nt, Human
cugcugugaguuuggaggucua

SEQ ID NO: 863491 - RNA, 22 nt, Human
gucaggaugggcagccaaacua

SEQ ID NO: 863492 - RNA, 22 nt, Human
cugcuucugggaugauggagua

SEQ ID NO: 863493 - RNA, 22 nt, Human
cucaggauuuaaaggggcacuc

SEQ ID NO: 863494 - RNA, 22 nt, Human
uaauuacagguccaaaacaauc

SEQ ID NO: 863495 - RNA, 22 nt, Human
uccccagggcugcagagggugu

SEQ ID NO: 863496 - RNA, 22 nt, Human
ucaggaggccaccaggaccugu

SEQ ID NO: 863497 - RNA, 22 nt, Human
aauucuaaauguaauuuagaau

SEQ ID NO: 863498 - RNA, 17 nt, Human
ucaggauguagcaguag

SEQ ID NO: 863499 - RNA, 22 nt, Human
aguucacauaucuguuuuauuu

SEQ ID NO: 863500 - RNA, 22 nt, Human
aaagaaggggucuacauccaau

SEQ ID NO: 863501 - RNA, 22 nt, Human
aaacugcuuuccacaguggcua

SEQ ID NO: 863502 - RNA, 22 nt, Human
augaaaauucuaugcaggccag

SEQ ID NO: 863503 - RNA, 22 nt, Human
auuacacuuguucaucaucacc

SEQ ID NO: 863504 - RNA, 22 nt, Human
uuuauccaaggguuuuaacugu

SEQ ID NO: 863505 - RNA, 22 nt, Human
auuucagaugaccaaauggaaa

SEQ ID NO: 863506 - RNA, 22 nt, Human
augauauuugcaaugugcuugc

SEQ ID NO: 863507 - RNA, 17 nt, Human
uugaacugcugagucag

SEQ ID NO: 863508 - RNA, 22 nt, Human
aucaggauggguuuggcuuagg

SEQ ID NO: 863509 - RNA, 22 nt, Human
gugcugugugauccaugcuggc

SEQ ID NO: 863510 - RNA, 22 nt, Human
cagcuggccaaucagggcgccc

SEQ ID NO: 863511 - RNA, 22 nt, Human
aaauuucaagcaaaguagcuau

SEQ ID NO: 863512 - RNA, 22 nt, Human
uuugcaaauaccaugaaacuug

SEQ ID NO: 863513 - RNA, 22 nt, Human
uucacagaguuauuuuuaugcu

SEQ ID NO: 863514 - RNA, 21 nt, Human
agcagaggggacauguuugau

SEQ ID NO: 863515 - RNA, 20 nt, Human
uacuggauuagggcucaccc

SEQ ID NO: 863516 - RNA, 22 nt, Human
uacauaguauucacauuguuuu

SEQ ID NO: 863517 - RNA, 22 nt, Human
uuccaugaaagugaaauggagc

SEQ ID NO: 863518 - RNA, 22 nt, Human
gcucccagcaauugaggcagcc

SEQ ID NO: 863519 - RNA, 22 nt, Human
ggcucagaccucccagcuccag

SEQ ID NO: 863520 - RNA, 22 nt, Human
aucaggaucugggagccugaaa

SEQ ID NO: 863521 - RNA, 22 nt, Human
gaaauauuacaguggaggggau

SEQ ID NO: 863522 - RNA, 22 nt, Human
uugcaucuaccauaucaaagau

SEQ ID NO: 863523 - RNA, 22 nt, Human
cccaggaggugugcccaacucg

SEQ ID NO: 863524 - RNA, 22 nt, Human
uucuucaaaacaacacuggccu

SEQ ID NO: 863525 - RNA, 21 nt, Human
uguccuuaaugcaauguccuu

SEQ ID NO: 863526 - RNA, 22 nt, Human
cagaaggcuggcagauugagau

SEQ ID NO: 863527 - RNA, 22 nt, Human
auaacaugagccagauugaaag

SEQ ID NO: 863528 - RNA, 22 nt, Human
ucagcauaucuugagcuucaug

SEQ ID NO: 863529 - RNA, 22 nt, Human
cugcuguggugucaagcaucuc

SEQ ID NO: 863530 - RNA, 19 nt, Human
uuagccauccacagugaaa

SEQ ID NO: 863531 - RNA, 22 nt, Human
gggcagcugccccucucugggc

SEQ ID NO: 863532 - RNA, 22 nt, Human
gcauguguuauuuuauguauga

SEQ ID NO: 863533 - RNA, 22 nt, Human
agcugccccaugagaggcaggu

SEQ ID NO: 863534 - RNA, 22 nt, Human
auucuucauuuacuguuacuug

SEQ ID NO: 863535 - RNA, 22 nt, Human
uuucuaguaaucaauauaaagu

SEQ ID NO: 863536 - RNA, 22 nt, Human
cagauggaacacagaaaggaga

SEQ ID NO: 863537 - RNA, 22 nt, Human
uuucaaauagaaucuuuccaaa

SEQ ID NO: 863538 - RNA, 20 nt, Human
cagaggcauuuucagacucu

SEQ ID NO: 863539 - RNA, 22 nt, Human
guuugcauuuauuagucuucug

SEQ ID NO: 863540 - RNA, 22 nt, Human
gaggggaaaguucugcacaagg

SEQ ID NO: 863541 - RNA, 22 nt, Human
cucuuucugauucgcugggacc

SEQ ID NO: 863542 - RNA, 22 nt, Human
gugcauuuaggucacaugaugu

SEQ ID NO: 863543 - RNA, 22 nt, Human
uuucuucagagagagcuuuccc

SEQ ID NO: 863544 - RNA, 22 nt, Human
ucaggaugguccuuuaugagaa

SEQ ID NO: 863545 - RNA, 22 nt, Human
agggagcuucuggccucagccu

SEQ ID NO: 863546 - RNA, 22 nt, Human
uccaugucuucaugugucuaac

SEQ ID NO: 863547 - RNA, 22 nt, Human
aagauggaguaguguaaugguu

SEQ ID NO: 863548 - RNA, 22 nt, Human
uugaaaggaauacagaggccua

SEQ ID NO: 863549 - RNA, 22 nt, Human
gaauuucacaaggugaggauaa

SEQ ID NO: 863550 - RNA, 22 nt, Human
gggaggugauuaggaccaugua

SEQ ID NO: 863551 - RNA, 20 nt, Human
gaguuccccauuucuccugg

SEQ ID NO: 863552 - RNA, 22 nt, Human
cuucuucauguauugauagucu

SEQ ID NO: 863553 - RNA, 22 nt, Human
gcucaggaucccaggggugugc

SEQ ID NO: 863554 - RNA, 22 nt, Human
ccucuucuaggacguccuugug

SEQ ID NO: 863555 - RNA, 22 nt, Human
uucuucuugucugcccucacau

SEQ ID NO: 863556 - RNA, 22 nt, Human
uuuccaaaggaguaccacgcau

SEQ ID NO: 863557 - RNA, 22 nt, Human
aaaagccaugcauaccuaagag

SEQ ID NO: 863558 - RNA, 22 nt, Human
ugucaccacuggcugaaacacc

SEQ ID NO: 863559 - RNA, 22 nt, Human
uuugaagauaaauauggagaaa

SEQ ID NO: 863560 - RNA, 22 nt, Human
aggcagaucacuugaggccagg

SEQ ID NO: 863561 - RNA, 22 nt, Human
gggcaguugauggaggucugga

SEQ ID NO: 863562 - RNA, 23 nt, Human
aaauuauugcucuucaauugccu

SEQ ID NO: 863563 - RNA, 22 nt, Human
cugccagucuaugcugcucggc

SEQ ID NO: 863564 - RNA, 22 nt, Human
gaaacuguauguaguuuuuggg

SEQ ID NO: 863565 - RNA, 22 nt, Human
ggcuuugccuggaauuuccuug

SEQ ID NO: 863566 - RNA, 22 nt, Human
uuuauuugaaucaggggagaau

SEQ ID NO: 863567 - RNA, 22 nt, Human
uacaucauaauaauacuuagaa

SEQ ID NO: 863568 - RNA, 21 nt, Human
uccaaaaaggagcguccuucu

SEQ ID NO: 863569 - RNA, 22 nt, Human
gucuucuuguuuugaaggaaau

SEQ ID NO: 863570 - RNA, 22 nt, Human
ucuuuaaugugauuguaauuau

SEQ ID NO: 863571 - RNA, 17 nt, Human
agaggcagauacuugga

SEQ ID NO: 863572 - RNA, 18 nt, Human
caugucugcgccacaagg

SEQ ID NO: 863573 - RNA, 19 nt, Human
aaggcagcaguagcaucca

SEQ ID NO: 863574 - RNA, 22 nt, Human
cucaucugauaaaucacucuua

SEQ ID NO: 863575 - RNA, 22 nt, Human
acuguagcugccacuggaugca

SEQ ID NO: 863576 - RNA, 22 nt, Human
gcuguucucuguaacaugcauu

SEQ ID NO: 863577 - RNA, 19 nt, Human
ugagaggcuuaaggcagcu

SEQ ID NO: 863578 - RNA, 22 nt, Human
auucuucaucagagaugcacua

SEQ ID NO: 863579 - RNA, 22 nt, Human
uucaggauccccuugaugggcu

SEQ ID NO: 863580 - RNA, 22 nt, Human
aggagaggcaucaagaaaaucg

SEQ ID NO: 863581 - RNA, 22 nt, Human
uuuauacauggagaauuuuugc

SEQ ID NO: 863582 - RNA, 22 nt, Human
ugaguucucacccauucuucuu

SEQ ID NO: 863583 - RNA, 22 nt, Human
uuuccaaagcugaguugagcaa

SEQ ID NO: 863584 - RNA, 22 nt, Human
uuugaaaggugucgagaugugu

SEQ ID NO: 863585 - RNA, 22 nt, Human
aaucagaauuuguccccugagu

SEQ ID NO: 863586 - RNA, 21 nt, Human
uuuuauugaugaauggccacu

SEQ ID NO: 863587 - RNA, 22 nt, Human
uuuccucauuuaucugcuggga

SEQ ID NO: 863588 - RNA, 22 nt, Human
cuucagaggggacucaaaguca

SEQ ID NO: 863589 - RNA, 22 nt, Human
auucuucauuguugauucaugu

SEQ ID NO: 863590 - RNA, 15 nt, Human
aaucagaaguguggc

SEQ ID NO: 863591 - RNA, 22 nt, Human
gcagggcaaacccagguguuca

SEQ ID NO: 863592 - RNA, 22 nt, Human
uucaguaaaacacugcaauguc

SEQ ID NO: 863593 - RNA, 22 nt, Human
accaggaggaaguguuaaugau

SEQ ID NO: 863594 - RNA, 22 nt, Human
uuucaaagaguuguaaauuacu

SEQ ID NO: 863595 - RNA, 22 nt, Human
cacucaggguacaauggagggc

SEQ ID NO: 863596 - RNA, 22 nt, Human
uuuaggcauacuuuugggagaa

SEQ ID NO: 863597 - RNA, 19 nt, Human
ggcagcuggacgcuguuca

SEQ ID NO: 863598 - RNA, 22 nt, Human
caggauggucucgaucuccuga

SEQ ID NO: 863599 - RNA, 22 nt, Human
cucaggauagauuguccucuca

SEQ ID NO: 863600 - RNA, 22 nt, Human
ccauggcaauggucagucuauu

SEQ ID NO: 863601 - RNA, 22 nt, Human
ggcgcacaaugugcagguuugu

SEQ ID NO: 863602 - RNA, 22 nt, Human
agacagcuaauaaaugagugug

SEQ ID NO: 863603 - RNA, 22 nt, Human
agugcuguaacaacuuauuugg

SEQ ID NO: 863604 - RNA, 22 nt, Human
uuccaaaguuaguuauuagaaa

SEQ ID NO: 863605 - RNA, 22 nt, Human
uuugacauuggcuuauucuguu

SEQ ID NO: 863606 - RNA, 20 nt, Human
cccaggagcugugccccauc

SEQ ID NO: 863607 - RNA, 22 nt, Human
augcuuaagcucaguuauauau

SEQ ID NO: 863608 - RNA, 22 nt, Human
ucccaggaaaacacucgaggac

SEQ ID NO: 863609 - RNA, 22 nt, Human
ggagggacccacucuagaggug

SEQ ID NO: 863610 - RNA, 22 nt, Human
cccaggagguuggggcuacagu

SEQ ID NO: 863611 - RNA, 22 nt, Human
auauacugaggagacuuuauau

SEQ ID NO: 863612 - RNA, 22 nt, Human
acagucauuagauacaaugucu

SEQ ID NO: 863613 - RNA, 22 nt, Human
ucagaauucugaccuuggguca

SEQ ID NO: 863614 - RNA, 22 nt, Human
uggcagcugaggggaggcuuug

SEQ ID NO: 863615 - RNA, 22 nt, Human
aaaauuauagaucuagugccug

SEQ ID NO: 863616 - RNA, 19 nt, Human
cuucuucuuggcagccaag

SEQ ID NO: 863617 - RNA, 22 nt, Human
gcccaggaguuggaggcugcag

SEQ ID NO: 863618 - RNA, 22 nt, Human
uugaaguuguaguucagugaag

SEQ ID NO: 863619 - RNA, 22 nt, Human
ugaaagggguugaguuacagcu

SEQ ID NO: 863620 - RNA, 22 nt, Human
agcuacccgaggacaggcuaag

SEQ ID NO: 863621 - RNA, 22 nt, Human
cugagccagcuggcaugugcua

SEQ ID NO: 863622 - RNA, 22 nt, Human
uuucaacauauaccauaaugcc

SEQ ID NO: 863623 - RNA, 22 nt, Human
cacaaaugguuguagacauuaa

SEQ ID NO: 863624 - RNA, 22 nt, Human
aagagaggacauggugaaccug

SEQ ID NO: 863625 - RNA, 21 nt, Human
ucaguaaaccuaaagauugua

SEQ ID NO: 863626 - RNA, 22 nt, Human
ucuucucuacaccagcagcccc

SEQ ID NO: 863627 - RNA, 22 nt, Human
ugguaauuaauuugauagguuc

SEQ ID NO: 863628 - RNA, 22 nt, Human
gagggagucugugcaaagaauu

SEQ ID NO: 863629 - RNA, 22 nt, Human
gcccaggaaguugaggcugccg

SEQ ID NO: 863630 - RNA, 22 nt, Human
cccaaggaagacgcuugugaua

SEQ ID NO: 863631 - RNA, 19 nt, Human
acagaaauuaguuauuuuc

SEQ ID NO: 863632 - RNA, 22 nt, Human
augguuuacaauguuuucaguu

SEQ ID NO: 863633 - RNA, 22 nt, Human
cuucucagcaugguuacuguga

SEQ ID NO: 863634 - RNA, 22 nt, Human
gggcacagaagucuaagacauc

SEQ ID NO: 863635 - RNA, 22 nt, Human
guuaggcaugaguguguauuaa

SEQ ID NO: 863636 - RNA, 22 nt, Human
agaauuccuccucugggacacu

SEQ ID NO: 863637 - RNA, 22 nt, Human
acuugcugguggcauuuacagu

SEQ ID NO: 863638 - RNA, 22 nt, Human
uucuauacaaagauuucucaca

SEQ ID NO: 863639 - RNA, 22 nt, Human
caucagaaccagcugggugagg

SEQ ID NO: 863640 - RNA, 22 nt, Human
acauaauagcauuucuaauuug

SEQ ID NO: 863641 - RNA, 22 nt, Human
caaguccuccaugugacuaggu

SEQ ID NO: 863642 - RNA, 22 nt, Human
uuagccauauagaaaaagagcu

SEQ ID NO: 863643 - RNA, 22 nt, Human
uuacagaaagguugugggauag

SEQ ID NO: 863644 - RNA, 22 nt, Human
ucccaggacuuccaguuggagg

SEQ ID NO: 863645 - RNA, 22 nt, Human
ugaaggccagcagagugaaggc

SEQ ID NO: 863646 - RNA, 22 nt, Human
gaagaaucaagcaguaauuugu

SEQ ID NO: 863647 - RNA, 20 nt, Human
uuucuugucggcuguugcug

SEQ ID NO: 863648 - RNA, 22 nt, Human
ccacaucucgguccccucuuug

SEQ ID NO: 863649 - RNA, 23 nt, Human
acuuuauugaccccaggucaguu

SEQ ID NO: 863650 - RNA, 22 nt, Human
ggcaugcucuuuguccacagua

SEQ ID NO: 863651 - RNA, 22 nt, Human
gauuucaaccuaacaguaugac

SEQ ID NO: 863652 - RNA, 22 nt, Human
gucaggauuuacaaacuucagu

SEQ ID NO: 863653 - RNA, 22 nt, Human
uucucagguagugcugaugcug

SEQ ID NO: 863654 - RNA, 22 nt, Human
uuacagaaaagggguuguccuu

SEQ ID NO: 863655 - RNA, 22 nt, Human
aauaaugucuuuggcuugacca

SEQ ID NO: 863656 - RNA, 22 nt, Human
uucuucaacaaggacacuguua

SEQ ID NO: 863657 - RNA, 22 nt, Human
agugcuuucuugcuccaucagu

SEQ ID NO: 863658 - RNA, 22 nt, Human
cuucucagucaccugugagucu

SEQ ID NO: 863659 - RNA, 22 nt, Human
ugaggcaggagaauggcgggaa

SEQ ID NO: 863660 - RNA, 19 nt, Human
aauacaguguuauagaauu

SEQ ID NO: 863661 - RNA, 17 nt, Human
acucaggaucugggagu

SEQ ID NO: 863662 - RNA, 22 nt, Human
ugaaguaacuguccaggaucca

SEQ ID NO: 863663 - RNA, 22 nt, Human
aagcagggcuuuaagcgguuuu

SEQ ID NO: 863664 - RNA, 22 nt, Human
acagaauucuaguauguggcuu

SEQ ID NO: 863665 - RNA, 22 nt, Human
augugcuuguaauguuaaaugu

SEQ ID NO: 863666 - RNA, 22 nt, Human
gaagcagcugccagagaugucu

SEQ ID NO: 863667 - RNA, 22 nt, Human
agggaagcccuggcugagaccc

SEQ ID NO: 863668 - RNA, 22 nt, Human
aucagaaauagucauguuacuu

SEQ ID NO: 863669 - RNA, 22 nt, Human
gggcagcucugcccaucagagg

SEQ ID NO: 863670 - RNA, 22 nt, Human
agucuugcauuuucugaagaug

SEQ ID NO: 863671 - RNA, 22 nt, Human
gauggcagguaguggucucauc

SEQ ID NO: 863672 - RNA, 22 nt, Human
aaucagaauuuauugaaucuuu

SEQ ID NO: 863673 - RNA, 22 nt, Human
uuucaucuuccuuggcauaggu

SEQ ID NO: 863674 - RNA, 22 nt, Human
agcauauaaauggacauauuug

SEQ ID NO: 863675 - RNA, 22 nt, Human
gagcagcugagcuggaaugaga

SEQ ID NO: 863676 - RNA, 22 nt, Human
aucauucuaguccuuauggucu

SEQ ID NO: 863677 - RNA, 22 nt, Human
uuccuuaggcuguuugcagugc

SEQ ID NO: 863678 - RNA, 22 nt, Human
gcaugucaugucauguaggaau

SEQ ID NO: 863679 - RNA, 22 nt, Human
acaccauacucauguugguucc

SEQ ID NO: 863680 - RNA, 22 nt, Human
auugaaagagaauguagcucuu

SEQ ID NO: 863681 - RNA, 22 nt, Human
ugaauagauuuuuaacauauaa

SEQ ID NO: 863682 - RNA, 22 nt, Human
uucuuaacuggaaaaugucaga

SEQ ID NO: 863683 - RNA, 22 nt, Human
aagcagagcaagcguauuuauu

SEQ ID NO: 863684 - RNA, 22 nt, Human
ugaaaugagauaauuuaagugc

SEQ ID NO: 863685 - RNA, 23 nt, Human
uucuucucaauuaguugauucag

SEQ ID NO: 863686 - RNA, 20 nt, Human
uuucaagucagcaauucuca

SEQ ID NO: 863687 - RNA, 22 nt, Human
uguccuuauauuguggaagggg

SEQ ID NO: 863688 - RNA, 22 nt, Human
uucuccagagggcucugcagga

SEQ ID NO: 863689 - RNA, 22 nt, Human
agauuucagaugcucggcaguu

SEQ ID NO: 863690 - RNA, 22 nt, Human
ccagaagaccccguccaccucc

SEQ ID NO: 863691 - RNA, 22 nt, Human
uuuuuaguagagguggguuuca

SEQ ID NO: 863692 - RNA, 17 nt, Human
gcgcagcuccuggcgcg

SEQ ID NO: 863693 - RNA, 22 nt, Human
ucuuuguaaaugccuagcauaa

SEQ ID NO: 863694 - RNA, 22 nt, Human
ggagcugugcagugacuacaga

SEQ ID NO: 863695 - RNA, 20 nt, Human
aucaggauucuugcuuuguu

SEQ ID NO: 863696 - RNA, 22 nt, Human
acaaauaugguacucggagaaa

SEQ ID NO: 863697 - RNA, 21 nt, Human
uucuccccagcgaauccucgg

SEQ ID NO: 863698 - RNA, 22 nt, Human
aggaagcugccugggaugggaa

SEQ ID NO: 863699 - RNA, 22 nt, Human
ccuccuuuccuguuuuccugag

SEQ ID NO: 863700 - RNA, 22 nt, Human
gggcaguuuauucuagaugguu

SEQ ID NO: 863701 - RNA, 22 nt, Human
gcaggaagcauagaagaaugcc

SEQ ID NO: 863702 - RNA, 22 nt, Human
uucugugaaucuuuuuucccac

SEQ ID NO: 863703 - RNA, 22 nt, Human
ucagaauugucuggggaauguu

SEQ ID NO: 863704 - RNA, 22 nt, Human
auguuuccagguucuuccuaug

SEQ ID NO: 863705 - RNA, 22 nt, Human
ugguaaauauguccauucucuu

SEQ ID NO: 863706 - RNA, 22 nt, Human
aaauggaucuguggaauacauu

SEQ ID NO: 863707 - RNA, 22 nt, Human
aaaguauuugugauuuuuacca

SEQ ID NO: 863708 - RNA, 22 nt, Human
gagccagcuauguagcaagagg

SEQ ID NO: 863709 - RNA, 22 nt, Human
ucaauucaauugaacaguuacu

SEQ ID NO: 863710 - RNA, 22 nt, Human
acugccauuggucaaaugagug

SEQ ID NO: 863711 - RNA, 22 nt, Human
aaaauuauggaguaucccaaag

SEQ ID NO: 863712 - RNA, 22 nt, Human
ugcuuaauaggaguugaacauu

SEQ ID NO: 863713 - RNA, 20 nt, Human
ucacuaguaaccaucugcuu

SEQ ID NO: 863714 - RNA, 22 nt, Human
ucuuagaaauuccccaguggcu

SEQ ID NO: 863715 - RNA, 22 nt, Human
aauaugcauuaacuguguacau

SEQ ID NO: 863716 - RNA, 22 nt, Human
guacagaaaguacccauagaag

SEQ ID NO: 863717 - RNA, 22 nt, Human
aggcagcuuaagcccuggccca

SEQ ID NO: 863718 - RNA, 22 nt, Human
auggcauuauagcaaugguuug

SEQ ID NO: 863719 - RNA, 22 nt, Human
ugaaagguagcuggccucauag

SEQ ID NO: 863720 - RNA, 22 nt, Human
ucuuuucaucauuuaauaggua

SEQ ID NO: 863721 - RNA, 22 nt, Human
ucagaauuugauuccugggaua

SEQ ID NO: 863722 - RNA, 22 nt, Human
cccaggagaauauuuuuggguc

SEQ ID NO: 863723 - RNA, 22 nt, Human
uucugaaccauugagcacugcc

SEQ ID NO: 863724 - RNA, 21 nt, Human
aggcaucuaaagagaguagac

SEQ ID NO: 863725 - RNA, 22 nt, Human
aucaggaucacugggagucuug

SEQ ID NO: 863726 - RNA, 22 nt, Human
aauuuguuaaaagugagugaca

SEQ ID NO: 863727 - RNA, 22 nt, Human
uuaauuaaauucaugagcauug

SEQ ID NO: 863728 - RNA, 22 nt, Human
uauuccaacugucauagucaua

SEQ ID NO: 863729 - RNA, 22 nt, Human
gaaauauacaugaagucggcug

SEQ ID NO: 863730 - RNA, 22 nt, Human
acaaagucacaauaauuaaccu

SEQ ID NO: 863731 - RNA, 22 nt, Human
guuaucaugcuucaucaucacu

SEQ ID NO: 863732 - RNA, 22 nt, Human
ucaaaauuucagcacuagcccu

SEQ ID NO: 863733 - RNA, 22 nt, Human
acaaagaucuugcuuuccuacu

SEQ ID NO: 863734 - RNA, 22 nt, Human
ugcugaugcuguucuguuagga

SEQ ID NO: 863735 - RNA, 22 nt, Human
augcugugucaccuuaggauuu

SEQ ID NO: 863736 - RNA, 22 nt, Human
aguacaauuuaaugaagauagc

SEQ ID NO: 863737 - RNA, 22 nt, Human
uucucuuagcuguaaagucaau

SEQ ID NO: 863738 - RNA, 23 nt, Human
ccaaagucgaagucuaguccaga

SEQ ID NO: 863739 - RNA, 20 nt, Human
caucagaaauccugacccac

SEQ ID NO: 863740 - RNA, 22 nt, Human
acaaauauuuacugaauccacu

SEQ ID NO: 863741 - RNA, 22 nt, Human
gaggccagaagugccucgggcu

SEQ ID NO: 863742 - RNA, 22 nt, Human
aggcuggagggcaauggcaaga

SEQ ID NO: 863743 - RNA, 22 nt, Human
uugcauuugaucuuggguucuc

SEQ ID NO: 863744 - RNA, 22 nt, Human
ggaggggauuuaguagaugcua

SEQ ID NO: 863745 - RNA, 22 nt, Human
gaugauaacagcauuucaacug

SEQ ID NO: 863746 - RNA, 22 nt, Human
gauuucaaggaguuuucacagu

SEQ ID NO: 863747 - RNA, 22 nt, Human
aagggcaggagaagacggauau

SEQ ID NO: 863748 - RNA, 22 nt, Human
agagggcagucucagauuggga

SEQ ID NO: 863749 - RNA, 22 nt, Human
ccaggagauaagcugaguuuau

SEQ ID NO: 863750 - RNA, 22 nt, Human
aaauuucaguuaccuuuacguu

SEQ ID NO: 863751 - RNA, 22 nt, Human
gccaggaggcugcuguguaggc

SEQ ID NO: 863752 - RNA, 22 nt, Human
augcuguguuugagaaccuagg

SEQ ID NO: 863753 - RNA, 21 nt, Human
cucaggaucuuauauauuagu

SEQ ID NO: 863754 - RNA, 22 nt, Human
caagauggaguccgggaaugug

SEQ ID NO: 863755 - RNA, 22 nt, Human
gcaggagacaacuguaaggaga

SEQ ID NO: 863756 - RNA, 22 nt, Human
cacauacuuguguguacauaug

SEQ ID NO: 863757 - RNA, 22 nt, Human
gauaaaauaacuauggaauacu

SEQ ID NO: 863758 - RNA, 22 nt, Human
aggguggcaccuggaagggaug

SEQ ID NO: 863759 - RNA, 22 nt, Human
uugaaagugccaaguccuagug

SEQ ID NO: 863760 - RNA, 22 nt, Human
uucuuucucaacaugaauguuu

SEQ ID NO: 863761 - RNA, 21 nt, Human
uuucacaaaaguaugugacaa

SEQ ID NO: 863762 - RNA, 22 nt, Human
aaacggauauaacagcaaacgc

SEQ ID NO: 863763 - RNA, 17 nt, Human
aagagaggcugagcugg

SEQ ID NO: 863764 - RNA, 22 nt, Human
auguucaaacuuuuuacacacc

SEQ ID NO: 863765 - RNA, 22 nt, Human
uaauuguagcuuuguaaucagc

SEQ ID NO: 863766 - RNA, 22 nt, Human
aagacuuucaaaccuauguuug

SEQ ID NO: 863767 - RNA, 22 nt, Human
agcaccauugcaaauauggcag

SEQ ID NO: 863768 - RNA, 22 nt, Human
acuggcaggcugcuggccggcg

SEQ ID NO: 863769 - RNA, 22 nt, Human
cccuggaguccuggcaguugau

SEQ ID NO: 863770 - RNA, 22 nt, Human
uucuuuuccuacacagcgauuu

SEQ ID NO: 863771 - RNA, 22 nt, Human
ugagagggcccagagcacacca

SEQ ID NO: 863772 - RNA, 22 nt, Human
aauuuuaaucaguggugcugag

SEQ ID NO: 863773 - RNA, 22 nt, Human
cccaggaaguggagguugcagu

SEQ ID NO: 863774 - RNA, 23 nt, Human
uuacagaaaguaugcuuuuguuu

SEQ ID NO: 863775 - RNA, 22 nt, Human
cuuaaagaguauuuaauauaau

SEQ ID NO: 863776 - RNA, 22 nt, Human
uagugcuuuaaguuuacagaga

SEQ ID NO: 863777 - RNA, 22 nt, Human
caacauuugaguaaagaaaugg

SEQ ID NO: 863778 - RNA, 22 nt, Human
uggcagcuugaaugcagucuuu

SEQ ID NO: 863779 - RNA, 22 nt, Human
uucaggauggcggauguugggg

SEQ ID NO: 863780 - RNA, 22 nt, Human
aagcagaggguauggccagguu

SEQ ID NO: 863781 - RNA, 22 nt, Human
uugacacaguuuucucauuaag

SEQ ID NO: 863782 - RNA, 22 nt, Human
aauguuuuaaaagagauugaga

SEQ ID NO: 863783 - RNA, 23 nt, Human
uuaaacuucagugcagaacacuc

SEQ ID NO: 863784 - RNA, 20 nt, Human
uauuuacaacuuagagccuc

SEQ ID NO: 863785 - RNA, 22 nt, Human
aaugaaacuguauauagacugu

SEQ ID NO: 863786 - RNA, 22 nt, Human
gaggagcuugaggcuaggagcc

SEQ ID NO: 863787 - RNA, 22 nt, Human
ucagaauuagagcucuucuuga

SEQ ID NO: 863788 - RNA, 22 nt, Human
ucacaguuauagucuguagaau

SEQ ID NO: 863789 - RNA, 22 nt, Human
auacauacauguaugcacauac

SEQ ID NO: 863790 - RNA, 23 nt, Human
aggucagcaggcaaggaaauggc

SEQ ID NO: 863791 - RNA, 22 nt, Human
gaucauuuugaugcccuuuuag

SEQ ID NO: 863792 - RNA, 22 nt, Human
gugagggguggcugagcaguuu

SEQ ID NO: 863793 - RNA, 22 nt, Human
uuaaagaauagugccccuauug

SEQ ID NO: 863794 - RNA, 22 nt, Human
uucuuuuacauuaagauuucag

SEQ ID NO: 863795 - RNA, 22 nt, Human
uacccaggggcugagcagaggu

SEQ ID NO: 863796 - RNA, 22 nt, Human
agagugaaguuuuugaaaguga

SEQ ID NO: 863797 - RNA, 21 nt, Human
agaggcaggcauuaaguacac

SEQ ID NO: 863798 - RNA, 22 nt, Human
cauagaaacugagacaaggauu

SEQ ID NO: 863799 - RNA, 22 nt, Human
acccaggacacagagaugaccc

SEQ ID NO: 863800 - RNA, 22 nt, Human
uaaauuguuuucuagaaguugu

SEQ ID NO: 863801 - RNA, 22 nt, Human
aggcagcaugggcccagagucc

SEQ ID NO: 863802 - RNA, 22 nt, Human
auucuucagcaggggacacuau

SEQ ID NO: 863803 - RNA, 22 nt, Human
uguccucuuccagugcuccuuc

SEQ ID NO: 863804 - RNA, 21 nt, Human
uucucagaucgaguagugaga

SEQ ID NO: 863805 - RNA, 22 nt, Human
ucaggagaaucagggcuguccu

SEQ ID NO: 863806 - RNA, 22 nt, Human
aucagcaucuuuaacaauuacc

SEQ ID NO: 863807 - RNA, 19 nt, Human
uccauaaugaagauagagg

SEQ ID NO: 863808 - RNA, 22 nt, Human
aaggccagcuuguagggcuggu

SEQ ID NO: 863809 - RNA, 22 nt, Human
cugaaaauguuacacaggaaga

SEQ ID NO: 863810 - RNA, 22 nt, Human
caguccuuaaggaaacauuugu

SEQ ID NO: 863811 - RNA, 22 nt, Human
uugauguacagaauuguucaca

SEQ ID NO: 863812 - RNA, 22 nt, Human
gaggcagcaaaauauaucauaa

SEQ ID NO: 863813 - RNA, 22 nt, Human
auacacauauguguguauaugu

SEQ ID NO: 863814 - RNA, 22 nt, Human
uguuuuaagagcgcacuuuaua

SEQ ID NO: 863815 - RNA, 22 nt, Human
gagacagcacaggccacuggga

SEQ ID NO: 863816 - RNA, 22 nt, Human
aucaggauucaccccagagcug

SEQ ID NO: 863817 - RNA, 20 nt, Human
aagggcagagggaacagacu

SEQ ID NO: 863818 - RNA, 22 nt, Human
aaaguccugacugcaggggaug

SEQ ID NO: 863819 - RNA, 22 nt, Human
gaggcaucugggcacagaagug

SEQ ID NO: 863820 - RNA, 22 nt, Human
ucccaggauguuggcggcaggu

SEQ ID NO: 863821 - RNA, 22 nt, Human
ugucauaacuuagugacaaauc

SEQ ID NO: 863822 - RNA, 22 nt, Human
cccaggaggcagauguugcagu

SEQ ID NO: 863823 - RNA, 22 nt, Human
aaguccuuaggaagcagucguu

SEQ ID NO: 863824 - RNA, 22 nt, Human
ucauacaucuguccuggagcuc

SEQ ID NO: 863825 - RNA, 22 nt, Human
uugcugugucauuuguuuaauc

SEQ ID NO: 863826 - RNA, 22 nt, Human
ugaacucgggaggaggcugcag

SEQ ID NO: 863827 - RNA, 22 nt, Human
ggcagcugcaaaucugcucugu

SEQ ID NO: 863828 - RNA, 22 nt, Human
ucaaauaccagcaauuucaugu

SEQ ID NO: 863829 - RNA, 22 nt, Human
uucagaaaggauaauuggaagg

SEQ ID NO: 863830 - RNA, 22 nt, Human
acaguccuuguguggaacauua

SEQ ID NO: 863831 - RNA, 22 nt, Human
uggcauuugggcuggcuuuucu

SEQ ID NO: 863832 - RNA, 22 nt, Human
ugaagaaucccagggaauuugg

SEQ ID NO: 863833 - RNA, 22 nt, Human
gagaggaguagacacuuugguu

SEQ ID NO: 863834 - RNA, 22 nt, Human
acaaugaacacacaaggaauuc

SEQ ID NO: 863835 - RNA, 22 nt, Human
gugaauaaucacccuucuggau

SEQ ID NO: 863836 - RNA, 20 nt, Human
augugucuguaaacaacucu

SEQ ID NO: 863837 - RNA, 22 nt, Human
gucaggauuuuaaaaucccagu

SEQ ID NO: 863838 - RNA, 22 nt, Human
uguacaaucugaugauguaugg

SEQ ID NO: 863839 - RNA, 22 nt, Human
aaaggccacugcaagggaaggu

SEQ ID NO: 863840 - RNA, 22 nt, Human
aaauuuucagagcacuagagaa

SEQ ID NO: 863841 - RNA, 22 nt, Human
uuuuuguagucauuagaagagg

SEQ ID NO: 863842 - RNA, 22 nt, Human
uacuuuuagccuauuugauucu

SEQ ID NO: 863843 - RNA, 22 nt, Human
aaggcagcagaggaaaggugcu

SEQ ID NO: 863844 - RNA, 22 nt, Human
uucuucaugcuguugcugcuug

SEQ ID NO: 863845 - RNA, 22 nt, Human
aucagaaauugcuaccagugga

SEQ ID NO: 863846 - RNA, 22 nt, Human
ccaggagaugggaaaguagcag

SEQ ID NO: 863847 - RNA, 22 nt, Human
gagggaggugauacugaacgua

SEQ ID NO: 863848 - RNA, 22 nt, Human
caguccuugauccaauaguggg

SEQ ID NO: 863849 - RNA, 22 nt, Human
cucugcauuuuaacagaugauu

SEQ ID NO: 863850 - RNA, 22 nt, Human
uuccauaauaggcuuaagugaa

SEQ ID NO: 863851 - RNA, 22 nt, Human
uccaugagcuagcuuuccaaag

SEQ ID NO: 863852 - RNA, 22 nt, Human
ccugcucagagcgucuugugug

SEQ ID NO: 863853 - RNA, 20 nt, Human
cucaggauugucuagccccu

SEQ ID NO: 863854 - RNA, 22 nt, Human
uagaugcuacaauuuuguacuc

SEQ ID NO: 863855 - RNA, 22 nt, Human
ggacaagccugugaguggguuu

SEQ ID NO: 863856 - RNA, 20 nt, Human
uccaggagaacugggagccg

SEQ ID NO: 863857 - RNA, 22 nt, Human
ccuugcugcgugcuagcacaga

SEQ ID NO: 863858 - RNA, 22 nt, Human
uguaaauaauuccuaggcuuuu

SEQ ID NO: 863859 - RNA, 22 nt, Human
caguccuucuccauuaaggcuc

SEQ ID NO: 863860 - RNA, 22 nt, Human
agcuggcaguaugacuggugac

SEQ ID NO: 863861 - RNA, 22 nt, Human
aaagccagguugugugcaggaa

SEQ ID NO: 863862 - RNA, 22 nt, Human
gcaggagaaaugaagauugggu

SEQ ID NO: 863863 - RNA, 22 nt, Human
cugcagagcaaguaacauccuc

SEQ ID NO: 863864 - RNA, 22 nt, Human
aauaacuggcacauaucacaua

SEQ ID NO: 863865 - RNA, 22 nt, Human
ggaagagggaaccacgacugua

SEQ ID NO: 863866 - RNA, 22 nt, Human
cuccaugaauuugagcuuugug

SEQ ID NO: 863867 - RNA, 22 nt, Human
auucauaaguaaaugauuaccu

SEQ ID NO: 863868 - RNA, 22 nt, Human
auuucagguaccugugggaucc

SEQ ID NO: 863869 - RNA, 22 nt, Human
uaauuauuugaagacauuagag

SEQ ID NO: 863870 - RNA, 22 nt, Human
cccaggagagagacuugaaucu

SEQ ID NO: 863871 - RNA, 19 nt, Human
ucccaggaaccuuuuauuu

SEQ ID NO: 863872 - RNA, 22 nt, Human
aguuauaugugaaaacacguau

SEQ ID NO: 863873 - RNA, 22 nt, Human
uuucaaagucaauaucauuacc

SEQ ID NO: 863874 - RNA, 18 nt, Human
aaacuggcuuggccugug

SEQ ID NO: 863875 - RNA, 22 nt, Human
uugacacagaucaauauucaac

SEQ ID NO: 863876 - RNA, 22 nt, Human
caacagucugguuuauauaaua

SEQ ID NO: 863877 - RNA, 20 nt, Human
auacuuguuuucaggcuuuu

SEQ ID NO: 863878 - RNA, 22 nt, Human
uggagaggaaagugcaguuuug

SEQ ID NO: 863879 - RNA, 22 nt, Human
uggcauuucaguauuuucauaa

SEQ ID NO: 863880 - RNA, 22 nt, Human
uuaaagauucugaggcugauua

SEQ ID NO: 863881 - RNA, 19 nt, Human
caguccuuuccgcuuucuc

SEQ ID NO: 863882 - RNA, 22 nt, Human
cuucugugcuucacaguugcca

SEQ ID NO: 863883 - RNA, 18 nt, Human
gcagcugacacuggaguu

SEQ ID NO: 863884 - RNA, 22 nt, Human
gugguuuugccauuacaaguaa

SEQ ID NO: 863885 - RNA, 22 nt, Human
agcugaugccauguggaacagu

SEQ ID NO: 863886 - RNA, 22 nt, Human
agucaccauuuucaccugccuc

SEQ ID NO: 863887 - RNA, 19 nt, Human
gugcuuuuuaagagcucag

SEQ ID NO: 863888 - RNA, 22 nt, Human
ucuuuccaaggacucuguagca

SEQ ID NO: 863889 - RNA, 22 nt, Human
uacaaaguagaaauucaguaaa

SEQ ID NO: 863890 - RNA, 22 nt, Human
accaggagccauagagucaggc

SEQ ID NO: 863891 - RNA, 22 nt, Human
cagugguugguagauacuugag

SEQ ID NO: 863892 - RNA, 22 nt, Human
gcugcccauuccacuggauggu

SEQ ID NO: 863893 - RNA, 22 nt, Human
uaugccugauaacugugucucu

SEQ ID NO: 863894 - RNA, 19 nt, Human
agaaguuagacauugcaau

SEQ ID NO: 863895 - RNA, 22 nt, Human
caucagaaaccuugaggaaacu

SEQ ID NO: 863896 - RNA, 22 nt, Human
uuugcacuagcauuuguccaug

SEQ ID NO: 863897 - RNA, 23 nt, Human
uuuauccaacucuguaaucucuc

SEQ ID NO: 863898 - RNA, 22 nt, Human
uuaaauuccagccucauaauag

SEQ ID NO: 863899 - RNA, 22 nt, Human
cccaggagauaacguucccaag

SEQ ID NO: 863900 - RNA, 22 nt, Human
gaccuggaggauccucuucuug

SEQ ID NO: 863901 - RNA, 20 nt, Human
gcccaggaauuugcauuucu

SEQ ID NO: 863902 - RNA, 22 nt, Human
uuccuuaguguuagauucugug

SEQ ID NO: 863903 - RNA, 22 nt, Human
uucuuauagaagcaaccauugu

SEQ ID NO: 863904 - RNA, 19 nt, Human
cauuuuaagcauccccagu

SEQ ID NO: 863905 - RNA, 22 nt, Human
uugaaagaggcaaaguuugauc

SEQ ID NO: 863906 - RNA, 22 nt, Human
uuuccuaggagauugaucacau

SEQ ID NO: 863907 - RNA, 22 nt, Human
uucucagauauuuacugagcau

SEQ ID NO: 863908 - RNA, 23 nt, Human
uaucagugugaugaggcugcugc

SEQ ID NO: 863909 - RNA, 22 nt, Human
ucuauacaugugcacacacauc

SEQ ID NO: 863910 - RNA, 15 nt, Human
uggcagcuuguuaag

SEQ ID NO: 863911 - RNA, 18 nt, Human
ugaauagggguuugcaga

SEQ ID NO: 863912 - RNA, 22 nt, Human
ggggcagccuccaggaaagcug

SEQ ID NO: 863913 - RNA, 19 nt, Human
caggaugaucccaugacac

SEQ ID NO: 863914 - RNA, 22 nt, Human
agaagucauuuauguuagauga

SEQ ID NO: 863915 - RNA, 22 nt, Human
ucugcaggcuuggaguggcagc

SEQ ID NO: 863916 - RNA, 22 nt, Human
aaaucaguuaagaugaggccau

SEQ ID NO: 863917 - RNA, 22 nt, Human
guaggcagucucucaggugauc

SEQ ID NO: 863918 - RNA, 22 nt, Human
gagugcagaugccagccccagu

SEQ ID NO: 863919 - RNA, 22 nt, Human
uggcauuuggcuuacuuauguu

SEQ ID NO: 863920 - RNA, 22 nt, Human
uaggauuuaggcuuuaacaucu

SEQ ID NO: 863921 - RNA, 22 nt, Human
uuccuuaguugacugucuuagu

SEQ ID NO: 863922 - RNA, 22 nt, Human
augaaaauguacauguguauaa

SEQ ID NO: 863923 - RNA, 22 nt, Human
ggauggcagucugcaugagaaa

SEQ ID NO: 863924 - RNA, 17 nt, Human
gucauucucagaaaaug

SEQ ID NO: 863925 - RNA, 22 nt, Human
aaacaaacaauuaguugugugg

SEQ ID NO: 863926 - RNA, 22 nt, Human
ucaggauguuaauauagcauua

SEQ ID NO: 863927 - RNA, 22 nt, Human
acagucucuccacacugcaggg

SEQ ID NO: 863928 - RNA, 23 nt, Human
guaaaauacgcagugcaguguga

SEQ ID NO: 863929 - RNA, 22 nt, Human
uauuuccagcaguaagaagaca

SEQ ID NO: 863930 - RNA, 22 nt, Human
ccuugcugaccaucaccuuuga

SEQ ID NO: 863931 - RNA, 20 nt, Human
agcauuugaaauaugacuau

SEQ ID NO: 863932 - RNA, 22 nt, Human
aggauuuaccuccagcuaggcu

SEQ ID NO: 863933 - RNA, 18 nt, Human
gagagggaucccucagga

SEQ ID NO: 863934 - RNA, 22 nt, Human
cucagaauuuagggcucugagg

SEQ ID NO: 863935 - RNA, 22 nt, Human
gcuuggcauugaccauuaucau

SEQ ID NO: 863936 - RNA, 22 nt, Human
agaccgagaaguucuccaggcc

SEQ ID NO: 863937 - RNA, 22 nt, Human
uucucagaugauucagauaaac

SEQ ID NO: 863938 - RNA, 22 nt, Human
aggauuuauuauaugcccucau

SEQ ID NO: 863939 - RNA, 22 nt, Human
uuugaagugcaaugaggauucu

SEQ ID NO: 863940 - RNA, 22 nt, Human
cuuaagauuugcgauaccuaau

SEQ ID NO: 863941 - RNA, 22 nt, Human
uuagccaugcccuagaagagga

SEQ ID NO: 863942 - RNA, 22 nt, Human
caguccuuagucuggauggcuu

SEQ ID NO: 863943 - RNA, 22 nt, Human
aggcagguccccuggaaggcac

SEQ ID NO: 863944 - RNA, 20 nt, Human
ucagugauuuugaagaggaa

SEQ ID NO: 863945 - RNA, 22 nt, Human
ggagcggagggagggccacugu

SEQ ID NO: 863946 - RNA, 22 nt, Human
cugaauaaagcccucgcgcgcu

SEQ ID NO: 863947 - RNA, 22 nt, Human
uggugguuaugcgcuuuguggg

SEQ ID NO: 863948 - RNA, 22 nt, Human
cacaauguauauguauaucaaa

SEQ ID NO: 863949 - RNA, 22 nt, Human
uaaaugaagaaauggagauugu

SEQ ID NO: 863950 - RNA, 22 nt, Human
caugauuuugucuuguguuaau

SEQ ID NO: 863951 - RNA, 22 nt, Human
gagugcaguuggggugagggga

SEQ ID NO: 863952 - RNA, 22 nt, Human
gcucagagcuugaaguuccacu

SEQ ID NO: 863953 - RNA, 22 nt, Human
agccagcugugggcucaggcgg

SEQ ID NO: 863954 - RNA, 22 nt, Human
ugcugcugaucauuuauagucu

SEQ ID NO: 863955 - RNA, 22 nt, Human
ggcagcacugcagcuuguuggg

SEQ ID NO: 863956 - RNA, 22 nt, Human
cucaggaugaaagucaugguga

SEQ ID NO: 863957 - RNA, 22 nt, Human
ucuacccagagcuaugaccuga

SEQ ID NO: 863958 - RNA, 20 nt, Human
ucuggcaggugaacgagcug

SEQ ID NO: 863959 - RNA, 22 nt, Human
uucauguguauggaacauuuuu

SEQ ID NO: 863960 - RNA, 22 nt, Human
aagcaaaggcaggagcuuguga

SEQ ID NO: 863961 - RNA, 23 nt, Human
cugcugugaaacaugguuuuggu

SEQ ID NO: 863962 - RNA, 22 nt, Human
acuagaaauuacucagaauaaa

SEQ ID NO: 863963 - RNA, 22 nt, Human
gcuguguuggugaagcuguagc

SEQ ID NO: 863964 - RNA, 22 nt, Human
agaggccagguccagaguuugu

SEQ ID NO: 863965 - RNA, 22 nt, Human
gaaggucaccuccccucucugg

SEQ ID NO: 863966 - RNA, 22 nt, Human
uugguccacugugaaauuggga

SEQ ID NO: 863967 - RNA, 22 nt, Human
ggagguggcagagggacauucu

SEQ ID NO: 863968 - RNA, 22 nt, Human
cccaggaguaagugacauuguu

SEQ ID NO: 863969 - RNA, 22 nt, Human
caaguccuaaauguauuuguug

SEQ ID NO: 863970 - RNA, 22 nt, Human
auauacaguuuuacaggguuuc

SEQ ID NO: 863971 - RNA, 22 nt, Human
aagaggagacuucagcaacuug

SEQ ID NO: 863972 - RNA, 22 nt, Human
augaauaaguaaacuccuuugg

SEQ ID NO: 863973 - RNA, 22 nt, Human
agaaaacuugucacagcucuca

SEQ ID NO: 863974 - RNA, 22 nt, Human
ucaauucugguccucaggaacu

SEQ ID NO: 863975 - RNA, 22 nt, Human
uuacagaagugaaggccuuuaa

SEQ ID NO: 863976 - RNA, 22 nt, Human
ccagugcuuccaggaauacggu

SEQ ID NO: 863977 - RNA, 22 nt, Human
ugcuuuggaucuauuugcugag

SEQ ID NO: 863978 - RNA, 22 nt, Human
cagugaaaucacaacuuuaguu

SEQ ID NO: 863979 - RNA, 22 nt, Human
uaacagaagaaaacauauugga

SEQ ID NO: 863980 - RNA, 22 nt, Human
aauagcucacugauuucucuuu

SEQ ID NO: 863981 - RNA, 22 nt, Human
ucaguaaaugguugcuguuauu

SEQ ID NO: 863982 - RNA, 22 nt, Human
agcuggcagucauccuagugag

SEQ ID NO: 863983 - RNA, 22 nt, Human
caaacuggcuaugggaaucuug

SEQ ID NO: 863984 - RNA, 22 nt, Human
uucagaaagguaaauggauuuc

SEQ ID NO: 863985 - RNA, 19 nt, Human
caggaaugagguaauggcu

SEQ ID NO: 863986 - RNA, 22 nt, Human
uucccucucacuuaaagcuugg

SEQ ID NO: 863987 - RNA, 22 nt, Human
gggagucugggcuagacuccuu

SEQ ID NO: 863988 - RNA, 20 nt, Human
guggcaggcagugaaggagc

SEQ ID NO: 863989 - RNA, 22 nt, Human
aaagcagaggugauaugacuua

SEQ ID NO: 863990 - RNA, 22 nt, Human
uaaggccaaacuauuauaguuc

SEQ ID NO: 863991 - RNA, 22 nt, Human
auaaagucuaccguauuaaaga

SEQ ID NO: 863992 - RNA, 22 nt, Human
ucauuuauaaggaugcaauuaa

SEQ ID NO: 863993 - RNA, 22 nt, Human
aagugggaauagaaaugaaggu

SEQ ID NO: 863994 - RNA, 22 nt, Human
caacuuucuguuaaauguuagu

SEQ ID NO: 863995 - RNA, 22 nt, Human
caggauggagaguuguugguug

SEQ ID NO: 863996 - RNA, 22 nt, Human
acuauacaccaaaauauuaagg

SEQ ID NO: 863997 - RNA, 22 nt, Human
uggcuguguuaccacuucaugu

SEQ ID NO: 863998 - RNA, 22 nt, Human
aaugggauaauuguucauggga

SEQ ID NO: 863999 - RNA, 22 nt, Human
cauugcuguuaauugucucuag

SEQ ID NO: 864000 - RNA, 22 nt, Human
guagccauuggcaaugaagccu

SEQ ID NO: 864001 - RNA, 22 nt, Human
aaguccuuuccaguccugugau

SEQ ID NO: 864002 - RNA, 22 nt, Human
cagucaccugaagacuugacca

SEQ ID NO: 864003 - RNA, 22 nt, Human
ccaugagccaggcugaggaagc

SEQ ID NO: 864004 - RNA, 22 nt, Human
uuagaaaugcacccaagaccua

SEQ ID NO: 864005 - RNA, 22 nt, Human
aggaagcuuagugaaaggacca

SEQ ID NO: 864006 - RNA, 22 nt, Human
cuccaggagggggauggcugua

SEQ ID NO: 864007 - RNA, 22 nt, Human
gucacagaguuauuaauugugu

SEQ ID NO: 864008 - RNA, 22 nt, Human
cccaggaaaguggaggcggcug

SEQ ID NO: 864009 - RNA, 22 nt, Human
agucuucucauuucacaugcuu

SEQ ID NO: 864010 - RNA, 22 nt, Human
ucugggaauuuauuggcacuuu

SEQ ID NO: 864011 - RNA, 22 nt, Human
aaaauaacuucuacuauuugca

SEQ ID NO: 864012 - RNA, 22 nt, Human
auucuuaauugccaugcuguau

SEQ ID NO: 864013 - RNA, 22 nt, Human
ugaaaugauguacaagaaggca

SEQ ID NO: 864014 - RNA, 22 nt, Human
uguugauuaguguuuagacuua

SEQ ID NO: 864015 - RNA, 17 nt, Human
agagagagcaugccacc

SEQ ID NO: 864016 - RNA, 22 nt, Human
acagaauuuaaagcucuagacu

SEQ ID NO: 864017 - RNA, 22 nt, Human
ccaggcugggcuacaaguugag

SEQ ID NO: 864018 - RNA, 22 nt, Human
aaggcagccucugccagccggg

SEQ ID NO: 864019 - RNA, 22 nt, Human
aaugaaaauuggacccuagaac

SEQ ID NO: 864020 - RNA, 22 nt, Human
cccaggaagagugaguggcauu

SEQ ID NO: 864021 - RNA, 22 nt, Human
ugucauaaucaguuuugcaugu

SEQ ID NO: 864022 - RNA, 22 nt, Human
cuuaggcaaccaggucaaugcu

SEQ ID NO: 864023 - RNA, 22 nt, Human
uuuacagaugaggauacugagg

SEQ ID NO: 864024 - RNA, 22 nt, Human
cagaauaaaagucccaaggcau

SEQ ID NO: 864025 - RNA, 22 nt, Human
gaugaaaaaagacgagcauaua

SEQ ID NO: 864026 - RNA, 22 nt, Human
gacagcuguggagaggcaugug

SEQ ID NO: 864027 - RNA, 22 nt, Human
acuuuaucaggaaucacacagc

SEQ ID NO: 864028 - RNA, 21 nt, Human
ggcagcguguggacaggaagg

SEQ ID NO: 864029 - RNA, 22 nt, Human
aggcaagcccccagugaggcuc

SEQ ID NO: 864030 - RNA, 23 nt, Human
ucuaauacaugaaaccuagaugu

SEQ ID NO: 864031 - RNA, 22 nt, Human
gguacaaugguucauuuuaugu

SEQ ID NO: 864032 - RNA, 22 nt, Human
gaggagcugggucagggagaca

SEQ ID NO: 864033 - RNA, 22 nt, Human
aggcuagcuuuggcucaguaaa

SEQ ID NO: 864034 - RNA, 22 nt, Human
ggcagccuugacuagugacuua

SEQ ID NO: 864035 - RNA, 22 nt, Human
agggaagcuuguuacugagaag

SEQ ID NO: 864036 - RNA, 22 nt, Human
caaagauuuuagaauuugcaau

SEQ ID NO: 864037 - RNA, 22 nt, Human
uaaucugaagaaacaggacuug

SEQ ID NO: 864038 - RNA, 22 nt, Human
augaaaacggaccagagcuauu

SEQ ID NO: 864039 - RNA, 22 nt, Human
guuuucugauuagcaaaucuga

SEQ ID NO: 864040 - RNA, 22 nt, Human
ucuuaaagagcgcaauuugagg

SEQ ID NO: 864041 - RNA, 22 nt, Human
gcuagaucucucauaaauucca

SEQ ID NO: 864042 - RNA, 22 nt, Human
uucuucuucauuucugacgaug

SEQ ID NO: 864043 - RNA, 22 nt, Human
uaagagaauguuguggcuaggu

SEQ ID NO: 864044 - RNA, 22 nt, Human
uaauacuuuugccuuguauuca

SEQ ID NO: 864045 - RNA, 22 nt, Human
gaauacauuggaaaucagaaua

SEQ ID NO: 864046 - RNA, 22 nt, Human
guuaggcagcccaagaugucag

SEQ ID NO: 864047 - RNA, 22 nt, Human
uuuagaaugugacuguauuuga

SEQ ID NO: 864048 - RNA, 22 nt, Human
cccaggaaaugaacuucugauu

SEQ ID NO: 864049 - RNA, 22 nt, Human
cucuaacaccacagugugguuu

SEQ ID NO: 864050 - RNA, 20 nt, Human
cucuccucacccgugucagg

SEQ ID NO: 864051 - RNA, 22 nt, Human
agggagcucaguuggaagcggu

SEQ ID NO: 864052 - RNA, 22 nt, Human
gggcagcugccagaggccaugg

SEQ ID NO: 864053 - RNA, 21 nt, Human
acaugucuggucauuuuuagc

SEQ ID NO: 864054 - RNA, 22 nt, Human
aaaaacugcaauuacuuuuguc

SEQ ID NO: 864055 - RNA, 20 nt, Human
cuucuucaguaguuuguucu

SEQ ID NO: 864056 - RNA, 21 nt, Human
uuuaaagaauaggaagggagg

SEQ ID NO: 864057 - RNA, 22 nt, Human
aggccagcuuccagaggggcag

SEQ ID NO: 864058 - RNA, 22 nt, Human
aaucagaaagaucuugaugaga

SEQ ID NO: 864059 - RNA, 22 nt, Human
auucauuugcuauuguguaugg

SEQ ID NO: 864060 - RNA, 22 nt, Human
gacuaugugaagugugaauagg

SEQ ID NO: 864061 - RNA, 22 nt, Human
gucuucaacaauaacuaccacu

SEQ ID NO: 864062 - RNA, 22 nt, Human
uggaguucauccaugacagcuu

SEQ ID NO: 864063 - RNA, 22 nt, Human
gaggccagcuaguccaggaagu

SEQ ID NO: 864064 - RNA, 22 nt, Human
gcagcugaauguccauugcugc

SEQ ID NO: 864065 - RNA, 22 nt, Human
aaggcagcuuuaaaaaagaugc

SEQ ID NO: 864066 - RNA, 22 nt, Human
aggcaggcccucuggaaaggua

SEQ ID NO: 864067 - RNA, 22 nt, Human
acacuaaugagaaaggaauuaa

SEQ ID NO: 864068 - RNA, 22 nt, Human
gauaaaauauguggccuuuagu

SEQ ID NO: 864069 - RNA, 22 nt, Human
acuuuugguucuguaacuguga

SEQ ID NO: 864070 - RNA, 22 nt, Human
agcagaggaggauuuaguuagg

SEQ ID NO: 864071 - RNA, 19 nt, Human
acauuuaaauucagaucuc

SEQ ID NO: 864072 - RNA, 22 nt, Human
uagaaacagcauauauuagccc

SEQ ID NO: 864073 - RNA, 22 nt, Human
ugcuggaauaauuucauguuaa

SEQ ID NO: 864074 - RNA, 22 nt, Human
ggauggagguucucagaugcuc

SEQ ID NO: 864075 - RNA, 22 nt, Human
ccaggaaaauaccaagcuuuaa

SEQ ID NO: 864076 - RNA, 19 nt, Human
uggagggguuugaaugugg

SEQ ID NO: 864077 - RNA, 22 nt, Human
gcaggagacuggcugugguagu

SEQ ID NO: 864078 - RNA, 22 nt, Human
guacagaaggagcuuuggauuc

SEQ ID NO: 864079 - RNA, 22 nt, Human
uaaagaucuuaggaagauuuuc

SEQ ID NO: 864080 - RNA, 22 nt, Human
aagggaggccagagguuuugca

SEQ ID NO: 864081 - RNA, 22 nt, Human
ugaaagguuaaaaguaguauug

SEQ ID NO: 864082 - RNA, 22 nt, Human
ucacaguaucacacaaggauua

SEQ ID NO: 864083 - RNA, 22 nt, Human
ucacagaagagauauugacaga

SEQ ID NO: 864084 - RNA, 22 nt, Human
aauacauguuuucuacuauucu

SEQ ID NO: 864085 - RNA, 22 nt, Human
acccaggacuuggcaaccucau

SEQ ID NO: 864086 - RNA, 22 nt, Human
cuugaaguugcaaaacauuaau

SEQ ID NO: 864087 - RNA, 22 nt, Human
aagccaaugagagaggccucag

SEQ ID NO: 864088 - RNA, 22 nt, Human
uccauguguuuuccuguccaca

SEQ ID NO: 864089 - RNA, 22 nt, Human
aggccagcagcaugacggcauc

SEQ ID NO: 864090 - RNA, 22 nt, Human
agaggcaggagguugacuugag

SEQ ID NO: 864091 - RNA, 22 nt, Human
aagggcagaauagagaagaugg

SEQ ID NO: 864092 - RNA, 22 nt, Human
agggagcuaggauccugaaggu

SEQ ID NO: 864093 - RNA, 22 nt, Human
acaauacaggcuucuggacuua

SEQ ID NO: 864094 - RNA, 22 nt, Human
guaggcagauaggagugcagcc

SEQ ID NO: 864095 - RNA, 22 nt, Human
aaaucaguucucccuuucuuca

SEQ ID NO: 864096 - RNA, 22 nt, Human
augcuguggaugccuugcccca

SEQ ID NO: 864097 - RNA, 19 nt, Human
cuuugucagaacaugcuuc

SEQ ID NO: 864098 - RNA, 22 nt, Human
uaucaucuuguugucaugcagc

SEQ ID NO: 864099 - RNA, 22 nt, Human
uguacaauguggccaguguuaa

SEQ ID NO: 864100 - RNA, 22 nt, Human
ccugucacgaugacugcacucu

SEQ ID NO: 864101 - RNA, 22 nt, Human
uacuaaacaucuggcauuaaau

SEQ ID NO: 864102 - RNA, 22 nt, Human
auaacaugaccugugcuucaca

SEQ ID NO: 864103 - RNA, 22 nt, Human
uggagaauuuugucaccagaca

SEQ ID NO: 864104 - RNA, 22 nt, Human
ucaagugcuugugagguauuug

SEQ ID NO: 864105 - RNA, 22 nt, Human
cuucuucauaggcaguccuguu

SEQ ID NO: 864106 - RNA, 22 nt, Human
uagugcuugagucucuccguac

SEQ ID NO: 864107 - RNA, 22 nt, Human
auuuccagugcacugaauagaa

SEQ ID NO: 864108 - RNA, 23 nt, Human
cagcccuuccugcauguuuuugu

SEQ ID NO: 864109 - RNA, 19 nt, Human
uugaaauuguuugauaugg

SEQ ID NO: 864110 - RNA, 22 nt, Human
aggcagcccacaggacacagga

SEQ ID NO: 864111 - RNA, 22 nt, Human
aaguauuucguucugaaaaagu

SEQ ID NO: 864112 - RNA, 21 nt, Human
aaucauacaaaacaugucagg

SEQ ID NO: 864113 - RNA, 22 nt, Human
uggcauuuuguucaguauaugg

SEQ ID NO: 864114 - RNA, 22 nt, Human
acugguuuuccagguuacuucu

SEQ ID NO: 864115 - RNA, 22 nt, Human
gagggucccugcucagggccag

SEQ ID NO: 864116 - RNA, 17 nt, Human
uaucagaauguguuuac

SEQ ID NO: 864117 - RNA, 22 nt, Human
ucuuuggaucccaacuggcugg

SEQ ID NO: 864118 - RNA, 22 nt, Human
ggugaagggccuuaggagacag

SEQ ID NO: 864119 - RNA, 22 nt, Human
uaucagaaaugccuuaaauugg

SEQ ID NO: 864120 - RNA, 22 nt, Human
gacaauacagaaagggacaugc

SEQ ID NO: 864121 - RNA, 22 nt, Human
uucuccaacacaagcaugaugu

SEQ ID NO: 864122 - RNA, 20 nt, Human
gaugggaaucggagcuggua

SEQ ID NO: 864123 - RNA, 22 nt, Human
ucugggaaaugcuguuccuugu

SEQ ID NO: 864124 - RNA, 22 nt, Human
ccaggagaugauguuggggauu

SEQ ID NO: 864125 - RNA, 22 nt, Human
aggcggcuccgggagugugggc

SEQ ID NO: 864126 - RNA, 22 nt, Human
aguaaacauagaauguucuucc

SEQ ID NO: 864127 - RNA, 22 nt, Human
cagggaggaugggcuguuuugc

SEQ ID NO: 864128 - RNA, 22 nt, Human
gcgucugaguugcgggggcuca

SEQ ID NO: 864129 - RNA, 22 nt, Human
cugcugugugaccauggacagg

SEQ ID NO: 864130 - RNA, 22 nt, Human
auuuugaugcuaucuaaugaau

SEQ ID NO: 864131 - RNA, 21 nt, Human
uggagacucugguucuuugug

SEQ ID NO: 864132 - RNA, 22 nt, Human
gcagaauugauggagaacuuaa

SEQ ID NO: 864133 - RNA, 21 nt, Human
uuucuucacuuugccccaugu

SEQ ID NO: 864134 - RNA, 22 nt, Human
ugugaaggagaugaagggagug

SEQ ID NO: 864135 - RNA, 22 nt, Human
uaucuguuaugggcugaauugc

SEQ ID NO: 864136 - RNA, 22 nt, Human
uacaauacuuaaccuauuuugc

SEQ ID NO: 864137 - RNA, 18 nt, Human
agcuucccucugagaggg

SEQ ID NO: 864138 - RNA, 22 nt, Human
cagaaucagcccuugcuauuaa

SEQ ID NO: 864139 - RNA, 22 nt, Human
aagggaggaggauuuauuguac

SEQ ID NO: 864140 - RNA, 22 nt, Human
cagcugacuucauaggaagaca

SEQ ID NO: 864141 - RNA, 15 nt, Human
caggagaggaagguu

SEQ ID NO: 864142 - RNA, 22 nt, Human
cccaugagauucugaauuuggc

SEQ ID NO: 864143 - RNA, 18 nt, Human
cugcccagagcauuucau

SEQ ID NO: 864144 - RNA, 22 nt, Human
agggagcuuccgaacuacagcu

SEQ ID NO: 864145 - RNA, 22 nt, Human
ugcauuuccagauuucuggagu

SEQ ID NO: 864146 - RNA, 22 nt, Human
gaagaggaugacaggagccggu

SEQ ID NO: 864147 - RNA, 22 nt, Human
cuuagcaugugguguccuugua

SEQ ID NO: 864148 - RNA, 22 nt, Human
uaauauauuucugcuaagcuca

SEQ ID NO: 864149 - RNA, 22 nt, Human
ggcauuuaguuuucauauucug

SEQ ID NO: 864150 - RNA, 22 nt, Human
acucagaaugacugaugcugug

SEQ ID NO: 864151 - RNA, 22 nt, Human
gacuucuauuaauaccucuacu

SEQ ID NO: 864152 - RNA, 17 nt, Human
ugaaaucagcacccagg

SEQ ID NO: 864153 - RNA, 22 nt, Human
gcacaauuauuuaugcaguaug

SEQ ID NO: 864154 - RNA, 22 nt, Human
uuugaaaguucuucugacacua

SEQ ID NO: 864155 - RNA, 22 nt, Human
gauuucuugauaaguaguguga

SEQ ID NO: 864156 - RNA, 22 nt, Human
aucuaaacagguguucuuuaga

SEQ ID NO: 864157 - RNA, 22 nt, Human
uuugaaauaugaggcauuauga

SEQ ID NO: 864158 - RNA, 22 nt, Human
uugauacaggcucuauuucauc

SEQ ID NO: 864159 - RNA, 22 nt, Human
agggagcucuaaguagagggac

SEQ ID NO: 864160 - RNA, 22 nt, Human
aucuucucaagcagcauccugu

SEQ ID NO: 864161 - RNA, 20 nt, Human
aauaaacuacugagagaugu

SEQ ID NO: 864162 - RNA, 22 nt, Human
gcagcugcagagaccggguggg

SEQ ID NO: 864163 - RNA, 23 nt, Human
uuccagaguccacaucugccacc

SEQ ID NO: 864164 - RNA, 22 nt, Human
acuggauuccauugugcaaaga

SEQ ID NO: 864165 - RNA, 22 nt, Human
acauuuaaauaccuauguuucu

SEQ ID NO: 864166 - RNA, 22 nt, Human
gccugcagaacugugaggcaau

SEQ ID NO: 864167 - RNA, 16 nt, Human
gcaacuuugggguuga

SEQ ID NO: 864168 - RNA, 22 nt, Human
gaaauauuguacuggagauguu

SEQ ID NO: 864169 - RNA, 22 nt, Human
uccauuuuucaugacuccucaa

SEQ ID NO: 864170 - RNA, 22 nt, Human
guuccaaagucucugagcugag

SEQ ID NO: 864171 - RNA, 22 nt, Human
gagggaggggagcuccacccuc

SEQ ID NO: 864172 - RNA, 20 nt, Human
ccucaguguccuggacuggg

SEQ ID NO: 864173 - RNA, 22 nt, Human
cagcuagcuaagaaggccagag

SEQ ID NO: 864174 - RNA, 22 nt, Human
aaaaaucuaugacugcuucucc

SEQ ID NO: 864175 - RNA, 22 nt, Human
auggcuuuccugggacaugggc

SEQ ID NO: 864176 - RNA, 22 nt, Human
ggaccuggcaauuugcaucucu

SEQ ID NO: 864177 - RNA, 22 nt, Human
ccagaucuaaguccaaaguacu

SEQ ID NO: 864178 - RNA, 22 nt, Human
gagguagcaugcuggaagggac

SEQ ID NO: 864179 - RNA, 17 nt, Human
ggcagcugugugcaugc

SEQ ID NO: 864180 - RNA, 22 nt, Human
aauugcuaaagauuauguuuuc

SEQ ID NO: 864181 - RNA, 22 nt, Human
gaggcaccucgcgggaggaggc

SEQ ID NO: 864182 - RNA, 22 nt, Human
caaagccauagaguagauaaga

SEQ ID NO: 864183 - RNA, 22 nt, Human
aaagcagucacuccagugugau

SEQ ID NO: 864184 - RNA, 22 nt, Human
aggauuuacuagcaaggauucu

SEQ ID NO: 864185 - RNA, 22 nt, Human
aaauacugucucugagagagcc

SEQ ID NO: 864186 - RNA, 22 nt, Human
gacggcagaaacucaugagguc

SEQ ID NO: 864187 - RNA, 22 nt, Human
gguggagcuggaccaggagagg

SEQ ID NO: 864188 - RNA, 22 nt, Human
auggcauuccaagucuucuuuu

SEQ ID NO: 864189 - RNA, 22 nt, Human
uaaguccuagaugauucacaga

SEQ ID NO: 864190 - RNA, 22 nt, Human
uucauaaucaccaaaaacugga

SEQ ID NO: 864191 - RNA, 22 nt, Human
agacccagaaagcagcugcauu

SEQ ID NO: 864192 - RNA, 19 nt, Human
cuugcugggugguuucugc

SEQ ID NO: 864193 - RNA, 22 nt, Human
uggggcuccuccuggcaggagg

SEQ ID NO: 864194 - RNA, 22 nt, Human
uaaguccuaauggcagaagucu

SEQ ID NO: 864195 - RNA, 22 nt, Human
auacagaaaaguggauagccag

SEQ ID NO: 864196 - RNA, 22 nt, Human
ucucaggaagugauauugagac

SEQ ID NO: 864197 - RNA, 22 nt, Human
caucagaaccaguggggacauu

SEQ ID NO: 864198 - RNA, 19 nt, Human
acaaaugauguugcacuga

SEQ ID NO: 864199 - RNA, 22 nt, Human
auacagaacucucaguuguaua

SEQ ID NO: 864200 - RNA, 20 nt, Human
ucucuucuggggagauaaaa

SEQ ID NO: 864201 - RNA, 22 nt, Human
cuucuucaguugcauguauugg

SEQ ID NO: 864202 - RNA, 22 nt, Human
gcuggauccacaaauaacuuug

SEQ ID NO: 864203 - RNA, 22 nt, Human
uuuacagaauguugaauuuggg

SEQ ID NO: 864204 - RNA, 22 nt, Human
uaaaacuuaacuauccagauua

SEQ ID NO: 864205 - RNA, 22 nt, Human
ucaggagaaaauaucaggaagu

SEQ ID NO: 864206 - RNA, 22 nt, Human
ugaggggagcccgcccuggacg

SEQ ID NO: 864207 - RNA, 22 nt, Human
auaaagucauuaugaagaucua

SEQ ID NO: 864208 - RNA, 22 nt, Human
cuguaugaggaucagacuggac

SEQ ID NO: 864209 - RNA, 22 nt, Human
aucagaaaucuaggauucagaa

SEQ ID NO: 864210 - RNA, 17 nt, Human
aggcaggcagagcggga

SEQ ID NO: 864211 - RNA, 22 nt, Human
ugcugcugauggcaccuaggca

SEQ ID NO: 864212 - RNA, 22 nt, Human
aagaagagaacuggcauccuaa

SEQ ID NO: 864213 - RNA, 22 nt, Human
cacugagcugauagaauuccag

SEQ ID NO: 864214 - RNA, 22 nt, Human
uuuacauuucccucugucaguu

SEQ ID NO: 864215 - RNA, 19 nt, Human
augcuuuauguuauuucuu

SEQ ID NO: 864216 - RNA, 21 nt, Human
gcucagaguauugcacuguuu

SEQ ID NO: 864217 - RNA, 22 nt, Human
gcacaauaacagccaagguuau

SEQ ID NO: 864218 - RNA, 22 nt, Human
gauuucuuuagguguaauagug

SEQ ID NO: 864219 - RNA, 22 nt, Human
ccagaucuucuuuucagugucu

SEQ ID NO: 864220 - RNA, 22 nt, Human
guguugaugacauuuuagaaac

SEQ ID NO: 864221 - RNA, 22 nt, Human
gcugcaggcauuuuccugggca

SEQ ID NO: 864222 - RNA, 22 nt, Human
uggcagcuggaucccaaggcag

SEQ ID NO: 864223 - RNA, 22 nt, Human
gucauauacacugcauguaauc

SEQ ID NO: 864224 - RNA, 23 nt, Human
auuugagaaaguauuuuuaagac

SEQ ID NO: 864225 - RNA, 22 nt, Human
aaauuaguacauugcaaagucc

SEQ ID NO: 864226 - RNA, 21 nt, Human
cuguggaagggaacuagaggg

SEQ ID NO: 864227 - RNA, 22 nt, Human
aaucagaacuucucaggguggg

SEQ ID NO: 864228 - RNA, 22 nt, Human
uugaaagucacaauggcauuaa

SEQ ID NO: 864229 - RNA, 22 nt, Human
auuuccuuugcaaagacugugc

SEQ ID NO: 864230 - RNA, 22 nt, Human
uaaagucaucuuuacaucuuug

SEQ ID NO: 864231 - RNA, 22 nt, Human
auaguuugaaggcuguucuacu

SEQ ID NO: 864232 - RNA, 22 nt, Human
auggagggugucagagagcgaa

SEQ ID NO: 864233 - RNA, 22 nt, Human
gagggaugguaguugacacuga

SEQ ID NO: 864234 - RNA, 22 nt, Human
ggagccuggucagguuggcucc

SEQ ID NO: 864235 - RNA, 22 nt, Human
uauuucagggagaauaaauuug

SEQ ID NO: 864236 - RNA, 22 nt, Human
acacauuucucuuuuuguaagu

SEQ ID NO: 864237 - RNA, 22 nt, Human
acaugcuuccaaauuauguugg

SEQ ID NO: 864238 - RNA, 22 nt, Human
cuggacucugcagagaaaagua

SEQ ID NO: 864239 - RNA, 22 nt, Human
uggcagcucccagagcuuccaa

SEQ ID NO: 864240 - RNA, 22 nt, Human
gcaggcaguuauuuaguagaau

SEQ ID NO: 864241 - RNA, 22 nt, Human
augcuuuaaacuauaaauccac

SEQ ID NO: 864242 - RNA, 22 nt, Human
augcuuaaugaggguauauaug

SEQ ID NO: 864243 - RNA, 22 nt, Human
aggcaguuguagagagggcucu

SEQ ID NO: 864244 - RNA, 22 nt, Human
agacaacaucacuaaagcugag

SEQ ID NO: 864245 - RNA, 22 nt, Human
gcccaggaggcagagguugugg

SEQ ID NO: 864246 - RNA, 22 nt, Human
uaaugucaaggugauagauuug

SEQ ID NO: 864247 - RNA, 22 nt, Human
cuuaaagaaauugaggagagga

SEQ ID NO: 864248 - RNA, 22 nt, Human
uagaauaugauuaauuuucuua

SEQ ID NO: 864249 - RNA, 22 nt, Human
gguacaauggaccauaaaagcu

SEQ ID NO: 864250 - RNA, 22 nt, Human
aaaucucaauuugaauuguagc

SEQ ID NO: 864251 - RNA, 22 nt, Human
agagcagcugugacauggacag

SEQ ID NO: 864252 - RNA, 22 nt, Human
acucuucuugcugcucauuaau

SEQ ID NO: 864253 - RNA, 22 nt, Human
aguguuugagacacauuucacu

SEQ ID NO: 864254 - RNA, 22 nt, Human
guaggcagguggaggagugaag

SEQ ID NO: 864255 - RNA, 21 nt, Human
auacauucuauuaagcauuua

SEQ ID NO: 864256 - RNA, 22 nt, Human
aagguucuaagggaagccaugc

SEQ ID NO: 864257 - RNA, 22 nt, Human
aaauuagucgguuuaggaauuu

SEQ ID NO: 864258 - RNA, 20 nt, Human
gucaggauuaguaaacucug

SEQ ID NO: 864259 - RNA, 22 nt, Human
uauuucuucgggauucaagcua

SEQ ID NO: 864260 - RNA, 22 nt, Human
accaggaggccuggagcacaaa

SEQ ID NO: 864261 - RNA, 22 nt, Human
uggcagcuaucuuuaaugagau

SEQ ID NO: 864262 - RNA, 23 nt, Human
cugcuguguuggucucgauggga

SEQ ID NO: 864263 - RNA, 22 nt, Human
acaacauucuuaaauacacuga

SEQ ID NO: 864264 - RNA, 22 nt, Human
cuuuccaaugcauuuccaaugu

SEQ ID NO: 864265 - RNA, 22 nt, Human
uuuauccaguguuggaauuuuu

SEQ ID NO: 864266 - RNA, 22 nt, Human
cuucuucagcacaauauugaug

SEQ ID NO: 864267 - RNA, 18 nt, Human
caagaaucucuaaagaag

SEQ ID NO: 864268 - RNA, 22 nt, Human
cagcucccgccaucgggaggca

SEQ ID NO: 864269 - RNA, 22 nt, Human
aggaagcucaaagccaugaugu

SEQ ID NO: 864270 - RNA, 22 nt, Human
aacuggauuaacuggcucaaau

SEQ ID NO: 864271 - RNA, 22 nt, Human
auuugcuuucagguauaaaagg

SEQ ID NO: 864272 - RNA, 22 nt, Human
ugucaccacauuugucaauauc

SEQ ID NO: 864273 - RNA, 18 nt, Human
guaggucaguaccaagca

SEQ ID NO: 864274 - RNA, 19 nt, Human
augucuggguaacagcugc

SEQ ID NO: 864275 - RNA, 22 nt, Human
ugaggcagguggauuacaaggu

SEQ ID NO: 864276 - RNA, 22 nt, Human
cggagggguuugaacagaggag

SEQ ID NO: 864277 - RNA, 22 nt, Human
aucaggaugacuauaaggcugc

SEQ ID NO: 864278 - RNA, 22 nt, Human
agucuuuccugcuugacuguuc

SEQ ID NO: 864279 - RNA, 22 nt, Human
cacaauuuggugcuaaagaaag

SEQ ID NO: 864280 - RNA, 22 nt, Human
ugcuggguuaccuaagccuaaa

SEQ ID NO: 864281 - RNA, 23 nt, Human
uuugaaaguaucaacucgccuga

SEQ ID NO: 864282 - RNA, 22 nt, Human
auggaucacagugccgugggug

SEQ ID NO: 864283 - RNA, 20 nt, Human
uaggcagcuugacccuuggu

SEQ ID NO: 864284 - RNA, 17 nt, Human
cuguuaauucauuuccc

SEQ ID NO: 864285 - RNA, 22 nt, Human
uuauuucauugauuucuaagac

SEQ ID NO: 864286 - RNA, 22 nt, Human
gauaucauaucagacaaccucu

SEQ ID NO: 864287 - RNA, 19 nt, Human
guuccaaaggccagaccuu

SEQ ID NO: 864288 - RNA, 22 nt, Human
cagcagaggugguucacauugu

SEQ ID NO: 864289 - RNA, 22 nt, Human
acagagagaaacaaucagcagc

SEQ ID NO: 864290 - RNA, 22 nt, Human
uacagcuaggcaaaaaugacau

SEQ ID NO: 864291 - RNA, 22 nt, Human
aaaucagucccucuuggaauuu

SEQ ID NO: 864292 - RNA, 22 nt, Human
gccaggaguguguggcuauguu

SEQ ID NO: 864293 - RNA, 22 nt, Human
agugcuuugguauagaacuauu

SEQ ID NO: 864294 - RNA, 22 nt, Human
caacuuuaugauugguuuguca

SEQ ID NO: 864295 - RNA, 22 nt, Human
cuguguuugaugagaagccacc

SEQ ID NO: 864296 - RNA, 22 nt, Human
acagugcuggcuacaacccugg

SEQ ID NO: 864297 - RNA, 22 nt, Human
auacagaauuugcccuuuucau

SEQ ID NO: 864298 - RNA, 22 nt, Human
gcugugcuugggaagaaucucu

SEQ ID NO: 864299 - RNA, 18 nt, Human
gagaggagccagaauuuu

SEQ ID NO: 864300 - RNA, 22 nt, Human
gaagcagcuggugagauggagc

SEQ ID NO: 864301 - RNA, 22 nt, Human
agccaacuaggagauuaaggua

SEQ ID NO: 864302 - RNA, 22 nt, Human
ugacuucaagguucagcaccuu

SEQ ID NO: 864303 - RNA, 22 nt, Human
aaauaucauuuauaacuuuuaa

SEQ ID NO: 864304 - RNA, 21 nt, Human
uuccagagauuguuucaccug

SEQ ID NO: 864305 - RNA, 22 nt, Human
uccaugagggacacuggaugcu

SEQ ID NO: 864306 - RNA, 22 nt, Human
agaaguuguagguuugcauauu

SEQ ID NO: 864307 - RNA, 21 nt, Human
auuauuauaaagaccacaggg

SEQ ID NO: 864308 - RNA, 22 nt, Human
aaggagaguacaggaguuggua

SEQ ID NO: 864309 - RNA, 22 nt, Human
ccacugaggcaggcaguaucua

SEQ ID NO: 864310 - RNA, 20 nt, Human
aguacaauguaugauucaga

SEQ ID NO: 864311 - RNA, 22 nt, Human
ucauuucuauugcuacugucug

SEQ ID NO: 864312 - RNA, 22 nt, Human
aggcagcugcccucuccuuccu

SEQ ID NO: 864313 - RNA, 22 nt, Human
ugaggcagcaauuguauuguau

SEQ ID NO: 864314 - RNA, 22 nt, Human
auauucuugugauuauaaagua

SEQ ID NO: 864315 - RNA, 23 nt, Human
uuuggacuugugacucuucuccu

SEQ ID NO: 864316 - RNA, 22 nt, Human
uucacagauuucccugcacaug

SEQ ID NO: 864317 - RNA, 22 nt, Human
auuuguagugaagugaaaauaa

SEQ ID NO: 864318 - RNA, 22 nt, Human
uauguuauuuucauacaacaga

SEQ ID NO: 864319 - RNA, 22 nt, Human
gcagcuucaguaggugaagaca

SEQ ID NO: 864320 - RNA, 22 nt, Human
cuacccagagugaaucucuuaa

SEQ ID NO: 864321 - RNA, 22 nt, Human
uguccuuaaggagcuuaauguc

SEQ ID NO: 864322 - RNA, 22 nt, Human
aggcagccaucugcaggaagga

SEQ ID NO: 864323 - RNA, 22 nt, Human
cugcuucuccaaaguaggacuu

SEQ ID NO: 864324 - RNA, 22 nt, Human
cauuuccagcuccugcaucaug

SEQ ID NO: 864325 - RNA, 22 nt, Human
uuucaggguacauggagcaaau

SEQ ID NO: 864326 - RNA, 22 nt, Human
uuuccaaaggcuaaacucaguu

SEQ ID NO: 864327 - RNA, 19 nt, Human
uuugaaaggauuguuauuu

SEQ ID NO: 864328 - RNA, 22 nt, Human
cuggccagaguuggagggugug

SEQ ID NO: 864329 - RNA, 22 nt, Human
gggagacacgcugcaggcauaa

SEQ ID NO: 864330 - RNA, 22 nt, Human
ucucaggaaauaggauuugagu

SEQ ID NO: 864331 - RNA, 21 nt, Human
agaauucuuaaguauucuaau

SEQ ID NO: 864332 - RNA, 22 nt, Human
uugcccagaguccacagcguac

SEQ ID NO: 864333 - RNA, 18 nt, Human
gcacuucacccagcuagu

SEQ ID NO: 864334 - RNA, 22 nt, Human
auagaauucguguuuguaauuc

SEQ ID NO: 864335 - RNA, 22 nt, Human
gagcagcuccagccgcaugacu

SEQ ID NO: 864336 - RNA, 22 nt, Human
ccuucauugcaucuuuaagaga

SEQ ID NO: 864337 - RNA, 22 nt, Human
ccagaauucagaaagggcauaa

SEQ ID NO: 864338 - RNA, 22 nt, Human
auagaauuugcacuaaaucugc

SEQ ID NO: 864339 - RNA, 22 nt, Human
caucagaaucugagucucugcc

SEQ ID NO: 864340 - RNA, 22 nt, Human
ggaggugggcuaaggacucucu

SEQ ID NO: 864341 - RNA, 22 nt, Human
uugaagaggacuuugcagcugu

SEQ ID NO: 864342 - RNA, 22 nt, Human
uuacagaaaagggcuuuaagag

SEQ ID NO: 864343 - RNA, 18 nt, Human
cauuguacaaugcuuuau

SEQ ID NO: 864344 - RNA, 22 nt, Human
cagcaggauaugguggagagag

SEQ ID NO: 864345 - RNA, 21 nt, Human
aucacauuggcuguuauuauu

SEQ ID NO: 864346 - RNA, 22 nt, Human
agaagugagugugacucagcag

SEQ ID NO: 864347 - RNA, 22 nt, Human
auggaucagaaucccgggaggg

SEQ ID NO: 864348 - RNA, 22 nt, Human
caauuucacuaauaauauuuac

SEQ ID NO: 864349 - RNA, 22 nt, Human
ucugggaaguccucugucaugc

SEQ ID NO: 864350 - RNA, 22 nt, Human
uaauuauucuagucacauagca

SEQ ID NO: 864351 - RNA, 22 nt, Human
uagugcuuuaggccugaguguc

SEQ ID NO: 864352 - RNA, 21 nt, Human
auggcuuuuuuaaagcuugug

SEQ ID NO: 864353 - RNA, 21 nt, Human
ugaaagaaggugcagucugaa

SEQ ID NO: 864354 - RNA, 22 nt, Human
agagggagcccagucauagcug

SEQ ID NO: 864355 - RNA, 22 nt, Human
uucuuuucuuuaggcauugugu

SEQ ID NO: 864356 - RNA, 22 nt, Human
auucuucacauaagugcuguac

SEQ ID NO: 864357 - RNA, 22 nt, Human
aggagaggucucccuuccccag

SEQ ID NO: 864358 - RNA, 22 nt, Human
gagaggcagaggccugaaaccg

SEQ ID NO: 864359 - RNA, 22 nt, Human
accaggagucuagccuagucaa

SEQ ID NO: 864360 - RNA, 22 nt, Human
cuucucagaucucagcuuugag

SEQ ID NO: 864361 - RNA, 22 nt, Human
ggagaagggacagacucagcuu

SEQ ID NO: 864362 - RNA, 20 nt, Human
cugcccagccacugagggau

SEQ ID NO: 864363 - RNA, 22 nt, Human
uagcacauuguugaccagaagg

SEQ ID NO: 864364 - RNA, 22 nt, Human
auuaggcaauucugggcaucuc

SEQ ID NO: 864365 - RNA, 22 nt, Human
uuguuuuaucuuucuacagacu

SEQ ID NO: 864366 - RNA, 22 nt, Human
cagggaggcugucuuaugccug

SEQ ID NO: 864367 - RNA, 22 nt, Human
gcaacuuuagggccagcaagua

SEQ ID NO: 864368 - RNA, 22 nt, Human
ucucuucuauuugagacuauuu

SEQ ID NO: 864369 - RNA, 22 nt, Human
uacaguaagaugaaauagcaau

SEQ ID NO: 864370 - RNA, 22 nt, Human
agcuucuuggcucagcacuugg

SEQ ID NO: 864371 - RNA, 19 nt, Human
uagaggagaagggaagugg

SEQ ID NO: 864372 - RNA, 22 nt, Human
aaauagauugcugaggcauuac

SEQ ID NO: 864373 - RNA, 21 nt, Human
uuugaaagcccuauguuuuca

SEQ ID NO: 864374 - RNA, 22 nt, Human
gcaaacaagcugccugaagauu

SEQ ID NO: 864375 - RNA, 22 nt, Human
aaggcagccauagcaccaucca

SEQ ID NO: 864376 - RNA, 22 nt, Human
ccuggagagagaggccaacugc

SEQ ID NO: 864377 - RNA, 22 nt, Human
aguggcagagccaaguagagcc

SEQ ID NO: 864378 - RNA, 22 nt, Human
aaggcagccagauccuuugggu

SEQ ID NO: 864379 - RNA, 22 nt, Human
agauaaugaaugccaugacauu

SEQ ID NO: 864380 - RNA, 22 nt, Human
gcagaggauagcauaugaaccu

SEQ ID NO: 864381 - RNA, 22 nt, Human
ggaggaggggugacugaaugcu

SEQ ID NO: 864382 - RNA, 22 nt, Human
aaugauuuccccuacacagaag

SEQ ID NO: 864383 - RNA, 22 nt, Human
auucuucaccauggauaauuug

SEQ ID NO: 864384 - RNA, 21 nt, Human
auacagaagguggcaaaguac

SEQ ID NO: 864385 - RNA, 22 nt, Human
aaaaugaugcuguaauuuggca

SEQ ID NO: 864386 - RNA, 23 nt, Human
agcacacuuguacaaugcccuag

SEQ ID NO: 864387 - RNA, 22 nt, Human
aggcagucuaucucuggagccu

SEQ ID NO: 864388 - RNA, 22 nt, Human
aggguagggccguagggccaug

SEQ ID NO: 864389 - RNA, 22 nt, Human
aguaaacacugucuuuauauau

SEQ ID NO: 864390 - RNA, 22 nt, Human
uuagccauugucagcacauggc

SEQ ID NO: 864391 - RNA, 22 nt, Human
guuuaauaauguugaauuacua

SEQ ID NO: 864392 - RNA, 22 nt, Human
uuauucuuuaaacauauauguu

SEQ ID NO: 864393 - RNA, 22 nt, Human
aaaguccuguuugaaggaccug

SEQ ID NO: 864394 - RNA, 20 nt, Human
aggcagcuggccaggcaggu

SEQ ID NO: 864395 - RNA, 22 nt, Human
acuauacaguauguacgugcac

SEQ ID NO: 864396 - RNA, 22 nt, Human
auuauuauuguugauguuaggg

SEQ ID NO: 864397 - RNA, 22 nt, Human
uuacagaauguucuuccaacag

SEQ ID NO: 864398 - RNA, 22 nt, Human
aucuugcauuugcuaaaaugca

SEQ ID NO: 864399 - RNA, 22 nt, Human
aggcagcguagcaaggcuagua

SEQ ID NO: 864400 - RNA, 22 nt, Human
uucuucuccuaaggagaguccu

SEQ ID NO: 864401 - RNA, 22 nt, Human
aguacaacauuagaguaucuua

SEQ ID NO: 864402 - RNA, 22 nt, Human
gaggccagggaugcaaugagag

SEQ ID NO: 864403 - RNA, 19 nt, Human
gaggagcuaucggagacag

SEQ ID NO: 864404 - RNA, 21 nt, Human
agcagaggcugccuggugacu

SEQ ID NO: 864405 - RNA, 22 nt, Human
acacagauuuuacauguuaugc

SEQ ID NO: 864406 - RNA, 22 nt, Human
aaucuuucccuauuaaaugugg

SEQ ID NO: 864407 - RNA, 22 nt, Human
ugaaugaguuuggcugcuguuc

SEQ ID NO: 864408 - RNA, 20 nt, Human
agcugccccugggcacugcc

SEQ ID NO: 864409 - RNA, 19 nt, Human
uuucuuaggccuuuggccu

SEQ ID NO: 864410 - RNA, 22 nt, Human
aauagaaaggaggggcucuugu

SEQ ID NO: 864411 - RNA, 22 nt, Human
ugcuuuaacauaagauaucuuu

SEQ ID NO: 864412 - RNA, 22 nt, Human
uaagaaacccaggaauuucuua

SEQ ID NO: 864413 - RNA, 22 nt, Human
ucaggauggcuucugcaucaaa

SEQ ID NO: 864414 - RNA, 22 nt, Human
aaaggccaagcaugagguggac

SEQ ID NO: 864415 - RNA, 22 nt, Human
gggcagcuggauaguuuuaaau

SEQ ID NO: 864416 - RNA, 22 nt, Human
uugcuucaguagcucuuuaaag

SEQ ID NO: 864417 - RNA, 22 nt, Human
aaauucaauuaacuuucaugcu

SEQ ID NO: 864418 - RNA, 22 nt, Human
caggaugaagggcaaaggcaag

SEQ ID NO: 864419 - RNA, 22 nt, Human
gaagcagccacggggagacaga

SEQ ID NO: 864420 - RNA, 22 nt, Human
uuaacacuccuaacuacagucu

SEQ ID NO: 864421 - RNA, 22 nt, Human
gcauggcugguguccugaggga

SEQ ID NO: 864422 - RNA, 22 nt, Human
acgagagguccuuagaaucugu

SEQ ID NO: 864423 - RNA, 20 nt, Human
agggcagcuugaggagccgg

SEQ ID NO: 864424 - RNA, 22 nt, Human
cuuuuccacugagccucacaaa

SEQ ID NO: 864425 - RNA, 22 nt, Human
gcucaggagcucuugguggcgc

SEQ ID NO: 864426 - RNA, 22 nt, Human
uugacaauguccuuugaauuuc

SEQ ID NO: 864427 - RNA, 22 nt, Human
cugaacucuuuaugacagcuug

SEQ ID NO: 864428 - RNA, 22 nt, Human
auuucaggauagccuaguuuug

SEQ ID NO: 864429 - RNA, 22 nt, Human
gacagaggcuggagcaccuccu

SEQ ID NO: 864430 - RNA, 22 nt, Human
uucugagacaauugagagucua

SEQ ID NO: 864431 - RNA, 22 nt, Human
acaaaugugucuaauugugccu

SEQ ID NO: 864432 - RNA, 22 nt, Human
aaggcaguagguguuucaaacu

SEQ ID NO: 864433 - RNA, 22 nt, Human
ucagaaaagguagcugugacaa

SEQ ID NO: 864434 - RNA, 22 nt, Human
aagcagcuuuugaagagugagg

SEQ ID NO: 864435 - RNA, 22 nt, Human
cagaccagaaggaagccgacaa

SEQ ID NO: 864436 - RNA, 22 nt, Human
uuuucaguaaugucuacauaau

SEQ ID NO: 864437 - RNA, 22 nt, Human
gaauagcuuccuuuuuuccaaa

SEQ ID NO: 864438 - RNA, 22 nt, Human
aaugugaucgcuuuagaagcuu

SEQ ID NO: 864439 - RNA, 22 nt, Human
agaggccacuuugccugugaug

SEQ ID NO: 864440 - RNA, 19 nt, Human
uauggcaggccgaggcacu

SEQ ID NO: 864441 - RNA, 22 nt, Human
gcuccucuucucccacugaaug

SEQ ID NO: 864442 - RNA, 22 nt, Human
acccaggagccgugagagguua

SEQ ID NO: 864443 - RNA, 22 nt, Human
auguauccuuauacacauuuau

SEQ ID NO: 864444 - RNA, 19 nt, Human
uggcaucuguaaaauggug

SEQ ID NO: 864445 - RNA, 23 nt, Human
uguaacaauucccagccuuugcc

SEQ ID NO: 864446 - RNA, 22 nt, Human
uagauuuuacuucugucauuac

SEQ ID NO: 864447 - RNA, 22 nt, Human
uuagaaaugauuucaccucuuu

SEQ ID NO: 864448 - RNA, 19 nt, Human
cccaggaggcggagguugc

SEQ ID NO: 864449 - RNA, 22 nt, Human
agcuucccaagguuggaagguu

SEQ ID NO: 864450 - RNA, 22 nt, Human
aauacugagaucccacaaagca

SEQ ID NO: 864451 - RNA, 22 nt, Human
gaggcagagaccuucaggaccu

SEQ ID NO: 864452 - RNA, 22 nt, Human
ucacaaaugaggaaaucgagca

SEQ ID NO: 864453 - RNA, 22 nt, Human
cccaggagcuucucucugccuc

SEQ ID NO: 864454 - RNA, 22 nt, Human
cauuuuaagaugaccugguuuc

SEQ ID NO: 864455 - RNA, 22 nt, Human
aguaaaaauugaggugcaaaau

SEQ ID NO: 864456 - RNA, 20 nt, Human
uuucaguugguuaauggcau

SEQ ID NO: 864457 - RNA, 22 nt, Human
cacaaaugugcagaaaugugag

SEQ ID NO: 864458 - RNA, 22 nt, Human
gcagaggcuguagggaagguug

SEQ ID NO: 864459 - RNA, 22 nt, Human
guagaaauagugguugacagga

SEQ ID NO: 864460 - RNA, 22 nt, Human
aaggcagucugguuucaaagca

SEQ ID NO: 864461 - RNA, 22 nt, Human
uggcagcuauggucuaagggcc

SEQ ID NO: 864462 - RNA, 22 nt, Human
uugcaggaaacugagugugagc

SEQ ID NO: 864463 - RNA, 22 nt, Human
uucacagacuuuccauagauug

SEQ ID NO: 864464 - RNA, 22 nt, Human
agaggcagcagucauacuacag

SEQ ID NO: 864465 - RNA, 22 nt, Human
uccauuuuagaagaaaauccac

SEQ ID NO: 864466 - RNA, 22 nt, Human
agggcagcccuucugggagggc

SEQ ID NO: 864467 - RNA, 22 nt, Human
cagcugacagugaggugggggc

SEQ ID NO: 864468 - RNA, 22 nt, Human
cugcuuuguaaaauagacauaa

SEQ ID NO: 864469 - RNA, 21 nt, Human
gggugggaggacacagcaggc

SEQ ID NO: 864470 - RNA, 22 nt, Human
guccucugaaguugugcaaugc

SEQ ID NO: 864471 - RNA, 22 nt, Human
cugaggaagacagcagcugugu

SEQ ID NO: 864472 - RNA, 22 nt, Human
auucaaguccagcuucucuaca

SEQ ID NO: 864473 - RNA, 22 nt, Human
cagcagagggagccauugaaau

SEQ ID NO: 864474 - RNA, 21 nt, Human
ucacuagugccuucugucauu

SEQ ID NO: 864475 - RNA, 22 nt, Human
cacaauuuccaagucauguuau

SEQ ID NO: 864476 - RNA, 22 nt, Human
gcccaggaguucaagucuagug

SEQ ID NO: 864477 - RNA, 22 nt, Human
augaaacaguguguauagcaaa

SEQ ID NO: 864478 - RNA, 22 nt, Human
gcugccagcuuuccuuggcuga

SEQ ID NO: 864479 - RNA, 22 nt, Human
uugaaggacauccuauuucuag

SEQ ID NO: 864480 - RNA, 22 nt, Human
uuuauuuggcauccagggagaa

SEQ ID NO: 864481 - RNA, 23 nt, Human
aaacugcuuccaauuccugccau

SEQ ID NO: 864482 - RNA, 22 nt, Human
augaaaauacugugguugauag

SEQ ID NO: 864483 - RNA, 22 nt, Human
uaauuucaaguuuagggcucua

SEQ ID NO: 864484 - RNA, 22 nt, Human
uuucuuaguccuagagugauuu

SEQ ID NO: 864485 - RNA, 23 nt, Human
gugcugugagccccuuggccucc

SEQ ID NO: 864486 - RNA, 22 nt, Human
acccaggagagagcuauaaaau

SEQ ID NO: 864487 - RNA, 22 nt, Human
agaccuggauuccaauccuacc

SEQ ID NO: 864488 - RNA, 22 nt, Human
auuuguugcuagcagcacugau

SEQ ID NO: 864489 - RNA, 19 nt, Human
agccuggcuuugcucugcu

SEQ ID NO: 864490 - RNA, 22 nt, Human
agaaacauccugcuuuccauuu

SEQ ID NO: 864491 - RNA, 22 nt, Human
aaauuguugaucuacaguaagg

SEQ ID NO: 864492 - RNA, 22 nt, Human
gcuugaaaauucauagguauuu

SEQ ID NO: 864493 - RNA, 22 nt, Human
gaggcagcagaacauggaagag

SEQ ID NO: 864494 - RNA, 22 nt, Human
uugauggcugugauuuacucag

SEQ ID NO: 864495 - RNA, 22 nt, Human
ucacauaaauuauacaauuuca

SEQ ID NO: 864496 - RNA, 22 nt, Human
gcccaggaaagauagggccuca

SEQ ID NO: 864497 - RNA, 18 nt, Human
ugagaggcagguagagga

SEQ ID NO: 864498 - RNA, 22 nt, Human
uuuaaagaaauuccucaucuuu

SEQ ID NO: 864499 - RNA, 22 nt, Human
uagaauucaagauucaacaggc

SEQ ID NO: 864500 - RNA, 22 nt, Human
gaauuucagaucagagaccauu

SEQ ID NO: 864501 - RNA, 22 nt, Human
cuuaggcaagcagagcccaucc

SEQ ID NO: 864502 - RNA, 22 nt, Human
ugaggcagcccacuuuccuuag

SEQ ID NO: 864503 - RNA, 22 nt, Human
aucuauacucagaguuaauauc

SEQ ID NO: 864504 - RNA, 22 nt, Human
ugaggggagacagaguggacuc

SEQ ID NO: 864505 - RNA, 22 nt, Human
aaaccgcaauuacuuuugcguc

SEQ ID NO: 864506 - RNA, 22 nt, Human
ugucaccaaguugaugaaugca

SEQ ID NO: 864507 - RNA, 22 nt, Human
acccaggacaaaauaaccaggu

SEQ ID NO: 864508 - RNA, 20 nt, Human
uuccaacucacaucucuaca

SEQ ID NO: 864509 - RNA, 17 nt, Human
uaaguccuaguuauuuu

SEQ ID NO: 864510 - RNA, 22 nt, Human
uagcacaucuggcgcuuauagg

SEQ ID NO: 864511 - RNA, 22 nt, Human
caguccuugcuaugacccugag

SEQ ID NO: 864512 - RNA, 21 nt, Human
uccuuccuugagguccuuucc

SEQ ID NO: 864513 - RNA, 22 nt, Human
cagucucuugcuucauuaguug

SEQ ID NO: 864514 - RNA, 22 nt, Human
aggaaaacacaguauugaugga

SEQ ID NO: 864515 - RNA, 22 nt, Human
ugaggggagcuagcaugccuug

SEQ ID NO: 864516 - RNA, 22 nt, Human
acuauacauugaauguuaaggu

SEQ ID NO: 864517 - RNA, 22 nt, Human
agcccaggucucaaaguacagg

SEQ ID NO: 864518 - RNA, 22 nt, Human
guaaauuauuucaagaucaucu

SEQ ID NO: 864519 - RNA, 23 nt, Human
agggagcuaaaaggcuggagcag

SEQ ID NO: 864520 - RNA, 22 nt, Human
uucacagaugccugaugugugg

SEQ ID NO: 864521 - RNA, 22 nt, Human
agccaacuaauuaaacaacuuu

SEQ ID NO: 864522 - RNA, 22 nt, Human
ugcacauucacuuagguauugu

SEQ ID NO: 864523 - RNA, 22 nt, Human
uuuaacagaugugaaauuuuca

SEQ ID NO: 864524 - RNA, 22 nt, Human
gcccaggauucuuucuuccuua

SEQ ID NO: 864525 - RNA, 22 nt, Human
ugacauaauaauccaaacauac

SEQ ID NO: 864526 - RNA, 22 nt, Human
uggcagcagacaaaaggccauu

SEQ ID NO: 864527 - RNA, 22 nt, Human
uuuuuugucuugaagaaauggu

SEQ ID NO: 864528 - RNA, 22 nt, Human
ccucaggaaccacauugcugcu

SEQ ID NO: 864529 - RNA, 22 nt, Human
ggauuuacaaguuuaacucuca

SEQ ID NO: 864530 - RNA, 22 nt, Human
uuucauaaggguuucuagacuu

SEQ ID NO: 864531 - RNA, 22 nt, Human
uacaaaaaauugauacugacga

SEQ ID NO: 864532 - RNA, 22 nt, Human
uccaggagauucauuaggucau

SEQ ID NO: 864533 - RNA, 17 nt, Human
uccauacaauucucucu

SEQ ID NO: 864534 - RNA, 22 nt, Human
gugaauaauuuuuuaguauaag

SEQ ID NO: 864535 - RNA, 22 nt, Human
auagucacugccuuccauuugu

SEQ ID NO: 864536 - RNA, 22 nt, Human
uuuuaguguagucaccgugggu

SEQ ID NO: 864537 - RNA, 22 nt, Human
agaucauaugaaaaauuucaag

SEQ ID NO: 864538 - RNA, 22 nt, Human
cccauugugguuguugaggaua

SEQ ID NO: 864539 - RNA, 22 nt, Human
aacuuugaggucacugaauucc

SEQ ID NO: 864540 - RNA, 22 nt, Human
aacaugcugccuuucuacgagu

SEQ ID NO: 864541 - RNA, 22 nt, Human
cugcccaggaaccagaggggca

SEQ ID NO: 864542 - RNA, 22 nt, Human
cgucuuccucuuacgaugcgcu

SEQ ID NO: 864543 - RNA, 22 nt, Human
uuugaacaugcugcaugauaau

SEQ ID NO: 864544 - RNA, 22 nt, Human
uuuaggcaaacucauugucaga

SEQ ID NO: 864545 - RNA, 22 nt, Human
gaccauuuguugaaaagauuau

SEQ ID NO: 864546 - RNA, 22 nt, Human
guucuaauuuggggcuccuuag

SEQ ID NO: 864547 - RNA, 22 nt, Human
uucucugaucuugcuagacuga

SEQ ID NO: 864548 - RNA, 22 nt, Human
agggggugucucugauuggguu

SEQ ID NO: 864549 - RNA, 21 nt, Human
uuugaaagugggugauucuuu

SEQ ID NO: 864550 - RNA, 22 nt, Human
uuucacacaacgugaauauacu

SEQ ID NO: 864551 - RNA, 22 nt, Human
ucccaggaaggauucggcauuu

SEQ ID NO: 864552 - RNA, 22 nt, Human
aauaauauuugaagcuucaaag

SEQ ID NO: 864553 - RNA, 22 nt, Human
caaguccucugguuucaaauag

SEQ ID NO: 864554 - RNA, 22 nt, Human
uagcuuuccuuguugccugugc

SEQ ID NO: 864555 - RNA, 22 nt, Human
ggcagcuuucaauaggguuaug

SEQ ID NO: 864556 - RNA, 22 nt, Human
agucucugucguagaucagcgu

SEQ ID NO: 864557 - RNA, 22 nt, Human
cccaggaggcagagauagcagu

SEQ ID NO: 864558 - RNA, 22 nt, Human
ugucugugaccucuuaggcaag

SEQ ID NO: 864559 - RNA, 22 nt, Human
augaaacacacacgcgcauacu

SEQ ID NO: 864560 - RNA, 22 nt, Human
ugcauguguguguauuuauaaa

SEQ ID NO: 864561 - RNA, 22 nt, Human
ucaggauguccaaaauccagcc

SEQ ID NO: 864562 - RNA, 22 nt, Human
acauaauagguaccugaauaau

SEQ ID NO: 864563 - RNA, 21 nt, Human
uucucagagucuauuacaguu

SEQ ID NO: 864564 - RNA, 22 nt, Human
caauuuuuaaacuaugaaguug

SEQ ID NO: 864565 - RNA, 22 nt, Human
aguggcaggcggagauguagga

SEQ ID NO: 864566 - RNA, 22 nt, Human
auucuuauuauaguaaaacagu

SEQ ID NO: 864567 - RNA, 22 nt, Human
guuuauaaggcccaauauuucu

SEQ ID NO: 864568 - RNA, 23 nt, Human
ucagucuucccugucaguaauag

SEQ ID NO: 864569 - RNA, 22 nt, Human
auuccaaaaggauguuagaaug

SEQ ID NO: 864570 - RNA, 22 nt, Human
uagaaauguugguauuaacauu

SEQ ID NO: 864571 - RNA, 17 nt, Human
uucaaagcuuaucaagg

SEQ ID NO: 864572 - RNA, 22 nt, Human
uauuucaacguaugaaaagcug

SEQ ID NO: 864573 - RNA, 18 nt, Human
uacagauuauagauacau

SEQ ID NO: 864574 - RNA, 19 nt, Human
uuugaaagaguuuuauugg

SEQ ID NO: 864575 - RNA, 22 nt, Human
uaaagcaguguugggucggacg

SEQ ID NO: 864576 - RNA, 22 nt, Human
ucacagaagaugcuggauguug

SEQ ID NO: 864577 - RNA, 22 nt, Human
ggcauuuagauugaauuucugu

SEQ ID NO: 864578 - RNA, 22 nt, Human
aaaucaguuguuauauuaaaga

SEQ ID NO: 864579 - RNA, 22 nt, Human
uauuuuaucugccagaguggag

SEQ ID NO: 864580 - RNA, 19 nt, Human
aacuggauaauggccacau

SEQ ID NO: 864581 - RNA, 21 nt, Human
cucaggauggcggccuggugg

SEQ ID NO: 864582 - RNA, 22 nt, Human
agcugccgaugcccagcugcau

SEQ ID NO: 864583 - RNA, 22 nt, Human
ucccaggaagaucccagggacc

SEQ ID NO: 864584 - RNA, 22 nt, Human
agacugaauaacaagcaaauaa

SEQ ID NO: 864585 - RNA, 22 nt, Human
ugcauggacucaucagacaaga

SEQ ID NO: 864586 - RNA, 22 nt, Human
uuacagaaggaacacuacucag

SEQ ID NO: 864587 - RNA, 22 nt, Human
aucaggaucaugcuggguggga

SEQ ID NO: 864588 - RNA, 22 nt, Human
gaaauauugggacucagagcuu

SEQ ID NO: 864589 - RNA, 22 nt, Human
ccuauacagccucagcugagau

SEQ ID NO: 864590 - RNA, 22 nt, Human
cagaggcagccgggggagaacg

SEQ ID NO: 864591 - RNA, 22 nt, Human
ucuggaucuccagcacuuauca

SEQ ID NO: 864592 - RNA, 22 nt, Human
ucagucuuugcuuaugacaaua

SEQ ID NO: 864593 - RNA, 22 nt, Human
uuucucaguuacuagcuguggu

SEQ ID NO: 864594 - RNA, 22 nt, Human
auaucagacagaaagcauugac

SEQ ID NO: 864595 - RNA, 22 nt, Human
ugucucugggugauucaguccu

SEQ ID NO: 864596 - RNA, 22 nt, Human
auaaaauuugcuacuguuaaau

SEQ ID NO: 864597 - RNA, 23 nt, Human
cuugcagggcuggaggcuuagaa

SEQ ID NO: 864598 - RNA, 22 nt, Human
uagggaggaggguuuucaaauc

SEQ ID NO: 864599 - RNA, 19 nt, Human
agacagagcucaguggguu

SEQ ID NO: 864600 - RNA, 22 nt, Human
gcuucacacuaaaaauguuaaa

SEQ ID NO: 864601 - RNA, 22 nt, Human
augugaggcagcacggagauua

SEQ ID NO: 864602 - RNA, 22 nt, Human
guggcagcggugugcaaggagg

SEQ ID NO: 864603 - RNA, 22 nt, Human
gaggcagagugcaccccaggag

SEQ ID NO: 864604 - RNA, 22 nt, Human
uacagacaguuuuucagauauu

SEQ ID NO: 864605 - RNA, 22 nt, Human
ugcccacauggugccauggcca

SEQ ID NO: 864606 - RNA, 22 nt, Human
uuuguaugugauaagacuauuc

SEQ ID NO: 864607 - RNA, 22 nt, Human
uguccuuagaagaagugaaaga

SEQ ID NO: 864608 - RNA, 22 nt, Human
augcuuaacucuguacauaguu

SEQ ID NO: 864609 - RNA, 22 nt, Human
uagaagcaguaauagaaauagg

SEQ ID NO: 864610 - RNA, 22 nt, Human
uucuucuuaauguccugggaac

SEQ ID NO: 864611 - RNA, 22 nt, Human
uucauugugaacacauucugcc

SEQ ID NO: 864612 - RNA, 22 nt, Human
uuucaaaauuuugcagugguaa

SEQ ID NO: 864613 - RNA, 22 nt, Human
uggcagcugagugcacccccuc

SEQ ID NO: 864614 - RNA, 22 nt, Human
aaauaguucagcuuguaaaccc

SEQ ID NO: 864615 - RNA, 22 nt, Human
uacaggaaguaaguaaugaaau

SEQ ID NO: 864616 - RNA, 23 nt, Human
acuauaaaguuguucugauuuac

SEQ ID NO: 864617 - RNA, 22 nt, Human
ucagugaucuaaggguauggcc

SEQ ID NO: 864618 - RNA, 22 nt, Human
cuaaaauuaucaagauaauucc

SEQ ID NO: 864619 - RNA, 22 nt, Human
aaccauuugcaguuacugagac

SEQ ID NO: 864620 - RNA, 17 nt, Human
gagacagcaggagcccc

SEQ ID NO: 864621 - RNA, 22 nt, Human
gcuggaucccugugggaguggu

SEQ ID NO: 864622 - RNA, 22 nt, Human
uugcacuaggaaaaggcagcca

SEQ ID NO: 864623 - RNA, 22 nt, Human
uauggcuuuuaacugucguaug

SEQ ID NO: 864624 - RNA, 22 nt, Human
acaugcuucauauuauaaccaa

SEQ ID NO: 864625 - RNA, 22 nt, Human
gccaggagccagcuucuuagca

SEQ ID NO: 864626 - RNA, 22 nt, Human
uacagaaaaacuggcauugaag

SEQ ID NO: 864627 - RNA, 22 nt, Human
caauuuuuuccaugcucuuaca

SEQ ID NO: 864628 - RNA, 20 nt, Human
agaggccaguuaggagucua

SEQ ID NO: 864629 - RNA, 22 nt, Human
uucagaaaucgaguuucauguc

SEQ ID NO: 864630 - RNA, 22 nt, Human
uuucagggagccuagaagagcu

SEQ ID NO: 864631 - RNA, 22 nt, Human
cccaagagguggagguugcagu

SEQ ID NO: 864632 - RNA, 22 nt, Human
cugcugugucagaguccagggg

SEQ ID NO: 864633 - RNA, 22 nt, Human
cugggaaauggcuucgagcuca

SEQ ID NO: 864634 - RNA, 22 nt, Human
cucucagacugaagggccugug

SEQ ID NO: 864635 - RNA, 22 nt, Human
caaauguauaaauguacuuucu

SEQ ID NO: 864636 - RNA, 22 nt, Human
ucagaaaugaucguuauucauu

SEQ ID NO: 864637 - RNA, 22 nt, Human
uggagacugugcuaagggaguu

SEQ ID NO: 864638 - RNA, 22 nt, Human
aggcagcuggaaaacuccaggc

SEQ ID NO: 864639 - RNA, 22 nt, Human
uuggaucacucugaagccuuac

SEQ ID NO: 864640 - RNA, 21 nt, Human
uuucuuaggcucuaaaaugac

SEQ ID NO: 864641 - RNA, 22 nt, Human
acucaggaauggggcugggacu

SEQ ID NO: 864642 - RNA, 22 nt, Human
ucuucacauggaacaugaagcu

SEQ ID NO: 864643 - RNA, 22 nt, Human
aaggccagccugagagcuaaca

SEQ ID NO: 864644 - RNA, 22 nt, Human
gcuggcuugauaguuucugcuu

SEQ ID NO: 864645 - RNA, 22 nt, Human
uucauugugauucuuggcuagc

SEQ ID NO: 864646 - RNA, 22 nt, Human
uaggaggguuagagggaaauau

SEQ ID NO: 864647 - RNA, 22 nt, Human
guucuaauaggagaaaagacag

SEQ ID NO: 864648 - RNA, 22 nt, Human
uaauuucaccguugcuagaaau

SEQ ID NO: 864649 - RNA, 22 nt, Human
aaagccauuacaaaauuucaua

SEQ ID NO: 864650 - RNA, 22 nt, Human
aaaucaguaaauguucauuaac

SEQ ID NO: 864651 - RNA, 22 nt, Human
ucaucugucccaggcuuuuuuc

SEQ ID NO: 864652 - RNA, 22 nt, Human
agucucuuauucccuauugcug

SEQ ID NO: 864653 - RNA, 22 nt, Human
gaggcgagaagcuggagauggu

SEQ ID NO: 864654 - RNA, 22 nt, Human
cugcugugagugguucuugccu

SEQ ID NO: 864655 - RNA, 22 nt, Human
uuuuuuaguuaggucagaaugu

SEQ ID NO: 864656 - RNA, 22 nt, Human
cccaggaguuagagguuguggu

SEQ ID NO: 864657 - RNA, 22 nt, Human
uaucauaaguuaauuaaacagu

SEQ ID NO: 864658 - RNA, 22 nt, Human
ucugucuucaucagcaugugau

SEQ ID NO: 864659 - RNA, 22 nt, Human
acagucuacuugagcuuguaua

SEQ ID NO: 864660 - RNA, 22 nt, Human
auggcagccugagcagaggaau

SEQ ID NO: 864661 - RNA, 22 nt, Human
gagggugggccagauaugaggg

SEQ ID NO: 864662 - RNA, 22 nt, Human
ugugaacuggcagguggacggg

SEQ ID NO: 864663 - RNA, 17 nt, Human
agagggaaaaugcgguu

SEQ ID NO: 864664 - RNA, 22 nt, Human
uccaugaguuugaggaaaagag

SEQ ID NO: 864665 - RNA, 22 nt, Human
aacaaacaaacauuuugucauc

SEQ ID NO: 864666 - RNA, 22 nt, Human
uccaggaggguuuucugccuuc

SEQ ID NO: 864667 - RNA, 22 nt, Human
uauccaaaggaacaaucacagc

SEQ ID NO: 864668 - RNA, 22 nt, Human
ugaaucauggauaaauagcuua

SEQ ID NO: 864669 - RNA, 21 nt, Human
auacagaacauugauccaaga

SEQ ID NO: 864670 - RNA, 22 nt, Human
caaugaaaauuuaaguugcagc

SEQ ID NO: 864671 - RNA, 22 nt, Human
aucaggauagucuguaaauugu

SEQ ID NO: 864672 - RNA, 22 nt, Human
uagcacaucuucuuggccugca

SEQ ID NO: 864673 - RNA, 22 nt, Human
aaguccuucuuuauaugagagu

SEQ ID NO: 864674 - RNA, 22 nt, Human
cugucauugagccugucagggc

SEQ ID NO: 864675 - RNA, 22 nt, Human
gcucaggaucagccaccucuuu

SEQ ID NO: 864676 - RNA, 22 nt, Human
ucuucagacccuuagcugugau

SEQ ID NO: 864677 - RNA, 22 nt, Human
uuucuagugguuaagauuuaca

SEQ ID NO: 864678 - RNA, 22 nt, Human
uugaaaguuaucuagauucuga

SEQ ID NO: 864679 - RNA, 22 nt, Human
cagcuucugcuaucgaacaucu

SEQ ID NO: 864680 - RNA, 22 nt, Human
acaugcuuguuuuucacaaccu

SEQ ID NO: 864681 - RNA, 16 nt, Human
ucccaggaggcggaac

SEQ ID NO: 864682 - RNA, 22 nt, Human
uugcugugucugauggcugaga

SEQ ID NO: 864683 - RNA, 22 nt, Human
ucuacagacagagcagguggga

SEQ ID NO: 864684 - RNA, 22 nt, Human
uucuucuuuccuauaauuaauu

SEQ ID NO: 864685 - RNA, 22 nt, Human
aauaauaagauacuaagggagu

SEQ ID NO: 864686 - RNA, 22 nt, Human
cucuggcuucuaccuugcaguu

SEQ ID NO: 864687 - RNA, 22 nt, Human
uaguccuugcugggcacagagu

SEQ ID NO: 864688 - RNA, 22 nt, Human
uuagagucaagcugcauguucu

SEQ ID NO: 864689 - RNA, 22 nt, Human
aggcacagcacaccuggccccc

SEQ ID NO: 864690 - RNA, 22 nt, Human
ucacagaacaauguuuaguucu

SEQ ID NO: 864691 - RNA, 21 nt, Human
uacagaaugcgcuucagucug

SEQ ID NO: 864692 - RNA, 23 nt, Human
aauaucaaggugauguucccaga

SEQ ID NO: 864693 - RNA, 22 nt, Human
aggcagaugggagcuggaaguu

SEQ ID NO: 864694 - RNA, 22 nt, Human
acaacaaaaucacuagucuucc

SEQ ID NO: 864695 - RNA, 22 nt, Human
acacaaauuguaggauaauugc

SEQ ID NO: 864696 - RNA, 22 nt, Human
gaaggccacuuuguguugagaa

SEQ ID NO: 864697 - RNA, 22 nt, Human
aggacagcagugcuggcacuug

SEQ ID NO: 864698 - RNA, 22 nt, Human
augaggcaguacacacaaagcc

SEQ ID NO: 864699 - RNA, 22 nt, Human
uaagaaguacaaaaauuuucug

SEQ ID NO: 864700 - RNA, 22 nt, Human
gcaaaauuaaacuuagcaucau

SEQ ID NO: 864701 - RNA, 22 nt, Human
uuucaguuuuugcucgauguau

SEQ ID NO: 864702 - RNA, 22 nt, Human
gauuuccaggucauuaauaaag

SEQ ID NO: 864703 - RNA, 22 nt, Human
guacaauagucccuguuuggau

SEQ ID NO: 864704 - RNA, 21 nt, Human
gagauuuagaaggaucaauuu

SEQ ID NO: 864705 - RNA, 22 nt, Human
uuccuuagauccuucaaucacg

SEQ ID NO: 864706 - RNA, 22 nt, Human
cauuguuaauugguaucuuaca

SEQ ID NO: 864707 - RNA, 22 nt, Human
ccaaaugugccuguuucaacaa

SEQ ID NO: 864708 - RNA, 22 nt, Human
ugaaaugaaacagaacauauca

SEQ ID NO: 864709 - RNA, 22 nt, Human
uagcagaaacuguuacagaagg

SEQ ID NO: 864710 - RNA, 23 nt, Human
ucagagagcuguugagagcugcc

SEQ ID NO: 864711 - RNA, 22 nt, Human
ggagagugggagcaacuguugc

SEQ ID NO: 864712 - RNA, 22 nt, Human
gagaggucaucucccaucagca

SEQ ID NO: 864713 - RNA, 22 nt, Human
uagaacauaagucauucauuug

SEQ ID NO: 864714 - RNA, 22 nt, Human
cagaggcagugggguugcuccu

SEQ ID NO: 864715 - RNA, 22 nt, Human
cuuuguagcugcuucugauuua

SEQ ID NO: 864716 - RNA, 23 nt, Human
aguacaauaaguauaauucuuuc

SEQ ID NO: 864717 - RNA, 22 nt, Human
uucagaaaaaacuucaauaagu

SEQ ID NO: 864718 - RNA, 22 nt, Human
ggccagcuuugagcugcaggaa

SEQ ID NO: 864719 - RNA, 22 nt, Human
ugcugcuguauccuuaguguca

SEQ ID NO: 864720 - RNA, 22 nt, Human
aauaagauccugaagauauguu

SEQ ID NO: 864721 - RNA, 22 nt, Human
uuacagauggaucuagcaaaau

SEQ ID NO: 864722 - RNA, 22 nt, Human
auagacauuuugcauucaagca

SEQ ID NO: 864723 - RNA, 22 nt, Human
cuggcuuucauuucaagcacgu

SEQ ID NO: 864724 - RNA, 22 nt, Human
uuugaagacagaucaauauaag

SEQ ID NO: 864725 - RNA, 22 nt, Human
aggguagguguaagauagcccu

SEQ ID NO: 864726 - RNA, 19 nt, Human
acuguaaggcauuuuuuuc

SEQ ID NO: 864727 - RNA, 22 nt, Human
ucuuugaacuuggcugaucucu

SEQ ID NO: 864728 - RNA, 22 nt, Human
ccaggagagcagaagcccaggc

SEQ ID NO: 864729 - RNA, 22 nt, Human
cuuccaaacccaggguaugggc

SEQ ID NO: 864730 - RNA, 22 nt, Human
uauuuucuguggaggaccagau

SEQ ID NO: 864731 - RNA, 22 nt, Human
gaaauauuucucuugagccccu

SEQ ID NO: 864732 - RNA, 22 nt, Human
acucaggaaaugagaggcucuc

SEQ ID NO: 864733 - RNA, 22 nt, Human
ucagucucaucaacucuauucc

SEQ ID NO: 864734 - RNA, 22 nt, Human
aaaggaagauugagcuuuucca

SEQ ID NO: 864735 - RNA, 22 nt, Human
agugcuguuagguuaauauagu

SEQ ID NO: 864736 - RNA, 22 nt, Human
uuuccaaaaugaaucuaaugca

SEQ ID NO: 864737 - RNA, 22 nt, Human
uuaguacugauagggucaauca

SEQ ID NO: 864738 - RNA, 22 nt, Human
cagcugccugucuggaggcaau

SEQ ID NO: 864739 - RNA, 22 nt, Human
cuugaaagaagggucuuuuaau

SEQ ID NO: 864740 - RNA, 22 nt, Human
aauuccaggcagaaaugugagu

SEQ ID NO: 864741 - RNA, 22 nt, Human
uucuuaaaacuuauggacaggu

SEQ ID NO: 864742 - RNA, 22 nt, Human
aaauacagaguugcuuaaaagc

SEQ ID NO: 864743 - RNA, 23 nt, Human
aucauucuccaaucuggagcagg

SEQ ID NO: 864744 - RNA, 22 nt, Human
uacccaggagaaacagcagggc

SEQ ID NO: 864745 - RNA, 22 nt, Human
ucaaaauuaaaccaacguccag

SEQ ID NO: 864746 - RNA, 22 nt, Human
agaugaaaagauaagcagcaau

SEQ ID NO: 864747 - RNA, 22 nt, Human
ucuguggauuuuaguguucaug

SEQ ID NO: 864748 - RNA, 22 nt, Human
uacaugaaguugucuaaacugg

SEQ ID NO: 864749 - RNA, 22 nt, Human
auugcuguacacuucuagaucu

SEQ ID NO: 864750 - RNA, 22 nt, Human
uagugcuuggcccuaccagaua

SEQ ID NO: 864751 - RNA, 22 nt, Human
uuacaguuuaguccaagccaga

SEQ ID NO: 864752 - RNA, 22 nt, Human
uaaguccuauuccaggucucuc

SEQ ID NO: 864753 - RNA, 22 nt, Human
cacaggagagcugggaggugcc

SEQ ID NO: 864754 - RNA, 22 nt, Human
ggcauuuauuugucucauucuu

SEQ ID NO: 864755 - RNA, 22 nt, Human
uugaauaaaugagcagugaauu

SEQ ID NO: 864756 - RNA, 22 nt, Human
caggcagccugagggaucuggg

SEQ ID NO: 864757 - RNA, 22 nt, Human
aaaacuaaauacgcuuugccuc

SEQ ID NO: 864758 - RNA, 22 nt, Human
uccauuuuagagaugaagaaac

SEQ ID NO: 864759 - RNA, 23 nt, Human
gggcaguuauguuguccuuggcu

SEQ ID NO: 864760 - RNA, 22 nt, Human
uuugcaguuucauugcugaaau

SEQ ID NO: 864761 - RNA, 22 nt, Human
uggcaauuuuaggugguuuagu

SEQ ID NO: 864762 - RNA, 22 nt, Human
uauuuaucgagugucuacuaug

SEQ ID NO: 864763 - RNA, 22 nt, Human
uugaacugguaguuggaaaucu

SEQ ID NO: 864764 - RNA, 22 nt, Human
ccuggaucccgauggcugugag

SEQ ID NO: 864765 - RNA, 22 nt, Human
ugucaccaugccagcuucugcc

SEQ ID NO: 864766 - RNA, 22 nt, Human
aucauuucccuuuagaucacaa

SEQ ID NO: 864767 - RNA, 22 nt, Human
uggagaggagcaccauggccau

SEQ ID NO: 864768 - RNA, 22 nt, Human
uauaaaauucucaguuuggggu

SEQ ID NO: 864769 - RNA, 20 nt, Human
ggggcugcaugcagagaaga

SEQ ID NO: 864770 - RNA, 22 nt, Human
uuucaaaguugggaauuguaau

SEQ ID NO: 864771 - RNA, 23 nt, Human
uccuuccuuugagaggcuccauc

SEQ ID NO: 864772 - RNA, 22 nt, Human
aagauaaacucuugauuucuga

SEQ ID NO: 864773 - RNA, 22 nt, Human
auaaaugauucagcaggaaaua

SEQ ID NO: 864774 - RNA, 22 nt, Human
ucugucuccucugaggugccag

SEQ ID NO: 864775 - RNA, 22 nt, Human
ugaggcaggagguugagaacug

SEQ ID NO: 864776 - RNA, 22 nt, Human
gugucccaggccucuggaauua

SEQ ID NO: 864777 - RNA, 22 nt, Human
aggagcagaauuuaaugugcag

SEQ ID NO: 864778 - RNA, 22 nt, Human
uuauccuggauuauauauguga

SEQ ID NO: 864779 - RNA, 22 nt, Human
agagggagugaaauggaauaga

SEQ ID NO: 864780 - RNA, 22 nt, Human
uucuucuugaaacuuuagguug

SEQ ID NO: 864781 - RNA, 22 nt, Human
uuuccaagagcuuauuucugaa

SEQ ID NO: 864782 - RNA, 22 nt, Human
uggcagcugguacagugggucu

SEQ ID NO: 864783 - RNA, 22 nt, Human
uccaggagaaaacugacggugg

SEQ ID NO: 864784 - RNA, 22 nt, Human
cuugcugugugguguucucaga

SEQ ID NO: 864785 - RNA, 22 nt, Human
aggcaguuuaggcagcgauuua

SEQ ID NO: 864786 - RNA, 22 nt, Human
guuuacauguacucauuauacu

SEQ ID NO: 864787 - RNA, 22 nt, Human
caggcagccugcggucugcaca

SEQ ID NO: 864788 - RNA, 22 nt, Human
gagggcaguagccucguacccu

SEQ ID NO: 864789 - RNA, 22 nt, Human
uuuucauuguuccucgagcauu

SEQ ID NO: 864790 - RNA, 22 nt, Human
ggcaggcucagcagccaaggag

SEQ ID NO: 864791 - RNA, 22 nt, Human
auacagaacaagccucaccucc

SEQ ID NO: 864792 - RNA, 22 nt, Human
cagucuucuaaccuagcagccu

SEQ ID NO: 864793 - RNA, 18 nt, Human
uuugcaaaggaaguaugg

SEQ ID NO: 864794 - RNA, 22 nt, Human
gcaguucuacuuauccauagac

SEQ ID NO: 864795 - RNA, 19 nt, Human
aggcagcaggccagggaug

SEQ ID NO: 864796 - RNA, 22 nt, Human
gaaugaauucagcacauggaau

SEQ ID NO: 864797 - RNA, 22 nt, Human
uaucaagugacuaucacagaac

SEQ ID NO: 864798 - RNA, 22 nt, Human
gcuuuggaugugugccugaggu

SEQ ID NO: 864799 - RNA, 22 nt, Human
ugcagucuccaccuccugggug

SEQ ID NO: 864800 - RNA, 22 nt, Human
uucaacuuuaugcauauguauu

SEQ ID NO: 864801 - RNA, 22 nt, Human
aaucagaacuccuaccacagag

SEQ ID NO: 864802 - RNA, 22 nt, Human
agcaccugccugcauuggcuau

SEQ ID NO: 864803 - RNA, 22 nt, Human
ugucaccaugcgaggcuaauuu

SEQ ID NO: 864804 - RNA, 22 nt, Human
caauuucaucuugugcuucaau

SEQ ID NO: 864805 - RNA, 22 nt, Human
aggcuagcaaugggagaugagu

SEQ ID NO: 864806 - RNA, 22 nt, Human
gagguggucgaggagggguacc

SEQ ID NO: 864807 - RNA, 22 nt, Human
uuuaaauucugucugccgcuua

SEQ ID NO: 864808 - RNA, 22 nt, Human
aucacaaaggcugcuucaugau

SEQ ID NO: 864809 - RNA, 20 nt, Human
gggagucuggaugaaagaug

SEQ ID NO: 864810 - RNA, 23 nt, Human
accaggagaaaagcuuugcggga

SEQ ID NO: 864811 - RNA, 22 nt, Human
ugaggcagucacccccuccugc

SEQ ID NO: 864812 - RNA, 22 nt, Human
augaggcaucugcagucacuag

SEQ ID NO: 864813 - RNA, 22 nt, Human
caucagaagaaagacaaaugau

SEQ ID NO: 864814 - RNA, 22 nt, Human
aauuucaaugcacucaugguug

SEQ ID NO: 864815 - RNA, 22 nt, Human
uauuugaaaguguacaaaaacu

SEQ ID NO: 864816 - RNA, 22 nt, Human
gcccaggauaaugcugucccug

SEQ ID NO: 864817 - RNA, 22 nt, Human
aaaucaguucacguucugaggu

SEQ ID NO: 864818 - RNA, 22 nt, Human
cugcugugcacccaggaaggcu

SEQ ID NO: 864819 - RNA, 22 nt, Human
uuaaauuagucaagcuucucug

SEQ ID NO: 864820 - RNA, 22 nt, Human
guagggagcccagagcccagug

SEQ ID NO: 864821 - RNA, 22 nt, Human
uucacagucacccuucuccaug

SEQ ID NO: 864822 - RNA, 22 nt, Human
uagcacauacauaauagauaga

SEQ ID NO: 864823 - RNA, 22 nt, Human
gagucaccuugggucagcgaua

SEQ ID NO: 864824 - RNA, 22 nt, Human
cccaggagguggagguugcggu

SEQ ID NO: 864825 - RNA, 22 nt, Human
auggauuugcuuauacacaugu

SEQ ID NO: 864826 - RNA, 20 nt, Human
aggcaguuagaaggagauga

SEQ ID NO: 864827 - RNA, 22 nt, Human
aauguuaauguguuugcuuaug

SEQ ID NO: 864828 - RNA, 22 nt, Human
cugcuguggaugcaggaccuca

SEQ ID NO: 864829 - RNA, 22 nt, Human
gaggagaggccaucguuguuau

SEQ ID NO: 864830 - RNA, 22 nt, Human
ggcaugcugcguacagaugaac

SEQ ID NO: 864831 - RNA, 22 nt, Human
gaggcagaaguugcagugagca

SEQ ID NO: 864832 - RNA, 22 nt, Human
cugcccagaagccagaugggca

SEQ ID NO: 864833 - RNA, 22 nt, Human
uuauuuaaugugaucugaagag

SEQ ID NO: 864834 - RNA, 22 nt, Human
auuacaagaugcauccauauuu

SEQ ID NO: 864835 - RNA, 22 nt, Human
cuagaaaucucuguuuacauca

SEQ ID NO: 864836 - RNA, 23 nt, Human
acugucugauauguuuuccauca

SEQ ID NO: 864837 - RNA, 22 nt, Human
auggguuucccucugaaauuau

SEQ ID NO: 864838 - RNA, 22 nt, Human
gcugcuguugauuuaguccaau

SEQ ID NO: 864839 - RNA, 22 nt, Human
ucacacagguuugcaaugauuu

SEQ ID NO: 864840 - RNA, 20 nt, Human
caggagggacauuucagcau

SEQ ID NO: 864841 - RNA, 21 nt, Human
uaaauaauaaguugcugagau

SEQ ID NO: 864842 - RNA, 22 nt, Human
uuuaaauuauaguuaaugucug

SEQ ID NO: 864843 - RNA, 22 nt, Human
uguucucacuggaugcuucaca

SEQ ID NO: 864844 - RNA, 22 nt, Human
ucccuucacagaugcgauguuu

SEQ ID NO: 864845 - RNA, 22 nt, Human
ucauuucccuccuacaaagagg

SEQ ID NO: 864846 - RNA, 22 nt, Human
aggccagcccugggcugagaga

SEQ ID NO: 864847 - RNA, 22 nt, Human
uuugacauuauccuguuacugg

SEQ ID NO: 864848 - RNA, 23 nt, Human
uuucuucagaagccuugcgaggc

SEQ ID NO: 864849 - RNA, 22 nt, Human
aggcagugccuggaccccagcu

SEQ ID NO: 864850 - RNA, 22 nt, Human
agucucugccagcuuguccucu

SEQ ID NO: 864851 - RNA, 22 nt, Human
gguacaauccacuguggguuag

SEQ ID NO: 864852 - RNA, 21 nt, Human
cuacagaagcucuccuaucca

SEQ ID NO: 864853 - RNA, 22 nt, Human
cugcuuugauuagaagaguaca

SEQ ID NO: 864854 - RNA, 22 nt, Human
ucucugguuauuaacuaacucc

SEQ ID NO: 864855 - RNA, 22 nt, Human
aaauugcagaugcuaaaugacu

SEQ ID NO: 864856 - RNA, 22 nt, Human
ccagaauuuggaucaugauuuu

SEQ ID NO: 864857 - RNA, 20 nt, Human
cucaggauacugcaaaguug

SEQ ID NO: 864858 - RNA, 22 nt, Human
uguacauagaucuugaaaauua

SEQ ID NO: 864859 - RNA, 22 nt, Human
cuuaaauuggaugaguuaaguu

SEQ ID NO: 864860 - RNA, 22 nt, Human
aaagcaguauauugguaguugu

SEQ ID NO: 864861 - RNA, 22 nt, Human
cuggaaauuggagaugauguuu

SEQ ID NO: 864862 - RNA, 22 nt, Human
ggucagagggugggcugccugu

SEQ ID NO: 864863 - RNA, 17 nt, Human
uagcuguguuucagcua

SEQ ID NO: 864864 - RNA, 22 nt, Human
ugauuuccuaggucuggagaag

SEQ ID NO: 864865 - RNA, 22 nt, Human
auuauccucagaaaacauguga

SEQ ID NO: 864866 - RNA, 22 nt, Human
gucaggauuugaacucaggucu

SEQ ID NO: 864867 - RNA, 22 nt, Human
uuagaaagcuuuccauagucaa

SEQ ID NO: 864868 - RNA, 22 nt, Human
aggagggagcuuaagccaggca

SEQ ID NO: 864869 - RNA, 22 nt, Human
acucaggaaauugagauaaugg

SEQ ID NO: 864870 - RNA, 22 nt, Human
cauuuacagcagacugaugaaa

SEQ ID NO: 864871 - RNA, 22 nt, Human
aagcaccuggguuauaucuuag

SEQ ID NO: 864872 - RNA, 22 nt, Human
uuugaagucagacacugcuuug

SEQ ID NO: 864873 - RNA, 22 nt, Human
ucagccaggccaccuucagcuu

SEQ ID NO: 864874 - RNA, 21 nt, Human
gcugcaucaaucuacccaggg

SEQ ID NO: 864875 - RNA, 22 nt, Human
ucugaaaugcaaauuugacuga

SEQ ID NO: 864876 - RNA, 22 nt, Human
gaggaggcuuccgggaggcacg

SEQ ID NO: 864877 - RNA, 22 nt, Human
uuuguaaauagcaguacucaug

SEQ ID NO: 864878 - RNA, 22 nt, Human
ucauuuguugaacuuuagugcg

SEQ ID NO: 864879 - RNA, 23 nt, Human
uuagagaugauuaaaaaaucuug

SEQ ID NO: 864880 - RNA, 22 nt, Human
ggacagcugcuuucaggccaca

SEQ ID NO: 864881 - RNA, 22 nt, Human
aaggcagccuuuguuugauuga

SEQ ID NO: 864882 - RNA, 22 nt, Human
ucauuuguucaucugcucuucu

SEQ ID NO: 864883 - RNA, 22 nt, Human
auguucuuccaaaucuguaaca

SEQ ID NO: 864884 - RNA, 22 nt, Human
cucacugugccuuuucccaaac

SEQ ID NO: 864885 - RNA, 17 nt, Human
caggcagacauguaagc

SEQ ID NO: 864886 - RNA, 20 nt, Human
acaggagaucugaggaaagg

SEQ ID NO: 864887 - RNA, 22 nt, Human
aagccgaggccacacagcagga

SEQ ID NO: 864888 - RNA, 22 nt, Human
gcagaauuggauaguugugaua

SEQ ID NO: 864889 - RNA, 22 nt, Human
cuucagaagccugcagccuuug

SEQ ID NO: 864890 - RNA, 22 nt, Human
aauuuacacuucauuuggaggg

SEQ ID NO: 864891 - RNA, 22 nt, Human
agugauggugagugagaagcuc

SEQ ID NO: 864892 - RNA, 22 nt, Human
cugcuguggccagccaggucaa

SEQ ID NO: 864893 - RNA, 22 nt, Human
uugcucaggcuggugugcagug

SEQ ID NO: 864894 - RNA, 22 nt, Human
augaguucaauuguuucaguca

SEQ ID NO: 864895 - RNA, 22 nt, Human
uucauuaauucauucagugacu

SEQ ID NO: 864896 - RNA, 22 nt, Human
aguuauaaucugcuacugauau

SEQ ID NO: 864897 - RNA, 22 nt, Human
uuugacaugcaaagcacuuuag

SEQ ID NO: 864898 - RNA, 22 nt, Human
gucaggauuauuuuauuaaaag

SEQ ID NO: 864899 - RNA, 21 nt, Human
cccaggaggagcuccggcucc

SEQ ID NO: 864900 - RNA, 22 nt, Human
cagaaaucauugugaugacagg

SEQ ID NO: 864901 - RNA, 22 nt, Human
cccaggaguuggaggcuacggu

SEQ ID NO: 864902 - RNA, 22 nt, Human
ucugcaucauuuuucagagccg

SEQ ID NO: 864903 - RNA, 22 nt, Human
uuacagaaucuacucgugguga

SEQ ID NO: 864904 - RNA, 22 nt, Human
ugaagaaucagauuggccugcg

SEQ ID NO: 864905 - RNA, 19 nt, Human
uccaggaggcugccauuga

SEQ ID NO: 864906 - RNA, 22 nt, Human
agugugucugaucacuugugag

SEQ ID NO: 864907 - RNA, 22 nt, Human
caggguggggaaauagcgcccu

SEQ ID NO: 864908 - RNA, 22 nt, Human
aucugccuccaaguccaugugu

SEQ ID NO: 864909 - RNA, 22 nt, Human
uaaguccuucaccuaauccuca

SEQ ID NO: 864910 - RNA, 22 nt, Human
uuuguuaauucuuauguuagag

SEQ ID NO: 864911 - RNA, 22 nt, Human
uuuaacuuaaucugcuugauga

SEQ ID NO: 864912 - RNA, 21 nt, Human
ggcagccucuguggaagggga

SEQ ID NO: 864913 - RNA, 20 nt, Human
acuggaucuggcuggagcug

SEQ ID NO: 864914 - RNA, 19 nt, Human
ugcugcuguccuugcaggg

SEQ ID NO: 864915 - RNA, 22 nt, Human
ucuacugugguccuuguaacca

SEQ ID NO: 864916 - RNA, 22 nt, Human
uaaacauuuguuauucuuguuu

SEQ ID NO: 864917 - RNA, 22 nt, Human
aagucaccccacacucuuggga

SEQ ID NO: 864918 - RNA, 22 nt, Human
guucuugccagcauccucaggu

SEQ ID NO: 864919 - RNA, 23 nt, Human
uuucaaauuacucugcagaugac

SEQ ID NO: 864920 - RNA, 22 nt, Human
uuuccaaaaguuuguucugugc

SEQ ID NO: 864921 - RNA, 22 nt, Human
agcagccuuugaucaucuggga

SEQ ID NO: 864922 - RNA, 18 nt, Human
gcaggcuuuuccuggguc

SEQ ID NO: 864923 - RNA, 22 nt, Human
gaaaggccauuucugaggguuu

SEQ ID NO: 864924 - RNA, 22 nt, Human
aaagccaugaauguuauagagg

SEQ ID NO: 864925 - RNA, 22 nt, Human
uagaaaugaauguuuaaaaguc

SEQ ID NO: 864926 - RNA, 22 nt, Human
ugcuucugggcaaaugugugug

SEQ ID NO: 864927 - RNA, 22 nt, Human
cuucugugauuugguuaggaua

SEQ ID NO: 864928 - RNA, 22 nt, Human
uccaggaguggggcagaggucu

SEQ ID NO: 864929 - RNA, 22 nt, Human
augguuuuagaaucaggaaaaa

SEQ ID NO: 864930 - RNA, 22 nt, Human
aaaacuuucagggauacagaaa

SEQ ID NO: 864931 - RNA, 22 nt, Human
ugcuuauugcuuucaagacugu

SEQ ID NO: 864932 - RNA, 16 nt, Human
aggaggggaauuagga

SEQ ID NO: 864933 - RNA, 21 nt, Human
gauuugcagaaacuagacagg

SEQ ID NO: 864934 - RNA, 22 nt, Human
aagucacaagcauauaugcauu

SEQ ID NO: 864935 - RNA, 22 nt, Human
gucagagagggcacgugcacac

SEQ ID NO: 864936 - RNA, 22 nt, Human
cuuaaacugaaagcuacaagau

SEQ ID NO: 864937 - RNA, 23 nt, Human
uacaugcuauaauuucacccuca

SEQ ID NO: 864938 - RNA, 22 nt, Human
ugucaccaguuccaggaaauaa

SEQ ID NO: 864939 - RNA, 22 nt, Human
uccaggaguccugggagugauu

SEQ ID NO: 864940 - RNA, 22 nt, Human
uagggcaggggaggaaucugaa

SEQ ID NO: 864941 - RNA, 22 nt, Human
uacccaggaggaaacugaggcu

SEQ ID NO: 864942 - RNA, 22 nt, Human
uucagaaagguuaaucuggauu

SEQ ID NO: 864943 - RNA, 22 nt, Human
uguggaaaagaauaagggagau

SEQ ID NO: 864944 - RNA, 22 nt, Human
ccauggcuuucuuucauuguaa

SEQ ID NO: 864945 - RNA, 22 nt, Human
aaacugcugguugcuggccagc

SEQ ID NO: 864946 - RNA, 22 nt, Human
auacagaagaacuauagccacu

SEQ ID NO: 864947 - RNA, 22 nt, Human
aguugcagacgcagagauguug

SEQ ID NO: 864948 - RNA, 22 nt, Human
augguuuauugcuuuaaugaaa

SEQ ID NO: 864949 - RNA, 22 nt, Human
ugaaaauggccugaagaagcaa

SEQ ID NO: 864950 - RNA, 22 nt, Human
ucucuucuaauuuucccgagua

SEQ ID NO: 864951 - RNA, 22 nt, Human
aguagaauagauggauacuauu

SEQ ID NO: 864952 - RNA, 22 nt, Human
uuuggacaaguuacugguuucc

SEQ ID NO: 864953 - RNA, 22 nt, Human
uauguuaagugggauaaucaaa

SEQ ID NO: 864954 - RNA, 22 nt, Human
ucucaggaucuaauacauggua

SEQ ID NO: 864955 - RNA, 22 nt, Human
auguuauuaaaguacagauucu

SEQ ID NO: 864956 - RNA, 22 nt, Human
uccaauauggauaaaaggggcc

SEQ ID NO: 864957 - RNA, 22 nt, Human
aucauuacuccuguaaaauugu

SEQ ID NO: 864958 - RNA, 22 nt, Human
ucuucuuccucauuuauacaua

SEQ ID NO: 864959 - RNA, 22 nt, Human
uggcagcuuccugcucauagga

SEQ ID NO: 864960 - RNA, 22 nt, Human
uuugaacuucuaccugucauau

SEQ ID NO: 864961 - RNA, 22 nt, Human
ccaggaaauagugcugugaucu

SEQ ID NO: 864962 - RNA, 22 nt, Human
uuccuuagccugccuuccaggg

SEQ ID NO: 864963 - RNA, 22 nt, Human
aucacauucuuucaaagcaguc

SEQ ID NO: 864964 - RNA, 22 nt, Human
acaugaaacuguugcauuagaa

SEQ ID NO: 864965 - RNA, 22 nt, Human
ugaggggauacgguacacauug

SEQ ID NO: 864966 - RNA, 22 nt, Human
uuucaguuuaugucuugaauua

SEQ ID NO: 864967 - RNA, 22 nt, Human
agaggacagacggaaagugcca

SEQ ID NO: 864968 - RNA, 20 nt, Human
aguuauaguaucuagccaug

SEQ ID NO: 864969 - RNA, 22 nt, Human
caucagaagauggcucuggaaa

SEQ ID NO: 864970 - RNA, 22 nt, Human
augcagcugucagggagaacau

SEQ ID NO: 864971 - RNA, 22 nt, Human
cugcugugagcacuccagccug

SEQ ID NO: 864972 - RNA, 22 nt, Human
uucagaaguagcuaagcaguca

SEQ ID NO: 864973 - RNA, 22 nt, Human
ugaacaaacugcauucuucacu

SEQ ID NO: 864974 - RNA, 22 nt, Human
aaaguccuagcgauccacagaa

SEQ ID NO: 864975 - RNA, 22 nt, Human
auuuagcaaaaaaugaugaagc

SEQ ID NO: 864976 - RNA, 22 nt, Human
ggcaagcucaggccucaggugu

SEQ ID NO: 864977 - RNA, 22 nt, Human
ggguggagaggcuaaguccagu

SEQ ID NO: 864978 - RNA, 22 nt, Human
ucuuuaauucagcaugaugcgg

SEQ ID NO: 864979 - RNA, 22 nt, Human
uuugaaguguuauuucuaucac

SEQ ID NO: 864980 - RNA, 22 nt, Human
ucaggagagagaaauuggggcu

SEQ ID NO: 864981 - RNA, 22 nt, Human
acaagccaauuacugugccagg

SEQ ID NO: 864982 - RNA, 22 nt, Human
uagggauguaaacauaguaauu

SEQ ID NO: 864983 - RNA, 22 nt, Human
aucccaugagaccacguuggcu

SEQ ID NO: 864984 - RNA, 22 nt, Human
ggcaauuucaugugguuuaaac

SEQ ID NO: 864985 - RNA, 22 nt, Human
uccaggagguuuggaggaagca

SEQ ID NO: 864986 - RNA, 22 nt, Human
acaaaugucuccucuuuuguua

SEQ ID NO: 864987 - RNA, 22 nt, Human
uuucugugguggguaguucaga

SEQ ID NO: 864988 - RNA, 22 nt, Human
aaacauguuuucugaauauuuu

SEQ ID NO: 864989 - RNA, 22 nt, Human
gauggacagccuggaaggaaag

SEQ ID NO: 864990 - RNA, 22 nt, Human
acccaggagguggaggcugcag

SEQ ID NO: 864991 - RNA, 22 nt, Human
uguuguuuucucauggagaaua

SEQ ID NO: 864992 - RNA, 22 nt, Human
auggaaagggaagcaaggaaca

SEQ ID NO: 864993 - RNA, 22 nt, Human
aggcugcugaggccaccacgcu

SEQ ID NO: 864994 - RNA, 22 nt, Human
cauuuguaguuaaaaaugucuc

SEQ ID NO: 864995 - RNA, 22 nt, Human
cagaauuuagcacaauguaugg

SEQ ID NO: 864996 - RNA, 22 nt, Human
uaacauuagguagacauaagcc

SEQ ID NO: 864997 - RNA, 22 nt, Human
uggcaucucaaacaggcagauu

SEQ ID NO: 864998 - RNA, 22 nt, Human
uagaacuacaagcauuaaaagu

SEQ ID NO: 864999 - RNA, 22 nt, Human
ucagaauuuugguuugguuggu

SEQ ID NO: 865000 - RNA, 22 nt, Human
uugauuucuauucagauguaga

SEQ ID NO: 865001 - RNA, 22 nt, Human
uugggcucaggaguuugagacc

SEQ ID NO: 865002 - RNA, 22 nt, Human
aggucagcaugaguagaaggua

SEQ ID NO: 865003 - RNA, 22 nt, Human
augccaaagcccaaguucauca

SEQ ID NO: 865004 - RNA, 22 nt, Human
uuuaggcaagggcaagauuauc

SEQ ID NO: 865005 - RNA, 22 nt, Human
ugaggcagugugagauaauaaa

SEQ ID NO: 865006 - RNA, 22 nt, Human
ggauggcaggacaaggacccag

SEQ ID NO: 865007 - RNA, 22 nt, Human
agagguagagguugcagugagc

SEQ ID NO: 865008 - RNA, 22 nt, Human
gaaggccauuuuuagguagaau

SEQ ID NO: 865009 - RNA, 19 nt, Human
uuugcagugguuccuuugu

SEQ ID NO: 865010 - RNA, 19 nt, Human
uggcauuuggaggcaaccu

SEQ ID NO: 865011 - RNA, 22 nt, Human
acagcauugagagcuaaauuua

SEQ ID NO: 865012 - RNA, 21 nt, Human
gugcuuuuccuuaauguucuu

SEQ ID NO: 865013 - RNA, 19 nt, Human
caaggccaccauuucuccg

SEQ ID NO: 865014 - RNA, 22 nt, Human
caggaaugaggucguaaguguc

SEQ ID NO: 865015 - RNA, 22 nt, Human
acuuugaaucucagauaaccaa

SEQ ID NO: 865016 - RNA, 22 nt, Human
ccagugcuucuuugcuagcugg

SEQ ID NO: 865017 - RNA, 22 nt, Human
ucuuagaaugucaacugauguu

SEQ ID NO: 865018 - RNA, 22 nt, Human
cuucuucaagagaaugggagac

SEQ ID NO: 865019 - RNA, 22 nt, Human
uugcauuucccauugaguaaug

SEQ ID NO: 865020 - RNA, 22 nt, Human
cagcaggagcagucagacuccu

SEQ ID NO: 865021 - RNA, 17 nt, Human
aaucuguuuacagucag

SEQ ID NO: 865022 - RNA, 22 nt, Human
ugaauaaucauguccauagugu

SEQ ID NO: 865023 - RNA, 22 nt, Human
uggcuuuaaaucuguauucaua

SEQ ID NO: 865024 - RNA, 22 nt, Human
acaaaauuguguuaaacuuuau

SEQ ID NO: 865025 - RNA, 22 nt, Human
ccagagagauugcuucuaaaga

SEQ ID NO: 865026 - RNA, 22 nt, Human
uagggcagaguccaggaugggc

SEQ ID NO: 865027 - RNA, 22 nt, Human
aaguguagauuauggagugucu

SEQ ID NO: 865028 - RNA, 17 nt, Human
gccucugcuugugucau

SEQ ID NO: 865029 - RNA, 22 nt, Human
agcacauucugccuugcuuugc

SEQ ID NO: 865030 - RNA, 22 nt, Human
cuguaaauaugaagaauauaug

SEQ ID NO: 865031 - RNA, 19 nt, Human
cuucuggcccugagccacc

SEQ ID NO: 865032 - RNA, 22 nt, Human
gaucagaauucuuguguguuuc

SEQ ID NO: 865033 - RNA, 22 nt, Human
uugaaauggaagugaaaauucu

SEQ ID NO: 865034 - RNA, 22 nt, Human
uaucagaagacuuacaguaucg

SEQ ID NO: 865035 - RNA, 22 nt, Human
caguucuuaauaccaugugguu

SEQ ID NO: 865036 - RNA, 22 nt, Human
uuuauccagcagcuauucaaaa

SEQ ID NO: 865037 - RNA, 22 nt, Human
aggacuuagaacauuauguacu

SEQ ID NO: 865038 - RNA, 20 nt, Human
ucuuauacagaaaacauuuu

SEQ ID NO: 865039 - RNA, 22 nt, Human
ucuggcaggucaaucauucuuu

SEQ ID NO: 865040 - RNA, 22 nt, Human
auuuagaacuuuguuugccaau

SEQ ID NO: 865041 - RNA, 22 nt, Human
aaaacugaaauacgauccaaug

SEQ ID NO: 865042 - RNA, 22 nt, Human
aggccagccucaggcagggacc

SEQ ID NO: 865043 - RNA, 22 nt, Human
uucccucuccuacucaggaaag

SEQ ID NO: 865044 - RNA, 22 nt, Human
uacauauacugagugauuugcu

SEQ ID NO: 865045 - RNA, 22 nt, Human
uucagugucaauuuuuaaauau

SEQ ID NO: 865046 - RNA, 22 nt, Human
acaaaguccugguguauggcca

SEQ ID NO: 865047 - RNA, 22 nt, Human
aauggccagcaacaggagugaa

SEQ ID NO: 865048 - RNA, 22 nt, Human
auucaacggguagaagggucuu

SEQ ID NO: 865049 - RNA, 22 nt, Human
cauggcuucuaagugauaacgu

SEQ ID NO: 865050 - RNA, 22 nt, Human
uaaggccagccagcaaaucugu

SEQ ID NO: 865051 - RNA, 22 nt, Human
agagcagcacguuguccccaca

SEQ ID NO: 865052 - RNA, 22 nt, Human
ccuggauucaagucuuucuuuc

SEQ ID NO: 865053 - RNA, 23 nt, Human
aaucuauacuuaggcugguaaua

SEQ ID NO: 865054 - RNA, 22 nt, Human
ucacaaauauuuuaacaguagg

SEQ ID NO: 865055 - RNA, 22 nt, Human
acagauuuuugguaaauaauuu

SEQ ID NO: 865056 - RNA, 22 nt, Human
auugaggcagcauaguucaggg

SEQ ID NO: 865057 - RNA, 22 nt, Human
agggauggaagacuugaagacc

SEQ ID NO: 865058 - RNA, 22 nt, Human
agucucuuuguggacucugccu

SEQ ID NO: 865059 - RNA, 22 nt, Human
uagugcuuaauaaauuucagaa

SEQ ID NO: 865060 - RNA, 22 nt, Human
ggccagcucuuguccacggagg

SEQ ID NO: 865061 - RNA, 22 nt, Human
ucaacuuuaguguagcuauuua

SEQ ID NO: 865062 - RNA, 20 nt, Human
cccaggagugagcagcuuua

SEQ ID NO: 865063 - RNA, 22 nt, Human
cagaaaauaaaguuucuacgca

SEQ ID NO: 865064 - RNA, 22 nt, Human
uuuaggcaugcaguucuauuua

SEQ ID NO: 865065 - RNA, 22 nt, Human
ugaaaugagagcacagaauaaa

SEQ ID NO: 865066 - RNA, 22 nt, Human
gcaccugauugauuucacugcu

SEQ ID NO: 865067 - RNA, 22 nt, Human
gggcagcuggcuuauagguuug

SEQ ID NO: 865068 - RNA, 22 nt, Human
cggagccugcuuguugcagcug

SEQ ID NO: 865069 - RNA, 22 nt, Human
agcacauaccagaaccacaggu

SEQ ID NO: 865070 - RNA, 22 nt, Human
caaucaguaaccggaucauggu

SEQ ID NO: 865071 - RNA, 22 nt, Human
uuucuucagccacuccaaacug

SEQ ID NO: 865072 - RNA, 22 nt, Human
aggcagcuggcagcacccaggg

SEQ ID NO: 865073 - RNA, 22 nt, Human
ggcagccuugagggaggccugg

SEQ ID NO: 865074 - RNA, 22 nt, Human
uaauuccaaguugagacaugca

SEQ ID NO: 865075 - RNA, 22 nt, Human
ccaugagcuuccuauauagggu

SEQ ID NO: 865076 - RNA, 22 nt, Human
uggcuuaauauuucauauuuaa

SEQ ID NO: 865077 - RNA, 21 nt, Human
acaggagaccgccuggcaguc

SEQ ID NO: 865078 - RNA, 22 nt, Human
cauacuuugggauaagagugga

SEQ ID NO: 865079 - RNA, 22 nt, Human
uucagaauauuuguuuuacaug

SEQ ID NO: 865080 - RNA, 22 nt, Human
ggcucagacucccaggcccucu

SEQ ID NO: 865081 - RNA, 22 nt, Human
uuucuuauacuauauugucauc

SEQ ID NO: 865082 - RNA, 22 nt, Human
acucaggaaaugaagacugguu

SEQ ID NO: 865083 - RNA, 22 nt, Human
uauccaaaguuucucagaaacu

SEQ ID NO: 865084 - RNA, 22 nt, Human
caggcagcugaggacuuugcua

SEQ ID NO: 865085 - RNA, 22 nt, Human
aaaaauugcugagaacggaauu

SEQ ID NO: 865086 - RNA, 22 nt, Human
ucagccagugccuugaucuugc

SEQ ID NO: 865087 - RNA, 22 nt, Human
gaagaaucugaggacagucauu

SEQ ID NO: 865088 - RNA, 22 nt, Human
aagcuggaacaucuugaggaag

SEQ ID NO: 865089 - RNA, 22 nt, Human
ugucucugauaaguaguucagu

SEQ ID NO: 865090 - RNA, 22 nt, Human
acuuuagaccaucuuccacagu

SEQ ID NO: 865091 - RNA, 22 nt, Human
auuaucuauguagaaugauuuu

SEQ ID NO: 865092 - RNA, 22 nt, Human
ucucuucucuagugagcaacug

SEQ ID NO: 865093 - RNA, 22 nt, Human
gcaacuuucaagcaccaugggg

SEQ ID NO: 865094 - RNA, 20 nt, Human
cccagugaagcauggaagag

SEQ ID NO: 865095 - RNA, 22 nt, Human
cuuucaacuacauacaggcgau

SEQ ID NO: 865096 - RNA, 22 nt, Human
aauaauuagugggacagagaac

SEQ ID NO: 865097 - RNA, 22 nt, Human
ugugaaagcaagucuaguucuc

SEQ ID NO: 865098 - RNA, 22 nt, Human
uuucaguucaguuuauuauauc

SEQ ID NO: 865099 - RNA, 22 nt, Human
gaauuucaaagagguuaagagg

SEQ ID NO: 865100 - RNA, 22 nt, Human
gggcagcugccacuccgcuugc

SEQ ID NO: 865101 - RNA, 22 nt, Human
guaaaauagaauaacguggcua

SEQ ID NO: 865102 - RNA, 22 nt, Human
uggauuuauggagaccgaaagu

SEQ ID NO: 865103 - RNA, 22 nt, Human
gauuuacagaucuaagggucac

SEQ ID NO: 865104 - RNA, 22 nt, Human
uccaggagcucauccacgucaa

SEQ ID NO: 865105 - RNA, 22 nt, Human
uaucuaaauggaauauuccaga

SEQ ID NO: 865106 - RNA, 22 nt, Human
cccaucacagacacuggguuau

SEQ ID NO: 865107 - RNA, 22 nt, Human
ugacaguuaagguauacauuca

SEQ ID NO: 865108 - RNA, 19 nt, Human
agauuuaccucauauaguu

SEQ ID NO: 865109 - RNA, 22 nt, Human
uuguuaaaaauagauuuccagg

SEQ ID NO: 865110 - RNA, 22 nt, Human
auuuucagagacaucuggacuu

SEQ ID NO: 865111 - RNA, 22 nt, Human
ucaacuuugaaaccauagugaa

SEQ ID NO: 865112 - RNA, 22 nt, Human
auguguaugcaugcacuaagau

SEQ ID NO: 865113 - RNA, 19 nt, Human
ugccuggacaaaugugggg

SEQ ID NO: 865114 - RNA, 22 nt, Human
ucugggaagcugguccuguucu

SEQ ID NO: 865115 - RNA, 22 nt, Human
gugauuuucuccuccuagaagu

SEQ ID NO: 865116 - RNA, 22 nt, Human
agaccauagggaccucagguug

SEQ ID NO: 865117 - RNA, 22 nt, Human
ccugcugugaagccaggccugu

SEQ ID NO: 865118 - RNA, 22 nt, Human
ucuuuaauguacuuucuuucac

SEQ ID NO: 865119 - RNA, 22 nt, Human
auucuucagaauaucuggcacu

SEQ ID NO: 865120 - RNA, 22 nt, Human
ugaauaguccuuggaauaacug

SEQ ID NO: 865121 - RNA, 22 nt, Human
uuuuccaaaguaccaugucccu

SEQ ID NO: 865122 - RNA, 20 nt, Human
acaggggcagcacaauaaug

SEQ ID NO: 865123 - RNA, 22 nt, Human
auucuucaaagagugucaaagu

SEQ ID NO: 865124 - RNA, 22 nt, Human
agaguucugcucuucucaguga

SEQ ID NO: 865125 - RNA, 21 nt, Human
ugaaacaaucagacagagucu

SEQ ID NO: 865126 - RNA, 22 nt, Human
aagaauucacugguagagucaa

SEQ ID NO: 865127 - RNA, 22 nt, Human
acaugcauacacguacauaccu

SEQ ID NO: 865128 - RNA, 22 nt, Human
uggcuuuauaaauccacugguu

SEQ ID NO: 865129 - RNA, 22 nt, Human
aguaaaauuucugcugaggaga

SEQ ID NO: 865130 - RNA, 22 nt, Human
cugacagucucauugauuugcu

SEQ ID NO: 865131 - RNA, 22 nt, Human
aacuggauuuaggaacagagaa

SEQ ID NO: 865132 - RNA, 22 nt, Human
gauggcuuugugcaccaugauu

SEQ ID NO: 865133 - RNA, 22 nt, Human
cugcugugacagcugccguguu

SEQ ID NO: 865134 - RNA, 22 nt, Human
ccaggagaaugggauuacccua

SEQ ID NO: 865135 - RNA, 19 nt, Human
ucaucucacagggccuggc

SEQ ID NO: 865136 - RNA, 22 nt, Human
aagauuauggcagauaacaauu

SEQ ID NO: 865137 - RNA, 22 nt, Human
cauggagauaaacugaaauauu

SEQ ID NO: 865138 - RNA, 22 nt, Human
ucuuuaauauaaaggaaugaau

SEQ ID NO: 865139 - RNA, 22 nt, Human
cagaauggcuuuuauggcucag

SEQ ID NO: 865140 - RNA, 22 nt, Human
ucagugcacagagauuuuuguu

SEQ ID NO: 865141 - RNA, 22 nt, Human
gcuguggucugugagcuccaaa

SEQ ID NO: 865142 - RNA, 22 nt, Human
caaauacuggguaaguuaauuu

SEQ ID NO: 865143 - RNA, 22 nt, Human
aucagaaaggugggcaagcaga

SEQ ID NO: 865144 - RNA, 22 nt, Human
ugaggcagguaagcaaguuuug

SEQ ID NO: 865145 - RNA, 19 nt, Human
ggcagcuugggaagguagc

SEQ ID NO: 865146 - RNA, 19 nt, Human
uuccuuagaggaggcggug

SEQ ID NO: 865147 - RNA, 22 nt, Human
aggcagugcucaagacagcagc

SEQ ID NO: 865148 - RNA, 22 nt, Human
ccagagagaaauggauuugagu

SEQ ID NO: 865149 - RNA, 22 nt, Human
gaaguucaaaagacagauuuga

SEQ ID NO: 865150 - RNA, 22 nt, Human
augaauaaaacauuuuaaucag

SEQ ID NO: 865151 - RNA, 22 nt, Human
caucaucaaaagugacagagaa

SEQ ID NO: 865152 - RNA, 22 nt, Human
cagucuuuguucccauuacuga

SEQ ID NO: 865153 - RNA, 22 nt, Human
uuugaauguuuuagguacuuaa

SEQ ID NO: 865154 - RNA, 22 nt, Human
ggagugggaacaaugacauggu

SEQ ID NO: 865155 - RNA, 22 nt, Human
uacuuguagcagguggcauuua

SEQ ID NO: 865156 - RNA, 21 nt, Human
agucuguuaggaugacucuga

SEQ ID NO: 865157 - RNA, 22 nt, Human
ugaaacaaugugaaguugcuga

SEQ ID NO: 865158 - RNA, 22 nt, Human
acauuuuuuagagucccacauu

SEQ ID NO: 865159 - RNA, 22 nt, Human
ugaaauagacacagugcuauac

SEQ ID NO: 865160 - RNA, 22 nt, Human
aaggaguuuggguagucauaca

SEQ ID NO: 865161 - RNA, 20 nt, Human
ugugaaagcaguagaaugac

SEQ ID NO: 865162 - RNA, 22 nt, Human
gagggaauggugugcaagaggu

SEQ ID NO: 865163 - RNA, 22 nt, Human
guggaaugaauagauuugcauu

SEQ ID NO: 865164 - RNA, 22 nt, Human
cuuaacauccugcauuuuucuu

SEQ ID NO: 865165 - RNA, 22 nt, Human
uaucagaaggcacauggagucu

SEQ ID NO: 865166 - RNA, 22 nt, Human
uuuaggcagucauugaacaagu

SEQ ID NO: 865167 - RNA, 22 nt, Human
aggcagagcuggguuuugaaau

SEQ ID NO: 865168 - RNA, 22 nt, Human
gccucugcaauuacauugugcc

SEQ ID NO: 865169 - RNA, 22 nt, Human
agaaaugacacacaugagacau

SEQ ID NO: 865170 - RNA, 22 nt, Human
ucagaauucuacaauagaucag

SEQ ID NO: 865171 - RNA, 22 nt, Human
ucauuguuucugcuuuucauga

SEQ ID NO: 865172 - RNA, 22 nt, Human
ggccagaggugguacauagcuu

SEQ ID NO: 865173 - RNA, 22 nt, Human
uacacaugaucauuuaguagca

SEQ ID NO: 865174 - RNA, 22 nt, Human
aaacuuugguauguagcaaaac

SEQ ID NO: 865175 - RNA, 22 nt, Human
ugaaggccuaacuuccagugcu

SEQ ID NO: 865176 - RNA, 22 nt, Human
caggcagcugacugucagauau

SEQ ID NO: 865177 - RNA, 22 nt, Human
aaaggccacacugcucuuucuc

SEQ ID NO: 865178 - RNA, 21 nt, Human
cuacagaaucgagcauucugg

SEQ ID NO: 865179 - RNA, 17 nt, Human
aaggccauuuccaccca

SEQ ID NO: 865180 - RNA, 22 nt, Human
uuccucuagcuucucacuaaca

SEQ ID NO: 865181 - RNA, 22 nt, Human
agggaggucuuugaggggcuua

SEQ ID NO: 865182 - RNA, 22 nt, Human
aucuuucaguuucauaccaauu

SEQ ID NO: 865183 - RNA, 22 nt, Human
uugcauuuuuagaugcuucugu

SEQ ID NO: 865184 - RNA, 22 nt, Human
uauuccaaaauaguuaagcacu

SEQ ID NO: 865185 - RNA, 22 nt, Human
cuguguuggcuuuucucuugua

SEQ ID NO: 865186 - RNA, 23 nt, Human
ggauuuaguggaugagcugagug

SEQ ID NO: 865187 - RNA, 22 nt, Human
uuuauuguuuagaagggggcug

SEQ ID NO: 865188 - RNA, 22 nt, Human
augcuuaauacacuguuaaagg

SEQ ID NO: 865189 - RNA, 22 nt, Human
cauuguuauagcauuacacacc

SEQ ID NO: 865190 - RNA, 22 nt, Human
guuuuauaggugaaauauuacu

SEQ ID NO: 865191 - RNA, 22 nt, Human
guucuucagaggggaaagaacc

SEQ ID NO: 865192 - RNA, 22 nt, Human
uuaauucuaguuuaacacuuag

SEQ ID NO: 865193 - RNA, 22 nt, Human
aucuucucauguguaaugaggu

SEQ ID NO: 865194 - RNA, 22 nt, Human
ggguacuuaauauuuacggggu

SEQ ID NO: 865195 - RNA, 22 nt, Human
ggcagcuuguccuucaggagag

SEQ ID NO: 865196 - RNA, 22 nt, Human
acuucuucuucagcugggggau

SEQ ID NO: 865197 - RNA, 22 nt, Human
gaguucuaaaggcagaacauaa

SEQ ID NO: 865198 - RNA, 22 nt, Human
ugccgcagugcggggagggccc

SEQ ID NO: 865199 - RNA, 22 nt, Human
ucuucagauggccaguuguccc

SEQ ID NO: 865200 - RNA, 20 nt, Human
gaguccuuaugggcugaggu

SEQ ID NO: 865201 - RNA, 22 nt, Human
gucaggauuggggucaugaguc

SEQ ID NO: 865202 - RNA, 20 nt, Human
uuuaggcauuacucuuuugu

SEQ ID NO: 865203 - RNA, 22 nt, Human
uugaaagacuucuccugugaaa

SEQ ID NO: 865204 - RNA, 22 nt, Human
auuaaauuaaguggcuaauuua

SEQ ID NO: 865205 - RNA, 22 nt, Human
gaaccucagugaaacuggaggu

SEQ ID NO: 865206 - RNA, 22 nt, Human
acauugcugcauucuccuuccc

SEQ ID NO: 865207 - RNA, 21 nt, Human
cccaggagaagaaaagaugca

SEQ ID NO: 865208 - RNA, 22 nt, Human
cucagagaggcaguggaaguca

SEQ ID NO: 865209 - RNA, 22 nt, Human
gaggcagcagggcugguuccuu

SEQ ID NO: 865210 - RNA, 21 nt, Human
acagcaagccuucacaugagu

SEQ ID NO: 865211 - RNA, 22 nt, Human
auuauucuuaugucaucauggc

SEQ ID NO: 865212 - RNA, 20 nt, Human
uggccuuuaaauaguauucc

SEQ ID NO: 865213 - RNA, 22 nt, Human
gcacaauaauucuuguuuugcu

SEQ ID NO: 865214 - RNA, 22 nt, Human
gcagcuaccacccaggaaggac

SEQ ID NO: 865215 - RNA, 22 nt, Human
uuaacaauagaguuucuucagg

SEQ ID NO: 865216 - RNA, 22 nt, Human
gaggggaagacuucuggacagu

SEQ ID NO: 865217 - RNA, 22 nt, Human
ugcaggaaucagaggggaagcg

SEQ ID NO: 865218 - RNA, 22 nt, Human
uaacagaaaggggacagaaaua

SEQ ID NO: 865219 - RNA, 22 nt, Human
ucuuagcacagcuauauaaguu

SEQ ID NO: 865220 - RNA, 22 nt, Human
gcucucuugguggcuguccugg

SEQ ID NO: 865221 - RNA, 22 nt, Human
gucccaggugggcuccaccucu

SEQ ID NO: 865222 - RNA, 22 nt, Human
cugcuuugacuguuaagaacca

SEQ ID NO: 865223 - RNA, 22 nt, Human
uccuuguugcugcagucaccug

SEQ ID NO: 865224 - RNA, 18 nt, Human
ucaggagacacagacgca

SEQ ID NO: 865225 - RNA, 22 nt, Human
uuacaaaguguuaugauaaaca

SEQ ID NO: 865226 - RNA, 22 nt, Human
ugcuucagaggaaaggcaaaag

SEQ ID NO: 865227 - RNA, 22 nt, Human
caaagucagcugccagucccaa

SEQ ID NO: 865228 - RNA, 22 nt, Human
uuuuagcacuaagugauaugcu

SEQ ID NO: 865229 - RNA, 22 nt, Human
gucaacuugcaagaugcugggc

SEQ ID NO: 865230 - RNA, 22 nt, Human
uuccugggacuggagcagccca

SEQ ID NO: 865231 - RNA, 22 nt, Human
uccaugaggcagggaggcuggc

SEQ ID NO: 865232 - RNA, 19 nt, Human
aaaauugcguauuuugagg

SEQ ID NO: 865233 - RNA, 22 nt, Human
ucucaguguguuuucucucaga

SEQ ID NO: 865234 - RNA, 22 nt, Human
cauuuguacagaacagcuuuau

SEQ ID NO: 865235 - RNA, 22 nt, Human
auucuucaguauguguggauug

SEQ ID NO: 865236 - RNA, 22 nt, Human
agcugcccuuaauaggcauuca

SEQ ID NO: 865237 - RNA, 22 nt, Human
cagauuucagcucauauauuau

SEQ ID NO: 865238 - RNA, 22 nt, Human
uucugaaagccaauucauugaa

SEQ ID NO: 865239 - RNA, 22 nt, Human
auuccaaacuuaccccagagga

SEQ ID NO: 865240 - RNA, 22 nt, Human
auucauuuagguauucacuuac

SEQ ID NO: 865241 - RNA, 22 nt, Human
cagaauuuuucgaauguacugu

SEQ ID NO: 865242 - RNA, 22 nt, Human
cuccaggaaagccugaggcccg

SEQ ID NO: 865243 - RNA, 22 nt, Human
ccagaggaggggggucuuucug

SEQ ID NO: 865244 - RNA, 22 nt, Human
uuucaacuuguuugcuuccaua

SEQ ID NO: 865245 - RNA, 22 nt, Human
ucaguaaaguucuuucuugcug

SEQ ID NO: 865246 - RNA, 19 nt, Human
acuggcaguuucugcaugg

SEQ ID NO: 865247 - RNA, 22 nt, Human
ucacugucugaaagaaauggcc

SEQ ID NO: 865248 - RNA, 22 nt, Human
gcuggcaggagccuuucccuuu

SEQ ID NO: 865249 - RNA, 22 nt, Human
auuauuauauagggaaaguccc

SEQ ID NO: 865250 - RNA, 22 nt, Human
uaguaucuauuaguaacaagag

SEQ ID NO: 865251 - RNA, 22 nt, Human
aguggaccagaagacugaagcu

SEQ ID NO: 865252 - RNA, 17 nt, Human
cauuuguugaucaguug

SEQ ID NO: 865253 - RNA, 22 nt, Human
guacagaaugcuugguaaggca

SEQ ID NO: 865254 - RNA, 22 nt, Human
uuucaguuguccuguuaauagc

SEQ ID NO: 865255 - RNA, 22 nt, Human
aagugaagaaauacaugagaau

SEQ ID NO: 865256 - RNA, 22 nt, Human
augguuuuccucugcugcuuaa

SEQ ID NO: 865257 - RNA, 22 nt, Human
cccuugcaucccauguguggcc

SEQ ID NO: 865258 - RNA, 22 nt, Human
uucaugugaauauauuugucuu

SEQ ID NO: 865259 - RNA, 22 nt, Human
aacaugauggggaagaacaaga

SEQ ID NO: 865260 - RNA, 22 nt, Human
uguuccaagcugcuggauaagc

SEQ ID NO: 865261 - RNA, 22 nt, Human
uuuaggcacagaguugagggac

SEQ ID NO: 865262 - RNA, 22 nt, Human
gcagaauuuggggguaaccuuu

SEQ ID NO: 865263 - RNA, 16 nt, Human
aaggagggaagagaau

SEQ ID NO: 865264 - RNA, 22 nt, Human
ggaggggaacuaaucccgugac

SEQ ID NO: 865265 - RNA, 22 nt, Human
auaaagauuuuuaggcauuucu

SEQ ID NO: 865266 - RNA, 22 nt, Human
cugcuguguuggcauuggauag

SEQ ID NO: 865267 - RNA, 22 nt, Human
uuuuugcugauaagcagaauuc

SEQ ID NO: 865268 - RNA, 23 nt, Human
acagaaaucauuuguaagguacc

SEQ ID NO: 865269 - RNA, 22 nt, Human
aacaugcuuugauaaauaaaag

SEQ ID NO: 865270 - RNA, 22 nt, Human
aggcggcugguguccugcaggu

SEQ ID NO: 865271 - RNA, 22 nt, Human
aaggaaccauuugugugcaugg

SEQ ID NO: 865272 - RNA, 22 nt, Human
aggcagcuggaggcagagacua

SEQ ID NO: 865273 - RNA, 22 nt, Human
auuaggcacuagaaugucaauu

SEQ ID NO: 865274 - RNA, 22 nt, Human
acaaagucaaauugcagccgcc

SEQ ID NO: 865275 - RNA, 22 nt, Human
caucagaaugaauguucuggag

SEQ ID NO: 865276 - RNA, 22 nt, Human
ggaggacacuggcucugccuuc

SEQ ID NO: 865277 - RNA, 22 nt, Human
ggccagcucugcacagcagcug

SEQ ID NO: 865278 - RNA, 22 nt, Human
uguacaauagcuauuaucucca

SEQ ID NO: 865279 - RNA, 22 nt, Human
ggaggaggggcgcuuugucuau

SEQ ID NO: 865280 - RNA, 22 nt, Human
ggugagggaguggaacgaggug

SEQ ID NO: 865281 - RNA, 22 nt, Human
ucauuuguggaagugauugugg

SEQ ID NO: 865282 - RNA, 20 nt, Human
ugcguguguauuuauuuucu

SEQ ID NO: 865283 - RNA, 22 nt, Human
ggagaggguguggaaaguuauc

SEQ ID NO: 865284 - RNA, 22 nt, Human
ucucacuuuguugcccagacuu

SEQ ID NO: 865285 - RNA, 20 nt, Human
aaucagaaagugugagcucu

SEQ ID NO: 865286 - RNA, 22 nt, Human
uaucagaacacauguuuugcag

SEQ ID NO: 865287 - RNA, 22 nt, Human
uuaagauagaacccaguagucu

SEQ ID NO: 865288 - RNA, 22 nt, Human
aggauuuauuccagaaaugcaa

SEQ ID NO: 865289 - RNA, 22 nt, Human
uuucuucucgacaccuuauccc

SEQ ID NO: 865290 - RNA, 22 nt, Human
gcaucuaaauaaacgugggagu

SEQ ID NO: 865291 - RNA, 21 nt, Human
agcaccuuacagcuauaaugg

SEQ ID NO: 865292 - RNA, 22 nt, Human
cguccuuacagagggucacagc

SEQ ID NO: 865293 - RNA, 22 nt, Human
auacagaauucacuacaguuuc

SEQ ID NO: 865294 - RNA, 22 nt, Human
augcuguguccuagugaaagaa

SEQ ID NO: 865295 - RNA, 23 nt, Human
acagacaacacugaugagagaaa

SEQ ID NO: 865296 - RNA, 21 nt, Human
ugcugaugucagagaagcaag

SEQ ID NO: 865297 - RNA, 22 nt, Human
ucucugaguauccugaacugcc

SEQ ID NO: 865298 - RNA, 22 nt, Human
gccaggagugucccacucauuu

SEQ ID NO: 865299 - RNA, 22 nt, Human
ggggcagcuaccggaaguaggg

SEQ ID NO: 865300 - RNA, 22 nt, Human
aaauuucaguuggaaugagcuc

SEQ ID NO: 865301 - RNA, 22 nt, Human
agugcuuugugcucucacugca

SEQ ID NO: 865302 - RNA, 19 nt, Human
uacauacuuauucuaaaag

SEQ ID NO: 865303 - RNA, 22 nt, Human
aggguggcugaguagauggaag

SEQ ID NO: 865304 - RNA, 19 nt, Human
aacuguaauuaauacccua

SEQ ID NO: 865305 - RNA, 22 nt, Human
caaagcaccacaaaccagguga

SEQ ID NO: 865306 - RNA, 22 nt, Human
uuuacagauguggaaagugagc

SEQ ID NO: 865307 - RNA, 22 nt, Human
acaugcuuugauguauuuugca

SEQ ID NO: 865308 - RNA, 22 nt, Human
gauuuacagguuagguccugua

SEQ ID NO: 865309 - RNA, 23 nt, Human
ugaaggccuggaggacgcguugu

SEQ ID NO: 865310 - RNA, 22 nt, Human
caucagaauuacuuggggagcu

SEQ ID NO: 865311 - RNA, 22 nt, Human
gauuuagagcaggaaugcaugg

SEQ ID NO: 865312 - RNA, 20 nt, Human
aucuucuuggccagcuugcu

SEQ ID NO: 865313 - RNA, 22 nt, Human
uggaaagucucuuuugacugua

SEQ ID NO: 865314 - RNA, 22 nt, Human
gaggagagagggacugucugca

SEQ ID NO: 865315 - RNA, 18 nt, Human
acugugugaauuagcucc

SEQ ID NO: 865316 - RNA, 22 nt, Human
agagugcagauaagagaauguu

SEQ ID NO: 865317 - RNA, 22 nt, Human
auugaaagaguuuucugcugca

SEQ ID NO: 865318 - RNA, 22 nt, Human
ggcaggcagaggcugagacagg

SEQ ID NO: 865319 - RNA, 22 nt, Human
cagcugccuucugcgggaaguc

SEQ ID NO: 865320 - RNA, 22 nt, Human
cagucaccaccagguggcagua

SEQ ID NO: 865321 - RNA, 22 nt, Human
agacucaagcagauaggaauua

SEQ ID NO: 865322 - RNA, 22 nt, Human
uuucuucagccuucacaaccug

SEQ ID NO: 865323 - RNA, 22 nt, Human
uuuccuaguucuaagaaaugua

SEQ ID NO: 865324 - RNA, 22 nt, Human
caggaugagaagggcucuuacg

SEQ ID NO: 865325 - RNA, 22 nt, Human
aucuauacccaucaugauuuaa

SEQ ID NO: 865326 - RNA, 17 nt, Human
gcuguaguuugauaaga

SEQ ID NO: 865327 - RNA, 22 nt, Human
cuacagaaacacuggacaugug

SEQ ID NO: 865328 - RNA, 22 nt, Human
ccaggcugagcaugauuggagc

SEQ ID NO: 865329 - RNA, 21 nt, Human
ucaggagagcccaucuacaaa

SEQ ID NO: 865330 - RNA, 22 nt, Human
gguggaaggccuggaaggaggc

SEQ ID NO: 865331 - RNA, 22 nt, Human
agaauuucaaauggaaguuuua

SEQ ID NO: 865332 - RNA, 22 nt, Human
gcggagggcgagcccgcggagc

SEQ ID NO: 865333 - RNA, 21 nt, Human
ccugcugugaucuuagugagu

SEQ ID NO: 865334 - RNA, 22 nt, Human
uaguuuuacuugcgaugauaau

SEQ ID NO: 865335 - RNA, 22 nt, Human
guucuucacauuucauugagga

SEQ ID NO: 865336 - RNA, 21 nt, Human
aaugaaguggcuauuuugagg

SEQ ID NO: 865337 - RNA, 22 nt, Human
uaacaucuuuagcagcucgaac

SEQ ID NO: 865338 - RNA, 23 nt, Human
uggaaagcggaccuggggcagag

SEQ ID NO: 865339 - RNA, 22 nt, Human
gcuggcagggacagcugcgugu

SEQ ID NO: 865340 - RNA, 22 nt, Human
agauucuacucuagauccaugg

SEQ ID NO: 865341 - RNA, 22 nt, Human
gaaggccauugcguccugggau

SEQ ID NO: 865342 - RNA, 22 nt, Human
ucccaggacccaggcauucaca

SEQ ID NO: 865343 - RNA, 19 nt, Human
ugaaauggcaguugcuaaa

SEQ ID NO: 865344 - RNA, 22 nt, Human
agaaaucaauaucuauauguug

SEQ ID NO: 865345 - RNA, 22 nt, Human
gaggcaguguugaaaaggagag

SEQ ID NO: 865346 - RNA, 22 nt, Human
cugcuguguuucacaccucugg

SEQ ID NO: 865347 - RNA, 22 nt, Human
cagaccucaguccucaguagga

SEQ ID NO: 865348 - RNA, 22 nt, Human
aaugaacauauaaagagaucuu

SEQ ID NO: 865349 - RNA, 22 nt, Human
aaaggccaccaacaugaagcau

SEQ ID NO: 865350 - RNA, 18 nt, Human
augggaggggccaagaga

SEQ ID NO: 865351 - RNA, 22 nt, Human
uccaggaguccuggguggcccc

SEQ ID NO: 865352 - RNA, 22 nt, Human
cugcuguguuucugcuagaaaa

SEQ ID NO: 865353 - RNA, 22 nt, Human
ugcagggcccucauuccugucc

SEQ ID NO: 865354 - RNA, 22 nt, Human
ucucucagaggaagaggcagug

SEQ ID NO: 865355 - RNA, 20 nt, Human
gcccaagguccagaaggggg

SEQ ID NO: 865356 - RNA, 22 nt, Human
aagaacuuccuaauauauuuuc

SEQ ID NO: 865357 - RNA, 22 nt, Human
auuugcuucugugaaaucaagu

SEQ ID NO: 865358 - RNA, 22 nt, Human
caaguaaacaauaugugauuca

SEQ ID NO: 865359 - RNA, 22 nt, Human
uaaagccauacugaaagccacu

SEQ ID NO: 865360 - RNA, 22 nt, Human
gcccaggaguugaagggcugac

SEQ ID NO: 865361 - RNA, 22 nt, Human
auggauuuggaugagauuacuu

SEQ ID NO: 865362 - RNA, 22 nt, Human
gggcagcugccaagugcaucgc

SEQ ID NO: 865363 - RNA, 22 nt, Human
uguucuuuggcuucacagcucu

SEQ ID NO: 865364 - RNA, 22 nt, Human
aauacugucuuucacagauauu

SEQ ID NO: 865365 - RNA, 22 nt, Human
uagugcuuaacacaaagugauu

SEQ ID NO: 865366 - RNA, 22 nt, Human
uggcagcugucuguggggucuc

SEQ ID NO: 865367 - RNA, 22 nt, Human
cuuccaaaauuuauauguugaa

SEQ ID NO: 865368 - RNA, 22 nt, Human
ugcuguguucuccugacucacc

SEQ ID NO: 865369 - RNA, 17 nt, Human
aagacagaagccaugag

SEQ ID NO: 865370 - RNA, 21 nt, Human
gaacauuuggguuguuucuac

SEQ ID NO: 865371 - RNA, 22 nt, Human
aauauaugugguauugaccagc

SEQ ID NO: 865372 - RNA, 22 nt, Human
cauuucaauacuaucugagaau

SEQ ID NO: 865373 - RNA, 22 nt, Human
uucauucugcaguucucagcuc

SEQ ID NO: 865374 - RNA, 22 nt, Human
ccauuucacucuuccugaagga

SEQ ID NO: 865375 - RNA, 22 nt, Human
acuucaugcagaagagagcugu

SEQ ID NO: 865376 - RNA, 22 nt, Human
cauuuacacacagaggugugcu

SEQ ID NO: 865377 - RNA, 22 nt, Human
uuauauuaguuagacuugcugu

SEQ ID NO: 865378 - RNA, 22 nt, Human
cucuuaguaaugccaugaagca

SEQ ID NO: 865379 - RNA, 22 nt, Human
cauagaaacuugcagcaagcac

SEQ ID NO: 865380 - RNA, 22 nt, Human
caggcgagugaacagacucuca

SEQ ID NO: 865381 - RNA, 22 nt, Human
cagcaggaccauugaggcauca

SEQ ID NO: 865382 - RNA, 22 nt, Human
caagaaucagaccugucagggu

SEQ ID NO: 865383 - RNA, 22 nt, Human
augaaauauuucagagcagagu

SEQ ID NO: 865384 - RNA, 22 nt, Human
ugcacaaacuugugucccaggg

SEQ ID NO: 865385 - RNA, 22 nt, Human
gccccagcguggcuguguuagg

SEQ ID NO: 865386 - RNA, 22 nt, Human
cuaauacacccuauugcuuguu

SEQ ID NO: 865387 - RNA, 22 nt, Human
gccaggagaaaaggcgaaugau

SEQ ID NO: 865388 - RNA, 22 nt, Human
agaaaucaugucuuauuucuau

SEQ ID NO: 865389 - RNA, 22 nt, Human
caggcagccaggggaccugucc

SEQ ID NO: 865390 - RNA, 22 nt, Human
cauuaauauuguucuucuuuag

SEQ ID NO: 865391 - RNA, 22 nt, Human
ucuggaucccaccgccacacac

SEQ ID NO: 865392 - RNA, 22 nt, Human
ccuggaucuccucuauucauau

SEQ ID NO: 865393 - RNA, 22 nt, Human
ggaggcgauccugggaaacacc

SEQ ID NO: 865394 - RNA, 22 nt, Human
gaaggaggugucaguuggacug

SEQ ID NO: 865395 - RNA, 22 nt, Human
gaggccaggaagcccaagauca

SEQ ID NO: 865396 - RNA, 22 nt, Human
uaauuuacuugcaaauaacaau

SEQ ID NO: 865397 - RNA, 22 nt, Human
aagggcagccugacucacgguc

SEQ ID NO: 865398 - RNA, 22 nt, Human
gugaauaauauuguuuauaaaa

SEQ ID NO: 865399 - RNA, 22 nt, Human
cuugggaaugcuaacagaugac

SEQ ID NO: 865400 - RNA, 22 nt, Human
uucucugaguacguuucagugu

SEQ ID NO: 865401 - RNA, 22 nt, Human
acaauauuguacccagaaguuu

SEQ ID NO: 865402 - RNA, 21 nt, Human
cccaggaggcugagaagagca

SEQ ID NO: 865403 - RNA, 22 nt, Human
caaaucuauauguugauauucu

SEQ ID NO: 865404 - RNA, 23 nt, Human
cuuugccacccagagccugacag

SEQ ID NO: 865405 - RNA, 22 nt, Human
gaagcagcaaguauaggacagg

SEQ ID NO: 865406 - RNA, 22 nt, Human
caaagaagagauuuacagagcu

SEQ ID NO: 865407 - RNA, 22 nt, Human
ucuucucuccugcuuggcagaa

SEQ ID NO: 865408 - RNA, 22 nt, Human
uuuuucaagacaaccugcaugu

SEQ ID NO: 865409 - RNA, 22 nt, Human
cauuucaaacaguuacagcugc

SEQ ID NO: 865410 - RNA, 20 nt, Human
caccagucaugagucaauac

SEQ ID NO: 865411 - RNA, 22 nt, Human
uuucagaaccgcuaaaauaaau

SEQ ID NO: 865412 - RNA, 22 nt, Human
uacugaaaguggucaacagugg

SEQ ID NO: 865413 - RNA, 22 nt, Human
uagucaccugugagcugcguag

SEQ ID NO: 865414 - RNA, 22 nt, Human
cauggucuacaauuucauuuua

SEQ ID NO: 865415 - RNA, 22 nt, Human
augcuguggaaguuccugaagc

SEQ ID NO: 865416 - RNA, 22 nt, Human
uuccauaauaaccugagagaaa

SEQ ID NO: 865417 - RNA, 18 nt, Human
cugcccagagcacuugug

SEQ ID NO: 865418 - RNA, 22 nt, Human
uuuguagaggguaauugacaga

SEQ ID NO: 865419 - RNA, 22 nt, Human
cccucuacagggaagcgcuuuc

SEQ ID NO: 865420 - RNA, 22 nt, Human
uaguccuuacuuacuagaauaa

SEQ ID NO: 865421 - RNA, 22 nt, Human
agucacuguucugucaugucaa

SEQ ID NO: 865422 - RNA, 22 nt, Human
ucuuugcaaaauacaacaaugg

SEQ ID NO: 865423 - RNA, 22 nt, Human
auuccaaagcacaucagaacua

SEQ ID NO: 865424 - RNA, 22 nt, Human
gaaguacaguuuuaucuagcca

SEQ ID NO: 865425 - RNA, 22 nt, Human
uucacacacagcuuccuauugu

SEQ ID NO: 865426 - RNA, 22 nt, Human
aacuuucuuggaugucucaaca

SEQ ID NO: 865427 - RNA, 22 nt, Human
gagagguccauuccccugucag

SEQ ID NO: 865428 - RNA, 22 nt, Human
caauuucacuaaugaugugggg

SEQ ID NO: 865429 - RNA, 22 nt, Human
agcauccaacaggagggaaggg

SEQ ID NO: 865430 - RNA, 22 nt, Human
uaauauguguuacugacuuuuu

SEQ ID NO: 865431 - RNA, 22 nt, Human
aucauucugauggucaaugcua

SEQ ID NO: 865432 - RNA, 22 nt, Human
guaaacaucagccacucuauuu

SEQ ID NO: 865433 - RNA, 18 nt, Human
ucuuuggacaacuacugg

SEQ ID NO: 865434 - RNA, 22 nt, Human
auugaaaguccuaucuaaggga

SEQ ID NO: 865435 - RNA, 22 nt, Human
uauaucaccaaaaacaguucug

SEQ ID NO: 865436 - RNA, 22 nt, Human
aguccaaggagagacagcauuu

SEQ ID NO: 865437 - RNA, 22 nt, Human
ccuggauccaugaaaaggcuac

SEQ ID NO: 865438 - RNA, 22 nt, Human
aauaauuacccaucuuuuugua

SEQ ID NO: 865439 - RNA, 16 nt, Human
auuuccagauuaugca

SEQ ID NO: 865440 - RNA, 22 nt, Human
ucaaguuucucucagauuaugg

SEQ ID NO: 865441 - RNA, 22 nt, Human
ugcuggaggauuaaacaaguca

SEQ ID NO: 865442 - RNA, 22 nt, Human
gcccaggaucugcucagaucau

SEQ ID NO: 865443 - RNA, 22 nt, Human
aaggcagcacagcaacugcuca

SEQ ID NO: 865444 - RNA, 22 nt, Human
acucaggagggaucagcuauca

SEQ ID NO: 865445 - RNA, 22 nt, Human
cucccaggguagggagagacua

SEQ ID NO: 865446 - RNA, 23 nt, Human
agaggcaggaguggcuugcccgg

SEQ ID NO: 865447 - RNA, 22 nt, Human
gagguagccacagauagagacu

SEQ ID NO: 865448 - RNA, 22 nt, Human
gcuccucugucaaaugagagug

SEQ ID NO: 865449 - RNA, 22 nt, Human
aaggccaacuaggaugagcuag

SEQ ID NO: 865450 - RNA, 22 nt, Human
uuucaucuucccagagaccuug

SEQ ID NO: 865451 - RNA, 22 nt, Human
gcagaauuuucuguuuucuaga

SEQ ID NO: 865452 - RNA, 22 nt, Human
uguuugaauuuugcuaacgugu

SEQ ID NO: 865453 - RNA, 22 nt, Human
ccaggaugacccccacuuuccu

SEQ ID NO: 865454 - RNA, 22 nt, Human
aggcagacugugcgggaagagu

SEQ ID NO: 865455 - RNA, 22 nt, Human
gucuucuuguguugccugucuu

SEQ ID NO: 865456 - RNA, 22 nt, Human
gggagcugaauggcaauggaga

SEQ ID NO: 865457 - RNA, 22 nt, Human
uuuuaacuuaaaauacauagau

SEQ ID NO: 865458 - RNA, 22 nt, Human
uaauuccaccuuuuuccaacuu

SEQ ID NO: 865459 - RNA, 22 nt, Human
cagugauguuucugcaucagag

SEQ ID NO: 865460 - RNA, 21 nt, Human
cgcagagcgaacuugcggcgc

SEQ ID NO: 865461 - RNA, 22 nt, Human
cuuugcaauagaggcacacaug

SEQ ID NO: 865462 - RNA, 22 nt, Human
ucauuugugugagugauuugac

SEQ ID NO: 865463 - RNA, 21 nt, Human
uuacagaauccaugggaaguc

SEQ ID NO: 865464 - RNA, 22 nt, Human
ccacuucaucagugcuccauuu

SEQ ID NO: 865465 - RNA, 22 nt, Human
uaauuuuaugacaguguauuuu

SEQ ID NO: 865466 - RNA, 22 nt, Human
aauuuacaguugcugaugguac

SEQ ID NO: 865467 - RNA, 22 nt, Human
uguucuucuagauugccuuuua

SEQ ID NO: 865468 - RNA, 22 nt, Human
cugcuguguggauucaauggcu

SEQ ID NO: 865469 - RNA, 22 nt, Human
ccaggagacccagggaaggagc

SEQ ID NO: 865470 - RNA, 22 nt, Human
uuucaguuacugcuauaucauu

SEQ ID NO: 865471 - RNA, 22 nt, Human
ucaauaaaucccucugacccug

SEQ ID NO: 865472 - RNA, 22 nt, Human
caaauaguaugagcaaugauuc

SEQ ID NO: 865473 - RNA, 16 nt, Human
gcccaggacgggaggc

SEQ ID NO: 865474 - RNA, 22 nt, Human
aaguccuuauguggaggggcua

SEQ ID NO: 865475 - RNA, 22 nt, Human
ccaggaaauggcuugcuucuuu

SEQ ID NO: 865476 - RNA, 22 nt, Human
uuaaggauguugugauuuauua

SEQ ID NO: 865477 - RNA, 22 nt, Human
uuugcagugucagcuucugugu

SEQ ID NO: 865478 - RNA, 22 nt, Human
uuuaggcagcagugaggaugaa

SEQ ID NO: 865479 - RNA, 22 nt, Human
ucccaggaugugcgugccgccg

SEQ ID NO: 865480 - RNA, 22 nt, Human
gcucccaggcauggagguaauu

SEQ ID NO: 865481 - RNA, 22 nt, Human
aggccagcaagaaagagagucu

SEQ ID NO: 865482 - RNA, 22 nt, Human
ucagugugaggucuuccacccg

SEQ ID NO: 865483 - RNA, 23 nt, Human
ugguucuaggccuauaauuauau

SEQ ID NO: 865484 - RNA, 22 nt, Human
aggaggcacucacucucagggu

SEQ ID NO: 865485 - RNA, 22 nt, Human
cuggcuguauuaguuugauccu

SEQ ID NO: 865486 - RNA, 22 nt, Human
cccaggaggcagagguugcagu

SEQ ID NO: 865487 - RNA, 22 nt, Human
ucucaggacuuugggaagcuca

SEQ ID NO: 865488 - RNA, 22 nt, Human
aguccuuagaacagugccuggg

SEQ ID NO: 865489 - RNA, 22 nt, Human
auggcuuugcucaaguuuagcc

SEQ ID NO: 865490 - RNA, 22 nt, Human
uuuuuggguccaggcuguaucu

SEQ ID NO: 865491 - RNA, 22 nt, Human
acaggagacccugcugguucug

SEQ ID NO: 865492 - RNA, 22 nt, Human
cagaguggcgacccccucagcu

SEQ ID NO: 865493 - RNA, 19 nt, Human
ugaguucugugguucucaa

SEQ ID NO: 865494 - RNA, 22 nt, Human
gugacaguggucacuuguaguu

SEQ ID NO: 865495 - RNA, 22 nt, Human
gcuguguuuuauguuagguuaa

SEQ ID NO: 865496 - RNA, 22 nt, Human
acauaauaaaaauaacagcuca

SEQ ID NO: 865497 - RNA, 22 nt, Human
acaggagaaaucuggucaaaag

SEQ ID NO: 865498 - RNA, 22 nt, Human
auaguuugugaaacacagcagu

SEQ ID NO: 865499 - RNA, 22 nt, Human
gaaauauacauugcaggaagag

SEQ ID NO: 865500 - RNA, 22 nt, Human
uccaggagguugagacugcagu

SEQ ID NO: 865501 - RNA, 22 nt, Human
ucuucagagugaaagucuguga

SEQ ID NO: 865502 - RNA, 22 nt, Human
aggcagcauccagaggagaaug

SEQ ID NO: 865503 - RNA, 22 nt, Human
ugucucaguacacuccgauguu

SEQ ID NO: 865504 - RNA, 22 nt, Human
cugcuguguuagcagguuuagu

SEQ ID NO: 865505 - RNA, 22 nt, Human
cucaggauggaagccuacagga

SEQ ID NO: 865506 - RNA, 22 nt, Human
uccaggaggcaccuuuggacca

SEQ ID NO: 865507 - RNA, 22 nt, Human
ggccaggaagggaagaucagca

SEQ ID NO: 865508 - RNA, 22 nt, Human
auuacagaaugcaguuccuuau

SEQ ID NO: 865509 - RNA, 22 nt, Human
agaucuauuagcaaacugccau

SEQ ID NO: 865510 - RNA, 22 nt, Human
acaacuuuguagcaauuccacg

SEQ ID NO: 865511 - RNA, 22 nt, Human
uugaaaguuuauggagucugca

SEQ ID NO: 865512 - RNA, 22 nt, Human
agaauucauaggaaguuuccua

SEQ ID NO: 865513 - RNA, 22 nt, Human
cacccugggcugggccuguuaa

SEQ ID NO: 865514 - RNA, 22 nt, Human
ucagaauugcagggagggcagg

SEQ ID NO: 865515 - RNA, 22 nt, Human
gggcagcugcagggauggugac

SEQ ID NO: 865516 - RNA, 22 nt, Human
ugaggcagaaauuccuguuuuc

SEQ ID NO: 865517 - RNA, 22 nt, Human
cauuuccugucuggaggucaaa

SEQ ID NO: 865518 - RNA, 23 nt, Human
uccaggagcaugcuggcuggcga

SEQ ID NO: 865519 - RNA, 22 nt, Human
cucccaggggaacuaucaagua

SEQ ID NO: 865520 - RNA, 22 nt, Human
aggauuuagauuuggaggaacu

SEQ ID NO: 865521 - RNA, 22 nt, Human
caugcuuauucauucugcuaac

SEQ ID NO: 865522 - RNA, 22 nt, Human
aucauaaagugcuaucugauug

SEQ ID NO: 865523 - RNA, 22 nt, Human
augcuuuagugucaaguuuggg

SEQ ID NO: 865524 - RNA, 22 nt, Human
agugcuuuauguuguugugcaa

SEQ ID NO: 865525 - RNA, 19 nt, Human
aucugccuuagugcugcug

SEQ ID NO: 865526 - RNA, 22 nt, Human
auacaugugggucuaaacauau

SEQ ID NO: 865527 - RNA, 22 nt, Human
uacuuugaagacaauaucugga

SEQ ID NO: 865528 - RNA, 22 nt, Human
gagggagugccagagggccagc

SEQ ID NO: 865529 - RNA, 22 nt, Human
gaucuguuucauucacagucug

SEQ ID NO: 865530 - RNA, 22 nt, Human
guucuucaucauuaacacucug

SEQ ID NO: 865531 - RNA, 22 nt, Human
ugaaggccacuuccugugagcu

SEQ ID NO: 865532 - RNA, 22 nt, Human
cccaggagguggaguucacagu

SEQ ID NO: 865533 - RNA, 22 nt, Human
auugaaagauuuugggcucaug

SEQ ID NO: 865534 - RNA, 22 nt, Human
uggucuuuaagguagcugucau

SEQ ID NO: 865535 - RNA, 22 nt, Human
gcugguuuccuuaucuauaaag

SEQ ID NO: 865536 - RNA, 22 nt, Human
ggggggugcugaucaguggagc

SEQ ID NO: 865537 - RNA, 22 nt, Human
ccccaggagauuugggagcaca

SEQ ID NO: 865538 - RNA, 22 nt, Human
uggcuuaagauuuaugcuuuua

SEQ ID NO: 865539 - RNA, 22 nt, Human
acccaggagcaggcugggcagu

SEQ ID NO: 865540 - RNA, 22 nt, Human
uuauuuaaaagugguaagauuc

SEQ ID NO: 865541 - RNA, 22 nt, Human
cucuaacacuguaaugcuuucu

SEQ ID NO: 865542 - RNA, 22 nt, Human
cucuccucagaacaggcccucu

SEQ ID NO: 865543 - RNA, 22 nt, Human
auauaauuguucugaaguguuu

SEQ ID NO: 865544 - RNA, 22 nt, Human
ccagcugucagugugaaaauaa

SEQ ID NO: 865545 - RNA, 22 nt, Human
ccagcuauugcuguguaacagu

SEQ ID NO: 865546 - RNA, 22 nt, Human
ugccaggauggccagggggcca

SEQ ID NO: 865547 - RNA, 22 nt, Human
uauuucuaagagauaucuguac

SEQ ID NO: 865548 - RNA, 22 nt, Human
auucuucacauggauaggaucu

SEQ ID NO: 865549 - RNA, 22 nt, Human
uccaggagauacacugcaccag

SEQ ID NO: 865550 - RNA, 22 nt, Human
auuccaguuggguucuaauaca

SEQ ID NO: 865551 - RNA, 22 nt, Human
ugauaauauuuugaaucauaag

SEQ ID NO: 865552 - RNA, 22 nt, Human
acacauuuacauguuuacguau

SEQ ID NO: 865553 - RNA, 22 nt, Human
uaagaaucugcauuuuaacaag

SEQ ID NO: 865554 - RNA, 22 nt, Human
ucagaaauacaaaacacuuacu

SEQ ID NO: 865555 - RNA, 22 nt, Human
agcauuuagucuuuauugcagc

SEQ ID NO: 865556 - RNA, 22 nt, Human
uaucuguuaggaucagagcugg

SEQ ID NO: 865557 - RNA, 22 nt, Human
uggauuuauuagguuggugaaa

SEQ ID NO: 865558 - RNA, 22 nt, Human
cagcuacuccucccaugacuuc

SEQ ID NO: 865559 - RNA, 22 nt, Human
aggauuuagcaugaaaugugaa

SEQ ID NO: 865560 - RNA, 22 nt, Human
ugaaucaguauaaauucucaaa

SEQ ID NO: 865561 - RNA, 22 nt, Human
cagaaaaggaagagcuauguaa

SEQ ID NO: 865562 - RNA, 22 nt, Human
acaugucuuuuaaagucuaaua

SEQ ID NO: 865563 - RNA, 17 nt, Human
gaggacagggaaguagg

SEQ ID NO: 865564 - RNA, 22 nt, Human
uaaguggaagguuauaugcuaa

SEQ ID NO: 865565 - RNA, 22 nt, Human
ccuggacucaggcugugggcac

SEQ ID NO: 865566 - RNA, 22 nt, Human
acauucacuauguccaaacucu

SEQ ID NO: 865567 - RNA, 22 nt, Human
acuuugcagggcuugauaucca

SEQ ID NO: 865568 - RNA, 22 nt, Human
cuggauuuaggacuaguccaag

SEQ ID NO: 865569 - RNA, 22 nt, Human
aggaagcuaaccagggagugag

SEQ ID NO: 865570 - RNA, 22 nt, Human
aaauguuuugcucccauguggu

SEQ ID NO: 865571 - RNA, 22 nt, Human
caagauggguguugugaugguu

SEQ ID NO: 865572 - RNA, 22 nt, Human
gcagcuccuccugggcuggaga

SEQ ID NO: 865573 - RNA, 22 nt, Human
cucuccucugaaguggugaccc

SEQ ID NO: 865574 - RNA, 20 nt, Human
ggcagcuugggcagcaguua

SEQ ID NO: 865575 - RNA, 22 nt, Human
accaggagccacaggaggagcc

SEQ ID NO: 865576 - RNA, 22 nt, Human
aguuacagugaccauuuauuua

SEQ ID NO: 865577 - RNA, 22 nt, Human
gaggcagcuggguccggucggg

SEQ ID NO: 865578 - RNA, 22 nt, Human
gcuuugaagucugugucuuuug

SEQ ID NO: 865579 - RNA, 22 nt, Human
aaagccaugggucuuuggcaua

SEQ ID NO: 865580 - RNA, 22 nt, Human
agucaauucuuuucaacucaag

SEQ ID NO: 865581 - RNA, 19 nt, Human
ugaggggaggagaggccug

SEQ ID NO: 865582 - RNA, 22 nt, Human
uaguccuuuccggcugcuauaa

SEQ ID NO: 865583 - RNA, 22 nt, Human
aaagccagagcaagcugucaca

SEQ ID NO: 865584 - RNA, 22 nt, Human
caugcuuuucaaucuaucuuaa

SEQ ID NO: 865585 - RNA, 22 nt, Human
cucugcaugccuugcucagaca

SEQ ID NO: 865586 - RNA, 22 nt, Human
cagucccuaguggagcucacag

SEQ ID NO: 865587 - RNA, 22 nt, Human
aggauuuaggagcuggcuaacg

SEQ ID NO: 865588 - RNA, 22 nt, Human
uggcagcugugcuucauucuuu

SEQ ID NO: 865589 - RNA, 22 nt, Human
aauuccaaguagcaucccauca

SEQ ID NO: 865590 - RNA, 22 nt, Human
cuuaggcauccaggguucuucc

SEQ ID NO: 865591 - RNA, 22 nt, Human
ggcacagagcccagcuuccuag

SEQ ID NO: 865592 - RNA, 22 nt, Human
ucccaggaggugcuuccuagga

SEQ ID NO: 865593 - RNA, 22 nt, Human
acauaccauacauggugagaug

SEQ ID NO: 865594 - RNA, 22 nt, Human
uaaaaugaucucucauguucuu

SEQ ID NO: 865595 - RNA, 22 nt, Human
gucaggaugcuauuguuauuaa

SEQ ID NO: 865596 - RNA, 22 nt, Human
uugguuuaggaacuggcuugga

SEQ ID NO: 865597 - RNA, 23 nt, Human
ucucaagaggaagcagggcucau

SEQ ID NO: 865598 - RNA, 22 nt, Human
uccaggagucuagccucaggcc

SEQ ID NO: 865599 - RNA, 22 nt, Human
acaacuuuaauggguuucagcu

SEQ ID NO: 865600 - RNA, 22 nt, Human
gucacuguuuccuauuauauuu

SEQ ID NO: 865601 - RNA, 19 nt, Human
cccaggagcaguauugaug

SEQ ID NO: 865602 - RNA, 23 nt, Human
acauacauggagauaaagugaug

SEQ ID NO: 865603 - RNA, 22 nt, Human
aagggagguaaagcuauuuaaa

SEQ ID NO: 865604 - RNA, 22 nt, Human
aguucuucauaaccuuacugug

SEQ ID NO: 865605 - RNA, 22 nt, Human
uauaucauggagauuaacauuc

SEQ ID NO: 865606 - RNA, 20 nt, Human
uguuccaagcuaaugaauga

SEQ ID NO: 865607 - RNA, 22 nt, Human
uuugaaagccuggcuuuucucu

SEQ ID NO: 865608 - RNA, 22 nt, Human
cuacccagcaccuaggcugccu

SEQ ID NO: 865609 - RNA, 22 nt, Human
gcuuuaaugaagucacgcaaag

SEQ ID NO: 865610 - RNA, 22 nt, Human
cuauaauuaugcucaaaaugua

SEQ ID NO: 865611 - RNA, 22 nt, Human
auuauccagcaccaaugucaga

SEQ ID NO: 865612 - RNA, 22 nt, Human
aggcagacucaauggcuagaua

SEQ ID NO: 865613 - RNA, 22 nt, Human
ggccaggagaggagggcacuga

SEQ ID NO: 865614 - RNA, 22 nt, Human
agcaccuugcucuuggccuucc

SEQ ID NO: 865615 - RNA, 22 nt, Human
uggaagggagugacagucagag

SEQ ID NO: 865616 - RNA, 22 nt, Human
acucaggaagaaagcagcuggu

SEQ ID NO: 865617 - RNA, 22 nt, Human
guugacagcuggugagcugcua

SEQ ID NO: 865618 - RNA, 22 nt, Human
cucaggauccaucuccugcccu

SEQ ID NO: 865619 - RNA, 22 nt, Human
ggcauuuacauaaucuuauuua

SEQ ID NO: 865620 - RNA, 22 nt, Human
aucuuucaaucaggaaaaaucu

SEQ ID NO: 865621 - RNA, 21 nt, Human
ccaggaaggacugagcucccu

SEQ ID NO: 865622 - RNA, 22 nt, Human
ucaguucaguauacacuauucu

SEQ ID NO: 865623 - RNA, 22 nt, Human
uuuacagagaauguacauaaag

SEQ ID NO: 865624 - RNA, 22 nt, Human
cacauauuugaugaagcuuugu

SEQ ID NO: 865625 - RNA, 22 nt, Human
caaugugguggcagaugucagu

SEQ ID NO: 865626 - RNA, 22 nt, Human
ugaaucugauuucccuggaggc

SEQ ID NO: 865627 - RNA, 22 nt, Human
uugagaagaaauaguuugcaau

SEQ ID NO: 865628 - RNA, 22 nt, Human
aucacaaaggguuuucucugag

SEQ ID NO: 865629 - RNA, 22 nt, Human
gaggggagacagggaaaucagu

SEQ ID NO: 865630 - RNA, 22 nt, Human
gcaaaauuuacacuccuucuuc

SEQ ID NO: 865631 - RNA, 20 nt, Human
caauuucaucauuuccugug

SEQ ID NO: 865632 - RNA, 22 nt, Human
agcugcuacugcucugccagag

SEQ ID NO: 865633 - RNA, 22 nt, Human
agggugguucuuuuaguggaag

SEQ ID NO: 865634 - RNA, 22 nt, Human
ggagaggggcaaguuuaucuag

SEQ ID NO: 865635 - RNA, 22 nt, Human
uaaauuaugucacaugacucug

SEQ ID NO: 865636 - RNA, 22 nt, Human
gcugauguuuaguugauguuac

SEQ ID NO: 865637 - RNA, 22 nt, Human
cugcugugggcaggguagcugg

SEQ ID NO: 865638 - RNA, 22 nt, Human
cuuccaaagcacuuuauggacc

SEQ ID NO: 865639 - RNA, 19 nt, Human
uacuaaacaugcauauugg

SEQ ID NO: 865640 - RNA, 22 nt, Human
aggcagcagucaugaggaaaga

SEQ ID NO: 865641 - RNA, 22 nt, Human
cauggcuuuguucuguuagaug

SEQ ID NO: 865642 - RNA, 22 nt, Human
ucaauaaauagcuuggcucagc

SEQ ID NO: 865643 - RNA, 22 nt, Human
ucaggaugguguggaggaaaua

SEQ ID NO: 865644 - RNA, 22 nt, Human
aguccagugaacuguaaauagg

SEQ ID NO: 865645 - RNA, 22 nt, Human
cagcagagaccaagugauuuga

SEQ ID NO: 865646 - RNA, 21 nt, Human
cccacggaaugaugaggcacu

SEQ ID NO: 865647 - RNA, 22 nt, Human
gagucuuugguaaagucugcug

SEQ ID NO: 865648 - RNA, 22 nt, Human
aacacuuucuauuauuaugguu

SEQ ID NO: 865649 - RNA, 22 nt, Human
guaaacaacacaaaucauuuga

SEQ ID NO: 865650 - RNA, 22 nt, Human
aauggcuucugaagcacacuuu

SEQ ID NO: 865651 - RNA, 21 nt, Human
uccaggagcacgggacuagga

SEQ ID NO: 865652 - RNA, 22 nt, Human
gauggcuucagucuccuugggu

SEQ ID NO: 865653 - RNA, 20 nt, Human
uugauucaagggcugaugga

SEQ ID NO: 865654 - RNA, 22 nt, Human
uuuccucacuucaugagaguuu

SEQ ID NO: 865655 - RNA, 22 nt, Human
cuacagaauggagggucagaga

SEQ ID NO: 865656 - RNA, 22 nt, Human
auacagauguugaauguuauau

SEQ ID NO: 865657 - RNA, 22 nt, Human
ucagaaauagucuuuaaaauga

SEQ ID NO: 865658 - RNA, 22 nt, Human
uucaacuauuaugaauaaaauu

SEQ ID NO: 865659 - RNA, 22 nt, Human
ucuuugaauucaaacuguucaa

SEQ ID NO: 865660 - RNA, 22 nt, Human
ucauuuguugcuguuaccugag

SEQ ID NO: 865661 - RNA, 22 nt, Human
ucccaggagcaccuuuugagcc

SEQ ID NO: 865662 - RNA, 22 nt, Human
uucaacuaauguuuauuuuaug

SEQ ID NO: 865663 - RNA, 22 nt, Human
aaaugaaaugagugccuggagg

SEQ ID NO: 865664 - RNA, 22 nt, Human
uucauucuugucuuuguauagu

SEQ ID NO: 865665 - RNA, 22 nt, Human
cuguuucaagugaagucagaca

SEQ ID NO: 865666 - RNA, 22 nt, Human
caggcagcugggucaccguccc

SEQ ID NO: 865667 - RNA, 20 nt, Human
ucacaucuggcagcugauga

SEQ ID NO: 865668 - RNA, 22 nt, Human
uuauuauugugguugcauuauc

SEQ ID NO: 865669 - RNA, 22 nt, Human
cauagaaaucaggugagaaucu

SEQ ID NO: 865670 - RNA, 22 nt, Human
uccagccuaggggaacagcugc

SEQ ID NO: 865671 - RNA, 23 nt, Human
augaaugaauaaggcaggaaagc

SEQ ID NO: 865672 - RNA, 22 nt, Human
uucagaaaaagaccauugcaau

SEQ ID NO: 865673 - RNA, 22 nt, Human
uggcagcuagcuguuuucaugc

SEQ ID NO: 865674 - RNA, 22 nt, Human
uaaaauugcggugaauauuucc

SEQ ID NO: 865675 - RNA, 22 nt, Human
agaggaggcagcuuaacucagu

SEQ ID NO: 865676 - RNA, 22 nt, Human
uuuuagauaguuuaacugcacu

SEQ ID NO: 865677 - RNA, 22 nt, Human
aguggcagagguugacugcagu

SEQ ID NO: 865678 - RNA, 22 nt, Human
aggauuuauuacaagccauggu

SEQ ID NO: 865679 - RNA, 22 nt, Human
cauuucaauuauuugcucuucu

SEQ ID NO: 865680 - RNA, 22 nt, Human
gaggcagcugaagcuucaaaga

SEQ ID NO: 865681 - RNA, 22 nt, Human
caagauggagaagcagcaaggg

SEQ ID NO: 865682 - RNA, 22 nt, Human
ucugggaacucugucauuuccc

SEQ ID NO: 865683 - RNA, 22 nt, Human
caggagaaauguggcugcuacc

SEQ ID NO: 865684 - RNA, 21 nt, Human
gagugcagcaagguagagucu

SEQ ID NO: 865685 - RNA, 22 nt, Human
gacagcuggcaguggaaaggug

SEQ ID NO: 865686 - RNA, 22 nt, Human
uuagaaaucugcugccaugcaa

SEQ ID NO: 865687 - RNA, 22 nt, Human
uagucaccuguugugugaugcc

SEQ ID NO: 865688 - RNA, 22 nt, Human
caggauggucuucauuuggcuc

SEQ ID NO: 865689 - RNA, 22 nt, Human
ugaggcaggagaaucaccggaa

SEQ ID NO: 865690 - RNA, 22 nt, Human
gucuucuuuucagucugcuugu

SEQ ID NO: 865691 - RNA, 22 nt, Human
uaaagccaacacuuuacugcuc

SEQ ID NO: 865692 - RNA, 22 nt, Human
auaugaaaagaagucaccauug

SEQ ID NO: 865693 - RNA, 22 nt, Human
uucaggaugaaagugugcaaca

SEQ ID NO: 865694 - RNA, 22 nt, Human
auuugcuuuaagguauaaaagg

SEQ ID NO: 865695 - RNA, 22 nt, Human
cagaguucaaagccugcuggga

SEQ ID NO: 865696 - RNA, 22 nt, Human
cccuguacagucucuguggcac

SEQ ID NO: 865697 - RNA, 22 nt, Human
uggcaaggccacaggugcaguu

SEQ ID NO: 865698 - RNA, 22 nt, Human
gaguccuugucauaauucagug

SEQ ID NO: 865699 - RNA, 22 nt, Human
uaggagggcccugaaaauggca

SEQ ID NO: 865700 - RNA, 22 nt, Human
uaucagaacacagccacagcca

SEQ ID NO: 865701 - RNA, 22 nt, Human
uuuguuuagaaagagauuggug

SEQ ID NO: 865702 - RNA, 20 nt, Human
agaagucagcucagaaguga

SEQ ID NO: 865703 - RNA, 22 nt, Human
uccaggagugugugcuaauggg

SEQ ID NO: 865704 - RNA, 22 nt, Human
uagcuguguaagcuugguaaga

SEQ ID NO: 865705 - RNA, 19 nt, Human
ucuuucauuucuagcucug

SEQ ID NO: 865706 - RNA, 22 nt, Human
uguacaaugcugagguuugggg

SEQ ID NO: 865707 - RNA, 22 nt, Human
uggcuucuugggaugggucauu

SEQ ID NO: 865708 - RNA, 22 nt, Human
cuuuuauuuugaauuaagggcu

SEQ ID NO: 865709 - RNA, 22 nt, Human
caguuuuugccauuaagaguaa

SEQ ID NO: 865710 - RNA, 22 nt, Human
gugcugugcgcuuuuucuguau

SEQ ID NO: 865711 - RNA, 22 nt, Human
ggcaccagccaccuauuucuag

SEQ ID NO: 865712 - RNA, 20 nt, Human
ccagaagagaugaucaucca

SEQ ID NO: 865713 - RNA, 22 nt, Human
cuucaggauuuaggaagaugaa

SEQ ID NO: 865714 - RNA, 22 nt, Human
guacagaauuaugccaugaggg

SEQ ID NO: 865715 - RNA, 22 nt, Human
auucuacaacccaauaauaauu

SEQ ID NO: 865716 - RNA, 22 nt, Human
uuaaaauagccagugccccucu

SEQ ID NO: 865717 - RNA, 22 nt, Human
uccuucuuugacaaguggcaga

SEQ ID NO: 865718 - RNA, 22 nt, Human
uaucuguuugcucacagguguu

SEQ ID NO: 865719 - RNA, 22 nt, Human
uuucaugagauuccuccacauc

SEQ ID NO: 865720 - RNA, 22 nt, Human
caggaugggauguagugggccc

SEQ ID NO: 865721 - RNA, 22 nt, Human
gugcauuugugcaugcacaugu

SEQ ID NO: 865722 - RNA, 23 nt, Human
gcagaggagcaagcuggacacca

SEQ ID NO: 865723 - RNA, 22 nt, Human
ugaugaaaauaugauucugagg

SEQ ID NO: 865724 - RNA, 22 nt, Human
aaucuguuuaguucugcguaug

SEQ ID NO: 865725 - RNA, 22 nt, Human
agcagagccugggcuaggggug

SEQ ID NO: 865726 - RNA, 22 nt, Human
uaagaacuucggacauguuauc

SEQ ID NO: 865727 - RNA, 22 nt, Human
agagagggcauagaaaaaggga

SEQ ID NO: 865728 - RNA, 21 nt, Human
cauuuacaugacagauugguu

SEQ ID NO: 865729 - RNA, 22 nt, Human
caagaaucuugcagcuuagacu

SEQ ID NO: 865730 - RNA, 18 nt, Human
uaaauauauuucccccuu

SEQ ID NO: 865731 - RNA, 22 nt, Human
gugaaggacuagcauggagggc

SEQ ID NO: 865732 - RNA, 23 nt, Human
ucuugaaaagccuacagcaguuc

SEQ ID NO: 865733 - RNA, 22 nt, Human
gcuggaucaaguccuucaccca

SEQ ID NO: 865734 - RNA, 22 nt, Human
uuauucuucuucucuugccagg

SEQ ID NO: 865735 - RNA, 22 nt, Human
guagaaaugguguguuucuucu

SEQ ID NO: 865736 - RNA, 22 nt, Human
auuaaauuggaucugcauaguu

SEQ ID NO: 865737 - RNA, 22 nt, Human
ggaggggagauguuugggcuca

SEQ ID NO: 865738 - RNA, 22 nt, Human
ugaaugaauccuaacaaagaca

SEQ ID NO: 865739 - RNA, 22 nt, Human
guuugcauauuugcacaggaau

SEQ ID NO: 865740 - RNA, 22 nt, Human
aaugcuuuuugcgaaaugugca

SEQ ID NO: 865741 - RNA, 22 nt, Human
gugaacuauuggguaucauaaa

SEQ ID NO: 865742 - RNA, 22 nt, Human
ucuggauccuaugcacuggacu

SEQ ID NO: 865743 - RNA, 22 nt, Human
uuucucugcugccugugucgau

SEQ ID NO: 865744 - RNA, 21 nt, Human
uuagaaagcucacuacaguua

SEQ ID NO: 865745 - RNA, 22 nt, Human
accaggagagauuuuauugaga

SEQ ID NO: 865746 - RNA, 22 nt, Human
ccaggagaauaauggcagauua

SEQ ID NO: 865747 - RNA, 22 nt, Human
ggagaggauguuuuaguaacuu

SEQ ID NO: 865748 - RNA, 22 nt, Human
aggcagcuaagauggauaauga

SEQ ID NO: 865749 - RNA, 22 nt, Human
auugaaaauaaggccagaaaca

SEQ ID NO: 865750 - RNA, 22 nt, Human
gucuuuaugguaugaaaacuga

SEQ ID NO: 865751 - RNA, 22 nt, Human
cccaggcagccugcagggaagg

SEQ ID NO: 865752 - RNA, 22 nt, Human
uggcagcuacagacagagguga

SEQ ID NO: 865753 - RNA, 22 nt, Human
aaaucaguuggaacacaagcag

SEQ ID NO: 865754 - RNA, 22 nt, Human
uacuuuuuagcacagugugugc

SEQ ID NO: 865755 - RNA, 19 nt, Human
uugaaagauuagcuuucua

SEQ ID NO: 865756 - RNA, 19 nt, Human
ggcagucucaagcagcaca

SEQ ID NO: 865757 - RNA, 22 nt, Human
aaugguuuucuagaacaugaaa

SEQ ID NO: 865758 - RNA, 22 nt, Human
aggcacaggccucagcacccag

SEQ ID NO: 865759 - RNA, 21 nt, Human
ggauggauagggaagagauuu

SEQ ID NO: 865760 - RNA, 22 nt, Human
cuggcuuuggucaugugaucau

SEQ ID NO: 865761 - RNA, 22 nt, Human
aggauuuacaaugauucuaggu

SEQ ID NO: 865762 - RNA, 22 nt, Human
ugaguuuugucuugcuagaagu

SEQ ID NO: 865763 - RNA, 22 nt, Human
aagacuguacauuuuccagucu

SEQ ID NO: 865764 - RNA, 22 nt, Human
gcccaggaguugaaugcagcag

SEQ ID NO: 865765 - RNA, 22 nt, Human
acuggaucuaauugguuauagu

SEQ ID NO: 865766 - RNA, 22 nt, Human
caggaugguggcaugaucagaa

SEQ ID NO: 865767 - RNA, 22 nt, Human
uuucagcugguaaaggaguagc

SEQ ID NO: 865768 - RNA, 22 nt, Human
cauuuguaucugggcugcugug

SEQ ID NO: 865769 - RNA, 22 nt, Human
ucaggagacuuaugucacagug

SEQ ID NO: 865770 - RNA, 22 nt, Human
ggggcagcucccgagggcagga

SEQ ID NO: 865771 - RNA, 22 nt, Human
gccauuuucugucuuguuuauu

SEQ ID NO: 865772 - RNA, 23 nt, Human
cuuuuaacuugaucugagaccag

SEQ ID NO: 865773 - RNA, 22 nt, Human
uuuaacagguaaaguaaaugug

SEQ ID NO: 865774 - RNA, 20 nt, Human
uugagcuuuuaguacagaca

SEQ ID NO: 865775 - RNA, 22 nt, Human
ucaggagaaagccaauuagagu

SEQ ID NO: 865776 - RNA, 22 nt, Human
cugcugugcaggugccuaugau

SEQ ID NO: 865777 - RNA, 22 nt, Human
uugcagcuucgagucuaucugu

SEQ ID NO: 865778 - RNA, 22 nt, Human
ccagcagagcauggggaggaag

SEQ ID NO: 865779 - RNA, 22 nt, Human
ccagggaguuuccaaucugaga

SEQ ID NO: 865780 - RNA, 22 nt, Human
aaugguauuugucaagcauagu

SEQ ID NO: 865781 - RNA, 22 nt, Human
aauuucaauuacuuuugcacca

SEQ ID NO: 865782 - RNA, 22 nt, Human
ugcccaggaucuggcgaugcuc

SEQ ID NO: 865783 - RNA, 22 nt, Human
aacaucuacuaagugccaggca

SEQ ID NO: 865784 - RNA, 22 nt, Human
cuggaucaugcauugcuugucc

SEQ ID NO: 865785 - RNA, 22 nt, Human
gcucuaauugaaaaauacugca

SEQ ID NO: 865786 - RNA, 22 nt, Human
auucuuauuuaaauagagucug

SEQ ID NO: 865787 - RNA, 21 nt, Human
gcaaauguucaggaaaaaaga

SEQ ID NO: 865788 - RNA, 22 nt, Human
uaggcagaauuguugaaugaag

SEQ ID NO: 865789 - RNA, 22 nt, Human
gaaggccacggaauggagcugg

SEQ ID NO: 865790 - RNA, 18 nt, Human
aagucaccccugcucccu

SEQ ID NO: 865791 - RNA, 22 nt, Human
uccaggaggcagggcugugccc

SEQ ID NO: 865792 - RNA, 22 nt, Human
ccagucacucugugagagcuac

SEQ ID NO: 865793 - RNA, 22 nt, Human
acugcccucccaucuauugcaa

SEQ ID NO: 865794 - RNA, 22 nt, Human
ucugaagauuaccagcuaaaug

SEQ ID NO: 865795 - RNA, 22 nt, Human
gcccaggaguucaaggcugcag

SEQ ID NO: 865796 - RNA, 21 nt, Human
uacugagaccucacagugugc

SEQ ID NO: 865797 - RNA, 22 nt, Human
uuuccaaaggaggaaccaguuu

SEQ ID NO: 865798 - RNA, 22 nt, Human
augaaacagugaauuagucaag

SEQ ID NO: 865799 - RNA, 22 nt, Human
gcccaggaggucaaguagcuau

SEQ ID NO: 865800 - RNA, 22 nt, Human
cauaauuacugauaugcugauu

SEQ ID NO: 865801 - RNA, 22 nt, Human
uaauaaacugcuacgcuuaguu

SEQ ID NO: 865802 - RNA, 22 nt, Human
cucccaggcacagggaggagcc

SEQ ID NO: 865803 - RNA, 22 nt, Human
cccuggaggcuggaggcaguag

SEQ ID NO: 865804 - RNA, 22 nt, Human
gagugucugaauuagagcacaa

SEQ ID NO: 865805 - RNA, 22 nt, Human
uauccaaacauauagucucucu

SEQ ID NO: 865806 - RNA, 20 nt, Human
uucuauacauaucacugaaa

SEQ ID NO: 865807 - RNA, 22 nt, Human
auugcuaggaacagguugcacc

SEQ ID NO: 865808 - RNA, 18 nt, Human
agaugaaagcaaaugaca

SEQ ID NO: 865809 - RNA, 22 nt, Human
uacagaauuagauuauuagaga

SEQ ID NO: 865810 - RNA, 22 nt, Human
cauggauugaauauaaauuaga

SEQ ID NO: 865811 - RNA, 23 nt, Human
uguaacaauuucauauacaugca

SEQ ID NO: 865812 - RNA, 22 nt, Human
gcuccuucaggugguagcuguu

SEQ ID NO: 865813 - RNA, 22 nt, Human
aaaacauguccauacagaaacu

SEQ ID NO: 865814 - RNA, 22 nt, Human
gcaggcagagguggaggagaca

SEQ ID NO: 865815 - RNA, 22 nt, Human
guagaaauuccauuuacuuuga

SEQ ID NO: 865816 - RNA, 22 nt, Human
cucaagacugaucgcaguggaa

SEQ ID NO: 865817 - RNA, 22 nt, Human
cauucuuauauuuacucauuca

SEQ ID NO: 865818 - RNA, 22 nt, Human
aggcagcauuugaauccagguc

SEQ ID NO: 865819 - RNA, 22 nt, Human
uacuaaauaguuuaauuccuca

SEQ ID NO: 865820 - RNA, 22 nt, Human
uccaugagagguaacuuuacaa

SEQ ID NO: 865821 - RNA, 22 nt, Human
gauagaaagaauauagauucca

SEQ ID NO: 865822 - RNA, 22 nt, Human
aggauuuaaauccuuaaccacu

SEQ ID NO: 865823 - RNA, 22 nt, Human
aaagcagguugcaauuacagug

SEQ ID NO: 865824 - RNA, 22 nt, Human
uccaggagggggagccgugccg

SEQ ID NO: 865825 - RNA, 22 nt, Human
caugcugugugguuagaacugu

SEQ ID NO: 865826 - RNA, 22 nt, Human
uugcugaaaucuaugacauccu

SEQ ID NO: 865827 - RNA, 22 nt, Human
auagaaauguauuuuggacuag

SEQ ID NO: 865828 - RNA, 22 nt, Human
uuucacaucagagguagauuag

SEQ ID NO: 865829 - RNA, 22 nt, Human
agggcagccucucagccuaggu

SEQ ID NO: 865830 - RNA, 22 nt, Human
uuucauggcuaggacuagagug

SEQ ID NO: 865831 - RNA, 22 nt, Human
acuugcauuauauuuaucacaa

SEQ ID NO: 865832 - RNA, 22 nt, Human
caugcuuuuuucuaguauaaau

SEQ ID NO: 865833 - RNA, 22 nt, Human
gcuuugaagacuuuuccagggu

SEQ ID NO: 865834 - RNA, 22 nt, Human
aauugcaauuuucuuaaggucu

SEQ ID NO: 865835 - RNA, 22 nt, Human
auuucacaaaccauccugauuu

SEQ ID NO: 865836 - RNA, 22 nt, Human
cauuucaaggaccacccuggga

SEQ ID NO: 865837 - RNA, 22 nt, Human
acugcuuuaucugagaaguccu

SEQ ID NO: 865838 - RNA, 22 nt, Human
uucacagaauggcaaguuaugg

SEQ ID NO: 865839 - RNA, 22 nt, Human
uucaggaugcagagguuguagu

SEQ ID NO: 865840 - RNA, 22 nt, Human
ucagucuucccuccagugcaac

SEQ ID NO: 865841 - RNA, 18 nt, Human
uuccaugauuccuuucac

SEQ ID NO: 865842 - RNA, 22 nt, Human
ugauugaagaggugaggaaguu

SEQ ID NO: 865843 - RNA, 22 nt, Human
agcccaggagguggagguugca

SEQ ID NO: 865844 - RNA, 22 nt, Human
cuccccagguucaggagguggg

SEQ ID NO: 865845 - RNA, 22 nt, Human
augaacaagagagggaagauuc

SEQ ID NO: 865846 - RNA, 22 nt, Human
ggagaggagauuguggcauuuu

SEQ ID NO: 865847 - RNA, 22 nt, Human
auacaaagacaaaucucaaucu

SEQ ID NO: 865848 - RNA, 22 nt, Human
ccaaagcaagucacaugaucaa

SEQ ID NO: 865849 - RNA, 22 nt, Human
uuacauaacgguaugaaaaaug

SEQ ID NO: 865850 - RNA, 22 nt, Human
aaauuauuacaagcuaguuggc

SEQ ID NO: 865851 - RNA, 22 nt, Human
caggcagcauuuacucugauga

SEQ ID NO: 865852 - RNA, 22 nt, Human
uucuccagaccuugugacuaug

SEQ ID NO: 865853 - RNA, 22 nt, Human
uuuaucuuuaggacuuugcaga

SEQ ID NO: 865854 - RNA, 22 nt, Human
ccaggagauuuuuccauagcac

SEQ ID NO: 865855 - RNA, 22 nt, Human
ccagcagaggggcggagugcag

SEQ ID NO: 865856 - RNA, 22 nt, Human
agaggucagauuucuccuggug

SEQ ID NO: 865857 - RNA, 22 nt, Human
aggcaguggaaggagaaagcaa

SEQ ID NO: 865858 - RNA, 22 nt, Human
ggagauggaauagauucugacu

SEQ ID NO: 865859 - RNA, 22 nt, Human
uucuucaguuugguaaauguaa

SEQ ID NO: 865860 - RNA, 22 nt, Human
ucaccagucuuucuuaccauug

SEQ ID NO: 865861 - RNA, 22 nt, Human
caucagaauagcucuguggaua

SEQ ID NO: 865862 - RNA, 22 nt, Human
uuacagaaugugccauuugguc

SEQ ID NO: 865863 - RNA, 22 nt, Human
gagguggaaggcaggaacaaau

SEQ ID NO: 865864 - RNA, 20 nt, Human
agaaaucagaccacacacua

SEQ ID NO: 865865 - RNA, 22 nt, Human
ucucucuucaacccuuaacuag

SEQ ID NO: 865866 - RNA, 22 nt, Human
auccauuugaaagaacagucca

SEQ ID NO: 865867 - RNA, 21 nt, Human
uaaggccaagucuauuucugu

SEQ ID NO: 865868 - RNA, 22 nt, Human
auuaaagacagcagauggaugg

SEQ ID NO: 865869 - RNA, 22 nt, Human
agaucugaccuaaccccaccac

SEQ ID NO: 865870 - RNA, 22 nt, Human
aaggccagaguacuagaggcug

SEQ ID NO: 865871 - RNA, 22 nt, Human
uucucuuuugugaugugagaug

SEQ ID NO: 865872 - RNA, 18 nt, Human
ucuuccaacacugacacc

SEQ ID NO: 865873 - RNA, 22 nt, Human
uuugaaaucuaaucaaggaaca

SEQ ID NO: 865874 - RNA, 20 nt, Human
gcccaggaucucugaggcau

SEQ ID NO: 865875 - RNA, 22 nt, Human
aggcaggccccugagaauagac

SEQ ID NO: 865876 - RNA, 22 nt, Human
gccaggagaaugcuagcagagg

SEQ ID NO: 865877 - RNA, 22 nt, Human
cauuucaaguaacagauugcuu

SEQ ID NO: 865878 - RNA, 22 nt, Human
aauuaaaugacaggggaagaug

SEQ ID NO: 865879 - RNA, 22 nt, Human
aagagagggguugcauggaaau

SEQ ID NO: 865880 - RNA, 22 nt, Human
gcagaggacagggauuuagauu

SEQ ID NO: 865881 - RNA, 22 nt, Human
gcagcugccuucagcuggaugg

SEQ ID NO: 865882 - RNA, 22 nt, Human
cuggccaggcuugggacagaca

SEQ ID NO: 865883 - RNA, 22 nt, Human
gcaggcuccaaggccugggaga

SEQ ID NO: 865884 - RNA, 22 nt, Human
auacaacagaaaaugauuauuc

SEQ ID NO: 865885 - RNA, 22 nt, Human
ggccaggagcugcacagggcuc

SEQ ID NO: 865886 - RNA, 23 nt, Human
acacauuuuucccguucugaggu

SEQ ID NO: 865887 - RNA, 22 nt, Human
caggaugagaggcccagggaag

SEQ ID NO: 865888 - RNA, 22 nt, Human
cugccaggcagggagauggcug

SEQ ID NO: 865889 - RNA, 22 nt, Human
gaggcauggccugaggcuagga

SEQ ID NO: 865890 - RNA, 22 nt, Human
acacauauucauauguacuuac

SEQ ID NO: 865891 - RNA, 22 nt, Human
uucucagagugaccaagucuuu

SEQ ID NO: 865892 - RNA, 22 nt, Human
uuaaaugaggcugauguagauu

SEQ ID NO: 865893 - RNA, 22 nt, Human
gagauuuaauuggauuaacuua

SEQ ID NO: 865894 - RNA, 22 nt, Human
uaucuguucaauggaagaugac

SEQ ID NO: 865895 - RNA, 22 nt, Human
cauauaauguuugaagaugugg

SEQ ID NO: 865896 - RNA, 22 nt, Human
uaccauuucauucuuuccucau

SEQ ID NO: 865897 - RNA, 22 nt, Human
uuuauccaccuuacccuguucc

SEQ ID NO: 865898 - RNA, 22 nt, Human
uaaggccaaguucauauacaac

SEQ ID NO: 865899 - RNA, 22 nt, Human
guucuucagucacaucacagaa

SEQ ID NO: 865900 - RNA, 22 nt, Human
uucugggacaucuggacaguuu

SEQ ID NO: 865901 - RNA, 22 nt, Human
auggcuuuguuccaauaaaacu

SEQ ID NO: 865902 - RNA, 22 nt, Human
cucuucuuuaguccagaccauc

SEQ ID NO: 865903 - RNA, 22 nt, Human
caggagggcccgagacucuucc

SEQ ID NO: 865904 - RNA, 22 nt, Human
uggcuuuagguugcauguuucu

SEQ ID NO: 865905 - RNA, 22 nt, Human
aaaguccuguuaacuguuaaca

SEQ ID NO: 865906 - RNA, 22 nt, Human
uucauucuugggaucagagagu

SEQ ID NO: 865907 - RNA, 23 nt, Human
cuuuuaacuagaguaucagcugc

SEQ ID NO: 865908 - RNA, 23 nt, Human
uugcacauuggagcuggucuucu

SEQ ID NO: 865909 - RNA, 22 nt, Human
uguugagacugagggagucagc

SEQ ID NO: 865910 - RNA, 22 nt, Human
accaggagacaugaccaaugag

SEQ ID NO: 865911 - RNA, 22 nt, Human
uggaggggcaauggagcgcgga

SEQ ID NO: 865912 - RNA, 23 nt, Human
ggagaggggugugggcaucuuua

SEQ ID NO: 865913 - RNA, 22 nt, Human
ucaggagacaaagggugcggag

SEQ ID NO: 865914 - RNA, 22 nt, Human
cccuggaggcaaagguugcagu

SEQ ID NO: 865915 - RNA, 22 nt, Human
caauuucaugccauguauugcu

SEQ ID NO: 865916 - RNA, 22 nt, Human
uauuauuaaauggcagaauuuu

SEQ ID NO: 865917 - RNA, 22 nt, Human
gcaaagcauucuguggagucua

SEQ ID NO: 865918 - RNA, 22 nt, Human
cauuuacaauguacagguugug

SEQ ID NO: 865919 - RNA, 22 nt, Human
ugcccaggcuggaaugcagugg

SEQ ID NO: 865920 - RNA, 22 nt, Human
caaguccuuagaugguucuuug

SEQ ID NO: 865921 - RNA, 22 nt, Human
aaauguauugcauaggauauuu

SEQ ID NO: 865922 - RNA, 22 nt, Human
uuauagaacagccuccucuaga

SEQ ID NO: 865923 - RNA, 22 nt, Human
uaucagaaggaagugccuuuaa

SEQ ID NO: 865924 - RNA, 22 nt, Human
uucaacuuuggagauuuaauaa

SEQ ID NO: 865925 - RNA, 22 nt, Human
caauuucaauacaaaauacauu

SEQ ID NO: 865926 - RNA, 18 nt, Human
aaguccuuccuuugcuuu

SEQ ID NO: 865927 - RNA, 22 nt, Human
uuuaaauuuagaagaaacacug

SEQ ID NO: 865928 - RNA, 23 nt, Human
cuucucagaagucugugccagga

SEQ ID NO: 865929 - RNA, 22 nt, Human
aguuuucacacucaccaaaagg

SEQ ID NO: 865930 - RNA, 22 nt, Human
caucagaauguuauggggggcu

SEQ ID NO: 865931 - RNA, 22 nt, Human
uccaugagacagauacuguaag

SEQ ID NO: 865932 - RNA, 22 nt, Human
ucuucagacuccaaauguuuua

SEQ ID NO: 865933 - RNA, 22 nt, Human
cucaggaugucggugacuauug

SEQ ID NO: 865934 - RNA, 22 nt, Human
acagaauuugcuugggcaaugg

SEQ ID NO: 865935 - RNA, 22 nt, Human
aaaguccagagggcacacugaa

SEQ ID NO: 865936 - RNA, 22 nt, Human
agguaggggguuugggaacugc

SEQ ID NO: 865937 - RNA, 22 nt, Human
accaggaguaacagugaguggu

SEQ ID NO: 865938 - RNA, 22 nt, Human
caggauggccccggggcugugc

SEQ ID NO: 865939 - RNA, 22 nt, Human
gcuguguuugacaguagcagac

SEQ ID NO: 865940 - RNA, 22 nt, Human
aggccagaaaugucagggagug

SEQ ID NO: 865941 - RNA, 20 nt, Human
uuucacagucccuguuuccu

SEQ ID NO: 865942 - RNA, 22 nt, Human
ccugcuguucuguuuagugaac

SEQ ID NO: 865943 - RNA, 22 nt, Human
caggagagauaugaguccccac

SEQ ID NO: 865944 - RNA, 23 nt, Human
ccacuagcaccuguucaacuucu

SEQ ID NO: 865945 - RNA, 22 nt, Human
gaggcugcuuugaugacaggag

SEQ ID NO: 865946 - RNA, 22 nt, Human
gaggcagcugaaggagugacag

SEQ ID NO: 865947 - RNA, 17 nt, Human
cucacggaggaugaauc

SEQ ID NO: 865948 - RNA, 22 nt, Human
uauuaaagggaaguuaugcaug

SEQ ID NO: 865949 - RNA, 22 nt, Human
aaaauauuuuagggccaggaga

SEQ ID NO: 865950 - RNA, 22 nt, Human
ggcagaggaaggaugaauucac

SEQ ID NO: 865951 - RNA, 22 nt, Human
aguaaaauuaauggaucagaag

SEQ ID NO: 865952 - RNA, 22 nt, Human
uucaggauccccaccgcguuua

SEQ ID NO: 865953 - RNA, 22 nt, Human
ucagaauuuuuguuacccuuga

SEQ ID NO: 865954 - RNA, 22 nt, Human
auuaaaauuccaagguaugcca

SEQ ID NO: 865955 - RNA, 22 nt, Human
uugcaucuagggcaacccagag

SEQ ID NO: 865956 - RNA, 22 nt, Human
aaggcagcaagaauuccagguu

SEQ ID NO: 865957 - RNA, 22 nt, Human
auuucagauucagaaauguagg

SEQ ID NO: 865958 - RNA, 22 nt, Human
aguggcagagugcacucaggca

SEQ ID NO: 865959 - RNA, 18 nt, Human
gucacuguguuucugagc

SEQ ID NO: 865960 - RNA, 22 nt, Human
ucacuucacacccacuaucaug

SEQ ID NO: 865961 - RNA, 22 nt, Human
aaaauugaagugaucaggaacu

SEQ ID NO: 865962 - RNA, 22 nt, Human
ggcagcuucucccaggcuguuu

SEQ ID NO: 865963 - RNA, 22 nt, Human
cccgggaggaggaaguugcagu

SEQ ID NO: 865964 - RNA, 22 nt, Human
uaacaauaguguuugcuaguca

SEQ ID NO: 865965 - RNA, 22 nt, Human
agugagaguauuaaugugaacu

SEQ ID NO: 865966 - RNA, 21 nt, Human
ggacagcugcgcgcagggcuc

SEQ ID NO: 865967 - RNA, 22 nt, Human
uaaguaaauuuauaaugugauu

SEQ ID NO: 865968 - RNA, 22 nt, Human
cuugaaagcuuugcgucuucua

SEQ ID NO: 865969 - RNA, 22 nt, Human
cagcuuucaucagugacacuca

SEQ ID NO: 865970 - RNA, 22 nt, Human
guuuuucuuugugugaagacaa

SEQ ID NO: 865971 - RNA, 15 nt, Human
cuccaugauuuugca

SEQ ID NO: 865972 - RNA, 22 nt, Human
gacauaauccuccucaccuacu

SEQ ID NO: 865973 - RNA, 22 nt, Human
agaggauguucuaggcacucau

SEQ ID NO: 865974 - RNA, 22 nt, Human
cccaggaagaggggucaggugu

SEQ ID NO: 865975 - RNA, 22 nt, Human
caaggccauauugccuguaugu

SEQ ID NO: 865976 - RNA, 22 nt, Human
gaggccaaucaauagggcaaua

SEQ ID NO: 865977 - RNA, 23 nt, Human
acuuuauccuauaucuuuguucu

SEQ ID NO: 865978 - RNA, 22 nt, Human
uaacaguguggacuugagaucu

SEQ ID NO: 865979 - RNA, 22 nt, Human
ccagaccacccuggccaugcac

SEQ ID NO: 865980 - RNA, 22 nt, Human
cucaggaugcaauuccaucaag

SEQ ID NO: 865981 - RNA, 22 nt, Human
uuuuccagagcugucucuugca

SEQ ID NO: 865982 - RNA, 22 nt, Human
gcugcccaggagagguggggcu

SEQ ID NO: 865983 - RNA, 22 nt, Human
aagacaauuugauacuaguugc

SEQ ID NO: 865984 - RNA, 22 nt, Human
uaucuuguaauagguccacuug

SEQ ID NO: 865985 - RNA, 22 nt, Human
uuuuaucugcuucauuaguuga

SEQ ID NO: 865986 - RNA, 22 nt, Human
gaggcagccagagguucucauu

SEQ ID NO: 865987 - RNA, 19 nt, Human
ucucuacacuacauuucua

SEQ ID NO: 865988 - RNA, 22 nt, Human
uccaggagaaggccauccagcg

SEQ ID NO: 865989 - RNA, 22 nt, Human
aacauguugcuuuaauaauauu

SEQ ID NO: 865990 - RNA, 22 nt, Human
uacacauguauuuauguguaca

SEQ ID NO: 865991 - RNA, 20 nt, Human
cugcugugugugccucagcc

SEQ ID NO: 865992 - RNA, 22 nt, Human
ggaggcagaauagagugugggu

SEQ ID NO: 865993 - RNA, 22 nt, Human
ugaaggaaugaguauacuguuu

SEQ ID NO: 865994 - RNA, 22 nt, Human
auagacauagccguaauuuauu

SEQ ID NO: 865995 - RNA, 22 nt, Human
guuucacagaugguguucauau

SEQ ID NO: 865996 - RNA, 22 nt, Human
aggagagggguaggauuaauuu

SEQ ID NO: 865997 - RNA, 22 nt, Human
cagcugcuuuaguuuuccaucc

SEQ ID NO: 865998 - RNA, 22 nt, Human
agaggcaggaagagcugauuuu

SEQ ID NO: 865999 - RNA, 19 nt, Human
cagaaauagcgaaguguaa

SEQ ID NO: 866000 - RNA, 22 nt, Human
uaaaauagcaugugcagugaaa

SEQ ID NO: 866001 - RNA, 22 nt, Human
cuuuccaagaaugcagauaccu

SEQ ID NO: 866002 - RNA, 22 nt, Human
aggcagcagugauaagauagga

SEQ ID NO: 866003 - RNA, 22 nt, Human
aaguuucauuguucauguaaca

SEQ ID NO: 866004 - RNA, 22 nt, Human
uuauuccauucaguucaacaag

SEQ ID NO: 866005 - RNA, 22 nt, Human
auuuuacuuugugaauauugac

SEQ ID NO: 866006 - RNA, 22 nt, Human
aauaaaaugaacugguagaguu

SEQ ID NO: 866007 - RNA, 22 nt, Human
caggcagcgcucguggccuggc

SEQ ID NO: 866008 - RNA, 22 nt, Human
gucuuucuaugaugaacuguug

SEQ ID NO: 866009 - RNA, 22 nt, Human
auucaaguucuucugucuuugc

SEQ ID NO: 866010 - RNA, 22 nt, Human
gaaguccugguccucucauuca

SEQ ID NO: 866011 - RNA, 22 nt, Human
gagaggcaggcgcugcaauggu

SEQ ID NO: 866012 - RNA, 22 nt, Human
ucagagaguuggaaagaauuaa

SEQ ID NO: 866013 - RNA, 22 nt, Human
cccagcaguaaccaguggaaau

SEQ ID NO: 866014 - RNA, 22 nt, Human
augcaucuauucccaagggcag

SEQ ID NO: 866015 - RNA, 22 nt, Human
uuaaaaugaauauugauuagca

SEQ ID NO: 866016 - RNA, 22 nt, Human
cuuaagaugaggucaugcuaua

SEQ ID NO: 866017 - RNA, 20 nt, Human
cuucuucauuaacccuacug

SEQ ID NO: 866018 - RNA, 22 nt, Human
gccaucacauccaggcuaccuc

SEQ ID NO: 866019 - RNA, 22 nt, Human
auguacaaaauguuuugaaaug

SEQ ID NO: 866020 - RNA, 20 nt, Human
guugaaaguaauaugaugcu

SEQ ID NO: 866021 - RNA, 22 nt, Human
acaacaaagacacuugaaauga

SEQ ID NO: 866022 - RNA, 19 nt, Human
aggcaggugcagagguccc

SEQ ID NO: 866023 - RNA, 22 nt, Human
gugcauuugacgaauacucacu

SEQ ID NO: 866024 - RNA, 22 nt, Human
uuacagaacugcccuaguuggc

SEQ ID NO: 866025 - RNA, 19 nt, Human
caggaaggggcgaaucugg

SEQ ID NO: 866026 - RNA, 22 nt, Human
cccaggaaacccgaaggcgacc

SEQ ID NO: 866027 - RNA, 22 nt, Human
acauacauauguuuaaaugcau

SEQ ID NO: 866028 - RNA, 22 nt, Human
caguucuuuguggggaguucuc

SEQ ID NO: 866029 - RNA, 22 nt, Human
gcccaggacucagggugucgcg

SEQ ID NO: 866030 - RNA, 22 nt, Human
cuuuaacaaaugacucuugucu

SEQ ID NO: 866031 - RNA, 22 nt, Human
uccucagacuucccuuugugua

SEQ ID NO: 866032 - RNA, 23 nt, Human
uggacgccgacuuuggaggcgcu

SEQ ID NO: 866033 - RNA, 22 nt, Human
ggcucagagaccugcgaucuga

SEQ ID NO: 866034 - RNA, 22 nt, Human
gaggucagucagaccaggguuu

SEQ ID NO: 866035 - RNA, 22 nt, Human
uuuuuauaugaaggauagugcg

SEQ ID NO: 866036 - RNA, 22 nt, Human
uacugaaauacuaagaaguuaa

SEQ ID NO: 866037 - RNA, 22 nt, Human
uuacuacugcuuuacuacuggg

SEQ ID NO: 866038 - RNA, 20 nt, Human
accaauguuagcuuaguacu

SEQ ID NO: 866039 - RNA, 20 nt, Human
uggcaucucucaauuguagg

SEQ ID NO: 866040 - RNA, 22 nt, Human
gaauauuuuuaaagggacuaau

SEQ ID NO: 866041 - RNA, 19 nt, Human
aucugagauuauaaacaga

SEQ ID NO: 866042 - RNA, 22 nt, Human
aaggcagcccuggcucagccug

SEQ ID NO: 866043 - RNA, 22 nt, Human
uucuucaauuuuccauauacug

SEQ ID NO: 866044 - RNA, 22 nt, Human
uucuucucucauagauuaaggu

SEQ ID NO: 866045 - RNA, 22 nt, Human
guucuucaguaaaauuaaaugu

SEQ ID NO: 866046 - RNA, 22 nt, Human
agcugcccagauaggaggaggc

SEQ ID NO: 866047 - RNA, 22 nt, Human
ugaggcaggacugagcgggaug

SEQ ID NO: 866048 - RNA, 22 nt, Human
caacuuugugugaccuagauag

SEQ ID NO: 866049 - RNA, 22 nt, Human
agaccaagaaaggaugaggauc

SEQ ID NO: 866050 - RNA, 22 nt, Human
aucaggauuacacggggaugcu

SEQ ID NO: 866051 - RNA, 22 nt, Human
uuaacauacaucaugaacaaug

SEQ ID NO: 866052 - RNA, 22 nt, Human
agccauuuuccugaaauauaac

SEQ ID NO: 866053 - RNA, 22 nt, Human
cagaaauaaacuucucacaucg

SEQ ID NO: 866054 - RNA, 22 nt, Human
ggcaucuccaaaacaugaacuc

SEQ ID NO: 866055 - RNA, 22 nt, Human
uuuaggaaugugguuuuugagc

SEQ ID NO: 866056 - RNA, 22 nt, Human
uaggcagcagugcuaugauucu

SEQ ID NO: 866057 - RNA, 22 nt, Human
uaaaugagggcugacaugauug

SEQ ID NO: 866058 - RNA, 22 nt, Human
acuggcaguagagggagcgcau

SEQ ID NO: 866059 - RNA, 22 nt, Human
uagaauucauguuacuguuagc

SEQ ID NO: 866060 - RNA, 22 nt, Human
aaggcaguacuuuauguccaua

SEQ ID NO: 866061 - RNA, 22 nt, Human
aggcagcuuuguaguaaagcua

SEQ ID NO: 866062 - RNA, 22 nt, Human
uuugaaagcaccauuugaguag

SEQ ID NO: 866063 - RNA, 22 nt, Human
agauaucaccaguuuuacauac

SEQ ID NO: 866064 - RNA, 22 nt, Human
aaaggccauuacuugcuuuuag

SEQ ID NO: 866065 - RNA, 22 nt, Human
caggcagggagcuggaaaggau

SEQ ID NO: 866066 - RNA, 22 nt, Human
cucccaggacucagaggagaag

SEQ ID NO: 866067 - RNA, 22 nt, Human
ggugagaggcagaggacagcuu

SEQ ID NO: 866068 - RNA, 19 nt, Human
agggaguuuauauuugcac

SEQ ID NO: 866069 - RNA, 19 nt, Human
ucauuguugguuugucggg

SEQ ID NO: 866070 - RNA, 23 nt, Human
auguuauuauuagcagucuugcc

SEQ ID NO: 866071 - RNA, 22 nt, Human
uugguacaaugugcuagguagg

SEQ ID NO: 866072 - RNA, 22 nt, Human
ccaugagacagcaacugaaagu

SEQ ID NO: 866073 - RNA, 20 nt, Human
cugcugugguccuuuauuuu

SEQ ID NO: 866074 - RNA, 22 nt, Human
aaggcagccgugugacugcaug

SEQ ID NO: 866075 - RNA, 22 nt, Human
gaagaauccuguccucuuuagg

SEQ ID NO: 866076 - RNA, 22 nt, Human
cuuaauuacccaaugugguagg

SEQ ID NO: 866077 - RNA, 22 nt, Human
uguaggccuauguccagcaauu

SEQ ID NO: 866078 - RNA, 22 nt, Human
ccaugcacaccagcaggcagac

SEQ ID NO: 866079 - RNA, 21 nt, Human
ccaagacucccaucuaguggu

SEQ ID NO: 866080 - RNA, 22 nt, Human
uucaucaauguguuuaauaaug

SEQ ID NO: 866081 - RNA, 22 nt, Human
cccaggaacagggcucagaccc

SEQ ID NO: 866082 - RNA, 22 nt, Human
auuaaacugagcaaauuaacau

SEQ ID NO: 866083 - RNA, 22 nt, Human
agcaccuguugcacuucauaau

SEQ ID NO: 866084 - RNA, 22 nt, Human
ugcaggaacugggagggauagu

SEQ ID NO: 866085 - RNA, 19 nt, Human
ggcaggcuggauagagagg

SEQ ID NO: 866086 - RNA, 22 nt, Human
uuucaaagaccauuaacuauca

SEQ ID NO: 866087 - RNA, 22 nt, Human
accaggaguagaauaucuguga

SEQ ID NO: 866088 - RNA, 20 nt, Human
agcaagaguaaggacagcga

SEQ ID NO: 866089 - RNA, 22 nt, Human
ucaacugcaaguuugcuuaguu

SEQ ID NO: 866090 - RNA, 22 nt, Human
caaguaaagaaucacauuucuu

SEQ ID NO: 866091 - RNA, 22 nt, Human
uuagacaagggcuccuuaaaag

SEQ ID NO: 866092 - RNA, 22 nt, Human
guucuucaucuuaaccaucugu

SEQ ID NO: 866093 - RNA, 22 nt, Human
acaucugaccauuacaagacau

SEQ ID NO: 866094 - RNA, 22 nt, Human
auucacaaaaugauauagauac

SEQ ID NO: 866095 - RNA, 22 nt, Human
uuugaaguucccccauaucaga

SEQ ID NO: 866096 - RNA, 22 nt, Human
ucaauucaacacaugcacauug

SEQ ID NO: 866097 - RNA, 22 nt, Human
guaggcagggcuguggggagaa

SEQ ID NO: 866098 - RNA, 22 nt, Human
auccuuagguggugcaucaggg

SEQ ID NO: 866099 - RNA, 22 nt, Human
ucuggaucggguuccucagguc

SEQ ID NO: 866100 - RNA, 20 nt, Human
aggcucagcugagcucuugg

SEQ ID NO: 866101 - RNA, 22 nt, Human
ugcuauacauguacauauuagu

SEQ ID NO: 866102 - RNA, 22 nt, Human
gugguuuucuccaacccagaac

SEQ ID NO: 866103 - RNA, 22 nt, Human
uuauagugggcccaacauggcg

SEQ ID NO: 866104 - RNA, 22 nt, Human
ggauuuccucuugacucuaaag

SEQ ID NO: 866105 - RNA, 22 nt, Human
agaauaaucacugaaguucaaa

SEQ ID NO: 866106 - RNA, 22 nt, Human
acauaauaccuaggacaguuug

SEQ ID NO: 866107 - RNA, 22 nt, Human
uaaagccacgcuggaaaucagg

SEQ ID NO: 866108 - RNA, 22 nt, Human
gugaauaaagggaguuuucaaa

SEQ ID NO: 866109 - RNA, 22 nt, Human
gcugcccagacauugaaucagg

SEQ ID NO: 866110 - RNA, 22 nt, Human
cugucccuucauuauucacuac

SEQ ID NO: 866111 - RNA, 21 nt, Human
auagaacaccaggcauauaua

SEQ ID NO: 866112 - RNA, 22 nt, Human
aguccuuaugagaugcugccuu

SEQ ID NO: 866113 - RNA, 22 nt, Human
uuccuuaggggacagggggaua

SEQ ID NO: 866114 - RNA, 22 nt, Human
auagcuuuacagaagaguuuag

SEQ ID NO: 866115 - RNA, 17 nt, Human
cuuuuaauuuacuuccc

SEQ ID NO: 866116 - RNA, 22 nt, Human
uuucagaaagcugaacauauga

SEQ ID NO: 866117 - RNA, 22 nt, Human
aggaagcuccuggagagccagu

SEQ ID NO: 866118 - RNA, 22 nt, Human
uuucugcugugcuuucuugcgu

SEQ ID NO: 866119 - RNA, 22 nt, Human
uguccuuauaagaaaaggaaau

SEQ ID NO: 866120 - RNA, 22 nt, Human
cccaugagaccugguuuaaggc

SEQ ID NO: 866121 - RNA, 22 nt, Human
gcccaggaagugacucagaugu

SEQ ID NO: 866122 - RNA, 22 nt, Human
aaaggcaggcuuucacaucuca

SEQ ID NO: 866123 - RNA, 22 nt, Human
gcucaggacuggaggagcgggg

SEQ ID NO: 866124 - RNA, 22 nt, Human
ugaugaaauguugaggcaguga

SEQ ID NO: 866125 - RNA, 22 nt, Human
aaucuagucuccuuaagucuuu

SEQ ID NO: 866126 - RNA, 18 nt, Human
gagucuuuguuacugcug

SEQ ID NO: 866127 - RNA, 22 nt, Human
uacaguauguucuugaauuugg

SEQ ID NO: 866128 - RNA, 22 nt, Human
ccaguacugucuccaauauucc

SEQ ID NO: 866129 - RNA, 22 nt, Human
gauuuuauuagcccaaacuuug

SEQ ID NO: 866130 - RNA, 22 nt, Human
ucacugcucagucuguacuaca

SEQ ID NO: 866131 - RNA, 22 nt, Human
aaauuauucucauguguuucuu

SEQ ID NO: 866132 - RNA, 22 nt, Human
uggaaauggaucugaugagucu

SEQ ID NO: 866133 - RNA, 23 nt, Human
uggcaaggaaugggauggagacu

SEQ ID NO: 866134 - RNA, 22 nt, Human
caaauauuccagguacaucccu

SEQ ID NO: 866135 - RNA, 22 nt, Human
uuugaaagggacaaagucacug

SEQ ID NO: 866136 - RNA, 22 nt, Human
ugcauaguucuccuuccuccuc

SEQ ID NO: 866137 - RNA, 22 nt, Human
uuucauaauacuguacaugaaa

SEQ ID NO: 866138 - RNA, 22 nt, Human
cuuugcaaacgauuaccacaug

SEQ ID NO: 866139 - RNA, 22 nt, Human
cuuaagauuugagauaccuaau

SEQ ID NO: 866140 - RNA, 22 nt, Human
ucucaagaucucaagauggccc

SEQ ID NO: 866141 - RNA, 22 nt, Human
ugaaagcacaaguucuaacagg

SEQ ID NO: 866142 - RNA, 22 nt, Human
ucaaaauuuuauuucucaagga

SEQ ID NO: 866143 - RNA, 22 nt, Human
ugaguuuuuucaacauaugaag

SEQ ID NO: 866144 - RNA, 22 nt, Human
aucaggauucaguaucuccagc

SEQ ID NO: 866145 - RNA, 22 nt, Human
ugaggggaacugaugcccauug

SEQ ID NO: 866146 - RNA, 22 nt, Human
uucaggaugcucagaguagucu

SEQ ID NO: 866147 - RNA, 22 nt, Human
cuuuggcacagucucauuugau

SEQ ID NO: 866148 - RNA, 22 nt, Human
gaagcacauggcuauagcuauu

SEQ ID NO: 866149 - RNA, 22 nt, Human
gagaggaguuacuauuuccgag

SEQ ID NO: 866150 - RNA, 22 nt, Human
caagaauccuguucuugaagau

SEQ ID NO: 866151 - RNA, 22 nt, Human
ggugaaggucagagcaggaaaa

SEQ ID NO: 866152 - RNA, 22 nt, Human
agucaccaggguuugcuggguu

SEQ ID NO: 866153 - RNA, 22 nt, Human
acuuugaaagccuuggccccgg

SEQ ID NO: 866154 - RNA, 22 nt, Human
aaucuguucuacucuauucaga

SEQ ID NO: 866155 - RNA, 22 nt, Human
uguaaauaguuagcuugccucu

SEQ ID NO: 866156 - RNA, 22 nt, Human
acuagaaacuaauggauuauua

SEQ ID NO: 866157 - RNA, 22 nt, Human
gauugaaacauaggcagucgag

SEQ ID NO: 866158 - RNA, 17 nt, Human
aggcagcucagaacauc

SEQ ID NO: 866159 - RNA, 22 nt, Human
gaggccuggagccgccuaggcg

SEQ ID NO: 866160 - RNA, 22 nt, Human
ucuuugcaggccaaauuguuaa

SEQ ID NO: 866161 - RNA, 22 nt, Human
gaggagcuugugagaagauguc

SEQ ID NO: 866162 - RNA, 22 nt, Human
uauacagauggaaagauacaca

SEQ ID NO: 866163 - RNA, 22 nt, Human
cuuucauucuuagauauuagug

SEQ ID NO: 866164 - RNA, 18 nt, Human
aauuuccauaugaauugc

SEQ ID NO: 866165 - RNA, 22 nt, Human
ugaaugaacuaaaucauaguuc

SEQ ID NO: 866166 - RNA, 22 nt, Human
cauuucaagcauugacuucuau

SEQ ID NO: 866167 - RNA, 22 nt, Human
uauaauuaguaaauggcagauu

SEQ ID NO: 866168 - RNA, 22 nt, Human
cuuugaagauggcaaauuuaga

SEQ ID NO: 866169 - RNA, 22 nt, Human
guucuucaggcugugcucuaga

SEQ ID NO: 866170 - RNA, 22 nt, Human
uaaaaguauacuuucaaaggag

SEQ ID NO: 866171 - RNA, 22 nt, Human
ggcagcuauuccaagcagcacu

SEQ ID NO: 866172 - RNA, 22 nt, Human
uaaggccaauuacauauguuca

SEQ ID NO: 866173 - RNA, 22 nt, Human
cuggcugugcagucuuccagaa

SEQ ID NO: 866174 - RNA, 22 nt, Human
auguuauaguuauaaaaugagg

SEQ ID NO: 866175 - RNA, 22 nt, Human
uccugagagcagcugcuuugga

SEQ ID NO: 866176 - RNA, 22 nt, Human
uuaauuacaaaacacauagguu

SEQ ID NO: 866177 - RNA, 22 nt, Human
uaaacauggcuguuucaguuau

SEQ ID NO: 866178 - RNA, 17 nt, Human
uucucugagcuguauug

SEQ ID NO: 866179 - RNA, 22 nt, Human
gacagugcauuuccuggcaugg

SEQ ID NO: 866180 - RNA, 22 nt, Human
cuauuacauuucuggacauuca

SEQ ID NO: 866181 - RNA, 22 nt, Human
auuuucaucauggguuuaacau

SEQ ID NO: 866182 - RNA, 22 nt, Human
gaugccuccaaaugagggcaga

SEQ ID NO: 866183 - RNA, 22 nt, Human
gaggagcugggcugagaggguc

SEQ ID NO: 866184 - RNA, 22 nt, Human
gaagaauccaugcuaauuuacc

SEQ ID NO: 866185 - RNA, 18 nt, Human
ugaggcagucagugaugg

SEQ ID NO: 866186 - RNA, 22 nt, Human
uggcagcuggagggcaauggcc

SEQ ID NO: 866187 - RNA, 22 nt, Human
agacgagggccuggcacacagu

SEQ ID NO: 866188 - RNA, 22 nt, Human
uuaacauuguccuuagcagauu

SEQ ID NO: 866189 - RNA, 21 nt, Human
aggcagcuggaaggccuggcu

SEQ ID NO: 866190 - RNA, 22 nt, Human
acaugaaaaauguuugcaguuu

SEQ ID NO: 866191 - RNA, 22 nt, Human
uaauuucagugcaagcucacgg

SEQ ID NO: 866192 - RNA, 19 nt, Human
accaggagacagugagcuu

SEQ ID NO: 866193 - RNA, 22 nt, Human
augcugugucaggaauuugaua

SEQ ID NO: 866194 - RNA, 22 nt, Human
uuucauuuugguuaugccauaa

SEQ ID NO: 866195 - RNA, 22 nt, Human
augcuguguggccaccuccaug

SEQ ID NO: 866196 - RNA, 22 nt, Human
uuaaugauaccuauguuaauuu

SEQ ID NO: 866197 - RNA, 22 nt, Human
gaaagccaucuggcugcuggga

SEQ ID NO: 866198 - RNA, 22 nt, Human
cagugguuauacuuacuguuuc

SEQ ID NO: 866199 - RNA, 22 nt, Human
augcuguguggucaaguuaauu

SEQ ID NO: 866200 - RNA, 22 nt, Human
ucauuuguaccauuuuuuaaga

SEQ ID NO: 866201 - RNA, 22 nt, Human
acccaggacucucuuccaguag

SEQ ID NO: 866202 - RNA, 22 nt, Human
cugaaugaggaaaagagugagg

SEQ ID NO: 866203 - RNA, 22 nt, Human
auggcuuucucuaaugugguau

SEQ ID NO: 866204 - RNA, 22 nt, Human
cuuauacacccucuucccaggc

SEQ ID NO: 866205 - RNA, 22 nt, Human
uuugacaucuaagaauucuuac

SEQ ID NO: 866206 - RNA, 22 nt, Human
ucauaauacaaagaguucugca

SEQ ID NO: 866207 - RNA, 22 nt, Human
ucauuguuauguuuugcugucu

SEQ ID NO: 866208 - RNA, 22 nt, Human
auuuacugagguaaauaaacug

SEQ ID NO: 866209 - RNA, 22 nt, Human
uggauuagugcugaaaugaugg

SEQ ID NO: 866210 - RNA, 22 nt, Human
gaggaggccaguggaaggaagc

SEQ ID NO: 866211 - RNA, 21 nt, Human
caaucaguuggcauuugagca

SEQ ID NO: 866212 - RNA, 19 nt, Human
uuacuuggcaaagucaguc

SEQ ID NO: 866213 - RNA, 22 nt, Human
cuacagaaaaucagccacaggc

SEQ ID NO: 866214 - RNA, 22 nt, Human
ugaugaaacugagguuccaaga

SEQ ID NO: 866215 - RNA, 22 nt, Human
guuuucaauuauaagauggcuu

SEQ ID NO: 866216 - RNA, 19 nt, Human
guugaaaguaggugagggu

SEQ ID NO: 866217 - RNA, 22 nt, Human
aucuaacagcaacaccagaaua

SEQ ID NO: 866218 - RNA, 22 nt, Human
gucauaaagcuuguugcauuua

SEQ ID NO: 866219 - RNA, 22 nt, Human
agacaaaugguaauuaugucua

SEQ ID NO: 866220 - RNA, 22 nt, Human
aucacuguguauguauaugcag

SEQ ID NO: 866221 - RNA, 22 nt, Human
aggcagaggagaaugaucuucc

SEQ ID NO: 866222 - RNA, 22 nt, Human
uaucuguuccaggcacucagcu

SEQ ID NO: 866223 - RNA, 22 nt, Human
cuggaguuagaguagacacuga

SEQ ID NO: 866224 - RNA, 22 nt, Human
cucuucuugucucugguuagaa

SEQ ID NO: 866225 - RNA, 22 nt, Human
aguaaacaguaucuuuaguguc

SEQ ID NO: 866226 - RNA, 22 nt, Human
aaaggagacuucagaucuccuu

SEQ ID NO: 866227 - RNA, 22 nt, Human
cuucagaauccagaaucagaau

SEQ ID NO: 866228 - RNA, 22 nt, Human
auguaaaucaagcagugcuggu

SEQ ID NO: 866229 - RNA, 22 nt, Human
caggagauguaagacuucuguu

SEQ ID NO: 866230 - RNA, 22 nt, Human
aagcuggcaugucaccugagaa

SEQ ID NO: 866231 - RNA, 22 nt, Human
ccuggaucagucacuguugcug

SEQ ID NO: 866232 - RNA, 22 nt, Human
cuaauuauguuguuauaaucaa

SEQ ID NO: 866233 - RNA, 22 nt, Human
uaaguucauaagcuuauucuua

SEQ ID NO: 866234 - RNA, 22 nt, Human
uccauuuucuaaguaucacuua

SEQ ID NO: 866235 - RNA, 23 nt, Human
aggcagcuggguagcaucuuucu

SEQ ID NO: 866236 - RNA, 22 nt, Human
cugguacaaaaugcugauauca

SEQ ID NO: 866237 - RNA, 22 nt, Human
uuuucagugggcaaugauguga

SEQ ID NO: 866238 - RNA, 22 nt, Human
cugccaggcagcagagggagaa

SEQ ID NO: 866239 - RNA, 22 nt, Human
uaucagaaacucuggggcaggg

SEQ ID NO: 866240 - RNA, 22 nt, Human
ccauggcucuuaccuuguuaua

SEQ ID NO: 866241 - RNA, 22 nt, Human
gauuucaauccagcuuucuucu

SEQ ID NO: 866242 - RNA, 22 nt, Human
aggaguggugcaggaccugcca

SEQ ID NO: 866243 - RNA, 22 nt, Human
gcccaggagccuggagaugugu

SEQ ID NO: 866244 - RNA, 22 nt, Human
uguuuucagucauauagcaggu

SEQ ID NO: 866245 - RNA, 22 nt, Human
ugaggcaggaguucaggcugcg

SEQ ID NO: 866246 - RNA, 22 nt, Human
ggauucuaacugaacagaauau

SEQ ID NO: 866247 - RNA, 22 nt, Human
aagauauagauaaaacuaugca

SEQ ID NO: 866248 - RNA, 22 nt, Human
ugagacaguuuuucuauuucca

SEQ ID NO: 866249 - RNA, 20 nt, Human
ccacaggaguccagucgacc

SEQ ID NO: 866250 - RNA, 22 nt, Human
ugagggagagggcgaaaaugaa

SEQ ID NO: 866251 - RNA, 22 nt, Human
aggccagcgcugcuagcucccg

SEQ ID NO: 866252 - RNA, 22 nt, Human
aggcagcuggacauaacuaacc

SEQ ID NO: 866253 - RNA, 22 nt, Human
ccaggaagcugucugauaugaa

SEQ ID NO: 866254 - RNA, 22 nt, Human
gaaauauucuugucuuguuuuc

SEQ ID NO: 866255 - RNA, 22 nt, Human
agcugcccagcuaggaagaagg

SEQ ID NO: 866256 - RNA, 22 nt, Human
gagggagggacuagcauucucu

SEQ ID NO: 866257 - RNA, 22 nt, Human
guuuuauaggcuguugcuauau

SEQ ID NO: 866258 - RNA, 22 nt, Human
auauauuugagaauauucauga

SEQ ID NO: 866259 - RNA, 22 nt, Human
uuuuauagcugaauaguauucc

SEQ ID NO: 866260 - RNA, 22 nt, Human
gaucugaagagcaaugaaauau

SEQ ID NO: 866261 - RNA, 22 nt, Human
uuuccaaauaaggucacacuca

SEQ ID NO: 866262 - RNA, 22 nt, Human
agucuugcucuugcaucugcuu

SEQ ID NO: 866263 - RNA, 22 nt, Human
uuuucuuaggugcuccaaguag

SEQ ID NO: 866264 - RNA, 21 nt, Human
ugaaugaggaggauggcauuu

SEQ ID NO: 866265 - RNA, 22 nt, Human
gguacaaugucuuacagaccca

SEQ ID NO: 866266 - RNA, 22 nt, Human
uaaucuaccacuauugcaauau

SEQ ID NO: 866267 - RNA, 22 nt, Human
gcccaggaagccaccgggaagu

SEQ ID NO: 866268 - RNA, 22 nt, Human
caggcagcucugcuuuuccuaa

SEQ ID NO: 866269 - RNA, 22 nt, Human
cuaacuuuagcuuagauuauca

SEQ ID NO: 866270 - RNA, 22 nt, Human
uaguuaaaauaauggagauguu

SEQ ID NO: 866271 - RNA, 22 nt, Human
ucaggagggugacaggcccugg

SEQ ID NO: 866272 - RNA, 22 nt, Human
uguccuuacaaggucccuuucg

SEQ ID NO: 866273 - RNA, 22 nt, Human
uguguuauugccacugaagacc

SEQ ID NO: 866274 - RNA, 22 nt, Human
cuugaaagucacaugcagcccu

SEQ ID NO: 866275 - RNA, 20 nt, Human
cugcuguguuauuguagaac

SEQ ID NO: 866276 - RNA, 22 nt, Human
cccaggagaccuagaucuguuu

SEQ ID NO: 866277 - RNA, 22 nt, Human
gcguuaauaacauuaauaaugc

SEQ ID NO: 866278 - RNA, 22 nt, Human
gaauacaugauacaugaacugc

SEQ ID NO: 866279 - RNA, 22 nt, Human
aaaaggcauggagguugauagu

SEQ ID NO: 866280 - RNA, 22 nt, Human
uagcucuucauuucaucugauu

SEQ ID NO: 866281 - RNA, 22 nt, Human
uggaggaaaaaaccaggcagag

SEQ ID NO: 866282 - RNA, 22 nt, Human
auagaauagcauagaaaauuga

SEQ ID NO: 866283 - RNA, 22 nt, Human
augguuuuucaaguauucagaa

SEQ ID NO: 866284 - RNA, 22 nt, Human
gaugagcauuguuucauguguu

SEQ ID NO: 866285 - RNA, 22 nt, Human
uguauacauuuaacuagauaga

SEQ ID NO: 866286 - RNA, 22 nt, Human
ggaagaggcugagccagguccc

SEQ ID NO: 866287 - RNA, 22 nt, Human
aggcugcucaguagauggagcu

SEQ ID NO: 866288 - RNA, 22 nt, Human
cacaaugugguuugucaucuuu

SEQ ID NO: 866289 - RNA, 23 nt, Human
ucuguacacaucagcaucuccca

SEQ ID NO: 866290 - RNA, 22 nt, Human
uuauuuacaacucuucucuucc

SEQ ID NO: 866291 - RNA, 22 nt, Human
gucaggauuaaugggaguaugc

SEQ ID NO: 866292 - RNA, 22 nt, Human
ucugggaacagccuggcugugu

SEQ ID NO: 866293 - RNA, 22 nt, Human
cccaggaaaugggcucuugccu

SEQ ID NO: 866294 - RNA, 22 nt, Human
cagggagggaggaaaauuugcu

SEQ ID NO: 866295 - RNA, 22 nt, Human
auuaggcauuauggggauaagg

SEQ ID NO: 866296 - RNA, 20 nt, Human
cagagccaagagcagcaucu

SEQ ID NO: 866297 - RNA, 22 nt, Human
uagaaauaaaucugcagcuggg

SEQ ID NO: 866298 - RNA, 22 nt, Human
agggacuuguguccuauguaug

SEQ ID NO: 866299 - RNA, 22 nt, Human
uguuuuaaucucccauugcucu

SEQ ID NO: 866300 - RNA, 22 nt, Human
ugucccucugaggcuucccugg

SEQ ID NO: 866301 - RNA, 22 nt, Human
ucauuuguacuugugugcuugu

SEQ ID NO: 866302 - RNA, 22 nt, Human
agcccaggaaguugaggcuugc

SEQ ID NO: 866303 - RNA, 22 nt, Human
gcccaggaaaugccccguggug

SEQ ID NO: 866304 - RNA, 22 nt, Human
ucaaaauucuagggagaauggu

SEQ ID NO: 866305 - RNA, 22 nt, Human
cuuaggcagacugcugaugcag

SEQ ID NO: 866306 - RNA, 22 nt, Human
ucucaggaauagaguggcagca

SEQ ID NO: 866307 - RNA, 22 nt, Human
ggcagcuuguccuggaggaugg

SEQ ID NO: 866308 - RNA, 22 nt, Human
acagguuugucugauguaauga

SEQ ID NO: 866309 - RNA, 22 nt, Human
acacauuucuaaauuuuuaccg

SEQ ID NO: 866310 - RNA, 22 nt, Human
aaagcagagguugcagugagcu

SEQ ID NO: 866311 - RNA, 23 nt, Human
auucuucauuaucuucuagaaaa

SEQ ID NO: 866312 - RNA, 22 nt, Human
cugaauaauacagacuagcuuc

SEQ ID NO: 866313 - RNA, 22 nt, Human
cccaggaaaagcagugccagca

SEQ ID NO: 866314 - RNA, 22 nt, Human
gaggacaggagacucacuguuu

SEQ ID NO: 866315 - RNA, 22 nt, Human
gcugcugucagugguggcaguu

SEQ ID NO: 866316 - RNA, 22 nt, Human
aaagcagauucugaugcaguag

SEQ ID NO: 866317 - RNA, 21 nt, Human
gauaaaaugggccuugguccu

SEQ ID NO: 866318 - RNA, 20 nt, Human
uguaacaaucuggauguugc

SEQ ID NO: 866319 - RNA, 22 nt, Human
auagaaauggcagcuggugcua

SEQ ID NO: 866320 - RNA, 22 nt, Human
ugauuuccccagucuugcugcu

SEQ ID NO: 866321 - RNA, 22 nt, Human
gaggcagcugggauacaaggga

SEQ ID NO: 866322 - RNA, 22 nt, Human
aaguccuuuauccuaaaagguc

SEQ ID NO: 866323 - RNA, 22 nt, Human
ucucucuugucaccccaucugc

SEQ ID NO: 866324 - RNA, 22 nt, Human
auguuuccgugagcauccuuga

SEQ ID NO: 866325 - RNA, 22 nt, Human
ucucuguacaguacaugccgug

SEQ ID NO: 866326 - RNA, 22 nt, Human
acagaauuuacacaucucuaaa

SEQ ID NO: 866327 - RNA, 22 nt, Human
ucgagcucuggagccaaggaug

SEQ ID NO: 866328 - RNA, 17 nt, Human
ucauuuguugugacuag

SEQ ID NO: 866329 - RNA, 22 nt, Human
acuuggcaaguaucuauaaagu

SEQ ID NO: 866330 - RNA, 22 nt, Human
acacaaacugcuagaaaauugg

SEQ ID NO: 866331 - RNA, 18 nt, Human
cugcugugucgucugggc

SEQ ID NO: 866332 - RNA, 22 nt, Human
ugcccaggauugugaggucagg

SEQ ID NO: 866333 - RNA, 22 nt, Human
aaugccaacuuggauauacauu

SEQ ID NO: 866334 - RNA, 22 nt, Human
aggaugagaagauuggaaucuu

SEQ ID NO: 866335 - RNA, 22 nt, Human
agugcagccgagaucaggugcu

SEQ ID NO: 866336 - RNA, 23 nt, Human
gagugcagaauagacaugcagug

SEQ ID NO: 866337 - RNA, 22 nt, Human
caaugaaagcaacugccuauaa

SEQ ID NO: 866338 - RNA, 22 nt, Human
aucugccugcaguggagguggg

SEQ ID NO: 866339 - RNA, 22 nt, Human
ugaggcagggaguuuaauuguc

SEQ ID NO: 866340 - RNA, 22 nt, Human
uccaugagcuagggauucauca

SEQ ID NO: 866341 - RNA, 22 nt, Human
aucugcaggaaugugugcagag

SEQ ID NO: 866342 - RNA, 23 nt, Human
gaaucaguggcuaacaaggaaac

SEQ ID NO: 866343 - RNA, 22 nt, Human
uuuggaauauuaaaaugucuca

SEQ ID NO: 866344 - RNA, 22 nt, Human
aggacaggauugagcugaacug

SEQ ID NO: 866345 - RNA, 22 nt, Human
cuuaaauuuucaucuacaagaa

SEQ ID NO: 866346 - RNA, 22 nt, Human
uuugaauagaggccccucagaa

SEQ ID NO: 866347 - RNA, 21 nt, Human
uagggcaggcauuggaagaga

SEQ ID NO: 866348 - RNA, 22 nt, Human
cuucucaguugcaagugucaga

SEQ ID NO: 866349 - RNA, 19 nt, Human
uuucccagcccuugcugug

SEQ ID NO: 866350 - RNA, 22 nt, Human
ucacacauucuagguauguuga

SEQ ID NO: 866351 - RNA, 22 nt, Human
uaauuucaauagcuugcauaau

SEQ ID NO: 866352 - RNA, 23 nt, Human
ccacagagcugccaauuccugug

SEQ ID NO: 866353 - RNA, 23 nt, Human
agaugagccaacaccuccaugcc

SEQ ID NO: 866354 - RNA, 22 nt, Human
uaugcuguggaaaauacaaaga

SEQ ID NO: 866355 - RNA, 22 nt, Human
gcuuuuauugucuuuacgacga

SEQ ID NO: 866356 - RNA, 22 nt, Human
agagagcauugaggaaaucuuc

SEQ ID NO: 866357 - RNA, 22 nt, Human
uuaauaaacaggugcagcugaa

SEQ ID NO: 866358 - RNA, 22 nt, Human
ucugaacuccagcccugcucuc

SEQ ID NO: 866359 - RNA, 22 nt, Human
caaggccagagccagcgauaag

SEQ ID NO: 866360 - RNA, 22 nt, Human
ucuggaucaccacuucugccuc

SEQ ID NO: 866361 - RNA, 22 nt, Human
aucugccugagucuagguuuuc

SEQ ID NO: 866362 - RNA, 22 nt, Human
uuugcaaagugacuauuauaug

SEQ ID NO: 866363 - RNA, 22 nt, Human
uagggaugacgaaaggacagag

SEQ ID NO: 866364 - RNA, 22 nt, Human
aaggagagagcuuugcuggaac

SEQ ID NO: 866365 - RNA, 22 nt, Human
ggaagaggcugaggccaugcug

SEQ ID NO: 866366 - RNA, 22 nt, Human
aguauuuagcauagugguuagu

SEQ ID NO: 866367 - RNA, 22 nt, Human
aauaauuuccagccaacuggaa

SEQ ID NO: 866368 - RNA, 22 nt, Human
ccagaucuaguguuguaaagcu

SEQ ID NO: 866369 - RNA, 22 nt, Human
uauaagaaacaaggcaaauuuu

SEQ ID NO: 866370 - RNA, 22 nt, Human
aauauccacacugugucccugc

SEQ ID NO: 866371 - RNA, 22 nt, Human
guggcaggagacuggaagaugg

SEQ ID NO: 866372 - RNA, 22 nt, Human
ggcagucuuaucagcauuggac

SEQ ID NO: 866373 - RNA, 22 nt, Human
cugagacuuucaugugcuuuua

SEQ ID NO: 866374 - RNA, 22 nt, Human
caaugucaugauuuuccauuag

SEQ ID NO: 866375 - RNA, 22 nt, Human
ucuuuguaacugucuauugaga

SEQ ID NO: 866376 - RNA, 22 nt, Human
cagcuggcugcaugaugccaaa

SEQ ID NO: 866377 - RNA, 22 nt, Human
ggagggaaugucuagcauucuu

SEQ ID NO: 866378 - RNA, 22 nt, Human
aaacaugaauagauauuaaaca

SEQ ID NO: 866379 - RNA, 22 nt, Human
uuccuuaguuauuugguccccu

SEQ ID NO: 866380 - RNA, 22 nt, Human
uuuagaaguucacacauuuaaa

SEQ ID NO: 866381 - RNA, 22 nt, Human
ucuaaacagccucuuaccaacu

SEQ ID NO: 866382 - RNA, 22 nt, Human
ucuucagaggaagucagucuuu

SEQ ID NO: 866383 - RNA, 22 nt, Human
cccaggagagaggggauaaagc

SEQ ID NO: 866384 - RNA, 20 nt, Human
aaacauucauguacaaguga

SEQ ID NO: 866385 - RNA, 22 nt, Human
ugcugugagguugagaaggaag

SEQ ID NO: 866386 - RNA, 22 nt, Human
caguuucuacgaaggucaaccc

SEQ ID NO: 866387 - RNA, 22 nt, Human
uuugaaauuaagauauugucca

SEQ ID NO: 866388 - RNA, 22 nt, Human
uggcagcuccuggggccagcac

SEQ ID NO: 866389 - RNA, 22 nt, Human
ccaggcagcaaauuuucugaau

SEQ ID NO: 866390 - RNA, 22 nt, Human
cuagaaauauuuuacagucaag

SEQ ID NO: 866391 - RNA, 22 nt, Human
uuauccaacaugacuuaugucc

SEQ ID NO: 866392 - RNA, 22 nt, Human
uuccaagagcuuuaauuguuga

SEQ ID NO: 866393 - RNA, 22 nt, Human
ugaggcagcuuuuucugugugu

SEQ ID NO: 866394 - RNA, 22 nt, Human
uccaggagaccagauguaggcc

SEQ ID NO: 866395 - RNA, 22 nt, Human
gaggcagcaucuauggugggaa

SEQ ID NO: 866396 - RNA, 16 nt, Human
uuuccaaagggcagcu

SEQ ID NO: 866397 - RNA, 22 nt, Human
uggauuuaguucuucacaggcc

SEQ ID NO: 866398 - RNA, 22 nt, Human
ccaaaauuauuacauuuguagg

SEQ ID NO: 866399 - RNA, 22 nt, Human
ugaaaggugacauuucuuggau

SEQ ID NO: 866400 - RNA, 22 nt, Human
uccaggagguagugcuuaauuu

SEQ ID NO: 866401 - RNA, 22 nt, Human
uagcuaucuguguccagaucca

SEQ ID NO: 866402 - RNA, 22 nt, Human
augguuuaaagaguaugacuuu

SEQ ID NO: 866403 - RNA, 18 nt, Human
ucauagaagugaaucaga

SEQ ID NO: 866404 - RNA, 22 nt, Human
cccaggagaccugugaaaggac

SEQ ID NO: 866405 - RNA, 22 nt, Human
aucagaauaauuagauuucaga

SEQ ID NO: 866406 - RNA, 22 nt, Human
aggcaagcugcagagaguccuu

SEQ ID NO: 866407 - RNA, 22 nt, Human
uuucaguguaucuuccaaaagc

SEQ ID NO: 866408 - RNA, 22 nt, Human
ucauuauuuuggacuggagugu

SEQ ID NO: 866409 - RNA, 22 nt, Human
agaggcggagguugcagugagc

SEQ ID NO: 866410 - RNA, 22 nt, Human
ucaggaugaccacgagccucua

SEQ ID NO: 866411 - RNA, 22 nt, Human
aauuucaaacuaauaggaacca

SEQ ID NO: 866412 - RNA, 22 nt, Human
auguagagcaguguuguccaau

SEQ ID NO: 866413 - RNA, 22 nt, Human
uguacaauggcuauaauacccu

SEQ ID NO: 866414 - RNA, 22 nt, Human
aagacuuucaaguaugcaugca

SEQ ID NO: 866415 - RNA, 20 nt, Human
auucuacaagaauaagcaug

SEQ ID NO: 866416 - RNA, 22 nt, Human
uuaacaugucuugacuucaucu

SEQ ID NO: 866417 - RNA, 22 nt, Human
uuuaaauuuguguuuagagggu

SEQ ID NO: 866418 - RNA, 22 nt, Human
agcccaggcagagggaugcuug

SEQ ID NO: 866419 - RNA, 22 nt, Human
ucuuccucuagaucugaggccc

SEQ ID NO: 866420 - RNA, 22 nt, Human
gccaggagacuccauucauuug

SEQ ID NO: 866421 - RNA, 22 nt, Human
aucuuucuauuucuaaaaacua

SEQ ID NO: 866422 - RNA, 22 nt, Human
caaggccauaagagauacaaaa

SEQ ID NO: 866423 - RNA, 22 nt, Human
aaagaaucuauauaucaccacc

SEQ ID NO: 866424 - RNA, 22 nt, Human
cagaggcaggauaagaacugcg

SEQ ID NO: 866425 - RNA, 22 nt, Human
cugaacuuauugagugcuugcu

SEQ ID NO: 866426 - RNA, 22 nt, Human
ugcuggguagaaguauuagucu

SEQ ID NO: 866427 - RNA, 22 nt, Human
agcucccagagcucgagaguaa

SEQ ID NO: 866428 - RNA, 22 nt, Human
gggagggguugcauguuugagu

SEQ ID NO: 866429 - RNA, 22 nt, Human
aagcaauagcaacaacuuuaca

SEQ ID NO: 866430 - RNA, 22 nt, Human
uagauauaucugucauacuggu

SEQ ID NO: 866431 - RNA, 21 nt, Human
caauuucaugggaagauggga

SEQ ID NO: 866432 - RNA, 22 nt, Human
ugaggcagugauguuuaagcac

SEQ ID NO: 866433 - RNA, 22 nt, Human
cuucugcaauaaguuuuggucc

SEQ ID NO: 866434 - RNA, 22 nt, Human
uaggcagcuuagguuagaagug

SEQ ID NO: 866435 - RNA, 22 nt, Human
gaggcagugucgguggcaggau

SEQ ID NO: 866436 - RNA, 22 nt, Human
ccauggcucuagagauugaaaa

SEQ ID NO: 866437 - RNA, 22 nt, Human
uccaggaggacugagggggcug

SEQ ID NO: 866438 - RNA, 22 nt, Human
uugcugaagugaagguauguuu

SEQ ID NO: 866439 - RNA, 22 nt, Human
uacuuucuguccuucuguuaaa

SEQ ID NO: 866440 - RNA, 20 nt, Human
auccaugagagucuggauuc

SEQ ID NO: 866441 - RNA, 19 nt, Human
uguguguuuauauauguau

SEQ ID NO: 866442 - RNA, 22 nt, Human
gauagaaagagugguucuuuuu

SEQ ID NO: 866443 - RNA, 22 nt, Human
aucagaaauugcccagcuguuu

SEQ ID NO: 866444 - RNA, 21 nt, Human
aggcagcucaggcccagagag

SEQ ID NO: 866445 - RNA, 22 nt, Human
uauuugcaacauaaaacucuga

SEQ ID NO: 866446 - RNA, 22 nt, Human
ggcagcuggggcagugcccugu

SEQ ID NO: 866447 - RNA, 22 nt, Human
gagggagggaaaguuuaacacu

SEQ ID NO: 866448 - RNA, 22 nt, Human
guuuaaucagaggaauuauaga

SEQ ID NO: 866449 - RNA, 22 nt, Human
aucugccuggcuccaggugagc

SEQ ID NO: 866450 - RNA, 22 nt, Human
ucaccgccuugcccggccgggc

SEQ ID NO: 866451 - RNA, 22 nt, Human
auuaggcagacaacguagccgg

SEQ ID NO: 866452 - RNA, 22 nt, Human
aucaggauagugguuaccuggg

SEQ ID NO: 866453 - RNA, 22 nt, Human
gcagggaagacccggagcagcg

SEQ ID NO: 866454 - RNA, 22 nt, Human
ggcauuuaucuaauauaguuua

SEQ ID NO: 866455 - RNA, 22 nt, Human
uugguacaaaaguaacuguggu

SEQ ID NO: 866456 - RNA, 22 nt, Human
cgaggcagggaagcugcaaaag

SEQ ID NO: 866457 - RNA, 23 nt, Human
aggcgagcucuucuccagcacgu

SEQ ID NO: 866458 - RNA, 22 nt, Human
auuuucaaaacaucugcugugu

SEQ ID NO: 866459 - RNA, 22 nt, Human
ugaaaugauaucugauaacaaa

SEQ ID NO: 866460 - RNA, 22 nt, Human
gcccaggagguggaggugcagu

SEQ ID NO: 866461 - RNA, 22 nt, Human
guccaaauuuuucacauguaga

SEQ ID NO: 866462 - RNA, 22 nt, Human
gaggggcagagguagagaacaa

SEQ ID NO: 866463 - RNA, 22 nt, Human
uauggcuuuuuauucaucuuac

SEQ ID NO: 866464 - RNA, 22 nt, Human
aguccuuacaccuggaaccuau

SEQ ID NO: 866465 - RNA, 22 nt, Human
acaugcauaggagaagucuuua

SEQ ID NO: 866466 - RNA, 22 nt, Human
cagaugaggcaaccucauugcu

SEQ ID NO: 866467 - RNA, 22 nt, Human
acagcauucaauaaauaauaac

SEQ ID NO: 866468 - RNA, 22 nt, Human
cuugaacucaaugugaggaaga

SEQ ID NO: 866469 - RNA, 22 nt, Human
aguaaaauuguauuggaaaaca

SEQ ID NO: 866470 - RNA, 22 nt, Human
uuccaagaguaaauucaaauug

SEQ ID NO: 866471 - RNA, 22 nt, Human
uuuaaagagaaugugaaggagu

SEQ ID NO: 866472 - RNA, 22 nt, Human
ccugcugugaccggggagcagg

SEQ ID NO: 866473 - RNA, 22 nt, Human
gagugcagaugaacagaagauu

SEQ ID NO: 866474 - RNA, 22 nt, Human
uucuucaaugugcccuguuuuc

SEQ ID NO: 866475 - RNA, 23 nt, Human
uccaggagaauuccagggcccgg

SEQ ID NO: 866476 - RNA, 22 nt, Human
uugaauaauuaauuacacucag

SEQ ID NO: 866477 - RNA, 22 nt, Human
ugaacucucucaagugacagaa

SEQ ID NO: 866478 - RNA, 22 nt, Human
acucagaaccauuuacucugag

SEQ ID NO: 866479 - RNA, 22 nt, Human
caauuucacugacacccuggaa

SEQ ID NO: 866480 - RNA, 22 nt, Human
gugguaauuuaauccuacacug

SEQ ID NO: 866481 - RNA, 22 nt, Human
uucuucaaacaaaaguggcaug

SEQ ID NO: 866482 - RNA, 22 nt, Human
gugaauaaccuacuccaggccu

SEQ ID NO: 866483 - RNA, 22 nt, Human
uaucaauacauguuaucagugu

SEQ ID NO: 866484 - RNA, 22 nt, Human
cugagcugggaguagagacucu

SEQ ID NO: 866485 - RNA, 22 nt, Human
uuuacagaugaggaaacugaga

SEQ ID NO: 866486 - RNA, 22 nt, Human
agcgagggaggucugaggacag

SEQ ID NO: 866487 - RNA, 22 nt, Human
guuccaaauuuggaucuuuagg

SEQ ID NO: 866488 - RNA, 22 nt, Human
gcuucccacagcuggacugggg

SEQ ID NO: 866489 - RNA, 22 nt, Human
ugagacaaccuaauuaaacacc

SEQ ID NO: 866490 - RNA, 22 nt, Human
acagaauugauggaaaucucag

SEQ ID NO: 866491 - RNA, 22 nt, Human
auccaaaccuggacaugagugg

SEQ ID NO: 866492 - RNA, 22 nt, Human
uggcauuucuguuagacucuca

SEQ ID NO: 866493 - RNA, 22 nt, Human
auuaaauuggacgcugggggaa

SEQ ID NO: 866494 - RNA, 22 nt, Human
ucucacugcaaauauuauguau

SEQ ID NO: 866495 - RNA, 22 nt, Human
auuuggcaacauuaauugaauc

SEQ ID NO: 866496 - RNA, 22 nt, Human
auaaaaguucaagagaguacag

SEQ ID NO: 866497 - RNA, 21 nt, Human
auccuuagcacuuagaagagu

SEQ ID NO: 866498 - RNA, 22 nt, Human
caggacagcucaacaccuccuc

SEQ ID NO: 866499 - RNA, 22 nt, Human
ccuccucugggaagauucagag

SEQ ID NO: 866500 - RNA, 22 nt, Human
auauacaggugguauguguaaa

SEQ ID NO: 866501 - RNA, 22 nt, Human
uuaaaaucuaaagcaguugucu

SEQ ID NO: 866502 - RNA, 22 nt, Human
aacaugucuggguauucacaag

SEQ ID NO: 866503 - RNA, 22 nt, Human
acagauguacacucauauauaa

SEQ ID NO: 866504 - RNA, 22 nt, Human
cccaggaaugagcaggcagggg

SEQ ID NO: 866505 - RNA, 22 nt, Human
ucuuugaauuucugacugucuu

SEQ ID NO: 866506 - RNA, 22 nt, Human
ggcagacuguaauaggagaauu

SEQ ID NO: 866507 - RNA, 22 nt, Human
aguggacucuucccagugcuug

SEQ ID NO: 866508 - RNA, 22 nt, Human
augaaggcaguuaaacgucauc

SEQ ID NO: 866509 - RNA, 22 nt, Human
gaggccaggagugcuguaaguu

SEQ ID NO: 866510 - RNA, 22 nt, Human
uaaauaugcauguauccuuauc

SEQ ID NO: 866511 - RNA, 22 nt, Human
uuugaaaguccuaggagagucc

SEQ ID NO: 866512 - RNA, 22 nt, Human
ucuuugaaagcuguucuagagu

SEQ ID NO: 866513 - RNA, 20 nt, Human
caucaucacaugagccaauu

SEQ ID NO: 866514 - RNA, 22 nt, Human
uguccucagauaugucuacucu

SEQ ID NO: 866515 - RNA, 21 nt, Human
acuuuaauauacaugaggagg

SEQ ID NO: 866516 - RNA, 22 nt, Human
agagggauaauauguauuguaa

SEQ ID NO: 866517 - RNA, 22 nt, Human
aggaagcuggugugaggaugaa

SEQ ID NO: 866518 - RNA, 22 nt, Human
cuuaaagaugucaaggcuguuu

SEQ ID NO: 866519 - RNA, 22 nt, Human
uucaccacagucucaucuacgc

SEQ ID NO: 866520 - RNA, 22 nt, Human
ccuggaucagagccagagaagc

SEQ ID NO: 866521 - RNA, 22 nt, Human
caagauuugccaguggccaacu

SEQ ID NO: 866522 - RNA, 22 nt, Human
acuguugucaggcugcuuugga

SEQ ID NO: 866523 - RNA, 22 nt, Human
caguccuuucugaaauccuaua

SEQ ID NO: 866524 - RNA, 22 nt, Human
cauaauauacuacauugaugaa

SEQ ID NO: 866525 - RNA, 22 nt, Human
uguggaaaauuggaacguuccu

SEQ ID NO: 866526 - RNA, 22 nt, Human
uugcagcuucuaccacuguuuc

SEQ ID NO: 866527 - RNA, 22 nt, Human
aaggcagccaugugcuuugggu

SEQ ID NO: 866528 - RNA, 22 nt, Human
uucagaaugugaccuuauuugg

SEQ ID NO: 866529 - RNA, 22 nt, Human
uauacagauuaacagauuuaaa

SEQ ID NO: 866530 - RNA, 22 nt, Human
ugccuggaaggcccaugggaag

SEQ ID NO: 866531 - RNA, 19 nt, Human
gcagcugcuugaaaagaaa

SEQ ID NO: 866532 - RNA, 22 nt, Human
aaauugaaugauuaagugguga

SEQ ID NO: 866533 - RNA, 22 nt, Human
uugguacagaugagguauucuc

SEQ ID NO: 866534 - RNA, 22 nt, Human
auuuccagacuuuuuccaggaa

SEQ ID NO: 866535 - RNA, 22 nt, Human
auacuuucugaccaauuaauug

SEQ ID NO: 866536 - RNA, 22 nt, Human
cccaguuucaacuuuccagugg

SEQ ID NO: 866537 - RNA, 22 nt, Human
uucuucucagggucccacaugg

SEQ ID NO: 866538 - RNA, 22 nt, Human
aauuaauggaaaguaaggaagg

SEQ ID NO: 866539 - RNA, 17 nt, Human
uaaagccagucaaguca

SEQ ID NO: 866540 - RNA, 22 nt, Human
uccaggagguugagugaguucc

SEQ ID NO: 866541 - RNA, 22 nt, Human
gccagucugcucccacaaguuc

SEQ ID NO: 866542 - RNA, 22 nt, Human
uauuucagcacaugggauaggu

SEQ ID NO: 866543 - RNA, 22 nt, Human
uacugcaugguggaguggagcu

SEQ ID NO: 866544 - RNA, 22 nt, Human
agugcuuuagagaaauggugcu

SEQ ID NO: 866545 - RNA, 22 nt, Human
caaguccaggucaauuuaaagc

SEQ ID NO: 866546 - RNA, 22 nt, Human
cagagggcucuuggcugccugc

SEQ ID NO: 866547 - RNA, 22 nt, Human
caguccuugcucaaagucuaca

SEQ ID NO: 866548 - RNA, 22 nt, Human
ucaaauaaugccauucaucauc

SEQ ID NO: 866549 - RNA, 22 nt, Human
cuagggaguggcagagcuggga

SEQ ID NO: 866550 - RNA, 22 nt, Human
ccaggagagcaggcgugcagcu

SEQ ID NO: 866551 - RNA, 22 nt, Human
ucuuccaagguugcacacuauc

SEQ ID NO: 866552 - RNA, 22 nt, Human
gagauuuagcugcuuaacuccu

SEQ ID NO: 866553 - RNA, 22 nt, Human
gaaugaaaaccuuggcucaaau

SEQ ID NO: 866554 - RNA, 22 nt, Human
ugcuuaauguacgugaguguac

SEQ ID NO: 866555 - RNA, 22 nt, Human
aggagggagaugcccauccugg

SEQ ID NO: 866556 - RNA, 22 nt, Human
agcauaaaggcacuagaaagag

SEQ ID NO: 866557 - RNA, 22 nt, Human
gaaucucaaggcuugugaggau

SEQ ID NO: 866558 - RNA, 22 nt, Human
ucuaaagaagaggguucugcgg

SEQ ID NO: 866559 - RNA, 22 nt, Human
auguggaggaaaugaguguaca

SEQ ID NO: 866560 - RNA, 20 nt, Human
aggaagcugagauguagagg

SEQ ID NO: 866561 - RNA, 22 nt, Human
caguuucuuggaugccaauuuc

SEQ ID NO: 866562 - RNA, 22 nt, Human
uucuugcaggucacucacugag

SEQ ID NO: 866563 - RNA, 17 nt, Human
ugauaguucauuuuaag

SEQ ID NO: 866564 - RNA, 22 nt, Human
uaggcaacaugucgaauacugu

SEQ ID NO: 866565 - RNA, 22 nt, Human
gcauguguggaggagaugugcu

SEQ ID NO: 866566 - RNA, 22 nt, Human
aaaggugacacucugccagcug

SEQ ID NO: 866567 - RNA, 22 nt, Human
gugcagcugugguggagccagg

SEQ ID NO: 866568 - RNA, 22 nt, Human
agaccaugggcucugaagagca

SEQ ID NO: 866569 - RNA, 21 nt, Human
aaagaaucauggguaauuuca

SEQ ID NO: 866570 - RNA, 22 nt, Human
gucccauaaguagugcaacuug

SEQ ID NO: 866571 - RNA, 22 nt, Human
ucuggcuuucauuuguuuaaag

SEQ ID NO: 866572 - RNA, 22 nt, Human
gaggaaccacucugagaagcca

SEQ ID NO: 866573 - RNA, 22 nt, Human
aggcagacaaggucccuggucu

SEQ ID NO: 866574 - RNA, 22 nt, Human
gagcaccucaauuugcuauuug

SEQ ID NO: 866575 - RNA, 18 nt, Human
uaggagagaauuuauuua

SEQ ID NO: 866576 - RNA, 21 nt, Human
gaguccuuccaauguccucag

SEQ ID NO: 866577 - RNA, 22 nt, Human
gauggcaggugauagccgaguc

SEQ ID NO: 866578 - RNA, 22 nt, Human
ucacugcucuccaauguggagu

SEQ ID NO: 866579 - RNA, 22 nt, Human
auuaugcugguuuacacauuuu

SEQ ID NO: 866580 - RNA, 22 nt, Human
uucuucuuucccccugugguac

SEQ ID NO: 866581 - RNA, 22 nt, Human
aggagaaggaagugcaucacua

SEQ ID NO: 866582 - RNA, 22 nt, Human
uuugaauaucacaaacuuucaa

SEQ ID NO: 866583 - RNA, 22 nt, Human
aaucaguguguaaaguggcugc

SEQ ID NO: 866584 - RNA, 22 nt, Human
ucuucagauaaagggagaguau

SEQ ID NO: 866585 - RNA, 22 nt, Human
gaaagccauagcccagcuuuac

SEQ ID NO: 866586 - RNA, 22 nt, Human
gcccaggagguugggcugugca

SEQ ID NO: 866587 - RNA, 22 nt, Human
acccaggagacagguugcagug

SEQ ID NO: 866588 - RNA, 22 nt, Human
uuugcauaagucauguccagug

SEQ ID NO: 866589 - RNA, 22 nt, Human
agacgagggcccccaggacagc

SEQ ID NO: 866590 - RNA, 22 nt, Human
agggcagccauugagggauucu

SEQ ID NO: 866591 - RNA, 22 nt, Human
cugcaucacagcaggaggcaca

SEQ ID NO: 866592 - RNA, 22 nt, Human
ucauucuugaucacuaguuagu

SEQ ID NO: 866593 - RNA, 22 nt, Human
ccaaaauuaagccucuuauguu

SEQ ID NO: 866594 - RNA, 22 nt, Human
ucugggaaccagugcggcuggg

SEQ ID NO: 866595 - RNA, 22 nt, Human
uucagaaacccauugggucucu

SEQ ID NO: 866596 - RNA, 22 nt, Human
uuucuaggcacagugucuuccc

SEQ ID NO: 866597 - RNA, 22 nt, Human
ccaggaguggcuggugaccuuc

SEQ ID NO: 866598 - RNA, 18 nt, Human
ggcaucugcacagcagcc

SEQ ID NO: 866599 - RNA, 22 nt, Human
caaagccaggcuuucuaaugua

SEQ ID NO: 866600 - RNA, 22 nt, Human
uucaauucuaaacuaauauucu

SEQ ID NO: 866601 - RNA, 22 nt, Human
aaaugucagaggaacauauuga

SEQ ID NO: 866602 - RNA, 22 nt, Human
uguuuuaaagccauugccuuuc

SEQ ID NO: 866603 - RNA, 22 nt, Human
ucaauaaaauuguuuuccuauc

SEQ ID NO: 866604 - RNA, 22 nt, Human
agagggaucacccuguuucugg

SEQ ID NO: 866605 - RNA, 22 nt, Human
cccaggagccaucugucuuggc

SEQ ID NO: 866606 - RNA, 22 nt, Human
auaaaacuuggguaugaucccu

SEQ ID NO: 866607 - RNA, 22 nt, Human
gaggcaacacauuuggaaagca

SEQ ID NO: 866608 - RNA, 22 nt, Human
aauuauauuguggugugaaugu

SEQ ID NO: 866609 - RNA, 22 nt, Human
cauuuguaauacugacuugcag

SEQ ID NO: 866610 - RNA, 22 nt, Human
uuugaauagcauaggauuacau

SEQ ID NO: 866611 - RNA, 22 nt, Human
acagucuugcuguauggucagg

SEQ ID NO: 866612 - RNA, 22 nt, Human
gcuggaucauauggugguucua

SEQ ID NO: 866613 - RNA, 22 nt, Human
cuugaaagauuuggccucugug

SEQ ID NO: 866614 - RNA, 22 nt, Human
acaugucuguaauuauuuuagg

SEQ ID NO: 866615 - RNA, 22 nt, Human
cucaggaucgcuugcccuaggg

SEQ ID NO: 866616 - RNA, 21 nt, Human
uccaggaguucuaauaggugu

SEQ ID NO: 866617 - RNA, 22 nt, Human
gcccaguaguucaagguugcag

SEQ ID NO: 866618 - RNA, 22 nt, Human
uuucauugcagagucugugugc

SEQ ID NO: 866619 - RNA, 22 nt, Human
guaaacauuacugugcuguaua

SEQ ID NO: 866620 - RNA, 23 nt, Human
uauuacaauuggucuuauuaaga

SEQ ID NO: 866621 - RNA, 22 nt, Human
auuccaaagguuaaugcccauu

SEQ ID NO: 866622 - RNA, 22 nt, Human
uccaggagaggccugaccaggu

SEQ ID NO: 866623 - RNA, 22 nt, Human
ccaggagagcauugcacagagg

SEQ ID NO: 866624 - RNA, 22 nt, Human
cuacagaaaccuuuuucauaca

SEQ ID NO: 866625 - RNA, 22 nt, Human
cuaugacacaggccauuauaua

SEQ ID NO: 866626 - RNA, 19 nt, Human
aucugccuguuaucacaua

SEQ ID NO: 866627 - RNA, 22 nt, Human
gaagcagcuuucuggugaggag

SEQ ID NO: 866628 - RNA, 22 nt, Human
cucaggaaaggccaugcaaggg

SEQ ID NO: 866629 - RNA, 22 nt, Human
cuauagaaaauuguaucacacg

SEQ ID NO: 866630 - RNA, 22 nt, Human
aagaaacaaccacugcucuccu

SEQ ID NO: 866631 - RNA, 19 nt, Human
uucauucucuuauuguugu

SEQ ID NO: 866632 - RNA, 22 nt, Human
uuauuauagauuaugcaagauu

SEQ ID NO: 866633 - RNA, 22 nt, Human
ucagagaguuagugucuuagcu

SEQ ID NO: 866634 - RNA, 21 nt, Human
auugaaagucaacaaucaguu

SEQ ID NO: 866635 - RNA, 22 nt, Human
uccaaauacauuuacuguauuu

SEQ ID NO: 866636 - RNA, 22 nt, Human
gauggcagcagcagccagggau

SEQ ID NO: 866637 - RNA, 22 nt, Human
cuuaaaaucuggcaguuagcua

SEQ ID NO: 866638 - RNA, 22 nt, Human
gggauggggagcuggaaagggg

SEQ ID NO: 866639 - RNA, 22 nt, Human
guacauaaaggaggcucuuugc

SEQ ID NO: 866640 - RNA, 19 nt, Human
uaaggccaaaaguaagugu

SEQ ID NO: 866641 - RNA, 22 nt, Human
aaagaaucacauccuucagcaa

SEQ ID NO: 866642 - RNA, 22 nt, Human
cccaggaaugggaaggaggaau

SEQ ID NO: 866643 - RNA, 22 nt, Human
acaguacauaauccugagucug

SEQ ID NO: 866644 - RNA, 22 nt, Human
uuucaacuagccccuaaguccu

SEQ ID NO: 866645 - RNA, 22 nt, Human
aggcuucuucuuccuauuuagu

SEQ ID NO: 866646 - RNA, 22 nt, Human
ucuuuaaucauaaccaagaugg

SEQ ID NO: 866647 - RNA, 22 nt, Human
gauagaaagguguugaaaucca

SEQ ID NO: 866648 - RNA, 20 nt, Human
cuguggaauuuuaccaugcg

SEQ ID NO: 866649 - RNA, 22 nt, Human
uuuccaagacuccaguucuccc

SEQ ID NO: 866650 - RNA, 20 nt, Human
augauuuugcacuaacuuca

SEQ ID NO: 866651 - RNA, 22 nt, Human
guaguucugcagugucaccuga

SEQ ID NO: 866652 - RNA, 22 nt, Human
gcagcugcuggagggaggcagg

SEQ ID NO: 866653 - RNA, 22 nt, Human
uuccaaacugccaauucagaag

SEQ ID NO: 866654 - RNA, 22 nt, Human
uucucagagcucacuguaguaa

SEQ ID NO: 866655 - RNA, 22 nt, Human
guggcagcaaaugccuggacua

SEQ ID NO: 866656 - RNA, 22 nt, Human
gcuaugcaggagccuaaugaca

SEQ ID NO: 866657 - RNA, 22 nt, Human
uucuacaauaugaauaaugaag

SEQ ID NO: 866658 - RNA, 22 nt, Human
aaauaauguuaggccuuugcuc

SEQ ID NO: 866659 - RNA, 22 nt, Human
guacauuucucuuguucuuauu

SEQ ID NO: 866660 - RNA, 22 nt, Human
uuccaugaagggcagccucuca

SEQ ID NO: 866661 - RNA, 22 nt, Human
uucaaauacauucuuugccacu

SEQ ID NO: 866662 - RNA, 21 nt, Human
aucauucuggaaaauucaagc

SEQ ID NO: 866663 - RNA, 22 nt, Human
cuggaucaugggaaagggauca

SEQ ID NO: 866664 - RNA, 22 nt, Human
cagauccacccuuguagugaca

SEQ ID NO: 866665 - RNA, 22 nt, Human
aucuuucagggccauuuguauu

SEQ ID NO: 866666 - RNA, 22 nt, Human
gaaaggccagcucacagaugag

SEQ ID NO: 866667 - RNA, 22 nt, Human
caaauucaaauuucaucagugu

SEQ ID NO: 866668 - RNA, 22 nt, Human
agcagcauuaugauauaucuua

SEQ ID NO: 866669 - RNA, 22 nt, Human
uugaacauuggcaauuucauau

SEQ ID NO: 866670 - RNA, 22 nt, Human
gagcagcucgagaaggaagcag

SEQ ID NO: 866671 - RNA, 22 nt, Human
gggauuuaguaggauaguauac

SEQ ID NO: 866672 - RNA, 22 nt, Human
gagcagcucugugccuggagac

SEQ ID NO: 866673 - RNA, 18 nt, Human
agggagagaccgcggguc

SEQ ID NO: 866674 - RNA, 22 nt, Human
ggagaggaaaugccagcacuuc

SEQ ID NO: 866675 - RNA, 22 nt, Human
uaagacuucauuaguaauaugg

SEQ ID NO: 866676 - RNA, 22 nt, Human
auucuucaucacuaccuuguga

SEQ ID NO: 866677 - RNA, 22 nt, Human
gcagaggccaggccaccagcaa

SEQ ID NO: 866678 - RNA, 22 nt, Human
auuccaaacgccucgcggacuu

SEQ ID NO: 866679 - RNA, 22 nt, Human
agagggcaaguguaguccagua

SEQ ID NO: 866680 - RNA, 22 nt, Human
gcagaggggaagcugaggaauu

SEQ ID NO: 866681 - RNA, 22 nt, Human
uuuccauguuggugaaaugagg

SEQ ID NO: 866682 - RNA, 22 nt, Human
gaaggccacaaaaaaugucaua

SEQ ID NO: 866683 - RNA, 22 nt, Human
ggguggaguagaaagaugaauu

SEQ ID NO: 866684 - RNA, 22 nt, Human
cugcgcagggguggcgccagaa

SEQ ID NO: 866685 - RNA, 22 nt, Human
aaaucucaguguucuaagcauu

SEQ ID NO: 866686 - RNA, 22 nt, Human
gauuuucauuugcacucuagaa

SEQ ID NO: 866687 - RNA, 22 nt, Human
aaagcagagcagggcacuuaug

SEQ ID NO: 866688 - RNA, 22 nt, Human
uuaauaaaguaugaauuggaaa

SEQ ID NO: 866689 - RNA, 22 nt, Human
caggcagcucuaauggaaagug

SEQ ID NO: 866690 - RNA, 22 nt, Human
uguaagaaucagucuuuaaugu

SEQ ID NO: 866691 - RNA, 22 nt, Human
gcugaaugaauguauuuuaaaa

SEQ ID NO: 866692 - RNA, 22 nt, Human
acauucacgcucucaaagcuga

SEQ ID NO: 866693 - RNA, 22 nt, Human
guucuucaucauuuuagauagg

SEQ ID NO: 866694 - RNA, 22 nt, Human
ucaaguuuaauugagauguuua

SEQ ID NO: 866695 - RNA, 22 nt, Human
gccaggagcccugggcaaguuc

SEQ ID NO: 866696 - RNA, 22 nt, Human
uagucaccucuuuaaauguccu

SEQ ID NO: 866697 - RNA, 22 nt, Human
aggagcagaacugauucugacu

SEQ ID NO: 866698 - RNA, 22 nt, Human
uauacagucuuuugcuauauuc

SEQ ID NO: 866699 - RNA, 22 nt, Human
uucuucuuuaucucaguauccu

SEQ ID NO: 866700 - RNA, 19 nt, Human
ucugccucuggucaggcuc

SEQ ID NO: 866701 - RNA, 22 nt, Human
ucauaaaaauagacucuaaagu

SEQ ID NO: 866702 - RNA, 22 nt, Human
cucccagagagcaggugggccg

SEQ ID NO: 866703 - RNA, 22 nt, Human
caugauaauuguuaacaaagua

SEQ ID NO: 866704 - RNA, 22 nt, Human
gaggccaaguuggagaccaggu

SEQ ID NO: 866705 - RNA, 22 nt, Human
uccuuagagacaagaccaguuu

SEQ ID NO: 866706 - RNA, 22 nt, Human
cagaucuagagcuuuuccaucu

SEQ ID NO: 866707 - RNA, 22 nt, Human
augggaggaugcucgggugcuc

SEQ ID NO: 866708 - RNA, 22 nt, Human
cuggcagucugccucuucacug

SEQ ID NO: 866709 - RNA, 22 nt, Human
cccaugagguggagguugcagu

SEQ ID NO: 866710 - RNA, 22 nt, Human
aggcaggcaaccaccugggaag

SEQ ID NO: 866711 - RNA, 22 nt, Human
caauuucagaccuuuccuugga

SEQ ID NO: 866712 - RNA, 22 nt, Human
ugaaggcccuaucuccauauac

SEQ ID NO: 866713 - RNA, 22 nt, Human
augugucuuugagacucugcua

SEQ ID NO: 866714 - RNA, 20 nt, Human
uuucaguuaucuugaccuuc

SEQ ID NO: 866715 - RNA, 22 nt, Human
ugauuuuuagcuauucugaaga

SEQ ID NO: 866716 - RNA, 22 nt, Human
auuucccagcuuugaucaguuu

SEQ ID NO: 866717 - RNA, 22 nt, Human
auguuuccauuuucuuguauca

SEQ ID NO: 866718 - RNA, 22 nt, Human
ugaaaugacagucuuaagcucu

SEQ ID NO: 866719 - RNA, 22 nt, Human
ccauccuaucugaccuacuugu

SEQ ID NO: 866720 - RNA, 22 nt, Human
acucagaagauauaaugacuca

SEQ ID NO: 866721 - RNA, 22 nt, Human
aaucagaaauugagggucuggu

SEQ ID NO: 866722 - RNA, 17 nt, Human
ccuguguuugcuccuuc

SEQ ID NO: 866723 - RNA, 22 nt, Human
uauauacuuucuuccuggguag

SEQ ID NO: 866724 - RNA, 22 nt, Human
uuagccauuuuauacaagugua

SEQ ID NO: 866725 - RNA, 22 nt, Human
uaaggccaaggggccauagucu

SEQ ID NO: 866726 - RNA, 22 nt, Human
auggcuuuuuagacuuugguac

SEQ ID NO: 866727 - RNA, 22 nt, Human
ugcauaauacguuuccuauaac

SEQ ID NO: 866728 - RNA, 22 nt, Human
ucuauacacacaaagaaugcuu

SEQ ID NO: 866729 - RNA, 23 nt, Human
uggaauaauaagguacauuaaca

SEQ ID NO: 866730 - RNA, 22 nt, Human
aaucagaaagaggucauguugc

SEQ ID NO: 866731 - RNA, 22 nt, Human
uucuucuucaagugcugcauuc

SEQ ID NO: 866732 - RNA, 22 nt, Human
agaggggaaguaaugaaugaua

SEQ ID NO: 866733 - RNA, 22 nt, Human
uuguaaauaguaguaagaugcc

SEQ ID NO: 866734 - RNA, 22 nt, Human
cagcuggccccacaguagaggc

SEQ ID NO: 866735 - RNA, 19 nt, Human
agcuuccauauucucuagu

SEQ ID NO: 866736 - RNA, 22 nt, Human
ggugaagggugucauggcauuu

SEQ ID NO: 866737 - RNA, 23 nt, Human
aguaaagcaauuguuggcgagag

SEQ ID NO: 866738 - RNA, 20 nt, Human
accaggagauggaggcaggg

SEQ ID NO: 866739 - RNA, 22 nt, Human
cagaggaugaucuggccucucu

SEQ ID NO: 866740 - RNA, 22 nt, Human
agaaaugaaaccaaagccuaga

SEQ ID NO: 866741 - RNA, 22 nt, Human
uuucacagcuggguggcagagu

SEQ ID NO: 866742 - RNA, 22 nt, Human
uugaagagugccuuccagacau

SEQ ID NO: 866743 - RNA, 22 nt, Human
cuugaaagucagcagaguggau

SEQ ID NO: 866744 - RNA, 22 nt, Human
cacaugaguccugccagguaug

SEQ ID NO: 866745 - RNA, 22 nt, Human
ugcuuauuuauagucaauagag

SEQ ID NO: 866746 - RNA, 22 nt, Human
uaaggccaggcuguggucggca

SEQ ID NO: 866747 - RNA, 22 nt, Human
auggaguucuuuaaauucacag

SEQ ID NO: 866748 - RNA, 22 nt, Human
caaauguaaauucuuuugaagc

SEQ ID NO: 866749 - RNA, 22 nt, Human
ucuucccuaaucaccaucuuca

SEQ ID NO: 866750 - RNA, 22 nt, Human
uguagggaggaaggguuggaaa

SEQ ID NO: 866751 - RNA, 22 nt, Human
aaguccuuuaauaucacauagu

SEQ ID NO: 866752 - RNA, 22 nt, Human
ucagccaguugccccaguuagu

SEQ ID NO: 866753 - RNA, 22 nt, Human
aucaggaugaagcuguagcgaa

SEQ ID NO: 866754 - RNA, 22 nt, Human
auuuaaaugcuuaagaggguuu

SEQ ID NO: 866755 - RNA, 22 nt, Human
ugaauaauccacagucauucau

SEQ ID NO: 866756 - RNA, 22 nt, Human
aucugccucuucuucauugcga

SEQ ID NO: 866757 - RNA, 22 nt, Human
cagauaaaggcuuacuaguagu

SEQ ID NO: 866758 - RNA, 22 nt, Human
gucaggaucaaauugaaguuau

SEQ ID NO: 866759 - RNA, 22 nt, Human
uaaauuauggcuggcagagcag

SEQ ID NO: 866760 - RNA, 22 nt, Human
agaaucugguagaaccaaggau

SEQ ID NO: 866761 - RNA, 22 nt, Human
caaacauucaaguacaagucuu

SEQ ID NO: 866762 - RNA, 22 nt, Human
uuucaugaggggcaaaaucuca

SEQ ID NO: 866763 - RNA, 22 nt, Human
ugcauaaagugccauaguauua

SEQ ID NO: 866764 - RNA, 22 nt, Human
uuugaagacauauuguuacaua

SEQ ID NO: 866765 - RNA, 22 nt, Human
gaaggccaagaggcuccaagau

SEQ ID NO: 866766 - RNA, 22 nt, Human
caaguccuaggucugauugaac

SEQ ID NO: 866767 - RNA, 23 nt, Human
uaugaacugcauugcuggugugu

SEQ ID NO: 866768 - RNA, 22 nt, Human
gaggcagcucuucugaaugggg

SEQ ID NO: 866769 - RNA, 22 nt, Human
cagagcucuauguucauggagg

SEQ ID NO: 866770 - RNA, 22 nt, Human
ugcacauuaguguuugagaugc

SEQ ID NO: 866771 - RNA, 22 nt, Human
ucuggaucgccggcgccugggc

SEQ ID NO: 866772 - RNA, 22 nt, Human
ugugccagccucuggcuguguc

SEQ ID NO: 866773 - RNA, 22 nt, Human
aaaugauugucaaaguucuguu

SEQ ID NO: 866774 - RNA, 22 nt, Human
aaggcaguuugggccaccaucu

SEQ ID NO: 866775 - RNA, 22 nt, Human
augguuuuguccucuuugguuc

SEQ ID NO: 866776 - RNA, 22 nt, Human
uucugugauugacauguggcuu

SEQ ID NO: 866777 - RNA, 22 nt, Human
cucacugacgaggaagcugaga

SEQ ID NO: 866778 - RNA, 22 nt, Human
uacacacagaggccaugggauu

SEQ ID NO: 866779 - RNA, 22 nt, Human
gacccaggaagcuacuucuggu

SEQ ID NO: 866780 - RNA, 22 nt, Human
uugaagaaauuauuuuauauag

SEQ ID NO: 866781 - RNA, 22 nt, Human
caggguggcacaucacagcauu

SEQ ID NO: 866782 - RNA, 22 nt, Human
accaggagcauuuuuuauuagu

SEQ ID NO: 866783 - RNA, 22 nt, Human
ccccaggagcuuguuuuagaga

SEQ ID NO: 866784 - RNA, 22 nt, Human
uuccaugaaggagacugagaag

SEQ ID NO: 866785 - RNA, 22 nt, Human
uauuucagcccuacuacuuggc

SEQ ID NO: 866786 - RNA, 22 nt, Human
agaaaauauucauugagaggcu

SEQ ID NO: 866787 - RNA, 22 nt, Human
uacagaaguaaauaccaaaagc

SEQ ID NO: 866788 - RNA, 22 nt, Human
gccucugcccuccugggacugc

SEQ ID NO: 866789 - RNA, 18 nt, Human
gaugggagcaagagaaga

SEQ ID NO: 866790 - RNA, 22 nt, Human
gcgcaggagccgcggagggccg

SEQ ID NO: 866791 - RNA, 22 nt, Human
uagaaacagaaaacuguaauag

SEQ ID NO: 866792 - RNA, 22 nt, Human
agacucaagacugcagaagacg

SEQ ID NO: 866793 - RNA, 22 nt, Human
cucuucuugccugaugaggcag

SEQ ID NO: 866794 - RNA, 22 nt, Human
aggagagaauguuccaggcuug

SEQ ID NO: 866795 - RNA, 22 nt, Human
aggcagcugaggucuggcgccc

SEQ ID NO: 866796 - RNA, 22 nt, Human
uuguugguggaauugaugcuag

SEQ ID NO: 866797 - RNA, 22 nt, Human
uuuuaucuaccuaugcucauuu

SEQ ID NO: 866798 - RNA, 22 nt, Human
ucuuagaaguucauguuccagc

SEQ ID NO: 866799 - RNA, 22 nt, Human
uaaagccaauauaccuagcaua

SEQ ID NO: 866800 - RNA, 22 nt, Human
acacacucaauugcauaagcac

SEQ ID NO: 866801 - RNA, 22 nt, Human
ucaggauaaaauguaauggcaa

SEQ ID NO: 866802 - RNA, 22 nt, Human
ucuaaccuuugaaacugcuuuc

SEQ ID NO: 866803 - RNA, 22 nt, Human
ucuuuaauaucugccccagagc

SEQ ID NO: 866804 - RNA, 22 nt, Human
caagagagaugcagcucacuca

SEQ ID NO: 866805 - RNA, 22 nt, Human
ccucagaugucuuaaggcacug

SEQ ID NO: 866806 - RNA, 22 nt, Human
uucaccgugaaccgauuccuca

SEQ ID NO: 866807 - RNA, 23 nt, Human
cagaaaacccagagcucaguccc

SEQ ID NO: 866808 - RNA, 22 nt, Human
auggcuuaugaauaacaguagg

SEQ ID NO: 866809 - RNA, 22 nt, Human
ggcagcugucucugaguuagca

SEQ ID NO: 866810 - RNA, 22 nt, Human
aggucagcaggccaggggcgaa

SEQ ID NO: 866811 - RNA, 22 nt, Human
aucagaaaauacccaguguuua

SEQ ID NO: 866812 - RNA, 22 nt, Human
agauuuccuaugguaauuauag

SEQ ID NO: 866813 - RNA, 22 nt, Human
acauucuuaacaguuaaaaacu

SEQ ID NO: 866814 - RNA, 22 nt, Human
gucaggaugagggaugaggagu

SEQ ID NO: 866815 - RNA, 22 nt, Human
augcaaaauaaggcagaaacau

SEQ ID NO: 866816 - RNA, 22 nt, Human
gaggcagcaugguaccuuggag

SEQ ID NO: 866817 - RNA, 22 nt, Human
gacccaggcucgugggacggcu

SEQ ID NO: 866818 - RNA, 22 nt, Human
gauuuuaauuauaggagguccu

SEQ ID NO: 866819 - RNA, 22 nt, Human
guuaaagaagaauaguuccuuu

SEQ ID NO: 866820 - RNA, 22 nt, Human
ucucagaguuuagagcugagcc

SEQ ID NO: 866821 - RNA, 22 nt, Human
ugcuuuggccacuagaauucag

SEQ ID NO: 866822 - RNA, 22 nt, Human
ucuauacugaugggauacuauu

SEQ ID NO: 866823 - RNA, 22 nt, Human
auuaggcagugccauuguacgg

SEQ ID NO: 866824 - RNA, 22 nt, Human
cacagacccagaagggaugaag

SEQ ID NO: 866825 - RNA, 22 nt, Human
ucugaagaacugaguaaacaug

SEQ ID NO: 866826 - RNA, 22 nt, Human
uucagcaaauggacuguucagg

SEQ ID NO: 866827 - RNA, 22 nt, Human
gagggaggcaucaugaauccag

SEQ ID NO: 866828 - RNA, 23 nt, Human
cccaggaguuucacugcaaaggu

SEQ ID NO: 866829 - RNA, 22 nt, Human
uucuuaacucaaauauauaucc

SEQ ID NO: 866830 - RNA, 22 nt, Human
gaggcagcauucgcauagacag

SEQ ID NO: 866831 - RNA, 22 nt, Human
agaaaugaagagagucaagguu

SEQ ID NO: 866832 - RNA, 22 nt, Human
gaggagagccugcacuuugacc

SEQ ID NO: 866833 - RNA, 22 nt, Human
ccuauacaggcuucuuuacaug

SEQ ID NO: 866834 - RNA, 22 nt, Human
gaggagaggcuggacgcgguga

SEQ ID NO: 866835 - RNA, 22 nt, Human
acagaaguuggaauuagauacu

SEQ ID NO: 866836 - RNA, 22 nt, Human
aggcagcuuucagugucucuca

SEQ ID NO: 866837 - RNA, 22 nt, Human
caggcagcuagauuuauaacaa

SEQ ID NO: 866838 - RNA, 22 nt, Human
augaaggcuguguggagccccc

SEQ ID NO: 866839 - RNA, 22 nt, Human
uuccaaagugcuggaauuacau

SEQ ID NO: 866840 - RNA, 22 nt, Human
uuucuagggcucuugucuucug

SEQ ID NO: 866841 - RNA, 22 nt, Human
uacagauauagagauuuauaga

SEQ ID NO: 866842 - RNA, 22 nt, Human
uauuuccaagcugaauccaaug

SEQ ID NO: 866843 - RNA, 22 nt, Human
aaauacuguagauaauagaguu

SEQ ID NO: 866844 - RNA, 22 nt, Human
uucaggauuguguuuuuccuga

SEQ ID NO: 866845 - RNA, 22 nt, Human
caucagaacgugagcuccuugu

SEQ ID NO: 866846 - RNA, 22 nt, Human
ucucuucuagcuucuugugguu

SEQ ID NO: 866847 - RNA, 22 nt, Human
aauauaauuuuauuccuagagu

SEQ ID NO: 866848 - RNA, 22 nt, Human
agggcagcagcggcccaggccu

SEQ ID NO: 866849 - RNA, 22 nt, Human
ggccagaaguuggaaaagagcc

SEQ ID NO: 866850 - RNA, 22 nt, Human
uucauuaguucugaagaugucu

SEQ ID NO: 866851 - RNA, 22 nt, Human
ucuucauuuuauagcaucugug

SEQ ID NO: 866852 - RNA, 22 nt, Human
augauguugauaaauuacuuua

SEQ ID NO: 866853 - RNA, 22 nt, Human
ugcauauuguccuugauauuau

SEQ ID NO: 866854 - RNA, 22 nt, Human
gauuucaagcccccagagauuc

SEQ ID NO: 866855 - RNA, 22 nt, Human
cugacuguaauucuguucuuaa

SEQ ID NO: 866856 - RNA, 19 nt, Human
gaggcgaggcgugcaggag

SEQ ID NO: 866857 - RNA, 22 nt, Human
caauuucagugcuguggagagg

SEQ ID NO: 866858 - RNA, 22 nt, Human
caaaugauacuguuuuuagucu

SEQ ID NO: 866859 - RNA, 23 nt, Human
gggcagcuuaagcuuguuuuucu

SEQ ID NO: 866860 - RNA, 22 nt, Human
cugcauuagucaugcuuugcag

SEQ ID NO: 866861 - RNA, 22 nt, Human
ggaggagggguuuacauuggaa

SEQ ID NO: 866862 - RNA, 22 nt, Human
uaugcugugcuagauacaauau

SEQ ID NO: 866863 - RNA, 22 nt, Human
uuggaaagcaagcuggacauac

SEQ ID NO: 866864 - RNA, 22 nt, Human
ccucaggauccgcaggugcagu

SEQ ID NO: 866865 - RNA, 19 nt, Human
caggagagcaugcacuuug

SEQ ID NO: 866866 - RNA, 18 nt, Human
ugugaacacauuuuucug

SEQ ID NO: 866867 - RNA, 22 nt, Human
auacagaagccuguauuucugg

SEQ ID NO: 866868 - RNA, 22 nt, Human
acagaaugggauuugaauauuu

SEQ ID NO: 866869 - RNA, 22 nt, Human
cugugcagcuggcuuccuggaa

SEQ ID NO: 866870 - RNA, 22 nt, Human
uuugaaaguguuuacuugggaa

SEQ ID NO: 866871 - RNA, 20 nt, Human
uuucugugagaaacacuguu

SEQ ID NO: 866872 - RNA, 19 nt, Human
gacagugcaguuguaguac

SEQ ID NO: 866873 - RNA, 22 nt, Human
auuugcuuaucuccacaguugu

SEQ ID NO: 866874 - RNA, 22 nt, Human
ugugcaggugcaggaagggggc

SEQ ID NO: 866875 - RNA, 22 nt, Human
ugaaauagaaaaacaggcuucu

SEQ ID NO: 866876 - RNA, 22 nt, Human
ccacagagcauuagauuucaga

SEQ ID NO: 866877 - RNA, 22 nt, Human
cuguggaaaauuuguauguaau

SEQ ID NO: 866878 - RNA, 22 nt, Human
cucacugugaccucagcagaca

SEQ ID NO: 866879 - RNA, 22 nt, Human
aauuuacaggugcacucgccau

SEQ ID NO: 866880 - RNA, 22 nt, Human
aagcuggagaguuaggugaaua

SEQ ID NO: 866881 - RNA, 22 nt, Human
uaggcagcauggauucugaaua

SEQ ID NO: 866882 - RNA, 22 nt, Human
aaucagaaaggcuaaggaagca

SEQ ID NO: 866883 - RNA, 22 nt, Human
ggauguugauugaauggccauu

SEQ ID NO: 866884 - RNA, 22 nt, Human
auagcuuucuuaaauauauaaa

SEQ ID NO: 866885 - RNA, 22 nt, Human
ugccuugcgggcguuucuguug

SEQ ID NO: 866886 - RNA, 22 nt, Human
uggcuuuacaucaaauugagua

SEQ ID NO: 866887 - RNA, 23 nt, Human
cagaaauaaacugguuuguagau

SEQ ID NO: 866888 - RNA, 22 nt, Human
aucugacuucacgcccaugcca

SEQ ID NO: 866889 - RNA, 22 nt, Human
caugucuguguacacaugcaca

SEQ ID NO: 866890 - RNA, 22 nt, Human
uuaauuuuaaccuguuuguguc

SEQ ID NO: 866891 - RNA, 22 nt, Human
agaauuucuggaagauugcaag

SEQ ID NO: 866892 - RNA, 22 nt, Human
uuugaaagggaaauaaacuccu

SEQ ID NO: 866893 - RNA, 22 nt, Human
ggcuuggaaauugcaggacaca

SEQ ID NO: 866894 - RNA, 22 nt, Human
gggcagcucuuugguauccuuc

SEQ ID NO: 866895 - RNA, 22 nt, Human
uaauuuuuccacguacacuggg

SEQ ID NO: 866896 - RNA, 22 nt, Human
uucaggauucucucccauuuac

SEQ ID NO: 866897 - RNA, 22 nt, Human
cucaggauucucgacacucaca

SEQ ID NO: 866898 - RNA, 22 nt, Human
ccaggagaugggagcaucuaaa

SEQ ID NO: 866899 - RNA, 22 nt, Human
uucaaguuuugccuccccaucc

SEQ ID NO: 866900 - RNA, 22 nt, Human
gaucuucuagcagaaguaauuu

SEQ ID NO: 866901 - RNA, 22 nt, Human
gcaucuaaacuugcaucauugu

SEQ ID NO: 866902 - RNA, 22 nt, Human
cauuuguuaauuacuauuaucu

SEQ ID NO: 866903 - RNA, 22 nt, Human
guggcaggagagacacagccau

SEQ ID NO: 866904 - RNA, 21 nt, Human
acagcauguuuguguguuugc

SEQ ID NO: 866905 - RNA, 22 nt, Human
agucuccuuggccucaaugccu

SEQ ID NO: 866906 - RNA, 22 nt, Human
cagagggcacaugguuuccuca

SEQ ID NO: 866907 - RNA, 22 nt, Human
guccaugacugugacucacaug

SEQ ID NO: 866908 - RNA, 22 nt, Human
ccaggacaaguguggccauggc

SEQ ID NO: 866909 - RNA, 23 nt, Human
gugagucuugccuuugcugugga

SEQ ID NO: 866910 - RNA, 22 nt, Human
ggagcacuauaauagagauuuu

SEQ ID NO: 866911 - RNA, 17 nt, Human
ugaaggccaugaccacg

SEQ ID NO: 866912 - RNA, 22 nt, Human
cauuuguauagugcuuagacca

SEQ ID NO: 866913 - RNA, 22 nt, Human
uccaggaggccucauuuccugu

SEQ ID NO: 866914 - RNA, 22 nt, Human
aggcaccuugagagcaggagcu

SEQ ID NO: 866915 - RNA, 22 nt, Human
ggcauuuaauccaucugauuga

SEQ ID NO: 866916 - RNA, 22 nt, Human
ggaggggucucuagcgaggaga

SEQ ID NO: 866917 - RNA, 22 nt, Human
uuugaauaaucacugggcauua

SEQ ID NO: 866918 - RNA, 22 nt, Human
ucccaggaaugucugaaaguga

SEQ ID NO: 866919 - RNA, 22 nt, Human
ugaugaauaaacuugagaguca

SEQ ID NO: 866920 - RNA, 22 nt, Human
aguuugaaauguuggcaauauu

SEQ ID NO: 866921 - RNA, 22 nt, Human
uggcagcuguuaauguuuuguu

SEQ ID NO: 866922 - RNA, 22 nt, Human
agaaaagaggcuuucuaagcau

SEQ ID NO: 866923 - RNA, 22 nt, Human
cagagggaaaaggggaguaaua

SEQ ID NO: 866924 - RNA, 22 nt, Human
acagcagcuugcgugucugguc

SEQ ID NO: 866925 - RNA, 22 nt, Human
uucaacccaaguucuccauuuu

SEQ ID NO: 866926 - RNA, 22 nt, Human
cccaggaacuccagagcuccuc

SEQ ID NO: 866927 - RNA, 22 nt, Human
uuugguccugagcaaaacuaug

SEQ ID NO: 866928 - RNA, 22 nt, Human
uuugaaaggaaguuaauacuuu

SEQ ID NO: 866929 - RNA, 22 nt, Human
ccaggagcagauauggacauaa

SEQ ID NO: 866930 - RNA, 22 nt, Human
cucuacucuuaacacagcuagg

SEQ ID NO: 866931 - RNA, 22 nt, Human
uuauuuauggcccucaccugau

SEQ ID NO: 866932 - RNA, 22 nt, Human
uuaauuaugcaaaaggccccau

SEQ ID NO: 866933 - RNA, 22 nt, Human
cagaucuguaguaaaagaucuc

SEQ ID NO: 866934 - RNA, 22 nt, Human
cagaccagcucuaugaacccaa

SEQ ID NO: 866935 - RNA, 22 nt, Human
uuucacaacugcuuauuugaga

SEQ ID NO: 866936 - RNA, 22 nt, Human
cucagugugaaugcucaguaaa

SEQ ID NO: 866937 - RNA, 22 nt, Human
ucaggagaaggcaauguggaaa

SEQ ID NO: 866938 - RNA, 22 nt, Human
gcuuuaaugcuucguggggcca

SEQ ID NO: 866939 - RNA, 20 nt, Human
cauuuguuagcuuucuacug

SEQ ID NO: 866940 - RNA, 22 nt, Human
aggcucagaggugagcaucugc

SEQ ID NO: 866941 - RNA, 22 nt, Human
aauaaaauggucaguuuucuca

SEQ ID NO: 866942 - RNA, 22 nt, Human
ugcugagaucugccaguagaug

SEQ ID NO: 866943 - RNA, 22 nt, Human
aggcagauauuggggugaugug

SEQ ID NO: 866944 - RNA, 22 nt, Human
uauucaaaguaccuucauugcc

SEQ ID NO: 866945 - RNA, 22 nt, Human
uaugaaaauuuagcugaagcau

SEQ ID NO: 866946 - RNA, 22 nt, Human
guguguuuagcauuagcagggg

SEQ ID NO: 866947 - RNA, 22 nt, Human
cuguauuucccacauucucuau

SEQ ID NO: 866948 - RNA, 22 nt, Human
ucugcuguauuagguugaacug

SEQ ID NO: 866949 - RNA, 19 nt, Human
uggagaggaaaugcugcuc

SEQ ID NO: 866950 - RNA, 22 nt, Human
auccaugauuaguaggauaaag

SEQ ID NO: 866951 - RNA, 21 nt, Human
gauugaaaccauggcagugag

SEQ ID NO: 866952 - RNA, 22 nt, Human
cccaggagaucuggaucucguc

SEQ ID NO: 866953 - RNA, 22 nt, Human
ucuuuaauuguggaagagcagc

SEQ ID NO: 866954 - RNA, 22 nt, Human
uuagccauuaaauuacaaggug

SEQ ID NO: 866955 - RNA, 22 nt, Human
gaggagagaugguagauugggu

SEQ ID NO: 866956 - RNA, 22 nt, Human
ugaaugaaugaauuaauagagu

SEQ ID NO: 866957 - RNA, 22 nt, Human
cacauuuaauccuuuauaagua

SEQ ID NO: 866958 - RNA, 22 nt, Human
guaaugaaugaaagaaacuggg

SEQ ID NO: 866959 - RNA, 22 nt, Human
agucaauuaucucuaggucauc

SEQ ID NO: 866960 - RNA, 22 nt, Human
aguacaauuauauuuagauggu

SEQ ID NO: 866961 - RNA, 22 nt, Human
ucaaucacguguuccauguucu

SEQ ID NO: 866962 - RNA, 23 nt, Human
ucucuuucaagagcuuaaugugc

SEQ ID NO: 866963 - RNA, 22 nt, Human
caugguuuauuagagcuuauuu

SEQ ID NO: 866964 - RNA, 22 nt, Human
uccagaauauuugggaaagaug

SEQ ID NO: 866965 - RNA, 22 nt, Human
auugaaagcauggauuuggauu

SEQ ID NO: 866966 - RNA, 22 nt, Human
uuuaggcauugaauuagaauag

SEQ ID NO: 866967 - RNA, 22 nt, Human
ccccaggagaaaucuuaaacua

SEQ ID NO: 866968 - RNA, 22 nt, Human
guuuuauaauugcuucauaaga

SEQ ID NO: 866969 - RNA, 21 nt, Human
auggagggaccagggaagcag

SEQ ID NO: 866970 - RNA, 22 nt, Human
cuuccuucugaagcauagaagc

SEQ ID NO: 866971 - RNA, 22 nt, Human
gcuacugauugaccuuggagag

SEQ ID NO: 866972 - RNA, 22 nt, Human
ucuacugcacuggugucucauc

SEQ ID NO: 866973 - RNA, 22 nt, Human
gaugaaaaauugcugugucaua

SEQ ID NO: 866974 - RNA, 22 nt, Human
auggcuuuucacagaggguucu

SEQ ID NO: 866975 - RNA, 22 nt, Human
ucccaggauuuuaggcucucag

SEQ ID NO: 866976 - RNA, 22 nt, Human
ugcuuggcuuucugagcuucug

SEQ ID NO: 866977 - RNA, 22 nt, Human
uugaaagaagaagcugcgaugu

SEQ ID NO: 866978 - RNA, 22 nt, Human
auuucauugaaguuaauucuuc

SEQ ID NO: 866979 - RNA, 22 nt, Human
ucaguguauggagugcuggauu

SEQ ID NO: 866980 - RNA, 22 nt, Human
uacaagaaauuucugcauauau

SEQ ID NO: 866981 - RNA, 22 nt, Human
cagaagaggacuggguagcuca

SEQ ID NO: 866982 - RNA, 22 nt, Human
aauguaaacagcaagagaaggg

SEQ ID NO: 866983 - RNA, 22 nt, Human
uuugcaaagaaauuauugcugu

SEQ ID NO: 866984 - RNA, 22 nt, Human
uuuauauuucccaggauuggcc

SEQ ID NO: 866985 - RNA, 22 nt, Human
uaugaaacauucauacaaauaa

SEQ ID NO: 866986 - RNA, 22 nt, Human
uagggaugagccaguggguagu

SEQ ID NO: 866987 - RNA, 22 nt, Human
aucacauugccagugauuaccc

SEQ ID NO: 866988 - RNA, 22 nt, Human
ggcagcuggguuggccagaaac

SEQ ID NO: 866989 - RNA, 22 nt, Human
uuugaagugggcauuagaaccu

SEQ ID NO: 866990 - RNA, 22 nt, Human
ggcuuaaugguucuuuuucuca

SEQ ID NO: 866991 - RNA, 22 nt, Human
ccuuaaauucuccauuugaaag

SEQ ID NO: 866992 - RNA, 22 nt, Human
uuggaucaaauuucaugcuguc

SEQ ID NO: 866993 - RNA, 22 nt, Human
uuuccauauuuaaucaaaauaa

SEQ ID NO: 866994 - RNA, 22 nt, Human
ccagugcuaagguagccucugc

SEQ ID NO: 866995 - RNA, 19 nt, Human
agcauuuggaauucuacac

SEQ ID NO: 866996 - RNA, 22 nt, Human
auacuaaaguauagaacuuagu

SEQ ID NO: 866997 - RNA, 20 nt, Human
uauuuguauuugggaaaguu

SEQ ID NO: 866998 - RNA, 22 nt, Human
uuagaaaucaccucugaagauc

SEQ ID NO: 866999 - RNA, 22 nt, Human
uagaugcuguagaaauacuuau

SEQ ID NO: 867000 - RNA, 23 nt, Human
gagauuuagcagacaaagcucuu

SEQ ID NO: 867001 - RNA, 22 nt, Human
uacaugaaccuuuaugugugau

SEQ ID NO: 867002 - RNA, 22 nt, Human
uugcuuugccaccagaagucua

SEQ ID NO: 867003 - RNA, 22 nt, Human
agaccauggccauccuaggaaa

SEQ ID NO: 867004 - RNA, 22 nt, Human
cagaagaguagcugaacaaguu

SEQ ID NO: 867005 - RNA, 21 nt, Human
gggcagcucuguuuuauuuuc

SEQ ID NO: 867006 - RNA, 22 nt, Human
guccaugauucuguguaguaga

SEQ ID NO: 867007 - RNA, 22 nt, Human
uuacaagcagcuacauaucaca

SEQ ID NO: 867008 - RNA, 22 nt, Human
accauccugaaaccuucaugcu

SEQ ID NO: 867009 - RNA, 22 nt, Human
ccaugagcuucaacugacacag

SEQ ID NO: 867010 - RNA, 22 nt, Human
cccagcaggaggagguugcagu

SEQ ID NO: 867011 - RNA, 22 nt, Human
aggcuucugcugauauuucauu

SEQ ID NO: 867012 - RNA, 22 nt, Human
gauaauaagcacagcaggaugu

SEQ ID NO: 867013 - RNA, 22 nt, Human
ucauuucaaugauacuacuaag

SEQ ID NO: 867014 - RNA, 22 nt, Human
uggcagcugcguuguguuucug

SEQ ID NO: 867015 - RNA, 22 nt, Human
gacccaggguggucaccugaaa

SEQ ID NO: 867016 - RNA, 22 nt, Human
guuguuuuuguucucuauagcu

SEQ ID NO: 867017 - RNA, 20 nt, Human
gcucccagccugcagucccc

SEQ ID NO: 867018 - RNA, 22 nt, Human
uaagauaaguggguugagaugg

SEQ ID NO: 867019 - RNA, 20 nt, Human
uccaggagguuaguguggcu

SEQ ID NO: 867020 - RNA, 22 nt, Human
gucuauauauugcuugaauaau

SEQ ID NO: 867021 - RNA, 22 nt, Human
cugcugugugcuuacuuggguu

SEQ ID NO: 867022 - RNA, 22 nt, Human
cuggcugugcugcaggcuuugg

SEQ ID NO: 867023 - RNA, 22 nt, Human
uagggcagagcuuguacacgau

SEQ ID NO: 867024 - RNA, 22 nt, Human
acaauucugaugguuucccagu

SEQ ID NO: 867025 - RNA, 22 nt, Human
uacaaaguaauguauaauaucg

SEQ ID NO: 867026 - RNA, 22 nt, Human
auucugauaucuuauucuagcu

SEQ ID NO: 867027 - RNA, 22 nt, Human
cuagaaauguagauucuuagug

SEQ ID NO: 867028 - RNA, 22 nt, Human
cuggcaguguccagcucgugau

SEQ ID NO: 867029 - RNA, 22 nt, Human
uuuuaugugcuggacuggcagu

SEQ ID NO: 867030 - RNA, 22 nt, Human
auugaaaggcaaaguaggaagc

SEQ ID NO: 867031 - RNA, 22 nt, Human
uacuauaccauguaagauauga

SEQ ID NO: 867032 - RNA, 22 nt, Human
cccaggagguggagguugcagu

SEQ ID NO: 867033 - RNA, 22 nt, Human
cuugcugucccuugguaugaac

SEQ ID NO: 867034 - RNA, 22 nt, Human
cauacuuucuuuuucacgcaua

SEQ ID NO: 867035 - RNA, 22 nt, Human
aguccuuugggaaaaaugacua

SEQ ID NO: 867036 - RNA, 22 nt, Human
uuguccaaaguaacacaucuag

SEQ ID NO: 867037 - RNA, 22 nt, Human
acuggaucagaaucugauuuuu

SEQ ID NO: 867038 - RNA, 22 nt, Human
uaauuucacaguucaacgcaca

SEQ ID NO: 867039 - RNA, 18 nt, Human
aagaggaggaaacccagg

SEQ ID NO: 867040 - RNA, 22 nt, Human
gcugccagccaacuugcugugc

SEQ ID NO: 867041 - RNA, 23 nt, Human
auugaugacuugauuacacuuuu

SEQ ID NO: 867042 - RNA, 22 nt, Human
uuugaaagaaaccagugaguga

SEQ ID NO: 867043 - RNA, 22 nt, Human
caaaugauaccuauuacuaggc

SEQ ID NO: 867044 - RNA, 22 nt, Human
caaguccucaaagggcucugcu

SEQ ID NO: 867045 - RNA, 22 nt, Human
uauuucagucacuucuucucug

SEQ ID NO: 867046 - RNA, 22 nt, Human
ucuaaacaguuucacucuuaau

SEQ ID NO: 867047 - RNA, 22 nt, Human
gaggguggguuucuugcacguc

SEQ ID NO: 867048 - RNA, 22 nt, Human
gaaggccacaagagaaguuaag

SEQ ID NO: 867049 - RNA, 22 nt, Human
cuggguaaguuccuaaggcuca

SEQ ID NO: 867050 - RNA, 22 nt, Human
aaaggccaugguuggaguguuu

SEQ ID NO: 867051 - RNA, 22 nt, Human
gaggagaggggcucccaagagc

SEQ ID NO: 867052 - RNA, 22 nt, Human
acaguuaucuuugaaauagaga

SEQ ID NO: 867053 - RNA, 22 nt, Human
augcugugcuggcuaaccaugg

SEQ ID NO: 867054 - RNA, 22 nt, Human
gcucacugccauucucuagaug

SEQ ID NO: 867055 - RNA, 22 nt, Human
uuuauccagaaucaggauuuuu

SEQ ID NO: 867056 - RNA, 22 nt, Human
aggauuuaucaggaacucucuu

SEQ ID NO: 867057 - RNA, 22 nt, Human
ugaggcagauauuuauuggguu

SEQ ID NO: 867058 - RNA, 22 nt, Human
aggcaggcuggucugaagagug

SEQ ID NO: 867059 - RNA, 22 nt, Human
cucucuguuaugcuuucaugaa

SEQ ID NO: 867060 - RNA, 22 nt, Human
ucucaggagccacagcgggagu

SEQ ID NO: 867061 - RNA, 22 nt, Human
uugcauuugacaaauuauuuaa

SEQ ID NO: 867062 - RNA, 22 nt, Human
aaagauaauguuuccuuauucu

SEQ ID NO: 867063 - RNA, 22 nt, Human
uucaggaucauuuguuuuaucu

SEQ ID NO: 867064 - RNA, 22 nt, Human
uccuucuuucccccuagucauu

SEQ ID NO: 867065 - RNA, 22 nt, Human
cggcagcucgagggccacccgu

SEQ ID NO: 867066 - RNA, 22 nt, Human
cauucauuuaugaaauaucuau

SEQ ID NO: 867067 - RNA, 22 nt, Human
aggcagugcugugcccugaacc

SEQ ID NO: 867068 - RNA, 22 nt, Human
caaauucaaugaacauguuuaa

SEQ ID NO: 867069 - RNA, 22 nt, Human
agauggagaccuuggaugaacu

SEQ ID NO: 867070 - RNA, 22 nt, Human
acuuugaaggggaacauuuuaa

SEQ ID NO: 867071 - RNA, 22 nt, Human
cccaggagagaggccaguuggc

SEQ ID NO: 867072 - RNA, 22 nt, Human
ugccuguguugauuacuuuguc

SEQ ID NO: 867073 - RNA, 22 nt, Human
aaaguccuugcaguuuccucuu

SEQ ID NO: 867074 - RNA, 20 nt, Human
augugagggguugaaguggg

SEQ ID NO: 867075 - RNA, 17 nt, Human
uggcagcugaaagcucu

SEQ ID NO: 867076 - RNA, 22 nt, Human
gaggccaggacaugaaagcuga

SEQ ID NO: 867077 - RNA, 22 nt, Human
ucucccaggcugcccuguggac

SEQ ID NO: 867078 - RNA, 22 nt, Human
cccaggagguguagcugcgugg

SEQ ID NO: 867079 - RNA, 22 nt, Human
cagaagucacccucagaauaac

SEQ ID NO: 867080 - RNA, 22 nt, Human
cccaggaggacauuccauaccc

SEQ ID NO: 867081 - RNA, 22 nt, Human
ugugaauaaugccgcaauaaac

SEQ ID NO: 867082 - RNA, 22 nt, Human
uaucuaaaggauuuaauuuagu

SEQ ID NO: 867083 - RNA, 22 nt, Human
caacugcugacaccaucacucc

SEQ ID NO: 867084 - RNA, 22 nt, Human
ggcagcuaggggcagggaauuc

SEQ ID NO: 867085 - RNA, 23 nt, Human
ucccaggaaucugcauuuuuaac

SEQ ID NO: 867086 - RNA, 18 nt, Human
auauguuaauuagguagg

SEQ ID NO: 867087 - RNA, 22 nt, Human
gaggagcuggcugucgggaggc

SEQ ID NO: 867088 - RNA, 22 nt, Human
auuccaaaggcuggccuggagg

SEQ ID NO: 867089 - RNA, 22 nt, Human
aggcagauuuaggagaaaagaa

SEQ ID NO: 867090 - RNA, 22 nt, Human
caggggaguuuuaugcaacaga

SEQ ID NO: 867091 - RNA, 22 nt, Human
uagggauguggugagaacugag

SEQ ID NO: 867092 - RNA, 22 nt, Human
ucaggagagaaagaauacaauu

SEQ ID NO: 867093 - RNA, 22 nt, Human
cucagaagccuucagucuuggc

SEQ ID NO: 867094 - RNA, 22 nt, Human
agucucuuuaaucacagugucu

SEQ ID NO: 867095 - RNA, 22 nt, Human
ucauagaaugaguuaaugaacu

SEQ ID NO: 867096 - RNA, 22 nt, Human
auugugcaaauauuaucuguag

SEQ ID NO: 867097 - RNA, 22 nt, Human
uagauuuaagacccugaauuug

SEQ ID NO: 867098 - RNA, 22 nt, Human
gugauuuagauguugaaaguga

SEQ ID NO: 867099 - RNA, 22 nt, Human
aggcaggcucaggcccaugcuu

SEQ ID NO: 867100 - RNA, 20 nt, Human
aaguuacauuguauuguacc

SEQ ID NO: 867101 - RNA, 22 nt, Human
caguuucuauggcugggcucug

SEQ ID NO: 867102 - RNA, 22 nt, Human
gaauuuuucuggaagcaauuau

SEQ ID NO: 867103 - RNA, 22 nt, Human
auuaguaaaacauuguauaugu

SEQ ID NO: 867104 - RNA, 22 nt, Human
ucugggaaugaauaagaccugu

SEQ ID NO: 867105 - RNA, 22 nt, Human
uuccaaaccucaaauaauuaau

SEQ ID NO: 867106 - RNA, 21 nt, Human
cccagggaagccgcagucacc

SEQ ID NO: 867107 - RNA, 22 nt, Human
aagggcaggaaaagauggaugu

SEQ ID NO: 867108 - RNA, 18 nt, Human
ccucagggagagagacgc

SEQ ID NO: 867109 - RNA, 21 nt, Human
ucauucacaggguauuguaua

SEQ ID NO: 867110 - RNA, 22 nt, Human
agaauaucguagcauauuaucu

SEQ ID NO: 867111 - RNA, 22 nt, Human
ugccauuuugagauguuaauga

SEQ ID NO: 867112 - RNA, 22 nt, Human
gacccaggcccaaggcugccag

SEQ ID NO: 867113 - RNA, 22 nt, Human
ucccaggacaggccacauggaa

SEQ ID NO: 867114 - RNA, 22 nt, Human
aaauuccagaaacucaguauau

SEQ ID NO: 867115 - RNA, 22 nt, Human
aagaaaucagaaaagcauucgu

SEQ ID NO: 867116 - RNA, 22 nt, Human
augcugugagugugccgcagag

SEQ ID NO: 867117 - RNA, 22 nt, Human
auugcuguggaaauauaagaug

SEQ ID NO: 867118 - RNA, 22 nt, Human
uggcagcagccauggaaggccc

SEQ ID NO: 867119 - RNA, 22 nt, Human
uuugaaagacagaauauuuuug

SEQ ID NO: 867120 - RNA, 22 nt, Human
cagcagagaaauuaaacuucug

SEQ ID NO: 867121 - RNA, 22 nt, Human
aauguuaauuuacugucuucau

SEQ ID NO: 867122 - RNA, 21 nt, Human
uaucagaagagaaagaaugau

SEQ ID NO: 867123 - RNA, 23 nt, Human
gaggcagcuccugcagugcccug

SEQ ID NO: 867124 - RNA, 22 nt, Human
ggccagcugggccaccaggugc

SEQ ID NO: 867125 - RNA, 22 nt, Human
uucaaacaguguagaauauaug

SEQ ID NO: 867126 - RNA, 22 nt, Human
cagucucucugaaguauuaaga

SEQ ID NO: 867127 - RNA, 22 nt, Human
cccuggaggucagaggccuggg

SEQ ID NO: 867128 - RNA, 22 nt, Human
aaguccaugaucaagauguggc

SEQ ID NO: 867129 - RNA, 22 nt, Human
uuucuucaauugcuaacaagga

SEQ ID NO: 867130 - RNA, 22 nt, Human
uggaaggagacugggaagugug

SEQ ID NO: 867131 - RNA, 22 nt, Human
acacaauacagggcucaaaaua

SEQ ID NO: 867132 - RNA, 22 nt, Human
agagacaaugccaaugcacacg

SEQ ID NO: 867133 - RNA, 23 nt, Human
uagggcagcugggagggacaugc

SEQ ID NO: 867134 - RNA, 22 nt, Human
aguacaaugucugacacaguag

SEQ ID NO: 867135 - RNA, 17 nt, Human
uuucaucugggaccacc

SEQ ID NO: 867136 - RNA, 22 nt, Human
caaauuccucagaaucagaaaa

SEQ ID NO: 867137 - RNA, 22 nt, Human
auauaugcauguguacuuaugu

SEQ ID NO: 867138 - RNA, 22 nt, Human
ucuucaauuagauuuaccaauu

SEQ ID NO: 867139 - RNA, 22 nt, Human
cucaggauauugggcuggagca

SEQ ID NO: 867140 - RNA, 22 nt, Human
uccaggagcauccaggugaagc

SEQ ID NO: 867141 - RNA, 22 nt, Human
uucauacucacuccaauaacug

SEQ ID NO: 867142 - RNA, 22 nt, Human
aaucauaauucaaauaagcuua

SEQ ID NO: 867143 - RNA, 22 nt, Human
ggcaggcugggugucauggagu

SEQ ID NO: 867144 - RNA, 22 nt, Human
aacauaauguggccaaagucac

SEQ ID NO: 867145 - RNA, 22 nt, Human
uccaggaguuugagacugcagu

SEQ ID NO: 867146 - RNA, 22 nt, Human
cggagaggugggggcagcaucu

SEQ ID NO: 867147 - RNA, 22 nt, Human
guccucuguuagaaaugugcuu

SEQ ID NO: 867148 - RNA, 17 nt, Human
gcccaggaaggacggcc

SEQ ID NO: 867149 - RNA, 22 nt, Human
uaaaguuuguagcaauugauau

SEQ ID NO: 867150 - RNA, 20 nt, Human
auuuggcaugaaguauugau

SEQ ID NO: 867151 - RNA, 22 nt, Human
uaugcccagcuuaaaguacaca

SEQ ID NO: 867152 - RNA, 22 nt, Human
guagaaauauuuaucucugaga

SEQ ID NO: 867153 - RNA, 22 nt, Human
ggcuuggaccagucacaguggu

SEQ ID NO: 867154 - RNA, 22 nt, Human
agaggaugauuuuaaggacacu

SEQ ID NO: 867155 - RNA, 22 nt, Human
caggcagcagaggaguguggga

SEQ ID NO: 867156 - RNA, 22 nt, Human
cugaauaauuuuauaguugcug

SEQ ID NO: 867157 - RNA, 22 nt, Human
caaggccaugagcagcgagugu

SEQ ID NO: 867158 - RNA, 22 nt, Human
aauauuuguuaguguuuuaaug

SEQ ID NO: 867159 - RNA, 22 nt, Human
cuuaacagagagaaguguugcu

SEQ ID NO: 867160 - RNA, 22 nt, Human
uccugaggcucacuuugaaugu

SEQ ID NO: 867161 - RNA, 22 nt, Human
agcccaggugagggguucgaaa

SEQ ID NO: 867162 - RNA, 22 nt, Human
cccaggaggccaagguugcagu

SEQ ID NO: 867163 - RNA, 22 nt, Human
cccaggaagaaauucugauuug

SEQ ID NO: 867164 - RNA, 22 nt, Human
gacccaggagugcagagagugg

SEQ ID NO: 867165 - RNA, 22 nt, Human
ggaagaggaggagccaggcuuu

SEQ ID NO: 867166 - RNA, 22 nt, Human
agggcaguucaacuucauagug

SEQ ID NO: 867167 - RNA, 17 nt, Human
agcugaccagauggacu

SEQ ID NO: 867168 - RNA, 22 nt, Human
agugcuuugaacgaaaggcuga

SEQ ID NO: 867169 - RNA, 22 nt, Human
cuguggaaauaaacaaugcuaa

SEQ ID NO: 867170 - RNA, 18 nt, Human
ucauuuguuuugcaugaa

SEQ ID NO: 867171 - RNA, 22 nt, Human
cgaggcaggcaggcggaggaua

SEQ ID NO: 867172 - RNA, 22 nt, Human
ggagcagggcagugaauucugg

SEQ ID NO: 867173 - RNA, 22 nt, Human
uaauaucuacuucauagaguuu

SEQ ID NO: 867174 - RNA, 22 nt, Human
uuacuuuggguccugcuuauaa

SEQ ID NO: 867175 - RNA, 22 nt, Human
ucugaaagaagggcagucuuuu

SEQ ID NO: 867176 - RNA, 22 nt, Human
uuuaauauuucuuuccugaagc

SEQ ID NO: 867177 - RNA, 22 nt, Human
agaggcggagcuugcagugagc

SEQ ID NO: 867178 - RNA, 22 nt, Human
gcaggggcuaaggacacagaga

SEQ ID NO: 867179 - RNA, 22 nt, Human
ggaugggagcagaggacgacca

SEQ ID NO: 867180 - RNA, 23 nt, Human
ucguugaauagcaauagcacaac

SEQ ID NO: 867181 - RNA, 22 nt, Human
uucucacuauguauguagauug

SEQ ID NO: 867182 - RNA, 23 nt, Human
uuccacaaugaaaauaaagcagg

SEQ ID NO: 867183 - RNA, 22 nt, Human
cagcagaggcacgucugugaau

SEQ ID NO: 867184 - RNA, 18 nt, Human
gcaggagauggguggggu

SEQ ID NO: 867185 - RNA, 18 nt, Human
uggcagcaggaagccauu

SEQ ID NO: 867186 - RNA, 22 nt, Human
uucacauaaugauacaaagcuu

SEQ ID NO: 867187 - RNA, 22 nt, Human
cagagccaggucuaggagucuc

SEQ ID NO: 867188 - RNA, 22 nt, Human
cuuuacauccuguuucccguuu

SEQ ID NO: 867189 - RNA, 22 nt, Human
aagauuauuuaagacaggaacc

SEQ ID NO: 867190 - RNA, 22 nt, Human
gcccaggaaauaaaagugggcu

SEQ ID NO: 867191 - RNA, 22 nt, Human
uggcagcucauuuggaaaugga

SEQ ID NO: 867192 - RNA, 22 nt, Human
gcaggagagucugugccagguu

SEQ ID NO: 867193 - RNA, 22 nt, Human
ccuucuucuguguggcccaaga

SEQ ID NO: 867194 - RNA, 22 nt, Human
ccaggacagugaacauguaaga

SEQ ID NO: 867195 - RNA, 22 nt, Human
auuugcaaagucguaucuguga

SEQ ID NO: 867196 - RNA, 22 nt, Human
cccaggaggaggaaaaagcucg

SEQ ID NO: 867197 - RNA, 22 nt, Human
caauuucaagauucuguucuuu

SEQ ID NO: 867198 - RNA, 22 nt, Human
gaaggccauuagagccugugcc

SEQ ID NO: 867199 - RNA, 22 nt, Human
uucacagacauugcagacugaa

SEQ ID NO: 867200 - RNA, 23 nt, Human
auuucuaggggauuuucuggugc

SEQ ID NO: 867201 - RNA, 22 nt, Human
gauguagagggaagauuuuaaa

SEQ ID NO: 867202 - RNA, 22 nt, Human
uggcuuuacacauccacugccu

SEQ ID NO: 867203 - RNA, 22 nt, Human
cagaauguagaucaucaucaag

SEQ ID NO: 867204 - RNA, 22 nt, Human
caggcagcaucagucugcugua

SEQ ID NO: 867205 - RNA, 22 nt, Human
acagaacugggggcacagauag

SEQ ID NO: 867206 - RNA, 22 nt, Human
ucucuguaguugggcagcugcu

SEQ ID NO: 867207 - RNA, 22 nt, Human
cuagaaaugcucaagagaaagu

SEQ ID NO: 867208 - RNA, 22 nt, Human
caucaucaaaacaaauggaguc

SEQ ID NO: 867209 - RNA, 18 nt, Human
cuggcuuucuuauccauc

SEQ ID NO: 867210 - RNA, 22 nt, Human
acauuguuugagaauacagaug

SEQ ID NO: 867211 - RNA, 19 nt, Human
ccaggagagcuuggagaag

SEQ ID NO: 867212 - RNA, 22 nt, Human
uuauacuuuauacuacaucauu

SEQ ID NO: 867213 - RNA, 22 nt, Human
acagugcuaaacacuucuugaa

SEQ ID NO: 867214 - RNA, 22 nt, Human
caggcagccuucucgucucaca

SEQ ID NO: 867215 - RNA, 22 nt, Human
ccaggagacaaagaugacugcu

SEQ ID NO: 867216 - RNA, 22 nt, Human
gaagcagcagcuggggacaguu

SEQ ID NO: 867217 - RNA, 22 nt, Human
uccaggagguaugaguggcccc

SEQ ID NO: 867218 - RNA, 22 nt, Human
gaggcugcuguuagcccugggc

SEQ ID NO: 867219 - RNA, 22 nt, Human
ggcagaggaggggugaauuugc

SEQ ID NO: 867220 - RNA, 22 nt, Human
gccagagguucaacaacugucu

SEQ ID NO: 867221 - RNA, 22 nt, Human
gaucagaauuuacuuauaauug

SEQ ID NO: 867222 - RNA, 22 nt, Human
uugguuuacuaggauucaaauu

SEQ ID NO: 867223 - RNA, 22 nt, Human
cuugaaagcacuccuuugacug

SEQ ID NO: 867224 - RNA, 17 nt, Human
uccaggagaggcaaugg

SEQ ID NO: 867225 - RNA, 22 nt, Human
uggcagcuggcucugcgcaggc

SEQ ID NO: 867226 - RNA, 22 nt, Human
uccauacauugaaauaccauuc

SEQ ID NO: 867227 - RNA, 22 nt, Human
ggcagcauauauucagugggca

SEQ ID NO: 867228 - RNA, 21 nt, Human
ucacagacuggucagugaggc

SEQ ID NO: 867229 - RNA, 23 nt, Human
agggugagcaagcuauggagacc

SEQ ID NO: 867230 - RNA, 22 nt, Human
aggcugcugccuuggagagugu

SEQ ID NO: 867231 - RNA, 21 nt, Human
caaagccaggcaacucucucc

SEQ ID NO: 867232 - RNA, 22 nt, Human
agggcagcacaaggcauggacu

SEQ ID NO: 867233 - RNA, 22 nt, Human
ugaacaguuucaagaaaacuuu

SEQ ID NO: 867234 - RNA, 22 nt, Human
ugugaauaccuugaauucauca

SEQ ID NO: 867235 - RNA, 22 nt, Human
aaguuucaaauauaaaauuaca

SEQ ID NO: 867236 - RNA, 22 nt, Human
augcugugguagacagcauucc

SEQ ID NO: 867237 - RNA, 22 nt, Human
cggcagcugauugcagagcacc

SEQ ID NO: 867238 - RNA, 22 nt, Human
auacauauaugguacuuccugg

SEQ ID NO: 867239 - RNA, 22 nt, Human
uggcauuuagaaaacaacaugu

SEQ ID NO: 867240 - RNA, 22 nt, Human
cauuucaaugccuucaacauag

SEQ ID NO: 867241 - RNA, 22 nt, Human
aaccauuugccauuaucuuaag

SEQ ID NO: 867242 - RNA, 22 nt, Human
gcuauacacauuucuugguagu

SEQ ID NO: 867243 - RNA, 22 nt, Human
uuagaaauacaagugagguuga

SEQ ID NO: 867244 - RNA, 17 nt, Human
aaucagauuucugagga

SEQ ID NO: 867245 - RNA, 22 nt, Human
ugucuucagcaaaugccuuucu

SEQ ID NO: 867246 - RNA, 22 nt, Human
auucaaguggcugcuauguuaa

SEQ ID NO: 867247 - RNA, 22 nt, Human
ccaggauggggagcagauagaa

SEQ ID NO: 867248 - RNA, 22 nt, Human
cauuuguaucauauguaucuua

SEQ ID NO: 867249 - RNA, 22 nt, Human
uuauuaaugaguacaaguuauu

SEQ ID NO: 867250 - RNA, 22 nt, Human
gccaggaggucagccccucaac

SEQ ID NO: 867251 - RNA, 22 nt, Human
uggcagcuccggguaggggcug

SEQ ID NO: 867252 - RNA, 22 nt, Human
uuacagaaguuucagcguuuua

SEQ ID NO: 867253 - RNA, 22 nt, Human
gagccaaggguugccauggaga

SEQ ID NO: 867254 - RNA, 22 nt, Human
auuucaggagcaguuucagugg

SEQ ID NO: 867255 - RNA, 20 nt, Human
ucaggaugugcugagugaag

SEQ ID NO: 867256 - RNA, 22 nt, Human
uggcuauugagugaucucuaga

SEQ ID NO: 867257 - RNA, 22 nt, Human
agauauaauaauuuacaagugu

SEQ ID NO: 867258 - RNA, 22 nt, Human
auuccaaagacagaagcagcug

SEQ ID NO: 867259 - RNA, 22 nt, Human
gauaaaauucuuauuuuacccg

SEQ ID NO: 867260 - RNA, 22 nt, Human
ugaaaugaagggcuuguucugg

SEQ ID NO: 867261 - RNA, 22 nt, Human
agcaccugucacaagcagaagg

SEQ ID NO: 867262 - RNA, 22 nt, Human
ccagguaggagagagggauccu

SEQ ID NO: 867263 - RNA, 22 nt, Human
gucaggauuauaauccccaugg

SEQ ID NO: 867264 - RNA, 22 nt, Human
acuaagugauucuaagcaucuu

SEQ ID NO: 867265 - RNA, 22 nt, Human
ugaucugagagcagaucaccau

SEQ ID NO: 867266 - RNA, 22 nt, Human
guuauacauauguguuaacaaa

SEQ ID NO: 867267 - RNA, 22 nt, Human
uuugaagucaaagauugauucc

SEQ ID NO: 867268 - RNA, 23 nt, Human
aggauuuaaaggcaaugcauuuu

SEQ ID NO: 867269 - RNA, 22 nt, Human
gcuuuaaugcaauuucaccuca

SEQ ID NO: 867270 - RNA, 22 nt, Human
agucucugcugguugugccuau

SEQ ID NO: 867271 - RNA, 22 nt, Human
ucuucauuccguagauauuuau

SEQ ID NO: 867272 - RNA, 22 nt, Human
ccagauaaggcuuuuuaaaagc

SEQ ID NO: 867273 - RNA, 19 nt, Human
ugcaagcuuuuucuuguua

SEQ ID NO: 867274 - RNA, 22 nt, Human
auccuuagaagggagugaggac

SEQ ID NO: 867275 - RNA, 22 nt, Human
ccccaggacguggcccucauag

SEQ ID NO: 867276 - RNA, 20 nt, Human
ucagaugggagugagccauc

SEQ ID NO: 867277 - RNA, 18 nt, Human
aggcaggcuggagugacu

SEQ ID NO: 867278 - RNA, 22 nt, Human
gcagaauucuacagaugauaaa

SEQ ID NO: 867279 - RNA, 22 nt, Human
ggcaggcugcuugggucauguc

SEQ ID NO: 867280 - RNA, 22 nt, Human
uuucuucauucaccuucacccc

SEQ ID NO: 867281 - RNA, 22 nt, Human
uugagaagaggcuuuguaggaa

SEQ ID NO: 867282 - RNA, 22 nt, Human
aagauggagcacgagcagaagc

SEQ ID NO: 867283 - RNA, 22 nt, Human
uggagucugugaugcucugggu

SEQ ID NO: 867284 - RNA, 22 nt, Human
uuuaggcaagaacucacugaga

SEQ ID NO: 867285 - RNA, 22 nt, Human
aggcacaguuucauccccgggc

SEQ ID NO: 867286 - RNA, 22 nt, Human
ucccaggacaugggcucugcuc

SEQ ID NO: 867287 - RNA, 22 nt, Human
caauuucagguggauagguuuu

SEQ ID NO: 867288 - RNA, 22 nt, Human
auuaaauuagcaaacugugaaa

SEQ ID NO: 867289 - RNA, 17 nt, Human
ucccaggaacagggaau

SEQ ID NO: 867290 - RNA, 22 nt, Human
auggcauuugaaucugucuuuu

SEQ ID NO: 867291 - RNA, 22 nt, Human
uuuugcuugagugcacaaaaug

SEQ ID NO: 867292 - RNA, 22 nt, Human
ugaacuccaaauacugcugauu

SEQ ID NO: 867293 - RNA, 22 nt, Human
ucacaaauagcuauauuaagga

SEQ ID NO: 867294 - RNA, 22 nt, Human
aggcagaccaugaaucaugacc

SEQ ID NO: 867295 - RNA, 22 nt, Human
gaguccuuuguuccuugccaca

SEQ ID NO: 867296 - RNA, 22 nt, Human
agagacagaggcaauauagcuu

SEQ ID NO: 867297 - RNA, 22 nt, Human
agaggcaguauacaauccgagc

SEQ ID NO: 867298 - RNA, 22 nt, Human
uuccuuagacagagguggucau

SEQ ID NO: 867299 - RNA, 22 nt, Human
uuauggcauauuccucauugua

SEQ ID NO: 867300 - RNA, 22 nt, Human
ucugggaacacacgucacuuca

SEQ ID NO: 867301 - RNA, 20 nt, Human
cugcugugauucccuccucc

SEQ ID NO: 867302 - RNA, 22 nt, Human
uugcuguguaacuccuggccug

SEQ ID NO: 867303 - RNA, 22 nt, Human
aauuucaaguggcaucuuugau

SEQ ID NO: 867304 - RNA, 22 nt, Human
gaaugaaagauuugcauucuau

SEQ ID NO: 867305 - RNA, 22 nt, Human
aggauuuaccgucauuuagucu

SEQ ID NO: 867306 - RNA, 22 nt, Human
augcagcugugggcaagaaaug

SEQ ID NO: 867307 - RNA, 22 nt, Human
uauuuguauguguguacauaua

SEQ ID NO: 867308 - RNA, 22 nt, Human
agggggugcccagaugaaggau

SEQ ID NO: 867309 - RNA, 22 nt, Human
caagaaucaacauuauuuagug

SEQ ID NO: 867310 - RNA, 22 nt, Human
gggcagcucucacagcagccaa

SEQ ID NO: 867311 - RNA, 22 nt, Human
auucuaacacaugcucuaagaa

SEQ ID NO: 867312 - RNA, 22 nt, Human
uuauacuaaaacgcauugaauu

SEQ ID NO: 867313 - RNA, 23 nt, Human
uuaagacuggcugaacuuaguag

SEQ ID NO: 867314 - RNA, 20 nt, Human
uugauaggcagcuugucagg

SEQ ID NO: 867315 - RNA, 23 nt, Human
cauaaaauauuaguaugguagca

SEQ ID NO: 867316 - RNA, 22 nt, Human
gaaacaacuacuauugauuucu

SEQ ID NO: 867317 - RNA, 22 nt, Human
caggagaggaggcuacuucuua

SEQ ID NO: 867318 - RNA, 22 nt, Human
uugcugaaaacaguggguauug

SEQ ID NO: 867319 - RNA, 22 nt, Human
uggcagcugaauggcuggaugg

SEQ ID NO: 867320 - RNA, 22 nt, Human
cuucuucaauagcaagcgcaua

SEQ ID NO: 867321 - RNA, 22 nt, Human
uccaggagugauaaggccacug

SEQ ID NO: 867322 - RNA, 20 nt, Human
agcuucuucugucuaauuuu

SEQ ID NO: 867323 - RNA, 22 nt, Human
aauucucagguaaaaguuaagu

SEQ ID NO: 867324 - RNA, 22 nt, Human
auaucaaacgaaguuauuuuaa

SEQ ID NO: 867325 - RNA, 22 nt, Human
gaauuacaugacccugaguaga

SEQ ID NO: 867326 - RNA, 22 nt, Human
cauuguuaccaucuuuuaccua

SEQ ID NO: 867327 - RNA, 22 nt, Human
uuaauucugccuuucauguaac

SEQ ID NO: 867328 - RNA, 22 nt, Human
uuagcaucugcuguaagcuuau

SEQ ID NO: 867329 - RNA, 19 nt, Human
guuaggcaggguggggagu

SEQ ID NO: 867330 - RNA, 22 nt, Human
uauggcuugucuuuauaccagg

SEQ ID NO: 867331 - RNA, 22 nt, Human
caguaaagcauguaugucuuca

SEQ ID NO: 867332 - RNA, 22 nt, Human
gcccaggaguuugcauuuuaac

SEQ ID NO: 867333 - RNA, 22 nt, Human
uuggaauucaaguuguagcuua

SEQ ID NO: 867334 - RNA, 22 nt, Human
uggagagguuuaaacaaaaguu

SEQ ID NO: 867335 - RNA, 22 nt, Human
auucauaacggcaaaugucacc

SEQ ID NO: 867336 - RNA, 22 nt, Human
cuguuaaucugcuugcaugaug

SEQ ID NO: 867337 - RNA, 22 nt, Human
uaaggccaccguuauagaacca

SEQ ID NO: 867338 - RNA, 22 nt, Human
aggaugaauaacugaaauggug

SEQ ID NO: 867339 - RNA, 22 nt, Human
augcuguggccagaguucaacu

SEQ ID NO: 867340 - RNA, 22 nt, Human
aguccuuagaacacuguaucug

SEQ ID NO: 867341 - RNA, 22 nt, Human
uaugucaaaguuaagaaauagg

SEQ ID NO: 867342 - RNA, 22 nt, Human
auucuucauacagacaaguccu

SEQ ID NO: 867343 - RNA, 22 nt, Human
caguccuugcucugggaugaug

SEQ ID NO: 867344 - RNA, 22 nt, Human
uuuuguuguaauauaccuaucc

SEQ ID NO: 867345 - RNA, 22 nt, Human
aaauuauaggugccaccuugga

SEQ ID NO: 867346 - RNA, 22 nt, Human
uuuucagaggccuaagagguuu

SEQ ID NO: 867347 - RNA, 22 nt, Human
gcucaggaaaacagucuaguaa

SEQ ID NO: 867348 - RNA, 22 nt, Human
ugcuuaauauugugauguaaua

SEQ ID NO: 867349 - RNA, 22 nt, Human
cccaggagacauauagaaggac

SEQ ID NO: 867350 - RNA, 22 nt, Human
auuggcaggaaccgaggagggg

SEQ ID NO: 867351 - RNA, 22 nt, Human
cagcacagggacaauagcagau

SEQ ID NO: 867352 - RNA, 22 nt, Human
ugcauggaggaagaugaaugca

SEQ ID NO: 867353 - RNA, 23 nt, Human
cccaggagccugaguccucucug

SEQ ID NO: 867354 - RNA, 22 nt, Human
uaggagaggugaauggcacacu

SEQ ID NO: 867355 - RNA, 22 nt, Human
uguuugaacugaauaacauagu

SEQ ID NO: 867356 - RNA, 20 nt, Human
aggauuuacuacuaccugcu

SEQ ID NO: 867357 - RNA, 22 nt, Human
uuucaguuuccagcuuugucau

SEQ ID NO: 867358 - RNA, 22 nt, Human
uucacauuggugauauguuucu

SEQ ID NO: 867359 - RNA, 22 nt, Human
gcagaggagaugaagauacuuu

SEQ ID NO: 867360 - RNA, 22 nt, Human
aggagcagcuucugaaccaugu

SEQ ID NO: 867361 - RNA, 22 nt, Human
aagucacccuagggccuggacu

SEQ ID NO: 867362 - RNA, 22 nt, Human
uuauccaaacuggugaaucauu

SEQ ID NO: 867363 - RNA, 22 nt, Human
aggcaagcauuuaaccacucau

SEQ ID NO: 867364 - RNA, 22 nt, Human
gaauuucauugcucugcugugu

SEQ ID NO: 867365 - RNA, 22 nt, Human
auacuguuuugugacuuaucuu

SEQ ID NO: 867366 - RNA, 18 nt, Human
caauuucaauggucugaa

SEQ ID NO: 867367 - RNA, 22 nt, Human
ugaggcaggaggauugcaggau

SEQ ID NO: 867368 - RNA, 22 nt, Human
aaggcagcuucaccacagcauu

SEQ ID NO: 867369 - RNA, 22 nt, Human
caucagaauguuagagaaggga

SEQ ID NO: 867370 - RNA, 22 nt, Human
uggguuuaaacucaacucuaaa

SEQ ID NO: 867371 - RNA, 22 nt, Human
uggaguucucaggugagggcuu

SEQ ID NO: 867372 - RNA, 22 nt, Human
agaggacaaaaugagaagugcu

SEQ ID NO: 867373 - RNA, 22 nt, Human
ggcagcuuccugagccagcagc

SEQ ID NO: 867374 - RNA, 22 nt, Human
uaucugagaaagaagcaccaga

SEQ ID NO: 867375 - RNA, 22 nt, Human
aucaggauuauuaaaucuggau

SEQ ID NO: 867376 - RNA, 22 nt, Human
gaauuucagggucugguaggaa

SEQ ID NO: 867377 - RNA, 22 nt, Human
aggauuuauuggugggaaguua

SEQ ID NO: 867378 - RNA, 22 nt, Human
uuuguuuacucauucauugaug

SEQ ID NO: 867379 - RNA, 22 nt, Human
uccaggaggcucugguugacgu

SEQ ID NO: 867380 - RNA, 22 nt, Human
aaucauaauuguauacauucau

SEQ ID NO: 867381 - RNA, 22 nt, Human
aagaaugauuacaaagcaacga

SEQ ID NO: 867382 - RNA, 22 nt, Human
cuuuggcaaugucauuuucaau

SEQ ID NO: 867383 - RNA, 22 nt, Human
auaaaugccucagaaucauccc

SEQ ID NO: 867384 - RNA, 22 nt, Human
auuucaacguuagauguaauag

SEQ ID NO: 867385 - RNA, 22 nt, Human
agccauucauugugcucucaga

SEQ ID NO: 867386 - RNA, 22 nt, Human
aauauuucugcagaaugguuuu

SEQ ID NO: 867387 - RNA, 22 nt, Human
guuaggcaguuuucuucauucu

SEQ ID NO: 867388 - RNA, 18 nt, Human
agggaguuuuagggaagg

SEQ ID NO: 867389 - RNA, 22 nt, Human
aagauauacuauuaaguaccau

SEQ ID NO: 867390 - RNA, 22 nt, Human
ggagguggcagggaacauaauu

SEQ ID NO: 867391 - RNA, 22 nt, Human
aguaaacauuucagauuuauuu

SEQ ID NO: 867392 - RNA, 22 nt, Human
aaaaacuguaauuacuuuugca

SEQ ID NO: 867393 - RNA, 22 nt, Human
uagauauaagguccuuagaaca

SEQ ID NO: 867394 - RNA, 22 nt, Human
augcuuaaccuugguguacaau

SEQ ID NO: 867395 - RNA, 22 nt, Human
agcugcccuguggggaggguug

SEQ ID NO: 867396 - RNA, 22 nt, Human
uuugagauggagucuugcucug

SEQ ID NO: 867397 - RNA, 22 nt, Human
agcuagccuaggcagagugcau

SEQ ID NO: 867398 - RNA, 22 nt, Human
auggcauuugaccgcuuugugg

SEQ ID NO: 867399 - RNA, 22 nt, Human
uuuucaguuccaucucugcucu

SEQ ID NO: 867400 - RNA, 22 nt, Human
uuucaucuaacacuacauaggg

SEQ ID NO: 867401 - RNA, 22 nt, Human
acuggcagcagcagcccuuggg

SEQ ID NO: 867402 - RNA, 22 nt, Human
aaauugcauuuuaaagguagau

SEQ ID NO: 867403 - RNA, 22 nt, Human
uccaggagagguagaggguucc

SEQ ID NO: 867404 - RNA, 22 nt, Human
aaagauuauggcauugaaauac

SEQ ID NO: 867405 - RNA, 22 nt, Human
ugugaauacagcaugugcuucu

SEQ ID NO: 867406 - RNA, 22 nt, Human
ugcuuuaagacacuaaguuuga

SEQ ID NO: 867407 - RNA, 22 nt, Human
agaggcagaaguguucaaaccc

SEQ ID NO: 867408 - RNA, 20 nt, Human
uuuacauuuugaaacaguga

SEQ ID NO: 867409 - RNA, 22 nt, Human
uuagaaauauggugcugccgcc

SEQ ID NO: 867410 - RNA, 21 nt, Human
aggucagcccagcucuggaag

SEQ ID NO: 867411 - RNA, 22 nt, Human
guugaaagaugucuugguuccc

SEQ ID NO: 867412 - RNA, 22 nt, Human
aaauguuucuacuugugagcau

SEQ ID NO: 867413 - RNA, 22 nt, Human
aaggcagcaacuaauggaucuc

SEQ ID NO: 867414 - RNA, 22 nt, Human
ucccaggauguuuauggcuggu

SEQ ID NO: 867415 - RNA, 22 nt, Human
gaucuucuauguaaugaagugu

SEQ ID NO: 867416 - RNA, 22 nt, Human
uaacagaaauuuuaguuagggg

SEQ ID NO: 867417 - RNA, 22 nt, Human
gauuucuugaccccugucucag

SEQ ID NO: 867418 - RNA, 22 nt, Human
cagucaccuagacagaacuuac

SEQ ID NO: 867419 - RNA, 22 nt, Human
aucugcagaggacaggcgagga

SEQ ID NO: 867420 - RNA, 20 nt, Human
caggaugauuggacacgaug

SEQ ID NO: 867421 - RNA, 22 nt, Human
aacauuucagcaaauaagaaca

SEQ ID NO: 867422 - RNA, 22 nt, Human
acagaugauuuuuaugaaaaca

SEQ ID NO: 867423 - RNA, 22 nt, Human
augacaaaagaagacaugaggu

SEQ ID NO: 867424 - RNA, 22 nt, Human
auauaauacaaccugcuaagug

SEQ ID NO: 867425 - RNA, 22 nt, Human
ucuccuccuuuuuucaacauag

SEQ ID NO: 867426 - RNA, 22 nt, Human
auuuccaguccuaaugaucugg

SEQ ID NO: 867427 - RNA, 22 nt, Human
cucccagagaccaagcugagaa

SEQ ID NO: 867428 - RNA, 22 nt, Human
auggcuuucagauggugaaaga

SEQ ID NO: 867429 - RNA, 15 nt, Human
uucaggauaugacuc

SEQ ID NO: 867430 - RNA, 22 nt, Human
aaucagucucauuuagcaggga

SEQ ID NO: 867431 - RNA, 22 nt, Human
uacagagauacucuagaucaaa

SEQ ID NO: 867432 - RNA, 22 nt, Human
ugaggcagaguaagauacauga

SEQ ID NO: 867433 - RNA, 18 nt, Human
ggucuuuaggucaguguc

SEQ ID NO: 867434 - RNA, 22 nt, Human
ugagccuguccugugcauguga

SEQ ID NO: 867435 - RNA, 22 nt, Human
uucaggaucacuaaacccucca

SEQ ID NO: 867436 - RNA, 22 nt, Human
uaauuucagugggcucugggcu

SEQ ID NO: 867437 - RNA, 22 nt, Human
uauuuccaccuauuauuuucug

SEQ ID NO: 867438 - RNA, 22 nt, Human
uucauucugggcucuaaggaac

SEQ ID NO: 867439 - RNA, 22 nt, Human
cuugcuggugguguuuucuaug

SEQ ID NO: 867440 - RNA, 22 nt, Human
ucucagucuuugcaaggaugcu

SEQ ID NO: 867441 - RNA, 22 nt, Human
uguaaauaaugcauguaaauca

SEQ ID NO: 867442 - RNA, 22 nt, Human
ggcagcuaguuuaagaaagagg

SEQ ID NO: 867443 - RNA, 22 nt, Human
gaaauagacacuuucuaugaau

SEQ ID NO: 867444 - RNA, 22 nt, Human
aaagcagaacugagagagcugg

SEQ ID NO: 867445 - RNA, 22 nt, Human
uuucuagucucgaucucuuaau

SEQ ID NO: 867446 - RNA, 22 nt, Human
gaggcagccucaguggaccucg

SEQ ID NO: 867447 - RNA, 21 nt, Human
uguaaguuucaucugaauugg

SEQ ID NO: 867448 - RNA, 22 nt, Human
cauaauaucuccgauuacuugc

SEQ ID NO: 867449 - RNA, 22 nt, Human
cuacccaggcuuagagggcugg

SEQ ID NO: 867450 - RNA, 22 nt, Human
aaagaaggaugggagaaauccu

SEQ ID NO: 867451 - RNA, 22 nt, Human
caaggccagggaauuuuucugg

SEQ ID NO: 867452 - RNA, 22 nt, Human
uuauagaaggagcauucacuua

SEQ ID NO: 867453 - RNA, 22 nt, Human
cagcuuccgaccgggggcugca

SEQ ID NO: 867454 - RNA, 20 nt, Human
agauuauuccuaagauuucu

SEQ ID NO: 867455 - RNA, 22 nt, Human
aguaccaugcuuccugacuggu

SEQ ID NO: 867456 - RNA, 22 nt, Human
ucuuagaaguuuauggcacgga

SEQ ID NO: 867457 - RNA, 17 nt, Human
guccuacccauggucua

SEQ ID NO: 867458 - RNA, 22 nt, Human
guucuucaaagugacaacuaaa

SEQ ID NO: 867459 - RNA, 22 nt, Human
cagauuucuauuucaaauacau

SEQ ID NO: 867460 - RNA, 22 nt, Human
uccaggaggaggaaggcugcca

SEQ ID NO: 867461 - RNA, 22 nt, Human
uuccuuagggaaagggauaagg

SEQ ID NO: 867462 - RNA, 22 nt, Human
uuucacauuagauaugucauuu

SEQ ID NO: 867463 - RNA, 22 nt, Human
uuuggaaugguaccuucaguug

SEQ ID NO: 867464 - RNA, 22 nt, Human
uuugcagucaaauuugcuaaau

SEQ ID NO: 867465 - RNA, 22 nt, Human
uucuacagacuauaacugugau

SEQ ID NO: 867466 - RNA, 22 nt, Human
ugcuuuaaauaugaauuagcau

SEQ ID NO: 867467 - RNA, 22 nt, Human
ggaggcugagaaguccaagauc

SEQ ID NO: 867468 - RNA, 22 nt, Human
acagucuugagcaucagccaga

SEQ ID NO: 867469 - RNA, 22 nt, Human
caggcagcucaaccuugggagc

SEQ ID NO: 867470 - RNA, 22 nt, Human
gcagggcagaccuccagccuau

SEQ ID NO: 867471 - RNA, 22 nt, Human
gccaggagggaaaggacaauuu

SEQ ID NO: 867472 - RNA, 23 nt, Human
uggagcugacagucagagggagg

SEQ ID NO: 867473 - RNA, 22 nt, Human
gucuucaauagagccucaauuu

SEQ ID NO: 867474 - RNA, 22 nt, Human
uuucuucacaggguauugggug

SEQ ID NO: 867475 - RNA, 22 nt, Human
augugcuucauucuacaugaca

SEQ ID NO: 867476 - RNA, 22 nt, Human
aggcagugcaugcaaaggucgg

SEQ ID NO: 867477 - RNA, 22 nt, Human
aagggaggggauguaagccugg

SEQ ID NO: 867478 - RNA, 22 nt, Human
uucauucuuugaaucugaggua

SEQ ID NO: 867479 - RNA, 22 nt, Human
uugcuuuguggugguucuucca

SEQ ID NO: 867480 - RNA, 22 nt, Human
acuguguggaccacucugaggc

SEQ ID NO: 867481 - RNA, 22 nt, Human
gaggcugaggguuagagaguca

SEQ ID NO: 867482 - RNA, 22 nt, Human
cuccaggaaaauagggaaugag

SEQ ID NO: 867483 - RNA, 19 nt, Human
gaggucagcaagaaguauu

SEQ ID NO: 867484 - RNA, 22 nt, Human
cuggcuuuaacccuacaaaccu

SEQ ID NO: 867485 - RNA, 22 nt, Human
ucugcagggaugugagggguga

SEQ ID NO: 867486 - RNA, 22 nt, Human
ucauggauggccgggaggugau

SEQ ID NO: 867487 - RNA, 22 nt, Human
caauauauaaugaguacuuucc

SEQ ID NO: 867488 - RNA, 22 nt, Human
uagcaucuggagaaacaagucc

SEQ ID NO: 867489 - RNA, 22 nt, Human
ccucuucugcuucaggagcacu

SEQ ID NO: 867490 - RNA, 22 nt, Human
uggcauuucuggccauuugugu

SEQ ID NO: 867491 - RNA, 22 nt, Human
uaaaauguuugcaagagaccag

SEQ ID NO: 867492 - RNA, 22 nt, Human
aaauuauuaugccccucuauaa

SEQ ID NO: 867493 - RNA, 22 nt, Human
uuaaauauuuucagcaggguca

SEQ ID NO: 867494 - RNA, 22 nt, Human
ucugcagguguuggaaggguca

SEQ ID NO: 867495 - RNA, 22 nt, Human
uuugaagauuaugccagaguga

SEQ ID NO: 867496 - RNA, 22 nt, Human
cccaggagguagagguugcagu

SEQ ID NO: 867497 - RNA, 22 nt, Human
acaugcuuuaacuuauuuugau

SEQ ID NO: 867498 - RNA, 22 nt, Human
uuucagacagauucuucucagu

SEQ ID NO: 867499 - RNA, 22 nt, Human
gugauuuugagaccuauauagu

SEQ ID NO: 867500 - RNA, 21 nt, Human
agagagggagaugaaacaucc

SEQ ID NO: 867501 - RNA, 17 nt, Human
cccaugagcccacuccc

SEQ ID NO: 867502 - RNA, 22 nt, Human
gcaggagaacaaagcaagcugc

SEQ ID NO: 867503 - RNA, 22 nt, Human
auauucuuccaaaacaucauuu

SEQ ID NO: 867504 - RNA, 22 nt, Human
aagauauucaaagauuuauuag

SEQ ID NO: 867505 - RNA, 22 nt, Human
ucaauaauggcaggauaaauuu

SEQ ID NO: 867506 - RNA, 22 nt, Human
ucauucuuuaccaaguugucac

SEQ ID NO: 867507 - RNA, 22 nt, Human
acccaggacaugggcacccgug

SEQ ID NO: 867508 - RNA, 22 nt, Human
gagaggagguggcuaugacagc

SEQ ID NO: 867509 - RNA, 22 nt, Human
uguccuuagggauauaaaauau

SEQ ID NO: 867510 - RNA, 22 nt, Human
ucagaaaauaacuguuaguuug

SEQ ID NO: 867511 - RNA, 22 nt, Human
cugcuuugcauagcugccagag

SEQ ID NO: 867512 - RNA, 22 nt, Human
agaggagguccuuuucugaugu

SEQ ID NO: 867513 - RNA, 22 nt, Human
gccuuaauuuaugucuaacaua

SEQ ID NO: 867514 - RNA, 21 nt, Human
gauuuuaaagagacugccaca

SEQ ID NO: 867515 - RNA, 22 nt, Human
uauuuccaaaagccuauuauga

SEQ ID NO: 867516 - RNA, 23 nt, Human
caguggagacucaugcuuccuua

SEQ ID NO: 867517 - RNA, 22 nt, Human
ucuuuuggguucuuaugauuua

SEQ ID NO: 867518 - RNA, 22 nt, Human
uuugcaguagacaucuuauuuu

SEQ ID NO: 867519 - RNA, 22 nt, Human
auugaaagauaggcuacugugg

SEQ ID NO: 867520 - RNA, 22 nt, Human
guuaggcaauaccucuuacacc

SEQ ID NO: 867521 - RNA, 22 nt, Human
uccaggagggguaggcaguaug

SEQ ID NO: 867522 - RNA, 22 nt, Human
uuuuuauaacucuuuugugaca

SEQ ID NO: 867523 - RNA, 22 nt, Human
gaaguccuccuaucuugcucuu

SEQ ID NO: 867524 - RNA, 22 nt, Human
gaggacagagccgccuggcaag

SEQ ID NO: 867525 - RNA, 22 nt, Human
uuugcaauuugugcugcaaaug

SEQ ID NO: 867526 - RNA, 22 nt, Human
uuggaucauggaaugucugcuu

SEQ ID NO: 867527 - RNA, 22 nt, Human
cagcugcuguuacugcuuauua

SEQ ID NO: 867528 - RNA, 22 nt, Human
gaguccuucuggcuggcaggau

SEQ ID NO: 867529 - RNA, 22 nt, Human
caccagacagguguaugcauau

SEQ ID NO: 867530 - RNA, 18 nt, Human
gaggcagcuagcaauuuu

SEQ ID NO: 867531 - RNA, 22 nt, Human
uaaagccacuucauucuagucu

SEQ ID NO: 867532 - RNA, 22 nt, Human
gaggagagaagcuaacggugcu

SEQ ID NO: 867533 - RNA, 22 nt, Human
uugcuuuguuacugcaguuucc

SEQ ID NO: 867534 - RNA, 19 nt, Human
ggucagcugggcuagaggc

SEQ ID NO: 867535 - RNA, 22 nt, Human
cucuaauccuuugucccugggu

SEQ ID NO: 867536 - RNA, 22 nt, Human
uuagccaugugggaaaaacagc

SEQ ID NO: 867537 - RNA, 22 nt, Human
uggaaugacagagagucugaau

SEQ ID NO: 867538 - RNA, 22 nt, Human
cuuuacagaauaagaauacugg

SEQ ID NO: 867539 - RNA, 20 nt, Human
aggagggaccuggauuggcg

SEQ ID NO: 867540 - RNA, 22 nt, Human
aggcaguguguagcuggaagag

SEQ ID NO: 867541 - RNA, 22 nt, Human
auucuucacaaauauauagaag

SEQ ID NO: 867542 - RNA, 22 nt, Human
cagauauuaggagcucaauaau

SEQ ID NO: 867543 - RNA, 22 nt, Human
uuuaggcagaacauggacuuug

SEQ ID NO: 867544 - RNA, 22 nt, Human
uucuucaaccaucuacauaaac

SEQ ID NO: 867545 - RNA, 21 nt, Human
ggcagccugacccccagagag

SEQ ID NO: 867546 - RNA, 22 nt, Human
gaggccaggggccuggagauga

SEQ ID NO: 867547 - RNA, 22 nt, Human
ugaggcagcaauugauuauuca

SEQ ID NO: 867548 - RNA, 22 nt, Human
agauggaguuaguaccagaguc

SEQ ID NO: 867549 - RNA, 22 nt, Human
cuacagaaguuucccuugcuua

SEQ ID NO: 867550 - RNA, 22 nt, Human
aguggcaguagaugagcugguu

SEQ ID NO: 867551 - RNA, 22 nt, Human
uccaggagugcugguuagagua

SEQ ID NO: 867552 - RNA, 22 nt, Human
auucuucacaccuguuccuguu

SEQ ID NO: 867553 - RNA, 22 nt, Human
ccugccugcaccuucucugggg

SEQ ID NO: 867554 - RNA, 22 nt, Human
acccaggaggugacacagggcu

SEQ ID NO: 867555 - RNA, 22 nt, Human
uggcaguccccugugccuggaa

SEQ ID NO: 867556 - RNA, 22 nt, Human
agugcugucaguuuuauagaua

SEQ ID NO: 867557 - RNA, 22 nt, Human
accauuuuggguauuuucagag

SEQ ID NO: 867558 - RNA, 22 nt, Human
uuaggaguccagaugucuuggg

SEQ ID NO: 867559 - RNA, 23 nt, Human
gccaggaguggguagacuaaugc

SEQ ID NO: 867560 - RNA, 22 nt, Human
aaaucucacuguagucaaagug

SEQ ID NO: 867561 - RNA, 19 nt, Human
agcaaauacaucaaaauug

SEQ ID NO: 867562 - RNA, 22 nt, Human
aacauuuaugauugagguaaau

SEQ ID NO: 867563 - RNA, 22 nt, Human
uaucuguuguaguacagaugau

SEQ ID NO: 867564 - RNA, 22 nt, Human
gcugcccacaaugauuacaugg

SEQ ID NO: 867565 - RNA, 22 nt, Human
ggaggaugagcuacgaggagcu

SEQ ID NO: 867566 - RNA, 22 nt, Human
ccuggaucuaaggaagcuggga

SEQ ID NO: 867567 - RNA, 22 nt, Human
gccuuaauuuuuuauaaucucu

SEQ ID NO: 867568 - RNA, 22 nt, Human
uugcugaaguuaaugcuugcaa

SEQ ID NO: 867569 - RNA, 22 nt, Human
cuuuacauaaggauaaaccugg

SEQ ID NO: 867570 - RNA, 22 nt, Human
acuuuaauuaaugaacuguggc

SEQ ID NO: 867571 - RNA, 22 nt, Human
aggccagaugucgggcuagaag

SEQ ID NO: 867572 - RNA, 19 nt, Human
aaaaacuuaguccagaaag

SEQ ID NO: 867573 - RNA, 22 nt, Human
cuuugaagagauuacugugcuc

SEQ ID NO: 867574 - RNA, 22 nt, Human
aucaggaucagggcuagcagag

SEQ ID NO: 867575 - RNA, 22 nt, Human
uuucaacuugaagaauugauac

SEQ ID NO: 867576 - RNA, 22 nt, Human
aaucagaacgcucgaucuucgg

SEQ ID NO: 867577 - RNA, 22 nt, Human
ggaggggaugguuugacccugg

SEQ ID NO: 867578 - RNA, 23 nt, Human
cccuggaguaaauucuuggaagg

SEQ ID NO: 867579 - RNA, 20 nt, Human
caguccaaucagaggccacc

SEQ ID NO: 867580 - RNA, 22 nt, Human
aaaguauucuugacuguuuuuc

SEQ ID NO: 867581 - RNA, 21 nt, Human
cagcagaguaaugcauucgua

SEQ ID NO: 867582 - RNA, 21 nt, Human
cugcuguggcccccgacaugc

SEQ ID NO: 867583 - RNA, 22 nt, Human
cacucuccagcacaccccauuu

SEQ ID NO: 867584 - RNA, 22 nt, Human
uauuacaauuuacauugcacuu

SEQ ID NO: 867585 - RNA, 22 nt, Human
uaaugcuuaacagcuggcuuuu

SEQ ID NO: 867586 - RNA, 22 nt, Human
uccagaaacuuuuccagucuca

SEQ ID NO: 867587 - RNA, 22 nt, Human
cagcgucucguugugggccucg

SEQ ID NO: 867588 - RNA, 17 nt, Human
agauggcaggaggcaga

SEQ ID NO: 867589 - RNA, 22 nt, Human
cuuugaauugccguuucaucug

SEQ ID NO: 867590 - RNA, 22 nt, Human
guuccaaaguuagaguguauug

SEQ ID NO: 867591 - RNA, 22 nt, Human
guaggcagugguuggaagagaa

SEQ ID NO: 867592 - RNA, 20 nt, Human
uuucugugcccaggucuguu

SEQ ID NO: 867593 - RNA, 22 nt, Human
agcaccaugaccuugccauuga

SEQ ID NO: 867594 - RNA, 22 nt, Human
agagggauggccccguaacuca

SEQ ID NO: 867595 - RNA, 22 nt, Human
agucauaugacccuucacaaac

SEQ ID NO: 867596 - RNA, 22 nt, Human
ccucagggaaugggaggcuggg

SEQ ID NO: 867597 - RNA, 22 nt, Human
aacauucugguucuaaaaaccu

SEQ ID NO: 867598 - RNA, 22 nt, Human
aaugguuugauggacaaaauga

SEQ ID NO: 867599 - RNA, 22 nt, Human
ucaugcuuaaaagacacuugag

SEQ ID NO: 867600 - RNA, 21 nt, Human
cauuucaaagagcuggaaauc

SEQ ID NO: 867601 - RNA, 21 nt, Human
ccauaccuaccucaccugguu

SEQ ID NO: 867602 - RNA, 22 nt, Human
caguaucugucaguaaucaggu

SEQ ID NO: 867603 - RNA, 22 nt, Human
aaacuuuguagagaaugcuggc

SEQ ID NO: 867604 - RNA, 22 nt, Human
uucaggaugacaccauguccag

SEQ ID NO: 867605 - RNA, 22 nt, Human
aauucacaaaaguuagauccau

SEQ ID NO: 867606 - RNA, 22 nt, Human
aauaucaguauauuguaucagu

SEQ ID NO: 867607 - RNA, 22 nt, Human
gauuuuauauggcauacugugg

SEQ ID NO: 867608 - RNA, 22 nt, Human
uuacagaaaguuucccaugccg

SEQ ID NO: 867609 - RNA, 21 nt, Human
aaaggccauaaucacggagca

SEQ ID NO: 867610 - RNA, 22 nt, Human
uuugaaguggaaaaggauuuaa

SEQ ID NO: 867611 - RNA, 22 nt, Human
aaaucauguuggcacaauaaaa

SEQ ID NO: 867612 - RNA, 22 nt, Human
acuaaacugaagcaugaaaagg

SEQ ID NO: 867613 - RNA, 22 nt, Human
ugcauguguuugccacagugag

SEQ ID NO: 867614 - RNA, 22 nt, Human
uguugaagauaaaguucucauu

SEQ ID NO: 867615 - RNA, 22 nt, Human
gggagagguuacccgagcaacu

SEQ ID NO: 867616 - RNA, 22 nt, Human
auguucuuguucaaaugucagu

SEQ ID NO: 867617 - RNA, 22 nt, Human
aggcaacuuuuggggaugaugg

SEQ ID NO: 867618 - RNA, 22 nt, Human
uucuuuugggaauuacguaugc

SEQ ID NO: 867619 - RNA, 22 nt, Human
aggcugcuucaauggauaagau

SEQ ID NO: 867620 - RNA, 22 nt, Human
caugugguucaaguacuccaca

SEQ ID NO: 867621 - RNA, 22 nt, Human
caaguccuuuucuuggcucagg

SEQ ID NO: 867622 - RNA, 22 nt, Human
augaacaauaaaauagaucaca

SEQ ID NO: 867623 - RNA, 22 nt, Human
uaagaaucaguagauauagauu

SEQ ID NO: 867624 - RNA, 22 nt, Human
ucuagacacuacuaguaaccgg

SEQ ID NO: 867625 - RNA, 22 nt, Human
gaaaauagcagauagaccaaug

SEQ ID NO: 867626 - RNA, 22 nt, Human
cuucagagugcagaagauuggg

SEQ ID NO: 867627 - RNA, 23 nt, Human
cuugcaggaagcagauggcacac

SEQ ID NO: 867628 - RNA, 22 nt, Human
aggcagcaugggccccagcucc

SEQ ID NO: 867629 - RNA, 22 nt, Human
gaggcagcggcucacagagaaa

SEQ ID NO: 867630 - RNA, 22 nt, Human
ugaggcaggaguuaaugugcuc

SEQ ID NO: 867631 - RNA, 22 nt, Human
acuuauuagcugugugaccuug

SEQ ID NO: 867632 - RNA, 22 nt, Human
gaauaaucaugaaauucaguga

SEQ ID NO: 867633 - RNA, 22 nt, Human
aucuagaacuuaaagucaguca

SEQ ID NO: 867634 - RNA, 22 nt, Human
gcaagcugcucuuauguggagg

SEQ ID NO: 867635 - RNA, 22 nt, Human
gagcagcucugggugacccagu

SEQ ID NO: 867636 - RNA, 22 nt, Human
cugacccauauaagaguggagg

SEQ ID NO: 867637 - RNA, 22 nt, Human
aaucagaaauucuacaucacaa

SEQ ID NO: 867638 - RNA, 22 nt, Human
caggguggcacucagcgcaucu

SEQ ID NO: 867639 - RNA, 22 nt, Human
cagaggcaggaagaugggcagu

SEQ ID NO: 867640 - RNA, 22 nt, Human
gcugggaagugcaagaucaagg

SEQ ID NO: 867641 - RNA, 22 nt, Human
acuucacacagcaaauuuaucu

SEQ ID NO: 867642 - RNA, 22 nt, Human
ucugcuguaaagaauuucugcc

SEQ ID NO: 867643 - RNA, 22 nt, Human
cuguaguugaugauuucugaua

SEQ ID NO: 867644 - RNA, 22 nt, Human
uuuguuuagaugguaaaucagu

SEQ ID NO: 867645 - RNA, 22 nt, Human
ggaucugagagcaagcaggacc

SEQ ID NO: 867646 - RNA, 22 nt, Human
aggcacaggaaugucauccagu

SEQ ID NO: 867647 - RNA, 22 nt, Human
gugacagucaaagacaugacuu

SEQ ID NO: 867648 - RNA, 22 nt, Human
gagagaggccuccauguacuga

SEQ ID NO: 867649 - RNA, 22 nt, Human
uuuaaaauuuagaccucuccac

SEQ ID NO: 867650 - RNA, 22 nt, Human
augguuuaagggagaauauuga

SEQ ID NO: 867651 - RNA, 22 nt, Human
auccaaacauguaccacacuaa

SEQ ID NO: 867652 - RNA, 22 nt, Human
uuuauuauguacaggcacuaua

SEQ ID NO: 867653 - RNA, 22 nt, Human
aaguccuucccaagcauguacc

SEQ ID NO: 867654 - RNA, 22 nt, Human
gccaggaguucagaugcauguu

SEQ ID NO: 867655 - RNA, 22 nt, Human
accgaaggaaacuggaaccguu

SEQ ID NO: 867656 - RNA, 20 nt, Human
uacaauacacaugcauauga

SEQ ID NO: 867657 - RNA, 22 nt, Human
ucuuugcacugugcaagcagaa

SEQ ID NO: 867658 - RNA, 22 nt, Human
agaauuccucuaggaucugccc

SEQ ID NO: 867659 - RNA, 22 nt, Human
guuaauauuuaccugucaagaa

SEQ ID NO: 867660 - RNA, 22 nt, Human
auacaacuuuaucuguaaugag

SEQ ID NO: 867661 - RNA, 22 nt, Human
aggcaggcacacuuccuccagg

SEQ ID NO: 867662 - RNA, 22 nt, Human
aagagggcugcaaucuuauugc

SEQ ID NO: 867663 - RNA, 22 nt, Human
gaggcagcuuaggguacugacu

SEQ ID NO: 867664 - RNA, 22 nt, Human
uaagagaacuggauagauagga

SEQ ID NO: 867665 - RNA, 22 nt, Human
ucuggaucucccucauccuggg

SEQ ID NO: 867666 - RNA, 22 nt, Human
auccuuaguuaagaacaggagu

SEQ ID NO: 867667 - RNA, 22 nt, Human
auauuguugacuauaagaguaa

SEQ ID NO: 867668 - RNA, 21 nt, Human
acucaggagacuaacuauguc

SEQ ID NO: 867669 - RNA, 22 nt, Human
uaagaaucuauuaggaauaugu

SEQ ID NO: 867670 - RNA, 22 nt, Human
agauuuacugagaacugauuac

SEQ ID NO: 867671 - RNA, 22 nt, Human
uuugacaucaauacccuagaau

SEQ ID NO: 867672 - RNA, 22 nt, Human
ugaguaauaaacugucuugcuc

SEQ ID NO: 867673 - RNA, 21 nt, Human
auaagcaugcugauuacauuu

SEQ ID NO: 867674 - RNA, 22 nt, Human
caagaugugccuaaucagaccu

SEQ ID NO: 867675 - RNA, 22 nt, Human
ucacaucucccuggaggacaca

SEQ ID NO: 867676 - RNA, 22 nt, Human
agacaguguguguauauauggu

SEQ ID NO: 867677 - RNA, 22 nt, Human
uuugaaaggagcuuuauccaga

SEQ ID NO: 867678 - RNA, 22 nt, Human
aggcagguuggugagaagacug

SEQ ID NO: 867679 - RNA, 18 nt, Human
ggcagggaaaagauaggg

SEQ ID NO: 867680 - RNA, 22 nt, Human
ucauuuuucacacagggucacc

SEQ ID NO: 867681 - RNA, 22 nt, Human
ucugaaggugcuagagaaagcu

SEQ ID NO: 867682 - RNA, 22 nt, Human
augcugaauugaugcgagggag

SEQ ID NO: 867683 - RNA, 22 nt, Human
aggcagccaaucagaggcugac

SEQ ID NO: 867684 - RNA, 20 nt, Human
agaggaggauuauuuuauuc

SEQ ID NO: 867685 - RNA, 22 nt, Human
uuagagucaaaauggcauguua

SEQ ID NO: 867686 - RNA, 22 nt, Human
cucacuguuuaauagcuggauc

SEQ ID NO: 867687 - RNA, 20 nt, Human
aggcagcugggaaaugaggg

SEQ ID NO: 867688 - RNA, 22 nt, Human
gaggcaguuccugagugacaag

SEQ ID NO: 867689 - RNA, 22 nt, Human
gcaaacaaggacauacauccug

SEQ ID NO: 867690 - RNA, 22 nt, Human
cacacuuugugcuaaucuauuu

SEQ ID NO: 867691 - RNA, 22 nt, Human
cccaggagaauauaauguucuu

SEQ ID NO: 867692 - RNA, 22 nt, Human
gaggaaccaaaucagcuugcac

SEQ ID NO: 867693 - RNA, 22 nt, Human
uuccuuagcuccucauggccug

SEQ ID NO: 867694 - RNA, 18 nt, Human
acucaggaaaugaugaca

SEQ ID NO: 867695 - RNA, 22 nt, Human
cauuuacauuuaagguuaauau

SEQ ID NO: 867696 - RNA, 22 nt, Human
acccaggaggcagagguugcag

SEQ ID NO: 867697 - RNA, 22 nt, Human
gucuucuguaagaugagguccc

SEQ ID NO: 867698 - RNA, 22 nt, Human
gggcagcucggaagugggaaag

SEQ ID NO: 867699 - RNA, 22 nt, Human
gcccaggaguugguggcugcag

SEQ ID NO: 867700 - RNA, 22 nt, Human
uagcccagcaugagcagagcug

SEQ ID NO: 867701 - RNA, 22 nt, Human
auauuucaugggguuccauacu

SEQ ID NO: 867702 - RNA, 22 nt, Human
aagaagagaaaugugcugcugg

SEQ ID NO: 867703 - RNA, 22 nt, Human
gcuccucuauuccccacauuuu

SEQ ID NO: 867704 - RNA, 22 nt, Human
aaguggacuaauacaaggacua

SEQ ID NO: 867705 - RNA, 22 nt, Human
aggccagaaauuuggaguaugu

SEQ ID NO: 867706 - RNA, 22 nt, Human
ugugaauagugccgcaauaaac

SEQ ID NO: 867707 - RNA, 20 nt, Human
guaaaauauggucuuugggu

SEQ ID NO: 867708 - RNA, 22 nt, Human
cuuccaaauguaaauaaguuuc

SEQ ID NO: 867709 - RNA, 22 nt, Human
cuacagaauucaacaaaugguu

SEQ ID NO: 867710 - RNA, 22 nt, Human
caguccuuggcuucauccgagu

SEQ ID NO: 867711 - RNA, 22 nt, Human
uuuuauguuccucuuuaugcga

SEQ ID NO: 867712 - RNA, 22 nt, Human
cauuuccacuucugaaaacugg

SEQ ID NO: 867713 - RNA, 22 nt, Human
auguucaaacaaguuaaugcca

SEQ ID NO: 867714 - RNA, 22 nt, Human
aaagucaucagaaccuuccaga

SEQ ID NO: 867715 - RNA, 22 nt, Human
gcugcugucacggugcuaaggg

SEQ ID NO: 867716 - RNA, 22 nt, Human
cagaggcacaagaaagcaaggc

SEQ ID NO: 867717 - RNA, 22 nt, Human
cugcugugccucuuuucacgug

SEQ ID NO: 867718 - RNA, 22 nt, Human
ccaggagaagcaucugagugua

SEQ ID NO: 867719 - RNA, 22 nt, Human
ucugguaaccuuuaucccuccu

SEQ ID NO: 867720 - RNA, 22 nt, Human
cugcgcagcaaucagagaggag

SEQ ID NO: 867721 - RNA, 22 nt, Human
auggcuuucagauuucuauguu

SEQ ID NO: 867722 - RNA, 22 nt, Human
aucuuucuccauauacaucuuu

SEQ ID NO: 867723 - RNA, 22 nt, Human
caguucuuauuuggccaguguc

SEQ ID NO: 867724 - RNA, 22 nt, Human
acaaaauuaugaagaggccuug

SEQ ID NO: 867725 - RNA, 22 nt, Human
uggagcugggguuugaaucugg

SEQ ID NO: 867726 - RNA, 21 nt, Human
aggcagcaggauccagggaca

SEQ ID NO: 867727 - RNA, 22 nt, Human
gauuucuugauaauucaaaucc

SEQ ID NO: 867728 - RNA, 22 nt, Human
agugcuuucccugaaaccuucc

SEQ ID NO: 867729 - RNA, 22 nt, Human
uaaguccuagcuuugguaggaa

SEQ ID NO: 867730 - RNA, 22 nt, Human
gugauuuaguguuaaguauguu

SEQ ID NO: 867731 - RNA, 22 nt, Human
uuguuugaggucacugauauuu

SEQ ID NO: 867732 - RNA, 22 nt, Human
uugauccaguugaaagugauga

SEQ ID NO: 867733 - RNA, 22 nt, Human
acaaaaagggagaugagguaga

SEQ ID NO: 867734 - RNA, 15 nt, Human
cccaggaguucgaga

SEQ ID NO: 867735 - RNA, 22 nt, Human
uagcugcugcagcacagggagg

SEQ ID NO: 867736 - RNA, 22 nt, Human
uccacauccauugcuugacuuu

SEQ ID NO: 867737 - RNA, 22 nt, Human
aaggcagccuuuugaguugauu

SEQ ID NO: 867738 - RNA, 22 nt, Human
uggcagcugcaggccuccugag

SEQ ID NO: 867739 - RNA, 22 nt, Human
uuuuccagauuggacuuagucc

SEQ ID NO: 867740 - RNA, 22 nt, Human
acacauauauacauauuugugc

SEQ ID NO: 867741 - RNA, 22 nt, Human
ugaucugaaggacaugggaccc

SEQ ID NO: 867742 - RNA, 22 nt, Human
aggguggccaugagggagagau

SEQ ID NO: 867743 - RNA, 22 nt, Human
gagauuuagagagacuuaaaca

SEQ ID NO: 867744 - RNA, 22 nt, Human
uuugaaagagcugauacaugaa

SEQ ID NO: 867745 - RNA, 22 nt, Human
ucuggcaggcaaucggcucugg

SEQ ID NO: 867746 - RNA, 22 nt, Human
ggauggcauguugggcucuguu

SEQ ID NO: 867747 - RNA, 22 nt, Human
ugaggcagcauucuucaagaca

SEQ ID NO: 867748 - RNA, 22 nt, Human
guauagaaacccagaaagauag

SEQ ID NO: 867749 - RNA, 22 nt, Human
agucaccagguuuuagagaccu

SEQ ID NO: 867750 - RNA, 22 nt, Human
uuucaacaccagagaccaugcg

SEQ ID NO: 867751 - RNA, 22 nt, Human
agaaaugacaagacugaucagg

SEQ ID NO: 867752 - RNA, 22 nt, Human
gaauuucaacaguccucaaaug

SEQ ID NO: 867753 - RNA, 22 nt, Human
cuggccagcugacagcagggcu

SEQ ID NO: 867754 - RNA, 22 nt, Human
cccaggaaagagacugcugggu

SEQ ID NO: 867755 - RNA, 22 nt, Human
uuugaaagucaaccuuccaguu

SEQ ID NO: 867756 - RNA, 22 nt, Human
ggaggugguggcagugacaauu

SEQ ID NO: 867757 - RNA, 22 nt, Human
gacccaggguauccagagcugc

SEQ ID NO: 867758 - RNA, 22 nt, Human
guggaauguccuugaucauaag

SEQ ID NO: 867759 - RNA, 22 nt, Human
uauuuccaggccccacucuaga

SEQ ID NO: 867760 - RNA, 20 nt, Human
uuccuuaggcauuggaagaa

SEQ ID NO: 867761 - RNA, 22 nt, Human
uccagaauacucugaaaucauu

SEQ ID NO: 867762 - RNA, 22 nt, Human
aaauauagugacacuuauaguc

SEQ ID NO: 867763 - RNA, 22 nt, Human
ggccuuuaagcaauugaaaaga

SEQ ID NO: 867764 - RNA, 22 nt, Human
guuuuaguggguggccacugau

SEQ ID NO: 867765 - RNA, 19 nt, Human
cauguuaugcuguaguauc

SEQ ID NO: 867766 - RNA, 22 nt, Human
cuacagacccaccuuggaagaa

SEQ ID NO: 867767 - RNA, 22 nt, Human
ccucuucuagguuucagccugc

SEQ ID NO: 867768 - RNA, 22 nt, Human
gaggaaccaaucugugauauuc

SEQ ID NO: 867769 - RNA, 22 nt, Human
gagagucuagugcaccuaguuu

SEQ ID NO: 867770 - RNA, 23 nt, Human
augguuuaugucacacuuuugau

SEQ ID NO: 867771 - RNA, 22 nt, Human
cuggauuuuagaaggcuuccua

SEQ ID NO: 867772 - RNA, 22 nt, Human
auuugcuugugcuaugaaaguu

SEQ ID NO: 867773 - RNA, 22 nt, Human
uuaauuacuaagcacaaugcaa

SEQ ID NO: 867774 - RNA, 22 nt, Human
uaugaaaagguggccaauguag

SEQ ID NO: 867775 - RNA, 22 nt, Human
ugaggcaggaauggggaaaagu

SEQ ID NO: 867776 - RNA, 22 nt, Human
acccaggaugauaauguucaca

SEQ ID NO: 867777 - RNA, 22 nt, Human
cagucucuaaaucaaucugaau

SEQ ID NO: 867778 - RNA, 22 nt, Human
ccaggcugccgaggaaagaaag

SEQ ID NO: 867779 - RNA, 22 nt, Human
aacaugcucuguuucuuggaug

SEQ ID NO: 867780 - RNA, 22 nt, Human
uuugaagucaggcuuucuaccc

SEQ ID NO: 867781 - RNA, 22 nt, Human
aaucaaaaccuacagagguaau

SEQ ID NO: 867782 - RNA, 22 nt, Human
aaucauucuuauuucacagcaa

SEQ ID NO: 867783 - RNA, 23 nt, Human
accaggaguugucucaggaaaca

SEQ ID NO: 867784 - RNA, 22 nt, Human
ugagccugguugcagugucugg

SEQ ID NO: 867785 - RNA, 22 nt, Human
auggccuuagugaugauuaaua

SEQ ID NO: 867786 - RNA, 22 nt, Human
ucagccaggccaggcauucaca

SEQ ID NO: 867787 - RNA, 22 nt, Human
ugcaacuuguuuggagagaaag

SEQ ID NO: 867788 - RNA, 22 nt, Human
cucuucuuggcccccaugaggg

SEQ ID NO: 867789 - RNA, 22 nt, Human
uggcaaggcugugggggcagag

SEQ ID NO: 867790 - RNA, 22 nt, Human
uuaacagagugccuggcaugua

SEQ ID NO: 867791 - RNA, 22 nt, Human
uauuuccauguuagaacuaagu

SEQ ID NO: 867792 - RNA, 22 nt, Human
uugauacuauuaagcacugggc

SEQ ID NO: 867793 - RNA, 22 nt, Human
uacuaucucuucuaacuucaga

SEQ ID NO: 867794 - RNA, 22 nt, Human
auucucuuuguauaacaucuug

SEQ ID NO: 867795 - RNA, 22 nt, Human
agaucugaggguccaagggagg

SEQ ID NO: 867796 - RNA, 22 nt, Human
ggguggagcuuggacaccagua

SEQ ID NO: 867797 - RNA, 22 nt, Human
cauggcuuuuuagcauauucaa

SEQ ID NO: 867798 - RNA, 22 nt, Human
augugaggaagaaagagguaag

SEQ ID NO: 867799 - RNA, 22 nt, Human
agaauuuccuaugagagauucc

SEQ ID NO: 867800 - RNA, 22 nt, Human
augcuguggggagugaggguag

SEQ ID NO: 867801 - RNA, 22 nt, Human
aggcagcuuucuguaggggugu

SEQ ID NO: 867802 - RNA, 22 nt, Human
uuauuauuggugaguuaaggaa

SEQ ID NO: 867803 - RNA, 22 nt, Human
gauguguuuccaggauuuguuu

SEQ ID NO: 867804 - RNA, 22 nt, Human
auucacuggcagacagaacuca

SEQ ID NO: 867805 - RNA, 19 nt, Human
aggauuuauuaugugcuca

SEQ ID NO: 867806 - RNA, 22 nt, Human
uugcuagcugguguaugcauug

SEQ ID NO: 867807 - RNA, 20 nt, Human
cccaggaguuugcucuuacu

SEQ ID NO: 867808 - RNA, 22 nt, Human
gggaggugauggcaagcagcgg

SEQ ID NO: 867809 - RNA, 22 nt, Human
cagcuucugucugauuagcaag

SEQ ID NO: 867810 - RNA, 22 nt, Human
uuacagaaguauugagagaucc

SEQ ID NO: 867811 - RNA, 22 nt, Human
accaggagggacccugguggcc

SEQ ID NO: 867812 - RNA, 22 nt, Human
ucagccagcaucagcuaagugc

SEQ ID NO: 867813 - RNA, 22 nt, Human
ccaggcugugguuuagauagag

SEQ ID NO: 867814 - RNA, 22 nt, Human
auaauucaugggccuuucaccu

SEQ ID NO: 867815 - RNA, 20 nt, Human
acaauacagguugugucuga

SEQ ID NO: 867816 - RNA, 22 nt, Human
uuugaacaggaguaucuauagu

SEQ ID NO: 867817 - RNA, 22 nt, Human
auauacaaagggcaaccucgcu

SEQ ID NO: 867818 - RNA, 22 nt, Human
gcugcugugccuggcguccugu

SEQ ID NO: 867819 - RNA, 22 nt, Human
uucucuuuucaccaguugcuaa

SEQ ID NO: 867820 - RNA, 23 nt, Human
uaauacugcuucagaggcuuaga

SEQ ID NO: 867821 - RNA, 22 nt, Human
cagaaagcuuaggcaaguugga

SEQ ID NO: 867822 - RNA, 22 nt, Human
cugugauuguuaguuccuauac

SEQ ID NO: 867823 - RNA, 22 nt, Human
aaucccagcuacucaggaaguu

SEQ ID NO: 867824 - RNA, 23 nt, Human
uacagaaggaguagucacuaaga

SEQ ID NO: 867825 - RNA, 22 nt, Human
uggcuuaagcgcaacucugucu

SEQ ID NO: 867826 - RNA, 22 nt, Human
aggcaccuugcgguccagugaa

SEQ ID NO: 867827 - RNA, 22 nt, Human
uguauacaggcauaagagauac

SEQ ID NO: 867828 - RNA, 19 nt, Human
ugcugaaguugucagucug

SEQ ID NO: 867829 - RNA, 22 nt, Human
augcugugucuagcaggaacac

SEQ ID NO: 867830 - RNA, 22 nt, Human
aaugucugccagaacugaucau

SEQ ID NO: 867831 - RNA, 22 nt, Human
acaacuuugacccuuguucuua

SEQ ID NO: 867832 - RNA, 22 nt, Human
gucaggaugacaagugcuuuca

SEQ ID NO: 867833 - RNA, 22 nt, Human
cagcaggauuugaaaggaagag

SEQ ID NO: 867834 - RNA, 22 nt, Human
uguacaaugccgagacuaacuc

SEQ ID NO: 867835 - RNA, 22 nt, Human
uugaaauaucaaguuauuagug

SEQ ID NO: 867836 - RNA, 18 nt, Human
gugcugugggcaguggcc

SEQ ID NO: 867837 - RNA, 22 nt, Human
ggugguggagccagcugggagu

SEQ ID NO: 867838 - RNA, 22 nt, Human
gaaggaggcguuagcccuagga

SEQ ID NO: 867839 - RNA, 22 nt, Human
uuucccagagguaugaauaagu

SEQ ID NO: 867840 - RNA, 22 nt, Human
uugauuaaucccaugugaguag

SEQ ID NO: 867841 - RNA, 21 nt, Human
ucucugugucuuuaagcugga

SEQ ID NO: 867842 - RNA, 22 nt, Human
uacacacaugcauuugccuuau

SEQ ID NO: 867843 - RNA, 23 nt, Human
uccaugagaugugggcuucuagu

SEQ ID NO: 867844 - RNA, 22 nt, Human
aggguccugggugcaguugcuu

SEQ ID NO: 867845 - RNA, 22 nt, Human
augcugugaaaaagaaggcuga

SEQ ID NO: 867846 - RNA, 22 nt, Human
ucucuucuaacacuagaaauuc

SEQ ID NO: 867847 - RNA, 22 nt, Human
aauccugugugacucuggggag

SEQ ID NO: 867848 - RNA, 22 nt, Human
augguuuaguuagggcuuuuca

SEQ ID NO: 867849 - RNA, 22 nt, Human
cugucauuuaagacauucugga

SEQ ID NO: 867850 - RNA, 22 nt, Human
guucucucugcuuccaagaugg

SEQ ID NO: 867851 - RNA, 22 nt, Human
uagggcaggugaagaaaagcua

SEQ ID NO: 867852 - RNA, 22 nt, Human
uuuguuaaauauuuauugagug

SEQ ID NO: 867853 - RNA, 22 nt, Human
auaaacucaugccaagaaauga

SEQ ID NO: 867854 - RNA, 22 nt, Human
uuugaaagcaggugugggaggg

SEQ ID NO: 867855 - RNA, 22 nt, Human
caggaugagguagaggcagaua

SEQ ID NO: 867856 - RNA, 22 nt, Human
cccaggagacugagcuguaacc

SEQ ID NO: 867857 - RNA, 22 nt, Human
caucagaaggaaggacgauuau

SEQ ID NO: 867858 - RNA, 22 nt, Human
uggagacucugcaucugugaca

SEQ ID NO: 867859 - RNA, 22 nt, Human
auacuguuucucuucuacauga

SEQ ID NO: 867860 - RNA, 21 nt, Human
aaauacagaaacuuguuuuca

SEQ ID NO: 867861 - RNA, 22 nt, Human
guugaaagcuuuucauuuaguu

SEQ ID NO: 867862 - RNA, 22 nt, Human
gauuucuuuaugaaguacagaa

SEQ ID NO: 867863 - RNA, 22 nt, Human
acauaaguuauggauaaaaugu

SEQ ID NO: 867864 - RNA, 22 nt, Human
uuccaugagcucugaguucaca

SEQ ID NO: 867865 - RNA, 22 nt, Human
aaagccuuugucucaggcucug

SEQ ID NO: 867866 - RNA, 22 nt, Human
uuucucuguucucuaacuguaa

SEQ ID NO: 867867 - RNA, 22 nt, Human
gcagaagucagaccaucugaau

SEQ ID NO: 867868 - RNA, 22 nt, Human
uuucacagguacaaacacuccu

SEQ ID NO: 867869 - RNA, 22 nt, Human
ggacuucuaagugccagacacu

SEQ ID NO: 867870 - RNA, 22 nt, Human
ugcuuugggucucucuaguuuc

SEQ ID NO: 867871 - RNA, 22 nt, Human
gagagggagccagccaggaacc

SEQ ID NO: 867872 - RNA, 22 nt, Human
aggcaacuguuugauaauguug

SEQ ID NO: 867873 - RNA, 20 nt, Human
ccucaggaugagggugagca

SEQ ID NO: 867874 - RNA, 22 nt, Human
cauuuguaguaucuguuuauau

SEQ ID NO: 867875 - RNA, 22 nt, Human
cucagaagaacaaaggcucuac

SEQ ID NO: 867876 - RNA, 22 nt, Human
caggcaggucagugaagaagga

SEQ ID NO: 867877 - RNA, 22 nt, Human
aguauugugacucaaguauucu

SEQ ID NO: 867878 - RNA, 22 nt, Human
gcucccagacugaccagaggug

SEQ ID NO: 867879 - RNA, 22 nt, Human
aggagggaccuaggaauauugc

SEQ ID NO: 867880 - RNA, 22 nt, Human
cauauaaauacaacauguguua

SEQ ID NO: 867881 - RNA, 22 nt, Human
uuugacauugccaauuugcuca

SEQ ID NO: 867882 - RNA, 22 nt, Human
cuucuucaaccugaaaguuuca

SEQ ID NO: 867883 - RNA, 22 nt, Human
agaggacagguuuuccaugggc

SEQ ID NO: 867884 - RNA, 22 nt, Human
aaguguauauaugacuuauaaa

SEQ ID NO: 867885 - RNA, 22 nt, Human
uugaaauacugcauuguucagu

SEQ ID NO: 867886 - RNA, 22 nt, Human
caggcagcugcuggguucagcc

SEQ ID NO: 867887 - RNA, 22 nt, Human
auuuaaauuuucugauggagag

SEQ ID NO: 867888 - RNA, 22 nt, Human
gggacgggcaguccaagggguc

SEQ ID NO: 867889 - RNA, 22 nt, Human
auaagcauguuagaauauuuga

SEQ ID NO: 867890 - RNA, 22 nt, Human
agccagcucccuccccugcagg

SEQ ID NO: 867891 - RNA, 22 nt, Human
cagucucucagcuuucagcugu

SEQ ID NO: 867892 - RNA, 22 nt, Human
uauggcuuuaaacaacuuaggu

SEQ ID NO: 867893 - RNA, 22 nt, Human
cauuaaaauaucucaugguguu

SEQ ID NO: 867894 - RNA, 22 nt, Human
gcaaguuauuuccauuuaaagc

SEQ ID NO: 867895 - RNA, 22 nt, Human
acagccaggaggaacucaguga

SEQ ID NO: 867896 - RNA, 22 nt, Human
aauuuccagaucagaugacuca

SEQ ID NO: 867897 - RNA, 20 nt, Human
gaagcagcuucauguagaca

SEQ ID NO: 867898 - RNA, 22 nt, Human
uuccugagggacuuuugagauu

SEQ ID NO: 867899 - RNA, 22 nt, Human
ugccaggauauaagagugcgau

SEQ ID NO: 867900 - RNA, 22 nt, Human
uagucaccuuuggcaccugcaa

SEQ ID NO: 867901 - RNA, 22 nt, Human
cuacccaggcuggagugcagua

SEQ ID NO: 867902 - RNA, 20 nt, Human
ucauuguguugccaauuccc

SEQ ID NO: 867903 - RNA, 22 nt, Human
aauuucaaacucuugcccucag

SEQ ID NO: 867904 - RNA, 21 nt, Human
gccaggaguagauuacauuua

SEQ ID NO: 867905 - RNA, 22 nt, Human
acuucacagaaauuuuaugagg

SEQ ID NO: 867906 - RNA, 22 nt, Human
auacagaauacuaauuccugag

SEQ ID NO: 867907 - RNA, 22 nt, Human
cucacugucuguacuagcugau

SEQ ID NO: 867908 - RNA, 22 nt, Human
gaaacugugaggaucuuaacuu

SEQ ID NO: 867909 - RNA, 22 nt, Human
aggcacagagaaugcccuccau

SEQ ID NO: 867910 - RNA, 22 nt, Human
gcacaauaauuuuuuuaagagg

SEQ ID NO: 867911 - RNA, 19 nt, Human
uggggcuguguuuugaccc

SEQ ID NO: 867912 - RNA, 22 nt, Human
caguccuuucaauggugaccuu

SEQ ID NO: 867913 - RNA, 22 nt, Human
uacccagggcuuuucugaugca

SEQ ID NO: 867914 - RNA, 17 nt, Human
caauuucauagguuuug

SEQ ID NO: 867915 - RNA, 23 nt, Human
agaucugauguuaccaagaauug

SEQ ID NO: 867916 - RNA, 22 nt, Human
uauacagaaagaauucaagucu

SEQ ID NO: 867917 - RNA, 22 nt, Human
ucacaugaguauuauuuuccaa

SEQ ID NO: 867918 - RNA, 22 nt, Human
ccaaacaaauccccauucuuag

SEQ ID NO: 867919 - RNA, 23 nt, Human
ucuccuccuagauacagucaugg

SEQ ID NO: 867920 - RNA, 22 nt, Human
uagaauaaguugaugauauaug

SEQ ID NO: 867921 - RNA, 22 nt, Human
uugguuuagagagugugguuac

SEQ ID NO: 867922 - RNA, 22 nt, Human
ucaucuugcugccauugcuuua

SEQ ID NO: 867923 - RNA, 22 nt, Human
aguucucagcuuaguaugcugu

SEQ ID NO: 867924 - RNA, 22 nt, Human
uuuaaauggcauuuucccagau

SEQ ID NO: 867925 - RNA, 22 nt, Human
cuggaggcacccuuagagaggc

SEQ ID NO: 867926 - RNA, 19 nt, Human
agaggcagucuccaacagg

SEQ ID NO: 867927 - RNA, 22 nt, Human
auguucuuucagccagugcauc

SEQ ID NO: 867928 - RNA, 20 nt, Human
ucuaauuaaaauugucuagu

SEQ ID NO: 867929 - RNA, 18 nt, Human
auagaaaccuuuaaucag

SEQ ID NO: 867930 - RNA, 22 nt, Human
gcccaggaugguguguaguggu

SEQ ID NO: 867931 - RNA, 22 nt, Human
gccaggaggggagaguguguca

SEQ ID NO: 867932 - RNA, 22 nt, Human
agcaucuggcagaaagucagaa

SEQ ID NO: 867933 - RNA, 20 nt, Human
gggugggagagucugagggu

SEQ ID NO: 867934 - RNA, 22 nt, Human
aucaggaugcugucaguuacca

SEQ ID NO: 867935 - RNA, 22 nt, Human
ugccuguguccccuucuuggca

SEQ ID NO: 867936 - RNA, 19 nt, Human
cuggccaggccaggggccc

SEQ ID NO: 867937 - RNA, 22 nt, Human
agccuuguuggucugaguuugg

SEQ ID NO: 867938 - RNA, 18 nt, Human
aguccuuacgaggcuaua

SEQ ID NO: 867939 - RNA, 22 nt, Human
agaggaugguugaggaagaccu

SEQ ID NO: 867940 - RNA, 22 nt, Human
ucuuucaaugagcauucuuucc

SEQ ID NO: 867941 - RNA, 22 nt, Human
accaggaguuuugaccaggggc

SEQ ID NO: 867942 - RNA, 22 nt, Human
ucagaauucagagggagugggg

SEQ ID NO: 867943 - RNA, 22 nt, Human
ucucuuucuauaugugagucuu

SEQ ID NO: 867944 - RNA, 22 nt, Human
accaggagaggcacuugcaaug

SEQ ID NO: 867945 - RNA, 22 nt, Human
cuuuggcagccucugcuauuga

SEQ ID NO: 867946 - RNA, 22 nt, Human
caaggccaguccauuuuggaag

SEQ ID NO: 867947 - RNA, 20 nt, Human
ugaggcaggagaauggcaug

SEQ ID NO: 867948 - RNA, 22 nt, Human
uaauacagaaguguauuaaaau

SEQ ID NO: 867949 - RNA, 22 nt, Human
aguaaaucagaccucauuaugu

SEQ ID NO: 867950 - RNA, 22 nt, Human
gaccauuucuaggaaucagacu

SEQ ID NO: 867951 - RNA, 22 nt, Human
aguuugaaaguauugacagaag

SEQ ID NO: 867952 - RNA, 22 nt, Human
caauuucagucucagagaguuc

SEQ ID NO: 867953 - RNA, 22 nt, Human
aaaagccaagguccucuucaga

SEQ ID NO: 867954 - RNA, 22 nt, Human
caaaugauagagccgauuauca

SEQ ID NO: 867955 - RNA, 22 nt, Human
aggcaguggcugagaccagggg

SEQ ID NO: 867956 - RNA, 22 nt, Human
cagaguggcacucugcuggaug

SEQ ID NO: 867957 - RNA, 22 nt, Human
cagaucuguuugccagaucagc

SEQ ID NO: 867958 - RNA, 22 nt, Human
ucuuuccauggccacacagucu

SEQ ID NO: 867959 - RNA, 22 nt, Human
auuggcagaaacagcagggcca

SEQ ID NO: 867960 - RNA, 22 nt, Human
cauggcuuguaauaaauuuaua

SEQ ID NO: 867961 - RNA, 19 nt, Human
uucauucuuucuacuuacc

SEQ ID NO: 867962 - RNA, 22 nt, Human
uccaaaguguugggauuauagg

SEQ ID NO: 867963 - RNA, 23 nt, Human
uuuaacuuuccaauaauucauug

SEQ ID NO: 867964 - RNA, 23 nt, Human
aggauguaggauguauggcagag

SEQ ID NO: 867965 - RNA, 22 nt, Human
agcagagguguuuauuauggga

SEQ ID NO: 867966 - RNA, 22 nt, Human
aacauuggauauuuauuaaaag

SEQ ID NO: 867967 - RNA, 22 nt, Human
uugauuaaacaggcauauucaa

SEQ ID NO: 867968 - RNA, 22 nt, Human
aucuaucccaguuuaacucauu

SEQ ID NO: 867969 - RNA, 22 nt, Human
cauucauuagaauagauaugua

SEQ ID NO: 867970 - RNA, 22 nt, Human
aagcagcuggaagaguaagaug

SEQ ID NO: 867971 - RNA, 22 nt, Human
gaugggauuuuuuauguguuca

SEQ ID NO: 867972 - RNA, 23 nt, Human
accaggagccaagaucucccugg

SEQ ID NO: 867973 - RNA, 22 nt, Human
caauauauaggaacaacuuagg

SEQ ID NO: 867974 - RNA, 22 nt, Human
gcuauacaaguguagaauagag

SEQ ID NO: 867975 - RNA, 22 nt, Human
uugcucagcacuggagccagcu

SEQ ID NO: 867976 - RNA, 23 nt, Human
ucaggauauugugugccaaggug

SEQ ID NO: 867977 - RNA, 22 nt, Human
cauuuucagcacccaucugaaa

SEQ ID NO: 867978 - RNA, 22 nt, Human
uaguccuuuaauaguuaaugug

SEQ ID NO: 867979 - RNA, 22 nt, Human
uaaacauguugacaucuuaccu

SEQ ID NO: 867980 - RNA, 22 nt, Human
ccauggcuuuugagucucaaga

SEQ ID NO: 867981 - RNA, 22 nt, Human
aauuuccaaauuucugucacac

SEQ ID NO: 867982 - RNA, 22 nt, Human
caggagaucuuaggaauucuua

SEQ ID NO: 867983 - RNA, 22 nt, Human
cccuugcacauuugucuuuaau

SEQ ID NO: 867984 - RNA, 22 nt, Human
aaauugcaaaaguacuuuuagg

SEQ ID NO: 867985 - RNA, 22 nt, Human
cuguggaaggccuguccugaaa

SEQ ID NO: 867986 - RNA, 22 nt, Human
uguacaauguguuuguuggcuu

SEQ ID NO: 867987 - RNA, 22 nt, Human
uuuggaauguaguuuaaucauc

SEQ ID NO: 867988 - RNA, 22 nt, Human
uuuaggcauugggugcucaagu

SEQ ID NO: 867989 - RNA, 22 nt, Human
uccuuagagauacugucuugaa

SEQ ID NO: 867990 - RNA, 22 nt, Human
aggcaagcauugggaacagggc

SEQ ID NO: 867991 - RNA, 22 nt, Human
uggcagcuuuuuguuucaggcu

SEQ ID NO: 867992 - RNA, 22 nt, Human
acaugcuuuucccacaauuaua

SEQ ID NO: 867993 - RNA, 22 nt, Human
uaucagaaugcagccaugugca

SEQ ID NO: 867994 - RNA, 20 nt, Human
uucacagaggacucagguca

SEQ ID NO: 867995 - RNA, 20 nt, Human
cgugcugugaccuugagcau

SEQ ID NO: 867996 - RNA, 22 nt, Human
ccucacugcuauguguuugcuc

SEQ ID NO: 867997 - RNA, 22 nt, Human
uuucaagaacaacauucauuca

SEQ ID NO: 867998 - RNA, 21 nt, Human
ucuauucauuacaguuauuug

SEQ ID NO: 867999 - RNA, 22 nt, Human
cagagccacuuggagaugagaa

SEQ ID NO: 868000 - RNA, 22 nt, Human
uucagaaacaucaguggaugga

SEQ ID NO: 868001 - RNA, 22 nt, Human
ggagaggagcuauugggggcuc

SEQ ID NO: 868002 - RNA, 22 nt, Human
uggaggaaguugcuggaaguca

SEQ ID NO: 868003 - RNA, 22 nt, Human
gaugccucuuuuggcugaauua

SEQ ID NO: 868004 - RNA, 22 nt, Human
gccacaggcacuuaagggcugg

SEQ ID NO: 868005 - RNA, 22 nt, Human
uaauuucacugauaugaaguca

SEQ ID NO: 868006 - RNA, 22 nt, Human
ugaggcaggacuugcauaaagu

SEQ ID NO: 868007 - RNA, 22 nt, Human
ugagaacugaggauuugaauuc

SEQ ID NO: 868008 - RNA, 22 nt, Human
agguccagcuguugcagccucc

SEQ ID NO: 868009 - RNA, 22 nt, Human
caggagagcccggguccgggcu

SEQ ID NO: 868010 - RNA, 22 nt, Human
uuuaggcacagggaguugguuu

SEQ ID NO: 868011 - RNA, 22 nt, Human
uggcagcuguguccagguagaa

SEQ ID NO: 868012 - RNA, 22 nt, Human
gcagcugagagaagaacagggc

SEQ ID NO: 868013 - RNA, 22 nt, Human
gaaauuauugcuagagacugca

SEQ ID NO: 868014 - RNA, 22 nt, Human
cuucagaagaaaagcagugugu

SEQ ID NO: 868015 - RNA, 22 nt, Human
uauuuuaaagacugccagccua

SEQ ID NO: 868016 - RNA, 21 nt, Human
uucugggaaaugagcuggggc

SEQ ID NO: 868017 - RNA, 22 nt, Human
agaucugaaucucauccgagga

SEQ ID NO: 868018 - RNA, 22 nt, Human
cuguggaauugaugcuuagugu

SEQ ID NO: 868019 - RNA, 22 nt, Human
uuauuauuccccaagucauuau

SEQ ID NO: 868020 - RNA, 22 nt, Human
ugaaggccagcucuuuaucagc

SEQ ID NO: 868021 - RNA, 18 nt, Human
aagaggaggagcagguug

SEQ ID NO: 868022 - RNA, 22 nt, Human
gugcugugucuaucaggaauaa

SEQ ID NO: 868023 - RNA, 22 nt, Human
uggcauuugcucccuuguguuc

SEQ ID NO: 868024 - RNA, 21 nt, Human
cacucaggguaugugccaggc

SEQ ID NO: 868025 - RNA, 22 nt, Human
uuuaagauucaguaaggcaaac

SEQ ID NO: 868026 - RNA, 22 nt, Human
gaaaggugccccauaggcagga

SEQ ID NO: 868027 - RNA, 22 nt, Human
agugcuuuaccuagauaauguu

SEQ ID NO: 868028 - RNA, 22 nt, Human
aggguaggaacugaguggaagg

SEQ ID NO: 868029 - RNA, 22 nt, Human
aguuauuacucuuuaacauauu

SEQ ID NO: 868030 - RNA, 22 nt, Human
aggcaguggaugucaggaaugg

SEQ ID NO: 868031 - RNA, 22 nt, Human
cugcugugcagacagacucucu

SEQ ID NO: 868032 - RNA, 22 nt, Human
uaacagaagaugaaacuucuuu

SEQ ID NO: 868033 - RNA, 23 nt, Human
auauggcuguuguguguuaacau

SEQ ID NO: 868034 - RNA, 22 nt, Human
acagaauugaaaguauaaucug

SEQ ID NO: 868035 - RNA, 22 nt, Human
acaaaauuuuuagacaaggcuu

SEQ ID NO: 868036 - RNA, 22 nt, Human
aaguucuaauuuugcauucagg

SEQ ID NO: 868037 - RNA, 22 nt, Human
agccagcuguucuggggcagca

SEQ ID NO: 868038 - RNA, 20 nt, Human
augcuuucuugugugcugcu

SEQ ID NO: 868039 - RNA, 21 nt, Human
agucccauccgguaagcaagc

SEQ ID NO: 868040 - RNA, 22 nt, Human
aggcagucuaguccccaggcaa

SEQ ID NO: 868041 - RNA, 23 nt, Human
cagaaaucugaaaucuagaaaug

SEQ ID NO: 868042 - RNA, 22 nt, Human
aaugaaauguagcuuauccaua

SEQ ID NO: 868043 - RNA, 22 nt, Human
uuugaaaggguuaugagacuga

SEQ ID NO: 868044 - RNA, 22 nt, Human
uuaucacuuaugagcuuuuugc

SEQ ID NO: 868045 - RNA, 18 nt, Human
agaggggagguaagucug

SEQ ID NO: 868046 - RNA, 22 nt, Human
ugcuucuggaaacaguggcugu

SEQ ID NO: 868047 - RNA, 22 nt, Human
cauuuacagugagaguuuuuac

SEQ ID NO: 868048 - RNA, 22 nt, Human
caaugaaauugagauccagaga

SEQ ID NO: 868049 - RNA, 23 nt, Human
uuuuccagaaucgacucuguaga

SEQ ID NO: 868050 - RNA, 22 nt, Human
caugcugugcaucuugaugacc

SEQ ID NO: 868051 - RNA, 22 nt, Human
gcagcucccagcuugaaagguc

SEQ ID NO: 868052 - RNA, 22 nt, Human
cuggcuuucccuggacaacagc

SEQ ID NO: 868053 - RNA, 22 nt, Human
aggcacaguggcucacaccugu

SEQ ID NO: 868054 - RNA, 22 nt, Human
gagaaaugcaugcaugucauca

SEQ ID NO: 868055 - RNA, 22 nt, Human
gcagaggccuagguggaaggcc

SEQ ID NO: 868056 - RNA, 22 nt, Human
uuuacaaccucauauucugaug

SEQ ID NO: 868057 - RNA, 22 nt, Human
gucaggauguuuauucuccagu

SEQ ID NO: 868058 - RNA, 22 nt, Human
cauguuuacuaccaggagaaug

SEQ ID NO: 868059 - RNA, 22 nt, Human
ucucugaguaagugacaguuca

SEQ ID NO: 868060 - RNA, 22 nt, Human
cagaaacauguauaaaguugua

SEQ ID NO: 868061 - RNA, 22 nt, Human
agagugucugguagcugcucug

SEQ ID NO: 868062 - RNA, 22 nt, Human
aggaaagguagcgugccagcag

SEQ ID NO: 868063 - RNA, 22 nt, Human
acacaaugcauauuuuuccaga

SEQ ID NO: 868064 - RNA, 22 nt, Human
ccucugcucugguccaugugcu

SEQ ID NO: 868065 - RNA, 22 nt, Human
accauguguuuuacacauggua

SEQ ID NO: 868066 - RNA, 22 nt, Human
ucccaggaauccguccucuaga

SEQ ID NO: 868067 - RNA, 22 nt, Human
uuuuaucuucauuccuaucuac

SEQ ID NO: 868068 - RNA, 22 nt, Human
aaaggccagguuggcugguauu

SEQ ID NO: 868069 - RNA, 22 nt, Human
acauuuuuauucaucaaagcag

SEQ ID NO: 868070 - RNA, 22 nt, Human
cccaggaguucgaggcuguagu

SEQ ID NO: 868071 - RNA, 22 nt, Human
acacaaguucuaaagauugcgc

SEQ ID NO: 868072 - RNA, 22 nt, Human
ugaggcaggaugcuugcacagg

SEQ ID NO: 868073 - RNA, 22 nt, Human
guugaaagaucauguggcugcc

SEQ ID NO: 868074 - RNA, 21 nt, Human
gagacagcccagugccagggc

SEQ ID NO: 868075 - RNA, 23 nt, Human
uacuuaggguuuagaucugacug

SEQ ID NO: 868076 - RNA, 22 nt, Human
cugaauaauauuccauuaugag

SEQ ID NO: 868077 - RNA, 22 nt, Human
uggcagcuauuacaaggaaguc

SEQ ID NO: 868078 - RNA, 22 nt, Human
cugcuuccauaaauaaugugcu

SEQ ID NO: 868079 - RNA, 22 nt, Human
gaucuguuauaaucucuuuuau

SEQ ID NO: 868080 - RNA, 22 nt, Human
ucuucuucccaucccucaaaug

SEQ ID NO: 868081 - RNA, 22 nt, Human
uuuccaaaguugccauaagcuu

SEQ ID NO: 868082 - RNA, 22 nt, Human
uggaaggaaagguagcagagaa

SEQ ID NO: 868083 - RNA, 22 nt, Human
aggagggacaccaauauauguu

SEQ ID NO: 868084 - RNA, 22 nt, Human
ucucucuuuuuaaucauguaau

SEQ ID NO: 868085 - RNA, 22 nt, Human
ucacaauuuggauacagcuaug

SEQ ID NO: 868086 - RNA, 22 nt, Human
cuucucagaggccagaagcuau

SEQ ID NO: 868087 - RNA, 21 nt, Human
agggagcuuuagguagaaguu

SEQ ID NO: 868088 - RNA, 22 nt, Human
gaggcaguuugccaugccagga

SEQ ID NO: 868089 - RNA, 22 nt, Human
aaucagaaucaguugacacagc

SEQ ID NO: 868090 - RNA, 22 nt, Human
ccccaggacacauggaccaagu

SEQ ID NO: 868091 - RNA, 22 nt, Human
aaucagaaccuugggucauaac

SEQ ID NO: 868092 - RNA, 22 nt, Human
uuacagaacugucuugaaauuu

SEQ ID NO: 868093 - RNA, 22 nt, Human
auagucuuagaucagauaaagu

SEQ ID NO: 868094 - RNA, 22 nt, Human
ggaggcagaacuucccgucagu

SEQ ID NO: 868095 - RNA, 22 nt, Human
ggcaggcaaugaggaugggaag

SEQ ID NO: 868096 - RNA, 22 nt, Human
uggaggaaguggcuggccagaa

SEQ ID NO: 868097 - RNA, 22 nt, Human
guuccaaacaagucauaaagua

SEQ ID NO: 868098 - RNA, 22 nt, Human
uucauacuaaaguguaagaugu

SEQ ID NO: 868099 - RNA, 22 nt, Human
cggaggggauacauuuucugaa

SEQ ID NO: 868100 - RNA, 22 nt, Human
cugcuguguggugaaacucagu

SEQ ID NO: 868101 - RNA, 22 nt, Human
guuauaaaaugcacaguuguuu

SEQ ID NO: 868102 - RNA, 22 nt, Human
cagagaaaaaauccugcucuca

SEQ ID NO: 868103 - RNA, 22 nt, Human
ucugcuguucauucuuuuagcu

SEQ ID NO: 868104 - RNA, 22 nt, Human
uccaaaaaacguuugaauaguu

SEQ ID NO: 868105 - RNA, 22 nt, Human
ugaaauaauaucuggaucaauc

SEQ ID NO: 868106 - RNA, 22 nt, Human
agaaaugcucaggucaacuuaa

SEQ ID NO: 868107 - RNA, 19 nt, Human
ugugaaagcuaguguucuu

SEQ ID NO: 868108 - RNA, 22 nt, Human
cauuuuaaaugauuuaagccaa

SEQ ID NO: 868109 - RNA, 22 nt, Human
ucuucuccagugcuucugcaca

SEQ ID NO: 868110 - RNA, 22 nt, Human
gcuuuggagccuguguucugcc

SEQ ID NO: 868111 - RNA, 22 nt, Human
auuguauaacagcauguauuuu

SEQ ID NO: 868112 - RNA, 22 nt, Human
auugucuuuccacugagaaguu

SEQ ID NO: 868113 - RNA, 22 nt, Human
auucaaauuaaguuaauucagc

SEQ ID NO: 868114 - RNA, 21 nt, Human
agcagaggcagaauguaugca

SEQ ID NO: 868115 - RNA, 22 nt, Human
uggauuaguuaagaaauguuag

SEQ ID NO: 868116 - RNA, 17 nt, Human
cccacggaggugugaaa

SEQ ID NO: 868117 - RNA, 22 nt, Human
gagagcaggaggcagcgggacg

SEQ ID NO: 868118 - RNA, 22 nt, Human
gaaucucaguggaagcaggaag

SEQ ID NO: 868119 - RNA, 22 nt, Human
uuucaaacauaucuucauuacu

SEQ ID NO: 868120 - RNA, 22 nt, Human
ucucuucuaauuaggguccaug

SEQ ID NO: 868121 - RNA, 22 nt, Human
auuccaaacagugcugcagacu

SEQ ID NO: 868122 - RNA, 22 nt, Human
caggcagcaggagcccugcucg

SEQ ID NO: 868123 - RNA, 22 nt, Human
cuugcaggauuuugcugcugua

SEQ ID NO: 868124 - RNA, 22 nt, Human
cccuuagcucaauuucuugccc

SEQ ID NO: 868125 - RNA, 22 nt, Human
agucccuguacuuuccacugcc

SEQ ID NO: 868126 - RNA, 20 nt, Human
cugagagucugugcuuaguc

SEQ ID NO: 868127 - RNA, 22 nt, Human
uuaguuuucccaucuuuauggu

SEQ ID NO: 868128 - RNA, 22 nt, Human
uugaacaguccuaagagacccu

SEQ ID NO: 868129 - RNA, 22 nt, Human
uuggaucagaugauaucuuugu

SEQ ID NO: 868130 - RNA, 22 nt, Human
uuaacacuugaacucuacaugu

SEQ ID NO: 868131 - RNA, 22 nt, Human
cagaggcauacucccagucuug

SEQ ID NO: 868132 - RNA, 22 nt, Human
cuagccaugggcauuaaaggua

SEQ ID NO: 868133 - RNA, 22 nt, Human
gggcagcuccuguggaauccac

SEQ ID NO: 868134 - RNA, 19 nt, Human
uucuccaggcugcagaggg

SEQ ID NO: 868135 - RNA, 19 nt, Human
aggguggcaaaggagggug

SEQ ID NO: 868136 - RNA, 22 nt, Human
uuuccaaauaaggucacauucu

SEQ ID NO: 868137 - RNA, 22 nt, Human
guccaugauucugugacacccu

SEQ ID NO: 868138 - RNA, 22 nt, Human
uggaauaaagugcuuugaucag

SEQ ID NO: 868139 - RNA, 22 nt, Human
uccaggaggugaggggaccaaa

SEQ ID NO: 868140 - RNA, 22 nt, Human
aaaauacuguggaguguugaaa

SEQ ID NO: 868141 - RNA, 22 nt, Human
gguuuaauggagauauuucaga

SEQ ID NO: 868142 - RNA, 21 nt, Human
uucaaaaugguguguuugucu

SEQ ID NO: 868143 - RNA, 22 nt, Human
aaggcagcaggauuuggugacu

SEQ ID NO: 868144 - RNA, 22 nt, Human
uauacuuuccugcaacuuugau

SEQ ID NO: 868145 - RNA, 22 nt, Human
cagcagagcugggcuuugaauu

SEQ ID NO: 868146 - RNA, 22 nt, Human
ucaguucugcuagaaaaacagu

SEQ ID NO: 868147 - RNA, 22 nt, Human
cguauacaugaagacauugcug

SEQ ID NO: 868148 - RNA, 22 nt, Human
uggcuuuaggagcuauauaccu

SEQ ID NO: 868149 - RNA, 22 nt, Human
uuaauauguugaaauuuauuag

SEQ ID NO: 868150 - RNA, 22 nt, Human
uagcccagaagagggaagcaac

SEQ ID NO: 868151 - RNA, 22 nt, Human
aagauauagauggugguauaaa

SEQ ID NO: 868152 - RNA, 22 nt, Human
aaugggauaggucuucaggaau

SEQ ID NO: 868153 - RNA, 21 nt, Human
cccaggaguccuauuuaaaug

SEQ ID NO: 868154 - RNA, 22 nt, Human
cagugauggauauggagaaguc

SEQ ID NO: 868155 - RNA, 22 nt, Human
uuaaauuuuagaaacagacucu

SEQ ID NO: 868156 - RNA, 22 nt, Human
aggcagcucuguggccucccag

SEQ ID NO: 868157 - RNA, 21 nt, Human
uggaggaauaaagcacagaag

SEQ ID NO: 868158 - RNA, 22 nt, Human
uauacagaacugcacgugcacg

SEQ ID NO: 868159 - RNA, 22 nt, Human
cauuugcagagggugacacucu

SEQ ID NO: 868160 - RNA, 22 nt, Human
cucuucuugaaagaggaauuca

SEQ ID NO: 868161 - RNA, 22 nt, Human
gcagagaacccagcagauuggc

SEQ ID NO: 868162 - RNA, 22 nt, Human
uccaggagggauugggcugugg

SEQ ID NO: 868163 - RNA, 22 nt, Human
ccaggagagcucuaaauggcug

SEQ ID NO: 868164 - RNA, 22 nt, Human
gaagcagcgaaguggaagggac

SEQ ID NO: 868165 - RNA, 20 nt, Human
uacagaaugcaauaaaaugg

SEQ ID NO: 868166 - RNA, 22 nt, Human
cuagccugggauuugaacuuau

SEQ ID NO: 868167 - RNA, 22 nt, Human
ccuuuaauuuacaauguuaauu

SEQ ID NO: 868168 - RNA, 22 nt, Human
ugguuuugcuaaaauagaaaga

SEQ ID NO: 868169 - RNA, 22 nt, Human
uucaggauaguggugaguggca

SEQ ID NO: 868170 - RNA, 22 nt, Human
ccauuguaaauucuguggaagu

SEQ ID NO: 868171 - RNA, 22 nt, Human
aggcagcuuuaacugguaguag

SEQ ID NO: 868172 - RNA, 22 nt, Human
caggaggggguggaguuucgcc

SEQ ID NO: 868173 - RNA, 22 nt, Human
aaucaguguggugacuugucug

SEQ ID NO: 868174 - RNA, 22 nt, Human
cuuaauuacuguccaauaugca

SEQ ID NO: 868175 - RNA, 22 nt, Human
auggcuuaugguaaauauuucu

SEQ ID NO: 868176 - RNA, 22 nt, Human
gauauuuugagaaauccuauga

SEQ ID NO: 868177 - RNA, 22 nt, Human
uuuaaaaucagaugggaguugg

SEQ ID NO: 868178 - RNA, 22 nt, Human
uacacauguuuggcaaguaugu

SEQ ID NO: 868179 - RNA, 22 nt, Human
ugaaacuaggccaaucaaauua

SEQ ID NO: 868180 - RNA, 22 nt, Human
gcaaauauucaagacuuuucca

SEQ ID NO: 868181 - RNA, 22 nt, Human
ucaucucaaaacccaaggggca

SEQ ID NO: 868182 - RNA, 22 nt, Human
cuugcugggguaagucugugcu

SEQ ID NO: 868183 - RNA, 22 nt, Human
ucaugcuuauugcauauuugga

SEQ ID NO: 868184 - RNA, 22 nt, Human
ucugucucaaguucuugcacuc

SEQ ID NO: 868185 - RNA, 22 nt, Human
uaauuauaacaguuacaucuua

SEQ ID NO: 868186 - RNA, 22 nt, Human
uuuauucaucaucuguucauau

SEQ ID NO: 868187 - RNA, 22 nt, Human
uugauagguuuuauguauaguu

SEQ ID NO: 868188 - RNA, 22 nt, Human
cuauacagagcauccuuaacuu

SEQ ID NO: 868189 - RNA, 22 nt, Human
gaggaacccagcugggguugcc

SEQ ID NO: 868190 - RNA, 22 nt, Human
aagacugucuuuucugagugac

SEQ ID NO: 868191 - RNA, 23 nt, Human
ggagugcaauggcgccaucucgg

SEQ ID NO: 868192 - RNA, 22 nt, Human
aguccuuaugugguggagagag

SEQ ID NO: 868193 - RNA, 22 nt, Human
acauuuaaccaaacuguuuaau

SEQ ID NO: 868194 - RNA, 22 nt, Human
cuacccagauccaggauggcua

SEQ ID NO: 868195 - RNA, 19 nt, Human
ccauggagagagaugcauu

SEQ ID NO: 868196 - RNA, 22 nt, Human
gcucacugcaaccucugcuucc

SEQ ID NO: 868197 - RNA, 22 nt, Human
guuauauauaguauuucucuga

SEQ ID NO: 868198 - RNA, 22 nt, Human
ucugcugugauuugcuaccugu

SEQ ID NO: 868199 - RNA, 22 nt, Human
aaauacugggcucaaaaggguu

SEQ ID NO: 868200 - RNA, 22 nt, Human
ugcuggcuacauuauugcuguc

SEQ ID NO: 868201 - RNA, 22 nt, Human
aguucacagccauguucaugug

SEQ ID NO: 868202 - RNA, 22 nt, Human
cagcuggcgggcagagccgcca

SEQ ID NO: 868203 - RNA, 22 nt, Human
cuggcuuucuauuuggugcuau

SEQ ID NO: 868204 - RNA, 22 nt, Human
uaucagaaagauauuacugggg

SEQ ID NO: 868205 - RNA, 22 nt, Human
ugaagaauaagauagauggagc

SEQ ID NO: 868206 - RNA, 22 nt, Human
uucucagauccaucagaagucc

SEQ ID NO: 868207 - RNA, 22 nt, Human
ggaggaggcggcagaaguuccu

SEQ ID NO: 868208 - RNA, 22 nt, Human
auguauuucuauguagugaaga

SEQ ID NO: 868209 - RNA, 22 nt, Human
ucucgacagccuggcacagugg

SEQ ID NO: 868210 - RNA, 22 nt, Human
cuggcuuucucugugguguuca

SEQ ID NO: 868211 - RNA, 22 nt, Human
aauaucagcacuuuugugguau

SEQ ID NO: 868212 - RNA, 22 nt, Human
ccauccugcauugcuauucaga

SEQ ID NO: 868213 - RNA, 22 nt, Human
cuggcaaguacugggccagcuc

SEQ ID NO: 868214 - RNA, 21 nt, Human
uaauaauuccacuacagagua

SEQ ID NO: 868215 - RNA, 22 nt, Human
uugaauaguuuuggauagcaua

SEQ ID NO: 868216 - RNA, 22 nt, Human
uuuaggcaauagauggcagugu

SEQ ID NO: 868217 - RNA, 23 nt, Human
ugcaugugaauucauacuuguuu

SEQ ID NO: 868218 - RNA, 22 nt, Human
uaggagagcugaacuauugucu

SEQ ID NO: 868219 - RNA, 21 nt, Human
acagucuccccagaucucucc

SEQ ID NO: 868220 - RNA, 22 nt, Human
ugaauaauuaugggaguccuaa

SEQ ID NO: 868221 - RNA, 22 nt, Human
ugaaacaagauccacagacuug

SEQ ID NO: 868222 - RNA, 22 nt, Human
gugaauaaaacaccugccaaga

SEQ ID NO: 868223 - RNA, 22 nt, Human
uucaacuagauuuauacaauuc

SEQ ID NO: 868224 - RNA, 22 nt, Human
uaguccuuuaucaaacauuuau

SEQ ID NO: 868225 - RNA, 22 nt, Human
ugguuuuagaugccuuuacugc

SEQ ID NO: 868226 - RNA, 22 nt, Human
ugcuuucaaaggcuuucuagau

SEQ ID NO: 868227 - RNA, 22 nt, Human
ugaggcaggagaaucacaugaa

SEQ ID NO: 868228 - RNA, 22 nt, Human
cuuuggcaaggguuuuaauugu

SEQ ID NO: 868229 - RNA, 22 nt, Human
gcuggauccugauucgucuuug

SEQ ID NO: 868230 - RNA, 22 nt, Human
aaaacaguuuaggcaucacagu

SEQ ID NO: 868231 - RNA, 22 nt, Human
cccaggaggcagagguuggagc

SEQ ID NO: 868232 - RNA, 22 nt, Human
auauuaaauggauuuugggagc

SEQ ID NO: 868233 - RNA, 22 nt, Human
cuuugaauuccaguacaauaac

SEQ ID NO: 868234 - RNA, 22 nt, Human
uguuuuuaaauaaugauagaaa

SEQ ID NO: 868235 - RNA, 22 nt, Human
caagauggacauaaggagagaa

SEQ ID NO: 868236 - RNA, 21 nt, Human
uuugaaagcuacaucuauagc

SEQ ID NO: 868237 - RNA, 22 nt, Human
auguuucaccagcaaauuaccu

SEQ ID NO: 868238 - RNA, 22 nt, Human
ucauuucaaguucugacagcua

SEQ ID NO: 868239 - RNA, 22 nt, Human
ugaaguuauauauguugaaaau

SEQ ID NO: 868240 - RNA, 22 nt, Human
agggcagcucucaccucuggcc

SEQ ID NO: 868241 - RNA, 22 nt, Human
gaucauuuacuuguucuggacu

SEQ ID NO: 868242 - RNA, 22 nt, Human
cauucucaauaguagaugagua

SEQ ID NO: 868243 - RNA, 22 nt, Human
uucacagagagaacucaaacca

SEQ ID NO: 868244 - RNA, 22 nt, Human
augaauaaacaggugccucuuc

SEQ ID NO: 868245 - RNA, 22 nt, Human
uuuaaugaauaauucaaaucug

SEQ ID NO: 868246 - RNA, 20 nt, Human
agagcagcaguuggugaggu

SEQ ID NO: 868247 - RNA, 19 nt, Human
uggcaggcccaggauggac

SEQ ID NO: 868248 - RNA, 22 nt, Human
uuugaaaggaauuaggaugaca

SEQ ID NO: 868249 - RNA, 22 nt, Human
uuccuuagugccucuuccgcug

SEQ ID NO: 868250 - RNA, 19 nt, Human
accaggaguaucagagcug

SEQ ID NO: 868251 - RNA, 22 nt, Human
ucauuauccuaguaucuugaau

SEQ ID NO: 868252 - RNA, 22 nt, Human
ugucugugaccucuuuggagcc

SEQ ID NO: 868253 - RNA, 22 nt, Human
aagcagaggaccgacggaggga

SEQ ID NO: 868254 - RNA, 22 nt, Human
uuagaaaugucacagaucugau

SEQ ID NO: 868255 - RNA, 22 nt, Human
caaggccacguucugcaugcgg

SEQ ID NO: 868256 - RNA, 22 nt, Human
caguccuuagauuuuacugcca

SEQ ID NO: 868257 - RNA, 22 nt, Human
caaguccucgcuucuagcugug

SEQ ID NO: 868258 - RNA, 22 nt, Human
uuuaggcagcuacauacuaacu

SEQ ID NO: 868259 - RNA, 23 nt, Human
uucauuugucuacuucacuuguu

SEQ ID NO: 868260 - RNA, 21 nt, Human
ucacaucuauguuaagcaaac

SEQ ID NO: 868261 - RNA, 22 nt, Human
cuugaaagcacuuaguaaauua

SEQ ID NO: 868262 - RNA, 22 nt, Human
ggagaggacauggcucccacag

SEQ ID NO: 868263 - RNA, 18 nt, Human
aguaaagcuuauuacaug

SEQ ID NO: 868264 - RNA, 23 nt, Human
cauuucaacgaauuuuccuucug

SEQ ID NO: 868265 - RNA, 23 nt, Human
gaggcacucaggaaaugugagug

SEQ ID NO: 868266 - RNA, 22 nt, Human
aauuccagcuaggaaaagcuuc

SEQ ID NO: 868267 - RNA, 22 nt, Human
uagaaacaucagcuaaccaaaa

SEQ ID NO: 868268 - RNA, 22 nt, Human
agucucuuccuucaaggcuggu

SEQ ID NO: 868269 - RNA, 22 nt, Human
agauggcagggguaccuggaag

SEQ ID NO: 868270 - RNA, 21 nt, Human
agggagcuggccacacagccu

SEQ ID NO: 868271 - RNA, 22 nt, Human
ugcuuaauacguauuugcugga

SEQ ID NO: 868272 - RNA, 22 nt, Human
ucaggagacauucuuaaaguag

SEQ ID NO: 868273 - RNA, 22 nt, Human
ugccaggagucaggccaggcag

SEQ ID NO: 868274 - RNA, 22 nt, Human
aucagaaaguucaucauguuug

SEQ ID NO: 868275 - RNA, 22 nt, Human
agcagagguuuguuggaaaccu

SEQ ID NO: 868276 - RNA, 22 nt, Human
ucacccuugauaauguucuucu

SEQ ID NO: 868277 - RNA, 21 nt, Human
uugaaaguaaauucagcagcu

SEQ ID NO: 868278 - RNA, 22 nt, Human
ggcagcuuccuaggagagggca

SEQ ID NO: 868279 - RNA, 22 nt, Human
aauuucaagucuugaagaagua

SEQ ID NO: 868280 - RNA, 22 nt, Human
ggaggggagucucccaaagccg

SEQ ID NO: 868281 - RNA, 22 nt, Human
auuaaagaaacccagcauguga

SEQ ID NO: 868282 - RNA, 22 nt, Human
augaaauaucuugaagaaauuc

SEQ ID NO: 868283 - RNA, 22 nt, Human
guugaaaguagaugcuauuugg

SEQ ID NO: 868284 - RNA, 22 nt, Human
ggcagaggagcuggaaacaugg

SEQ ID NO: 868285 - RNA, 22 nt, Human
ugucucugaggugagggucagc

SEQ ID NO: 868286 - RNA, 22 nt, Human
cuacuucuaaguacauggugau

SEQ ID NO: 868287 - RNA, 22 nt, Human
ugcuuagacgucaaguacagcc

SEQ ID NO: 868288 - RNA, 22 nt, Human
aauuucaaagcucacuggcaua

SEQ ID NO: 868289 - RNA, 22 nt, Human
acuauacagaagaggauaggaa

SEQ ID NO: 868290 - RNA, 22 nt, Human
cuggcuugcagcucaucauaaa

SEQ ID NO: 868291 - RNA, 20 nt, Human
ggcaggcuuuauauggaggg

SEQ ID NO: 868292 - RNA, 22 nt, Human
gcauuuccugugcuuggcauau

SEQ ID NO: 868293 - RNA, 22 nt, Human
ugcuuuaagagauuguuaguac

SEQ ID NO: 868294 - RNA, 22 nt, Human
uggcagcuagauaguguguuua

SEQ ID NO: 868295 - RNA, 22 nt, Human
agucaaaugaguaaauauauaa

SEQ ID NO: 868296 - RNA, 22 nt, Human
ugugugucagagucuccauggu

SEQ ID NO: 868297 - RNA, 22 nt, Human
aaugucugcucuacucaggagg

SEQ ID NO: 868298 - RNA, 22 nt, Human
aaucagaaaauucaguggaauu

SEQ ID NO: 868299 - RNA, 22 nt, Human
aaguauaagcuauucuucauga

SEQ ID NO: 868300 - RNA, 22 nt, Human
gccaggagcaugucauuguuga

SEQ ID NO: 868301 - RNA, 22 nt, Human
aggcagauuacuugaggccagg

SEQ ID NO: 868302 - RNA, 22 nt, Human
acaguggagaaggcaugaggcu

SEQ ID NO: 868303 - RNA, 22 nt, Human
gggcagcuguaucugagcuuau

SEQ ID NO: 868304 - RNA, 22 nt, Human
ucuucacaugaccuucaugucu

SEQ ID NO: 868305 - RNA, 22 nt, Human
aaaggccacacagagcagggag

SEQ ID NO: 868306 - RNA, 22 nt, Human
aggcuucugugagcucauacaa

SEQ ID NO: 868307 - RNA, 20 nt, Human
agaaaaaguguggaaauuuc

SEQ ID NO: 868308 - RNA, 23 nt, Human
uugauuucaaaugcagagaacac

SEQ ID NO: 868309 - RNA, 22 nt, Human
cuaaagaagcuagcaaucuaua

SEQ ID NO: 868310 - RNA, 22 nt, Human
gagagucuaggaaccucauaua

SEQ ID NO: 868311 - RNA, 22 nt, Human
gagucaccuuggccgcuguccc

SEQ ID NO: 868312 - RNA, 22 nt, Human
ucuuagcauuucauaacaacug

SEQ ID NO: 868313 - RNA, 22 nt, Human
uuugaaagaauuuauguacuuu

SEQ ID NO: 868314 - RNA, 22 nt, Human
ggugaaggcacaagagggcaag

SEQ ID NO: 868315 - RNA, 22 nt, Human
uuggcaggaauauugcagaggu

SEQ ID NO: 868316 - RNA, 22 nt, Human
aggaagcugcuggaguagugug

SEQ ID NO: 868317 - RNA, 22 nt, Human
uacuagaaccucacaacaaucc

SEQ ID NO: 868318 - RNA, 22 nt, Human
cauagagugauguaagguaugu

SEQ ID NO: 868319 - RNA, 22 nt, Human
augaaggcuguguagauggaug

SEQ ID NO: 868320 - RNA, 22 nt, Human
uuucccaguucccugcucuaua

SEQ ID NO: 868321 - RNA, 22 nt, Human
auuucacaucuaucucagauuu

SEQ ID NO: 868322 - RNA, 22 nt, Human
agacagcugggaaauggagugu

SEQ ID NO: 868323 - RNA, 22 nt, Human
ucuucaucucagauuaacagga

SEQ ID NO: 868324 - RNA, 22 nt, Human
ggugaguugggguucacagguc

SEQ ID NO: 868325 - RNA, 22 nt, Human
ucucaggaagauuagggcuaag

SEQ ID NO: 868326 - RNA, 22 nt, Human
aauauuaucaaaagcuuuuuca

SEQ ID NO: 868327 - RNA, 19 nt, Human
uucacaauuaugaaauuag

SEQ ID NO: 868328 - RNA, 22 nt, Human
uuuacuuuugguaaggucauuu

SEQ ID NO: 868329 - RNA, 22 nt, Human
uuaaagggccgauuuccaggcc

SEQ ID NO: 868330 - RNA, 22 nt, Human
ucaccgucgggggucgcugucu

SEQ ID NO: 868331 - RNA, 22 nt, Human
uguauguugggucaaaguacau

SEQ ID NO: 868332 - RNA, 22 nt, Human
uggauuuaauggaugaggggca

SEQ ID NO: 868333 - RNA, 21 nt, Human
ucucugguuggaguugugcca

SEQ ID NO: 868334 - RNA, 22 nt, Human
gcaacuuuagaaaaaucuauaa

SEQ ID NO: 868335 - RNA, 22 nt, Human
auggcuuugaaguaauguaauu

SEQ ID NO: 868336 - RNA, 22 nt, Human
auuuuacuacuccaauuaauga

SEQ ID NO: 868337 - RNA, 22 nt, Human
augguuuugaagggaggucaaa

SEQ ID NO: 868338 - RNA, 23 nt, Human
uggcagcuguguaagagaaagca

SEQ ID NO: 868339 - RNA, 22 nt, Human
agcccagguucuaaagccaaac

SEQ ID NO: 868340 - RNA, 22 nt, Human
auggaaagugcauggaagucau

SEQ ID NO: 868341 - RNA, 22 nt, Human
auucuucacuguuucagaauga

SEQ ID NO: 868342 - RNA, 22 nt, Human
gggcagcugucuugguucucaa

SEQ ID NO: 868343 - RNA, 18 nt, Human
cgaggcaggcggaucacg

SEQ ID NO: 868344 - RNA, 22 nt, Human
aaggacagggaugguugauugu

SEQ ID NO: 868345 - RNA, 18 nt, Human
agucuucugauccauuuu

SEQ ID NO: 868346 - RNA, 22 nt, Human
aggaggggcauagaaauguaau

SEQ ID NO: 868347 - RNA, 21 nt, Human
agccuguugguuuacugcuca

SEQ ID NO: 868348 - RNA, 22 nt, Human
cagucucagaggugggaguggg

SEQ ID NO: 868349 - RNA, 21 nt, Human
ucauuugugaucugauuucca

SEQ ID NO: 868350 - RNA, 22 nt, Human
cccaaggacacgggcagggaca

SEQ ID NO: 868351 - RNA, 19 nt, Human
uccaggagcaaagccaguu

SEQ ID NO: 868352 - RNA, 22 nt, Human
uugaauaauguguauguuguua

SEQ ID NO: 868353 - RNA, 22 nt, Human
cuggcugggagcgagcugcuca

SEQ ID NO: 868354 - RNA, 22 nt, Human
augacaguucuacacuuaaucu

SEQ ID NO: 868355 - RNA, 22 nt, Human
aauuccagaggaggacaguccu

SEQ ID NO: 868356 - RNA, 22 nt, Human
ucccaggaucugagggcagaga

SEQ ID NO: 868357 - RNA, 22 nt, Human
aggaaacuccccuacaucucaa

SEQ ID NO: 868358 - RNA, 22 nt, Human
gaaguccucaaugcauugucuu

SEQ ID NO: 868359 - RNA, 22 nt, Human
augcuuuuaugucacaugguca

SEQ ID NO: 868360 - RNA, 22 nt, Human
caucagaacaaaucgguuaaga

SEQ ID NO: 868361 - RNA, 22 nt, Human
uagaaacagauguuuuugaaga

SEQ ID NO: 868362 - RNA, 22 nt, Human
aaugagacacgugaagcagaug

SEQ ID NO: 868363 - RNA, 22 nt, Human
cucauacauaugccauuccugc

SEQ ID NO: 868364 - RNA, 22 nt, Human
ucaguaaaugaaugaauauaug

SEQ ID NO: 868365 - RNA, 22 nt, Human
acuauacauaaaacauuugggu

SEQ ID NO: 868366 - RNA, 22 nt, Human
ccguagcacaugcuccuggggc

SEQ ID NO: 868367 - RNA, 22 nt, Human
aucaggauguuuggcugucaua

SEQ ID NO: 868368 - RNA, 20 nt, Human
aagcacauuucuacaauaau

SEQ ID NO: 868369 - RNA, 22 nt, Human
cucaggauugugccuagggaga

SEQ ID NO: 868370 - RNA, 22 nt, Human
ugucuuuggaauauuuagcuga

SEQ ID NO: 868371 - RNA, 22 nt, Human
aaguuucaugauguaauuauug

SEQ ID NO: 868372 - RNA, 22 nt, Human
ucuauacaaguuucacuuugac

SEQ ID NO: 868373 - RNA, 22 nt, Human
agucucugcaugccugcugugc

SEQ ID NO: 868374 - RNA, 22 nt, Human
ggacagcucugccaggagcuca

SEQ ID NO: 868375 - RNA, 22 nt, Human
ccucaggauacaggagccacag

SEQ ID NO: 868376 - RNA, 22 nt, Human
gaggcugcccaacuggagugga

SEQ ID NO: 868377 - RNA, 22 nt, Human
uuacagaagagaaagaauucag

SEQ ID NO: 868378 - RNA, 22 nt, Human
aauauaaugcuguuuuaugcca

SEQ ID NO: 868379 - RNA, 22 nt, Human
acaacuuuucuaucauguggaa

SEQ ID NO: 868380 - RNA, 22 nt, Human
uuucagacaggacuucauaugu

SEQ ID NO: 868381 - RNA, 22 nt, Human
cauuuguuuagaagucuuuaua

SEQ ID NO: 868382 - RNA, 22 nt, Human
uauagccauuuccaguggcauc

SEQ ID NO: 868383 - RNA, 22 nt, Human
caucauaaaauugagauaacug

SEQ ID NO: 868384 - RNA, 22 nt, Human
uggaaagcgaggaguuggcauu

SEQ ID NO: 868385 - RNA, 22 nt, Human
ucucacuuuccagacuuuucaa

SEQ ID NO: 868386 - RNA, 22 nt, Human
ucauaaaaugcuccugauauug

SEQ ID NO: 868387 - RNA, 22 nt, Human
aaacauuugcaacucgguuugg

SEQ ID NO: 868388 - RNA, 22 nt, Human
aaucagugguucccagcccagg

SEQ ID NO: 868389 - RNA, 22 nt, Human
uaucuguuguccaugcagaaag

SEQ ID NO: 868390 - RNA, 22 nt, Human
uguacaaucuuggucccuuuau

SEQ ID NO: 868391 - RNA, 22 nt, Human
gcaagcugaugugauagugaaa

SEQ ID NO: 868392 - RNA, 22 nt, Human
ucugggaagcugcgugccuguu

SEQ ID NO: 868393 - RNA, 22 nt, Human
uuauccaagcagaagcugcaca

SEQ ID NO: 868394 - RNA, 22 nt, Human
uaucuguugucuuuuacaugua

SEQ ID NO: 868395 - RNA, 22 nt, Human
gccugcagauauauaggauggu

SEQ ID NO: 868396 - RNA, 22 nt, Human
guuuucaaggggauuuaacuga

SEQ ID NO: 868397 - RNA, 22 nt, Human
acauuucuaguuguucaucucc

SEQ ID NO: 868398 - RNA, 21 nt, Human
uccagaaaagaggucauuagc

SEQ ID NO: 868399 - RNA, 22 nt, Human
gagggcauaguuaaauaggagg

SEQ ID NO: 868400 - RNA, 22 nt, Human
cauuuguaggaugcuucuuguu

SEQ ID NO: 868401 - RNA, 22 nt, Human
aaugucugagucucuguauccc

SEQ ID NO: 868402 - RNA, 22 nt, Human
cacaauuuguuuuaucaguauu

SEQ ID NO: 868403 - RNA, 22 nt, Human
cccaggaggcggagguuguggu

SEQ ID NO: 868404 - RNA, 22 nt, Human
aagugagugguaaggagcaugg

SEQ ID NO: 868405 - RNA, 22 nt, Human
auuucaaggcuauuaauauaaa

SEQ ID NO: 868406 - RNA, 22 nt, Human
uaaucuacuguuuauaugaaau

SEQ ID NO: 868407 - RNA, 22 nt, Human
aaugcaaagcaagcagagauuu

SEQ ID NO: 868408 - RNA, 22 nt, Human
ugcuguguggaugugaagaauc

SEQ ID NO: 868409 - RNA, 22 nt, Human
aauggccagcugggagaguuga

SEQ ID NO: 868410 - RNA, 22 nt, Human
ccaagaugaucuuuacaguguu

SEQ ID NO: 868411 - RNA, 22 nt, Human
gaggcagcuuggggcugugggu

SEQ ID NO: 868412 - RNA, 22 nt, Human
aaaauugaggcucauguuaaau

SEQ ID NO: 868413 - RNA, 22 nt, Human
uuauuugcccauguuuagcaga

SEQ ID NO: 868414 - RNA, 22 nt, Human
agugugagcccuggaguggugc

SEQ ID NO: 868415 - RNA, 21 nt, Human
caaguccuuugccaaagugcu

SEQ ID NO: 868416 - RNA, 22 nt, Human
uaacauguuaagaaauuagaua

SEQ ID NO: 868417 - RNA, 22 nt, Human
cuucucaaaguugugaaucagg

SEQ ID NO: 868418 - RNA, 22 nt, Human
ucauagaagcaccagaagauau

SEQ ID NO: 868419 - RNA, 22 nt, Human
cucaggaugcaggucacaggac

SEQ ID NO: 868420 - RNA, 22 nt, Human
auauaggcuaacaacuauugag

SEQ ID NO: 868421 - RNA, 19 nt, Human
uucccaggaaaggggugca

SEQ ID NO: 868422 - RNA, 22 nt, Human
uucuucaguguagcaacuguau

SEQ ID NO: 868423 - RNA, 22 nt, Human
cccaggaaaucaggcuuucuag

SEQ ID NO: 868424 - RNA, 22 nt, Human
acauaauaggugccugaauauu

SEQ ID NO: 868425 - RNA, 17 nt, Human
gcugacccuggagaagu

SEQ ID NO: 868426 - RNA, 22 nt, Human
gcugauguaagacuuuugguuu

SEQ ID NO: 868427 - RNA, 22 nt, Human
cugcuuuggacaacuauucuug

SEQ ID NO: 868428 - RNA, 22 nt, Human
ggaggaugccaagcugugcaca

SEQ ID NO: 868429 - RNA, 19 nt, Human
uuccaaaaucaggauuuga

SEQ ID NO: 868430 - RNA, 22 nt, Human
ugguuuaaccugucucuuauua

SEQ ID NO: 868431 - RNA, 22 nt, Human
ugaaaugaaugugauucgauag

SEQ ID NO: 868432 - RNA, 22 nt, Human
uccaggaguuugaccugugggc

SEQ ID NO: 868433 - RNA, 22 nt, Human
uucaggauucugugucugacaa

SEQ ID NO: 868434 - RNA, 22 nt, Human
uuuccaaacccagcgagcuaca

SEQ ID NO: 868435 - RNA, 22 nt, Human
aaacuuuguucgucugaugugg

SEQ ID NO: 868436 - RNA, 22 nt, Human
cauuucaaaagaauugccagaa

SEQ ID NO: 868437 - RNA, 22 nt, Human
aaaaagguugauccagauuagg

SEQ ID NO: 868438 - RNA, 22 nt, Human
ucauuucucccggccaaaaacu

SEQ ID NO: 868439 - RNA, 22 nt, Human
uaucuguuggcuccuaguugua

SEQ ID NO: 868440 - RNA, 21 nt, Human
agaauaaugguaucauuugcu

SEQ ID NO: 868441 - RNA, 22 nt, Human
acaaaauuaccuaguuauuuuc

SEQ ID NO: 868442 - RNA, 22 nt, Human
cugcuguguaucauuuuagaug

SEQ ID NO: 868443 - RNA, 22 nt, Human
uucaggauuauacucucuuccc

SEQ ID NO: 868444 - RNA, 22 nt, Human
aaaggugacugcagcagcuauu

SEQ ID NO: 868445 - RNA, 22 nt, Human
aaauggauggaaagcaauuuuu

SEQ ID NO: 868446 - RNA, 22 nt, Human
gaggcagugcauugucuagggg

SEQ ID NO: 868447 - RNA, 22 nt, Human
uuuuucagccaugaauuacacu

SEQ ID NO: 868448 - RNA, 22 nt, Human
auuucaacagaguuugaaggca

SEQ ID NO: 868449 - RNA, 22 nt, Human
caguggagagacuuuuacucuu

SEQ ID NO: 868450 - RNA, 22 nt, Human
acaacuuucuggguuaucugau

SEQ ID NO: 868451 - RNA, 22 nt, Human
augguauugcaacaacugucau

SEQ ID NO: 868452 - RNA, 22 nt, Human
ugaaaugagauagauaaucagg

SEQ ID NO: 868453 - RNA, 22 nt, Human
gaaaaaggauaaauacaguguu

SEQ ID NO: 868454 - RNA, 22 nt, Human
caguaaaugcagauauagauac

SEQ ID NO: 868455 - RNA, 22 nt, Human
aggacagcccuugagagcacau

SEQ ID NO: 868456 - RNA, 22 nt, Human
aggaaaggccuuugcauuuggu

SEQ ID NO: 868457 - RNA, 22 nt, Human
gcuauacagcaggagaauggaa

SEQ ID NO: 868458 - RNA, 17 nt, Human
caagagagaugacugga

SEQ ID NO: 868459 - RNA, 22 nt, Human
ugcuugaaagggguuucccagu

SEQ ID NO: 868460 - RNA, 22 nt, Human
ugaaggcccagccacagaaugg

SEQ ID NO: 868461 - RNA, 22 nt, Human
gugcuuucugcugcauuccucu

SEQ ID NO: 868462 - RNA, 22 nt, Human
gucuccugagacugcagucacc

SEQ ID NO: 868463 - RNA, 22 nt, Human
aaguuacacauuuucauuguaa

SEQ ID NO: 868464 - RNA, 22 nt, Human
cagcugccccuccagggcuggg

SEQ ID NO: 868465 - RNA, 22 nt, Human
uaucagaaaucaacacacagug

SEQ ID NO: 868466 - RNA, 22 nt, Human
uuucuuguaagauguuuauuaa

SEQ ID NO: 868467 - RNA, 23 nt, Human
agaauuccaguuucuuaugucac

SEQ ID NO: 868468 - RNA, 22 nt, Human
uuaaauauuauguugucugcaa

SEQ ID NO: 868469 - RNA, 22 nt, Human
auuucacucauucauguuacuu

SEQ ID NO: 868470 - RNA, 22 nt, Human
ccaggcugcagucaaggggcau

SEQ ID NO: 868471 - RNA, 22 nt, Human
gaggauggaggugugagcuaug

SEQ ID NO: 868472 - RNA, 22 nt, Human
uacugcauaacuggcauguggg

SEQ ID NO: 868473 - RNA, 22 nt, Human
ggaucugauuaauaagguggac

SEQ ID NO: 868474 - RNA, 19 nt, Human
aaagcagaggagcaucuga

SEQ ID NO: 868475 - RNA, 22 nt, Human
aggcaggcacuccggaaguguc

SEQ ID NO: 868476 - RNA, 22 nt, Human
uucauacuguguuuccaaguuu

SEQ ID NO: 868477 - RNA, 22 nt, Human
caaggccaguucaccaagggca

SEQ ID NO: 868478 - RNA, 22 nt, Human
gaggcacugcaguacagugacu

SEQ ID NO: 868479 - RNA, 22 nt, Human
uucucugagauagacuaagugg

SEQ ID NO: 868480 - RNA, 22 nt, Human
ugcuuuaaaauggacuguuuug

SEQ ID NO: 868481 - RNA, 22 nt, Human
uuacagaaaggaaggacugacu

SEQ ID NO: 868482 - RNA, 22 nt, Human
gcagcugcagacccucagugcu

SEQ ID NO: 868483 - RNA, 22 nt, Human
ugcacagugaccccuggugacu

SEQ ID NO: 868484 - RNA, 22 nt, Human
ccagaggaaaaauaucucccua

SEQ ID NO: 868485 - RNA, 20 nt, Human
gaaguccuuucacucuuccc

SEQ ID NO: 868486 - RNA, 22 nt, Human
uaggcagcugcaaacuucgguc

SEQ ID NO: 868487 - RNA, 22 nt, Human
guuccaaagcaaaggaggugag

SEQ ID NO: 868488 - RNA, 22 nt, Human
aagucacccacaggcagcagaa

SEQ ID NO: 868489 - RNA, 22 nt, Human
auaaauaucacuguugucccuc

SEQ ID NO: 868490 - RNA, 22 nt, Human
gauggcagucaaccaggugagg

SEQ ID NO: 868491 - RNA, 22 nt, Human
caagaugggcaccccagcaccu

SEQ ID NO: 868492 - RNA, 21 nt, Human
auuucagagcacacaaguaaa

SEQ ID NO: 868493 - RNA, 22 nt, Human
aggguagggcccggagacagac

SEQ ID NO: 868494 - RNA, 22 nt, Human
uaagaaucggucgcaacagagg

SEQ ID NO: 868495 - RNA, 22 nt, Human
ugggagcccaagggagcugccg

SEQ ID NO: 868496 - RNA, 22 nt, Human
agcugcccuuuaugaugcugaa

SEQ ID NO: 868497 - RNA, 22 nt, Human
guacagaaauggggccccaggu

SEQ ID NO: 868498 - RNA, 22 nt, Human
aggaugaggcuggcaggucuug

SEQ ID NO: 868499 - RNA, 22 nt, Human
caaggccacugcucagguuucc

SEQ ID NO: 868500 - RNA, 22 nt, Human
cccaggaguuugaguucagcau

SEQ ID NO: 868501 - RNA, 22 nt, Human
ccaggagagcucucguucagug

SEQ ID NO: 868502 - RNA, 22 nt, Human
uguacaaugccagggaacacca

SEQ ID NO: 868503 - RNA, 22 nt, Human
auguucuguuuuguaauucaua

SEQ ID NO: 868504 - RNA, 22 nt, Human
uuccuuagcagaccugguaucc

SEQ ID NO: 868505 - RNA, 22 nt, Human
cagaaccaggaacugauggaga

SEQ ID NO: 868506 - RNA, 19 nt, Human
uggagacugagagugagca

SEQ ID NO: 868507 - RNA, 22 nt, Human
aggggaugauccucccgcagcg

SEQ ID NO: 868508 - RNA, 22 nt, Human
cacagcauaaugaaauauacuu

SEQ ID NO: 868509 - RNA, 22 nt, Human
ccuggagauuucuucaagcuuu

SEQ ID NO: 868510 - RNA, 22 nt, Human
cugaauaauguucucuuguaug

SEQ ID NO: 868511 - RNA, 22 nt, Human
acaauuccacauggcaugcagg

SEQ ID NO: 868512 - RNA, 22 nt, Human
cagguaaaaauaaauuugugag

SEQ ID NO: 868513 - RNA, 22 nt, Human
cuccuuagugccucugcacgag

SEQ ID NO: 868514 - RNA, 17 nt, Human
uuugaaaggaugucagu

SEQ ID NO: 868515 - RNA, 22 nt, Human
uugcaggauuuuagagaugaca

SEQ ID NO: 868516 - RNA, 22 nt, Human
ggaggccagggacccagucagc

SEQ ID NO: 868517 - RNA, 22 nt, Human
aagacugugucuauggcuacuc

SEQ ID NO: 868518 - RNA, 22 nt, Human
uuaacacuaucugucauaauua

SEQ ID NO: 868519 - RNA, 22 nt, Human
ggaguaggaguagaacucauca

SEQ ID NO: 868520 - RNA, 22 nt, Human
aguuugaauugaaaugcagaug

SEQ ID NO: 868521 - RNA, 22 nt, Human
caauuuuuguacuuauaguacu

SEQ ID NO: 868522 - RNA, 22 nt, Human
aggcagcuagagagugaaacug

SEQ ID NO: 868523 - RNA, 22 nt, Human
ugcuguggcaguuuauguauag

SEQ ID NO: 868524 - RNA, 20 nt, Human
aggaggggauagaaucaaag

SEQ ID NO: 868525 - RNA, 19 nt, Human
cucucacucgccacauccu

SEQ ID NO: 868526 - RNA, 22 nt, Human
auaggcuuauauaaaaacaucu

SEQ ID NO: 868527 - RNA, 22 nt, Human
gaccaaggaagaggggagccag

SEQ ID NO: 868528 - RNA, 22 nt, Human
auauucuucuuguucagacuau

SEQ ID NO: 868529 - RNA, 22 nt, Human
cccaggaaugaggggcggaggc

SEQ ID NO: 868530 - RNA, 22 nt, Human
aggugagggugccagugcaugg

SEQ ID NO: 868531 - RNA, 22 nt, Human
uguaacaauuucuuacuauugu

SEQ ID NO: 868532 - RNA, 22 nt, Human
uuuaggcacaacuacucagcua

SEQ ID NO: 868533 - RNA, 22 nt, Human
auaaagauuucuuuuucucuac

SEQ ID NO: 868534 - RNA, 22 nt, Human
auuggcaguuagugacgaggcu

SEQ ID NO: 868535 - RNA, 22 nt, Human
gaguccuuuucauagcaguggg

SEQ ID NO: 868536 - RNA, 22 nt, Human
aggaucugugagugcugcagac

SEQ ID NO: 868537 - RNA, 22 nt, Human
gcccaggauggagaauaguggu

SEQ ID NO: 868538 - RNA, 22 nt, Human
uuccagcaggcagacaggagau

SEQ ID NO: 868539 - RNA, 22 nt, Human
acccaggaggcaagguugcagu

SEQ ID NO: 868540 - RNA, 21 nt, Human
aaauggauagggcaauggaag

SEQ ID NO: 868541 - RNA, 22 nt, Human
ucccaggaugaagacaguguug

SEQ ID NO: 868542 - RNA, 22 nt, Human
gcugucccgcugacuuccagcu

SEQ ID NO: 868543 - RNA, 22 nt, Human
acagaguucccacuccagaagc

SEQ ID NO: 868544 - RNA, 22 nt, Human
agaggggaaggaugugauguga

SEQ ID NO: 868545 - RNA, 22 nt, Human
agagcagcuggggcagagacca

SEQ ID NO: 868546 - RNA, 19 nt, Human
ugcccaggccagguugggc

SEQ ID NO: 868547 - RNA, 22 nt, Human
uuagccauuaauguccugugca

SEQ ID NO: 868548 - RNA, 22 nt, Human
aggcagcuuucuggugcaccau

SEQ ID NO: 868549 - RNA, 22 nt, Human
ucugcugugggucuauauuuua

SEQ ID NO: 868550 - RNA, 22 nt, Human
uggcagcugucagaaugcaaau

SEQ ID NO: 868551 - RNA, 22 nt, Human
aaucaagucaaccaucaugugc

SEQ ID NO: 868552 - RNA, 21 nt, Human
uucuucaguuuaauauaaaau

SEQ ID NO: 868553 - RNA, 22 nt, Human
auauacugauagcugcacuucu

SEQ ID NO: 868554 - RNA, 22 nt, Human
caggauggugugagugugagga

SEQ ID NO: 868555 - RNA, 22 nt, Human
cagagacauucaguaaauuauc

SEQ ID NO: 868556 - RNA, 19 nt, Human
ugaggggcucacagucuca

SEQ ID NO: 868557 - RNA, 22 nt, Human
ugcugcuguuuccuacaucuca

SEQ ID NO: 868558 - RNA, 22 nt, Human
augaggcauuccacucaaacuc

SEQ ID NO: 868559 - RNA, 21 nt, Human
aaugcauuaacauaaagcuga

SEQ ID NO: 868560 - RNA, 22 nt, Human
cugcugugcuuguggccacccg

SEQ ID NO: 868561 - RNA, 22 nt, Human
ugaaauagucuaaaaaaccaga

SEQ ID NO: 868562 - RNA, 22 nt, Human
auuuaguguauucuaauaugug

SEQ ID NO: 868563 - RNA, 22 nt, Human
aagcaauauacugauaugauua

SEQ ID NO: 868564 - RNA, 22 nt, Human
cucuucuugcuagacugagugc

SEQ ID NO: 868565 - RNA, 22 nt, Human
accaggaguugggggugggacc

SEQ ID NO: 868566 - RNA, 22 nt, Human
gugaauaacuuucuauguuaau

SEQ ID NO: 868567 - RNA, 22 nt, Human
ucugucccugagagcucaggag

SEQ ID NO: 868568 - RNA, 22 nt, Human
aucagaaaaacauaauguuauu

SEQ ID NO: 868569 - RNA, 22 nt, Human
uauuucaagaacuucuauccau

SEQ ID NO: 868570 - RNA, 22 nt, Human
auugaaagguuuugagcagaua

SEQ ID NO: 868571 - RNA, 22 nt, Human
auguuacacauaggcauaaaug

SEQ ID NO: 868572 - RNA, 22 nt, Human
uauuucagguauggugugaaau

SEQ ID NO: 868573 - RNA, 22 nt, Human
aagggcagagggaaucccacau

SEQ ID NO: 868574 - RNA, 22 nt, Human
aacuagucagugauucucagaa

SEQ ID NO: 868575 - RNA, 22 nt, Human
caaggccaguuucuccuaguca

SEQ ID NO: 868576 - RNA, 22 nt, Human
aaucuucuuucuuaacaguaca

SEQ ID NO: 868577 - RNA, 22 nt, Human
ucaggagacuggcagugcccac

SEQ ID NO: 868578 - RNA, 19 nt, Human
ugcauaaauuauauacuuu

SEQ ID NO: 868579 - RNA, 20 nt, Human
aggacagcagcugccacuug

SEQ ID NO: 868580 - RNA, 20 nt, Human
ugaaggccagcagcauaggg

SEQ ID NO: 868581 - RNA, 22 nt, Human
aaugaacagauacacauaggca

SEQ ID NO: 868582 - RNA, 18 nt, Human
ugaaacaagaauggugca

SEQ ID NO: 868583 - RNA, 22 nt, Human
caguccagcccccugcuaaaag

SEQ ID NO: 868584 - RNA, 22 nt, Human
ucacagacauggugagguaaca

SEQ ID NO: 868585 - RNA, 22 nt, Human
uggcagcugccauguccacgug

SEQ ID NO: 868586 - RNA, 22 nt, Human
ugcuugugagaguuuuuucaga

SEQ ID NO: 868587 - RNA, 22 nt, Human
caguccuuccuugccccuuggg

SEQ ID NO: 868588 - RNA, 22 nt, Human
caguugccuacuacauggcagg

SEQ ID NO: 868589 - RNA, 22 nt, Human
ucauacacaagagcauguaaca

SEQ ID NO: 868590 - RNA, 22 nt, Human
uucaacucuucaagaucacauc

SEQ ID NO: 868591 - RNA, 21 nt, Human
auggauuuaaacaggccacaa

SEQ ID NO: 868592 - RNA, 22 nt, Human
cccaggaacagcacagaacagc

SEQ ID NO: 868593 - RNA, 22 nt, Human
ucgcugugguuucuguacaugg

SEQ ID NO: 868594 - RNA, 23 nt, Human
uugcuuucaucaugagaugcucc

SEQ ID NO: 868595 - RNA, 22 nt, Human
aagaaaucugauauuuguuuca

SEQ ID NO: 868596 - RNA, 22 nt, Human
auuuccaauuucauccaugucc

SEQ ID NO: 868597 - RNA, 22 nt, Human
ucuuugcaaauguuauuaucuu

SEQ ID NO: 868598 - RNA, 22 nt, Human
uuuaggcagaagcccugcugau

SEQ ID NO: 868599 - RNA, 22 nt, Human
agaccaagugcaggugccacua

SEQ ID NO: 868600 - RNA, 22 nt, Human
cgccucagccguggucaucuuc

SEQ ID NO: 868601 - RNA, 22 nt, Human
uugaauaauauguucaggagga

SEQ ID NO: 868602 - RNA, 20 nt, Human
ugaaggccauuuguuccaga

SEQ ID NO: 868603 - RNA, 22 nt, Human
caaaggcaggcccccugugcag

SEQ ID NO: 868604 - RNA, 22 nt, Human
uuagccauggacugaauugacu

SEQ ID NO: 868605 - RNA, 22 nt, Human
guugaaaguggagaaccugguu

SEQ ID NO: 868606 - RNA, 22 nt, Human
ugaggggagguuggggcacauc

SEQ ID NO: 868607 - RNA, 23 nt, Human
uguugaaguaacuguuacauaga

SEQ ID NO: 868608 - RNA, 20 nt, Human
gccaggagggugugaugagc

SEQ ID NO: 868609 - RNA, 22 nt, Human
cccaggaggcagaaguugcagu

SEQ ID NO: 868610 - RNA, 22 nt, Human
aucaggaugacaacugcugggu

SEQ ID NO: 868611 - RNA, 23 nt, Human
auguauuuaaauuucagugauga

SEQ ID NO: 868612 - RNA, 22 nt, Human
ucugcaggaggcuggcugcagg

SEQ ID NO: 868613 - RNA, 22 nt, Human
ugugauauuugaguauugucaa

SEQ ID NO: 868614 - RNA, 22 nt, Human
cugcugugcaacauugcaccua

SEQ ID NO: 868615 - RNA, 23 nt, Human
aggcagcagguuguccaggguga

SEQ ID NO: 868616 - RNA, 21 nt, Human
agccagucuguuuucuagugc

SEQ ID NO: 868617 - RNA, 22 nt, Human
aggaagcuagagccaccggacu

SEQ ID NO: 868618 - RNA, 22 nt, Human
ccaggagagcaaaggucacucu

SEQ ID NO: 868619 - RNA, 22 nt, Human
cucacuguccaacaggcuuuac

SEQ ID NO: 868620 - RNA, 22 nt, Human
aaucagcuaaauaaacuaguca

SEQ ID NO: 868621 - RNA, 22 nt, Human
uagggauguccugagacuuggc

SEQ ID NO: 868622 - RNA, 22 nt, Human
caguucacacugugcuaucugc

SEQ ID NO: 868623 - RNA, 22 nt, Human
ugaaaugagcauuuauucuuua

SEQ ID NO: 868624 - RNA, 19 nt, Human
uggauuuauauucuuuauc

SEQ ID NO: 868625 - RNA, 22 nt, Human
caacagcugaucuuugaugaag

SEQ ID NO: 868626 - RNA, 22 nt, Human
gaggcagcugggcuggugguuu

SEQ ID NO: 868627 - RNA, 22 nt, Human
aguacauauaguaauuuagcca

SEQ ID NO: 868628 - RNA, 22 nt, Human
gacaguccuugcccaguaucua

SEQ ID NO: 868629 - RNA, 17 nt, Human
ggcagccucaggcguuu

SEQ ID NO: 868630 - RNA, 22 nt, Human
acccaggauaaucuguguaucu

SEQ ID NO: 868631 - RNA, 23 nt, Human
cccagggacacgaugacaccucc

SEQ ID NO: 868632 - RNA, 22 nt, Human
cagugcugggcagaggagagcg

SEQ ID NO: 868633 - RNA, 22 nt, Human
uguguacacagauaguaauggc

SEQ ID NO: 868634 - RNA, 22 nt, Human
uuugcauaggauggacauuuua

SEQ ID NO: 868635 - RNA, 22 nt, Human
uguuuaauaauucuaugauagu

SEQ ID NO: 868636 - RNA, 22 nt, Human
gggacuucauagcuaggcacuu

SEQ ID NO: 868637 - RNA, 22 nt, Human
aagcgccaugguuccugcgcag

SEQ ID NO: 868638 - RNA, 22 nt, Human
augaaaauugacagcggaagua

SEQ ID NO: 868639 - RNA, 22 nt, Human
agagggcagggcgguaaguccu

SEQ ID NO: 868640 - RNA, 22 nt, Human
aggacagcaguuggugagguuc

SEQ ID NO: 868641 - RNA, 22 nt, Human
aucugcuugaaugagcaacagg

SEQ ID NO: 868642 - RNA, 22 nt, Human
ucagauggguuuugaaggaugu

SEQ ID NO: 868643 - RNA, 22 nt, Human
gaggcaguguuuacugcccugu

SEQ ID NO: 868644 - RNA, 22 nt, Human
uagcaucuguucuuucauuaaa

SEQ ID NO: 868645 - RNA, 22 nt, Human
agugagggaugaagaacugcgg

SEQ ID NO: 868646 - RNA, 23 nt, Human
cccauuuucauguuaacuccugg

SEQ ID NO: 868647 - RNA, 22 nt, Human
uugaaaggguuaaagugguaaa

SEQ ID NO: 868648 - RNA, 22 nt, Human
auacaaauuuauagaugcauuu

SEQ ID NO: 868649 - RNA, 22 nt, Human
ugagauguaagguaugcuuacu

SEQ ID NO: 868650 - RNA, 22 nt, Human
uuuacagagagagaacuggacu

SEQ ID NO: 868651 - RNA, 22 nt, Human
caguccuucauuccuccuuuga

SEQ ID NO: 868652 - RNA, 22 nt, Human
uuugcauaaaggagcauuucuc

SEQ ID NO: 868653 - RNA, 22 nt, Human
uguauacaauucacacuuccca

SEQ ID NO: 868654 - RNA, 22 nt, Human
cugaauaauuuucuguuguaug

SEQ ID NO: 868655 - RNA, 22 nt, Human
uuuaucuguuguacauuuaugc

SEQ ID NO: 868656 - RNA, 22 nt, Human
caacuuuucugugaauuuaagu

SEQ ID NO: 868657 - RNA, 22 nt, Human
auggcuuaagaaugcuuuugug

SEQ ID NO: 868658 - RNA, 22 nt, Human
uuauucuuuucuccagaauccc

SEQ ID NO: 868659 - RNA, 22 nt, Human
accaggagguguuugcucaagu

SEQ ID NO: 868660 - RNA, 22 nt, Human
auacauaauuacuuccgauguu

SEQ ID NO: 868661 - RNA, 22 nt, Human
aaggcagcaccgccuccugaaa

SEQ ID NO: 868662 - RNA, 22 nt, Human
aauguauuccucaugcaagagu

SEQ ID NO: 868663 - RNA, 22 nt, Human
ccauaauauuaaaugcuuuugu

SEQ ID NO: 868664 - RNA, 22 nt, Human
uucuucuccgaggagggcuggu

SEQ ID NO: 868665 - RNA, 22 nt, Human
gaccauuuuuacagagcauuca

SEQ ID NO: 868666 - RNA, 22 nt, Human
caggcagcccugcaccaagugu

SEQ ID NO: 868667 - RNA, 20 nt, Human
ucauuucuugggguuccaag

SEQ ID NO: 868668 - RNA, 22 nt, Human
cucaggauuaaggaaucuaaau

SEQ ID NO: 868669 - RNA, 22 nt, Human
gggcagcuagcccucuagccca

SEQ ID NO: 868670 - RNA, 22 nt, Human
agaggggaguccuaaucugauu

SEQ ID NO: 868671 - RNA, 22 nt, Human
cagagauuauuauaacuaauua

SEQ ID NO: 868672 - RNA, 22 nt, Human
aggagaggguggcauuaaguuu

SEQ ID NO: 868673 - RNA, 22 nt, Human
gagggccagcagccucagcaug

SEQ ID NO: 868674 - RNA, 22 nt, Human
gcauguguugguuuaugcaugu

SEQ ID NO: 868675 - RNA, 22 nt, Human
agagagagggaaacugcuaaac

SEQ ID NO: 868676 - RNA, 22 nt, Human
uccaggagagguguggggacug

SEQ ID NO: 868677 - RNA, 22 nt, Human
uuuaacagaugcuaugucuacc

SEQ ID NO: 868678 - RNA, 22 nt, Human
cagauacuguaaaauuucagua

SEQ ID NO: 868679 - RNA, 22 nt, Human
ucuacuguagugaugcugcagu

SEQ ID NO: 868680 - RNA, 22 nt, Human
uuugaaagcuacuuucggguca

SEQ ID NO: 868681 - RNA, 22 nt, Human
agugcuuugagcguuugaaaag

SEQ ID NO: 868682 - RNA, 22 nt, Human
aaggcaguaaaaucuaccuugc

SEQ ID NO: 868683 - RNA, 22 nt, Human
guguuuuaagaaagaagcucag

SEQ ID NO: 868684 - RNA, 22 nt, Human
agagaugaacauaaaacaagga

SEQ ID NO: 868685 - RNA, 22 nt, Human
gagacaggauuuaaccaaagcu

SEQ ID NO: 868686 - RNA, 22 nt, Human
ugaaaugaucaguuugguuacu

SEQ ID NO: 868687 - RNA, 22 nt, Human
uucaugugauaaaugugugacu

SEQ ID NO: 868688 - RNA, 22 nt, Human
auuuccaagaaagcuuuaggau

SEQ ID NO: 868689 - RNA, 22 nt, Human
ucacaguaaaagcauggaagag

SEQ ID NO: 868690 - RNA, 22 nt, Human
auuuaucucuggaaacuaagca

SEQ ID NO: 868691 - RNA, 22 nt, Human
ccuggaucgaugccgagggaaa

SEQ ID NO: 868692 - RNA, 22 nt, Human
ucagcugcucaaauuuauguca

SEQ ID NO: 868693 - RNA, 22 nt, Human
caaggccaagguuuugugaacu

SEQ ID NO: 868694 - RNA, 22 nt, Human
aucuuguuauaagagauaaugg

SEQ ID NO: 868695 - RNA, 22 nt, Human
guucuucaggccauccucccag

SEQ ID NO: 868696 - RNA, 22 nt, Human
ccuggaucuuucugacugacaa

SEQ ID NO: 868697 - RNA, 22 nt, Human
ugaaaugauuauaugguguuug

SEQ ID NO: 868698 - RNA, 22 nt, Human
uucagcaaacacgaugcuuguu

SEQ ID NO: 868699 - RNA, 22 nt, Human
uccucagaaaccccugugaggu

SEQ ID NO: 868700 - RNA, 22 nt, Human
ucaguaaacagguuuaaguccu

SEQ ID NO: 868701 - RNA, 23 nt, Human
agaugaggcuucuccauguuggu

SEQ ID NO: 868702 - RNA, 22 nt, Human
cagcugccccgcuggcugacca

SEQ ID NO: 868703 - RNA, 18 nt, Human
ccagguggugacagagau

SEQ ID NO: 868704 - RNA, 22 nt, Human
gcauguuauguaucugcccagc

SEQ ID NO: 868705 - RNA, 22 nt, Human
ggaggggaggauuaaugacaaa

SEQ ID NO: 868706 - RNA, 22 nt, Human
cuuacagagaagaaaauguagu

SEQ ID NO: 868707 - RNA, 22 nt, Human
ugcccaggguuucuaagagcag

SEQ ID NO: 868708 - RNA, 22 nt, Human
ucugauaacucuggccccaggc

SEQ ID NO: 868709 - RNA, 22 nt, Human
ggaggggagguccagcugaucu

SEQ ID NO: 868710 - RNA, 22 nt, Human
ucuuugaauccuuuacaucuga

SEQ ID NO: 868711 - RNA, 22 nt, Human
aggaggggcaaugauagucugg

SEQ ID NO: 868712 - RNA, 22 nt, Human
acuuucugcaguguuggaaaug

SEQ ID NO: 868713 - RNA, 22 nt, Human
uacugaaaagccacaaggacca

SEQ ID NO: 868714 - RNA, 22 nt, Human
uuggcaguaaaagaaaaugcuu

SEQ ID NO: 868715 - RNA, 22 nt, Human
cucaggauagcugcgcagccug

SEQ ID NO: 868716 - RNA, 22 nt, Human
gcauucuuuuuaggagguuccu

SEQ ID NO: 868717 - RNA, 22 nt, Human
agucugucugucacuucugcag

SEQ ID NO: 868718 - RNA, 22 nt, Human
gauuucaaguaucuugggcgag

SEQ ID NO: 868719 - RNA, 22 nt, Human
cccaggagguggagguugcagc

SEQ ID NO: 868720 - RNA, 22 nt, Human
uguaacaaaauaccuuggauug

SEQ ID NO: 868721 - RNA, 22 nt, Human
gagguggugguggaggcauagc

SEQ ID NO: 868722 - RNA, 22 nt, Human
uacaacauuguguugcuucaua

SEQ ID NO: 868723 - RNA, 22 nt, Human
ucaggaauccagacagggcaca

SEQ ID NO: 868724 - RNA, 22 nt, Human
aggaugagccgcgcaagcugac

SEQ ID NO: 868725 - RNA, 22 nt, Human
cucccagggucuaggcugcugg

SEQ ID NO: 868726 - RNA, 22 nt, Human
cugcaucaguggauaugauggu

SEQ ID NO: 868727 - RNA, 22 nt, Human
ccugcuguaaugugucuuuauu

SEQ ID NO: 868728 - RNA, 22 nt, Human
cugcccaggaaggagaggaugg

SEQ ID NO: 868729 - RNA, 22 nt, Human
aauuccaggaugcaggaggugc

SEQ ID NO: 868730 - RNA, 22 nt, Human
cugccaggcacgugcagcauca

SEQ ID NO: 868731 - RNA, 22 nt, Human
uugaagaaagucauauauaaug

SEQ ID NO: 868732 - RNA, 22 nt, Human
uagcucuucaaucacugucucc

SEQ ID NO: 868733 - RNA, 22 nt, Human
aaaucagugcucauuugaaagg

SEQ ID NO: 868734 - RNA, 22 nt, Human
agacaaauggaguaugagcaac

SEQ ID NO: 868735 - RNA, 23 nt, Human
uucuuucaagaaguucacagugc

SEQ ID NO: 868736 - RNA, 22 nt, Human
uauguguuugacacccugcaag

SEQ ID NO: 868737 - RNA, 22 nt, Human
ucaucugucauccacaaagcug

SEQ ID NO: 868738 - RNA, 22 nt, Human
agaccaagacuauaaugagagg

SEQ ID NO: 868739 - RNA, 22 nt, Human
augcacaagcaagagauaaugg

SEQ ID NO: 868740 - RNA, 22 nt, Human
cuacagaagaaacuaucacuau

SEQ ID NO: 868741 - RNA, 22 nt, Human
guauacagauacuuagacgugc

SEQ ID NO: 868742 - RNA, 20 nt, Human
gcagcuacucugucucgcuc

SEQ ID NO: 868743 - RNA, 22 nt, Human
caaggccacuccagagacuggu

SEQ ID NO: 868744 - RNA, 22 nt, Human
ugucaccagcugcuccucagga

SEQ ID NO: 868745 - RNA, 22 nt, Human
augguuuacugaucuuuuuggu

SEQ ID NO: 868746 - RNA, 22 nt, Human
uuucuaggucuuccauacugcc

SEQ ID NO: 868747 - RNA, 22 nt, Human
uggccaggcagguagaacggcc

SEQ ID NO: 868748 - RNA, 22 nt, Human
aauaucaacaguguccuucuaa

SEQ ID NO: 868749 - RNA, 22 nt, Human
aaaagucugcucucauuucaga

SEQ ID NO: 868750 - RNA, 22 nt, Human
ugaaacaaauuuggaaaaucua

SEQ ID NO: 868751 - RNA, 22 nt, Human
uaggcagccagcaucaguuggg

SEQ ID NO: 868752 - RNA, 23 nt, Human
uggaggaaacacaucagaagacc

SEQ ID NO: 868753 - RNA, 22 nt, Human
caauuucaaugaggccacaggg

SEQ ID NO: 868754 - RNA, 22 nt, Human
uucuaugccauguucagcuacu

SEQ ID NO: 868755 - RNA, 22 nt, Human
gcauaauauacaugcuugaucc

SEQ ID NO: 868756 - RNA, 22 nt, Human
gucacuguauccagguuccagc

SEQ ID NO: 868757 - RNA, 22 nt, Human
aauuauccuuaaugcaguaagc

SEQ ID NO: 868758 - RNA, 18 nt, Human
gcagcuagccaggggggc

SEQ ID NO: 868759 - RNA, 21 nt, Human
uggcaggcagcuggaagcuug

SEQ ID NO: 868760 - RNA, 22 nt, Human
gaacccaggcuuuugaggcugu

SEQ ID NO: 868761 - RNA, 22 nt, Human
ugaggcaguucuuacuuguauu

SEQ ID NO: 868762 - RNA, 22 nt, Human
gaggaggcacuugagcagaugu

SEQ ID NO: 868763 - RNA, 22 nt, Human
aggcaagcgcagaagcggagga

SEQ ID NO: 868764 - RNA, 22 nt, Human
uguguucuggaaagcucacuga

SEQ ID NO: 868765 - RNA, 22 nt, Human
ucaaaauuagugaccaaaggca

SEQ ID NO: 868766 - RNA, 20 nt, Human
gggcagcuccccucauucug

SEQ ID NO: 868767 - RNA, 22 nt, Human
agcacaauagagcaguuaaaaa

SEQ ID NO: 868768 - RNA, 22 nt, Human
gccaggagagcuccuucagguu

SEQ ID NO: 868769 - RNA, 22 nt, Human
aaaggccacuugaaggauuuuu

SEQ ID NO: 868770 - RNA, 22 nt, Human
uuuaggcaaauuucagaugugc

SEQ ID NO: 868771 - RNA, 22 nt, Human
auugcuguaaauuaucuuauua

SEQ ID NO: 868772 - RNA, 20 nt, Human
gauuucaaagcagaguggcc

SEQ ID NO: 868773 - RNA, 22 nt, Human
uucuuugaguuaguacagucca

SEQ ID NO: 868774 - RNA, 22 nt, Human
cuuaaauucuuaaugcccucau

SEQ ID NO: 868775 - RNA, 22 nt, Human
gauggcagcauauugacagcau

SEQ ID NO: 868776 - RNA, 18 nt, Human
uugagggaggggcagagu

SEQ ID NO: 868777 - RNA, 22 nt, Human
gguuauauaauucagugcuuuc

SEQ ID NO: 868778 - RNA, 22 nt, Human
guccucuggaagaugaguucuu

SEQ ID NO: 868779 - RNA, 22 nt, Human
cuugcuucauuagugucuuagu

SEQ ID NO: 868780 - RNA, 22 nt, Human
ugcuauacggagcaucuucagg

SEQ ID NO: 868781 - RNA, 22 nt, Human
cuuagaaaucgaacucagguua

SEQ ID NO: 868782 - RNA, 21 nt, Human
gcugcccaacccugcaucucc

SEQ ID NO: 868783 - RNA, 22 nt, Human
aucuaacacuguaaacugucuu

SEQ ID NO: 868784 - RNA, 22 nt, Human
cagagccauuauggagacuugc

SEQ ID NO: 868785 - RNA, 22 nt, Human
caggagaggcuguacguuucuc

SEQ ID NO: 868786 - RNA, 22 nt, Human
guaaacauuuucaucugugccc

SEQ ID NO: 868787 - RNA, 22 nt, Human
aaauauagcaauuaugccuacu

SEQ ID NO: 868788 - RNA, 22 nt, Human
ccucacugaagaggugacauuu

SEQ ID NO: 868789 - RNA, 22 nt, Human
aacuuuguguguuuaauauggc

SEQ ID NO: 868790 - RNA, 22 nt, Human
caguaaauacauaucagagaag

SEQ ID NO: 868791 - RNA, 22 nt, Human
cuacagaagccguggucaggaa

SEQ ID NO: 868792 - RNA, 22 nt, Human
aggcaguuguugcugagcagcu

SEQ ID NO: 868793 - RNA, 22 nt, Human
ucugcaggcuuauaggaugggu

SEQ ID NO: 868794 - RNA, 22 nt, Human
cacaauuuccuugcuucacuuu

SEQ ID NO: 868795 - RNA, 22 nt, Human
uucccaugccuggccccuaucc

SEQ ID NO: 868796 - RNA, 22 nt, Human
uuagaaagaacuuuagauauca

SEQ ID NO: 868797 - RNA, 22 nt, Human
acauauauuacuaguaaagaca

SEQ ID NO: 868798 - RNA, 22 nt, Human
gcagcugccccgacugugaguc

SEQ ID NO: 868799 - RNA, 22 nt, Human
auccaugaucaauuuauuacua

SEQ ID NO: 868800 - RNA, 22 nt, Human
cuggauuugccuauggugcuuu

SEQ ID NO: 868801 - RNA, 22 nt, Human
aggcaguuuauccccagagccu

SEQ ID NO: 868802 - RNA, 22 nt, Human
ggauucagugucuguuaauagu

SEQ ID NO: 868803 - RNA, 22 nt, Human
gggcagcuggccagguauucug

SEQ ID NO: 868804 - RNA, 22 nt, Human
ccuugcguuuuacagcuucuag

SEQ ID NO: 868805 - RNA, 22 nt, Human
uuauacauguguuuugagauga

SEQ ID NO: 868806 - RNA, 22 nt, Human
gggcagcucuggcugugggaag

SEQ ID NO: 868807 - RNA, 22 nt, Human
cccaggagguggagcuugcagu

SEQ ID NO: 868808 - RNA, 22 nt, Human
aauuaaauugguuuagagagga

SEQ ID NO: 868809 - RNA, 23 nt, Human
ucucaggacacacaugucuauca

SEQ ID NO: 868810 - RNA, 17 nt, Human
caaggccagcaucuuca

SEQ ID NO: 868811 - RNA, 22 nt, Human
acaucucaugaaugauaaauca

SEQ ID NO: 868812 - RNA, 22 nt, Human
gccuaauaacuagcuguguaac

SEQ ID NO: 868813 - RNA, 17 nt, Human
gagagcugcugcuuccg

SEQ ID NO: 868814 - RNA, 22 nt, Human
ucugcaggcucuagaugagguu

SEQ ID NO: 868815 - RNA, 22 nt, Human
auuucaacacuuuuggaauuag

SEQ ID NO: 868816 - RNA, 23 nt, Human
ggccauuucauuugguucaaacu

SEQ ID NO: 868817 - RNA, 22 nt, Human
gaccauuugcuaguaaauugca

SEQ ID NO: 868818 - RNA, 22 nt, Human
cauuuguagcuauuuacuguau

SEQ ID NO: 868819 - RNA, 21 nt, Human
ugaggcaggggugcuuuuguc

SEQ ID NO: 868820 - RNA, 23 nt, Human
uaauucacauauacauugcuuca

SEQ ID NO: 868821 - RNA, 22 nt, Human
uuugacaaaggaaaaaugcaca

SEQ ID NO: 868822 - RNA, 22 nt, Human
gauuuacaaagcucucuagugu

SEQ ID NO: 868823 - RNA, 22 nt, Human
ugaaggccucugguacaugcca

SEQ ID NO: 868824 - RNA, 22 nt, Human
agugcuuuagcauccaacuguc

SEQ ID NO: 868825 - RNA, 22 nt, Human
ugccuugcacauaauauacauu

SEQ ID NO: 868826 - RNA, 22 nt, Human
uuacuuugcuuucucauuacag

SEQ ID NO: 868827 - RNA, 22 nt, Human
gaggucaggcuugcagcagggu

SEQ ID NO: 868828 - RNA, 22 nt, Human
uuauacaguuuauacuuagaau

SEQ ID NO: 868829 - RNA, 23 nt, Human
aaugauuucaugaugauagcagc

SEQ ID NO: 868830 - RNA, 22 nt, Human
agcccagggacagggcggaugu

SEQ ID NO: 868831 - RNA, 22 nt, Human
gauaaugaugacaaugacaacc

SEQ ID NO: 868832 - RNA, 18 nt, Human
cucaccauucugcccaau

SEQ ID NO: 868833 - RNA, 22 nt, Human
acaggccacaguggagucucug

SEQ ID NO: 868834 - RNA, 22 nt, Human
auagcuguuagauuggggucga

SEQ ID NO: 868835 - RNA, 22 nt, Human
uuuuaagaugcuaguauuucag

SEQ ID NO: 868836 - RNA, 21 nt, Human
uuucagaccuaucuuugaagg

SEQ ID NO: 868837 - RNA, 22 nt, Human
agaaaucauugaauuauuugcu

SEQ ID NO: 868838 - RNA, 22 nt, Human
gauuucaaagguucugcaugcc

SEQ ID NO: 868839 - RNA, 22 nt, Human
acccaggauagagugcugcagu

SEQ ID NO: 868840 - RNA, 22 nt, Human
uuuauccauaucauuaaaaucu

SEQ ID NO: 868841 - RNA, 22 nt, Human
auugaaagauauacuguucuca

SEQ ID NO: 868842 - RNA, 22 nt, Human
caaggccaagucucugugaaga

SEQ ID NO: 868843 - RNA, 22 nt, Human
ccuggaucuuuguuguaaauau

SEQ ID NO: 868844 - RNA, 22 nt, Human
acaugcuuugcacuuacaucau

SEQ ID NO: 868845 - RNA, 22 nt, Human
cccaggagacagaaacagaggu

SEQ ID NO: 868846 - RNA, 21 nt, Human
caagccagaccaauagcagcc

SEQ ID NO: 868847 - RNA, 22 nt, Human
acucaggaaaaauguagugaua

SEQ ID NO: 868848 - RNA, 18 nt, Human
cugcuugggagacgucag

SEQ ID NO: 868849 - RNA, 22 nt, Human
aggccagcacgacagccgcagg

SEQ ID NO: 868850 - RNA, 22 nt, Human
uccaugagaacccuuggagaua

SEQ ID NO: 868851 - RNA, 22 nt, Human
acccaggaaaacauggugcaga

SEQ ID NO: 868852 - RNA, 22 nt, Human
cccagggaagccauuucugacu

SEQ ID NO: 868853 - RNA, 21 nt, Human
uucaaagacuugaugcugacc

SEQ ID NO: 868854 - RNA, 22 nt, Human
ugcuuauucuuuccacaauuca

SEQ ID NO: 868855 - RNA, 22 nt, Human
auaugcuugggacugauacagu

SEQ ID NO: 868856 - RNA, 22 nt, Human
uucuagaugauaaaccagcagc

SEQ ID NO: 868857 - RNA, 22 nt, Human
aauaauuuuagcucagaguugu

SEQ ID NO: 868858 - RNA, 20 nt, Human
guaaugaauguaaacaguaa

SEQ ID NO: 868859 - RNA, 22 nt, Human
agcuggcagcucucagggguac

SEQ ID NO: 868860 - RNA, 18 nt, Human
caauuucauccuuaagcc

SEQ ID NO: 868861 - RNA, 22 nt, Human
cugcugugccuuaaaaugcaag

SEQ ID NO: 868862 - RNA, 22 nt, Human
caauuucauggauaaaagaugu

SEQ ID NO: 868863 - RNA, 22 nt, Human
cuugcaggccuuucuagcucua

SEQ ID NO: 868864 - RNA, 22 nt, Human
ugaaagguuauuuaggucugcu

SEQ ID NO: 868865 - RNA, 20 nt, Human
uauggcuuggcaaagcuuca

SEQ ID NO: 868866 - RNA, 22 nt, Human
ccaggagacuguacugauauuu

SEQ ID NO: 868867 - RNA, 22 nt, Human
uuccuuagugacuucuagcuac

SEQ ID NO: 868868 - RNA, 22 nt, Human
auaucagaaauaguaagcagag

SEQ ID NO: 868869 - RNA, 22 nt, Human
uaugaacucuggagucugagug

SEQ ID NO: 868870 - RNA, 23 nt, Human
uccaggagaaccccugucugucc

SEQ ID NO: 868871 - RNA, 22 nt, Human
uuucacaaaugucuuuaacuug

SEQ ID NO: 868872 - RNA, 22 nt, Human
uccaugaggaccaaauucguag

SEQ ID NO: 868873 - RNA, 22 nt, Human
agggcagcagcuccuccuagcu

SEQ ID NO: 868874 - RNA, 22 nt, Human
uccaggagacacaagguacaua

SEQ ID NO: 868875 - RNA, 22 nt, Human
cauuuguauguuccuccuuagg

SEQ ID NO: 868876 - RNA, 22 nt, Human
aucaggaucugcaucauaagaa

SEQ ID NO: 868877 - RNA, 22 nt, Human
ugaagaauaaaugguugagacu

SEQ ID NO: 868878 - RNA, 22 nt, Human
aacagaauaguugauguacagu

SEQ ID NO: 868879 - RNA, 22 nt, Human
caggcagcugcgacaagagagc

SEQ ID NO: 868880 - RNA, 22 nt, Human
gcagggaagaucuuggagcugc

SEQ ID NO: 868881 - RNA, 22 nt, Human
aggcaggcucaaugcccagucu

SEQ ID NO: 868882 - RNA, 22 nt, Human
ugaggcagugcugggaagccug

SEQ ID NO: 868883 - RNA, 22 nt, Human
ggaggugggauuaggaccuaaa

SEQ ID NO: 868884 - RNA, 22 nt, Human
gaaacugugaucguguucuggg

SEQ ID NO: 868885 - RNA, 22 nt, Human
ucugcaggcuguacaggaagca

SEQ ID NO: 868886 - RNA, 19 nt, Human
gaaguccucuaguaaauuu

SEQ ID NO: 868887 - RNA, 18 nt, Human
ugcuuggagcauuuacca

SEQ ID NO: 868888 - RNA, 22 nt, Human
acccaggagcucugggguccuc

SEQ ID NO: 868889 - RNA, 22 nt, Human
guaucacuuuugagagugagaa

SEQ ID NO: 868890 - RNA, 22 nt, Human
auauauaaccuggauaaggcuu

SEQ ID NO: 868891 - RNA, 22 nt, Human
uugcagcuuagugauguuaucu

SEQ ID NO: 868892 - RNA, 20 nt, Human
aagagaggaaguuauacuag

SEQ ID NO: 868893 - RNA, 22 nt, Human
aguccaugguucugacucaucu

SEQ ID NO: 868894 - RNA, 22 nt, Human
cucaggauuuacuaauuucaag

SEQ ID NO: 868895 - RNA, 18 nt, Human
aggcagacacuagagguc

SEQ ID NO: 868896 - RNA, 22 nt, Human
uugaauaggacucagcagugau

SEQ ID NO: 868897 - RNA, 22 nt, Human
aaucuucuacuugacaguucuc

SEQ ID NO: 868898 - RNA, 22 nt, Human
ucagagaguuacacaaauuguu

SEQ ID NO: 868899 - RNA, 22 nt, Human
ucucagucagccuugauguccc

SEQ ID NO: 868900 - RNA, 22 nt, Human
cuuguccccagcagguugguuu

SEQ ID NO: 868901 - RNA, 22 nt, Human
gagugcaggccugagcaccauc

SEQ ID NO: 868902 - RNA, 22 nt, Human
uggauuagguacuaugaauaua

SEQ ID NO: 868903 - RNA, 22 nt, Human
cccaggugcugcgugaagccuc

SEQ ID NO: 868904 - RNA, 22 nt, Human
uugugaguagugccgcaauaaa

SEQ ID NO: 868905 - RNA, 22 nt, Human
gaauuucaaaagccagaacggg

SEQ ID NO: 868906 - RNA, 22 nt, Human
gaaagaggaaggagauguauua

SEQ ID NO: 868907 - RNA, 22 nt, Human
gagucaccacugugauagucga

SEQ ID NO: 868908 - RNA, 22 nt, Human
auaucacaguaguuguuuaguu

SEQ ID NO: 868909 - RNA, 22 nt, Human
cuggcuuucuguuauaaagaca

SEQ ID NO: 868910 - RNA, 22 nt, Human
uauuuuaaagugaagggucuug

SEQ ID NO: 868911 - RNA, 22 nt, Human
uguccuuaucuccaaacaauca

SEQ ID NO: 868912 - RNA, 22 nt, Human
aauuccaaauguuuucaaucca

SEQ ID NO: 868913 - RNA, 22 nt, Human
aauauuguuucaagaucacaga

SEQ ID NO: 868914 - RNA, 22 nt, Human
gaagugaagguuacucuagauu

SEQ ID NO: 868915 - RNA, 16 nt, Human
ccccaggacuuggcac

SEQ ID NO: 868916 - RNA, 22 nt, Human
agggagcugagcugugagcagc

SEQ ID NO: 868917 - RNA, 22 nt, Human
caaauaguuuuucauguauuau

SEQ ID NO: 868918 - RNA, 22 nt, Human
uggcaggcagugugggagcugg

SEQ ID NO: 868919 - RNA, 22 nt, Human
aggagaggcucuaacucugugu

SEQ ID NO: 868920 - RNA, 22 nt, Human
uuguaaaugaccuuuucuaauu

SEQ ID NO: 868921 - RNA, 22 nt, Human
aucuacccacugaacacaauau

SEQ ID NO: 868922 - RNA, 22 nt, Human
guuaaagaguuuggcuuucuuc

SEQ ID NO: 868923 - RNA, 22 nt, Human
agcccaggaaucugcaucuuga

SEQ ID NO: 868924 - RNA, 22 nt, Human
cugcuguggguuaagacacugu

SEQ ID NO: 868925 - RNA, 22 nt, Human
guugaaugaaucauucuaugua

SEQ ID NO: 868926 - RNA, 22 nt, Human
aucaggauccaccuugagccug

SEQ ID NO: 868927 - RNA, 22 nt, Human
uuugcagugauucuugcaguga

SEQ ID NO: 868928 - RNA, 20 nt, Human
uuuuccagaaaguaucauug

SEQ ID NO: 868929 - RNA, 22 nt, Human
cauagaaaguauuauggaauuu

SEQ ID NO: 868930 - RNA, 22 nt, Human
auucuucaccugagucagucua

SEQ ID NO: 868931 - RNA, 22 nt, Human
aaggcagcucagcucauggcag

SEQ ID NO: 868932 - RNA, 22 nt, Human
cagaaggcuuuguggaguagac

SEQ ID NO: 868933 - RNA, 22 nt, Human
gaguccuuaauacacuggugga

SEQ ID NO: 868934 - RNA, 22 nt, Human
aaauacuagaauucagaguuga

SEQ ID NO: 868935 - RNA, 22 nt, Human
guucuucagauuccauuucagu

SEQ ID NO: 868936 - RNA, 22 nt, Human
cagaauaaagguacaauugagu

SEQ ID NO: 868937 - RNA, 22 nt, Human
uaaggccaauuaacaaccaggg

SEQ ID NO: 868938 - RNA, 22 nt, Human
ucugggaacugagcuccccuag

SEQ ID NO: 868939 - RNA, 20 nt, Human
aggcaccugucacaggugag

SEQ ID NO: 868940 - RNA, 22 nt, Human
uuguuauaaagacuaaauaugu

SEQ ID NO: 868941 - RNA, 22 nt, Human
uuacagaagaguaacuuggcaa

SEQ ID NO: 868942 - RNA, 22 nt, Human
agccagucggggccaugcuggg

SEQ ID NO: 868943 - RNA, 22 nt, Human
cccauucauccucgcuuccuuc

SEQ ID NO: 868944 - RNA, 22 nt, Human
caggcagcguccugcuuccugu

SEQ ID NO: 868945 - RNA, 22 nt, Human
cccaggaccgcgcggcugagcg

SEQ ID NO: 868946 - RNA, 22 nt, Human
cccaagagcuucuaggacgcug

SEQ ID NO: 868947 - RNA, 19 nt, Human
gcuuuggagggagguucua

SEQ ID NO: 868948 - RNA, 19 nt, Human
uggcagggagaguuugaag

SEQ ID NO: 868949 - RNA, 22 nt, Human
ggugaagguggaacgcagagca

SEQ ID NO: 868950 - RNA, 22 nt, Human
cuucuucacacuggucugaagc

SEQ ID NO: 868951 - RNA, 22 nt, Human
cccaggaggcgcagguugcggu

SEQ ID NO: 868952 - RNA, 22 nt, Human
ccccggaggcggagguugcagu

SEQ ID NO: 868953 - RNA, 22 nt, Human
caggcagaguuagagcaacugg

SEQ ID NO: 868954 - RNA, 22 nt, Human
uaugaacuuuugaugugacaug

SEQ ID NO: 868955 - RNA, 22 nt, Human
guuaaauucgaugauggauaaa

SEQ ID NO: 868956 - RNA, 22 nt, Human
cuacagaaggagaaauggguaa

SEQ ID NO: 868957 - RNA, 22 nt, Human
aaguaaaauguuuccuuuauua

SEQ ID NO: 868958 - RNA, 22 nt, Human
augcugugauuguagaaauauu

SEQ ID NO: 868959 - RNA, 22 nt, Human
cggcagcuccgcgccguaggac

SEQ ID NO: 868960 - RNA, 22 nt, Human
uuucacauaugguuguugauug

SEQ ID NO: 868961 - RNA, 22 nt, Human
gcaucuaauccaguccagcauc

SEQ ID NO: 868962 - RNA, 22 nt, Human
gauuucuuugcaagcuguguuc

SEQ ID NO: 868963 - RNA, 22 nt, Human
cucaugauguagcgaaugagaa

SEQ ID NO: 868964 - RNA, 21 nt, Human
cuugaaagguagagucuacag

SEQ ID NO: 868965 - RNA, 19 nt, Human
ucccaggaagcaaauguca

SEQ ID NO: 868966 - RNA, 22 nt, Human
uguauuuuuagaccuuuagacc

SEQ ID NO: 868967 - RNA, 22 nt, Human
uugcauuugagaaaguucuccu

SEQ ID NO: 868968 - RNA, 22 nt, Human
aaggagagguuguccguguugu

SEQ ID NO: 868969 - RNA, 22 nt, Human
gaucugaaucaauagaauaacu

SEQ ID NO: 868970 - RNA, 22 nt, Human
gauuucuucauuuguggugaau

SEQ ID NO: 868971 - RNA, 22 nt, Human
gaggcagcaggcugaggaggau

SEQ ID NO: 868972 - RNA, 22 nt, Human
cagaggcaaaagagguggaggu

SEQ ID NO: 868973 - RNA, 18 nt, Human
uugcuuuguaagcuugca

SEQ ID NO: 868974 - RNA, 22 nt, Human
cuucuucaucuguaaaacuugg

SEQ ID NO: 868975 - RNA, 22 nt, Human
caaauguauucucacuucaggg

SEQ ID NO: 868976 - RNA, 22 nt, Human
cauuuguuaaccaguguggauu

SEQ ID NO: 868977 - RNA, 19 nt, Human
ucucugcuucucuuggcau

SEQ ID NO: 868978 - RNA, 22 nt, Human
aaacaaacauagguuugaaagu

SEQ ID NO: 868979 - RNA, 20 nt, Human
uuacagaaaugauguuauuu

SEQ ID NO: 868980 - RNA, 22 nt, Human
cauuucaauacaguuuguaaau

SEQ ID NO: 868981 - RNA, 22 nt, Human
gugggagcuuuggcaucaggcu

SEQ ID NO: 868982 - RNA, 22 nt, Human
aguuauccgaaggcacugagau

SEQ ID NO: 868983 - RNA, 22 nt, Human
gcucucuuuuuccagugguggu

SEQ ID NO: 868984 - RNA, 22 nt, Human
uuuucauuuuuguagaugcaag

SEQ ID NO: 868985 - RNA, 22 nt, Human
auuaggcauauaugcuuuuaau

SEQ ID NO: 868986 - RNA, 22 nt, Human
gugcagcugcaggagucagguc

SEQ ID NO: 868987 - RNA, 22 nt, Human
gagguagcgaguggacagugca

SEQ ID NO: 868988 - RNA, 22 nt, Human
uugcauuuccuguacuguuuga

SEQ ID NO: 868989 - RNA, 22 nt, Human
uauaaaauggcaucagcuccaa

SEQ ID NO: 868990 - RNA, 22 nt, Human
auuucaacauucucaguuguag

SEQ ID NO: 868991 - RNA, 22 nt, Human
uugaaaguccuucuugaguuac

SEQ ID NO: 868992 - RNA, 22 nt, Human
uugaaaggugaacaugaugcac

SEQ ID NO: 868993 - RNA, 22 nt, Human
aucacauuguuagcauagacug

SEQ ID NO: 868994 - RNA, 22 nt, Human
cauagcuuagggguuaaacuca

SEQ ID NO: 868995 - RNA, 22 nt, Human
aaggcaguuaauuuggcuagaa

SEQ ID NO: 868996 - RNA, 22 nt, Human
ggcauuaagaauaucauuaaaa

SEQ ID NO: 868997 - RNA, 22 nt, Human
ugagacaaaauugacagacaaa

SEQ ID NO: 868998 - RNA, 20 nt, Human
uguuaaaggacacuugcuuu

SEQ ID NO: 868999 - RNA, 22 nt, Human
ugaggggagaagcagcagccug

SEQ ID NO: 869000 - RNA, 22 nt, Human
ccagauuugagcgucuuaaacc

SEQ ID NO: 869001 - RNA, 22 nt, Human
acugugugacuguuauuacugu

SEQ ID NO: 869002 - RNA, 21 nt, Human
auacagaaggcagacucucuc

SEQ ID NO: 869003 - RNA, 22 nt, Human
ugucaaauuuuuauugcaguau

SEQ ID NO: 869004 - RNA, 22 nt, Human
uaaauuauguuccauguccuuu

SEQ ID NO: 869005 - RNA, 22 nt, Human
gaucauuugcaggaaacauuaa

SEQ ID NO: 869006 - RNA, 22 nt, Human
aacauauaaacucuuaaguuca

SEQ ID NO: 869007 - RNA, 22 nt, Human
uuucaaguguccugauuaaugg

SEQ ID NO: 869008 - RNA, 22 nt, Human
ugaaacauuugaugaucuuugg

SEQ ID NO: 869009 - RNA, 22 nt, Human
gcccaggagaggccagggcuga

SEQ ID NO: 869010 - RNA, 22 nt, Human
caauacuuccuuguuagaggca

SEQ ID NO: 869011 - RNA, 19 nt, Human
uuucagacucaucuccagc

SEQ ID NO: 869012 - RNA, 22 nt, Human
ugccugugguuccaguuuuuuc

SEQ ID NO: 869013 - RNA, 22 nt, Human
gugguaauagagcuccaaacua

SEQ ID NO: 869014 - RNA, 22 nt, Human
uuuugaauaauucagaaacagc

SEQ ID NO: 869015 - RNA, 22 nt, Human
uuugaagaccuuaucucuaaau

SEQ ID NO: 869016 - RNA, 22 nt, Human
aauuuuaagcauaugacugguu

SEQ ID NO: 869017 - RNA, 22 nt, Human
aaggcaguaggaucuuccacag

SEQ ID NO: 869018 - RNA, 22 nt, Human
aaguccuuggagaauagaaagg

SEQ ID NO: 869019 - RNA, 22 nt, Human
uagaaaucagcaggcauaugua

SEQ ID NO: 869020 - RNA, 22 nt, Human
aaagcagacugauuugcaucac

SEQ ID NO: 869021 - RNA, 22 nt, Human
ccucaggaaaugaauaaauggc

SEQ ID NO: 869022 - RNA, 22 nt, Human
uucagcaagaccaccauguacc

SEQ ID NO: 869023 - RNA, 22 nt, Human
uaagaaucgauguuuauuuaga

SEQ ID NO: 869024 - RNA, 22 nt, Human
agcugcccugggcuggagaugg

SEQ ID NO: 869025 - RNA, 22 nt, Human
uaauuauagccgcuauuuugcu

SEQ ID NO: 869026 - RNA, 22 nt, Human
cuguauuuguccucuauuuauu

SEQ ID NO: 869027 - RNA, 22 nt, Human
aagcaccucuaugauugcuuuu

SEQ ID NO: 869028 - RNA, 22 nt, Human
ucagguggcuuggagggggacg

SEQ ID NO: 869029 - RNA, 22 nt, Human
aaagaaucguguguaguuugaa

SEQ ID NO: 869030 - RNA, 22 nt, Human
agaggcagccguauuucaaagg

SEQ ID NO: 869031 - RNA, 22 nt, Human
gaagugaagagauuagaaauca

SEQ ID NO: 869032 - RNA, 22 nt, Human
ggcuuggaaaugguaaugagcu

SEQ ID NO: 869033 - RNA, 22 nt, Human
guucuucagcauuagaagucau

SEQ ID NO: 869034 - RNA, 20 nt, Human
uauuccaaggguagagaaaa

SEQ ID NO: 869035 - RNA, 22 nt, Human
ucaggagaguguucaguggagg

SEQ ID NO: 869036 - RNA, 22 nt, Human
acagcauugcuccaucucaaga

SEQ ID NO: 869037 - RNA, 22 nt, Human
caaggccaaagggccacuguca

SEQ ID NO: 869038 - RNA, 22 nt, Human
ugcuuggccuacuuguccuuug

SEQ ID NO: 869039 - RNA, 22 nt, Human
uuccuuagggucagccagaucu

SEQ ID NO: 869040 - RNA, 22 nt, Human
cauuucacaaauggccacauca

SEQ ID NO: 869041 - RNA, 22 nt, Human
cagaauuuaaguggauuauucu

SEQ ID NO: 869042 - RNA, 22 nt, Human
accaggaggcuacacuguccca

SEQ ID NO: 869043 - RNA, 22 nt, Human
cugcccaggcugaaggaacauc

SEQ ID NO: 869044 - RNA, 22 nt, Human
cucaggauguacuacagaaggc

SEQ ID NO: 869045 - RNA, 22 nt, Human
cauaaaauggcuuguucuuuaa

SEQ ID NO: 869046 - RNA, 22 nt, Human
ggcaagaaggcuucagguagcu

SEQ ID NO: 869047 - RNA, 17 nt, Human
gaggagcuccaguaggu

SEQ ID NO: 869048 - RNA, 22 nt, Human
gagaggggcccaagccacauag

SEQ ID NO: 869049 - RNA, 20 nt, Human
uccaugaguuagagacuaua

SEQ ID NO: 869050 - RNA, 22 nt, Human
agaggagugggaagcagugcaa

SEQ ID NO: 869051 - RNA, 22 nt, Human
gcagaggagcaaguugcuacag

SEQ ID NO: 869052 - RNA, 22 nt, Human
uccauuuucaucucauguauaa

SEQ ID NO: 869053 - RNA, 21 nt, Human
cucaaagaccaaaaguguaga

SEQ ID NO: 869054 - RNA, 22 nt, Human
cugcuuugggcagcuuuguggc

SEQ ID NO: 869055 - RNA, 22 nt, Human
uacugccuggagcauuggugcu

SEQ ID NO: 869056 - RNA, 22 nt, Human
cuuugcaaacugucacacuuuc

SEQ ID NO: 869057 - RNA, 22 nt, Human
agccuauuccaggaugagcuca

SEQ ID NO: 869058 - RNA, 22 nt, Human
aaagauuugaguucugcuuaua

SEQ ID NO: 869059 - RNA, 22 nt, Human
gaauuucagagguaacaucauc

SEQ ID NO: 869060 - RNA, 22 nt, Human
augcagcuucaggauuaugaug

SEQ ID NO: 869061 - RNA, 22 nt, Human
gaggucaggggagaggcugaug

SEQ ID NO: 869062 - RNA, 22 nt, Human
aaguccuuguauacagaaucaa

SEQ ID NO: 869063 - RNA, 22 nt, Human
gccaggaggcuuaacuggacag

SEQ ID NO: 869064 - RNA, 22 nt, Human
aggcagcccugugcuggaugcu

SEQ ID NO: 869065 - RNA, 22 nt, Human
auguuaaaugguuuauuauuaa

SEQ ID NO: 869066 - RNA, 22 nt, Human
uuuguaaaggccugaauuucag

SEQ ID NO: 869067 - RNA, 19 nt, Human
caagugaagccugggaugg

SEQ ID NO: 869068 - RNA, 22 nt, Human
agaucaguuagauagcuugaug

SEQ ID NO: 869069 - RNA, 22 nt, Human
agucaccaucuguggcagccug

SEQ ID NO: 869070 - RNA, 22 nt, Human
auguuucaccaguuuuauaaga

SEQ ID NO: 869071 - RNA, 22 nt, Human
uucaggauggaguaccuuuuau

SEQ ID NO: 869072 - RNA, 22 nt, Human
ucaggagauggucuuuauaggc

SEQ ID NO: 869073 - RNA, 22 nt, Human
uguucauuuggcccuuuuguau

SEQ ID NO: 869074 - RNA, 22 nt, Human
gagaggugaaggcugcccuggg

SEQ ID NO: 869075 - RNA, 22 nt, Human
cuucagaaugggacuguguuug

SEQ ID NO: 869076 - RNA, 22 nt, Human
aggcagcugugaggacuggauu

SEQ ID NO: 869077 - RNA, 22 nt, Human
guuuuucuaggaccaugugauu

SEQ ID NO: 869078 - RNA, 22 nt, Human
gaacuguaguuaauacuacaca

SEQ ID NO: 869079 - RNA, 22 nt, Human
cccuuagcuccaagggguuugg

SEQ ID NO: 869080 - RNA, 22 nt, Human
auuuccaggagaaaggauuuua

SEQ ID NO: 869081 - RNA, 22 nt, Human
uucaauucaauucuaaauauau

SEQ ID NO: 869082 - RNA, 22 nt, Human
agagugcaaccgaaacaagcag

SEQ ID NO: 869083 - RNA, 18 nt, Human
ugcuggguaacuguaugg

SEQ ID NO: 869084 - RNA, 22 nt, Human
caucacccggaacugugucugc

SEQ ID NO: 869085 - RNA, 22 nt, Human
uagucaccagcuacaggacagc

SEQ ID NO: 869086 - RNA, 22 nt, Human
uaauuauuaugacaacaauugc

SEQ ID NO: 869087 - RNA, 22 nt, Human
uccaggagucagacagauggug

SEQ ID NO: 869088 - RNA, 22 nt, Human
cuagaaauacaggcacgugcca

SEQ ID NO: 869089 - RNA, 22 nt, Human
guccuuaguuacuuuucauguc

SEQ ID NO: 869090 - RNA, 22 nt, Human
ucacacagauugguagagcuga

SEQ ID NO: 869091 - RNA, 22 nt, Human
uacuaaacccucgauggaucuu

SEQ ID NO: 869092 - RNA, 22 nt, Human
auacaacuuuacaugcaauucc

SEQ ID NO: 869093 - RNA, 23 nt, Human
uuucaacuccugccauuauuucu

SEQ ID NO: 869094 - RNA, 22 nt, Human
aaaggaagaugccaggacucug

SEQ ID NO: 869095 - RNA, 22 nt, Human
cggagaggaccugcaacucgcu

SEQ ID NO: 869096 - RNA, 23 nt, Human
caauuucauaugauucuaccuaa

SEQ ID NO: 869097 - RNA, 22 nt, Human
auauuauucuaguaacagugau

SEQ ID NO: 869098 - RNA, 23 nt, Human
ugaguucucaucuuggcuucuau

SEQ ID NO: 869099 - RNA, 22 nt, Human
aagcagaguccccuucccaugg

SEQ ID NO: 869100 - RNA, 22 nt, Human
caggcagcucgaugccuuguug

SEQ ID NO: 869101 - RNA, 22 nt, Human
ggaggcaggaaagacagguuca

SEQ ID NO: 869102 - RNA, 22 nt, Human
agaggggagagcuaagcaauuc

SEQ ID NO: 869103 - RNA, 22 nt, Human
acauguaaaaggaacaugcaug

SEQ ID NO: 869104 - RNA, 22 nt, Human
uuuauuguuaucaugggugagu

SEQ ID NO: 869105 - RNA, 22 nt, Human
ugaggcagaaaauagcaguuca

SEQ ID NO: 869106 - RNA, 22 nt, Human
agugcagcaugcuggggaggcu

SEQ ID NO: 869107 - RNA, 22 nt, Human
uauuucagcaagaagaaugugg

SEQ ID NO: 869108 - RNA, 22 nt, Human
aggagaggaaucauuauuacaa

SEQ ID NO: 869109 - RNA, 22 nt, Human
ucacugcugcugccaugaugga

SEQ ID NO: 869110 - RNA, 22 nt, Human
caucucaugggcaugccaagcu

SEQ ID NO: 869111 - RNA, 22 nt, Human
uucaggaucaaguugccaguag

SEQ ID NO: 869112 - RNA, 19 nt, Human
gccaggagggcucuggcug

SEQ ID NO: 869113 - RNA, 22 nt, Human
aaacuuuggauugugauugugc

SEQ ID NO: 869114 - RNA, 22 nt, Human
auggagggugguaagacagaga

SEQ ID NO: 869115 - RNA, 22 nt, Human
aaaauugagagucuugugcaag

SEQ ID NO: 869116 - RNA, 22 nt, Human
cuauacaguaaccacagugauu

SEQ ID NO: 869117 - RNA, 22 nt, Human
ucagagaggcaauacuguuuaa

SEQ ID NO: 869118 - RNA, 22 nt, Human
ucaguagcagaaagcaaugagu

SEQ ID NO: 869119 - RNA, 22 nt, Human
uucagaaaugaauauugguauu

SEQ ID NO: 869120 - RNA, 22 nt, Human
guacagaaaugugaugacgcaa

SEQ ID NO: 869121 - RNA, 22 nt, Human
uggcagcucuguucaacaugag

SEQ ID NO: 869122 - RNA, 22 nt, Human
ccaggagagcgcccucccggcc

SEQ ID NO: 869123 - RNA, 19 nt, Human
agauggcaaaaugcaaaga

SEQ ID NO: 869124 - RNA, 22 nt, Human
auuccaaacucuuucccugucg

SEQ ID NO: 869125 - RNA, 22 nt, Human
acaugauuuuaguaucauaaua

SEQ ID NO: 869126 - RNA, 22 nt, Human
uuuacagaaugucaauuucuau

SEQ ID NO: 869127 - RNA, 22 nt, Human
cuuguaauuauaauguacuguu

SEQ ID NO: 869128 - RNA, 22 nt, Human
cauugcuuccuaugucccuucu

SEQ ID NO: 869129 - RNA, 22 nt, Human
aagaaugagcucaaagaucuua

SEQ ID NO: 869130 - RNA, 22 nt, Human
ggcauuuagagggcuuuucuga

SEQ ID NO: 869131 - RNA, 22 nt, Human
gaguccuugacacauaguaggu

SEQ ID NO: 869132 - RNA, 22 nt, Human
ucagauggcacacagagccugc

SEQ ID NO: 869133 - RNA, 22 nt, Human
ugagauuuguuuuauaaaauag

SEQ ID NO: 869134 - RNA, 22 nt, Human
uuuaaugauagcuguuucacau

SEQ ID NO: 869135 - RNA, 22 nt, Human
uuucacauuuaggcgugaauug

SEQ ID NO: 869136 - RNA, 22 nt, Human
aacacuuugggcauggccuucc

SEQ ID NO: 869137 - RNA, 22 nt, Human
ucccugggcuucuccagacuug

SEQ ID NO: 869138 - RNA, 22 nt, Human
auugaaagcacaaagaacaagu

SEQ ID NO: 869139 - RNA, 22 nt, Human
gaaauaagaguccaugccaggu

SEQ ID NO: 869140 - RNA, 22 nt, Human
ucagaauaugcuaaugacauuu

SEQ ID NO: 869141 - RNA, 22 nt, Human
ugcuuaauagugcacugguuuc

SEQ ID NO: 869142 - RNA, 22 nt, Human
gugcuuuuaaaggcaauuagua

SEQ ID NO: 869143 - RNA, 22 nt, Human
gaguccuuggcaucaucaguac

SEQ ID NO: 869144 - RNA, 23 nt, Human
ggcagcucucaucugaugacuga

SEQ ID NO: 869145 - RNA, 22 nt, Human
uuccaugaaauguguuaugcuu

SEQ ID NO: 869146 - RNA, 22 nt, Human
aggcaguuucugggacagcaua

SEQ ID NO: 869147 - RNA, 22 nt, Human
agugcuuuccuucuugugacau

SEQ ID NO: 869148 - RNA, 22 nt, Human
cuuaggcagggcuggaagaucu

SEQ ID NO: 869149 - RNA, 19 nt, Human
uucuccagccugaccugag

SEQ ID NO: 869150 - RNA, 22 nt, Human
aguuggagugaacaugagauug

SEQ ID NO: 869151 - RNA, 18 nt, Human
ggcagcuugacuagcaac

SEQ ID NO: 869152 - RNA, 22 nt, Human
gcccaggauggcuggaggugcu

SEQ ID NO: 869153 - RNA, 22 nt, Human
agaaagcaucuccauuguaggu

SEQ ID NO: 869154 - RNA, 22 nt, Human
uugauacauuuuuaggauaaac

SEQ ID NO: 869155 - RNA, 22 nt, Human
agggagcucacaguccaguaga

SEQ ID NO: 869156 - RNA, 22 nt, Human
uggcagagugcagaagaggcau

SEQ ID NO: 869157 - RNA, 20 nt, Human
cccagguaggugccaugagu

SEQ ID NO: 869158 - RNA, 22 nt, Human
aaggcagcaugaaucccuguac

SEQ ID NO: 869159 - RNA, 22 nt, Human
cagucaccuugaggacucagac

SEQ ID NO: 869160 - RNA, 22 nt, Human
uuccacaauguaugaauaagau

SEQ ID NO: 869161 - RNA, 19 nt, Human
gagcgcagagggcagggga

SEQ ID NO: 869162 - RNA, 22 nt, Human
ggcagcucacgggcauggggug

SEQ ID NO: 869163 - RNA, 22 nt, Human
ucaggaugagcucauaacuaug

SEQ ID NO: 869164 - RNA, 21 nt, Human
auuuccaaauaaggucacauu

SEQ ID NO: 869165 - RNA, 22 nt, Human
augcuuuaaaugucuuuugcuu

SEQ ID NO: 869166 - RNA, 21 nt, Human
ucuugaaaauuguagcaguuu

SEQ ID NO: 869167 - RNA, 22 nt, Human
auguuucagauacagaucaaau

SEQ ID NO: 869168 - RNA, 22 nt, Human
auccaugaagguacuucucagg

SEQ ID NO: 869169 - RNA, 22 nt, Human rhinovirus B
uggccauucagcauaacacaca

SEQ ID NO: 869170 - RNA, 22 nt, Human
agggccaaguccaggaccucgg

SEQ ID NO: 869171 - RNA, 20 nt, Human
ucccaggcuccacccuagac

SEQ ID NO: 869172 - RNA, 22 nt, Human
auggcuuugaaguaauguaauu

SEQ ID NO: 869173 - RNA, 22 nt, Human
uacuuuuccuggaaccacugcu

SEQ ID NO: 869174 - RNA, 22 nt, Human
gguucacagguccugggagcag

SEQ ID NO: 869175 - RNA, 22 nt, Human
uuccaggaugcugcugcuuuuu

SEQ ID NO: 869176 - RNA, 22 nt, Human
gcugccaccguggagaugagug

SEQ ID NO: 869177 - RNA, 21 nt, Human
aguguguguggaaugagaaua

SEQ ID NO: 869178 - RNA, 19 nt, Human
ugggcagguucaguaaugg

SEQ ID NO: 869179 - RNA, 22 nt, Human
cccaguguuccuugaggggcug

SEQ ID NO: 869180 - RNA, 22 nt, Human
cuuuguaucuaaauaucuugaa

SEQ ID NO: 869181 - RNA, 22 nt, Human
cagcagcuccaaagaauagcca

SEQ ID NO: 869182 - RNA, 22 nt, Human
uuguuuaaagaacuucugacuu

SEQ ID NO: 869183 - RNA, 22 nt, Human
gaguuuauugucuuccaggcuu

SEQ ID NO: 869184 - RNA, 17 nt, Human
uagcuguguuucagcua

SEQ ID NO: 869185 - RNA, 22 nt, Human
aggacuucuaagcuaagaaguu

SEQ ID NO: 869186 - RNA, 22 nt, Human
auuugccuuuuaaacucacaau

SEQ ID NO: 869187 - RNA, 22 nt, Human
uguuuaugcaucguuaauacca

SEQ ID NO: 869188 - RNA, 22 nt, Human
ugaccuuucucugggugcuugg

SEQ ID NO: 869189 - RNA, 23 nt, Human
ugauuacaagggccaaagaaagg

SEQ ID NO: 869190 - RNA, 22 nt, Human
auaguguguuagugacauaggc

SEQ ID NO: 869191 - RNA, 22 nt, Human
ccugcugucucugggcaggcag

SEQ ID NO: 869192 - RNA, 22 nt, Human
ugucucagaguguuguauuaga

SEQ ID NO: 869193 - RNA, 22 nt, Human
auaaauagugcugccaugagua

SEQ ID NO: 869194 - RNA, 22 nt, Human
gccuggcugaggccucugcuaa

SEQ ID NO: 869195 - RNA, 21 nt, Human
ugucuuuaggaccuguuaaau

SEQ ID NO: 869196 - RNA, 22 nt, Human
cagggcugaacugagcuuguga

SEQ ID NO: 869197 - RNA, 22 nt, Human
ugcaucuaaguggcuaacaacc

SEQ ID NO: 869198 - RNA, 22 nt, Human
ugaaaguuauuacugaugaugu

SEQ ID NO: 869199 - RNA, 19 nt, Human
aaauaucagagagaugaua

SEQ ID NO: 869200 - RNA, 22 nt, Human
caguuucagcucaagcacucag

SEQ ID NO: 869201 - RNA, 22 nt, Human
gcagcaucagguucacugcgug

SEQ ID NO: 869202 - RNA, 23 nt, Human
cuuucauugugguuucacagagc

SEQ ID NO: 869203 - RNA, 22 nt, Human
cuggaaugccucccugucagag

SEQ ID NO: 869204 - RNA, 22 nt, Human
auguuuccauuuucuuguauca

SEQ ID NO: 869205 - RNA, 22 nt, Human
cugcugugcacccaggaaggcu

SEQ ID NO: 869206 - RNA, 22 nt, Human
auuagugcccaggcugccucuu

SEQ ID NO: 869207 - RNA, 22 nt, Human
cuuaggcaaccaggucaaugcu

SEQ ID NO: 869208 - RNA, 22 nt, Human
cauguauugaagugugcaucug

SEQ ID NO: 869209 - RNA, 22 nt, Human
cuuuauguuggggugucuuagu

SEQ ID NO: 869210 - RNA, 22 nt, Human
uagcaucaugaucagaacuguu

SEQ ID NO: 869211 - RNA, 22 nt, Human
auuuacauaauagacuuuaggu

SEQ ID NO: 869212 - RNA, 22 nt, Human
ucagugcuugacagcucuggga

SEQ ID NO: 869213 - RNA, 22 nt, Human
gcagccagguuugaggaccacu

SEQ ID NO: 869214 - RNA, 22 nt, Human
ugaaaacacuuuaguuuagguc

SEQ ID NO: 869215 - RNA, 22 nt, Human
uggcucugugucucccagcagc

SEQ ID NO: 869216 - RNA, 22 nt, Human
agaaaugacaagacugaucagg

SEQ ID NO: 869217 - RNA, 22 nt, Human
uauuugcugaaucugauucaga

SEQ ID NO: 869218 - RNA, 22 nt, Human
uaacagcauuugaaugaguaac

SEQ ID NO: 869219 - RNA, 22 nt, Human
agccagcaugaagacagaggcc

SEQ ID NO: 869220 - RNA, 22 nt, Human
uuucaguugauugcuuggguua

SEQ ID NO: 869221 - RNA, 22 nt, Human
cugaggcuaaccucgagagaca

SEQ ID NO: 869222 - RNA, 22 nt, Human
gggaguggauuauguggaccca

SEQ ID NO: 869223 - RNA, 22 nt, Human
ucucauuugccucaucuauaaa

SEQ ID NO: 869224 - RNA, 22 nt, Human
agagagguuugcuggaagauuc

SEQ ID NO: 869225 - RNA, 18 nt, Human
auuaaucauaaaaugcug

SEQ ID NO: 869226 - RNA, 22 nt, Human
uguucauuccggggagggcuaa

SEQ ID NO: 869227 - RNA, 19 nt, Human
auuugcuugucugcucugc

SEQ ID NO: 869228 - RNA, 20 nt, Human
ugcuggcaugcaagagggaa

SEQ ID NO: 869229 - RNA, 22 nt, Human
ucaugucaguuucuucuauaaa

SEQ ID NO: 869230 - RNA, 22 nt, Human
acauaaguuauggauaaaaugu

SEQ ID NO: 869231 - RNA, 22 nt, Human
ucccuguggauaucugcagcug

SEQ ID NO: 869232 - RNA, 22 nt, Human
cacugcagcaccaugcagggcu

SEQ ID NO: 869233 - RNA, 22 nt, Human
uacaucauuuuggagaugagca

SEQ ID NO: 869234 - RNA, 22 nt, Human
gggaagugaaguguagcugucu

SEQ ID NO: 869235 - RNA, 22 nt, Human
uauguuucaucaggcauggagu

SEQ ID NO: 869236 - RNA, 22 nt, Human
agcaaaagauagauuaacaaga

SEQ ID NO: 869237 - RNA, 22 nt, Human
guagaacuaggacuucagguau

SEQ ID NO: 869238 - RNA, 22 nt, Human
ucacacaugaguaaauacaggg

SEQ ID NO: 869239 - RNA, 22 nt, Human
auguaacacccacuuuuauagc

SEQ ID NO: 869240 - RNA, 22 nt, Human
gggucuggacggcugcaggaag

SEQ ID NO: 869241 - RNA, 22 nt, Human
aguucagaguaaauguugaagg

SEQ ID NO: 869242 - RNA, 22 nt, Human
acagccaaggaauuaggaaggg

SEQ ID NO: 869243 - RNA, 22 nt, Human
caggcagaguuagagcaacugg

SEQ ID NO: 869244 - RNA, 22 nt, Human
auuuuccucaagccucuggaag

SEQ ID NO: 869245 - RNA, 22 nt, Human
aagagagggacuuauuaaaguc

SEQ ID NO: 869246 - RNA, 22 nt, Human
cagccagcuggcacugugagua

SEQ ID NO: 869247 - RNA, 22 nt, Human
auuagauuguaaauguuuucac

SEQ ID NO: 869248 - RNA, 22 nt, Human
cuauguucucggcacuauggau

SEQ ID NO: 869249 - RNA, 22 nt, Human
uauguuuaguauccauuuucag

SEQ ID NO: 869250 - RNA, 22 nt, Human
ccacacugaaccucagugucuu

SEQ ID NO: 869251 - RNA, 22 nt, Human
ccugucuggggacucccugggu

SEQ ID NO: 869252 - RNA, 22 nt, Human
guccagccccugacucccaggc

SEQ ID NO: 869253 - RNA, 18 nt, Human
guacacaaagucaaagua

SEQ ID NO: 869254 - RNA, 22 nt, Human
aaacuaaaccuggcuuaguaag

SEQ ID NO: 869255 - RNA, 22 nt, Human
guuguacagcauccagugcaga

SEQ ID NO: 869256 - RNA, 22 nt, Human
aguggcugcugacuuuaauaca

SEQ ID NO: 869257 - RNA, 22 nt, Human
guaggaauuuugugagcuuucc

SEQ ID NO: 869258 - RNA, 22 nt, Human
cugagugaucagcuuggguccg

SEQ ID NO: 869259 - RNA, 22 nt, Human
uuuucacacaaggugauaaguu

SEQ ID NO: 869260 - RNA, 22 nt, Human
uccucaggaucuaggagugcuu

SEQ ID NO: 869261 - RNA, 22 nt, Human
ugacagagcaagaucuagauaa

SEQ ID NO: 869262 - RNA, 22 nt, Human
uucuagacuguguacagauuca

SEQ ID NO: 869263 - RNA, 22 nt, Human
aaacuagaugauuaugaagcau

SEQ ID NO: 869264 - RNA, 22 nt, Human
cauuuagaagucuuagaacuau

SEQ ID NO: 869265 - RNA, 22 nt, Human
acacaaaaucaaaguccuaggc

SEQ ID NO: 869266 - RNA, 22 nt, Human
auugcucagcacaagcagcaga

SEQ ID NO: 869267 - RNA, 22 nt, Human
guggaagguaaugcagcuuacu

SEQ ID NO: 869268 - RNA, 22 nt, Human
ugaagcaacuggacaaguuggc

SEQ ID NO: 869269 - RNA, 22 nt, Human
cagcuggccugagcgguggcgg

SEQ ID NO: 869270 - RNA, 20 nt, Human
agcuguuuacauggauuucu

SEQ ID NO: 869271 - RNA, 22 nt, Human
agcacagaugugaguggaggcu

SEQ ID NO: 869272 - RNA, 22 nt, Human
uaugucuuaacucuagaaaggu

SEQ ID NO: 869273 - RNA, 22 nt, Human
ugauauuuaagcaaaaauaugg

SEQ ID NO: 869274 - RNA, 22 nt, Human
gaaagguuuggcuuuucaguag

SEQ ID NO: 869275 - RNA, 22 nt, Human
aaugcuuuuacgacauguaccu

SEQ ID NO: 869276 - RNA, 22 nt, Human
aaaauaugacugugcuccuuaa

SEQ ID NO: 869277 - RNA, 22 nt, Human
gagcagugacuggagcaugaga

SEQ ID NO: 869278 - RNA, 22 nt, Human
acagcagggucacauucccucu

SEQ ID NO: 869279 - RNA, 22 nt, Human
uccacagguccggcaugaacag

SEQ ID NO: 869280 - RNA, 22 nt, Human
uuucuaaaugguggcugcauug

SEQ ID NO: 869281 - RNA, 22 nt, Human
gcugcagcagcugcaggguugu

SEQ ID NO: 869282 - RNA, 22 nt, Human
gcucagaguuaauuggaugggu

SEQ ID NO: 869283 - RNA, 22 nt, Human
ccugugccaaaaggcugcuuau

SEQ ID NO: 869284 - RNA, 22 nt, Human
uuucucagcucagcaucugggu

SEQ ID NO: 869285 - RNA, 22 nt, Human
aggccagcuguuacuagagcca

SEQ ID NO: 869286 - RNA, 22 nt, Human
guucuaggagccaagaauauag

SEQ ID NO: 869287 - RNA, 22 nt, Human
ucauaaagcuugccugcagugu

SEQ ID NO: 869288 - RNA, 22 nt, Human
ucuuuccuacuuuauugugaac

SEQ ID NO: 869289 - RNA, 22 nt, Human
gaguugccucuaagucccuggu

SEQ ID NO: 869290 - RNA, 22 nt, Human
uccaggaggcagggcugugccc

SEQ ID NO: 869291 - RNA, 22 nt, Human
ggggugugucugacaaugguau

SEQ ID NO: 869292 - RNA, 22 nt, Human
aaauccuaagcagaggaauuua

SEQ ID NO: 869293 - RNA, 22 nt, Human
uguccauacaauguaacaucuu

SEQ ID NO: 869294 - RNA, 22 nt, Human
uucuucaaaauccagcaugauu

SEQ ID NO: 869295 - RNA, 22 nt, Human
uauauuugugugugauuuauga

SEQ ID NO: 869296 - RNA, 22 nt, Human
cccagguguuuguggcagaggu

SEQ ID NO: 869297 - RNA, 22 nt, Human
auauuuguaaaauucugugucu

SEQ ID NO: 869298 - RNA, 22 nt, Human
augccucugcucuugguccuca

SEQ ID NO: 869299 - RNA, 22 nt, Human
uuuguuuucaaugugucauuca

SEQ ID NO: 869300 - RNA, 22 nt, Human
ccaggcuguaagagugauguug

SEQ ID NO: 869301 - RNA, 21 nt, Human
uccagggucagaaguucagug

SEQ ID NO: 869302 - RNA, 22 nt, Human
aggagcuucagagagaaccugg

SEQ ID NO: 869303 - RNA, 23 nt, Human
ugggucacuguuucaccauugcu

SEQ ID NO: 869304 - RNA, 22 nt, Human
caaaguaauuuggagauauaua

SEQ ID NO: 869305 - RNA, 22 nt, Human
auaacuuagaguaggcaaaagu

SEQ ID NO: 869306 - RNA, 22 nt, Human
aaagaugccuaacucagaagau

SEQ ID NO: 869307 - RNA, 22 nt, Human
agggcagcagcugucccugaga

SEQ ID NO: 869308 - RNA, 22 nt, Human
gauuucaaagguucugcaugcc

SEQ ID NO: 869309 - RNA, 20 nt, Human
uccuaacuauaaaguggcuc

SEQ ID NO: 869310 - RNA, 22 nt, Human
uuuacagagaauguacauaaag

SEQ ID NO: 869311 - RNA, 22 nt, Human
ucugugaaaggaaagaacugac

SEQ ID NO: 869312 - RNA, 22 nt, Human
ccuugggagaaauugcagaguc

SEQ ID NO: 869313 - RNA, 22 nt, Human
gggcuccaaccccagugaacuc

SEQ ID NO: 869314 - RNA, 22 nt, Human
uuucuaaucugauucuccuacc

SEQ ID NO: 869315 - RNA, 17 nt, Human
ccaggucuccuugcuuu

SEQ ID NO: 869316 - RNA, 22 nt, Human
gcccagcaggacagagugguuu

SEQ ID NO: 869317 - RNA, 22 nt, Human
uuagaagcaggcugugucccca

SEQ ID NO: 869318 - RNA, 22 nt, Human
aaaguuuuauaugcugcagcga

SEQ ID NO: 869319 - RNA, 22 nt, Human
gugcucuaaggcaccacugagc

SEQ ID NO: 869320 - RNA, 22 nt, Human
gggucccuggaauuacuugaca

SEQ ID NO: 869321 - RNA, 22 nt, Human
uguucuuaacuuuuguguauau

SEQ ID NO: 869322 - RNA, 22 nt, Human
gugaaauuguauuuggcauuga

SEQ ID NO: 869323 - RNA, 22 nt, Human
uucagcaagugucucuacuguc

SEQ ID NO: 869324 - RNA, 22 nt, Human
uucagugcagacgccgaagccc

SEQ ID NO: 869325 - RNA, 22 nt, Human
ccuggccaggcauggagucaca

SEQ ID NO: 869326 - RNA, 22 nt, Human
cuucuacacaucccucuugcuu

SEQ ID NO: 869327 - RNA, 22 nt, Human
aaagaacagauguguggugcau

SEQ ID NO: 869328 - RNA, 22 nt, Human
uuggccagagguuucucucaug

SEQ ID NO: 869329 - RNA, 22 nt, Human
aaaggcuucggaucagaaggua

SEQ ID NO: 869330 - RNA, 22 nt, Human
ugacacuucaaagaccaggguc

SEQ ID NO: 869331 - RNA, 22 nt, Human
agaugcagaaaaacuaagugau

SEQ ID NO: 869332 - RNA, 22 nt, Human
ugcuccugaacacagcccuaug

SEQ ID NO: 869333 - RNA, 22 nt, Human
uaggcuucccgcucacaugccc

SEQ ID NO: 869334 - RNA, 23 nt, Human
acugccugugccgaucucucuca

SEQ ID NO: 869335 - RNA, 22 nt, Human
accuggagcuuccaacucaacu

SEQ ID NO: 869336 - RNA, 20 nt, Human
aagcuucacuucauuugauc

SEQ ID NO: 869337 - RNA, 22 nt, Human
uagugccaaagccuggugucau

SEQ ID NO: 869338 - RNA, 22 nt, Human
aauuacaaauguagacucucau

SEQ ID NO: 869339 - RNA, 22 nt, Human
uaagccugcaugaaccaugaga

SEQ ID NO: 869340 - RNA, 22 nt, Human
uccaggcuccugacuuuuuggg

SEQ ID NO: 869341 - RNA, 22 nt, Human
ugucauggacagauuagaugag

SEQ ID NO: 869342 - RNA, 22 nt, Human
auacagaugagaucaggcauaa

SEQ ID NO: 869343 - RNA, 23 nt, Human
uuacaacuauuugccauguuguu

SEQ ID NO: 869344 - RNA, 22 nt, Human
ugcuuucacuucucugcagcca

SEQ ID NO: 869345 - RNA, 23 nt, Human
aguuucacauuuuacauguggcu

SEQ ID NO: 869346 - RNA, 19 nt, Human
cugcucagagcagcuccag

SEQ ID NO: 869347 - RNA, 22 nt, Human
cucacugcccugaaguuggguu

SEQ ID NO: 869348 - RNA, 22 nt, Human
cagccugacaccagcuuugggc

SEQ ID NO: 869349 - RNA, 22 nt, Human
uacauucagaauugggaggcaa

SEQ ID NO: 869350 - RNA, 22 nt, Human
uaaagguccaaagagggcuacg

SEQ ID NO: 869351 - RNA, 22 nt, Human
aggaaaugcaggcaaauacucu

SEQ ID NO: 869352 - RNA, 22 nt, Human
uuuauuucacucuccggauacu

SEQ ID NO: 869353 - RNA, 22 nt, Human
agcccaggaaguugaggcuugc

SEQ ID NO: 869354 - RNA, 22 nt, Human
cugauuccaaagccaaagcuau

SEQ ID NO: 869355 - RNA, 22 nt, Human
gcuucaaacugagcuucaagug

SEQ ID NO: 869356 - RNA, 22 nt, Human
uuacauuuugggguaaggauaa

SEQ ID NO: 869357 - RNA, 22 nt, Human
aaagaggcagguguuacuggaa

SEQ ID NO: 869358 - RNA, 22 nt, Human
ucacauucuucccugacuucuu

SEQ ID NO: 869359 - RNA, 22 nt, Human
cuggagggcuggacuaaggaaa

SEQ ID NO: 869360 - RNA, 22 nt, Human
guucaguguuuuuauugacagg

SEQ ID NO: 869361 - RNA, 22 nt, Human
agucagagacccuagaucuaau

SEQ ID NO: 869362 - RNA, 22 nt, Human
ccagggugugggcgucggcacg

SEQ ID NO: 869363 - RNA, 22 nt, Human
caaauguaauugcgguuuuugc

SEQ ID NO: 869364 - RNA, 22 nt, Human
uggcccugggcaucuuucguga

SEQ ID NO: 869365 - RNA, 22 nt, Human
cucuccucagaacaggcccucu

SEQ ID NO: 869366 - RNA, 22 nt, Human
gugaaggcuaauuaaacaaguu

SEQ ID NO: 869367 - RNA, 22 nt, Human
gcugggaguuugauuugacugg

SEQ ID NO: 869368 - RNA, 21 nt, Human
uccaggagcacgggacuagga

SEQ ID NO: 869369 - RNA, 22 nt, Human
guggccagggcccacaggauga

SEQ ID NO: 869370 - RNA, 22 nt, Human
gggcuguggagccgcgagggcu

SEQ ID NO: 869371 - RNA, 22 nt, Human
uuugagaaaugggcucugugcu

SEQ ID NO: 869372 - RNA, 22 nt, Human
uuaggcaaagauauuacguagu

SEQ ID NO: 869373 - RNA, 22 nt, Human
ucucugggccucccuuuccaag

SEQ ID NO: 869374 - RNA, 22 nt, Human
aggaauugccuggggccuggga

SEQ ID NO: 869375 - RNA, 22 nt, Human
uuccugggccuuaaaucuuuug

SEQ ID NO: 869376 - RNA, 22 nt, Human
uaaguccaaggguaugaguugg

SEQ ID NO: 869377 - RNA, 22 nt, Human
gccugccuuuguaugacccuga

SEQ ID NO: 869378 - RNA, 22 nt, Human
cauuauugccagccauacugaa

SEQ ID NO: 869379 - RNA, 22 nt, Human
cagugcuccugauguacccuug

SEQ ID NO: 869380 - RNA, 21 nt, Human
aagaacuauugagguacacag

SEQ ID NO: 869381 - RNA, 22 nt, Human
ugcuauuaccugcuggacaguc

SEQ ID NO: 869382 - RNA, 22 nt, Human
aauucccauuugcagaaaauca

SEQ ID NO: 869383 - RNA, 22 nt, Human
gugucuauaaugaaaugcacuu

SEQ ID NO: 869384 - RNA, 22 nt, Human
aucuuuaggaaccuaaccuauu

SEQ ID NO: 869385 - RNA, 22 nt, Human
ucaaauaugugauagaagcuaa

SEQ ID NO: 869386 - RNA, 22 nt, Human
guauaguuugcgauuugugguu

SEQ ID NO: 869387 - RNA, 22 nt, Human
aaaacauguccauacagaaacu

SEQ ID NO: 869388 - RNA, 22 nt, Human
ggcaguguuuauggguaacaca

SEQ ID NO: 869389 - RNA, 19 nt, Human
agagauccagcuucuagcu

SEQ ID NO: 869390 - RNA, 20 nt, Human
cuggaagccuuuccagagca

SEQ ID NO: 869391 - RNA, 22 nt, Human
aguccauaggcaguucauaaca

SEQ ID NO: 869392 - RNA, 22 nt, Human
gcagugaagauggcagguuggg

SEQ ID NO: 869393 - RNA, 22 nt, Human
cagaaccuuggugguagggaca

SEQ ID NO: 869394 - RNA, 22 nt, Human
agagagcuguccugggacaccc

SEQ ID NO: 869395 - RNA, 22 nt, Human
cccuggaguagcacugggucgc

SEQ ID NO: 869396 - RNA, 22 nt, Human
ucagcuccuauacuuuguccug

SEQ ID NO: 869397 - RNA, 22 nt, Human
ucauguuuuugccauaugacuc

SEQ ID NO: 869398 - RNA, 22 nt, Human
uguuuacaugcauaagcuuaag

SEQ ID NO: 869399 - RNA, 22 nt, Human
acaggacaacucagcagccagc

SEQ ID NO: 869400 - RNA, 22 nt, Human
uccuagaagauggaucagagaa

SEQ ID NO: 869401 - RNA, 23 nt, Human
ggcuagaguggaggggaacugca

SEQ ID NO: 869402 - RNA, 22 nt, Human
aaacaucuaucagcauuuuuua

SEQ ID NO: 869403 - RNA, 22 nt, Human
acagggccucagccagggcaga

SEQ ID NO: 869404 - RNA, 22 nt, Human
gggaagaagacauggugaaggc

SEQ ID NO: 869405 - RNA, 22 nt, Human
aaagcauuucaugucuagaaag

SEQ ID NO: 869406 - RNA, 22 nt, Human
cuguggcucaggccuguaagcc

SEQ ID NO: 869407 - RNA, 21 nt, Human
acagcagcaaucugucuuucc

SEQ ID NO: 869408 - RNA, 22 nt, Human
uagccaaagaagguauauuugu

SEQ ID NO: 869409 - RNA, 22 nt, Human
agccacugucugaacuucugug

SEQ ID NO: 869410 - RNA, 22 nt, Human
auggaaugccaaguucacugcu

SEQ ID NO: 869411 - RNA, 22 nt, Human
aggucuaacugauagaauucau

SEQ ID NO: 869412 - RNA, 22 nt, Human
ugggugacagacaccucucugu

SEQ ID NO: 869413 - RNA, 20 nt, Human
acaaucuguuuguugucugu

SEQ ID NO: 869414 - RNA, 22 nt, Human
aaauacagaguugcuuaaaagc

SEQ ID NO: 869415 - RNA, 22 nt, Human
agcuggggguagugagaaauaa

SEQ ID NO: 869416 - RNA, 22 nt, Human
uaaguucucugaaaugaaaaag

SEQ ID NO: 869417 - RNA, 23 nt, Human
cugugcucagagggagggagagc

SEQ ID NO: 869418 - RNA, 22 nt, Human
agugucugaguaaauuucucau

SEQ ID NO: 869419 - RNA, 22 nt, Human
gagggcucuaccaaguaacucu

SEQ ID NO: 869420 - RNA, 22 nt, Human
gaagguuuugauuccacugaau

SEQ ID NO: 869421 - RNA, 22 nt, Human
gacagccaggucugaugaccca

SEQ ID NO: 869422 - RNA, 22 nt, Human
uguaaaguuuuauuguuccuuc

SEQ ID NO: 869423 - RNA, 22 nt, Human
ucuuugauacagauguaagcug

SEQ ID NO: 869424 - RNA, 22 nt, Human
cugcuccagacaccugcagggg

SEQ ID NO: 869425 - RNA, 22 nt, Human
ucugggaguggguccaaggaau

SEQ ID NO: 869426 - RNA, 22 nt, Human
caggacacuacagaugggaggg

SEQ ID NO: 869427 - RNA, 22 nt, Human
cugcuuucugcaccccaggucg

SEQ ID NO: 869428 - RNA, 22 nt, Human
aguuucauauuaccaugucacc

SEQ ID NO: 869429 - RNA, 22 nt, Human
gagcugcacaucugaggcuaau

SEQ ID NO: 869430 - RNA, 21 nt, Human
uucuagaaccgugggcgguuc

SEQ ID NO: 869431 - RNA, 22 nt, Human
gccuggcucugagggagcuccu

SEQ ID NO: 869432 - RNA, 22 nt, Human
cugcuguggccagccaggucaa

SEQ ID NO: 869433 - RNA, 22 nt, Human
ugaagcccugucuuauggaaga

SEQ ID NO: 869434 - RNA, 22 nt, Human
uccagacucugucacuuccuag

SEQ ID NO: 869435 - RNA, 22 nt, Human
ucucugagguuguuuccagcac

SEQ ID NO: 869436 - RNA, 22 nt, Human
uggcuacaucacagagaauucc

SEQ ID NO: 869437 - RNA, 22 nt, Human
caggcugccgugaagcaggccu

SEQ ID NO: 869438 - RNA, 22 nt, Human
caggagcucacugucuaauggg

SEQ ID NO: 869439 - RNA, 22 nt, Human
ugaaagguagcuggccucauag

SEQ ID NO: 869440 - RNA, 22 nt, Human
caguguuuagcacagugcuugg

SEQ ID NO: 869441 - RNA, 22 nt, Human
gcagagcugucuaagucacuuc

SEQ ID NO: 869442 - RNA, 22 nt, Human
guucugggucuggacacacaga

SEQ ID NO: 869443 - RNA, 22 nt, Human
uugagauagaucucaucuuccc

SEQ ID NO: 869444 - RNA, 22 nt, Human
ugucaguguauacauacaguau

SEQ ID NO: 869445 - RNA, 22 nt, Human
aggcucugugaugugccaggca

SEQ ID NO: 869446 - RNA, 22 nt, Human
cagcuugugcaaagguccuggg

SEQ ID NO: 869447 - RNA, 22 nt, Human
gcuguacaguuuacuagguggg

SEQ ID NO: 869448 - RNA, 22 nt, Human
aguuuuauguagacaauucauu

SEQ ID NO: 869449 - RNA, 22 nt, Human
uacagauauuucucuucaacaa

SEQ ID NO: 869450 - RNA, 22 nt, Human
acagagcaugcucaguguguga

SEQ ID NO: 869451 - RNA, 22 nt, Human
ugaauuaaaggaauucgaauuc

SEQ ID NO: 869452 - RNA, 22 nt, Human
ugagccaggcccagugggguca

SEQ ID NO: 869453 - RNA, 17 nt, Human
ccuuucucuuucaucuc

SEQ ID NO: 869454 - RNA, 22 nt, Human
guacaauuaagugcacaaauag

SEQ ID NO: 869455 - RNA, 22 nt, Human
augcaaauaaacagucuaguug

SEQ ID NO: 869456 - RNA, 22 nt, Human
cugcaaaaguaauugcagguuu

SEQ ID NO: 869457 - RNA, 22 nt, Human
uagugugucccuggggaguguu

SEQ ID NO: 869458 - RNA, 20 nt, Human
aaaaauugauaucgcuuccu

SEQ ID NO: 869459 - RNA, 22 nt, Human
agcugcuccaauuuuuaccauu

SEQ ID NO: 869460 - RNA, 22 nt, Human
ucugggccuuggaguggggaga

SEQ ID NO: 869461 - RNA, 22 nt, Human
gcauucuuugaaugcuucuaau

SEQ ID NO: 869462 - RNA, 22 nt, Human
gcugaagcccacguggcuugua

SEQ ID NO: 869463 - RNA, 21 nt, Human
guucaauagcucuuugaaugc

SEQ ID NO: 869464 - RNA, 22 nt, Human
agcaggugaugugagucuggaa

SEQ ID NO: 869465 - RNA, 22 nt, Human
cugccagacacguuaugcucau

SEQ ID NO: 869466 - RNA, 22 nt, Human
uguacagauugaucauggagag

SEQ ID NO: 869467 - RNA, 19 nt, Human
cucuuuccauuguauuugc

SEQ ID NO: 869468 - RNA, 22 nt, Human
acaugcaugcuuuggugggugu

SEQ ID NO: 869469 - RNA, 22 nt, Human
gaaauguuccugaucccugauu

SEQ ID NO: 869470 - RNA, 22 nt, Human
uuucuuauauucugucauuguu

SEQ ID NO: 869471 - RNA, 22 nt, Human
ugucucugagaugacucccacc

SEQ ID NO: 869472 - RNA, 22 nt, Human
ugucucugaaauauguggcucc

SEQ ID NO: 869473 - RNA, 22 nt, Human
ucacauuuguguuuuauuagag

SEQ ID NO: 869474 - RNA, 22 nt, Human
uaaagcagugguucucaaacuu

SEQ ID NO: 869475 - RNA, 22 nt, Human
gaugucuuucuaauacuggcuu

SEQ ID NO: 869476 - RNA, 22 nt, Human
agcucccauuaucuucugaaac

SEQ ID NO: 869477 - RNA, 22 nt, Human
aucuuuaggcaaguuacuuaac

SEQ ID NO: 869478 - RNA, 22 nt, Human
ggcugccuucagacuccagcuu

SEQ ID NO: 869479 - RNA, 22 nt, Human
auuagcaacauggugaauaugu

SEQ ID NO: 869480 - RNA, 22 nt, Human
cccaggucgucagcaguguggu

SEQ ID NO: 869481 - RNA, 16 nt, Human
ugugcauguucugugu

SEQ ID NO: 869482 - RNA, 22 nt, Human
ccagcccucacugaggccucuc

SEQ ID NO: 869483 - RNA, 22 nt, Human
auucacaugauguauguagggc

SEQ ID NO: 869484 - RNA, 22 nt, Human
agagucuuuugucaguaauguu

SEQ ID NO: 869485 - RNA, 20 nt, Human
ucuuggaaaaaguucagaau

SEQ ID NO: 869486 - RNA, 22 nt, Human
cugacagguugguagcuuugga

SEQ ID NO: 869487 - RNA, 22 nt, Human
auuuccaugucgguauuuuaua

SEQ ID NO: 869488 - RNA, 22 nt, Human
cugccucuguugggcauggucu

SEQ ID NO: 869489 - RNA, 22 nt, Human
uccaggcucagucaagcacuuc

SEQ ID NO: 869490 - RNA, 19 nt, Human
uguacguguggguguuuaa

SEQ ID NO: 869491 - RNA, 22 nt, Human
gagagcuggccagcuucaguau

SEQ ID NO: 869492 - RNA, 22 nt, Human
cauucaaauuaagauuuuguua

SEQ ID NO: 869493 - RNA, 22 nt, Human
ggcccuguuagagcucccacaa

SEQ ID NO: 869494 - RNA, 22 nt, Human
ugagacagccucugcacucaug

SEQ ID NO: 869495 - RNA, 22 nt, Human
ucaggccugcaaaugaauggua

SEQ ID NO: 869496 - RNA, 22 nt, Human
uagcaacugcucuauucuagga

SEQ ID NO: 869497 - RNA, 22 nt, Human
uuggaagaguagaguugaauaa

SEQ ID NO: 869498 - RNA, 22 nt, Human
gugagcuucugccucucagucc

SEQ ID NO: 869499 - RNA, 21 nt, Human
ucugggagugggaaaaugguc

SEQ ID NO: 869500 - RNA, 22 nt, Human
aguucagccauuuguuaacuau

SEQ ID NO: 869501 - RNA, 21 nt, Human
auucucaggcccauccucagg

SEQ ID NO: 869502 - RNA, 22 nt, Human
aucuuuaguagaggaauauauu

SEQ ID NO: 869503 - RNA, 22 nt, Human
ucuucuuaaaguauguucucuu

SEQ ID NO: 869504 - RNA, 22 nt, Human
uccugugugcuuucuuuagguu

SEQ ID NO: 869505 - RNA, 22 nt, Human
caguaguggucuaucacuggag

SEQ ID NO: 869506 - RNA, 22 nt, Human
agguugaacccccaagaccuau

SEQ ID NO: 869507 - RNA, 22 nt, Human
ccuucugucucccucauauuga

SEQ ID NO: 869508 - RNA, 22 nt, Human
gggcucagucugcggcgcgcgg

SEQ ID NO: 869509 - RNA, 23 nt, Human
agaguuuucuguuuucuguaggg

SEQ ID NO: 869510 - RNA, 22 nt, Human
uuccuuucugucagccugagug

SEQ ID NO: 869511 - RNA, 22 nt, Human
aggucaaaaugcuuuucagguc

SEQ ID NO: 869512 - RNA, 22 nt, Human
uuggccagguccauuucuccau

SEQ ID NO: 869513 - RNA, 22 nt, Human
aaguaacacggaacuugaagca

SEQ ID NO: 869514 - RNA, 20 nt, Human
uuucuggguacucucccucu

SEQ ID NO: 869515 - RNA, 22 nt, Human
ucugcugugauuugcuaccugu

SEQ ID NO: 869516 - RNA, 22 nt, Human
cacagggcagugcugcccacuc

SEQ ID NO: 869517 - RNA, 22 nt, Human
gcccaggaaaugccccguggug

SEQ ID NO: 869518 - RNA, 22 nt, Human
acuaaauaguuuugacagaaca

SEQ ID NO: 869519 - RNA, 21 nt, Human
uggguccccgacacgcuaccu

SEQ ID NO: 869520 - RNA, 22 nt, Human
aagcacaggagacgcacagcca

SEQ ID NO: 869521 - RNA, 17 nt, Human
gggagaugaagggauau

SEQ ID NO: 869522 - RNA, 22 nt, Human
aauucacaugcaugucugugca

SEQ ID NO: 869523 - RNA, 22 nt, Human
ucacaacucuuuccauuuaaua

SEQ ID NO: 869524 - RNA, 22 nt, Human
ccugugccauccugagcauccc

SEQ ID NO: 869525 - RNA, 22 nt, Human
ugucauggucuguaaggagccc

SEQ ID NO: 869526 - RNA, 22 nt, Human
cucagcagguaccacaugaucu

SEQ ID NO: 869527 - RNA, 22 nt, Human
augaaauaucuugaagaaauuc

SEQ ID NO: 869528 - RNA, 22 nt, Human
cuuguucaucugcauaccaagu

SEQ ID NO: 869529 - RNA, 22 nt, Human
gcaaugcaaucagaugauuauu

SEQ ID NO: 869530 - RNA, 22 nt, Human
agagacugucacauaacagagg

SEQ ID NO: 869531 - RNA, 23 nt, Human
uguuuuucauucacaugggcugu

SEQ ID NO: 869532 - RNA, 22 nt, Human
ggagaagguggcucagcaaagg

SEQ ID NO: 869533 - RNA, 22 nt, Human
auaaucagaauucaugaaagau

SEQ ID NO: 869534 - RNA, 19 nt, Human
uguacauauagagcucagu

SEQ ID NO: 869535 - RNA, 22 nt, Human
aucaacagugaagagaucaaga

SEQ ID NO: 869536 - RNA, 22 nt, Human
aauaauauuugaagcuucaaag

SEQ ID NO: 869537 - RNA, 22 nt, Human
acaugcaugggguaaugguauu

SEQ ID NO: 869538 - RNA, 22 nt, Human
uggaaauuacuaacacuuagag

SEQ ID NO: 869539 - RNA, 22 nt, Human
uggcuggaauggagcugagccu

SEQ ID NO: 869540 - RNA, 22 nt, Human
ccagauuugagcgucuuaaacc

SEQ ID NO: 869541 - RNA, 22 nt, Human
uuaaugcuugucuagaucuucu

SEQ ID NO: 869542 - RNA, 22 nt, Human
gugcaguggcagauccuagcuc

SEQ ID NO: 869543 - RNA, 22 nt, Human
gcuguucuuucagcccagggcu

SEQ ID NO: 869544 - RNA, 22 nt, Human
uucuucuugucugcccucacau

SEQ ID NO: 869545 - RNA, 22 nt, Human
guuuaugaaugugucagacaua

SEQ ID NO: 869546 - RNA, 22 nt, Human
caggacacuuguucuucucugc

SEQ ID NO: 869547 - RNA, 22 nt, Human
ggucaugagggagcagugcagg

SEQ ID NO: 869548 - RNA, 22 nt, Human
uaguucuacucaaagugugauc

SEQ ID NO: 869549 - RNA, 22 nt, Human
guuucauauauaguaacugaaa

SEQ ID NO: 869550 - RNA, 22 nt, Human
acaagguauccacauuaaaugu

SEQ ID NO: 869551 - RNA, 22 nt, Human
acagacugucaugacacuauau

SEQ ID NO: 869552 - RNA, 22 nt, Human
cccagggguucuagaccagcuu

SEQ ID NO: 869553 - RNA, 22 nt, Human
ggagaggaaaugccagcacuuc

SEQ ID NO: 869554 - RNA, 22 nt, Human
aaaaugugaucuacaaaugcaa

SEQ ID NO: 869555 - RNA, 22 nt, Human
gugcaauuuugcaucuguaugc

SEQ ID NO: 869556 - RNA, 22 nt, Human
ugggggagauuagagcuucuua

SEQ ID NO: 869557 - RNA, 22 nt, Human
ccagggauguggcagcaccaua

SEQ ID NO: 869558 - RNA, 22 nt, Human
ugcuccagaaccugaccaugcu

SEQ ID NO: 869559 - RNA, 22 nt, Human
auguacauaaaauguauaauga

SEQ ID NO: 869560 - RNA, 22 nt, Human
agcagcaucuucuaaguaaggc

SEQ ID NO: 869561 - RNA, 22 nt, Human
caggcagccugcggucugcaca

SEQ ID NO: 869562 - RNA, 22 nt, Human
aauuguacaggaaguugcugga

SEQ ID NO: 869563 - RNA, 22 nt, Human
gaguaacaucuggaaccgacac

SEQ ID NO: 869564 - RNA, 22 nt, Human
gcuucugccuugcacuuuguca

SEQ ID NO: 869565 - RNA, 22 nt, Human
ugagggcuaaauuguggcaggu

SEQ ID NO: 869566 - RNA, 22 nt, Human
ggugcugaugaagauguagccu

SEQ ID NO: 869567 - RNA, 22 nt, Human
agcuggagccagugugaggcuu

SEQ ID NO: 869568 - RNA, 22 nt, Human
acugcaacaccuccuggguuca

SEQ ID NO: 869569 - RNA, 22 nt, Human
cuggaagaggaagccagcugga

SEQ ID NO: 869570 - RNA, 17 nt, Human
gacaggcucagugacga

SEQ ID NO: 869571 - RNA, 22 nt, Human
gaagccaguguuugaagaauuu

SEQ ID NO: 869572 - RNA, 22 nt, Human
ggcaucuguccaucucuccagc

SEQ ID NO: 869573 - RNA, 22 nt, Human
acagguaccggucagauuacgg

SEQ ID NO: 869574 - RNA, 22 nt, Human
ucagugaaccuucuguggcagg

SEQ ID NO: 869575 - RNA, 22 nt, Human
guggccagccccauggacaguu

SEQ ID NO: 869576 - RNA, 23 nt, Human
uaggcucuguagguagagauggg

SEQ ID NO: 869577 - RNA, 22 nt, Human
uuuguguggcguuggccggcgg

SEQ ID NO: 869578 - RNA, 22 nt, Human
aaaaguuaccucuguaauauaa

SEQ ID NO: 869579 - RNA, 22 nt, Human
ugucuauuugaauuauccuaau

SEQ ID NO: 869580 - RNA, 22 nt, Human
cccugaggaccaggaaggaggg

SEQ ID NO: 869581 - RNA, 22 nt, Human
gugacagcuccuugguuagaug

SEQ ID NO: 869582 - RNA, 22 nt, Human
ccaggcccugccugugguuccu

SEQ ID NO: 869583 - RNA, 22 nt, Human
uuucugauauucauuuagaaga

SEQ ID NO: 869584 - RNA, 22 nt, Human
cagcaacuuaggcagaacaucu

SEQ ID NO: 869585 - RNA, 22 nt, Human
uauagagucauguuuacucuaa

SEQ ID NO: 869586 - RNA, 22 nt, Human
gaaauuuacaacuuucucaugg

SEQ ID NO: 869587 - RNA, 22 nt, Human
cuucagcuguggucuccaaggc

SEQ ID NO: 869588 - RNA, 22 nt, Human
uggggcagggaugggaaacuau

SEQ ID NO: 869589 - RNA, 22 nt, Human
agcugcagguucagcauuccac

SEQ ID NO: 869590 - RNA, 23 nt, Human
cuguggccaccccuagcuggagg

SEQ ID NO: 869591 - RNA, 22 nt, Human
gagcccagggugaaauagcagc

SEQ ID NO: 869592 - RNA, 22 nt, Human
uuuauuaagaugcgaaugcuga

SEQ ID NO: 869593 - RNA, 22 nt, Human
ugagccaggcuccaugccaccu

SEQ ID NO: 869594 - RNA, 22 nt, Human
aaagcaugauuagauagaugau

SEQ ID NO: 869595 - RNA, 22 nt, Human
uccccacuccugggcagaugcg

SEQ ID NO: 869596 - RNA, 22 nt, Human
cuauuaaauacucuucaaauug

SEQ ID NO: 869597 - RNA, 22 nt, Human
aggggugaaggcccgauaggag

SEQ ID NO: 869598 - RNA, 22 nt, Human
uguuauuauguuuccagagccu

SEQ ID NO: 869599 - RNA, 22 nt, Human
auucauguucggggccacguug

SEQ ID NO: 869600 - RNA, 22 nt, Human
uccuguguucuagguauggucu

SEQ ID NO: 869601 - RNA, 22 nt, Human
cugcaggguuuuucaaggacaa

SEQ ID NO: 869602 - RNA, 21 nt, Human
gucauccaccucucgggcucu

SEQ ID NO: 869603 - RNA, 22 nt, Human
auuaaauuaaguggcuaauuua

SEQ ID NO: 869604 - RNA, 22 nt, Human
aggacagcauuuucagcaucuc

SEQ ID NO: 869605 - RNA, 22 nt, Human
uccugggcccaggcugccaggg

SEQ ID NO: 869606 - RNA, 22 nt, Human
ugagcagaugugccaaacugua

SEQ ID NO: 869607 - RNA, 22 nt, Human
uccugaggacccugucaggggc

SEQ ID NO: 869608 - RNA, 22 nt, Human
aagugauuucugccugcauguu

SEQ ID NO: 869609 - RNA, 22 nt, Human
ggcaccaggacaugacucccag

SEQ ID NO: 869610 - RNA, 22 nt, Human
cagaaucuguugggguugcaga

SEQ ID NO: 869611 - RNA, 22 nt, Human
uuuccuugccuccuguccuucu

SEQ ID NO: 869612 - RNA, 20 nt, Human
ucccuggaggugguggcauc

SEQ ID NO: 869613 - RNA, 22 nt, Human
ugacacagauuagagacauacc

SEQ ID NO: 869614 - RNA, 22 nt, Human
aggcccaaaagaaaccacuggg

SEQ ID NO: 869615 - RNA, 22 nt, Human
ggagacagugguagggccuaag

SEQ ID NO: 869616 - RNA, 22 nt, Human
agagcuuuugggaauucaggua

SEQ ID NO: 869617 - RNA, 19 nt, Human
acaggcagaauugggugug

SEQ ID NO: 869618 - RNA, 22 nt, Human
ggcugagggccagggcuagucu

SEQ ID NO: 869619 - RNA, 21 nt, Human
uaggacuuuacaauuuaggaa

SEQ ID NO: 869620 - RNA, 22 nt, Human
aacagucuuggaagucuuguua

SEQ ID NO: 869621 - RNA, 22 nt, Human
aggcagcccacaggacacagga

SEQ ID NO: 869622 - RNA, 22 nt, Human
uguaacaaauacccuugaaguu

SEQ ID NO: 869623 - RNA, 22 nt, Human
cuuuguuuauauuucuccucga

SEQ ID NO: 869624 - RNA, 22 nt, Human
aggcuggcgucaggggcuguac

SEQ ID NO: 869625 - RNA, 22 nt, Human
cuagccagauuuaaagagagac

SEQ ID NO: 869626 - RNA, 22 nt, Human
agaaaauuacuccagagacaag

SEQ ID NO: 869627 - RNA, 22 nt, Human
gaggcaguuugccaugccagga

SEQ ID NO: 869628 - RNA, 22 nt, Human
uaguuacagaucuaggacuguu

SEQ ID NO: 869629 - RNA, 22 nt, Human
cgaggccaauguguuuuaugaa

SEQ ID NO: 869630 - RNA, 22 nt, Human
agagugccacugacaggucccu

SEQ ID NO: 869631 - RNA, 22 nt, Human
uucugaaaccuucaguaugaag

SEQ ID NO: 869632 - RNA, 22 nt, Human
uaccauuuugaaacauuucauc

SEQ ID NO: 869633 - RNA, 22 nt, Human
cagaggaaaugggaaggagaua

SEQ ID NO: 869634 - RNA, 22 nt, Human
aacaggcuccuugugaauggau

SEQ ID NO: 869635 - RNA, 22 nt, Human
guuuccaugaaaauguuucugc

SEQ ID NO: 869636 - RNA, 22 nt, Human
uucaaugucuauguacauuuua

SEQ ID NO: 869637 - RNA, 22 nt, Human
ucaggcugugggcacuggccau

SEQ ID NO: 869638 - RNA, 19 nt, Human
cugugucacauuuaugaaa

SEQ ID NO: 869639 - RNA, 22 nt, Human
aucagaaaaacauaauguuauu

SEQ ID NO: 869640 - RNA, 20 nt, Human
cugagcgucuaagaggugag

SEQ ID NO: 869641 - RNA, 22 nt, Human
ucuguuauacaacaaguaacag

SEQ ID NO: 869642 - RNA, 22 nt, Human
aaaugcugcagcuaguguguuu

SEQ ID NO: 869643 - RNA, 22 nt, Human
uuccagaguauugguagcuaua

SEQ ID NO: 869644 - RNA, 22 nt, Human
gcagcucuggggcaggccugag

SEQ ID NO: 869645 - RNA, 22 nt, Human
agaagccacaggaaagcagcuu

SEQ ID NO: 869646 - RNA, 22 nt, Human
gugaaggaguuaucagugguua

SEQ ID NO: 869647 - RNA, 22 nt, Human
ucucuucuaauuuucccgagua

SEQ ID NO: 869648 - RNA, 22 nt, Human
guguaaacaaugaaaacagagc

SEQ ID NO: 869649 - RNA, 22 nt, Human
caggcucccacccuccugcagc

SEQ ID NO: 869650 - RNA, 22 nt, Human
cacaagacuuauuuguguagaa

SEQ ID NO: 869651 - RNA, 22 nt, Human
gagcuuuuacugcuguauugaa

SEQ ID NO: 869652 - RNA, 22 nt, Human
aauaccaugauaauuaauucau

SEQ ID NO: 869653 - RNA, 18 nt, Human
uucugugcaucuuucuau

SEQ ID NO: 869654 - RNA, 22 nt, Human
uacuacauuaauaaaacauuca

SEQ ID NO: 869655 - RNA, 20 nt, Human
acaguguuaguuaucaucuc

SEQ ID NO: 869656 - RNA, 22 nt, Human
ucuaaggacaguuauuacuggg

SEQ ID NO: 869657 - RNA, 22 nt, Human
ucaugucagcuguugaugugca

SEQ ID NO: 869658 - RNA, 22 nt, Human
cugaaguucuacaagccucagg

SEQ ID NO: 869659 - RNA, 22 nt, Human
uaguauaucuuuaguacauagu

SEQ ID NO: 869660 - RNA, 22 nt, Human
ugccucaggcaccuggcagguu

SEQ ID NO: 869661 - RNA, 22 nt, Human
ggaaggaaagcagcuuggcccu

SEQ ID NO: 869662 - RNA, 19 nt, Human
auacaugcauuuacaugcu

SEQ ID NO: 869663 - RNA, 22 nt, Human
uggcuucuagagcccauccuuc

SEQ ID NO: 869664 - RNA, 22 nt, Human
agacauaaacuuacugaaauac

SEQ ID NO: 869665 - RNA, 22 nt, Human
gcaggcugggguagccccacuu

SEQ ID NO: 869666 - RNA, 22 nt, Human
agcagguuuguuuucuucugag

SEQ ID NO: 869667 - RNA, 22 nt, Human
ucacaauauuuaucuuccaauu

SEQ ID NO: 869668 - RNA, 22 nt, Human
ucaguacagcuuagucuucuca

SEQ ID NO: 869669 - RNA, 22 nt, Human
ugcucaguccuccugcagugcc

SEQ ID NO: 869670 - RNA, 22 nt, Human
ccaggcuuccuaaugugugcag

SEQ ID NO: 869671 - RNA, 22 nt, Human
cacaggcuuuuuuggcugaugu

SEQ ID NO: 869672 - RNA, 22 nt, Human
ucaucuuuguaucccuaacaca

SEQ ID NO: 869673 - RNA, 22 nt, Human
cacauacaugcacaccuaaaua

SEQ ID NO: 869674 - RNA, 22 nt, Human
aauaauguacauacauauuucg

SEQ ID NO: 869675 - RNA, 23 nt, Human
uuacagaaaguaugcuuuuguuu

SEQ ID NO: 869676 - RNA, 22 nt, Human
accagcucagaagccagaaaga

SEQ ID NO: 869677 - RNA, 22 nt, Human
uugugucauguuccauugaaaa

SEQ ID NO: 869678 - RNA, 16 nt, Human
ggcagcagcuccgugc

SEQ ID NO: 869679 - RNA, 22 nt, Human
gcacaaacugcaauuacuuuug

SEQ ID NO: 869680 - RNA, 22 nt, Human
ugucaucugaauuucucaucac

SEQ ID NO: 869681 - RNA, 22 nt, Human
agcuuuauucaugauuucaggg

SEQ ID NO: 869682 - RNA, 18 nt, Human
gggcaagcggcugucacc

SEQ ID NO: 869683 - RNA, 22 nt, Human
acagucugccucucagagcagc

SEQ ID NO: 869684 - RNA, 21 nt, Human
uucagcaagcacucuggacac

SEQ ID NO: 869685 - RNA, 22 nt, Human
guccucagucaguuuggugggg

SEQ ID NO: 869686 - RNA, 16 nt, Human
guuacccacccaaggc

SEQ ID NO: 869687 - RNA, 22 nt, Human
ccaggcaggcagcguucucagg

SEQ ID NO: 869688 - RNA, 22 nt, Human
guucuaagggcuugaaauguau

SEQ ID NO: 869689 - RNA, 22 nt, Human
guacauuucaguuuccuuaaga

SEQ ID NO: 869690 - RNA, 21 nt, Human
ucuccucccggggagaggccg

SEQ ID NO: 869691 - RNA, 22 nt, Human
aaagaagacagacauuucuuuc

SEQ ID NO: 869692 - RNA, 22 nt, Human
aaaagucuugucaagguuccca

SEQ ID NO: 869693 - RNA, 22 nt, Human
uggccugggcaugaagcaucgu

SEQ ID NO: 869694 - RNA, 22 nt, Human
ucugugccuucucccagacuua

SEQ ID NO: 869695 - RNA, 22 nt, Human
ugucuucuaccuugacagcauu

SEQ ID NO: 869696 - RNA, 22 nt, Human
aaaggaguuacucauaaagcuu

SEQ ID NO: 869697 - RNA, 22 nt, Human
ggacugggccagggguuggacu

SEQ ID NO: 869698 - RNA, 22 nt, Human
gcagcagagaccccaggaagga

SEQ ID NO: 869699 - RNA, 22 nt, Human
cucuggccgcagcucagcucug

SEQ ID NO: 869700 - RNA, 22 nt, Human
ucaugaaucguggaaugauuua

SEQ ID NO: 869701 - RNA, 22 nt, Human
uagaaguugaacuaaaaauauu

SEQ ID NO: 869702 - RNA, 22 nt, Human
cauuuuaaaugauuuaagccaa

SEQ ID NO: 869703 - RNA, 22 nt, Human
cagcaucucugccugccugcaa

SEQ ID NO: 869704 - RNA, 22 nt, Human
acaaagauucauuugcauuauu

SEQ ID NO: 869705 - RNA, 22 nt, Human
ccacaguguuuugucacauuag

SEQ ID NO: 869706 - RNA, 22 nt, Human
cagcuguucuugggacagacag

SEQ ID NO: 869707 - RNA, 22 nt, Human
cugccuuugcccuugacacugu

SEQ ID NO: 869708 - RNA, 22 nt, Human
ucacaguaucagguggagugga

SEQ ID NO: 869709 - RNA, 22 nt, Human
agaaagggaacuggcaaagcca

SEQ ID NO: 869710 - RNA, 22 nt, Human
agaguggcuucuuugacaugcu

SEQ ID NO: 869711 - RNA, 22 nt, Human
uuccucucgcucuccggggccc

SEQ ID NO: 869712 - RNA, 17 nt, Human
uaaauacacaaggguau

SEQ ID NO: 869713 - RNA, 22 nt, Human
aguuccagcugugaccagaaaa

SEQ ID NO: 869714 - RNA, 22 nt, Human
aaaguucuggagaaaauaauga

SEQ ID NO: 869715 - RNA, 22 nt, Human
gucugagggagaaggaucuggg

SEQ ID NO: 869716 - RNA, 21 nt, Human
acaguauauuagauauuugaa

SEQ ID NO: 869717 - RNA, 22 nt, Human
ucagagucaggaaugcuugauu

SEQ ID NO: 869718 - RNA, 22 nt, Human
uuauaggaaaaguucuagaaaa

SEQ ID NO: 869719 - RNA, 19 nt, Human
uugaggggccaggggagau

SEQ ID NO: 869720 - RNA, 22 nt, Human
gcaaagcaaucaggaguagcau

SEQ ID NO: 869721 - RNA, 17 nt, Human
auguuaauuucacauuu

SEQ ID NO: 869722 - RNA, 22 nt, Human
cuuguauagggaaagauaaauc

SEQ ID NO: 869723 - RNA, 22 nt, Human
cagcugggcuaagaguagaggc

SEQ ID NO: 869724 - RNA, 22 nt, Human
uugcagaagccuguuguuccug

SEQ ID NO: 869725 - RNA, 22 nt, Human
accaggcuccccuuggauccug

SEQ ID NO: 869726 - RNA, 22 nt, Human
uccaggaguuugagacugcagu

SEQ ID NO: 869727 - RNA, 22 nt, Human
uuugcucugcuguugccaggug

SEQ ID NO: 869728 - RNA, 22 nt, Human
agaggcccucucugcucagucu

SEQ ID NO: 869729 - RNA, 22 nt, Human
acugccuugauugccaguuucc

SEQ ID NO: 869730 - RNA, 22 nt, Human
uauccaauucaccauugauggg

SEQ ID NO: 869731 - RNA, 22 nt, Human
aucugcuuccugggcuccauga

SEQ ID NO: 869732 - RNA, 22 nt, Human
uaauaacaauuguaggacauga

SEQ ID NO: 869733 - RNA, 22 nt, Human
aguggggccgcgguccugcccu

SEQ ID NO: 869734 - RNA, 22 nt, Human
aacagcuuagaaauguugcuaa

SEQ ID NO: 869735 - RNA, 22 nt, Human
uaaugcuuaauuuucacaagcc

SEQ ID NO: 869736 - RNA, 22 nt, Human
uauugaaaugaaugacagugau

SEQ ID NO: 869737 - RNA, 22 nt, Human
aaaaagacuagucgagugcagu

SEQ ID NO: 869738 - RNA, 22 nt, Human
uaacucugaauccucacagcag

SEQ ID NO: 869739 - RNA, 22 nt, Human
uccuccucuaucagacagugcc

SEQ ID NO: 869740 - RNA, 22 nt, Human
uugcaaaguucccuacacaugu

SEQ ID NO: 869741 - RNA, 23 nt, Human
uagcaaaguuguuugggaaauuu

SEQ ID NO: 869742 - RNA, 22 nt, Human
gagcucccuggagguucagaua

SEQ ID NO: 869743 - RNA, 22 nt, Human
uggcucugcugaaccuagugca

SEQ ID NO: 869744 - RNA, 22 nt, Human
aaugcaggcacgugcaagcaag

SEQ ID NO: 869745 - RNA, 22 nt, Human
ugcauuaagugucugcauaugg

SEQ ID NO: 869746 - RNA, 22 nt, Human
auacaaauuuauagaugcauuu

SEQ ID NO: 869747 - RNA, 22 nt, Human
ucugggaguuagaauacauggg

SEQ ID NO: 869748 - RNA, 22 nt, Human
guguuuccaguucagaaagcaa

SEQ ID NO: 869749 - RNA, 20 nt, Human
auguaaaauuauaaggcuga

SEQ ID NO: 869750 - RNA, 22 nt, Human
auacagaagaacuauagccacu

SEQ ID NO: 869751 - RNA, 22 nt, Human
aacacaggaggcuauguuuucu

SEQ ID NO: 869752 - RNA, 22 nt, Human
ugguggaguuucucuuucaaac

SEQ ID NO: 869753 - RNA, 22 nt, Human
gcuauuuagugagucacauccu

SEQ ID NO: 869754 - RNA, 22 nt, Human
auucuucuaauaugaucguguu

SEQ ID NO: 869755 - RNA, 22 nt, Human
ucauuuauuugacuuuggagug

SEQ ID NO: 869756 - RNA, 22 nt, Human
gucaggacucugacccgucccg

SEQ ID NO: 869757 - RNA, 22 nt, Human
uggacccccucaaggcagagcu

SEQ ID NO: 869758 - RNA, 22 nt, Human
uggcacugccuggcagggcccc

SEQ ID NO: 869759 - RNA, 22 nt, Human
cuguggcucugcagucccaaca

SEQ ID NO: 869760 - RNA, 22 nt, Human
uuugacagauccuuaacucagc

SEQ ID NO: 869761 - RNA, 22 nt, Human
ucccagccuuccuuguggugaa

SEQ ID NO: 869762 - RNA, 22 nt, Human
cugagcagaccauggcagaggu

SEQ ID NO: 869763 - RNA, 22 nt, Human
uggcucagaaggcugccuucac

SEQ ID NO: 869764 - RNA, 22 nt, Human
cagcaccuuccuuaacuccagg

SEQ ID NO: 869765 - RNA, 22 nt, Human
aacaggggcugguugaaagagc

SEQ ID NO: 869766 - RNA, 22 nt, Human
agcccuccuggggccacgcugg

SEQ ID NO: 869767 - RNA, 22 nt, Human
cuucccuuccccucacggagac

SEQ ID NO: 869768 - RNA, 22 nt, Human
gagaaucuccagaugaaguccu

SEQ ID NO: 869769 - RNA, 22 nt, Human
agguuuaugauucugcacgugg

SEQ ID NO: 869770 - RNA, 22 nt, Human
gcucugcugucuucuugcaggc

SEQ ID NO: 869771 - RNA, 22 nt, Human
ugcaggagauaauggugcuuag

SEQ ID NO: 869772 - RNA, 22 nt, Human
agaggcagcagucauacuacag

SEQ ID NO: 869773 - RNA, 23 nt, Human
ucaggauauugugugccaaggug

SEQ ID NO: 869774 - RNA, 22 nt, Human
uggagggaacccaggcugcucu

SEQ ID NO: 869775 - RNA, 22 nt, Human
agucauuuggagcaccuuauua

SEQ ID NO: 869776 - RNA, 22 nt, Human
aaguagaaaaccgcacuggacu

SEQ ID NO: 869777 - RNA, 22 nt, Human
cagaagcuuugcucauaaccau

SEQ ID NO: 869778 - RNA, 22 nt, Human
uuggaucaaauuucaugcuguc

SEQ ID NO: 869779 - RNA, 22 nt, Human
auauccuuuacugugucacaga

SEQ ID NO: 869780 - RNA, 21 nt, Human
ucgaccugcugggcucgggcu

SEQ ID NO: 869781 - RNA, 23 nt, Human
uuucacauuaauguuuagcagga

SEQ ID NO: 869782 - RNA, 22 nt, Human
gagccaaucuuugggcucuugg

SEQ ID NO: 869783 - RNA, 22 nt, Human
guuagguagaaguuuacuuuga

SEQ ID NO: 869784 - RNA, 22 nt, Human
aucuacaggauaguuuaauauu

SEQ ID NO: 869785 - RNA, 22 nt, Human
aaagaaugucugaacagcuggc

SEQ ID NO: 869786 - RNA, 22 nt, Human
gacaguaagucagagacuuggu

SEQ ID NO: 869787 - RNA, 22 nt, Human
ucaaaguagccggauggaauuu

SEQ ID NO: 869788 - RNA, 22 nt, Human
cgggcagcggcguggccauggu

SEQ ID NO: 869789 - RNA, 21 nt, Human
aaucaagaguacugguguggc

SEQ ID NO: 869790 - RNA, 22 nt, Human
cuuuucucugcgggucuuucau

SEQ ID NO: 869791 - RNA, 22 nt, Human
uggcaguggugucugcacaggc

SEQ ID NO: 869792 - RNA, 22 nt, Human
ggguggagugugaaaucuggcu

SEQ ID NO: 869793 - RNA, 22 nt, Human
ggcuguggggccggguacagug

SEQ ID NO: 869794 - RNA, 19 nt, Human
cauuuuaagcauccccagu

SEQ ID NO: 869795 - RNA, 22 nt, Human
cuggcccagucucagaguguca

SEQ ID NO: 869796 - RNA, 22 nt, Human
gcagcuggagccagccagacac

SEQ ID NO: 869797 - RNA, 22 nt, Human
ccagggagcccacaggacaaug

SEQ ID NO: 869798 - RNA, 22 nt, Human
acucaggcacucagcccucgcc

SEQ ID NO: 869799 - RNA, 22 nt, Human
uacaaugucucucaccugacuu

SEQ ID NO: 869800 - RNA, 22 nt, Human
ccaggguggcguagaugcuggg

SEQ ID NO: 869801 - RNA, 22 nt, Human
gcuuccuuauuguugccauagu

SEQ ID NO: 869802 - RNA, 22 nt, Human
auuauguagcuaaaaauugugu

SEQ ID NO: 869803 - RNA, 22 nt, Human
ucuccuuucuggagccugcuca

SEQ ID NO: 869804 - RNA, 22 nt, Human
cuugacuuugccuuuuaaaugu

SEQ ID NO: 869805 - RNA, 22 nt, Human
aagcauuucuguuuaucuaucg

SEQ ID NO: 869806 - RNA, 22 nt, Human
ucagugcuuuugagaagcuccu

SEQ ID NO: 869807 - RNA, 20 nt, Human
uggaguuguggcaguuugga

SEQ ID NO: 869808 - RNA, 18 nt, Human
gagucgucggagagucug

SEQ ID NO: 869809 - RNA, 21 nt, Human
ggacaccagucacacuggauu

SEQ ID NO: 869810 - RNA, 22 nt, Human
augucucugccccagagagcuu

SEQ ID NO: 869811 - RNA, 22 nt, Human
cacacccaaauuucucucucag

SEQ ID NO: 869812 - RNA, 22 nt, Human
cagauucuuaauuuaugggauu

SEQ ID NO: 869813 - RNA, 22 nt, Human
cagcucacccaucacgucugcu

SEQ ID NO: 869814 - RNA, 22 nt, Human
ucagcuguagguauggaugucc

SEQ ID NO: 869815 - RNA, 20 nt, Human
ugaaggcagguaagaaagau

SEQ ID NO: 869816 - RNA, 22 nt, Human
ccugggucacucaggcaggcgg

SEQ ID NO: 869817 - RNA, 22 nt, Human
uggcucuggccaccgggagggc

SEQ ID NO: 869818 - RNA, 23 nt, Human
uuacuuuugcaccaaccuaauau

SEQ ID NO: 869819 - RNA, 22 nt, Human
aguuaacaaguuggcaaucaac

SEQ ID NO: 869820 - RNA, 22 nt, Human
gggcuggcucugucuagaaagg

SEQ ID NO: 869821 - RNA, 22 nt, Human
ucagagaucuucaggaugggac

SEQ ID NO: 869822 - RNA, 21 nt, Human
caaguguggauguggaaggua

SEQ ID NO: 869823 - RNA, 22 nt, Human
augucuguuaaucgacccuaau

SEQ ID NO: 869824 - RNA, 22 nt, Human
cagcucugccaucaucugccuu

SEQ ID NO: 869825 - RNA, 22 nt, Human
ucacuaaugauuuugaaagaag

SEQ ID NO: 869826 - RNA, 22 nt, Human
aggggagaguuaaugugaaugu

SEQ ID NO: 869827 - RNA, 22 nt, Human
ucugcuucuccuacuucauggg

SEQ ID NO: 869828 - RNA, 22 nt, Human
acagaugaguuagaauaggcag

SEQ ID NO: 869829 - RNA, 22 nt, Human
caaagcaggaagcuccugacag

SEQ ID NO: 869830 - RNA, 20 nt, Human
uuauuuguuuacuuuggucc

SEQ ID NO: 869831 - RNA, 22 nt, Human
cuguccagcugaccagagcagc

SEQ ID NO: 869832 - RNA, 22 nt, Human
agacagcaugauacaugaugcu

SEQ ID NO: 869833 - RNA, 22 nt, Human
auauaauacaaccugcuaagug

SEQ ID NO: 869834 - RNA, 22 nt, Human
cccaaacaguuccugugguacu

SEQ ID NO: 869835 - RNA, 22 nt, Human
uuuuguuuucuuagaaaccugg

SEQ ID NO: 869836 - RNA, 22 nt, Human
guuuguucacuaugacuguggu

SEQ ID NO: 869837 - RNA, 22 nt, Human
gaggccacccuaugggucccag

SEQ ID NO: 869838 - RNA, 22 nt, Human
aaggaaagacaggacggaauuc

SEQ ID NO: 869839 - RNA, 22 nt, Human
acagagacuaagcuuuucauca

SEQ ID NO: 869840 - RNA, 22 nt, Human
uacagacaaagugcuauagggu

SEQ ID NO: 869841 - RNA, 22 nt, Human
cagccaggcccagaucaugcug

SEQ ID NO: 869842 - RNA, 22 nt, Human
uucaggccuaauuucuagcccc

SEQ ID NO: 869843 - RNA, 22 nt, Human
cuaggcaguccugacgguacua

SEQ ID NO: 869844 - RNA, 22 nt, Human
acucuuuagagguacaucucuu

SEQ ID NO: 869845 - RNA, 22 nt, Human
gaaauagaggacagcuggauca

SEQ ID NO: 869846 - RNA, 19 nt, Human
aggagaaguagcagaaauu

SEQ ID NO: 869847 - RNA, 22 nt, Human
uuuucaugucauguccuugagg

SEQ ID NO: 869848 - RNA, 22 nt, Human
uuucccaagaaaaauaauugga

SEQ ID NO: 869849 - RNA, 22 nt, Human
agccagcucugaguugaaguac

SEQ ID NO: 869850 - RNA, 22 nt, Human
aagaucaaguguacuuuaugua

SEQ ID NO: 869851 - RNA, 22 nt, Human
ggcugagaagacaguggggugg

SEQ ID NO: 869852 - RNA, 22 nt, Human
cuacaaagaauuucucuagcuc

SEQ ID NO: 869853 - RNA, 22 nt, Human
ucaaaagucugcauucuucaca

SEQ ID NO: 869854 - RNA, 22 nt, Human
cccaggcuagaaaggccaacaa

SEQ ID NO: 869855 - RNA, 22 nt, Human
uguuugcucugacuaucuugcg

SEQ ID NO: 869856 - RNA, 22 nt, Human
cugggaagggagucaagauacu

SEQ ID NO: 869857 - RNA, 20 nt, Human
ggggcugcaugcagagaaga

SEQ ID NO: 869858 - RNA, 20 nt, Human
agaaugcuuuuugcauugca

SEQ ID NO: 869859 - RNA, 22 nt, Human
ugacaaaacugcaauuacuuuu

SEQ ID NO: 869860 - RNA, 22 nt, Human
caaagcugauacucagcaagua

SEQ ID NO: 869861 - RNA, 22 nt, Human
cuuguauucuuccacuuaagau

SEQ ID NO: 869862 - RNA, 22 nt, Human
aggcccugcaggaagcaggaug

SEQ ID NO: 869863 - RNA, 22 nt, Human
gccuuggccuuccuaggccuga

SEQ ID NO: 869864 - RNA, 22 nt, Human
ugggagagucuaaaaccgaggu

SEQ ID NO: 869865 - RNA, 22 nt, Human
uguccagaucaaugcccacaug

SEQ ID NO: 869866 - RNA, 22 nt, Human
auaugucucuguacaacagucu

SEQ ID NO: 869867 - RNA, 22 nt, Human
aagaggcuuauagucuuccugu

SEQ ID NO: 869868 - RNA, 22 nt, Human
ucccuggagauaacuucuggga

SEQ ID NO: 869869 - RNA, 22 nt, Human
ucugcccacaguccaauaguug

SEQ ID NO: 869870 - RNA, 22 nt, Human
uacagaaacagcgugguuagaa

SEQ ID NO: 869871 - RNA, 22 nt, Human
ugcaaugauauugucaaagcau

SEQ ID NO: 869872 - RNA, 22 nt, Human
aggucaagauucuacauuugua

SEQ ID NO: 869873 - RNA, 22 nt, Human
acaaugcaccuauuuuaaaacu

SEQ ID NO: 869874 - RNA, 22 nt, Human
aggagcuggaguccaggcaagu

SEQ ID NO: 869875 - RNA, 22 nt, Human
uggcucuccagagccuauggua

SEQ ID NO: 869876 - RNA, 22 nt, Human
uggcaaugagcaggugcucugg

SEQ ID NO: 869877 - RNA, 22 nt, Human
agcacagauuugucaacauaga

SEQ ID NO: 869878 - RNA, 22 nt, Human
gcugcccacaaccccgugucua

SEQ ID NO: 869879 - RNA, 18 nt, Human
cagauccaggcagcuauu

SEQ ID NO: 869880 - RNA, 22 nt, Human
gugaagcagaguguggaagcaa

SEQ ID NO: 869881 - RNA, 22 nt, Human
uggaaauugcuauuaccgauga

SEQ ID NO: 869882 - RNA, 22 nt, Human
ccagggcugccgcaucccuggu

SEQ ID NO: 869883 - RNA, 22 nt, Human
ucugccugcuaacuccugcacc

SEQ ID NO: 869884 - RNA, 22 nt, Human
gcugcuccagcugugcugcaga

SEQ ID NO: 869885 - RNA, 22 nt, Human
uccugggcagccucucuggaag

SEQ ID NO: 869886 - RNA, 22 nt, Human
agccugcuugagaguccuggcu

SEQ ID NO: 869887 - RNA, 22 nt, Human
aaggccagggaugccagcucgg

SEQ ID NO: 869888 - RNA, 22 nt, Human
gccccacagccugcggucucag

SEQ ID NO: 869889 - RNA, 22 nt, Human
ugcauguuuauaacagaugagg

SEQ ID NO: 869890 - RNA, 22 nt, Human
ucugccuguggauacaugcucu

SEQ ID NO: 869891 - RNA, 22 nt, Human
auucaguggauaucuucacuuu

SEQ ID NO: 869892 - RNA, 22 nt, Human
aagaaguuagguguaacaauau

SEQ ID NO: 869893 - RNA, 22 nt, Human
cccagcagauggcuaugugcua

SEQ ID NO: 869894 - RNA, 22 nt, Human
auagugggaauuacgauauacu

SEQ ID NO: 869895 - RNA, 22 nt, Human
agaaggcuggcccuggguggcc

SEQ ID NO: 869896 - RNA, 22 nt, Human
uucaaacacuguuggcacuggg

SEQ ID NO: 869897 - RNA, 22 nt, Human
gggugugcaggucauggcgucu

SEQ ID NO: 869898 - RNA, 20 nt, Human
aggcucagcugagcucuugg

SEQ ID NO: 869899 - RNA, 22 nt, Human
uucaaagaguugggugucuggg

SEQ ID NO: 869900 - RNA, 22 nt, Human
cagaggcacagcuucuuuuaau

SEQ ID NO: 869901 - RNA, 22 nt, Human
caaggcagcuguagggauuugg

SEQ ID NO: 869902 - RNA, 22 nt, Human
uuuagucauuuggauuugaucu

SEQ ID NO: 869903 - RNA, 22 nt, Human
uagaaacaaaaucugaugacuc

SEQ ID NO: 869904 - RNA, 22 nt, Human
uauacagauaaugaagaccaag

SEQ ID NO: 869905 - RNA, 22 nt, Human
acuuuuaugauaaucaauguuc

SEQ ID NO: 869906 - RNA, 22 nt, Human
agcugcuggggagggcagacac

SEQ ID NO: 869907 - RNA, 22 nt, Human
caguuaaauucuccaguuacca

SEQ ID NO: 869908 - RNA, 22 nt, Human
aauauaguguuagcucauuuga

SEQ ID NO: 869909 - RNA, 22 nt, Human
cagcugcaggaacaaaaaugug

SEQ ID NO: 869910 - RNA, 22 nt, Human
aaggcuuugauuccauugcccu

SEQ ID NO: 869911 - RNA, 17 nt, Human
cucugggugccugugug

SEQ ID NO: 869912 - RNA, 22 nt, Human
ccagggccugagggcgacgccc

SEQ ID NO: 869913 - RNA, 22 nt, Human
uucacauuagugguucuauaua

SEQ ID NO: 869914 - RNA, 22 nt, Human
cagguaggaaaagggugucagg

SEQ ID NO: 869915 - RNA, 22 nt, Human
aaagagcuaacauugccgagau

SEQ ID NO: 869916 - RNA, 19 nt, Human
acagggaauuuccacagaa

SEQ ID NO: 869917 - RNA, 22 nt, Human
ugcauucaaaucuccaggcuca

SEQ ID NO: 869918 - RNA, 22 nt, Human
guucccuuucguauggacuggg

SEQ ID NO: 869919 - RNA, 22 nt, Human
ucagcuguguaucccagggccu

SEQ ID NO: 869920 - RNA, 22 nt, Human
cacuccaggucccaguuccugg

SEQ ID NO: 869921 - RNA, 22 nt, Human
aaucacauuaagcccuguucag

SEQ ID NO: 869922 - RNA, 22 nt, Human
acaugcagaauucuuagagagc

SEQ ID NO: 869923 - RNA, 22 nt, Human
acuugcauguuauuuuuauagg

SEQ ID NO: 869924 - RNA, 22 nt, Human
ucucccagaggaucccagugga

SEQ ID NO: 869925 - RNA, 22 nt, Human
cagaguggcagucccaggccca

SEQ ID NO: 869926 - RNA, 22 nt, Human
uggcuccagaagggagggcgcc

SEQ ID NO: 869927 - RNA, 22 nt, Human
ugcacaguaaacaugacuggag

SEQ ID NO: 869928 - RNA, 22 nt, Human
auuuuagagaaacaaacguagg

SEQ ID NO: 869929 - RNA, 22 nt, Human
gcauccuggcucuaggugucau

SEQ ID NO: 869930 - RNA, 22 nt, Human
ugggccucuggguuagucccua

SEQ ID NO: 869931 - RNA, 22 nt, Human
aggaauggugcucagcagaaau

SEQ ID NO: 869932 - RNA, 22 nt, Human
ugccauggauuaaguggguggc

SEQ ID NO: 869933 - RNA, 22 nt, Human
acaguuuuuucaacauuggaau

SEQ ID NO: 869934 - RNA, 22 nt, Human
uccagggcugacuugggagagg

SEQ ID NO: 869935 - RNA, 22 nt, Human
uuaaaguaaucugugugaauuu

SEQ ID NO: 869936 - RNA, 22 nt, Human
ggagcccagguuguuugugcag

SEQ ID NO: 869937 - RNA, 22 nt, Human
aggaaugucgucauaaacauga

SEQ ID NO: 869938 - RNA, 22 nt, Human
gagcugaaauaugaagccaauu

SEQ ID NO: 869939 - RNA, 22 nt, Human
caguccugcccaggcugacaga

SEQ ID NO: 869940 - RNA, 22 nt, Human
guuuguaugaauguuuuaugcu

SEQ ID NO: 869941 - RNA, 22 nt, Human
uagaaaggauauugagaugaau

SEQ ID NO: 869942 - RNA, 22 nt, Human
ucagguccaagauggccaucca

SEQ ID NO: 869943 - RNA, 20 nt, Human
acuagucuaaaagggcugac

SEQ ID NO: 869944 - RNA, 22 nt, Human
uauuuguugaguuguuaugucu

SEQ ID NO: 869945 - RNA, 22 nt, Human
acacagaguaucuuuugccuag

SEQ ID NO: 869946 - RNA, 22 nt, Human
gcaugagacuagcucaugagca

SEQ ID NO: 869947 - RNA, 22 nt, Human
uguauuugguguauuuaaugag

SEQ ID NO: 869948 - RNA, 22 nt, Human
augacacuuggugauacuuugu

SEQ ID NO: 869949 - RNA, 20 nt, Human
aguguuugcucacagucucc

SEQ ID NO: 869950 - RNA, 22 nt, Human
gcagcugcaauaggcaucaagc

SEQ ID NO: 869951 - RNA, 22 nt, Human
cagcccaaagccccaggcuaga

SEQ ID NO: 869952 - RNA, 22 nt, Human
agcacauuaagugaguucaugu

SEQ ID NO: 869953 - RNA, 22 nt, Human
caagaggagcaggcaggugugc

SEQ ID NO: 869954 - RNA, 22 nt, Human
aaugcaaagcucuuuaauccuu

SEQ ID NO: 869955 - RNA, 22 nt, Human
ccuuuccuuuuuagugugggag

SEQ ID NO: 869956 - RNA, 22 nt, Human
gauacacaaguggaaggagacg

SEQ ID NO: 869957 - RNA, 22 nt, Human
ugagaagauuugcucuucugag

SEQ ID NO: 869958 - RNA, 21 nt, Human
aaaaagcuggggcaugcaugc

SEQ ID NO: 869959 - RNA, 22 nt, Human
caggccaggcugcauuugcccc

SEQ ID NO: 869960 - RNA, 22 nt, Human
aaaauucugucauuaaauugug

SEQ ID NO: 869961 - RNA, 22 nt, Human
caggugggccaugaaaaaugac

SEQ ID NO: 869962 - RNA, 23 nt, Human
uucauagagagauggugagaauu

SEQ ID NO: 869963 - RNA, 22 nt, Human
cuuccugggacaccuaacucua

SEQ ID NO: 869964 - RNA, 22 nt, Human
gcuacaggugacagccucugca

SEQ ID NO: 869965 - RNA, 22 nt, Human
acagauaaggcaguuaagaguu

SEQ ID NO: 869966 - RNA, 22 nt, Human
cugggcaguuuuacaucauugc

SEQ ID NO: 869967 - RNA, 22 nt, Human
gcagcugccccgacugugaguc

SEQ ID NO: 869968 - RNA, 22 nt, Human
ggcaggggugaggccacucuga

SEQ ID NO: 869969 - RNA, 20 nt, Human
caguagcaauaauuagaagc

SEQ ID NO: 869970 - RNA, 22 nt, Human
aaagguuugaggugggaagagg

SEQ ID NO: 869971 - RNA, 18 nt, Human
ccucacagacuuccaugu

SEQ ID NO: 869972 - RNA, 22 nt, Human
cucagagagacaaugugggaca

SEQ ID NO: 869973 - RNA, 22 nt, Human
auccugaagcaugaaugucaaa

SEQ ID NO: 869974 - RNA, 19 nt, Human
uggaggcaagacauggagg

SEQ ID NO: 869975 - RNA, 22 nt, Human
ugugccucacccugcucuuggc

SEQ ID NO: 869976 - RNA, 22 nt, Human
cgcagggccgcgagcgggacca

SEQ ID NO: 869977 - RNA, 22 nt, Human
ugagggccgaggagcugugggu

SEQ ID NO: 869978 - RNA, 22 nt, Human
ggggccuguagagcuucaggga

SEQ ID NO: 869979 - RNA, 22 nt, Human
cuucacaaauggccuagaguuc

SEQ ID NO: 869980 - RNA, 20 nt, Human
ccacccuccaggaacacaua

SEQ ID NO: 869981 - RNA, 22 nt, Human
cucuccagccuuuagcccacgc

SEQ ID NO: 869982 - RNA, 18 nt, Human
acccucuggcuucugagc

SEQ ID NO: 869983 - RNA, 22 nt, Human
acaagcgggccacagugcuggu

SEQ ID NO: 869984 - RNA, 22 nt, Human
agaaaguuuauuucuugaugga

SEQ ID NO: 869985 - RNA, 22 nt, Human
ggaggccaaggaggagcuugcc

SEQ ID NO: 869986 - RNA, 22 nt, Human
ucauuucuuaacuagagugaac

SEQ ID NO: 869987 - RNA, 22 nt, Human
agacacuguguacagaaaaaga

SEQ ID NO: 869988 - RNA, 22 nt, Human
ugucagaggcucagggucucag

SEQ ID NO: 869989 - RNA, 22 nt, Human
gaggcugcuguuagcccugggc

SEQ ID NO: 869990 - RNA, 22 nt, Human
uaggcuuguuacaaaacaguca

SEQ ID NO: 869991 - RNA, 23 nt, Human
ucugggcaccuuguugacaugau

SEQ ID NO: 869992 - RNA, 22 nt, Human
ugguccaguuuagcauugagug

SEQ ID NO: 869993 - RNA, 22 nt, Human
uauuuuacagacuacuuuagau

SEQ ID NO: 869994 - RNA, 22 nt, Human
caggaagcaguagaacuuuucc

SEQ ID NO: 869995 - RNA, 22 nt, Human
auuggggagagcuaauauuuua

SEQ ID NO: 869996 - RNA, 22 nt, Human
gagucugagucuaauggcccca

SEQ ID NO: 869997 - RNA, 22 nt, Human
uggccugguccuugucaaggca

SEQ ID NO: 869998 - RNA, 22 nt, Human
cuuuguaagucuuucuccaaga

SEQ ID NO: 869999 - RNA, 22 nt, Human
uacaugaccuagacuugcuaaa

SEQ ID NO: 870000 - RNA, 19 nt, Human
ugccacagauaaaaacuga

SEQ ID NO: 870001 - RNA, 22 nt, Human
guuuguuuuaagauaggaugga

SEQ ID NO: 870002 - RNA, 22 nt, Human
aguaauaauuuauauuagggag

SEQ ID NO: 870003 - RNA, 22 nt, Human
ugcuccaggugugccucucaug

SEQ ID NO: 870004 - RNA, 22 nt, Human
uuucaguucaccugggaacccg

SEQ ID NO: 870005 - RNA, 22 nt, Human
uucauaaacaaauuaaggccug

SEQ ID NO: 870006 - RNA, 22 nt, Human
uuauggcuaaauuucaauauua

SEQ ID NO: 870007 - RNA, 22 nt, Human
gagcuucccucugcagucccug

SEQ ID NO: 870008 - RNA, 22 nt, Human
ucuggaguugugcaguggaccu

SEQ ID NO: 870009 - RNA, 22 nt, Human
cagaggggauaacagguguaga

SEQ ID NO: 870010 - RNA, 22 nt, Human
uuggaucauggaaugucugcuu

SEQ ID NO: 870011 - RNA, 23 nt, Human
ugcugggguaguuuguggcacag

SEQ ID NO: 870012 - RNA, 22 nt, Human
aacauuuauucuaauucuggga

SEQ ID NO: 870013 - RNA, 22 nt, Human
augugcaugugcacacaugcgu

SEQ ID NO: 870014 - RNA, 22 nt, Human
cagcaaggccauuggaugcagu

SEQ ID NO: 870015 - RNA, 22 nt, Human
gagcagcacugaguuagcagcu

SEQ ID NO: 870016 - RNA, 22 nt, Human
auccuguagucucacagcccca

SEQ ID NO: 870017 - RNA, 19 nt, Human
aggaaagguggccuuagca

SEQ ID NO: 870018 - RNA, 22 nt, Human
ggccaaggcucuugagggcuga

SEQ ID NO: 870019 - RNA, 22 nt, Human
ugcugggggugucucaccaggc

SEQ ID NO: 870020 - RNA, 22 nt, Human
cccagccagccucuucccauau

SEQ ID NO: 870021 - RNA, 22 nt, Human
uuuuuccuuggaugugucucuc

SEQ ID NO: 870022 - RNA, 22 nt, Human
acuggcagccacaacuggcagg

SEQ ID NO: 870023 - RNA, 21 nt, Human
cuccugggcuaagauauagug

SEQ ID NO: 870024 - RNA, 22 nt, Human
ccucagaguuauuugaagugaa

SEQ ID NO: 870025 - RNA, 22 nt, Human
ccacauggauagauagggacau

SEQ ID NO: 870026 - RNA, 22 nt, Human
uuuggucuggaaucuucagggu

SEQ ID NO: 870027 - RNA, 22 nt, Human
aagagggaggugcgggugcaga

SEQ ID NO: 870028 - RNA, 22 nt, Human
agucaucauguacagagagcaa

SEQ ID NO: 870029 - RNA, 22 nt, Human
cagcuguugucucucacauauu

SEQ ID NO: 870030 - RNA, 22 nt, Human
agucaagagacuuaaaauauuu

SEQ ID NO: 870031 - RNA, 22 nt, Human
ggagagagaugccgccuugcuc

SEQ ID NO: 870032 - RNA, 22 nt, Human
auacagaugaaauacuaagcua

SEQ ID NO: 870033 - RNA, 22 nt, Human
caaguugugaaugacagacuuc

SEQ ID NO: 870034 - RNA, 22 nt, Human
agaagcuaauucaugucuuaug

SEQ ID NO: 870035 - RNA, 22 nt, Human
uucuuuuuaaaguguguaugca

SEQ ID NO: 870036 - RNA, 22 nt, Human
ugccagugcuugugucugagca

SEQ ID NO: 870037 - RNA, 22 nt, Human
agggcugagcccaggcauguag

SEQ ID NO: 870038 - RNA, 22 nt, Human
augcuguguggccaccuccaug

SEQ ID NO: 870039 - RNA, 17 nt, Human
ggucugugucuagggaa

SEQ ID NO: 870040 - RNA, 22 nt, Human
uuagaaaauuugcuucuuugga

SEQ ID NO: 870041 - RNA, 22 nt, Human
uuaaagagggaaagacuucaga

SEQ ID NO: 870042 - RNA, 21 nt, Human
ucugucugguuuuagaguggc

SEQ ID NO: 870043 - RNA, 22 nt, Human
ugaguagagaauucagcuaagg

SEQ ID NO: 870044 - RNA, 22 nt, Human
agagaggcugcuggacuauaug

SEQ ID NO: 870045 - RNA, 22 nt, Human
uccaaggagcagucuucaaccu

SEQ ID NO: 870046 - RNA, 22 nt, Human
gcguguaugcaggucugugcag

SEQ ID NO: 870047 - RNA, 22 nt, Human
guaaaugugacuccaccugagu

SEQ ID NO: 870048 - RNA, 22 nt, Human
ucuucacaugaccuucaugucu

SEQ ID NO: 870049 - RNA, 22 nt, Human
gcagucaaagauuggaccaauu

SEQ ID NO: 870050 - RNA, 20 nt, Human
acagcagccuugcuagaaac

SEQ ID NO: 870051 - RNA, 22 nt, Human
uaaauucacuccugguagaccu

SEQ ID NO: 870052 - RNA, 22 nt, Human
auauaaagagcuuaguauagug

SEQ ID NO: 870053 - RNA, 22 nt, Human
auuauccagcaccaaugucaga

SEQ ID NO: 870054 - RNA, 22 nt, Human
acagagggucugggcacaggac

SEQ ID NO: 870055 - RNA, 17 nt, Human
auucuuugaugucucug

SEQ ID NO: 870056 - RNA, 22 nt, Human
uuugguuaauuuaggcuugcau

SEQ ID NO: 870057 - RNA, 22 nt, Human
gccaggcauguccucugcagaa

SEQ ID NO: 870058 - RNA, 22 nt, Human
uauguaaaguagauggcaggua

SEQ ID NO: 870059 - RNA, 22 nt, Human
ucugggagugaagcaacagaug

SEQ ID NO: 870060 - RNA, 22 nt, Human
ccuggcaggacuguuguaagaa

SEQ ID NO: 870061 - RNA, 22 nt, Human
gacacaguuacuuauuuugccu

SEQ ID NO: 870062 - RNA, 22 nt, Human
acaaugcaauaggagcuagaaa

SEQ ID NO: 870063 - RNA, 22 nt, Human
ccuuggcaagacaguggagggu

SEQ ID NO: 870064 - RNA, 18 nt, Human
uugagaaauaagcacuaa

SEQ ID NO: 870065 - RNA, 22 nt, Human
ugaucuagguuggcuucaacug

SEQ ID NO: 870066 - RNA, 22 nt, Human
guauguauacauuguggaaugg

SEQ ID NO: 870067 - RNA, 22 nt, Human
uuuacagcaacagugcagaggu

SEQ ID NO: 870068 - RNA, 22 nt, Human
cuccauauguucaguuaugcag

SEQ ID NO: 870069 - RNA, 22 nt, Human
gacagccaacuggggagggcau

SEQ ID NO: 870070 - RNA, 22 nt, Human
cuuucuugguccugaagauggc

SEQ ID NO: 870071 - RNA, 22 nt, Human
gccaggaguucagaugcauguu

SEQ ID NO: 870072 - RNA, 20 nt, Human
ucauuccaaauaguucagca

SEQ ID NO: 870073 - RNA, 22 nt, Human
uaggccagcccuuaguccuguc

SEQ ID NO: 870074 - RNA, 22 nt, Human
uccagagauccaaagaauauga

SEQ ID NO: 870075 - RNA, 22 nt, Human
gaggcugccccuuccucagcug

SEQ ID NO: 870076 - RNA, 22 nt, Human
aacaucaggaucuuguuacagu

SEQ ID NO: 870077 - RNA, 22 nt, Human
gaggccaggaagcccaagauca

SEQ ID NO: 870078 - RNA, 22 nt, Human
ucagcuggugaguggauagaca

SEQ ID NO: 870079 - RNA, 22 nt, Human
aacuacuaccacagucaagaca

SEQ ID NO: 870080 - RNA, 22 nt, Human
ugguccugguagcggugugcuu

SEQ ID NO: 870081 - RNA, 22 nt, Human
cagaggcucaccagccuuucac

SEQ ID NO: 870082 - RNA, 22 nt, Human
gggacaugaggccauagugauu

SEQ ID NO: 870083 - RNA, 22 nt, Human
auuugccuugugauuuguaagu

SEQ ID NO: 870084 - RNA, 22 nt, Human
cagcuccugccugggcagcugu

SEQ ID NO: 870085 - RNA, 23 nt, Human
acccaucucuccugucaugcaga

SEQ ID NO: 870086 - RNA, 22 nt, Human
gccuguguggaugcgccggugc

SEQ ID NO: 870087 - RNA, 22 nt, Human
cugcaggggaccaaagucugac

SEQ ID NO: 870088 - RNA, 19 nt, Human
augaucugcccuuguaaua

SEQ ID NO: 870089 - RNA, 22 nt, Human
aguuuaauauccuucaacuuuc

SEQ ID NO: 870090 - RNA, 22 nt, Human
agcucccagcuccuuugagaga

SEQ ID NO: 870091 - RNA, 22 nt, Human
ccucaggccagggggcggccag

SEQ ID NO: 870092 - RNA, 20 nt, Human
aggcugggguguuuugccca

SEQ ID NO: 870093 - RNA, 22 nt, Human
cuggcauucuuguuucuggaaa

SEQ ID NO: 870094 - RNA, 22 nt, Human
guuuccuaccagugguuccaga

SEQ ID NO: 870095 - RNA, 22 nt, Human
guaucacuuuugagagugagaa

SEQ ID NO: 870096 - RNA, 22 nt, Human
cucaggaucgcuugcccuaggg

SEQ ID NO: 870097 - RNA, 22 nt, Human
aauaaacaaaucuuuccugugg

SEQ ID NO: 870098 - RNA, 22 nt, Human
gggaaagacccugagucuuauu

SEQ ID NO: 870099 - RNA, 22 nt, Human
uguguucaucaugauaucaggu

SEQ ID NO: 870100 - RNA, 22 nt, Human
uuccauuuuucuaacucucaga

SEQ ID NO: 870101 - RNA, 22 nt, Human
gcccaggaggcagagguugugg

SEQ ID NO: 870102 - RNA, 22 nt, Human
agggcugcugaggaagccuugc

SEQ ID NO: 870103 - RNA, 22 nt, Human
uggcagcugaggggaggcuuug

SEQ ID NO: 870104 - RNA, 22 nt, Human
ucugaaauagaagugucuuucu

SEQ ID NO: 870105 - RNA, 22 nt, Human
ccugcuguuagauuucagucac

SEQ ID NO: 870106 - RNA, 22 nt, Human
uagcagcaauuucagaaguuug

SEQ ID NO: 870107 - RNA, 22 nt, Human
cuucauuggcuuccauagaugc

SEQ ID NO: 870108 - RNA, 22 nt, Human
ggaggaagagguuguucucuca

SEQ ID NO: 870109 - RNA, 22 nt, Human
guccugguagggcucugugucu

SEQ ID NO: 870110 - RNA, 19 nt, Human
ucuuuucacgcauuuugaa

SEQ ID NO: 870111 - RNA, 22 nt, Human
ucaggcccuuugcugcugcccc

SEQ ID NO: 870112 - RNA, 22 nt, Human
ugucacaaguaacuggcaaugc

SEQ ID NO: 870113 - RNA, 17 nt, Human
uacaggagagcaggaac

SEQ ID NO: 870114 - RNA, 22 nt, Human
cucuguccugguuuauacuggc

SEQ ID NO: 870115 - RNA, 22 nt, Human
ccugcccuaauccagagacuag

SEQ ID NO: 870116 - RNA, 22 nt, Human
uccagcccuguggcuuccaccc

SEQ ID NO: 870117 - RNA, 22 nt, Human
auggcaccuuccccagagcuca

SEQ ID NO: 870118 - RNA, 22 nt, Human
cagguacauucguagacccauu

SEQ ID NO: 870119 - RNA, 22 nt, Human
acucccuguacuugccucucuu

SEQ ID NO: 870120 - RNA, 22 nt, Human
cugugcuugacagugggaagca

SEQ ID NO: 870121 - RNA, 22 nt, Human
ucuugcagcuucaucugcaauu

SEQ ID NO: 870122 - RNA, 22 nt, Human
caggaaauuuauguucuacuua

SEQ ID NO: 870123 - RNA, 22 nt, Human
uauuugauagagauaaaugaua

SEQ ID NO: 870124 - RNA, 22 nt, Human
uagcaggaccaugacaagaaaa

SEQ ID NO: 870125 - RNA, 19 nt, Human
cuucaguguucaccuggcc

SEQ ID NO: 870126 - RNA, 22 nt, Human
uaugucuuuuccaaugcugucu

SEQ ID NO: 870127 - RNA, 22 nt, Human
guccuuggccuucuuguaggca

SEQ ID NO: 870128 - RNA, 22 nt, Human
cggggcuguagcacagcugagc

SEQ ID NO: 870129 - RNA, 16 nt, Human
agcagggcgggaagga

SEQ ID NO: 870130 - RNA, 22 nt, Human
ucagcaagcagggggauguuca

SEQ ID NO: 870131 - RNA, 22 nt, Human
ugggggugaaagucuggacagu

SEQ ID NO: 870132 - RNA, 22 nt, Human
uggcccugcagaacuagccugg

SEQ ID NO: 870133 - RNA, 22 nt, Human
ccugggcuuucggcggcuuccu

SEQ ID NO: 870134 - RNA, 22 nt, Human
gggcagugaauauuggugggaa

SEQ ID NO: 870135 - RNA, 22 nt, Human
caggccaggugcucuagaauca

SEQ ID NO: 870136 - RNA, 22 nt, Human
agaagagcccuuuaagggggaa

SEQ ID NO: 870137 - RNA, 22 nt, Human
uuuccucuccggggccuccagg

SEQ ID NO: 870138 - RNA, 22 nt, Human
guuuccaugguguuucuugggu

SEQ ID NO: 870139 - RNA, 22 nt, Human
acuguguccucauguggcagaa

SEQ ID NO: 870140 - RNA, 22 nt, Human
uagaacagcauuuggcuauuaa

SEQ ID NO: 870141 - RNA, 22 nt, Human
ugcaggagagcuggucuggccc

SEQ ID NO: 870142 - RNA, 22 nt, Human
gagaagaaauagaaucacauuu

SEQ ID NO: 870143 - RNA, 22 nt, Human
gagggcuguggggcaugaccag

SEQ ID NO: 870144 - RNA, 19 nt, Human
ggucacaaggaguugugaa

SEQ ID NO: 870145 - RNA, 22 nt, Human
ccaugaccccuggcauccaggg

SEQ ID NO: 870146 - RNA, 23 nt, Human
gcccugcugggaccuccugcuac

SEQ ID NO: 870147 - RNA, 22 nt, Human
cuggaagcuuguuugccagucu

SEQ ID NO: 870148 - RNA, 22 nt, Human
augaguucauacuuucaguacc

SEQ ID NO: 870149 - RNA, 22 nt, Human
uaggcccaguuccgccucccgg

SEQ ID NO: 870150 - RNA, 22 nt, Human
acagauaaaaguuguuuaaaau

SEQ ID NO: 870151 - RNA, 22 nt, Human
ggacaccccggguaccaggucu

SEQ ID NO: 870152 - RNA, 22 nt, Human
uagggcaguuauaacauuagug

SEQ ID NO: 870153 - RNA, 22 nt, Human
uuugaaauuaagauauugucca

SEQ ID NO: 870154 - RNA, 22 nt, Human
ucuggagaggggccuagaauuu

SEQ ID NO: 870155 - RNA, 22 nt, Human
aagauuauggcagauaacaauu

SEQ ID NO: 870156 - RNA, 22 nt, Human
auggggcugaaacauggaagag

SEQ ID NO: 870157 - RNA, 22 nt, Human
ggcagcuuguccuucaggagag

SEQ ID NO: 870158 - RNA, 22 nt, Human
ugucuuuaagcaaacaguguuu

SEQ ID NO: 870159 - RNA, 22 nt, Human
ggggaaagugaauuguguagug

SEQ ID NO: 870160 - RNA, 22 nt, Human
cauguauagguccauagugaau

SEQ ID NO: 870161 - RNA, 22 nt, Human
gaggggcacagcagcuguugca

SEQ ID NO: 870162 - RNA, 22 nt, Human
uacagaauguguaucauuacca

SEQ ID NO: 870163 - RNA, 22 nt, Human
aagggcuggagacugggucuuc

SEQ ID NO: 870164 - RNA, 19 nt, Human
ucaaugcaugaaaucagcc

SEQ ID NO: 870165 - RNA, 22 nt, Human
cccugucuguaccgugaugagc

SEQ ID NO: 870166 - RNA, 22 nt, Human
uucucaguuucacugauaacag

SEQ ID NO: 870167 - RNA, 22 nt, Human
aaacagaaauuuccucaugcuc

SEQ ID NO: 870168 - RNA, 22 nt, Human
gacagagugcagggcuagaaga

SEQ ID NO: 870169 - RNA, 22 nt, Human
gaaauucaaauaagauauguag

SEQ ID NO: 870170 - RNA, 22 nt, Human
ggguuuuaugguucacuugcaa

SEQ ID NO: 870171 - RNA, 22 nt, Human
auguggggacaaaaugauggcc

SEQ ID NO: 870172 - RNA, 22 nt, Human
aaucuaagccaccaguaguuuc

SEQ ID NO: 870173 - RNA, 22 nt, Human
uugucugagaaagugaguugcu

SEQ ID NO: 870174 - RNA, 22 nt, Human
uuuucaucucugcuuuguaccu

SEQ ID NO: 870175 - RNA, 22 nt, Human
uaggccaacguggaagggucca

SEQ ID NO: 870176 - RNA, 22 nt, Human
gagaaguuucugguuugcauag

SEQ ID NO: 870177 - RNA, 22 nt, Human
ugcacugaauaguagacuguac

SEQ ID NO: 870178 - RNA, 22 nt, Human
ugaugcagaauccuagaguguc

SEQ ID NO: 870179 - RNA, 22 nt, Human
aacauacuuauacuaaauaaug

SEQ ID NO: 870180 - RNA, 22 nt, Human
ucugggagggagccucagaauc

SEQ ID NO: 870181 - RNA, 22 nt, Human
uagaaaugauuuugaugcuuca

SEQ ID NO: 870182 - RNA, 22 nt, Human
ggaggcuccaugagcuccugca

SEQ ID NO: 870183 - RNA, 22 nt, Human
gaggcugauucggggaacagca

SEQ ID NO: 870184 - RNA, 22 nt, Human
uuggucuucauccgucacagca

SEQ ID NO: 870185 - RNA, 22 nt, Human
agcuggccagaugucccaaaga

SEQ ID NO: 870186 - RNA, 22 nt, Human
uguguaaauggacugugaauua

SEQ ID NO: 870187 - RNA, 22 nt, Human
ucuucagacuguuguucuuuug

SEQ ID NO: 870188 - RNA, 19 nt, Human
uguuggaggugcugaauua

SEQ ID NO: 870189 - RNA, 22 nt, Human
acuguggccugcuguaugggcu

SEQ ID NO: 870190 - RNA, 22 nt, Human
guacuaagucaggagaagaauu

SEQ ID NO: 870191 - RNA, 22 nt, Human
ugcagggcccucauuccugucc

SEQ ID NO: 870192 - RNA, 22 nt, Human
uuuaggaagaguugaguaaauu

SEQ ID NO: 870193 - RNA, 22 nt, Human
cuggagcuggcuuccuuccacu

SEQ ID NO: 870194 - RNA, 22 nt, Human
caaggaaacaugaaaugcauug

SEQ ID NO: 870195 - RNA, 22 nt, Human
cuauuuguacagcauuaguaau

SEQ ID NO: 870196 - RNA, 21 nt, Human
uccagcuccugccacuccuua

SEQ ID NO: 870197 - RNA, 22 nt, Human
aauggcaccuucaagaagaaaa

SEQ ID NO: 870198 - RNA, 22 nt, Human
agggugccuggaagccacucac

SEQ ID NO: 870199 - RNA, 22 nt, Human
auucagugaguguuuaccggaa

SEQ ID NO: 870200 - RNA, 22 nt, Human
cucucuggauauuuguaugcug

SEQ ID NO: 870201 - RNA, 22 nt, Human
acccaggcuggagugcaguagc

SEQ ID NO: 870202 - RNA, 22 nt, Human
ugauucuauggaaggcauaagg

SEQ ID NO: 870203 - RNA, 22 nt, Human
caggcuucuuuucuuuccagac

SEQ ID NO: 870204 - RNA, 22 nt, Human
acagcugugagggucacuugua

SEQ ID NO: 870205 - RNA, 22 nt, Human
acagagucucagggaugaaagc

SEQ ID NO: 870206 - RNA, 22 nt, Human
aguugucaccucuauucaaauc

SEQ ID NO: 870207 - RNA, 22 nt, Human
acugaugaagaguaccacuguu

SEQ ID NO: 870208 - RNA, 22 nt, Human
uugcuucucagggccugaugca

SEQ ID NO: 870209 - RNA, 22 nt, Human
cccggaaaggcgauuaucccuc

SEQ ID NO: 870210 - RNA, 22 nt, Human
cagcauuuggugaucaucuuaa

SEQ ID NO: 870211 - RNA, 22 nt, Human
accugagcaugccaggagagug

SEQ ID NO: 870212 - RNA, 22 nt, Human
caauaauauccugugcuguuug

SEQ ID NO: 870213 - RNA, 22 nt, Human
gacauucugucaauguugacuc

SEQ ID NO: 870214 - RNA, 22 nt, Human
uugggaaguaauaugguggucu

SEQ ID NO: 870215 - RNA, 22 nt, Human
uccugggaaguugcaucaccgu

SEQ ID NO: 870216 - RNA, 22 nt, Human
cauuuauauaaaauguccagaa

SEQ ID NO: 870217 - RNA, 22 nt, Human
cucagcccggugcucgugccac

SEQ ID NO: 870218 - RNA, 22 nt, Human
guagaguuuaaugaaaaaucug

SEQ ID NO: 870219 - RNA, 22 nt, Human
augcuuccuuaccagaagauga

SEQ ID NO: 870220 - RNA, 22 nt, Human
cugguuuugaauaugucugcuu

SEQ ID NO: 870221 - RNA, 21 nt, Human
uguggcagauguugggaggca

SEQ ID NO: 870222 - RNA, 22 nt, Human
augaggcaaggcuggccguguu

SEQ ID NO: 870223 - RNA, 22 nt, Human
gcagagggcagggguguuuguu

SEQ ID NO: 870224 - RNA, 22 nt, Human
aggccuggugugccggaugcag

SEQ ID NO: 870225 - RNA, 22 nt, Human
ugauuucccucaucauaacaga

SEQ ID NO: 870226 - RNA, 22 nt, Human
acaaugaguuugauguaguuug

SEQ ID NO: 870227 - RNA, 22 nt, Human
aagaaaagaaaccugaggcuuu

SEQ ID NO: 870228 - RNA, 22 nt, Human
uucugacauuugucaaaaugau

SEQ ID NO: 870229 - RNA, 22 nt, Human
gcagcagggagcagggguguca

SEQ ID NO: 870230 - RNA, 23 nt, Human
aguuuccacccaggguagaaggg

SEQ ID NO: 870231 - RNA, 22 nt, Human
ccugggggccaggaagguguga

SEQ ID NO: 870232 - RNA, 22 nt, Human
uuguuuucacagcuuugcccgg

SEQ ID NO: 870233 - RNA, 22 nt, Human
ucagugugaauucauuuuagau

SEQ ID NO: 870234 - RNA, 22 nt, Human
agccccaguaagggagggccug

SEQ ID NO: 870235 - RNA, 22 nt, Human
ccucugagugacagccuccucu

SEQ ID NO: 870236 - RNA, 22 nt, Human
acagauuuggcccagccaaugc

SEQ ID NO: 870237 - RNA, 19 nt, Human
gcugaaggaggugccugca

SEQ ID NO: 870238 - RNA, 15 nt, Human
gaggccaggcaugug

SEQ ID NO: 870239 - RNA, 22 nt, Human
uucuaguucauauucucaaaga

SEQ ID NO: 870240 - RNA, 22 nt, Human
gaggaggucccccgacaugccu

SEQ ID NO: 870241 - RNA, 22 nt, Human
ucaggagaacuuccuucuaccc

SEQ ID NO: 870242 - RNA, 22 nt, Human
aacacugucuuauacuucaaug

SEQ ID NO: 870243 - RNA, 22 nt, Human
ccuucaaaacacuaguuuuuga

SEQ ID NO: 870244 - RNA, 22 nt, Human
cugagcugaaacuugagaggcu

SEQ ID NO: 870245 - RNA, 22 nt, Human
ccucuuugugccugcaggcugc

SEQ ID NO: 870246 - RNA, 22 nt, Human
uaaaggagugugaugaaaggga

SEQ ID NO: 870247 - RNA, 22 nt, Human
caggaggugaaggagaaccagu

SEQ ID NO: 870248 - RNA, 22 nt, Human
aaaagcagaccacgcuuugugg

SEQ ID NO: 870249 - RNA, 22 nt, Human
gcuggguuuccagcaggcagga

SEQ ID NO: 870250 - RNA, 22 nt, Human
agcccagcagaaaguccagccu

SEQ ID NO: 870251 - RNA, 22 nt, Human
acauuccucagugccaguugag

SEQ ID NO: 870252 - RNA, 22 nt, Human
agcugccaccucugccuuuggg

SEQ ID NO: 870253 - RNA, 22 nt, Human
gaugcagaaaguagacaccauc

SEQ ID NO: 870254 - RNA, 22 nt, Human
guuacaaaugccaaagcugaga

SEQ ID NO: 870255 - RNA, 19 nt, Human
acugaagcagggacugaaa

SEQ ID NO: 870256 - RNA, 22 nt, Human
gcccagcaccucucucaggguu

SEQ ID NO: 870257 - RNA, 22 nt, Human
agauauuuugugugauguuuca

SEQ ID NO: 870258 - RNA, 22 nt, Human
acuuugaaggggaacauuuuaa

SEQ ID NO: 870259 - RNA, 22 nt, Human
agucaguguagaaagcccaggc

SEQ ID NO: 870260 - RNA, 22 nt, Human
auagcaccugugaugggaugag

SEQ ID NO: 870261 - RNA, 22 nt, Human
caggcccagcccagcccuucga

SEQ ID NO: 870262 - RNA, 22 nt, Human
gauguaaaauucuugguuguca

SEQ ID NO: 870263 - RNA, 22 nt, Human
auguuggcuggauuuuagauuu

SEQ ID NO: 870264 - RNA, 22 nt, Human
ucucugcccaugagcaaucugc

SEQ ID NO: 870265 - RNA, 22 nt, Human
ugggaagguuagcaguuuguca

SEQ ID NO: 870266 - RNA, 22 nt, Human
ugacagaggagcuggaaugauu

SEQ ID NO: 870267 - RNA, 22 nt, Human
uggaggcaacugaagauguagu

SEQ ID NO: 870268 - RNA, 22 nt, Human
auuugccucugcuuucaaggau

SEQ ID NO: 870269 - RNA, 22 nt, Human
agauuaugcuggcugcuacaag

SEQ ID NO: 870270 - RNA, 22 nt, Human
gagggccaggcagcaagaaggc

SEQ ID NO: 870271 - RNA, 22 nt, Human
ugggagaugguucugagacuuu

SEQ ID NO: 870272 - RNA, 22 nt, Human
auaguuaugcucuagacaagaa

SEQ ID NO: 870273 - RNA, 22 nt, Human
aggcaggauugcugacaacaau

SEQ ID NO: 870274 - RNA, 22 nt, Human
uuucaaacuguacuuuccccua

SEQ ID NO: 870275 - RNA, 22 nt, Human
cagcaucucauucauucauguu

SEQ ID NO: 870276 - RNA, 22 nt, Human
cugugaccuccaggaaggggug

SEQ ID NO: 870277 - RNA, 22 nt, Human
acagcagcagaccagcauaugu

SEQ ID NO: 870278 - RNA, 22 nt, Human
ucuuuccacagcauguccaugc

SEQ ID NO: 870279 - RNA, 21 nt, Human
ucuuuuccuuucugugugcaa

SEQ ID NO: 870280 - RNA, 22 nt, Human
gugggcaguuggugauucucgu

SEQ ID NO: 870281 - RNA, 22 nt, Human
ucugucuguccagggcccccgc

SEQ ID NO: 870282 - RNA, 22 nt, Human
ggcagcuggccuccucgcccac

SEQ ID NO: 870283 - RNA, 22 nt, Human
uugaaacugaguguguuugggg

SEQ ID NO: 870284 - RNA, 22 nt, Human
auggagauuuuuagaauuacag

SEQ ID NO: 870285 - RNA, 22 nt, Human
acaguguucacuuaacaaugga

SEQ ID NO: 870286 - RNA, 22 nt, Human
aaacuucagugaaugacuuaug

SEQ ID NO: 870287 - RNA, 21 nt, Human
ccugagggugguugugaagau

SEQ ID NO: 870288 - RNA, 22 nt, Human
acagcuggugaauguucucugu

SEQ ID NO: 870289 - RNA, 22 nt, Human
uucagcuugaaucuggcuuuga

SEQ ID NO: 870290 - RNA, 22 nt, Human
aaacaggaguugaccaaguaca

SEQ ID NO: 870291 - RNA, 22 nt, Human
agcugucugucuccugaggaga

SEQ ID NO: 870292 - RNA, 22 nt, Human
acacaugugucugcaugcagug

SEQ ID NO: 870293 - RNA, 22 nt, Human
gcccacuccagcuucucccaca

SEQ ID NO: 870294 - RNA, 22 nt, Human
uuuacauguaauguuauacaaa

SEQ ID NO: 870295 - RNA, 18 nt, Human
gccaggcaggguggggaa

SEQ ID NO: 870296 - RNA, 22 nt, Human
aggcccuggucaggucuggcug

SEQ ID NO: 870297 - RNA, 22 nt, Human
ucuugcagaaaauaguauagau

SEQ ID NO: 870298 - RNA, 22 nt, Human
uccauuugaaaugaaagugaua

SEQ ID NO: 870299 - RNA, 22 nt, Human
ccugagcauuagacauccauca

SEQ ID NO: 870300 - RNA, 21 nt, Human
gauaaggcaggaggauaagua

SEQ ID NO: 870301 - RNA, 22 nt, Human
ugccaggcucagccccuaucuu

SEQ ID NO: 870302 - RNA, 22 nt, Human
cauucacaauaguugaaaggug

SEQ ID NO: 870303 - RNA, 22 nt, Human
aggaccuguguuuuccuugaau

SEQ ID NO: 870304 - RNA, 22 nt, Human
ccaggagccugggccaggcugg

SEQ ID NO: 870305 - RNA, 22 nt, Human
agcagccaggaaucugcagagc

SEQ ID NO: 870306 - RNA, 22 nt, Human
cagaaaaggguguuuguucagg

SEQ ID NO: 870307 - RNA, 20 nt, Human
uugagcuuuuaguacagaca

SEQ ID NO: 870308 - RNA, 22 nt, Human
cuguccagugacuuugggccau

SEQ ID NO: 870309 - RNA, 21 nt, Human
aaagaaucauggguaauuuca

SEQ ID NO: 870310 - RNA, 22 nt, Human
ggcccugcaagguacccaggcc

SEQ ID NO: 870311 - RNA, 22 nt, Human
cagccagggagggcaaaugaga

SEQ ID NO: 870312 - RNA, 23 nt, Human
auggucagaauuuuccagcugag

SEQ ID NO: 870313 - RNA, 22 nt, Human
cuuuccaagaaugcagauaccu

SEQ ID NO: 870314 - RNA, 22 nt, Human
ccuuuguggggcgguggguaau

SEQ ID NO: 870315 - RNA, 22 nt, Human
uugagaaacaucuaaucuuugu

SEQ ID NO: 870316 - RNA, 22 nt, Human
ugggcugaaaugcuguggacua

SEQ ID NO: 870317 - RNA, 20 nt, Human
aguuccacauggcuggggag

SEQ ID NO: 870318 - RNA, 22 nt, Human
acaguacagugcagaggaagau

SEQ ID NO: 870319 - RNA, 22 nt, Human
cugggaggugaacagaaaaacu

SEQ ID NO: 870320 - RNA, 19 nt, Human
gccugagccagccaugcaa

SEQ ID NO: 870321 - RNA, 22 nt, Human
aaaauaucagcaaagggugaca

SEQ ID NO: 870322 - RNA, 22 nt, Human
ggcaggcagaggcugagacagg

SEQ ID NO: 870323 - RNA, 22 nt, Human
gccaggcgggucucaaacuccu

SEQ ID NO: 870324 - RNA, 22 nt, Human
ucaguaguuuuaagucuguuaa

SEQ ID NO: 870325 - RNA, 22 nt, Human
gaaucucauucuaacuaguagg

SEQ ID NO: 870326 - RNA, 22 nt, Human
ugacauuuuuaaaaccacuagu

SEQ ID NO: 870327 - RNA, 22 nt, Human
gauaaauggcugaagaaauagu

SEQ ID NO: 870328 - RNA, 22 nt, Human
uaacaguauagccuaacauuuc

SEQ ID NO: 870329 - RNA, 22 nt, Human
uuaggaaagaagcagcuaggag

SEQ ID NO: 870330 - RNA, 22 nt, Human
cugccugcuuaccaugcaucag

SEQ ID NO: 870331 - RNA, 22 nt, Human
uaucuaaaggauuuaauuuagu

SEQ ID NO: 870332 - RNA, 22 nt, Human
aagcugugguaaaggguagagg

SEQ ID NO: 870333 - RNA, 23 nt, Human
aagucagagccaagucaaugaga

SEQ ID NO: 870334 - RNA, 22 nt, Human
aaguaucaaaugguagcauaug

SEQ ID NO: 870335 - RNA, 22 nt, Human
guguguccucaguaguggcaug

SEQ ID NO: 870336 - RNA, 22 nt, Human
accaggcacucuuguggcagug

SEQ ID NO: 870337 - RNA, 20 nt, Human
aggcccugccagggacggag

SEQ ID NO: 870338 - RNA, 22 nt, Human
uuaggaaguuauaguggaaaug

SEQ ID NO: 870339 - RNA, 22 nt, Human
uaucaguggucacaagauacau

SEQ ID NO: 870340 - RNA, 22 nt, Human
ccuggcucccuggaccucauua

SEQ ID NO: 870341 - RNA, 22 nt, Human
uuguauggauuugugggugagu

SEQ ID NO: 870342 - RNA, 22 nt, Human
aagguggcccugagcaugacaa

SEQ ID NO: 870343 - RNA, 22 nt, Human
gaggagcuggcagcgucuccgc

SEQ ID NO: 870344 - RNA, 22 nt, Human
ugaaagguuauuuaggucugcu

SEQ ID NO: 870345 - RNA, 22 nt, Human
uggcgcaguuucucugcugccu

SEQ ID NO: 870346 - RNA, 22 nt, Human
auacaaagcuaaauaugguuuc

SEQ ID NO: 870347 - RNA, 22 nt, Human
ucuaguccuaggagaggaguca

SEQ ID NO: 870348 - RNA, 22 nt, Human
agcugccugcuuaugagcucca

SEQ ID NO: 870349 - RNA, 22 nt, Human
ccauuuuauuagugacauuuag

SEQ ID NO: 870350 - RNA, 22 nt, Human
gaaggcccagcuugaaugcugc

SEQ ID NO: 870351 - RNA, 22 nt, Human
uaccuauagguacaauuacaag

SEQ ID NO: 870352 - RNA, 22 nt, Human
uacaguuuuuauucaugacaag

SEQ ID NO: 870353 - RNA, 22 nt, Human
gcucuguggcauucaugggcag

SEQ ID NO: 870354 - RNA, 22 nt, Human
uaaagacaugguguaggugaac

SEQ ID NO: 870355 - RNA, 22 nt, Human
uguuaagaagaggcaguacuua

SEQ ID NO: 870356 - RNA, 22 nt, Human
guccaccauagggagggcgugg

SEQ ID NO: 870357 - RNA, 22 nt, Human
caguagcaugcaccaggagggu

SEQ ID NO: 870358 - RNA, 22 nt, Human
gauaauaucugguuuauucacc

SEQ ID NO: 870359 - RNA, 16 nt, Human
ggcuccagaauagcga

SEQ ID NO: 870360 - RNA, 22 nt, Human
cugaaggcaccaggggugccag

SEQ ID NO: 870361 - RNA, 22 nt, Human
agggagaacaguugcagcagac

SEQ ID NO: 870362 - RNA, 18 nt, Human
cucucugggugaggacaa

SEQ ID NO: 870363 - RNA, 22 nt, Human
cucagggaguagcacaugugga

SEQ ID NO: 870364 - RNA, 22 nt, Human
uggagggaacaaaggaguccca

SEQ ID NO: 870365 - RNA, 22 nt, Human
ccaggcucacagcaucccagga

SEQ ID NO: 870366 - RNA, 20 nt, Human
agugggagagggcagacugc

SEQ ID NO: 870367 - RNA, 22 nt, Human
agauauacacccauaucacaua

SEQ ID NO: 870368 - RNA, 22 nt, Human
augccagaagccaaaaaauauu

SEQ ID NO: 870369 - RNA, 22 nt, Human
auggcagccuguggacagucaa

SEQ ID NO: 870370 - RNA, 22 nt, Human
cuccaggugcagaaggacucag

SEQ ID NO: 870371 - RNA, 22 nt, Human
ccagccacugggccacugccag

SEQ ID NO: 870372 - RNA, 19 nt, Human
aggagcacugccagcacca

SEQ ID NO: 870373 - RNA, 22 nt, Human
ugguggcaauucaaagacagca

SEQ ID NO: 870374 - RNA, 22 nt, Human
uggagaugcacgagcaggugga

SEQ ID NO: 870375 - RNA, 19 nt, Human
ugccaggaauacuccagaa

SEQ ID NO: 870376 - RNA, 22 nt, Human
ucauaaauuagcugucuuugaa

SEQ ID NO: 870377 - RNA, 22 nt, Human
gcaggaagaugagcucagguaa

SEQ ID NO: 870378 - RNA, 22 nt, Human
aguggcuggagccccaggcugg

SEQ ID NO: 870379 - RNA, 22 nt, Human
aaaugacacuaggcuuuuugca

SEQ ID NO: 870380 - RNA, 22 nt, Human
aguguuuaaacugaagugauga

SEQ ID NO: 870381 - RNA, 22 nt, Human
auggcugggucaccaucagggu

SEQ ID NO: 870382 - RNA, 22 nt, Human
aacauuucagcaccugauuccu

SEQ ID NO: 870383 - RNA, 22 nt, Human
agggagcuuuuucaugugucua

SEQ ID NO: 870384 - RNA, 22 nt, Human
aguacaaaggcccuugauuacu

SEQ ID NO: 870385 - RNA, 22 nt, Human
acaaggcuguggggagaacuga

SEQ ID NO: 870386 - RNA, 22 nt, Human
uugcucugaacccagggcacca

SEQ ID NO: 870387 - RNA, 22 nt, Human
augggcugaggugggauagaag

SEQ ID NO: 870388 - RNA, 22 nt, Human
gaaggcugcugggaaguguggu

SEQ ID NO: 870389 - RNA, 22 nt, Human
gugcucuagaaauugucagugg

SEQ ID NO: 870390 - RNA, 22 nt, Human
uauauuugcuaaaugugugcaa

SEQ ID NO: 870391 - RNA, 23 nt, Human
acauuucaauacugagggucuga

SEQ ID NO: 870392 - RNA, 22 nt, Human
gcccuguguguuugcacugauu

SEQ ID NO: 870393 - RNA, 22 nt, Human
agcuggagaguuuccaggaagg

SEQ ID NO: 870394 - RNA, 22 nt, Human
gcagagcacccugcagugguau

SEQ ID NO: 870395 - RNA, 22 nt, Human
agucuucagagaaauuaacucu

SEQ ID NO: 870396 - RNA, 22 nt, Human
ugugaaugcuuguuauggagug

SEQ ID NO: 870397 - RNA, 22 nt, Human
ucuggggacggggcccagcaau

SEQ ID NO: 870398 - RNA, 22 nt, Human
uuguucauaaagacaguucaga

SEQ ID NO: 870399 - RNA, 22 nt, Human
agcucuggaacucccggcugcu

SEQ ID NO: 870400 - RNA, 22 nt, Human
ucuaggaguugauaaaagggcu

SEQ ID NO: 870401 - RNA, 22 nt, Human
ucuucuguggcucucaccaccc

SEQ ID NO: 870402 - RNA, 22 nt, Human
gcugaagaugcaucccuucucu

SEQ ID NO: 870403 - RNA, 22 nt, Human
agaccuuuauuucaugauagga

SEQ ID NO: 870404 - RNA, 19 nt, Human
guggccugcgcugggugcg

SEQ ID NO: 870405 - RNA, 22 nt, Human
gacccuggcagguagccucaca

SEQ ID NO: 870406 - RNA, 22 nt, Human
uuguggaagcccuaugagagac

SEQ ID NO: 870407 - RNA, 22 nt, Human
agcagguguauauaaggcugag

SEQ ID NO: 870408 - RNA, 22 nt, Human
cugggcccaggcggcucucgga

SEQ ID NO: 870409 - RNA, 18 nt, Human
ucccucagaauuauagaa

SEQ ID NO: 870410 - RNA, 20 nt, Human
aauuagauguuuaaucaaua

SEQ ID NO: 870411 - RNA, 22 nt, Human
ggaagccuaaagcccaggucuc

SEQ ID NO: 870412 - RNA, 22 nt, Human
uuuauucuaacuugcugcucua

SEQ ID NO: 870413 - RNA, 22 nt, Human
guuuggugagcuaagauuauuu

SEQ ID NO: 870414 - RNA, 22 nt, Human
ucuguucagacacuuuacaugu

SEQ ID NO: 870415 - RNA, 22 nt, Human
cccugaggccucagguucauug

SEQ ID NO: 870416 - RNA, 22 nt, Human
gggcucugaaucccaggucugc

SEQ ID NO: 870417 - RNA, 22 nt, Human
uaauuaacauacaaaacagcug

SEQ ID NO: 870418 - RNA, 22 nt, Human
uagucaggaguaggaguuuugg

SEQ ID NO: 870419 - RNA, 17 nt, Human
ucuccaggacgagcuca

SEQ ID NO: 870420 - RNA, 22 nt, Human
uguauuuucuucuggaagcuua

SEQ ID NO: 870421 - RNA, 22 nt, Human
ccacaaggccuguggggcugcu

SEQ ID NO: 870422 - RNA, 22 nt, Human
uucuaguuuccauuuuaagaca

SEQ ID NO: 870423 - RNA, 20 nt, Human
uccugcaguuccuaggaggg

SEQ ID NO: 870424 - RNA, 22 nt, Human
gugcucuguggauugaguugaa

SEQ ID NO: 870425 - RNA, 22 nt, Human
uggccccaucaagggaugaguu

SEQ ID NO: 870426 - RNA, 22 nt, Human
uagcugcccaucuuuccuuuag

SEQ ID NO: 870427 - RNA, 20 nt, Human
uacaauauucccacuuugcu

SEQ ID NO: 870428 - RNA, 22 nt, Human
uaucaacaaaggccuuguguuu

SEQ ID NO: 870429 - RNA, 22 nt, Human
cugcccugggauggucugugcg

SEQ ID NO: 870430 - RNA, 22 nt, Human
aaggaggcagaacucacaugga

SEQ ID NO: 870431 - RNA, 22 nt, Human
uuuacaggauuacccuggcugc

SEQ ID NO: 870432 - RNA, 22 nt, Human
ucucauggcuuaacaagcccac

SEQ ID NO: 870433 - RNA, 22 nt, Human
acauuuugagaaaugacaagcu

SEQ ID NO: 870434 - RNA, 22 nt, Human
ucagagguaguagcagaguuga

SEQ ID NO: 870435 - RNA, 19 nt, Human
acccaggguugauguccag

SEQ ID NO: 870436 - RNA, 22 nt, Human
aagcaaguacaauagcaaguac

SEQ ID NO: 870437 - RNA, 22 nt, Human
agcaugaagacuucagagcuag

SEQ ID NO: 870438 - RNA, 22 nt, Human
uucuagagaacucgagugccuu

SEQ ID NO: 870439 - RNA, 22 nt, Human
aguucuaaggugaguagagagg

SEQ ID NO: 870440 - RNA, 22 nt, Human
auuccaggacuaaaggaacagc

SEQ ID NO: 870441 - RNA, 22 nt, Human
uuuuccuacugauaaacaguua

SEQ ID NO: 870442 - RNA, 22 nt, Human
auuucccaauacgcuaagugga

SEQ ID NO: 870443 - RNA, 22 nt, Human
aaagagucuggcguuuuaaugg

SEQ ID NO: 870444 - RNA, 22 nt, Human
ugccagcuccugcagcuccugu

SEQ ID NO: 870445 - RNA, 22 nt, Human
ccaggcagaugggccggcuuca

SEQ ID NO: 870446 - RNA, 22 nt, Human
uguucauucugugaccugguuc

SEQ ID NO: 870447 - RNA, 23 nt, Human
agauacagaucuacgugucaaug

SEQ ID NO: 870448 - RNA, 22 nt, Human
ucagcccagggacagaggcccc

SEQ ID NO: 870449 - RNA, 22 nt, Human
ucucugaagaaucgaugauucu

SEQ ID NO: 870450 - RNA, 22 nt, Human
uuucaaggauguuauauaaaug

SEQ ID NO: 870451 - RNA, 22 nt, Human
acuuuagaaaagcauccauaga

SEQ ID NO: 870452 - RNA, 22 nt, Human
uuuuggaagccgcggcugggca

SEQ ID NO: 870453 - RNA, 18 nt, Human
caugcagagggaucugug

SEQ ID NO: 870454 - RNA, 22 nt, Human
ucagaggaucaugucccuacuc

SEQ ID NO: 870455 - RNA, 22 nt, Human
aauaagacucugcuagaaauuc

SEQ ID NO: 870456 - RNA, 22 nt, Human
cugugugugaacacagcccagc

SEQ ID NO: 870457 - RNA, 19 nt, Human
ugugugcaaauggaagcca

SEQ ID NO: 870458 - RNA, 22 nt, Human
cccaggcacacugaagugacau

SEQ ID NO: 870459 - RNA, 20 nt, Human
cucuuaaauguaaaguaggc

SEQ ID NO: 870460 - RNA, 22 nt, Human
uucuggggccccaguguccucg

SEQ ID NO: 870461 - RNA, 22 nt, Human
ugaagaagccaauugguaggcu

SEQ ID NO: 870462 - RNA, 22 nt, Human
aaucuaguuuaauauguuuaaa

SEQ ID NO: 870463 - RNA, 21 nt, Human
uauuuauuaauuuguaaggcu

SEQ ID NO: 870464 - RNA, 22 nt, Human
agaaaguucugugaguuguuca

SEQ ID NO: 870465 - RNA, 22 nt, Human
uccaggagguuuggaggaagca

SEQ ID NO: 870466 - RNA, 22 nt, Human
agaguggggacagggccugucc

SEQ ID NO: 870467 - RNA, 22 nt, Human
auucuauagacagaaggucaau

SEQ ID NO: 870468 - RNA, 22 nt, Human
uucuauguggcaucaagcucag

SEQ ID NO: 870469 - RNA, 22 nt, Human
agaagccaacagggcaggagag

SEQ ID NO: 870470 - RNA, 22 nt, Human
aggcagggcucauuucuuaggc

SEQ ID NO: 870471 - RNA, 16 nt, Human
gcuccugggcccucga

SEQ ID NO: 870472 - RNA, 22 nt, Human
ggugagcagcugucuguaugga

SEQ ID NO: 870473 - RNA, 22 nt, Human
cugugcuggcagaccuggaguu

SEQ ID NO: 870474 - RNA, 22 nt, Human
agauacauuguucuaagcauug

SEQ ID NO: 870475 - RNA, 22 nt, Human
ugcuuccuugaucauucccaaa

SEQ ID NO: 870476 - RNA, 22 nt, Human
ggaaugaaacacuucugauucu

SEQ ID NO: 870477 - RNA, 22 nt, Human
ugucugagugcauaugugcugg

SEQ ID NO: 870478 - RNA, 22 nt, Human
ucucaaacuaacaaugauuaua

SEQ ID NO: 870479 - RNA, 22 nt, Human
cucucagggcagguggccuuuc

SEQ ID NO: 870480 - RNA, 22 nt, Human
aggagagagcugagcuuugcug

SEQ ID NO: 870481 - RNA, 20 nt, Human
uauaaauucagagcuuuggu

SEQ ID NO: 870482 - RNA, 22 nt, Human
uaaagugugcauggucaaauau

SEQ ID NO: 870483 - RNA, 22 nt, Human
uggccugcagaggcuguggggc

SEQ ID NO: 870484 - RNA, 22 nt, Human
gugaggggaguaaagccauguu

SEQ ID NO: 870485 - RNA, 22 nt, Human
aacuuuaaaaaauaugucuguu

SEQ ID NO: 870486 - RNA, 22 nt, Human
gccugggagaaugaccuccaac

SEQ ID NO: 870487 - RNA, 22 nt, Human
uuuccacacaggcucuacuacu

SEQ ID NO: 870488 - RNA, 22 nt, Human
auucuacauuuggagugauguc

SEQ ID NO: 870489 - RNA, 22 nt, Human
caggggaguuuuaugcaacaga

SEQ ID NO: 870490 - RNA, 22 nt, Human
cugggcucuagaaaggaaagaa

SEQ ID NO: 870491 - RNA, 22 nt, Human
uuuuggugcaccuagcuuuuuc

SEQ ID NO: 870492 - RNA, 22 nt, Human
gcuucuagggaaggcagucaca

SEQ ID NO: 870493 - RNA, 22 nt, Human
agauguggauccuaggguagaa

SEQ ID NO: 870494 - RNA, 22 nt, Human
cugaggagcaaccccgugcccu

SEQ ID NO: 870495 - RNA, 22 nt, Human
ugaaagaaggguggaaaaugua

SEQ ID NO: 870496 - RNA, 22 nt, Human
gcccaggauucuuucuuccuua

SEQ ID NO: 870497 - RNA, 22 nt, Human
ggcaaaaacagcaaugacuuuu

SEQ ID NO: 870498 - RNA, 23 nt, Human
ucuggaauccucccccuugguuc

SEQ ID NO: 870499 - RNA, 22 nt, Human
acccaggggcagccuugcugug

SEQ ID NO: 870500 - RNA, 19 nt, Human
cucugccucccuccugggu

SEQ ID NO: 870501 - RNA, 21 nt, Human
ugaacaaaguucuuaucguga

SEQ ID NO: 870502 - RNA, 22 nt, Human
uuacacagugaauuuacucaag

SEQ ID NO: 870503 - RNA, 22 nt, Human
uuucauugccauaaggugggau

SEQ ID NO: 870504 - RNA, 22 nt, Human
ggggcugacgggcauguggcuu

SEQ ID NO: 870505 - RNA, 22 nt, Human
ccucuucuaccauuuacauuuu

SEQ ID NO: 870506 - RNA, 22 nt, Human
aacauagaauuguuauauuuuc

SEQ ID NO: 870507 - RNA, 22 nt, Human
aguguuuccugaguguuaucau

SEQ ID NO: 870508 - RNA, 22 nt, Human
aggaugggucagcuagagucca

SEQ ID NO: 870509 - RNA, 22 nt, Human
augcauaugcaaugcacaauuu

SEQ ID NO: 870510 - RNA, 22 nt, Human
caguaguuauuaguugccacug

SEQ ID NO: 870511 - RNA, 21 nt, Human
aggagggcacaaggccaggaa

SEQ ID NO: 870512 - RNA, 22 nt, Human
uuugaagauaaauauggagaaa

SEQ ID NO: 870513 - RNA, 22 nt, Human
uagguacaaggagggauucuug

SEQ ID NO: 870514 - RNA, 22 nt, Human
gacuguccagaauuccuaggug

SEQ ID NO: 870515 - RNA, 20 nt, Human
ugucugugccacggcacucc

SEQ ID NO: 870516 - RNA, 22 nt, Human
uggaagaauaggauagaagaac

SEQ ID NO: 870517 - RNA, 22 nt, Human
cuuggacuuccaggaaguauuu

SEQ ID NO: 870518 - RNA, 19 nt, Human
ucucuauauuuguuucuga

SEQ ID NO: 870519 - RNA, 22 nt, Human
ccaggacucaguggggaaaggg

SEQ ID NO: 870520 - RNA, 22 nt, Human
aggcagcaugggccccagcucc

SEQ ID NO: 870521 - RNA, 22 nt, Human
aaagaguugaaaacuaacagug

SEQ ID NO: 870522 - RNA, 22 nt, Human
caagccugucucaccagugcua

SEQ ID NO: 870523 - RNA, 22 nt, Human
gcuguucauuagaaauagaaug

SEQ ID NO: 870524 - RNA, 16 nt, Human
uggggaagcucgugag

SEQ ID NO: 870525 - RNA, 22 nt, Human
uggcaggcagugugggagcugg

SEQ ID NO: 870526 - RNA, 22 nt, Human
ugaagccccuaagucccaggca

SEQ ID NO: 870527 - RNA, 22 nt, Human
ugccagggccauagggagucua

SEQ ID NO: 870528 - RNA, 22 nt, Human
auacacacauaugugaguuuug

SEQ ID NO: 870529 - RNA, 22 nt, Human
uugagcccaggaggccugggug

SEQ ID NO: 870530 - RNA, 22 nt, Human
agacuaaagacucauucugcug

SEQ ID NO: 870531 - RNA, 22 nt, Human
uaacacaugguuaguacacaau

SEQ ID NO: 870532 - RNA, 22 nt, Human
uuuucuguuacaaaguacagcg

SEQ ID NO: 870533 - RNA, 22 nt, Human
cugcagugcaagcccagaugga

SEQ ID NO: 870534 - RNA, 22 nt, Human
cucugggguggaggaggcugac

SEQ ID NO: 870535 - RNA, 22 nt, Human
cugggacuuuguaggccaguug

SEQ ID NO: 870536 - RNA, 18 nt, Human
gggcggaagggaagauaa

SEQ ID NO: 870537 - RNA, 22 nt, Human
ggugauucugugaggggcugac

SEQ ID NO: 870538 - RNA, 22 nt, Human
gucuagagugcuuccuagucau

SEQ ID NO: 870539 - RNA, 22 nt, Human
augcaucacuaaauagugccgu

SEQ ID NO: 870540 - RNA, 22 nt, Human
cugcuucauagcccuggucucu

SEQ ID NO: 870541 - RNA, 22 nt, Human
gaguuuggguggaaggagggua

SEQ ID NO: 870542 - RNA, 22 nt, Human
uuuaauugcauuuaaagaugga

SEQ ID NO: 870543 - RNA, 22 nt, Human
uaucaucuuguugucaugcagc

SEQ ID NO: 870544 - RNA, 22 nt, Human
auuuuuucagauugaguguuaa

SEQ ID NO: 870545 - RNA, 22 nt, Human
uuugaauagcauaggauuacau

SEQ ID NO: 870546 - RNA, 22 nt, Human
agcuccagaggcagugaugaag

SEQ ID NO: 870547 - RNA, 22 nt, Human
aggacccugcucaagcaucucc

SEQ ID NO: 870548 - RNA, 22 nt, Human
cacagcuguuuucuccaggcag

SEQ ID NO: 870549 - RNA, 22 nt, Human
ccugcaggcugcaggccaguuc

SEQ ID NO: 870550 - RNA, 22 nt, Human
gucuguccacuuggaagcuccc

SEQ ID NO: 870551 - RNA, 22 nt, Human
auacauauccacaggagauaaa

SEQ ID NO: 870552 - RNA, 22 nt, Human
uuugcuaaauaagugauuaagu

SEQ ID NO: 870553 - RNA, 22 nt, Human
ucuuucauguauaugcaaccua

SEQ ID NO: 870554 - RNA, 22 nt, Human
ggaaggggugggugagccucag

SEQ ID NO: 870555 - RNA, 22 nt, Human
ccugggagggcaagugcugaug

SEQ ID NO: 870556 - RNA, 22 nt, Human
uauuugcuuggaaaccuaaucc

SEQ ID NO: 870557 - RNA, 22 nt, Human
uguaugcaccauuguauuaccu

SEQ ID NO: 870558 - RNA, 22 nt, Human
guuucacagaugguguucauau

SEQ ID NO: 870559 - RNA, 22 nt, Human
ugcaaaaauugcuggaaucuuu

SEQ ID NO: 870560 - RNA, 22 nt, Human
aaggcaaugacugauuuagaau

SEQ ID NO: 870561 - RNA, 22 nt, Human
acuguccaagcaugccuggcuu

SEQ ID NO: 870562 - RNA, 17 nt, Human
auggcucaccugugggc

SEQ ID NO: 870563 - RNA, 22 nt, Human
aggucuugugaaggacugugcc

SEQ ID NO: 870564 - RNA, 22 nt, Human
agcucaggucauuccagggaug

SEQ ID NO: 870565 - RNA, 22 nt, Human
acauguuuacauuaggugauau

SEQ ID NO: 870566 - RNA, 22 nt, Human
uugaucugccucauucuuguuc

SEQ ID NO: 870567 - RNA, 19 nt, Human
ugcucuggagccagcucuc

SEQ ID NO: 870568 - RNA, 22 nt, Human
aagcaagaguuggagugauguu

SEQ ID NO: 870569 - RNA, 22 nt, Human
gucuuauuaugagguuagacuu

SEQ ID NO: 870570 - RNA, 22 nt, Human
guauuugaucauuagaaugauu

SEQ ID NO: 870571 - RNA, 23 nt, Human
agccccucauaucugcuuucucu

SEQ ID NO: 870572 - RNA, 22 nt, Human
aucaaauauaauaauuuucgcu

SEQ ID NO: 870573 - RNA, 22 nt, Human
uccgaugcuuccagggccaccu

SEQ ID NO: 870574 - RNA, 22 nt, Human
cuaauucugaaacagugucaau

SEQ ID NO: 870575 - RNA, 22 nt, Human
aggcacugcagauuacaggcgc

SEQ ID NO: 870576 - RNA, 21 nt, Human
cacaagacacauaggguguuu

SEQ ID NO: 870577 - RNA, 22 nt, Human
ugaacccuuguagaggauggag

SEQ ID NO: 870578 - RNA, 22 nt, Human
gaacaacuccaagggacaucau

SEQ ID NO: 870579 - RNA, 22 nt, Human
cggcugagacggccauagacac

SEQ ID NO: 870580 - RNA, 22 nt, Human
agccucccuaugcaccuucagg

SEQ ID NO: 870581 - RNA, 22 nt, Human
uuggaacucuaccaacaguagu

SEQ ID NO: 870582 - RNA, 22 nt, Human
ccuggccagggucugggcugcu

SEQ ID NO: 870583 - RNA, 22 nt, Human
aaggcugagggcuguaccuggc

SEQ ID NO: 870584 - RNA, 18 nt, Human
aagccagagaccacugcc

SEQ ID NO: 870585 - RNA, 22 nt, Human
acuguuaagaaggaggauggaa

SEQ ID NO: 870586 - RNA, 22 nt, Human
ucugagagcucuggggccccuu

SEQ ID NO: 870587 - RNA, 22 nt, Human
gaagaucagaguaagcuuuuua

SEQ ID NO: 870588 - RNA, 22 nt, Human
cugaaguuaguuaugccuaaaa

SEQ ID NO: 870589 - RNA, 22 nt, Human
uuuaguucacaccaggguagca

SEQ ID NO: 870590 - RNA, 22 nt, Human
uguccucaaggagcuucagucu

SEQ ID NO: 870591 - RNA, 22 nt, Human
gugucugugucauuacuaauag

SEQ ID NO: 870592 - RNA, 22 nt, Human
ugucccagauacuggacauaga

SEQ ID NO: 870593 - RNA, 22 nt, Human
cccaaaaugugcauguucgaau

SEQ ID NO: 870594 - RNA, 22 nt, Human
cagaaacuagauuuagacacaa

SEQ ID NO: 870595 - RNA, 22 nt, Human
ccucuggucccagcucugcugc

SEQ ID NO: 870596 - RNA, 22 nt, Human
gggagcugagcuggaagagaau

SEQ ID NO: 870597 - RNA, 22 nt, Human
uccugagacaucucugcugguc

SEQ ID NO: 870598 - RNA, 22 nt, Human
caggaucugccaauauucaacc

SEQ ID NO: 870599 - RNA, 22 nt, Human
cccugguggggccagacuugcu

SEQ ID NO: 870600 - RNA, 22 nt, Human
auuagucaguauuuguuugcca

SEQ ID NO: 870601 - RNA, 22 nt, Human
uaguuucuaaagcuuccuaggu

SEQ ID NO: 870602 - RNA, 22 nt, Human
agcugcaggccucuccugggga

SEQ ID NO: 870603 - RNA, 22 nt, Human
aagcccagguaaguggcucaug

SEQ ID NO: 870604 - RNA, 22 nt, Human
uucaagaugacccagucacacg

SEQ ID NO: 870605 - RNA, 22 nt, Human
cuggcucccguuguccuugaag

SEQ ID NO: 870606 - RNA, 21 nt, Human
gccuccagccagauggccucc

SEQ ID NO: 870607 - RNA, 22 nt, Human
auggcuagcaccgcguugcugg

SEQ ID NO: 870608 - RNA, 20 nt, Human
aggucaguagaaugauuuug

SEQ ID NO: 870609 - RNA, 19 nt, Human
uccaggcuccauuggcaga

SEQ ID NO: 870610 - RNA, 22 nt, Human
cugcuguuucucaaaauuaagu

SEQ ID NO: 870611 - RNA, 22 nt, Human
accaaugugaugauauuaggag

SEQ ID NO: 870612 - RNA, 22 nt, Human
uggcagcuggagggcaauggcc

SEQ ID NO: 870613 - RNA, 22 nt, Human
uccugggaguggccauguaaug

SEQ ID NO: 870614 - RNA, 22 nt, Human
uuuuggcaagcugggagauauu

SEQ ID NO: 870615 - RNA, 22 nt, Human
gacaaagccuaagaaguauuua

SEQ ID NO: 870616 - RNA, 22 nt, Human
cagauucuccaggggcugcaga

SEQ ID NO: 870617 - RNA, 22 nt, Human
ucucucuucuuuguuaagaaug

SEQ ID NO: 870618 - RNA, 22 nt, Human
auauuucucucagacauggaag

SEQ ID NO: 870619 - RNA, 22 nt, Human
ugcuggcucuaggcugagacag

SEQ ID NO: 870620 - RNA, 22 nt, Human
aaaguucacugaccagcacugg

SEQ ID NO: 870621 - RNA, 22 nt, Human
cuugguuauacuccaggaacca

SEQ ID NO: 870622 - RNA, 22 nt, Human
agacagacaugcuaguuuucuu

SEQ ID NO: 870623 - RNA, 18 nt, Human
ucuguccacccugugcug

SEQ ID NO: 870624 - RNA, 22 nt, Human
acagcacaaucugagucccaga

SEQ ID NO: 870625 - RNA, 22 nt, Human
aaaaguaaucgcaguuuuugcc

SEQ ID NO: 870626 - RNA, 22 nt, Human
aaucuggacuugucugugaaga

SEQ ID NO: 870627 - RNA, 22 nt, Human
ccuacucugagcgccuccgcau

SEQ ID NO: 870628 - RNA, 22 nt, Human
cccaggaggcagauguugcagu

SEQ ID NO: 870629 - RNA, 22 nt, Human
cuucauacaauuuuuugacaua

SEQ ID NO: 870630 - RNA, 22 nt, Human
cuuauuuaaugaggguuagaau

SEQ ID NO: 870631 - RNA, 22 nt, Human
agagcugaauucaagugcuggc

SEQ ID NO: 870632 - RNA, 22 nt, Human
uuguacaacguuuuaaauuuga

SEQ ID NO: 870633 - RNA, 22 nt, Human
agagggagcccagucauagcug

SEQ ID NO: 870634 - RNA, 22 nt, Human
auuauuggacacuucuucugca

SEQ ID NO: 870635 - RNA, 22 nt, Human
caaguauuuuaaggacuagugg

SEQ ID NO: 870636 - RNA, 22 nt, Human
aaaguuucaauagaggaagugg

SEQ ID NO: 870637 - RNA, 22 nt, Human
ggcuggagacaacguccugccc

SEQ ID NO: 870638 - RNA, 22 nt, Human
acaauaguaagguauauuguca

SEQ ID NO: 870639 - RNA, 17 nt, Human
uuucuacaguuggcagc

SEQ ID NO: 870640 - RNA, 22 nt, Human
agaccacagucaggcuccuggu

SEQ ID NO: 870641 - RNA, 22 nt, Human
acagcugcaugaugguccagau

SEQ ID NO: 870642 - RNA, 22 nt, Human
cacaguuugguauagaagugau

SEQ ID NO: 870643 - RNA, 22 nt, Human
ucuagcugaggguaggagaccu

SEQ ID NO: 870644 - RNA, 22 nt, Human
ugccugccuaggaagcugugaa

SEQ ID NO: 870645 - RNA, 18 nt, Human
aaggucugucugguaggu

SEQ ID NO: 870646 - RNA, 22 nt, Human
caguccucucugugucugcacc

SEQ ID NO: 870647 - RNA, 22 nt, Human
aagugucugcaaaaugacagag

SEQ ID NO: 870648 - RNA, 22 nt, Human
aggcugagauagguggaucauu

SEQ ID NO: 870649 - RNA, 22 nt, Human
ugacauuuaaucccuaaauauu

SEQ ID NO: 870650 - RNA, 22 nt, Human
uucucuaauacauuuugacaaa

SEQ ID NO: 870651 - RNA, 20 nt, Human
accagguggcugaugacacc

SEQ ID NO: 870652 - RNA, 22 nt, Human
cugugagcuggguggccaggac

SEQ ID NO: 870653 - RNA, 22 nt, Human
caagcagggagcaucaagggag

SEQ ID NO: 870654 - RNA, 22 nt, Human
gucaaaaaguagucauuucugu

SEQ ID NO: 870655 - RNA, 22 nt, Human
gggcagcagagcccugccgagu

SEQ ID NO: 870656 - RNA, 22 nt, Human
cagguucccagguccagggcuu

SEQ ID NO: 870657 - RNA, 21 nt, Human
uaagaacauuaucuucuuccu

SEQ ID NO: 870658 - RNA, 22 nt, Human
agagugcuuaguagugacaugg

SEQ ID NO: 870659 - RNA, 22 nt, Human
auuaauacauuauagggauugu

SEQ ID NO: 870660 - RNA, 22 nt, Human
aggaccuguaccucagcaucua

SEQ ID NO: 870661 - RNA, 22 nt, Human
ucaguguucagcggugugugca

SEQ ID NO: 870662 - RNA, 22 nt, Human
ucuuccucaugaauucucguau

SEQ ID NO: 870663 - RNA, 22 nt, Human
ugggcagguuguuauuugacau

SEQ ID NO: 870664 - RNA, 22 nt, Human
uacaauguuccuagcaggaaag

SEQ ID NO: 870665 - RNA, 22 nt, Human
cuucuucauguauugauagucu

SEQ ID NO: 870666 - RNA, 22 nt, Human
ucaaguauuauuacagauguag

SEQ ID NO: 870667 - RNA, 22 nt, Human
auagucuucagcacuuugauca

SEQ ID NO: 870668 - RNA, 21 nt, Human
caugggguugcuauagcaaaa

SEQ ID NO: 870669 - RNA, 21 nt, Human
ugaggcucuguugugccugca

SEQ ID NO: 870670 - RNA, 23 nt, Human
ugugcgugaugcuuuguugaagg

SEQ ID NO: 870671 - RNA, 20 nt, Human
uugaaaaugcauugugcagu

SEQ ID NO: 870672 - RNA, 22 nt, Human
acagaagauaacugggaccaga

SEQ ID NO: 870673 - RNA, 22 nt, Human
uugcuuuauauucaagagagga

SEQ ID NO: 870674 - RNA, 22 nt, Human
aucuuguuauaagagauaaugg

SEQ ID NO: 870675 - RNA, 22 nt, Human
gucuacacugaauuuccacaga

SEQ ID NO: 870676 - RNA, 21 nt, Human
caaagccaggcaacucucucc

SEQ ID NO: 870677 - RNA, 22 nt, Human
ggcuggacaugagcuuggcagu

SEQ ID NO: 870678 - RNA, 22 nt, Human
aaggcacaugaccuaggccugg

SEQ ID NO: 870679 - RNA, 22 nt, Human
acuggcagagacccugauggcc

SEQ ID NO: 870680 - RNA, 22 nt, Human
auaaagucuaccguauuaaaga

SEQ ID NO: 870681 - RNA, 22 nt, Human
uugcuuuaccauuugaucucua

SEQ ID NO: 870682 - RNA, 22 nt, Human
uaugguuauguaaucaguuguu

SEQ ID NO: 870683 - RNA, 22 nt, Human
agaacacacugggggaaacaag

SEQ ID NO: 870684 - RNA, 22 nt, Human
auuugcuugugcuaugaaaguu

SEQ ID NO: 870685 - RNA, 23 nt, Human
agcaccaggaacagugugguccu

SEQ ID NO: 870686 - RNA, 22 nt, Human
aagaaacugaaaguggcuucau

SEQ ID NO: 870687 - RNA, 22 nt, Human
cagugccaugucugagccccua

SEQ ID NO: 870688 - RNA, 22 nt, Human
uguguggcaagcuguaugcuag

SEQ ID NO: 870689 - RNA, 22 nt, Human
uuugaauaucacaaacuuucaa

SEQ ID NO: 870690 - RNA, 22 nt, Human
ccugguugugaguugaguugag

SEQ ID NO: 870691 - RNA, 22 nt, Human
cuuucauaagggguuuuauaau

SEQ ID NO: 870692 - RNA, 22 nt, Human
gcacuugauuacauuagugccu

SEQ ID NO: 870693 - RNA, 22 nt, Human
uuucauguguugaauguguaca

SEQ ID NO: 870694 - RNA, 22 nt, Human
gaggguggagcuccagaaucug

SEQ ID NO: 870695 - RNA, 22 nt, Human
uuuacagaaugucaauuucuau

SEQ ID NO: 870696 - RNA, 22 nt, Human
gucugcuggugccuggccugcg

SEQ ID NO: 870697 - RNA, 22 nt, Human
aguguuuagcaugaaguucauu

SEQ ID NO: 870698 - RNA, 22 nt, Human
ugugaagauagcuguuacaucu

SEQ ID NO: 870699 - RNA, 22 nt, Human
ugucacuucaguuuugaaacaa

SEQ ID NO: 870700 - RNA, 22 nt, Human
agucucuuuaaucacagugucu

SEQ ID NO: 870701 - RNA, 22 nt, Human
gucacccugcuguuuguccauu

SEQ ID NO: 870702 - RNA, 22 nt, Human
uuauucagugcauauauuaaaa

SEQ ID NO: 870703 - RNA, 22 nt, Human
aucaugcaauaaggugaggccu

SEQ ID NO: 870704 - RNA, 22 nt, Human
guccuucuuuucaucccugguu

SEQ ID NO: 870705 - RNA, 22 nt, Human
uuauugucaaaaacaggacacu

SEQ ID NO: 870706 - RNA, 22 nt, Human
ggagaaaguacagcaggcaaca

SEQ ID NO: 870707 - RNA, 22 nt, Human
cagguccccuccccuaccaggc

SEQ ID NO: 870708 - RNA, 21 nt, Human
cagugcucaaucugacagugg

SEQ ID NO: 870709 - RNA, 22 nt, Human
gagcggaggcuuggaggccagc

SEQ ID NO: 870710 - RNA, 22 nt, Human
acagaacugagaauucucuauc

SEQ ID NO: 870711 - RNA, 22 nt, Human
uuuccacaauuugagcagcaga

SEQ ID NO: 870712 - RNA, 22 nt, Human
cagggagcggagucccaugccu

SEQ ID NO: 870713 - RNA, 23 nt, Human
auucugagucagaaaguuugggg

SEQ ID NO: 870714 - RNA, 22 nt, Human
uucugcugcgacccaggaguua

SEQ ID NO: 870715 - RNA, 22 nt, Human
auauuaugcuaagggaaauaag

SEQ ID NO: 870716 - RNA, 22 nt, Human
cagggccacacggaagggaaca

SEQ ID NO: 870717 - RNA, 22 nt, Human
caaauacuguacugaacacugu

SEQ ID NO: 870718 - RNA, 22 nt, Human
aauacgucccaucaucuuuuuc

SEQ ID NO: 870719 - RNA, 23 nt, Human
aagaggaggcccugcucccgucc

SEQ ID NO: 870720 - RNA, 22 nt, Human
gcuccuggccagcacagggccc

SEQ ID NO: 870721 - RNA, 22 nt, Human
agugggggccaacgagggcagc

SEQ ID NO: 870722 - RNA, 23 nt, Human
ucugugccaguuuccaugucugu

SEQ ID NO: 870723 - RNA, 22 nt, Human
ugucagcaucauuuguugaagg

SEQ ID NO: 870724 - RNA, 22 nt, Human
uaggaaggaggccaucuuggcg

SEQ ID NO: 870725 - RNA, 22 nt, Human
caagggggcaggaucacacuug

SEQ ID NO: 870726 - RNA, 22 nt, Human
uccuggauggagcugcccucgc

SEQ ID NO: 870727 - RNA, 22 nt, Human
ugggaagauaugagugaccaac

SEQ ID NO: 870728 - RNA, 22 nt, Human
ccugcugaggucagccacccaa

SEQ ID NO: 870729 - RNA, 22 nt, Human
cugcagcuauauuuucccacag

SEQ ID NO: 870730 - RNA, 22 nt, Human
uccauuguguuacagagcauuc

SEQ ID NO: 870731 - RNA, 22 nt, Human
uguaauauuguagugacaguac

SEQ ID NO: 870732 - RNA, 22 nt, Human
gcauucuuuagacugagagaua

SEQ ID NO: 870733 - RNA, 22 nt, Human
aagugauuauuuaaugcgguuu

SEQ ID NO: 870734 - RNA, 22 nt, Human
auauuauaaguuauuucaaguu

SEQ ID NO: 870735 - RNA, 22 nt, Human
ggaggcugagaaguccaagauc

SEQ ID NO: 870736 - RNA, 19 nt, Human
ucucuucucccugguuuua

SEQ ID NO: 870737 - RNA, 22 nt, Human
uucuggcuuuaggcuuuucaag

SEQ ID NO: 870738 - RNA, 22 nt, Human
ggucugaggcuccaaggaggug

SEQ ID NO: 870739 - RNA, 22 nt, Human
aauguuuuuuggucugaugaau

SEQ ID NO: 870740 - RNA, 22 nt, Human
cccucaggugaaaggaaaaauu

SEQ ID NO: 870741 - RNA, 22 nt, Human
ugagaaucagcugcacagaggu

SEQ ID NO: 870742 - RNA, 22 nt, Human
uuugacagcagauaaaauaaaa

SEQ ID NO: 870743 - RNA, 22 nt, Human
uauguacauauacacgugugug

SEQ ID NO: 870744 - RNA, 22 nt, Human
auaugcuuacacuacaagauga

SEQ ID NO: 870745 - RNA, 22 nt, Human
ggccagucugggccacggucgg

SEQ ID NO: 870746 - RNA, 22 nt, Human
gccuggcuaauuuugguauuuu

SEQ ID NO: 870747 - RNA, 22 nt, Human
uauguauagagucuuuuaaauu

SEQ ID NO: 870748 - RNA, 22 nt, Human
cgaggccagcucuaagcccuac

SEQ ID NO: 870749 - RNA, 22 nt, Human
cauuuggaaagagacuagagaa

SEQ ID NO: 870750 - RNA, 22 nt, Human
aagcacagaaaaggagcaugga

SEQ ID NO: 870751 - RNA, 22 nt, Human
auaaauugugcuuuugacaucu

SEQ ID NO: 870752 - RNA, 22 nt, Human
agagcugcccacacagcagauu

SEQ ID NO: 870753 - RNA, 22 nt, Human
gugagacacccaagagucagau

SEQ ID NO: 870754 - RNA, 22 nt, Human
acacacuggcccccaguacuga

SEQ ID NO: 870755 - RNA, 22 nt, Human
gcagggggucauucacgcuggc

SEQ ID NO: 870756 - RNA, 22 nt, Human
ucugcaggagagugcccuagag

SEQ ID NO: 870757 - RNA, 22 nt, Human
gaauaauagcagaaauuagcag

SEQ ID NO: 870758 - RNA, 22 nt, Human
cugguggggaguccuggucucc

SEQ ID NO: 870759 - RNA, 22 nt, Human
ccuuggcaggggagaaauauau

SEQ ID NO: 870760 - RNA, 22 nt, Human
uggaagcacaggaucaguggaa

SEQ ID NO: 870761 - RNA, 22 nt, Human
ugggcagagucguggggaauag

SEQ ID NO: 870762 - RNA, 22 nt, Human
cuagauucauauauuuuuggag

SEQ ID NO: 870763 - RNA, 22 nt, Human
cauggcagagccugcagguggg

SEQ ID NO: 870764 - RNA, 22 nt, Human
ucaugcauauuuguaguaguuc

SEQ ID NO: 870765 - RNA, 22 nt, Human
cccuuuaaguagaauauauuau

SEQ ID NO: 870766 - RNA, 22 nt, Human
auccaaacuaugacuaguguuc

SEQ ID NO: 870767 - RNA, 22 nt, Human
acacauauaccacuguaaauga

SEQ ID NO: 870768 - RNA, 22 nt, Human
ugcugccaagcccgugcuccug

SEQ ID NO: 870769 - RNA, 22 nt, Human
ucuuuuguacucaguauugaca

SEQ ID NO: 870770 - RNA, 22 nt, Human
ugggcugcuguuacaggggcug

SEQ ID NO: 870771 - RNA, 22 nt, Human
uuauuuccucucuaauagggua

SEQ ID NO: 870772 - RNA, 22 nt, Human
agcagcaggaggccauugucuu

SEQ ID NO: 870773 - RNA, 22 nt, Human
ugaaauaauaucuggaucaauc

SEQ ID NO: 870774 - RNA, 22 nt, Human
gggugaggagcugccagucaug

SEQ ID NO: 870775 - RNA, 22 nt, Human
uacauucagaagaauggacacg

SEQ ID NO: 870776 - RNA, 23 nt, Human
gacagguaaggguugggagaauc

SEQ ID NO: 870777 - RNA, 22 nt, Human
cuacagcagagcuacacuaacu

SEQ ID NO: 870778 - RNA, 22 nt, Human
agcuucuccugguacagaacug

SEQ ID NO: 870779 - RNA, 19 nt, Human
gcucagagucccccugcgg

SEQ ID NO: 870780 - RNA, 17 nt, Human
ggccuuggggccucagu

SEQ ID NO: 870781 - RNA, 22 nt, Human
aggugccagcucucaggcagga

SEQ ID NO: 870782 - RNA, 22 nt, Human
gcauuagagcccaucaccugua

SEQ ID NO: 870783 - RNA, 22 nt, Human
gcccaggagguugggcugugca

SEQ ID NO: 870784 - RNA, 22 nt, Human
gggcagcucagccaccaugcag

SEQ ID NO: 870785 - RNA, 22 nt, Human
aaagccauuacaaaauuucaua

SEQ ID NO: 870786 - RNA, 22 nt, Human
ugacuugucucuuugggagaca

SEQ ID NO: 870787 - RNA, 22 nt, Human
uggagcugaggggaaugcugag

SEQ ID NO: 870788 - RNA, 22 nt, Human
uagcaaggcguggcacucaaau

SEQ ID NO: 870789 - RNA, 22 nt, Human
ucauuuauaaggaugcaauuaa

SEQ ID NO: 870790 - RNA, 22 nt, Human
ccugucauacuaacguaguggg

SEQ ID NO: 870791 - RNA, 22 nt, Human
caggagauguaagacuucuguu

SEQ ID NO: 870792 - RNA, 22 nt, Human
ccuuugugcaucucugcuccua

SEQ ID NO: 870793 - RNA, 22 nt, Human
gcauccagagguagccacugug

SEQ ID NO: 870794 - RNA, 22 nt, Human
uccaguccuagaaacuggagag

SEQ ID NO: 870795 - RNA, 22 nt, Human
cugccuugaaaaugaagcuuua

SEQ ID NO: 870796 - RNA, 22 nt, Human
cuggcacauagucagcacucaa

SEQ ID NO: 870797 - RNA, 22 nt, Human
uuaauugauauaaagaacuuca

SEQ ID NO: 870798 - RNA, 22 nt, Human
accuguuuucagaaaaugcaga

SEQ ID NO: 870799 - RNA, 22 nt, Human
ucugaaagggcuaaauaauuug

SEQ ID NO: 870800 - RNA, 22 nt, Human
aggaaggaagagacaccauuug

SEQ ID NO: 870801 - RNA, 22 nt, Human
uagaacaucagguugaauuugg

SEQ ID NO: 870802 - RNA, 22 nt, Human
uuaguuuucucaucuaucucac

SEQ ID NO: 870803 - RNA, 20 nt, Human
ccacaagggaauauuguuga

SEQ ID NO: 870804 - RNA, 22 nt, Human
ggauggcuguaaaaggugggaa

SEQ ID NO: 870805 - RNA, 22 nt, Human
gcagcagccgacauggauugca

SEQ ID NO: 870806 - RNA, 22 nt, Human
gcagacaaagcagcaugccuau

SEQ ID NO: 870807 - RNA, 22 nt, Human
ggacaggcccucuggucagcuu

SEQ ID NO: 870808 - RNA, 20 nt, Human
aucuucuuggccagcuugcu

SEQ ID NO: 870809 - RNA, 22 nt, Human
uguaacaacauuugauuuuuag

SEQ ID NO: 870810 - RNA, 22 nt, Human
acuguucugccaagaucaacgu

SEQ ID NO: 870811 - RNA, 22 nt, Human
cauguguggucuguggcuaucu

SEQ ID NO: 870812 - RNA, 22 nt, Human
ggccgggcaggucucagccagc

SEQ ID NO: 870813 - RNA, 22 nt, Human
ugcugucuuuuucccuuccuaa

SEQ ID NO: 870814 - RNA, 22 nt, Human
cauucauacaaguuuguuucau

SEQ ID NO: 870815 - RNA, 22 nt, Human
ccuggcuucuauaccaccaggu

SEQ ID NO: 870816 - RNA, 19 nt, Human
uggcagaggacaaggacuu

SEQ ID NO: 870817 - RNA, 20 nt, Human
uacaaaccuccacacuggug

SEQ ID NO: 870818 - RNA, 22 nt, Human
aaaugcuucaccucauuaaacu

SEQ ID NO: 870819 - RNA, 22 nt, Human
ggugugauuaugacaugugacu

SEQ ID NO: 870820 - RNA, 22 nt, Human
ucucucuugucaccccaucugc

SEQ ID NO: 870821 - RNA, 22 nt, Human
gcagaagcugggcagcgaggug

SEQ ID NO: 870822 - RNA, 22 nt, Human
gaagccugguccagagcuccca

SEQ ID NO: 870823 - RNA, 22 nt, Human
ccacaggauccaagggaaggca

SEQ ID NO: 870824 - RNA, 22 nt, Human
aguuaacacauccagaauagag

SEQ ID NO: 870825 - RNA, 22 nt, Human
caaagcaccacaaaccagguga

SEQ ID NO: 870826 - RNA, 22 nt, Human
agcuugaaacguaccaacauug

SEQ ID NO: 870827 - RNA, 22 nt, Human
aaggccagcccuaaugaugcuc

SEQ ID NO: 870828 - RNA, 20 nt, Human
ccugccugccucggcucauu

SEQ ID NO: 870829 - RNA, 22 nt, Human
uuggaauuaaaaggagaacuuc

SEQ ID NO: 870830 - RNA, 23 nt, Human
uuuaugcagcauguagaacaugg

SEQ ID NO: 870831 - RNA, 22 nt, Human
aaacaauguagauuaccauuua

SEQ ID NO: 870832 - RNA, 22 nt, Human
ccuguucuguuaauuaaacuuu

SEQ ID NO: 870833 - RNA, 18 nt, Human
ccagagggugcgucagcu

SEQ ID NO: 870834 - RNA, 22 nt, Human
ggccucagggucacucuguaga

SEQ ID NO: 870835 - RNA, 22 nt, Human
auacaaaguauugauccugagu

SEQ ID NO: 870836 - RNA, 23 nt, Human
uguuauuccagguuaauguacuu

SEQ ID NO: 870837 - RNA, 22 nt, Human
uuagcuuuugagaaugauuucu

SEQ ID NO: 870838 - RNA, 22 nt, Human
aaagccagaguguguuagagac

SEQ ID NO: 870839 - RNA, 22 nt, Human
augggcaguguauuggaaggaa

SEQ ID NO: 870840 - RNA, 18 nt, Human
cuuagaacaucauuccuu

SEQ ID NO: 870841 - RNA, 22 nt, Human
uagaaacucucaaucugggaug

SEQ ID NO: 870842 - RNA, 22 nt, Human
uaccaguugauguuuuaaauag

SEQ ID NO: 870843 - RNA, 22 nt, Human
ugucccuggaacuauggcucca

SEQ ID NO: 870844 - RNA, 22 nt, Human
agcuuagaauguguuaggaaag

SEQ ID NO: 870845 - RNA, 22 nt, Human
uuuccuucuuagcgguguucuu

SEQ ID NO: 870846 - RNA, 22 nt, Human
gcaguggccacauggaggagga

SEQ ID NO: 870847 - RNA, 22 nt, Human
gcaggcugugaggcucagaugg

SEQ ID NO: 870848 - RNA, 22 nt, Human
gaggcuggacgugcauuucuac

SEQ ID NO: 870849 - RNA, 22 nt, Human
auauucaagugaggauggcuaa

SEQ ID NO: 870850 - RNA, 18 nt, Human
ccagguggugacagagau

SEQ ID NO: 870851 - RNA, 22 nt, Human
auggaagguccuacagagcgca

SEQ ID NO: 870852 - RNA, 22 nt, Human
ccagcuucggcaagcagacuuu

SEQ ID NO: 870853 - RNA, 22 nt, Human
uacaauguaauucugauuaugu

SEQ ID NO: 870854 - RNA, 18 nt, Human
ggcugugcguggaggcug

SEQ ID NO: 870855 - RNA, 22 nt, Human
cuauagaaaauuguaucacacg

SEQ ID NO: 870856 - RNA, 22 nt, Human
cacauucacauuuuucccucua

SEQ ID NO: 870857 - RNA, 22 nt, Human
agcacagugccugacauauaug

SEQ ID NO: 870858 - RNA, 22 nt, Human
aacauugagcugguggagagga

SEQ ID NO: 870859 - RNA, 22 nt, Human
uaagguuucuaguuucuaaacu

SEQ ID NO: 870860 - RNA, 22 nt, Human
ggcuucugaaaucucugugcgu

SEQ ID NO: 870861 - RNA, 22 nt, Human
cuguccagaauaggcaaaucca

SEQ ID NO: 870862 - RNA, 22 nt, Human
aagauguugcauuagaauaccu

SEQ ID NO: 870863 - RNA, 17 nt, Human
agauaagcuucagagcu

SEQ ID NO: 870864 - RNA, 22 nt, Human
uuacauuucccccuuggaggcu

SEQ ID NO: 870865 - RNA, 22 nt, Human
gccugcugagggaaguugggca

SEQ ID NO: 870866 - RNA, 22 nt, Human
aucuuuggaucgcucccccuuc

SEQ ID NO: 870867 - RNA, 22 nt, Human
aguccuggcauauagguccuca

SEQ ID NO: 870868 - RNA, 22 nt, Human
ccugggcagguguggcuucccc

SEQ ID NO: 870869 - RNA, 22 nt, Human
auguagcagauauuugugcaca

SEQ ID NO: 870870 - RNA, 22 nt, Human
ccuggugcaccaaguaagggug

SEQ ID NO: 870871 - RNA, 22 nt, Human
gaagcagcagcuggggacaguu

SEQ ID NO: 870872 - RNA, 22 nt, Human
cugcagaggccucgccuccucu

SEQ ID NO: 870873 - RNA, 22 nt, Human
guuucauggagagcugaauauu

SEQ ID NO: 870874 - RNA, 22 nt, Human
gcccugaagcugaggguguuaa

SEQ ID NO: 870875 - RNA, 22 nt, Human
gugcucacugugagacguccug

SEQ ID NO: 870876 - RNA, 22 nt, Human
uuacacaugcucacuuauuugu

SEQ ID NO: 870877 - RNA, 22 nt, Human
ccagugugguagguccacaggu

SEQ ID NO: 870878 - RNA, 22 nt, Human
agcagcaauaauaaaguaauac

SEQ ID NO: 870879 - RNA, 22 nt, Human
uuguaacaaagacacuccaaaa

SEQ ID NO: 870880 - RNA, 20 nt, Human
acccagcucugugcccuggg

SEQ ID NO: 870881 - RNA, 22 nt, Human
uaauauuucuacccugcugccu

SEQ ID NO: 870882 - RNA, 22 nt, Human
uugcuuccuugagcuggucuga

SEQ ID NO: 870883 - RNA, 22 nt, Human
aagaacauaacagaagcugugu

SEQ ID NO: 870884 - RNA, 22 nt, Human
aaguaaaccacagagaagccac

SEQ ID NO: 870885 - RNA, 22 nt, Human
ccuagucuuccgcguccccacc

SEQ ID NO: 870886 - RNA, 22 nt, Human
cuggagcuaggaaguccaagau

SEQ ID NO: 870887 - RNA, 22 nt, Human
cauaauuuuccaugguuugcua

SEQ ID NO: 870888 - RNA, 22 nt, Human
agauucaugggucuaaccagug

SEQ ID NO: 870889 - RNA, 22 nt, Human
agcaggaguguccccuggcugu

SEQ ID NO: 870890 - RNA, 22 nt, Human
uuaacacagggggagacaaagu

SEQ ID NO: 870891 - RNA, 22 nt, Human
aacauugccaugguuaauuuua

SEQ ID NO: 870892 - RNA, 22 nt, Human
uacaacaguucaugaaaugaaa

SEQ ID NO: 870893 - RNA, 20 nt, Human
ugcucaggauggagaggugu

SEQ ID NO: 870894 - RNA, 22 nt, Human
gcagauggacuguaugaccuga

SEQ ID NO: 870895 - RNA, 22 nt, Human
uguacaaggccaucuacaugcu

SEQ ID NO: 870896 - RNA, 22 nt, Human
acagggcaugugcaagagacau

SEQ ID NO: 870897 - RNA, 22 nt, Human
agagguauugcacgugcucucu

SEQ ID NO: 870898 - RNA, 22 nt, Human
aagucaggugagacucucuggg

SEQ ID NO: 870899 - RNA, 21 nt, Human
ccagggaagaaaugagggcag

SEQ ID NO: 870900 - RNA, 21 nt, Human
ugcuguagguuucguggcacu

SEQ ID NO: 870901 - RNA, 22 nt, Human
aaaauugaggcucauguuaaau

SEQ ID NO: 870902 - RNA, 22 nt, Human
auauguguguauuucuuacuag

SEQ ID NO: 870903 - RNA, 22 nt, Human
aaaguuugaaugauauauuagu

SEQ ID NO: 870904 - RNA, 22 nt, Human
ggucagugacuuuuuucugugg

SEQ ID NO: 870905 - RNA, 22 nt, Human
agcucccagggcugggcaaguu

SEQ ID NO: 870906 - RNA, 23 nt, Human
aggugccaacugagagcugagag

SEQ ID NO: 870907 - RNA, 22 nt, Human
agaggccccaugggauggcggu

SEQ ID NO: 870908 - RNA, 22 nt, Human
uuccuuuugcaagguccucuag

SEQ ID NO: 870909 - RNA, 22 nt, Human
ggccucugccucaucugggcac

SEQ ID NO: 870910 - RNA, 22 nt, Human
ccaggcugggcggggaaccugg

SEQ ID NO: 870911 - RNA, 20 nt, Human
auauaauaaauuuugguuac

SEQ ID NO: 870912 - RNA, 22 nt, Human
agcagcagggcucugcccgugc

SEQ ID NO: 870913 - RNA, 22 nt, Human
ggagggacccacucuagaggug

SEQ ID NO: 870914 - RNA, 22 nt, Human
uaaauguuaugcccaucaucca

SEQ ID NO: 870915 - RNA, 22 nt, Human
agcuggcuugcaugcuaaggag

SEQ ID NO: 870916 - RNA, 22 nt, Human
uuuaacagaugcuaugucuacc

SEQ ID NO: 870917 - RNA, 22 nt, Human
ucaggacagggaucacaucauc

SEQ ID NO: 870918 - RNA, 22 nt, Human
guuuucauuacugcugugauuu

SEQ ID NO: 870919 - RNA, 22 nt, Human
uuccaguuggcacugcaauuua

SEQ ID NO: 870920 - RNA, 22 nt, Human
uaagagcagagguugaauaaau

SEQ ID NO: 870921 - RNA, 22 nt, Human
gcccuggauguacaggcauguu

SEQ ID NO: 870922 - RNA, 22 nt, Human
uaccagggaacagggauauuaa

SEQ ID NO: 870923 - RNA, 22 nt, Human
cucauaaugugacuguauuuga

SEQ ID NO: 870924 - RNA, 22 nt, Human
ggcugugaacccuggcagugug

SEQ ID NO: 870925 - RNA, 22 nt, Human
ggcugcauaggcagaagcugug

SEQ ID NO: 870926 - RNA, 22 nt, Human
agccugugugaagcccucagag

SEQ ID NO: 870927 - RNA, 22 nt, Human
caggggcugugggcggagccuc

SEQ ID NO: 870928 - RNA, 22 nt, Human
gaggagguuccggguggagaag

SEQ ID NO: 870929 - RNA, 22 nt, Human
uguuauuucuuugccauaucuu

SEQ ID NO: 870930 - RNA, 22 nt, Human
uuccuuuucauaugccccgcgu

SEQ ID NO: 870931 - RNA, 22 nt, Human
ggcauggccuguaagacggaga

SEQ ID NO: 870932 - RNA, 22 nt, Human
ucucagagugguggucccucug

SEQ ID NO: 870933 - RNA, 21 nt, Human
ugaaacauuugaucaaagcac

SEQ ID NO: 870934 - RNA, 22 nt, Human
agaguggccuggccuggggcau

SEQ ID NO: 870935 - RNA, 22 nt, Human
cuagggagggauguuggcauga

SEQ ID NO: 870936 - RNA, 22 nt, Human
cagguuaguuaaucuuuguuuc

SEQ ID NO: 870937 - RNA, 22 nt, Human
ugggccacggggguggagagcu

SEQ ID NO: 870938 - RNA, 22 nt, Human
cagcugcacugaagcagguuug

SEQ ID NO: 870939 - RNA, 22 nt, Human
uuguacaaaugcauauuccugg

SEQ ID NO: 870940 - RNA, 22 nt, Human
guauuucuuuccauuauaguca

SEQ ID NO: 870941 - RNA, 22 nt, Human
caccacugcuuccugccaucug

SEQ ID NO: 870942 - RNA, 22 nt, Human
caggccuggcugcagcucgccu

SEQ ID NO: 870943 - RNA, 22 nt, Human
aggcuucaguauucaccgcaug

SEQ ID NO: 870944 - RNA, 22 nt, Human
gcuggccucuggagaagggcuu

SEQ ID NO: 870945 - RNA, 22 nt, Human
uuauuccauugucuuuugacuu

SEQ ID NO: 870946 - RNA, 22 nt, Human
guauguauauauguguacacac

SEQ ID NO: 870947 - RNA, 22 nt, Human
cugggccagauccagccucaca

SEQ ID NO: 870948 - RNA, 23 nt, Human
augcuagcugugccaacaccaua

SEQ ID NO: 870949 - RNA, 22 nt, Human
uccacagcauuauuagaaggau

SEQ ID NO: 870950 - RNA, 22 nt, Human
ugcucagggagcuuccuggugg

SEQ ID NO: 870951 - RNA, 22 nt, Human
uugauucugauccugucuggag

SEQ ID NO: 870952 - RNA, 22 nt, Human
gcccugagauucuuggauucug

SEQ ID NO: 870953 - RNA, 22 nt, Human
agguggggugagcugcagacua

SEQ ID NO: 870954 - RNA, 22 nt, Human
acaugaucccaccugccuauaa

SEQ ID NO: 870955 - RNA, 22 nt, Human
ggugcagggagaggcaggcccc

SEQ ID NO: 870956 - RNA, 22 nt, Human
uaggauuuacuuugacaauauu

SEQ ID NO: 870957 - RNA, 22 nt, Human
aggaacacaacuuccugagagc

SEQ ID NO: 870958 - RNA, 22 nt, Human
uucuaagcucugaaauaaaucu

SEQ ID NO: 870959 - RNA, 22 nt, Human
cugaagaggacgcagcagcaag

SEQ ID NO: 870960 - RNA, 22 nt, Human
acuuuggaggguguuguagaug

SEQ ID NO: 870961 - RNA, 22 nt, Human
ucaaacaugaaagcuugauuuu

SEQ ID NO: 870962 - RNA, 22 nt, Human
aagcaauugagugaaaccucuu

SEQ ID NO: 870963 - RNA, 22 nt, Human
uucuagcaugccuuuuagcaca

SEQ ID NO: 870964 - RNA, 22 nt, Human
cagguggaucucuaaggacuga

SEQ ID NO: 870965 - RNA, 22 nt, Human
aacuggcauaugaacuuguucu

SEQ ID NO: 870966 - RNA, 22 nt, Human
auaaaguggagguaguauucau

SEQ ID NO: 870967 - RNA, 22 nt, Human
caccgagugacaguagccauca

SEQ ID NO: 870968 - RNA, 21 nt, Human
aucuuuauuacgcagagaaga

SEQ ID NO: 870969 - RNA, 19 nt, Human
uacauuccacacaaucucu

SEQ ID NO: 870970 - RNA, 22 nt, Human
aaagaucaauagauaaagcuac

SEQ ID NO: 870971 - RNA, 22 nt, Human
aaacaauguugucuccaagagg

SEQ ID NO: 870972 - RNA, 17 nt, Human
uuucaacaucacucagc

SEQ ID NO: 870973 - RNA, 22 nt, Human
caucacugcuucuaaaauggug

SEQ ID NO: 870974 - RNA, 22 nt, Human
uguuauuuauuucaccuccaga

SEQ ID NO: 870975 - RNA, 22 nt, Human
uuucaguuacugcuauaucauu

SEQ ID NO: 870976 - RNA, 22 nt, Human
cuggcagcgugagcagcaucca

SEQ ID NO: 870977 - RNA, 22 nt, Human
cugugcaguggcagcguguggg

SEQ ID NO: 870978 - RNA, 22 nt, Human
uggcagcaguagccaccccagc

SEQ ID NO: 870979 - RNA, 22 nt, Human
aaggucuaaagcuacugaguug

SEQ ID NO: 870980 - RNA, 22 nt, Human
gggggaggugaaugcaauaagg

SEQ ID NO: 870981 - RNA, 21 nt, Human
agagaagaggacuuucucaca

SEQ ID NO: 870982 - RNA, 22 nt, Human
uggagguggcacaagggagguc

SEQ ID NO: 870983 - RNA, 22 nt, Human
uucuacacugaguuuuuucccu

SEQ ID NO: 870984 - RNA, 22 nt, Human
gagaaguuuaaucauuagacca

SEQ ID NO: 870985 - RNA, 22 nt, Human
cugugugcuguuagggagcugc

SEQ ID NO: 870986 - RNA, 22 nt, Human
ucguuuuagguggacauugugu

SEQ ID NO: 870987 - RNA, 22 nt, Human
aaaaucaguacacuuuauuuug

SEQ ID NO: 870988 - RNA, 22 nt, Human
aauguuuucccagugcagacga

SEQ ID NO: 870989 - RNA, 22 nt, Human
ucaggacagccagggugcagac

SEQ ID NO: 870990 - RNA, 22 nt, Human
uuucauauuguccagucagcgc

SEQ ID NO: 870991 - RNA, 17 nt, Human
ccugggaggaguuauga

SEQ ID NO: 870992 - RNA, 22 nt, Human
gagccagagcuacaagugucug

SEQ ID NO: 870993 - RNA, 22 nt, Human
ccaggccagcgcuggcuggagg

SEQ ID NO: 870994 - RNA, 22 nt, Human
gccuggcuuuugccucauguuc

SEQ ID NO: 870995 - RNA, 22 nt, Human
ggccucagaggaggugugaguc

SEQ ID NO: 870996 - RNA, 22 nt, Human
uauguucugacucuacauggga

SEQ ID NO: 870997 - RNA, 22 nt, Human
ugucauuuaauagauaugaugg

SEQ ID NO: 870998 - RNA, 22 nt, Human
cagugagggaagaucucagcac

SEQ ID NO: 870999 - RNA, 21 nt, Human
ucagucccuggguguguccca

SEQ ID NO: 871000 - RNA, 22 nt, Human
uaaacagccuaaaacuuucuuu

SEQ ID NO: 871001 - RNA, 22 nt, Human
aucuguguguucaggaaguccu

SEQ ID NO: 871002 - RNA, 22 nt, Human
caccacagcauccacuagaagg

SEQ ID NO: 871003 - RNA, 22 nt, Human
gggaaggcagugggaggaacug

SEQ ID NO: 871004 - RNA, 22 nt, Human
gacagcugcauccucagacaca

SEQ ID NO: 871005 - RNA, 22 nt, Human
cugcagugaggauucuuaggug

SEQ ID NO: 871006 - RNA, 22 nt, Human
uauacacaaacaagggguuaag

SEQ ID NO: 871007 - RNA, 22 nt, Human
acaacauuuccauuuccuuggu

SEQ ID NO: 871008 - RNA, 22 nt, Human
cugcagggaccacaagcagguu

SEQ ID NO: 871009 - RNA, 22 nt, Human
cagaugaagaucauagaauagu

SEQ ID NO: 871010 - RNA, 22 nt, Human
augcacaaguuauauguaugga

SEQ ID NO: 871011 - RNA, 22 nt, Human
gagagaaaagggggaauugauu

SEQ ID NO: 871012 - RNA, 22 nt, Human
gacaugcauuaagacacacuga

SEQ ID NO: 871013 - RNA, 22 nt, Human
auucacaguuacugcugaacca

SEQ ID NO: 871014 - RNA, 22 nt, Human
cuccuggggccauggaaggaac

SEQ ID NO: 871015 - RNA, 22 nt, Human
acuaggaacgggguuugcacuc

SEQ ID NO: 871016 - RNA, 22 nt, Human
ugggaguggggcauagaaggua

SEQ ID NO: 871017 - RNA, 22 nt, Human
cacagauagaccuuaugagauu

SEQ ID NO: 871018 - RNA, 22 nt, Human
uaaaugcuuagauucauagaaa

SEQ ID NO: 871019 - RNA, 22 nt, Human
aacaagagacucuguuccagaa

SEQ ID NO: 871020 - RNA, 22 nt, Human
gcuucaugaaaaucacugguca

SEQ ID NO: 871021 - RNA, 22 nt, Human
uaacuucacuggacucagcagc

SEQ ID NO: 871022 - RNA, 22 nt, Human
gucagaagcauuuguggcugaa

SEQ ID NO: 871023 - RNA, 22 nt, Human
agugucuggucucugaacuaaa

SEQ ID NO: 871024 - RNA, 22 nt, Human
cucaggucuuaguucugucauc

SEQ ID NO: 871025 - RNA, 22 nt, Human
agcuuguagaaggccacgagca

SEQ ID NO: 871026 - RNA, 22 nt, Human
cagagcugguguuacaagucca

SEQ ID NO: 871027 - RNA, 22 nt, Human
uaucuagagcagugguucucaa

SEQ ID NO: 871028 - RNA, 22 nt, Human
ccuacuuagcauauuuucucuu

SEQ ID NO: 871029 - RNA, 22 nt, Human
ucagaaguccaauuuucgcacc

SEQ ID NO: 871030 - RNA, 22 nt, Human
aguccugugcaaaugcaucuga

SEQ ID NO: 871031 - RNA, 22 nt, Human
gagggaugugccugaaggcagg

SEQ ID NO: 871032 - RNA, 22 nt, Human
cugcagccuccaccuuuugggu

SEQ ID NO: 871033 - RNA, 19 nt, Human
ccuagagggaaggcaggac

SEQ ID NO: 871034 - RNA, 22 nt, Human
ggaguggugucacugagaggaa

SEQ ID NO: 871035 - RNA, 22 nt, Human
aaucaauguuagucaugaauuu

SEQ ID NO: 871036 - RNA, 22 nt, Human
cagcugccacaccucuuucucu

SEQ ID NO: 871037 - RNA, 22 nt, Human
uuucuucuuaauacuggcugcu

SEQ ID NO: 871038 - RNA, 23 nt, Human
agcauguugugauguuaccacug

SEQ ID NO: 871039 - RNA, 19 nt, Human
aguguguacugaaagcacu

SEQ ID NO: 871040 - RNA, 17 nt, Human
gaaagguccuagaaauc

SEQ ID NO: 871041 - RNA, 22 nt, Human
ugaugaaaguguuuacucaccu

SEQ ID NO: 871042 - RNA, 22 nt, Human
aggcagugguguuugcuggugg

SEQ ID NO: 871043 - RNA, 22 nt, Human
ggccucagagaaggcugugcgg

SEQ ID NO: 871044 - RNA, 22 nt, Human
cuuggaauggggcagaaaaugg

SEQ ID NO: 871045 - RNA, 22 nt, Human
uuucaaaguggagaauuagaca

SEQ ID NO: 871046 - RNA, 22 nt, Human
auucacaaguucuagggauuag

SEQ ID NO: 871047 - RNA, 22 nt, Human
ucuugauuuugugaauaaguug

SEQ ID NO: 871048 - RNA, 22 nt, Human
ucuagaaacagguuucuagaaa

SEQ ID NO: 871049 - RNA, 22 nt, Human
gcugcuguggcagauuggauuc

SEQ ID NO: 871050 - RNA, 22 nt, Human
auuauuaaagcuacaucaagga

SEQ ID NO: 871051 - RNA, 22 nt, Human
ucucugaagagcucagacuagu

SEQ ID NO: 871052 - RNA, 22 nt, Human
cugggaggauucauugagguga

SEQ ID NO: 871053 - RNA, 22 nt, Human
uuccaaagcugcuuuauuuagu

SEQ ID NO: 871054 - RNA, 22 nt, Human
accaggcuugaugauuugcuua

SEQ ID NO: 871055 - RNA, 22 nt, Human
cccguuugccucuuuauuuacu

SEQ ID NO: 871056 - RNA, 22 nt, Human
ugaggguggccuuguguggacu

SEQ ID NO: 871057 - RNA, 23 nt, Human
agcacucaugcugcagaagucau

SEQ ID NO: 871058 - RNA, 22 nt, Human
accugggauggggccagguuua

SEQ ID NO: 871059 - RNA, 22 nt, Human
uuuuaguuguaguuggugagga

SEQ ID NO: 871060 - RNA, 22 nt, Human
aauuggcauagcauacaauuca

SEQ ID NO: 871061 - RNA, 22 nt, Human
ggcagcuucggacggcuuauaa

SEQ ID NO: 871062 - RNA, 22 nt, Human
uagaaagacagagguuuugucu

SEQ ID NO: 871063 - RNA, 22 nt, Human
uucaaacucugaguaguucugc

SEQ ID NO: 871064 - RNA, 17 nt, Human
uacagaaggcaccacaa

SEQ ID NO: 871065 - RNA, 22 nt, Human
augguuuguguggcccagauga

SEQ ID NO: 871066 - RNA, 22 nt, Human
agaggcccugggcuggugugcu

SEQ ID NO: 871067 - RNA, 22 nt, Human
agaaacuauccugaguagcaaa

SEQ ID NO: 871068 - RNA, 22 nt, Human
uccaggcuuuuucaugcugucu

SEQ ID NO: 871069 - RNA, 22 nt, Human
guauauauuggauaaaccagag

SEQ ID NO: 871070 - RNA, 22 nt, Human
uucuaagucugcugucuucauc

SEQ ID NO: 871071 - RNA, 22 nt, Human
aaaaagacagaggaugaggcag

SEQ ID NO: 871072 - RNA, 22 nt, Human
agcugccugggcuuguacaccu

SEQ ID NO: 871073 - RNA, 22 nt, Human
aguucaauagaaaaauauauua

SEQ ID NO: 871074 - RNA, 22 nt, Human
uucuugcaucaagacagccugu

SEQ ID NO: 871075 - RNA, 22 nt, Human
caguuaaaagguaugcuaccaa

SEQ ID NO: 871076 - RNA, 22 nt, Human
ccugagcuagggaaggaagacc

SEQ ID NO: 871077 - RNA, 22 nt, Human
cagcacaggccccucucuccca

SEQ ID NO: 871078 - RNA, 22 nt, Human
guggcagcucauguuguuuuaa

SEQ ID NO: 871079 - RNA, 22 nt, Human
aggugccacucucaugggcuac

SEQ ID NO: 871080 - RNA, 22 nt, Human
cuuagaacagugucugccagag

SEQ ID NO: 871081 - RNA, 22 nt, Human
gaggcucuucaauaggucaaug

SEQ ID NO: 871082 - RNA, 22 nt, Human
aacauugagcucuggaguggaa

SEQ ID NO: 871083 - RNA, 22 nt, Human
ugcaguguuccuguagccugcc

SEQ ID NO: 871084 - RNA, 22 nt, Human
uaaauuuuuguuaacagccucu

SEQ ID NO: 871085 - RNA, 22 nt, Human
uagcagcucacuaacucugcgu

SEQ ID NO: 871086 - RNA, 22 nt, Human
uuauauguaugcuuauaaacca

SEQ ID NO: 871087 - RNA, 22 nt, Human
ugucugugaccucuuuggagcc

SEQ ID NO: 871088 - RNA, 22 nt, Human
agggacaguauccaucucacag

SEQ ID NO: 871089 - RNA, 18 nt, Human
ucaguccuccauagagcu

SEQ ID NO: 871090 - RNA, 22 nt, Human
ugugugccagccuacgaggagc

SEQ ID NO: 871091 - RNA, 23 nt, Human
agaggccaacuucuugccccucc

SEQ ID NO: 871092 - RNA, 21 nt, Human
uucuggguuguuaaucugaac

SEQ ID NO: 871093 - RNA, 22 nt, Human
uugaaaacauuuauauuagaau

SEQ ID NO: 871094 - RNA, 22 nt, Human
augcauuuauguguguacauug

SEQ ID NO: 871095 - RNA, 22 nt, Human
ccaaggacuggacacacagguu

SEQ ID NO: 871096 - RNA, 22 nt, Human
gccuuaauuuaugucuaacaua

SEQ ID NO: 871097 - RNA, 22 nt, Human
aaagcaauaguaaugguaauag

SEQ ID NO: 871098 - RNA, 22 nt, Human
gucuccuggcugcagcuaagac

SEQ ID NO: 871099 - RNA, 22 nt, Human
caccaggcuggagugcagaggu

SEQ ID NO: 871100 - RNA, 22 nt, Human
uaaugcuucaauuuccuugauu

SEQ ID NO: 871101 - RNA, 22 nt, Human
ggaggaugccaagcugugcaca

SEQ ID NO: 871102 - RNA, 22 nt, Human
gucuuauuuucugucuacuaaa

SEQ ID NO: 871103 - RNA, 22 nt, Human
gucacaguaucauguuugaaug

SEQ ID NO: 871104 - RNA, 22 nt, Human
agugcaguaaaugggcauuaug

SEQ ID NO: 871105 - RNA, 22 nt, Human
gucccugcccuccugggacuca

SEQ ID NO: 871106 - RNA, 22 nt, Human
ucauaaugacaaacauacucag

SEQ ID NO: 871107 - RNA, 22 nt, Human
ggaggggaggauuaaugacaaa

SEQ ID NO: 871108 - RNA, 22 nt, Human
ugaagcagaggggucuugagcu

SEQ ID NO: 871109 - RNA, 22 nt, Human
aauguucaacagauggauauuu

SEQ ID NO: 871110 - RNA, 22 nt, Human
agaaguuuggaugccaucauag

SEQ ID NO: 871111 - RNA, 19 nt, Human
gucaucuuuuaauaaugug

SEQ ID NO: 871112 - RNA, 22 nt, Human
gaugaaauagaauuaauuuagg

SEQ ID NO: 871113 - RNA, 22 nt, Human
ggaggaguguggggcacucugc

SEQ ID NO: 871114 - RNA, 22 nt, Human
acagcuuccaguauucuugaaa

SEQ ID NO: 871115 - RNA, 22 nt, Human
gggacaggcugagacuugagcu

SEQ ID NO: 871116 - RNA, 22 nt, Human
gugcaggauguugggaaucagg

SEQ ID NO: 871117 - RNA, 22 nt, Human
ggaggaccauccugguuucacc

SEQ ID NO: 871118 - RNA, 22 nt, Human
ugcuggaguucgacauugcaaa

SEQ ID NO: 871119 - RNA, 22 nt, Human
uggcaguucuaauugaccauuu

SEQ ID NO: 871120 - RNA, 22 nt, Human
ucucuuucuauugcaccaugcu

SEQ ID NO: 871121 - RNA, 22 nt, Human
ccuggcccagggacuuucgccu

SEQ ID NO: 871122 - RNA, 22 nt, Human
agggcagugggaaagccugcuc

SEQ ID NO: 871123 - RNA, 22 nt, Human
aggcagguuucccggcugucaa

SEQ ID NO: 871124 - RNA, 22 nt, Human
aaaucucacuggcaggcaggca

SEQ ID NO: 871125 - RNA, 22 nt, Human
agcagcugcagagggcuccccc

SEQ ID NO: 871126 - RNA, 22 nt, Human
aguuuaacuuuguaaacgugag

SEQ ID NO: 871127 - RNA, 22 nt, Human
aguuuacacuaugaaaagacua

SEQ ID NO: 871128 - RNA, 22 nt, Human
ugcugucuuuucccaauccugg

SEQ ID NO: 871129 - RNA, 23 nt, Human
cauguacacacagcuguacagug

SEQ ID NO: 871130 - RNA, 22 nt, Human
cuccuggggcacuuagaagcaa

SEQ ID NO: 871131 - RNA, 22 nt, Human
gaguccagugauguuccugguc

SEQ ID NO: 871132 - RNA, 20 nt, Human
gugcccaguuggugacagac

SEQ ID NO: 871133 - RNA, 22 nt, Human
aaugcuuuaaauccuaguguaa

SEQ ID NO: 871134 - RNA, 22 nt, Human
uaacugaauguauuacaacaga

SEQ ID NO: 871135 - RNA, 22 nt, Human
cucuccuacauuucauucacaa

SEQ ID NO: 871136 - RNA, 22 nt, Human
uaauguuaguauguaaucuuau

SEQ ID NO: 871137 - RNA, 22 nt, Human
ugucccagcacuuugggagucu

SEQ ID NO: 871138 - RNA, 22 nt, Human
aaggccacgucuccuuccagag

SEQ ID NO: 871139 - RNA, 22 nt, Human
cugcacguauaaucagucuguu

SEQ ID NO: 871140 - RNA, 22 nt, Human
agguuguuuugccucauuaucc

SEQ ID NO: 871141 - RNA, 23 nt, Human
cagugcagggcaacucagacucc

SEQ ID NO: 871142 - RNA, 22 nt, Human
acagacuguuggccuacugagc

SEQ ID NO: 871143 - RNA, 22 nt, Human
acauaggccaauauccagagcu

SEQ ID NO: 871144 - RNA, 22 nt, Human
guguguggacgucugagcccag

SEQ ID NO: 871145 - RNA, 22 nt, Human
ggccagcuucucugcugccugu

SEQ ID NO: 871146 - RNA, 22 nt, Human
guugcacaguuccucaagcagg

SEQ ID NO: 871147 - RNA, 22 nt, Human
uuucuauagcuuucuugggagu

SEQ ID NO: 871148 - RNA, 22 nt, Human
acuuugccccaggucucaugac

SEQ ID NO: 871149 - RNA, 22 nt, Human
agaguggcucugcugggcacag

SEQ ID NO: 871150 - RNA, 22 nt, Human
cugagcugugugguccugggca

SEQ ID NO: 871151 - RNA, 21 nt, Human
agugucauuugaucauuguua

SEQ ID NO: 871152 - RNA, 22 nt, Human
ggccaaauccuccaugguggcu

SEQ ID NO: 871153 - RNA, 22 nt, Human
acagcugcucuauaucucagcc

SEQ ID NO: 871154 - RNA, 22 nt, Human
cccugcucuucugacucaagcu

SEQ ID NO: 871155 - RNA, 22 nt, Human
gagaugaauguaaacaaaggca

SEQ ID NO: 871156 - RNA, 22 nt, Human
ugcuauuauugucaccacugua

SEQ ID NO: 871157 - RNA, 22 nt, Human
cuagaaaucucuguuuacauca

SEQ ID NO: 871158 - RNA, 22 nt, Human
cagcuucuccagaugacccuca

SEQ ID NO: 871159 - RNA, 22 nt, Human
cugagcugguguuucaggguca

SEQ ID NO: 871160 - RNA, 22 nt, Human
agcagcaggcuuaaggaaaagu

SEQ ID NO: 871161 - RNA, 22 nt, Human
cccaggcagggacgugcucugg

SEQ ID NO: 871162 - RNA, 22 nt, Human
caggcugggacugaccccugcu

SEQ ID NO: 871163 - RNA, 22 nt, Human
ucagggagagugacccauccac

SEQ ID NO: 871164 - RNA, 22 nt, Human
acugauggcccaccuuggucuc

SEQ ID NO: 871165 - RNA, 22 nt, Human
gcugucagaaggugaaggguaa

SEQ ID NO: 871166 - RNA, 22 nt, Human
aaucuucaaaaacaauugaggg

SEQ ID NO: 871167 - RNA, 22 nt, Human
caggaggcagagguugcagcga

SEQ ID NO: 871168 - RNA, 19 nt, Human
uaccagccuccugccugau

SEQ ID NO: 871169 - RNA, 23 nt, Human
uggccagcagaagcaaggggagc

SEQ ID NO: 871170 - RNA, 22 nt, Human
caggugccgggaaugcagcaau

SEQ ID NO: 871171 - RNA, 22 nt, Human
caggauggucucgaucuccuga

SEQ ID NO: 871172 - RNA, 22 nt, Human
acaaguauuggugaggauguag

SEQ ID NO: 871173 - RNA, 22 nt, Human
ucuagcaagcucgugcucaagg

SEQ ID NO: 871174 - RNA, 22 nt, Human
gggggugguucuaaguccuaua

SEQ ID NO: 871175 - RNA, 22 nt, Human
gagacacacauucuggagagaa

SEQ ID NO: 871176 - RNA, 22 nt, Human
gauuaggagggagaggcaagua

SEQ ID NO: 871177 - RNA, 22 nt, Human
ugggaaagacucaggacaggag

SEQ ID NO: 871178 - RNA, 22 nt, Human
aaagcagcggugucuuuacugc

SEQ ID NO: 871179 - RNA, 22 nt, Human
uucuaaagccuguccuaucaga

SEQ ID NO: 871180 - RNA, 22 nt, Human
agccaaggacucagugguaggc

SEQ ID NO: 871181 - RNA, 22 nt, Human
cuguauguuggguaagcauugc

SEQ ID NO: 871182 - RNA, 22 nt, Human
caggcccugggcaggcacagag

SEQ ID NO: 871183 - RNA, 22 nt, Human
ucagcuggugaauggacucauc

SEQ ID NO: 871184 - RNA, 22 nt, Human
augcaucaggcacuaggaauag

SEQ ID NO: 871185 - RNA, 22 nt, Human
gugaggugacuagcaggugggg

SEQ ID NO: 871186 - RNA, 22 nt, Human
aauauuuguuaguguuuuaaug

SEQ ID NO: 871187 - RNA, 22 nt, Human
aaacugggauucuucacaaggu

SEQ ID NO: 871188 - RNA, 22 nt, Human
aaauccagcuacggggcaacau

SEQ ID NO: 871189 - RNA, 22 nt, Human
acacaaagcuauugagugucau

SEQ ID NO: 871190 - RNA, 22 nt, Human
agaggcaccgucugcagcgugc

SEQ ID NO: 871191 - RNA, 22 nt, Human
ggggcggggcucugagaagcau

SEQ ID NO: 871192 - RNA, 22 nt, Human
uaauaccuacuggucauugcaa

SEQ ID NO: 871193 - RNA, 22 nt, Human
ucauucaagauuucaauagauu

SEQ ID NO: 871194 - RNA, 22 nt, Human
aggcucugaaggagaaccuguu

SEQ ID NO: 871195 - RNA, 22 nt, Human
cuucuagagcuggagcaaaugu

SEQ ID NO: 871196 - RNA, 22 nt, Human
agaaaccuccauuuauucacuc

SEQ ID NO: 871197 - RNA, 22 nt, Human
uuagugugcauggaucugugga

SEQ ID NO: 871198 - RNA, 22 nt, Human
cuccaggccaagauuaaguaau

SEQ ID NO: 871199 - RNA, 22 nt, Human
gccagccagagaggcaugguua

SEQ ID NO: 871200 - RNA, 22 nt, Human
ugcagaggcuggcucgccgggu

SEQ ID NO: 871201 - RNA, 21 nt, Human
caaauagacauggcuagagga

SEQ ID NO: 871202 - RNA, 21 nt, Human
ucaaaucauguacugaccaca

SEQ ID NO: 871203 - RNA, 22 nt, Human
gcagagccccucaagccagccu

SEQ ID NO: 871204 - RNA, 22 nt, Human
gcaggaguguauuugcauguaa

SEQ ID NO: 871205 - RNA, 22 nt, Human
aaauguacacuuugcaucuuga

SEQ ID NO: 871206 - RNA, 22 nt, Human
uuguugcauuucaaguaugaga

SEQ ID NO: 871207 - RNA, 22 nt, Human
guucaugugacuacuaugaccu

SEQ ID NO: 871208 - RNA, 22 nt, Human
auuuaauuuggagagagaaacc

SEQ ID NO: 871209 - RNA, 22 nt, Human
agguccaguuuucugacaaggg

SEQ ID NO: 871210 - RNA, 22 nt, Human
cugggcccacaaguggaaucgu

SEQ ID NO: 871211 - RNA, 22 nt, Human
gacaggccaggggcugaggugg

SEQ ID NO: 871212 - RNA, 22 nt, Human
agguaaggcuguaagcuaagcc

SEQ ID NO: 871213 - RNA, 22 nt, Human
uguguguguuucugcucauaca

SEQ ID NO: 871214 - RNA, 22 nt, Human
cugcaucaguggauaugauggu

SEQ ID NO: 871215 - RNA, 22 nt, Human
gcucccagcaauugaggcagcc

SEQ ID NO: 871216 - RNA, 21 nt, Human
aauaaaacaguuggugucaau

SEQ ID NO: 871217 - RNA, 22 nt, Human
ucauuauuugcuuuaguuaugu

SEQ ID NO: 871218 - RNA, 22 nt, Human
ggcuggagugggcuccagaguu

SEQ ID NO: 871219 - RNA, 22 nt, Human
ggaaagaauagagacuuuauca

SEQ ID NO: 871220 - RNA, 22 nt, Human
agaggcugaaugaugucaucau

SEQ ID NO: 871221 - RNA, 23 nt, Human
ucugcuucuguauuuuuucccau

SEQ ID NO: 871222 - RNA, 22 nt, Human
aagagauuaaaguaacuugccu

SEQ ID NO: 871223 - RNA, 23 nt, Human
accaggaguugucucaggaaaca

SEQ ID NO: 871224 - RNA, 22 nt, Human
uucuuacagaguuuacagagcc

SEQ ID NO: 871225 - RNA, 22 nt, Human
agcaggaaggucugugugaguc

SEQ ID NO: 871226 - RNA, 22 nt, Human
gcccagggugaagugcaguugu

SEQ ID NO: 871227 - RNA, 22 nt, Human
gauggccuggguccccuuccgg

SEQ ID NO: 871228 - RNA, 22 nt, Human
gagagagaaaaugacuccggac

SEQ ID NO: 871229 - RNA, 20 nt, Human
cuccagccccugcccugguc

SEQ ID NO: 871230 - RNA, 22 nt, Human
uuuagguuaaucaacaaacauu

SEQ ID NO: 871231 - RNA, 22 nt, Human
cuaagucauggaaagugugugu

SEQ ID NO: 871232 - RNA, 23 nt, Human
cuccuugguaugccaugcccagc

SEQ ID NO: 871233 - RNA, 21 nt, Human
ucaggaagagccaguucaugc

SEQ ID NO: 871234 - RNA, 22 nt, Human
uggcuggaggaaggaacugagg

SEQ ID NO: 871235 - RNA, 22 nt, Human
caguucucuuuccacuggaggc

SEQ ID NO: 871236 - RNA, 21 nt, Human
ggcagcacuaccugaagcaua

SEQ ID NO: 871237 - RNA, 22 nt, Human
auacaacuuuacaugcaauucc

SEQ ID NO: 871238 - RNA, 22 nt, Human
acuguaaagguuuguagcccag

SEQ ID NO: 871239 - RNA, 20 nt, Human
agagugagacuccaucucag

SEQ ID NO: 871240 - RNA, 18 nt, Human
cauuaugugguuauagaa

SEQ ID NO: 871241 - RNA, 22 nt, Human
uuugacagugacgccuguauga

SEQ ID NO: 871242 - RNA, 23 nt, Human
uagagcagggaaaucugucagag

SEQ ID NO: 871243 - RNA, 20 nt, Human
ugcucuggggguggagagac

SEQ ID NO: 871244 - RNA, 22 nt, Human
cugcgugucuccuuggggcaga

SEQ ID NO: 871245 - RNA, 22 nt, Human
aaucagcaguuggaauuagaua

SEQ ID NO: 871246 - RNA, 22 nt, Human
gaccccaacccuagagucugac

SEQ ID NO: 871247 - RNA, 22 nt, Human
agagcagauggccagggggccu

SEQ ID NO: 871248 - RNA, 22 nt, Human
cagguuccaguugcagggacuu

SEQ ID NO: 871249 - RNA, 22 nt, Human
cucugccaggcagaacggcuuu

SEQ ID NO: 871250 - RNA, 22 nt, Human
caggaacaggggagugaaccug

SEQ ID NO: 871251 - RNA, 23 nt, Human
cagaaaguuugagaagauacauc

SEQ ID NO: 871252 - RNA, 22 nt, Human
aacaguaagagauguuuuaucu

SEQ ID NO: 871253 - RNA, 22 nt, Human
gagcagcugagcuggaaugaga

SEQ ID NO: 871254 - RNA, 22 nt, Human
agcccuguucuguuuuaguagc

SEQ ID NO: 871255 - RNA, 22 nt, Human
uggcacaggagcacugcccugg

SEQ ID NO: 871256 - RNA, 22 nt, Human
uccaggagucagacagauggug

SEQ ID NO: 871257 - RNA, 22 nt, Human
aauucuauguucuugaguaaga

SEQ ID NO: 871258 - RNA, 17 nt, Human
aggccucccuccaggcc

SEQ ID NO: 871259 - RNA, 22 nt, Human
cugggcgcguccccugaggcgg

SEQ ID NO: 871260 - RNA, 22 nt, Human
aaagcagcaaguauuuguuacu

SEQ ID NO: 871261 - RNA, 22 nt, Human
uucaaugugguuauaauaacua

SEQ ID NO: 871262 - RNA, 22 nt, Human
agcaggaaggcuuuggggguuc

SEQ ID NO: 871263 - RNA, 22 nt, Human
acauuuugaaagggaaauuguu

SEQ ID NO: 871264 - RNA, 22 nt, Human
gcacaaagguggaaggaggaag

SEQ ID NO: 871265 - RNA, 22 nt, Human
cauguuaaauugaguuugcaau

SEQ ID NO: 871266 - RNA, 22 nt, Human
uugcuggggugugaaaucugau

SEQ ID NO: 871267 - RNA, 22 nt, Human
gacagcaguccuggaguuccca

SEQ ID NO: 871268 - RNA, 22 nt, Human
agcugcaggagucgccuaggau

SEQ ID NO: 871269 - RNA, 22 nt, Human
gugaagcaguugcguggguucc

SEQ ID NO: 871270 - RNA, 22 nt, Human
agguacauuugauaaaaauagc

SEQ ID NO: 871271 - RNA, 22 nt, Human
aagggggcgaagacgugauuga

SEQ ID NO: 871272 - RNA, 20 nt, Human
aauguucaguaauuguuuua

SEQ ID NO: 871273 - RNA, 22 nt, Human
agggcuccugaggcccuucugg

SEQ ID NO: 871274 - RNA, 22 nt, Human
guacccagaggcaugaucccag

SEQ ID NO: 871275 - RNA, 22 nt, Human
uuguucauccaacacaagguug

SEQ ID NO: 871276 - RNA, 22 nt, Human
auugaagagaagcuaaauagag

SEQ ID NO: 871277 - RNA, 22 nt, Human
agaaggcagguuuuaaaauguc

SEQ ID NO: 871278 - RNA, 22 nt, Human
uggaggcugguuucugcugagg

SEQ ID NO: 871279 - RNA, 22 nt, Human
ucagaagucccuugcaucuuag

SEQ ID NO: 871280 - RNA, 22 nt, Human
auguaaaucaagcagugcuggu

SEQ ID NO: 871281 - RNA, 22 nt, Human
aauuuucugaugaugaagcacg

SEQ ID NO: 871282 - RNA, 22 nt, Human
uuuaauuuucugggcccagcag

SEQ ID NO: 871283 - RNA, 22 nt, Human
ccuggcagaauauuaaagugca

SEQ ID NO: 871284 - RNA, 20 nt, Human
ggcauccuuuuggucacagc

SEQ ID NO: 871285 - RNA, 22 nt, Human
augucuucuguggagacaggua

SEQ ID NO: 871286 - RNA, 22 nt, Human
agccaugucacauauggucauc

SEQ ID NO: 871287 - RNA, 22 nt, Human
aaaggcucaacagcuguacuuu

SEQ ID NO: 871288 - RNA, 22 nt, Human
uaauuccuagaaauuauucuca

SEQ ID NO: 871289 - RNA, 22 nt, Human
uaacacaugguucugucaggaa

SEQ ID NO: 871290 - RNA, 22 nt, Human
aguuuuauggcucaaccuaaua

SEQ ID NO: 871291 - RNA, 22 nt, Human
ugcaaauauugggacagucuag

SEQ ID NO: 871292 - RNA, 22 nt, Human
ggacagagagugaauaugacau

SEQ ID NO: 871293 - RNA, 22 nt, Human
uacagcagacugaagguugugu

SEQ ID NO: 871294 - RNA, 22 nt, Human
uaaggcuuuccuugucaucuuu

SEQ ID NO: 871295 - RNA, 22 nt, Human
uuuaauaucucacacuuccaug

SEQ ID NO: 871296 - RNA, 22 nt, Human
uuuguucugaaaacucaagucc

SEQ ID NO: 871297 - RNA, 22 nt, Human
cccuuagaggcuggaggcagca

SEQ ID NO: 871298 - RNA, 22 nt, Human
aggcagagcugauguucuguga

SEQ ID NO: 871299 - RNA, 22 nt, Human
ggucagugcugccagagugacc

SEQ ID NO: 871300 - RNA, 22 nt, Human
gagcugccuguugcauagcaac

SEQ ID NO: 871301 - RNA, 22 nt, Human
uucucugggacaggaacaguuu

SEQ ID NO: 871302 - RNA, 20 nt, Human
acaugcuugagaggaugcag

SEQ ID NO: 871303 - RNA, 22 nt, Human
ccacagaggacaacugccuggc

SEQ ID NO: 871304 - RNA, 22 nt, Human
gccagcagcugugggguggcca

SEQ ID NO: 871305 - RNA, 22 nt, Human
acacaugauaagaaaguuuaaa

SEQ ID NO: 871306 - RNA, 22 nt, Human
guauuuuacugcucaaagcucu

SEQ ID NO: 871307 - RNA, 22 nt, Human
guggaaggaauuaacagacuag

SEQ ID NO: 871308 - RNA, 22 nt, Human
uuacgaauguuagauugcaucu

SEQ ID NO: 871309 - RNA, 22 nt, Human
agcugccucagucacucauggc

SEQ ID NO: 871310 - RNA, 22 nt, Human
gaaggcaagugagccaagagaa

SEQ ID NO: 871311 - RNA, 22 nt, Human
agugugucaguugaaagagauu

SEQ ID NO: 871312 - RNA, 22 nt, Human
acagcuguggggacucuugccc

SEQ ID NO: 871313 - RNA, 22 nt, Human
aucagugccccauggcuaaugc

SEQ ID NO: 871314 - RNA, 22 nt, Human
gcaggcuugggacgagcuggag

SEQ ID NO: 871315 - RNA, 22 nt, Human
ggguuacugcuucaaaaaauua

SEQ ID NO: 871316 - RNA, 21 nt, Human
aucagaguacgcaugcgcuga

SEQ ID NO: 871317 - RNA, 22 nt, Human
aacuguuuauguaaguaugcag

SEQ ID NO: 871318 - RNA, 22 nt, Human
ucuauguuagagauacauccua

SEQ ID NO: 871319 - RNA, 22 nt, Human
ggugucaggaaaaucucagugu

SEQ ID NO: 871320 - RNA, 22 nt, Human
agucaggggaucuagacuugaa

SEQ ID NO: 871321 - RNA, 18 nt, Human
ggcuguggacaagauuag

SEQ ID NO: 871322 - RNA, 22 nt, Human
cccagccugugacagccguccu

SEQ ID NO: 871323 - RNA, 22 nt, Human
gccugcuggaucaagcuuaugc

SEQ ID NO: 871324 - RNA, 22 nt, Human
uuaacacaucccugcucuaccc

SEQ ID NO: 871325 - RNA, 22 nt, Human
uuccagggaagagcaaggcagu

SEQ ID NO: 871326 - RNA, 22 nt, Human
caggcuuccgccagguuuccag

SEQ ID NO: 871327 - RNA, 22 nt, Human
caguggauccucugacucccuc

SEQ ID NO: 871328 - RNA, 19 nt, Human
ggcagucacggucaggagc

SEQ ID NO: 871329 - RNA, 22 nt, Human
aggauaauuggcauuuguaggc

SEQ ID NO: 871330 - RNA, 21 nt, Human
cccucaggaaacagaaugcac

SEQ ID NO: 871331 - RNA, 22 nt, Human
uucuucuuaauguccugggaac

SEQ ID NO: 871332 - RNA, 22 nt, Human
gugggcagauacauuugauaug

SEQ ID NO: 871333 - RNA, 22 nt, Human
aguuuggaguguggucuuugag

SEQ ID NO: 871334 - RNA, 22 nt, Human
uugucugagagauggcagaggu

SEQ ID NO: 871335 - RNA, 22 nt, Human
gcacacacaugugaguacaugc

SEQ ID NO: 871336 - RNA, 22 nt, Human
gugguccugccagccaggucca

SEQ ID NO: 871337 - RNA, 22 nt, Human
ggcuccuguagaucucuaaagc

SEQ ID NO: 871338 - RNA, 22 nt, Human
auuacaugagagaauguaaaua

SEQ ID NO: 871339 - RNA, 22 nt, Human
ugaaaaggguagaucccuaagu

SEQ ID NO: 871340 - RNA, 22 nt, Human
ggggaagaaugcucucuagaga

SEQ ID NO: 871341 - RNA, 22 nt, Human
acauguuuaaguuuaaugaaaa

SEQ ID NO: 871342 - RNA, 20 nt, Human
uaacaguaagugauguuaca

SEQ ID NO: 871343 - RNA, 21 nt, Human
uacacaaagcgugguccagag

SEQ ID NO: 871344 - RNA, 19 nt, Human
cuuggugcuugcccuuggc

SEQ ID NO: 871345 - RNA, 20 nt, Human
ccuugccaguagggcuggga

SEQ ID NO: 871346 - RNA, 22 nt, Human
caggaaggaccguccagaucag

SEQ ID NO: 871347 - RNA, 22 nt, Human
auucuuaauuccaaagacugag

SEQ ID NO: 871348 - RNA, 23 nt, Human
aaaugacuaaauguucuuauaga

SEQ ID NO: 871349 - RNA, 22 nt, Human
ugaggaaacugaggcacagaug

SEQ ID NO: 871350 - RNA, 22 nt, Human
uaaacaagcuggacugauaagu

SEQ ID NO: 871351 - RNA, 22 nt, Human
agaaacauccugcuuuccauuu

SEQ ID NO: 871352 - RNA, 22 nt, Human
cuggugugauugagcccaggug

SEQ ID NO: 871353 - RNA, 22 nt, Human
cccagugucaccaacaggacac

SEQ ID NO: 871354 - RNA, 22 nt, Human
cacccugcuacaaagccuccug

SEQ ID NO: 871355 - RNA, 22 nt, Human
caggcaggagacauuugguugg

SEQ ID NO: 871356 - RNA, 22 nt, Human
guucuauguugagauagcuaau

SEQ ID NO: 871357 - RNA, 22 nt, Human
gugugagugaaaguaguuugau

SEQ ID NO: 871358 - RNA, 22 nt, Human
ucaaacagaaauuguucaugcu

SEQ ID NO: 871359 - RNA, 22 nt, Human
ugaggggcagagagguguccag

SEQ ID NO: 871360 - RNA, 22 nt, Human
aauagauacuacuuagauguag

SEQ ID NO: 871361 - RNA, 22 nt, Human
cccagcuaccucugcuaggaga

SEQ ID NO: 871362 - RNA, 22 nt, Human
gaggcucaaaccuggacagagc

SEQ ID NO: 871363 - RNA, 22 nt, Human
uaggugucugcucuuauuuaac

SEQ ID NO: 871364 - RNA, 22 nt, Human
uaucacaauuccuauaguuugu

SEQ ID NO: 871365 - RNA, 22 nt, Human
uccuuaggcaauuugggagagu

SEQ ID NO: 871366 - RNA, 22 nt, Human
ccacgagggaaccagguggggu

SEQ ID NO: 871367 - RNA, 22 nt, Human
uaggccacagagaggagauuuc

SEQ ID NO: 871368 - RNA, 22 nt, Human
uccuuuccagccucaccucagc

SEQ ID NO: 871369 - RNA, 22 nt, Human
agcuccuggaggugcgcacucg

SEQ ID NO: 871370 - RNA, 22 nt, Human
cuaguuuaaagcagcugaaagg

SEQ ID NO: 871371 - RNA, 22 nt, Human
ugugugcaauucuuaacauaca

SEQ ID NO: 871372 - RNA, 22 nt, Human
cacuauuuccuggauuuugacg

SEQ ID NO: 871373 - RNA, 20 nt, Human
accaggagauggaggcaggg

SEQ ID NO: 871374 - RNA, 22 nt, Human
gggaguguugagcgcccugcca

SEQ ID NO: 871375 - RNA, 22 nt, Human
ggacaugauuagcagggagagc

SEQ ID NO: 871376 - RNA, 22 nt, Human
guccuugguaugaccaagguuu

SEQ ID NO: 871377 - RNA, 23 nt, Human
aaacaagcccuaaugaagagucc

SEQ ID NO: 871378 - RNA, 19 nt, Human
agacucugccacucuucuc

SEQ ID NO: 871379 - RNA, 22 nt, Human
gcagggcaugggcccugucugc

SEQ ID NO: 871380 - RNA, 22 nt, Human
ugucuuggaugaggauuaacag

SEQ ID NO: 871381 - RNA, 22 nt, Human
ggaaaaacagucuuuauuauuu

SEQ ID NO: 871382 - RNA, 22 nt, Human
aaaguguugauaugugacaucc

SEQ ID NO: 871383 - RNA, 22 nt, Human
ugucagcaguuuuuaguggagg

SEQ ID NO: 871384 - RNA, 22 nt, Human
auguguaugucuuauucaaaga

SEQ ID NO: 871385 - RNA, 22 nt, Human
auugagaauccauuugagauga

SEQ ID NO: 871386 - RNA, 22 nt, Human
guaagaggaucaaggcggugca

SEQ ID NO: 871387 - RNA, 22 nt, Human
ucucucuccuaguuuuuagugg

SEQ ID NO: 871388 - RNA, 21 nt, Human
cacaugugaauuacugaacug

SEQ ID NO: 871389 - RNA, 22 nt, Human
ggcucuggugggaagguuagau

SEQ ID NO: 871390 - RNA, 22 nt, Human
accaggaggcuacacuguccca

SEQ ID NO: 871391 - RNA, 22 nt, Human
acuguguggaccacucugaggc

SEQ ID NO: 871392 - RNA, 22 nt, Human
gacagaagaggaacuuggacag

SEQ ID NO: 871393 - RNA, 22 nt, Human
aggcuucaguuguaccuucuug

SEQ ID NO: 871394 - RNA, 22 nt, Human
cagguggcuuauuagggucagu

SEQ ID NO: 871395 - RNA, 22 nt, Human
ccuguucuugucucauuggcua

SEQ ID NO: 871396 - RNA, 22 nt, Human
auaaaguagcuuucagugccaa

SEQ ID NO: 871397 - RNA, 22 nt, Human
gucugccugucuggaugacaga

SEQ ID NO: 871398 - RNA, 22 nt, Human
gaggccagaaugagucucuggg

SEQ ID NO: 871399 - RNA, 22 nt, Human
ccccuggggaucagcuggaauu

SEQ ID NO: 871400 - RNA, 22 nt, Human
agggcccuaaggaaggcacaca

SEQ ID NO: 871401 - RNA, 22 nt, Human
uauuguaucuucuguuuagaag

SEQ ID NO: 871402 - RNA, 22 nt, Human
uuccaggacaagauguuucagg

SEQ ID NO: 871403 - RNA, 22 nt, Human
gcucugugccacaugcaguguu

SEQ ID NO: 871404 - RNA, 23 nt, Human
ucaucuuccucauuucuccaggg

SEQ ID NO: 871405 - RNA, 22 nt, Human
ucuucauucucgccuuugucgu

SEQ ID NO: 871406 - RNA, 22 nt, Human
uggcuucaaagguagcauacaa

SEQ ID NO: 871407 - RNA, 23 nt, Human
ucugucuuguuuaggccacuguu

SEQ ID NO: 871408 - RNA, 22 nt, Human
uuugacuuugggcucuaacuca

SEQ ID NO: 871409 - RNA, 22 nt, Human
uuuagcauuacuaaaaugaaaa

SEQ ID NO: 871410 - RNA, 22 nt, Human
agaaucauuauauuuauuaagc

SEQ ID NO: 871411 - RNA, 22 nt, Human
acagucaagaaauggcagagcc

SEQ ID NO: 871412 - RNA, 22 nt, Human
ucacagaagaaguagauugcau

SEQ ID NO: 871413 - RNA, 22 nt, Human
aacuuucuguuacguccccaga

SEQ ID NO: 871414 - RNA, 22 nt, Human
uucauugcaguucuucagguua

SEQ ID NO: 871415 - RNA, 22 nt, Human
uagauucaugcaguaugcuagu

SEQ ID NO: 871416 - RNA, 22 nt, Human
aaugaacacgcugguggugcaa

SEQ ID NO: 871417 - RNA, 22 nt, Human
uggcugagcugcagcguggcuu

SEQ ID NO: 871418 - RNA, 22 nt, Human
auuaacaugcagccagacacac

SEQ ID NO: 871419 - RNA, 22 nt, Human
auuagcagcuuucuggucucua

SEQ ID NO: 871420 - RNA, 22 nt, Human
ugcuggggcucugaccacucca

SEQ ID NO: 871421 - RNA, 22 nt, Human
augcugugaaaaagaaggcuga

SEQ ID NO: 871422 - RNA, 21 nt, Human
agaaguccccacucugucgca

SEQ ID NO: 871423 - RNA, 22 nt, Human
gcuggcugaguucugucgucug

SEQ ID NO: 871424 - RNA, 22 nt, Human
cagcaccauuugcagccucuuu

SEQ ID NO: 871425 - RNA, 20 nt, Human
agucucuguagugccugaga

SEQ ID NO: 871426 - RNA, 22 nt, Human
cacauacauucauguuacucua

SEQ ID NO: 871427 - RNA, 22 nt, Human
acacauugcagacaucucauua

SEQ ID NO: 871428 - RNA, 22 nt, Human
uccuuggaucuuuccuaugauu

SEQ ID NO: 871429 - RNA, 22 nt, Human
auacagaaaaguggauagccag

SEQ ID NO: 871430 - RNA, 20 nt, Human
ccagcauguacacaugugga

SEQ ID NO: 871431 - RNA, 22 nt, Human
uaugcaguguaugcacugagau

SEQ ID NO: 871432 - RNA, 20 nt, Human
uuacucaguuccugccaugc

SEQ ID NO: 871433 - RNA, 22 nt, Human
gugaccaucaucucagcuaguu

SEQ ID NO: 871434 - RNA, 22 nt, Human
auuugcuuguccuggugacugu

SEQ ID NO: 871435 - RNA, 22 nt, Human
gcccugaccuucacugacucuc

SEQ ID NO: 871436 - RNA, 22 nt, Human
aggccucaguuuccccaguugu

SEQ ID NO: 871437 - RNA, 22 nt, Human
gaguuaaaugacuugguuaagg

SEQ ID NO: 871438 - RNA, 22 nt, Human
acccaggaugauaauguucaca

SEQ ID NO: 871439 - RNA, 21 nt, Human
agaagccaugugguggagaac

SEQ ID NO: 871440 - RNA, 22 nt, Human
ggaggcggggaaggcaucccau

SEQ ID NO: 871441 - RNA, 22 nt, Human
caguccagaguaccccaagaag

SEQ ID NO: 871442 - RNA, 22 nt, Human
uggggagcacgguagggaaaug

SEQ ID NO: 871443 - RNA, 22 nt, Human
ucauaaaaauagacucuaaagu

SEQ ID NO: 871444 - RNA, 22 nt, Human
acaggaagugcuggcacuuaca

SEQ ID NO: 871445 - RNA, 22 nt, Human
aaauaggggaccaggaaaggag

SEQ ID NO: 871446 - RNA, 20 nt, Human
agcuggcccccgguggccug

SEQ ID NO: 871447 - RNA, 19 nt, Human
agacagagacugaaauaga

SEQ ID NO: 871448 - RNA, 22 nt, Human
aggucucaaucucaggugguca

SEQ ID NO: 871449 - RNA, 22 nt, Human
cugagccaaggggacagugaca

SEQ ID NO: 871450 - RNA, 22 nt, Human
ucuggaaggcuucaaggucuaa

SEQ ID NO: 871451 - RNA, 23 nt, Human
ugagcagcuaaaggugaugcggg

SEQ ID NO: 871452 - RNA, 22 nt, Human
uuagccuuagaagcuuagcaaa

SEQ ID NO: 871453 - RNA, 22 nt, Human
ugggaagacuccucaggaggcg

SEQ ID NO: 871454 - RNA, 22 nt, Human
ucaucuguuucucuguaguucu

SEQ ID NO: 871455 - RNA, 22 nt, Human
ugagacagggucuugcucuguu

SEQ ID NO: 871456 - RNA, 22 nt, Human
cuccucuggcuuccuggaggca

SEQ ID NO: 871457 - RNA, 22 nt, Human
uaucuagauaccaagaagcaca

SEQ ID NO: 871458 - RNA, 22 nt, Human
ucagaggaaagggaacauaguc

SEQ ID NO: 871459 - RNA, 22 nt, Human
uggcuucuuagaccaguggccu

SEQ ID NO: 871460 - RNA, 22 nt, Human
ccuuggagaccugggucugugc

SEQ ID NO: 871461 - RNA, 22 nt, Human
cagcccugggucccugcccugg

SEQ ID NO: 871462 - RNA, 22 nt, Human
aguggguacugggcaggcagag

SEQ ID NO: 871463 - RNA, 22 nt, Human
agagguggagcucuuggcauca

SEQ ID NO: 871464 - RNA, 22 nt, Human
gcagaggaucaggcucuggaaa

SEQ ID NO: 871465 - RNA, 22 nt, Human
ucuggaguuugagcacuucaau

SEQ ID NO: 871466 - RNA, 22 nt, Human
agggcugguauguccaugaaag

SEQ ID NO: 871467 - RNA, 22 nt, Human
acauucaaggccuucugacaca

SEQ ID NO: 871468 - RNA, 22 nt, Human
guuacacacaauauauccuaaa

SEQ ID NO: 871469 - RNA, 22 nt, Human
ucauguuuggaguuugcucacu

SEQ ID NO: 871470 - RNA, 17 nt, Human
uggcaugaggguguggg

SEQ ID NO: 871471 - RNA, 22 nt, Human
aaucuucauuuugacaagauuc

SEQ ID NO: 871472 - RNA, 22 nt, Human
uuaugagacuguuuuacacacu

SEQ ID NO: 871473 - RNA, 22 nt, Human
aaauccauucuguuuuaaaagu

SEQ ID NO: 871474 - RNA, 22 nt, Human
ugcuggcaugcaugcuguagga

SEQ ID NO: 871475 - RNA, 22 nt, Human
cugucuggccggcccagcuucc

SEQ ID NO: 871476 - RNA, 22 nt, Human
aggggucuauccugagaugguc

SEQ ID NO: 871477 - RNA, 22 nt, Human
cuggcuccauuacucagcaucu

SEQ ID NO: 871478 - RNA, 22 nt, Human
cuggguagggcaaggaacuggc

SEQ ID NO: 871479 - RNA, 22 nt, Human
ugagguaggcuugagaugggag

SEQ ID NO: 871480 - RNA, 22 nt, Human
aaaugccucccaaacagcacaa

SEQ ID NO: 871481 - RNA, 22 nt, Human
agucugugacucauuggaucuc

SEQ ID NO: 871482 - RNA, 18 nt, Human
ugaggcucagagacggug

SEQ ID NO: 871483 - RNA, 22 nt, Human
agaggggcucauauccugucau

SEQ ID NO: 871484 - RNA, 22 nt, Human
cagagcaguaaaucuggggcac

SEQ ID NO: 871485 - RNA, 22 nt, Human
ugggcugcuucuauuggugguc

SEQ ID NO: 871486 - RNA, 22 nt, Human
gcuggugguuaccgugcuaaug

SEQ ID NO: 871487 - RNA, 22 nt, Human
ugaggggagacagaguggacuc

SEQ ID NO: 871488 - RNA, 22 nt, Human
ggcucaggccagaccacgacuc

SEQ ID NO: 871489 - RNA, 22 nt, Human
gggcccuggcuuuccuguucuu

SEQ ID NO: 871490 - RNA, 22 nt, Human
uuccagugaccauagaguaugg

SEQ ID NO: 871491 - RNA, 22 nt, Human
gggcagugucuggcccccaggc

SEQ ID NO: 871492 - RNA, 22 nt, Human
ggcucaccauuuucacucucug

SEQ ID NO: 871493 - RNA, 22 nt, Human
uaacacugguauuucauuuagu

SEQ ID NO: 871494 - RNA, 22 nt, Human
uaaagcaaggcaaauuguuggu

SEQ ID NO: 871495 - RNA, 22 nt, Human
cauuuuaagaugaccugguuuc

SEQ ID NO: 871496 - RNA, 22 nt, Human
agagccuugcucuaaauuucuc

SEQ ID NO: 871497 - RNA, 22 nt, Human
augaccagccgagauaaacaga

SEQ ID NO: 871498 - RNA, 22 nt, Human
ugaggcaggaauggggaaaagu

SEQ ID NO: 871499 - RNA, 22 nt, Human
aacaauaggagugaugcaguau

SEQ ID NO: 871500 - RNA, 21 nt, Human
auacuuugaauuacagccuug

SEQ ID NO: 871501 - RNA, 22 nt, Human
acagggcccuugccagcacaag

SEQ ID NO: 871502 - RNA, 22 nt, Human
ucacaguauaaccucauauagg

SEQ ID NO: 871503 - RNA, 22 nt, Human
augaggcccaggaaucuguauu

SEQ ID NO: 871504 - RNA, 22 nt, Human
uucaauguuaagaagaauaugu

SEQ ID NO: 871505 - RNA, 22 nt, Human
aggcagcuuucuguaggggugu

SEQ ID NO: 871506 - RNA, 22 nt, Human
gaggagguggaauuccaggaau

SEQ ID NO: 871507 - RNA, 22 nt, Human
uuuaaauucugucugccgcuua

SEQ ID NO: 871508 - RNA, 22 nt, Human
cuugagaacaggguuagguaac

SEQ ID NO: 871509 - RNA, 22 nt, Human
gaacauucuuggaggaaauaac

SEQ ID NO: 871510 - RNA, 22 nt, Human
ccagaggcagacuuacacucca

SEQ ID NO: 871511 - RNA, 23 nt, Human
uuguaucucuggaaauucuucaa

SEQ ID NO: 871512 - RNA, 23 nt, Human
aggcaguggugguaacaugucaa

SEQ ID NO: 871513 - RNA, 22 nt, Human
gcagacugcgugaggcgccgcc

SEQ ID NO: 871514 - RNA, 22 nt, Human
ucugucucucaagggccguccu

SEQ ID NO: 871515 - RNA, 22 nt, Human
aaggugucggguuagcucagcc

SEQ ID NO: 871516 - RNA, 22 nt, Human
gacagccaggcauagggaguau

SEQ ID NO: 871517 - RNA, 22 nt, Human
ucagcucugcaaggucaccucc

SEQ ID NO: 871518 - RNA, 22 nt, Human
gcagauggaaagugcuugaggg

SEQ ID NO: 871519 - RNA, 22 nt, Human
gccugggagggcagcagugugg

SEQ ID NO: 871520 - RNA, 22 nt, Human
aggccacauagcuugcauguag

SEQ ID NO: 871521 - RNA, 22 nt, Human
ucugaggcagcuugccacucua

SEQ ID NO: 871522 - RNA, 19 nt, Human
ccuggaggugaagguucuc

SEQ ID NO: 871523 - RNA, 22 nt, Human
ucuggaugcucugagcccaagg

SEQ ID NO: 871524 - RNA, 22 nt, Human
ccuggcuguuugagcggggaau

SEQ ID NO: 871525 - RNA, 22 nt, Human
auuugcuuucagccuuaaggau

SEQ ID NO: 871526 - RNA, 22 nt, Human
uuccacaagauguuucuuagaa

SEQ ID NO: 871527 - RNA, 22 nt, Human
caaaauagauguuaaccuggaa

SEQ ID NO: 871528 - RNA, 22 nt, Human
acagaagagcuggcucugugcu

SEQ ID NO: 871529 - RNA, 22 nt, Human
ucaagcaaauguccuuuuguuc

SEQ ID NO: 871530 - RNA, 22 nt, Human
ccagagguuccaggcuagggag

SEQ ID NO: 871531 - RNA, 22 nt, Human
ccugcuuugagaugggcagcag

SEQ ID NO: 871532 - RNA, 22 nt, Human
agcauaaaauaaauaguuugca

SEQ ID NO: 871533 - RNA, 22 nt, Human
aagacagaugcaaccugcuagc

SEQ ID NO: 871534 - RNA, 22 nt, Human
ccucagagcagcacccagauga

SEQ ID NO: 871535 - RNA, 22 nt, Human
uuucauaaacaguagaagacua

SEQ ID NO: 871536 - RNA, 22 nt, Human
uguguugugucaccuaucaugc

SEQ ID NO: 871537 - RNA, 18 nt, Human
ggccagagggaggguccc

SEQ ID NO: 871538 - RNA, 22 nt, Human
agcagcacacgggagaaagaca

SEQ ID NO: 871539 - RNA, 22 nt, Human
ggcugaugagcuuagcuagaga

SEQ ID NO: 871540 - RNA, 22 nt, Human
cagaaacagacaugacgcagua

SEQ ID NO: 871541 - RNA, 22 nt, Human
caaugacagguucaugacuccu

SEQ ID NO: 871542 - RNA, 22 nt, Human
uaacacauauuugcaguaagca

SEQ ID NO: 871543 - RNA, 22 nt, Human
ucugggucaugacucagcguga

SEQ ID NO: 871544 - RNA, 22 nt, Human
ugugauauuugaguauugucaa

SEQ ID NO: 871545 - RNA, 23 nt, Human
ugggucagcugccuccaggacaa

SEQ ID NO: 871546 - RNA, 22 nt, Human
auacagugccccuuuucacaug

SEQ ID NO: 871547 - RNA, 22 nt, Human
agcagcugauggggaaggaguu

SEQ ID NO: 871548 - RNA, 18 nt, Human
ggcagaugacaggagaga

SEQ ID NO: 871549 - RNA, 22 nt, Human
gaagggagaagguugggugacg

SEQ ID NO: 871550 - RNA, 22 nt, Human
aaggaagggaaauagugauguc

SEQ ID NO: 871551 - RNA, 21 nt, Human
ucagaggcacugagagcaaug

SEQ ID NO: 871552 - RNA, 22 nt, Human
acauuucuccuacuuguuauuu

SEQ ID NO: 871553 - RNA, 22 nt, Human
guguuaaugguagaaucugagu

SEQ ID NO: 871554 - RNA, 22 nt, Human
uuguaucagugccuauaaaaug

SEQ ID NO: 871555 - RNA, 22 nt, Human
gcauucucucucuaaauguugu

SEQ ID NO: 871556 - RNA, 22 nt, Human
ucaccaggauugggcuguaggc

SEQ ID NO: 871557 - RNA, 22 nt, Human
cuagaaucuaugucaggaacuc

SEQ ID NO: 871558 - RNA, 23 nt, Human
ccagcugugccuggcccaggagc

SEQ ID NO: 871559 - RNA, 22 nt, Human
uggaagggagugacagucagag

SEQ ID NO: 871560 - RNA, 22 nt, Human
ccuggagggacccuggcccugu

SEQ ID NO: 871561 - RNA, 22 nt, Human
caaggcagcccgcugaaccaca

SEQ ID NO: 871562 - RNA, 19 nt, Human
aagaagcaauaagcuguga

SEQ ID NO: 871563 - RNA, 22 nt, Human
uugaaucauuacaauagauaag

SEQ ID NO: 871564 - RNA, 22 nt, Human
uagaacaugacuuauuuuugga

SEQ ID NO: 871565 - RNA, 22 nt, Human
gauguucuuauaccauuguggg

SEQ ID NO: 871566 - RNA, 22 nt, Human
ggaucaggcugaagcuaggacu

SEQ ID NO: 871567 - RNA, 22 nt, Human
gaggggcucuuuaauaguaaca

SEQ ID NO: 871568 - RNA, 22 nt, Human
acgugcgugugcgcacacauac

SEQ ID NO: 871569 - RNA, 22 nt, Human
gcucaaggcaggcagacaugag

SEQ ID NO: 871570 - RNA, 22 nt, Human
cagugauauuuauccuacucac

SEQ ID NO: 871571 - RNA, 22 nt, Human
ugaguggaguagugaaugcauu

SEQ ID NO: 871572 - RNA, 22 nt, Human
uucaagguaugguagcugguca

SEQ ID NO: 871573 - RNA, 22 nt, Human
acugggagucaugaggaaggag

SEQ ID NO: 871574 - RNA, 22 nt, Human
aagaacauucgaacuauuuucu

SEQ ID NO: 871575 - RNA, 22 nt, Human
auuuggaaauguaagaaugcaa

SEQ ID NO: 871576 - RNA, 22 nt, Human
uguguauagguugugcuaauag

SEQ ID NO: 871577 - RNA, 22 nt, Human
gcugccuggaauaacggcuggc

SEQ ID NO: 871578 - RNA, 22 nt, Human
aaguuuagggaagucugagcgc

SEQ ID NO: 871579 - RNA, 21 nt, Human
ucagagagucacagugaacug

SEQ ID NO: 871580 - RNA, 22 nt, Human
ccauuuaguaaggaagaacagc

SEQ ID NO: 871581 - RNA, 22 nt, Human
uucuaaugauuucauucaaagc

SEQ ID NO: 871582 - RNA, 22 nt, Human
uuuacagucucuauagucaaaa

SEQ ID NO: 871583 - RNA, 22 nt, Human
auguucaucaacacauuacaag

SEQ ID NO: 871584 - RNA, 22 nt, Human
ucccuguauagagaaucccuuu

SEQ ID NO: 871585 - RNA, 22 nt, Human
uggcuccagguugaacuuuggg

SEQ ID NO: 871586 - RNA, 22 nt, Human
ucaaaccugcugucuuguucau

SEQ ID NO: 871587 - RNA, 22 nt, Human
ucugggagggcugguucaguau

SEQ ID NO: 871588 - RNA, 22 nt, Human
agccucuguagaaagcagugug

SEQ ID NO: 871589 - RNA, 22 nt, Human
uaggcaacaugucgaauacugu

SEQ ID NO: 871590 - RNA, 21 nt, Human
acagcaagccuuccuuucagg

SEQ ID NO: 871591 - RNA, 22 nt, Human
auccauuuuccuuggcagcagg

SEQ ID NO: 871592 - RNA, 20 nt, Human
uaugaagauaugugaacagc

SEQ ID NO: 871593 - RNA, 20 nt, Human
gcucccagccugcagucccc

SEQ ID NO: 871594 - RNA, 22 nt, Human
gagcaguuuuauuucaugagac

SEQ ID NO: 871595 - RNA, 22 nt, Human
aggacuucuuagaugccuuccg

SEQ ID NO: 871596 - RNA, 22 nt, Human
ccaagauaagagacaagauuua

SEQ ID NO: 871597 - RNA, 22 nt, Human
caagauuuuaucuccguuucug

SEQ ID NO: 871598 - RNA, 23 nt, Human
aaucuagaaugaccuacucaucu

SEQ ID NO: 871599 - RNA, 22 nt, Human
caggcuucaugaauuaugcacc

SEQ ID NO: 871600 - RNA, 22 nt, Human
acagugaugggggugcaggaag

SEQ ID NO: 871601 - RNA, 22 nt, Human
gaggcuggaggucaaagaugaa

SEQ ID NO: 871602 - RNA, 22 nt, Human
ucuggagaagaaacuugcucug

SEQ ID NO: 871603 - RNA, 22 nt, Human
uaagaaacugucacaguacuau

SEQ ID NO: 871604 - RNA, 22 nt, Human
auuuuaacccucuuauauauac

SEQ ID NO: 871605 - RNA, 22 nt, Human
augaggccagaccacucugcau

SEQ ID NO: 871606 - RNA, 22 nt, Human
cugcagcugcgggaccggagcg

SEQ ID NO: 871607 - RNA, 22 nt, Human
uaggccacagaugagacauaag

SEQ ID NO: 871608 - RNA, 22 nt, Human
agugacaguuucaggcauuuuu

SEQ ID NO: 871609 - RNA, 22 nt, Human
aaaggaauauucaaaacaguca

SEQ ID NO: 871610 - RNA, 22 nt, Human
augcacugccccucugcaccuc

SEQ ID NO: 871611 - RNA, 23 nt, Human
uccauacucuaaacauguuauuu

SEQ ID NO: 871612 - RNA, 22 nt, Human
ugccucagcugaggccgcucca

SEQ ID NO: 871613 - RNA, 19 nt, Human
agcuccugggcucugggcc

SEQ ID NO: 871614 - RNA, 22 nt, Human
gcacacagaaucagugggcaua

SEQ ID NO: 871615 - RNA, 22 nt, Human
ugugcaguucaaacccguguug

SEQ ID NO: 871616 - RNA, 22 nt, Human
cuuggcccggagccccaugaag

SEQ ID NO: 871617 - RNA, 22 nt, Human
aguuucucuuaaucuaguaucu

SEQ ID NO: 871618 - RNA, 22 nt, Human
gaaauauuucucuugagccccu

SEQ ID NO: 871619 - RNA, 21 nt, Human
ccacugcucuucccuagggcc

SEQ ID NO: 871620 - RNA, 22 nt, Human
ggcugccucccaggagaaucug

SEQ ID NO: 871621 - RNA, 22 nt, Human
cuaagggcuugcuggagccagg

SEQ ID NO: 871622 - RNA, 22 nt, Human
ccaacaguccagaugagauggu

SEQ ID NO: 871623 - RNA, 22 nt, Human
accaggcaugauguggagcaca

SEQ ID NO: 871624 - RNA, 22 nt, Human
ucucuguggugggaggcugagu

SEQ ID NO: 871625 - RNA, 22 nt, Human
ggggccagcaauguugaggaau

SEQ ID NO: 871626 - RNA, 22 nt, Human
gcucugagugaucagcugggaa

SEQ ID NO: 871627 - RNA, 22 nt, Human
ggaacaguacucggaggccaga

SEQ ID NO: 871628 - RNA, 22 nt, Human
gugaggccgcacgccccggagu

SEQ ID NO: 871629 - RNA, 22 nt, Human
aucuucaaggaaaaaauacagu

SEQ ID NO: 871630 - RNA, 22 nt, Human
ugccugggagugaccaagacuc

SEQ ID NO: 871631 - RNA, 22 nt, Human
ugcccagcacccagcaugaugc

SEQ ID NO: 871632 - RNA, 22 nt, Human
aagacagaagugauuugaugug

SEQ ID NO: 871633 - RNA, 17 nt, Human
uuuaaacuacuacaagg

SEQ ID NO: 871634 - RNA, 22 nt, Human
caugcagggagcagaggagaca

SEQ ID NO: 871635 - RNA, 22 nt, Human
ccagucugcagccccuggggac

SEQ ID NO: 871636 - RNA, 21 nt, Human
uggcuggauagaugggaacug

SEQ ID NO: 871637 - RNA, 22 nt, Human
acagaauuuuuacacaggguaa

SEQ ID NO: 871638 - RNA, 22 nt, Human
cuguggggaaaggguccugcuc

SEQ ID NO: 871639 - RNA, 22 nt, Human
ugcagggcaguggagguugagu

SEQ ID NO: 871640 - RNA, 22 nt, Human
uagcauuucccaaaugcauuug

SEQ ID NO: 871641 - RNA, 20 nt, Human
ugccugggaaggcguggagg

SEQ ID NO: 871642 - RNA, 22 nt, Human
aagcuggagaguuucacagaug

SEQ ID NO: 871643 - RNA, 22 nt, Human
uuucagugugcuccugagggcu

SEQ ID NO: 871644 - RNA, 22 nt, Human
ucaagguugccaggaaggaaga

SEQ ID NO: 871645 - RNA, 22 nt, Human
ugguccuguagcucucuaaguu

SEQ ID NO: 871646 - RNA, 22 nt, Human
ugucacagaucguuuuugagcu

SEQ ID NO: 871647 - RNA, 22 nt, Human
uuucaaugacacaaaagagaaa

SEQ ID NO: 871648 - RNA, 22 nt, Human
ucagaggauuggacuuuuaugu

SEQ ID NO: 871649 - RNA, 22 nt, Human
auccauuugccgugcuaugugc

SEQ ID NO: 871650 - RNA, 22 nt, Human
agaagcugugguaugaaaugug

SEQ ID NO: 871651 - RNA, 22 nt, Human
ugguggccuugauggcaucugc

SEQ ID NO: 871652 - RNA, 21 nt, Human
cagggcacacagaggauggua

SEQ ID NO: 871653 - RNA, 22 nt, Human
ugaagccaaucugccaggcaga

SEQ ID NO: 871654 - RNA, 22 nt, Human
acaggccucaaauagggugccu

SEQ ID NO: 871655 - RNA, 22 nt, Human
agcugucuaccugcagaguccu

SEQ ID NO: 871656 - RNA, 19 nt, Human
agguauuugggagauauau

SEQ ID NO: 871657 - RNA, 22 nt, Human
acaugugaaaucucauaguuag

SEQ ID NO: 871658 - RNA, 22 nt, Human
ugaaauguagugaagcauggaa

SEQ ID NO: 871659 - RNA, 22 nt, Human
acauuuauuacucagguuguug

SEQ ID NO: 871660 - RNA, 22 nt, Human
auugaauagcugcuuguuguau

SEQ ID NO: 871661 - RNA, 22 nt, Human
uacuucaaccuucucuauuaga

SEQ ID NO: 871662 - RNA, 22 nt, Human
agcugcaguucguuccagcucu

SEQ ID NO: 871663 - RNA, 22 nt, Human
auuugcuuucccuucccugaca

SEQ ID NO: 871664 - RNA, 19 nt, Human
gggagcugucugcccgugg

SEQ ID NO: 871665 - RNA, 22 nt, Human
gggcagaggggcgcuucccucu

SEQ ID NO: 871666 - RNA, 22 nt, Human
gugaaccaagaagucaaagcga

SEQ ID NO: 871667 - RNA, 22 nt, Human
uuuuccuucaccucuugagccu

SEQ ID NO: 871668 - RNA, 22 nt, Human
cagacuggccacaucugcacug

SEQ ID NO: 871669 - RNA, 21 nt, Human
aguuagcagauuucugucucc

SEQ ID NO: 871670 - RNA, 22 nt, Human
agcuccaggucagugcaccccu

SEQ ID NO: 871671 - RNA, 22 nt, Human
cugcagaccucugagguccaug

SEQ ID NO: 871672 - RNA, 22 nt, Human
cucggguaccaugcuaggcacu

SEQ ID NO: 871673 - RNA, 22 nt, Human
gcauuuaaauuugaacuucaga

SEQ ID NO: 871674 - RNA, 22 nt, Human
ucuuuugugauucuucaguuac

SEQ ID NO: 871675 - RNA, 22 nt, Human
ucauuacaagauuuccaauuug

SEQ ID NO: 871676 - RNA, 22 nt, Human
gagaaguuguguggauuuaaag

SEQ ID NO: 871677 - RNA, 22 nt, Human
cauuauguucaguagcuuaaaa

SEQ ID NO: 871678 - RNA, 22 nt, Human
caaaugcaugagaaauaagagg

SEQ ID NO: 871679 - RNA, 22 nt, Human
cuuggucuaaugguaauaagca

SEQ ID NO: 871680 - RNA, 22 nt, Human
agcuaggauaagcagagacugg

SEQ ID NO: 871681 - RNA, 22 nt, Human
acaaaaccagaaaaucucuacc

SEQ ID NO: 871682 - RNA, 22 nt, Human
uacaguuuaacacuuuggagaa

SEQ ID NO: 871683 - RNA, 18 nt, Human
ugggcucaaaggauccuc

SEQ ID NO: 871684 - RNA, 22 nt, Human
aggcuccugcaggugaggugcu

SEQ ID NO: 871685 - RNA, 22 nt, Human
acagccagugacuggacaagcu

SEQ ID NO: 871686 - RNA, 19 nt, Human
ucucugcuucucuuggcau

SEQ ID NO: 871687 - RNA, 22 nt, Human
auaucauuauguuaugagcaca

SEQ ID NO: 871688 - RNA, 22 nt, Human
acucuggagauggaugucagga

SEQ ID NO: 871689 - RNA, 22 nt, Human
gccagcaguccaguccuuagug

SEQ ID NO: 871690 - RNA, 22 nt, Human
aucagcagugucuaccucggug

SEQ ID NO: 871691 - RNA, 21 nt, Human
ugucagcaacaauacuuucuc

SEQ ID NO: 871692 - RNA, 22 nt, Human
ugugugcauucacaugcaugcc

SEQ ID NO: 871693 - RNA, 22 nt, Human
cuuuuucuaaucauaauugucu

SEQ ID NO: 871694 - RNA, 22 nt, Human
gaggcugcugccaucauuaggu

SEQ ID NO: 871695 - RNA, 22 nt, Human
uugaaauacugcauuguucagu

SEQ ID NO: 871696 - RNA, 21 nt, Human
uuggaagauaaugcuuaugau

SEQ ID NO: 871697 - RNA, 22 nt, Human
gucugggucuccacagucagca

SEQ ID NO: 871698 - RNA, 22 nt, Human
ggaggagacaguaaaaagcacg

SEQ ID NO: 871699 - RNA, 22 nt, Human
cucugagguccuacagugaccc

SEQ ID NO: 871700 - RNA, 22 nt, Human
aggcagccaaucagaggcugac

SEQ ID NO: 871701 - RNA, 22 nt, Human
ccaaaucaggggccacaagcau

SEQ ID NO: 871702 - RNA, 22 nt, Human
gauguauaaccuggcuauguua

SEQ ID NO: 871703 - RNA, 22 nt, Human
cuacaucucaccuuccaggaca

SEQ ID NO: 871704 - RNA, 22 nt, Human
ccaugggcacuggguggaggua

SEQ ID NO: 871705 - RNA, 22 nt, Human
ugagccagguuaagacaggagc

SEQ ID NO: 871706 - RNA, 22 nt, Human
agggaaggagguuagaacccac

SEQ ID NO: 871707 - RNA, 22 nt, Human
agaagcagaaggaagcagggcc

SEQ ID NO: 871708 - RNA, 22 nt, Human
guuuccagccuccuggguaaag

SEQ ID NO: 871709 - RNA, 22 nt, Human
uagcaggguuuugaagaggguu

SEQ ID NO: 871710 - RNA, 18 nt, Human
agacaaacuucuucugcc

SEQ ID NO: 871711 - RNA, 22 nt, Human
agugugcucugguugccaugcu

SEQ ID NO: 871712 - RNA, 22 nt, Human
ugggguggugggaaccaaguag

SEQ ID NO: 871713 - RNA, 23 nt, Human
agcauucucuccaacauuuaaca

SEQ ID NO: 871714 - RNA, 22 nt, Human
gacagcaggagaucaugauaga

SEQ ID NO: 871715 - RNA, 22 nt, Human
gcacagcaugaagagaggaagc

SEQ ID NO: 871716 - RNA, 22 nt, Human
ggacagcauaucagcagggcag

SEQ ID NO: 871717 - RNA, 22 nt, Human
agcaaagcuaucucuauggaga

SEQ ID NO: 871718 - RNA, 21 nt, Human
ugaaaguuggagucaaaugua

SEQ ID NO: 871719 - RNA, 22 nt, Human
gaugaggaaugcucagcucaau

SEQ ID NO: 871720 - RNA, 20 nt, Human
cuguccuuuuguuggaagac

SEQ ID NO: 871721 - RNA, 22 nt, Human
gcguguuugcccagugaguggc

SEQ ID NO: 871722 - RNA, 22 nt, Human
acauugaagugucuggccuccu

SEQ ID NO: 871723 - RNA, 22 nt, Human
agcacugggaacgcauggggcc

SEQ ID NO: 871724 - RNA, 22 nt, Human
ugcagcaugcaggagaggcucu

SEQ ID NO: 871725 - RNA, 22 nt, Human
ugugccucauguaucuggauga

SEQ ID NO: 871726 - RNA, 22 nt, Human
aauacuuuccuauauaaggugc

SEQ ID NO: 871727 - RNA, 22 nt, Human
uuucagugcacguaguuuauuu

SEQ ID NO: 871728 - RNA, 22 nt, Human
uuguacaacacauauucuacag

SEQ ID NO: 871729 - RNA, 22 nt, Human
aggcagccaguucagguuucuu

SEQ ID NO: 871730 - RNA, 22 nt, Human
aguaccuuugcauggauuuuuu

SEQ ID NO: 871731 - RNA, 22 nt, Human
acauucuguugaggcuggguca

SEQ ID NO: 871732 - RNA, 22 nt, Human
ugagugugcuaggugucucggu

SEQ ID NO: 871733 - RNA, 22 nt, Human
accuccuggcuuaucauggaca

SEQ ID NO: 871734 - RNA, 22 nt, Human
cauguugaauggccuugauuuu

SEQ ID NO: 871735 - RNA, 22 nt, Human
gggcaggugugcagagcuguug

SEQ ID NO: 871736 - RNA, 23 nt, Human
agaugaggcuucuccauguuggu

SEQ ID NO: 871737 - RNA, 22 nt, Human
cagaaauggaaguucugguuua

SEQ ID NO: 871738 - RNA, 22 nt, Human
uugugcaaaggggguuaaucau

SEQ ID NO: 871739 - RNA, 22 nt, Human
aagcgccacgagaagcuggacc

SEQ ID NO: 871740 - RNA, 22 nt, Human
ccugggcauucuuugaguucuc

SEQ ID NO: 871741 - RNA, 22 nt, Human
aaacacaucauucaugucguca

SEQ ID NO: 871742 - RNA, 22 nt, Human
agcagugacuugcuuuguuucc

SEQ ID NO: 871743 - RNA, 22 nt, Human
uuugcagaagaaaacaugaaca

SEQ ID NO: 871744 - RNA, 22 nt, Human
uucuacacagugcggguuaaca

SEQ ID NO: 871745 - RNA, 22 nt, Human
agaggcaggaagagcugauuuu

SEQ ID NO: 871746 - RNA, 22 nt, Human
ucuggcucaucucuccagguaa

SEQ ID NO: 871747 - RNA, 22 nt, Human
cugagcuguuacucuguccucg

SEQ ID NO: 871748 - RNA, 22 nt, Human
auuaauuuccaggcacugugcu

SEQ ID NO: 871749 - RNA, 22 nt, Human
auuucucaucuuugugaauggu

SEQ ID NO: 871750 - RNA, 22 nt, Human
ccugccucccagagguccucua

SEQ ID NO: 871751 - RNA, 22 nt, Human
uacagggaaugggacauaaauc

SEQ ID NO: 871752 - RNA, 22 nt, Human
aaaagcaucucaaaggagcuuc

SEQ ID NO: 871753 - RNA, 22 nt, Human
aggucccaguguuagggugaca

SEQ ID NO: 871754 - RNA, 22 nt, Human
cuggccagcugacagcagggcu

SEQ ID NO: 871755 - RNA, 20 nt, Human
ucuuccagcuucugguagaa

SEQ ID NO: 871756 - RNA, 22 nt, Human
caauagaaaacucaauacuuaa

SEQ ID NO: 871757 - RNA, 22 nt, Human
ccagggcccacggccagaauag

SEQ ID NO: 871758 - RNA, 22 nt, Human
agucucaaguguuaguauuauu

SEQ ID NO: 871759 - RNA, 22 nt, Human
uaggaaauugacaccugcuuga

SEQ ID NO: 871760 - RNA, 22 nt, Human
acaggcugccacuugcauccaa

SEQ ID NO: 871761 - RNA, 22 nt, Human
gcccaggaguucaagucuagug

SEQ ID NO: 871762 - RNA, 22 nt, Human
cucuugccagagaugagacucu

SEQ ID NO: 871763 - RNA, 22 nt, Human
cacuauaauccuguuuuagaac

SEQ ID NO: 871764 - RNA, 22 nt, Human
cuucacugaguagucuagacuc

SEQ ID NO: 871765 - RNA, 22 nt, Human
ugucauuuucuaaucuguuguc

SEQ ID NO: 871766 - RNA, 22 nt, Human
aaaguccagggaaagagcgucu

SEQ ID NO: 871767 - RNA, 16 nt, Human
gcagguggggcgcgca

SEQ ID NO: 871768 - RNA, 22 nt, Human
guguucucucuacaggaauuua

SEQ ID NO: 871769 - RNA, 22 nt, Human
aggcccuggacacucaagccgg

SEQ ID NO: 871770 - RNA, 22 nt, Human
aguuuacaacaguagcuaugga

SEQ ID NO: 871771 - RNA, 22 nt, Human
cagcuucuccggccuggugcgg

SEQ ID NO: 871772 - RNA, 22 nt, Human
uugcuuuacuuugccauucguu

SEQ ID NO: 871773 - RNA, 22 nt, Human
ugggaaguaggacagugcaguu

SEQ ID NO: 871774 - RNA, 22 nt, Human
gacagcuucgaggaggugagcu

SEQ ID NO: 871775 - RNA, 22 nt, Human
auagcagcaucaguuuaucucc

SEQ ID NO: 871776 - RNA, 22 nt, Human
gggcaguggcucacgccuguaa

SEQ ID NO: 871777 - RNA, 22 nt, Human
uuggaaaccaggcuuugagacg

SEQ ID NO: 871778 - RNA, 22 nt, Human
uuugaagacagaucaauauaag

SEQ ID NO: 871779 - RNA, 22 nt, Human
acugagggccaaaggcacugag

SEQ ID NO: 871780 - RNA, 22 nt, Human
aaaugucuaucuggcauauucc

SEQ ID NO: 871781 - RNA, 22 nt, Human
ugucuuauuaagaccagugacu

SEQ ID NO: 871782 - RNA, 22 nt, Human
ggagggcugccagguggagcgg

SEQ ID NO: 871783 - RNA, 22 nt, Human
cuacaguacuggaugcucagcc

SEQ ID NO: 871784 - RNA, 22 nt, Human
cucuugggugggcagugggccu

SEQ ID NO: 871785 - RNA, 21 nt, Human
acugcaaacagcagagacuga

SEQ ID NO: 871786 - RNA, 22 nt, Human
gagaacagugucauccuauaau

SEQ ID NO: 871787 - RNA, 22 nt, Human
agggcuugacaagggcuggagc

SEQ ID NO: 871788 - RNA, 22 nt, Human
agggcucagaacaaugagugua

SEQ ID NO: 871789 - RNA, 22 nt, Human
cuuguaaaugcagauucugauu

SEQ ID NO: 871790 - RNA, 22 nt, Human
acagauggggcacaaagccaca

SEQ ID NO: 871791 - RNA, 22 nt, Human
aauucuuaaucccauaaaguga

SEQ ID NO: 871792 - RNA, 23 nt, Human
agcaccugugauuuccuagcucu

SEQ ID NO: 871793 - RNA, 22 nt, Human
agucuacaaucuuaaaugaacu

SEQ ID NO: 871794 - RNA, 18 nt, Human
gaggcacauaguuggggc

SEQ ID NO: 871795 - RNA, 22 nt, Human
caccuuugcaaaccaaaucuga

SEQ ID NO: 871796 - RNA, 22 nt, Human
aacuucugaccucaagaacugu

SEQ ID NO: 871797 - RNA, 22 nt, Human
auaaagauuuuuaggcauuucu

SEQ ID NO: 871798 - RNA, 22 nt, Human
caggcugccgugggguccaggc

SEQ ID NO: 871799 - RNA, 22 nt, Human
ccugggugacccgugagcgucc

SEQ ID NO: 871800 - RNA, 22 nt, Human
uagaaacugauagucuugugcu

SEQ ID NO: 871801 - RNA, 22 nt, Human
caucuuuaaaaugggaacaaca

SEQ ID NO: 871802 - RNA, 22 nt, Human
gcugaaauucagauuccuaggc

SEQ ID NO: 871803 - RNA, 22 nt, Human
gggcauggugcugguguucaug

SEQ ID NO: 871804 - RNA, 22 nt, Human
uccagggcagggugcgcauggg

SEQ ID NO: 871805 - RNA, 22 nt, Human
aucuuucacuuuuuguggauga

SEQ ID NO: 871806 - RNA, 22 nt, Human
uggcagcacggcauccacucuc

SEQ ID NO: 871807 - RNA, 22 nt, Human
ugaaugagugaguucagaccuc

SEQ ID NO: 871808 - RNA, 22 nt, Human
gcuggcagaagagcugguucaa

SEQ ID NO: 871809 - RNA, 22 nt, Human
ccucugcaucuggcugcugcag

SEQ ID NO: 871810 - RNA, 22 nt, Human
auagaauaaggcacagauucuu

SEQ ID NO: 871811 - RNA, 22 nt, Human
agcuguggcagcacuuuggagu

SEQ ID NO: 871812 - RNA, 18 nt, Human
acucugggaccuguuauu

SEQ ID NO: 871813 - RNA, 22 nt, Human
agcuguggucuucaaguugccu

SEQ ID NO: 871814 - RNA, 22 nt, Human
gggaugacuacuuaugggaagu

SEQ ID NO: 871815 - RNA, 22 nt, Human
uggacagaaacccgagugaucu

SEQ ID NO: 871816 - RNA, 22 nt, Human
uuuacagaauguugaauuuggg

SEQ ID NO: 871817 - RNA, 22 nt, Human
gagcuggaagucuguggucaga

SEQ ID NO: 871818 - RNA, 20 nt, Human
uccugagaccugggaagguu

SEQ ID NO: 871819 - RNA, 20 nt, Human
cugcccugcccuggguccug

SEQ ID NO: 871820 - RNA, 22 nt, Human
ccugucugaggaggugcucuuu

SEQ ID NO: 871821 - RNA, 22 nt, Human
uagcagcagugguguauuuaga

SEQ ID NO: 871822 - RNA, 22 nt, Human
ugggcagaggacagggaagauc

SEQ ID NO: 871823 - RNA, 22 nt, Human
cucuuuguggaacggcaguguc

SEQ ID NO: 871824 - RNA, 22 nt, Human
augaaauauucuuugguaagaa

SEQ ID NO: 871825 - RNA, 22 nt, Human
cagcuuuuaggacugugagaaa

SEQ ID NO: 871826 - RNA, 21 nt, Human
augugcagcaagcagcaugcu

SEQ ID NO: 871827 - RNA, 22 nt, Human
cuccaggaccagggcuccugga

SEQ ID NO: 871828 - RNA, 22 nt, Human
agcacaggcuuuggugugaggg

SEQ ID NO: 871829 - RNA, 22 nt, Human
auaaggaaccugggcuuaagag

SEQ ID NO: 871830 - RNA, 22 nt, Human
ggacagagcccugguggccuaa

SEQ ID NO: 871831 - RNA, 22 nt, Human
uggggaaggaucaccacaaucu

SEQ ID NO: 871832 - RNA, 21 nt, Human
aaugucuuuguccaugcucug

SEQ ID NO: 871833 - RNA, 22 nt, Human
gcuacuuugcagcuagcuagga

SEQ ID NO: 871834 - RNA, 22 nt, Human
gggagggucugagagcugcacc

SEQ ID NO: 871835 - RNA, 22 nt, Human
gcuaugggaugugcuguggaug

SEQ ID NO: 871836 - RNA, 22 nt, Human
gugcagggcagguguccuucca

SEQ ID NO: 871837 - RNA, 22 nt, Human
aggcugaggcgggaggaucacu

SEQ ID NO: 871838 - RNA, 22 nt, Human
agggcucacugggaggcuauaa

SEQ ID NO: 871839 - RNA, 21 nt, Human
ugcucaguaaaugcugaguga

SEQ ID NO: 871840 - RNA, 22 nt, Human
augcugcacaagccacauguag

SEQ ID NO: 871841 - RNA, 23 nt, Human
acaugggagggacauggaggcug

SEQ ID NO: 871842 - RNA, 22 nt, Human
agccagcaucuugcuucuugag

SEQ ID NO: 871843 - RNA, 22 nt, Human
ugcagcaugccaaacgaggagg

SEQ ID NO: 871844 - RNA, 22 nt, Human
gugggucuggcuuugaggguca

SEQ ID NO: 871845 - RNA, 17 nt, Human
gcugccaccuuuggagc

SEQ ID NO: 871846 - RNA, 22 nt, Human
cagcauuuggaggagaggcuuu

SEQ ID NO: 871847 - RNA, 22 nt, Human
caaauguauguuuuccuaugua

SEQ ID NO: 871848 - RNA, 22 nt, Human
uucaguuugaauucuguagaac

SEQ ID NO: 871849 - RNA, 16 nt, Human
cuacccagugagaagg

SEQ ID NO: 871850 - RNA, 22 nt, Human
uuccagcacagaaguauacauu

SEQ ID NO: 871851 - RNA, 22 nt, Human
uauauuaaagugcuuugcagug

SEQ ID NO: 871852 - RNA, 22 nt, Human
agguuauucucuaucucauccc

SEQ ID NO: 871853 - RNA, 22 nt, Human
uguauuugaguuaugaaagaga

SEQ ID NO: 871854 - RNA, 22 nt, Human
ugcccuguuaucuuggaagagu

SEQ ID NO: 871855 - RNA, 22 nt, Human
augcaaaugcuagagaauguug

SEQ ID NO: 871856 - RNA, 22 nt, Human
ugcauuccacagaagggaaaac

SEQ ID NO: 871857 - RNA, 22 nt, Human
gcaggggaguggaugauggauu

SEQ ID NO: 871858 - RNA, 22 nt, Human
cucuggccuggggccugcuccc

SEQ ID NO: 871859 - RNA, 22 nt, Human
uaaaacugcuugguauggucua

SEQ ID NO: 871860 - RNA, 21 nt, Human
agcagaggggacauguuugau

SEQ ID NO: 871861 - RNA, 22 nt, Human
aagcucuugaguaaacuaguuu

SEQ ID NO: 871862 - RNA, 22 nt, Human
aagcacauuauagcuaucuagg

SEQ ID NO: 871863 - RNA, 22 nt, Human
auagagugauguaagguaugug

SEQ ID NO: 871864 - RNA, 22 nt, Human
agcaguuaugugucucuugacu

SEQ ID NO: 871865 - RNA, 22 nt, Human
cagccacuggugccaggcuguu

SEQ ID NO: 871866 - RNA, 22 nt, Human
agaaagggucacugaaagagga

SEQ ID NO: 871867 - RNA, 22 nt, Human
uugcagggcaggaccauggaca

SEQ ID NO: 871868 - RNA, 22 nt, Human
auuacaacaagaaaaggguaag

SEQ ID NO: 871869 - RNA, 22 nt, Human
cugggccucacccuagaccaau

SEQ ID NO: 871870 - RNA, 22 nt, Human
uccaggugugcucugugcccug

SEQ ID NO: 871871 - RNA, 22 nt, Human
acuaaaguguuggagaaugagg

SEQ ID NO: 871872 - RNA, 22 nt, Human
caggaaauucuuuuguuugugc

SEQ ID NO: 871873 - RNA, 22 nt, Human
ucugggaguuguaguccggugg

SEQ ID NO: 871874 - RNA, 22 nt, Human
ggguaggcaaagcaaugacguu

SEQ ID NO: 871875 - RNA, 22 nt, Human
ucccugaugugggcugcgugac

SEQ ID NO: 871876 - RNA, 22 nt, Human
ucagaaaggaguuagaggucuc

SEQ ID NO: 871877 - RNA, 22 nt, Human
agcaggaacgaguucaugggga

SEQ ID NO: 871878 - RNA, 22 nt, Human
gaggcuuuauaacuauuuguuc

SEQ ID NO: 871879 - RNA, 22 nt, Human
cuucaugauccuaccacauuga

SEQ ID NO: 871880 - RNA, 22 nt, Human
augucacauggucaccucuagc

SEQ ID NO: 871881 - RNA, 22 nt, Human
cugccaggccuccgcugucccc

SEQ ID NO: 871882 - RNA, 22 nt, Human
augauacaagcaaaacuaauca

SEQ ID NO: 871883 - RNA, 22 nt, Human
gcugggcaggccucgugagggc

SEQ ID NO: 871884 - RNA, 22 nt, Human
ugcuugauuuggcaguguauuc

SEQ ID NO: 871885 - RNA, 22 nt, Human
acaccaaaguagaauuaaugua

SEQ ID NO: 871886 - RNA, 22 nt, Human
augcugugccuucucugugcca

SEQ ID NO: 871887 - RNA, 22 nt, Human
cuggcuuccucaggagcagugg

SEQ ID NO: 871888 - RNA, 22 nt, Human
agcuggagauucuggggacagu

SEQ ID NO: 871889 - RNA, 22 nt, Human
gaaguacauucugauagggaag

SEQ ID NO: 871890 - RNA, 22 nt, Human
ugggccagcaauugcugcucag

SEQ ID NO: 871891 - RNA, 22 nt, Human
aaagcagcugaucucagagccu

SEQ ID NO: 871892 - RNA, 22 nt, Human
ggcucuggguucugcaaugcgu

SEQ ID NO: 871893 - RNA, 22 nt, Human
guccauuuuauucagagacuuu

SEQ ID NO: 871894 - RNA, 22 nt, Human
ucuuggagaauggcagagaagc

SEQ ID NO: 871895 - RNA, 22 nt, Human
acaauagacaaagugaauggcu

SEQ ID NO: 871896 - RNA, 22 nt, Human
ucucuggguauucacugccuuc

SEQ ID NO: 871897 - RNA, 22 nt, Human
uuuggaaguaaaugaguguuuu

SEQ ID NO: 871898 - RNA, 22 nt, Human
aguguuucuggaaucaguguuu

SEQ ID NO: 871899 - RNA, 22 nt, Human
ggccagcugcucagugucucug

SEQ ID NO: 871900 - RNA, 22 nt, Human
auguucuguuucuuaaucuuga

SEQ ID NO: 871901 - RNA, 22 nt, Human
ucauaaagauacuaagugaguu

SEQ ID NO: 871902 - RNA, 22 nt, Human
gucauuuuaugggaacagauuu

SEQ ID NO: 871903 - RNA, 23 nt, Human
aggcccaacucugugagggcugc

SEQ ID NO: 871904 - RNA, 22 nt, Human
aggcucugcagugcuggaggac

SEQ ID NO: 871905 - RNA, 22 nt, Human
uguacauagaaaggauacagcu

SEQ ID NO: 871906 - RNA, 19 nt, Human
uucacuaauuguaagauuu

SEQ ID NO: 871907 - RNA, 22 nt, Human
auggcagggcagccucucagag

SEQ ID NO: 871908 - RNA, 22 nt, Human
ucccaggagcaccuuuugagcc

SEQ ID NO: 871909 - RNA, 22 nt, Human
auuucucagcacuuccuaucuc

SEQ ID NO: 871910 - RNA, 22 nt, Human
gaauauauuucucuuaccuuua

SEQ ID NO: 871911 - RNA, 22 nt, Human
uaugaaauuuaaacacagauca

SEQ ID NO: 871912 - RNA, 22 nt, Human
aggacacacccagcucacgggg

SEQ ID NO: 871913 - RNA, 22 nt, Human
ggcagcaucuugauauugguuu

SEQ ID NO: 871914 - RNA, 22 nt, Human
uauguucuaaccuugucuuucc

SEQ ID NO: 871915 - RNA, 22 nt, Human
aggcagguagaaggaucuuuau

SEQ ID NO: 871916 - RNA, 22 nt, Human
auucacauuuagccucugacau

SEQ ID NO: 871917 - RNA, 22 nt, Human
acacaguaucaaauuucaucuu

SEQ ID NO: 871918 - RNA, 22 nt, Human
auuaaaagagauaauguguguu

SEQ ID NO: 871919 - RNA, 22 nt, Human
aucuuuagugugaauuuauuga

SEQ ID NO: 871920 - RNA, 23 nt, Human
aagcugccagucugaagccuggg

SEQ ID NO: 871921 - RNA, 22 nt, Human
caguggaauauauaggggauuu

SEQ ID NO: 871922 - RNA, 22 nt, Human
acuuagcagguacuuucauauu

SEQ ID NO: 871923 - RNA, 22 nt, Human
gccuccagcuggggcauuucag

SEQ ID NO: 871924 - RNA, 22 nt, Human
uugcuuuaaugagauuuugcca

SEQ ID NO: 871925 - RNA, 22 nt, Human
caggaagaccagggcuguggcu

SEQ ID NO: 871926 - RNA, 22 nt, Human
ucugaaauauauuuugaguguu

SEQ ID NO: 871927 - RNA, 21 nt, Human
ucaagacagcauauuuaagaa

SEQ ID NO: 871928 - RNA, 22 nt, Human
ucagauauagucauuuaaauaa

SEQ ID NO: 871929 - RNA, 22 nt, Human
uaaguucuuuucuauguaauau

SEQ ID NO: 871930 - RNA, 22 nt, Human
acuguacugaaaaguaagcaag

SEQ ID NO: 871931 - RNA, 22 nt, Human
uuuguggcaggagcggagaccg

SEQ ID NO: 871932 - RNA, 22 nt, Human
gaggcagagucacaaagagucu

SEQ ID NO: 871933 - RNA, 22 nt, Human
agccuggccugggcaggcacau

SEQ ID NO: 871934 - RNA, 19 nt, Human
cugagagaugcuucacaca

SEQ ID NO: 871935 - RNA, 22 nt, Human
agcggcugcuccgcaggcuggc

SEQ ID NO: 871936 - RNA, 22 nt, Human
uuacauguuuauggggguacau

SEQ ID NO: 871937 - RNA, 22 nt, Human
cagcuucucgggagcgcaugug

SEQ ID NO: 871938 - RNA, 22 nt, Human
gccaggagagcuccuucagguu

SEQ ID NO: 871939 - RNA, 22 nt, Human
aaauggacauugggugagcucu

SEQ ID NO: 871940 - RNA, 22 nt, Human
cagccccagcacuuagcugagu

SEQ ID NO: 871941 - RNA, 22 nt, Human
gugcccugguccccagcauaua

SEQ ID NO: 871942 - RNA, 22 nt, Human
aaacauugaugggaaguuuaau

SEQ ID NO: 871943 - RNA, 20 nt, Human
cagaggcauuuucagacucu

SEQ ID NO: 871944 - RNA, 22 nt, Human
ugagaauagcagacugguaacu

SEQ ID NO: 871945 - RNA, 22 nt, Human
ucagucccuucuccaggucagc

SEQ ID NO: 871946 - RNA, 22 nt, Human
aauaaucucacuuuauguggaa

SEQ ID NO: 871947 - RNA, 22 nt, Human
caaaugauacuguuuuuagucu

SEQ ID NO: 871948 - RNA, 22 nt, Human
cugcugggggacacagguccgg

SEQ ID NO: 871949 - RNA, 22 nt, Human
cacugcaguuccccagugcgca

SEQ ID NO: 871950 - RNA, 22 nt, Human
ugccuggaucugaggacccauu

SEQ ID NO: 871951 - RNA, 22 nt, Human
uccacgccaaaauuuguagcuu

SEQ ID NO: 871952 - RNA, 22 nt, Human
gcaccaggcagcugagcaggcc

SEQ ID NO: 871953 - RNA, 22 nt, Human
aaauaucauucuggugcacaga

SEQ ID NO: 871954 - RNA, 18 nt, Human
uccagagcuacuguggug

SEQ ID NO: 871955 - RNA, 22 nt, Human
ggaauaaagaaucugguucccc

SEQ ID NO: 871956 - RNA, 22 nt, Human
aaguuacaguuaugaaacucac

SEQ ID NO: 871957 - RNA, 23 nt, Human
ccagggccccuacaccacugucc

SEQ ID NO: 871958 - RNA, 22 nt, Human
uaaaaucaugacagauugacau

SEQ ID NO: 871959 - RNA, 21 nt, Human
gccugagcaugucuucagguc

SEQ ID NO: 871960 - RNA, 22 nt, Human
agugugggggcuuuggugucac

SEQ ID NO: 871961 - RNA, 22 nt, Human
cagguuuaguuccacacagcuc

SEQ ID NO: 871962 - RNA, 22 nt, Human
caggaagauuguggaggugguu

SEQ ID NO: 871963 - RNA, 20 nt, Human
ucucugagcuucucuugggg

SEQ ID NO: 871964 - RNA, 22 nt, Human
uucuacaauaugaauaaugaag

SEQ ID NO: 871965 - RNA, 22 nt, Human
aaagaggggacuguuaauucca

SEQ ID NO: 871966 - RNA, 22 nt, Human
gucugucucccugugacugaga

SEQ ID NO: 871967 - RNA, 22 nt, Human
uucuuuggugggagauugaggu

SEQ ID NO: 871968 - RNA, 22 nt, Human
gcagcaagucuaguuuguaggc

SEQ ID NO: 871969 - RNA, 22 nt, Human
uaguuuuaugaauugguauaau

SEQ ID NO: 871970 - RNA, 22 nt, Human
ccuguggaauagaaucuucccu

SEQ ID NO: 871971 - RNA, 22 nt, Human
uggcauuugagcuggaaggaug

SEQ ID NO: 871972 - RNA, 22 nt, Human
aaggccagcuggagggaugagg

SEQ ID NO: 871973 - RNA, 22 nt, Human
aaucagaaauucuacaucacaa

SEQ ID NO: 871974 - RNA, 22 nt, Human
aagacauucacaaauguucacu

SEQ ID NO: 871975 - RNA, 22 nt, Human
aacucacuuuguggcuucugaa

SEQ ID NO: 871976 - RNA, 22 nt, Human
uuuagacauggcuugcucacuu

SEQ ID NO: 871977 - RNA, 22 nt, Human
agcuuucuucuaguuguacagu

SEQ ID NO: 871978 - RNA, 22 nt, Human
uucuguccgcuuguuuguuaga

SEQ ID NO: 871979 - RNA, 22 nt, Human
ucaacuuggagcacauuuggcu

SEQ ID NO: 871980 - RNA, 22 nt, Human
ucuucuccaguucauccuacca

SEQ ID NO: 871981 - RNA, 22 nt, Human
cucugugaaccccuccuuucuu

SEQ ID NO: 871982 - RNA, 21 nt, Human
cagggccaauccugaccucua

SEQ ID NO: 871983 - RNA, 21 nt, Human
ucccugugagcagcucuuccu

SEQ ID NO: 871984 - RNA, 22 nt, Human
ucaggaaagaguuagaugauua

SEQ ID NO: 871985 - RNA, 22 nt, Human
ugauacaaucaugagagaggac

SEQ ID NO: 871986 - RNA, 23 nt, Human
aauaaugucuugugcucucacuu

SEQ ID NO: 871987 - RNA, 22 nt, Human
ccucagaguuuaagaugucaga

SEQ ID NO: 871988 - RNA, 22 nt, Human
caugauagguauuuaauuaaau

SEQ ID NO: 871989 - RNA, 22 nt, Human
ccugggcaauauagugaggccc

SEQ ID NO: 871990 - RNA, 22 nt, Human
aguguuucaagaagcaggaagu

SEQ ID NO: 871991 - RNA, 22 nt, Human
guucuaggcuaggggaguaaga

SEQ ID NO: 871992 - RNA, 22 nt, Human
cagguggcuaacggccucauag

SEQ ID NO: 871993 - RNA, 22 nt, Human
cucccagauuccugcuguggga

SEQ ID NO: 871994 - RNA, 22 nt, Human
cucagcagcagggaagagguca

SEQ ID NO: 871995 - RNA, 22 nt, Human
uucuaacucuacacuagcuuug

SEQ ID NO: 871996 - RNA, 22 nt, Human
cauaauauacuacauugaugaa

SEQ ID NO: 871997 - RNA, 22 nt, Human
aauagcuuggacccauugcuuu

SEQ ID NO: 871998 - RNA, 22 nt, Human
aagcagggcucccuggggacuc

SEQ ID NO: 871999 - RNA, 21 nt, Human
uuugaauagaaauagugcuua

SEQ ID NO: 872000 - RNA, 22 nt, Human
gaccacagaggugugggagaga

SEQ ID NO: 872001 - RNA, 22 nt, Human
ugcugggcucaaccuccagagc

SEQ ID NO: 872002 - RNA, 22 nt, Human
ugagcagacuugaugaggcagc

SEQ ID NO: 872003 - RNA, 21 nt, Human
uggcugagccaggugugugga

SEQ ID NO: 872004 - RNA, 22 nt, Human
aaaugucucuauugccucuggu

SEQ ID NO: 872005 - RNA, 22 nt, Human
gagagagaaggccugugggugu

SEQ ID NO: 872006 - RNA, 22 nt, Human
uauuccuuggcaaaaaauauau

SEQ ID NO: 872007 - RNA, 22 nt, Human
gcugcaagucauggcuuuugca

SEQ ID NO: 872008 - RNA, 22 nt, Human
aucuagaaguggcaugaauuac

SEQ ID NO: 872009 - RNA, 22 nt, Human
aagcagcauguggguuaucggg

SEQ ID NO: 872010 - RNA, 22 nt, Human
caagacuucaccgcucugugcu

SEQ ID NO: 872011 - RNA, 22 nt, Human
augugggccgugcggguguccu

SEQ ID NO: 872012 - RNA, 22 nt, Human
ucuggcuccacuuucuucauuu

SEQ ID NO: 872013 - RNA, 19 nt, Human
cauuuucccaucauccuuu

SEQ ID NO: 872014 - RNA, 22 nt, Human
agaaggaaaaccugucuuaugu

SEQ ID NO: 872015 - RNA, 18 nt, Human
ucaggcuggaaguuugcc

SEQ ID NO: 872016 - RNA, 18 nt, Human
aaugugaauauuuacuuc

SEQ ID NO: 872017 - RNA, 22 nt, Human
cugggcacagcguugggcucuu

SEQ ID NO: 872018 - RNA, 22 nt, Human
ggcaucucgcauucuuguuucu

SEQ ID NO: 872019 - RNA, 18 nt, Human
cugacccuggcucugggu

SEQ ID NO: 872020 - RNA, 22 nt, Human
gcccugagaaugugugugucua

SEQ ID NO: 872021 - RNA, 22 nt, Human
uuuccugcacccgcugaugcca

SEQ ID NO: 872022 - RNA, 22 nt, Human
uggaggugaaaugagauuuugu

SEQ ID NO: 872023 - RNA, 22 nt, Human
aggcucuggcuacuacagagcu

SEQ ID NO: 872024 - RNA, 22 nt, Human
gggagggcuuggacccagaugu

SEQ ID NO: 872025 - RNA, 22 nt, Human
gaaaauaguucaucacaaugau

SEQ ID NO: 872026 - RNA, 22 nt, Human
auguuuuugagauacaaacaga

SEQ ID NO: 872027 - RNA, 22 nt, Human
uggaggugggagggacuguccu

SEQ ID NO: 872028 - RNA, 22 nt, Human
acagaauauugguuacuguugc

SEQ ID NO: 872029 - RNA, 22 nt, Human
uggaauguggauaagggugucu

SEQ ID NO: 872030 - RNA, 22 nt, Human
gaacauuuauauuagauagcua

SEQ ID NO: 872031 - RNA, 22 nt, Human
cugaggcaguuuaauuuuugaa

SEQ ID NO: 872032 - RNA, 22 nt, Human
aaugguuucugaaguuaggcag

SEQ ID NO: 872033 - RNA, 22 nt, Human
guuucaauuucacuuuccaggc

SEQ ID NO: 872034 - RNA, 22 nt, Human
acaauugacuguauuuuuagcu

SEQ ID NO: 872035 - RNA, 22 nt, Human
aacaaguguauuaauggaaaua

SEQ ID NO: 872036 - RNA, 17 nt, Human
gucacugucuaaugaag

SEQ ID NO: 872037 - RNA, 22 nt, Human
ugagauaacuauucugucaacu

SEQ ID NO: 872038 - RNA, 22 nt, Human
gucccauaaguagugcaacuug

SEQ ID NO: 872039 - RNA, 20 nt, Human
aguuuagaggccaacaagcc

SEQ ID NO: 872040 - RNA, 20 nt, Human
ucagcacagcugacaagguu

SEQ ID NO: 872041 - RNA, 17 nt, Human
acacagccagguucucc

SEQ ID NO: 872042 - RNA, 22 nt, Human
aaaugggccuggaaagaggaug

SEQ ID NO: 872043 - RNA, 22 nt, Human
aaaaacuguaauuacuuuugca

SEQ ID NO: 872044 - RNA, 22 nt, Human
ugucagcaacccaucacuccca

SEQ ID NO: 872045 - RNA, 22 nt, Human
uuccuauggcucaguugcauuu

SEQ ID NO: 872046 - RNA, 21 nt, Human
gggagcugacagcagcacggc

SEQ ID NO: 872047 - RNA, 22 nt, Human
gaacaggguugggugagagagg

SEQ ID NO: 872048 - RNA, 22 nt, Human
gucagcagcauguuuaaucaaa

SEQ ID NO: 872049 - RNA, 22 nt, Human
gggcagguggcaaagccagagg

SEQ ID NO: 872050 - RNA, 22 nt, Human
auuuccaagguaauuuugagua

SEQ ID NO: 872051 - RNA, 22 nt, Human
ugauuuuacuuagcaugauguu

SEQ ID NO: 872052 - RNA, 21 nt, Human
ucucugggcccuccugugggg

SEQ ID NO: 872053 - RNA, 22 nt, Human
uggccaggcagguagaacggcc

SEQ ID NO: 872054 - RNA, 22 nt, Human
uaacacugcuucauuuuggaga

SEQ ID NO: 872055 - RNA, 22 nt, Human
ucucagaagugaucaggauguu

SEQ ID NO: 872056 - RNA, 22 nt, Human
gcugucucgccugacacuggcu

SEQ ID NO: 872057 - RNA, 23 nt, Human
ugggccagggaguccgguuucuu

SEQ ID NO: 872058 - RNA, 20 nt, Human
guauucuguauucugcucag

SEQ ID NO: 872059 - RNA, 20 nt, Human
ggcaggugcuguccccuccu

SEQ ID NO: 872060 - RNA, 22 nt, Human
ucagggcccucacuugcauagg

SEQ ID NO: 872061 - RNA, 22 nt, Human
ugaagcaguucucagaaguggg

SEQ ID NO: 872062 - RNA, 22 nt, Human
uagaaacacagaucugguguca

SEQ ID NO: 872063 - RNA, 22 nt, Human
acagaugaguuaaagcagagug

SEQ ID NO: 872064 - RNA, 22 nt, Human
ccuggcuccugccucugcaggg

SEQ ID NO: 872065 - RNA, 21 nt, Human
agccaggcaagcacccccacu

SEQ ID NO: 872066 - RNA, 22 nt, Human
uccacagguauuucuccuugcu

SEQ ID NO: 872067 - RNA, 22 nt, Human
uggcugguuuuggugagcuccg

SEQ ID NO: 872068 - RNA, 22 nt, Human
ccuggcucugaaguccacauca

SEQ ID NO: 872069 - RNA, 22 nt, Human
uuaguguacuuagugcucuaag

SEQ ID NO: 872070 - RNA, 23 nt, Human
cagcuuucagggcuuuagggaag

SEQ ID NO: 872071 - RNA, 22 nt, Human
agguauuccaguggucaccaag

SEQ ID NO: 872072 - RNA, 22 nt, Human
acagaacuggaauuggaacuca

SEQ ID NO: 872073 - RNA, 22 nt, Human
uucauguggaaaagggcuuuca

SEQ ID NO: 872074 - RNA, 22 nt, Human
gaggccugguagccgagcccca

SEQ ID NO: 872075 - RNA, 22 nt, Human
augcacauguaugucaauauuu

SEQ ID NO: 872076 - RNA, 22 nt, Human
cugaaggaagcagguggccugu

SEQ ID NO: 872077 - RNA, 22 nt, Human
uuuagugauucauuuagaaaaa

SEQ ID NO: 872078 - RNA, 22 nt, Human
uacagcagcccaccuucuucug

SEQ ID NO: 872079 - RNA, 22 nt, Human
auucacaaauaacaggugcaga

SEQ ID NO: 872080 - RNA, 22 nt, Human
cuccugggaaaugaaggggcag

SEQ ID NO: 872081 - RNA, 22 nt, Human
ccugggcagggcuggacucuca

SEQ ID NO: 872082 - RNA, 22 nt, Human
ggcugccaggagaagcucagug

SEQ ID NO: 872083 - RNA, 22 nt, Human
uccacauagucauuaauuucug

SEQ ID NO: 872084 - RNA, 22 nt, Human
uuuugccugagagugaaaauaa

SEQ ID NO: 872085 - RNA, 22 nt, Human
caguguguggauugcccuugca

SEQ ID NO: 872086 - RNA, 22 nt, Human
aucagaaacucuuagagcaggg

SEQ ID NO: 872087 - RNA, 22 nt, Human
caguuucuauggcugggcucug

SEQ ID NO: 872088 - RNA, 22 nt, Human
auacuacauuauuagagccugg

SEQ ID NO: 872089 - RNA, 22 nt, Human
ucugacagaggugguagauaca

SEQ ID NO: 872090 - RNA, 22 nt, Human
ugagaagcugcugacuuagccu

SEQ ID NO: 872091 - RNA, 22 nt, Human
cagggggcuguggcuguccagu

SEQ ID NO: 872092 - RNA, 22 nt, Human
guuuucuggcaguuauuccuua

SEQ ID NO: 872093 - RNA, 22 nt, Human
ccugcgggcugguaagaggcuu

SEQ ID NO: 872094 - RNA, 22 nt, Human
auuucaugguacaucgugacuu

SEQ ID NO: 872095 - RNA, 22 nt, Human
uugcaguugucuuuccuaauuu

SEQ ID NO: 872096 - RNA, 22 nt, Human
uuguagcagggaucagaauaca

SEQ ID NO: 872097 - RNA, 23 nt, Human
gggcccagcacaggaccuggcag

SEQ ID NO: 872098 - RNA, 22 nt, Human
uaagcauauuccagucaugucc

SEQ ID NO: 872099 - RNA, 20 nt, Human
aggagaaauucgggacaccu

SEQ ID NO: 872100 - RNA, 22 nt, Human
uugagguauugauaaaacauuu

SEQ ID NO: 872101 - RNA, 22 nt, Human
agagucuggcgcugagaugaca

SEQ ID NO: 872102 - RNA, 22 nt, Human
caggaaagagcugccaggcagg

SEQ ID NO: 872103 - RNA, 22 nt, Human
gagaggggaccugugugucuag

SEQ ID NO: 872104 - RNA, 22 nt, Human
agggaauggaugauggcagguu

SEQ ID NO: 872105 - RNA, 22 nt, Human
cacagaugaaguaaacaacucu

SEQ ID NO: 872106 - RNA, 22 nt, Human
ccuagcagggagaggauaccug

SEQ ID NO: 872107 - RNA, 22 nt, Human
aauacagaggggucacaauuca

SEQ ID NO: 872108 - RNA, 17 nt, Human
ucauuucuaggcacucc

SEQ ID NO: 872109 - RNA, 22 nt, Human
ggaggccaccugaccugcuguu

SEQ ID NO: 872110 - RNA, 22 nt, Human
uucuguuuugcacagacuugaa

SEQ ID NO: 872111 - RNA, 22 nt, Human
uccagagcuacuugcucaacuu

SEQ ID NO: 872112 - RNA, 22 nt, Human
accuuggaaaguuuaauugagg

SEQ ID NO: 872113 - RNA, 22 nt, Human
agguggagacccagagaaggcg

SEQ ID NO: 872114 - RNA, 22 nt, Human
ucacucaagcaucuacagggau

SEQ ID NO: 872115 - RNA, 22 nt, Human
agccucagggcucugcgcagac

SEQ ID NO: 872116 - RNA, 22 nt, Human
agggagagaaguuauacaagau

SEQ ID NO: 872117 - RNA, 19 nt, Human
ucauugaacauaauuacuu

SEQ ID NO: 872118 - RNA, 20 nt, Human
cagcagagacccauggggag

SEQ ID NO: 872119 - RNA, 22 nt, Human
uagacauuuagauaucucgcug

SEQ ID NO: 872120 - RNA, 22 nt, Human
uaucacauuuggagauuuauga

SEQ ID NO: 872121 - RNA, 22 nt, Human
gcugaggcugggagcagccugu

SEQ ID NO: 872122 - RNA, 22 nt, Human
aucuaagagagagagcaugucu

SEQ ID NO: 872123 - RNA, 22 nt, Human
cacagacagugucccuuuguug

SEQ ID NO: 872124 - RNA, 22 nt, Human
agcaauagauaaaacauuuacc

SEQ ID NO: 872125 - RNA, 22 nt, Human
cauuuaugaagcacuuuagagu

SEQ ID NO: 872126 - RNA, 23 nt, Human
ccauggccaaugucaagcuacua

SEQ ID NO: 872127 - RNA, 22 nt, Human
uuucauaauacuguacaugaaa

SEQ ID NO: 872128 - RNA, 22 nt, Human
agugucugcuagguucaucaac

SEQ ID NO: 872129 - RNA, 22 nt, Human
gagcugcagaagggguuuuccu

SEQ ID NO: 872130 - RNA, 22 nt, Human
ucuaaacauuaugauaguagag

SEQ ID NO: 872131 - RNA, 22 nt, Human
cuuucuuauaccugucagggcc

SEQ ID NO: 872132 - RNA, 22 nt, Human
uuuacagugucuuguugacugu

SEQ ID NO: 872133 - RNA, 22 nt, Human
aggcuggcuuugguagcauggu

SEQ ID NO: 872134 - RNA, 22 nt, Human
acuugaaacaucuuuaaaugua

SEQ ID NO: 872135 - RNA, 22 nt, Human
aauucucaggaauuucaucugu

SEQ ID NO: 872136 - RNA, 22 nt, Human
cucugagaggugagaagcagca

SEQ ID NO: 872137 - RNA, 22 nt, Human
uauguuuguuaucacaacuagg

SEQ ID NO: 872138 - RNA, 22 nt, Human
ucucuuggaacacuugcucuua

SEQ ID NO: 872139 - RNA, 22 nt, Human
aaucuuaagcugaauucucucc

SEQ ID NO: 872140 - RNA, 22 nt, Human
caucugcuguuccuuggacuca

SEQ ID NO: 872141 - RNA, 22 nt, Human
uauugcaucuuaguguaaguca

SEQ ID NO: 872142 - RNA, 22 nt, Human
acugucauuaaugaauguaaua

SEQ ID NO: 872143 - RNA, 21 nt, Human
agagauagacuagaauugaug

SEQ ID NO: 872144 - RNA, 22 nt, Human
cagauauauuuuauuuggucaa

SEQ ID NO: 872145 - RNA, 22 nt, Human
uucucuaaaauuaagugaggua

SEQ ID NO: 872146 - RNA, 22 nt, Human
uucauguuuugagccauucuga

SEQ ID NO: 872147 - RNA, 22 nt, Human
acucucugguauuggcaaguuu

SEQ ID NO: 872148 - RNA, 22 nt, Human
ucacauuguucuuaguuuaccu

SEQ ID NO: 872149 - RNA, 22 nt, Human
augaggccauggcugucacuaa

SEQ ID NO: 872150 - RNA, 22 nt, Human
uggcaaauuccaaaguuaauuc

SEQ ID NO: 872151 - RNA, 22 nt, Human
cuuauacacgaacacaaggugu

SEQ ID NO: 872152 - RNA, 22 nt, Human
cuccuaggugcucacugggguc

SEQ ID NO: 872153 - RNA, 22 nt, Human
aaucucaaagauggccagaaga

SEQ ID NO: 872154 - RNA, 22 nt, Human
agacuguagggauagaggucuu

SEQ ID NO: 872155 - RNA, 22 nt, Human
acuuccuuguacugacuccauu

SEQ ID NO: 872156 - RNA, 22 nt, Human
caucuugcuggguuuuaucaua

SEQ ID NO: 872157 - RNA, 22 nt, Human
ccugagcucaagaaggugacca

SEQ ID NO: 872158 - RNA, 20 nt, Human
uuguuucugcuauuuucuaa

SEQ ID NO: 872159 - RNA, 19 nt, Human
auagaaccugcaguuucaa

SEQ ID NO: 872160 - RNA, 22 nt, Human
gcagcuggaagugacacucugu

SEQ ID NO: 872161 - RNA, 22 nt, Human
auguuucuguccuacgagauaa

SEQ ID NO: 872162 - RNA, 22 nt, Human
cugugccuccagucucgcuucu

SEQ ID NO: 872163 - RNA, 22 nt, Human
ggcugaggggcccagaggaaca

SEQ ID NO: 872164 - RNA, 22 nt, Human
uuuacagaugaggauacugagg

SEQ ID NO: 872165 - RNA, 22 nt, Human
ugccauuuacugagauuagaag

SEQ ID NO: 872166 - RNA, 17 nt, Human
uuccaaggagcauuuga

SEQ ID NO: 872167 - RNA, 22 nt, Human
caucacuacaaauuuaagaaau

SEQ ID NO: 872168 - RNA, 22 nt, Human
acuauagcucggguuauaaugu

SEQ ID NO: 872169 - RNA, 22 nt, Human
cugagcugcucccgcugcagcg

SEQ ID NO: 872170 - RNA, 22 nt, Human
gccugcuguuaacugcaggaau

SEQ ID NO: 872171 - RNA, 22 nt, Human
aagagagaguuccuaggcaaaa

SEQ ID NO: 872172 - RNA, 22 nt, Human
cuggcugcgucugcucugacag

SEQ ID NO: 872173 - RNA, 22 nt, Human
uagcagucaucggcagagaaaa

SEQ ID NO: 872174 - RNA, 22 nt, Human
uuauuuucuccucagaaagugg

SEQ ID NO: 872175 - RNA, 22 nt, Human
uucuggacacgugacucucauu

SEQ ID NO: 872176 - RNA, 22 nt, Human
augcugugccuggaaagcggcu

SEQ ID NO: 872177 - RNA, 22 nt, Human
gcugagcaggguggggaaaggc

SEQ ID NO: 872178 - RNA, 22 nt, Human
ucucagucagccuugauguccc

SEQ ID NO: 872179 - RNA, 21 nt, Human
auucugaguugucagucuuca

SEQ ID NO: 872180 - RNA, 22 nt, Human
auuucucauguacaaaaacacu

SEQ ID NO: 872181 - RNA, 22 nt, Human
agcuuccacaucugucuucagu

SEQ ID NO: 872182 - RNA, 22 nt, Human
accugaauugucauaucuuauu

SEQ ID NO: 872183 - RNA, 22 nt, Human
aucuuuagucaggcguggguau

SEQ ID NO: 872184 - RNA, 22 nt, Human
cugccucugguuuuggucccug

SEQ ID NO: 872185 - RNA, 22 nt, Human
aaagcucugguuuggagcauuu

SEQ ID NO: 872186 - RNA, 17 nt, Human
uggaugugggaucugga

SEQ ID NO: 872187 - RNA, 22 nt, Human
agaaugcucuucaaaaucuagc

SEQ ID NO: 872188 - RNA, 22 nt, Human
caucucacagcaaacugcugaa

SEQ ID NO: 872189 - RNA, 22 nt, Human
ucacccaggauauugaagucag

SEQ ID NO: 872190 - RNA, 22 nt, Human
gacaaguuacaccugugcuuga

SEQ ID NO: 872191 - RNA, 22 nt, Human
gcagauggugccaugucuugug

SEQ ID NO: 872192 - RNA, 22 nt, Human
uagcaagcagauuagaagaucc

SEQ ID NO: 872193 - RNA, 22 nt, Human
augugugguuuaagaauugaau

SEQ ID NO: 872194 - RNA, 22 nt, Human
agcuucuuccaggcagugacuc

SEQ ID NO: 872195 - RNA, 22 nt, Human
agggaaagguagugaggucaca

SEQ ID NO: 872196 - RNA, 22 nt, Human
ccucuugauugguuggaagcgg

SEQ ID NO: 872197 - RNA, 22 nt, Human
uuucaaagaccauuaacuauca

SEQ ID NO: 872198 - RNA, 22 nt, Human
aaaggucagcugccaucguucu

SEQ ID NO: 872199 - RNA, 21 nt, Human
uuuguucaggcaaguuacagu

SEQ ID NO: 872200 - RNA, 22 nt, Human
gcugggagccccgagccagcgc

SEQ ID NO: 872201 - RNA, 22 nt, Human
uguggugccgagagucuggacg

SEQ ID NO: 872202 - RNA, 22 nt, Human
agcaaacagugugcuaagaaau

SEQ ID NO: 872203 - RNA, 22 nt, Human
acagcauugcuccaucucaaga

SEQ ID NO: 872204 - RNA, 22 nt, Human
auuaagggccaauccuccagcc

SEQ ID NO: 872205 - RNA, 22 nt, Human
uggccuggugcucaggcaguag

SEQ ID NO: 872206 - RNA, 22 nt, Human
aaggaaaucuuuguaacaucuu

SEQ ID NO: 872207 - RNA, 22 nt, Human
auucucucucuaugaaaacuga

SEQ ID NO: 872208 - RNA, 22 nt, Human
cugccuggccacaacccagggu

SEQ ID NO: 872209 - RNA, 22 nt, Human
cugaggcacagugaacuucucc

SEQ ID NO: 872210 - RNA, 22 nt, Human
aaaaauagcuucucuugucccu

SEQ ID NO: 872211 - RNA, 22 nt, Human
cauauaauguuugaagaugugg

SEQ ID NO: 872212 - RNA, 22 nt, Human
gcagggcagaccuccagccuau

SEQ ID NO: 872213 - RNA, 18 nt, Human
ugggccugcauccuaguc

SEQ ID NO: 872214 - RNA, 22 nt, Human
cuguggcuguauuuggccagag

SEQ ID NO: 872215 - RNA, 22 nt, Human
auugaagauucugacaucagaa

SEQ ID NO: 872216 - RNA, 22 nt, Human
acagacugugaguaugcauagu

SEQ ID NO: 872217 - RNA, 22 nt, Human
agcaauguuggccuauauaccu

SEQ ID NO: 872218 - RNA, 22 nt, Human
aaacaguguguuucagagaggc

SEQ ID NO: 872219 - RNA, 22 nt, Human
cagcacuaggauauacauuucc

SEQ ID NO: 872220 - RNA, 22 nt, Human
aaaacacaagaagcaggguaca

SEQ ID NO: 872221 - RNA, 22 nt, Human
gagcucaguguagucauggcuu

SEQ ID NO: 872222 - RNA, 22 nt, Human
gugcauauuuugcacacagaug

SEQ ID NO: 872223 - RNA, 22 nt, Human
uaauguaaagaagauguaggaa

SEQ ID NO: 872224 - RNA, 22 nt, Human
cugacccuuaaugagcaaguaa

SEQ ID NO: 872225 - RNA, 22 nt, Human
ccaggaaggcguuguuccucuc

SEQ ID NO: 872226 - RNA, 22 nt, Human
uuaauuuuuauguauagugugu

SEQ ID NO: 872227 - RNA, 22 nt, Human
uggcugugccucuuuccaggcc

SEQ ID NO: 872228 - RNA, 22 nt, Human
cagcuuugugacuucggacaag

SEQ ID NO: 872229 - RNA, 22 nt, Human
ggaggucauagcugugcaggua

SEQ ID NO: 872230 - RNA, 22 nt, Human
ccugccugguguaagucuaagg

SEQ ID NO: 872231 - RNA, 22 nt, Human
uuuugucaccugauuugcccac

SEQ ID NO: 872232 - RNA, 22 nt, Human
gaagucuggcugacgagaguua

SEQ ID NO: 872233 - RNA, 22 nt, Human
caggaguccugaaaucugauga

SEQ ID NO: 872234 - RNA, 22 nt, Human
acaaugugauaauuuaaagaua

SEQ ID NO: 872235 - RNA, 22 nt, Human
agaagcuugaaggagcagugac

SEQ ID NO: 872236 - RNA, 23 nt, Human
uaaauuaccuuuccagugcaggg

SEQ ID NO: 872237 - RNA, 22 nt, Human
ugcugcagcuuugucacaugca

SEQ ID NO: 872238 - RNA, 20 nt, Human
uuuuagcagaaagaaagcuc

SEQ ID NO: 872239 - RNA, 22 nt, Human
ucacaagacaagacaaauugca

SEQ ID NO: 872240 - RNA, 22 nt, Human
cagccuugauggaugaggaagu

SEQ ID NO: 872241 - RNA, 22 nt, Human
uggcccagcaguucugccccag

SEQ ID NO: 872242 - RNA, 22 nt, Human
aaaguuugagugauuugacaca

SEQ ID NO: 872243 - RNA, 22 nt, Human
uuguauuugauugucauaucgu

SEQ ID NO: 872244 - RNA, 22 nt, Human
auacaaaauauauacuggagac

SEQ ID NO: 872245 - RNA, 20 nt, Human
aggacuuguuugggcagagu

SEQ ID NO: 872246 - RNA, 22 nt, Human
cugugacugggugacaguccuc

SEQ ID NO: 872247 - RNA, 20 nt, Human
acuugcuuuugucaggaaaa

SEQ ID NO: 872248 - RNA, 22 nt, Human
cugggagaggaaccucgagggu

SEQ ID NO: 872249 - RNA, 22 nt, Human
ggucucagguagggccuaggaa

SEQ ID NO: 872250 - RNA, 22 nt, Human
gaaucuagggccuagaucacag

SEQ ID NO: 872251 - RNA, 22 nt, Human
aaauaguuacuucugcugucuu

SEQ ID NO: 872252 - RNA, 22 nt, Human
uaaaagagaauggauaacagag

SEQ ID NO: 872253 - RNA, 22 nt, Human
ucagggcaucaucaugaauaua

SEQ ID NO: 872254 - RNA, 22 nt, Human
uuguuucauggggauguuuauu

SEQ ID NO: 872255 - RNA, 22 nt, Human
uagugauuuccauuucaggguu

SEQ ID NO: 872256 - RNA, 22 nt, Human
auuccuugcacaucagauaguu

SEQ ID NO: 872257 - RNA, 22 nt, Human
cagaauuucagugauguuuucu

SEQ ID NO: 872258 - RNA, 22 nt, Human
gucacaaauccccucagcaacu

SEQ ID NO: 872259 - RNA, 22 nt, Human
ucagggagggaccugaggcugg

SEQ ID NO: 872260 - RNA, 22 nt, Human
gagcagggccacuucuguaccu

SEQ ID NO: 872261 - RNA, 22 nt, Human
aaccuucacuugcuucauuuga

SEQ ID NO: 872262 - RNA, 22 nt, Human
caagacuuagagcaucuugaaa

SEQ ID NO: 872263 - RNA, 22 nt, Human
cagaggaccuguguggccagag

SEQ ID NO: 872264 - RNA, 19 nt, Human
uguccuguccugcucugac

SEQ ID NO: 872265 - RNA, 22 nt, Human
cagcagggcccccgggugcgcc

SEQ ID NO: 872266 - RNA, 22 nt, Human
uucugagccagagucaguuaug

SEQ ID NO: 872267 - RNA, 21 nt, Human
augucuaugacauauuuccuu

SEQ ID NO: 872268 - RNA, 22 nt, Human
ugccuauucaauauaugcauuu

SEQ ID NO: 872269 - RNA, 22 nt, Human
gaauauguuugacauuuaguug

SEQ ID NO: 872270 - RNA, 22 nt, Human
caggcaugcuucugucugggca

SEQ ID NO: 872271 - RNA, 22 nt, Human
ugcaucaagaagucuaaguuug

SEQ ID NO: 872272 - RNA, 22 nt, Human
caugaggguugggguggagcuu

SEQ ID NO: 872273 - RNA, 22 nt, Human
agucugaaggcaaucugcugac

SEQ ID NO: 872274 - RNA, 22 nt, Human
uccagagaaaucuagucuuaca

SEQ ID NO: 872275 - RNA, 22 nt, Human
ccauuuuuaaagagcuuaagua

SEQ ID NO: 872276 - RNA, 22 nt, Human
ucugcaggaucagagccagagg

SEQ ID NO: 872277 - RNA, 22 nt, Human
aaauuauuuucagaauggagaa

SEQ ID NO: 872278 - RNA, 22 nt, Human
cucuucuuauggccguggcuga

SEQ ID NO: 872279 - RNA, 16 nt, Human
ugccugcucugaucuc

SEQ ID NO: 872280 - RNA, 22 nt, Human
gauaaauuaucagggguuuaaa

SEQ ID NO: 872281 - RNA, 22 nt, Human
ugucuauuaacacaagaaagga

SEQ ID NO: 872282 - RNA, 22 nt, Human
uugcuaauuuaacuaccuuguu

SEQ ID NO: 872283 - RNA, 22 nt, Human
agaagcaguuauuuuuugcaca

SEQ ID NO: 872284 - RNA, 22 nt, Human
cuguccucaccuuggcaggggg

SEQ ID NO: 872285 - RNA, 22 nt, Human
acauggcaggaaucauguguuu

SEQ ID NO: 872286 - RNA, 22 nt, Human
aauuuggagagagauuaauguu

SEQ ID NO: 872287 - RNA, 22 nt, Human
ugggaaggcguggaaguagaag

SEQ ID NO: 872288 - RNA, 22 nt, Human
auccugcuuguuacuuauagag

SEQ ID NO: 872289 - RNA, 22 nt, Human
guucaaggaagggaggaaagcc

SEQ ID NO: 872290 - RNA, 22 nt, Human
uauuaucauugguaauaugguc

SEQ ID NO: 872291 - RNA, 22 nt, Human
aucagaguggguuuuaaaagug

SEQ ID NO: 872292 - RNA, 22 nt, Human
uaagaacuucggacauguuauc

SEQ ID NO: 872293 - RNA, 22 nt, Human
caguuaaaggcccaauaucugg

SEQ ID NO: 872294 - RNA, 22 nt, Human
auguuauaguuauaaaaugagg

SEQ ID NO: 872295 - RNA, 22 nt, Human
augcuguuauucuaauguguga

SEQ ID NO: 872296 - RNA, 22 nt, Human
gcacagggcccugugcguaggu

SEQ ID NO: 872297 - RNA, 22 nt, Human
uuacagauguuucaggaauacu

SEQ ID NO: 872298 - RNA, 22 nt, Human
cugggccuagcaacagaggagu

SEQ ID NO: 872299 - RNA, 22 nt, Human
cacaggagaaaggggaagcucg

SEQ ID NO: 872300 - RNA, 22 nt, Human
ccacaaggaggacagcaguugg

SEQ ID NO: 872301 - RNA, 22 nt, Human
uggggugugcucagagcagggg

SEQ ID NO: 872302 - RNA, 22 nt, Human
cauucacaaaaccacaugccau

SEQ ID NO: 872303 - RNA, 22 nt, Human
aggggucagugaccauugagga

SEQ ID NO: 872304 - RNA, 22 nt, Human
acaguucaagacaucaguauga

SEQ ID NO: 872305 - RNA, 22 nt, Human
auugcaaaugagucuuaauaua

SEQ ID NO: 872306 - RNA, 22 nt, Human
uggguaagaauugggggcucug

SEQ ID NO: 872307 - RNA, 22 nt, Human
aacuuguuagaaaugcagaauc

SEQ ID NO: 872308 - RNA, 22 nt, Human
ccagguaggagagagggauccu

SEQ ID NO: 872309 - RNA, 22 nt, Human
aggugcuggagucugggcagga

SEQ ID NO: 872310 - RNA, 22 nt, Human
uuggcagugucugcaaaaugga

SEQ ID NO: 872311 - RNA, 22 nt, Human
auguggcuauuuuaauguuaau

SEQ ID NO: 872312 - RNA, 22 nt, Human
ugagcauagcccuucuaguguu

SEQ ID NO: 872313 - RNA, 22 nt, Human
cagggccucugugggcucucuc

SEQ ID NO: 872314 - RNA, 22 nt, Human
uucaaacagaugacucugcucu

SEQ ID NO: 872315 - RNA, 22 nt, Human
gcaguggcuaggagucuggcgu

SEQ ID NO: 872316 - RNA, 22 nt, Human
ugcuguugacggacuggcugcu

SEQ ID NO: 872317 - RNA, 22 nt, Human
aggccacagauacugugaagua

SEQ ID NO: 872318 - RNA, 22 nt, Human
uuuugugaauaguuuaucuaag

SEQ ID NO: 872319 - RNA, 22 nt, Human
gacccugguguccagguccugc

SEQ ID NO: 872320 - RNA, 20 nt, Human
ucccuccugcagauagagaa

SEQ ID NO: 872321 - RNA, 22 nt, Human
aauaggcucaaauguucuucuc

SEQ ID NO: 872322 - RNA, 22 nt, Human
gcagacacuucccacugcagcg

SEQ ID NO: 872323 - RNA, 22 nt, Human
uaggcacugaguacauauuggu

SEQ ID NO: 872324 - RNA, 22 nt, Human
caacauaugcuuucaugaggua

SEQ ID NO: 872325 - RNA, 21 nt, Human
ugaaaucugaugggacaaaug

SEQ ID NO: 872326 - RNA, 22 nt, Human
uucuaugccauguucagcuacu

SEQ ID NO: 872327 - RNA, 22 nt, Human
uuaugcuaagugaaauaagcca

SEQ ID NO: 872328 - RNA, 22 nt, Human
ugggaggacuugugggcuucau

SEQ ID NO: 872329 - RNA, 22 nt, Human
ugaagugaccuggggcagugua

SEQ ID NO: 872330 - RNA, 22 nt, Human
cagagaaagggugaauuccuuc

SEQ ID NO: 872331 - RNA, 22 nt, Human
gaaauacaaaugccuagauccu

SEQ ID NO: 872332 - RNA, 22 nt, Human
uuccuccagccuggagcacuuc

SEQ ID NO: 872333 - RNA, 22 nt, Human
ucugggugccacugucuguaca

SEQ ID NO: 872334 - RNA, 22 nt, Human
gaggggccggcaugugccucuc

SEQ ID NO: 872335 - RNA, 22 nt, Human
acuggcagcagcagcccuuggg

SEQ ID NO: 872336 - RNA, 23 nt, Human
aagcagggagauucuuagcugag

SEQ ID NO: 872337 - RNA, 22 nt, Human
uuccuggggcgacuguaucuga

SEQ ID NO: 872338 - RNA, 22 nt, Human
uuauuauuuuguguacagcaaa

SEQ ID NO: 872339 - RNA, 22 nt, Human
agacuuaggagcugacaucucu

SEQ ID NO: 872340 - RNA, 22 nt, Human
ccugagaagagcuuaugaguga

SEQ ID NO: 872341 - RNA, 22 nt, Human
cucucccuugggugggcuuugg

SEQ ID NO: 872342 - RNA, 22 nt, Human
caaauguaucagcccagggauu

SEQ ID NO: 872343 - RNA, 22 nt, Human
uccaccagcuucuucaccagcu

SEQ ID NO: 872344 - RNA, 22 nt, Human
gcacccagauagcaaggauuag

SEQ ID NO: 872345 - RNA, 17 nt, Human
cagggcugucugccuag

SEQ ID NO: 872346 - RNA, 22 nt, Human
aagcaaacaggagaagagcugu

SEQ ID NO: 872347 - RNA, 22 nt, Human
uacaaaggaggugcauagaaca

SEQ ID NO: 872348 - RNA, 22 nt, Human
uucuguuuauaauuugcaguug

SEQ ID NO: 872349 - RNA, 17 nt, Human
caggucugaggccaggc

SEQ ID NO: 872350 - RNA, 19 nt, Human
aauuuaguucuuguuuaga

SEQ ID NO: 872351 - RNA, 22 nt, Human
ugggcagacauugaguuuguuc

SEQ ID NO: 872352 - RNA, 22 nt, Human
gggcugccuuuuaauucuuccc

SEQ ID NO: 872353 - RNA, 22 nt, Human
uagaaucugauuacccuaugaa

SEQ ID NO: 872354 - RNA, 22 nt, Human
uucaaguuagagauauauuuag

SEQ ID NO: 872355 - RNA, 22 nt, Human
uuuaccuaguauaaugcaaccu

SEQ ID NO: 872356 - RNA, 18 nt, Human
agcuccuggucucaggga

SEQ ID NO: 872357 - RNA, 22 nt, Human
agggaggaguccucaaagucau

SEQ ID NO: 872358 - RNA, 22 nt, Human
cucugggcaaguaugauagaaa

SEQ ID NO: 872359 - RNA, 22 nt, Human
ccaagcuggacagcagcaagga

SEQ ID NO: 872360 - RNA, 22 nt, Human
uagaauaugugguguauacuuu

SEQ ID NO: 872361 - RNA, 22 nt, Human
uucuucagagaguagaagcaag

SEQ ID NO: 872362 - RNA, 22 nt, Human
uugcuuuagguauagaauccau

SEQ ID NO: 872363 - RNA, 22 nt, Human
caauguuuuuccuuccuuaaua

SEQ ID NO: 872364 - RNA, 22 nt, Human
agaaauguaauugcaacugucu

SEQ ID NO: 872365 - RNA, 22 nt, Human
caaauguugacuaagaggguuu

SEQ ID NO: 872366 - RNA, 22 nt, Human
ugcaaggguguuugagcugccc

SEQ ID NO: 872367 - RNA, 22 nt, Human
gaguccaggcucagaaacccgu

SEQ ID NO: 872368 - RNA, 22 nt, Human
ucagcuucuuucacuuaacaug

SEQ ID NO: 872369 - RNA, 22 nt, Human
agcugugcuguggucaucuggg

SEQ ID NO: 872370 - RNA, 22 nt, Human
uugucugaaccaucucccuggc

SEQ ID NO: 872371 - RNA, 22 nt, Human
uuguauuagcuguaaauuuucu

SEQ ID NO: 872372 - RNA, 22 nt, Human
uugggguacgcaggucugggag

SEQ ID NO: 872373 - RNA, 22 nt, Human
aaagcaaugucucugccugguu

SEQ ID NO: 872374 - RNA, 22 nt, Human
uacagaauuagauuauuagaga

SEQ ID NO: 872375 - RNA, 22 nt, Human
gcaucuuucuguccauucagca

SEQ ID NO: 872376 - RNA, 22 nt, Human
uucuguauauuguaaagacuca

SEQ ID NO: 872377 - RNA, 21 nt, Human
gccagccuguuuaccuguggu

SEQ ID NO: 872378 - RNA, 22 nt, Human
cugugcuggauucugaggcuac

SEQ ID NO: 872379 - RNA, 19 nt, Human
gcucagagacaccuguugc

SEQ ID NO: 872380 - RNA, 22 nt, Human
cuucuuucccaggcauguuuua

SEQ ID NO: 872381 - RNA, 22 nt, Human
guucaguguuugauuucugcug

SEQ ID NO: 872382 - RNA, 22 nt, Human
ccagggaugcuuucccaggacu

SEQ ID NO: 872383 - RNA, 22 nt, Human
gaagagaagcaucaauagguaa

SEQ ID NO: 872384 - RNA, 22 nt, Human
aucaucauucuuggauaaagca

SEQ ID NO: 872385 - RNA, 22 nt, Human
aggacuucugaggucaagucgc

SEQ ID NO: 872386 - RNA, 19 nt, Human
uccacagugguugaacuag

SEQ ID NO: 872387 - RNA, 22 nt, Human
uggacagggcagagaccgaguc

SEQ ID NO: 872388 - RNA, 22 nt, Human
acaguuuaggaugagagaacac

SEQ ID NO: 872389 - RNA, 22 nt, Human
guucuccacugcagagucucuc

SEQ ID NO: 872390 - RNA, 19 nt, Human
gaagaagcuugagaaguag

SEQ ID NO: 872391 - RNA, 22 nt, Human
gaaaggccaccaugccagggac

SEQ ID NO: 872392 - RNA, 20 nt, Human
aaacugucugucaguaucua

SEQ ID NO: 872393 - RNA, 22 nt, Human
cagcuguuaugagguguacaug

SEQ ID NO: 872394 - RNA, 22 nt, Human
uggccagcagaguucacucucu

SEQ ID NO: 872395 - RNA, 22 nt, Human
cccagcuccgagcuccgagccg

SEQ ID NO: 872396 - RNA, 22 nt, Human
aaacagcaauggagaagccagg

SEQ ID NO: 872397 - RNA, 22 nt, Human
gacaaggcagaaagcuuaaagg

SEQ ID NO: 872398 - RNA, 22 nt, Human
aauagcaucuucugagacaaag

SEQ ID NO: 872399 - RNA, 22 nt, Human
uguuucaugaaacauguuuagg

SEQ ID NO: 872400 - RNA, 22 nt, Human
aaauggauguugaguuaaaugu

SEQ ID NO: 872401 - RNA, 22 nt, Human
gaccuuuagugucauguuauau

SEQ ID NO: 872402 - RNA, 22 nt, Human
cugugcugauucagcacaggcc

SEQ ID NO: 872403 - RNA, 22 nt, Human
cagggucuuggcgccaucaccc

SEQ ID NO: 872404 - RNA, 21 nt, Human
agaggaagaagaguguauuau

SEQ ID NO: 872405 - RNA, 22 nt, Human
ggagguccaugugaauguggcc

SEQ ID NO: 872406 - RNA, 22 nt, Human
caguauuuuccuuguuaacuua

SEQ ID NO: 872407 - RNA, 22 nt, Human
gagaggaaagaaccaaugaccc

SEQ ID NO: 872408 - RNA, 22 nt, Human
cugcucuaagcugguggagagu

SEQ ID NO: 872409 - RNA, 19 nt, Human
uucugcuguuccuaggcug

SEQ ID NO: 872410 - RNA, 22 nt, Human
aggagaggcaucaagaaaaucg

SEQ ID NO: 872411 - RNA, 22 nt, Human
acaauucuggguauuuauauag

SEQ ID NO: 872412 - RNA, 18 nt, Human
acugcaggagaggugagg

SEQ ID NO: 872413 - RNA, 22 nt, Human
aaagugacaaccagcaggacuu

SEQ ID NO: 872414 - RNA, 22 nt, Human
agugggagggccauauggugaa

SEQ ID NO: 872415 - RNA, 21 nt, Human
auacagaaggcagacucucuc

SEQ ID NO: 872416 - RNA, 22 nt, Human
uagcuuuaggcacguuugaauu

SEQ ID NO: 872417 - RNA, 23 nt, Human
aguuccagaaaaaugcucaagca

SEQ ID NO: 872418 - RNA, 22 nt, Human
uagacacaaaucucagugacac

SEQ ID NO: 872419 - RNA, 22 nt, Human
uuaccuguuuuacaugcacaac

SEQ ID NO: 872420 - RNA, 22 nt, Human
gaguucaguaguuauagucuag

SEQ ID NO: 872421 - RNA, 20 nt, Human
cucugcugcgcaucccacuu

SEQ ID NO: 872422 - RNA, 22 nt, Human
gugggagaauggccuugcaaac

SEQ ID NO: 872423 - RNA, 22 nt, Human
aaggcuaucuggccuccuugcc

SEQ ID NO: 872424 - RNA, 22 nt, Human
uguuugcaacaacuagauggag

SEQ ID NO: 872425 - RNA, 22 nt, Human
gccagggugugcagggacagga

SEQ ID NO: 872426 - RNA, 22 nt, Human
gcaaacuguuggaguagagucu

SEQ ID NO: 872427 - RNA, 22 nt, Human
guacccaggcacgccuugcuga

SEQ ID NO: 872428 - RNA, 22 nt, Human
ggcuuggcaggugcccugcgca

SEQ ID NO: 872429 - RNA, 22 nt, Human
aggcuucuaggaaacuuucugg

SEQ ID NO: 872430 - RNA, 22 nt, Human
ggaaacaaaccacucauggugg

SEQ ID NO: 872431 - RNA, 22 nt, Human
cuugggcuuagaagguaaguga

SEQ ID NO: 872432 - RNA, 22 nt, Human
guuucauagcauauacgugugu

SEQ ID NO: 872433 - RNA, 22 nt, Human
gggagcgggacugcgcaggcuu

SEQ ID NO: 872434 - RNA, 22 nt, Human
aaucuucagugucuaaaaagca

SEQ ID NO: 872435 - RNA, 18 nt, Human
acugugugaauuagcucc

SEQ ID NO: 872436 - RNA, 22 nt, Human
aagauguuuuaauauuucgagg

SEQ ID NO: 872437 - RNA, 22 nt, Human
aggcuccaugcaaaggcuguuu

SEQ ID NO: 872438 - RNA, 22 nt, Human
uacugaaacuuuucuucaacug

SEQ ID NO: 872439 - RNA, 22 nt, Human
uccugccugagcguggaggagg

SEQ ID NO: 872440 - RNA, 22 nt, Human
caugagcauaaaucagucacga

SEQ ID NO: 872441 - RNA, 22 nt, Human
gcuaggcucggaagcagcaggg

SEQ ID NO: 872442 - RNA, 22 nt, Human
ccaaagugcugggauucaggca

SEQ ID NO: 872443 - RNA, 22 nt, Human
cugagaaauucuuucuuucacu

SEQ ID NO: 872444 - RNA, 22 nt, Human
ugagcagaaaagaaugcugagc

SEQ ID NO: 872445 - RNA, 22 nt, Human
ccagcuggagccaagguggacu

SEQ ID NO: 872446 - RNA, 22 nt, Human
caagcuggcugggagaggcacg

SEQ ID NO: 872447 - RNA, 22 nt, Human
uucacaguggcccucucugagu

SEQ ID NO: 872448 - RNA, 22 nt, Human
guucugggugaugagguuggcu

SEQ ID NO: 872449 - RNA, 22 nt, Human
cggaagcguucucagcaggggc

SEQ ID NO: 872450 - RNA, 22 nt, Human
agggagagguugaaaccucagu

SEQ ID NO: 872451 - RNA, 18 nt, Human
cuguaccacccugagggc

SEQ ID NO: 872452 - RNA, 22 nt, Human
ucaauuauuuuggcuaugcuaa

SEQ ID NO: 872453 - RNA, 22 nt, Human
aacccagccguguagcugccgc

SEQ ID NO: 872454 - RNA, 22 nt, Human
aacaggcaggagaauucugccu

SEQ ID NO: 872455 - RNA, 22 nt, Human
cccauuuagaccuauucugccc

SEQ ID NO: 872456 - RNA, 20 nt, Human
cagcaucaaaggaagguuug

SEQ ID NO: 872457 - RNA, 22 nt, Human
ucuguggccugccuccucauuu

SEQ ID NO: 872458 - RNA, 22 nt, Human
uugcagagcaguaggaauauag

SEQ ID NO: 872459 - RNA, 22 nt, Human
agugccuggcacauggaaggug

SEQ ID NO: 872460 - RNA, 22 nt, Human
cuuaggaaugcguuuccugggu

SEQ ID NO: 872461 - RNA, 22 nt, Human
uaugcuaacugggggaaaagag

SEQ ID NO: 872462 - RNA, 22 nt, Human
cugcuccuccccaucaggcagc

SEQ ID NO: 872463 - RNA, 22 nt, Human
guggccagcaagugcugccucu

SEQ ID NO: 872464 - RNA, 22 nt, Human
ugacacuuccaguuaaaaauau

SEQ ID NO: 872465 - RNA, 22 nt, Human
cagcucuggggcagagugacua

SEQ ID NO: 872466 - RNA, 22 nt, Human
cuccagggagcuguggagguuu

SEQ ID NO: 872467 - RNA, 22 nt, Human
auccagcuuugucuggucuucg

SEQ ID NO: 872468 - RNA, 22 nt, Human
aauaaaguagcguuuaaggugc

SEQ ID NO: 872469 - RNA, 22 nt, Human
uggaaagugcucuagacuuucu

SEQ ID NO: 872470 - RNA, 22 nt, Human
uagcaccuuaacucugcugcgu

SEQ ID NO: 872471 - RNA, 22 nt, Human
uugaaacaguagcucauagacc

SEQ ID NO: 872472 - RNA, 22 nt, Human
auauauacaacuagauuaaaag

SEQ ID NO: 872473 - RNA, 18 nt, Human
agacagacagguuugugc

SEQ ID NO: 872474 - RNA, 22 nt, Human
uucugguguguucucucuaggc

SEQ ID NO: 872475 - RNA, 22 nt, Human
accagaaggaccagaggcaagg

SEQ ID NO: 872476 - RNA, 22 nt, Human
uagcacacacugcaucuacaaa

SEQ ID NO: 872477 - RNA, 22 nt, Human
uccacugcagcuucugauggaa

SEQ ID NO: 872478 - RNA, 22 nt, Human
uggguagguguggccugaaugu

SEQ ID NO: 872479 - RNA, 20 nt, Human
acaguggaaauugaugucug

SEQ ID NO: 872480 - RNA, 22 nt, Human
acagagaccagcaucuucugcc

SEQ ID NO: 872481 - RNA, 22 nt, Human
augcaggaagucggggagcggg

SEQ ID NO: 872482 - RNA, 22 nt, Human
cccaggcaucccauuaaggagc

SEQ ID NO: 872483 - RNA, 22 nt, Human
ucuccugccacugcuucccauu

SEQ ID NO: 872484 - RNA, 22 nt, Human
acuguaccucaaacucuggaac

SEQ ID NO: 872485 - RNA, 22 nt, Human
auguuugaaauuguaaguauau

SEQ ID NO: 872486 - RNA, 22 nt, Human
ccugaagggacuccagagagca

SEQ ID NO: 872487 - RNA, 22 nt, Human
gguuuaaugggugaaggcauga

SEQ ID NO: 872488 - RNA, 22 nt, Human
guucuuccuggaaguggauuuc

SEQ ID NO: 872489 - RNA, 22 nt, Human
uucagauguggcuuugucaggc

SEQ ID NO: 872490 - RNA, 22 nt, Human
uucuuugguguuacccagcuca

SEQ ID NO: 872491 - RNA, 22 nt, Human
aaauacaguggcagcagauaau

SEQ ID NO: 872492 - RNA, 22 nt, Human
ggagaggcuuccagagucgugc

SEQ ID NO: 872493 - RNA, 22 nt, Human
uuaguacauucacugugguagg

SEQ ID NO: 872494 - RNA, 22 nt, Human
acacauauaugugcguguauau

SEQ ID NO: 872495 - RNA, 22 nt, Human
ucugaaauauugguaauacuuu

SEQ ID NO: 872496 - RNA, 22 nt, Human
aauguguacuuuuucaugcuca

SEQ ID NO: 872497 - RNA, 22 nt, Human
aaguuuguuguacauguuagua

SEQ ID NO: 872498 - RNA, 22 nt, Human
uuaggcaauuugauuuuucaag

SEQ ID NO: 872499 - RNA, 22 nt, Human
uuauguuaugaauggaugaucu

SEQ ID NO: 872500 - RNA, 18 nt, Human
agcugguggggagacagc

SEQ ID NO: 872501 - RNA, 22 nt, Human
ugugugaaggagccacuguuca

SEQ ID NO: 872502 - RNA, 22 nt, Human
agaugggccuucgagcaugccc

SEQ ID NO: 872503 - RNA, 21 nt, Human
uagaaagucaaagcuaucagc

SEQ ID NO: 872504 - RNA, 19 nt, Human
ggagccuggcaggggcgug

SEQ ID NO: 872505 - RNA, 21 nt, Human
cuagcacgauuccaaguaaua

SEQ ID NO: 872506 - RNA, 16 nt, Human
acagugugcuaagcau

SEQ ID NO: 872507 - RNA, 22 nt, Human
uugcuuuugugugcucucugga

SEQ ID NO: 872508 - RNA, 22 nt, Human
gacauuuaauaguauuguggga

SEQ ID NO: 872509 - RNA, 22 nt, Human
ggaggggucucuagcgaggaga

SEQ ID NO: 872510 - RNA, 20 nt, Human
cucucuccaucucaguggcc

SEQ ID NO: 872511 - RNA, 22 nt, Human
cuccaggccagggaaguggaca

SEQ ID NO: 872512 - RNA, 22 nt, Human
ccagcugcuugggaaaaugucu

SEQ ID NO: 872513 - RNA, 22 nt, Human
ugcuggagacauagcaggcagc

SEQ ID NO: 872514 - RNA, 22 nt, Human
cacaggccaauacccucucucu

SEQ ID NO: 872515 - RNA, 22 nt, Human
uggccuggcugcccugucugga

SEQ ID NO: 872516 - RNA, 22 nt, Human
agcuagaaguacagccauauga

SEQ ID NO: 872517 - RNA, 22 nt, Human
aaagacuugggagcaguaugcu

SEQ ID NO: 872518 - RNA, 22 nt, Human
acaugaggugcuauaggucuac

SEQ ID NO: 872519 - RNA, 22 nt, Human
ggcaggaagcucauguggacug

SEQ ID NO: 872520 - RNA, 22 nt, Human
ggggacaguuaaagaccaagac

SEQ ID NO: 872521 - RNA, 22 nt, Human
ccuccugggcuccugucugcac

SEQ ID NO: 872522 - RNA, 22 nt, Human
aaagcagugcaccuuaauugau

SEQ ID NO: 872523 - RNA, 22 nt, Human
gcaagcugcuuaagcucauugu

SEQ ID NO: 872524 - RNA, 22 nt, Human
cagcccugcagccauggccugu

SEQ ID NO: 872525 - RNA, 22 nt, Human
cucagcccagcccaggaccagg

SEQ ID NO: 872526 - RNA, 22 nt, Human
ugaacagaucaauagaacugac

SEQ ID NO: 872527 - RNA, 22 nt, Human
aaagauuucacaucccaagccu

SEQ ID NO: 872528 - RNA, 22 nt, Human
uucauguaauuccauaagguaa

SEQ ID NO: 872529 - RNA, 22 nt, Human
gaacauuacugcuugggagagg

SEQ ID NO: 872530 - RNA, 22 nt, Human
gaguacaucuuaauuugacuaa

SEQ ID NO: 872531 - RNA, 22 nt, Human
gcuggcaccugcaccaagcagg

SEQ ID NO: 872532 - RNA, 22 nt, Human
uguucauuuggcccuuuuguau

SEQ ID NO: 872533 - RNA, 22 nt, Human
cacaaaaguaggaggcaggcgg

SEQ ID NO: 872534 - RNA, 22 nt, Human
acuuacaaguucccuuucucag

SEQ ID NO: 872535 - RNA, 22 nt, Human
ggcugccauaacagaguaccac

SEQ ID NO: 872536 - RNA, 21 nt, Human
acagucuccccagaucucucc

SEQ ID NO: 872537 - RNA, 22 nt, Human
uuguccaaaguaacacaucuag

SEQ ID NO: 872538 - RNA, 20 nt, Human
uccagcugggaacagcugau

SEQ ID NO: 872539 - RNA, 22 nt, Human
cugugugugagaagcagguuga

SEQ ID NO: 872540 - RNA, 22 nt, Human
ccaaaauuaagccucuuauguu

SEQ ID NO: 872541 - RNA, 22 nt, Human
aaaugccugaaugguauuuggu

SEQ ID NO: 872542 - RNA, 22 nt, Human
augcauauggcuugagggaaua

SEQ ID NO: 872543 - RNA, 22 nt, Human
uugaaagaacucuucagagaua

SEQ ID NO: 872544 - RNA, 17 nt, Human
gugucuuugcuguugug

SEQ ID NO: 872545 - RNA, 22 nt, Human
uucucaugaaacucgcuuccuc

SEQ ID NO: 872546 - RNA, 22 nt, Human
gauuuguagcuuuucagucugu

SEQ ID NO: 872547 - RNA, 22 nt, Human
ggagcuccuggcagugacagag

SEQ ID NO: 872548 - RNA, 22 nt, Human
guucaguuauuucugaagauau

SEQ ID NO: 872549 - RNA, 21 nt, Human
caaaagagacugauucuugga

SEQ ID NO: 872550 - RNA, 22 nt, Human
gcuguucccauguggggcucag

SEQ ID NO: 872551 - RNA, 22 nt, Human
aggacagaccuaggacuggagc

SEQ ID NO: 872552 - RNA, 22 nt, Human
aggcugcuucuuguccuuggca

SEQ ID NO: 872553 - RNA, 21 nt, Human
ggggcagagcuaggcccugca

SEQ ID NO: 872554 - RNA, 22 nt, Human
ggcccagccuugggguuucuuu

SEQ ID NO: 872555 - RNA, 22 nt, Human
ugaagacaaagucaggcccaga

SEQ ID NO: 872556 - RNA, 22 nt, Human
auguauaugugugcacgcacag

SEQ ID NO: 872557 - RNA, 21 nt, Human
gcccagcaaggugagaaggcc

SEQ ID NO: 872558 - RNA, 22 nt, Human
ucucagaguuuuuuuccaggac

SEQ ID NO: 872559 - RNA, 22 nt, Human
ggcuuuauuugcagccauuguu

SEQ ID NO: 872560 - RNA, 22 nt, Human
aagacaauauugcugugaacgu

SEQ ID NO: 872561 - RNA, 22 nt, Human
cuggcucugucacccuuucucc

SEQ ID NO: 872562 - RNA, 22 nt, Human
cuggaauguucuccagcauggc

SEQ ID NO: 872563 - RNA, 22 nt, Human
ugcagagucccaggacccagag

SEQ ID NO: 872564 - RNA, 22 nt, Human
gagggaugguaguugacacuga

SEQ ID NO: 872565 - RNA, 22 nt, Human
ugaaaaacugaauaguugagua

SEQ ID NO: 872566 - RNA, 22 nt, Human
agcacagauggauguauucauu

SEQ ID NO: 872567 - RNA, 19 nt, Human
ugucacugucauggcccag

SEQ ID NO: 872568 - RNA, 22 nt, Human
ugaguccauugauggauaguga

SEQ ID NO: 872569 - RNA, 22 nt, Human
uuuuaagaaauguaugacuguc

SEQ ID NO: 872570 - RNA, 22 nt, Human
gacaauuucucaauauagaaac

SEQ ID NO: 872571 - RNA, 22 nt, Human
ccugaggccccugaggauagca

SEQ ID NO: 872572 - RNA, 22 nt, Human
cuugccaguguugcagaagcuc

SEQ ID NO: 872573 - RNA, 22 nt, Human
aauguccaccgugaugauggaa

SEQ ID NO: 872574 - RNA, 22 nt, Human
ugugugcucgauggcccugcag

SEQ ID NO: 872575 - RNA, 19 nt, Human
auguacccagugucaaucc

SEQ ID NO: 872576 - RNA, 22 nt, Human
aauaagaauuuacuugucaaga

SEQ ID NO: 872577 - RNA, 22 nt, Human
uuucagggaaguguugaaaagg

SEQ ID NO: 872578 - RNA, 22 nt, Human
auugaagaaacccaaauaaugg

SEQ ID NO: 872579 - RNA, 22 nt, Human
agcagaaaauuggaaaugacaa

SEQ ID NO: 872580 - RNA, 22 nt, Human
uuauuucauugauuucuaagac

SEQ ID NO: 872581 - RNA, 22 nt, Human
gcugugugcucacguaguggaa

SEQ ID NO: 872582 - RNA, 22 nt, Human
uuguacaauggaugccagauga

SEQ ID NO: 872583 - RNA, 22 nt, Human
cuggccacuggagguggcaccc

SEQ ID NO: 872584 - RNA, 22 nt, Human
gcacagaggaagcacagacucu

SEQ ID NO: 872585 - RNA, 22 nt, Human
auaguucacuaauagcaaaagc

SEQ ID NO: 872586 - RNA, 22 nt, Human
aaucucacauagcuaggaguag

SEQ ID NO: 872587 - RNA, 22 nt, Human
auugauaucaguuugcugauug

SEQ ID NO: 872588 - RNA, 22 nt, Human
uccugaggccucugugauguga

SEQ ID NO: 872589 - RNA, 22 nt, Human
gagagaaagccccugcaucccu

SEQ ID NO: 872590 - RNA, 22 nt, Human
agauccaggguuggauuugcau

SEQ ID NO: 872591 - RNA, 22 nt, Human
acucuguagccuguaagagagc

SEQ ID NO: 872592 - RNA, 19 nt, Human
uaaaaugucuguggucagu

SEQ ID NO: 872593 - RNA, 18 nt, Human
aaaguucagggagaguug

SEQ ID NO: 872594 - RNA, 22 nt, Human
gcaggagguugagccaggacug

SEQ ID NO: 872595 - RNA, 22 nt, Human
acuucaaaaugaguuuccuggu

SEQ ID NO: 872596 - RNA, 22 nt, Human
auggccagagaaggcaggguca

SEQ ID NO: 872597 - RNA, 22 nt, Human
uucaguuucguuaucuaugaga

SEQ ID NO: 872598 - RNA, 22 nt, Human
gugacugugaucuuauuugcaa

SEQ ID NO: 872599 - RNA, 22 nt, Human
aggugggguucagucucagccg

SEQ ID NO: 872600 - RNA, 22 nt, Human
ugccuggcaagaggggcuggcu

SEQ ID NO: 872601 - RNA, 22 nt, Human
ugaggcuguucuaccagggcca

SEQ ID NO: 872602 - RNA, 22 nt, Human
gcuggagugagggaccauauuu

SEQ ID NO: 872603 - RNA, 22 nt, Human
acccaggcugcuucucaguggc

SEQ ID NO: 872604 - RNA, 22 nt, Human
cuacaaagaaagcugaggggaa

SEQ ID NO: 872605 - RNA, 22 nt, Human
ggcucccuggaaaucccgaggc

SEQ ID NO: 872606 - RNA, 22 nt, Human
ucaauuaugccauugcaauauu

SEQ ID NO: 872607 - RNA, 22 nt, Human
ucacuggggccuuuggucagga

SEQ ID NO: 872608 - RNA, 22 nt, Human
ccaucccugagucacaggaggg

SEQ ID NO: 872609 - RNA, 22 nt, Human
aucauguuaaauauuucaaucu

SEQ ID NO: 872610 - RNA, 22 nt, Human
cucauaaaggcacacuuguugu

SEQ ID NO: 872611 - RNA, 22 nt, Human
ugccugggccucugaggaaggc

SEQ ID NO: 872612 - RNA, 22 nt, Human
gcagacuggucuucagccuugg

SEQ ID NO: 872613 - RNA, 22 nt, Human
uaauaauuggcuaacccuggga

SEQ ID NO: 872614 - RNA, 22 nt, Human
acacaugagaaacaucaguugu

SEQ ID NO: 872615 - RNA, 22 nt, Human
agcugucucugguauuauguga

SEQ ID NO: 872616 - RNA, 22 nt, Human
aauaaagccuuauugauuuuac

SEQ ID NO: 872617 - RNA, 18 nt, Human
aagcaggguccauugugc

SEQ ID NO: 872618 - RNA, 18 nt, Human
gcagagugcgucucugug

SEQ ID NO: 872619 - RNA, 21 nt, Human
uuacacacugcuucuagaaug

SEQ ID NO: 872620 - RNA, 22 nt, Human
cacagcuugggcucugacaaua

SEQ ID NO: 872621 - RNA, 22 nt, Human
ucaagagccagguaagcacagg

SEQ ID NO: 872622 - RNA, 22 nt, Human
gugugccaacaaaagacagugc

SEQ ID NO: 872623 - RNA, 22 nt, Human
ucuuugaaguugaaguaguugg

SEQ ID NO: 872624 - RNA, 22 nt, Human
aggcuucagacaaauguuaugg

SEQ ID NO: 872625 - RNA, 22 nt, Human
guuauuuuaacuucucaguaau

SEQ ID NO: 872626 - RNA, 22 nt, Human
gcuuucugccugggcuccauuu

SEQ ID NO: 872627 - RNA, 18 nt, Human
cuccuggcugauggugag

SEQ ID NO: 872628 - RNA, 22 nt, Human
cugagaaaccaggugcucugau

SEQ ID NO: 872629 - RNA, 22 nt, Human
cacaauuuccuugcuucacuuu

SEQ ID NO: 872630 - RNA, 22 nt, Human
auuacaacuaugugcucugcaa

SEQ ID NO: 872631 - RNA, 17 nt, Human
aggcaggagauuggaga

SEQ ID NO: 872632 - RNA, 22 nt, Human
uguuuaauaauucuaugauagu

SEQ ID NO: 872633 - RNA, 22 nt, Human
uauguaucuguucaucaguuaa

SEQ ID NO: 872634 - RNA, 22 nt, Human
auugacaagcaguaugucuuag

SEQ ID NO: 872635 - RNA, 22 nt, Human
cugcaggcaucuaacugugggc

SEQ ID NO: 872636 - RNA, 22 nt, Human
ucaugacauucaggugcuacau

SEQ ID NO: 872637 - RNA, 22 nt, Human
ggcaggcuccaagcauccuaug

SEQ ID NO: 872638 - RNA, 22 nt, Human
cccacaggcaggugcaugggcu

SEQ ID NO: 872639 - RNA, 22 nt, Human
auuucuagcagggcaggaaaga

SEQ ID NO: 872640 - RNA, 22 nt, Human
aggccuggccugggcggcauug

SEQ ID NO: 872641 - RNA, 22 nt, Human
acugaacauaugcaagaccauu

SEQ ID NO: 872642 - RNA, 22 nt, Human
cuuuauguucaguacaaugcuu

SEQ ID NO: 872643 - RNA, 22 nt, Human
cugcagcaagagaagugcugac

SEQ ID NO: 872644 - RNA, 22 nt, Human
acuguggccggaacagugggac

SEQ ID NO: 872645 - RNA, 22 nt, Human
agaagccagaggcaguggguac

SEQ ID NO: 872646 - RNA, 22 nt, Human
ggcaggacucuucugugggccg

SEQ ID NO: 872647 - RNA, 22 nt, Human
ucacccagacagcuugcacuga

SEQ ID NO: 872648 - RNA, 22 nt, Human
agucuccagaaauauagcagug

SEQ ID NO: 872649 - RNA, 22 nt, Human
uaggccacucuccuuugucuca

SEQ ID NO: 872650 - RNA, 22 nt, Human
uauauuuaauuaguugcuggau

SEQ ID NO: 872651 - RNA, 22 nt, Human
caggaaagaaaugagaacacca

SEQ ID NO: 872652 - RNA, 22 nt, Human
aagccaggagcgaggccucggc

SEQ ID NO: 872653 - RNA, 22 nt, Human
uauucuccccggaucagggcaa

SEQ ID NO: 872654 - RNA, 22 nt, Human
ggcugcccugggaggcaagggu

SEQ ID NO: 872655 - RNA, 22 nt, Human
uuucaaagucaagaaggauacu

SEQ ID NO: 872656 - RNA, 22 nt, Human
gaggggaaaacaggaauuaaca

SEQ ID NO: 872657 - RNA, 22 nt, Human
aucaucuucauauuccucagcu

SEQ ID NO: 872658 - RNA, 22 nt, Human
guuuaugaauugcauucccuuu

SEQ ID NO: 872659 - RNA, 22 nt, Human
aggaauuauaguaguauuuguc

SEQ ID NO: 872660 - RNA, 22 nt, Human
uuggguccuaaccccagagucu

SEQ ID NO: 872661 - RNA, 20 nt, Human
ggcagccaaucagcgugccg

SEQ ID NO: 872662 - RNA, 22 nt, Human
ucuucauauauaaaguggaaua

SEQ ID NO: 872663 - RNA, 22 nt, Human
ugccuaggcuggaaugcagugg

SEQ ID NO: 872664 - RNA, 22 nt, Human
auguaaacaaagaucuuccugc

SEQ ID NO: 872665 - RNA, 22 nt, Human
ggcagccuucucucauagguga

SEQ ID NO: 872666 - RNA, 22 nt, Human
acauuuuuggguugaugucuga

SEQ ID NO: 872667 - RNA, 22 nt, Human
aaauggcaguagaaaagaaucc

SEQ ID NO: 872668 - RNA, 22 nt, Human
cccaggucccgccccagcucua

SEQ ID NO: 872669 - RNA, 22 nt, Human
ugccaaauuuguaucuuaagga

SEQ ID NO: 872670 - RNA, 22 nt, Human
auuuucagcccccacucguggc

SEQ ID NO: 872671 - RNA, 23 nt, Human
uaggccagggugaccuggggaga

SEQ ID NO: 872672 - RNA, 22 nt, Human
ugcugcaguauauauuucuugg

SEQ ID NO: 872673 - RNA, 22 nt, Human
uuucaaguuuaguguguucaaa

SEQ ID NO: 872674 - RNA, 22 nt, Human
cuguuguaaagcuauucauuug

SEQ ID NO: 872675 - RNA, 22 nt, Human
uguacaauguggccaguguuaa

SEQ ID NO: 872676 - RNA, 22 nt, Human
auuaaucauuucugcauuaucu

SEQ ID NO: 872677 - RNA, 22 nt, Human
acaggacaggcugggcuagacu

SEQ ID NO: 872678 - RNA, 22 nt, Human
gcuggccugggcagaggcuaug

SEQ ID NO: 872679 - RNA, 22 nt, Human
uugaaacuuuucuuggagaaac

SEQ ID NO: 872680 - RNA, 22 nt, Human
uccuguggagaggacuggaggu

SEQ ID NO: 872681 - RNA, 21 nt, Human
uuuauguacuucauagaguag

SEQ ID NO: 872682 - RNA, 22 nt, Human
ggcuucuuccuggcuccuauua

SEQ ID NO: 872683 - RNA, 22 nt, Human
caugcuccagcuccagacaggu

SEQ ID NO: 872684 - RNA, 19 nt, Human
cagcaauaaugccagaugg

SEQ ID NO: 872685 - RNA, 22 nt, Human
uuucuaagacauuugucaucuu

SEQ ID NO: 872686 - RNA, 22 nt, Human
gcagagguguagcccccuccau

SEQ ID NO: 872687 - RNA, 22 nt, Human
aucaucuaguuuaacuuucuuu

SEQ ID NO: 872688 - RNA, 22 nt, Human
aggaggcuuuugcaggugccac

SEQ ID NO: 872689 - RNA, 22 nt, Human
gaucauuucaguccaguaaaua

SEQ ID NO: 872690 - RNA, 22 nt, Human
uucagcagucguccaggaaaag

SEQ ID NO: 872691 - RNA, 22 nt, Human
uuucucuuugacaggaaucaga

SEQ ID NO: 872692 - RNA, 22 nt, Human
auugcaaaggucccauucaaga

SEQ ID NO: 872693 - RNA, 22 nt, Human
aacacagaguauuugaagcauu

SEQ ID NO: 872694 - RNA, 20 nt, Human
agugucuggauuuuguaacc

SEQ ID NO: 872695 - RNA, 22 nt, Human
ugugugcacuuaaugcaaucau

SEQ ID NO: 872696 - RNA, 20 nt, Human
cugaggggucugacuuggac

SEQ ID NO: 872697 - RNA, 22 nt, Human
gggcagguggagggcccagcca

SEQ ID NO: 872698 - RNA, 22 nt, Human
cccagccucuggguucugccgg

SEQ ID NO: 872699 - RNA, 22 nt, Human
gucuaauaacuuucagucauuu

SEQ ID NO: 872700 - RNA, 22 nt, Human
aagcacagacacaaaaggcuuu

SEQ ID NO: 872701 - RNA, 22 nt, Human
ugggcaaggcuggagccugcag

SEQ ID NO: 872702 - RNA, 22 nt, Human
gaggaagaugguugaguggucc

SEQ ID NO: 872703 - RNA, 22 nt, Human
uuggagggacugagcuucaguc

SEQ ID NO: 872704 - RNA, 22 nt, Human
cuggcuccuccaaggccuggag

SEQ ID NO: 872705 - RNA, 22 nt, Human
gcccucucuucugcagccucca

SEQ ID NO: 872706 - RNA, 22 nt, Human
agcccuggcucccagcagcgcu

SEQ ID NO: 872707 - RNA, 22 nt, Human
gcugggagcaaagccaugcaua

SEQ ID NO: 872708 - RNA, 22 nt, Human
agggccagcacuccuggcagga

SEQ ID NO: 872709 - RNA, 22 nt, Human
cacaaaguggguggaaaacuaa

SEQ ID NO: 872710 - RNA, 22 nt, Human
uuucuaaggugauccuuucuua

SEQ ID NO: 872711 - RNA, 22 nt, Human
cagaguccaauugcucagagcg

SEQ ID NO: 872712 - RNA, 22 nt, Human
uucaggagcuggcugcgaagga

SEQ ID NO: 872713 - RNA, 22 nt, Human
aaagaguuggacuuucucaggc

SEQ ID NO: 872714 - RNA, 22 nt, Human
uacaguacagucuagacucugg

SEQ ID NO: 872715 - RNA, 22 nt, Human
auuuacagaugaugcuauuuga

SEQ ID NO: 872716 - RNA, 22 nt, Human
uuccugagucccggguaaagau

SEQ ID NO: 872717 - RNA, 22 nt, Human
aaguuaucuuugauuagaaaua

SEQ ID NO: 872718 - RNA, 20 nt, Human
caggccucugggggcccugg

SEQ ID NO: 872719 - RNA, 22 nt, Human
uaagaaacuauggagaagaacu

SEQ ID NO: 872720 - RNA, 22 nt, Human
ccagcucuagccccauguggcu

SEQ ID NO: 872721 - RNA, 20 nt, Human
agcuggagaagggcccuucc

SEQ ID NO: 872722 - RNA, 22 nt, Human
cucaggaaccgcggcagcagcc

SEQ ID NO: 872723 - RNA, 22 nt, Human
cuaaggaugcauauguuuuguu

SEQ ID NO: 872724 - RNA, 22 nt, Human
agaaaguuuauuccuaucuagc

SEQ ID NO: 872725 - RNA, 22 nt, Human
uucccuggcaugaguguaagau

SEQ ID NO: 872726 - RNA, 22 nt, Human
gcuggcugccuuacuuugugga

SEQ ID NO: 872727 - RNA, 22 nt, Human
gcaguuuaguagaugacauuau

SEQ ID NO: 872728 - RNA, 22 nt, Human
aauuaaaugacaggggaagaug

SEQ ID NO: 872729 - RNA, 22 nt, Human
ccuggcacauaguaaguacuag

SEQ ID NO: 872730 - RNA, 22 nt, Human
ggaugcugggagacagcaggca

SEQ ID NO: 872731 - RNA, 22 nt, Human
agcuuuggcccuggagguuacu

SEQ ID NO: 872732 - RNA, 23 nt, Human
gcaugcaacuugcaguaguauuc

SEQ ID NO: 872733 - RNA, 22 nt, Human
agagagcaggacuucacugagc

SEQ ID NO: 872734 - RNA, 22 nt, Human
uauuucuuucagguauguguug

SEQ ID NO: 872735 - RNA, 22 nt, Human
ccagcccuuagauaaaccuggc

SEQ ID NO: 872736 - RNA, 20 nt, Human
uuccuguccucucuuucagg

SEQ ID NO: 872737 - RNA, 23 nt, Human
ugcugggcagagcuggugcugag

SEQ ID NO: 872738 - RNA, 22 nt, Human
gcagucuuugaaugugaaauag

SEQ ID NO: 872739 - RNA, 22 nt, Human
cuucacagaauaaacucauuau

SEQ ID NO: 872740 - RNA, 22 nt, Human
aaggccacuuuaccuuaaaucc

SEQ ID NO: 872741 - RNA, 22 nt, Human
acccugagccgccaggaaggcc

SEQ ID NO: 872742 - RNA, 22 nt, Human
augcaaggguaaccccagacau

SEQ ID NO: 872743 - RNA, 22 nt, Human
gaccagucauuacucaugcccu

SEQ ID NO: 872744 - RNA, 22 nt, Human
agugucuguugcuuuugcagug

SEQ ID NO: 872745 - RNA, 22 nt, Human
aaaguuuucugccuucauuaga

SEQ ID NO: 872746 - RNA, 22 nt, Human
uccccacagcagaagaucugag

SEQ ID NO: 872747 - RNA, 22 nt, Human
agccagcuuucacaaaugaaga

SEQ ID NO: 872748 - RNA, 22 nt, Human
gccaaggaaggcuuccuggaag

SEQ ID NO: 872749 - RNA, 22 nt, Human
gccacagguacuaugggagaga

SEQ ID NO: 872750 - RNA, 22 nt, Human
uaaacauuuguuauucuuguuu

SEQ ID NO: 872751 - RNA, 22 nt, Human
agagaucugugcuuacuacaag

SEQ ID NO: 872752 - RNA, 22 nt, Human
ugaggcaggaguuaaugugcuc

SEQ ID NO: 872753 - RNA, 22 nt, Human
ggauggagaugaccauggugac

SEQ ID NO: 872754 - RNA, 19 nt, Human
cuuugcaggggauggguga

SEQ ID NO: 872755 - RNA, 22 nt, Human
auaucaaaauaaacagcaugca

SEQ ID NO: 872756 - RNA, 22 nt, Human
cagggcuccccgcaccgcagcc

SEQ ID NO: 872757 - RNA, 23 nt, Human
uucaggaaaugaauacagacaca

SEQ ID NO: 872758 - RNA, 22 nt, Human
uaugaguucaguuaucuuaagu

SEQ ID NO: 872759 - RNA, 22 nt, Human
aggccacagagagugcaugugc

SEQ ID NO: 872760 - RNA, 22 nt, Human
aagcaaagacaguuugagugga

SEQ ID NO: 872761 - RNA, 22 nt, Human
ugagcccauguagcacuuccau

SEQ ID NO: 872762 - RNA, 22 nt, Human
guguguagaugugagaggacug

SEQ ID NO: 872763 - RNA, 22 nt, Human
ucugggugcccuuugcucuguu

SEQ ID NO: 872764 - RNA, 22 nt, Human
uuggcugcucuguguuuaguau

SEQ ID NO: 872765 - RNA, 18 nt, Human
agucuuuaaagauguuac

SEQ ID NO: 872766 - RNA, 20 nt, Human
cagcaaaaugaaaauggauu

SEQ ID NO: 872767 - RNA, 22 nt, Human
ucagcucucacagaucucaacc

SEQ ID NO: 872768 - RNA, 22 nt, Human
caugaguuuuuuaguucaugca

SEQ ID NO: 872769 - RNA, 22 nt, Human
caguucugguuugcagauauau

SEQ ID NO: 872770 - RNA, 22 nt, Human
gaaggcuggggccuucucaucu

SEQ ID NO: 872771 - RNA, 22 nt, Human
agauuccucagucaugaagccu

SEQ ID NO: 872772 - RNA, 22 nt, Human
acaagaaccaaagaaggauauu

SEQ ID NO: 872773 - RNA, 22 nt, Human
uauucacaaaaugagguccuca

SEQ ID NO: 872774 - RNA, 22 nt, Human
uaaagacagauggaccagccau

SEQ ID NO: 872775 - RNA, 19 nt, Human
gagcagcugcacccauuga

SEQ ID NO: 872776 - RNA, 20 nt, Human
aacacugagggcuacucuuc

SEQ ID NO: 872777 - RNA, 22 nt, Human
agcaauguggaccagcucaggg

SEQ ID NO: 872778 - RNA, 22 nt, Human
agaacaggcaguugguuggauu

SEQ ID NO: 872779 - RNA, 22 nt, Human
agcuucauggaaccugaggcua

SEQ ID NO: 872780 - RNA, 19 nt, Human
ugcuccauugaggugucuc

SEQ ID NO: 872781 - RNA, 22 nt, Human
gagggccuacuggacaugucag

SEQ ID NO: 872782 - RNA, 22 nt, Human
aggucagagcaauguauugcuu

SEQ ID NO: 872783 - RNA, 22 nt, Human
gcacuuuagcauugguuuacac

SEQ ID NO: 872784 - RNA, 22 nt, Human
agggugucagccacggaauggg

SEQ ID NO: 872785 - RNA, 22 nt, Human
uggcagggagccaccggucaug

SEQ ID NO: 872786 - RNA, 22 nt, Human
ggucuucagcuuugcaugucuu

SEQ ID NO: 872787 - RNA, 19 nt, Human
guguagcuauuggucaaaa

SEQ ID NO: 872788 - RNA, 22 nt, Human
cauuguugcugcuucaagauau

SEQ ID NO: 872789 - RNA, 22 nt, Human
ggcugcagaaguacuuccggau

SEQ ID NO: 872790 - RNA, 22 nt, Human
cagggcucaggcucugggauuc

SEQ ID NO: 872791 - RNA, 22 nt, Human
cagucccagaagagccugggag

SEQ ID NO: 872792 - RNA, 22 nt, Human
ugggggaacuguugcgcgcggg

SEQ ID NO: 872793 - RNA, 22 nt, Human
auaaagcuuugaaauggagaua

SEQ ID NO: 872794 - RNA, 21 nt, Human
uggaaagauucaaagaccagg

SEQ ID NO: 872795 - RNA, 22 nt, Human
gcaguggcaugaugugggcuca

SEQ ID NO: 872796 - RNA, 22 nt, Human
cugcagcucuagcuuuugaccu

SEQ ID NO: 872797 - RNA, 19 nt, Human
cauauuuuugggcuggcau

SEQ ID NO: 872798 - RNA, 22 nt, Human
gagccaggguuugaaacuagac

SEQ ID NO: 872799 - RNA, 22 nt, Human
uuuccucuuauacaguguuuau

SEQ ID NO: 872800 - RNA, 22 nt, Human
uuaagauguucagauaauuugg

SEQ ID NO: 872801 - RNA, 22 nt, Human
uggcuucuggcuggugagaaau

SEQ ID NO: 872802 - RNA, 22 nt, Human
uuaguacauagaugaugguuga

SEQ ID NO: 872803 - RNA, 22 nt, Human
auccuucuaccuaggacuauuu

SEQ ID NO: 872804 - RNA, 21 nt, Human
cuggagcuuggugagaagugu

SEQ ID NO: 872805 - RNA, 22 nt, Human
aggacacaccagguccagcugu

SEQ ID NO: 872806 - RNA, 22 nt, Human
uuugacaagagggcaucuucag

SEQ ID NO: 872807 - RNA, 22 nt, Human
agaaucuuucugaaugacugug

SEQ ID NO: 872808 - RNA, 22 nt, Human
ugccucugaggaagauuguguu

SEQ ID NO: 872809 - RNA, 22 nt, Human
cucugcugucucagaugggcca

SEQ ID NO: 872810 - RNA, 22 nt, Human
aguucuuugugaguaauacaga

SEQ ID NO: 872811 - RNA, 22 nt, Human
cccagaggggucgucugagggg

SEQ ID NO: 872812 - RNA, 22 nt, Human
uuuccaaagcugaguugagcaa

SEQ ID NO: 872813 - RNA, 22 nt, Human
cucuggcagagcuguagacuuc

SEQ ID NO: 872814 - RNA, 22 nt, Human
uuggggcaugauuagauuauga

SEQ ID NO: 872815 - RNA, 22 nt, Human
uccccagacagcgggaggccug

SEQ ID NO: 872816 - RNA, 22 nt, Human
ugagcagagaugacugggcauu

SEQ ID NO: 872817 - RNA, 22 nt, Human
cacuuagaaaacuugagcaagu

SEQ ID NO: 872818 - RNA, 22 nt, Human
cuuuacaaauuagcucucggga

SEQ ID NO: 872819 - RNA, 23 nt, Human
ugugaaauuugaggucagugcuu

SEQ ID NO: 872820 - RNA, 22 nt, Human
agguaugugggugagaggagga

SEQ ID NO: 872821 - RNA, 22 nt, Human
gccucucuccuuggcuugcagu

SEQ ID NO: 872822 - RNA, 22 nt, Human
auaauaaugaaagccacugugu

SEQ ID NO: 872823 - RNA, 22 nt, Human
cucucuggaauuaaagcccaau

SEQ ID NO: 872824 - RNA, 22 nt, Human
agcuucuagcccauccagcagg

SEQ ID NO: 872825 - RNA, 22 nt, Human
acugccuuagaacaaagcagga

SEQ ID NO: 872826 - RNA, 22 nt, Human
uuucagugucaguaaugcagca

SEQ ID NO: 872827 - RNA, 20 nt, Human
uggaggcaccuguggagauc

SEQ ID NO: 872828 - RNA, 22 nt, Human
augcugaauugaugcgagggag

SEQ ID NO: 872829 - RNA, 22 nt, Human
agauggagucucacucuuguug

SEQ ID NO: 872830 - RNA, 22 nt, Human
gagcuagaguuuguaggguaga

SEQ ID NO: 872831 - RNA, 22 nt, Human
gggcaaggcagaagaguuggag

SEQ ID NO: 872832 - RNA, 22 nt, Human
guggcaggucccauuggagcag

SEQ ID NO: 872833 - RNA, 22 nt, Human
auacaggugugagggucucuuu

SEQ ID NO: 872834 - RNA, 22 nt, Human
acucucaaauauuaaucuuugg

SEQ ID NO: 872835 - RNA, 23 nt, Human
ugcuggcugaaacagccaaagga

SEQ ID NO: 872836 - RNA, 22 nt, Human
ggccccagauucugggcugggu

SEQ ID NO: 872837 - RNA, 22 nt, Human
gugccagggggcacugaacaga

SEQ ID NO: 872838 - RNA, 22 nt, Human
guuucuuaaguuacaaaaucuu

SEQ ID NO: 872839 - RNA, 22 nt, Human
ugggcuccagcaccugugcucu

SEQ ID NO: 872840 - RNA, 22 nt, Human
acauuuuuauucaucaaagcag

SEQ ID NO: 872841 - RNA, 22 nt, Human
auuuggaauucgaguaauucca

SEQ ID NO: 872842 - RNA, 22 nt, Human
ccaagggcucuggacagagugg

SEQ ID NO: 872843 - RNA, 20 nt, Human
uggaauguagucggugagag

SEQ ID NO: 872844 - RNA, 22 nt, Human
gugagcguggucuucugugggu

SEQ ID NO: 872845 - RNA, 22 nt, Human
uaaauccagcuucuaauuuaga

SEQ ID NO: 872846 - RNA, 22 nt, Human
ugaggucagcccuuccuaugau

SEQ ID NO: 872847 - RNA, 22 nt, Human
agagccugaggccaggaaaaug

SEQ ID NO: 872848 - RNA, 22 nt, Human
ucuugggagucccaggacauag

SEQ ID NO: 872849 - RNA, 22 nt, Human
gccaggcucagcagucaaccug

SEQ ID NO: 872850 - RNA, 22 nt, Human
uuagaaagaauagccuggcugc

SEQ ID NO: 872851 - RNA, 22 nt, Human
uuagcaauaugaaugcauuugc

SEQ ID NO: 872852 - RNA, 22 nt, Human
agaaagcuggagucaagcagag

SEQ ID NO: 872853 - RNA, 17 nt, Human
ucagcaaagacaaagga

SEQ ID NO: 872854 - RNA, 22 nt, Human
ugacagaaagaauaugucaauc

SEQ ID NO: 872855 - RNA, 22 nt, Human
ugcagaagaaaacagcugugug

SEQ ID NO: 872856 - RNA, 22 nt, Human
ugcuucugcucagcuuccuacu

SEQ ID NO: 872857 - RNA, 22 nt, Human
gacucuggcagcacuagggggc

SEQ ID NO: 872858 - RNA, 22 nt, Human
ccagcccuugagauggaaggga

SEQ ID NO: 872859 - RNA, 22 nt, Human
aggcauuuuuguuaaucuuugg

SEQ ID NO: 872860 - RNA, 22 nt, Human
uccaccacuuccugcagccauu

SEQ ID NO: 872861 - RNA, 22 nt, Human
acaucccacagaaacauacaua

SEQ ID NO: 872862 - RNA, 21 nt, Human
uuguuacaaugcaagaguaug

SEQ ID NO: 872863 - RNA, 22 nt, Human
ggagcugcuucuugcugugggu

SEQ ID NO: 872864 - RNA, 22 nt, Human
uaguuuguagaaaucuagaaau

SEQ ID NO: 872865 - RNA, 18 nt, Human
uuuuucugauaaaacaag

SEQ ID NO: 872866 - RNA, 22 nt, Human
cccaggcuggccuccgcagugc

SEQ ID NO: 872867 - RNA, 22 nt, Human
auucagugauucauuuguacaa

SEQ ID NO: 872868 - RNA, 22 nt, Human
guauacaugugguaaaaugcac

SEQ ID NO: 872869 - RNA, 22 nt, Human
cagagcuggcggugagaagaca

SEQ ID NO: 872870 - RNA, 22 nt, Human
cccaggaugucgaggcugcagu

SEQ ID NO: 872871 - RNA, 22 nt, Human
ucaaaguauaauugcuuuuuug

SEQ ID NO: 872872 - RNA, 22 nt, Human
aaacugcaauuacuuuugcacc

SEQ ID NO: 872873 - RNA, 22 nt, Human
gacuuuguagguaauugugucu

SEQ ID NO: 872874 - RNA, 22 nt, Human
ucaaauacauggucaaucaacu

SEQ ID NO: 872875 - RNA, 22 nt, Human
ggaggaggggugacugaaugcu

SEQ ID NO: 872876 - RNA, 22 nt, Human
acacacaaaucuauuagugaau

SEQ ID NO: 872877 - RNA, 22 nt, Human
ugucaucauuugagagaagaaa

SEQ ID NO: 872878 - RNA, 22 nt, Human
uugcaaggugauaaaagaauga

SEQ ID NO: 872879 - RNA, 22 nt, Human
ucacugaaugcagauacgugac

SEQ ID NO: 872880 - RNA, 22 nt, Human
uccaguucuaggucacucucug

SEQ ID NO: 872881 - RNA, 22 nt, Human
ccagggcuuuaucugccuuuga

SEQ ID NO: 872882 - RNA, 23 nt, Human
ggccuguguuuugucugaaguac

SEQ ID NO: 872883 - RNA, 20 nt, Human
aguggguguaaguuauugcc

SEQ ID NO: 872884 - RNA, 22 nt, Human
uacauugagcacguacuaugug

SEQ ID NO: 872885 - RNA, 22 nt, Human
uagugucuagugaguuugaugc

SEQ ID NO: 872886 - RNA, 22 nt, Human
uauuccaagugccuagaagagu

SEQ ID NO: 872887 - RNA, 22 nt, Human
cugcugucaaaggaaauauuug

SEQ ID NO: 872888 - RNA, 22 nt, Human
ucugaaaugaccuuuccccacu

SEQ ID NO: 872889 - RNA, 22 nt, Human
uccagcuugggugggaggaggu

SEQ ID NO: 872890 - RNA, 23 nt, Human
ccucagggucuagcagagagaag

SEQ ID NO: 872891 - RNA, 22 nt, Human
agcucccagaaggcccugcgcc

SEQ ID NO: 872892 - RNA, 22 nt, Human
agcaagcaggauggucaaacua

SEQ ID NO: 872893 - RNA, 22 nt, Human
gcaggagcucguuuccaggcug

SEQ ID NO: 872894 - RNA, 22 nt, Human
uuaagaggugaggccuuuaaga

SEQ ID NO: 872895 - RNA, 22 nt, Human
acacagguacacauauguaccu

SEQ ID NO: 872896 - RNA, 22 nt, Human
gggcagcacagacagugaaggc

SEQ ID NO: 872897 - RNA, 23 nt, Human
ugcagcugccucuggcgggccgg

SEQ ID NO: 872898 - RNA, 19 nt, Human
aaggcuggagaaggccucu

SEQ ID NO: 872899 - RNA, 21 nt, Human
uuugagaauuggucagagugc

SEQ ID NO: 872900 - RNA, 22 nt, Human
uuguuuuugugaggcagcccau

SEQ ID NO: 872901 - RNA, 22 nt, Human
caaauuaaugugucucaaaaua

SEQ ID NO: 872902 - RNA, 20 nt, Human
uccugagccuccaccauguc

SEQ ID NO: 872903 - RNA, 22 nt, Human
gcaugcagagucccucugcauu

SEQ ID NO: 872904 - RNA, 22 nt, Human
ucauguuauugacucauaauau

SEQ ID NO: 872905 - RNA, 22 nt, Human
gguagucaguguuaguuugauu

SEQ ID NO: 872906 - RNA, 22 nt, Human
auuauuucucacucacauaaua

SEQ ID NO: 872907 - RNA, 22 nt, Human
uuguuguagacgcgaagugacu

SEQ ID NO: 872908 - RNA, 22 nt, Human
uucuucaaccaucuacauaaac

SEQ ID NO: 872909 - RNA, 22 nt, Human
uauaaaugccaggacuuuagau

SEQ ID NO: 872910 - RNA, 22 nt, Human
ucccagagccaagcuauggaug

SEQ ID NO: 872911 - RNA, 20 nt, Human
gggagacagggccagugucc

SEQ ID NO: 872912 - RNA, 21 nt, Human
gugcugggacacagccaggcu

SEQ ID NO: 872913 - RNA, 22 nt, Human
augaggccaccuucuacauuuc

SEQ ID NO: 872914 - RNA, 22 nt, Human
uugaguacaaacucagccugag

SEQ ID NO: 872915 - RNA, 22 nt, Human
gccagguguccucacagugagg

SEQ ID NO: 872916 - RNA, 22 nt, Human
cugucagcuucuccuggccaga

SEQ ID NO: 872917 - RNA, 22 nt, Human
gcugcccuaauaucacauguua

SEQ ID NO: 872918 - RNA, 22 nt, Human
cauuuauucucagauccuuguc

SEQ ID NO: 872919 - RNA, 22 nt, Human
gagaaaugagugauucacuuuu

SEQ ID NO: 872920 - RNA, 22 nt, Human
agaaaucaugacuaagagcagu

SEQ ID NO: 872921 - RNA, 22 nt, Human
gaaaauguuagcuucauaguca

SEQ ID NO: 872922 - RNA, 22 nt, Human
ccacacugaccagcugugagac

SEQ ID NO: 872923 - RNA, 22 nt, Human
ggaaggaauuccaagacuaaag

SEQ ID NO: 872924 - RNA, 19 nt, Human
agucagcaugcaugugacu

SEQ ID NO: 872925 - RNA, 22 nt, Human
acaaugcugcagggaaauuagg

SEQ ID NO: 872926 - RNA, 22 nt, Human
gaggauguccacauggacggug

SEQ ID NO: 872927 - RNA, 22 nt, Human
augucuguccaacccugcaggg

SEQ ID NO: 872928 - RNA, 22 nt, Human
ugggcucuggagggccuaggau

SEQ ID NO: 872929 - RNA, 22 nt, Human
cugcagggcccgccugagcccu

SEQ ID NO: 872930 - RNA, 22 nt, Human
aagaaaagguaaccgcuuaucu

SEQ ID NO: 872931 - RNA, 22 nt, Human
uaaagcuauuauaguuauguuu

SEQ ID NO: 872932 - RNA, 18 nt, Human
ggcagccuacccacuugu

SEQ ID NO: 872933 - RNA, 22 nt, Human
gcaggaguucaauugcccauga

SEQ ID NO: 872934 - RNA, 22 nt, Human
uuugggaaccagaaguucaaaa

SEQ ID NO: 872935 - RNA, 22 nt, Human
ugugucuguccucgguugaugc

SEQ ID NO: 872936 - RNA, 22 nt, Human
gcucugcuguggaauccucucc

SEQ ID NO: 872937 - RNA, 22 nt, Human
cuggcucugugggaccuggccu

SEQ ID NO: 872938 - RNA, 22 nt, Human
ugcagcaauuuuuuaggcauuc

SEQ ID NO: 872939 - RNA, 22 nt, Human
agcaguggccuggggcucugug

SEQ ID NO: 872940 - RNA, 22 nt, Human
gugaccaguuggcagggguggg

SEQ ID NO: 872941 - RNA, 22 nt, Human
aacauacagugagcaguggacu

SEQ ID NO: 872942 - RNA, 22 nt, Human
cugaaaggaauaaggcucuuug

SEQ ID NO: 872943 - RNA, 22 nt, Human
cggcuggaagcuggacaggccg

SEQ ID NO: 872944 - RNA, 22 nt, Human
aagacaggaaaagcuccaggcc

SEQ ID NO: 872945 - RNA, 22 nt, Human
gagcaggccagcaauggaaggg

SEQ ID NO: 872946 - RNA, 22 nt, Human
aagcccagaugagaucccugga

SEQ ID NO: 872947 - RNA, 22 nt, Human
ugugggccucagcaggacucca

SEQ ID NO: 872948 - RNA, 22 nt, Human
aauguuccuauuuacccccuaa

SEQ ID NO: 872949 - RNA, 22 nt, Human
gggagaaggaggacugugcugu

SEQ ID NO: 872950 - RNA, 22 nt, Human
ccauuggagaguuuuaagaagg

SEQ ID NO: 872951 - RNA, 22 nt, Human
gaggcucauugcauugugcauu

SEQ ID NO: 872952 - RNA, 22 nt, Human
agucugugaaaagauaggaagu

SEQ ID NO: 872953 - RNA, 22 nt, Human
uacagcagggcgcugugaugaa

SEQ ID NO: 872954 - RNA, 22 nt, Human
acaauagaaauaauuaagcaca

SEQ ID NO: 872955 - RNA, 22 nt, Human
cugcccugacugaccuuuugaa

SEQ ID NO: 872956 - RNA, 22 nt, Human
acgccaguagacugaaccuuuc

SEQ ID NO: 872957 - RNA, 22 nt, Human
ugacaagaauuugggacuguua

SEQ ID NO: 872958 - RNA, 22 nt, Human
aaaagcaaguugccuagguuga

SEQ ID NO: 872959 - RNA, 22 nt, Human
uccagggcauggggagagagug

SEQ ID NO: 872960 - RNA, 22 nt, Human
aaagacuaaaugaaugagcuca

SEQ ID NO: 872961 - RNA, 22 nt, Human
uaagacacauugagaaacacaa

SEQ ID NO: 872962 - RNA, 22 nt, Human
acagacugaagauauuuccccc

SEQ ID NO: 872963 - RNA, 22 nt, Human
ugcaaaguugaggaaggcaugg

SEQ ID NO: 872964 - RNA, 22 nt, Human
accugaauccccagggccuucc

SEQ ID NO: 872965 - RNA, 22 nt, Human
uuauguaccucuuucugcuuca

SEQ ID NO: 872966 - RNA, 22 nt, Human
gacuguacuugagagaggaacu

SEQ ID NO: 872967 - RNA, 19 nt, Human
uggcuucuucgguguuccc

SEQ ID NO: 872968 - RNA, 22 nt, Human
auuucaguguuuuaagaguuca

SEQ ID NO: 872969 - RNA, 21 nt, Human
cacaccaaacaggaacaggga

SEQ ID NO: 872970 - RNA, 22 nt, Human
uagaaacaucagcuaaccaaaa

SEQ ID NO: 872971 - RNA, 22 nt, Human
gaggggagaggcuuauggauca

SEQ ID NO: 872972 - RNA, 22 nt, Human
ugggcagcagcaaagccagacu

SEQ ID NO: 872973 - RNA, 22 nt, Human
cuauuuuaagaggccauuaggu

SEQ ID NO: 872974 - RNA, 22 nt, Human
uuuggaaugacagauaucaaua

SEQ ID NO: 872975 - RNA, 22 nt, Human
cuucagaaacuaguaacagcua

SEQ ID NO: 872976 - RNA, 22 nt, Human
auauucauugaacaccuacuac

SEQ ID NO: 872977 - RNA, 22 nt, Human
acagaguuaauggauaggcagg

SEQ ID NO: 872978 - RNA, 22 nt, Human
ccagagagaaaauggagggcca

SEQ ID NO: 872979 - RNA, 22 nt, Human
uaacaaagguugccaaacuaag

SEQ ID NO: 872980 - RNA, 22 nt, Human
agcagagaccauauagcccaga

SEQ ID NO: 872981 - RNA, 22 nt, Human
aguggcugguaguuacugagca

SEQ ID NO: 872982 - RNA, 22 nt, Human
ggcuuuauuuugcaugaaugcu

SEQ ID NO: 872983 - RNA, 17 nt, Human
ucgguuugccaggcuuc

SEQ ID NO: 872984 - RNA, 22 nt, Human
aagugacauaaaaucucccagg

SEQ ID NO: 872985 - RNA, 22 nt, Human
gaaaguuuucauauauaccaaa

SEQ ID NO: 872986 - RNA, 22 nt, Human
agcuguuuuugugggcauguga

SEQ ID NO: 872987 - RNA, 22 nt, Human
cccuuggcuucuauggguuuuc

SEQ ID NO: 872988 - RNA, 22 nt, Human
aggaagccaugguggacgucua

SEQ ID NO: 872989 - RNA, 22 nt, Human
gccuggagugcaguggcgugau

SEQ ID NO: 872990 - RNA, 22 nt, Human
uuucacaaguaaaguccuaagu

SEQ ID NO: 872991 - RNA, 22 nt, Human
uccaggccugcaaugacaaagc

SEQ ID NO: 872992 - RNA, 22 nt, Human
gccuggcugagguggggaggca

SEQ ID NO: 872993 - RNA, 18 nt, Human
auaaagugcuaauaaugg

SEQ ID NO: 872994 - RNA, 22 nt, Human
caguaaaugagaagcuaguaau

SEQ ID NO: 872995 - RNA, 22 nt, Human
agggcgaggagacggaggcaca

SEQ ID NO: 872996 - RNA, 22 nt, Human
aggagagggguaggauuaauuu

SEQ ID NO: 872997 - RNA, 21 nt, Human
ucagaggcugggggaaugccc

SEQ ID NO: 872998 - RNA, 22 nt, Human
acaguucuuuggauggaagaau

SEQ ID NO: 872999 - RNA, 22 nt, Human
ugggagaagacguacuuuagac

SEQ ID NO: 873000 - RNA, 22 nt, Human
gggccuuccgacucccaaggcc

SEQ ID NO: 873001 - RNA, 23 nt, Human
uuuuagugacuccuuuaucugcc

SEQ ID NO: 873002 - RNA, 22 nt, Human
aaggcagccaugugcuuugggu

SEQ ID NO: 873003 - RNA, 22 nt, Human
aagcacagauaaaacaggauuc

SEQ ID NO: 873004 - RNA, 23 nt, Human
auccugcugauggcccuccagga

SEQ ID NO: 873005 - RNA, 19 nt, Human
acacuguagauauagcuau

SEQ ID NO: 873006 - RNA, 22 nt, Human
uccagggcuggguuggcucagc

SEQ ID NO: 873007 - RNA, 22 nt, Human
aaugucuaugaaaugaaaggga

SEQ ID NO: 873008 - RNA, 22 nt, Human
uagcaaagaaccugauacccca

SEQ ID NO: 873009 - RNA, 20 nt, Human
uuacaaguuucuaauaacca

SEQ ID NO: 873010 - RNA, 22 nt, Human
aacacaaagaagcugcaggauc

SEQ ID NO: 873011 - RNA, 22 nt, Human
cuacccuguauuuagagaugca

SEQ ID NO: 873012 - RNA, 22 nt, Human
gcagacuguaucaaugucagua

SEQ ID NO: 873013 - RNA, 19 nt, Human
uggcaguguggcuuccaga

SEQ ID NO: 873014 - RNA, 22 nt, Human
ucagaaaggccacauggugcag

SEQ ID NO: 873015 - RNA, 22 nt, Human
acagacauuuucuguauugccu

SEQ ID NO: 873016 - RNA, 22 nt, Human
gcagcugucagaaguuggaauc

SEQ ID NO: 873017 - RNA, 22 nt, Human
acucugagaacugagauucccu

SEQ ID NO: 873018 - RNA, 22 nt, Human
ugaaggaagaauaggcaguguu

SEQ ID NO: 873019 - RNA, 22 nt, Human
uuucugaggaauuaauacagaa

SEQ ID NO: 873020 - RNA, 22 nt, Human
aaacauugcuaaauaaugcugc

SEQ ID NO: 873021 - RNA, 22 nt, Human
uaauuuuacuuccugagcaccu

SEQ ID NO: 873022 - RNA, 22 nt, Human
cauucugcauuuggaaggggca

SEQ ID NO: 873023 - RNA, 22 nt, Human
ucagggcugcauacaggagaua

SEQ ID NO: 873024 - RNA, 22 nt, Human
ugcuacuacuugucaacgguca

SEQ ID NO: 873025 - RNA, 22 nt, Human
ggugaggggcgccucugcccgg

SEQ ID NO: 873026 - RNA, 22 nt, Human
ugacccuuugcuuccucauugu

SEQ ID NO: 873027 - RNA, 22 nt, Human
gcccugaaauauuuccacggcc

SEQ ID NO: 873028 - RNA, 22 nt, Human
uucaugcugugucuacaacuua

SEQ ID NO: 873029 - RNA, 22 nt, Human
gggcacuggaggccaaggagcu

SEQ ID NO: 873030 - RNA, 22 nt, Human
cugcauaugauagaugccuugc

SEQ ID NO: 873031 - RNA, 22 nt, Human
uacauugacucucugucccuaa

SEQ ID NO: 873032 - RNA, 22 nt, Human
ucuguuuaugcauauuuaaaac

SEQ ID NO: 873033 - RNA, 22 nt, Human
gggucuucgccgccgccauaac

SEQ ID NO: 873034 - RNA, 22 nt, Human
gcaaauauuucuaauuccugaa

SEQ ID NO: 873035 - RNA, 22 nt, Human
ucugaaggugcuagagaaagcu

SEQ ID NO: 873036 - RNA, 22 nt, Human
gcaggagcuggaaagugauguu

SEQ ID NO: 873037 - RNA, 22 nt, Human
aaaugucuuuaucucauguaac

SEQ ID NO: 873038 - RNA, 22 nt, Human
cugagaaaugcauuuuuccagc

SEQ ID NO: 873039 - RNA, 22 nt, Human
aggccaggguagggcccauugu

SEQ ID NO: 873040 - RNA, 22 nt, Human
cuccuagguaacagggugguuu

SEQ ID NO: 873041 - RNA, 22 nt, Human
agggcuugccauugccuguuag

SEQ ID NO: 873042 - RNA, 23 nt, Human
uucuuuggaauugggcugcaagg

SEQ ID NO: 873043 - RNA, 22 nt, Human
ccaaguccugcugccacucuac

SEQ ID NO: 873044 - RNA, 22 nt, Human
uuucugauucucacuuuggcau

SEQ ID NO: 873045 - RNA, 18 nt, Human
gaaaauacucugggcuca

SEQ ID NO: 873046 - RNA, 22 nt, Human
ucccuuagggcugggugggugu

SEQ ID NO: 873047 - RNA, 21 nt, Human
gaccccagaccagcagacaca

SEQ ID NO: 873048 - RNA, 22 nt, Human
ggaaaucucuacuuugucauuu

SEQ ID NO: 873049 - RNA, 22 nt, Human
gaggaccacagaugagccugca

SEQ ID NO: 873050 - RNA, 22 nt, Human
gugugcagaggcaggaggugcu

SEQ ID NO: 873051 - RNA, 19 nt, Human
uacuuauuagaaauauggg

SEQ ID NO: 873052 - RNA, 22 nt, Human
gggugugucuuuugcuccugga

SEQ ID NO: 873053 - RNA, 21 nt, Human
guucaaauggguagauucaca

SEQ ID NO: 873054 - RNA, 22 nt, Human
ucagagguaagggcugagagga

SEQ ID NO: 873055 - RNA, 22 nt, Human
ugcugcuuggaaauggggcuga

SEQ ID NO: 873056 - RNA, 22 nt, Human
uggggccagcggggaggacuca

SEQ ID NO: 873057 - RNA, 21 nt, Human
cagaggucauccugaggacaa

SEQ ID NO: 873058 - RNA, 22 nt, Human
uuucaguuugucggccuuggac

SEQ ID NO: 873059 - RNA, 22 nt, Human
gagcucuggcagggcaggucug

SEQ ID NO: 873060 - RNA, 22 nt, Human
guacauauuaaaggucuauaaa

SEQ ID NO: 873061 - RNA, 22 nt, Human
uagcagcacauggugguuuuau

SEQ ID NO: 873062 - RNA, 20 nt, Human
ucucuaacaugaaugcuauc

SEQ ID NO: 873063 - RNA, 22 nt, Human
ugaagauuuaagcaucucaauu

SEQ ID NO: 873064 - RNA, 22 nt, Human
uguuggaauaagugcuugaagg

SEQ ID NO: 873065 - RNA, 22 nt, Human
auuuaguuuaggaaaaguaggu

SEQ ID NO: 873066 - RNA, 22 nt, Human
gcaggcccagagucgcuggccu

SEQ ID NO: 873067 - RNA, 22 nt, Human
uacaaagucacauugaaaugaa

SEQ ID NO: 873068 - RNA, 20 nt, Human
uacaagaauccccaguuguc

SEQ ID NO: 873069 - RNA, 22 nt, Human
uauuaucagagcuauuuggaau

SEQ ID NO: 873070 - RNA, 22 nt, Human
aaggcuuguagauuugggcuuu

SEQ ID NO: 873071 - RNA, 22 nt, Human
agacuguaugauuugaguuuau

SEQ ID NO: 873072 - RNA, 22 nt, Human
agccaccuccugcucugcucac

SEQ ID NO: 873073 - RNA, 22 nt, Human
ucaccccuacauuucccuugcu

SEQ ID NO: 873074 - RNA, 22 nt, Human
agucacauaguguuuuggaauc

SEQ ID NO: 873075 - RNA, 22 nt, Human
acuuuaugcuaaacuuuacucu

SEQ ID NO: 873076 - RNA, 22 nt, Human
guggccuagaggugcaaggaac

SEQ ID NO: 873077 - RNA, 22 nt, Human
uauuuucaccuucucuggauau

SEQ ID NO: 873078 - RNA, 22 nt, Human
ggcaggugcaccugagccaucu

SEQ ID NO: 873079 - RNA, 22 nt, Human
uggggcuguggauucucacgaa

SEQ ID NO: 873080 - RNA, 22 nt, Human
uucaaagaccuuacuuggcaaa

SEQ ID NO: 873081 - RNA, 22 nt, Human
uaagagacuuaagaauaauuga

SEQ ID NO: 873082 - RNA, 22 nt, Human
caggagucuguuccucauuugu

SEQ ID NO: 873083 - RNA, 22 nt, Human
aaugauauuuauugaauagaug

SEQ ID NO: 873084 - RNA, 22 nt, Human
gucaggagaggccaucagcuuu

SEQ ID NO: 873085 - RNA, 22 nt, Human
ugcuccuggcaucucugcgucc

SEQ ID NO: 873086 - RNA, 22 nt, Human
gucuuuggaaagacaaaguuca

SEQ ID NO: 873087 - RNA, 22 nt, Human
ucuuccuauggggcugcaggaa

SEQ ID NO: 873088 - RNA, 22 nt, Human
ugcaaacaauuuccuauaaagu

SEQ ID NO: 873089 - RNA, 22 nt, Human
gaggcuucccgcccaugcugga

SEQ ID NO: 873090 - RNA, 22 nt, Human
uggugucuccauccugcccugc

SEQ ID NO: 873091 - RNA, 20 nt, Human
auguuuaauguuguccaccc

SEQ ID NO: 873092 - RNA, 22 nt, Human
auggaauggccugucauaaucu

SEQ ID NO: 873093 - RNA, 22 nt, Human
uucugcuuuuagcuaaacuaua

SEQ ID NO: 873094 - RNA, 22 nt, Human
agcugcagucaagcugggccac

SEQ ID NO: 873095 - RNA, 22 nt, Human
uaggaagaagcagccuugcuua

SEQ ID NO: 873096 - RNA, 22 nt, Human
gggcugcuuuuuucuuagcaga

SEQ ID NO: 873097 - RNA, 22 nt, Human
aguaauaaacucuuuuuaucuc

SEQ ID NO: 873098 - RNA, 22 nt, Human
cagagcagucuggagauccagc

SEQ ID NO: 873099 - RNA, 22 nt, Human
cuguuucucccauguccaagug

SEQ ID NO: 873100 - RNA, 22 nt, Human
uaacaggcaaggucacaccuug

SEQ ID NO: 873101 - RNA, 22 nt, Human
aaauaagcacuuaacuguauca

SEQ ID NO: 873102 - RNA, 22 nt, Human
agggagcuguggucagcucagu

SEQ ID NO: 873103 - RNA, 22 nt, Human
aacuuucugucugagcugcaga

SEQ ID NO: 873104 - RNA, 23 nt, Human
acacagaagaagacccaaggaag

SEQ ID NO: 873105 - RNA, 22 nt, Human
gcaggagcaaacugcagugugg

SEQ ID NO: 873106 - RNA, 22 nt, Human
ucaaggcuauuaauucugugag

SEQ ID NO: 873107 - RNA, 22 nt, Human
uccauuuagcuggcaaacaaug

SEQ ID NO: 873108 - RNA, 21 nt, Human
guacaagcucaccaaguggac

SEQ ID NO: 873109 - RNA, 22 nt, Human
aggucucugcagaaaguaaguc

SEQ ID NO: 873110 - RNA, 22 nt, Human
gccaggugggagacagacagca

SEQ ID NO: 873111 - RNA, 22 nt, Human
cagagcugcacauucuaugaug

SEQ ID NO: 873112 - RNA, 22 nt, Human
ucagcuuugaucucaggcaauc

SEQ ID NO: 873113 - RNA, 22 nt, Human
gugguggaugucuguaaucuca

SEQ ID NO: 873114 - RNA, 22 nt, Human
ucagugcagaauagugaugcau

SEQ ID NO: 873115 - RNA, 22 nt, Human
acagcugugggcucugcauaua

SEQ ID NO: 873116 - RNA, 21 nt, Human
ucacaggcucagggagagagu

SEQ ID NO: 873117 - RNA, 22 nt, Human
guugggguaccuugaggcuggg

SEQ ID NO: 873118 - RNA, 22 nt, Human
uaguacaguuuaaauauuaaua

SEQ ID NO: 873119 - RNA, 22 nt, Human
gcugccacucugagcuugcuuc

SEQ ID NO: 873120 - RNA, 22 nt, Human
gaaaggagugaauauuugugac

SEQ ID NO: 873121 - RNA, 22 nt, Human
ucaggcaggcucagaggaaaac

SEQ ID NO: 873122 - RNA, 22 nt, Human
cacacagcuagugacaggagaa

SEQ ID NO: 873123 - RNA, 20 nt, Human
uccugagauuuaagggguuc

SEQ ID NO: 873124 - RNA, 22 nt, Human
ucagauuuauguggcuaggcuc

SEQ ID NO: 873125 - RNA, 20 nt, Human
ucaauuuucuacaacauuug

SEQ ID NO: 873126 - RNA, 22 nt, Human
guacacacaaucucuggucagu

SEQ ID NO: 873127 - RNA, 22 nt, Human
cagggccauaucuugugcacca

SEQ ID NO: 873128 - RNA, 22 nt, Human
cagaagcagugagagaugugca

SEQ ID NO: 873129 - RNA, 22 nt, Human
gaagaacacuucaugauucauu

SEQ ID NO: 873130 - RNA, 22 nt, Human
uuucuuaugggguaguccuuua

SEQ ID NO: 873131 - RNA, 22 nt, Human
aaauagcagaagcagagggggu

SEQ ID NO: 873132 - RNA, 22 nt, Human
uguucuugggaaucuuacaguu

SEQ ID NO: 873133 - RNA, 22 nt, Human
ccaagcaaauaaucacccacua

SEQ ID NO: 873134 - RNA, 22 nt, Human
ugcagaggcgccgugggugggg

SEQ ID NO: 873135 - RNA, 22 nt, Human
acaggcuguugggguccagggu

SEQ ID NO: 873136 - RNA, 22 nt, Human
ccugccugcguccucugagggc

SEQ ID NO: 873137 - RNA, 22 nt, Human
uuguuuacuaagaaccugguca

SEQ ID NO: 873138 - RNA, 22 nt, Human
ugcaugugucgggccugugcua

SEQ ID NO: 873139 - RNA, 22 nt, Human
uuucauuauaaaaaguuggcuu

SEQ ID NO: 873140 - RNA, 22 nt, Human
agaaucuuggaacucagaucac

SEQ ID NO: 873141 - RNA, 22 nt, Human
gcagggugccgacuucagggau

SEQ ID NO: 873142 - RNA, 22 nt, Human
caggaaaugaacaggaaugaac

SEQ ID NO: 873143 - RNA, 22 nt, Human
agauggggcugaaaguuccaau

SEQ ID NO: 873144 - RNA, 20 nt, Human
agaacaaguacuaaaggaga

SEQ ID NO: 873145 - RNA, 22 nt, Human
ugugacugaagugucuagaccu

SEQ ID NO: 873146 - RNA, 22 nt, Human
uuuauauuaccuggaauagcuu

SEQ ID NO: 873147 - RNA, 22 nt, Human
cccaggcuggcacugcugaagu

SEQ ID NO: 873148 - RNA, 22 nt, Human
uguguaaaaugagccuaaaguc

SEQ ID NO: 873149 - RNA, 22 nt, Human
gggaagcugaagcuagagaaaa

SEQ ID NO: 873150 - RNA, 19 nt, Human
acugccugaggcucacagg

SEQ ID NO: 873151 - RNA, 18 nt, Human
ucagccuguugucugccu

SEQ ID NO: 873152 - RNA, 22 nt, Human
auuauucagucuuguaaggagu

SEQ ID NO: 873153 - RNA, 22 nt, Human
ucugugcccucggugcugggcc

SEQ ID NO: 873154 - RNA, 22 nt, Human
ggugugggggcagcucugauau

SEQ ID NO: 873155 - RNA, 22 nt, Human
gccuggcuauggccucccccau

SEQ ID NO: 873156 - RNA, 22 nt, Human
uaacauuaaaagagauaauuga

SEQ ID NO: 873157 - RNA, 22 nt, Human
uggucugccuggaucacagccc

SEQ ID NO: 873158 - RNA, 22 nt, Human
ugugugugugcgcgcacgcaua

SEQ ID NO: 873159 - RNA, 22 nt, Human
gucaaacaaauuaacauaucca

SEQ ID NO: 873160 - RNA, 23 nt, Human
uguguacacaauagaugagguuu

SEQ ID NO: 873161 - RNA, 22 nt, Human
ucuucagguagugaguggggug

SEQ ID NO: 873162 - RNA, 22 nt, Human
gagguggcuuagucucuggaca

SEQ ID NO: 873163 - RNA, 22 nt, Human
ucauggaugauagcuucauugc

SEQ ID NO: 873164 - RNA, 22 nt, Human
gccaagcuggaugaagagguug

SEQ ID NO: 873165 - RNA, 22 nt, Human
uguccugcaagcccuaaugaau

SEQ ID NO: 873166 - RNA, 22 nt, Human
uucagcacugacugagugguua

SEQ ID NO: 873167 - RNA, 22 nt, Human
aauacuugggcugagauuuuug

SEQ ID NO: 873168 - RNA, 22 nt, Human
uaucagugauugcuguauacaa

SEQ ID NO: 873169 - RNA, 23 nt, Human
augcacaagccagcaggggacag

SEQ ID NO: 873170 - RNA, 22 nt, Human
aggugggcggauucaugagguc

SEQ ID NO: 873171 - RNA, 22 nt, Human
aacaguuaucucacauauggaa

SEQ ID NO: 873172 - RNA, 22 nt, Human
cugggucccacagccugcuggg

SEQ ID NO: 873173 - RNA, 22 nt, Human
ugggauagggcuauugcucaca

SEQ ID NO: 873174 - RNA, 22 nt, Human
ccuuuguaccuuaaauccugug

SEQ ID NO: 873175 - RNA, 22 nt, Human
ugguaaaugcuauuccuauauu

SEQ ID NO: 873176 - RNA, 22 nt, Human
ccagagcuucggggcggcugua

SEQ ID NO: 873177 - RNA, 22 nt, Human
acucucucacagcuuggcugau

SEQ ID NO: 873178 - RNA, 22 nt, Human
cugcagggacccaagucuuugg

SEQ ID NO: 873179 - RNA, 22 nt, Human
gcggggcccccggccgagcucu

SEQ ID NO: 873180 - RNA, 22 nt, Human
aaauccuaaugacaaguuuagu

SEQ ID NO: 873181 - RNA, 20 nt, Human
caggagggacauuucagcau

SEQ ID NO: 873182 - RNA, 22 nt, Human
ugucuccuaaugucuguuuccu

SEQ ID NO: 873183 - RNA, 22 nt, Human
cagccagagaaagggcacugcc

SEQ ID NO: 873184 - RNA, 22 nt, Human
uaccugggcccaccagugccug

SEQ ID NO: 873185 - RNA, 23 nt, Human
guuaccuuacuucugugaucuuc

SEQ ID NO: 873186 - RNA, 22 nt, Human
accagccaccaccaggagaucg

SEQ ID NO: 873187 - RNA, 22 nt, Human
uuggucuugaguggcuuguuaa

SEQ ID NO: 873188 - RNA, 22 nt, Human
uuccagagucagccacugggag

SEQ ID NO: 873189 - RNA, 22 nt, Human
acagaacauggauuuuugaagu

SEQ ID NO: 873190 - RNA, 22 nt, Human
agggaugugcagcauccagaca

SEQ ID NO: 873191 - RNA, 22 nt, Human
augaccugaggccuuacucuag

SEQ ID NO: 873192 - RNA, 22 nt, Human
gcugggagcaaguacucaucuu

SEQ ID NO: 873193 - RNA, 22 nt, Human
ggacacagcugcagccacaccc

SEQ ID NO: 873194 - RNA, 22 nt, Human
caccaggagcaucuaggaggcg

SEQ ID NO: 873195 - RNA, 22 nt, Human
gcuuuagacauaaaguucuuca

SEQ ID NO: 873196 - RNA, 22 nt, Human
ucagcacucgcuaccuaguaaa

SEQ ID NO: 873197 - RNA, 22 nt, Human
uccuuugguuguagacaggaau

SEQ ID NO: 873198 - RNA, 22 nt, Human
acaaauagaaaaucuggauugg

SEQ ID NO: 873199 - RNA, 18 nt, Human
gcuucucauuucuaagca

SEQ ID NO: 873200 - RNA, 22 nt, Human
uuuuguaagaaacugccaagcc

SEQ ID NO: 873201 - RNA, 22 nt, Human
uagaauucaagauucaacaggc

SEQ ID NO: 873202 - RNA, 22 nt, Human
gaauggcuaucggauuauuagg

SEQ ID NO: 873203 - RNA, 22 nt, Human
ccaaacuguuucguauuuaugc

SEQ ID NO: 873204 - RNA, 22 nt, Human
ugcaaucucggcacuuugggag

SEQ ID NO: 873205 - RNA, 22 nt, Human
auguggcuaguccaauuaauga

SEQ ID NO: 873206 - RNA, 22 nt, Human
agaaagcuggaagagcugggau

SEQ ID NO: 873207 - RNA, 22 nt, Human
acaggucagauaaaggcuggug

SEQ ID NO: 873208 - RNA, 22 nt, Human
gucuccagggcugcuggcgccu

SEQ ID NO: 873209 - RNA, 22 nt, Human
ccagagccucgcccggagccuc

SEQ ID NO: 873210 - RNA, 22 nt, Human
ucuggaauuaaacucaggagac

SEQ ID NO: 873211 - RNA, 22 nt, Human
auagaaacagggaagcaaagca

SEQ ID NO: 873212 - RNA, 22 nt, Human
ucuuuuccuccucuuguuggcc

SEQ ID NO: 873213 - RNA, 22 nt, Human
uuuugccugugaauacuaucuu

SEQ ID NO: 873214 - RNA, 22 nt, Human
ucuuucaaugugaaaccaugua

SEQ ID NO: 873215 - RNA, 22 nt, Human
ggcaggcgugguggccucagaa

SEQ ID NO: 873216 - RNA, 22 nt, Human
gugcagcaaaguuugagauaua

SEQ ID NO: 873217 - RNA, 22 nt, Human
ggcaggcaucaucaguugauca

SEQ ID NO: 873218 - RNA, 22 nt, Human
ucaagauauagaggguucuaga

SEQ ID NO: 873219 - RNA, 22 nt, Human
auuucucaguguacauuauguu

SEQ ID NO: 873220 - RNA, 22 nt, Human
uacagcuggacugguagcugug

SEQ ID NO: 873221 - RNA, 22 nt, Human
ucuggccauggcaagccgagug

SEQ ID NO: 873222 - RNA, 22 nt, Human
uucagaagguaggaaugucccu

SEQ ID NO: 873223 - RNA, 22 nt, Human
uggcuuccuccagagcaggagg

SEQ ID NO: 873224 - RNA, 22 nt, Human
aaaucaguuguuauauuaaaga

SEQ ID NO: 873225 - RNA, 22 nt, Human
uaaggugugguaguuuaguucu

SEQ ID NO: 873226 - RNA, 22 nt, Human
agucaggaaaagcuuuccugga

SEQ ID NO: 873227 - RNA, 22 nt, Human
cuggggugagcagaaacagggg

SEQ ID NO: 873228 - RNA, 22 nt, Human
guacaacaugauuuuacucucu

SEQ ID NO: 873229 - RNA, 22 nt, Human
uguggcaggaagagcuucugag

SEQ ID NO: 873230 - RNA, 22 nt, Human
gagggagaauugcagccagcgu

SEQ ID NO: 873231 - RNA, 22 nt, Human
aaaucuagaaguuuaaaaggau

SEQ ID NO: 873232 - RNA, 22 nt, Human
cagggggcucaaaggagagugc

SEQ ID NO: 873233 - RNA, 20 nt, Human
ucuguuauuauuacauugcc

SEQ ID NO: 873234 - RNA, 22 nt, Human
cugucucucuaggacacugggg

SEQ ID NO: 873235 - RNA, 22 nt, Human
cuucccccaaaucaagagaccu

SEQ ID NO: 873236 - RNA, 22 nt, Human
ggaaagaaagugugaacaacuu

SEQ ID NO: 873237 - RNA, 22 nt, Human
augcuacaggaagacgucaggc

SEQ ID NO: 873238 - RNA, 22 nt, Human
cuugcaggcagggccuccugga

SEQ ID NO: 873239 - RNA, 22 nt, Human
gggcagagacucagaaacagaa

SEQ ID NO: 873240 - RNA, 22 nt, Human
gcauugaaggacuuccauuaua

SEQ ID NO: 873241 - RNA, 22 nt, Human
uaagcaagauuuauugaauuuu

SEQ ID NO: 873242 - RNA, 22 nt, Human
cuggcuccucuacacacccaaa

SEQ ID NO: 873243 - RNA, 18 nt, Human
acacacacaccuguguau

SEQ ID NO: 873244 - RNA, 23 nt, Human
ggcaccaggccauggagcgggag

SEQ ID NO: 873245 - RNA, 22 nt, Human
augggcagagcuggugggaggc

SEQ ID NO: 873246 - RNA, 22 nt, Human
gaggaggaaacccuguuccucu

SEQ ID NO: 873247 - RNA, 22 nt, Human
agggcucagccagccugugugc

SEQ ID NO: 873248 - RNA, 22 nt, Human
uuggcugguaagccaaaugaaa

SEQ ID NO: 873249 - RNA, 22 nt, Human
uuauacauguguuuugagauga

SEQ ID NO: 873250 - RNA, 22 nt, Human
uuggaaaugauuucuauuauua

SEQ ID NO: 873251 - RNA, 22 nt, Human
cccugaguuaguacaguugagu

SEQ ID NO: 873252 - RNA, 22 nt, Human
aucuuggggaauccucugugua

SEQ ID NO: 873253 - RNA, 22 nt, Human
uccacagauaaaaacagagguu

SEQ ID NO: 873254 - RNA, 22 nt, Human
ugucugaguuagcucuucucag

SEQ ID NO: 873255 - RNA, 22 nt, Human
gaagauugaaggcugggaauua

SEQ ID NO: 873256 - RNA, 22 nt, Human
ccagugccuaucuccucuggga

SEQ ID NO: 873257 - RNA, 23 nt, Human
cugaccugacccauaagcaagga

SEQ ID NO: 873258 - RNA, 22 nt, Human
ucucuagugccaugaaaguccu

SEQ ID NO: 873259 - RNA, 22 nt, Human
auuauucucuggaggaaagauu

SEQ ID NO: 873260 - RNA, 22 nt, Human
ugacaucuggcuugugcccugc

SEQ ID NO: 873261 - RNA, 22 nt, Human
guagcagcagagcagguccucc

SEQ ID NO: 873262 - RNA, 22 nt, Human
ugugcagugugaccagggcugc

SEQ ID NO: 873263 - RNA, 21 nt, Human
gcaaggccuaucauggcagcu

SEQ ID NO: 873264 - RNA, 22 nt, Human
gggcucaggaguuugaggcugc

SEQ ID NO: 873265 - RNA, 22 nt, Human
aauaacuucaucuucaggauag

SEQ ID NO: 873266 - RNA, 22 nt, Human
ucagguccucugggucccagcc

SEQ ID NO: 873267 - RNA, 22 nt, Human
ugugugcaagugacauuagaaa

SEQ ID NO: 873268 - RNA, 22 nt, Human
ugaaggaaugaguauacuguuu

SEQ ID NO: 873269 - RNA, 18 nt, Human
caagaaucucuaaagaag

SEQ ID NO: 873270 - RNA, 22 nt, Human
ccagccucaucauauuccugcu

SEQ ID NO: 873271 - RNA, 20 nt, Human
ugagccugcuguaggaggcc

SEQ ID NO: 873272 - RNA, 22 nt, Human
cucacagaugcugugggucagg

SEQ ID NO: 873273 - RNA, 22 nt, Human
uagcacaagcaacuacugaagu

SEQ ID NO: 873274 - RNA, 22 nt, Human
gugacagagugagacccugucu

SEQ ID NO: 873275 - RNA, 22 nt, Human
ccaugugucuccccuggaagua

SEQ ID NO: 873276 - RNA, 22 nt, Human
guggccugccgugugguauggg

SEQ ID NO: 873277 - RNA, 22 nt, Human
gggaagauaguguugagggccc

SEQ ID NO: 873278 - RNA, 20 nt, Human
ugggagcuggugaggucuca

SEQ ID NO: 873279 - RNA, 22 nt, Human
cgggaaaguuccacagauggau

SEQ ID NO: 873280 - RNA, 22 nt, Human
gugacucuuaccuacccagccu

SEQ ID NO: 873281 - RNA, 22 nt, Human
gagcagagucuauuuccacacu

SEQ ID NO: 873282 - RNA, 22 nt, Human
uuucccaaguguaaacauggca

SEQ ID NO: 873283 - RNA, 22 nt, Human
ugcagggcagauaugacuguag

SEQ ID NO: 873284 - RNA, 22 nt, Human
ggcagagcauucgauggaccug

SEQ ID NO: 873285 - RNA, 21 nt, Human
uggcagagugcagucuauaca

SEQ ID NO: 873286 - RNA, 22 nt, Human
uucacauuaucaggauuguuuc

SEQ ID NO: 873287 - RNA, 22 nt, Human
uuggaauuccuguuguuucguc

SEQ ID NO: 873288 - RNA, 22 nt, Human
gcucugaggaccaauuccugug

SEQ ID NO: 873289 - RNA, 22 nt, Human
ccugcugugucccuggcuuucu

SEQ ID NO: 873290 - RNA, 22 nt, Human
gacugagaaacaguacauuacc

SEQ ID NO: 873291 - RNA, 22 nt, Human
aucucagggguuccuucuagag

SEQ ID NO: 873292 - RNA, 22 nt, Human
gagcagcaagcacucaaaggcu

SEQ ID NO: 873293 - RNA, 22 nt, Human
uuagaucauuuugaacuaauuu

SEQ ID NO: 873294 - RNA, 22 nt, Human
cuggucccugaguaguuaugca

SEQ ID NO: 873295 - RNA, 22 nt, Human
ugagaaacacaggcaugaauag

SEQ ID NO: 873296 - RNA, 22 nt, Human
gcucuaugggcacagccagugu

SEQ ID NO: 873297 - RNA, 22 nt, Human
ucagugucauaucaagaagaug

SEQ ID NO: 873298 - RNA, 22 nt, Human
gacagaugagggaguauucuca

SEQ ID NO: 873299 - RNA, 22 nt, Human
acaagcauaagugagaugaaua

SEQ ID NO: 873300 - RNA, 22 nt, Human
cccaguggugcuggcaucugug

SEQ ID NO: 873301 - RNA, 22 nt, Human
uuuacccaguaacugcuuggcu

SEQ ID NO: 873302 - RNA, 22 nt, Human
cacacccaaauucuaacaguag

SEQ ID NO: 873303 - RNA, 22 nt, Human
uuggcagcccagcuuacuagca

SEQ ID NO: 873304 - RNA, 22 nt, Human
cugagccauccauaccagcuua

SEQ ID NO: 873305 - RNA, 22 nt, Human
cugcagcuccugagcucagaga

SEQ ID NO: 873306 - RNA, 23 nt, Human
auacugaaacuguuguuuaucug

SEQ ID NO: 873307 - RNA, 22 nt, Human
caggacaagagggaaucgauaa

SEQ ID NO: 873308 - RNA, 22 nt, Human
gccacuggcgcugugcagagug

SEQ ID NO: 873309 - RNA, 22 nt, Human
auccuuccuucauuugacaggu

SEQ ID NO: 873310 - RNA, 22 nt, Human
guacaguacuucagaaccagcc

SEQ ID NO: 873311 - RNA, 22 nt, Human
cauuucacacauaaacuugggu

SEQ ID NO: 873312 - RNA, 22 nt, Human
auuuagcaaaaaaugaugaagc

SEQ ID NO: 873313 - RNA, 22 nt, Human
aucugcauguaucucucugcau

SEQ ID NO: 873314 - RNA, 22 nt, Human
acaacaaucuacccuagcuucu

SEQ ID NO: 873315 - RNA, 22 nt, Human
cuuuucaugagucuguuauggg

SEQ ID NO: 873316 - RNA, 22 nt, Human
agagguucaaacuucauaauuu

SEQ ID NO: 873317 - RNA, 22 nt, Human
gagcuggugugugcccgagcac

SEQ ID NO: 873318 - RNA, 22 nt, Human
ugcaggguguccggaggaucac

SEQ ID NO: 873319 - RNA, 22 nt, Human
uuguguguagacucagccauug

SEQ ID NO: 873320 - RNA, 22 nt, Human
gcccugacacuuugcagcugag

SEQ ID NO: 873321 - RNA, 22 nt, Human
uagcacaauaucaugucuguga

SEQ ID NO: 873322 - RNA, 22 nt, Human
aagcccugccacccauucacug

SEQ ID NO: 873323 - RNA, 22 nt, Human
aggaaugacauagaaaggggag

SEQ ID NO: 873324 - RNA, 22 nt, Human
cuagaaggaagcccagcacuuc

SEQ ID NO: 873325 - RNA, 22 nt, Human
agcagcauuaugauauaucuua

SEQ ID NO: 873326 - RNA, 22 nt, Human
uuagagauacauuuguagcuug

SEQ ID NO: 873327 - RNA, 22 nt, Human
aguucuaaacacuugaggaacc

SEQ ID NO: 873328 - RNA, 22 nt, Human
cugaggggucgugggagcccag

SEQ ID NO: 873329 - RNA, 22 nt, Human
cacauauaccucuucuugaguu

SEQ ID NO: 873330 - RNA, 22 nt, Human
ucucuuggaaagcuugcccacu

SEQ ID NO: 873331 - RNA, 22 nt, Human
aggcuccaggcaaaauuucgga

SEQ ID NO: 873332 - RNA, 22 nt, Human
ugcauacuuuuaaugacuguuu

SEQ ID NO: 873333 - RNA, 22 nt, Human
cugauaauguccugcaguaaau

SEQ ID NO: 873334 - RNA, 22 nt, Human
aaguucuaacaggaggucucuu

SEQ ID NO: 873335 - RNA, 22 nt, Human
ggcagcaucccauggaccgcau

SEQ ID NO: 873336 - RNA, 22 nt, Human
auuuaagaggcugcuagaguau

SEQ ID NO: 873337 - RNA, 22 nt, Human
uuucuagaaaccaagauauugu

SEQ ID NO: 873338 - RNA, 22 nt, Human
aucuuugaaucaaugaaucagu

SEQ ID NO: 873339 - RNA, 22 nt, Human
cucuggaggccuaaggaagugg

SEQ ID NO: 873340 - RNA, 22 nt, Human
cuacacuagaguugcaauggaa

SEQ ID NO: 873341 - RNA, 22 nt, Human
uuggaacaugccgggguccagg

SEQ ID NO: 873342 - RNA, 22 nt, Human
aaaaagagaaaugcucuagucc

SEQ ID NO: 873343 - RNA, 22 nt, Human
aaucagagcaagacauggaaca

SEQ ID NO: 873344 - RNA, 19 nt, Human
auagcagcuauacccagau

SEQ ID NO: 873345 - RNA, 22 nt, Human
agggucagggagugaguauuua

SEQ ID NO: 873346 - RNA, 22 nt, Human
uggaaugucaaaagucugcuau

SEQ ID NO: 873347 - RNA, 22 nt, Human
cagcaccugcucuuagacacgg

SEQ ID NO: 873348 - RNA, 22 nt, Human
auccugcaggggguuuuauuca

SEQ ID NO: 873349 - RNA, 22 nt, Human
cuuccuggcaugggucucauga

SEQ ID NO: 873350 - RNA, 22 nt, Human
cugcucuccccaggccagucug

SEQ ID NO: 873351 - RNA, 22 nt, Human
ccacugcccaccccgacgucua

SEQ ID NO: 873352 - RNA, 22 nt, Human
caaggcugucuccagcuuccaa

SEQ ID NO: 873353 - RNA, 22 nt, Human
gggcuccagcccgggaccaggu

SEQ ID NO: 873354 - RNA, 22 nt, Human
cucaggauauugggcuggagca

SEQ ID NO: 873355 - RNA, 22 nt, Human
caggaggagcauuagcgucuca

SEQ ID NO: 873356 - RNA, 23 nt, Human
cucaccaagcgccgccgcugugu

SEQ ID NO: 873357 - RNA, 23 nt, Human
acagacuguauucaaaguaggac

SEQ ID NO: 873358 - RNA, 22 nt, Human
uuucaaauaccauaaaccuaau

SEQ ID NO: 873359 - RNA, 21 nt, Human
ugauucucugacugucggaca

SEQ ID NO: 873360 - RNA, 22 nt, Human
ucugccugcggcugcagguggc

SEQ ID NO: 873361 - RNA, 22 nt, Human
ggggaagaaaucuggguucuuc

SEQ ID NO: 873362 - RNA, 18 nt, Human
auccugggagcagacagc

SEQ ID NO: 873363 - RNA, 21 nt, Human
agcugccuccacuucugaggc

SEQ ID NO: 873364 - RNA, 22 nt, Human
caacuuuagaccccaaguagcu

SEQ ID NO: 873365 - RNA, 22 nt, Human
gggauuucaccauguugguugg

SEQ ID NO: 873366 - RNA, 22 nt, Human
gcacugguaucaccugagagcu

SEQ ID NO: 873367 - RNA, 22 nt, Human
ccugacaguccuuuucuagugu

SEQ ID NO: 873368 - RNA, 19 nt, Human
uggcauugguccagauaaa

SEQ ID NO: 873369 - RNA, 22 nt, Human
caagguuuacauugggcuauca

SEQ ID NO: 873370 - RNA, 22 nt, Human
ccucaggccucugccucauugg

SEQ ID NO: 873371 - RNA, 22 nt, Human
gaagagagagugggguucugcg

SEQ ID NO: 873372 - RNA, 22 nt, Human
cauuuguuaaugcugcuuuuaa

SEQ ID NO: 873373 - RNA, 20 nt, Human
gcaugcuuggagagagagaa

SEQ ID NO: 873374 - RNA, 22 nt, Human
ugggaagcugcauuuuaacaag

SEQ ID NO: 873375 - RNA, 22 nt, Human
augugagggcucaggcugacug

SEQ ID NO: 873376 - RNA, 19 nt, Human
gcccucaggcagcuccauc

SEQ ID NO: 873377 - RNA, 22 nt, Human
cugggaugauagugcuaguauu

SEQ ID NO: 873378 - RNA, 22 nt, Human
cagucaggggugggaucaaggc

SEQ ID NO: 873379 - RNA, 22 nt, Human
uucuagaauccuugucuacuuu

SEQ ID NO: 873380 - RNA, 22 nt, Human
ugaggccccgaagcugagguuu

SEQ ID NO: 873381 - RNA, 22 nt, Human
cugcuguggguuaagacacugu

SEQ ID NO: 873382 - RNA, 22 nt, Human
gcagacagaagcuaaguagaca

SEQ ID NO: 873383 - RNA, 19 nt, Human
gggagagccaggcucaccc

SEQ ID NO: 873384 - RNA, 20 nt, Human
uccuggccucccuggggcuc

SEQ ID NO: 873385 - RNA, 22 nt, Human
ccacagaaugaugacacuucag

SEQ ID NO: 873386 - RNA, 22 nt, Human
agguuaggaaauagggcuguaa

SEQ ID NO: 873387 - RNA, 20 nt, Human
caaaagcaaugaaguuauga

SEQ ID NO: 873388 - RNA, 22 nt, Human
ugcaucuuacguuuugaaaggg

SEQ ID NO: 873389 - RNA, 20 nt, Human
aaaauagccccaggcucauu

SEQ ID NO: 873390 - RNA, 22 nt, Human
uuucagugugagugucuuauuu

SEQ ID NO: 873391 - RNA, 22 nt, Human
aaagagaacuuuuacccaagaa

SEQ ID NO: 873392 - RNA, 22 nt, Human
auagcaguaacacugacauuuu

SEQ ID NO: 873393 - RNA, 23 nt, Human
aggggcagcaaguuuugguguua

SEQ ID NO: 873394 - RNA, 22 nt, Human
uucagagccagcaacacuaggc

SEQ ID NO: 873395 - RNA, 22 nt, Human
ugaggcugagauaucagggagg

SEQ ID NO: 873396 - RNA, 22 nt, Human
augcuuuacgacaaaaaacuca

SEQ ID NO: 873397 - RNA, 22 nt, Human
gcaggccaagcccucgcagaga

SEQ ID NO: 873398 - RNA, 22 nt, Human
caaaaaacaccugugugaguau

SEQ ID NO: 873399 - RNA, 22 nt, Human
ugcccacucuuuugauuugugu

SEQ ID NO: 873400 - RNA, 22 nt, Human
gcuucuguggugcaucuuugcu

SEQ ID NO: 873401 - RNA, 22 nt, Human
agggccaguucuaccucugaau

SEQ ID NO: 873402 - RNA, 22 nt, Human
caugcagggacuugugcuccau

SEQ ID NO: 873403 - RNA, 22 nt, Human
ugccccugaugccuagaacaga

SEQ ID NO: 873404 - RNA, 22 nt, Human
aggagacaguuuggacguguag

SEQ ID NO: 873405 - RNA, 22 nt, Human
uuugcugggcucugugccagac

SEQ ID NO: 873406 - RNA, 16 nt, Human
uagggcugggaaggag

SEQ ID NO: 873407 - RNA, 18 nt, Human
gucuuuggaguggaggua

SEQ ID NO: 873408 - RNA, 22 nt, Human
uuucucucuauuuagacaggua

SEQ ID NO: 873409 - RNA, 22 nt, Human
ccucagaagaaguggaauugau

SEQ ID NO: 873410 - RNA, 22 nt, Human
gaugugugugcccugggccugc

SEQ ID NO: 873411 - RNA, 22 nt, Human
aagagggaagucaccuggaggu

SEQ ID NO: 873412 - RNA, 22 nt, Human
cagaggcugggaccucaggcau

SEQ ID NO: 873413 - RNA, 22 nt, Human
ucccauuuauuaauuaguuugc

SEQ ID NO: 873414 - RNA, 22 nt, Human
caugagugcuauaugugaagag

SEQ ID NO: 873415 - RNA, 22 nt, Human
guuuagaacacggaaauacuga

SEQ ID NO: 873416 - RNA, 22 nt, Human
ucaaggaagauagcuauuauga

SEQ ID NO: 873417 - RNA, 22 nt, Human
agccagggggacgcuuucuggc

SEQ ID NO: 873418 - RNA, 22 nt, Human
ucugcuguguccccugugcggg

SEQ ID NO: 873419 - RNA, 22 nt, Human
gacucugugggaggaggcucag

SEQ ID NO: 873420 - RNA, 22 nt, Human
cccaggcagcggggucuccuug

SEQ ID NO: 873421 - RNA, 22 nt, Human
uucaaaggaaaggcagugucaa

SEQ ID NO: 873422 - RNA, 22 nt, Human
gagcaggcuugcagagaagggg

SEQ ID NO: 873423 - RNA, 22 nt, Human
uugcuaauuuguauaaugaaaa

SEQ ID NO: 873424 - RNA, 22 nt, Human
uucugagcugcaacacuaacau

SEQ ID NO: 873425 - RNA, 22 nt, Human
ucuacaaagccauucaggaucu

SEQ ID NO: 873426 - RNA, 22 nt, Human
ggccucggcccacugcugcggu

SEQ ID NO: 873427 - RNA, 22 nt, Human
caaucaguaaccggaucauggu

SEQ ID NO: 873428 - RNA, 22 nt, Human
uagauauaagguccuuagaaca

SEQ ID NO: 873429 - RNA, 22 nt, Human
aagucacagaguuggaagucag

SEQ ID NO: 873430 - RNA, 22 nt, Human
ucaggacaauagugauuuuuac

SEQ ID NO: 873431 - RNA, 22 nt, Human
uuuucucaggugcuuaucuaag

SEQ ID NO: 873432 - RNA, 22 nt, Human
uaaaaugguaacuuucauuugc

SEQ ID NO: 873433 - RNA, 22 nt, Human
gugcgggccuggggguuucucu

SEQ ID NO: 873434 - RNA, 22 nt, Human
ugugcgcgugcagcggaguguu

SEQ ID NO: 873435 - RNA, 22 nt, Human
agcuccagggaaagaguggauc

SEQ ID NO: 873436 - RNA, 22 nt, Human
ggcucugcagagggcccagcuu

SEQ ID NO: 873437 - RNA, 22 nt, Human
cuuggugcaggggacagggcaa

SEQ ID NO: 873438 - RNA, 22 nt, Human
uauacacauauacguuugugug

SEQ ID NO: 873439 - RNA, 22 nt, Human
auguuuugcuggauguuggcua

SEQ ID NO: 873440 - RNA, 22 nt, Human
gauucaaaguuaaugaagaugc

SEQ ID NO: 873441 - RNA, 22 nt, Human
aaugcauauguaggcaagcagu

SEQ ID NO: 873442 - RNA, 22 nt, Human
uguuuuguuagcacucugggaa

SEQ ID NO: 873443 - RNA, 22 nt, Human
uaggccaccaggguuccauuua

SEQ ID NO: 873444 - RNA, 22 nt, Human
aggaaugacaggccucccgcag

SEQ ID NO: 873445 - RNA, 22 nt, Human
cacagggcuuugauggcugagu

SEQ ID NO: 873446 - RNA, 22 nt, Human
gucuagcaaugaugaugagcua

SEQ ID NO: 873447 - RNA, 22 nt, Human
uugagguaauaaacagccauuc

SEQ ID NO: 873448 - RNA, 22 nt, Human
uuauuauuccccaagucauuau

SEQ ID NO: 873449 - RNA, 22 nt, Human
auaaagcucuuaguagcagccu

SEQ ID NO: 873450 - RNA, 22 nt, Human
auccaaagauggaaagaacuuu

SEQ ID NO: 873451 - RNA, 23 nt, Human
aggcaaggguguaaaggaaauga

SEQ ID NO: 873452 - RNA, 22 nt, Human
ugucugugggcaacgccuccca

SEQ ID NO: 873453 - RNA, 22 nt, Human
gcugcuuuagaauugaaacaga

SEQ ID NO: 873454 - RNA, 22 nt, Human
caucuucagguucauggucaua

SEQ ID NO: 873455 - RNA, 22 nt, Human
acacuuuuaagacuuuaaugaa

SEQ ID NO: 873456 - RNA, 22 nt, Human
ugagcagagacuucaagggcag

SEQ ID NO: 873457 - RNA, 22 nt, Human
ccuagagcucugcuuuaucuaa

SEQ ID NO: 873458 - RNA, 22 nt, Human
uggagcuggaauuucugggccu

SEQ ID NO: 873459 - RNA, 22 nt, Human
caggcaguggccauguugggag

SEQ ID NO: 873460 - RNA, 22 nt, Human
ugacccugaaauguagugguuu

SEQ ID NO: 873461 - RNA, 22 nt, Human
aauuauuuaacuccuuuggaga

SEQ ID NO: 873462 - RNA, 22 nt, Human
uguggaagggacacuggacugg

SEQ ID NO: 873463 - RNA, 22 nt, Human
uuugcucuugcuggaaaaguug

SEQ ID NO: 873464 - RNA, 22 nt, Human
aggcagagagcaguggccgucu

SEQ ID NO: 873465 - RNA, 22 nt, Human
uguggcagaguaaggacccagu

SEQ ID NO: 873466 - RNA, 22 nt, Human
gugggcuggauuugcuugcaga

SEQ ID NO: 873467 - RNA, 22 nt, Human
gcauucuuccugggcugggggc

SEQ ID NO: 873468 - RNA, 22 nt, Human
gagagggauacugaguuuuggu

SEQ ID NO: 873469 - RNA, 22 nt, Human
ucagcuugcuaaaagggcaucu

SEQ ID NO: 873470 - RNA, 22 nt, Human
guaagaggagugggaagccuca

SEQ ID NO: 873471 - RNA, 22 nt, Human
uugugcucccucccgucuggcc

SEQ ID NO: 873472 - RNA, 22 nt, Human
cucaaguuggcaugaacaaauu

SEQ ID NO: 873473 - RNA, 22 nt, Human
uucuuaaguuuagcaacuugug

SEQ ID NO: 873474 - RNA, 23 nt, Human
acugggcugaaauuaaagguguc

SEQ ID NO: 873475 - RNA, 22 nt, Human
uucuuuuagaauuuccuaaggu

SEQ ID NO: 873476 - RNA, 20 nt, Human
ucuuuuauuggcagauccug

SEQ ID NO: 873477 - RNA, 22 nt, Human
caugcaucgaugaaugcguggg

SEQ ID NO: 873478 - RNA, 22 nt, Human
cccuuagaacaacauuagcaua

SEQ ID NO: 873479 - RNA, 22 nt, Human
ggaccagagcucgggcuucuca

SEQ ID NO: 873480 - RNA, 22 nt, Human
cugggagaugacucagagcagg

SEQ ID NO: 873481 - RNA, 22 nt, Human
cuuuaugugcugggcauuaagg

SEQ ID NO: 873482 - RNA, 22 nt, Human
aggguaagcuuggggcuggcag

SEQ ID NO: 873483 - RNA, 22 nt, Human
ucccacaggcccagggcggaaa

SEQ ID NO: 873484 - RNA, 22 nt, Human
aauguucauugauuaaaugaau

SEQ ID NO: 873485 - RNA, 22 nt, Human
ugaucuuugggccauuaauaaa

SEQ ID NO: 873486 - RNA, 22 nt, Human
uaagugagaucugaaaugaaau

SEQ ID NO: 873487 - RNA, 22 nt, Human
uccuggccuugcuccugaugcc

SEQ ID NO: 873488 - RNA, 22 nt, Human
cagguggggcgcccucaggcag

SEQ ID NO: 873489 - RNA, 22 nt, Human
uaagaaguguuugcccagccau

SEQ ID NO: 873490 - RNA, 22 nt, Human
cuagggcuuccaagaugccuuc

SEQ ID NO: 873491 - RNA, 22 nt, Human
gcauagaagguuuugguaucaa

SEQ ID NO: 873492 - RNA, 22 nt, Human
ggcagcauugccuuugcaguga

SEQ ID NO: 873493 - RNA, 22 nt, Human
ucucuguggcaacaauucacua

SEQ ID NO: 873494 - RNA, 22 nt, Human
cgugagcaaaauggacacuccc

SEQ ID NO: 873495 - RNA, 22 nt, Human
acugaaguucauacaacagacu

SEQ ID NO: 873496 - RNA, 22 nt, Human
gucuuuauauuuacuaaagaau

SEQ ID NO: 873497 - RNA, 18 nt, Human
ucuaggagaguaccuacc

SEQ ID NO: 873498 - RNA, 22 nt, Human
uagaaauggagaacagauuaau

SEQ ID NO: 873499 - RNA, 22 nt, Human
gaaagacucuugaugucuuugg

SEQ ID NO: 873500 - RNA, 22 nt, Human
guggccaggccgacugccaggc

SEQ ID NO: 873501 - RNA, 22 nt, Human
acaguuugguugcuacaguaaa

SEQ ID NO: 873502 - RNA, 22 nt, Human
cugugccaguguauuccuguga

SEQ ID NO: 873503 - RNA, 22 nt, Human
gcccaggaguuggaggcugcag

SEQ ID NO: 873504 - RNA, 22 nt, Human
aggcaggcacacuuccuccagg

SEQ ID NO: 873505 - RNA, 20 nt, Human
acugacagggaacuaaggcu

SEQ ID NO: 873506 - RNA, 22 nt, Human
gccucuguggcucagccuugcu

SEQ ID NO: 873507 - RNA, 22 nt, Human
uccucuggccuuggaauccuuu

SEQ ID NO: 873508 - RNA, 22 nt, Human
gggcagcucuggcugugggaag

SEQ ID NO: 873509 - RNA, 22 nt, Human
aucugcuuguugcaugucuguu

SEQ ID NO: 873510 - RNA, 22 nt, Human
aaagcacucuauccuuuguaga

SEQ ID NO: 873511 - RNA, 22 nt, Human
guguuuaaugcagaugugggug

SEQ ID NO: 873512 - RNA, 22 nt, Human
cuagacagaggcaagcgcauua

SEQ ID NO: 873513 - RNA, 22 nt, Human
uugucugaggguuugagagaau

SEQ ID NO: 873514 - RNA, 22 nt, Human
gcccuggacagugacggugacc

SEQ ID NO: 873515 - RNA, 21 nt, Human
ggccagcucggaaggucccau

SEQ ID NO: 873516 - RNA, 22 nt, Human
aagguacagggaaggagcaaga

SEQ ID NO: 873517 - RNA, 22 nt, Human
agacaggugcucgcccaagucc

SEQ ID NO: 873518 - RNA, 20 nt, Human
cauggcugugagcccacagg

SEQ ID NO: 873519 - RNA, 23 nt, Human
cccagagcacagccuccagaugc

SEQ ID NO: 873520 - RNA, 22 nt, Human
ggcucuggcuacuccacccugu

SEQ ID NO: 873521 - RNA, 22 nt, Human
cucuguaugggauuuacugguu

SEQ ID NO: 873522 - RNA, 22 nt, Human
agugauguuaauaaaugauguu

SEQ ID NO: 873523 - RNA, 22 nt, Human
gcucugugcaaauagcaccccu

SEQ ID NO: 873524 - RNA, 22 nt, Human
cacagcugugagaagggagccu

SEQ ID NO: 873525 - RNA, 22 nt, Human
aauacuugucagaugaauaaga

SEQ ID NO: 873526 - RNA, 22 nt, Human
ggucacuucuuucaucgaaacu

SEQ ID NO: 873527 - RNA, 22 nt, Human
gugugcauguauauacuuuuau

SEQ ID NO: 873528 - RNA, 21 nt, Human
ccuccaggugauuccgugcuc

SEQ ID NO: 873529 - RNA, 22 nt, Human
ccucucuccuuccuuugccaaa

SEQ ID NO: 873530 - RNA, 22 nt, Human
gugugggcuaugugcgugggca

SEQ ID NO: 873531 - RNA, 20 nt, Human
uggaggcagagccagaggga

SEQ ID NO: 873532 - RNA, 22 nt, Human
cucugggcaggaccaguggacc

SEQ ID NO: 873533 - RNA, 22 nt, Human
guucuggguucuggguuauugg

SEQ ID NO: 873534 - RNA, 22 nt, Human
uggcucuggagcuccugggccc

SEQ ID NO: 873535 - RNA, 22 nt, Human
uccaggcuggcucuucaaaauu

SEQ ID NO: 873536 - RNA, 22 nt, Human
agacccuucauguaguucccca

SEQ ID NO: 873537 - RNA, 23 nt, Human
gccaggaguggguagacuaaugc

SEQ ID NO: 873538 - RNA, 22 nt, Human
cuggguggcgucuggggccagu

SEQ ID NO: 873539 - RNA, 22 nt, Human
ccaagcagucugcuaggaguuu

SEQ ID NO: 873540 - RNA, 20 nt, Human
cugcccagccacugagggau

SEQ ID NO: 873541 - RNA, 22 nt, Human
uuugacaaccaggcagguaaga

SEQ ID NO: 873542 - RNA, 22 nt, Human
uaagauaaguggguugagaugg

SEQ ID NO: 873543 - RNA, 22 nt, Human
gacagaaggcaucuagggcacg

SEQ ID NO: 873544 - RNA, 22 nt, Human
agcccaagccuggcuggcgaug

SEQ ID NO: 873545 - RNA, 22 nt, Human
ucagaagacuacuaggacacau

SEQ ID NO: 873546 - RNA, 22 nt, Human
aaacugcaggucaugacccauu

SEQ ID NO: 873547 - RNA, 22 nt, Human
aagacauuccaaaguggcuaau

SEQ ID NO: 873548 - RNA, 22 nt, Human
gcuuuguguagaaggaggaugg

SEQ ID NO: 873549 - RNA, 22 nt, Human
auauacacagagcuuaugguga

SEQ ID NO: 873550 - RNA, 22 nt, Human
ugaaagugaaugucacuguuga

SEQ ID NO: 873551 - RNA, 22 nt, Human
agcugaaauucacaaggaucca

SEQ ID NO: 873552 - RNA, 22 nt, Human
cgugucuguaugucaaucagcu

SEQ ID NO: 873553 - RNA, 22 nt, Human
uaaaaugacuuccuccaacauc

SEQ ID NO: 873554 - RNA, 22 nt, Human
ggggccuuuucugaauguggaa

SEQ ID NO: 873555 - RNA, 22 nt, Human
ugagaaggugaaaguguggaga

SEQ ID NO: 873556 - RNA, 22 nt, Human
cgcgcugcagacagcggaggcc

SEQ ID NO: 873557 - RNA, 22 nt, Human
ugacaucagaauggcauagaaa

SEQ ID NO: 873558 - RNA, 22 nt, Human
cugaggaggcuaauuugaggau

SEQ ID NO: 873559 - RNA, 22 nt, Human
acagccuuauugcgagcaaggc

SEQ ID NO: 873560 - RNA, 22 nt, Human
uacaguuuguauggucaggaau

SEQ ID NO: 873561 - RNA, 22 nt, Human
ggcaccuggauguagcagugaa

SEQ ID NO: 873562 - RNA, 21 nt, Human
agaaauguaucauucuuuucc

SEQ ID NO: 873563 - RNA, 22 nt, Human
aagggcagaauagagaagaugg

SEQ ID NO: 873564 - RNA, 22 nt, Human
ucuuuccacauucucuguuuag

SEQ ID NO: 873565 - RNA, 19 nt, Human
uggaagaggaagggaaaua

SEQ ID NO: 873566 - RNA, 22 nt, Human
guccugggaaggaagccaggga

SEQ ID NO: 873567 - RNA, 22 nt, Human
uaaccuuuggugaaauauuaac

SEQ ID NO: 873568 - RNA, 18 nt, Human
acuagugagcaagcuagg

SEQ ID NO: 873569 - RNA, 22 nt, Human
aacauuuguacuaaagaaguuc

SEQ ID NO: 873570 - RNA, 22 nt, Human
guuugaaaguggcaaguccuug

SEQ ID NO: 873571 - RNA, 22 nt, Human
ugcagcauugaaauagcuaggc

SEQ ID NO: 873572 - RNA, 22 nt, Human
uggaaugucaagaagcaguaag

SEQ ID NO: 873573 - RNA, 19 nt, Human
uagaaugcccacuuaaaaa

SEQ ID NO: 873574 - RNA, 17 nt, Human
aaacaaugcagacaagc

SEQ ID NO: 873575 - RNA, 22 nt, Human
cagggugcugcaccaucccuca

SEQ ID NO: 873576 - RNA, 22 nt, Human
gggcccagcgugguuccaucug

SEQ ID NO: 873577 - RNA, 22 nt, Human
gcagcugccuauucagggcuug

SEQ ID NO: 873578 - RNA, 17 nt, Human
uagcauuuaucuuccuu

SEQ ID NO: 873579 - RNA, 22 nt, Human
ugcaagggugacagguugcucu

SEQ ID NO: 873580 - RNA, 22 nt, Human
ggugacggggcccagguuuccu

SEQ ID NO: 873581 - RNA, 22 nt, Human
ugaacagugggcaugugaagac

SEQ ID NO: 873582 - RNA, 18 nt, Human
ugaguucauuagacuucc

SEQ ID NO: 873583 - RNA, 22 nt, Human
guauuuuuagguaaggaaagua

SEQ ID NO: 873584 - RNA, 22 nt, Human
cccagagcuccgguccugccca

SEQ ID NO: 873585 - RNA, 18 nt, Human
guggcagccuuuggcuuu

SEQ ID NO: 873586 - RNA, 22 nt, Human
aaaggacuagguguugccaaaa

SEQ ID NO: 873587 - RNA, 22 nt, Human
uuuuccacagcaccauaagauu

SEQ ID NO: 873588 - RNA, 23 nt, Human
auucagaauuguguguuuguaua

SEQ ID NO: 873589 - RNA, 22 nt, Human
ggcacagagcuccagccuuggc

SEQ ID NO: 873590 - RNA, 22 nt, Human
guccagagauggacgagcagau

SEQ ID NO: 873591 - RNA, 22 nt, Human
cugugucuaaucuuauacauca

SEQ ID NO: 873592 - RNA, 22 nt, Human
ucuugcaggcggcucagcaacc

SEQ ID NO: 873593 - RNA, 21 nt, Human
gagacucucauguuauuugga

SEQ ID NO: 873594 - RNA, 22 nt, Human
gccaaauauaauucuccaccuu

SEQ ID NO: 873595 - RNA, 22 nt, Human
aauaaugucuaugguuccaaaa

SEQ ID NO: 873596 - RNA, 22 nt, Human
gccggggcuggggagagacaug

SEQ ID NO: 873597 - RNA, 22 nt, Human
ugagguauuuuuuaaagcacaa

SEQ ID NO: 873598 - RNA, 21 nt, Human
gacacaaaggguaguaauggu

SEQ ID NO: 873599 - RNA, 22 nt, Human
cugaggccuaagacaugaauga

SEQ ID NO: 873600 - RNA, 22 nt, Human
gagacagcuuaauuggugguca

SEQ ID NO: 873601 - RNA, 22 nt, Human
uggcaggguacaccuuaacacc

SEQ ID NO: 873602 - RNA, 22 nt, Human
agcaauuauuguauaagaacaa

SEQ ID NO: 873603 - RNA, 22 nt, Human
aggcagcagggccacuggcuga

SEQ ID NO: 873604 - RNA, 22 nt, Human
uaaagugaguacaaaaugaggg

SEQ ID NO: 873605 - RNA, 21 nt, Human
agccugggaggcggagguugc

SEQ ID NO: 873606 - RNA, 22 nt, Human
guggccuggcuggcaccaccuc

SEQ ID NO: 873607 - RNA, 22 nt, Human
aaauuggcaguucagggaauua

SEQ ID NO: 873608 - RNA, 23 nt, Human
acaguucucugauggguuuaaca

SEQ ID NO: 873609 - RNA, 23 nt, Human
agggcccaagccuggacagcagg

SEQ ID NO: 873610 - RNA, 22 nt, Human
caugcgaggcgggaggaggccu

SEQ ID NO: 873611 - RNA, 22 nt, Human
aaguucgaaauuuagggagaug

SEQ ID NO: 873612 - RNA, 22 nt, Human
cacaauguguuggguuaaguuu

SEQ ID NO: 873613 - RNA, 22 nt, Human
agacaacugcagagcaaagaau

SEQ ID NO: 873614 - RNA, 22 nt, Human
acaaugcaccagcaucuucacc

SEQ ID NO: 873615 - RNA, 23 nt, Human
aggcuucauccauauuuauugcc

SEQ ID NO: 873616 - RNA, 22 nt, Human
aagugcuuggcuaaugguuaug

SEQ ID NO: 873617 - RNA, 22 nt, Human
gaguggcaggcacugugacgga

SEQ ID NO: 873618 - RNA, 22 nt, Human
agagccaggcucuaccuggguu

SEQ ID NO: 873619 - RNA, 22 nt, Human
acagguuuuuguggauauaugu

SEQ ID NO: 873620 - RNA, 22 nt, Human
ggcugcaggcagaggcugucug

SEQ ID NO: 873621 - RNA, 22 nt, Human
uauguacaucuugagcaaugaa

SEQ ID NO: 873622 - RNA, 19 nt, Human
gccaggccuggaccugcag

SEQ ID NO: 873623 - RNA, 22 nt, Human
agugggcagcccaggaggucuu

SEQ ID NO: 873624 - RNA, 22 nt, Human
augccagaaggcagaauuuauc

SEQ ID NO: 873625 - RNA, 22 nt, Human
aaagguuugcauggaauuuacc

SEQ ID NO: 873626 - RNA, 22 nt, Human
guucccauuggggaucuugggc

SEQ ID NO: 873627 - RNA, 22 nt, Human
uuucuacauucaaaaacuacca

SEQ ID NO: 873628 - RNA, 22 nt, Human
uagaggugagaggaacuuugga

SEQ ID NO: 873629 - RNA, 22 nt, Human
agggcagcaauuugguuccugg

SEQ ID NO: 873630 - RNA, 22 nt, Human
caguuuuucaaaauuacaugau

SEQ ID NO: 873631 - RNA, 21 nt, Human
agcaauuucauuugguuuaac

SEQ ID NO: 873632 - RNA, 22 nt, Human
uuggaaggccagcaccuugagu

SEQ ID NO: 873633 - RNA, 22 nt, Human
aguaugucagagugaaaauggu

SEQ ID NO: 873634 - RNA, 22 nt, Human
agcaggguucucaguuggugcu

SEQ ID NO: 873635 - RNA, 22 nt, Human
cucaauaugccagaggggaaag

SEQ ID NO: 873636 - RNA, 22 nt, Human
ugcagaagcagagccgguggcc

SEQ ID NO: 873637 - RNA, 22 nt, Human
cucauaaacaauucuuugaggu

SEQ ID NO: 873638 - RNA, 20 nt, Human
uccaucuugggcagaagcag

SEQ ID NO: 873639 - RNA, 22 nt, Human
gggcuggaucuccugcaggcag

SEQ ID NO: 873640 - RNA, 22 nt, Human
gaagcuucguggcucuucaaau

SEQ ID NO: 873641 - RNA, 23 nt, Human
ccagggagugcuacuaucaagcc

SEQ ID NO: 873642 - RNA, 20 nt, Human
ggcagagggccugggagaag

SEQ ID NO: 873643 - RNA, 22 nt, Human
uguguauagaaaguaggaaagg

SEQ ID NO: 873644 - RNA, 22 nt, Human
ugucccauggauaccaggcuau

SEQ ID NO: 873645 - RNA, 22 nt, Human
gaccaggcccaggugcaaggga

SEQ ID NO: 873646 - RNA, 22 nt, Human
ccacagguacggauugaggacc

SEQ ID NO: 873647 - RNA, 22 nt, Human
ugcaaacaggcauuucacaaac

SEQ ID NO: 873648 - RNA, 22 nt, Human
agcaggcaggcugccagugaau

SEQ ID NO: 873649 - RNA, 18 nt, Human
ccugaggugggaggaagg

SEQ ID NO: 873650 - RNA, 23 nt, Human
acagccuucuggggcuucugggc

SEQ ID NO: 873651 - RNA, 22 nt, Human
ucaaugcauaggagguggcaga

SEQ ID NO: 873652 - RNA, 22 nt, Human
cacaugaagagagucuaguaau

SEQ ID NO: 873653 - RNA, 22 nt, Human
cccagccucuggauucugcccu

SEQ ID NO: 873654 - RNA, 19 nt, Human
ugaaggagggggauggcca

SEQ ID NO: 873655 - RNA, 22 nt, Human
caguuaaacgggccaugugagu

SEQ ID NO: 873656 - RNA, 22 nt, Human
aacagaauaguugauguacagu

SEQ ID NO: 873657 - RNA, 22 nt, Human
uucaagucagagcaagccaagu

SEQ ID NO: 873658 - RNA, 22 nt, Human
ugugaagauuaaguuacugggc

SEQ ID NO: 873659 - RNA, 22 nt, Human
ggccugugcugagaaccuggcu

SEQ ID NO: 873660 - RNA, 22 nt, Human
ugaggugggcuuguggauuugc

SEQ ID NO: 873661 - RNA, 22 nt, Human
ggcagauguuauaugaucugag

SEQ ID NO: 873662 - RNA, 22 nt, Human
agaggcucuaauaccagcaugg

SEQ ID NO: 873663 - RNA, 22 nt, Human
ucuagagccaaagucuuggggg

SEQ ID NO: 873664 - RNA, 22 nt, Human
agggcgggcucaucacaugcuc

SEQ ID NO: 873665 - RNA, 22 nt, Human
gaaugugugacucuauugagca

SEQ ID NO: 873666 - RNA, 22 nt, Human
uaauaguugugacuuuguaaag

SEQ ID NO: 873667 - RNA, 22 nt, Human
gucccaggcuuauguggagcuu

SEQ ID NO: 873668 - RNA, 22 nt, Human
aaauugcuaaggaucucaugug

SEQ ID NO: 873669 - RNA, 22 nt, Human
cagugguagaagccaaguagau

SEQ ID NO: 873670 - RNA, 22 nt, Human
ugacacccaucugugccagucc

SEQ ID NO: 873671 - RNA, 22 nt, Human
uacuuucuguccuucuguuaaa

SEQ ID NO: 873672 - RNA, 22 nt, Human
uggccagcccuucagccaugcc

SEQ ID NO: 873673 - RNA, 22 nt, Human
ucugggcugcuucagccuucgc

SEQ ID NO: 873674 - RNA, 22 nt, Human
ugggcucugaagucagucugcu

SEQ ID NO: 873675 - RNA, 22 nt, Human
uccagcuugacaaaugauuuua

SEQ ID NO: 873676 - RNA, 22 nt, Human
aucauuaguuguggaauucuug

SEQ ID NO: 873677 - RNA, 22 nt, Human
ccacagagacagagcccagggu

SEQ ID NO: 873678 - RNA, 22 nt, Human
agacaguaugauauaugaauac

SEQ ID NO: 873679 - RNA, 22 nt, Human
ugcugcagguguguucagugag

SEQ ID NO: 873680 - RNA, 22 nt, Human
aaaauaaguugguccuguccuu

SEQ ID NO: 873681 - RNA, 22 nt, Human
augacacaauuuuagagcugaa

SEQ ID NO: 873682 - RNA, 22 nt, Human
auuuacagccuugccaucuaua

SEQ ID NO: 873683 - RNA, 22 nt, Human
uugucugugaaauggaaauagu

SEQ ID NO: 873684 - RNA, 22 nt, Human
uugcacuccagcccgagcaaca

SEQ ID NO: 873685 - RNA, 22 nt, Human
agggggcaggagagaccugcug

SEQ ID NO: 873686 - RNA, 22 nt, Human
uuuauugucuucguggugccua

SEQ ID NO: 873687 - RNA, 22 nt, Human
guccuucagcuuuaucugaaca

SEQ ID NO: 873688 - RNA, 22 nt, Human
acaugcauaggagaagucuuua

SEQ ID NO: 873689 - RNA, 22 nt, Human
auguuaaguguaccauauauca

SEQ ID NO: 873690 - RNA, 22 nt, Human
cacagguuucaaggauaagaug

SEQ ID NO: 873691 - RNA, 22 nt, Human
gagcuuuucuuccaguuaauga

SEQ ID NO: 873692 - RNA, 22 nt, Human
uccuaggguaaucagcauacau

SEQ ID NO: 873693 - RNA, 22 nt, Human
agaggagguggugaugcuuuaa

SEQ ID NO: 873694 - RNA, 22 nt, Human
ugugucugaacaugcuuuguaa

SEQ ID NO: 873695 - RNA, 22 nt, Human
auuacacauagacauucguuca

SEQ ID NO: 873696 - RNA, 22 nt, Human
uauucaagauugaacuggcaga

SEQ ID NO: 873697 - RNA, 22 nt, Human
uggcucuguggauguucugacc

SEQ ID NO: 873698 - RNA, 22 nt, Human
ucagccuuguggcccugcucca

SEQ ID NO: 873699 - RNA, 22 nt, Human
ugcuuuaccuucccagaaacca

SEQ ID NO: 873700 - RNA, 22 nt, Human
gaggcaguuccugagugacaag

SEQ ID NO: 873701 - RNA, 22 nt, Human
gacuccccacguuaaggaaugu

SEQ ID NO: 873702 - RNA, 22 nt, Human
ugugaggagaggcccagcuccc

SEQ ID NO: 873703 - RNA, 22 nt, Human
ccugggcuuucaaaaccagccu

SEQ ID NO: 873704 - RNA, 22 nt, Human
ggaccagagaagugagcaccug

SEQ ID NO: 873705 - RNA, 22 nt, Human
acagaucuacauugucugaccc

SEQ ID NO: 873706 - RNA, 20 nt, Human
gccaggcacuguucucaaua

SEQ ID NO: 873707 - RNA, 22 nt, Human
acaguggcaguauuagggcaga

SEQ ID NO: 873708 - RNA, 22 nt, Human
gaguccuuuucucuguccacug

SEQ ID NO: 873709 - RNA, 22 nt, Human
cagauggggcaaggccaucugu

SEQ ID NO: 873710 - RNA, 22 nt, Human
uauuagaaaggcuauugcauag

SEQ ID NO: 873711 - RNA, 22 nt, Human
uugaccuauguuucuucaucug

SEQ ID NO: 873712 - RNA, 22 nt, Human
uggcccuguccucauuucaucu

SEQ ID NO: 873713 - RNA, 22 nt, Human
aaagcagccugcucauccugga

SEQ ID NO: 873714 - RNA, 22 nt, Human
agcuccaggcagcauuaauaaa

SEQ ID NO: 873715 - RNA, 22 nt, Human
ucuggccagcaugagaccuggu

SEQ ID NO: 873716 - RNA, 22 nt, Human
guaaaugugcuucuuuuaacuu

SEQ ID NO: 873717 - RNA, 22 nt, Human
auguguaaagcuuuucuuuguu

SEQ ID NO: 873718 - RNA, 18 nt, Human
uucucauaccucacuuag

SEQ ID NO: 873719 - RNA, 19 nt, Human
uacaggaggccugcaaucu

SEQ ID NO: 873720 - RNA, 19 nt, Human
aggcagucauuggaauaua

SEQ ID NO: 873721 - RNA, 20 nt, Human
ugggccucuggugccucugg

SEQ ID NO: 873722 - RNA, 22 nt, Human
agagacccagacugaucauugc

SEQ ID NO: 873723 - RNA, 22 nt, Human
aaaucagaggcaacaacuacuu

SEQ ID NO: 873724 - RNA, 22 nt, Human
ugaggccagggauuccaucauu

SEQ ID NO: 873725 - RNA, 22 nt, Human
aguguucacucuguggagccca

SEQ ID NO: 873726 - RNA, 22 nt, Human
acagcagcuugucuguucuuua

SEQ ID NO: 873727 - RNA, 22 nt, Human
uugcagauuaaaacacugagcu

SEQ ID NO: 873728 - RNA, 22 nt, Human
ugucauguauaagacacugugu

SEQ ID NO: 873729 - RNA, 22 nt, Human
ugucugcagaagauggcauggg

SEQ ID NO: 873730 - RNA, 22 nt, Human
auugcuuuucagacaaugaggc

SEQ ID NO: 873731 - RNA, 22 nt, Human
acuuaaaaagaaucuuuucacg

SEQ ID NO: 873732 - RNA, 22 nt, Human
gcuggcaguuuccucaccgagg

SEQ ID NO: 873733 - RNA, 22 nt, Human
auuauagaggguuacaguuaau

SEQ ID NO: 873734 - RNA, 22 nt, Human
cuccucuggaaauuccucugcc

SEQ ID NO: 873735 - RNA, 22 nt, Human
ucagauaccauugaauuuguug

SEQ ID NO: 873736 - RNA, 22 nt, Human
ucauguuuuaguaaagugaagg

SEQ ID NO: 873737 - RNA, 22 nt, Human
ugcuaucuaggcaagguggucc

SEQ ID NO: 873738 - RNA, 22 nt, Human
cuggaaggugacugucuugaau

SEQ ID NO: 873739 - RNA, 22 nt, Human
guuaacaagguguagagguuuu

SEQ ID NO: 873740 - RNA, 21 nt, Human
ccagacucagaaguuuaacca

SEQ ID NO: 873741 - RNA, 22 nt, Human
auuugcuuugggacagcuuaaa

SEQ ID NO: 873742 - RNA, 22 nt, Human
aggcagugugggccaagcuucc

SEQ ID NO: 873743 - RNA, 22 nt, Human
gccagggugagggcugagaggu

SEQ ID NO: 873744 - RNA, 22 nt, Human
uggcugcugagaaggcagcugu

SEQ ID NO: 873745 - RNA, 22 nt, Human
gcagcaagaauaauuuggguag

SEQ ID NO: 873746 - RNA, 22 nt, Human
gcaagcaaguaucuggcaggga

SEQ ID NO: 873747 - RNA, 22 nt, Human
agaauguaagaaugcaaagauu

SEQ ID NO: 873748 - RNA, 22 nt, Human
aagugauuguuccguugagugu

SEQ ID NO: 873749 - RNA, 22 nt, Human
auuucauguuucaucuaccuaa

SEQ ID NO: 873750 - RNA, 22 nt, Human
gggucaggcucagcagggcagc

SEQ ID NO: 873751 - RNA, 22 nt, Human
cagugcugugcuggaagcuguu

SEQ ID NO: 873752 - RNA, 22 nt, Human
ucaauucuaguggagagaguuu

SEQ ID NO: 873753 - RNA, 20 nt, Human
aggcaguguagagaugagua

SEQ ID NO: 873754 - RNA, 22 nt, Human
uaugcagcugguuaagaacaca

SEQ ID NO: 873755 - RNA, 22 nt, Human
gcccuggaugcucauggcauca

SEQ ID NO: 873756 - RNA, 22 nt, Human
ggccagaggugguacauagcuu

SEQ ID NO: 873757 - RNA, 22 nt, Human
agaacagugcugauaaaucaua

SEQ ID NO: 873758 - RNA, 22 nt, Human
uaugagaacaagaacaaucucc

SEQ ID NO: 873759 - RNA, 22 nt, Human
cuccuacaguguuugaguccag

SEQ ID NO: 873760 - RNA, 22 nt, Human
ugugcauagacuuucaccaccu

SEQ ID NO: 873761 - RNA, 22 nt, Human
cgcugggggaacagcgagggug

SEQ ID NO: 873762 - RNA, 22 nt, Human
caguucugacuuucauaauguc

SEQ ID NO: 873763 - RNA, 22 nt, Human
agggucagagaucggccaugug

SEQ ID NO: 873764 - RNA, 22 nt, Human
gcaagcagacugggccccugug

SEQ ID NO: 873765 - RNA, 22 nt, Human
aauugcuagacuauacuguaau

SEQ ID NO: 873766 - RNA, 22 nt, Human
uucuaaauguaaauaguaugau

SEQ ID NO: 873767 - RNA, 22 nt, Human
ucuguccacaagcacaggcucu

SEQ ID NO: 873768 - RNA, 22 nt, Human
agcagggcccacuaggggagau

SEQ ID NO: 873769 - RNA, 22 nt, Human
gccucaggccuauagcugcugu

SEQ ID NO: 873770 - RNA, 22 nt, Human
aaauguccugagauucaacuua

SEQ ID NO: 873771 - RNA, 22 nt, Human
gauucugagcugguguuuuacg

SEQ ID NO: 873772 - RNA, 22 nt, Human
ccaggagagcgcccucccggcc

SEQ ID NO: 873773 - RNA, 18 nt, Human
cccugaagggcaagauaa

SEQ ID NO: 873774 - RNA, 22 nt, Human
ugaguucagauccuggcucugc

SEQ ID NO: 873775 - RNA, 22 nt, Human
uccugccucuuuucuuauucca

SEQ ID NO: 873776 - RNA, 22 nt, Human
gcaagaaaagagccuucagugg

SEQ ID NO: 873777 - RNA, 22 nt, Human
ugcccuccacaguggcuccacc

SEQ ID NO: 873778 - RNA, 22 nt, Human
cacugcaggucugagauggggg

SEQ ID NO: 873779 - RNA, 22 nt, Human
agcuacaccccuuuacaguccu

SEQ ID NO: 873780 - RNA, 22 nt, Human
cagagagaggccacugcuauua

SEQ ID NO: 873781 - RNA, 22 nt, Human
ccagcucuggcuucuugcuggg

SEQ ID NO: 873782 - RNA, 22 nt, Human
ggcagcaaugcugugcaggcau

SEQ ID NO: 873783 - RNA, 22 nt, Human
gccuaagacugaggcuuuuguc

SEQ ID NO: 873784 - RNA, 23 nt, Human
cagggugaccaauguggccauca

SEQ ID NO: 873785 - RNA, 22 nt, Human
aauguaaagcucaggucaggag

SEQ ID NO: 873786 - RNA, 22 nt, Human
gccugggauucucaaaggggug

SEQ ID NO: 873787 - RNA, 22 nt, Human
auccacaggaggguuuggaaaa

SEQ ID NO: 873788 - RNA, 22 nt, Human
aaauaagugugggccagucaaa

SEQ ID NO: 873789 - RNA, 22 nt, Human
acaguugagaugcaacuuuggg

SEQ ID NO: 873790 - RNA, 22 nt, Human
agcugcuuguacaugaccacau

SEQ ID NO: 873791 - RNA, 22 nt, Human
aggaagaaaugugacuucaaac

SEQ ID NO: 873792 - RNA, 21 nt, Human
gugugucuaauguaguggaaa

SEQ ID NO: 873793 - RNA, 22 nt, Human
gcauugcaacugacagaucauu

SEQ ID NO: 873794 - RNA, 22 nt, Human
cuacccagagugaaucucuuaa

SEQ ID NO: 873795 - RNA, 22 nt, Human
aaggaggcacccugagccugcc

SEQ ID NO: 873796 - RNA, 22 nt, Human
guuaaaugcagauucugacuca

SEQ ID NO: 873797 - RNA, 22 nt, Human
guccucaguaagagggccucug

SEQ ID NO: 873798 - RNA, 22 nt, Human
agacagcugccuccaccacagc

SEQ ID NO: 873799 - RNA, 22 nt, Human
cuugucugauaauggggccaac

SEQ ID NO: 873800 - RNA, 22 nt, Human
gagcugccugaacaagcagcag

SEQ ID NO: 873801 - RNA, 22 nt, Human
gaaaguauuuacauuaacaucu

SEQ ID NO: 873802 - RNA, 22 nt, Human
aacacuuuuuaguaaagauuga

SEQ ID NO: 873803 - RNA, 22 nt, Human
guucauuuaugauguaacaugu

SEQ ID NO: 873804 - RNA, 22 nt, Human
uucuaguucuuagagaauuggu

SEQ ID NO: 873805 - RNA, 22 nt, Human
uaugcuaagugagaaaagacag

SEQ ID NO: 873806 - RNA, 22 nt, Human
ugaguucaaauuuuggcucugc

SEQ ID NO: 873807 - RNA, 18 nt, Human
aggaaagaaaggcaggug

SEQ ID NO: 873808 - RNA, 22 nt, Human
uuaaagcuagguggaacaaauu

SEQ ID NO: 873809 - RNA, 22 nt, Human
acaaacuuauguuucauaugua

SEQ ID NO: 873810 - RNA, 22 nt, Human
agaauauugaaaguucuugaca

SEQ ID NO: 873811 - RNA, 22 nt, Human
ggucagaggucacaagcuggca

SEQ ID NO: 873812 - RNA, 22 nt, Human
agcagaaauagaagucaaugau

SEQ ID NO: 873813 - RNA, 22 nt, Human
uuccuucuaauuuuacaccuga

SEQ ID NO: 873814 - RNA, 22 nt, Human
aagacagugacagucacaauug

SEQ ID NO: 873815 - RNA, 22 nt, Human
uuuaccacaauuuuaaacaaug

SEQ ID NO: 873816 - RNA, 22 nt, Human
ggcguggggccuucugcccgcu

SEQ ID NO: 873817 - RNA, 22 nt, Human
cuguggcucuuuaguugagcac

SEQ ID NO: 873818 - RNA, 18 nt, Human
aggcccuggccucgaaca

SEQ ID NO: 873819 - RNA, 22 nt, Human
cagugacguaaacugcaugugc

SEQ ID NO: 873820 - RNA, 22 nt, Human
gaagauuuucuccuuuaaauga

SEQ ID NO: 873821 - RNA, 22 nt, Human
aaggcaggaugcggacccaucu

SEQ ID NO: 873822 - RNA, 22 nt, Human
aaggucugaguuuugccaggcc

SEQ ID NO: 873823 - RNA, 22 nt, Human
ucaggcugccuaucagacugug

SEQ ID NO: 873824 - RNA, 22 nt, Human
uaagaagugagugcaccuucuu

SEQ ID NO: 873825 - RNA, 22 nt, Human
ucacaugcccuguauuuaccag

SEQ ID NO: 873826 - RNA, 22 nt, Human
agacuguugccugaacuuagcc

SEQ ID NO: 873827 - RNA, 22 nt, Human
ucacaagacagaaaacauuuag

SEQ ID NO: 873828 - RNA, 22 nt, Human
ggucgcacccgggcgcugcugg

SEQ ID NO: 873829 - RNA, 22 nt, Human
ugugaaauauuggcaauuucau

SEQ ID NO: 873830 - RNA, 22 nt, Human
ugcugcuguagcuaggcuuucu

SEQ ID NO: 873831 - RNA, 20 nt, Human
aauuagcuuaagucaaucag

SEQ ID NO: 873832 - RNA, 22 nt, Human
ucucugaguucuccuccagccc

SEQ ID NO: 873833 - RNA, 22 nt, Human
gugcuuuagguguuuggcugaa

SEQ ID NO: 873834 - RNA, 22 nt, Human
aaagguuaguucuuagaagugc

SEQ ID NO: 873835 - RNA, 22 nt, Human
uguauacacuaugcuauauggu

SEQ ID NO: 873836 - RNA, 22 nt, Human
auuaauguguagccaacuuaau

SEQ ID NO: 873837 - RNA, 22 nt, Human
ggucccugaagaggccuggggu

SEQ ID NO: 873838 - RNA, 22 nt, Human
cacaacugccagccaggaaagg

SEQ ID NO: 873839 - RNA, 19 nt, Human
agcaaauacaucaaaauug

SEQ ID NO: 873840 - RNA, 22 nt, Human
cugcuguaaugagucagcaucu

SEQ ID NO: 873841 - RNA, 22 nt, Human
auguaucaacaaauuguacagu

SEQ ID NO: 873842 - RNA, 22 nt, Human
uggaagaaaauucaaucgaguu

SEQ ID NO: 873843 - RNA, 22 nt, Human
aacuguuuaccauacacaguga

SEQ ID NO: 873844 - RNA, 22 nt, Human
agugcagaguacauuuguggca

SEQ ID NO: 873845 - RNA, 22 nt, Human
gagguuagaggucagugcaguc

SEQ ID NO: 873846 - RNA, 22 nt, Human
uuuuccaaauuagaaguagaga

SEQ ID NO: 873847 - RNA, 22 nt, Human
caguggcgugaucucugcucac

SEQ ID NO: 873848 - RNA, 22 nt, Human
ggcaggcaagucugcucuguga

SEQ ID NO: 873849 - RNA, 22 nt, Human
acuaaaugagauacugucuuca

SEQ ID NO: 873850 - RNA, 22 nt, Human
gagacacaggugguuccuguca

SEQ ID NO: 873851 - RNA, 22 nt, Human
ggugucugaugguggcuucuca

SEQ ID NO: 873852 - RNA, 22 nt, Human
gcccucuggggcacacagagga

SEQ ID NO: 873853 - RNA, 22 nt, Human
acagccuucucuucacuguguc

SEQ ID NO: 873854 - RNA, 22 nt, Human
cacugagagaugugucacagca

SEQ ID NO: 873855 - RNA, 22 nt, Human
uaauuauuaugacaacaauugc

SEQ ID NO: 873856 - RNA, 22 nt, Human
ugugggccaggaggccucagug

SEQ ID NO: 873857 - RNA, 22 nt, Human
ccaguggaguuuuuauacccag

SEQ ID NO: 873858 - RNA, 22 nt, Human
ugggaaggggagcuggaaagga

SEQ ID NO: 873859 - RNA, 22 nt, Human
uugccauugcucagugaacaga

SEQ ID NO: 873860 - RNA, 22 nt, Human
caggcccaggggucuggcccac

SEQ ID NO: 873861 - RNA, 22 nt, Human
ucaggaggcaaguagguauuga

SEQ ID NO: 873862 - RNA, 22 nt, Human
guagggacuuguuuuacuagua

SEQ ID NO: 873863 - RNA, 22 nt, Human
cucucucuuuagaagcgucugg

SEQ ID NO: 873864 - RNA, 23 nt, Human
gcaggugguucgaacagaaguuu

SEQ ID NO: 873865 - RNA, 22 nt, Human
cccaggagagagacuugaaucu

SEQ ID NO: 873866 - RNA, 22 nt, Human
ugcagaugagggaugaaaauga

SEQ ID NO: 873867 - RNA, 19 nt, Human
cacagaugauugacacaua

SEQ ID NO: 873868 - RNA, 22 nt, Human
uaugaguacugugaacgagaau

SEQ ID NO: 873869 - RNA, 20 nt, Human
auagacaaagacaugccaga

SEQ ID NO: 873870 - RNA, 22 nt, Human
ugcagaggagucagccugggca

SEQ ID NO: 873871 - RNA, 22 nt, Human
agggccugggauguccuccuag

SEQ ID NO: 873872 - RNA, 19 nt, Human
uauauuugagugugcaugc

SEQ ID NO: 873873 - RNA, 20 nt, Human
uucuuaaagaccucacuuug

SEQ ID NO: 873874 - RNA, 22 nt, Human
uuucacaaagcauagcacuuua

SEQ ID NO: 873875 - RNA, 22 nt, Human
ugaacacacacaucuuaauaau

SEQ ID NO: 873876 - RNA, 22 nt, Human
aauauguugagucuaucuuuau

SEQ ID NO: 873877 - RNA, 22 nt, Human
agggcucagccuccuccucagc

SEQ ID NO: 873878 - RNA, 22 nt, Human
uuugagaacuuugguauuuucc

SEQ ID NO: 873879 - RNA, 22 nt, Human
ugagaccuuaaaagguauguca

SEQ ID NO: 873880 - RNA, 22 nt, Human
aauagcaauuacauuugcacca

SEQ ID NO: 873881 - RNA, 22 nt, Human
ucucuaguauuaaauauagugu

SEQ ID NO: 873882 - RNA, 22 nt, Human
ucagcucuguguacaguuagca

SEQ ID NO: 873883 - RNA, 22 nt, Human
uggcucaaguaacaaaaauaua

SEQ ID NO: 873884 - RNA, 22 nt, Human
uuugcugaauagauuguaaacu

SEQ ID NO: 873885 - RNA, 22 nt, Human
aagcaguuuuucaacuguuuag

SEQ ID NO: 873886 - RNA, 22 nt, Human
gaggcaguguugaaaaggagag

SEQ ID NO: 873887 - RNA, 22 nt, Human
ccuuaaacuuuaucuugugaga

SEQ ID NO: 873888 - RNA, 22 nt, Human
cagauguuugucuauaugcuuu

SEQ ID NO: 873889 - RNA, 22 nt, Human
ggccaggaacuuuugggauggg

SEQ ID NO: 873890 - RNA, 20 nt, Human
acacaugugcguguucagua

SEQ ID NO: 873891 - RNA, 22 nt, Human
acagagcaauucuuggguguuu

SEQ ID NO: 873892 - RNA, 22 nt, Human
gcagacagaugagggugcuggg

SEQ ID NO: 873893 - RNA, 22 nt, Human
ucuucuuccuccacagggccca

SEQ ID NO: 873894 - RNA, 22 nt, Human
uccugcuggaaguagggaauga

SEQ ID NO: 873895 - RNA, 22 nt, Human
ugcuuuguguuugaauagauaa

SEQ ID NO: 873896 - RNA, 22 nt, Human
acacagagccagggaauacagu

SEQ ID NO: 873897 - RNA, 22 nt, Human
aauguauuccucaugcaagagu

SEQ ID NO: 873898 - RNA, 22 nt, Human
cagcccagccgagggccuggcu

SEQ ID NO: 873899 - RNA, 22 nt, Human
uuuggcggacugagaacgcggg

SEQ ID NO: 873900 - RNA, 22 nt, Human
cucagcucuuuauacuagcugu

SEQ ID NO: 873901 - RNA, 22 nt, Human
ccuggcucaggcacgcauggcu

SEQ ID NO: 873902 - RNA, 21 nt, Human
agacagagugcagucuacaua

SEQ ID NO: 873903 - RNA, 22 nt, Human
ccgugcuucuucagaugugaau

SEQ ID NO: 873904 - RNA, 22 nt, Human
ugaacacauaaggcuuuccugu

SEQ ID NO: 873905 - RNA, 21 nt, Human
cuuuucuguguuccucccugu

SEQ ID NO: 873906 - RNA, 22 nt, Human
uagaaaugugauaauagcuuaa

SEQ ID NO: 873907 - RNA, 22 nt, Human
gauuaaaaauaacccaugcuga

SEQ ID NO: 873908 - RNA, 22 nt, Human
ggcaaaaaguucccaucagugu

SEQ ID NO: 873909 - RNA, 22 nt, Human
augcaguggcagcuccuggugu

SEQ ID NO: 873910 - RNA, 22 nt, Human
ucagcuguaucuugcugcacuu

SEQ ID NO: 873911 - RNA, 22 nt, Human
cagcaagaguugggguuguugg

SEQ ID NO: 873912 - RNA, 22 nt, Human
ucaguguucgcucagggacucc

SEQ ID NO: 873913 - RNA, 22 nt, Human
gaaauaagaguccaugccaggu

SEQ ID NO: 873914 - RNA, 22 nt, Human
cacaucugcucugggcagcacu

SEQ ID NO: 873915 - RNA, 22 nt, Human
aaaugcaggaaauuaugcuuuu

SEQ ID NO: 873916 - RNA, 22 nt, Human
acauuugacuacauuuauauau

SEQ ID NO: 873917 - RNA, 20 nt, Human
ccaggccugggccugcucua

SEQ ID NO: 873918 - RNA, 22 nt, Human
agggcacaagacucugagcccc

SEQ ID NO: 873919 - RNA, 21 nt, Human
aguuacauguauagauaaagu

SEQ ID NO: 873920 - RNA, 17 nt, Human
aauacuuccaacuagug

SEQ ID NO: 873921 - RNA, 22 nt, Human
cucagggaggcccugggacccu

SEQ ID NO: 873922 - RNA, 22 nt, Human
ucuuccagaaucucagagggcu

SEQ ID NO: 873923 - RNA, 22 nt, Human
ggagaaggugcuggucacugug

SEQ ID NO: 873924 - RNA, 22 nt, Human
gacaggaacauaaauguaggag

SEQ ID NO: 873925 - RNA, 22 nt, Human
uaaucucuuuuaggacagagcc

SEQ ID NO: 873926 - RNA, 22 nt, Human
ccugcuuaacauugccaugaca

SEQ ID NO: 873927 - RNA, 22 nt, Human
uugaucucuguugcugucuuug

SEQ ID NO: 873928 - RNA, 22 nt, Human
accuaaauucuggcugauuagg

SEQ ID NO: 873929 - RNA, 22 nt, Human
uuccucagccagcacuuagggg

SEQ ID NO: 873930 - RNA, 22 nt, Human
aagauacaaaugucaauauugg

SEQ ID NO: 873931 - RNA, 22 nt, Human
auuuuaguaccucaaguaucca

SEQ ID NO: 873932 - RNA, 22 nt, Human
gugugugccaucaagagcuuuc

SEQ ID NO: 873933 - RNA, 22 nt, Human
uucuuccucagcagggcugccu

SEQ ID NO: 873934 - RNA, 22 nt, Human
aaucaggacccacucuacaguu

SEQ ID NO: 873935 - RNA, 22 nt, Human
ugggucccaaucugaaauguca

SEQ ID NO: 873936 - RNA, 21 nt, Human
agggcacccccgcugccuacc

SEQ ID NO: 873937 - RNA, 22 nt, Human
augaaaauacugugguugauag

SEQ ID NO: 873938 - RNA, 22 nt, Human
uugcuguugaugaugugauaca

SEQ ID NO: 873939 - RNA, 22 nt, Human
cauuuauugaguggccacagug

SEQ ID NO: 873940 - RNA, 22 nt, Human
aagcauuucagguagagauauu

SEQ ID NO: 873941 - RNA, 22 nt, Human
cagaacagucgccugcauggau

SEQ ID NO: 873942 - RNA, 22 nt, Human
ggagaggugcaggucaguggca

SEQ ID NO: 873943 - RNA, 22 nt, Human
gugauucucaaauugugauauc

SEQ ID NO: 873944 - RNA, 19 nt, Human
aguuuagagagacucuaaa

SEQ ID NO: 873945 - RNA, 22 nt, Human
agacacaguacuugcccucaug

SEQ ID NO: 873946 - RNA, 22 nt, Human
aagaggugccagggguuuugua

SEQ ID NO: 873947 - RNA, 22 nt, Human
aaacacugaaaauuuuggucau

SEQ ID NO: 873948 - RNA, 22 nt, Human
augaaacuaaacuacauaaguu

SEQ ID NO: 873949 - RNA, 22 nt, Human
gcucugaaucaaucagauaagg

SEQ ID NO: 873950 - RNA, 19 nt, Human
uuuaaagugacugguauuu

SEQ ID NO: 873951 - RNA, 22 nt, Human
aaaagcagaucuccaaagucua

SEQ ID NO: 873952 - RNA, 22 nt, Human
acuauaacccauggaauauaag

SEQ ID NO: 873953 - RNA, 22 nt, Human
agacccugcaccucucgugggc

SEQ ID NO: 873954 - RNA, 22 nt, Human
cucuccugggcugaccguccga

SEQ ID NO: 873955 - RNA, 22 nt, Human
ucagagaucuggaguacaacug

SEQ ID NO: 873956 - RNA, 22 nt, Human
gacagcaggaugugaggggaug

SEQ ID NO: 873957 - RNA, 22 nt, Human
uggcuucuccagaaaucuuggu

SEQ ID NO: 873958 - RNA, 22 nt, Human
ggccucuguucugcauuccucc

SEQ ID NO: 873959 - RNA, 22 nt, Human
cuaaauguucacaugcaauuuu

SEQ ID NO: 873960 - RNA, 22 nt, Human
gauauaguaauauuccugaacu

SEQ ID NO: 873961 - RNA, 22 nt, Human
gauuuccucacuaacauccauc

SEQ ID NO: 873962 - RNA, 22 nt, Human
gcuucaugccaggagguuuaag

SEQ ID NO: 873963 - RNA, 22 nt, Human
ucaaaggcugcuugucuucugg

SEQ ID NO: 873964 - RNA, 22 nt, Human
augacauugacagaccugcugc

SEQ ID NO: 873965 - RNA, 22 nt, Human
aguaaacaguaggaacugagaa

SEQ ID NO: 873966 - RNA, 22 nt, Human
ccuccagcugccucagucucuu

SEQ ID NO: 873967 - RNA, 22 nt, Human
ccagcccuugcugaaggguggc

SEQ ID NO: 873968 - RNA, 22 nt, Human
gaugguccuccugcugccucuc

SEQ ID NO: 873969 - RNA, 22 nt, Human
gccugagaguugaaguucagug

SEQ ID NO: 873970 - RNA, 22 nt, Human
caccuagggcaucccugcccca

SEQ ID NO: 873971 - RNA, 22 nt, Human
ucccaccaggugaccauuucau

SEQ ID NO: 873972 - RNA, 22 nt, Human
ggcuggaacuucuucuggcauu

SEQ ID NO: 873973 - RNA, 22 nt, Human
uguuugaauaacuuggauauau

SEQ ID NO: 873974 - RNA, 22 nt, Human
agcagcaggcuguguggacuga

SEQ ID NO: 873975 - RNA, 20 nt, Human
caggaggcaaggucaagguc

SEQ ID NO: 873976 - RNA, 22 nt, Human
gugaaauauuuuguuuauguca

SEQ ID NO: 873977 - RNA, 22 nt, Human
ucuggcucucauacucgccagu

SEQ ID NO: 873978 - RNA, 22 nt, Human
agggaagagcuugcaagaaacc

SEQ ID NO: 873979 - RNA, 22 nt, Human
uacaggagcauggggaagggau

SEQ ID NO: 873980 - RNA, 22 nt, Human
aggugucugugaugggagcgau

SEQ ID NO: 873981 - RNA, 21 nt, Human
ggcagaaguagcauggacggg

SEQ ID NO: 873982 - RNA, 22 nt, Human
ccuggagggcagcccauucugg

SEQ ID NO: 873983 - RNA, 22 nt, Human
uuuuacaggugaaaaaugaaga

SEQ ID NO: 873984 - RNA, 22 nt, Human
uccugggugaaagaacaggcag

SEQ ID NO: 873985 - RNA, 22 nt, Human
ggccucugccccagccacaccu

SEQ ID NO: 873986 - RNA, 22 nt, Human
aggaaauuuugaaucagugucu

SEQ ID NO: 873987 - RNA, 22 nt, Human
cagccagugguugaagaugcag

SEQ ID NO: 873988 - RNA, 22 nt, Human
cuuuaugagccuugugaaggag

SEQ ID NO: 873989 - RNA, 22 nt, Human
ucugaaauaggaaagcaaaugg

SEQ ID NO: 873990 - RNA, 22 nt, Human
cuggcugaggucaccaguagcu

SEQ ID NO: 873991 - RNA, 17 nt, Human
uccagagaggcuucccu

SEQ ID NO: 873992 - RNA, 22 nt, Human
ucagcuguuaucacugucuguc

SEQ ID NO: 873993 - RNA, 22 nt, Human
uucuuucucagugggcagauac

SEQ ID NO: 873994 - RNA, 22 nt, Human
cccaggcaggagugugguggcu

SEQ ID NO: 873995 - RNA, 21 nt, Human
caggccccaggccuggggugc

SEQ ID NO: 873996 - RNA, 22 nt, Human
uauauuagugagauuuauccau

SEQ ID NO: 873997 - RNA, 22 nt, Human
cugugucccuugucccagagcc

SEQ ID NO: 873998 - RNA, 22 nt, Human
ugaaguuuccucugaggccagu

SEQ ID NO: 873999 - RNA, 22 nt, Human
acuggacucuggagguuucgua

SEQ ID NO: 874000 - RNA, 22 nt, Human
cuccccauggcaacaguuaugg

SEQ ID NO: 874001 - RNA, 22 nt, Human
cucuucuuuccaucccuagcca

SEQ ID NO: 874002 - RNA, 22 nt, Human
gccuggcucacagagcagccuu

SEQ ID NO: 874003 - RNA, 22 nt, Human
ugugaacaguaugucauuucac

SEQ ID NO: 874004 - RNA, 22 nt, Human
uuuaggaucaaugagaaagucu

SEQ ID NO: 874005 - RNA, 22 nt, Human
aagcaggaagcucagguccuug

SEQ ID NO: 874006 - RNA, 20 nt, Human
aagagcccgcagggcagugc

SEQ ID NO: 874007 - RNA, 22 nt, Human
aggcaagauuaggaccagaaga

SEQ ID NO: 874008 - RNA, 22 nt, Human
uagcagcacagaaagccuggag

SEQ ID NO: 874009 - RNA, 22 nt, Human
ugcuggccaauggcagaggcgg

SEQ ID NO: 874010 - RNA, 22 nt, Human
gugucccaaagauuagaaauca

SEQ ID NO: 874011 - RNA, 22 nt, Human
ucuaacaccugucagaugugau

SEQ ID NO: 874012 - RNA, 22 nt, Human
auugucgucaauggacacauag

SEQ ID NO: 874013 - RNA, 22 nt, Human
acacaggagaaaagaucuccca

SEQ ID NO: 874014 - RNA, 18 nt, Human
ucucaaaaauaauggcuu

SEQ ID NO: 874015 - RNA, 22 nt, Human
gugcacacauacaugaacgcug

SEQ ID NO: 874016 - RNA, 22 nt, Human
uagaaaccaucucacugcucag

SEQ ID NO: 874017 - RNA, 22 nt, Human
ugguauggaugguguggcuuuc

SEQ ID NO: 874018 - RNA, 22 nt, Human
ucugcgcugccuugauccuugg

SEQ ID NO: 874019 - RNA, 22 nt, Human
uccuacagauacuaaggagauc

SEQ ID NO: 874020 - RNA, 22 nt, Human
gcuggcaguguauuguuagcug

SEQ ID NO: 874021 - RNA, 22 nt, Human
agagugcuagccugagggaggu

SEQ ID NO: 874022 - RNA, 22 nt, Human
uggccuggcucacagugagauu

SEQ ID NO: 874023 - RNA, 22 nt, Human
uaaucuguugacuaacuuggga

SEQ ID NO: 874024 - RNA, 22 nt, Human
auuugaaaaccugagccucccg

SEQ ID NO: 874025 - RNA, 22 nt, Human
uauguaaaggauugagaugaau

SEQ ID NO: 874026 - RNA, 22 nt, Human
aagaguuuaauuuugucuagac

SEQ ID NO: 874027 - RNA, 22 nt, Human
acaaggcaauggcaggauuuca

SEQ ID NO: 874028 - RNA, 22 nt, Human
uucuggaauacuaaguuccuuu

SEQ ID NO: 874029 - RNA, 22 nt, Human
auggacagaagguagcaccuau

SEQ ID NO: 874030 - RNA, 22 nt, Human
cagugugccugaaucaaguguu

SEQ ID NO: 874031 - RNA, 22 nt, Human
ccuccugguaauuagcgaaagg

SEQ ID NO: 874032 - RNA, 22 nt, Human
agucuuauggccaucucugauu

SEQ ID NO: 874033 - RNA, 22 nt, Human
augccuguaaaacagcacccag

SEQ ID NO: 874034 - RNA, 22 nt, Human
auuauagggaauucuagaaguc

SEQ ID NO: 874035 - RNA, 22 nt, Human
gcuuucugugcagugaacacua

SEQ ID NO: 874036 - RNA, 22 nt, Human
cugcagcugcaguucugagaga

SEQ ID NO: 874037 - RNA, 22 nt, Human
ggccacagaacagcuacaggac

SEQ ID NO: 874038 - RNA, 22 nt, Human
cagagcugugauaaauagauau

SEQ ID NO: 874039 - RNA, 22 nt, Human
gguuuccauuauuuuaugggug

SEQ ID NO: 874040 - RNA, 22 nt, Human
aaaagaggagugguuuaugaca

SEQ ID NO: 874041 - RNA, 22 nt, Human
ggcacugggagaggugagacgg

SEQ ID NO: 874042 - RNA, 22 nt, Human
ucaguaacccugcuguucagag

SEQ ID NO: 874043 - RNA, 21 nt, Human
ugcaggcaggcagagaugcug

SEQ ID NO: 874044 - RNA, 22 nt, Human
uuuuaaacuauagcuggaugcu

SEQ ID NO: 874045 - RNA, 22 nt, Human
gcugguggugggccaguucugu

SEQ ID NO: 874046 - RNA, 22 nt, Human
ucuaagaauacucauaucuucu

SEQ ID NO: 874047 - RNA, 19 nt, Human
agacagagcucaguggguu

SEQ ID NO: 874048 - RNA, 22 nt, Human
aaguguuaaaagauuaaaugcu

SEQ ID NO: 874049 - RNA, 22 nt, Human
gggcaguguugugguucucuau

SEQ ID NO: 874050 - RNA, 22 nt, Human
acuuaaaaacagauccagcagg

SEQ ID NO: 874051 - RNA, 22 nt, Human
auaaagucauggcagcuagaau

SEQ ID NO: 874052 - RNA, 22 nt, Human
ggcuccugaggaccaggcacag

SEQ ID NO: 874053 - RNA, 22 nt, Human
uggcugcagaaccuccucagga

SEQ ID NO: 874054 - RNA, 22 nt, Human
guuuguuuauacaaaagauccu

SEQ ID NO: 874055 - RNA, 23 nt, Human
ucugcuggugacacggucacauu

SEQ ID NO: 874056 - RNA, 22 nt, Human
auuugccuguaagacaaggccu

SEQ ID NO: 874057 - RNA, 22 nt, Human
cugucugugccucuucucccag

SEQ ID NO: 874058 - RNA, 22 nt, Human
ucauuacaucuuggccaaaacu

SEQ ID NO: 874059 - RNA, 22 nt, Human
ucucugagaagcugaggcuggg

SEQ ID NO: 874060 - RNA, 22 nt, Human
uaauacuugcuuuggauguaug

SEQ ID NO: 874061 - RNA, 22 nt, Human
gccucccugagucacccaagca

SEQ ID NO: 874062 - RNA, 22 nt, Human
gauguauacaggguugacucau

SEQ ID NO: 874063 - RNA, 22 nt, Human
cuucuuuuacaggucuuggguu

SEQ ID NO: 874064 - RNA, 22 nt, Human
gaagagcugcacacuggggacu

SEQ ID NO: 874065 - RNA, 22 nt, Human
gugcugaaauagaggagguggc

SEQ ID NO: 874066 - RNA, 22 nt, Human
cuggcucuuucagccgcuggag

SEQ ID NO: 874067 - RNA, 22 nt, Human
ggcuggcacgaagcccugcugg

SEQ ID NO: 874068 - RNA, 22 nt, Human
auagcaaagaugucaauucccc

SEQ ID NO: 874069 - RNA, 22 nt, Human
agcagggggcauccuugcccuu

SEQ ID NO: 874070 - RNA, 22 nt, Human
gagcuggcacagaaggaucuua

SEQ ID NO: 874071 - RNA, 22 nt, Human
cugggcucagaugagaggaagg

SEQ ID NO: 874072 - RNA, 21 nt, Human
cucaggauggcggccuggugg

SEQ ID NO: 874073 - RNA, 22 nt, Human
gcuucagacuggagcagaggaa

SEQ ID NO: 874074 - RNA, 22 nt, Human
uaugugcacauuagagagaugg

SEQ ID NO: 874075 - RNA, 22 nt, Human
agcugccucugaacuuuaauuc

SEQ ID NO: 874076 - RNA, 22 nt, Human
ccccucccugaccugguugggc

SEQ ID NO: 874077 - RNA, 21 nt, Human
ugacccuugccgagcuacauu

SEQ ID NO: 874078 - RNA, 16 nt, Human
uuucucucugcuauuu

SEQ ID NO: 874079 - RNA, 22 nt, Human
gggccaggucggugaaugguca

SEQ ID NO: 874080 - RNA, 22 nt, Human
ucaguaacuuggccgaggucau

SEQ ID NO: 874081 - RNA, 22 nt, Human
aggaaagguagcgugccagcag

SEQ ID NO: 874082 - RNA, 22 nt, Human
uucaaucauugcaaaguaaugg

SEQ ID NO: 874083 - RNA, 22 nt, Human
auuuacuacugcuaucuagaag

SEQ ID NO: 874084 - RNA, 22 nt, Human
auaaagcauacuuuguaugacu

SEQ ID NO: 874085 - RNA, 22 nt, Human
uuucaagaggccagagcgaggc

SEQ ID NO: 874086 - RNA, 22 nt, Human
uucuaaagugcaaucugacaga

SEQ ID NO: 874087 - RNA, 22 nt, Human
cacaugagagcccccaagagca

SEQ ID NO: 874088 - RNA, 23 nt, Human
augagcauuuuuaauuucugugg

SEQ ID NO: 874089 - RNA, 18 nt, Human
gugcucuaugucuguuau

SEQ ID NO: 874090 - RNA, 22 nt, Human
caaggcaugcacaagaaggggg

SEQ ID NO: 874091 - RNA, 22 nt, Human
ucuuuggcuaugauuuacuguu

SEQ ID NO: 874092 - RNA, 22 nt, Human
uagacucuuggggaaaucugca

SEQ ID NO: 874093 - RNA, 22 nt, Human
auuucacagcugucaguguuac

SEQ ID NO: 874094 - RNA, 22 nt, Human
ccuuagaaaaucauggaauauu

SEQ ID NO: 874095 - RNA, 22 nt, Human
gcagggaggaagagaugcuucc

SEQ ID NO: 874096 - RNA, 22 nt, Human
uaagacacauucauaucugucu

SEQ ID NO: 874097 - RNA, 22 nt, Human
uuggagauaugugaaaaaaaca

SEQ ID NO: 874098 - RNA, 22 nt, Human
ucugucauccaggcuggaauau

SEQ ID NO: 874099 - RNA, 22 nt, Human
uggaaggccuguuguguccuag

SEQ ID NO: 874100 - RNA, 22 nt, Human
ggccggccuuugcgagcauucu

SEQ ID NO: 874101 - RNA, 22 nt, Human
agaaaucugacugcugugcaca

SEQ ID NO: 874102 - RNA, 22 nt, Human
guguggcugugggagauguuca

SEQ ID NO: 874103 - RNA, 22 nt, Human
aaggugcucguuauggccagug

SEQ ID NO: 874104 - RNA, 22 nt, Human
gcuacagacugagcauggcucu

SEQ ID NO: 874105 - RNA, 22 nt, Human
ugcuugugugagggccugggag

SEQ ID NO: 874106 - RNA, 22 nt, Human
ggugccaggcucccagcucagg

SEQ ID NO: 874107 - RNA, 22 nt, Human
uggggagaggaauuugaaugau

SEQ ID NO: 874108 - RNA, 22 nt, Human
ugcagcucuguaugcugauuau

SEQ ID NO: 874109 - RNA, 22 nt, Human
guggcccacuuacgucaugugu

SEQ ID NO: 874110 - RNA, 22 nt, Human
uccugugccaucucuagagacu

SEQ ID NO: 874111 - RNA, 22 nt, Human
aaaugcuguguuuuaacauaga

SEQ ID NO: 874112 - RNA, 23 nt, Human
agaggggagcaucugcuggcuga

SEQ ID NO: 874113 - RNA, 22 nt, Human
ucaggaaguauaaucagauuca

SEQ ID NO: 874114 - RNA, 22 nt, Human
gauuuucaugauaaacuuguga

SEQ ID NO: 874115 - RNA, 20 nt, Human
gaagccagaggggaaaggag

SEQ ID NO: 874116 - RNA, 22 nt, Human
acacaugcugauaagaauauaa

SEQ ID NO: 874117 - RNA, 22 nt, Human
uaguggaggccuguugugugca

SEQ ID NO: 874118 - RNA, 22 nt, Human
ggagggggacugacacugauuu

SEQ ID NO: 874119 - RNA, 18 nt, Human
agugcaugcuaggggaag

SEQ ID NO: 874120 - RNA, 22 nt, Human
ugcagaaguauuccaggcccca

SEQ ID NO: 874121 - RNA, 22 nt, Human
uugugugguagcuucauugaac

SEQ ID NO: 874122 - RNA, 22 nt, Human
augugucugugggcacacacac

SEQ ID NO: 874123 - RNA, 23 nt, Human
acagggcuuaucugucacucauc

SEQ ID NO: 874124 - RNA, 22 nt, Human
cuguccucuguccucagcagga

SEQ ID NO: 874125 - RNA, 22 nt, Human
ccucugagcuggccuguggggc

SEQ ID NO: 874126 - RNA, 22 nt, Human
guggggcuggaagauggguacu

SEQ ID NO: 874127 - RNA, 22 nt, Human
ccccagaaagccuggcacuagg

SEQ ID NO: 874128 - RNA, 22 nt, Human
uuggaaagcaacuuuugagagu

SEQ ID NO: 874129 - RNA, 22 nt, Human
ccaggcuuucccagccucucca

SEQ ID NO: 874130 - RNA, 22 nt, Human
agguagcuauccagacgcugaa

SEQ ID NO: 874131 - RNA, 19 nt, Human
gagcaggccacacaugugu

SEQ ID NO: 874132 - RNA, 22 nt, Human
gcugagagugagcacuggauau

SEQ ID NO: 874133 - RNA, 22 nt, Human
gaccugaaagugugggcgaccu

SEQ ID NO: 874134 - RNA, 22 nt, Human
agaggccacuuugccugugaug

SEQ ID NO: 874135 - RNA, 22 nt, Human
uucaauacaccauaggaauagu

SEQ ID NO: 874136 - RNA, 22 nt, Human
aauucaaucuaagaaaugauca

SEQ ID NO: 874137 - RNA, 22 nt, Human
cagagccuuuguguccacauuu

SEQ ID NO: 874138 - RNA, 22 nt, Human
cuacauuucauccagggagagc

SEQ ID NO: 874139 - RNA, 22 nt, Human
agugcauucugucaucuugguu

SEQ ID NO: 874140 - RNA, 22 nt, Human
uuggaacagaaacagacaaaua

SEQ ID NO: 874141 - RNA, 22 nt, Human
uuuaucugaaaaaacucuugga

SEQ ID NO: 874142 - RNA, 22 nt, Human
ccaggguuuaaauucugacuau

SEQ ID NO: 874143 - RNA, 22 nt, Human
uugcaagacacuuggaagcaca

SEQ ID NO: 874144 - RNA, 18 nt, Human
agcagcugugccacacug

SEQ ID NO: 874145 - RNA, 22 nt, Human
uaucuagauaguuuagccaucu

SEQ ID NO: 874146 - RNA, 22 nt, Human
ggcuggcacugaggagagcucu

SEQ ID NO: 874147 - RNA, 22 nt, Human
gcgcagcucagugagggaacuu

SEQ ID NO: 874148 - RNA, 22 nt, Human
gaggacaagcugugaguggggu

SEQ ID NO: 874149 - RNA, 22 nt, Human
gcuuuggaaacuggcccugcgc

SEQ ID NO: 874150 - RNA, 22 nt, Human
auaaaaucaacuggcuccaguu

SEQ ID NO: 874151 - RNA, 22 nt, Human
uuccuaacacaguguaagcaag

SEQ ID NO: 874152 - RNA, 22 nt, Human
gaggccuggcugucagucccca

SEQ ID NO: 874153 - RNA, 22 nt, Human
cagguggcauugucccgccagc

SEQ ID NO: 874154 - RNA, 22 nt, Human
cagcacuucaaugagcauuuca

SEQ ID NO: 874155 - RNA, 20 nt, Human
aaugucuugagacauuucag

SEQ ID NO: 874156 - RNA, 22 nt, Human
ucuuugaaguaucuuaaauggu

SEQ ID NO: 874157 - RNA, 22 nt, Human
uaugugugcauguauacauuaa

SEQ ID NO: 874158 - RNA, 22 nt, Human
aagggccuccuggggagccugg

SEQ ID NO: 874159 - RNA, 22 nt, Human
aagauacagacagagccaaaau

SEQ ID NO: 874160 - RNA, 22 nt, Human
ccuggugcuuaccagagcuuuu

SEQ ID NO: 874161 - RNA, 22 nt, Human
uccaggaguccuggguggcccc

SEQ ID NO: 874162 - RNA, 21 nt, Human
ugacuaauugugauaaagugc

SEQ ID NO: 874163 - RNA, 22 nt, Human
cuugucugggcagcuugggagu

SEQ ID NO: 874164 - RNA, 22 nt, Human
ugauucugagggagcauucugc

SEQ ID NO: 874165 - RNA, 22 nt, Human
uucagaaguagcuaagcaguca

SEQ ID NO: 874166 - RNA, 22 nt, Human
uaagcauuaacucugcugcaag

SEQ ID NO: 874167 - RNA, 22 nt, Human
auagacaaugguuugccaagaa

SEQ ID NO: 874168 - RNA, 22 nt, Human
ucuuugcauuccugugugcuuu

SEQ ID NO: 874169 - RNA, 22 nt, Human
uaaugcuuuguuuugaucuaac

SEQ ID NO: 874170 - RNA, 22 nt, Human
gcaccuuaauuaagaaauugcc

SEQ ID NO: 874171 - RNA, 19 nt, Human
ugcuucuggaaccaugauc

SEQ ID NO: 874172 - RNA, 22 nt, Human
ugcauggacgugacuuggccaa

SEQ ID NO: 874173 - RNA, 22 nt, Human
ucaggccaaagaaacagcauga

SEQ ID NO: 874174 - RNA, 22 nt, Human
uaugucugcuugguuuuggaau

SEQ ID NO: 874175 - RNA, 22 nt, Human
ugggcucagugggagaaagggc

SEQ ID NO: 874176 - RNA, 22 nt, Human
acagggaauggagggaucagua

SEQ ID NO: 874177 - RNA, 22 nt, Human
ggcuuggcuacaagccaugggc

SEQ ID NO: 874178 - RNA, 22 nt, Human
gaaggaaaaauacucuguaagg

SEQ ID NO: 874179 - RNA, 22 nt, Human
gaaucucaguggaagcaggaag

SEQ ID NO: 874180 - RNA, 18 nt, Human
ggaaggugcuggagugca

SEQ ID NO: 874181 - RNA, 22 nt, Human
uccaggagguugagacugcagu

SEQ ID NO: 874182 - RNA, 22 nt, Human
ucauaugucacucaugggcaua

SEQ ID NO: 874183 - RNA, 22 nt, Human
gcugcaagucacagaaacagug

SEQ ID NO: 874184 - RNA, 22 nt, Human
gcugugugccaggggaaggcug

SEQ ID NO: 874185 - RNA, 19 nt, Human
ucccuucuauaguaauaaa

SEQ ID NO: 874186 - RNA, 20 nt, Human
aaagcaguaugcaaguagag

SEQ ID NO: 874187 - RNA, 21 nt, Human
ugaggcucaucuuauguggcu

SEQ ID NO: 874188 - RNA, 22 nt, Human
auuuccacauaagggaaauaag

SEQ ID NO: 874189 - RNA, 22 nt, Human
gggaagugcccucuucaggaga

SEQ ID NO: 874190 - RNA, 19 nt, Human
uccagacuguccaggcuau

SEQ ID NO: 874191 - RNA, 23 nt, Human
uccuggguuugaauucuagucuu

SEQ ID NO: 874192 - RNA, 19 nt, Human
acacugaauguagaauugg

SEQ ID NO: 874193 - RNA, 22 nt, Human
ucccugcacagccgagccaugc

SEQ ID NO: 874194 - RNA, 22 nt, Human
ucaggacauuugucagcaggag

SEQ ID NO: 874195 - RNA, 22 nt, Human
uccuuggaaauuucaucagaca

SEQ ID NO: 874196 - RNA, 22 nt, Human
aacuucauuccuuuuuaugacu

SEQ ID NO: 874197 - RNA, 22 nt, Human
ccuggacuuucaggacuacugu

SEQ ID NO: 874198 - RNA, 22 nt, Human
acaauaugggauauacauuuua

SEQ ID NO: 874199 - RNA, 22 nt, Human
cuuccucccggcccaugcucug

SEQ ID NO: 874200 - RNA, 19 nt, Human
uggcagguagugagcaguc

SEQ ID NO: 874201 - RNA, 22 nt, Human
aaagaguuacacaguuucagaa

SEQ ID NO: 874202 - RNA, 22 nt, Human
gccugccuuuuggaggcacauu

SEQ ID NO: 874203 - RNA, 22 nt, Human
auguacaagcuguuuuacugca

SEQ ID NO: 874204 - RNA, 22 nt, Human
aggacacacugcaagagccugg

SEQ ID NO: 874205 - RNA, 22 nt, Human
ccucacugcuauguguuugcuc

SEQ ID NO: 874206 - RNA, 22 nt, Human
ucauauagagggcauacaaaug

SEQ ID NO: 874207 - RNA, 22 nt, Human
cccagacucaucccugggagcu

SEQ ID NO: 874208 - RNA, 22 nt, Human
agauggaggaaggcugaacuca

SEQ ID NO: 874209 - RNA, 22 nt, Human
uauucacauguacauaugcuca

SEQ ID NO: 874210 - RNA, 22 nt, Human
ugucauaaguguuugcacccag

SEQ ID NO: 874211 - RNA, 22 nt, Human
gggcuacugagcuggaacuggg

SEQ ID NO: 874212 - RNA, 22 nt, Human
uggcagagcccagaacugagca

SEQ ID NO: 874213 - RNA, 22 nt, Human
ugcagcauucugguaaaaggca

SEQ ID NO: 874214 - RNA, 22 nt, Human
gagaggcugaaaucacaggagc

SEQ ID NO: 874215 - RNA, 22 nt, Human
ucuacuucuccuucauuuccca

SEQ ID NO: 874216 - RNA, 22 nt, Human
gugcucuauguugauuccuuga

SEQ ID NO: 874217 - RNA, 22 nt, Human
ugcuuuauaggggauugcaggc

SEQ ID NO: 874218 - RNA, 22 nt, Human
gcaaagcacacccucagaguuu

SEQ ID NO: 874219 - RNA, 22 nt, Human
cagcaagauuaagggcagaaaa

SEQ ID NO: 874220 - RNA, 22 nt, Human
ucuugcaguugcgcagugcaug

SEQ ID NO: 874221 - RNA, 22 nt, Human
ucccacaugugaauccucaggu

SEQ ID NO: 874222 - RNA, 22 nt, Human
gccaggcagacaggucaucagg

SEQ ID NO: 874223 - RNA, 22 nt, Human
guucagauuugacugguuucuc

SEQ ID NO: 874224 - RNA, 22 nt, Human
ucauaaauuggguuggcugggu

SEQ ID NO: 874225 - RNA, 22 nt, Human
uucuaaucugggcuucugcagu

SEQ ID NO: 874226 - RNA, 22 nt, Human
agauuucccacuccauguauug

SEQ ID NO: 874227 - RNA, 22 nt, Human
aggagcuggccuagaaaggaga

SEQ ID NO: 874228 - RNA, 22 nt, Human
auucuucaaagagugucaaagu

SEQ ID NO: 874229 - RNA, 22 nt, Human
uccaggagugauaaggccacug

SEQ ID NO: 874230 - RNA, 22 nt, Human
gcaguggggcaaucauagcuca

SEQ ID NO: 874231 - RNA, 22 nt, Human
caggcagcugcuggguucagcc

SEQ ID NO: 874232 - RNA, 22 nt, Human
auccaaacauguaccacacuaa

SEQ ID NO: 874233 - RNA, 22 nt, Human
acugggcaccaucaugagauag

SEQ ID NO: 874234 - RNA, 22 nt, Human
augguuuguaacccaauacucc

SEQ ID NO: 874235 - RNA, 22 nt, Human
gcuguuucuuuggcaaacugau

SEQ ID NO: 874236 - RNA, 22 nt, Human
ggcuggccuguguggccgccac

SEQ ID NO: 874237 - RNA, 22 nt, Human
cagucaggaaugccuccuuccu

SEQ ID NO: 874238 - RNA, 22 nt, Human
uucaucauuacagucauguuau

SEQ ID NO: 874239 - RNA, 22 nt, Human
gagaggaguagacacuuugguu

SEQ ID NO: 874240 - RNA, 22 nt, Human
cagucaccaccagguggcagua

SEQ ID NO: 874241 - RNA, 22 nt, Human
uucaaguuuucagaauagccac

SEQ ID NO: 874242 - RNA, 22 nt, Human
ccccugcuggccugcugguuuc

SEQ ID NO: 874243 - RNA, 22 nt, Human
cccagcuggccagguggcuuug

SEQ ID NO: 874244 - RNA, 19 nt, Human
cuagggcuuggcagcaggc

SEQ ID NO: 874245 - RNA, 20 nt, Human
aaagauacuuuuuguaaugg

SEQ ID NO: 874246 - RNA, 22 nt, Human
ucuccauaggcaguucauaaca

SEQ ID NO: 874247 - RNA, 19 nt, Human
agguaggcaguggcaugga

SEQ ID NO: 874248 - RNA, 22 nt, Human
ugggagaacacugcucuggaug

SEQ ID NO: 874249 - RNA, 18 nt, Human
ggccucagccuggccgga

SEQ ID NO: 874250 - RNA, 22 nt, Human
uuucaaagggaaguuaugaagu

SEQ ID NO: 874251 - RNA, 22 nt, Human
uuacagaaggaacacuacucag

SEQ ID NO: 874252 - RNA, 22 nt, Human
agcaugcugguuacguguagca

SEQ ID NO: 874253 - RNA, 22 nt, Human
uuucgagggccuuaaguauucc

SEQ ID NO: 874254 - RNA, 22 nt, Human
aagcaccaaguucaacauuccc

SEQ ID NO: 874255 - RNA, 22 nt, Human
cugaagcaaaggaucgagcuaa

SEQ ID NO: 874256 - RNA, 22 nt, Human
gggccagaccucuucucaggga

SEQ ID NO: 874257 - RNA, 22 nt, Human
acacaguugauugucacucagg

SEQ ID NO: 874258 - RNA, 22 nt, Human
uuucucuagcuauucauuaaau

SEQ ID NO: 874259 - RNA, 22 nt, Human
ggcuuuauuucacuguaccaua

SEQ ID NO: 874260 - RNA, 22 nt, Human
cagaagacgccugggugcugua

SEQ ID NO: 874261 - RNA, 22 nt, Human
accagagauggggcuucucugu

SEQ ID NO: 874262 - RNA, 22 nt, Human
gacagcuguacacuccugguua

SEQ ID NO: 874263 - RNA, 22 nt, Human
cucaggccauuccuaccaaggg

SEQ ID NO: 874264 - RNA, 22 nt, Human
guggcuauauuugaggauacgu

SEQ ID NO: 874265 - RNA, 22 nt, Human
aggcccuguuaugagccacugu

SEQ ID NO: 874266 - RNA, 22 nt, Human
guaacauucuagaaacuuaaca

SEQ ID NO: 874267 - RNA, 15 nt, Human
cuguggcuaaccuaa

SEQ ID NO: 874268 - RNA, 22 nt, Human
ugucaauaucaggcagaccuaa

SEQ ID NO: 874269 - RNA, 22 nt, Human
ugggaagggaguuucuuggagu

SEQ ID NO: 874270 - RNA, 22 nt, Human
aagacugucugggacaagauga

SEQ ID NO: 874271 - RNA, 20 nt, Human
uuuuccacuccucaaaacag

SEQ ID NO: 874272 - RNA, 22 nt, Human
aacaggagaguaaauauaugau

SEQ ID NO: 874273 - RNA, 18 nt, Human
cccacacagcaguagcuc

SEQ ID NO: 874274 - RNA, 22 nt, Human
agggcagccugagugcuggccc

SEQ ID NO: 874275 - RNA, 22 nt, Human
ggcuccugauuugagggggcug

SEQ ID NO: 874276 - RNA, 19 nt, Human
ccagccucucuuccacccc

SEQ ID NO: 874277 - RNA, 22 nt, Human
uucugauugcugaugaggccca

SEQ ID NO: 874278 - RNA, 22 nt, Human
uucacaauagcuggcaucaucu

SEQ ID NO: 874279 - RNA, 22 nt, Human
uucacaagucauuagcugcaua

SEQ ID NO: 874280 - RNA, 22 nt, Human
augguuuauugcuuuaaugaaa

SEQ ID NO: 874281 - RNA, 22 nt, Human
aggacacacuguucucacguaa

SEQ ID NO: 874282 - RNA, 22 nt, Human
uuuaugauuauuuuaaagcagc

SEQ ID NO: 874283 - RNA, 23 nt, Human
gcucagagguuuuucucuggaug

SEQ ID NO: 874284 - RNA, 22 nt, Human
aagaaaacaugaucuaauuuaa

SEQ ID NO: 874285 - RNA, 22 nt, Human
acauuucagauguaaugugaug

SEQ ID NO: 874286 - RNA, 22 nt, Human
gcugccuccacuggcucccagu

SEQ ID NO: 874287 - RNA, 22 nt, Human
cauucucugaucuucacauacc

SEQ ID NO: 874288 - RNA, 22 nt, Human
uuaaaugagauguucagauauu

SEQ ID NO: 874289 - RNA, 22 nt, Human
ggcggugguugagaggacggcg

SEQ ID NO: 874290 - RNA, 22 nt, Human
aaugagaauguaagugaagaga

SEQ ID NO: 874291 - RNA, 22 nt, Human
agugaacaguuuggaacacaug

SEQ ID NO: 874292 - RNA, 22 nt, Human
ucucugggacacugggucaguu

SEQ ID NO: 874293 - RNA, 22 nt, Human
cuggcucccucgcugaggugcu

SEQ ID NO: 874294 - RNA, 22 nt, Human
ucauuucaugucucaggcacug

SEQ ID NO: 874295 - RNA, 22 nt, Human
gucuuagauuucaccgauaaug

SEQ ID NO: 874296 - RNA, 22 nt, Human
aaggaugaacauuaauacauca

SEQ ID NO: 874297 - RNA, 22 nt, Human
caacacugauuauggcugagcu

SEQ ID NO: 874298 - RNA, 22 nt, Human
uggcuucaucugcagcacugcc

SEQ ID NO: 874299 - RNA, 22 nt, Human
uagggcuggcgugcucagggaa

SEQ ID NO: 874300 - RNA, 22 nt, Human
aagauggagcacgagcagaagc

SEQ ID NO: 874301 - RNA, 22 nt, Human
aaggagucugggccauucagag

SEQ ID NO: 874302 - RNA, 22 nt, Human
ccagggugggguccaggaacca

SEQ ID NO: 874303 - RNA, 22 nt, Human
uucucuggagggcugcccggcc

SEQ ID NO: 874304 - RNA, 22 nt, Human
gauuuucauuugcacucuagaa

SEQ ID NO: 874305 - RNA, 22 nt, Human
auggacuuaagagucagaagcu

SEQ ID NO: 874306 - RNA, 22 nt, Human
uaacacaugaaagcaccuucuu

SEQ ID NO: 874307 - RNA, 22 nt, Human
agaaaucucaguaucucaggga

SEQ ID NO: 874308 - RNA, 22 nt, Human
ugcucaggcccugggccauccu

SEQ ID NO: 874309 - RNA, 22 nt, Human
cuggggaacgcagcgagcagcg

SEQ ID NO: 874310 - RNA, 22 nt, Human
aagucuuaaccaaauaaauguu

SEQ ID NO: 874311 - RNA, 22 nt, Human
ccagcagagugggguuuagagu

SEQ ID NO: 874312 - RNA, 22 nt, Human
gcugagcaacguggagaguuuu

SEQ ID NO: 874313 - RNA, 22 nt, Human
aucagagcuaguacuugcaggu

SEQ ID NO: 874314 - RNA, 20 nt, Human
accccagccccucuaucuga

SEQ ID NO: 874315 - RNA, 22 nt, Human
agucaguuaaccucacagcauc

SEQ ID NO: 874316 - RNA, 22 nt, Human
ccuuucucuggcagcaggacag

SEQ ID NO: 874317 - RNA, 22 nt, Human
aggugugggaaacgggugaccu

SEQ ID NO: 874318 - RNA, 22 nt, Human
agaugugggugucaggcaguga

SEQ ID NO: 874319 - RNA, 22 nt, Human
ggcuccugggcagcugcucccu

SEQ ID NO: 874320 - RNA, 22 nt, Human
gauuucuuuguacccacaaucc

SEQ ID NO: 874321 - RNA, 22 nt, Human
agagguggccaugggcgcugga

SEQ ID NO: 874322 - RNA, 22 nt, Human
aaauggcagcccagagguaagg

SEQ ID NO: 874323 - RNA, 22 nt, Human
cugugaugacaggcagggccaa

SEQ ID NO: 874324 - RNA, 22 nt, Human
uuuagugauaagaauuaugaaa

SEQ ID NO: 874325 - RNA, 22 nt, Human
guccugagagaggcuccuugcc

SEQ ID NO: 874326 - RNA, 22 nt, Human
aguucuuuuaccaaggcaaaug

SEQ ID NO: 874327 - RNA, 22 nt, Human
agcucaagcuacacacagaguc

SEQ ID NO: 874328 - RNA, 22 nt, Human
gcauugaaggcauuuuaucuac

SEQ ID NO: 874329 - RNA, 22 nt, Human
uuuacaacauaggccccaagaa

SEQ ID NO: 874330 - RNA, 22 nt, Human
ucauugaaugcucugcagguug

SEQ ID NO: 874331 - RNA, 22 nt, Human
auuuauauuuugggagcuccug

SEQ ID NO: 874332 - RNA, 20 nt, Human
cugcugugguccuuuauuuu

SEQ ID NO: 874333 - RNA, 22 nt, Human
uaagcaaaagucgagugugagc

SEQ ID NO: 874334 - RNA, 21 nt, Human
agaagccaugccaguaaaauu

SEQ ID NO: 874335 - RNA, 22 nt, Human
uacaguuccaggaucauagggu

SEQ ID NO: 874336 - RNA, 22 nt, Human
acgugcaucuuuccauaugugg

SEQ ID NO: 874337 - RNA, 22 nt, Human
gaggccuggagccgccuaggcg

SEQ ID NO: 874338 - RNA, 22 nt, Human
uccaggcuagccugguagagaa

SEQ ID NO: 874339 - RNA, 22 nt, Human
agaccacuaaaacuuucucuau

SEQ ID NO: 874340 - RNA, 22 nt, Human
uacauugacuuggauuguuaga

SEQ ID NO: 874341 - RNA, 22 nt, Human
agcagcaucaacccucccgugu

SEQ ID NO: 874342 - RNA, 22 nt, Human
acuuccuuccaaacauucauuu

SEQ ID NO: 874343 - RNA, 22 nt, Human
aaaugcuuauuagugucacaaa

SEQ ID NO: 874344 - RNA, 22 nt, Human
ccagcagcugacaccaguccca

SEQ ID NO: 874345 - RNA, 22 nt, Human
aggccuggugaaugaaguaucu

SEQ ID NO: 874346 - RNA, 22 nt, Human
uuucaaaguugggaauuguaau

SEQ ID NO: 874347 - RNA, 22 nt, Human
agccuggaggccaggagacagu

SEQ ID NO: 874348 - RNA, 22 nt, Human
ucuucagagugaaagucuguga

SEQ ID NO: 874349 - RNA, 19 nt, Human
cuugaaacuacuguugaga

SEQ ID NO: 874350 - RNA, 22 nt, Human
aggcuaguuaguauuuacaaaa

SEQ ID NO: 874351 - RNA, 22 nt, Human
auuuacaguuuagcauuucaag

SEQ ID NO: 874352 - RNA, 22 nt, Human
cagcagcaccuauuauaguguu

SEQ ID NO: 874353 - RNA, 22 nt, Human
ccagcugguguuccuuaggacc

SEQ ID NO: 874354 - RNA, 22 nt, Human
cacagggcuaaaugaaggguug

SEQ ID NO: 874355 - RNA, 22 nt, Human
guguguguucaauaaauuuaag

SEQ ID NO: 874356 - RNA, 20 nt, Human
auuuuguuuauguuccucuc

SEQ ID NO: 874357 - RNA, 22 nt, Human
uuuaugucccuucaaauguuua

SEQ ID NO: 874358 - RNA, 22 nt, Human
ucucagugaagaguauaacaaa

SEQ ID NO: 874359 - RNA, 22 nt, Human
ucuuugaucagccuuucacuga

SEQ ID NO: 874360 - RNA, 22 nt, Human
uucuguauguacauauguguau

SEQ ID NO: 874361 - RNA, 22 nt, Human
ggagggagguuagauucaagcu

SEQ ID NO: 874362 - RNA, 22 nt, Human
aaggcugguuuccuugauguuu

SEQ ID NO: 874363 - RNA, 22 nt, Human
uaaggugagcuguauaacaggg

SEQ ID NO: 874364 - RNA, 22 nt, Human
ugucaaaaauaagagagauugu

SEQ ID NO: 874365 - RNA, 22 nt, Human
aaggcagcaccgccuccugaaa

SEQ ID NO: 874366 - RNA, 22 nt, Human
cugacagaucuggaucugaacu

SEQ ID NO: 874367 - RNA, 22 nt, Human
ucuuuccauggccacacagucu

SEQ ID NO: 874368 - RNA, 22 nt, Human
augcaagcaaucugagcuuugg

SEQ ID NO: 874369 - RNA, 22 nt, Human
gucauaaagacagaaacauucc

SEQ ID NO: 874370 - RNA, 22 nt, Human
aguggcagaagccaagucugca

SEQ ID NO: 874371 - RNA, 22 nt, Human
ucacccauccuggaugagauuc

SEQ ID NO: 874372 - RNA, 22 nt, Human
ggaaggguuuggaaagccgaga

SEQ ID NO: 874373 - RNA, 22 nt, Human
auaagcaugauuaccgggagca

SEQ ID NO: 874374 - RNA, 22 nt, Human
gagguggauguugcagugagcu

SEQ ID NO: 874375 - RNA, 22 nt, Human
gugagaguguuuggaaauagaa

SEQ ID NO: 874376 - RNA, 22 nt, Human
uuucauaauauccagagauuuu

SEQ ID NO: 874377 - RNA, 22 nt, Human
agguauuuguuacagcagcacc

SEQ ID NO: 874378 - RNA, 22 nt, Human
uuucacauauaggggaagcuac

SEQ ID NO: 874379 - RNA, 19 nt, Human
agggcugcucuggccuggg

SEQ ID NO: 874380 - RNA, 20 nt, Human
agagagagguaaauugagca

SEQ ID NO: 874381 - RNA, 22 nt, Human
ugugaaggagcaugcagagggg

SEQ ID NO: 874382 - RNA, 22 nt, Human
uuugucuuggccucaguuuucu

SEQ ID NO: 874383 - RNA, 20 nt, Human
cuggcaggagcgagucuacc

SEQ ID NO: 874384 - RNA, 22 nt, Human
uuccacaggacuaaaugucauc

SEQ ID NO: 874385 - RNA, 22 nt, Human
caggguggggaaauagcgcccu

SEQ ID NO: 874386 - RNA, 22 nt, Human
auuugucucucuggguuuacuu

SEQ ID NO: 874387 - RNA, 21 nt, Human
agagacugucacugcaguacc

SEQ ID NO: 874388 - RNA, 22 nt, Human
uguaguguagcagggugggaca

SEQ ID NO: 874389 - RNA, 22 nt, Human
ggaaggaggggcaaagcaguuc

SEQ ID NO: 874390 - RNA, 22 nt, Human
aguuucuaccgguacauucagg

SEQ ID NO: 874391 - RNA, 22 nt, Human
ccugccagcccgcguucaugcc

SEQ ID NO: 874392 - RNA, 22 nt, Human
gcagcaggaauaggauaagcaa

SEQ ID NO: 874393 - RNA, 22 nt, Human
accuguguuucuguagugguca

SEQ ID NO: 874394 - RNA, 22 nt, Human
ccuugcccugagcaggggucag

SEQ ID NO: 874395 - RNA, 22 nt, Human
auggccagcccuucccgcagcu

SEQ ID NO: 874396 - RNA, 22 nt, Human
agcugagguugaagagugaacg

SEQ ID NO: 874397 - RNA, 22 nt, Human
gccacagggauuguuuugugag

SEQ ID NO: 874398 - RNA, 22 nt, Human
gucuggcuguuccugccuguga

SEQ ID NO: 874399 - RNA, 22 nt, Human
uggcaguuuuguauuugagcau

SEQ ID NO: 874400 - RNA, 22 nt, Human
cacaggcugcccgcagcuggga

SEQ ID NO: 874401 - RNA, 22 nt, Human
cagggccucucaucccacgggc

SEQ ID NO: 874402 - RNA, 19 nt, Human
uccagccugcuguuucucu

SEQ ID NO: 874403 - RNA, 22 nt, Human
gcucacaggcaguguugggaga

SEQ ID NO: 874404 - RNA, 22 nt, Human
uacaauguacuuccuugcacag

SEQ ID NO: 874405 - RNA, 22 nt, Human
uuaugcauauagcagauacgag

SEQ ID NO: 874406 - RNA, 22 nt, Human
gcagaggacacaggagggcaag

SEQ ID NO: 874407 - RNA, 22 nt, Human
cuggcugguuacuauuucuggu

SEQ ID NO: 874408 - RNA, 22 nt, Human
gggagcugcugaacacaagggu

SEQ ID NO: 874409 - RNA, 22 nt, Human
gcaguucuacuuauccauagac

SEQ ID NO: 874410 - RNA, 22 nt, Human
uuucauaauagugcaguuuguu

SEQ ID NO: 874411 - RNA, 22 nt, Human
augucuucauagcuuauaucca

SEQ ID NO: 874412 - RNA, 22 nt, Human
agguuggccucagggaggcucu

SEQ ID NO: 874413 - RNA, 22 nt, Human
caauacugaguuuacauucauc

SEQ ID NO: 874414 - RNA, 22 nt, Human
auuuuccagccuuucuagaacu

SEQ ID NO: 874415 - RNA, 22 nt, Human
agaaaguuguuuuagccaaacc

SEQ ID NO: 874416 - RNA, 22 nt, Human
agguauuucccaaaguggcaug

SEQ ID NO: 874417 - RNA, 22 nt, Human
cagauugagucugggaaaaggc

SEQ ID NO: 874418 - RNA, 22 nt, Human
caaggcagucccuacucccugc

SEQ ID NO: 874419 - RNA, 22 nt, Human
cuuccaaagcacuuuauggacc

SEQ ID NO: 874420 - RNA, 22 nt, Human
auuccaggcaugcaggaacaag

SEQ ID NO: 874421 - RNA, 22 nt, Human
uaguggcauuguugugaggauu

SEQ ID NO: 874422 - RNA, 22 nt, Human
ugauuuaaaagaaacauugucu

SEQ ID NO: 874423 - RNA, 22 nt, Human
aaaaagauagcauugugcuccu

SEQ ID NO: 874424 - RNA, 22 nt, Human
cugggaagcuucgagcaggaaa

SEQ ID NO: 874425 - RNA, 22 nt, Human
uuucuaaaauagauuuuauggu

SEQ ID NO: 874426 - RNA, 22 nt, Human
ucaggaaaugucccagguugug

SEQ ID NO: 874427 - RNA, 22 nt, Human
gacagacuaaauggcuguagga

SEQ ID NO: 874428 - RNA, 23 nt, Human
uucuucagccuuauagcccuggg

SEQ ID NO: 874429 - RNA, 22 nt, Human
augcuuuuuaaacuuaauugga

SEQ ID NO: 874430 - RNA, 22 nt, Human
gauuuuaauuauaggagguccu

SEQ ID NO: 874431 - RNA, 22 nt, Human
uaggaaagaaaugaguagugau

SEQ ID NO: 874432 - RNA, 22 nt, Human
aggcuuuuggagaagcauaugc

SEQ ID NO: 874433 - RNA, 20 nt, Human
ucauuucuugggguuccaag

SEQ ID NO: 874434 - RNA, 22 nt, Human
ugcuggccuguccacgggcugu

SEQ ID NO: 874435 - RNA, 22 nt, Human
gggauggacuuggggacuccag

SEQ ID NO: 874436 - RNA, 22 nt, Human
aucagagcaauggauaaaauca

SEQ ID NO: 874437 - RNA, 22 nt, Human
cuccugagaggaucucuguugu

SEQ ID NO: 874438 - RNA, 22 nt, Human
aggcugccucgugagcucgcug

SEQ ID NO: 874439 - RNA, 22 nt, Human
auguuaaaaaccaguacaguug

SEQ ID NO: 874440 - RNA, 22 nt, Human
aucaacaugacaggagaagaga

SEQ ID NO: 874441 - RNA, 22 nt, Human
caggcaccccaggugagcacug

SEQ ID NO: 874442 - RNA, 22 nt, Human
gaguggcuggguguuugaaucc

SEQ ID NO: 874443 - RNA, 22 nt, Human
uuggcacaaauuucugaaauaa

SEQ ID NO: 874444 - RNA, 22 nt, Human
augagaaaguuaaucaucauga

SEQ ID NO: 874445 - RNA, 22 nt, Human
uaggcugggaagaaagauucuc

SEQ ID NO: 874446 - RNA, 22 nt, Human
aaguaacaugggaacaucugaa

SEQ ID NO: 874447 - RNA, 22 nt, Human
uucuuugugcauccaauuuucu

SEQ ID NO: 874448 - RNA, 21 nt, Human
aaauccaaacacuaguccaca

SEQ ID NO: 874449 - RNA, 22 nt, Human
uuuaucuguuguacauuuaugc

SEQ ID NO: 874450 - RNA, 22 nt, Human
aucuuuguuaucucagaucuug

SEQ ID NO: 874451 - RNA, 22 nt, Human
uggcccugacugauguggaggg

SEQ ID NO: 874452 - RNA, 22 nt, Human
aagaauaagaggauuuagaaca

SEQ ID NO: 874453 - RNA, 22 nt, Human
uuuaguuugauguucuacuccu

SEQ ID NO: 874454 - RNA, 22 nt, Human
ucaggcccuucucccaggacuc

SEQ ID NO: 874455 - RNA, 22 nt, Human
ugaaguuuuacauccucuccaa

SEQ ID NO: 874456 - RNA, 22 nt, Human
cuucuaauauaaagucuuugca

SEQ ID NO: 874457 - RNA, 22 nt, Human
ggccacagucucuggaaggaug

SEQ ID NO: 874458 - RNA, 22 nt, Human
uuguucaucuggaacccagagc

SEQ ID NO: 874459 - RNA, 22 nt, Human
cacagaauaauucacauggcuc

SEQ ID NO: 874460 - RNA, 22 nt, Human
ccaggaggcagagguuguagug

SEQ ID NO: 874461 - RNA, 22 nt, Human
gaggcugaggguuagagaguca

SEQ ID NO: 874462 - RNA, 22 nt, Human
gcagggugauagugaggcucag

SEQ ID NO: 874463 - RNA, 22 nt, Human
cuuuccuaguuggucccagcac

SEQ ID NO: 874464 - RNA, 22 nt, Human
ggccugugucugugccuguccu

SEQ ID NO: 874465 - RNA, 23 nt, Human
aggaagaggcaauuucucuuaga

SEQ ID NO: 874466 - RNA, 22 nt, Human
gaagugacagaagggaugggca

SEQ ID NO: 874467 - RNA, 22 nt, Human
ucuggccacuugcuucacacug

SEQ ID NO: 874468 - RNA, 22 nt, Human
aggcaaauuauuguaugcaguu

SEQ ID NO: 874469 - RNA, 22 nt, Human
cuguccuggagggcauaggacg

SEQ ID NO: 874470 - RNA, 22 nt, Human
aaugaaaauuggacccuagaac

SEQ ID NO: 874471 - RNA, 19 nt, Human
ccagaggacuguuaaugaa

SEQ ID NO: 874472 - RNA, 22 nt, Human
ucugggacauucucuccauagu

SEQ ID NO: 874473 - RNA, 23 nt, Human
uccuaacucaauucagggguguc

SEQ ID NO: 874474 - RNA, 22 nt, Human
gauuuuaucgucauccuucugg

SEQ ID NO: 874475 - RNA, 22 nt, Human
cucccagacaugugccuccuug

SEQ ID NO: 874476 - RNA, 22 nt, Human
aguggggacuuaugccagcauu

SEQ ID NO: 874477 - RNA, 22 nt, Human
acaugugugacaacagagguga

SEQ ID NO: 874478 - RNA, 22 nt, Human
cuuuauguguacuuuccauuuu

SEQ ID NO: 874479 - RNA, 22 nt, Human
uauauucuauuguaccucuccu

SEQ ID NO: 874480 - RNA, 22 nt, Human
cuggcucuaucuccaaggcugg

SEQ ID NO: 874481 - RNA, 22 nt, Human
aggagccagggaagcugcuuuc

SEQ ID NO: 874482 - RNA, 22 nt, Human
ugaacccaggagguugcaguga

SEQ ID NO: 874483 - RNA, 22 nt, Human
uuaaauugucauuugagcaaug

SEQ ID NO: 874484 - RNA, 22 nt, Human
cugggcucugcggugucgcucu

SEQ ID NO: 874485 - RNA, 22 nt, Human
uggagaaaagguugaauccauc

SEQ ID NO: 874486 - RNA, 22 nt, Human
agucugacuagacucugcucac

SEQ ID NO: 874487 - RNA, 22 nt, Human
aaaagagaguugccagucugua

SEQ ID NO: 874488 - RNA, 22 nt, Human
ucacauuuguucuugaaucuaa

SEQ ID NO: 874489 - RNA, 22 nt, Human
cuguggagugcuuggcucagug

SEQ ID NO: 874490 - RNA, 20 nt, Human
aguuuauuccaggagaacug

SEQ ID NO: 874491 - RNA, 22 nt, Human
ugaacuuuuucucuacgggcca

SEQ ID NO: 874492 - RNA, 22 nt, Human
aacaaaugaccugauuucuucc

SEQ ID NO: 874493 - RNA, 22 nt, Human
cugucuguugaccauaguuugc

SEQ ID NO: 874494 - RNA, 22 nt, Human
aaaucacugauuaaaguuagaa

SEQ ID NO: 874495 - RNA, 22 nt, Human
gagguggcccuugcucagccuu

SEQ ID NO: 874496 - RNA, 22 nt, Human
uacuaacaaugagaacaagcca

SEQ ID NO: 874497 - RNA, 22 nt, Human
gcccaagguauaucagagacag

SEQ ID NO: 874498 - RNA, 22 nt, Human
agguagggaagaaggcaugaaa

SEQ ID NO: 874499 - RNA, 22 nt, Human
ccagagagaaauggauuugagu

SEQ ID NO: 874500 - RNA, 22 nt, Human
gaaucucaggaagaucucugca

SEQ ID NO: 874501 - RNA, 22 nt, Human
acugcacuuuaggccaacuagg

SEQ ID NO: 874502 - RNA, 22 nt, Human
ugccaucugaaaauuacauccu

SEQ ID NO: 874503 - RNA, 22 nt, Human
uuaguugcucacuacaagguua

SEQ ID NO: 874504 - RNA, 22 nt, Human
uuguuucuucauuuagaagcuu

SEQ ID NO: 874505 - RNA, 22 nt, Human
agugucugccugggaggagcau

SEQ ID NO: 874506 - RNA, 22 nt, Human
gggcaugccugcgcagugcaug

SEQ ID NO: 874507 - RNA, 22 nt, Human
aacaggcuauuucuuuacaaac

SEQ ID NO: 874508 - RNA, 22 nt, Human
agcucugccgccuuucaggcug

SEQ ID NO: 874509 - RNA, 23 nt, Human
uaucuuuuucaauguuggaaaua

SEQ ID NO: 874510 - RNA, 22 nt, Human
cauuagcaaucauaaaccuuua

SEQ ID NO: 874511 - RNA, 22 nt, Human
ggugccagccuagugcaguggu

SEQ ID NO: 874512 - RNA, 22 nt, Human
cuuucuugcauaauuugaaacc

SEQ ID NO: 874513 - RNA, 22 nt, Human
aauugacagaaaguuuacgagg

SEQ ID NO: 874514 - RNA, 22 nt, Human
ugaaaugagagcacagaauaaa

SEQ ID NO: 874515 - RNA, 22 nt, Human
ugaaauguagauuaggcauucu

SEQ ID NO: 874516 - RNA, 22 nt, Human
auaaucauuuuaauuagugguu

SEQ ID NO: 874517 - RNA, 22 nt, Human
agccugguguggggcugcagag

SEQ ID NO: 874518 - RNA, 22 nt, Human
caugugucuuuauggagccaca

SEQ ID NO: 874519 - RNA, 22 nt, Human
uaggccaguggcagguugugug

SEQ ID NO: 874520 - RNA, 22 nt, Human
uauauguuuuucuaauuaggga

SEQ ID NO: 874521 - RNA, 18 nt, Human
cuggagucacagugggga

SEQ ID NO: 874522 - RNA, 22 nt, Human
uuaugcuaaguggaauaagcca

SEQ ID NO: 874523 - RNA, 21 nt, Human
auccauucuccgguuaaugag

SEQ ID NO: 874524 - RNA, 22 nt, Human
uuugugaagggaacagaagugu

SEQ ID NO: 874525 - RNA, 22 nt, Human
aagaugcgguugaccauggugu

SEQ ID NO: 874526 - RNA, 22 nt, Human
acagacugagucaucuucuuaa

SEQ ID NO: 874527 - RNA, 19 nt, Human
ucuccaguugcuuucaggg

SEQ ID NO: 874528 - RNA, 22 nt, Human
gucucucaaaacuagaagagaa

SEQ ID NO: 874529 - RNA, 22 nt, Human
ccaggccagggcugcagcgagc

SEQ ID NO: 874530 - RNA, 22 nt, Human
agaggccaugcuagaggccugg

SEQ ID NO: 874531 - RNA, 22 nt, Human
cagcaucuguuggauggauaag

SEQ ID NO: 874532 - RNA, 22 nt, Human
uguuuuguuuaugagagcacag

SEQ ID NO: 874533 - RNA, 22 nt, Human
uucagaagugcuuucacacucu

SEQ ID NO: 874534 - RNA, 22 nt, Human
uuucaagaacagcagcauucca

SEQ ID NO: 874535 - RNA, 22 nt, Human
ucugaagcuggaggaagcuuug

SEQ ID NO: 874536 - RNA, 22 nt, Human
uaggaaauggcucaguuacugc

SEQ ID NO: 874537 - RNA, 22 nt, Human
augauuuaaagucauugugaac

SEQ ID NO: 874538 - RNA, 22 nt, Human
uuaucaguuguguguauacacg

SEQ ID NO: 874539 - RNA, 22 nt, Human
cagaaacacuuguagagaaguu

SEQ ID NO: 874540 - RNA, 22 nt, Human
aggcaaugcagauagaugaaug

SEQ ID NO: 874541 - RNA, 22 nt, Human
cacuuugaugcagggcucagua

SEQ ID NO: 874542 - RNA, 22 nt, Human
gagccugcccagcccuguccac

SEQ ID NO: 874543 - RNA, 22 nt, Human
guccugggagaugggacccuga

SEQ ID NO: 874544 - RNA, 22 nt, Human
caacaauuucccaguuucccau

SEQ ID NO: 874545 - RNA, 22 nt, Human
ugaauuuaaaauaaauguaguu

SEQ ID NO: 874546 - RNA, 22 nt, Human
uggaaugaguggcuaagauuca

SEQ ID NO: 874547 - RNA, 22 nt, Human
cauuuaguuauacuaaaacauu

SEQ ID NO: 874548 - RNA, 22 nt, Human
cacugcuugguugcaacauugc

SEQ ID NO: 874549 - RNA, 22 nt, Human
ccaggcuggagugcaguagugu

SEQ ID NO: 874550 - RNA, 22 nt, Human
gcugucagucacauuguuacag

SEQ ID NO: 874551 - RNA, 22 nt, Human
cccuggagucagguuggccugg

SEQ ID NO: 874552 - RNA, 19 nt, Human
uguuuuguuaaagcagucc

SEQ ID NO: 874553 - RNA, 22 nt, Human
gcugccucuguagcuuuggacc

SEQ ID NO: 874554 - RNA, 22 nt, Human
ccauuucacucuuccugaagga

SEQ ID NO: 874555 - RNA, 23 nt, Human
ugucugguuucuuuuauuuagca

SEQ ID NO: 874556 - RNA, 22 nt, Human
uuauaacaacaguuuacuuuaa

SEQ ID NO: 874557 - RNA, 22 nt, Human
ugacccuuccccucuggguucu

SEQ ID NO: 874558 - RNA, 22 nt, Human
auuggugcaauagucaggagcu

SEQ ID NO: 874559 - RNA, 22 nt, Human
acauagcacgucucaauuugga

SEQ ID NO: 874560 - RNA, 20 nt, Human
aaaguguaagcauauaauua

SEQ ID NO: 874561 - RNA, 22 nt, Human
gccagacacuccccugggcagg

SEQ ID NO: 874562 - RNA, 22 nt, Human
cagggaugagcagauggagcaa

SEQ ID NO: 874563 - RNA, 22 nt, Human
aucauucagugaccacuuccca

SEQ ID NO: 874564 - RNA, 22 nt, Human
gggccucacuaugugguccagg

SEQ ID NO: 874565 - RNA, 22 nt, Human
cugugggcauuugagugugggu

SEQ ID NO: 874566 - RNA, 22 nt, Human
aaacacugugggacaucuuacu

SEQ ID NO: 874567 - RNA, 22 nt, Human
augcacagacccaaaggccauc

SEQ ID NO: 874568 - RNA, 22 nt, Human
caaugauagauuuuacaaauua

SEQ ID NO: 874569 - RNA, 22 nt, Human
uaguggagaguuguuuugugca

SEQ ID NO: 874570 - RNA, 22 nt, Human
agugugcauuccucuccucagg

SEQ ID NO: 874571 - RNA, 22 nt, Human
ggaagccaggcccagagaugcu

SEQ ID NO: 874572 - RNA, 22 nt, Human
aggcagguccccuggaaggcac

SEQ ID NO: 874573 - RNA, 22 nt, Human
cuucucucccuggcacucagac

SEQ ID NO: 874574 - RNA, 22 nt, Human
cuggcccggcugccuggucauu

SEQ ID NO: 874575 - RNA, 22 nt, Human
ugcagggcuauaacuccauucu

SEQ ID NO: 874576 - RNA, 22 nt, Human
agauacaguguuacauuuuuau

SEQ ID NO: 874577 - RNA, 22 nt, Human
aaaugucagaggaacauauuga

SEQ ID NO: 874578 - RNA, 22 nt, Human
ccugugcccucugcauagcagc

SEQ ID NO: 874579 - RNA, 22 nt, Human
agccccucuguggcucugccuc

SEQ ID NO: 874580 - RNA, 22 nt, Human
ggacaacauguuuuaauuaagg

SEQ ID NO: 874581 - RNA, 22 nt, Human
uauguacaugauuucauuugcu

SEQ ID NO: 874582 - RNA, 22 nt, Human
ugaggccagagaguuugcauuu

SEQ ID NO: 874583 - RNA, 22 nt, Human
uagaaucuguguucaaaccuac

SEQ ID NO: 874584 - RNA, 22 nt, Human
auaccugaucaaggcaaaaaug

SEQ ID NO: 874585 - RNA, 22 nt, Human
aaaugcagauucuuaggcccca

SEQ ID NO: 874586 - RNA, 22 nt, Human
gggacuuaaugcagagagggac

SEQ ID NO: 874587 - RNA, 22 nt, Human
caguuucuucaucugcagaauc

SEQ ID NO: 874588 - RNA, 22 nt, Human
aaugucauuuaaaauaauucug

SEQ ID NO: 874589 - RNA, 22 nt, Human
agggcaugaagcaguggacagc

SEQ ID NO: 874590 - RNA, 22 nt, Human
cuuuaugaaaaccagauugggg

SEQ ID NO: 874591 - RNA, 22 nt, Human
ucacuucuucccuugcacauau

SEQ ID NO: 874592 - RNA, 22 nt, Human
cacaauuauagaagaaagcaua

SEQ ID NO: 874593 - RNA, 22 nt, Human
uguccagguggccucugcugcu

SEQ ID NO: 874594 - RNA, 22 nt, Human
aauccacgggauuauucuaacu

SEQ ID NO: 874595 - RNA, 22 nt, Human
gacagcaagagacagagcaucc

SEQ ID NO: 874596 - RNA, 22 nt, Human
gcauuucauguagauugagaac

SEQ ID NO: 874597 - RNA, 22 nt, Human
gaagucucucuggagaguagaa

SEQ ID NO: 874598 - RNA, 22 nt, Human
gcuuacaggugaggcagcaaga

SEQ ID NO: 874599 - RNA, 22 nt, Human
cagagacacuuaacaggaaugg

SEQ ID NO: 874600 - RNA, 21 nt, Human
ggccagcagcguccacugugg

SEQ ID NO: 874601 - RNA, 22 nt, Human
aagaaucucucuacuuuauuac

SEQ ID NO: 874602 - RNA, 22 nt, Human
gcaggaagccuuaccaagccca

SEQ ID NO: 874603 - RNA, 22 nt, Human
ggcugaguucucuugcugaauc

SEQ ID NO: 874604 - RNA, 22 nt, Human
cgcagcuggauaucaugugccu

SEQ ID NO: 874605 - RNA, 22 nt, Human
acaagccaauuacugugccagg

SEQ ID NO: 874606 - RNA, 17 nt, Human
uccuggauccauggugg

SEQ ID NO: 874607 - RNA, 22 nt, Human
cuggccugcugggugagguccu

SEQ ID NO: 874608 - RNA, 20 nt, Human
uauauguguacauacacaca

SEQ ID NO: 874609 - RNA, 22 nt, Human
aggcugagcggggucccagagc

SEQ ID NO: 874610 - RNA, 22 nt, Human
uuuaaaaucagaugggaguugg

SEQ ID NO: 874611 - RNA, 22 nt, Human
acagagacugggaugccugccu

SEQ ID NO: 874612 - RNA, 22 nt, Human
ucuggccuacuggaguccauga

SEQ ID NO: 874613 - RNA, 22 nt, Human
caggugccauagacgggccugg

SEQ ID NO: 874614 - RNA, 22 nt, Human
aaaggcuuuaaaauguacauau

SEQ ID NO: 874615 - RNA, 22 nt, Human
gccaggcuggaaagaacagaca

SEQ ID NO: 874616 - RNA, 22 nt, Human
cuuucauuugauaagaaugcca

SEQ ID NO: 874617 - RNA, 22 nt, Human
gggcuucucuuuagugagcuga

SEQ ID NO: 874618 - RNA, 22 nt, Human
cugggcuguuuguucuggucuc

SEQ ID NO: 874619 - RNA, 22 nt, Human
cauuuguucaaccauucucgcu

SEQ ID NO: 874620 - RNA, 22 nt, Human
uuuaucuuuaggacuuugcaga

SEQ ID NO: 874621 - RNA, 22 nt, Human
cugaagaugucugagaugcuca

SEQ ID NO: 874622 - RNA, 21 nt, Human
cauuucaugauuauagaaaug

SEQ ID NO: 874623 - RNA, 22 nt, Human
ccuuuucuauguaccagcagug

SEQ ID NO: 874624 - RNA, 22 nt, Human
cauuccagcucucauacucugg

SEQ ID NO: 874625 - RNA, 22 nt, Human
uguuucugggugugucucaccu

SEQ ID NO: 874626 - RNA, 22 nt, Human
aacagcuguucgcagauguagg

SEQ ID NO: 874627 - RNA, 20 nt, Human
gcugucugacaguucccaga

SEQ ID NO: 874628 - RNA, 22 nt, Human
aagcagagccugagacagggau

SEQ ID NO: 874629 - RNA, 19 nt, Human
acacaaugacacauauaua

SEQ ID NO: 874630 - RNA, 22 nt, Human
ugcagaaggccugacauugcac

SEQ ID NO: 874631 - RNA, 22 nt, Human
ggguggggccaggcaauuugca

SEQ ID NO: 874632 - RNA, 22 nt, Human
gucugccauguggagaaagcca

SEQ ID NO: 874633 - RNA, 22 nt, Human
agccagcuguggcuauggcucc

SEQ ID NO: 874634 - RNA, 22 nt, Human
aggcugcaggucugggucaugu

SEQ ID NO: 874635 - RNA, 22 nt, Human
augcuuuuccuaaaaugaugcc

SEQ ID NO: 874636 - RNA, 22 nt, Human
aagagcuucccuguuguagagg

SEQ ID NO: 874637 - RNA, 22 nt, Human
cugggcucuaggaaccauuccu

SEQ ID NO: 874638 - RNA, 20 nt, Human
acagagacugagacacuugc

SEQ ID NO: 874639 - RNA, 22 nt, Human
uugaaaaugguaagcaugauau

SEQ ID NO: 874640 - RNA, 22 nt, Human
gcugcugugugggagacaggcg

SEQ ID NO: 874641 - RNA, 22 nt, Human
uucaaguuuguauuucuguauu

SEQ ID NO: 874642 - RNA, 22 nt, Human
agcucagguagacucagcaucu

SEQ ID NO: 874643 - RNA, 22 nt, Human
uucucuaaggucccguucugga

SEQ ID NO: 874644 - RNA, 22 nt, Human
agcagcuuccuguuugcaggca

SEQ ID NO: 874645 - RNA, 22 nt, Human
cccugagcgugaggaggaagua

SEQ ID NO: 874646 - RNA, 22 nt, Human
uuggucccucauggacacauga

SEQ ID NO: 874647 - RNA, 22 nt, Human
aaguucuauagucuuucuacua

SEQ ID NO: 874648 - RNA, 22 nt, Human
gggaagagauuuccacaucauu

SEQ ID NO: 874649 - RNA, 22 nt, Human
aggagcagaacugauucugacu

SEQ ID NO: 874650 - RNA, 22 nt, Human
cugaaagcauuaacuccacuuc

SEQ ID NO: 874651 - RNA, 21 nt, Human
gaacaggaaaagcuggcuuca

SEQ ID NO: 874652 - RNA, 22 nt, Human
ugagaggcuagaucagcucugu

SEQ ID NO: 874653 - RNA, 22 nt, Human
ucauggggcucuucaaguggag

SEQ ID NO: 874654 - RNA, 22 nt, Human
auccacauuuaggucucuaaaa

SEQ ID NO: 874655 - RNA, 22 nt, Human
uaaagucaucuuuaaacaugcc

SEQ ID NO: 874656 - RNA, 22 nt, Human
agucaacaaaaauguggagccu

SEQ ID NO: 874657 - RNA, 22 nt, Human
uuuguacugccacagcugacgu

SEQ ID NO: 874658 - RNA, 22 nt, Human
uuuuugaucugagcaguuggag

SEQ ID NO: 874659 - RNA, 22 nt, Human
agaguuauauugguugagaauu

SEQ ID NO: 874660 - RNA, 22 nt, Human
agucuagauguguacuagguua

SEQ ID NO: 874661 - RNA, 22 nt, Human
uuacaagugucagguacuggca

SEQ ID NO: 874662 - RNA, 22 nt, Human
uauaccaugugugcacacuccc

SEQ ID NO: 874663 - RNA, 22 nt, Human
ugccugucuuuccucccucgua

SEQ ID NO: 874664 - RNA, 21 nt, Human
cuaacuuugaguccuggcccc

SEQ ID NO: 874665 - RNA, 22 nt, Human
ucaaagaugaugcugaaguuau

SEQ ID NO: 874666 - RNA, 22 nt, Human
ugagguggcuagggaggcacuc

SEQ ID NO: 874667 - RNA, 22 nt, Human
gcucaaaggcuaucaauagugu

SEQ ID NO: 874668 - RNA, 22 nt, Human
auaucaaagcuaguggaaauuu

SEQ ID NO: 874669 - RNA, 22 nt, Human
aggacagauuuuuggccaccag

SEQ ID NO: 874670 - RNA, 21 nt, Human
uucuuucugaaucugaaguau

SEQ ID NO: 874671 - RNA, 22 nt, Human
ucucccagaaguccucaguaca

SEQ ID NO: 874672 - RNA, 23 nt, Human
caggaaauguucuugaagccuga

SEQ ID NO: 874673 - RNA, 22 nt, Human
uuccuugguagggacaacucug

SEQ ID NO: 874674 - RNA, 22 nt, Human
gcacagggaggcuggccuggcc

SEQ ID NO: 874675 - RNA, 22 nt, Human
ugggagagauaggcuucuggac

SEQ ID NO: 874676 - RNA, 22 nt, Human
aaacaucauaggcaugcaugau

SEQ ID NO: 874677 - RNA, 23 nt, Human
uuuugcaauaagucacuggaaua

SEQ ID NO: 874678 - RNA, 22 nt, Human
ugacauuuaucuucuacaauga

SEQ ID NO: 874679 - RNA, 22 nt, Human
uccagagagaaaaacaagcuuu

SEQ ID NO: 874680 - RNA, 22 nt, Human
uaagagaugcuuuucuaaauaa

SEQ ID NO: 874681 - RNA, 22 nt, Human
gcccagugcccuagaaugcacu

SEQ ID NO: 874682 - RNA, 22 nt, Human
cucagugcaaccaaagugaucu

SEQ ID NO: 874683 - RNA, 22 nt, Human
aaggcuaaauucuguacugcau

SEQ ID NO: 874684 - RNA, 22 nt, Human
aacaaguaaguuuauauauauu

SEQ ID NO: 874685 - RNA, 22 nt, Human
uuccaaauuaaaauguacaaug

SEQ ID NO: 874686 - RNA, 22 nt, Human
uuaaagaguuuauuacuuguaa

SEQ ID NO: 874687 - RNA, 22 nt, Human
cagugaaaucacaacuuuaguu

SEQ ID NO: 874688 - RNA, 22 nt, Human
aaauuguccuuuuaagaaacag

SEQ ID NO: 874689 - RNA, 20 nt, Human
acugaucuuguucuuacucc

SEQ ID NO: 874690 - RNA, 22 nt, Human
aggcacagggaugcggagccag

SEQ ID NO: 874691 - RNA, 22 nt, Human
aaaaacacugggcugggaguca

SEQ ID NO: 874692 - RNA, 22 nt, Human
uggcuucacccguccuccccac

SEQ ID NO: 874693 - RNA, 22 nt, Human
gcagcuggggccacacuuaggc

SEQ ID NO: 874694 - RNA, 22 nt, Human
uggcagcagaacaugaaaccca

SEQ ID NO: 874695 - RNA, 22 nt, Human
uuacuguugguguauccauagc

SEQ ID NO: 874696 - RNA, 22 nt, Human
uaaagacaaaugacauuacggc

SEQ ID NO: 874697 - RNA, 22 nt, Human
acuguauaguauuuauucuuag

SEQ ID NO: 874698 - RNA, 22 nt, Human
ggcagguggcacugcugcuccc

SEQ ID NO: 874699 - RNA, 22 nt, Human
aggcccugcuuuccagagcuca

SEQ ID NO: 874700 - RNA, 22 nt, Human
acugcaucugaaacauggguca

SEQ ID NO: 874701 - RNA, 22 nt, Human
cagcuuugcaggcuggucagug

SEQ ID NO: 874702 - RNA, 22 nt, Human
cagagcaguccuugucaaucag

SEQ ID NO: 874703 - RNA, 22 nt, Human
gggugcaggggacccuagggac

SEQ ID NO: 874704 - RNA, 22 nt, Human
cugucucaagacugcaggcacu

SEQ ID NO: 874705 - RNA, 20 nt, Human
ggccauggguugccugaggu

SEQ ID NO: 874706 - RNA, 22 nt, Human
ggcaacaugaugucaaccagga

SEQ ID NO: 874707 - RNA, 22 nt, Human
ugcguguguguauauacacagg

SEQ ID NO: 874708 - RNA, 22 nt, Human
ugugaagcauagauucuguaga

SEQ ID NO: 874709 - RNA, 22 nt, Human
gccucugcaucaucacuccagc

SEQ ID NO: 874710 - RNA, 22 nt, Human
accccacagcauacaaaggcac

SEQ ID NO: 874711 - RNA, 22 nt, Human
aggacagugguguucuggagug

SEQ ID NO: 874712 - RNA, 22 nt, Human
cgcaggcuuuagaaucugcuac

SEQ ID NO: 874713 - RNA, 23 nt, Human
cuuuuaacuagaguaucagcugc

SEQ ID NO: 874714 - RNA, 22 nt, Human
acaguuuauguaaagcugccaa

SEQ ID NO: 874715 - RNA, 22 nt, Human
gcuggaaggcuaggcucaguug

SEQ ID NO: 874716 - RNA, 22 nt, Human
uccagcuuggcagagcuaccug

SEQ ID NO: 874717 - RNA, 22 nt, Human
agccacagucuguagccagcuu

SEQ ID NO: 874718 - RNA, 19 nt, Human
aaguagucaucccauucuu

SEQ ID NO: 874719 - RNA, 22 nt, Human
uaacacagugucuaccauuauu

SEQ ID NO: 874720 - RNA, 22 nt, Human
agacagcuccaagugucucugu

SEQ ID NO: 874721 - RNA, 22 nt, Human
aacagcugcuucuaucuuuuca

SEQ ID NO: 874722 - RNA, 22 nt, Human
uaaagguaacaugaacugcuuu

SEQ ID NO: 874723 - RNA, 22 nt, Human
cccugggcucagagcagguagc

SEQ ID NO: 874724 - RNA, 22 nt, Human
gcccaagccggagcugggagag

SEQ ID NO: 874725 - RNA, 22 nt, Human
uucuggaggccagcugccaccu

SEQ ID NO: 874726 - RNA, 22 nt, Human
caguuacaugcucaugucauca

SEQ ID NO: 874727 - RNA, 22 nt, Human
gucccucugugucccugcaguc

SEQ ID NO: 874728 - RNA, 22 nt, Human
gugagagcugcuagacuguuau

SEQ ID NO: 874729 - RNA, 20 nt, Human
acugugugaucuggaaagcu

SEQ ID NO: 874730 - RNA, 19 nt, Human
aacaaguaggaauggaaga

SEQ ID NO: 874731 - RNA, 22 nt, Human
cuggggcugcgguggaggagcc

SEQ ID NO: 874732 - RNA, 20 nt, Human
guucaugucucaaauagaaa

SEQ ID NO: 874733 - RNA, 22 nt, Human
aaguacacaucguuggccccga

SEQ ID NO: 874734 - RNA, 22 nt, Human
uagacucagacagaaaaugugu

SEQ ID NO: 874735 - RNA, 22 nt, Human
ccagcuccugggucuuagucag

SEQ ID NO: 874736 - RNA, 22 nt, Human
ggcuucugagugcucugcuguu

SEQ ID NO: 874737 - RNA, 22 nt, Human
aagguauuggggaauauuugac

SEQ ID NO: 874738 - RNA, 22 nt, Human
uugaccuggaaggugcuuccug

SEQ ID NO: 874739 - RNA, 22 nt, Human
cacagguagaugccaugcagca

SEQ ID NO: 874740 - RNA, 22 nt, Human
cuuuccuagauggccaucuuuc

SEQ ID NO: 874741 - RNA, 22 nt, Human
guaggaaagggagugaagggaa

SEQ ID NO: 874742 - RNA, 22 nt, Human
ugucaggacacagcuuucugug

SEQ ID NO: 874743 - RNA, 22 nt, Human
cagcugcuguucaguuuuguuu

SEQ ID NO: 874744 - RNA, 20 nt, Human
ugaggcaggagaauggcaug

SEQ ID NO: 874745 - RNA, 22 nt, Human
caaacauagugaagcaaugaca

SEQ ID NO: 874746 - RNA, 22 nt, Human
ggauuugggcuugcagcagagc

SEQ ID NO: 874747 - RNA, 23 nt, Human
gugagguauauugaaaucaugcu

SEQ ID NO: 874748 - RNA, 22 nt, Human
cccagcuccagagccagaaaca

SEQ ID NO: 874749 - RNA, 16 nt, Human
uccuggccccuaugga

SEQ ID NO: 874750 - RNA, 22 nt, Human
agguggaacguucaggugcuag

SEQ ID NO: 874751 - RNA, 22 nt, Human
ugcugccaaaugcgagcucugu

SEQ ID NO: 874752 - RNA, 16 nt, Human
ccucugggccugcaag

SEQ ID NO: 874753 - RNA, 22 nt, Human
uaccaaaaccaagccauuaucu

SEQ ID NO: 874754 - RNA, 22 nt, Human
caggagcccguugcuccggcgg

SEQ ID NO: 874755 - RNA, 22 nt, Human
gcugaaguccuaaucccaagua

SEQ ID NO: 874756 - RNA, 22 nt, Human
gaggaaaauggaguguaauuaa

SEQ ID NO: 874757 - RNA, 22 nt, Human
agggggugcauuugugaaugaa

SEQ ID NO: 874758 - RNA, 22 nt, Human
cucuuggccagacacagaggca

SEQ ID NO: 874759 - RNA, 22 nt, Human
agugcaaaauucagaagcaauu

SEQ ID NO: 874760 - RNA, 22 nt, Human
ccaggccuagccccugagggua

SEQ ID NO: 874761 - RNA, 18 nt, Human
gaauaucuagcacauagu

SEQ ID NO: 874762 - RNA, 22 nt, Human
uauucucagcaacacacaugga

SEQ ID NO: 874763 - RNA, 22 nt, Human
ugcaaauaggggacaacucuuu

SEQ ID NO: 874764 - RNA, 22 nt, Human
aggcagcugugaggacuggauu

SEQ ID NO: 874765 - RNA, 22 nt, Human
ugucucuuggagggucuaguga

SEQ ID NO: 874766 - RNA, 23 nt, Human
gaaguucuuucuucucaugcugu

SEQ ID NO: 874767 - RNA, 17 nt, Human
ucacaucacacaagcaa

SEQ ID NO: 874768 - RNA, 22 nt, Human
cagaaguggcaucauucaagag

SEQ ID NO: 874769 - RNA, 16 nt, Human
ucccaggaggcggaac

SEQ ID NO: 874770 - RNA, 22 nt, Human
ggcagggugccuggcuccuguu

SEQ ID NO: 874771 - RNA, 22 nt, Human
uugaaaaaauugguagaggaug

SEQ ID NO: 874772 - RNA, 22 nt, Human
gcuuccucgcugggcagaggca

SEQ ID NO: 874773 - RNA, 20 nt, Human
aagcaucuggauguagcaau

SEQ ID NO: 874774 - RNA, 20 nt, Human
agcauucuacuagacuuuuc

SEQ ID NO: 874775 - RNA, 22 nt, Human
auauaaguguguggcuguuagu

SEQ ID NO: 874776 - RNA, 22 nt, Human
ccacaaggggacucguuaaaug

SEQ ID NO: 874777 - RNA, 23 nt, Human
acagagacaaugguuucaucuug

SEQ ID NO: 874778 - RNA, 22 nt, Human
caacugugaauuuuaugauacc

SEQ ID NO: 874779 - RNA, 22 nt, Human
ggccucugcaacuggcuguggc

SEQ ID NO: 874780 - RNA, 22 nt, Human
augacaacacauggugcugaau

SEQ ID NO: 874781 - RNA, 19 nt, Human
uggcaggcccaggauggac

SEQ ID NO: 874782 - RNA, 22 nt, Human
cagaagguuuacacuggacugu

SEQ ID NO: 874783 - RNA, 23 nt, Human
gaggccuggcccugccacaucuc

SEQ ID NO: 874784 - RNA, 22 nt, Human
ggucugagauauuuguucagcu

SEQ ID NO: 874785 - RNA, 22 nt, Human
cagcucugcugguggugccagg

SEQ ID NO: 874786 - RNA, 22 nt, Human
cuaaacaggaaggagcaccuga

SEQ ID NO: 874787 - RNA, 22 nt, Human
ggagagaacugaccugaaagga

SEQ ID NO: 874788 - RNA, 22 nt, Human
ggguguguuccuaaggaaacca

SEQ ID NO: 874789 - RNA, 22 nt, Human
gacaggcaccuugucugucuug

SEQ ID NO: 874790 - RNA, 22 nt, Human
gacauucaacuuugaugauuau

SEQ ID NO: 874791 - RNA, 22 nt, Human
cagugauuacugugcuuuuggu

SEQ ID NO: 874792 - RNA, 22 nt, Human
acauuucuuccacaugcugcug

SEQ ID NO: 874793 - RNA, 18 nt, Human
uccugccugcgggcuccc

SEQ ID NO: 874794 - RNA, 22 nt, Human
gcugugugacugagagccuggc

SEQ ID NO: 874795 - RNA, 22 nt, Human
agcagcagaucaaacaggcuug

SEQ ID NO: 874796 - RNA, 22 nt, Human
aggcuggaaagggaccagagug

SEQ ID NO: 874797 - RNA, 22 nt, Human
acagcuuugggcaaugcuauga

SEQ ID NO: 874798 - RNA, 22 nt, Human
ggaggucaaauggagggcuggg

SEQ ID NO: 874799 - RNA, 22 nt, Human
ucaaugcaaccuccaccucccg

SEQ ID NO: 874800 - RNA, 22 nt, Human
ccugggccuauccuagaaccaa

SEQ ID NO: 874801 - RNA, 22 nt, Human
ggccagcucaggguccuugggc

SEQ ID NO: 874802 - RNA, 22 nt, Human
agagaagagucuugucaaauua

SEQ ID NO: 874803 - RNA, 22 nt, Human
uucacauuggugauauguuucu

SEQ ID NO: 874804 - RNA, 22 nt, Human
auacaaucuagucugucagcaa

SEQ ID NO: 874805 - RNA, 22 nt, Human
auguuuaagaaagucuuccaua

SEQ ID NO: 874806 - RNA, 22 nt, Human
ucccaaggccaggcaucuagaa

SEQ ID NO: 874807 - RNA, 22 nt, Human
auguaccagauguauguucuca

SEQ ID NO: 874808 - RNA, 22 nt, Human
ggcaaaaaccgcaauaacuucu

SEQ ID NO: 874809 - RNA, 23 nt, Human
uuuauagcagcaugauuuauagu

SEQ ID NO: 874810 - RNA, 22 nt, Human
ugaaaugcuguagagacuguau

SEQ ID NO: 874811 - RNA, 22 nt, Human
ggcaggcuguucaccugcuuuu

SEQ ID NO: 874812 - RNA, 22 nt, Human
uguggaguggucugaaggcucc

SEQ ID NO: 874813 - RNA, 22 nt, Human
aaacuguauagggaaaaguaga

SEQ ID NO: 874814 - RNA, 22 nt, Human
acaguacaagcaugauacauaa

SEQ ID NO: 874815 - RNA, 22 nt, Human
ugcugucccuaagucucuucaa

SEQ ID NO: 874816 - RNA, 22 nt, Human
auuucacaaaccauccugauuu

SEQ ID NO: 874817 - RNA, 22 nt, Human
agaaaucacuuaaugaacguag

SEQ ID NO: 874818 - RNA, 22 nt, Human
ugguuuuauuuauguugaguca

SEQ ID NO: 874819 - RNA, 22 nt, Human
cuggacuuacuugcugaggacu

SEQ ID NO: 874820 - RNA, 22 nt, Human
gccuguggccgacugagagccu

SEQ ID NO: 874821 - RNA, 22 nt, Human
cccaagggugcccagcagagga

SEQ ID NO: 874822 - RNA, 22 nt, Human
gauuucagaguuuauuagguua

SEQ ID NO: 874823 - RNA, 22 nt, Human
acacauauauacauauuugugc

SEQ ID NO: 874824 - RNA, 22 nt, Human
uuuucauuguuacuaugagcua

SEQ ID NO: 874825 - RNA, 22 nt, Human
ccugcucuccauacacuuucua

SEQ ID NO: 874826 - RNA, 22 nt, Human
uguggacuugaaauuacuuuuc

SEQ ID NO: 874827 - RNA, 22 nt, Human
ccagaugguuugcaugggaggg

SEQ ID NO: 874828 - RNA, 22 nt, Human
ucaccuugugaucucccugccu

SEQ ID NO: 874829 - RNA, 22 nt, Human
auguggcuugucgauauuagca

SEQ ID NO: 874830 - RNA, 22 nt, Human
ccagcaagccaggucuguggcu

SEQ ID NO: 874831 - RNA, 22 nt, Human
accuaacuuaccuagguccaca

SEQ ID NO: 874832 - RNA, 22 nt, Human
aaagacaugacacauuggagag

SEQ ID NO: 874833 - RNA, 22 nt, Human
aacacuuucuuccuugcucagg

SEQ ID NO: 874834 - RNA, 22 nt, Human
aggaagaauguuuacauaucaa

SEQ ID NO: 874835 - RNA, 22 nt, Human
ucacugaagacugggcucuaaa

SEQ ID NO: 874836 - RNA, 22 nt, Human
auguccagggcacacagcagug

SEQ ID NO: 874837 - RNA, 22 nt, Human
agcaugaaagcauaggacaguc

SEQ ID NO: 874838 - RNA, 22 nt, Human
aauuuauuuccugccaguacac

SEQ ID NO: 874839 - RNA, 22 nt, Human
gucaucuuugcccugugcagga

SEQ ID NO: 874840 - RNA, 22 nt, Human
acauguauacaauguguaauga

SEQ ID NO: 874841 - RNA, 22 nt, Human
aguucuggcgcccaugagcaga

SEQ ID NO: 874842 - RNA, 22 nt, Human
guucaaaauucaaaugguauac

SEQ ID NO: 874843 - RNA, 22 nt, Human
uuuccaauucaagcuuuuacgu

SEQ ID NO: 874844 - RNA, 22 nt, Human
auucuucaucacuaccuuguga

SEQ ID NO: 874845 - RNA, 22 nt, Human
cugaggagcccccucucagcau

SEQ ID NO: 874846 - RNA, 22 nt, Human
cucaggcugugccaccugugug

SEQ ID NO: 874847 - RNA, 22 nt, Human
aaugauaagacaugaguagagg

SEQ ID NO: 874848 - RNA, 22 nt, Human
gagcagaacuacucacauaucg

SEQ ID NO: 874849 - RNA, 22 nt, Human
gggagccagcagggcauggagc

SEQ ID NO: 874850 - RNA, 22 nt, Human
agacagggccacucauccucac

SEQ ID NO: 874851 - RNA, 22 nt, Human
ucucuccuccacaccgggugcu

SEQ ID NO: 874852 - RNA, 22 nt, Human
gagggagaaggacuaucaggcu

SEQ ID NO: 874853 - RNA, 22 nt, Human
agugaggggcagcugagugggc

SEQ ID NO: 874854 - RNA, 22 nt, Human
agccaugggcucccaguccuuu

SEQ ID NO: 874855 - RNA, 22 nt, Human
augugagaauaacucaaaacaa

SEQ ID NO: 874856 - RNA, 22 nt, Human
cagggaggcugucuuaugccug

SEQ ID NO: 874857 - RNA, 23 nt, Human
ugggugcuaaucugcucugugga

SEQ ID NO: 874858 - RNA, 22 nt, Human
cugaaugagggauucugagggc

SEQ ID NO: 874859 - RNA, 22 nt, Human
auggagcagcagaaggggcuug

SEQ ID NO: 874860 - RNA, 22 nt, Human
ucuagaacuucucuaaaaugaa

SEQ ID NO: 874861 - RNA, 22 nt, Human
uuucauaaccucaagcuacagu

SEQ ID NO: 874862 - RNA, 22 nt, Human
gcaacaguuggauuccagagga

SEQ ID NO: 874863 - RNA, 22 nt, Human
agagggagcuuuauuuuucugu

SEQ ID NO: 874864 - RNA, 22 nt, Human
aggacugaugauggugcugaca

SEQ ID NO: 874865 - RNA, 22 nt, Human
agugcuggguacuguucccauu

SEQ ID NO: 874866 - RNA, 22 nt, Human
agcagcugagaugguaagauuc

SEQ ID NO: 874867 - RNA, 22 nt, Human
ggcguggcagucaggaaaaggu

SEQ ID NO: 874868 - RNA, 22 nt, Human
auaacagagagcuacugaacug

SEQ ID NO: 874869 - RNA, 22 nt, Human
aggcccagagagccaguuagug

SEQ ID NO: 874870 - RNA, 22 nt, Human
augcaaggguugccuuuccagc

SEQ ID NO: 874871 - RNA, 22 nt, Human
auuccacaggacuaccaaugug

SEQ ID NO: 874872 - RNA, 22 nt, Human
cgaggccaccgugguuuccgag

SEQ ID NO: 874873 - RNA, 20 nt, Human
uccugcugaccuucacaagc

SEQ ID NO: 874874 - RNA, 21 nt, Human
ucaacccuugcgucaccaagc

SEQ ID NO: 874875 - RNA, 20 nt, Human
accugggaaaaccuuuuccu

SEQ ID NO: 874876 - RNA, 22 nt, Human
caggggccuggcugucuaggaa

SEQ ID NO: 874877 - RNA, 20 nt, Human
uguaacacaugagcuuugag

SEQ ID NO: 874878 - RNA, 22 nt, Human
ccucagaggcagaugguaagaa

SEQ ID NO: 874879 - RNA, 22 nt, Human
uaaaagaccacaaggugguaau

SEQ ID NO: 874880 - RNA, 21 nt, Human
auaaacagcaugugauccaug

SEQ ID NO: 874881 - RNA, 22 nt, Human
gccuacaguuggcugagggccu

SEQ ID NO: 874882 - RNA, 22 nt, Human
ugaagcuuguauuuaaauaagu

SEQ ID NO: 874883 - RNA, 22 nt, Human
gcacagcuggacucugccuggc

SEQ ID NO: 874884 - RNA, 22 nt, Human
acagcugugauuucuaucauga

SEQ ID NO: 874885 - RNA, 22 nt, Human
ugggugagggacaaaaguuucu

SEQ ID NO: 874886 - RNA, 22 nt, Human
uccaggcucuaggcugcucucc

SEQ ID NO: 874887 - RNA, 22 nt, Human
ggcagcuggguuggccagaaac

SEQ ID NO: 874888 - RNA, 22 nt, Human
caaccucuaucggucaggaagc

SEQ ID NO: 874889 - RNA, 22 nt, Human
cagcagcucacugaauaaugac

SEQ ID NO: 874890 - RNA, 23 nt, Human
acaugcaaaaaucacagucuccu

SEQ ID NO: 874891 - RNA, 22 nt, Human
ucucugaauucugaugcaagug

SEQ ID NO: 874892 - RNA, 22 nt, Human
aaggggaauagaguggguugug

SEQ ID NO: 874893 - RNA, 22 nt, Human
gcucuugggggacagauggagu

SEQ ID NO: 874894 - RNA, 22 nt, Human
auucacaguuuccucauauucu

SEQ ID NO: 874895 - RNA, 22 nt, Human
gggugagacagaaagagcaaaa

SEQ ID NO: 874896 - RNA, 22 nt, Human
gaaaggagggaaacagagcggu

SEQ ID NO: 874897 - RNA, 22 nt, Human
aaguccaagaggaaagguuucc

SEQ ID NO: 874898 - RNA, 21 nt, Human
cccuaacucuaaaggauccau

SEQ ID NO: 874899 - RNA, 22 nt, Human
cuucagugacauuccuucccuc

SEQ ID NO: 874900 - RNA, 22 nt, Human
cugagguggccucugccgggga

SEQ ID NO: 874901 - RNA, 22 nt, Human
guuaauuuaguagaguccagau

SEQ ID NO: 874902 - RNA, 22 nt, Human
ugucagcagaaguggugcacuc

SEQ ID NO: 874903 - RNA, 22 nt, Human
cacaggaagcugacugcuggca

SEQ ID NO: 874904 - RNA, 22 nt, Human
uagacaaacugauacuuggcga

SEQ ID NO: 874905 - RNA, 22 nt, Human
uacgaauccuguggaugaaugu

SEQ ID NO: 874906 - RNA, 22 nt, Human
uuuuaucuucauuccuaucuac

SEQ ID NO: 874907 - RNA, 22 nt, Human
auguucauuagucaacauuucu

SEQ ID NO: 874908 - RNA, 22 nt, Human
agagauucauguuuacuguagg

SEQ ID NO: 874909 - RNA, 22 nt, Human
caaacauugcuaccagagguuu

SEQ ID NO: 874910 - RNA, 22 nt, Human
gggccucagguucuggagaagg

SEQ ID NO: 874911 - RNA, 22 nt, Human
uggcuucucugugguggcuccc

SEQ ID NO: 874912 - RNA, 22 nt, Human
ugauauuuuaugagcuuucaua

SEQ ID NO: 874913 - RNA, 22 nt, Human
gcagggcaaacccagguguuca

SEQ ID NO: 874914 - RNA, 23 nt, Human
aacuuuacuauuuugaauaaugc

SEQ ID NO: 874915 - RNA, 22 nt, Human
acaaaugacuauuugguacagg

SEQ ID NO: 874916 - RNA, 17 nt, Human
ggcagagcugacagggc

SEQ ID NO: 874917 - RNA, 22 nt, Human
ccacaguuugccagccaggaau

SEQ ID NO: 874918 - RNA, 22 nt, Human
uagcagcaccuacacgucagag

SEQ ID NO: 874919 - RNA, 22 nt, Human
ggaguggcagagaggguauacu

SEQ ID NO: 874920 - RNA, 22 nt, Human
acagaacugggaaaugcacaua

SEQ ID NO: 874921 - RNA, 22 nt, Human
uuacaguagauacaaugaguaa

SEQ ID NO: 874922 - RNA, 22 nt, Human
aggcuggguaccugucauaugc

SEQ ID NO: 874923 - RNA, 22 nt, Human
auuaaauguuccuuaaauuaua

SEQ ID NO: 874924 - RNA, 21 nt, Human
gcucccuggcugugugaccug

SEQ ID NO: 874925 - RNA, 19 nt, Human
gcuggcagauguggccgug

SEQ ID NO: 874926 - RNA, 22 nt, Human
ccugaguggggagcuaagugag

SEQ ID NO: 874927 - RNA, 22 nt, Human
cuggcaggcggagguugcagug

SEQ ID NO: 874928 - RNA, 22 nt, Human
uaucuguuaugggcugaauugc

SEQ ID NO: 874929 - RNA, 22 nt, Human
augcuggcagccgagugcucca

SEQ ID NO: 874930 - RNA, 22 nt, Human
agcaaagcaccauauggcaguu

SEQ ID NO: 874931 - RNA, 22 nt, Human
gaggugucaugagggccugcuc

SEQ ID NO: 874932 - RNA, 22 nt, Human
gggguguggacggcugugccag

SEQ ID NO: 874933 - RNA, 21 nt, Human
cugcacugugauuuaaaaugu

SEQ ID NO: 874934 - RNA, 22 nt, Human
aguguggggucaccggcccagg

SEQ ID NO: 874935 - RNA, 22 nt, Human
uccugcugaccaguaaaugaau

SEQ ID NO: 874936 - RNA, 22 nt, Human
ucccaaagguccgagcgggaau

SEQ ID NO: 874937 - RNA, 22 nt, Human
ucugaggcccuacccugagccu

SEQ ID NO: 874938 - RNA, 22 nt, Human
acuguacacagugguguacugu

SEQ ID NO: 874939 - RNA, 22 nt, Human
aggagccccucuucaguccugg

SEQ ID NO: 874940 - RNA, 22 nt, Human
aggcuccucggggcugacggcg

SEQ ID NO: 874941 - RNA, 22 nt, Human
aacucuauuuacccuacuaaac

SEQ ID NO: 874942 - RNA, 22 nt, Human
uaugaguacaaggaaggaugga

SEQ ID NO: 874943 - RNA, 22 nt, Human
ugcaggagcuuggcucuguccc

SEQ ID NO: 874944 - RNA, 22 nt, Human
gcuauuuauuaaaauggugaag

SEQ ID NO: 874945 - RNA, 22 nt, Human
agguuaggaagauacagaaugu

SEQ ID NO: 874946 - RNA, 22 nt, Human
guuuuucuagacugggaguuug

SEQ ID NO: 874947 - RNA, 22 nt, Human
uuucuguuguacuuaaacuagg

SEQ ID NO: 874948 - RNA, 22 nt, Human
cuguccaugacuugcacuauaa

SEQ ID NO: 874949 - RNA, 22 nt, Human
uuucauuggcagagccuguuuu

SEQ ID NO: 874950 - RNA, 22 nt, Human
aaacaccaagagcuagcuauua

SEQ ID NO: 874951 - RNA, 22 nt, Human
caccugaauggaacuuugaacc

SEQ ID NO: 874952 - RNA, 22 nt, Human
uggggugguaauacaccguucu

SEQ ID NO: 874953 - RNA, 22 nt, Human
uccagccaugacucggacagug

SEQ ID NO: 874954 - RNA, 22 nt, Human
uacaguaaaugugguagaaacu

SEQ ID NO: 874955 - RNA, 22 nt, Human
cugguguggcggcgcccuguag

SEQ ID NO: 874956 - RNA, 19 nt, Human
uguccucacagagcauaac

SEQ ID NO: 874957 - RNA, 22 nt, Human
aaaagcaguuaucugggaggaa

SEQ ID NO: 874958 - RNA, 22 nt, Human
uccugccuugccugggacauca

SEQ ID NO: 874959 - RNA, 22 nt, Human
agccagcagggcuuagaggaca

SEQ ID NO: 874960 - RNA, 22 nt, Human
agggcuggcaagggauugaaau

SEQ ID NO: 874961 - RNA, 22 nt, Human
uggcagguggcucuggcauucu

SEQ ID NO: 874962 - RNA, 22 nt, Human
aaaguuugcaauuuauguuaau

SEQ ID NO: 874963 - RNA, 22 nt, Human
gcuguguaaacuuguacagugc

SEQ ID NO: 874964 - RNA, 23 nt, Human
gcugucaguuguuuuugucucua

SEQ ID NO: 874965 - RNA, 22 nt, Human
aggggacacggcuucuccaggg

SEQ ID NO: 874966 - RNA, 22 nt, Human
agcagcagagcucuggucugca

SEQ ID NO: 874967 - RNA, 22 nt, Human
acaugcuuuucccacaauuaua

SEQ ID NO: 874968 - RNA, 22 nt, Human
gggaccugaggagggguuucag

SEQ ID NO: 874969 - RNA, 22 nt, Human
cauuacauuucaaaauguuucc

SEQ ID NO: 874970 - RNA, 22 nt, Human
aggucuaggagucugaaaguau

SEQ ID NO: 874971 - RNA, 22 nt, Human
uggugggggaggcugucuagca

SEQ ID NO: 874972 - RNA, 22 nt, Human
uccaaauuuaccuuacagauau

SEQ ID NO: 874973 - RNA, 22 nt, Human
ggcuucucagcacacuguccac

SEQ ID NO: 874974 - RNA, 22 nt, Human
cuagcuguguaaaccgagcugc

SEQ ID NO: 874975 - RNA, 22 nt, Human
cugaaaggagagcugcaaggau

SEQ ID NO: 874976 - RNA, 22 nt, Human
uccuggcuucugucuccuuauu

SEQ ID NO: 874977 - RNA, 22 nt, Human
cugcagcuuaaaggaguucaau

SEQ ID NO: 874978 - RNA, 22 nt, Human
uuagcaaauaucuugaaacagg

SEQ ID NO: 874979 - RNA, 22 nt, Human
guggggcaguggccugggagca

SEQ ID NO: 874980 - RNA, 22 nt, Human
cugggcccugaagacagucagg

SEQ ID NO: 874981 - RNA, 20 nt, Human
aaaaagacaaaacgaguugg

SEQ ID NO: 874982 - RNA, 20 nt, Human
gugcaauggcaccaucucag

SEQ ID NO: 874983 - RNA, 21 nt, Human
ucauaucugcuuugcugucug

SEQ ID NO: 874984 - RNA, 22 nt, Human
uugacagaugugaaagugagca

SEQ ID NO: 874985 - RNA, 22 nt, Human
ggccaagguguucugauaugcc

SEQ ID NO: 874986 - RNA, 22 nt, Human
cuucuggguauuccagauaccu

SEQ ID NO: 874987 - RNA, 22 nt, Human
gggaggagugaagauucaccug

SEQ ID NO: 874988 - RNA, 22 nt, Human
auucuucuugagucuuggacuc

SEQ ID NO: 874989 - RNA, 23 nt, Human
cagaggcaucggauucaacauca

SEQ ID NO: 874990 - RNA, 22 nt, Human
ccuagacuagaggcagggagcc

SEQ ID NO: 874991 - RNA, 22 nt, Human
ugccagcuucuuacggcugccu

SEQ ID NO: 874992 - RNA, 22 nt, Human
acaguggagaagcaaaugcagu

SEQ ID NO: 874993 - RNA, 22 nt, Human
ggcucuggagacauguggagag

SEQ ID NO: 874994 - RNA, 22 nt, Human
uguuugaguucuagcgcauuua

SEQ ID NO: 874995 - RNA, 22 nt, Human
ugagccaugggacuccaaggga

SEQ ID NO: 874996 - RNA, 22 nt, Human
auuucucaaccaggucaaaaag

SEQ ID NO: 874997 - RNA, 22 nt, Human
cucaaauccccguuccucauuc

SEQ ID NO: 874998 - RNA, 22 nt, Human
agaaucuaaauaugcaauuuga

SEQ ID NO: 874999 - RNA, 23 nt, Human
auaauaauuauggcagcaaagug

SEQ ID NO: 875000 - RNA, 22 nt, Human
gugagagccugucuggaugucg

SEQ ID NO: 875001 - RNA, 22 nt, Human
cagagucauaucagagaauaug

SEQ ID NO: 875002 - RNA, 22 nt, Human
aagaacagauucagccugaacu

SEQ ID NO: 875003 - RNA, 22 nt, Human
cuguguagccucaugugggcuu

SEQ ID NO: 875004 - RNA, 22 nt, Human
ugcguacuguuuauacaugugu

SEQ ID NO: 875005 - RNA, 22 nt, Human
uacacagaggcugaugucuuag

SEQ ID NO: 875006 - RNA, 22 nt, Human
uauuugaugaagguaaagucuu

SEQ ID NO: 875007 - RNA, 22 nt, Human
auaauuaucucagacacuuguu

SEQ ID NO: 875008 - RNA, 22 nt, Human
uagcaguauuccggaauacuuu

SEQ ID NO: 875009 - RNA, 22 nt, Human
cugugggagggugagagaacca

SEQ ID NO: 875010 - RNA, 22 nt, Human
cuguggcugcagccuugguccu

SEQ ID NO: 875011 - RNA, 22 nt, Human
cuucuuccaguuauaagagcuu

SEQ ID NO: 875012 - RNA, 22 nt, Human
uuuuaauccucuugguaucuua

SEQ ID NO: 875013 - RNA, 22 nt, Human
cugcauguguuucugcuggguu

SEQ ID NO: 875014 - RNA, 22 nt, Human
uggaccugcuggaugggcaggu

SEQ ID NO: 875015 - RNA, 22 nt, Human
uggaggggcaauggagcgcgga

SEQ ID NO: 875016 - RNA, 22 nt, Human
ucagcucuacacacaccugugu

SEQ ID NO: 875017 - RNA, 22 nt, Human
agcuucugcaucuuuucuuccc

SEQ ID NO: 875018 - RNA, 22 nt, Human
ugugugcacgcugggagcugga

SEQ ID NO: 875019 - RNA, 22 nt, Human
acaaugaaaaaauuuacugugg

SEQ ID NO: 875020 - RNA, 22 nt, Human
aacacuguaacagcaucauuuu

SEQ ID NO: 875021 - RNA, 22 nt, Human
ugcaagaaguccucucugggug

SEQ ID NO: 875022 - RNA, 22 nt, Human
aggaacuggugaaguguaguga

SEQ ID NO: 875023 - RNA, 22 nt, Human
agauguggaacacuagacugcu

SEQ ID NO: 875024 - RNA, 22 nt, Human
ugcacaggugagacucaggaag

SEQ ID NO: 875025 - RNA, 22 nt, Human
gaggcucaguuauuuuagccug

SEQ ID NO: 875026 - RNA, 22 nt, Human
uccaguccuaucugcccuugga

SEQ ID NO: 875027 - RNA, 22 nt, Human
ucucugagcucaggagcugcag

SEQ ID NO: 875028 - RNA, 22 nt, Human
caggcaaguucauuuccaggca

SEQ ID NO: 875029 - RNA, 22 nt, Human
cauaagaauauuccauccuuug

SEQ ID NO: 875030 - RNA, 22 nt, Human
aagaaaucagaaaagcauucgu

SEQ ID NO: 875031 - RNA, 22 nt, Human
uggcagccacaucucguggauu

SEQ ID NO: 875032 - RNA, 21 nt, Human
gagugggacaugggagugguu

SEQ ID NO: 875033 - RNA, 22 nt, Human
auugcaggccaguguccugggc

SEQ ID NO: 875034 - RNA, 22 nt, Human
aaagcagguuaugaccauggcc

SEQ ID NO: 875035 - RNA, 22 nt, Human
aaauauuguuuugguaagcuuc

SEQ ID NO: 875036 - RNA, 22 nt, Human
ccuggacuguguccugugguca

SEQ ID NO: 875037 - RNA, 22 nt, Human
acccuguaugcuauaucccuaa

SEQ ID NO: 875038 - RNA, 22 nt, Human
aggggcugggacagagccaagc

SEQ ID NO: 875039 - RNA, 22 nt, Human
agcuaaaugugaaaugucaacc

SEQ ID NO: 875040 - RNA, 22 nt, Human
augcauauuucaugaaucuuug

SEQ ID NO: 875041 - RNA, 22 nt, Human
ggauucaggguaaaguuucagu

SEQ ID NO: 875042 - RNA, 22 nt, Human
uccuggaguauuucuguggugu

SEQ ID NO: 875043 - RNA, 22 nt, Human
uaggcuugcaauuaggauggaa

SEQ ID NO: 875044 - RNA, 22 nt, Human
acuggcucagaguuccuagaga

SEQ ID NO: 875045 - RNA, 22 nt, Human
agaacagccaauaaaagagggg

SEQ ID NO: 875046 - RNA, 22 nt, Human
auaagaggaauuacagaagagg

SEQ ID NO: 875047 - RNA, 22 nt, Human
cugcugugggcaggguagcugg

SEQ ID NO: 875048 - RNA, 22 nt, Human
ggcaaaaaucaccccugguuca

SEQ ID NO: 875049 - RNA, 22 nt, Human
uaacaguuuugaguuuugcuuc

SEQ ID NO: 875050 - RNA, 22 nt, Human
aucuucaaagggauguccaugg

SEQ ID NO: 875051 - RNA, 22 nt, Human
uaugaagaaguucugugaaaug

SEQ ID NO: 875052 - RNA, 22 nt, Human
ugagagcugccacgugaccaug

SEQ ID NO: 875053 - RNA, 22 nt, Human
uuguacagacccugaaaagcuc

SEQ ID NO: 875054 - RNA, 20 nt, Human
auacagaugguuccagcugg

SEQ ID NO: 875055 - RNA, 22 nt, Human
cgccuucaggcccuuuuuguug

SEQ ID NO: 875056 - RNA, 18 nt, Human
ucaggcugggccuccuuc

SEQ ID NO: 875057 - RNA, 22 nt, Human
cagagccucugcccugggcacu

SEQ ID NO: 875058 - RNA, 22 nt, Human
ucuuugggagaaggggucccag

SEQ ID NO: 875059 - RNA, 22 nt, Human
cuuaacauccugcauuuuucuu

SEQ ID NO: 875060 - RNA, 22 nt, Human
uccuggagggaggcggugcuac

SEQ ID NO: 875061 - RNA, 22 nt, Human
aggacugacuuuugccaugaaa

SEQ ID NO: 875062 - RNA, 22 nt, Human
aaauucuuuggccuacuuugaa

SEQ ID NO: 875063 - RNA, 22 nt, Human
uccagccuuccuuuucacucuc

SEQ ID NO: 875064 - RNA, 22 nt, Human
ugaacauacaauuauuaagaac

SEQ ID NO: 875065 - RNA, 23 nt, Human
gcccugcccuuagcacacucaca

SEQ ID NO: 875066 - RNA, 22 nt, Human
cuggcagcugcccgagaugccc

SEQ ID NO: 875067 - RNA, 22 nt, Human
ugugagcagcucuguggacuca

SEQ ID NO: 875068 - RNA, 22 nt, Human
gggcaguguugcucucaaaguc

SEQ ID NO: 875069 - RNA, 22 nt, Human
augaacaguaugcaacaugauu

SEQ ID NO: 875070 - RNA, 22 nt, Human
gcacacaucuuguaauccugag

SEQ ID NO: 875071 - RNA, 22 nt, Human
uuccaacuucccaucccugcug

SEQ ID NO: 875072 - RNA, 22 nt, Human
uagucccauuuugagguauuug

SEQ ID NO: 875073 - RNA, 22 nt, Human
gccucagcuguugcaggggccc

SEQ ID NO: 875074 - RNA, 22 nt, Human
uuuguaugaacugguauguagg

SEQ ID NO: 875075 - RNA, 22 nt, Human
aagugcaggaguggggaaagua

SEQ ID NO: 875076 - RNA, 16 nt, Human
ccaggaggcugacacc

SEQ ID NO: 875077 - RNA, 17 nt, Human
ugcgaugucuguguuug

SEQ ID NO: 875078 - RNA, 22 nt, Human
aaaacaggaguuuugguaggcu

SEQ ID NO: 875079 - RNA, 22 nt, Human
uaguuaaaccaccauucuggua

SEQ ID NO: 875080 - RNA, 22 nt, Human
acaggcagagaguggcggacuc

SEQ ID NO: 875081 - RNA, 22 nt, Human
uuucccuucuuuccugaguaau

SEQ ID NO: 875082 - RNA, 22 nt, Human
uaacacauuuuccucauacgga

SEQ ID NO: 875083 - RNA, 22 nt, Human
caaggcucuggaccaaauccca

SEQ ID NO: 875084 - RNA, 22 nt, Human
ggaugcugcuaucaggcuucga

SEQ ID NO: 875085 - RNA, 22 nt, Human
uacugucuauacacuugauuac

SEQ ID NO: 875086 - RNA, 22 nt, Human
uggaugaaauauugcauuuaug

SEQ ID NO: 875087 - RNA, 22 nt, Human
uucugccacgagcaguuucuuc

SEQ ID NO: 875088 - RNA, 22 nt, Human
ccaggcugcucacaagcugccc

SEQ ID NO: 875089 - RNA, 22 nt, Human
gggcagcauucugugggcaggu

SEQ ID NO: 875090 - RNA, 22 nt, Human
auaccacaacauggcucagagg

SEQ ID NO: 875091 - RNA, 22 nt, Human
uggagggcaugcuguccauggg

SEQ ID NO: 875092 - RNA, 22 nt, Human
uuugcuugacccuugugcugaa

SEQ ID NO: 875093 - RNA, 22 nt, Human
gugugggcagggccgugcuccc

SEQ ID NO: 875094 - RNA, 22 nt, Human
cugggcugaaaguguuccuuga

SEQ ID NO: 875095 - RNA, 22 nt, Human
uggcacugggacagaugcucuc

SEQ ID NO: 875096 - RNA, 22 nt, Human
acaacaaaaugaggaagugguc

SEQ ID NO: 875097 - RNA, 22 nt, Human
gugggcagagcaagggaacuca

SEQ ID NO: 875098 - RNA, 22 nt, Human
uugcuuccuggaugugacuuug

SEQ ID NO: 875099 - RNA, 21 nt, Human
ccugggccaaauucccuggac

SEQ ID NO: 875100 - RNA, 22 nt, Human
ccuuggcaguggagugaggugg

SEQ ID NO: 875101 - RNA, 23 nt, Human
auaguucugcuuagaaaucagug

SEQ ID NO: 875102 - RNA, 22 nt, Human
acacugugagcugaagggcugc

SEQ ID NO: 875103 - RNA, 22 nt, Human
gcugccacuuggucaugucaug

SEQ ID NO: 875104 - RNA, 22 nt, Human
cagcccucaucccgccugcguu

SEQ ID NO: 875105 - RNA, 22 nt, Human
cuagaaucuccaaguuuacuca

SEQ ID NO: 875106 - RNA, 23 nt, Human
uaaggcauuuuuucuguaucagu

SEQ ID NO: 875107 - RNA, 22 nt, Human
ugaggcuuagagaagaugggau

SEQ ID NO: 875108 - RNA, 22 nt, Human
uagacaauauuugaaaguagug

SEQ ID NO: 875109 - RNA, 22 nt, Human
uuuuucauugcagccucucucc

SEQ ID NO: 875110 - RNA, 22 nt, Human
aagugaagaaauacaugagaau

SEQ ID NO: 875111 - RNA, 22 nt, Human
gugaaggcugugugaaaguucu

SEQ ID NO: 875112 - RNA, 17 nt, Human
ucugaagccagucugcu

SEQ ID NO: 875113 - RNA, 22 nt, Human
guccacagagggcugggcaggc

SEQ ID NO: 875114 - RNA, 22 nt, Human
augguccuuuuugccuggaugc

SEQ ID NO: 875115 - RNA, 22 nt, Human
ugacauuugagcauacauguaa

SEQ ID NO: 875116 - RNA, 22 nt, Human
uuacauguaaucuaaaauaauu

SEQ ID NO: 875117 - RNA, 22 nt, Human
uucagggagagcgggacgggug

SEQ ID NO: 875118 - RNA, 22 nt, Human
gccagcaaagcaaguugucagc

SEQ ID NO: 875119 - RNA, 22 nt, Human
gugggugcggggagccgaggcg

SEQ ID NO: 875120 - RNA, 22 nt, Human
caguggagagacuuuuacucuu

SEQ ID NO: 875121 - RNA, 22 nt, Human
agcgugaauuaguugguacaca

SEQ ID NO: 875122 - RNA, 22 nt, Human
gaggcugccaaugugugcaugu

SEQ ID NO: 875123 - RNA, 19 nt, Human
uagcugauagcuacuuuau

SEQ ID NO: 875124 - RNA, 22 nt, Human
uuugaugaaagcuacuauuuac

SEQ ID NO: 875125 - RNA, 20 nt, Human
aagguccaaacucuguguuc

SEQ ID NO: 875126 - RNA, 22 nt, Human
gaguccaguaguuaggacagag

SEQ ID NO: 875127 - RNA, 19 nt, Human
acagccuguugguggggcu

SEQ ID NO: 875128 - RNA, 19 nt, Human
uuccaaaaucaggauuuga

SEQ ID NO: 875129 - RNA, 22 nt, Human
uuguaugaauguauccuaauuu

SEQ ID NO: 875130 - RNA, 22 nt, Human
agcugccuguccuaggccauca

SEQ ID NO: 875131 - RNA, 22 nt, Human
ucaggccugcaggcuuccugga

SEQ ID NO: 875132 - RNA, 22 nt, Human
ugucauuuggacuuugguauua

SEQ ID NO: 875133 - RNA, 22 nt, Human
ggucugaguggugcugacucag

SEQ ID NO: 875134 - RNA, 19 nt, Human
uccaggagcaaagccaguu

SEQ ID NO: 875135 - RNA, 22 nt, Human
caucacauuuaaggggaaggac

SEQ ID NO: 875136 - RNA, 22 nt, Human
cuggcuguggucacagguaacu

SEQ ID NO: 875137 - RNA, 19 nt, Human
cccagcuguucuuccacca

SEQ ID NO: 875138 - RNA, 22 nt, Human
aaaggauuagagauaccaugcc

SEQ ID NO: 875139 - RNA, 22 nt, Human
agagccacggcaggccuaggaa

SEQ ID NO: 875140 - RNA, 22 nt, Human
aguuggauggauuggaaugaag

SEQ ID NO: 875141 - RNA, 16 nt, Human
ugaggccagccauuuc

SEQ ID NO: 875142 - RNA, 22 nt, Human
uucaaauuaccacauuugcuua

SEQ ID NO: 875143 - RNA, 22 nt, Human
gcaaugcauauguggguagcau

SEQ ID NO: 875144 - RNA, 22 nt, Human
ugcuucccaagguuucaugugc

SEQ ID NO: 875145 - RNA, 21 nt, Human
cccugcuuggggcagaacaac

SEQ ID NO: 875146 - RNA, 22 nt, Human
cuggguucuuggcacagcagga

SEQ ID NO: 875147 - RNA, 22 nt, Human
caggucugaagagucacaugcc

SEQ ID NO: 875148 - RNA, 22 nt, Human
ucacauuguaggucauuugcaa

SEQ ID NO: 875149 - RNA, 22 nt, Human
gaggaaaucauuccagaaaagg

SEQ ID NO: 875150 - RNA, 22 nt, Human
aagagcaacuuggaaacacuca

SEQ ID NO: 875151 - RNA, 22 nt, Human
uucauugagugguuuauucuaa

SEQ ID NO: 875152 - RNA, 22 nt, Human
uauuuguauuucaugcaguaaa

SEQ ID NO: 875153 - RNA, 22 nt, Human
uccagggguaccggccaggcag

SEQ ID NO: 875154 - RNA, 22 nt, Human
gggcccagcacuggcugggauc

SEQ ID NO: 875155 - RNA, 22 nt, Human
agggucagguuaagggagucau

SEQ ID NO: 875156 - RNA, 21 nt, Human
caauuacuuuugcaccgacuu

SEQ ID NO: 875157 - RNA, 22 nt, Human
agacccugucaguguuaggaaa

SEQ ID NO: 875158 - RNA, 22 nt, Human
guguccugagugaggccuggcc

SEQ ID NO: 875159 - RNA, 22 nt, Human
ugcagguguagaguugggcucc

SEQ ID NO: 875160 - RNA, 22 nt, Human
aggggagcaucugugaugguua

SEQ ID NO: 875161 - RNA, 18 nt, Human
uugcagguaccucuaucu

SEQ ID NO: 875162 - RNA, 23 nt, Human
gcuaggugcuuccacacgugcug

SEQ ID NO: 875163 - RNA, 19 nt, Human
aaguauucuuuguuagcag

SEQ ID NO: 875164 - RNA, 22 nt, Human
aaugacagagcacugaacuugg

SEQ ID NO: 875165 - RNA, 22 nt, Human
cugggcucaagaagucuucccu

SEQ ID NO: 875166 - RNA, 22 nt, Human
uuuguucguucaugcacgguag

SEQ ID NO: 875167 - RNA, 22 nt, Human
gcaggagcugcucuccugacga

SEQ ID NO: 875168 - RNA, 21 nt, Human
aaacaucucugcuuuuguguc

SEQ ID NO: 875169 - RNA, 22 nt, Human
cuggccugugggcugucuccgg

SEQ ID NO: 875170 - RNA, 22 nt, Human
uggaggcaccacuggcugcccg

SEQ ID NO: 875171 - RNA, 22 nt, Human
uaucaguaggguugaacuuugg

SEQ ID NO: 875172 - RNA, 23 nt, Human
aggcaggcaguucagcuguuguu

SEQ ID NO: 875173 - RNA, 22 nt, Human
ucaguuuuuguuugccagauag

SEQ ID NO: 875174 - RNA, 22 nt, Human
caaaugcuaugauuuugaguuu

SEQ ID NO: 875175 - RNA, 22 nt, Human
aagguaaugaaacagcagcuaa

SEQ ID NO: 875176 - RNA, 22 nt, Human
aaaguuuuuaagcaagacccuu

SEQ ID NO: 875177 - RNA, 22 nt, Human
cuaggaagagaaggaauucccc

SEQ ID NO: 875178 - RNA, 22 nt, Human
gacauaaaguucuugcuugaau

SEQ ID NO: 875179 - RNA, 22 nt, Human
acaggcucucuauugagugcag

SEQ ID NO: 875180 - RNA, 22 nt, Human
uuccaauccaaacuucaccuuu

SEQ ID NO: 875181 - RNA, 22 nt, Human
auuuggaaguuuggagugaagg

SEQ ID NO: 875182 - RNA, 22 nt, Human
uaauuacagguccaaaacaauc

SEQ ID NO: 875183 - RNA, 22 nt, Human
gccauuuggcaaaacugacuuc

SEQ ID NO: 875184 - RNA, 22 nt, Human
aacacugcugcuggguucugug

SEQ ID NO: 875185 - RNA, 18 nt, Human
cuggucucccuucgcuuu

SEQ ID NO: 875186 - RNA, 22 nt, Human
auuagcugaccucuaaggagcc

SEQ ID NO: 875187 - RNA, 22 nt, Human
cacagccuugagcgaggacaag

SEQ ID NO: 875188 - RNA, 22 nt, Human
gugugcaucuuuucugcuugau

SEQ ID NO: 875189 - RNA, 22 nt, Human
uccccuccaacuccaacuaugg

SEQ ID NO: 875190 - RNA, 22 nt, Human
aggagauaagaggcuggugugg

SEQ ID NO: 875191 - RNA, 22 nt, Human
cuggugcacuacagccuggaac

SEQ ID NO: 875192 - RNA, 22 nt, Human
gcugugagcugccugugucaca

SEQ ID NO: 875193 - RNA, 22 nt, Human
gaggcaagcccagugggucuaa

SEQ ID NO: 875194 - RNA, 22 nt, Human
aaguuccugggccaaguccagg

SEQ ID NO: 875195 - RNA, 21 nt, Human
ugauuuccaucuuaaaauaaa

SEQ ID NO: 875196 - RNA, 22 nt, Human
cccuuccucaaggagcuguguu

SEQ ID NO: 875197 - RNA, 22 nt, Human
aagcuggcuaaauaaaaggucc

SEQ ID NO: 875198 - RNA, 22 nt, Human
gcuggugagauuuuauguuucc

SEQ ID NO: 875199 - RNA, 22 nt, Human
aacacugaccucuacccucagu

SEQ ID NO: 875200 - RNA, 22 nt, Human
agggcagcuggaagguggcuuc

SEQ ID NO: 875201 - RNA, 22 nt, Human
uuggcacuauucacuccauggg

SEQ ID NO: 875202 - RNA, 22 nt, Human
uccucagaaaccccugugaggu

SEQ ID NO: 875203 - RNA, 22 nt, Human
agguuuauuaaguaaauagagc

SEQ ID NO: 875204 - RNA, 22 nt, Human
ugugugcucuaaugccuaguac

SEQ ID NO: 875205 - RNA, 22 nt, Human
agaucuggcccucagcuugauu

SEQ ID NO: 875206 - RNA, 22 nt, Human
ccuucaugucauuggacaccuu

SEQ ID NO: 875207 - RNA, 22 nt, Human
ccagccaggcuggcuguggagg

SEQ ID NO: 875208 - RNA, 17 nt, Human
gaggccaaggcaggcgg

SEQ ID NO: 875209 - RNA, 22 nt, Human
gaggcagaggaagguggucucu

SEQ ID NO: 875210 - RNA, 22 nt, Human
auuaaggcacuugagcaugaug

SEQ ID NO: 875211 - RNA, 22 nt, Human
gcuggagcuugagaggacaggg

SEQ ID NO: 875212 - RNA, 22 nt, Human
ugugggugaugaauuuguucuu

SEQ ID NO: 875213 - RNA, 22 nt, Human
acucagaggcagcugcucaccc

SEQ ID NO: 875214 - RNA, 20 nt, Human
gcugccuguuucuguaagua

SEQ ID NO: 875215 - RNA, 22 nt, Human
gggcucagucuggcguggaaug

SEQ ID NO: 875216 - RNA, 23 nt, Human
uucuaaccuuaaagcccuuugga

SEQ ID NO: 875217 - RNA, 22 nt, Human
ggccuggagucagggaaagcaa

SEQ ID NO: 875218 - RNA, 22 nt, Human
agcuagagcugagaagcacuug

SEQ ID NO: 875219 - RNA, 22 nt, Human
gcugauuaacuucauuguaguu

SEQ ID NO: 875220 - RNA, 22 nt, Human
augcuguggaaguuccugaagc

SEQ ID NO: 875221 - RNA, 22 nt, Human
uagcaccaaaacugaagaacau

SEQ ID NO: 875222 - RNA, 20 nt, Human
gcaaggcacagugaggaggg

SEQ ID NO: 875223 - RNA, 22 nt, Human
uaagugagggagcugggacuug

SEQ ID NO: 875224 - RNA, 22 nt, Human
gauguacaggaguuuuucaagg

SEQ ID NO: 875225 - RNA, 22 nt, Human
gagcuguguucaugaggagaaa

SEQ ID NO: 875226 - RNA, 22 nt, Human
ugaaggccuaacuuccagugcu

SEQ ID NO: 875227 - RNA, 22 nt, Human
augcaagacauaaauaaucuuu

SEQ ID NO: 875228 - RNA, 22 nt, Human
auggaaugugaacaugauggca

SEQ ID NO: 875229 - RNA, 22 nt, Human
aaaugcagauuuugaugcagca

SEQ ID NO: 875230 - RNA, 22 nt, Human
uuggucaagucuuaaagaaaaa

SEQ ID NO: 875231 - RNA, 22 nt, Human
uccuuggagcucuccaagggau

SEQ ID NO: 875232 - RNA, 22 nt, Human
uaggaaaaauacagaauuauau

SEQ ID NO: 875233 - RNA, 22 nt, Human
ucuaaacuuguaaacaagcaua

SEQ ID NO: 875234 - RNA, 22 nt, Human
guugaauauuuuaagaguuuug

SEQ ID NO: 875235 - RNA, 19 nt, Human
aaaguuuuauucucauuug

SEQ ID NO: 875236 - RNA, 22 nt, Human
acuaaauagccucugguaguug

SEQ ID NO: 875237 - RNA, 22 nt, Human
ugcuuccacuaaugagcugugu

SEQ ID NO: 875238 - RNA, 22 nt, Human
ucaguuuccugguuuugacauu

SEQ ID NO: 875239 - RNA, 22 nt, Human
aacuaaaucuggcauuuagagc

SEQ ID NO: 875240 - RNA, 22 nt, Human
ugaggaugguguuggagagggc

SEQ ID NO: 875241 - RNA, 22 nt, Human
uccaggaggguuuucugccuuc

SEQ ID NO: 875242 - RNA, 22 nt, Human
cuccaggagggggauggcugua

SEQ ID NO: 875243 - RNA, 22 nt, Human
agcagcuguggggacaagggua

SEQ ID NO: 875244 - RNA, 22 nt, Human
auuuauuaugggauuuggcaca

SEQ ID NO: 875245 - RNA, 22 nt, Human
augcacacguacccuacaaggc

SEQ ID NO: 875246 - RNA, 22 nt, Human
acugccuuauaugcugugugug

SEQ ID NO: 875247 - RNA, 22 nt, Human
gacaagacaccucucuccaucc

SEQ ID NO: 875248 - RNA, 22 nt, Human
ucagagcuuuggagaccaggaa

SEQ ID NO: 875249 - RNA, 22 nt, Human
cuuucagucaguuaacucagaa

SEQ ID NO: 875250 - RNA, 22 nt, Human
acacauguauaugcuugugugu

SEQ ID NO: 875251 - RNA, 22 nt, Human
uuccucaguuagugccugaggc

SEQ ID NO: 875252 - RNA, 22 nt, Human
gaggcugcauucuucccacugc

SEQ ID NO: 875253 - RNA, 22 nt, Human
caaaugcaaaauauaacccugu

SEQ ID NO: 875254 - RNA, 20 nt, Human
agagcagcaguuggugaggu

SEQ ID NO: 875255 - RNA, 22 nt, Human
aacaaaccuucccuauacgucu

SEQ ID NO: 875256 - RNA, 22 nt, Human
uggggacaggagacuuacagcu

SEQ ID NO: 875257 - RNA, 22 nt, Human
gcuggcagagcucugggcuggg

SEQ ID NO: 875258 - RNA, 22 nt, Human
aggccaagugcugggacaggug

SEQ ID NO: 875259 - RNA, 22 nt, Human
uccagaguuugagucuccuucc

SEQ ID NO: 875260 - RNA, 22 nt, Human
ugcauguguuucccagcaagcu

SEQ ID NO: 875261 - RNA, 22 nt, Human
aaacaaugaaauauuuuuaugg

SEQ ID NO: 875262 - RNA, 22 nt, Human
cucuugcugucaaagcagggua

SEQ ID NO: 875263 - RNA, 22 nt, Human
uuacauaacuuuaaaaugccgu

SEQ ID NO: 875264 - RNA, 22 nt, Human
aaggcuggguuugggaugugau

SEQ ID NO: 875265 - RNA, 22 nt, Human
aaagaagagcuggaaggagucu

SEQ ID NO: 875266 - RNA, 22 nt, Human
cuaacuuuagcuuagauuauca

SEQ ID NO: 875267 - RNA, 22 nt, Human
caggggccaggcugucugcugu

SEQ ID NO: 875268 - RNA, 22 nt, Human
ucaagcaaagauacaaauggaa

SEQ ID NO: 875269 - RNA, 17 nt, Human
ggccagaggcggggcug

SEQ ID NO: 875270 - RNA, 22 nt, Human
cuuuacagauaggaacuacuca

SEQ ID NO: 875271 - RNA, 22 nt, Human
aggaagcugggaaacugacauu

SEQ ID NO: 875272 - RNA, 22 nt, Human
acacugagcaucucuagaggca

SEQ ID NO: 875273 - RNA, 22 nt, Human
ucucaucuuuaaaugaaaauuu

SEQ ID NO: 875274 - RNA, 22 nt, Human
ccagaccacccuggccaugcac

SEQ ID NO: 875275 - RNA, 22 nt, Human
auuuggugccugggaaaucucu

SEQ ID NO: 875276 - RNA, 22 nt, Human
guuaaguaaacuaugauuuauc

SEQ ID NO: 875277 - RNA, 22 nt, Human
ucuccaaauaguuauauuuaga

SEQ ID NO: 875278 - RNA, 22 nt, Human
uuagauuuauaugugagaaugg

SEQ ID NO: 875279 - RNA, 22 nt, Human
ucuugagagauauacuacugaa

SEQ ID NO: 875280 - RNA, 22 nt, Human
gaacuucagaaucagcauaucu

SEQ ID NO: 875281 - RNA, 22 nt, Human
cauucauauuugcaguauaccu

SEQ ID NO: 875282 - RNA, 22 nt, Human
acauuugauugaugaaucaaau

SEQ ID NO: 875283 - RNA, 22 nt, Human
aauauuucguugcguggcuaga

SEQ ID NO: 875284 - RNA, 22 nt, Human
gcuccacuugcagcuaggcuug

SEQ ID NO: 875285 - RNA, 22 nt, Human
cugagguagucauuuucuacuc

SEQ ID NO: 875286 - RNA, 22 nt, Human
uagcuguuggcuuacaucuguu

SEQ ID NO: 875287 - RNA, 23 nt, Human
ugaggcugauugauuuuugcuca

SEQ ID NO: 875288 - RNA, 22 nt, Human
ugaggaagcaaaggcuugugug

SEQ ID NO: 875289 - RNA, 22 nt, Human
uucuucuccgaggagggcuggu

SEQ ID NO: 875290 - RNA, 22 nt, Human
uuauugaaauggaagcuauaac

SEQ ID NO: 875291 - RNA, 19 nt, Human
ggcagaagguguaggggga

SEQ ID NO: 875292 - RNA, 22 nt, Human
augacagacccucuaaagacaa

SEQ ID NO: 875293 - RNA, 18 nt, Human
aggucugaggaagagccu

SEQ ID NO: 875294 - RNA, 22 nt, Human
aauucugugcaggcagagcuau

SEQ ID NO: 875295 - RNA, 22 nt, Human
cagcugcaguucaaugcuugcu

SEQ ID NO: 875296 - RNA, 22 nt, Human
guggcugcagcggcuguggaga

SEQ ID NO: 875297 - RNA, 22 nt, Human
ggcuggucacaccacugcaggg

SEQ ID NO: 875298 - RNA, 22 nt, Human
uauguauaugguagaaguaugu

SEQ ID NO: 875299 - RNA, 22 nt, Human
ccauaaaguaggaaacacuaca

SEQ ID NO: 875300 - RNA, 22 nt, Human
aggcauuuucacugaugucauc

SEQ ID NO: 875301 - RNA, 22 nt, Human
cugagcucuaaugucagccuug

SEQ ID NO: 875302 - RNA, 22 nt, Human
uauauguagauuguaccaaugu

SEQ ID NO: 875303 - RNA, 22 nt, Human
gcucucugccauaugaggauac

SEQ ID NO: 875304 - RNA, 22 nt, Human
cuuggaggaugugcggcugccc

SEQ ID NO: 875305 - RNA, 22 nt, Human
uccaauuuuacgucuguauaaa

SEQ ID NO: 875306 - RNA, 22 nt, Human
acaguagaaacaggcaggcaga

SEQ ID NO: 875307 - RNA, 22 nt, Human
ugguccauguccuccaucucuc

SEQ ID NO: 875308 - RNA, 22 nt, Human
uguuuuguucacugcauugucc

SEQ ID NO: 875309 - RNA, 22 nt, Human
agccaccaccacugaaagguua

SEQ ID NO: 875310 - RNA, 22 nt, Human
ucaaacauaaaacuaaaucgag

SEQ ID NO: 875311 - RNA, 22 nt, Human
uuccuugguguaacugcuccua

SEQ ID NO: 875312 - RNA, 22 nt, Human
ccuuaaauucuccauuugaaag

SEQ ID NO: 875313 - RNA, 22 nt, Human
gaaaguuuucucacacaguaau

SEQ ID NO: 875314 - RNA, 18 nt, Human
cccagcacuuugggagcc

SEQ ID NO: 875315 - RNA, 22 nt, Human
ggucuuguuuauauaagguggu

SEQ ID NO: 875316 - RNA, 20 nt, Human
cacguuuuuccacuagcaaa

SEQ ID NO: 875317 - RNA, 22 nt, Human
uaggcacaaaaugaaaauggca

SEQ ID NO: 875318 - RNA, 22 nt, Human
ggacucucaggcugucggcuuc

SEQ ID NO: 875319 - RNA, 22 nt, Human
ccacaaguuucagcacccagag

SEQ ID NO: 875320 - RNA, 22 nt, Human
uuucuaacguagacagggaggu

SEQ ID NO: 875321 - RNA, 22 nt, Human
gagaggaacucccagugccugg

SEQ ID NO: 875322 - RNA, 22 nt, Human
uguggacgucauuaaagcagug

SEQ ID NO: 875323 - RNA, 22 nt, Human
ugcauauuguccuugauauuau

SEQ ID NO: 875324 - RNA, 22 nt, Human
cuuuacauuaauuucuacugau

SEQ ID NO: 875325 - RNA, 22 nt, Human
aaguuuuacugaggacacaugu

SEQ ID NO: 875326 - RNA, 22 nt, Human
uuguaacagcuguuuauauagu

SEQ ID NO: 875327 - RNA, 22 nt, Human
aaacaauguugcugggugcggu

SEQ ID NO: 875328 - RNA, 22 nt, Human
ugggcucagucugcuugguccu

SEQ ID NO: 875329 - RNA, 22 nt, Human
uugacaaaacaacacagauuuc

SEQ ID NO: 875330 - RNA, 20 nt, Human
cugggcugggcuacaggguc

SEQ ID NO: 875331 - RNA, 22 nt, Human
gcucuaacuauuaagaggucau

SEQ ID NO: 875332 - RNA, 22 nt, Human
uucuuugggcaauugcuggccc

SEQ ID NO: 875333 - RNA, 22 nt, Human
auguacaaaauguuuugaaaug

SEQ ID NO: 875334 - RNA, 22 nt, Human
cagaaggcaaggccugccacgc

SEQ ID NO: 875335 - RNA, 19 nt, Human
uauuucaaagugccgucua

SEQ ID NO: 875336 - RNA, 22 nt, Human
caccccagcuucucaggauaga

SEQ ID NO: 875337 - RNA, 22 nt, Human
gagggccucugugggugcucac

SEQ ID NO: 875338 - RNA, 22 nt, Human
cacauugauaauuaaggccucc

SEQ ID NO: 875339 - RNA, 22 nt, Human
ugagguaauguguacguuaauu

SEQ ID NO: 875340 - RNA, 22 nt, Human
acaucuucaaagugcuuugcaa

SEQ ID NO: 875341 - RNA, 22 nt, Human
gacagcagggaaaguccagacc

SEQ ID NO: 875342 - RNA, 22 nt, Human
uuccacaacaaccaagcauaua

SEQ ID NO: 875343 - RNA, 22 nt, Human
cagguccaacuauuuaucugug

SEQ ID NO: 875344 - RNA, 22 nt, Human
gagagcugauagaugagcuacu

SEQ ID NO: 875345 - RNA, 22 nt, Human
ucuguccagaacguacaucuug

SEQ ID NO: 875346 - RNA, 22 nt, Human
gaguaagagcuggcuuuggugu

SEQ ID NO: 875347 - RNA, 22 nt, Human
aguucucaagguuaggaaaagu

SEQ ID NO: 875348 - RNA, 22 nt, Human
agggcugcuuaccuggaauggc

SEQ ID NO: 875349 - RNA, 22 nt, Human
ucacugcuucuuggagaauguc

SEQ ID NO: 875350 - RNA, 22 nt, Human
gggcugagugggccucuuacuu

SEQ ID NO: 875351 - RNA, 22 nt, Human
cugaggcuuguccucucagcuu

SEQ ID NO: 875352 - RNA, 22 nt, Human
auguguaugcaugcacuaagau

SEQ ID NO: 875353 - RNA, 22 nt, Human
auaagcauuucacagguguguu

SEQ ID NO: 875354 - RNA, 22 nt, Human
gaaacuuacuuacucacauuuc

SEQ ID NO: 875355 - RNA, 22 nt, Human
gggcacagagggucuugaagaa

SEQ ID NO: 875356 - RNA, 22 nt, Human
ccuggcucuagaggccacuccu

SEQ ID NO: 875357 - RNA, 22 nt, Human
uauaggaaguauucaaagacug

SEQ ID NO: 875358 - RNA, 22 nt, Human
cagugcugccaaagggaccuug

SEQ ID NO: 875359 - RNA, 22 nt, Human
aggcucuguuauucuagagggc

SEQ ID NO: 875360 - RNA, 22 nt, Human
ucugggagagggaaagaagacu

SEQ ID NO: 875361 - RNA, 22 nt, Human
ugacaacauugaguuaugugca

SEQ ID NO: 875362 - RNA, 22 nt, Human
cagcuucuauuuaucuuugugu

SEQ ID NO: 875363 - RNA, 22 nt, Human
ucuucauguugcuuauucuggg

SEQ ID NO: 875364 - RNA, 22 nt, Human
guccuuucgagggugagugaaa

SEQ ID NO: 875365 - RNA, 22 nt, Human
uguucauuaaacuacugugugg

SEQ ID NO: 875366 - RNA, 22 nt, Human
auuuagaagcuaauuuuucaga

SEQ ID NO: 875367 - RNA, 22 nt, Human
ugugagugaaugggucugaagu

SEQ ID NO: 875368 - RNA, 22 nt, Human
ucucugcccauccucaguccac

SEQ ID NO: 875369 - RNA, 22 nt, Human
cucccagggucuaggcugcugg

SEQ ID NO: 875370 - RNA, 22 nt, Human
ugaggggccgcccaagcacuuc

SEQ ID NO: 875371 - RNA, 22 nt, Human
aaacacuucaaggacuucuguc

SEQ ID NO: 875372 - RNA, 22 nt, Human
ugcuucuguucuuucaccuacg

SEQ ID NO: 875373 - RNA, 22 nt, Human
ugaaucugauuucccuggaggc

SEQ ID NO: 875374 - RNA, 22 nt, Human
cugaaagguauaaauaagacuu

SEQ ID NO: 875375 - RNA, 22 nt, Human
ggaggggagguccagcugaucu

SEQ ID NO: 875376 - RNA, 22 nt, Human
uucauugaaccacuuuauucuu

SEQ ID NO: 875377 - RNA, 22 nt, Human
ugccaggccacguagcuucaag

SEQ ID NO: 875378 - RNA, 20 nt, Human
cuguuaaaagguaugaauuc

SEQ ID NO: 875379 - RNA, 22 nt, Human
uuuguuaaauauuuauugagug

SEQ ID NO: 875380 - RNA, 22 nt, Human
gcaaauacauguugagcaccua

SEQ ID NO: 875381 - RNA, 22 nt, Human
uuggcaaaggacucaaagcagg

SEQ ID NO: 875382 - RNA, 22 nt, Human
gaccacagagcacggccugcuu

SEQ ID NO: 875383 - RNA, 22 nt, Human
uguuaguuguucauguuaagag

SEQ ID NO: 875384 - RNA, 22 nt, Human
uuuuggugauuuuacugaaggu

SEQ ID NO: 875385 - RNA, 22 nt, Human
ggaucugggguagagcaguggg

SEQ ID NO: 875386 - RNA, 22 nt, Human
cauuacaaaguuauaaacaguu

SEQ ID NO: 875387 - RNA, 22 nt, Human
gcaagguguuuuaacaggaaaa

SEQ ID NO: 875388 - RNA, 22 nt, Human
uguguguggggaggcagcagau

SEQ ID NO: 875389 - RNA, 19 nt, Human
cacagggcaggucucaugu

SEQ ID NO: 875390 - RNA, 22 nt, Human
ggcacucaauaaauguugccaa

SEQ ID NO: 875391 - RNA, 22 nt, Human
ccugggcaggccggacgcuggg

SEQ ID NO: 875392 - RNA, 22 nt, Human
uccuuucugucuuuacucugga

SEQ ID NO: 875393 - RNA, 23 nt, Human
aguacaauaaguauaauucuuuc

SEQ ID NO: 875394 - RNA, 22 nt, Human
cugcagugaaaucaggaagcaa

SEQ ID NO: 875395 - RNA, 22 nt, Human
ccagccagcugcccuuggggcc

SEQ ID NO: 875396 - RNA, 22 nt, Human
uuccuucuagagcuuguuuagg

SEQ ID NO: 875397 - RNA, 22 nt, Human
agaaacucuggaagaacuuuua

SEQ ID NO: 875398 - RNA, 22 nt, Human
cagaaaggacuuugguuggcuu

SEQ ID NO: 875399 - RNA, 19 nt, Human
ugagacagagaccaguucu

SEQ ID NO: 875400 - RNA, 22 nt, Human
agggccaggaacaccugaaggg

SEQ ID NO: 875401 - RNA, 22 nt, Human
agaaaucuaagaugcucaagga

SEQ ID NO: 875402 - RNA, 22 nt, Human
ugcuaaacaauguacaguguau

SEQ ID NO: 875403 - RNA, 22 nt, Human
guuucuuauuugcagguugcuu

SEQ ID NO: 875404 - RNA, 22 nt, Human
agcucugguuauugaagcaggg

SEQ ID NO: 875405 - RNA, 22 nt, Human
aagacaacagagaugacagacu

SEQ ID NO: 875406 - RNA, 22 nt, Human
gaguggcuguguacaugcccag

SEQ ID NO: 875407 - RNA, 22 nt, Human
aagggcaugggaugaaaaguag

SEQ ID NO: 875408 - RNA, 22 nt, Human
ucugggguggagcccuggaguc

SEQ ID NO: 875409 - RNA, 21 nt, Human
uauaggaaucagucacaucug

SEQ ID NO: 875410 - RNA, 22 nt, Human
uggcagaguuggagguggaaga

SEQ ID NO: 875411 - RNA, 22 nt, Human
gcugcaggagcuggagcugugg

SEQ ID NO: 875412 - RNA, 22 nt, Human
ucuuagcaaauacuacuuagaa

SEQ ID NO: 875413 - RNA, 22 nt, Human
uuccuugaaagcuggacauggg

SEQ ID NO: 875414 - RNA, 22 nt, Human
gagagacccagacaccaugcau

SEQ ID NO: 875415 - RNA, 22 nt, Human
agcucacaccucaucagggugg

SEQ ID NO: 875416 - RNA, 18 nt, Human
cagccucugauugguugc

SEQ ID NO: 875417 - RNA, 22 nt, Human
uauuguauuaaggauucaagua

SEQ ID NO: 875418 - RNA, 22 nt, Human
ugcauuuuugagguuaacucaa

SEQ ID NO: 875419 - RNA, 22 nt, Human
uuaaaucaggcaucauuucagu

SEQ ID NO: 875420 - RNA, 22 nt, Human
agcauuuauugaccugcugcug

SEQ ID NO: 875421 - RNA, 22 nt, Human
gcuccaggaggaugaccuuccu

SEQ ID NO: 875422 - RNA, 22 nt, Human
gugcgugaggccccugagcgaa

SEQ ID NO: 875423 - RNA, 22 nt, Human
cuggaaugagagcccggggauc

SEQ ID NO: 875424 - RNA, 22 nt, Human
uggccuggggaccugugagacc

SEQ ID NO: 875425 - RNA, 22 nt, Human
gagaggagacuuauccagauug

SEQ ID NO: 875426 - RNA, 22 nt, Human
ucucuguggcauccacucaacu

SEQ ID NO: 875427 - RNA, 22 nt, Human
ugcaguguuuggaugcugaguc

SEQ ID NO: 875428 - RNA, 22 nt, Human
uucuacagaauaaauguuuaca

SEQ ID NO: 875429 - RNA, 22 nt, Human
aauaucuguggccauacaauuu

SEQ ID NO: 875430 - RNA, 19 nt, Human
ucccaggcaaaggcuucuc

SEQ ID NO: 875431 - RNA, 22 nt, Human
gagcacaggcuuugguggacac

SEQ ID NO: 875432 - RNA, 22 nt, Human
cagcccuuccaggcagaauucu

SEQ ID NO: 875433 - RNA, 22 nt, Human
gcacaagaauaaccauauuuaa

SEQ ID NO: 875434 - RNA, 22 nt, Human
caggucagcacuuggaggugca

SEQ ID NO: 875435 - RNA, 22 nt, Human
cuugaaagaagggucuuuuaau

SEQ ID NO: 875436 - RNA, 22 nt, Human
ucaggaagaaagaagggagugu

SEQ ID NO: 875437 - RNA, 22 nt, Human
caugaauauuuaguauuuacuu

SEQ ID NO: 875438 - RNA, 22 nt, Human
caucuuuagggaccauuauucu

SEQ ID NO: 875439 - RNA, 22 nt, Human
aagcagcagccaucccccaagg

SEQ ID NO: 875440 - RNA, 22 nt, Human
ucagugcacaaugacgguggcu

SEQ ID NO: 875441 - RNA, 22 nt, Human
cucugugcccuacugcucagcu

SEQ ID NO: 875442 - RNA, 22 nt, Human
cugucuaguuaggaugccagca

SEQ ID NO: 875443 - RNA, 22 nt, Human
gacaaguuguggagaagagggu

SEQ ID NO: 875444 - RNA, 22 nt, Human
uacaaaugccugacacacagau

SEQ ID NO: 875445 - RNA, 22 nt, Human
cugcuguggugucaagcaucuc

SEQ ID NO: 875446 - RNA, 22 nt, Human
caagagacuuauguggaaaccu

SEQ ID NO: 875447 - RNA, 22 nt, Human
aaauuuucagagcacuagagaa

SEQ ID NO: 875448 - RNA, 20 nt, Human
agaagaggauacaaccaggc

SEQ ID NO: 875449 - RNA, 22 nt, Human
cucugguucagggcucccuggc

SEQ ID NO: 875450 - RNA, 22 nt, Human
aguuuauguuguuuauaagcca

SEQ ID NO: 875451 - RNA, 22 nt, Human
uucuuugcccauguuuccuaag

SEQ ID NO: 875452 - RNA, 20 nt, Human
accugggguugccugugcuc

SEQ ID NO: 875453 - RNA, 22 nt, Human
uuauuuauguuaacagucgaga

SEQ ID NO: 875454 - RNA, 22 nt, Human
gggaccuggggacuccuuguuc

SEQ ID NO: 875455 - RNA, 22 nt, Human
augaugugugcugaucaagcuu

SEQ ID NO: 875456 - RNA, 22 nt, Human
guuaacaaauguaaagcaauua

SEQ ID NO: 875457 - RNA, 22 nt, Human
uugucaccuauacugagcuuaa

SEQ ID NO: 875458 - RNA, 22 nt, Human
ugcaaacauccgacugaaagcc

SEQ ID NO: 875459 - RNA, 22 nt, Human
aucauugaauauaagugcuauu

SEQ ID NO: 875460 - RNA, 23 nt, Human
gacacaggagcacccagcugagc

SEQ ID NO: 875461 - RNA, 22 nt, Human
ucagggcaucucuuaaguggug

SEQ ID NO: 875462 - RNA, 22 nt, Human
uguguucaccaaaguguagaaa

SEQ ID NO: 875463 - RNA, 22 nt, Human
acacugguugguugaauuuacu

SEQ ID NO: 875464 - RNA, 22 nt, Human
uuuaguuuugaugaaaaugcca

SEQ ID NO: 875465 - RNA, 22 nt, Human
caguuuauaugaggguaucaag

SEQ ID NO: 875466 - RNA, 22 nt, Human
auauuuggaaagaaaaucauug

SEQ ID NO: 875467 - RNA, 22 nt, Human
ggagauggaauagauucugacu

SEQ ID NO: 875468 - RNA, 22 nt, Human
gaugaaauucagaauugagggg

SEQ ID NO: 875469 - RNA, 22 nt, Human
uauaugucugcuacuguauaaa

SEQ ID NO: 875470 - RNA, 22 nt, Human
caggaaagguagucacaaugua

SEQ ID NO: 875471 - RNA, 22 nt, Human
ccugagacaugaaccaggcucc

SEQ ID NO: 875472 - RNA, 22 nt, Human
acagcugcuguggagguuuuca

SEQ ID NO: 875473 - RNA, 22 nt, Human
ucacauguauaugcagcacagc

SEQ ID NO: 875474 - RNA, 22 nt, Human
gcucugagagugggugauucug

SEQ ID NO: 875475 - RNA, 22 nt, Human
gaacacuugcuguuaauaagug

SEQ ID NO: 875476 - RNA, 22 nt, Human
uugagauagguggaaucucuuu

SEQ ID NO: 875477 - RNA, 22 nt, Human
aacaaauguguggcaguguggg

SEQ ID NO: 875478 - RNA, 22 nt, Human
ucuugauuuuguuaaaauuaga

SEQ ID NO: 875479 - RNA, 22 nt, Human
cuggggcccaucgagggcugag

SEQ ID NO: 875480 - RNA, 22 nt, Human
agaaaugaaaccaaagccuaga

SEQ ID NO: 875481 - RNA, 22 nt, Human
acauuucucuuagaguuggacu

SEQ ID NO: 875482 - RNA, 22 nt, Human
uuuggaaacugccucagcucuu

SEQ ID NO: 875483 - RNA, 22 nt, Human
uguacaugacagagagagccaa

SEQ ID NO: 875484 - RNA, 22 nt, Human
aucugcuucagugauaugugaa

SEQ ID NO: 875485 - RNA, 22 nt, Human
uccccugcagaugagggcagug

SEQ ID NO: 875486 - RNA, 22 nt, Human
ucacugcaaccucugccuuccg

SEQ ID NO: 875487 - RNA, 22 nt, Human
gcugccagcccucggggucuga

SEQ ID NO: 875488 - RNA, 22 nt, Human
uucauucagugagacuaggacg

SEQ ID NO: 875489 - RNA, 22 nt, Human
gccuggcucccucugcagcucc

SEQ ID NO: 875490 - RNA, 22 nt, Human
uggcuaaucuuaaggcuuuugc

SEQ ID NO: 875491 - RNA, 22 nt, Human
cagacacagcaauucuguguug

SEQ ID NO: 875492 - RNA, 22 nt, Human
aaggccacacuugcuggccagc

SEQ ID NO: 875493 - RNA, 22 nt, Human
gggaggagcugagugugugugc

SEQ ID NO: 875494 - RNA, 23 nt, Human
aaauggguuucuguuuuguggac

SEQ ID NO: 875495 - RNA, 21 nt, Human
uccucccugagcuguggggga

SEQ ID NO: 875496 - RNA, 22 nt, Human
aggaagaaccuaagaaagucuc

SEQ ID NO: 875497 - RNA, 22 nt, Human
ugcuggaauugaccuagaagga

SEQ ID NO: 875498 - RNA, 23 nt, Human
gcucuauguguuauagcuguuuu

SEQ ID NO: 875499 - RNA, 22 nt, Human
gugucccagcagcacauuggcu

SEQ ID NO: 875500 - RNA, 22 nt, Human
ugaacuuuuauuugaugacagg

SEQ ID NO: 875501 - RNA, 22 nt, Human
auacaguaauuuguaacucauc

SEQ ID NO: 875502 - RNA, 22 nt, Human
aucugaaagcuaggaguucuca

SEQ ID NO: 875503 - RNA, 22 nt, Human
auuacaguggacagcuaugcac

SEQ ID NO: 875504 - RNA, 17 nt, Human
cugcagcuggagggcca

SEQ ID NO: 875505 - RNA, 22 nt, Human
agguggggcugggaaagauucc

SEQ ID NO: 875506 - RNA, 22 nt, Human
agggggugucucugauuggguu

SEQ ID NO: 875507 - RNA, 20 nt, Human
uuuuaugucaccuuccuguc

SEQ ID NO: 875508 - RNA, 22 nt, Human
acugugagagagguucuuggua

SEQ ID NO: 875509 - RNA, 22 nt, Human
guauuucugguuaaaugugcua

SEQ ID NO: 875510 - RNA, 22 nt, Human
ggaggaagugcaguucuacuac

SEQ ID NO: 875511 - RNA, 22 nt, Human
gggcaucugguggagccucagg

SEQ ID NO: 875512 - RNA, 22 nt, Human
gggaagcagcauugugcuggcu

SEQ ID NO: 875513 - RNA, 22 nt, Human
uaucugugaaauguguuuguau

SEQ ID NO: 875514 - RNA, 22 nt, Human
auuuagucucccuuaucaagga

SEQ ID NO: 875515 - RNA, 22 nt, Human
acaguguuguggcucuuaauag

SEQ ID NO: 875516 - RNA, 22 nt, Human
ggcgcaggccuuggauccuggu

SEQ ID NO: 875517 - RNA, 22 nt, Human
ccaguguguuaguggauuuccc

SEQ ID NO: 875518 - RNA, 23 nt, Human
caggaaaucaauucuuccagcau

SEQ ID NO: 875519 - RNA, 21 nt, Human
aucucuucaaggcugauuuac

SEQ ID NO: 875520 - RNA, 22 nt, Human
uucugcauucaaauuaugugag

SEQ ID NO: 875521 - RNA, 22 nt, Human
uccagcuuucacgcuccugccu

SEQ ID NO: 875522 - RNA, 22 nt, Human
ugaggccaagaaaagcugggug

SEQ ID NO: 875523 - RNA, 22 nt, Human
cagggccaguucucgcagcagu

SEQ ID NO: 875524 - RNA, 22 nt, Human
ucuuuggacauguugagguugc

SEQ ID NO: 875525 - RNA, 22 nt, Human
ccucccuccauugccaucgucu

SEQ ID NO: 875526 - RNA, 22 nt, Human
uguuaaaaauucagcucuagau

SEQ ID NO: 875527 - RNA, 22 nt, Human
gcugagaguccaggaaaacauc

SEQ ID NO: 875528 - RNA, 22 nt, Human
gggcuccagggcccgagucguc

SEQ ID NO: 875529 - RNA, 22 nt, Human
uggguccaguguccuggcuaug

SEQ ID NO: 875530 - RNA, 22 nt, Human
ucauauaucugcaaagcaguau

SEQ ID NO: 875531 - RNA, 22 nt, Human
agucaccaucuguggcagccug

SEQ ID NO: 875532 - RNA, 21 nt, Human
ggcugcagggagcccuggggu

SEQ ID NO: 875533 - RNA, 22 nt, Human
uggcaggcggagguugcaguga

SEQ ID NO: 875534 - RNA, 20 nt, Human
gaugagacccaugcaugaga

SEQ ID NO: 875535 - RNA, 22 nt, Human
uuccaaaguuauucaagcagua

SEQ ID NO: 875536 - RNA, 21 nt, Human
cccaggaggcugagaagagca

SEQ ID NO: 875537 - RNA, 22 nt, Human
gcaggacuugaauccaggcagu

SEQ ID NO: 875538 - RNA, 22 nt, Human
caccagcuugcagucuuaaccc

SEQ ID NO: 875539 - RNA, 22 nt, Human
gugcuacagacugaguacacuu

SEQ ID NO: 875540 - RNA, 22 nt, Human
aggaacagaagagcaaugcagg

SEQ ID NO: 875541 - RNA, 22 nt, Human
gaagagcuccaaaaacagugag

SEQ ID NO: 875542 - RNA, 19 nt, Human
ugggagaggcaacagagua

SEQ ID NO: 875543 - RNA, 21 nt, Human
aggagaccggcuuguuugugc

SEQ ID NO: 875544 - RNA, 22 nt, Human
cacaggggcaaacuguagggga

SEQ ID NO: 875545 - RNA, 22 nt, Human
uucauauaaauggaaucagaau

SEQ ID NO: 875546 - RNA, 17 nt, Human
acaggccugcuugcacu

SEQ ID NO: 875547 - RNA, 22 nt, Human
ugugacagaucuuuaaauaaug

SEQ ID NO: 875548 - RNA, 22 nt, Human
guggcagcagguacucacgcac

SEQ ID NO: 875549 - RNA, 22 nt, Human
uguacaaauucauugaacugua

SEQ ID NO: 875550 - RNA, 22 nt, Human
cugcacuugacaugcucucaga

SEQ ID NO: 875551 - RNA, 22 nt, Human
gccugcugaagccagagugugu

SEQ ID NO: 875552 - RNA, 22 nt, Human
gggcuccagauugcagcgauca

SEQ ID NO: 875553 - RNA, 22 nt, Human
aaacuucagggaauaaaagagu

SEQ ID NO: 875554 - RNA, 19 nt, Human
uccuugugacugugugaaa

SEQ ID NO: 875555 - RNA, 22 nt, Human
ccagugcccagcugcccaggca

SEQ ID NO: 875556 - RNA, 20 nt, Human
aaaagcagccagagauggua

SEQ ID NO: 875557 - RNA, 22 nt, Human
uucacagauugacuggauuccu

SEQ ID NO: 875558 - RNA, 22 nt, Human
guggccagccagggugcugaug

SEQ ID NO: 875559 - RNA, 22 nt, Human
caauguaaauauuuucuaauca

SEQ ID NO: 875560 - RNA, 22 nt, Human
uauuucuguuuauuuguacauc

SEQ ID NO: 875561 - RNA, 22 nt, Human
ugagagcugaagauauguuaac

SEQ ID NO: 875562 - RNA, 22 nt, Human
cagcaguuuugaaguguggaga

SEQ ID NO: 875563 - RNA, 22 nt, Human
cuaaacauggcuuagaacacuc

SEQ ID NO: 875564 - RNA, 23 nt, Human
gaggccacauuccccugcuugag

SEQ ID NO: 875565 - RNA, 22 nt, Human
augugugcauguuagagagagu

SEQ ID NO: 875566 - RNA, 22 nt, Human
gcugucugucuucacaucucgc

SEQ ID NO: 875567 - RNA, 22 nt, Human
ucuagauguacugcugaagagu

SEQ ID NO: 875568 - RNA, 22 nt, Human
caguuuauuguugcguucacau

SEQ ID NO: 875569 - RNA, 22 nt, Human
auaauucuccaauuuuuguugu

SEQ ID NO: 875570 - RNA, 23 nt, Human
aggucaaccacaagcugacaaac

SEQ ID NO: 875571 - RNA, 23 nt, Human
ucaaacauauugugagacacagg

SEQ ID NO: 875572 - RNA, 22 nt, Human
cugaggcucccucgggucugcu

SEQ ID NO: 875573 - RNA, 22 nt, Human
agacagcagggagcaggauuca

SEQ ID NO: 875574 - RNA, 22 nt, Human
acugccuucaaacagcgccacc

SEQ ID NO: 875575 - RNA, 22 nt, Human
caguuguucccagcaaugaaag

SEQ ID NO: 875576 - RNA, 22 nt, Human
cuagagguagaggcagugggaa

SEQ ID NO: 875577 - RNA, 22 nt, Human
agcggcugucggccagccggag

SEQ ID NO: 875578 - RNA, 22 nt, Human
gguaacaaacuucugacuuaag

SEQ ID NO: 875579 - RNA, 22 nt, Human
cuggcuccauccuugagcucug

SEQ ID NO: 875580 - RNA, 22 nt, Human
ggccaggaucuguuuguccacc

SEQ ID NO: 875581 - RNA, 22 nt, Human
ggagugacucucggggccacua

SEQ ID NO: 875582 - RNA, 22 nt, Human
agcuuccugucuucugcacaaa

SEQ ID NO: 875583 - RNA, 22 nt, Human
gcccaggagaggccagggcuga

SEQ ID NO: 875584 - RNA, 22 nt, Human
ggcaccagggaaggaaggcugg

SEQ ID NO: 875585 - RNA, 22 nt, Human
ucaaauagguaugaguagaaau

SEQ ID NO: 875586 - RNA, 22 nt, Human
auuguacuagaaauuguauuca

SEQ ID NO: 875587 - RNA, 22 nt, Human
uuucugagaaauuaaacacuuu

SEQ ID NO: 875588 - RNA, 22 nt, Human
guuagacaugagugugcuuaca

SEQ ID NO: 875589 - RNA, 22 nt, Human
augcauaucacagucuccaugu

SEQ ID NO: 875590 - RNA, 22 nt, Human
cacaauuccauggcauucuuug

SEQ ID NO: 875591 - RNA, 22 nt, Human
cuccuuccugcagaucugagau

SEQ ID NO: 875592 - RNA, 22 nt, Human
ucaggaaagaagaugcucagug

SEQ ID NO: 875593 - RNA, 19 nt, Human
gucuguguauuuguugcug

SEQ ID NO: 875594 - RNA, 22 nt, Human
cugugggagcacaugacagaua

SEQ ID NO: 875595 - RNA, 22 nt, Human
uuuugcuuuuguaacacagugu

SEQ ID NO: 875596 - RNA, 22 nt, Human
ggcaggagcucuccaguuugcc

SEQ ID NO: 875597 - RNA, 22 nt, Human
caaggccuucuugggagagauu

SEQ ID NO: 875598 - RNA, 22 nt, Human
ugucauuuccugaaugcugagu

SEQ ID NO: 875599 - RNA, 19 nt, Human
acuucugaggaacugcaca

SEQ ID NO: 875600 - RNA, 22 nt, Human
agauggcucuuugaaggggaau

SEQ ID NO: 875601 - RNA, 20 nt, Human
acagaauaugcugguugugg

SEQ ID NO: 875602 - RNA, 22 nt, Human
agguccuguguccaggggccug

SEQ ID NO: 875603 - RNA, 22 nt, Human
aagauaacaggaggaguuugua

SEQ ID NO: 875604 - RNA, 22 nt, Human
aaauagaaaccaacaaggucag

SEQ ID NO: 875605 - RNA, 22 nt, Human
cuacauaaauuuaucacagacu

SEQ ID NO: 875606 - RNA, 21 nt, Human
ccugagugagaccuggcccgu

SEQ ID NO: 875607 - RNA, 22 nt, Human
guggaaaugcccccaaauagug

SEQ ID NO: 875608 - RNA, 22 nt, Human
gagcccuguaggaaucucucaa

SEQ ID NO: 875609 - RNA, 22 nt, Human
gcucuggauccggcugggucug

SEQ ID NO: 875610 - RNA, 22 nt, Human
ugugugcagccucugucuuugg

SEQ ID NO: 875611 - RNA, 22 nt, Human
acaaugcauaaguuucucccag

SEQ ID NO: 875612 - RNA, 22 nt, Human
cugugacuguguuggaugcaca

SEQ ID NO: 875613 - RNA, 22 nt, Human
uguuuucuagaaacaaugccua

SEQ ID NO: 875614 - RNA, 21 nt, Human
gcagucacucgguuggcuacc

SEQ ID NO: 875615 - RNA, 22 nt, Human
uccagcagguccgagacaaguu

SEQ ID NO: 875616 - RNA, 21 nt, Human
uguauacacguguugaaaaca

SEQ ID NO: 875617 - RNA, 22 nt, Human
ugggcuccucgucacucgcugu

SEQ ID NO: 875618 - RNA, 21 nt, Human
auugaaagucaacaaucaguu

SEQ ID NO: 875619 - RNA, 22 nt, Human
ggagccuguggcugcuugaagc

SEQ ID NO: 875620 - RNA, 22 nt, Human
augcaacaggucagccaggaag

SEQ ID NO: 875621 - RNA, 22 nt, Human
uggcaggguuggccaccuuacc

SEQ ID NO: 875622 - RNA, 22 nt, Human
cugaggccucuguucaccagaa

SEQ ID NO: 875623 - RNA, 22 nt, Human
cucugagcagaggccguggcua

SEQ ID NO: 875624 - RNA, 22 nt, Human
cuuccucucaauaagaugagaa

SEQ ID NO: 875625 - RNA, 22 nt, Human
ggaggccagccugaggcugagg

SEQ ID NO: 875626 - RNA, 22 nt, Human
ccauagugaauugucucagacg

SEQ ID NO: 875627 - RNA, 22 nt, Human
uagcagcaauuacacaguccgu

SEQ ID NO: 875628 - RNA, 22 nt, Human
ugcuuaaaguaguggauuguua

SEQ ID NO: 875629 - RNA, 22 nt, Human
acaaggcacuuuaugaagagga

SEQ ID NO: 875630 - RNA, 22 nt, Human
acagguggucuuugcuccuuuu

SEQ ID NO: 875631 - RNA, 22 nt, Human
uuuugaaagccagguuuguaug

SEQ ID NO: 875632 - RNA, 22 nt, Human
cugcaggcugagcgccugccgg

SEQ ID NO: 875633 - RNA, 23 nt, Human
gcagauggccccagagugcugcc

SEQ ID NO: 875634 - RNA, 18 nt, Human
gcacagagcaaguuucau

SEQ ID NO: 875635 - RNA, 22 nt, Human
cagggacagagacugcaccuug

SEQ ID NO: 875636 - RNA, 22 nt, Human
uaucuuugaugccagauguuac

SEQ ID NO: 875637 - RNA, 22 nt, Human
aguggcugauuacaaacugagu

SEQ ID NO: 875638 - RNA, 22 nt, Human
aaagcagcuguuugacuuucca

SEQ ID NO: 875639 - RNA, 22 nt, Human
ggaacaguugagaugauguacc

SEQ ID NO: 875640 - RNA, 22 nt, Human
uuuuaaacugcagaauuuagaa

SEQ ID NO: 875641 - RNA, 22 nt, Human
agggcagcggugcuuguguuau

SEQ ID NO: 875642 - RNA, 22 nt, Human
agaucugguuggaguccugaca

SEQ ID NO: 875643 - RNA, 22 nt, Human
auguuuauggagcagguauuag

SEQ ID NO: 875644 - RNA, 22 nt, Human
cucuagaagcugaggggcccaa

SEQ ID NO: 875645 - RNA, 22 nt, Human
auaauuaggucuuauaacgucu

SEQ ID NO: 875646 - RNA, 22 nt, Human
uucaauaucucuaagaaugagg

SEQ ID NO: 875647 - RNA, 22 nt, Human
agucuuuacauguguuauauau

SEQ ID NO: 875648 - RNA, 22 nt, Human
aauaacagauuuucaagcugug

SEQ ID NO: 875649 - RNA, 22 nt, Human
uaaauacugaguuggaguuggc

SEQ ID NO: 875650 - RNA, 22 nt, Human
aaaucagaggucagcuguacca

SEQ ID NO: 875651 - RNA, 22 nt, Human
cccagaggugcuucagaggugc

SEQ ID NO: 875652 - RNA, 22 nt, Human
agcccugggaggccagcuugua

SEQ ID NO: 875653 - RNA, 22 nt, Human
aggcuccacccuacagagcucc

SEQ ID NO: 875654 - RNA, 22 nt, Human
gcauaugaucacgugugucggu

SEQ ID NO: 875655 - RNA, 22 nt, Human
gguagucauggauagcuaugag

SEQ ID NO: 875656 - RNA, 22 nt, Human
uaauuuacuugcaaauaacaau

SEQ ID NO: 875657 - RNA, 22 nt, Human
aguucugguuaaccugcaaccu

SEQ ID NO: 875658 - RNA, 22 nt, Human
cuggcugucuucugggagcugu

SEQ ID NO: 875659 - RNA, 19 nt, Human
cucugccucuggcuguggc

SEQ ID NO: 875660 - RNA, 22 nt, Human
uggcaauaauuguaauucaauu

SEQ ID NO: 875661 - RNA, 22 nt, Human
caaagugcugggauuauaggca

SEQ ID NO: 875662 - RNA, 22 nt, Human
caacaguuccuccauccucucu

SEQ ID NO: 875663 - RNA, 15 nt, Human
aagaaucugaagcuu

SEQ ID NO: 875664 - RNA, 22 nt, Human
ucucagaaauacuauguuguca

SEQ ID NO: 875665 - RNA, 22 nt, Human
aguauuuggccucuacagucuc

SEQ ID NO: 875666 - RNA, 22 nt, Human
ugcagaagcugcaggucagugg

SEQ ID NO: 875667 - RNA, 22 nt, Human
cucacagguuaguuguguggau

SEQ ID NO: 875668 - RNA, 22 nt, Human
aaagccagcaaggugaguuuca

SEQ ID NO: 875669 - RNA, 19 nt, Human
cugcucuccuugacuugga

SEQ ID NO: 875670 - RNA, 22 nt, Human
ugguggcuguugcagaacugag

SEQ ID NO: 875671 - RNA, 22 nt, Human
cagguaaaaauaaauuugugag

SEQ ID NO: 875672 - RNA, 22 nt, Human
guuccaggacccuggccucuga

SEQ ID NO: 875673 - RNA, 22 nt, Human
gauugaaaggaaaaccagagug

SEQ ID NO: 875674 - RNA, 22 nt, Human
aaaaucuaaguagcgaguaagg

SEQ ID NO: 875675 - RNA, 20 nt, Human
aauuuacucacagaaugaau

SEQ ID NO: 875676 - RNA, 22 nt, Human
cagcaggauuugaaaggaagag

SEQ ID NO: 875677 - RNA, 22 nt, Human
guccuaaauauagugauucaug

SEQ ID NO: 875678 - RNA, 22 nt, Human
cagaaauguuuguuaauauugu

SEQ ID NO: 875679 - RNA, 22 nt, Human
cagaacauucacucauaugugg

SEQ ID NO: 875680 - RNA, 22 nt, Human
gagucaggcuagggugacaggc

SEQ ID NO: 875681 - RNA, 22 nt, Human
cugugugcauaguugugcucaa

SEQ ID NO: 875682 - RNA, 22 nt, Human
augcuguggggagugaggguag

SEQ ID NO: 875683 - RNA, 22 nt, Human
gccugcagccucaagggcugag

SEQ ID NO: 875684 - RNA, 22 nt, Human
uagcaaaauguggauguaguug

SEQ ID NO: 875685 - RNA, 22 nt, Human
ucagaggagaaguugggaaaau

SEQ ID NO: 875686 - RNA, 22 nt, Human
augcaauguuccuuucuucacc

SEQ ID NO: 875687 - RNA, 22 nt, Human
acagcagaguggagaugagcac

SEQ ID NO: 875688 - RNA, 22 nt, Human
ucccuguacacuaacuugagac

SEQ ID NO: 875689 - RNA, 22 nt, Human
uauuauguaaagguuauugcag

SEQ ID NO: 875690 - RNA, 22 nt, Human
ucacagugacagccaauguuuu

SEQ ID NO: 875691 - RNA, 21 nt, Human
aggugggcagguggaguggcc

SEQ ID NO: 875692 - RNA, 22 nt, Human
cagugguggaaugaggaauugu

SEQ ID NO: 875693 - RNA, 19 nt, Human
ugcagccacgugagagacu

SEQ ID NO: 875694 - RNA, 22 nt, Human
ugcagggaaagggcacugggcu

SEQ ID NO: 875695 - RNA, 22 nt, Human
gugccuggaacuggguaggcug

SEQ ID NO: 875696 - RNA, 22 nt, Human
gugugcaggugucagugcagcu

SEQ ID NO: 875697 - RNA, 22 nt, Human
gagaggcuccaugaccccggca

SEQ ID NO: 875698 - RNA, 22 nt, Human
agcuucaucuuuauguacagga

SEQ ID NO: 875699 - RNA, 22 nt, Human
caagccagcuccugccacagag

SEQ ID NO: 875700 - RNA, 22 nt, Human
aggucagcugcugauaggcagc

SEQ ID NO: 875701 - RNA, 22 nt, Human
gucaugagaaaucuuugaaggu

SEQ ID NO: 875702 - RNA, 22 nt, Human
ucacaaggauaagccacauaua

SEQ ID NO: 875703 - RNA, 20 nt, Human
cucuuugcaaugcagaagac

SEQ ID NO: 875704 - RNA, 22 nt, Human
cuguguuuuuggucugaucuau

SEQ ID NO: 875705 - RNA, 22 nt, Human
gagagcugggggacuguggaug

SEQ ID NO: 875706 - RNA, 22 nt, Human
guuccacaucacacuacuugau

SEQ ID NO: 875707 - RNA, 22 nt, Human
gcagagauccuugcuggaugac

SEQ ID NO: 875708 - RNA, 22 nt, Human
ucaguguuaaucagugguaccu

SEQ ID NO: 875709 - RNA, 22 nt, Human
aguaacacaagagguccuugcg

SEQ ID NO: 875710 - RNA, 22 nt, Human
ggacacaggcagcugggugggu

SEQ ID NO: 875711 - RNA, 22 nt, Human
cucuugaacuuucuaguuucau

SEQ ID NO: 875712 - RNA, 22 nt, Human
ggccagcagaccucagggacuc

SEQ ID NO: 875713 - RNA, 22 nt, Human
ugaaaaacacuaauuggaaagc

SEQ ID NO: 875714 - RNA, 20 nt, Human
guggccuguccuguuguggg

SEQ ID NO: 875715 - RNA, 22 nt, Human
ccugggcccucaccgccggugg

SEQ ID NO: 875716 - RNA, 19 nt, Human
cuccucagucccagagguc

SEQ ID NO: 875717 - RNA, 22 nt, Human
ccagcugcagguguuccagaug

SEQ ID NO: 875718 - RNA, 22 nt, Human
ccagaaaguucagcugugaaug

SEQ ID NO: 875719 - RNA, 21 nt, Human
guuuaugaaucuuguccugcu

SEQ ID NO: 875720 - RNA, 22 nt, Human
gcaguguguuucugagauaugg

SEQ ID NO: 875721 - RNA, 22 nt, Human
uucucugagauagacuaagugg

SEQ ID NO: 875722 - RNA, 19 nt, Human
ugugccuccucgucuccua

SEQ ID NO: 875723 - RNA, 22 nt, Human
ccuggcugcaguuuuugcagaa

SEQ ID NO: 875724 - RNA, 22 nt, Human
aaguucuaugaaucuacuccaa

SEQ ID NO: 875725 - RNA, 22 nt, Human
ucaacaagagcccaugcuuuuu

SEQ ID NO: 875726 - RNA, 22 nt, Human
uguugggaucgaaugguggaac

SEQ ID NO: 875727 - RNA, 22 nt, Human
augaagcauuacaggaugacag

SEQ ID NO: 875728 - RNA, 22 nt, Human
gagcugcagagcucgaaggaac

SEQ ID NO: 875729 - RNA, 22 nt, Human
cuuguccuuuacuugagacuca

SEQ ID NO: 875730 - RNA, 20 nt, Human
aacagggggcugcagagggc

SEQ ID NO: 875731 - RNA, 23 nt, Human
aacuuaauacugggauaagaugc

SEQ ID NO: 875732 - RNA, 22 nt, Human
uagagcugcuggacuguaacag

SEQ ID NO: 875733 - RNA, 20 nt, Human
aggaaggagaaucugagcaa

SEQ ID NO: 875734 - RNA, 22 nt, Human
cagaaauggagcccaggaaucu

SEQ ID NO: 875735 - RNA, 22 nt, Human
uccaaauaucuuggugguuagg

SEQ ID NO: 875736 - RNA, 22 nt, Human
uggcagagacuccuccugggag

SEQ ID NO: 875737 - RNA, 22 nt, Human
ccacuggagaugucagacaggu

SEQ ID NO: 875738 - RNA, 22 nt, Human
gcaggucucaaucugagcaggc

SEQ ID NO: 875739 - RNA, 22 nt, Human
auaggacuuuguaucaggauga

SEQ ID NO: 875740 - RNA, 22 nt, Human
cagugagauaccacagagcaaa

SEQ ID NO: 875741 - RNA, 22 nt, Human
gcucagcugagcgaaggacaug

SEQ ID NO: 875742 - RNA, 22 nt, Human
ugucuuuacuuaauaaauauac

SEQ ID NO: 875743 - RNA, 22 nt, Human
agaaccuucagcuugcaacaag

SEQ ID NO: 875744 - RNA, 22 nt, Human
agcagagccugggcuaggggug

SEQ ID NO: 875745 - RNA, 22 nt, Human
uuugcacagccuuucuggcugc

SEQ ID NO: 875746 - RNA, 22 nt, Human
ccugucacgaugacugcacucu

SEQ ID NO: 875747 - RNA, 22 nt, Human
uucacaucuauaacuuagauaa

SEQ ID NO: 875748 - RNA, 22 nt, Human
ccugcccacugcccggucagcc

SEQ ID NO: 875749 - RNA, 22 nt, Human
gcugucugcaucucuagagcuu

SEQ ID NO: 875750 - RNA, 22 nt, Human
uaucuaaauggaauauuccaga

SEQ ID NO: 875751 - RNA, 22 nt, Human
uuuaggauauuaauguucagag

SEQ ID NO: 875752 - RNA, 22 nt, Human
ugucagugguagacccagaggu

SEQ ID NO: 875753 - RNA, 22 nt, Human
gcugucuggauaucuuggaauu

SEQ ID NO: 875754 - RNA, 22 nt, Human
ccacucugcugugcuccaugau

SEQ ID NO: 875755 - RNA, 22 nt, Human
ccuggagggcgccgcacagucc

SEQ ID NO: 875756 - RNA, 22 nt, Human
agggccugacacccuugccagc

SEQ ID NO: 875757 - RNA, 22 nt, Human
aaagugaggacuugaguacugu

SEQ ID NO: 875758 - RNA, 18 nt, Human
ucagaggagauaccuaaa

SEQ ID NO: 875759 - RNA, 22 nt, Human
cugucucugucuuaacucccag

SEQ ID NO: 875760 - RNA, 22 nt, Human
auucuaucucuauauuucugca

SEQ ID NO: 875761 - RNA, 22 nt, Human
gucuuucauggauauucaguuu

SEQ ID NO: 875762 - RNA, 22 nt, Human
ugaaguuucacgcgucauucaa

SEQ ID NO: 875763 - RNA, 22 nt, Human
uauguagauuucucuguuuuuc

SEQ ID NO: 875764 - RNA, 22 nt, Human
uuccucagcuggccugauuggg

SEQ ID NO: 875765 - RNA, 22 nt, Human
aguacaaugucugacacaguag

SEQ ID NO: 875766 - RNA, 22 nt, Human
cuggucccauccuggcuucaug

SEQ ID NO: 875767 - RNA, 22 nt, Human
ugggccagagaguaagaaaggu

SEQ ID NO: 875768 - RNA, 22 nt, Human
agggcagcacagcugugcuccu

SEQ ID NO: 875769 - RNA, 22 nt, Human
uuacaguagcuuuauuuggagu

SEQ ID NO: 875770 - RNA, 22 nt, Human
cucaggagaugacagaagguau

SEQ ID NO: 875771 - RNA, 22 nt, Human
ucuccucugugccacagcuugg

SEQ ID NO: 875772 - RNA, 19 nt, Human
guggcagcagauuuggugu

SEQ ID NO: 875773 - RNA, 23 nt, Human
ggguuuccuucuggcuccuccuu

SEQ ID NO: 875774 - RNA, 22 nt, Human
gggagccacaguuuauagugau

SEQ ID NO: 875775 - RNA, 20 nt, Human
auuccauaguuggcacuuuu

SEQ ID NO: 875776 - RNA, 22 nt, Human
guaccagucucugugggcaccu

SEQ ID NO: 875777 - RNA, 22 nt, Human
auguuacaguugaguaaauuaa

SEQ ID NO: 875778 - RNA, 22 nt, Human
aacacagggacucccaggagaa

SEQ ID NO: 875779 - RNA, 22 nt, Human
aggcuuguggauuggagcgagu

SEQ ID NO: 875780 - RNA, 22 nt, Human
ucuggcagcaagauaacaaugg

SEQ ID NO: 875781 - RNA, 22 nt, Human
ucuggccccuggcaguccugga

SEQ ID NO: 875782 - RNA, 22 nt, Human
uguggcagaaagcauguggaca

SEQ ID NO: 875783 - RNA, 22 nt, Human
gaccuucuugcuguguccuaac

SEQ ID NO: 875784 - RNA, 22 nt, Human
uggacccuacccggcccucggc

SEQ ID NO: 875785 - RNA, 22 nt, Human
aggcagaagccagccagggucc

SEQ ID NO: 875786 - RNA, 22 nt, Human
ugcuuuuaagaacaaugcugcu

SEQ ID NO: 875787 - RNA, 22 nt, Human
uaguaaacaggcaagggaccac

SEQ ID NO: 875788 - RNA, 22 nt, Human
aaugaacagauacacauaggca

SEQ ID NO: 875789 - RNA, 22 nt, Human
auuguuaaaguaauaaccaugg

SEQ ID NO: 875790 - RNA, 22 nt, Human
guucccaugccuccaagcuuca

SEQ ID NO: 875791 - RNA, 22 nt, Human
ucuucagggucugccccagggg

SEQ ID NO: 875792 - RNA, 22 nt, Human
ucugaaauacugcagguucucu

SEQ ID NO: 875793 - RNA, 22 nt, Human
cuguggcuucugggucaguuca

SEQ ID NO: 875794 - RNA, 22 nt, Human
uuucaguuuuugcucgauguau

SEQ ID NO: 875795 - RNA, 22 nt, Human
cugcuucacccugccugagaac

SEQ ID NO: 875796 - RNA, 22 nt, Human
cagcugguacucaguucuuguc

SEQ ID NO: 875797 - RNA, 22 nt, Human
uuggugaguauggacacagaga

SEQ ID NO: 875798 - RNA, 22 nt, Human
agagacaggaguucuguuucca

SEQ ID NO: 875799 - RNA, 22 nt, Human
caugaaauguguuaaucucuug

SEQ ID NO: 875800 - RNA, 22 nt, Human
aaugucuucaguucuguauugu

SEQ ID NO: 875801 - RNA, 22 nt, Human
agcugaagaaaugggaagcauu

SEQ ID NO: 875802 - RNA, 21 nt, Human
ucucuacacuuucacuaggcu

SEQ ID NO: 875803 - RNA, 22 nt, Human
gcugucucucccaggauccaug

SEQ ID NO: 875804 - RNA, 22 nt, Human
ucuagaaucacuguuuccaucu

SEQ ID NO: 875805 - RNA, 22 nt, Human
acuuauuucauggaucauaaug

SEQ ID NO: 875806 - RNA, 22 nt, Human
gagcagcucaggcacuuagcca

SEQ ID NO: 875807 - RNA, 22 nt, Human
ucugugaagcucugaacagcag

SEQ ID NO: 875808 - RNA, 22 nt, Human
ugcuugugacagaacugugucc

SEQ ID NO: 875809 - RNA, 22 nt, Human
augcuacacuccgcgaaaaugu

SEQ ID NO: 875810 - RNA, 22 nt, Human
acagauggcaccuuuuugcugu

SEQ ID NO: 875811 - RNA, 22 nt, Human
cugcuucauauuucauagugau

SEQ ID NO: 875812 - RNA, 22 nt, Human
gagcacagcagggcucugggug

SEQ ID NO: 875813 - RNA, 22 nt, Human
agcuugcaguuucugcuguuuu

SEQ ID NO: 875814 - RNA, 22 nt, Human
cugcucuagguccauugcggga

SEQ ID NO: 875815 - RNA, 22 nt, Human
ucugaggcugucucugggcucc

SEQ ID NO: 875816 - RNA, 22 nt, Human
aagucacacaguuaacaugagg

SEQ ID NO: 875817 - RNA, 22 nt, Human
gggugccacagagcuuccacuu

SEQ ID NO: 875818 - RNA, 23 nt, Human
uuuguucaucauuagagucuagc

SEQ ID NO: 875819 - RNA, 22 nt, Human
uuggaacuggauuucauguagc

SEQ ID NO: 875820 - RNA, 22 nt, Human
caucucauccugcccuaaaaca

SEQ ID NO: 875821 - RNA, 22 nt, Human
cuggccuggggccucagcugcu

SEQ ID NO: 875822 - RNA, 22 nt, Human
uccaagaacccaagcgaaugcc

SEQ ID NO: 875823 - RNA, 22 nt, Human
ucuuuggaaggagcaguuuuug

SEQ ID NO: 875824 - RNA, 22 nt, Human
ucagugccuacuuugaucaauu

SEQ ID NO: 875825 - RNA, 22 nt, Human
caaagccauagaguagauaaga

SEQ ID NO: 875826 - RNA, 22 nt, Human
cucccuccaaauaagacucggg

SEQ ID NO: 875827 - RNA, 22 nt, Human
ggcugcuggggacgugggagag

SEQ ID NO: 875828 - RNA, 16 nt, Human
gggcugggggauucug

SEQ ID NO: 875829 - RNA, 22 nt, Human
guucccuucucaugggguccag

SEQ ID NO: 875830 - RNA, 22 nt, Human
uuguaaauaguaguaagaugcc

SEQ ID NO: 875831 - RNA, 22 nt, Human
uugucauauuuauaaaauguaa

SEQ ID NO: 875832 - RNA, 22 nt, Human
auauuuguuagagucuaugugu

SEQ ID NO: 875833 - RNA, 22 nt, Human
gucugugcuuauucagcagggg

SEQ ID NO: 875834 - RNA, 22 nt, Human
aacaaggcacaagcuggcuguu

SEQ ID NO: 875835 - RNA, 22 nt, Human
uaauacuugucauaaaggcauu

SEQ ID NO: 875836 - RNA, 22 nt, Human
gucagcugucuccccagagugg

SEQ ID NO: 875837 - RNA, 22 nt, Human
agucucuuacccaagcagaaug

SEQ ID NO: 875838 - RNA, 22 nt, Human
aguggcagaucucuggucugga

SEQ ID NO: 875839 - RNA, 18 nt, Human
uuuuccuuccaccuugaa

SEQ ID NO: 875840 - RNA, 23 nt, Human
uucuuucaagaaguucacagugc

SEQ ID NO: 875841 - RNA, 19 nt, Human
aaaggcaguggguggcgug

SEQ ID NO: 875842 - RNA, 18 nt, Human
caguggugcugggaugug

SEQ ID NO: 875843 - RNA, 22 nt, Human
uuccaagagccuuucuucuaga

SEQ ID NO: 875844 - RNA, 22 nt, Human
auucuguauuuggauauaaggg

SEQ ID NO: 875845 - RNA, 22 nt, Human
aauguuuuauagcucaagcaau

SEQ ID NO: 875846 - RNA, 22 nt, Human
acccaggacuuggcaaccucau

SEQ ID NO: 875847 - RNA, 22 nt, Human
ggccaggcacugugugagauau

SEQ ID NO: 875848 - RNA, 22 nt, Human
ccagggcacguugggacaguac

SEQ ID NO: 875849 - RNA, 22 nt, Human
caggaggcuuugggauccaagu

SEQ ID NO: 875850 - RNA, 22 nt, Human
aaacuuuuccugcucuuguccu

SEQ ID NO: 875851 - RNA, 22 nt, Human
uaaauuacccuuuagggaauug

SEQ ID NO: 875852 - RNA, 22 nt, Human
gcugucugacuccaaguuggag

SEQ ID NO: 875853 - RNA, 22 nt, Human
gacacaggauuccuggcucugc

SEQ ID NO: 875854 - RNA, 22 nt, Human
aaaucucaauuugaauuguagc

SEQ ID NO: 875855 - RNA, 22 nt, Human
gaaauguuuccuuuuguaugcu

SEQ ID NO: 875856 - RNA, 22 nt, Human
uggucaacaggcagggaugaaa

SEQ ID NO: 875857 - RNA, 22 nt, Human
agaaaauauucauugagaggcu

SEQ ID NO: 875858 - RNA, 22 nt, Human
uucaaguuuacuuugaaguuua

SEQ ID NO: 875859 - RNA, 19 nt, Human
caaguuaaaaugaggucau

SEQ ID NO: 875860 - RNA, 22 nt, Human
gggcacugcuuugcucugucac

SEQ ID NO: 875861 - RNA, 22 nt, Human
aaauuacuuuacacuuucaucu

SEQ ID NO: 875862 - RNA, 22 nt, Human
gcucugaggagccaagaaugug

SEQ ID NO: 875863 - RNA, 22 nt, Human
guucuucaccaaggucagaggc

SEQ ID NO: 875864 - RNA, 22 nt, Human
ggcauugucuauuugcauucau

SEQ ID NO: 875865 - RNA, 22 nt, Human
uccuggggccagcacuggugga

SEQ ID NO: 875866 - RNA, 21 nt, Human
agcugcccagaguagggaagg

SEQ ID NO: 875867 - RNA, 22 nt, Human
uccgaggcgcaccggcgcuccu

SEQ ID NO: 875868 - RNA, 22 nt, Human
uauguguaaccuugugauuuau

SEQ ID NO: 875869 - RNA, 22 nt, Human
uuucuucauugacaaggaaaaa

SEQ ID NO: 875870 - RNA, 20 nt, Human
agcaguguggggagacugug

SEQ ID NO: 875871 - RNA, 22 nt, Human
uuuaauuugaaaugaguaaccc

SEQ ID NO: 875872 - RNA, 22 nt, Human
auguaaacacucacugugcccc

SEQ ID NO: 875873 - RNA, 20 nt, Human
gcaggcagggaaugggggug

SEQ ID NO: 875874 - RNA, 22 nt, Human
agcaguguuggugggagcaucu

SEQ ID NO: 875875 - RNA, 22 nt, Human
uuuauuuggcauccagggagaa

SEQ ID NO: 875876 - RNA, 22 nt, Human
aaggacaggagaaaacgggauc

SEQ ID NO: 875877 - RNA, 23 nt, Human
agaguccacaagauuuuccagug

SEQ ID NO: 875878 - RNA, 22 nt, Human
agacagacuuugaucuggaugu

SEQ ID NO: 875879 - RNA, 22 nt, Human
guagagcaggacuugagauguu

SEQ ID NO: 875880 - RNA, 22 nt, Human
ugacaaaccaguagcaauaaag

SEQ ID NO: 875881 - RNA, 22 nt, Human
cccaggcuccugcuguguugac

SEQ ID NO: 875882 - RNA, 22 nt, Human
cagaggcaggaagaugggcagu

SEQ ID NO: 875883 - RNA, 22 nt, Human
agugggagcggcagucggggac

SEQ ID NO: 875884 - RNA, 22 nt, Human
ggagugggaacaaugacauggu

SEQ ID NO: 875885 - RNA, 17 nt, Human
acagcaggcccggaggg

SEQ ID NO: 875886 - RNA, 21 nt, Human
ugcagaaaugguuuuucuaag

SEQ ID NO: 875887 - RNA, 22 nt, Human
acugggcaaggauaugaugggu

SEQ ID NO: 875888 - RNA, 22 nt, Human
uugaaacucaucuuagugaugu

SEQ ID NO: 875889 - RNA, 22 nt, Human
auuguauuuccagcuugaaugu

SEQ ID NO: 875890 - RNA, 22 nt, Human
ucauauuuggggguguguguuu

SEQ ID NO: 875891 - RNA, 22 nt, Human
agcaucuucaacaggcauuuua

SEQ ID NO: 875892 - RNA, 22 nt, Human
gcucccaggaugaggagccagg

SEQ ID NO: 875893 - RNA, 21 nt, Human
auggaaaaacagguagagcau

SEQ ID NO: 875894 - RNA, 22 nt, Human
ucccacagaguggcucaccuag

SEQ ID NO: 875895 - RNA, 22 nt, Human
ggaaggaagugcagacuuuaaa

SEQ ID NO: 875896 - RNA, 22 nt, Human
uggccacacccaccuagaggag

SEQ ID NO: 875897 - RNA, 18 nt, Human
uggcagcaggaagccauu

SEQ ID NO: 875898 - RNA, 22 nt, Human
uuaguugaugcuaagggauccc

SEQ ID NO: 875899 - RNA, 22 nt, Human
auggccagucugacuaguuucc

SEQ ID NO: 875900 - RNA, 22 nt, Human
aaggcauugagcaguuacagua

SEQ ID NO: 875901 - RNA, 22 nt, Human
ggacuugcuaagguggcugaac

SEQ ID NO: 875902 - RNA, 22 nt, Human
aaggcauuggacuaguaucaga

SEQ ID NO: 875903 - RNA, 22 nt, Human
agggcugaguggugcagucaaa

SEQ ID NO: 875904 - RNA, 22 nt, Human
cugccagggaggcugggaaguu

SEQ ID NO: 875905 - RNA, 22 nt, Human
ucacacacauggauaguauuuu

SEQ ID NO: 875906 - RNA, 22 nt, Human
gcugucacucuccggccuuccc

SEQ ID NO: 875907 - RNA, 22 nt, Human
acaaguguugcauuuugccauu

SEQ ID NO: 875908 - RNA, 22 nt, Human
gcuggcucagggacuagaguuu

SEQ ID NO: 875909 - RNA, 22 nt, Human
acugcaucugaacugugaaugg

SEQ ID NO: 875910 - RNA, 22 nt, Human
gaacccaggaggcagagguugc

SEQ ID NO: 875911 - RNA, 22 nt, Human
gucugucaucugagauggagug

SEQ ID NO: 875912 - RNA, 22 nt, Human
gcagggcugcugaaacuuguuu

SEQ ID NO: 875913 - RNA, 22 nt, Human
uugcucuguccagccagcaggu

SEQ ID NO: 875914 - RNA, 22 nt, Human
uuuucugugauucugagguugg

SEQ ID NO: 875915 - RNA, 18 nt, Human
cccagcccaccauuucuc

SEQ ID NO: 875916 - RNA, 22 nt, Human
aacaaaagccgaaguagguguc

SEQ ID NO: 875917 - RNA, 22 nt, Human
uauuugcaaagaacuacacuag

SEQ ID NO: 875918 - RNA, 22 nt, Human
uuauuugguugcugacuuggaa

SEQ ID NO: 875919 - RNA, 22 nt, Human
ugggccuggguuccuccugggc

SEQ ID NO: 875920 - RNA, 22 nt, Human
gaagccacccuccuuccagccc

SEQ ID NO: 875921 - RNA, 22 nt, Human
gcucucugcaagucagcagccu

SEQ ID NO: 875922 - RNA, 22 nt, Human
cagugcuuuuaaaacaacauca

SEQ ID NO: 875923 - RNA, 21 nt, Human
gacuggagagaggaagucugg

SEQ ID NO: 875924 - RNA, 22 nt, Human
ucaucuaagagucuuacauuua

SEQ ID NO: 875925 - RNA, 22 nt, Human
aacugauuguuggaugauagug

SEQ ID NO: 875926 - RNA, 22 nt, Human
gucagugcuugaagggcagaga

SEQ ID NO: 875927 - RNA, 22 nt, Human
acauacacgggaaaccucuuuu

SEQ ID NO: 875928 - RNA, 22 nt, Human
uccacagacguguuauuaguug

SEQ ID NO: 875929 - RNA, 22 nt, Human
ucuguucuuggugcagcuggga

SEQ ID NO: 875930 - RNA, 22 nt, Human
cuuaggcauccaggguucuucc

SEQ ID NO: 875931 - RNA, 22 nt, Human
uuugauaauuaaaaauuguagu

SEQ ID NO: 875932 - RNA, 22 nt, Human
ugucaacaaaacgguucaaaug

SEQ ID NO: 875933 - RNA, 22 nt, Human
uccacagggccuuucuggugug

SEQ ID NO: 875934 - RNA, 22 nt, Human
cagcugccuucugcgggaaguc

SEQ ID NO: 875935 - RNA, 22 nt, Human
uauuuccaccuauuauuuucug

SEQ ID NO: 875936 - RNA, 22 nt, Human
cugcccugggugcuggggaucc

SEQ ID NO: 875937 - RNA, 22 nt, Human
caaguuauggcuucccaguagg

SEQ ID NO: 875938 - RNA, 22 nt, Human
caggcacuagcagaaugaggcu

SEQ ID NO: 875939 - RNA, 22 nt, Human
uguuucaaauuacuugaggauu

SEQ ID NO: 875940 - RNA, 22 nt, Human
gaaaauacaaauagccuugaaa

SEQ ID NO: 875941 - RNA, 22 nt, Human
acacacuguugcucauccaggc

SEQ ID NO: 875942 - RNA, 22 nt, Human
aaauagauuuccuagcauugga

SEQ ID NO: 875943 - RNA, 22 nt, Human
gccagagacacuuggagguaga

SEQ ID NO: 875944 - RNA, 22 nt, Human
ucagaauuagagcucuucuuga

SEQ ID NO: 875945 - RNA, 22 nt, Human
cuggcaggaaguuagaugguaa

SEQ ID NO: 875946 - RNA, 22 nt, Human
agcaguggcuggauggugugcu

SEQ ID NO: 875947 - RNA, 22 nt, Human
ugcagggcuuccucuuggaguu

SEQ ID NO: 875948 - RNA, 22 nt, Human
ugauuuuuagcuauucugaaga

SEQ ID NO: 875949 - RNA, 17 nt, Human
caguugaaauguuugga

SEQ ID NO: 875950 - RNA, 22 nt, Human
uuccaguuugcaguugacacua

SEQ ID NO: 875951 - RNA, 22 nt, Human
aguucagcaaauaaaacauagu

SEQ ID NO: 875952 - RNA, 22 nt, Human
uaguccuugcugggcacagagu

SEQ ID NO: 875953 - RNA, 22 nt, Human
gaguuaaaggaaaauaacuuua

SEQ ID NO: 875954 - RNA, 22 nt, Human
accaguaagauccuguacauac

SEQ ID NO: 875955 - RNA, 21 nt, Human
auacugaaccucauaagccca

SEQ ID NO: 875956 - RNA, 22 nt, Human
gugcaugucggggugcauguca

SEQ ID NO: 875957 - RNA, 22 nt, Human
gaaagcuaaaugaggucuuaca

SEQ ID NO: 875958 - RNA, 22 nt, Human
gggcaccagcggccgcacugcc

SEQ ID NO: 875959 - RNA, 22 nt, Human
ccugcacaggccaggcaucuga

SEQ ID NO: 875960 - RNA, 22 nt, Human
uuuucauuguaaaucaggaaac

SEQ ID NO: 875961 - RNA, 22 nt, Human
acuuucaaaagagaagucauga

SEQ ID NO: 875962 - RNA, 22 nt, Human
gacuuugccacugaccuccaac

SEQ ID NO: 875963 - RNA, 22 nt, Human
ucugagaaaguacuguauguuc

SEQ ID NO: 875964 - RNA, 22 nt, Human
cugguccauucucucccugaag

SEQ ID NO: 875965 - RNA, 22 nt, Human
gcagcauuuguggaaugggccc

SEQ ID NO: 875966 - RNA, 22 nt, Human
aauguuuaauguuagugguaau

SEQ ID NO: 875967 - RNA, 22 nt, Human
aggauugugccuccagucagaa

SEQ ID NO: 875968 - RNA, 22 nt, Human
gcagaggccugaagguggcggg

SEQ ID NO: 875969 - RNA, 22 nt, Human
uuucuagguuuacaauacugca

SEQ ID NO: 875970 - RNA, 22 nt, Human
ugggagaguaaccaauuccuuc

SEQ ID NO: 875971 - RNA, 19 nt, Human
ucagggcaguccggucccc

SEQ ID NO: 875972 - RNA, 22 nt, Human
uagggcuggguacacucuugcc

SEQ ID NO: 875973 - RNA, 17 nt, Human
aaagagcuuggaguguu

SEQ ID NO: 875974 - RNA, 21 nt, Human
gggcaggucucugaugucaac

SEQ ID NO: 875975 - RNA, 22 nt, Human
auggcaguuucacucugggauu

SEQ ID NO: 875976 - RNA, 22 nt, Human
aggaaaggugagagcggccgcg

SEQ ID NO: 875977 - RNA, 22 nt, Human
ugaaagcugggcacaagauucu

SEQ ID NO: 875978 - RNA, 22 nt, Human
uggaaauuuaucaagauauaca

SEQ ID NO: 875979 - RNA, 23 nt, Human
auggaagucacuguuuucuuguc

SEQ ID NO: 875980 - RNA, 22 nt, Human
ucagggcagccuaaggcaccuc

SEQ ID NO: 875981 - RNA, 20 nt, Human
caccaggcgcucugagaaca

SEQ ID NO: 875982 - RNA, 19 nt, Human
auacaguaagguguuugcc

SEQ ID NO: 875983 - RNA, 22 nt, Human
ccagcagaggggcggagugcag

SEQ ID NO: 875984 - RNA, 22 nt, Human
ccuggccagccagggcuggggu

SEQ ID NO: 875985 - RNA, 21 nt, Human
ugcuggugagcucauguggcu

SEQ ID NO: 875986 - RNA, 22 nt, Human
cauguccauuuaugcacagaaa

SEQ ID NO: 875987 - RNA, 22 nt, Human
agucaggaaccucagcaagucu

SEQ ID NO: 875988 - RNA, 22 nt, Human
ccagagcugauuccugggacuu

SEQ ID NO: 875989 - RNA, 22 nt, Human
aggcuggagacccgccaagaaa

SEQ ID NO: 875990 - RNA, 22 nt, Human
cagguccuggcaucaggcaggu

SEQ ID NO: 875991 - RNA, 22 nt, Human
gaauagauccucauuuauugau

SEQ ID NO: 875992 - RNA, 22 nt, Human
cagaggccuauccaguguccau

SEQ ID NO: 875993 - RNA, 22 nt, Human
gguccccguggaggcuggagcg

SEQ ID NO: 875994 - RNA, 22 nt, Human
cucaggagguuuccugucuagg

SEQ ID NO: 875995 - RNA, 22 nt, Human
cacaauuguaucagaaaauagu

SEQ ID NO: 875996 - RNA, 22 nt, Human
auucacaaugauacauaagcga

SEQ ID NO: 875997 - RNA, 22 nt, Human
aucaagaauguucauucuucua

SEQ ID NO: 875998 - RNA, 22 nt, Human
cugcccuguuuggacagcccgg

SEQ ID NO: 875999 - RNA, 22 nt, Human
auuguggacugaucagggcuag

SEQ ID NO: 876000 - RNA, 22 nt, Human
auuuccuauccuggucuuaaaa

SEQ ID NO: 876001 - RNA, 22 nt, Human
auaaucugagcuauuucaugag

SEQ ID NO: 876002 - RNA, 21 nt, Human
gcugggcuccagucugccgcu

SEQ ID NO: 876003 - RNA, 22 nt, Human
ugcagaagacacaagguaacgu

SEQ ID NO: 876004 - RNA, 22 nt, Human
agcucugguuuagaaggggaaa

SEQ ID NO: 876005 - RNA, 22 nt, Human
ucuggaaagaucauuaaaucca

SEQ ID NO: 876006 - RNA, 22 nt, Human
cugcaggauuucaugggcugac

SEQ ID NO: 876007 - RNA, 22 nt, Human
gcaggaugggagcuucacucug

SEQ ID NO: 876008 - RNA, 22 nt, Human
aaaguuacacgacuauuuaugu

SEQ ID NO: 876009 - RNA, 22 nt, Human
aagacauuggacaauccagagg

SEQ ID NO: 876010 - RNA, 22 nt, Human
aagcagcaugcuaugcuggugg

SEQ ID NO: 876011 - RNA, 22 nt, Human
ucccugggaacaaaggaugaga

SEQ ID NO: 876012 - RNA, 22 nt, Human
acaucacacgccuuccaggagg

SEQ ID NO: 876013 - RNA, 22 nt, Human
cugugcuugcggguguggagcc

SEQ ID NO: 876014 - RNA, 18 nt, Human
gucuguguggcuugggga

SEQ ID NO: 876015 - RNA, 23 nt, Human
acagacaacacugaugagagaaa

SEQ ID NO: 876016 - RNA, 22 nt, Human
cacaauuucaguugcaugcaac

SEQ ID NO: 876017 - RNA, 22 nt, Human
cacuuugugugggaucaggggu

SEQ ID NO: 876018 - RNA, 22 nt, Human
ugcauuuuugauaacuguguac

SEQ ID NO: 876019 - RNA, 22 nt, Human
aggcucccaugguguggcagga

SEQ ID NO: 876020 - RNA, 22 nt, Human
agagcaagugacagaaacaggg

SEQ ID NO: 876021 - RNA, 22 nt, Human
acaaugauuuuuuagaguaguu

SEQ ID NO: 876022 - RNA, 22 nt, Human
ucauaaauaguugugccugaau

SEQ ID NO: 876023 - RNA, 22 nt, Human
auaguuuugcugucagguccua

SEQ ID NO: 876024 - RNA, 22 nt, Human
ggcuuuugaauuccaaggcauu

SEQ ID NO: 876025 - RNA, 22 nt, Human
acgauugaagaauagucuuaac

SEQ ID NO: 876026 - RNA, 22 nt, Human
uuguccauggacagcaccacag

SEQ ID NO: 876027 - RNA, 22 nt, Human
ugcaugucaaggcacucaggau

SEQ ID NO: 876028 - RNA, 22 nt, Human
ucagaaauguaagcugaugacu

SEQ ID NO: 876029 - RNA, 22 nt, Human
uucccauuugugguagugaauu

SEQ ID NO: 876030 - RNA, 22 nt, Human
ugccaggcgugguggugcgcac

SEQ ID NO: 876031 - RNA, 23 nt, Human
acauucuugauucaggccuuagc

SEQ ID NO: 876032 - RNA, 22 nt, Human
cagagggucaccaggaagugca

SEQ ID NO: 876033 - RNA, 22 nt, Human
aucugaauaaauuucuuuuagu

SEQ ID NO: 876034 - RNA, 22 nt, Human
aagcagaauuuaauagaaaggu

SEQ ID NO: 876035 - RNA, 22 nt, Human
agccucaguuucaggccuccuc

SEQ ID NO: 876036 - RNA, 22 nt, Human
uuaaggaauuacgaaaauauuu

SEQ ID NO: 876037 - RNA, 22 nt, Human
ugcugacacuauucuaaaaagc

SEQ ID NO: 876038 - RNA, 22 nt, Human
gggcugagcacauacugacagc

SEQ ID NO: 876039 - RNA, 22 nt, Human
uguuuauugagugccuacuaua

SEQ ID NO: 876040 - RNA, 22 nt, Human
uuguccauuuuauuggauggug

SEQ ID NO: 876041 - RNA, 22 nt, Human
cacugcccaccaaguggcuggu

SEQ ID NO: 876042 - RNA, 22 nt, Human
ggaagaaaagcuuccagcgccu

SEQ ID NO: 876043 - RNA, 21 nt, Human
agauaguugggcaugcagcug

SEQ ID NO: 876044 - RNA, 22 nt, Human
agaacugauuugaagguugggg

SEQ ID NO: 876045 - RNA, 22 nt, Human
cugugccacugccccaggccuc

SEQ ID NO: 876046 - RNA, 22 nt, Human
uucaacagugauggccuuugua

SEQ ID NO: 876047 - RNA, 22 nt, Human
ugggucagacagccagugggcc

SEQ ID NO: 876048 - RNA, 21 nt, Human
ggguaaggaaaaugauucuuc

SEQ ID NO: 876049 - RNA, 22 nt, Human
uccauuuuagaagaaaauccac

SEQ ID NO: 876050 - RNA, 22 nt, Human
ugugggaggaacacagccagaa

SEQ ID NO: 876051 - RNA, 22 nt, Human
guuucuuaaaagaggaguuaga

SEQ ID NO: 876052 - RNA, 22 nt, Human
guggcagagccaggcuuugaac

SEQ ID NO: 876053 - RNA, 22 nt, Human
gacagacacuauugguaugccu

SEQ ID NO: 876054 - RNA, 22 nt, Human
agccaggcugcaguuggcuggc

SEQ ID NO: 876055 - RNA, 22 nt, Human
cuagaacuacaucuuuuaauag

SEQ ID NO: 876056 - RNA, 21 nt, Human
aucagaaguuuuggucaguag

SEQ ID NO: 876057 - RNA, 22 nt, Human
cugaggcuggcguuugaggaag

SEQ ID NO: 876058 - RNA, 22 nt, Human
cacaggaaaauaaaagaucuaa

SEQ ID NO: 876059 - RNA, 22 nt, Human
acugcauugagguuucauacuu

SEQ ID NO: 876060 - RNA, 20 nt, Human
acaguuuauuuuacuugguu

SEQ ID NO: 876061 - RNA, 22 nt, Human
gaggagcaagaaauagugccca

SEQ ID NO: 876062 - RNA, 22 nt, Human
uuugagcuaugggcuuggauuu

SEQ ID NO: 876063 - RNA, 21 nt, Human
ucaaagcacauauuugcacau

SEQ ID NO: 876064 - RNA, 18 nt, Human
cagagugggccaagagac

SEQ ID NO: 876065 - RNA, 22 nt, Human
cuguuauauugguauauuuaca

SEQ ID NO: 876066 - RNA, 22 nt, Human
uuuuaugagaaugcgccacuug

SEQ ID NO: 876067 - RNA, 22 nt, Human
ccaggaaguaugacccaacaga

SEQ ID NO: 876068 - RNA, 22 nt, Human
cugcagcugucucuacugggca

SEQ ID NO: 876069 - RNA, 22 nt, Human
acacuugccaugcugcacacug

SEQ ID NO: 876070 - RNA, 22 nt, Human
uaacacauagauauuuuaacuu

SEQ ID NO: 876071 - RNA, 22 nt, Human
cacagcugucagcugaccuagg

SEQ ID NO: 876072 - RNA, 22 nt, Human
uuaugauuuagaaagauucacu

SEQ ID NO: 876073 - RNA, 22 nt, Human
aagauuucugcuuuuggaggca

SEQ ID NO: 876074 - RNA, 22 nt, Human
uugaagaaagucauauauaaug

SEQ ID NO: 876075 - RNA, 22 nt, Human
uuauuuggaaauauggcuucug

SEQ ID NO: 876076 - RNA, 22 nt, Human
ggccaugggaagagguggagag

SEQ ID NO: 876077 - RNA, 22 nt, Human
auuuucuagauagaugaugcau

SEQ ID NO: 876078 - RNA, 22 nt, Human
ugucuucaaauauugaaauccu

SEQ ID NO: 876079 - RNA, 22 nt, Human
auguuugcuauuguucuagugg

SEQ ID NO: 876080 - RNA, 22 nt, Human
guccaggcuaagucccuucugc

SEQ ID NO: 876081 - RNA, 17 nt, Human
ccuguguuugcuccuuc

SEQ ID NO: 876082 - RNA, 22 nt, Human
ugagaugguugaccagagagca

SEQ ID NO: 876083 - RNA, 22 nt, Human
uacugcauguguuugaugaugg

SEQ ID NO: 876084 - RNA, 17 nt, Human
uuacacaggagagcucu

SEQ ID NO: 876085 - RNA, 22 nt, Human
ugaaaauuaagcagaugaauga

SEQ ID NO: 876086 - RNA, 22 nt, Human
gcagcuggcccugacacgcaga

SEQ ID NO: 876087 - RNA, 22 nt, Human
gugcuugggggaaguaacagac

SEQ ID NO: 876088 - RNA, 22 nt, Human
gaugauuguuggcucucuugau

SEQ ID NO: 876089 - RNA, 22 nt, Human
cuggaugauaacagcaauauuu

SEQ ID NO: 876090 - RNA, 22 nt, Human
auggaaggcuuuaugacucaaa

SEQ ID NO: 876091 - RNA, 22 nt, Human
aggcccauaguagcucugggca

SEQ ID NO: 876092 - RNA, 22 nt, Human
uugacagagcuaggucaacucu

SEQ ID NO: 876093 - RNA, 22 nt, Human
ucuggagaagcccagggagcug

SEQ ID NO: 876094 - RNA, 22 nt, Human
gagaggaagccaggggguguug

SEQ ID NO: 876095 - RNA, 22 nt, Human
guggcagaggcucugggaccag

SEQ ID NO: 876096 - RNA, 22 nt, Human
cauuuguaucauauguaucuua

SEQ ID NO: 876097 - RNA, 22 nt, Human
uugguaaauacuauaaucaaau

SEQ ID NO: 876098 - RNA, 22 nt, Human
gagggggagaugugcacacacu

SEQ ID NO: 876099 - RNA, 21 nt, Human
ucucugacccaggaagagggc

SEQ ID NO: 876100 - RNA, 22 nt, Human
gcagggccagguacaagaagca

SEQ ID NO: 876101 - RNA, 22 nt, Human
agaaccauuuugacagauauac

SEQ ID NO: 876102 - RNA, 22 nt, Human
aucucuguuagaucugcuuaaa

SEQ ID NO: 876103 - RNA, 22 nt, Human
guacaggcagcaaacaccauaa

SEQ ID NO: 876104 - RNA, 22 nt, Human
ugggaccugaagcagguuggca

SEQ ID NO: 876105 - RNA, 22 nt, Human
aaucuucuacuugacaguucuc

SEQ ID NO: 876106 - RNA, 22 nt, Human
gcuaagaggcuauaucuuucuc

SEQ ID NO: 876107 - RNA, 22 nt, Human
ggcacagcugaugcagacacac

SEQ ID NO: 876108 - RNA, 22 nt, Human
aguggcuugcucugccucagcc

SEQ ID NO: 876109 - RNA, 22 nt, Human
uccucauucuuggugcaucaaa

SEQ ID NO: 876110 - RNA, 22 nt, Human
uuuguucuaacuucugcagaca

SEQ ID NO: 876111 - RNA, 22 nt, Human
uuugagaagaguuugagguauu

SEQ ID NO: 876112 - RNA, 22 nt, Human
uagcauuaaagguaagacauua

SEQ ID NO: 876113 - RNA, 22 nt, Human
aaggacaaguaguauuugcauc

SEQ ID NO: 876114 - RNA, 22 nt, Human
uuuguacauauauaaaaucugu

SEQ ID NO: 876115 - RNA, 22 nt, Human
uguaaaguaucugugagcucuc

SEQ ID NO: 876116 - RNA, 22 nt, Human
aaacaugaucacuccggcuuuu

SEQ ID NO: 876117 - RNA, 22 nt, Human
gggccaugagagguucaucaac

SEQ ID NO: 876118 - RNA, 22 nt, Human
uucaacaggaaagcacuuuaca

SEQ ID NO: 876119 - RNA, 22 nt, Human
uuccagcaggcagacaggagau

SEQ ID NO: 876120 - RNA, 22 nt, Human
aggcccugcugaggccucccuc

SEQ ID NO: 876121 - RNA, 22 nt, Human
aggcagacaaggacacaguggg

SEQ ID NO: 876122 - RNA, 22 nt, Human
ucuccaggugagggugguuaga

SEQ ID NO: 876123 - RNA, 22 nt, Human
gccuccaggguagaggaggaag

SEQ ID NO: 876124 - RNA, 20 nt, Human
uacauucaaaacaaacucug

SEQ ID NO: 876125 - RNA, 22 nt, Human
auaguacagagggcuacugguu

SEQ ID NO: 876126 - RNA, 22 nt, Human
ucugcacaucccccaaaguauu

SEQ ID NO: 876127 - RNA, 22 nt, Human
ugcugaaggcaggggagguggc

SEQ ID NO: 876128 - RNA, 22 nt, Human
auggcaguuguaugggcuguau

SEQ ID NO: 876129 - RNA, 22 nt, Human
acuggggccuccuccaugcucu

SEQ ID NO: 876130 - RNA, 23 nt, Human
aucuagaaaccugaugacucugu

SEQ ID NO: 876131 - RNA, 22 nt, Human
ucuguugacuccuagcagccau

SEQ ID NO: 876132 - RNA, 22 nt, Human
ucugcaggagcagggcguggag

SEQ ID NO: 876133 - RNA, 22 nt, Human
gccuaacuuggcuuuguucacc

SEQ ID NO: 876134 - RNA, 19 nt, Human
cuucuugauaagguucuuu

SEQ ID NO: 876135 - RNA, 22 nt, Human
aacacauauuuauauaugcaca

SEQ ID NO: 876136 - RNA, 22 nt, Human
ugcuuaaaaugaugauuauuuu

SEQ ID NO: 876137 - RNA, 22 nt, Human
accaggaguaacagugaguggu

SEQ ID NO: 876138 - RNA, 22 nt, Human
ugaggaaacuuacaaggcagaa

SEQ ID NO: 876139 - RNA, 22 nt, Human
cuguucauguugaggcauaggg

SEQ ID NO: 876140 - RNA, 20 nt, Human
uccagcaguaugcuauacuu

SEQ ID NO: 876141 - RNA, 22 nt, Human
ugcugccauggucgcugguguc

SEQ ID NO: 876142 - RNA, 17 nt, Human
agaaugcaaagcaggcu

SEQ ID NO: 876143 - RNA, 22 nt, Human
ugccucugcugcuguggcauca

SEQ ID NO: 876144 - RNA, 22 nt, Human
guuuauucuucagcaacaucug

SEQ ID NO: 876145 - RNA, 20 nt, Human
uguguauaaauauauguuuc

SEQ ID NO: 876146 - RNA, 22 nt, Human
ggugcaggacgaaguggggguu

SEQ ID NO: 876147 - RNA, 22 nt, Human
ucacugaaaguaauucuaguga

SEQ ID NO: 876148 - RNA, 22 nt, Human
uuaacaaaaauaucaggcauca

SEQ ID NO: 876149 - RNA, 22 nt, Human
cuccaguggugauggggaagaa

SEQ ID NO: 876150 - RNA, 23 nt, Human
acaccugugcuguagucacuaca

SEQ ID NO: 876151 - RNA, 22 nt, Human
aaaguucugagacugauggcua

SEQ ID NO: 876152 - RNA, 22 nt, Human
aaugcauuccacugagauuugu

SEQ ID NO: 876153 - RNA, 22 nt, Human
cggggcugaggcaacgcggaga

SEQ ID NO: 876154 - RNA, 22 nt, Human
ucuggagaaggaagagucuuug

SEQ ID NO: 876155 - RNA, 18 nt, Human
uggggucucucagguaag

SEQ ID NO: 876156 - RNA, 22 nt, Human
agccagggacgcugcaggcuac

SEQ ID NO: 876157 - RNA, 22 nt, Human
uuuccucugaugcugacuugga

SEQ ID NO: 876158 - RNA, 22 nt, Human
acagcaaaagacaagaacuuaa

SEQ ID NO: 876159 - RNA, 22 nt, Human
aaggcuggaccuggaugaaucu

SEQ ID NO: 876160 - RNA, 22 nt, Human
acagauuugacugguaccuggc

SEQ ID NO: 876161 - RNA, 21 nt, Human
cuggacugaggagacagucgc

SEQ ID NO: 876162 - RNA, 22 nt, Human
agaaaucaggaacaguaaggag

SEQ ID NO: 876163 - RNA, 22 nt, Human
gacacaggaaucaccuuggaug

SEQ ID NO: 876164 - RNA, 22 nt, Human
ccagugugaaaggucauuuauc

SEQ ID NO: 876165 - RNA, 23 nt, Human
aaacugcaucucugagccucagc

SEQ ID NO: 876166 - RNA, 17 nt, Human
ccugcccagagacagau

SEQ ID NO: 876167 - RNA, 22 nt, Human
ucucaguuucucauuauaaaag

SEQ ID NO: 876168 - RNA, 22 nt, Human
gggcuccaguuguccccaggau

SEQ ID NO: 876169 - RNA, 22 nt, Human
gugcagggagcccagaaggucc

SEQ ID NO: 876170 - RNA, 22 nt, Human
gucccaggaguugcugggccuu

SEQ ID NO: 876171 - RNA, 22 nt, Human
acagugcuuagcacagaguaga

SEQ ID NO: 876172 - RNA, 22 nt, Human
aacaucucuguauuuuauagac

SEQ ID NO: 876173 - RNA, 22 nt, Human
gcauucuuuccacgaggaggua

SEQ ID NO: 876174 - RNA, 19 nt, Human
ucucuaaccucaagagguu

SEQ ID NO: 876175 - RNA, 22 nt, Human
gcuggcugagcacugguuuaua

SEQ ID NO: 876176 - RNA, 22 nt, Human
uggagaaggccggccaggagug

SEQ ID NO: 876177 - RNA, 22 nt, Human
aaguccaucucugccccacaca

SEQ ID NO: 876178 - RNA, 22 nt, Human
aauauaauuuuauuccuagagu

SEQ ID NO: 876179 - RNA, 22 nt, Human
ccggcgggcagcggcagugagc

SEQ ID NO: 876180 - RNA, 22 nt, Human
uuucaucuaacacuacauaggg

SEQ ID NO: 876181 - RNA, 22 nt, Human
uguuuccccaaccccacaagua

SEQ ID NO: 876182 - RNA, 22 nt, Human
cuggaauguaugggaacccaaa

SEQ ID NO: 876183 - RNA, 19 nt, Human
uucuuuggugguggugacc

SEQ ID NO: 876184 - RNA, 22 nt, Human
ccaguuugaggaagaaguagau

SEQ ID NO: 876185 - RNA, 22 nt, Human
cugccuccucacguccacagug

SEQ ID NO: 876186 - RNA, 22 nt, Human
cugugcacacgugcccaacagu

SEQ ID NO: 876187 - RNA, 22 nt, Human
auuuaugauuagccuauuguug

SEQ ID NO: 876188 - RNA, 22 nt, Human
agcugccacugagggugcacag

SEQ ID NO: 876189 - RNA, 22 nt, Human
ccacacuccccgcaggcguagg

SEQ ID NO: 876190 - RNA, 22 nt, Human
cugugcacuaaccacacccacg

SEQ ID NO: 876191 - RNA, 22 nt, Human
gugucccaauguucaggacggc

SEQ ID NO: 876192 - RNA, 22 nt, Human
gagauuuaauuggauuaacuua

SEQ ID NO: 876193 - RNA, 22 nt, Human
cugaggagaaaugggaugguuc

SEQ ID NO: 876194 - RNA, 22 nt, Human
agcuguauuugugaauauuuaa

SEQ ID NO: 876195 - RNA, 22 nt, Human
aagcugaggauacaugaagccu

SEQ ID NO: 876196 - RNA, 22 nt, Human
uaggaacuagacucaugacuca

SEQ ID NO: 876197 - RNA, 22 nt, Human
uugggcaggcuggcagacugcu

SEQ ID NO: 876198 - RNA, 19 nt, Human
gagaggccugugcuugaag

SEQ ID NO: 876199 - RNA, 22 nt, Human
agggcagaaguacagacacuua

SEQ ID NO: 876200 - RNA, 22 nt, Human
auuuccuauacaguuguccaua

SEQ ID NO: 876201 - RNA, 22 nt, Human
gcuggcugguccagcaggggcu

SEQ ID NO: 876202 - RNA, 23 nt, Human
gugcagcagugucugcagucaug

SEQ ID NO: 876203 - RNA, 22 nt, Human
uacagcugcuggugcuccaugc

SEQ ID NO: 876204 - RNA, 22 nt, Human
ccugagcuugauccuucugucu

SEQ ID NO: 876205 - RNA, 22 nt, Human
uuugagaaggugacaaauucua

SEQ ID NO: 876206 - RNA, 22 nt, Human
gcaggucuagaagcugccucug

SEQ ID NO: 876207 - RNA, 22 nt, Human
agcugugggccugggagagcug

SEQ ID NO: 876208 - RNA, 22 nt, Human
gaggcuucuguaacccuguccu

SEQ ID NO: 876209 - RNA, 19 nt, Human
aaaugcuguggagggcucc

SEQ ID NO: 876210 - RNA, 22 nt, Human
aaaauuauagaucuagugccug

SEQ ID NO: 876211 - RNA, 22 nt, Human
ugggcagauuaaugcaguggcu

SEQ ID NO: 876212 - RNA, 22 nt, Human
uuuugugacagaaagauuaagu

SEQ ID NO: 876213 - RNA, 22 nt, Human
ccgggagcaggcgccaccgcca

SEQ ID NO: 876214 - RNA, 22 nt, Human
cuuuuuuaagguagcuccuccu

SEQ ID NO: 876215 - RNA, 18 nt, Human
ggcaggauuucaacuuuc

SEQ ID NO: 876216 - RNA, 22 nt, Human
acagcauuuaaagaaaaugaac

SEQ ID NO: 876217 - RNA, 22 nt, Human
ucuaggaguaaugagcuagcac

SEQ ID NO: 876218 - RNA, 22 nt, Human
cugcagggagaggggacagccu

SEQ ID NO: 876219 - RNA, 22 nt, Human
gggaacacagacuugaugauga

SEQ ID NO: 876220 - RNA, 20 nt, Human
ugucuggauguuuaagcaga

SEQ ID NO: 876221 - RNA, 22 nt, Human
ugucucugugcauuugugcuuc

SEQ ID NO: 876222 - RNA, 22 nt, Human
acuuuaaaaagagccuucuaac

SEQ ID NO: 876223 - RNA, 22 nt, Human
uacaaagcaaaucaucuaagag

SEQ ID NO: 876224 - RNA, 22 nt, Human
uccugcagagucccacugauuu

SEQ ID NO: 876225 - RNA, 22 nt, Human
uagaauuuucugcuuugauagu

SEQ ID NO: 876226 - RNA, 22 nt, Human
agcacccucagccuuauccaga

SEQ ID NO: 876227 - RNA, 22 nt, Human
acacuucuuugucaccugcuuc

SEQ ID NO: 876228 - RNA, 22 nt, Human
ucugcaggucacgcuccagccu

SEQ ID NO: 876229 - RNA, 22 nt, Human
ucaaacagaggaacaauuguuu

SEQ ID NO: 876230 - RNA, 22 nt, Human
aaggcaauguaaauuacagcuu

SEQ ID NO: 876231 - RNA, 22 nt, Human
gccagcugggccuuagggcugg

SEQ ID NO: 876232 - RNA, 22 nt, Human
acucccuccaaaucugcacagu

SEQ ID NO: 876233 - RNA, 23 nt, Human
ucucagaaaggagaaguaauuug

SEQ ID NO: 876234 - RNA, 22 nt, Human
aucuauucucuacaguagacag

SEQ ID NO: 876235 - RNA, 22 nt, Human
caaguguccaugauagucuuag

SEQ ID NO: 876236 - RNA, 22 nt, Human
gaggggaguguccuccgggccc

SEQ ID NO: 876237 - RNA, 22 nt, Human
aggaccugacauuguguuuucu

SEQ ID NO: 876238 - RNA, 22 nt, Human
aauaugacauagaauugagaug

SEQ ID NO: 876239 - RNA, 22 nt, Human
gacagaugugggugacagcagc

SEQ ID NO: 876240 - RNA, 22 nt, Human
uaacaaacuggaaauugacauu

SEQ ID NO: 876241 - RNA, 19 nt, Human
gcgaggaagucacuguggu

SEQ ID NO: 876242 - RNA, 22 nt, Human
uggcuucaggagcaccuggcuu

SEQ ID NO: 876243 - RNA, 22 nt, Human
ucagggaaaagucacacugggu

SEQ ID NO: 876244 - RNA, 22 nt, Human
uuggucugcucugauguuuucu

SEQ ID NO: 876245 - RNA, 22 nt, Human
caguagacacauuaauauggaa

SEQ ID NO: 876246 - RNA, 22 nt, Human
ggccaaauuuauuugcagcugg

SEQ ID NO: 876247 - RNA, 22 nt, Human
gcucacagagggugcuuaauac

SEQ ID NO: 876248 - RNA, 22 nt, Human
uauuuauucauucagcaagcau

SEQ ID NO: 876249 - RNA, 22 nt, Human
cacauugcagacguauauuauu

SEQ ID NO: 876250 - RNA, 22 nt, Human
uccucaguggggcauucauuau

SEQ ID NO: 876251 - RNA, 22 nt, Human
cucuggcuuaguaugcuccaaa

SEQ ID NO: 876252 - RNA, 22 nt, Human
agggcucaauggugggcaugua

SEQ ID NO: 876253 - RNA, 22 nt, Human
guguccagagaaacucacagcu

SEQ ID NO: 876254 - RNA, 18 nt, Human
cacaggagaugaccugac

SEQ ID NO: 876255 - RNA, 21 nt, Human
ugucauauuucaauacaguuu

SEQ ID NO: 876256 - RNA, 22 nt, Human
uucaagaucgaguuuaaaguga

SEQ ID NO: 876257 - RNA, 22 nt, Human
aagaauaucuguuuuauuuagg

SEQ ID NO: 876258 - RNA, 22 nt, Human
uagaaccuccagaguggccccc

SEQ ID NO: 876259 - RNA, 22 nt, Human
gacaucauggagaggauaaaua

SEQ ID NO: 876260 - RNA, 19 nt, Human
ucucugccgaucagggccc

SEQ ID NO: 876261 - RNA, 22 nt, Human
uagcagcaauucaggugugaug

SEQ ID NO: 876262 - RNA, 22 nt, Human
gagagcauguggucuaguuuua

SEQ ID NO: 876263 - RNA, 22 nt, Human
auauugcaguguguuuauguga

SEQ ID NO: 876264 - RNA, 22 nt, Human
uaauacagauacaaaggaggac

SEQ ID NO: 876265 - RNA, 22 nt, Human
gugcuccauggccuguguccau

SEQ ID NO: 876266 - RNA, 22 nt, Human
aagcagaugcagcuaauaaagc

SEQ ID NO: 876267 - RNA, 22 nt, Human
ccaggaggucugaguguggaca

SEQ ID NO: 876268 - RNA, 22 nt, Human
ggaagcuggggagcuuuggaga

SEQ ID NO: 876269 - RNA, 22 nt, Human
ugucuuauggcauguccacugg

SEQ ID NO: 876270 - RNA, 22 nt, Human
cugcagcagccuccagccuugg

SEQ ID NO: 876271 - RNA, 22 nt, Human
uguaggaauuccagugacuuca

SEQ ID NO: 876272 - RNA, 22 nt, Human
cagauuuaggucacuagaauuu

SEQ ID NO: 876273 - RNA, 20 nt, Human
ugacaacaugccuuuugcuu

SEQ ID NO: 876274 - RNA, 22 nt, Human
uggagcuggaauuugagcugga

SEQ ID NO: 876275 - RNA, 22 nt, Human
cccauuuuagcaagggguggcg

SEQ ID NO: 876276 - RNA, 22 nt, Human
agcaaauaauugucuuugaggg

SEQ ID NO: 876277 - RNA, 23 nt, Human
gaguggggagaaauugguuaaac

SEQ ID NO: 876278 - RNA, 19 nt, Human
acuguguggaagugugauu

SEQ ID NO: 876279 - RNA, 22 nt, Human
cagagacauguggccugcacgu

SEQ ID NO: 876280 - RNA, 23 nt, Human
aguguugguugggaagccaagca

SEQ ID NO: 876281 - RNA, 22 nt, Human
gcccaccuaaccugcucaccuu

SEQ ID NO: 876282 - RNA, 22 nt, Human
gccaggaagcaguuagaugggu

SEQ ID NO: 876283 - RNA, 22 nt, Human
ucuggcaguaauaggggagaga

SEQ ID NO: 876284 - RNA, 22 nt, Human
agcacagguacggagaugcuac

SEQ ID NO: 876285 - RNA, 22 nt, Human
aucugcuguucuucacagcuug

SEQ ID NO: 876286 - RNA, 22 nt, Human
uacaucaagauaaaaacuguca

SEQ ID NO: 876287 - RNA, 22 nt, Human
uuguggcugugcaccgcugccu

SEQ ID NO: 876288 - RNA, 23 nt, Human
ugccuuaguuagcacauuucuaa

SEQ ID NO: 876289 - RNA, 22 nt, Human
agcagcagauucagcaggaaug

SEQ ID NO: 876290 - RNA, 22 nt, Human
gagcaggucuuucauggugcau

SEQ ID NO: 876291 - RNA, 22 nt, Human
aagcuggcaugucaccugagaa

SEQ ID NO: 876292 - RNA, 22 nt, Human
cauuucaagcauugacuucuau

SEQ ID NO: 876293 - RNA, 22 nt, Human
gcuggccucuacaggccggcca

SEQ ID NO: 876294 - RNA, 22 nt, Human
auaaagcaugcuuguuuggaga

SEQ ID NO: 876295 - RNA, 22 nt, Human
uuacuaggccaguuuucacuuu

SEQ ID NO: 876296 - RNA, 22 nt, Human
uggcaauuucagaaaauagaau

SEQ ID NO: 876297 - RNA, 22 nt, Human
ucuaacauuuauggccacugga

SEQ ID NO: 876298 - RNA, 22 nt, Human
agauacagaaguuuuucccuau

SEQ ID NO: 876299 - RNA, 22 nt, Human
uccugggcgguuaugugaucug

SEQ ID NO: 876300 - RNA, 20 nt, Human
uggcuucucuucacuccugu

SEQ ID NO: 876301 - RNA, 22 nt, Human
uuaccacacuuauuuacauugg

SEQ ID NO: 876302 - RNA, 22 nt, Human
uuuucagaggccuaagagguuu

SEQ ID NO: 876303 - RNA, 23 nt, Human
acaaggcucuguucugcaguuuc

SEQ ID NO: 876304 - RNA, 22 nt, Human
auucuaggacuugagagcuaag

SEQ ID NO: 876305 - RNA, 22 nt, Human
agacccugguaaacacuccagg

SEQ ID NO: 876306 - RNA, 22 nt, Human
ggcaccagggacaauccucuuc

SEQ ID NO: 876307 - RNA, 22 nt, Human
uaaaagcugagauauccuguac

SEQ ID NO: 876308 - RNA, 22 nt, Human
uaaauuauguuccauguccuuu

SEQ ID NO: 876309 - RNA, 22 nt, Human
acacauuccugcagacaugaug

SEQ ID NO: 876310 - RNA, 22 nt, Human
caggacaaccucagguugcugc

SEQ ID NO: 876311 - RNA, 22 nt, Human
gucuagagccugaugaggauga

SEQ ID NO: 876312 - RNA, 22 nt, Human
aaagugcaaucaguuagaccau

SEQ ID NO: 876313 - RNA, 22 nt, Human
aaguucuuucuggaaggucugc

SEQ ID NO: 876314 - RNA, 22 nt, Human
auacuucuggugacaaagucuu

SEQ ID NO: 876315 - RNA, 22 nt, Human
agacaauacauuuauucccuuu

SEQ ID NO: 876316 - RNA, 22 nt, Human
uauucacaggcacgaaauauug

SEQ ID NO: 876317 - RNA, 22 nt, Human
uccucacauggugagccacaca

SEQ ID NO: 876318 - RNA, 22 nt, Human
accugcagguguuuccacacuu

SEQ ID NO: 876319 - RNA, 19 nt, Human
uauaggaagugugguuaag

SEQ ID NO: 876320 - RNA, 22 nt, Human
cccuccagugucccagugggga

SEQ ID NO: 876321 - RNA, 22 nt, Human
uuucauagcugaaaauguugaa

SEQ ID NO: 876322 - RNA, 22 nt, Human
ucucugagcugcuucuugcaua

SEQ ID NO: 876323 - RNA, 22 nt, Human
cugccgugagcuuucgcgagcc

SEQ ID NO: 876324 - RNA, 21 nt, Human
uggcucugagccucauggcug

SEQ ID NO: 876325 - RNA, 22 nt, Human
uaaggcaugaguuuauuucaua

SEQ ID NO: 876326 - RNA, 22 nt, Human
ggcugagccaugggcacugcag

SEQ ID NO: 876327 - RNA, 17 nt, Human
ggcaggugcggggccgc

SEQ ID NO: 876328 - RNA, 22 nt, Human
auguauuaugguuuuccuuaag

SEQ ID NO: 876329 - RNA, 22 nt, Human
uggcagagaacacggcugaucu

SEQ ID NO: 876330 - RNA, 22 nt, Human
uguauucucucaauauuucaua

SEQ ID NO: 876331 - RNA, 22 nt, Human
gacugaggcuccccuaggcuca

SEQ ID NO: 876332 - RNA, 22 nt, Human
acucaaguggccuugauggcuu

SEQ ID NO: 876333 - RNA, 22 nt, Human
aguucucuuggaaguuauguga

SEQ ID NO: 876334 - RNA, 22 nt, Human
gcugucuccauagcuguguguc

SEQ ID NO: 876335 - RNA, 22 nt, Human
cucacauaguaagcagucagua

SEQ ID NO: 876336 - RNA, 22 nt, Human
uguggacuaguguuuggauuuu

SEQ ID NO: 876337 - RNA, 22 nt, Human
gcagcagcucucaaaguggucu

SEQ ID NO: 876338 - RNA, 22 nt, Human
cuucucagucuugguuagagag

SEQ ID NO: 876339 - RNA, 22 nt, Human
cagaaggagcgcuaagguccca

SEQ ID NO: 876340 - RNA, 22 nt, Human
cuuggucaugcaagauaucgau

SEQ ID NO: 876341 - RNA, 22 nt, Human
ugggacugugaccuccagggua

SEQ ID NO: 876342 - RNA, 22 nt, Human
aaggcuuccuggaggagguguc

SEQ ID NO: 876343 - RNA, 22 nt, Human
uaaguguuguuuucaagagaua

SEQ ID NO: 876344 - RNA, 22 nt, Human
gaggcagccucaguggaccucg

SEQ ID NO: 876345 - RNA, 22 nt, Human
aauaaauguuaagauugucuca

SEQ ID NO: 876346 - RNA, 22 nt, Human
accugggaaaaggaguggccau

SEQ ID NO: 876347 - RNA, 22 nt, Human
aagaaucucugaucaggcuuua

SEQ ID NO: 876348 - RNA, 22 nt, Human
ccuuccuuugcaggucagguca

SEQ ID NO: 876349 - RNA, 19 nt, Human
cccacaggaggacauaugg

SEQ ID NO: 876350 - RNA, 20 nt, Human
auguccagugacuggaccau

SEQ ID NO: 876351 - RNA, 22 nt, Human
auccaacaggacaaagaaagga

SEQ ID NO: 876352 - RNA, 22 nt, Human
cuaggcagauggagaaguggcu

SEQ ID NO: 876353 - RNA, 22 nt, Human
ugggcugcuucucaaaugucuc

SEQ ID NO: 876354 - RNA, 22 nt, Human
gaggcucuuucuuuggacuuca

SEQ ID NO: 876355 - RNA, 22 nt, Human
agauggggcucaguguggaggc

SEQ ID NO: 876356 - RNA, 19 nt, Human
acugaaguuacccaaaugg

SEQ ID NO: 876357 - RNA, 22 nt, Human
ccagggcugguggcugcagagg

SEQ ID NO: 876358 - RNA, 22 nt, Human
acuuaaaguuauaauuugcuaa

SEQ ID NO: 876359 - RNA, 22 nt, Human
acugcaucgcucgcuuaggucc

SEQ ID NO: 876360 - RNA, 22 nt, Human
uuauuguuuggguauaauuuga

SEQ ID NO: 876361 - RNA, 22 nt, Human
aggacuuguuuaaaguuugugc

SEQ ID NO: 876362 - RNA, 22 nt, Human
uuacuuaaacagaaaugcagaa

SEQ ID NO: 876363 - RNA, 22 nt, Human
gaaggagaggauugugaggcug

SEQ ID NO: 876364 - RNA, 22 nt, Human
aaagcccauguggaaguacagg

SEQ ID NO: 876365 - RNA, 22 nt, Human
gcaggggcaggagaucucaggc

SEQ ID NO: 876366 - RNA, 22 nt, Human
uucucuucaucucaguaaaugu

SEQ ID NO: 876367 - RNA, 22 nt, Human
caaaccuuguaaaugccaaacu

SEQ ID NO: 876368 - RNA, 22 nt, Human
uggcaggcucugaguagcaccu

SEQ ID NO: 876369 - RNA, 22 nt, Human
agccaaggucgccccagggcaa

SEQ ID NO: 876370 - RNA, 22 nt, Human
gucuccaguguucaggugacug

SEQ ID NO: 876371 - RNA, 22 nt, Human
agcugcucauuacuuucuguug

SEQ ID NO: 876372 - RNA, 19 nt, Human
guucaaacacugauucagc

SEQ ID NO: 876373 - RNA, 22 nt, Human
aagugcugagacuacaggcaug

SEQ ID NO: 876374 - RNA, 22 nt, Human
agcuaaaucacuuauucuuuca

SEQ ID NO: 876375 - RNA, 22 nt, Human
caaguauuuccugauggccugu

SEQ ID NO: 876376 - RNA, 22 nt, Human
uaucuguuuccuaugcauguga

SEQ ID NO: 876377 - RNA, 17 nt, Human
ucugaugacuagaggaa

SEQ ID NO: 876378 - RNA, 22 nt, Human
uggcugaguguuccaaggagca

SEQ ID NO: 876379 - RNA, 22 nt, Human
uagcagggaagaugaucagaau

SEQ ID NO: 876380 - RNA, 22 nt, Human
uugaagacaagggcagggguuc

SEQ ID NO: 876381 - RNA, 22 nt, Human
uucuuaagugagaaagcaggag

SEQ ID NO: 876382 - RNA, 22 nt, Human
uggcuuggacuaaauggaccgu

SEQ ID NO: 876383 - RNA, 22 nt, Human
uucucacaaauccauccaggag

SEQ ID NO: 876384 - RNA, 22 nt, Human
aaagacuuuagguuagaggcau

SEQ ID NO: 876385 - RNA, 22 nt, Human
auccacaggucauguaaugugg

SEQ ID NO: 876386 - RNA, 19 nt, Human
aggcugcccagucucugcc

SEQ ID NO: 876387 - RNA, 22 nt, Human
uccugagcuacaguaguaugau

SEQ ID NO: 876388 - RNA, 22 nt, Human
guguguggggccuucggguccu

SEQ ID NO: 876389 - RNA, 19 nt, Human
gcaggccaggaggcggagg

SEQ ID NO: 876390 - RNA, 22 nt, Human
ugaaccuuuugaauaaggacca

SEQ ID NO: 876391 - RNA, 22 nt, Human
gucugccucuuucuuucugggu

SEQ ID NO: 876392 - RNA, 22 nt, Human
ccagcugguaagugauggagcc

SEQ ID NO: 876393 - RNA, 19 nt, Human
ggcacuggggccaggacca

SEQ ID NO: 876394 - RNA, 22 nt, Human
aaaugcacaauaaaguaaaggc

SEQ ID NO: 876395 - RNA, 22 nt, Human
auuuggaugcacuaaauaaaau

SEQ ID NO: 876396 - RNA, 21 nt, Human
cuugagaauuaacuguucauu

SEQ ID NO: 876397 - RNA, 22 nt, Human
cccaggaaauagccaggaggug

SEQ ID NO: 876398 - RNA, 22 nt, Human
cagugaaguuuaaaguguagau

SEQ ID NO: 876399 - RNA, 22 nt, Human
ucuuuacacaagacaagaauaa

SEQ ID NO: 876400 - RNA, 22 nt, Human
uguggcauuccaagacgcuuaa

SEQ ID NO: 876401 - RNA, 22 nt, Human
guccagaguagucgaguauucu

SEQ ID NO: 876402 - RNA, 22 nt, Human
auuauaaaccuuugaggguggg

SEQ ID NO: 876403 - RNA, 22 nt, Human
uugacaaagauauauucaugcu

SEQ ID NO: 876404 - RNA, 22 nt, Human
ugcauauuuuauaaagauggaa

SEQ ID NO: 876405 - RNA, 22 nt, Human
augaaugauuuuauguaaauga

SEQ ID NO: 876406 - RNA, 22 nt, Human
uauuugcaggacauagauaugg

SEQ ID NO: 876407 - RNA, 22 nt, Human
gcagcccuaaccugucauagug

SEQ ID NO: 876408 - RNA, 22 nt, Human
gcaggagucagcccuaccuuga

SEQ ID NO: 876409 - RNA, 22 nt, Human
ucacagugcaccccucacaggg

SEQ ID NO: 876410 - RNA, 21 nt, Human
aauuuagucaacagacugugg

SEQ ID NO: 876411 - RNA, 22 nt, Human
uccugggacucugccucaggcu

SEQ ID NO: 876412 - RNA, 22 nt, Human
cuugggaguagaggcaggagca

SEQ ID NO: 876413 - RNA, 22 nt, Human
uaauuuugucccccugcacaua

SEQ ID NO: 876414 - RNA, 22 nt, Human
aacuaaaagugugucucuugua

SEQ ID NO: 876415 - RNA, 18 nt, Human
cccagaggaaugccugga

SEQ ID NO: 876416 - RNA, 22 nt, Human
gggaagagaggaggugguuucg

SEQ ID NO: 876417 - RNA, 15 nt, Human
gauacacaugacugg

SEQ ID NO: 876418 - RNA, 22 nt, Human
agaggacagacggaaagugcca

SEQ ID NO: 876419 - RNA, 22 nt, Human
uauccauuauguuggcuagucu

SEQ ID NO: 876420 - RNA, 22 nt, Human
uccugggugugauauucauaga

SEQ ID NO: 876421 - RNA, 22 nt, Human
caggcugaggcaguaggguuug

SEQ ID NO: 876422 - RNA, 22 nt, Human
aaagaugucauacacauuaaga

SEQ ID NO: 876423 - RNA, 22 nt, Human
uuuuagauugggaaauguaaag

SEQ ID NO: 876424 - RNA, 20 nt, Human
accccacagaguccauugca

SEQ ID NO: 876425 - RNA, 22 nt, Human
uacaguggggagcucaggagag

SEQ ID NO: 876426 - RNA, 22 nt, Human
ugagauucagggaugcagagca

SEQ ID NO: 876427 - RNA, 22 nt, Human
cagacugaaaaucccugguagu

SEQ ID NO: 876428 - RNA, 22 nt, Human
gaggcagcauucgcauagacag

SEQ ID NO: 876429 - RNA, 22 nt, Human
gaauaacauuuuuuccuuuaca

SEQ ID NO: 876430 - RNA, 22 nt, Human
cuggggcucacuccagcccugg

SEQ ID NO: 876431 - RNA, 22 nt, Human
caggcaugaugggaagugccug

SEQ ID NO: 876432 - RNA, 22 nt, Human
ucucuuggacauguggcucugc

SEQ ID NO: 876433 - RNA, 22 nt, Human
aaaugcaguuuccugagaccca

SEQ ID NO: 876434 - RNA, 22 nt, Human
aaucacaugaaaacuguguguu

SEQ ID NO: 876435 - RNA, 22 nt, Human
guagaaauuccauuuacuuuga

SEQ ID NO: 876436 - RNA, 22 nt, Human
uggggcuccuccuggcaggagg

SEQ ID NO: 876437 - RNA, 22 nt, Human
uacauguucaaauuugucuuuc

SEQ ID NO: 876438 - RNA, 22 nt, Human
ccugcauccgaaagugaucaua

SEQ ID NO: 876439 - RNA, 22 nt, Human
uagcccagagagccaggggcuu

SEQ ID NO: 876440 - RNA, 21 nt, Human
ccucugcucgggcaugcguuu

SEQ ID NO: 876441 - RNA, 19 nt, Human
uuugaauauaaugcagcua

SEQ ID NO: 876442 - RNA, 22 nt, Human
acugccagaaucauucaaggaa

SEQ ID NO: 876443 - RNA, 22 nt, Human
acaagacugugcucuaagagug

SEQ ID NO: 876444 - RNA, 22 nt, Human
ucacagagaacuauaauccauc

SEQ ID NO: 876445 - RNA, 20 nt, Human
ccaaugcaguaucucguucc

SEQ ID NO: 876446 - RNA, 22 nt, Human
uuguacuugccauagaacaaca

SEQ ID NO: 876447 - RNA, 22 nt, Human
uggcuucauggcaagucuuagu

SEQ ID NO: 876448 - RNA, 22 nt, Human
agaauaagccugacgaaaccua

SEQ ID NO: 876449 - RNA, 22 nt, Human
gaaaucugaacaacagcuguca

SEQ ID NO: 876450 - RNA, 22 nt, Human
ccucccacauccuagcucugcu

SEQ ID NO: 876451 - RNA, 22 nt, Human
cagggcaguuuuacuucucucu

SEQ ID NO: 876452 - RNA, 22 nt, Human
uguggcagaacugggacucaaa

SEQ ID NO: 876453 - RNA, 22 nt, Human
gagcaugguuccauagguuggu

SEQ ID NO: 876454 - RNA, 22 nt, Human
aagcagaugccaagauuuacca

SEQ ID NO: 876455 - RNA, 22 nt, Human
aaauugucucuauuuugauucg

SEQ ID NO: 876456 - RNA, 22 nt, Human
aauuaaaagauaacccaugagu

SEQ ID NO: 876457 - RNA, 20 nt, Human
uccagggcccuggcuccucu

SEQ ID NO: 876458 - RNA, 22 nt, Human
ugcccaggcuucacccucagag

SEQ ID NO: 876459 - RNA, 22 nt, Human
gaggaagaauugguuauuggag

SEQ ID NO: 876460 - RNA, 22 nt, Human
cuguugucuucauugucauauc

SEQ ID NO: 876461 - RNA, 22 nt, Human
ugagagaaacguuccuuacauc

SEQ ID NO: 876462 - RNA, 22 nt, Human
acccagugacauccuuuaccug

SEQ ID NO: 876463 - RNA, 20 nt, Human
agcugcaacagacuguaugg

SEQ ID NO: 876464 - RNA, 22 nt, Human
uuacaagauaacggagaaagca

SEQ ID NO: 876465 - RNA, 19 nt, Human
acaaagcugugagcagcuu

SEQ ID NO: 876466 - RNA, 22 nt, Human
guucucguuucugaagaaaagu

SEQ ID NO: 876467 - RNA, 22 nt, Human
gggcuggcaucgguugcugaga

SEQ ID NO: 876468 - RNA, 22 nt, Human
ccagagcagauguggccuuggu

SEQ ID NO: 876469 - RNA, 22 nt, Human
gggcccugggauucagagcaag

SEQ ID NO: 876470 - RNA, 22 nt, Human
uuagaaaaauguucaguaguuu

SEQ ID NO: 876471 - RNA, 19 nt, Human
gguguccuagagauaagag

SEQ ID NO: 876472 - RNA, 22 nt, Human
gcucucaugcccucugggcuug

SEQ ID NO: 876473 - RNA, 22 nt, Human
uggcaaggcugugggggcagag

SEQ ID NO: 876474 - RNA, 22 nt, Human
agugauuuacuaccauauuggg

SEQ ID NO: 876475 - RNA, 22 nt, Human
uggguggcacuucuggggucca

SEQ ID NO: 876476 - RNA, 22 nt, Human
uacagagauuuauugcuaaggc

SEQ ID NO: 876477 - RNA, 22 nt, Human
aagcugcaugaaguugaguaga

SEQ ID NO: 876478 - RNA, 22 nt, Human
uguuccugaggcaugugucaau

SEQ ID NO: 876479 - RNA, 22 nt, Human
uggaaagggacuuaugaguucc

SEQ ID NO: 876480 - RNA, 22 nt, Human
cagagacccuaggcaggugaca

SEQ ID NO: 876481 - RNA, 22 nt, Human
cugagcugggcucucuugaggg

SEQ ID NO: 876482 - RNA, 22 nt, Human
cccaggagaugcacuccauugg

SEQ ID NO: 876483 - RNA, 22 nt, Human
uggcuggaggguuagugagaua

SEQ ID NO: 876484 - RNA, 22 nt, Human
cacugacuaaguuugugaaggu

SEQ ID NO: 876485 - RNA, 22 nt, Human
guggcucuugcauggggucucu

SEQ ID NO: 876486 - RNA, 22 nt, Human
ugggagcacccugaggagcuuc

SEQ ID NO: 876487 - RNA, 22 nt, Human
gaagauuugcccaugcacuuuu

SEQ ID NO: 876488 - RNA, 22 nt, Human
gagggcugcugccagauaugcc

SEQ ID NO: 876489 - RNA, 22 nt, Human
uauaggcagaucugagaauauu

SEQ ID NO: 876490 - RNA, 22 nt, Human
aucacagagauugcuuuuaaaa

SEQ ID NO: 876491 - RNA, 22 nt, Human
uguaaacaaaugcauucuugcu

SEQ ID NO: 876492 - RNA, 22 nt, Human
guccaggaaucaaaagauggaa

SEQ ID NO: 876493 - RNA, 22 nt, Human
gccaaggcugaggcccugggcu

SEQ ID NO: 876494 - RNA, 22 nt, Human
acagugagcgguagugauugcu

SEQ ID NO: 876495 - RNA, 22 nt, Human
ugcaggaagcaaccagguccaa

SEQ ID NO: 876496 - RNA, 22 nt, Human
gcaugcagacagucugagacca

SEQ ID NO: 876497 - RNA, 19 nt, Human
acuagauacaacaugcaga

SEQ ID NO: 876498 - RNA, 21 nt, Human
uccagggcuuugauucucuca

SEQ ID NO: 876499 - RNA, 21 nt, Human
gaacauuuggguuguuucuac

SEQ ID NO: 876500 - RNA, 22 nt, Human
gugccucucauuggcugagccc

SEQ ID NO: 876501 - RNA, 17 nt, Human
ucacaguuggucucagu

SEQ ID NO: 876502 - RNA, 22 nt, Human
aagcugcagaugugccugugga

SEQ ID NO: 876503 - RNA, 22 nt, Human
cccuggugcccugggucagccu

SEQ ID NO: 876504 - RNA, 22 nt, Human
auuacauauguuggcaacauuu

SEQ ID NO: 876505 - RNA, 22 nt, Human
gaaaauuauugaaaauggcucu

SEQ ID NO: 876506 - RNA, 22 nt, Human
ucagagguucuucucaguggcc

SEQ ID NO: 876507 - RNA, 22 nt, Human
cugacucagcagcugaugaucc

SEQ ID NO: 876508 - RNA, 22 nt, Human
caguuuaaaugagugacugcag

SEQ ID NO: 876509 - RNA, 22 nt, Human
ucaggcaccccuugaguagggg

SEQ ID NO: 876510 - RNA, 22 nt, Human
ggaccaggcaagcugaggcggg

SEQ ID NO: 876511 - RNA, 19 nt, Human
uuguacagcaaccaacccu

SEQ ID NO: 876512 - RNA, 18 nt, Human
ucagggaagagaauauga

SEQ ID NO: 876513 - RNA, 22 nt, Human
cuccaggagggcuuccugugau

SEQ ID NO: 876514 - RNA, 22 nt, Human
uuugaaauuggcucauugguuu

SEQ ID NO: 876515 - RNA, 22 nt, Human
ccugaggcuuaaucugucccaa

SEQ ID NO: 876516 - RNA, 22 nt, Human
aguaaauuucugcauguguacu

SEQ ID NO: 876517 - RNA, 22 nt, Human
agaaaugaagagagucaagguu

SEQ ID NO: 876518 - RNA, 22 nt, Human
ggcuuagcaacuccugaggcuc

SEQ ID NO: 876519 - RNA, 23 nt, Human
uauuacaauuggucuuauuaaga

SEQ ID NO: 876520 - RNA, 22 nt, Human
aguucucuggcuccuuuccaga

SEQ ID NO: 876521 - RNA, 20 nt, Human
cugcacugaacaugucugag

SEQ ID NO: 876522 - RNA, 22 nt, Human
cuugcugggguaagucugugcu

SEQ ID NO: 876523 - RNA, 22 nt, Human
caaauaguaugagcaaugauuc

SEQ ID NO: 876524 - RNA, 22 nt, Human
auucaacuagugauuguguuau

SEQ ID NO: 876525 - RNA, 22 nt, Human
agccuggcccugcugaacucug

SEQ ID NO: 876526 - RNA, 22 nt, Human
gcuccaggaagggaaaucucca

SEQ ID NO: 876527 - RNA, 22 nt, Human
gccaaauaugguggacaguuug

SEQ ID NO: 876528 - RNA, 22 nt, Human
cacuggcaucuaagggugguag

SEQ ID NO: 876529 - RNA, 22 nt, Human
aucuuugaugacuaaugcuuug

SEQ ID NO: 876530 - RNA, 22 nt, Human
gugcugaaauggaccucaggaa

SEQ ID NO: 876531 - RNA, 22 nt, Human
gaaugcagauggcugguguaug

SEQ ID NO: 876532 - RNA, 22 nt, Human
uacuuuuuagcacagugugugc

SEQ ID NO: 876533 - RNA, 22 nt, Human
gcuucuguggauuggcuggcuu

SEQ ID NO: 876534 - RNA, 22 nt, Human
cuuuguuuuacucagaggcaug

SEQ ID NO: 876535 - RNA, 22 nt, Human
ccacagugacacgggcuggccc

SEQ ID NO: 876536 - RNA, 22 nt, Human
gcugaagggagugcugagucug

SEQ ID NO: 876537 - RNA, 22 nt, Human
ugagagccagaagggccugagg

SEQ ID NO: 876538 - RNA, 22 nt, Human
uuguuaaauggaugcagaauaa

SEQ ID NO: 876539 - RNA, 22 nt, Human
agcuggcuauacuugaaaaguc

SEQ ID NO: 876540 - RNA, 22 nt, Human
gcagggucuugagaggcagcca

SEQ ID NO: 876541 - RNA, 22 nt, Human
uugcagggauaaaacaagugaa

SEQ ID NO: 876542 - RNA, 22 nt, Human
ugcagcaagaccggauaugucg

SEQ ID NO: 876543 - RNA, 22 nt, Human
uaacaguauauuuaccaaaccu

SEQ ID NO: 876544 - RNA, 22 nt, Human
gcaagcagacauucagguaggu

SEQ ID NO: 876545 - RNA, 22 nt, Human
caucuguguaucugugcuuaga

SEQ ID NO: 876546 - RNA, 22 nt, Human
agugugcuuaaguuuaucagga

SEQ ID NO: 876547 - RNA, 22 nt, Human
auuuauuauugugguuacuucu

SEQ ID NO: 876548 - RNA, 22 nt, Human
ucuggcuccuggcuccacugcc

SEQ ID NO: 876549 - RNA, 22 nt, Human
aggcuccuugcucacaggcuca

SEQ ID NO: 876550 - RNA, 22 nt, Human
caggucaaagguuaguuauguu

SEQ ID NO: 876551 - RNA, 22 nt, Human
acaaagauaagucagaaaguca

SEQ ID NO: 876552 - RNA, 22 nt, Human
aauuugauuuucuuaaaccaua

SEQ ID NO: 876553 - RNA, 22 nt, Human
augcagggaccuuugcuuuggu

SEQ ID NO: 876554 - RNA, 22 nt, Human
caguaguguugcugagugucag

SEQ ID NO: 876555 - RNA, 22 nt, Human
uuuuccuuugauucccagaugu

SEQ ID NO: 876556 - RNA, 22 nt, Human
uuaagguagcucacuaaauaug

SEQ ID NO: 876557 - RNA, 22 nt, Human
ugguggagagacaguguauugg

SEQ ID NO: 876558 - RNA, 22 nt, Human
ucagagagcuggugggcagagg

SEQ ID NO: 876559 - RNA, 21 nt, Human
caguagugcgucgcagaggac

SEQ ID NO: 876560 - RNA, 22 nt, Human
agauaucaccucuaggcuggug

SEQ ID NO: 876561 - RNA, 22 nt, Human
ucuagggaauugugguuuucuu

SEQ ID NO: 876562 - RNA, 20 nt, Human
ucaggugacacacguggcac

SEQ ID NO: 876563 - RNA, 22 nt, Human
ugguggaggugcauuucggagc

SEQ ID NO: 876564 - RNA, 22 nt, Human
ugacccuuagaagcugcagcga

SEQ ID NO: 876565 - RNA, 22 nt, Human
uagcuuaucccacagugcccag

SEQ ID NO: 876566 - RNA, 22 nt, Human
uggaggaugccuggggaggccu

SEQ ID NO: 876567 - RNA, 19 nt, Human
ggccuggcuaucccugcug

SEQ ID NO: 876568 - RNA, 22 nt, Human
uuguuuuuagagaagcccugaa

SEQ ID NO: 876569 - RNA, 22 nt, Human
uuacacuucuaaaaaaagcagg

SEQ ID NO: 876570 - RNA, 22 nt, Human
uuccaguucacuccauuucugg

SEQ ID NO: 876571 - RNA, 22 nt, Human
gaggcucacugggcaaagacuc

SEQ ID NO: 876572 - RNA, 22 nt, Human
agcagcuuaucuuggagaggca

SEQ ID NO: 876573 - RNA, 22 nt, Human
caaauacaaauacgggcagcuu

SEQ ID NO: 876574 - RNA, 22 nt, Human
uguguguguaaaagcauuuaua

SEQ ID NO: 876575 - RNA, 22 nt, Human
cagguucuugaagccuucuggc

SEQ ID NO: 876576 - RNA, 22 nt, Human
agucacaauaccgugugucagu

SEQ ID NO: 876577 - RNA, 22 nt, Human
uuaagcauggaagugaaauaau

SEQ ID NO: 876578 - RNA, 22 nt, Human
cagcugugcuagaagccacgaa

SEQ ID NO: 876579 - RNA, 22 nt, Human
uucuuucuuuguaguccugaac

SEQ ID NO: 876580 - RNA, 22 nt, Human
gcaguggggaaugcuggggaga

SEQ ID NO: 876581 - RNA, 21 nt, Human
cucuuugggaucuuuggaaag

SEQ ID NO: 876582 - RNA, 22 nt, Human
uguguuggaaauagggucuuug

SEQ ID NO: 876583 - RNA, 23 nt, Human
uugcaaauuucaguuaguucaug

SEQ ID NO: 876584 - RNA, 22 nt, Human
uaaaaguaggaaugaaacgcau

SEQ ID NO: 876585 - RNA, 22 nt, Human
ucaucauucugacaagucuaca

SEQ ID NO: 876586 - RNA, 22 nt, Human
uuucuucucgacaccuuauccc

SEQ ID NO: 876587 - RNA, 22 nt, Human
aagcauuuuugaaaugguagga

SEQ ID NO: 876588 - RNA, 19 nt, Human
gaggaggcuucagcuuucu

SEQ ID NO: 876589 - RNA, 22 nt, Human
cuaauuuaaugaaugagucuua

SEQ ID NO: 876590 - RNA, 22 nt, Human
ugugucuggaccggggaggagc

SEQ ID NO: 876591 - RNA, 22 nt, Human
ggcuccuguggcaagacagcuu

SEQ ID NO: 876592 - RNA, 22 nt, Human
cagcugagcucccaggccauca

SEQ ID NO: 876593 - RNA, 22 nt, Human
ucuuccaggcccugccacagcu

SEQ ID NO: 876594 - RNA, 22 nt, Human
ggaguggcuauuugugcugguu

SEQ ID NO: 876595 - RNA, 21 nt, Human
cugugcuucuuccuaagccag

SEQ ID NO: 876596 - RNA, 22 nt, Human
agaauacaauuguucaguaaua

SEQ ID NO: 876597 - RNA, 22 nt, Human
aaaucaguuggaacacaagcag

SEQ ID NO: 876598 - RNA, 22 nt, Human
uguaacaaguaauccaugggag

SEQ ID NO: 876599 - RNA, 22 nt, Human
gcagccugaggcccuuucuggc

SEQ ID NO: 876600 - RNA, 22 nt, Human
ucuugcaggcaugaaaggacuc

SEQ ID NO: 876601 - RNA, 22 nt, Human
ggcccugagcugaaguacugug

SEQ ID NO: 876602 - RNA, 22 nt, Human
gacaggaggcagagcucaggug

SEQ ID NO: 876603 - RNA, 20 nt, Human
auguuaaauagcauuuagag

SEQ ID NO: 876604 - RNA, 22 nt, Human
ccagcuggagcucgcagauagg

SEQ ID NO: 876605 - RNA, 22 nt, Human
ccuaggagagggaaaaucuagg

SEQ ID NO: 876606 - RNA, 22 nt, Human
aacagaauaucaaaagauuaug

SEQ ID NO: 876607 - RNA, 22 nt, Human
augcaggagagcauguuuaaga

SEQ ID NO: 876608 - RNA, 22 nt, Human
gcuggcucuuuuugccgggcuc

SEQ ID NO: 876609 - RNA, 22 nt, Human
auucugaugcuucacaaaggua

SEQ ID NO: 876610 - RNA, 22 nt, Human
ugagccguggucucugagggug

SEQ ID NO: 876611 - RNA, 22 nt, Human
aagaggugagaagcuacacuua

SEQ ID NO: 876612 - RNA, 22 nt, Human
ucugcagggcccuuggcuccug

SEQ ID NO: 876613 - RNA, 22 nt, Human
ccuugaaaugagaaaaaguugg

SEQ ID NO: 876614 - RNA, 22 nt, Human
uaagccagauacaccacugaaa

SEQ ID NO: 876615 - RNA, 22 nt, Human
uaauaucuggcauucaaacaug

SEQ ID NO: 876616 - RNA, 22 nt, Human
cuggcccauugccuucucucuc

SEQ ID NO: 876617 - RNA, 20 nt, Human
uggcugcacaccaggacagg

SEQ ID NO: 876618 - RNA, 22 nt, Human
gccaguggcuugccaggcagga

SEQ ID NO: 876619 - RNA, 20 nt, Human
ugguaaaggagggcuggagg

SEQ ID NO: 876620 - RNA, 22 nt, Human
ugaaacaaaccaguaauuuugu

SEQ ID NO: 876621 - RNA, 22 nt, Human
aaugaacuggagaacaaugacc

SEQ ID NO: 876622 - RNA, 22 nt, Human
auugcugacuuuaauauuauau

SEQ ID NO: 876623 - RNA, 22 nt, Human
ccugaggcucuccugaauaaug

SEQ ID NO: 876624 - RNA, 22 nt, Human
aggccagaaaaagacagcucca

SEQ ID NO: 876625 - RNA, 22 nt, Human
cuuucauucuuagauauuagug

SEQ ID NO: 876626 - RNA, 20 nt, Human
agggucagagagcgugagug

SEQ ID NO: 876627 - RNA, 20 nt, Human
gcagggcgacacgggggagg

SEQ ID NO: 876628 - RNA, 22 nt, Human
aaugaagauaaaaugggaugga

SEQ ID NO: 876629 - RNA, 21 nt, Human
ucuaaauguccagcaauagaa

SEQ ID NO: 876630 - RNA, 22 nt, Human
cagaggcugccagccaugugca

SEQ ID NO: 876631 - RNA, 23 nt, Human
ucugggccacuugucugcacuuc

SEQ ID NO: 876632 - RNA, 22 nt, Human
cugccugccuuggccuccagga

SEQ ID NO: 876633 - RNA, 22 nt, Human
gccuggagcucuccacuugggg

SEQ ID NO: 876634 - RNA, 22 nt, Human
uuugacaggacuaacauauggc

SEQ ID NO: 876635 - RNA, 22 nt, Human
cauagugucugguaacauagua

SEQ ID NO: 876636 - RNA, 22 nt, Human
agauuuacaaaggauuugcuuu

SEQ ID NO: 876637 - RNA, 22 nt, Human
gcugagggcauguguggcgacu

SEQ ID NO: 876638 - RNA, 22 nt, Human
ucaucaucugggcuugggggug

SEQ ID NO: 876639 - RNA, 22 nt, Human
acugugggagcgcaguggcagc

SEQ ID NO: 876640 - RNA, 22 nt, Human
ugcuucaugcuucugacaauag

SEQ ID NO: 876641 - RNA, 22 nt, Human
uccugagagucaagaaugcagg

SEQ ID NO: 876642 - RNA, 22 nt, Human
cagagaaacucagauagcugau

SEQ ID NO: 876643 - RNA, 22 nt, Human
ggcccucuuuuauccaucauaa

SEQ ID NO: 876644 - RNA, 22 nt, Human
uacugauagcacaaaugacauu

SEQ ID NO: 876645 - RNA, 22 nt, Human
uggucaaaugccaaucuguagu

SEQ ID NO: 876646 - RNA, 22 nt, Human
uuggcacagagcugcagccugg

SEQ ID NO: 876647 - RNA, 22 nt, Human
uacugaaaagccacaaggacca

SEQ ID NO: 876648 - RNA, 22 nt, Human
auaaacuaauugggguauaguu

SEQ ID NO: 876649 - RNA, 22 nt, Human
cauugagagugacuuggacaau

SEQ ID NO: 876650 - RNA, 22 nt, Human
ccagggaaacuuuggaguggag

SEQ ID NO: 876651 - RNA, 22 nt, Human
ucucaggggccuggaguccugg

SEQ ID NO: 876652 - RNA, 22 nt, Human
gaggcacaucacuuggugcauu

SEQ ID NO: 876653 - RNA, 22 nt, Human
ucauuuucccacugaagcuguc

SEQ ID NO: 876654 - RNA, 22 nt, Human
ugaaacaaaauuaagauucucg

SEQ ID NO: 876655 - RNA, 22 nt, Human
gggcaagcuuugaacaucagca

SEQ ID NO: 876656 - RNA, 22 nt, Human
ucagggccacaacaccagaguc

SEQ ID NO: 876657 - RNA, 23 nt, Human
guuuucaacacaauaaauguaac

SEQ ID NO: 876658 - RNA, 22 nt, Human
uucauugaaggagggacuugcu

SEQ ID NO: 876659 - RNA, 22 nt, Human
uauucuuguauacuacaaucuu

SEQ ID NO: 876660 - RNA, 22 nt, Human
cagcacuuggugccauugagug

SEQ ID NO: 876661 - RNA, 22 nt, Human
gcaguguuauguuuucuauaau

SEQ ID NO: 876662 - RNA, 22 nt, Human
aauguauaaccauaggaaauuu

SEQ ID NO: 876663 - RNA, 22 nt, Human
caagccaguuuguaguucucuc

SEQ ID NO: 876664 - RNA, 22 nt, Human
aguccagaccccggcagcuggu

SEQ ID NO: 876665 - RNA, 17 nt, Human
ggcaggugacagacacc

SEQ ID NO: 876666 - RNA, 22 nt, Human
cucuuuggggcuggaagccuag

SEQ ID NO: 876667 - RNA, 22 nt, Human
augaaauuugcugcuaaguucc

SEQ ID NO: 876668 - RNA, 22 nt, Human
uguggcucuccuccugcugccc

SEQ ID NO: 876669 - RNA, 22 nt, Human
cucuuuguggccaccuaaucuu

SEQ ID NO: 876670 - RNA, 22 nt, Human
ucuccagggacauguuucugga

SEQ ID NO: 876671 - RNA, 22 nt, Human
aggcuguugcaugccacagaua

SEQ ID NO: 876672 - RNA, 22 nt, Human
uaacacaguucucuguugcaca

SEQ ID NO: 876673 - RNA, 22 nt, Human
ccugggcaucucaugcaccugc

SEQ ID NO: 876674 - RNA, 22 nt, Human
aaauagcagccuuuaguuaaca

SEQ ID NO: 876675 - RNA, 22 nt, Human
cuguggccccacccucuuggcc

SEQ ID NO: 876676 - RNA, 21 nt, Human
ccagugcuacagcugccugac

SEQ ID NO: 876677 - RNA, 22 nt, Human
gugggcagucaugaaaucuaga

SEQ ID NO: 876678 - RNA, 22 nt, Human
auggaauguuuccucuuuuauu

SEQ ID NO: 876679 - RNA, 22 nt, Human
gguggaaggccuggaaggaggc

SEQ ID NO: 876680 - RNA, 22 nt, Human
gagcugugcuuauaccaauuca

SEQ ID NO: 876681 - RNA, 19 nt, Human
ugaggcacaugauaagaac

SEQ ID NO: 876682 - RNA, 21 nt, Human
acauaggcgaauguucgggag

SEQ ID NO: 876683 - RNA, 22 nt, Human
ggcccucuggcuuccgcauggg

SEQ ID NO: 876684 - RNA, 18 nt, Human
ccuggaggucuucggggu

SEQ ID NO: 876685 - RNA, 22 nt, Human
uucccagauuggagggcagggg

SEQ ID NO: 876686 - RNA, 22 nt, Human
uuggaaaaugaggcacagagag

SEQ ID NO: 876687 - RNA, 22 nt, Human
uggcacagcccauucagagaag

SEQ ID NO: 876688 - RNA, 22 nt, Human
uggccugcccagagcagcucug

SEQ ID NO: 876689 - RNA, 22 nt, Human
gccugggaacucugaucuccug

SEQ ID NO: 876690 - RNA, 21 nt, Human
ucauggauuuucucugcuuuu

SEQ ID NO: 876691 - RNA, 22 nt, Human
uccagacuguucacauuggcau

SEQ ID NO: 876692 - RNA, 22 nt, Human
ugauuuguuuagugccaaguuu

SEQ ID NO: 876693 - RNA, 23 nt, Human
acuuuauugaccccaggucaguu

SEQ ID NO: 876694 - RNA, 22 nt, Human
uuauuuguaaagguccauagua

SEQ ID NO: 876695 - RNA, 22 nt, Human
ucacuuuggauuauguaauuuc

SEQ ID NO: 876696 - RNA, 22 nt, Human
caggaaaggugugucaugaugg

SEQ ID NO: 876697 - RNA, 22 nt, Human
ucaguguuuguggcaaauguua

SEQ ID NO: 876698 - RNA, 22 nt, Human
uagcaucagccacaccuuguac

SEQ ID NO: 876699 - RNA, 22 nt, Human
ucucugugcaggaugcugaguu

SEQ ID NO: 876700 - RNA, 22 nt, Human
gcccugagcuagugugggcagg

SEQ ID NO: 876701 - RNA, 22 nt, Human
uuacuguuuugguaccucauug

SEQ ID NO: 876702 - RNA, 22 nt, Human
aggccagcuucuacccucuguu

SEQ ID NO: 876703 - RNA, 19 nt, Human
gacucacaccuuccgcugu

SEQ ID NO: 876704 - RNA, 22 nt, Human
uaccuugugagcuuucuaacau

SEQ ID NO: 876705 - RNA, 22 nt, Human
uuugacagauagauguuauguu

SEQ ID NO: 876706 - RNA, 22 nt, Human
ucagauuuaugaauauacuaug

SEQ ID NO: 876707 - RNA, 22 nt, Human
uuuccucuucgauuaaguuugg

SEQ ID NO: 876708 - RNA, 22 nt, Human
cagggagcuggcuggcgugagu

SEQ ID NO: 876709 - RNA, 22 nt, Human
gaggcugugugucccucuggac

SEQ ID NO: 876710 - RNA, 22 nt, Human
cagggaguuuuuguuccucuag

SEQ ID NO: 876711 - RNA, 22 nt, Human
uccaggcuagagugcaguggcc

SEQ ID NO: 876712 - RNA, 22 nt, Human
auagaagaggaaacugagguug

SEQ ID NO: 876713 - RNA, 22 nt, Human
cuccagagaguccagcucuggg

SEQ ID NO: 876714 - RNA, 22 nt, Human
uuuuuacagucauggucacuca

SEQ ID NO: 876715 - RNA, 22 nt, Human
agcagcugagccccagcuguga

SEQ ID NO: 876716 - RNA, 22 nt, Human
aguguuuguaaacuacagaucu

SEQ ID NO: 876717 - RNA, 22 nt, Human
ucaguuucacuugaagaaaaga

SEQ ID NO: 876718 - RNA, 22 nt, Human
acauauuuugaaagcuuucuaa

SEQ ID NO: 876719 - RNA, 22 nt, Human
ugugccaggcacuugcccaggc

SEQ ID NO: 876720 - RNA, 22 nt, Human
aaggugcucacgggcucaggga

SEQ ID NO: 876721 - RNA, 23 nt, Human
augcaaagugcugucauguagac

SEQ ID NO: 876722 - RNA, 22 nt, Human
acagcagaucuggcuacagguu

SEQ ID NO: 876723 - RNA, 22 nt, Human
ugagcagaggaggcugccaacu

SEQ ID NO: 876724 - RNA, 23 nt, Human
cuguccaggauucuugagagaac

SEQ ID NO: 876725 - RNA, 22 nt, Human
gaggcucacuaggcauccuggg

SEQ ID NO: 876726 - RNA, 22 nt, Human
agccagcucccuccccugcagg

SEQ ID NO: 876727 - RNA, 22 nt, Human
ugcccugcccaucuacccuguc

SEQ ID NO: 876728 - RNA, 22 nt, Human
gcaggcagagguggaggagaca

SEQ ID NO: 876729 - RNA, 22 nt, Human
auauucuucuuguucagacuau

SEQ ID NO: 876730 - RNA, 22 nt, Human
aguacaaaugcagccagaguag

SEQ ID NO: 876731 - RNA, 22 nt, Human
gaguaaaaguuggauuacaaag

SEQ ID NO: 876732 - RNA, 22 nt, Human
acauuucuaucauccuguaaug

SEQ ID NO: 876733 - RNA, 22 nt, Human
cagcauauuacuuuaaaaaauc

SEQ ID NO: 876734 - RNA, 22 nt, Human
ggcuuggaaaugguaaugagcu

SEQ ID NO: 876735 - RNA, 22 nt, Human
aucuuugggauccugauuuacu

SEQ ID NO: 876736 - RNA, 22 nt, Human
uggcagcacaagguggcccaug

SEQ ID NO: 876737 - RNA, 22 nt, Human
acacaguaccccaaggcugggc

SEQ ID NO: 876738 - RNA, 22 nt, Human
aagucuggugcuguccucaccc

SEQ ID NO: 876739 - RNA, 22 nt, Human
aaucagagcccucugagcuuca

SEQ ID NO: 876740 - RNA, 22 nt, Human
acagggcuauauuccucagagc

SEQ ID NO: 876741 - RNA, 22 nt, Human
uuauaauucuggcauaggcugu

SEQ ID NO: 876742 - RNA, 22 nt, Human
acugauuaaaaacagacauuua

SEQ ID NO: 876743 - RNA, 22 nt, Human
ccaggcugugguuuagauagag

SEQ ID NO: 876744 - RNA, 22 nt, Human
cugggggucgcgccucugggca

SEQ ID NO: 876745 - RNA, 22 nt, Human
auucaguguuugcagcaacuuu

SEQ ID NO: 876746 - RNA, 22 nt, Human
augucuuucucacagccaguuc

SEQ ID NO: 876747 - RNA, 22 nt, Human
uugaggaaagagugcaaagagg

SEQ ID NO: 876748 - RNA, 22 nt, Human
uuuugaaagaguccugcuacag

SEQ ID NO: 876749 - RNA, 22 nt, Human
ggcuggcaggggaugucagaug

SEQ ID NO: 876750 - RNA, 22 nt, Human
augugcaacuuuucugucuuuu

SEQ ID NO: 876751 - RNA, 22 nt, Human
uuguuuaaaagaaaucauagaa

SEQ ID NO: 876752 - RNA, 20 nt, Human
auguccugcuucuccucacc

SEQ ID NO: 876753 - RNA, 22 nt, Human
aguggugcuagguggaauauag

SEQ ID NO: 876754 - RNA, 22 nt, Human
caaacuuuugaggaguucagga

SEQ ID NO: 876755 - RNA, 22 nt, Human
ucugugccaucagucuccagag

SEQ ID NO: 876756 - RNA, 22 nt, Human
ucuccagguggcuugggcuucu

SEQ ID NO: 876757 - RNA, 22 nt, Human
cuuuucuuauguggacguaccu

SEQ ID NO: 876758 - RNA, 22 nt, Human
uaagaauuguguugaauagagu

SEQ ID NO: 876759 - RNA, 22 nt, Human
aggccaaguagcuagcauugaa

SEQ ID NO: 876760 - RNA, 22 nt, Human
caaaugauaccuauuacuaggc

SEQ ID NO: 876761 - RNA, 22 nt, Human
acuuguuuacaagcaguucuga

SEQ ID NO: 876762 - RNA, 23 nt, Human
ucuggcuuugcuggaaguuuuga

SEQ ID NO: 876763 - RNA, 22 nt, Human
uucugcugguaacuauguuuca

SEQ ID NO: 876764 - RNA, 22 nt, Human
agauacacagcccugccaucac

SEQ ID NO: 876765 - RNA, 19 nt, Human
ucagggggcugauaggagg

SEQ ID NO: 876766 - RNA, 22 nt, Human
augugaagcuugugcuaacaua

SEQ ID NO: 876767 - RNA, 22 nt, Human
ugaaccaggaggcagccagcac

SEQ ID NO: 876768 - RNA, 22 nt, Human
uaucaacaauagccaguguuua

SEQ ID NO: 876769 - RNA, 22 nt, Human
aacucuuuuuuuaaguguagcc

SEQ ID NO: 876770 - RNA, 22 nt, Human
uacccagugcaacuggagucuc

SEQ ID NO: 876771 - RNA, 22 nt, Human
aggucuccuugugggucuugcc

SEQ ID NO: 876772 - RNA, 22 nt, Human
augcgugugugcaaaccauugc

SEQ ID NO: 876773 - RNA, 22 nt, Human
caaacuuugcaaaacuuacagu

SEQ ID NO: 876774 - RNA, 22 nt, Human
ucaacgcaugcuccaagaaaga

SEQ ID NO: 876775 - RNA, 21 nt, Human
ccucucucauuguaaugaagu

SEQ ID NO: 876776 - RNA, 22 nt, Human
gauuuauaguaugugcuuucag

SEQ ID NO: 876777 - RNA, 18 nt, Human
ugugaacacauuuuucug

SEQ ID NO: 876778 - RNA, 22 nt, Human
ucugugcugcaggagucugcau

SEQ ID NO: 876779 - RNA, 22 nt, Human
cucugagguuuccucacaagcu

SEQ ID NO: 876780 - RNA, 21 nt, Human
uggcacagaaaggaaaguuca

SEQ ID NO: 876781 - RNA, 22 nt, Human
uggagacagagauagccaauug

SEQ ID NO: 876782 - RNA, 22 nt, Human
cuguuaauggaggacuacagga

SEQ ID NO: 876783 - RNA, 22 nt, Human
uuuauagcugugagaccuuggg

SEQ ID NO: 876784 - RNA, 22 nt, Human
aaagccaguuugucucuuuaaa

SEQ ID NO: 876785 - RNA, 22 nt, Human
uggcuggaggcaugcaagcucc

SEQ ID NO: 876786 - RNA, 22 nt, Human
ugagccugggagauggaggcug

SEQ ID NO: 876787 - RNA, 22 nt, Human
agacaaauugggacauuguguu

SEQ ID NO: 876788 - RNA, 22 nt, Human
gcucucuggcuaguccaucggg

SEQ ID NO: 876789 - RNA, 20 nt, Human
ucagggcaugggacagcccc

SEQ ID NO: 876790 - RNA, 22 nt, Human
guggggggagcugcaagcugga

SEQ ID NO: 876791 - RNA, 22 nt, Human
ucagcccugggcuuccucaugg

SEQ ID NO: 876792 - RNA, 22 nt, Human
cugugggagaggugccuggauu

SEQ ID NO: 876793 - RNA, 22 nt, Human
aggagcagcccacuccuguccu

SEQ ID NO: 876794 - RNA, 22 nt, Human
augggugugaaaauggucaucu

SEQ ID NO: 876795 - RNA, 22 nt, Human
caaaaguuauugcgguuuuugc

SEQ ID NO: 876796 - RNA, 21 nt, Human
acacagaggcaucaucacuuu

SEQ ID NO: 876797 - RNA, 23 nt, Human
acagacauuguacaucuuguuuu

SEQ ID NO: 876798 - RNA, 22 nt, Human
ggggugagcugggccugugccu

SEQ ID NO: 876799 - RNA, 22 nt, Human
ccugguguuaucauaggucaug

SEQ ID NO: 876800 - RNA, 22 nt, Human
ggcuccacccugcuuccagaag

SEQ ID NO: 876801 - RNA, 22 nt, Human
uguucauucuguauaugcugua

SEQ ID NO: 876802 - RNA, 22 nt, Human
agaguacugcugcuggguacug

SEQ ID NO: 876803 - RNA, 22 nt, Human
cacaugccuauuaaccaaacga

SEQ ID NO: 876804 - RNA, 22 nt, Human
agagggggaaaauagagguguu

SEQ ID NO: 876805 - RNA, 22 nt, Human
uucugggcauguuacauucugu

SEQ ID NO: 876806 - RNA, 22 nt, Human
uguuugcauuaauuagaaggua

SEQ ID NO: 876807 - RNA, 22 nt, Human
uuuagcauuccugggaugauuu

SEQ ID NO: 876808 - RNA, 23 nt, Human
cuguggcugaguccuguuggagu

SEQ ID NO: 876809 - RNA, 22 nt, Human
aggcuucugauaccaugagaga

SEQ ID NO: 876810 - RNA, 22 nt, Human
auuucuuaugaauauugacugu

SEQ ID NO: 876811 - RNA, 22 nt, Human
ggcagagucagaggugguucug

SEQ ID NO: 876812 - RNA, 22 nt, Human
uugccucaagauuuuuuauuga

SEQ ID NO: 876813 - RNA, 22 nt, Human
ucuguuucuucuucuguuauau

SEQ ID NO: 876814 - RNA, 22 nt, Human
auuacccaggguaggaauuccu

SEQ ID NO: 876815 - RNA, 22 nt, Human
gcgagugccgagagggcagggc

SEQ ID NO: 876816 - RNA, 23 nt, Human
cacauauagcagccacuaagguc

SEQ ID NO: 876817 - RNA, 22 nt, Human
aaaugucagaaaacauggagug

SEQ ID NO: 876818 - RNA, 20 nt, Human
gccuaagagcuagcugucac

SEQ ID NO: 876819 - RNA, 22 nt, Human
uguagaugagucagggugcaug

SEQ ID NO: 876820 - RNA, 22 nt, Human
aaacaagagcuuacauggcugc

SEQ ID NO: 876821 - RNA, 22 nt, Human
agggccucgaaggcagagggau

SEQ ID NO: 876822 - RNA, 22 nt, Human
cauggcugcuggcucggucccu

SEQ ID NO: 876823 - RNA, 21 nt, Human
caaggcuuaaacauuaaucua

SEQ ID NO: 876824 - RNA, 22 nt, Human
uaaaugcuuucuaugaaagagg

SEQ ID NO: 876825 - RNA, 22 nt, Human
acaaaggcaggauugacuuagu

SEQ ID NO: 876826 - RNA, 22 nt, Human
cugugugagugacugcaucuca

SEQ ID NO: 876827 - RNA, 21 nt, Human
uagaugaaaucagaguauuuc

SEQ ID NO: 876828 - RNA, 22 nt, Human
aaaugacagagcugggacuagu

SEQ ID NO: 876829 - RNA, 22 nt, Human
acaucacaguaguuaagccaga

SEQ ID NO: 876830 - RNA, 22 nt, Human
acugaaaugaaaucuaucaucu

SEQ ID NO: 876831 - RNA, 22 nt, Human
gagcagcuccagccgcaugacu

SEQ ID NO: 876832 - RNA, 22 nt, Human
acaggcaauuagcaagcuguua

SEQ ID NO: 876833 - RNA, 22 nt, Human
gauaauuuaagucuugggggcu

SEQ ID NO: 876834 - RNA, 20 nt, Human
acauguacuaaugaauacag

SEQ ID NO: 876835 - RNA, 22 nt, Human
aggcuggaaaucacuagauucc

SEQ ID NO: 876836 - RNA, 22 nt, Human
gcucagaguuaaauauagugcu

SEQ ID NO: 876837 - RNA, 18 nt, Human
acccaggcucaugguccu

SEQ ID NO: 876838 - RNA, 22 nt, Human
auauagguuaucauauuugccc

SEQ ID NO: 876839 - RNA, 22 nt, Human
aaggcccagcgugaccucagug

SEQ ID NO: 876840 - RNA, 22 nt, Human
acagacuguuugguucaugucu

SEQ ID NO: 876841 - RNA, 22 nt, Human
uauuugaagauucuucugaugu

SEQ ID NO: 876842 - RNA, 22 nt, Human
gcccggccaggaacagaguaua

SEQ ID NO: 876843 - RNA, 22 nt, Human
uuugaaaacuuaauuuggucgu

SEQ ID NO: 876844 - RNA, 22 nt, Human
gugcucuagaaauagucagugg

SEQ ID NO: 876845 - RNA, 22 nt, Human
acacugucugggacucaggagu

SEQ ID NO: 876846 - RNA, 22 nt, Human
cagggcuuacuggaggcugcuu

SEQ ID NO: 876847 - RNA, 17 nt, Human
guguccaggccgauggc

SEQ ID NO: 876848 - RNA, 19 nt, Human
gcccugcaggagguggggc

SEQ ID NO: 876849 - RNA, 18 nt, Human
uguuuccuccuggaggcu

SEQ ID NO: 876850 - RNA, 22 nt, Human
uuuacaacuuucuguucuguau

SEQ ID NO: 876851 - RNA, 23 nt, Human
acuauaaaguuguucugauuuac

SEQ ID NO: 876852 - RNA, 22 nt, Human
ccugcucuuauagcuguuucca

SEQ ID NO: 876853 - RNA, 22 nt, Human
gcccagcugagaagcgcggggc

SEQ ID NO: 876854 - RNA, 22 nt, Human
aucaaaacccagacaggcugga

SEQ ID NO: 876855 - RNA, 22 nt, Human
caaagcugugaauuccuacaaa

SEQ ID NO: 876856 - RNA, 22 nt, Human
gccaggugcauggcugagucuc

SEQ ID NO: 876857 - RNA, 22 nt, Human
agggaagcaauauuagauauca

SEQ ID NO: 876858 - RNA, 22 nt, Human
aguuauuucaguaacauaauag

SEQ ID NO: 876859 - RNA, 22 nt, Human
ucaggucuguacuauugucuug

SEQ ID NO: 876860 - RNA, 19 nt, Human
gcagguggauguggucagc

SEQ ID NO: 876861 - RNA, 22 nt, Human
auuuccuucccagauuugguuc

SEQ ID NO: 876862 - RNA, 22 nt, Human
gccuggcugucaaacccagaag

SEQ ID NO: 876863 - RNA, 22 nt, Human
aaagauuucagaagccugugcc

SEQ ID NO: 876864 - RNA, 22 nt, Human
cuccuccagcucucccuggggg

SEQ ID NO: 876865 - RNA, 22 nt, Human
ggaaggguuuaagcaggagagu

SEQ ID NO: 876866 - RNA, 22 nt, Human
aguuaagaauacacaucauaau

SEQ ID NO: 876867 - RNA, 18 nt, Human
uguaaacacuuucauucu

SEQ ID NO: 876868 - RNA, 22 nt, Human
ucucuucccuuuaugguaugug

SEQ ID NO: 876869 - RNA, 22 nt, Human
guccagagaguaaaggggguaa

SEQ ID NO: 876870 - RNA, 22 nt, Human
aggcuucacucgacaugccaau

SEQ ID NO: 876871 - RNA, 22 nt, Human
ucagaauuggacaauagaagca

SEQ ID NO: 876872 - RNA, 22 nt, Human
acuuuagagaaauguagaagua

SEQ ID NO: 876873 - RNA, 22 nt, Human
gcugggcaaggcugaagcuacc

SEQ ID NO: 876874 - RNA, 22 nt, Human
acagaguccuagcugcaaagaa

SEQ ID NO: 876875 - RNA, 22 nt, Human
aagugucuacauuugcuaacca

SEQ ID NO: 876876 - RNA, 22 nt, Human
cacugaggcuuccuuaggcaau

SEQ ID NO: 876877 - RNA, 21 nt, Human
aggcagcaucugauuuauaug

SEQ ID NO: 876878 - RNA, 22 nt, Human
auaaagucugggccaggcaugg

SEQ ID NO: 876879 - RNA, 22 nt, Human
acaggucuccagagugagagga

SEQ ID NO: 876880 - RNA, 21 nt, Human
ggaaaacuuuccuugucugaa

SEQ ID NO: 876881 - RNA, 22 nt, Human
ccaggacagggagacgggagcc

SEQ ID NO: 876882 - RNA, 22 nt, Human
gcugucugcugggucgcucagg

SEQ ID NO: 876883 - RNA, 22 nt, Human
uuuauaaacaguaccacggugc

SEQ ID NO: 876884 - RNA, 22 nt, Human
gccuggcuggucacugccuggc

SEQ ID NO: 876885 - RNA, 20 nt, Human
ugcagcacgggcccuuucca

SEQ ID NO: 876886 - RNA, 22 nt, Human
ggaauguuugcucccuucaggg

SEQ ID NO: 876887 - RNA, 22 nt, Human
auggcagagaaagcgagccaca

SEQ ID NO: 876888 - RNA, 22 nt, Human
acagcuuuuuacuaauagauug

SEQ ID NO: 876889 - RNA, 22 nt, Human
aguggcaggcagaagcuucuca

SEQ ID NO: 876890 - RNA, 22 nt, Human
uaagaacucgugaucauuugaa

SEQ ID NO: 876891 - RNA, 22 nt, Human
uuacacaauuuuauugaccuaa

SEQ ID NO: 876892 - RNA, 22 nt, Human
guacauauuacagacaaagcuu

SEQ ID NO: 876893 - RNA, 22 nt, Human
aaagggcugaaguagucucugu

SEQ ID NO: 876894 - RNA, 22 nt, Human
aucucugcguccccagcaucga

SEQ ID NO: 876895 - RNA, 22 nt, Human
augcaucauggaaaacucaguu

SEQ ID NO: 876896 - RNA, 20 nt, Human
aagaggcuguggauccuacu

SEQ ID NO: 876897 - RNA, 22 nt, Human
cagagggcugcccugaguucgu

SEQ ID NO: 876898 - RNA, 22 nt, Human
caaagguuguugagagugcagg

SEQ ID NO: 876899 - RNA, 22 nt, Human
cacaaaauaucaagcacuuuua

SEQ ID NO: 876900 - RNA, 22 nt, Human
aaaguguggucguucauuuugu

SEQ ID NO: 876901 - RNA, 22 nt, Human
ugaaugcagagacugugggaaa

SEQ ID NO: 876902 - RNA, 22 nt, Human
cagugagguggauggauggccu

SEQ ID NO: 876903 - RNA, 22 nt, Human
uugacacagucaacuugauuuu

SEQ ID NO: 876904 - RNA, 22 nt, Human
guuucuuaaauguagcaggacc

SEQ ID NO: 876905 - RNA, 22 nt, Human
ggaaagagcuaaaagggugaga

SEQ ID NO: 876906 - RNA, 22 nt, Human
agcuuuaugaggagaccuuagu

SEQ ID NO: 876907 - RNA, 22 nt, Human
aaagucucaggcaaaccaggac

SEQ ID NO: 876908 - RNA, 22 nt, Human
cucagggacggaggcuugcgga

SEQ ID NO: 876909 - RNA, 17 nt, Human
accugacaguacagugu

SEQ ID NO: 876910 - RNA, 22 nt, Human
ggagcccugcccuaggcagcuc

SEQ ID NO: 876911 - RNA, 22 nt, Human
auacaguuagaaaaaaagccuu

SEQ ID NO: 876912 - RNA, 22 nt, Human
gcugccucacuccagcccaaua

SEQ ID NO: 876913 - RNA, 22 nt, Human
accagagaauuuagccaagaaa

SEQ ID NO: 876914 - RNA, 21 nt, Human
ugaggcaggggugcuuuuguc

SEQ ID NO: 876915 - RNA, 22 nt, Human
gcuuuaugagugaggcaggaua

SEQ ID NO: 876916 - RNA, 22 nt, Human
caguguuuccgucaguauguga

SEQ ID NO: 876917 - RNA, 22 nt, Human
gggagcaggacauaauagcaau

SEQ ID NO: 876918 - RNA, 22 nt, Human
cagccucucuguaucucaggau

SEQ ID NO: 876919 - RNA, 22 nt, Human
acucauuuaaacauuuacugaa

SEQ ID NO: 876920 - RNA, 22 nt, Human
acauuugauauggaguugugua

SEQ ID NO: 876921 - RNA, 23 nt, Human
gcucagguggcucagggacugau

SEQ ID NO: 876922 - RNA, 22 nt, Human
ucucaucuauucacauuaacug

SEQ ID NO: 876923 - RNA, 22 nt, Human
ggcugaaguguaguggcucacu

SEQ ID NO: 876924 - RNA, 22 nt, Human
aagugaauguagcaaacuugaa

SEQ ID NO: 876925 - RNA, 22 nt, Human
ugggcucaugcuggagaugaga

SEQ ID NO: 876926 - RNA, 22 nt, Human
ugucaccuggaaaucacucuaa

SEQ ID NO: 876927 - RNA, 22 nt, Human
ucacuggugugagaggagcaaa

SEQ ID NO: 876928 - RNA, 22 nt, Human
uauaacaguuuaggugguguca

SEQ ID NO: 876929 - RNA, 22 nt, Human
aagcugccacacggugaguacu

SEQ ID NO: 876930 - RNA, 21 nt, Human
caguguugauauuuaauacau

SEQ ID NO: 876931 - RNA, 22 nt, Human
auucuugcuucacacuccucug

SEQ ID NO: 876932 - RNA, 22 nt, Human
ugaaggcccagccacagaaugg

SEQ ID NO: 876933 - RNA, 22 nt, Human
ugcuugcugggccaauggcaau

SEQ ID NO: 876934 - RNA, 22 nt, Human
gccugcccugaaagaggugaag

SEQ ID NO: 876935 - RNA, 22 nt, Human
acauaugagguguuauucuaug

SEQ ID NO: 876936 - RNA, 22 nt, Human
uccauugcucaauauagaguuu

SEQ ID NO: 876937 - RNA, 22 nt, Human
cagugcauagauccugaggccu

SEQ ID NO: 876938 - RNA, 22 nt, Human
agcagcaaaagagaauaguuug

SEQ ID NO: 876939 - RNA, 22 nt, Human
uuugaaaguccuaggagagucc

SEQ ID NO: 876940 - RNA, 21 nt, Human
agguggggcugcaccucugcu

SEQ ID NO: 876941 - RNA, 22 nt, Human
ggcagccauggacacuggcuag

SEQ ID NO: 876942 - RNA, 21 nt, Human
aaguuucucccuaauuguugc

SEQ ID NO: 876943 - RNA, 22 nt, Human
cuuagaacauucugccugggaa

SEQ ID NO: 876944 - RNA, 22 nt, Human
ggcaguggguggaucucaggga

SEQ ID NO: 876945 - RNA, 22 nt, Human
uuugucaccaguggcuuuggua

SEQ ID NO: 876946 - RNA, 22 nt, Human
cucucccuaugccucccaggag

SEQ ID NO: 876947 - RNA, 20 nt, Human
cucucucuccauucccaggg

SEQ ID NO: 876948 - RNA, 22 nt, Human
gaaagguucuugggaguucaca

SEQ ID NO: 876949 - RNA, 22 nt, Human
cuuguaaaauauccaguuaagg

SEQ ID NO: 876950 - RNA, 22 nt, Human
uaggaagaaacuuucccugcag

SEQ ID NO: 876951 - RNA, 22 nt, Human
ugggucacaaaggccagaugau

SEQ ID NO: 876952 - RNA, 22 nt, Human
agcuccagcccaucugcucgug

SEQ ID NO: 876953 - RNA, 22 nt, Human
ugcccugguuacacuggagucc

SEQ ID NO: 876954 - RNA, 22 nt, Human
ugacaaacccugcaaauagcuc

SEQ ID NO: 876955 - RNA, 20 nt, Human
ugcaguguccucacuuguca

SEQ ID NO: 876956 - RNA, 22 nt, Human
ggcuucagugagcugagcucac

SEQ ID NO: 876957 - RNA, 22 nt, Human
uaauacaguagcuuuuacacag

SEQ ID NO: 876958 - RNA, 17 nt, Human
uguuuucugcuaccuuu

SEQ ID NO: 876959 - RNA, 22 nt, Human
cggcuggggcuguccccaugac

SEQ ID NO: 876960 - RNA, 22 nt, Human
acagagacucaugaaagaugac

SEQ ID NO: 876961 - RNA, 22 nt, Human
cugagcagugcuuugcaguggg

SEQ ID NO: 876962 - RNA, 22 nt, Human
agcugccucagcaacacagacc

SEQ ID NO: 876963 - RNA, 22 nt, Human
cuggagcauuuucugcuucugc

SEQ ID NO: 876964 - RNA, 22 nt, Human
ugcauuuguaacauucaagaau

SEQ ID NO: 876965 - RNA, 22 nt, Human
aaacaguucucauuuguuuaga

SEQ ID NO: 876966 - RNA, 22 nt, Human
acugagggguuggagagugagg

SEQ ID NO: 876967 - RNA, 22 nt, Human
gauucaaaaauaagcuccuauu

SEQ ID NO: 876968 - RNA, 22 nt, Human
uugggacaucuggcauacaguu

SEQ ID NO: 876969 - RNA, 22 nt, Human
ggagcugugggacgcuguccca

SEQ ID NO: 876970 - RNA, 22 nt, Human
augacacccccacagcauuguu

SEQ ID NO: 876971 - RNA, 22 nt, Human
agaaagggaugagguagcugcu

SEQ ID NO: 876972 - RNA, 22 nt, Human
ugucuuaauaugugcauucugu

SEQ ID NO: 876973 - RNA, 22 nt, Human
aaagcaugguuaaagacagugg

SEQ ID NO: 876974 - RNA, 22 nt, Human
cuggagccuucaccaggggaaa

SEQ ID NO: 876975 - RNA, 22 nt, Human
auuuccaguacuauuuucugcu

SEQ ID NO: 876976 - RNA, 22 nt, Human
ugcaguccuggugaggggacau

SEQ ID NO: 876977 - RNA, 22 nt, Human
agaguggcccguuggccugaac

SEQ ID NO: 876978 - RNA, 22 nt, Human
ccagcaucgacuuccugccuga

SEQ ID NO: 876979 - RNA, 22 nt, Human
aggcagcauuugaauccagguc

SEQ ID NO: 876980 - RNA, 22 nt, Human
acccugaagaaacuucuaagug

SEQ ID NO: 876981 - RNA, 22 nt, Human
uaguuuuacuugcgaugauaau

SEQ ID NO: 876982 - RNA, 22 nt, Human
agacagcugggaguguccuucu

SEQ ID NO: 876983 - RNA, 22 nt, Human
uaaagugcccagggaaagcggg

SEQ ID NO: 876984 - RNA, 22 nt, Human
ucagggccacgcggaggugacg

SEQ ID NO: 876985 - RNA, 22 nt, Human
cugcccuggguuuuaugggagu

SEQ ID NO: 876986 - RNA, 22 nt, Human
ccuuucccgcuuugagggcaag

SEQ ID NO: 876987 - RNA, 22 nt, Human
gagcugccaguguaugaauucu

SEQ ID NO: 876988 - RNA, 22 nt, Human
ucuauacugaugggauacuauu

SEQ ID NO: 876989 - RNA, 22 nt, Human
agcacagauucugaagaguccu

SEQ ID NO: 876990 - RNA, 22 nt, Human
aggaauuauuugucuuagucuu

SEQ ID NO: 876991 - RNA, 22 nt, Human
aguuuggaagucaggcuuuucu

SEQ ID NO: 876992 - RNA, 22 nt, Human
uuuagagaguguaaaaauauau

SEQ ID NO: 876993 - RNA, 23 nt, Human
uagacugcaggcuccuugagggc

SEQ ID NO: 876994 - RNA, 23 nt, Human
agauuuggaaagcugaguggcgu

SEQ ID NO: 876995 - RNA, 22 nt, Human
cagggugggcacccagccucca

SEQ ID NO: 876996 - RNA, 22 nt, Human
uggcagcugguacagugggucu

SEQ ID NO: 876997 - RNA, 22 nt, Human
ucuagggaaccuauccuaugau

SEQ ID NO: 876998 - RNA, 22 nt, Human
aggccuggccuuuauguucaag

SEQ ID NO: 876999 - RNA, 22 nt, Human
agcgggcucaaguggccagcag

SEQ ID NO: 877000 - RNA, 22 nt, Human
uaggaaugggcaagacaaagaa

SEQ ID NO: 877001 - RNA, 22 nt, Human
uaagacauccguugcuuauaau

SEQ ID NO: 877002 - RNA, 20 nt, Human
acaaaugcauucugugacau

SEQ ID NO: 877003 - RNA, 22 nt, Human
uagcagaaacuguuacagaagg

SEQ ID NO: 877004 - RNA, 22 nt, Human
aucagucauauccaaauuagca

SEQ ID NO: 877005 - RNA, 22 nt, Human
cugagcaggcgguggagcggcu

SEQ ID NO: 877006 - RNA, 22 nt, Human
auacccaggcuuauguugguca

SEQ ID NO: 877007 - RNA, 22 nt, Human
uuuggaaugguaccuucaguug

SEQ ID NO: 877008 - RNA, 22 nt, Human
ccuggagauuauuugguccaau

SEQ ID NO: 877009 - RNA, 22 nt, Human
ugcucccagcuccugcagcaac

SEQ ID NO: 877010 - RNA, 22 nt, Human
acagugcccuaugaacagcucu

SEQ ID NO: 877011 - RNA, 22 nt, Human
aucaaagugguuuucugugcuu

SEQ ID NO: 877012 - RNA, 22 nt, Human
uuuggaaaauauugaacugguu

SEQ ID NO: 877013 - RNA, 22 nt, Human
uucauguuucauuuguuacuau

SEQ ID NO: 877014 - RNA, 22 nt, Human
aguguuauuuuucaaaggcccu

SEQ ID NO: 877015 - RNA, 22 nt, Human
accugggaaagccguggaaagg

SEQ ID NO: 877016 - RNA, 22 nt, Human
ggcagcauccgcccggcacccu

SEQ ID NO: 877017 - RNA, 22 nt, Human
ccuggcucugggaucuucgcuu

SEQ ID NO: 877018 - RNA, 22 nt, Human
ggagaaggaauauuggaguagg

SEQ ID NO: 877019 - RNA, 17 nt, Human
ugcugucugcuucccua

SEQ ID NO: 877020 - RNA, 22 nt, Human
uccaggagguagugcuuaauuu

SEQ ID NO: 877021 - RNA, 22 nt, Human
cuucagugaauguugaguaagg

SEQ ID NO: 877022 - RNA, 22 nt, Human
ccauucuuucagugucucaugu

SEQ ID NO: 877023 - RNA, 23 nt, Human
ugcucaauagaccauaauaucca

SEQ ID NO: 877024 - RNA, 22 nt, Human
uuccuggcaaagugagcaucac

SEQ ID NO: 877025 - RNA, 22 nt, Human
ugucuucacaugauaagccauu

SEQ ID NO: 877026 - RNA, 22 nt, Human
acagaagcaaaagcaggaucuu

SEQ ID NO: 877027 - RNA, 19 nt, Human
gccagcagaaugaugaggc

SEQ ID NO: 877028 - RNA, 22 nt, Human
aaccuaggacuauagauaucau

SEQ ID NO: 877029 - RNA, 22 nt, Human
uaacacuguccaaagaauucca

SEQ ID NO: 877030 - RNA, 22 nt, Human
aucucuaauuuaaaaaguaaca

SEQ ID NO: 877031 - RNA, 22 nt, Human
caugaaaaauuuacuguuaaca

SEQ ID NO: 877032 - RNA, 22 nt, Human
gguggccucgguggugcacagg

SEQ ID NO: 877033 - RNA, 22 nt, Human
gcugcccugccucagacuccuc

SEQ ID NO: 877034 - RNA, 22 nt, Human
ugggcacaaacaucugccuguu

SEQ ID NO: 877035 - RNA, 22 nt, Human
ugaguccaagagccagugggaa

SEQ ID NO: 877036 - RNA, 22 nt, Human
uaacauauuguguggcacuagg

SEQ ID NO: 877037 - RNA, 19 nt, Human
ugugugcccucaccacaua

SEQ ID NO: 877038 - RNA, 22 nt, Human
aggcagcagcuugcugguugcc

SEQ ID NO: 877039 - RNA, 22 nt, Human
ugacugaaauugcauuuuaaaa

SEQ ID NO: 877040 - RNA, 22 nt, Human
ucccagagcaguacuccaggag

SEQ ID NO: 877041 - RNA, 22 nt, Human
ucauggggugaauuaguaugcu

SEQ ID NO: 877042 - RNA, 22 nt, Human
guccucagagugggcagguccu

SEQ ID NO: 877043 - RNA, 22 nt, Human
uucauucacccaggaaacaucu

SEQ ID NO: 877044 - RNA, 22 nt, Human
augggcaguaacaguggcaguc

SEQ ID NO: 877045 - RNA, 22 nt, Human
uggaauguaaucagaauaugaa

SEQ ID NO: 877046 - RNA, 22 nt, Human
auuucagcccaguaugagcccc

SEQ ID NO: 877047 - RNA, 22 nt, Human
uuauguguaccucaaucugagg

SEQ ID NO: 877048 - RNA, 21 nt, Human
ugggagagcguugcuguccuc

SEQ ID NO: 877049 - RNA, 22 nt, Human
agaagccagccuugccuccuuu

SEQ ID NO: 877050 - RNA, 22 nt, Human
aaaguucuauguaauguuuuuu

SEQ ID NO: 877051 - RNA, 22 nt, Human
ucuggaauagguccugaguauu

SEQ ID NO: 877052 - RNA, 22 nt, Human
ccuucucucugaagaccccaaa

SEQ ID NO: 877053 - RNA, 22 nt, Human
augagaugugucuaauggaacc

SEQ ID NO: 877054 - RNA, 23 nt, Human
uggcccugaaucuguccuggagg

SEQ ID NO: 877055 - RNA, 17 nt, Human
acagugagaagucaucu

SEQ ID NO: 877056 - RNA, 22 nt, Human
ugaggggagcccgcccuggacg

SEQ ID NO: 877057 - RNA, 22 nt, Human
aggaggaagggaagacaaguaa

SEQ ID NO: 877058 - RNA, 22 nt, Human
guagacagcaaccaaaccaggu

SEQ ID NO: 877059 - RNA, 22 nt, Human
gaauguaagugggcagaagaca

SEQ ID NO: 877060 - RNA, 22 nt, Human
acaggucuacuggcaagcagug

SEQ ID NO: 877061 - RNA, 22 nt, Human
caguaacauuucaagguagagg

SEQ ID NO: 877062 - RNA, 22 nt, Human
cuugagaaugugagccacagau

SEQ ID NO: 877063 - RNA, 22 nt, Human
uacaaagcuguauagccugguc

SEQ ID NO: 877064 - RNA, 22 nt, Human
gucaauauagaucaaugcacag

SEQ ID NO: 877065 - RNA, 22 nt, Human
gugugcagucugcuaggcaggg

SEQ ID NO: 877066 - RNA, 22 nt, Human
uggcaacucaauuucuacaaga

SEQ ID NO: 877067 - RNA, 19 nt, Human
ccaggcuuuaugcaaauac

SEQ ID NO: 877068 - RNA, 22 nt, Human
ugcuuaaaaagcuccaucaaua

SEQ ID NO: 877069 - RNA, 22 nt, Human
ucaauucugguccucaggaacu

SEQ ID NO: 877070 - RNA, 17 nt, Human
ugaggcucggugaggag

SEQ ID NO: 877071 - RNA, 22 nt, Human
auuucuuuucaagagggugcuu

SEQ ID NO: 877072 - RNA, 22 nt, Human
uacauacauauucauacaggug

SEQ ID NO: 877073 - RNA, 22 nt, Human
ucuccagggagguagcccagug

SEQ ID NO: 877074 - RNA, 22 nt, Human
uucuagaacaggcaaaaccaau

SEQ ID NO: 877075 - RNA, 22 nt, Human
ggccugcugggccccacagucc

SEQ ID NO: 877076 - RNA, 22 nt, Human
ggcuagggaaauccugauccaa

SEQ ID NO: 877077 - RNA, 22 nt, Human
uucuaucucauauguguucuag

SEQ ID NO: 877078 - RNA, 22 nt, Human
guaagcaaacagcaaaugauuu

SEQ ID NO: 877079 - RNA, 22 nt, Human
gcugucugggaugucacugcug

SEQ ID NO: 877080 - RNA, 22 nt, Human
aaguggugguaugaaccgaggg

SEQ ID NO: 877081 - RNA, 22 nt, Human
ucacucuggccucugcagcagu

SEQ ID NO: 877082 - RNA, 22 nt, Human
uaacacugugucugccauaucc

SEQ ID NO: 877083 - RNA, 22 nt, Human
ucuccccagggguauggguauu

SEQ ID NO: 877084 - RNA, 22 nt, Human
gcuccuggcucuggccaaggga

SEQ ID NO: 877085 - RNA, 16 nt, Human
cucagcuaaggagagg

SEQ ID NO: 877086 - RNA, 22 nt, Human
agcugccuguaaaaugugugau

SEQ ID NO: 877087 - RNA, 22 nt, Human
ggccagaaguuggaaaagagcc

SEQ ID NO: 877088 - RNA, 22 nt, Human
ugagguggaaggauccuuugaa

SEQ ID NO: 877089 - RNA, 22 nt, Human
ucugacccagauggcaccgugg

SEQ ID NO: 877090 - RNA, 22 nt, Human
ucugcgugaauuugcauugugg

SEQ ID NO: 877091 - RNA, 22 nt, Human
uggcuucugcauauuuuuagag

SEQ ID NO: 877092 - RNA, 22 nt, Human
ugugggaggauucagaauuggg

SEQ ID NO: 877093 - RNA, 22 nt, Human
ccagcucucugcagaaaggacu

SEQ ID NO: 877094 - RNA, 19 nt, Human
uaguaguagaaaacaauac

SEQ ID NO: 877095 - RNA, 22 nt, Human
agagcuggagaugcagguuucg

SEQ ID NO: 877096 - RNA, 23 nt, Human
aggaagcuaccaauuuuguaggc

SEQ ID NO: 877097 - RNA, 22 nt, Human
gcuucgggguccaagcgcgugu

SEQ ID NO: 877098 - RNA, 22 nt, Human
cugcauguguuauauuugguuc

SEQ ID NO: 877099 - RNA, 22 nt, Human
uggagcaggugcucaggguaau

SEQ ID NO: 877100 - RNA, 19 nt, Human
cgcaggagccgaggugacc

SEQ ID NO: 877101 - RNA, 22 nt, Human
gagguuggcgcccugccuggcc

SEQ ID NO: 877102 - RNA, 22 nt, Human
caguggggggacugaggccuga

SEQ ID NO: 877103 - RNA, 22 nt, Human
cuuggagauacagaggacauuu

SEQ ID NO: 877104 - RNA, 22 nt, Human
cagagggaucaucuuccugaag

SEQ ID NO: 877105 - RNA, 22 nt, Human
gcugagccuagcugucuccugu

SEQ ID NO: 877106 - RNA, 22 nt, Human
gugagacaucuugggaagugau

SEQ ID NO: 877107 - RNA, 22 nt, Human
ugcaagggcuuagggggcugug

SEQ ID NO: 877108 - RNA, 22 nt, Human
uccaguugcccaucucucuucu

SEQ ID NO: 877109 - RNA, 22 nt, Human
acaaaagugagugugucucaga

SEQ ID NO: 877110 - RNA, 22 nt, Human
gcuggacucaggggacucaggg

SEQ ID NO: 877111 - RNA, 22 nt, Human
ucuccaggcuuaaucucagcuu

SEQ ID NO: 877112 - RNA, 22 nt, Human
uugcuguuucucugugucuggu

SEQ ID NO: 877113 - RNA, 22 nt, Human
aaaugaguuugccucuagauag

SEQ ID NO: 877114 - RNA, 18 nt, Human
ucacagaauauugagugg

SEQ ID NO: 877115 - RNA, 22 nt, Human
aaagcagcugauagucucaucu

SEQ ID NO: 877116 - RNA, 22 nt, Human
ccuccugggccuugcucuguga

SEQ ID NO: 877117 - RNA, 22 nt, Human
agugguuacucaagcaaaucuc

SEQ ID NO: 877118 - RNA, 22 nt, Human
cucugggaccauggcaagugcg

SEQ ID NO: 877119 - RNA, 20 nt, Human
aaacucuaccucaaucguca

SEQ ID NO: 877120 - RNA, 22 nt, Human
aauuuccugggauaaaaagcca

SEQ ID NO: 877121 - RNA, 22 nt, Human
ggcuaggggaauaaucuguggu

SEQ ID NO: 877122 - RNA, 22 nt, Human
agacagacauucuagagccacc

SEQ ID NO: 877123 - RNA, 22 nt, Human
gcacccagagggcagggucucc

SEQ ID NO: 877124 - RNA, 22 nt, Human
gagaaucuuuccccacagaagg

SEQ ID NO: 877125 - RNA, 22 nt, Human
ugguggcagugagaaggagagg

SEQ ID NO: 877126 - RNA, 22 nt, Human
uucccacauucuuuacauucau

SEQ ID NO: 877127 - RNA, 22 nt, Human
uccagcccgacugggccugccg

SEQ ID NO: 877128 - RNA, 22 nt, Human
cagcugugauaugccugccuga

SEQ ID NO: 877129 - RNA, 22 nt, Human
aguucauauugaaagcagguga

SEQ ID NO: 877130 - RNA, 22 nt, Human
ucucuugacugcuaaaauuaga

SEQ ID NO: 877131 - RNA, 22 nt, Human
caugcagucuggagccuucugu

SEQ ID NO: 877132 - RNA, 22 nt, Human
ugggagaguuuguuuagaguga

SEQ ID NO: 877133 - RNA, 22 nt, Human
aaaguugaccgaaagauuuuga

SEQ ID NO: 877134 - RNA, 22 nt, Human
ggugcagaguccacagaaagcu

SEQ ID NO: 877135 - RNA, 22 nt, Human
gcugcccucccagggcaagcuu

SEQ ID NO: 877136 - RNA, 22 nt, Human
auacagcagcccuugcuuugca

SEQ ID NO: 877137 - RNA, 22 nt, Human
gcugugugacccuagccaguag

SEQ ID NO: 877138 - RNA, 22 nt, Human
acugggccuguacagagaaaac

SEQ ID NO: 877139 - RNA, 20 nt, Human
aauguauauuuuaugccagg

SEQ ID NO: 877140 - RNA, 22 nt, Human
aagcaacauucucuguggcauu

SEQ ID NO: 877141 - RNA, 22 nt, Human
uucuauuucuuaaucuuggcug

SEQ ID NO: 877142 - RNA, 20 nt, Human
ccugggcuccaggagccccg

SEQ ID NO: 877143 - RNA, 22 nt, Human
aaggaccugauuuugagcaucu

SEQ ID NO: 877144 - RNA, 22 nt, Human
auuuaaaugcuuaagaggguuu

SEQ ID NO: 877145 - RNA, 22 nt, Human
aaaguugcuguccuagcuggcu

SEQ ID NO: 877146 - RNA, 22 nt, Human
gcacagccacugagugagaacc

SEQ ID NO: 877147 - RNA, 22 nt, Human
gcagaggacagggauuuagauu

SEQ ID NO: 877148 - RNA, 22 nt, Human
aacauccccuucaugucaugau

SEQ ID NO: 877149 - RNA, 22 nt, Human
gucuuuaagggacugaauuugg

SEQ ID NO: 877150 - RNA, 22 nt, Human
aauugcauauauaugaggccau

SEQ ID NO: 877151 - RNA, 22 nt, Human
uuugugaacaaacaugaagaug

SEQ ID NO: 877152 - RNA, 22 nt, Human
gucuuauuaaaaaucuaauccc

SEQ ID NO: 877153 - RNA, 22 nt, Human
cccugaggagagcgcuucccga

SEQ ID NO: 877154 - RNA, 22 nt, Human
aguucucuuuagcucauauggu

SEQ ID NO: 877155 - RNA, 22 nt, Human
gaagguguccacuucucaccuc

SEQ ID NO: 877156 - RNA, 22 nt, Human
uauagaacaaguuauuuaugcu

SEQ ID NO: 877157 - RNA, 22 nt, Human
gagagaggccuccauguacuga

SEQ ID NO: 877158 - RNA, 22 nt, Human
aucuacauaaaacgaauacaua

SEQ ID NO: 877159 - RNA, 22 nt, Human
uuguaaaugaccuuuucuaauu

SEQ ID NO: 877160 - RNA, 22 nt, Human
ugucuuauguagauacugagaa

SEQ ID NO: 877161 - RNA, 22 nt, Human
gcuacacaauagcguucacuua

SEQ ID NO: 877162 - RNA, 17 nt, Human
ucugaggccucuaggag

SEQ ID NO: 877163 - RNA, 22 nt, Human
ggcgccagcccaggccgucgug

SEQ ID NO: 877164 - RNA, 17 nt, Human
aaauaugaccucaaagu

SEQ ID NO: 877165 - RNA, 22 nt, Human
cuucacaguaaauccagaagaa

SEQ ID NO: 877166 - RNA, 22 nt, Human
uauguacucuaauuugucucau

SEQ ID NO: 877167 - RNA, 22 nt, Human
uagagucuaguguauacaaagu

SEQ ID NO: 877168 - RNA, 19 nt, Human
acucaagucuaaugaaauc

SEQ ID NO: 877169 - RNA, 22 nt, Human
gcccagcuccucugcagacccu

SEQ ID NO: 877170 - RNA, 22 nt, Human
gcccucugcucagcuccucagc

SEQ ID NO: 877171 - RNA, 22 nt, Human
ggagccuggccuggcucugugu

SEQ ID NO: 877172 - RNA, 22 nt, Human
gcuuaaugagcagagaaucuac

SEQ ID NO: 877173 - RNA, 22 nt, Human
ucacagcacccugaggugcugg

SEQ ID NO: 877174 - RNA, 22 nt, Human
gaguauaaguaauuucaagcaa

SEQ ID NO: 877175 - RNA, 22 nt, Human
uaacuguaguuauaaagcuauc

SEQ ID NO: 877176 - RNA, 22 nt, Human
uucacaaaacacuauuuucugg

SEQ ID NO: 877177 - RNA, 20 nt, Human
cuccaaggcuugcaggaggc

SEQ ID NO: 877178 - RNA, 22 nt, Human
uauagaagagacaugugcauag

SEQ ID NO: 877179 - RNA, 22 nt, Human
cagccagaggcugcgaggggcc

SEQ ID NO: 877180 - RNA, 22 nt, Human
uucuguucugauacuuguuucu

SEQ ID NO: 877181 - RNA, 22 nt, Human
accaggacuuuguauucagcuu

SEQ ID NO: 877182 - RNA, 22 nt, Human
gcauuuguguucuuccuagagc

SEQ ID NO: 877183 - RNA, 22 nt, Human
uuuuuauaugaaggauagugcg

SEQ ID NO: 877184 - RNA, 22 nt, Human
aaaauggcuguggucuggcaag

SEQ ID NO: 877185 - RNA, 22 nt, Human
ucugccuguugagccuaaggcc

SEQ ID NO: 877186 - RNA, 22 nt, Human
ugugaggaugugagcgugaacc

SEQ ID NO: 877187 - RNA, 22 nt, Human
cggcagagcggcgagccccucc

SEQ ID NO: 877188 - RNA, 22 nt, Human
uggcucagccagcccuaggaac

SEQ ID NO: 877189 - RNA, 22 nt, Human
ucagaagucacuuaggaaaggg

SEQ ID NO: 877190 - RNA, 19 nt, Human
caggacaguuugccaagaa

SEQ ID NO: 877191 - RNA, 22 nt, Human
cucacugacugcaagucaaguu

SEQ ID NO: 877192 - RNA, 22 nt, Human
ucaauuauuugauaugaaaggg

SEQ ID NO: 877193 - RNA, 22 nt, Human
agauucagaaaauucucuguuc

SEQ ID NO: 877194 - RNA, 20 nt, Human
aacauugaaagucuagaaga

SEQ ID NO: 877195 - RNA, 22 nt, Human
agccacagcuccuugguggaga

SEQ ID NO: 877196 - RNA, 22 nt, Human
uccugccucuugccuucuucac

SEQ ID NO: 877197 - RNA, 20 nt, Human
ggcuucacucugcaccacca

SEQ ID NO: 877198 - RNA, 22 nt, Human
auuucucaggacuccaugggcg

SEQ ID NO: 877199 - RNA, 21 nt, Human
uagaaucacuaauaagaugua

SEQ ID NO: 877200 - RNA, 19 nt, Human
cuggcuucaagcaguccuc

SEQ ID NO: 877201 - RNA, 22 nt, Human
ccacugucuuuuccaggcugaa

SEQ ID NO: 877202 - RNA, 22 nt, Human
aagcccaguaccuucagugagg

SEQ ID NO: 877203 - RNA, 22 nt, Human
uauuugcugugcuuauuccauu

SEQ ID NO: 877204 - RNA, 22 nt, Human
aaaugaguuuccucaauguccu

SEQ ID NO: 877205 - RNA, 23 nt, Human
gggagaauaugaggaugauggug

SEQ ID NO: 877206 - RNA, 22 nt, Human
guuugacacggugcgucuucag

SEQ ID NO: 877207 - RNA, 22 nt, Human
gugccuggaaugcgccucggcg

SEQ ID NO: 877208 - RNA, 22 nt, Human
cuaugaccccagcaugaauaag

SEQ ID NO: 877209 - RNA, 22 nt, Human
ugugccagugccuuggguauua

SEQ ID NO: 877210 - RNA, 22 nt, Human
ugucuccuauuuccugcuaagg

SEQ ID NO: 877211 - RNA, 22 nt, Human
acaguggccucaaagaaagaga

SEQ ID NO: 877212 - RNA, 22 nt, Human
agugucuguuacgcuugcagaa

SEQ ID NO: 877213 - RNA, 22 nt, Human
agagcuggccagggaucacucu

SEQ ID NO: 877214 - RNA, 22 nt, Human
aaaaugcaaaccuaccuacaua

SEQ ID NO: 877215 - RNA, 22 nt, Human
agaaaucacaggaggcagaagg

SEQ ID NO: 877216 - RNA, 22 nt, Human
aggcccuggguuagggcccacu

SEQ ID NO: 877217 - RNA, 22 nt, Human
caagaggcuaaacugggcuauu

SEQ ID NO: 877218 - RNA, 22 nt, Human
gggaacagaggaggguguugcu

SEQ ID NO: 877219 - RNA, 22 nt, Human
ggaaaccaggacugcaccgucu

SEQ ID NO: 877220 - RNA, 22 nt, Human
uggcuggaaacaggagauucag

SEQ ID NO: 877221 - RNA, 23 nt, Human
ggcuccuggauucaaauccugcc

SEQ ID NO: 877222 - RNA, 22 nt, Human
uggcuuuaaaucuguauucaua

SEQ ID NO: 877223 - RNA, 22 nt, Human
aagccucaccuuuuagaagcua

SEQ ID NO: 877224 - RNA, 22 nt, Human
acaggcagagaacucagccaga

SEQ ID NO: 877225 - RNA, 22 nt, Human
augucugauaaauaaugcauaa

SEQ ID NO: 877226 - RNA, 22 nt, Human
uuccucuggaggcucuaggaga

SEQ ID NO: 877227 - RNA, 22 nt, Human
gaaucuuauuuuuaaaucuucc

SEQ ID NO: 877228 - RNA, 22 nt, Human
ggcaggaagaggagggugaacu

SEQ ID NO: 877229 - RNA, 22 nt, Human
ggcagcaggagccaucugguag

SEQ ID NO: 877230 - RNA, 22 nt, Human
aagaugaaaauuuacugugaug

SEQ ID NO: 877231 - RNA, 22 nt, Human
gcuuacaagaucgugcuccagu

SEQ ID NO: 877232 - RNA, 22 nt, Human
ucaucauaauauggaaucuugu

SEQ ID NO: 877233 - RNA, 22 nt, Human
cagagacaggcuugcccuccac

SEQ ID NO: 877234 - RNA, 22 nt, Human
agggagguccaucccugcagag

SEQ ID NO: 877235 - RNA, 22 nt, Human
caggugucaaaauacuaagugg

SEQ ID NO: 877236 - RNA, 22 nt, Human
ccucagcucuucccugugcaca

SEQ ID NO: 877237 - RNA, 22 nt, Human
uuugagaaguaauucaagacau

SEQ ID NO: 877238 - RNA, 22 nt, Human
gugcccaggugucccugagaag

SEQ ID NO: 877239 - RNA, 22 nt, Human
auguucuucuaucuuuauuaaa

SEQ ID NO: 877240 - RNA, 22 nt, Human
gggcagugggaccaggcaccag

SEQ ID NO: 877241 - RNA, 20 nt, Human
cucuccuugccgacuuggca

SEQ ID NO: 877242 - RNA, 22 nt, Human
guggagcccugccuugcucaug

SEQ ID NO: 877243 - RNA, 22 nt, Human
uggcauuuggcuuacuuauguu

SEQ ID NO: 877244 - RNA, 22 nt, Human
gugaauaauuuuuuaguauaag

SEQ ID NO: 877245 - RNA, 20 nt, Human
aaagccacuggcaagagacu

SEQ ID NO: 877246 - RNA, 22 nt, Human
cagggugccuguccucagcaaa

SEQ ID NO: 877247 - RNA, 22 nt, Human
cagugcugacagggaggaaccu

SEQ ID NO: 877248 - RNA, 20 nt, Human
ccucugccccggggcugcua

SEQ ID NO: 877249 - RNA, 22 nt, Human
agggccagcccauaaugccaaa

SEQ ID NO: 877250 - RNA, 22 nt, Human
uccugagcugacacuuggggag

SEQ ID NO: 877251 - RNA, 22 nt, Human
uccugacuaggagggcuaaggu

SEQ ID NO: 877252 - RNA, 22 nt, Human
aaacauugaccucauccuggca

SEQ ID NO: 877253 - RNA, 22 nt, Human
auuacacacucaaguccuguua

SEQ ID NO: 877254 - RNA, 22 nt, Human
ucuccacaccagaaggagcuga

SEQ ID NO: 877255 - RNA, 22 nt, Human
ugcugggcuagaagcugaggcc

SEQ ID NO: 877256 - RNA, 19 nt, Human
agcuguggggccuagcacc

SEQ ID NO: 877257 - RNA, 22 nt, Human
ugcagcccaggcgucagguggu

SEQ ID NO: 877258 - RNA, 22 nt, Human
auucaaaguagaugaaguuuca

SEQ ID NO: 877259 - RNA, 22 nt, Human
caagaacaguuugccaaauugg

SEQ ID NO: 877260 - RNA, 21 nt, Human
uacaagaccggauucgggccc

SEQ ID NO: 877261 - RNA, 22 nt, Human
gaggaggaaaggaguugaaaug

SEQ ID NO: 877262 - RNA, 22 nt, Human
aauguuucguaaauugucuaug

SEQ ID NO: 877263 - RNA, 22 nt, Human
guccucuggccuuucccaggac

SEQ ID NO: 877264 - RNA, 22 nt, Human
aagccagguuccauggaggagc

SEQ ID NO: 877265 - RNA, 22 nt, Human
aacaggaauugcaggcagaucu

SEQ ID NO: 877266 - RNA, 22 nt, Human
aucagcugaugaauggaugaau

SEQ ID NO: 877267 - RNA, 22 nt, Human
agagccaggaaguggcgugggg

SEQ ID NO: 877268 - RNA, 22 nt, Human
acagucuucccuuauuccacuc

SEQ ID NO: 877269 - RNA, 22 nt, Human
uuucuucauagaccuugucuug

SEQ ID NO: 877270 - RNA, 22 nt, Human
cugaaguuuuucaauuuauguu

SEQ ID NO: 877271 - RNA, 22 nt, Human
aaugaagccacugaagacaauc

SEQ ID NO: 877272 - RNA, 22 nt, Human
auuaaauacugcaggcuaagca

SEQ ID NO: 877273 - RNA, 22 nt, Human
uguuggcaucucugagagaguu

SEQ ID NO: 877274 - RNA, 22 nt, Human
gcccaagcagcuucccgagcuu

SEQ ID NO: 877275 - RNA, 22 nt, Human
cagaagaaaguggggagacaag

SEQ ID NO: 877276 - RNA, 22 nt, Human
caggcccugccuuggcaugugu

SEQ ID NO: 877277 - RNA, 22 nt, Human
agucagcagccuggccaggaga

SEQ ID NO: 877278 - RNA, 22 nt, Human
ccagccuugcaccgagccagcc

SEQ ID NO: 877279 - RNA, 22 nt, Human
uagaggugucacuuugggaagu

SEQ ID NO: 877280 - RNA, 23 nt, Human
aauagcugguaaugauagcacaa

SEQ ID NO: 877281 - RNA, 22 nt, Human
uuccuuaguugacugucuuagu

SEQ ID NO: 877282 - RNA, 22 nt, Human
aacagcauaccaauguacauau

SEQ ID NO: 877283 - RNA, 22 nt, Human
aggcaagcagucagucuaugag

SEQ ID NO: 877284 - RNA, 22 nt, Human
ucugaagggcugaguggaggag

SEQ ID NO: 877285 - RNA, 22 nt, Human
gccaccagggggugcaaggucc

SEQ ID NO: 877286 - RNA, 22 nt, Human
cauugaaaccuaacauaggcug

SEQ ID NO: 877287 - RNA, 20 nt, Human
acacagagugagucugcuug

SEQ ID NO: 877288 - RNA, 22 nt, Human
aucuuuggggcauccaggaaaa

SEQ ID NO: 877289 - RNA, 22 nt, Human
guacaaaugcagguuuguuaca

SEQ ID NO: 877290 - RNA, 22 nt, Human
aagaaagauaagguuugcuugg

SEQ ID NO: 877291 - RNA, 22 nt, Human
aaguucuaacaucuacguggaa

SEQ ID NO: 877292 - RNA, 22 nt, Human
uguaaacaugcugaggcuggag

SEQ ID NO: 877293 - RNA, 22 nt, Human
aagcaggagaugcaggaaugua

SEQ ID NO: 877294 - RNA, 21 nt, Human
aggugcagagccagggaccag

SEQ ID NO: 877295 - RNA, 22 nt, Human
agcuccuggggguuccaagcag

SEQ ID NO: 877296 - RNA, 22 nt, Human
ggaacaggaaaggagggaugcu

SEQ ID NO: 877297 - RNA, 23 nt, Human
ugauuuccagugagucaguggga

SEQ ID NO: 877298 - RNA, 22 nt, Human
accugggaacgcuuuguggagg

SEQ ID NO: 877299 - RNA, 22 nt, Human
cugagaaagugaggguuaaaca

SEQ ID NO: 877300 - RNA, 22 nt, Human
ugaggcaggacuugcauaaagu

SEQ ID NO: 877301 - RNA, 20 nt, Human
uggaccugucucuuuaggga

SEQ ID NO: 877302 - RNA, 22 nt, Human
aacuauacauauuuacauagac

SEQ ID NO: 877303 - RNA, 18 nt, Human
cuccuuggagaagaggcc

SEQ ID NO: 877304 - RNA, 22 nt, Human
gggaccugaggcccugcuccac

SEQ ID NO: 877305 - RNA, 22 nt, Human
acguuauaucugaaaaaaguga

SEQ ID NO: 877306 - RNA, 22 nt, Human
cuguuuccugucuucucacuau

SEQ ID NO: 877307 - RNA, 22 nt, Human
ccugcucggggugcagugggcu

SEQ ID NO: 877308 - RNA, 22 nt, Human
uggccuggaaccuggcagggac

SEQ ID NO: 877309 - RNA, 22 nt, Human
uccacaggucagggagauaggc

SEQ ID NO: 877310 - RNA, 22 nt, Human
uaagcauacauucucuccuuuc

SEQ ID NO: 877311 - RNA, 22 nt, Human
ggaaauacaaagauacaccacu

SEQ ID NO: 877312 - RNA, 22 nt, Human
uccagcagaaccagagaccugg

SEQ ID NO: 877313 - RNA, 22 nt, Human
ugacagggucagagcugagcug

SEQ ID NO: 877314 - RNA, 22 nt, Human
gagagaaaacaaguucuccauu

SEQ ID NO: 877315 - RNA, 22 nt, Human
uuuguucugaagcaaguaggga

SEQ ID NO: 877316 - RNA, 22 nt, Human
aaauuauaggugccaccuugga

SEQ ID NO: 877317 - RNA, 22 nt, Human
uaacagaguuguacaguuacgu

SEQ ID NO: 877318 - RNA, 22 nt, Human
aggcugggcaccguuuugaucc

SEQ ID NO: 877319 - RNA, 22 nt, Human
uaacuacaagggcggucucugu

SEQ ID NO: 877320 - RNA, 22 nt, Human
gaugcgggcccgcuccacugcc

SEQ ID NO: 877321 - RNA, 22 nt, Human
ugguaggagauauggucuccga

SEQ ID NO: 877322 - RNA, 22 nt, Human
gcacccucugagcuccgcuccg

SEQ ID NO: 877323 - RNA, 22 nt, Human
uaauaccacugugcucauuaua

SEQ ID NO: 877324 - RNA, 22 nt, Human
gcugggacaggcuuggcccugu

SEQ ID NO: 877325 - RNA, 22 nt, Human
ccucuggccacaugggacauag

SEQ ID NO: 877326 - RNA, 22 nt, Human
uggcccuauuuggaaauagagc

SEQ ID NO: 877327 - RNA, 22 nt, Human
augauucucauuuuauaaacuu

SEQ ID NO: 877328 - RNA, 22 nt, Human
uuuugauaucaugaugaacaga

SEQ ID NO: 877329 - RNA, 22 nt, Human
agcugccacagagccuggccag

SEQ ID NO: 877330 - RNA, 22 nt, Human
aucaacauacugcucaggcauu

SEQ ID NO: 877331 - RNA, 22 nt, Human
auguuuccauguucaauuuacu

SEQ ID NO: 877332 - RNA, 22 nt, Human
gcuccaggcugcucugucccau

SEQ ID NO: 877333 - RNA, 22 nt, Human
cuggagagaaaugacaaagcua

SEQ ID NO: 877334 - RNA, 22 nt, Human
agcagggcuccauuucacugcc

SEQ ID NO: 877335 - RNA, 22 nt, Human
caggaagauuagaccaagagcu

SEQ ID NO: 877336 - RNA, 22 nt, Human
ggugcccaccugucuuccugga

SEQ ID NO: 877337 - RNA, 19 nt, Human
ugcugcagucaggcgaggg

SEQ ID NO: 877338 - RNA, 18 nt, Human
cucugucauaagugucau

SEQ ID NO: 877339 - RNA, 22 nt, Human
ugccugcucuugagacuuacaa

SEQ ID NO: 877340 - RNA, 22 nt, Human
cucccuggcacagcgagagguu

SEQ ID NO: 877341 - RNA, 19 nt, Human
ggcagacacaguugacaug

SEQ ID NO: 877342 - RNA, 22 nt, Human
cuuagaacauacuuagugugau

SEQ ID NO: 877343 - RNA, 22 nt, Human
aggcuugucucagaagaugcug

SEQ ID NO: 877344 - RNA, 22 nt, Human
ugcuuccuugagcucuccaauc

SEQ ID NO: 877345 - RNA, 22 nt, Human
aaagcuauucaacacgaacaug

SEQ ID NO: 877346 - RNA, 22 nt, Human
uugugcucuguguuauuuaagg

SEQ ID NO: 877347 - RNA, 22 nt, Human
ugucuuuggggcuguaccuguu

SEQ ID NO: 877348 - RNA, 22 nt, Human
uuuauccacaguauccaaaauc

SEQ ID NO: 877349 - RNA, 22 nt, Human
ucuuucaaaguaacaaccacga

SEQ ID NO: 877350 - RNA, 20 nt, Human
agaagcugauacugauggaa

SEQ ID NO: 877351 - RNA, 22 nt, Human
gccuuaauuaguaacagaccau

SEQ ID NO: 877352 - RNA, 22 nt, Human
uccucacagaugggugcauagc

SEQ ID NO: 877353 - RNA, 22 nt, Human
cucuggagguggagguugcagu

SEQ ID NO: 877354 - RNA, 22 nt, Human
cacaaaugguuguagacauuaa

SEQ ID NO: 877355 - RNA, 22 nt, Human
cugagcagaagggugcacgugc

SEQ ID NO: 877356 - RNA, 22 nt, Human
cugcuggagguuggagcaugca

SEQ ID NO: 877357 - RNA, 19 nt, Human
ccagguggaacugagguag

SEQ ID NO: 877358 - RNA, 21 nt, Human
accucaagcaacaaccaaggu

SEQ ID NO: 877359 - RNA, 22 nt, Human
caggaggcaguuucagaaguca

SEQ ID NO: 877360 - RNA, 22 nt, Human
accagggcugacaaucugaugg

SEQ ID NO: 877361 - RNA, 22 nt, Human
uuacacaggcacuuaaaaugca

SEQ ID NO: 877362 - RNA, 22 nt, Human
cauaaaauggcuuguucuuuaa

SEQ ID NO: 877363 - RNA, 21 nt, Human
gucugcagaccccuucauugc

SEQ ID NO: 877364 - RNA, 22 nt, Human
cgggguggcacucuaaauagaa

SEQ ID NO: 877365 - RNA, 22 nt, Human
gcuccuggcuucacugacauca

SEQ ID NO: 877366 - RNA, 21 nt, Human
uucaauacuauuucaauaguc

SEQ ID NO: 877367 - RNA, 20 nt, Human
uucaaagacccucaggucca

SEQ ID NO: 877368 - RNA, 22 nt, Human
guggguccgcuugguuccggug

SEQ ID NO: 877369 - RNA, 22 nt, Human
acagcaagccagcuugucacug

SEQ ID NO: 877370 - RNA, 22 nt, Human
uugaaauagaugcgucagagau

SEQ ID NO: 877371 - RNA, 22 nt, Human
guccaagagucaagaagggggc

SEQ ID NO: 877372 - RNA, 21 nt, Human
uuucuucccuuggcuucugag

SEQ ID NO: 877373 - RNA, 22 nt, Human
acagucucuuggaauuuucaga

SEQ ID NO: 877374 - RNA, 22 nt, Human
ucagaugagugcuuucagcugc

SEQ ID NO: 877375 - RNA, 22 nt, Human
cugaaauguuaaauacuuggcu

SEQ ID NO: 877376 - RNA, 22 nt, Human
gcuggaggaggaagugugaggg

SEQ ID NO: 877377 - RNA, 22 nt, Human
ggaagcugccaguccaccagcu

SEQ ID NO: 877378 - RNA, 22 nt, Human
cuucuagaguuucugaugcaac

SEQ ID NO: 877379 - RNA, 22 nt, Human
ugaaagcuuguuggaaauguag

SEQ ID NO: 877380 - RNA, 22 nt, Human
gccuggcugcuagccagaggca

SEQ ID NO: 877381 - RNA, 22 nt, Human
uguuuuauuucuccaagaggga

SEQ ID NO: 877382 - RNA, 22 nt, Human
cuguuauuuggaggaugcuugg

SEQ ID NO: 877383 - RNA, 22 nt, Human
gccuuaauuuuuuauaaucucu

SEQ ID NO: 877384 - RNA, 22 nt, Human
cugaacaggcucugauggauuc

SEQ ID NO: 877385 - RNA, 22 nt, Human
uauauaauuuguaaaagcaccu

SEQ ID NO: 877386 - RNA, 22 nt, Human
acuggaaugaaguuaaucugau

SEQ ID NO: 877387 - RNA, 22 nt, Human
ggcaagcauaaccuguacagcc

SEQ ID NO: 877388 - RNA, 22 nt, Human
cagucucucuuguagugcagcu

SEQ ID NO: 877389 - RNA, 17 nt, Human
cccaggccgccgggagc

SEQ ID NO: 877390 - RNA, 19 nt, Human
cgcaggcuucgggucgcuc

SEQ ID NO: 877391 - RNA, 22 nt, Human
ggccugacaagugggaagaggc

SEQ ID NO: 877392 - RNA, 22 nt, Human
uggaaugacaaguuguucagag

SEQ ID NO: 877393 - RNA, 20 nt, Human
uccucccccaccuuugcagc

SEQ ID NO: 877394 - RNA, 20 nt, Human
ugugcccaauguccagguuc

SEQ ID NO: 877395 - RNA, 22 nt, Human
gagcuccagcaucucugccaaa

SEQ ID NO: 877396 - RNA, 22 nt, Human
ggugagcaaagcuucaucugua

SEQ ID NO: 877397 - RNA, 22 nt, Human
acuuauauuugcuuuaugcuuc

SEQ ID NO: 877398 - RNA, 22 nt, Human
caguucuggaguuucauucuuu

SEQ ID NO: 877399 - RNA, 22 nt, Human
cuguuuguuggcuauugacagu

SEQ ID NO: 877400 - RNA, 22 nt, Human
auuuccauuaucaugacaaauu

SEQ ID NO: 877401 - RNA, 20 nt, Human
uuggcagcagcucagccacc

SEQ ID NO: 877402 - RNA, 22 nt, Human
gugauaaaggggaggaagugug

SEQ ID NO: 877403 - RNA, 22 nt, Human
gcuagggaaccucuucugagga

SEQ ID NO: 877404 - RNA, 22 nt, Human
gagguccaacacaauggguguu

SEQ ID NO: 877405 - RNA, 18 nt, Human
ugucaguaaagugacaga

SEQ ID NO: 877406 - RNA, 22 nt, Human
aauuuuaucucuaagcaggcuu

SEQ ID NO: 877407 - RNA, 21 nt, Human
agcugggccucagccugcagu

SEQ ID NO: 877408 - RNA, 22 nt, Human
caguggcauacuuggcugauau

SEQ ID NO: 877409 - RNA, 22 nt, Human
uggcauggacuagugcugaggu

SEQ ID NO: 877410 - RNA, 22 nt, Human
aggcugugacuacgcagggaag

SEQ ID NO: 877411 - RNA, 22 nt, Human
gcagcagaggcccuacucuuug

SEQ ID NO: 877412 - RNA, 18 nt, Human
caaauacuguugucuuau

SEQ ID NO: 877413 - RNA, 22 nt, Human
ugcagccagcaagugaauacau

SEQ ID NO: 877414 - RNA, 22 nt, Human
acauaaauagauuauugggagg

SEQ ID NO: 877415 - RNA, 22 nt, Human
uauaggacugaucacauuuuca

SEQ ID NO: 877416 - RNA, 22 nt, Human
cucuggaggccguuggcccuua

SEQ ID NO: 877417 - RNA, 22 nt, Human
ugaaucaaugaauugcacuuca

SEQ ID NO: 877418 - RNA, 22 nt, Human
acgggcagacagagcuacucgc

SEQ ID NO: 877419 - RNA, 22 nt, Human
uugagcaggauggcuaugcaca

SEQ ID NO: 877420 - RNA, 22 nt, Human
agaggucuaugcuaggggaacu

SEQ ID NO: 877421 - RNA, 22 nt, Human
ugggcaggcaagugaauaccuu

SEQ ID NO: 877422 - RNA, 22 nt, Human
ucaggcugggagacaaucacug

SEQ ID NO: 877423 - RNA, 22 nt, Human
caggaacacaaugagucucaaa

SEQ ID NO: 877424 - RNA, 22 nt, Human
gacacagggggauguguggacg

SEQ ID NO: 877425 - RNA, 22 nt, Human
ucugaagaacugaguaaacaug

SEQ ID NO: 877426 - RNA, 22 nt, Human
uaaugcugccaagccaugcaga

SEQ ID NO: 877427 - RNA, 22 nt, Human
gcaccugcuggggcugaugaga

SEQ ID NO: 877428 - RNA, 22 nt, Human
gcugcagggagcuggaaggcuc

SEQ ID NO: 877429 - RNA, 21 nt, Human
acagggcaugcagcuggcugu

SEQ ID NO: 877430 - RNA, 22 nt, Human
ucugucugggugccucgaguac

SEQ ID NO: 877431 - RNA, 19 nt, Human
cacagcuggcgcugaccgc

SEQ ID NO: 877432 - RNA, 22 nt, Human
uacauaauuaaucuuuaaguuc

SEQ ID NO: 877433 - RNA, 22 nt, Human
ugaggcagaaauuccuguuuuc

SEQ ID NO: 877434 - RNA, 22 nt, Human
uaauacagaaguguauuaaaau

SEQ ID NO: 877435 - RNA, 22 nt, Human
caagauuugccaguggccaacu

SEQ ID NO: 877436 - RNA, 22 nt, Human
acagaauagguacagucaguca

SEQ ID NO: 877437 - RNA, 22 nt, Human
aggagggcaggcuggcugccua

SEQ ID NO: 877438 - RNA, 22 nt, Human
ggggauggugggaaggcaaucu

SEQ ID NO: 877439 - RNA, 22 nt, Human
gagaaagauuguccuucagggg

SEQ ID NO: 877440 - RNA, 22 nt, Human
ugccucuuggagccuuuccucu

SEQ ID NO: 877441 - RNA, 22 nt, Human
caggcagcaucagucugcugua

SEQ ID NO: 877442 - RNA, 22 nt, Human
agcauugagguggguuucucuu

SEQ ID NO: 877443 - RNA, 22 nt, Human
uuccauaauaaccugagagaaa

SEQ ID NO: 877444 - RNA, 22 nt, Human
ucacccagcagcugcuucugcu

SEQ ID NO: 877445 - RNA, 22 nt, Human
guuuaacauuguaccaacaccu

SEQ ID NO: 877446 - RNA, 22 nt, Human
auggaaaucgaugucuaaguua

SEQ ID NO: 877447 - RNA, 22 nt, Human
gagcucagcaaaggucugugug

SEQ ID NO: 877448 - RNA, 22 nt, Human
cagugcagaggugcaagcaugu

SEQ ID NO: 877449 - RNA, 22 nt, Human
uccacaauggcagagaaauguc

SEQ ID NO: 877450 - RNA, 22 nt, Human
ucucugagaucagccacugacu

SEQ ID NO: 877451 - RNA, 22 nt, Human
aauguuacaguuuuaauucuga

SEQ ID NO: 877452 - RNA, 22 nt, Human
cacagggccuugugugacugca

SEQ ID NO: 877453 - RNA, 22 nt, Human
uaaugcaauuuucucaguccau

SEQ ID NO: 877454 - RNA, 22 nt, Human
ucacaaaugucuccuguccugu

SEQ ID NO: 877455 - RNA, 20 nt, Human
gugcagaggcagccuguggg

SEQ ID NO: 877456 - RNA, 22 nt, Human
ccacaggaaguuaugaguacua

SEQ ID NO: 877457 - RNA, 22 nt, Human
augugugccccuuuuacucuuu

SEQ ID NO: 877458 - RNA, 22 nt, Human
agugacaaagauucuccuuguu

SEQ ID NO: 877459 - RNA, 22 nt, Human
caguuuucuaaagucucuuuaa

SEQ ID NO: 877460 - RNA, 22 nt, Human
uuauacuuuauacuacaucauu

SEQ ID NO: 877461 - RNA, 22 nt, Human
caucagagucagagcucuuucu

SEQ ID NO: 877462 - RNA, 22 nt, Human
aucuguccugugacagugggag

SEQ ID NO: 877463 - RNA, 22 nt, Human
guggaaaagaaagucuuccuug

SEQ ID NO: 877464 - RNA, 22 nt, Human
cagcccugugcggagggcccug

SEQ ID NO: 877465 - RNA, 22 nt, Human
cggagccugcuuguugcagcug

SEQ ID NO: 877466 - RNA, 22 nt, Human
ucagugucuauagauaagguuu

SEQ ID NO: 877467 - RNA, 22 nt, Human
ucagugucuugaccugggugug

SEQ ID NO: 877468 - RNA, 22 nt, Human
cacauguuugcuacauuuuucu

SEQ ID NO: 877469 - RNA, 21 nt, Human
aaaauguuuccuuguugguua

SEQ ID NO: 877470 - RNA, 22 nt, Human
gcuggccacacugcugauggag

SEQ ID NO: 877471 - RNA, 23 nt, Human
ucuuuagaagaacaucagaaaug

SEQ ID NO: 877472 - RNA, 22 nt, Human
caauucaaaccagucugucucu

SEQ ID NO: 877473 - RNA, 22 nt, Human
agucucuauguuccugcaauau

SEQ ID NO: 877474 - RNA, 22 nt, Human
uguuaauuucuuuagaagugga

SEQ ID NO: 877475 - RNA, 22 nt, Human
uggcucauucuggggaagucag

SEQ ID NO: 877476 - RNA, 23 nt, Human
uaucaguaagcaucccugaaccc

SEQ ID NO: 877477 - RNA, 22 nt, Human
gggaggaaaugugcagcgaauu

SEQ ID NO: 877478 - RNA, 22 nt, Human
cagauaaaauuaauauuaccaa

SEQ ID NO: 877479 - RNA, 21 nt, Human
acagccuugugauggagacag

SEQ ID NO: 877480 - RNA, 22 nt, Human
uuguguuugaugcugacacgca

SEQ ID NO: 877481 - RNA, 22 nt, Human
ugugagagagugcauuugcaua

SEQ ID NO: 877482 - RNA, 22 nt, Human
agaagaaaugugaaggccacug

SEQ ID NO: 877483 - RNA, 22 nt, Human
auuugacaacuucugguggcau

SEQ ID NO: 877484 - RNA, 23 nt, Human
gcugccucuguuggucuucaguu

SEQ ID NO: 877485 - RNA, 23 nt, Human
ucaaacuguuauauugccagagu

SEQ ID NO: 877486 - RNA, 22 nt, Human
ugggaggugauuaaauuauggg

SEQ ID NO: 877487 - RNA, 22 nt, Human
ucaugcaaauacuguuccagaa

SEQ ID NO: 877488 - RNA, 22 nt, Human
uucuagcagagggcaucugcug

SEQ ID NO: 877489 - RNA, 22 nt, Human
aagggcaggugggcauuucugg

SEQ ID NO: 877490 - RNA, 22 nt, Human
ucauuugugugagugauuugac

SEQ ID NO: 877491 - RNA, 22 nt, Human
gugggcagacaugauagaagga

SEQ ID NO: 877492 - RNA, 22 nt, Human
ugacagaaugugacucucagau

SEQ ID NO: 877493 - RNA, 22 nt, Human
aacaucaucaugaacaacuaau

SEQ ID NO: 877494 - RNA, 22 nt, Human
cuggggagugaaauucuuaaau

SEQ ID NO: 877495 - RNA, 22 nt, Human
cugagaggcggagcuugcagug

SEQ ID NO: 877496 - RNA, 22 nt, Human
ugauaaacuggagagguggagg

SEQ ID NO: 877497 - RNA, 22 nt, Human
cuggcuggucugagcagucgca

SEQ ID NO: 877498 - RNA, 22 nt, Human
auguguuuuuauucuggcaugu

SEQ ID NO: 877499 - RNA, 22 nt, Human
uggaagauaugcugauucucug

SEQ ID NO: 877500 - RNA, 22 nt, Human
guuucaaagggaagacgcugga

SEQ ID NO: 877501 - RNA, 22 nt, Human
gaaaucacuuuuuucauaguug

SEQ ID NO: 877502 - RNA, 22 nt, Human
accagggcccgggagagcucuc

SEQ ID NO: 877503 - RNA, 22 nt, Human
gccagcuguaagcuggggugau

SEQ ID NO: 877504 - RNA, 21 nt, Human
ggaacauuguuaauagucucu

SEQ ID NO: 877505 - RNA, 22 nt, Human
uauuagugaaagaauuaguuug

SEQ ID NO: 877506 - RNA, 22 nt, Human
cucuagaaugaauuagcgcagg

SEQ ID NO: 877507 - RNA, 22 nt, Human
cacauugggcuugcaugcacgg

SEQ ID NO: 877508 - RNA, 22 nt, Human
uggcuucugagucuccugacau

SEQ ID NO: 877509 - RNA, 21 nt, Human
aggaaaggaaguccccagggu

SEQ ID NO: 877510 - RNA, 22 nt, Human
aaguguguugacugaauugggg

SEQ ID NO: 877511 - RNA, 22 nt, Human
ucuuuagagcacgggaaaaaca

SEQ ID NO: 877512 - RNA, 22 nt, Human
ucagauacuguggcuuaugggc

SEQ ID NO: 877513 - RNA, 17 nt, Human
agccgggcauggaccag

SEQ ID NO: 877514 - RNA, 22 nt, Human
aggggccuggacauggacgcgc

SEQ ID NO: 877515 - RNA, 20 nt, Human
uggagcuccagcguccaugu

SEQ ID NO: 877516 - RNA, 22 nt, Human
agccucugacugucagcaaggu

SEQ ID NO: 877517 - RNA, 22 nt, Human
ucauaaauucuggugcugugag

SEQ ID NO: 877518 - RNA, 22 nt, Human
caacacuucuuauacuuacuga

SEQ ID NO: 877519 - RNA, 22 nt, Human
gaggccuggaauuccagccugg

SEQ ID NO: 877520 - RNA, 22 nt, Human
gcauucuuuuuaggagguuccu

SEQ ID NO: 877521 - RNA, 22 nt, Human
auauaauuguucugaaguguuu

SEQ ID NO: 877522 - RNA, 22 nt, Human
caauucugcaagugacugaccu

SEQ ID NO: 877523 - RNA, 22 nt, Human
uuuccaguuguucuagaaagcu

SEQ ID NO: 877524 - RNA, 21 nt, Human
agcauucugcuucuuuccugg

SEQ ID NO: 877525 - RNA, 22 nt, Human
cugccugcaucccacagugggg

SEQ ID NO: 877526 - RNA, 22 nt, Human
cacugcccucacugugguucuc

SEQ ID NO: 877527 - RNA, 22 nt, Human
caaauguaauaaggaguuuccc

SEQ ID NO: 877528 - RNA, 22 nt, Human
uuucauaaugucacagucaaaa

SEQ ID NO: 877529 - RNA, 22 nt, Human
gggagggaggugcugguucacg

SEQ ID NO: 877530 - RNA, 22 nt, Human
augaagaaaaauccagcugucc

SEQ ID NO: 877531 - RNA, 22 nt, Human
uggaauguaaaggguaugggau

SEQ ID NO: 877532 - RNA, 22 nt, Human
cauggcuuaccccaggagcagc

SEQ ID NO: 877533 - RNA, 16 nt, Human
ccagaggccuggccuc

SEQ ID NO: 877534 - RNA, 22 nt, Human
uggaugagucugagauugggca

SEQ ID NO: 877535 - RNA, 22 nt, Human
cagaaguaagauuacugugaga

SEQ ID NO: 877536 - RNA, 18 nt, Human
aggcacagagcauacaua

SEQ ID NO: 877537 - RNA, 22 nt, Human
acaacaaagacacuugaaauga

SEQ ID NO: 877538 - RNA, 22 nt, Human
aucuagaacuuaaagucaguca

SEQ ID NO: 877539 - RNA, 22 nt, Human
uggcuuucccccagcccaguug

SEQ ID NO: 877540 - RNA, 22 nt, Human
gaagcaguucgaaagcaguugg

SEQ ID NO: 877541 - RNA, 22 nt, Human
uaaagccauacugaaagccacu

SEQ ID NO: 877542 - RNA, 22 nt, Human
cucuuuggauagaauuacaaag

SEQ ID NO: 877543 - RNA, 22 nt, Human
aaauguucaccagauccaugac

SEQ ID NO: 877544 - RNA, 22 nt, Human
accuuggaaaugcccauugccu

SEQ ID NO: 877545 - RNA, 22 nt, Human
cagcagcuggugagacacagcc

SEQ ID NO: 877546 - RNA, 22 nt, Human
uugcuuucccaaggcagaacau

SEQ ID NO: 877547 - RNA, 22 nt, Human
agagguauauauucuccauauu

SEQ ID NO: 877548 - RNA, 20 nt, Human
gcuuucaagcuugucauugu

SEQ ID NO: 877549 - RNA, 20 nt, Human
cacaggaaagcuacucaguu

SEQ ID NO: 877550 - RNA, 22 nt, Human
gagcugaacaucauggaaaggc

SEQ ID NO: 877551 - RNA, 22 nt, Human
aggccagcauucucucuccagg

SEQ ID NO: 877552 - RNA, 22 nt, Human
ugaaaguauuugauuucuauua

SEQ ID NO: 877553 - RNA, 22 nt, Human
cccagcagccuugucccuucuc

SEQ ID NO: 877554 - RNA, 22 nt, Human
ucucauucauacccuacaugcu

SEQ ID NO: 877555 - RNA, 22 nt, Human
ugcuauuugugagugucuucgu

SEQ ID NO: 877556 - RNA, 22 nt, Human
agagcacaggugcuggagccca

SEQ ID NO: 877557 - RNA, 22 nt, Human
cauaguaaauaaugcagaugau

SEQ ID NO: 877558 - RNA, 22 nt, Human
ucccugcagacguccugcgggu

SEQ ID NO: 877559 - RNA, 22 nt, Human
agaggcuccuucacucuggcac

SEQ ID NO: 877560 - RNA, 22 nt, Human
agccucugucaagcuuuucaaa

SEQ ID NO: 877561 - RNA, 21 nt, Human
cccaagggaggcaggauaagg

SEQ ID NO: 877562 - RNA, 16 nt, Human
ugggugggaggagcgg

SEQ ID NO: 877563 - RNA, 22 nt, Human
ggucauguguccaggagguagc

SEQ ID NO: 877564 - RNA, 22 nt, Human
ggaggagggguuuacauuggaa

SEQ ID NO: 877565 - RNA, 22 nt, Human
cuacagaauggagggucagaga

SEQ ID NO: 877566 - RNA, 22 nt, Human
accagcugugugaccugaggca

SEQ ID NO: 877567 - RNA, 22 nt, Human
ccacaggacacaacugcugacc

SEQ ID NO: 877568 - RNA, 22 nt, Human
uguguuaacacugcaugauaau

SEQ ID NO: 877569 - RNA, 22 nt, Human
auuugucaguggaagugauuca

SEQ ID NO: 877570 - RNA, 19 nt, Human
uuugugaagaaaaugaugc

SEQ ID NO: 877571 - RNA, 18 nt, Human
ccuggcagccaugcgcgc

SEQ ID NO: 877572 - RNA, 22 nt, Human
aagcagcaaguuuauuucuauc

SEQ ID NO: 877573 - RNA, 22 nt, Human
auuugcugauggcauuugagcu

SEQ ID NO: 877574 - RNA, 22 nt, Human
uaaauacuuaguuuugugucua

SEQ ID NO: 877575 - RNA, 22 nt, Human
acagugcucaugugacauggug

SEQ ID NO: 877576 - RNA, 22 nt, Human
aauggucaaaaagauacguaaa

SEQ ID NO: 877577 - RNA, 22 nt, Human
aaguuacaggagaaagagauca

SEQ ID NO: 877578 - RNA, 22 nt, Human
ggcaauuaaaguacugugaaug

SEQ ID NO: 877579 - RNA, 22 nt, Human
aguaaacagaaagcaagaugau

SEQ ID NO: 877580 - RNA, 22 nt, Human
cacuucauugggaccagggcug

SEQ ID NO: 877581 - RNA, 18 nt, Human
uggagacauagacaaugu

SEQ ID NO: 877582 - RNA, 22 nt, Human
aaauugcagguaggugggugau

SEQ ID NO: 877583 - RNA, 22 nt, Human
uacaaguauguuuuaaaauguu

SEQ ID NO: 877584 - RNA, 23 nt, Human
uauuuuccuggcaacaggggaac

SEQ ID NO: 877585 - RNA, 19 nt, Human
agcuggcacuagaauccag

SEQ ID NO: 877586 - RNA, 20 nt, Human
ggcccagugaaccaggacgg

SEQ ID NO: 877587 - RNA, 22 nt, Human
auuugcaagaguaagaauuucu

SEQ ID NO: 877588 - RNA, 22 nt, Human
auguuugaggacucagaagacg

SEQ ID NO: 877589 - RNA, 22 nt, Human
caaaaguaauugcgguuuuugc

SEQ ID NO: 877590 - RNA, 22 nt, Human
guggggaggcauucuucucccu

SEQ ID NO: 877591 - RNA, 22 nt, Human
caaauagaacucacagacaaga

SEQ ID NO: 877592 - RNA, 22 nt, Human
cugccccaggaccucuucugga

SEQ ID NO: 877593 - RNA, 22 nt, Human
uuacaggaggugcuagguguuu

SEQ ID NO: 877594 - RNA, 22 nt, Human
gaucucuguggacucuuagcac

SEQ ID NO: 877595 - RNA, 22 nt, Human
uccuuguaaaggagcucuaaca

SEQ ID NO: 877596 - RNA, 22 nt, Human
ccuuucucauuuuaagcauuag

SEQ ID NO: 877597 - RNA, 22 nt, Human
uuuuaaucaugcuucuaugucc

SEQ ID NO: 877598 - RNA, 22 nt, Human
gaagugacaagaugcuaggauc

SEQ ID NO: 877599 - RNA, 22 nt, Human
acucugaaauagaggcuggugg

SEQ ID NO: 877600 - RNA, 22 nt, Human
uucuugauucuuccuugaagga

SEQ ID NO: 877601 - RNA, 22 nt, Human
aggcaaggugcuacagacagug

SEQ ID NO: 877602 - RNA, 22 nt, Human
cagcagagcugggaauaaaauu

SEQ ID NO: 877603 - RNA, 22 nt, Human
aagaguuucuuacuggcaucua

SEQ ID NO: 877604 - RNA, 22 nt, Human
auuuacauuuauuugagaaggu

SEQ ID NO: 877605 - RNA, 22 nt, Human
ugcagggccuugggaugugucc

SEQ ID NO: 877606 - RNA, 21 nt, Human
cugagaccugcauuagagagg

SEQ ID NO: 877607 - RNA, 22 nt, Human
aaaggccaauaaagacaagcug

SEQ ID NO: 877608 - RNA, 23 nt, Human
uccaggagaaccccugucugucc

SEQ ID NO: 877609 - RNA, 22 nt, Human
cugagguggggccugggcauca

SEQ ID NO: 877610 - RNA, 22 nt, Human
agcuggccggccuccaggugga

SEQ ID NO: 877611 - RNA, 22 nt, Human
ucccgauucuuccuauacagga

SEQ ID NO: 877612 - RNA, 22 nt, Human
acacaguauugugacuauaacu

SEQ ID NO: 877613 - RNA, 23 nt, Human
ucuguccacgcgaggcccuugcu

SEQ ID NO: 877614 - RNA, 22 nt, Human
uagaauaaguugaugauauaug

SEQ ID NO: 877615 - RNA, 22 nt, Human
uguaauuauguuguuagaguau

SEQ ID NO: 877616 - RNA, 22 nt, Human
ucaucuauuuauguagaacaag

SEQ ID NO: 877617 - RNA, 22 nt, Human
uaccaugucuucaauaagucua

SEQ ID NO: 877618 - RNA, 22 nt, Human
acagagaucagaggcauaagca

SEQ ID NO: 877619 - RNA, 22 nt, Human
aagggcaggagaagacggauau

SEQ ID NO: 877620 - RNA, 22 nt, Human
cuuagcaagcauucaagugccu

SEQ ID NO: 877621 - RNA, 22 nt, Human
uacauugugauguuucaauaca

SEQ ID NO: 877622 - RNA, 22 nt, Human
uuucuauucuggaucuguggca

SEQ ID NO: 877623 - RNA, 22 nt, Human
uaugacaagaaauacagaggua

SEQ ID NO: 877624 - RNA, 22 nt, Human
uuggaaaguuuuuacugaagac

SEQ ID NO: 877625 - RNA, 21 nt, Human
gcagaugggaagagacgaggc

SEQ ID NO: 877626 - RNA, 22 nt, Human
uaaggaaugcuugaauguuccu

SEQ ID NO: 877627 - RNA, 22 nt, Human
agaaacaagguguagguugacc

SEQ ID NO: 877628 - RNA, 22 nt, Human
aacuccagcucacacagugacc

SEQ ID NO: 877629 - RNA, 18 nt, Human
cugugggcuggugcauga

SEQ ID NO: 877630 - RNA, 22 nt, Human
auguuaccucuauuagaauauu

SEQ ID NO: 877631 - RNA, 22 nt, Human
ccucaggggucacugugaggag

SEQ ID NO: 877632 - RNA, 22 nt, Human
ugguccugucucaaggagccuu

SEQ ID NO: 877633 - RNA, 22 nt, Human
gcugauccuuuuaugucuagcu

SEQ ID NO: 877634 - RNA, 22 nt, Human
caucugaaaucugccuacaagc

SEQ ID NO: 877635 - RNA, 23 nt, Human
cagcccuggagaugugggaggca

SEQ ID NO: 877636 - RNA, 22 nt, Human
acagcuucuauuucucuguacu

SEQ ID NO: 877637 - RNA, 22 nt, Human
agccuucaguaaauccacugug

SEQ ID NO: 877638 - RNA, 22 nt, Human
acugccuguagcucuucaucuc

SEQ ID NO: 877639 - RNA, 19 nt, Human
gugaggauacugcucagag

SEQ ID NO: 877640 - RNA, 22 nt, Human
gaaauugccagaucuaguagau

SEQ ID NO: 877641 - RNA, 22 nt, Human
uaaauaucaguccagcucuucc

SEQ ID NO: 877642 - RNA, 22 nt, Human
gccagaagggguggauccaggc

SEQ ID NO: 877643 - RNA, 19 nt, Human
gccagugugugguacagug

SEQ ID NO: 877644 - RNA, 22 nt, Human
gggcuccacgcacgcgagaggu

SEQ ID NO: 877645 - RNA, 22 nt, Human
ucagugucuugggcuugaaugc

SEQ ID NO: 877646 - RNA, 17 nt, Human
gcaaucucagucuccuu

SEQ ID NO: 877647 - RNA, 22 nt, Human
ccacauuuuugauacucucacu

SEQ ID NO: 877648 - RNA, 22 nt, Human
ucucuggggaugcuuauucuug

SEQ ID NO: 877649 - RNA, 22 nt, Human
uucauucuugucuuuguauagu

SEQ ID NO: 877650 - RNA, 22 nt, Human
acaggaugauaaaggauggcca

SEQ ID NO: 877651 - RNA, 22 nt, Human
ugacaguguuugcacuucaggu

SEQ ID NO: 877652 - RNA, 20 nt, Human
gucugcaguaagagggaaua

SEQ ID NO: 877653 - RNA, 22 nt, Human
uguuucaaaacagugauaauuu

SEQ ID NO: 877654 - RNA, 22 nt, Human
aucugaaguccuuauaaucuga

SEQ ID NO: 877655 - RNA, 22 nt, Human
acauucuugaagugaaguuuau

SEQ ID NO: 877656 - RNA, 22 nt, Human
auguuuccauagaagucacagu

SEQ ID NO: 877657 - RNA, 22 nt, Human
gagauggagaaggaagcuguuu

SEQ ID NO: 877658 - RNA, 22 nt, Human
agacagugugguuggugguucc

SEQ ID NO: 877659 - RNA, 22 nt, Human
caggacagaccaagaucgugcu

SEQ ID NO: 877660 - RNA, 22 nt, Human
uacaaucaggauaauaauagug

SEQ ID NO: 877661 - RNA, 22 nt, Human
ugauucugccacguacuggcug

SEQ ID NO: 877662 - RNA, 22 nt, Human
cucuagggaagaaugagagccc

SEQ ID NO: 877663 - RNA, 22 nt, Human
uucaacagacccuucuuucuuu

SEQ ID NO: 877664 - RNA, 22 nt, Human
uuauugcaacuccuaaauagag

SEQ ID NO: 877665 - RNA, 22 nt, Human
caguguuuuguuacuugggcac

SEQ ID NO: 877666 - RNA, 22 nt, Human
aagacacacacauaugcugagu

SEQ ID NO: 877667 - RNA, 22 nt, Human
acugcacagaauuaugguuggu

SEQ ID NO: 877668 - RNA, 22 nt, Human
uuuuaaaggauacucuugucua

SEQ ID NO: 877669 - RNA, 22 nt, Human
gccagucugauaggggagaagu

SEQ ID NO: 877670 - RNA, 22 nt, Human
ccuggaggagcgcugaccagcu

SEQ ID NO: 877671 - RNA, 22 nt, Human
guuuacaacaugccaacugggc

SEQ ID NO: 877672 - RNA, 22 nt, Human
aagguauaucugauccaugagg

SEQ ID NO: 877673 - RNA, 22 nt, Human
gaauucuaggguaaauauccua

SEQ ID NO: 877674 - RNA, 22 nt, Human
cagcagaggcacgucugugaau

SEQ ID NO: 877675 - RNA, 20 nt, Human
uagacuuuucaucaaccuua

SEQ ID NO: 877676 - RNA, 22 nt, Human
caggcuugauuauucagacaau

SEQ ID NO: 877677 - RNA, 22 nt, Human
agcagcuguuuguugaauuggu

SEQ ID NO: 877678 - RNA, 22 nt, Human
aaaauccucuaauucuagaaua

SEQ ID NO: 877679 - RNA, 22 nt, Human
aucucccaaacucauuucuuca

SEQ ID NO: 877680 - RNA, 22 nt, Human
ucugccaguuagaaacugguua

SEQ ID NO: 877681 - RNA, 22 nt, Human
uagaaaguagccacuuacagag

SEQ ID NO: 877682 - RNA, 20 nt, Human
caguccaaucagaggccacc

SEQ ID NO: 877683 - RNA, 23 nt, Human
aggcaauacaaggcaucucugga

SEQ ID NO: 877684 - RNA, 22 nt, Human
aucuuacagcagcaaggaagua

SEQ ID NO: 877685 - RNA, 22 nt, Human
uuuuggaaccaacagugcaccu

SEQ ID NO: 877686 - RNA, 22 nt, Human
gacuccaggugcaggaggagcc

SEQ ID NO: 877687 - RNA, 22 nt, Human
caaaguaugaaccaguuucucu

SEQ ID NO: 877688 - RNA, 22 nt, Human
uguggaacaaaauguugggaga

SEQ ID NO: 877689 - RNA, 22 nt, Human
gucuggaguggggccugagaau

SEQ ID NO: 877690 - RNA, 22 nt, Human
augauguacagaaaguuggcgg

SEQ ID NO: 877691 - RNA, 22 nt, Human
acuguuacagagcaggaaauug

SEQ ID NO: 877692 - RNA, 22 nt, Human
ucuauacacacaaagaaugcuu

SEQ ID NO: 877693 - RNA, 19 nt, Human
auacacauacguaaacuga

SEQ ID NO: 877694 - RNA, 22 nt, Human
augauuuuuucuaacacagucg

SEQ ID NO: 877695 - RNA, 22 nt, Human
cagaucaagcuguauggucaga

SEQ ID NO: 877696 - RNA, 22 nt, Human
agaaagaacguugguuaucuua

SEQ ID NO: 877697 - RNA, 22 nt, Human
agagccuggcucccagcuaccg

SEQ ID NO: 877698 - RNA, 19 nt, Human
acaugacaacaggggaggc

SEQ ID NO: 877699 - RNA, 22 nt, Human
gagcccagguucugcuuccagc

SEQ ID NO: 877700 - RNA, 22 nt, Human
aggggagaaaaaugccuucugu

SEQ ID NO: 877701 - RNA, 22 nt, Human
aauauuuuaggcuuuccaggcu

SEQ ID NO: 877702 - RNA, 22 nt, Human
ugauuuccuagcugacaugaaa

SEQ ID NO: 877703 - RNA, 19 nt, Human
cuccagaauacauguuccu

SEQ ID NO: 877704 - RNA, 22 nt, Human
caggccuggagugcaauggcac

SEQ ID NO: 877705 - RNA, 18 nt, Human
acuguucucuccugcccu

SEQ ID NO: 877706 - RNA, 22 nt, Human
aaugcuaacauugguuuauauc

SEQ ID NO: 877707 - RNA, 18 nt, Human
uccagucccagcucugcc

SEQ ID NO: 877708 - RNA, 22 nt, Human
uguggaagugccaaugacaaau

SEQ ID NO: 877709 - RNA, 22 nt, Human
aagggcuggucuagaaagggag

SEQ ID NO: 877710 - RNA, 22 nt, Human
ggguaggaaauccagagguggc

SEQ ID NO: 877711 - RNA, 21 nt, Human
auuacaucccuggugauacau

SEQ ID NO: 877712 - RNA, 22 nt, Human
auucagugucuacuccauugcc

SEQ ID NO: 877713 - RNA, 22 nt, Human
cuguacagaguucugaguguac

SEQ ID NO: 877714 - RNA, 22 nt, Human
ugucauuuaucuuauaguaauc

SEQ ID NO: 877715 - RNA, 22 nt, Human
agggauggaagcucgucugcaa

SEQ ID NO: 877716 - RNA, 22 nt, Human
gaucauuuuguauagcaaaggu

SEQ ID NO: 877717 - RNA, 22 nt, Human
gaacuuuaaucccuugggcuua

SEQ ID NO: 877718 - RNA, 22 nt, Human
guacuauagguaauguagacca

SEQ ID NO: 877719 - RNA, 22 nt, Human
uggccacauccuuuccuuguca

SEQ ID NO: 877720 - RNA, 21 nt, Human
agaaauacagcagggaugauc

SEQ ID NO: 877721 - RNA, 22 nt, Human
aaguaaguuucucucuccaaga

SEQ ID NO: 877722 - RNA, 22 nt, Human
aaacaugaguuaaaaguaacug

SEQ ID NO: 877723 - RNA, 22 nt, Human
ggaguaaggcucagaggaaaug

SEQ ID NO: 877724 - RNA, 22 nt, Human
uggauggguugaaaugugagcc

SEQ ID NO: 877725 - RNA, 22 nt, Human
ugacacaaaggaaagcauaauc

SEQ ID NO: 877726 - RNA, 23 nt, Human
acagcugcaccuggccgccuggc

SEQ ID NO: 877727 - RNA, 20 nt, Human
gcuccaggucagagaggacg

SEQ ID NO: 877728 - RNA, 22 nt, Human
acagcugcuguuuuugaaggac

SEQ ID NO: 877729 - RNA, 22 nt, Human
ucaaauaaggagucaugaccau

SEQ ID NO: 877730 - RNA, 22 nt, Human
ggcucuugggagcucagaguug

SEQ ID NO: 877731 - RNA, 22 nt, Human
gccuuuaucuugggccaaguuu

SEQ ID NO: 877732 - RNA, 22 nt, Human
cccugugccucaguuuccucau

SEQ ID NO: 877733 - RNA, 19 nt, Human
aaugaguuccaugaaaaga

SEQ ID NO: 877734 - RNA, 22 nt, Human
ugcagggaauccagucuagggu

SEQ ID NO: 877735 - RNA, 22 nt, Human
cucagcagcuacaggauucggg

SEQ ID NO: 877736 - RNA, 22 nt, Human
cauuugugcuuuuauaaaauag

SEQ ID NO: 877737 - RNA, 22 nt, Human
uagauaauuuggcaucauauug

SEQ ID NO: 877738 - RNA, 22 nt, Human
ccacagaaucgcuaguggagca

SEQ ID NO: 877739 - RNA, 22 nt, Human
ugggagagcagagaacccucuu

SEQ ID NO: 877740 - RNA, 23 nt, Human
aguaacaugcaaauaacagucug

SEQ ID NO: 877741 - RNA, 22 nt, Human
cugaaguuuugacaucucauuu

SEQ ID NO: 877742 - RNA, 22 nt, Human
gcacaugguaggcauuugaugu

SEQ ID NO: 877743 - RNA, 22 nt, Human
gugugaccucaucuuaacugga

SEQ ID NO: 877744 - RNA, 22 nt, Human
agaccacaggcaugcacagagc

SEQ ID NO: 877745 - RNA, 22 nt, Human
gcccuagggggaaccgaggacu

SEQ ID NO: 877746 - RNA, 22 nt, Human
aauguuuuagauuacugcuggg

SEQ ID NO: 877747 - RNA, 22 nt, Human
caguaaauccuagagcccucau

SEQ ID NO: 877748 - RNA, 22 nt, Human
cugcccacaguucucugccaug

SEQ ID NO: 877749 - RNA, 19 nt, Human
ucauaaaaaugguaaccca

SEQ ID NO: 877750 - RNA, 22 nt, Human
aucugucuggaggccuggcaug

SEQ ID NO: 877751 - RNA, 22 nt, Human
agaacuucagcaaaaccaguua

SEQ ID NO: 877752 - RNA, 22 nt, Human
ucucauaauagcauuucucacc

SEQ ID NO: 877753 - RNA, 23 nt, Human
uacuauaacgcugugucagcucc

SEQ ID NO: 877754 - RNA, 22 nt, Human
ugugggcucuaauggcagcaga

SEQ ID NO: 877755 - RNA, 22 nt, Human
caaaugcaggucauaaccugag

SEQ ID NO: 877756 - RNA, 22 nt, Human
auacccagcucuuucguuuugg

SEQ ID NO: 877757 - RNA, 22 nt, Human
ugaaauguuuggguccagaagu

SEQ ID NO: 877758 - RNA, 22 nt, Human
cagccugccgucagccagguag

SEQ ID NO: 877759 - RNA, 22 nt, Human
cauuucaauacaguuuguaaau

SEQ ID NO: 877760 - RNA, 22 nt, Human
agacagcagaaacuagagcacu

SEQ ID NO: 877761 - RNA, 22 nt, Human
ggauacaacuagaagauggcag

SEQ ID NO: 877762 - RNA, 22 nt, Human
auucugggcgccuauggcugca

SEQ ID NO: 877763 - RNA, 19 nt, Human
ccugcagggaugagagguu

SEQ ID NO: 877764 - RNA, 22 nt, Human
caggcagggagcuggaaaggau

SEQ ID NO: 877765 - RNA, 22 nt, Human
auauaaagaaguggaaaaugag

SEQ ID NO: 877766 - RNA, 22 nt, Human
aaaguucuggcauuuucugucu

SEQ ID NO: 877767 - RNA, 22 nt, Human
gacagcuuagugaaaauguaaa

SEQ ID NO: 877768 - RNA, 22 nt, Human
caggaauguaugauacaguggu

SEQ ID NO: 877769 - RNA, 22 nt, Human
auuucugauacccggucacccu

SEQ ID NO: 877770 - RNA, 22 nt, Human
ggaaugaagaaauagauggugu

SEQ ID NO: 877771 - RNA, 22 nt, Human
ugcuucuguauuuugggcuuga

SEQ ID NO: 877772 - RNA, 22 nt, Human
acugccuucaugcagaccccug

SEQ ID NO: 877773 - RNA, 22 nt, Human
guggcagcuacauuuaaugcaa

SEQ ID NO: 877774 - RNA, 21 nt, Human
acccccacaccuccuuaguuc

SEQ ID NO: 877775 - RNA, 22 nt, Human
gaaacauugagcagaaggagaa

SEQ ID NO: 877776 - RNA, 22 nt, Human
uguucuuagcaggagcaucuau

SEQ ID NO: 877777 - RNA, 22 nt, Human
cagcauggugccagugagucca

SEQ ID NO: 877778 - RNA, 22 nt, Human
cacauuucugugagucaauauu

SEQ ID NO: 877779 - RNA, 22 nt, Human
uauguaucuuuuguuuucccug

SEQ ID NO: 877780 - RNA, 22 nt, Human
ucuauauaaccuccacuucuac

SEQ ID NO: 877781 - RNA, 22 nt, Human
uagcugccuuugggcuccugcu

SEQ ID NO: 877782 - RNA, 22 nt, Human
agagguagagguugcagugagc

SEQ ID NO: 877783 - RNA, 22 nt, Human
ugcuuucuuuagcuccugaguc

SEQ ID NO: 877784 - RNA, 22 nt, Human
caaggcaagucauaugggcaag

SEQ ID NO: 877785 - RNA, 22 nt, Human
cucuuaaaaacuugauauauuu

SEQ ID NO: 877786 - RNA, 23 nt, Human
uauacacauguggcaguauagug

SEQ ID NO: 877787 - RNA, 22 nt, Human
cuuuggaggaccuaugugcaau

SEQ ID NO: 877788 - RNA, 22 nt, Human
ugcccaggauugugaggucagg

SEQ ID NO: 877789 - RNA, 20 nt, Human
gcaauuaauuuuugguuaca

SEQ ID NO: 877790 - RNA, 22 nt, Human
gcuguucucuguaacaugcauu

SEQ ID NO: 877791 - RNA, 21 nt, Human
cugugucgcucucgcugggag

SEQ ID NO: 877792 - RNA, 22 nt, Human
caacuucagggaaacaugaagc

SEQ ID NO: 877793 - RNA, 22 nt, Human
cugcagagcauaaaucugaaua

SEQ ID NO: 877794 - RNA, 22 nt, Human
uuaaaagagacuuccuuuguuu

SEQ ID NO: 877795 - RNA, 22 nt, Human
ggugcagcuggacagagaagcc

SEQ ID NO: 877796 - RNA, 22 nt, Human
ucuuuggaguguuaucaguaau

SEQ ID NO: 877797 - RNA, 22 nt, Human
acuacagugugauaagaggggc

SEQ ID NO: 877798 - RNA, 22 nt, Human
caggcagagaggagcauuuaau

SEQ ID NO: 877799 - RNA, 20 nt, Human
guaaugaauguaaacaguaa

SEQ ID NO: 877800 - RNA, 20 nt, Human
ucuuuguuaauuuuaucucc

SEQ ID NO: 877801 - RNA, 19 nt, Human
ugcaagugucuuggacaag

SEQ ID NO: 877802 - RNA, 22 nt, Human
aggcucagauccuuguguccug

SEQ ID NO: 877803 - RNA, 22 nt, Human
uaagagaaggaucuguuccagg

SEQ ID NO: 877804 - RNA, 22 nt, Human
acucuuacucccucaggcacug

SEQ ID NO: 877805 - RNA, 22 nt, Human
gggaaggcauaccugagggaga

SEQ ID NO: 877806 - RNA, 22 nt, Human
uugggcugggcaagaaucaaug

SEQ ID NO: 877807 - RNA, 22 nt, Human
ggggcagagagaaggaagcuug

SEQ ID NO: 877808 - RNA, 22 nt, Human
gcugcagcccugcggaucacuu

SEQ ID NO: 877809 - RNA, 22 nt, Human
ugggcucuagacuuuagugugg

SEQ ID NO: 877810 - RNA, 22 nt, Human
auggcaguacguugaaaauuuu

SEQ ID NO: 877811 - RNA, 17 nt, Human
ccuguuguugccuuugc

SEQ ID NO: 877812 - RNA, 22 nt, Human
ggugcugauguuauugaugcug

SEQ ID NO: 877813 - RNA, 22 nt, Human
aaacagcuuguuucaggaaagu

SEQ ID NO: 877814 - RNA, 22 nt, Human
uuucuucaauugcuaacaagga

SEQ ID NO: 877815 - RNA, 19 nt, Human
ccaggagcaguggugagcu

SEQ ID NO: 877816 - RNA, 22 nt, Human
auguggccuuagguucuagugg

SEQ ID NO: 877817 - RNA, 18 nt, Human
cugccuguugcugagagg

SEQ ID NO: 877818 - RNA, 22 nt, Human
aagcugugaaauagauuacaca

SEQ ID NO: 877819 - RNA, 22 nt, Human
auauauaagcugaugagccaca

SEQ ID NO: 877820 - RNA, 22 nt, Human
uggccacaguguccagcagcag

SEQ ID NO: 877821 - RNA, 22 nt, Human
aauguucaaacagaucacuuag

SEQ ID NO: 877822 - RNA, 22 nt, Human
ugccuuccuggagcugaaggcu

SEQ ID NO: 877823 - RNA, 22 nt, Human
auacacauguguaugugcaugc

SEQ ID NO: 877824 - RNA, 22 nt, Human
cucugggaauucugagcaagca

SEQ ID NO: 877825 - RNA, 22 nt, Human
cuuuccaacucuagugaaauuu

SEQ ID NO: 877826 - RNA, 18 nt, Human
acagggaugggguaagug

SEQ ID NO: 877827 - RNA, 22 nt, Human
ggucagguagcucugacaggcc

SEQ ID NO: 877828 - RNA, 22 nt, Human
aggagccaccuaggagcuguuu

SEQ ID NO: 877829 - RNA, 22 nt, Human
ucugcuguguugaaugauuggu

SEQ ID NO: 877830 - RNA, 22 nt, Human
agcccagccacuauuaaauguu

SEQ ID NO: 877831 - RNA, 22 nt, Human
gugcuagggacaaagcagugaa

SEQ ID NO: 877832 - RNA, 22 nt, Human
agcaguuugaaucaauggccag

SEQ ID NO: 877833 - RNA, 21 nt, Human
gggcuggauauuggaaagagg

SEQ ID NO: 877834 - RNA, 22 nt, Human
uuucuuuuccaauaucccuacu

SEQ ID NO: 877835 - RNA, 21 nt, Human
agucuucuccagaggcugggg

SEQ ID NO: 877836 - RNA, 22 nt, Human
cacaggaacaaagaagacaauu

SEQ ID NO: 877837 - RNA, 22 nt, Human
accaggaaauuuggcaacaaag

SEQ ID NO: 877838 - RNA, 17 nt, Human
auuccacagggaaucug

SEQ ID NO: 877839 - RNA, 23 nt, Human
gcaguggaaugucucuguuugga

SEQ ID NO: 877840 - RNA, 22 nt, Human
uaaguacauuugggaccaccug

SEQ ID NO: 877841 - RNA, 18 nt, Human
ugcacugugcugaguggc

SEQ ID NO: 877842 - RNA, 19 nt, Human
ggucagagagauccaggcu

SEQ ID NO: 877843 - RNA, 22 nt, Human
uuguucuagccuccuguuuuga

SEQ ID NO: 877844 - RNA, 22 nt, Human
ugaaauguuaaacaaguggcuc

SEQ ID NO: 877845 - RNA, 22 nt, Human
guggcacaaggcuuacacagca

SEQ ID NO: 877846 - RNA, 20 nt, Human
gcagagugugagagggugaa

SEQ ID NO: 877847 - RNA, 22 nt, Human
uuggcccuccaccuggcugugc

SEQ ID NO: 877848 - RNA, 22 nt, Human
auuuuuucuguaaacuggccuu

SEQ ID NO: 877849 - RNA, 17 nt, Human
auacauuguuaaaguau

SEQ ID NO: 877850 - RNA, 22 nt, Human
uaugucuuaauccuuccuuagg

SEQ ID NO: 877851 - RNA, 22 nt, Human
ccuuuacaguaugguuguauca

SEQ ID NO: 877852 - RNA, 21 nt, Human
aaggggcaaacccaggacacc

SEQ ID NO: 877853 - RNA, 19 nt, Human
ucugcagacuauauuguga

SEQ ID NO: 877854 - RNA, 22 nt, Human
aauuaauauuuguggaauuaau

SEQ ID NO: 877855 - RNA, 22 nt, Human
caggguccccgggucuccugug

SEQ ID NO: 877856 - RNA, 22 nt, Human
ucucugcugagaagggcuggca

SEQ ID NO: 877857 - RNA, 22 nt, Human
ucuccccaaaggacucacucuc

SEQ ID NO: 877858 - RNA, 22 nt, Human
gaaauagaucucugggaugcaa

SEQ ID NO: 877859 - RNA, 22 nt, Human
uggaaaaugugacuauucuaaa

SEQ ID NO: 877860 - RNA, 22 nt, Human
caugacauuuuaaaaagaacau

SEQ ID NO: 877861 - RNA, 22 nt, Human
ugaggcaguugagcuuccugag

SEQ ID NO: 877862 - RNA, 21 nt, Human
caguuacagccaggacaaggc

SEQ ID NO: 877863 - RNA, 22 nt, Human
uuuuauguaauccuuacugucg

SEQ ID NO: 877864 - RNA, 21 nt, Human
aaagagacaaauggcauauac

SEQ ID NO: 877865 - RNA, 22 nt, Human
acacauuaggcagugcuuaaau

SEQ ID NO: 877866 - RNA, 22 nt, Human
ugaggucacagcuggggaugga

SEQ ID NO: 877867 - RNA, 22 nt, Human
uuugcuuguucaagauuucugu

SEQ ID NO: 877868 - RNA, 22 nt, Human
agugucugaaccaccggggcau

SEQ ID NO: 877869 - RNA, 21 nt, Human
auuuacaaaacagucccuucc

SEQ ID NO: 877870 - RNA, 22 nt, Human
acuuaggccuugcuaagcauuu

SEQ ID NO: 877871 - RNA, 22 nt, Human
agauacauuugugugcauguau

SEQ ID NO: 877872 - RNA, 19 nt, Human
ggcugugguggugccuugc

SEQ ID NO: 877873 - RNA, 22 nt, Human
acguuagaaaagcaggagcuca

SEQ ID NO: 877874 - RNA, 22 nt, Human
aaauugaaugauuaagugguga

SEQ ID NO: 877875 - RNA, 18 nt, Human
gcucugguuccuucaacc

SEQ ID NO: 877876 - RNA, 22 nt, Human
cugcuuuagguggaauguucua

SEQ ID NO: 877877 - RNA, 22 nt, Human
ugcuggaagaauuccaugcugg

SEQ ID NO: 877878 - RNA, 23 nt, Human
cuguauuugacuugagcggaaau

SEQ ID NO: 877879 - RNA, 22 nt, Human
uaaauguuguaaguacaucuaa

SEQ ID NO: 877880 - RNA, 21 nt, Human
ugagccaggcugacggcugug

SEQ ID NO: 877881 - RNA, 22 nt, Human
agccagcuucuuuacgguggca

SEQ ID NO: 877882 - RNA, 18 nt, Human
gcugucugaggucugagg

SEQ ID NO: 877883 - RNA, 22 nt, Human
ggugggagggcugcguuccucu

SEQ ID NO: 877884 - RNA, 22 nt, Human
aguaacaaauauucauuggauu

SEQ ID NO: 877885 - RNA, 22 nt, Human
cugcagccucaaccuccugagc

SEQ ID NO: 877886 - RNA, 22 nt, Human
uuguccauugugacaagugugg

SEQ ID NO: 877887 - RNA, 22 nt, Human
auauaguuuaagaaaguacagu

SEQ ID NO: 877888 - RNA, 21 nt, Human
ugacugaggcuucuucacaca

SEQ ID NO: 877889 - RNA, 22 nt, Human
cagggcagugaagaacacacgu

SEQ ID NO: 877890 - RNA, 22 nt, Human
uggaaauggaucugaugagucu

SEQ ID NO: 877891 - RNA, 22 nt, Human
cacacugacuggaaucaaggau

SEQ ID NO: 877892 - RNA, 22 nt, Human
cugguccuaaagcccuacucca

SEQ ID NO: 877893 - RNA, 20 nt, Human
uaagcacaugaacaguccuc

SEQ ID NO: 877894 - RNA, 22 nt, Human
ggugacagccgcuuggcgcuag

SEQ ID NO: 877895 - RNA, 22 nt, Human
agacaugacagauaguugcuag

SEQ ID NO: 877896 - RNA, 22 nt, Human
acauucauuccaggucagucag

SEQ ID NO: 877897 - RNA, 22 nt, Human
cccagcugcaccucuauggccu

SEQ ID NO: 877898 - RNA, 16 nt, Human
ucauuuugagugacag

SEQ ID NO: 877899 - RNA, 22 nt, Human
uuuuaugucauaaggacacuca

SEQ ID NO: 877900 - RNA, 22 nt, Human
cagggcucgcucgcucgcucgc

SEQ ID NO: 877901 - RNA, 22 nt, Human
gaggggaguaaagucauguuac

SEQ ID NO: 877902 - RNA, 19 nt, Human
gggaucagcccagggcucu

SEQ ID NO: 877903 - RNA, 22 nt, Human
gggguagggugauugugaagua

SEQ ID NO: 877904 - RNA, 22 nt, Human
agggaagggcagggucuaugca

SEQ ID NO: 877905 - RNA, 22 nt, Human
ggugaaauuccuuguggaaagu

SEQ ID NO: 877906 - RNA, 22 nt, Human
ccaggaggcagagguuacagug

SEQ ID NO: 877907 - RNA, 21 nt, Human
agguuuauuucaacuucagga

SEQ ID NO: 877908 - RNA, 22 nt, Human
uccuugggucagugagugaggu

SEQ ID NO: 877909 - RNA, 18 nt, Human
ucacagacuuacugggcc

SEQ ID NO: 877910 - RNA, 22 nt, Human
ucaccagggagcuuguccucug

SEQ ID NO: 877911 - RNA, 22 nt, Human
aaagauaauguuuccuuauucu

SEQ ID NO: 877912 - RNA, 22 nt, Human
agcagcagauuauggucuacau

SEQ ID NO: 877913 - RNA, 22 nt, Human
ugucuacuugggcucuacagca

SEQ ID NO: 877914 - RNA, 22 nt, Human
uuuguucugcaucacagaaaaa

SEQ ID NO: 877915 - RNA, 22 nt, Human
acaauuucuuauaguucaauuc

SEQ ID NO: 877916 - RNA, 22 nt, Human
uugauguaauacuuugcaacca

SEQ ID NO: 877917 - RNA, 22 nt, Human
gcucuggacuggggccugagaa

SEQ ID NO: 877918 - RNA, 22 nt, Human
aggcucaggcaggaauggcgga

SEQ ID NO: 877919 - RNA, 22 nt, Human
aagagagacaauagguagcauu

SEQ ID NO: 877920 - RNA, 22 nt, Human
ggagcugcuuugaucugaagaa

SEQ ID NO: 877921 - RNA, 22 nt, Human
guuuagaagccaagauuugggu

SEQ ID NO: 877922 - RNA, 22 nt, Human
ugcugguucuuaggagagagau

SEQ ID NO: 877923 - RNA, 22 nt, Human
ccuuacaaugcaguuuacuuag

SEQ ID NO: 877924 - RNA, 22 nt, Human
auacagauguuaaagcaauuuc

SEQ ID NO: 877925 - RNA, 22 nt, Human
aggagaggcucuaacucugugu

SEQ ID NO: 877926 - RNA, 19 nt, Human
ugaagcagcaaacucucag

SEQ ID NO: 877927 - RNA, 22 nt, Human
cuuauuuugcugaugacccagg

SEQ ID NO: 877928 - RNA, 22 nt, Human
aguauuugauacagucuucuag

SEQ ID NO: 877929 - RNA, 19 nt, Human
ccagagguuugcugggccu

SEQ ID NO: 877930 - RNA, 22 nt, Human
cacugcugauuucauaggcagg

SEQ ID NO: 877931 - RNA, 22 nt, Human
uagcagaaccagucagugagcc

SEQ ID NO: 877932 - RNA, 22 nt, Human
uaggauuuaggcuuuaacaucu

SEQ ID NO: 877933 - RNA, 22 nt, Human
uucauguaauaggauguguuaa

SEQ ID NO: 877934 - RNA, 21 nt, Human
cccaggaguccuauuuaaaug

SEQ ID NO: 877935 - RNA, 20 nt, Human
gcacccagcuucuuguucua

SEQ ID NO: 877936 - RNA, 22 nt, Human
gccuuccuuuuaccaccagcca

SEQ ID NO: 877937 - RNA, 22 nt, Human
auucuaaauguaauuuagaauu

SEQ ID NO: 877938 - RNA, 22 nt, Human
acugggaggcaucuggagcuga

SEQ ID NO: 877939 - RNA, 22 nt, Human
ugcugauuuugccuacugaucc

SEQ ID NO: 877940 - RNA, 22 nt, Human
gacagggaggaaagagacugcu

SEQ ID NO: 877941 - RNA, 22 nt, Human
uuuccuaacacaaugcaugaga

SEQ ID NO: 877942 - RNA, 22 nt, Human
ucugcagaagcucacuaaaucc

SEQ ID NO: 877943 - RNA, 22 nt, Human
ggggcagccuccaggaaagcug

SEQ ID NO: 877944 - RNA, 22 nt, Human
uucucuuaucuggcauuauugg

SEQ ID NO: 877945 - RNA, 22 nt, Human
ucacagagaaauguggcacaaa

SEQ ID NO: 877946 - RNA, 22 nt, Human
aaaugcaucagcucauaagaga

SEQ ID NO: 877947 - RNA, 22 nt, Human
gauauuuugagaaauccuauga

SEQ ID NO: 877948 - RNA, 22 nt, Human
uucucucuuuuggguaggaggu

SEQ ID NO: 877949 - RNA, 22 nt, Human
cagagcccauggcacaugugga

SEQ ID NO: 877950 - RNA, 21 nt, Human
gaaaggucuuaacuuacagag

SEQ ID NO: 877951 - RNA, 20 nt, Human
uaggagcaaugagaguagaa

SEQ ID NO: 877952 - RNA, 20 nt, Human
auacaguaggugcucaauau

SEQ ID NO: 877953 - RNA, 22 nt, Human
uggagcagagaugguggccuuc

SEQ ID NO: 877954 - RNA, 22 nt, Human
agagggggcagcggaccaguga

SEQ ID NO: 877955 - RNA, 22 nt, Human
uauuucuucgggauucaagcua

SEQ ID NO: 877956 - RNA, 22 nt, Human
cccuccagcucaaagcaaccgg

SEQ ID NO: 877957 - RNA, 22 nt, Human
uugcaaaaacugcaauuacuuu

SEQ ID NO: 877958 - RNA, 22 nt, Human
cucuccaguuauagcugauuug

SEQ ID NO: 877959 - RNA, 22 nt, Human
cccaggccagaacuugguugcu

SEQ ID NO: 877960 - RNA, 22 nt, Human
gcugaaguaacucacaucguua

SEQ ID NO: 877961 - RNA, 22 nt, Human
caucaauaggguuugaaagcaa

SEQ ID NO: 877962 - RNA, 22 nt, Human
agaaccaguuuaagauuugggu

SEQ ID NO: 877963 - RNA, 22 nt, Human
cuggcagccaagugggauacuc

SEQ ID NO: 877964 - RNA, 22 nt, Human
gcaaagcaucaguagaaauguu

SEQ ID NO: 877965 - RNA, 22 nt, Human
aagacagccuuucccuggugcc

SEQ ID NO: 877966 - RNA, 22 nt, Human
uagaaaucuuguuacuaugugu

SEQ ID NO: 877967 - RNA, 23 nt, Human
gagcuuuuguaguagucacugug

SEQ ID NO: 877968 - RNA, 22 nt, Human
cccucugcucaggugcauaggc

SEQ ID NO: 877969 - RNA, 22 nt, Human
agugucaacugucuacagggag

SEQ ID NO: 877970 - RNA, 22 nt, Human
gagcugagaagcagcgcuugau

SEQ ID NO: 877971 - RNA, 22 nt, Human
caugggcuacagaagcaugcug

SEQ ID NO: 877972 - RNA, 22 nt, Human
cagcaagauggugaaugagacg

SEQ ID NO: 877973 - RNA, 22 nt, Human
uuccugagggccccagaggagg

SEQ ID NO: 877974 - RNA, 22 nt, Human
agacagaacagaauaauuguug

SEQ ID NO: 877975 - RNA, 22 nt, Human
ucuuugguauucacuugugaag

SEQ ID NO: 877976 - RNA, 22 nt, Human
gaggccagaaugagcugaaugc

SEQ ID NO: 877977 - RNA, 22 nt, Human
gaggugaaaguuauucauuuau

SEQ ID NO: 877978 - RNA, 22 nt, Human
cagaggaacguuuggauugauu

SEQ ID NO: 877979 - RNA, 22 nt, Human
uucuuacauuacuuuacaugug

SEQ ID NO: 877980 - RNA, 22 nt, Human
ccaggcagagugcuccagaaag

SEQ ID NO: 877981 - RNA, 22 nt, Human
gcagggcucauugccaggcauu

SEQ ID NO: 877982 - RNA, 22 nt, Human
cugugccagccugucccaggag

SEQ ID NO: 877983 - RNA, 22 nt, Human
uugcuaugugagauggcucaag

SEQ ID NO: 877984 - RNA, 22 nt, Human
auguccagcaugacacauucuc

SEQ ID NO: 877985 - RNA, 22 nt, Human
aauuagaagcuguuagcaaaau

SEQ ID NO: 877986 - RNA, 22 nt, Human
guauuguauauuugcaaauaca

SEQ ID NO: 877987 - RNA, 22 nt, Human
ggaaagagcccagcagugcuug

SEQ ID NO: 877988 - RNA, 22 nt, Human
gagggcucugaaaggaggucac

SEQ ID NO: 877989 - RNA, 22 nt, Human
auacuuuuaauuccuucugagu

SEQ ID NO: 877990 - RNA, 22 nt, Human
gaugaaaaaagacgagcauaua

SEQ ID NO: 877991 - RNA, 22 nt, Human
cagugcugguguaggcugacca

SEQ ID NO: 877992 - RNA, 22 nt, Human
uuuuucaagacaaccugcaugu

SEQ ID NO: 877993 - RNA, 22 nt, Human
ggaugaggaaaccacagugucc

SEQ ID NO: 877994 - RNA, 22 nt, Human
uccucccaacuuuuccaucuca

SEQ ID NO: 877995 - RNA, 19 nt, Human
aguuccacacuuuaucugg

SEQ ID NO: 877996 - RNA, 22 nt, Human
auuuccuauggauacaggcaga

SEQ ID NO: 877997 - RNA, 22 nt, Human
acagaugagaaggcugaccagu

SEQ ID NO: 877998 - RNA, 22 nt, Human
gcuuaauucuggcucaguuucc

SEQ ID NO: 877999 - RNA, 22 nt, Human
uuaaaguaugguuuaagggcuu

SEQ ID NO: 878000 - RNA, 22 nt, Human
gaggccagccccucuugaaggc

SEQ ID NO: 878001 - RNA, 22 nt, Human
ccuugagacacagccaaagaug

SEQ ID NO: 878002 - RNA, 22 nt, Human
augcauaagugcagcagauuug

SEQ ID NO: 878003 - RNA, 17 nt, Human
cccagggaccacugcuu

SEQ ID NO: 878004 - RNA, 22 nt, Human
ugcuuuaucugacuuggcgcug

SEQ ID NO: 878005 - RNA, 20 nt, Human
uggcccagcacgacgaggac

SEQ ID NO: 878006 - RNA, 22 nt, Human
uuguacaaaggauuuggaagag

SEQ ID NO: 878007 - RNA, 22 nt, Human
auggggugagacuaggauuaaa

SEQ ID NO: 878008 - RNA, 22 nt, Human
ccuguguggccaggcuggaguc

SEQ ID NO: 878009 - RNA, 22 nt, Human
cugugaaugcuaguaagagugc

SEQ ID NO: 878010 - RNA, 22 nt, Human
gagaauuagggcguaauucaga

SEQ ID NO: 878011 - RNA, 22 nt, Human
acccucagacauauuccaucau

SEQ ID NO: 878012 - RNA, 23 nt, Human
acaaaguaauuccugcuuccaaa

SEQ ID NO: 878013 - RNA, 22 nt, Human
aggugcagcaugaguccaacgg

SEQ ID NO: 878014 - RNA, 22 nt, Human
uggggaaggcggagcuugcagc

SEQ ID NO: 878015 - RNA, 22 nt, Human
uucuuccucacacucucaccca

SEQ ID NO: 878016 - RNA, 22 nt, Human
caggcaaggagcuggcucaagu

SEQ ID NO: 878017 - RNA, 22 nt, Human
agaguggguuauaggcagacuu

SEQ ID NO: 878018 - RNA, 22 nt, Human
uccaccagagcccucuuugcgg

SEQ ID NO: 878019 - RNA, 18 nt, Human
acagacaaaauggaaaug

SEQ ID NO: 878020 - RNA, 22 nt, Human
ugauaaacagcugaugaagacc

SEQ ID NO: 878021 - RNA, 22 nt, Human
guggcaucaagauuuagauuca

SEQ ID NO: 878022 - RNA, 22 nt, Human
auccaucccaucuucaccaggg

SEQ ID NO: 878023 - RNA, 21 nt, Human
uuuacugagcacuuacuaugu

SEQ ID NO: 878024 - RNA, 22 nt, Human
gaaauguagaauugcuuaacug

SEQ ID NO: 878025 - RNA, 22 nt, Human
ugugaguugcucuuuugcuacu

SEQ ID NO: 878026 - RNA, 22 nt, Human
caugcacuuaccugaaauucaa

SEQ ID NO: 878027 - RNA, 22 nt, Human
aaagcaaugaugguagacacgu

SEQ ID NO: 878028 - RNA, 22 nt, Human
uggcacugccaaccugcuaggu

SEQ ID NO: 878029 - RNA, 22 nt, Human
gcuccuggcucucugagggcug

SEQ ID NO: 878030 - RNA, 22 nt, Human
uacaguaccagaaaugcuaaga

SEQ ID NO: 878031 - RNA, 22 nt, Human
caggugaguaacaaugggugau

SEQ ID NO: 878032 - RNA, 22 nt, Human
gccuggugaaaggcagagagcg

SEQ ID NO: 878033 - RNA, 22 nt, Human
ugcagggaccccgaggcucucu

SEQ ID NO: 878034 - RNA, 22 nt, Human
uaaauagaaucuaaacugcuca

SEQ ID NO: 878035 - RNA, 19 nt, Human
uaauaagcaauauggaagu

SEQ ID NO: 878036 - RNA, 22 nt, Human
acuaggggcucaggcccaggga

SEQ ID NO: 878037 - RNA, 20 nt, Human
gugugaccuccuguggaugc

SEQ ID NO: 878038 - RNA, 22 nt, Human
aaauuacagaucaccaaugcau

SEQ ID NO: 878039 - RNA, 22 nt, Human
aagugcaagcaggacuuaguuu

SEQ ID NO: 878040 - RNA, 22 nt, Human
aggagcugguagucucauuggg

SEQ ID NO: 878041 - RNA, 22 nt, Human
aauuccauccauuuguuucaac

SEQ ID NO: 878042 - RNA, 22 nt, Human
uagcccagaugauugaaccaug

SEQ ID NO: 878043 - RNA, 19 nt, Human
caggugguaaucugagccu

SEQ ID NO: 878044 - RNA, 22 nt, Human
acuguggauaagucagagaugu

SEQ ID NO: 878045 - RNA, 22 nt, Human
cagaaacuuuugaugaguguau

SEQ ID NO: 878046 - RNA, 22 nt, Human
cauguauauuuuauguggagag

SEQ ID NO: 878047 - RNA, 22 nt, Human
agugggcugagcuugcugggug

SEQ ID NO: 878048 - RNA, 22 nt, Human
uaaugaacaucuuaaucugaaa

SEQ ID NO: 878049 - RNA, 22 nt, Human
caguuuaaguagaacugagaau

SEQ ID NO: 878050 - RNA, 22 nt, Human
aggcuggcugaaaaacacccuu

SEQ ID NO: 878051 - RNA, 22 nt, Human
ucaaaggaguuuaaguuacugg

SEQ ID NO: 878052 - RNA, 22 nt, Human
auggaaaagggucuuucauuuc

SEQ ID NO: 878053 - RNA, 22 nt, Human
gggcuucucucaggggcaugag

SEQ ID NO: 878054 - RNA, 19 nt, Human
auuuccaagaauuggagag

SEQ ID NO: 878055 - RNA, 22 nt, Human
uucucugccucuagcuauauuc

SEQ ID NO: 878056 - RNA, 22 nt, Human
uccaggcaucuguauuuuuuaa

SEQ ID NO: 878057 - RNA, 22 nt, Human
ucuuaauugagaacaguguagg

SEQ ID NO: 878058 - RNA, 22 nt, Human
uugcaauugcuauggagagcgu

SEQ ID NO: 878059 - RNA, 22 nt, Human
acagaggggucacagccugaag

SEQ ID NO: 878060 - RNA, 22 nt, Human
guugaauaucccguaucuuaaa

SEQ ID NO: 878061 - RNA, 22 nt, Human
auagcauggccugugacacuuu

SEQ ID NO: 878062 - RNA, 22 nt, Human
aguucacuuucuguaguggaag

SEQ ID NO: 878063 - RNA, 21 nt, Human
agccaagccuugggagccagg

SEQ ID NO: 878064 - RNA, 22 nt, Human
uagcaaaugccugguuaauuag

SEQ ID NO: 878065 - RNA, 22 nt, Human
ccagccucacuggcaucaccua

SEQ ID NO: 878066 - RNA, 22 nt, Human
cccagggcuuuucucacuagac

SEQ ID NO: 878067 - RNA, 22 nt, Human
ccagcaagguccagcauaggga

SEQ ID NO: 878068 - RNA, 22 nt, Human
aggcuaguaucaucuacuuuug

SEQ ID NO: 878069 - RNA, 22 nt, Human
aggaaugaacucgagugaucug

SEQ ID NO: 878070 - RNA, 22 nt, Human
uagaaugaccuccucuuagcuu

SEQ ID NO: 878071 - RNA, 22 nt, Human
cggcugaggaucuccaggccug

SEQ ID NO: 878072 - RNA, 22 nt, Human
ugcaggguauccuugucucugc

SEQ ID NO: 878073 - RNA, 22 nt, Human
cugcggugggcugggcuguccc

SEQ ID NO: 878074 - RNA, 22 nt, Human
agagugcuuaaagcuggcuuug

SEQ ID NO: 878075 - RNA, 22 nt, Human
gggacgggcaguccaagggguc

SEQ ID NO: 878076 - RNA, 22 nt, Human
gcuuguuucuauuuaucaagua

SEQ ID NO: 878077 - RNA, 22 nt, Human
ucaggauaaaauguaauggcaa

SEQ ID NO: 878078 - RNA, 22 nt, Human
ucagugaugagguggcuuucaa

SEQ ID NO: 878079 - RNA, 22 nt, Human
aauucauccaugaacaauucca

SEQ ID NO: 878080 - RNA, 22 nt, Human
ggacaugauauuucaggaagac

SEQ ID NO: 878081 - RNA, 22 nt, Human
uacuuuuuaugauaagaacuga

SEQ ID NO: 878082 - RNA, 22 nt, Human
acaguaaacaaugcagcaaauu

SEQ ID NO: 878083 - RNA, 21 nt, Human
ccaggcuccugaggcugguca

SEQ ID NO: 878084 - RNA, 21 nt, Human
uauugcauaacaaauuacccu

SEQ ID NO: 878085 - RNA, 18 nt, Human
aauuucuuugacaacuua

SEQ ID NO: 878086 - RNA, 22 nt, Human
ugcaggcucaucucaagaguag

SEQ ID NO: 878087 - RNA, 18 nt, Human
ccuguggcucagcccaca

SEQ ID NO: 878088 - RNA, 22 nt, Human
ucucucagaacugcagcugcag

SEQ ID NO: 878089 - RNA, 22 nt, Human
ucuuuggaauuugcuggaaaua

SEQ ID NO: 878090 - RNA, 22 nt, Human
gagaucgguaaagagcaugcac

SEQ ID NO: 878091 - RNA, 22 nt, Human
ugcaucaaaacuggacuccuuc

SEQ ID NO: 878092 - RNA, 22 nt, Human
aaguguuuagguuugcagucga

SEQ ID NO: 878093 - RNA, 22 nt, Human
ggcagcugucucugaguuagca

SEQ ID NO: 878094 - RNA, 22 nt, Human
auaaaaaugagggcgguagcua

SEQ ID NO: 878095 - RNA, 22 nt, Human
agaggggcgggaacucaaccuc

SEQ ID NO: 878096 - RNA, 22 nt, Human
agcuggagaucaugcugauacu

SEQ ID NO: 878097 - RNA, 22 nt, Human
ugaaaucaucugccaauaaguu

SEQ ID NO: 878098 - RNA, 22 nt, Human
uggccugggugcugcugacauc

SEQ ID NO: 878099 - RNA, 22 nt, Human
uuuguaagcaaaaaguccauuc

SEQ ID NO: 878100 - RNA, 22 nt, Human
ggggcagaaguagugccccuga

SEQ ID NO: 878101 - RNA, 22 nt, Human
cugcuggaaguuugcuguggau

SEQ ID NO: 878102 - RNA, 22 nt, Human
ggucagagggugggcugccugu

SEQ ID NO: 878103 - RNA, 22 nt, Human
cccugaggcugaggauaggugg

SEQ ID NO: 878104 - RNA, 22 nt, Human
agcaaagcugauuaagagcaca

SEQ ID NO: 878105 - RNA, 22 nt, Human
cccauggguuuuccucccugcc

SEQ ID NO: 878106 - RNA, 22 nt, Human
auagaauaugacuuuuagaucc

SEQ ID NO: 878107 - RNA, 22 nt, Human
auaaagucauuucaaaaguuga

SEQ ID NO: 878108 - RNA, 22 nt, Human
gaccacagcagugcaagaggag

SEQ ID NO: 878109 - RNA, 22 nt, Human
ugguggcaaaagaggcaaagug

SEQ ID NO: 878110 - RNA, 22 nt, Human
cauuagagcagauaauaugugu

SEQ ID NO: 878111 - RNA, 22 nt, Human
agcuuuaucccuugcccaucga

SEQ ID NO: 878112 - RNA, 22 nt, Human
cagacaucacacucagauugca

SEQ ID NO: 878113 - RNA, 22 nt, Human
agaagccaagaacagacagugc

SEQ ID NO: 878114 - RNA, 22 nt, Human
ucaguugcuagaagggggaacc

SEQ ID NO: 878115 - RNA, 22 nt, Human
uccucaggucaaagcaggagaa

SEQ ID NO: 878116 - RNA, 22 nt, Human
caggcugcugacaggcuuggag

SEQ ID NO: 878117 - RNA, 22 nt, Human
cacagguccuuccugcccuggg

SEQ ID NO: 878118 - RNA, 22 nt, Human
aaauagaauuggaagcagaguu

SEQ ID NO: 878119 - RNA, 22 nt, Human
auggaaauaucuuuagagcuua

SEQ ID NO: 878120 - RNA, 22 nt, Human
gcacccagaggucagcagugcu

SEQ ID NO: 878121 - RNA, 22 nt, Human
agccagccgggggaccacagug

SEQ ID NO: 878122 - RNA, 18 nt, Human
ggaaaccacaggguucug

SEQ ID NO: 878123 - RNA, 22 nt, Human
aacauuuacaaauccuucugca

SEQ ID NO: 878124 - RNA, 22 nt, Human
cucacagauacggcuauuccug

SEQ ID NO: 878125 - RNA, 22 nt, Human
agcccagguucuaaagccaaac

SEQ ID NO: 878126 - RNA, 22 nt, Human
cagggaugucucuggaagggag

SEQ ID NO: 878127 - RNA, 20 nt, Human
gcugggggugugcugaguga

SEQ ID NO: 878128 - RNA, 22 nt, Human
uauaagaaacaaggcaaauuuu

SEQ ID NO: 878129 - RNA, 23 nt, Human
aagauacagguguggaaugguuu

SEQ ID NO: 878130 - RNA, 22 nt, Human
auguacacuuuggaagagucac

SEQ ID NO: 878131 - RNA, 22 nt, Human
ucuguucuuuccaacaagacag

SEQ ID NO: 878132 - RNA, 18 nt, Human
ucauucaaagucuacuga

SEQ ID NO: 878133 - RNA, 22 nt, Human
uuacccaggaaagaaaugguau

SEQ ID NO: 878134 - RNA, 22 nt, Human
agacgcuauuuugaggggucua

SEQ ID NO: 878135 - RNA, 22 nt, Human
agaaaacuugcucgagccuguu

SEQ ID NO: 878136 - RNA, 22 nt, Human
uguaaccaugaugagcagguau

SEQ ID NO: 878137 - RNA, 22 nt, Human
uguucaaguggauguggcuuuu

SEQ ID NO: 878138 - RNA, 22 nt, Human
ccucugaguguuuuccccgggu

SEQ ID NO: 878139 - RNA, 22 nt, Human
gcagcagaguagacagagcccu

SEQ ID NO: 878140 - RNA, 22 nt, Human
ugcaauaacccaguaucuguga

SEQ ID NO: 878141 - RNA, 23 nt, Human
gcccucaguagaaaauguuagaa

SEQ ID NO: 878142 - RNA, 22 nt, Human
aucaugaaucuuguguucuaug

SEQ ID NO: 878143 - RNA, 22 nt, Human
agauacauuaguaguuacuugu

SEQ ID NO: 878144 - RNA, 22 nt, Human
uaggacuuagucuaauuuuucu

SEQ ID NO: 878145 - RNA, 20 nt, Human
uucuagcauacuuacaagga

SEQ ID NO: 878146 - RNA, 22 nt, Human
gucacccugcuggcuguucagc

SEQ ID NO: 878147 - RNA, 22 nt, Human
cauguaaauccuucuuuaggcc

SEQ ID NO: 878148 - RNA, 22 nt, Human
gauaggauuauucccauuucca

SEQ ID NO: 878149 - RNA, 22 nt, Human
ugcacgugggcucucugcucuu

SEQ ID NO: 878150 - RNA, 20 nt, Human
cucucccagcacagcuuccu

SEQ ID NO: 878151 - RNA, 20 nt, Human
agugacagagacuguguggc

SEQ ID NO: 878152 - RNA, 22 nt, Human
agggcugccugcucugcauuga

SEQ ID NO: 878153 - RNA, 22 nt, Human
ugucagggcaugcgguccagcc

SEQ ID NO: 878154 - RNA, 22 nt, Human
ccucuggcuuacuguuggguuu

SEQ ID NO: 878155 - RNA, 22 nt, Human
uauucagaggguugaauuuuua

SEQ ID NO: 878156 - RNA, 22 nt, Human
guugaauaauucauagaagcua

SEQ ID NO: 878157 - RNA, 22 nt, Human
cagcaccauuuuccuggucagc

SEQ ID NO: 878158 - RNA, 22 nt, Human
cuuccaggugcuggccuggccu

SEQ ID NO: 878159 - RNA, 22 nt, Human
caggaaauauaggaaaaggaac

SEQ ID NO: 878160 - RNA, 22 nt, Human
ugaugucugccaggguccuggg

SEQ ID NO: 878161 - RNA, 22 nt, Human
uuugacuccuguguuucuggaa

SEQ ID NO: 878162 - RNA, 21 nt, Human
ucuuccugcuccacacucccc

SEQ ID NO: 878163 - RNA, 22 nt, Human
aaggaucauaguaaacauugau

SEQ ID NO: 878164 - RNA, 22 nt, Human
uccugcugcucuugggaaaccu

SEQ ID NO: 878165 - RNA, 22 nt, Human
ugaaagaagugucacauugcca

SEQ ID NO: 878166 - RNA, 22 nt, Human
cccagcuccuuggaugggcagg

SEQ ID NO: 878167 - RNA, 22 nt, Human
aucuucaauauuuuuguguaga

SEQ ID NO: 878168 - RNA, 22 nt, Human
uucugguggccagaagucugaa

SEQ ID NO: 878169 - RNA, 22 nt, Human
gagaggugaaauaguuguccgg

SEQ ID NO: 878170 - RNA, 22 nt, Human
cagcccuggcuagggcgagggc

SEQ ID NO: 878171 - RNA, 22 nt, Human
gaggcaggcccugaaugaguca

SEQ ID NO: 878172 - RNA, 22 nt, Human
gugauaucuuacaauucucuuu

SEQ ID NO: 878173 - RNA, 22 nt, Human
ccacuuuucuacccacugugac

SEQ ID NO: 878174 - RNA, 22 nt, Human
gcaggaguggagaccaugggga

SEQ ID NO: 878175 - RNA, 22 nt, Human
ucuggcucuccagugcucuuag

SEQ ID NO: 878176 - RNA, 22 nt, Human
ugucuuaaacuugugggacuuc

SEQ ID NO: 878177 - RNA, 20 nt, Human
ugucuuuccauggcuggauc

SEQ ID NO: 878178 - RNA, 22 nt, Human
gaccugaaaugggggccugucc

SEQ ID NO: 878179 - RNA, 22 nt, Human
agggcucacuacaacccuggga

SEQ ID NO: 878180 - RNA, 22 nt, Human
uacauagaauauuucacuuaaa

SEQ ID NO: 878181 - RNA, 22 nt, Human
auaauauugagucaggaccuga

SEQ ID NO: 878182 - RNA, 22 nt, Human
caggccagcagggccuccgugg

SEQ ID NO: 878183 - RNA, 22 nt, Human
ugaaaauucaucucauagcaga

SEQ ID NO: 878184 - RNA, 22 nt, Human
uuccuucuaauauucugccugu

SEQ ID NO: 878185 - RNA, 22 nt, Human
uuaaagcaucacacuauuaauu

SEQ ID NO: 878186 - RNA, 22 nt, Human
aaggggcucuugucaggcgcag

SEQ ID NO: 878187 - RNA, 23 nt, Human
gcucaggcaucauucuuccuggc

SEQ ID NO: 878188 - RNA, 22 nt, Human
uauuuaaaauagugcuccagca

SEQ ID NO: 878189 - RNA, 22 nt, Human
ccugggugucaugggcagcugg

SEQ ID NO: 878190 - RNA, 21 nt, Human
uaaauaauaaguugcugagau

SEQ ID NO: 878191 - RNA, 22 nt, Human
gccaggguucgaauccguaugg

SEQ ID NO: 878192 - RNA, 20 nt, Human
ccaauguuuacagauuacuu

SEQ ID NO: 878193 - RNA, 22 nt, Human
gccacugauuccaagucaauuu

SEQ ID NO: 878194 - RNA, 22 nt, Human
ccucugcccuuuuccuguauca

SEQ ID NO: 878195 - RNA, 21 nt, Human
gcucugugaaauuucaccagg

SEQ ID NO: 878196 - RNA, 22 nt, Human
ggcccacacugacagcugagcu

SEQ ID NO: 878197 - RNA, 22 nt, Human
aaaguguuuacauugcuauaag

SEQ ID NO: 878198 - RNA, 22 nt, Human
uuauaguauuagguacucaaca

SEQ ID NO: 878199 - RNA, 22 nt, Human
uuaauccauggcaguuauuaaa

SEQ ID NO: 878200 - RNA, 22 nt, Human
uguuaaauugauucaccuuucu

SEQ ID NO: 878201 - RNA, 22 nt, Human
uguccaggucagcagcagggac

SEQ ID NO: 878202 - RNA, 22 nt, Human
gagaggcccugaagcccacaga

SEQ ID NO: 878203 - RNA, 22 nt, Human
ggcagugagaggucuccugguc

SEQ ID NO: 878204 - RNA, 22 nt, Human
uggaagagacacuuacauucag

SEQ ID NO: 878205 - RNA, 22 nt, Human
ggaaaggcuaacagucauggaa

SEQ ID NO: 878206 - RNA, 21 nt, Human
agagcugguagguagguaggu

SEQ ID NO: 878207 - RNA, 22 nt, Human
gaugagggccugguggcugugc

SEQ ID NO: 878208 - RNA, 22 nt, Human
accucugggaaaaguauggaaa

SEQ ID NO: 878209 - RNA, 22 nt, Human
gaagaaggugcuacacagggca

SEQ ID NO: 878210 - RNA, 22 nt, Human
agacaguaauaaaauagguaag

SEQ ID NO: 878211 - RNA, 22 nt, Human
aaguucuaauuuugcauucagg

SEQ ID NO: 878212 - RNA, 22 nt, Human
uacaaugcugugcauguaaugg

SEQ ID NO: 878213 - RNA, 22 nt, Human
gcaagagacuuuuaugucugcc

SEQ ID NO: 878214 - RNA, 22 nt, Human
cuguccugaggcagguggccug

SEQ ID NO: 878215 - RNA, 19 nt, Human
cccaaggcccugggcaggc

SEQ ID NO: 878216 - RNA, 22 nt, Human
gggaccaggucagggcucugac

SEQ ID NO: 878217 - RNA, 22 nt, Human
ugcucaggaggaggcugugagg

SEQ ID NO: 878218 - RNA, 22 nt, Human
uucacauuacaaggccauauuu

SEQ ID NO: 878219 - RNA, 22 nt, Human
uuuacuacuugugauaacugaa

SEQ ID NO: 878220 - RNA, 18 nt, Human
gaaagugcggggcagggg

SEQ ID NO: 878221 - RNA, 22 nt, Human
gcugccaugccacagcacucac

SEQ ID NO: 878222 - RNA, 22 nt, Human
auucuaagucuuguucacauuc

SEQ ID NO: 878223 - RNA, 22 nt, Human
cugggagucaccaggagcaagg

SEQ ID NO: 878224 - RNA, 22 nt, Human
guggaaggaagagauggcccca

SEQ ID NO: 878225 - RNA, 22 nt, Human
caguaauaacacagaaaguuug

SEQ ID NO: 878226 - RNA, 22 nt, Human
caugggcccgugagaggcaggg

SEQ ID NO: 878227 - RNA, 22 nt, Human
uucaaacacagacagcagcaug

SEQ ID NO: 878228 - RNA, 22 nt, Human
ucuccucucuuaccugguacaa

SEQ ID NO: 878229 - RNA, 22 nt, Human
auguggcucagcaggcucccgu

SEQ ID NO: 878230 - RNA, 22 nt, Human
cacagguaauagccuaggcuau

SEQ ID NO: 878231 - RNA, 22 nt, Human
cugagguggaacagaggugaag

SEQ ID NO: 878232 - RNA, 22 nt, Human
uuagaaaacauaagugguaaag

SEQ ID NO: 878233 - RNA, 22 nt, Human
aagcaaagugcuuugccuccag

SEQ ID NO: 878234 - RNA, 20 nt, Human
aaugaucagcauagcaagga

SEQ ID NO: 878235 - RNA, 22 nt, Human
aggcagcucuguggccucccag

SEQ ID NO: 878236 - RNA, 23 nt, Human
acaaugucuguucauaaaauacc

SEQ ID NO: 878237 - RNA, 21 nt, Human
agagagaaggccauauggucc

SEQ ID NO: 878238 - RNA, 22 nt, Human
uagcuucucuuuucaacaucuu

SEQ ID NO: 878239 - RNA, 22 nt, Human
agugaacaaggaugccaccucu

SEQ ID NO: 878240 - RNA, 22 nt, Human
gagaaggacuacacaucuggcc

SEQ ID NO: 878241 - RNA, 22 nt, Human
guguggggagcugcagccacau

SEQ ID NO: 878242 - RNA, 22 nt, Human
ggcuggauaccaggagacaggg

SEQ ID NO: 878243 - RNA, 22 nt, Human
cuacucucccaugauucucugu

SEQ ID NO: 878244 - RNA, 22 nt, Human
ccugccugcaaaaugggacaag

SEQ ID NO: 878245 - RNA, 22 nt, Human
gccuggagggucccucucugga

SEQ ID NO: 878246 - RNA, 18 nt, Human
ugaacuuuuccugcugcu

SEQ ID NO: 878247 - RNA, 15 nt, Human
ugauuuccuacuaac

SEQ ID NO: 878248 - RNA, 21 nt, Human
caaguucugugucuuacuccu

SEQ ID NO: 878249 - RNA, 22 nt, Human
cuuguacauugauuucugcauu

SEQ ID NO: 878250 - RNA, 22 nt, Human
gaguggcuacaggcagcuuaca

SEQ ID NO: 878251 - RNA, 22 nt, Human
auauuuguugaguucuuaugau

SEQ ID NO: 878252 - RNA, 22 nt, Human
gggucuggcaugcugagaugga

SEQ ID NO: 878253 - RNA, 22 nt, Human
cccaggagacugagcuguaacc

SEQ ID NO: 878254 - RNA, 23 nt, Human
ggaaagagaggaguugugcauag

SEQ ID NO: 878255 - RNA, 22 nt, Human
cugaggccugggggcguggacg

SEQ ID NO: 878256 - RNA, 22 nt, Human
gaauuucacaaggugaggauaa

SEQ ID NO: 878257 - RNA, 22 nt, Human
cagacagagucuucccaucagu

SEQ ID NO: 878258 - RNA, 22 nt, Human
uacaaaacagugcucugguccu

SEQ ID NO: 878259 - RNA, 22 nt, Human
cucagugcuuuggauccuggau

SEQ ID NO: 878260 - RNA, 22 nt, Human
agacauuuauucacacauuuau

SEQ ID NO: 878261 - RNA, 22 nt, Human
cccauuuaaguaaugauaaacu

SEQ ID NO: 878262 - RNA, 23 nt, Human
uggcuucaacucugucggcagcc

SEQ ID NO: 878263 - RNA, 22 nt, Human
cagacugugucugaaccugguc

SEQ ID NO: 878264 - RNA, 19 nt, Human
cgcagguggaaggagccgc

SEQ ID NO: 878265 - RNA, 22 nt, Human
aaagccuucuucggucugugau

SEQ ID NO: 878266 - RNA, 22 nt, Human
uuucuccaauguaucagcacac

SEQ ID NO: 878267 - RNA, 22 nt, Human
agcugagaaucuuccccagugu

SEQ ID NO: 878268 - RNA, 22 nt, Human
gaaugaaagauuugcauucuau

SEQ ID NO: 878269 - RNA, 22 nt, Human
ccugaaacaucuucuguaaaua

SEQ ID NO: 878270 - RNA, 22 nt, Human
gaggggcucuugggcaugaagg

SEQ ID NO: 878271 - RNA, 22 nt, Human
agcucccagagcucgagaguaa

SEQ ID NO: 878272 - RNA, 22 nt, Human
aagaggaggauugaugugggag

SEQ ID NO: 878273 - RNA, 22 nt, Human
auuccacaagaccauaaauuag

SEQ ID NO: 878274 - RNA, 22 nt, Human
cccaggaggccaagguugcagu

SEQ ID NO: 878275 - RNA, 22 nt, Human
gucacacagagcccugugcuca

SEQ ID NO: 878276 - RNA, 22 nt, Human
acucugagucaugcacuccuug

SEQ ID NO: 878277 - RNA, 22 nt, Human
aaaugcuuuggugcugguacag

SEQ ID NO: 878278 - RNA, 22 nt, Human
ugcaggaaugagguucucaguu

SEQ ID NO: 878279 - RNA, 22 nt, Human
augugugcucuugagccuucac

SEQ ID NO: 878280 - RNA, 22 nt, Human
uaucuguucauguuuauauguc

SEQ ID NO: 878281 - RNA, 22 nt, Human
cucuccagccaggggcuuccug

SEQ ID NO: 878282 - RNA, 22 nt, Human
auguuuccagauaugucacccu

SEQ ID NO: 878283 - RNA, 22 nt, Human
cuggaaggguacauaggaaacu

SEQ ID NO: 878284 - RNA, 22 nt, Human
uaaaagauaucuuagggauuug

SEQ ID NO: 878285 - RNA, 22 nt, Human
gggagccaugcuggucuucuuu

SEQ ID NO: 878286 - RNA, 22 nt, Human
gggcugcacguauucugcucac

SEQ ID NO: 878287 - RNA, 22 nt, Human
ggcacagcaggagcuaugugaa

SEQ ID NO: 878288 - RNA, 22 nt, Human
cuggagccuagguugaccuggg

SEQ ID NO: 878289 - RNA, 19 nt, Human
cagaggugauauaugccca

SEQ ID NO: 878290 - RNA, 22 nt, Human
uccucugccccagaugaaauuu

SEQ ID NO: 878291 - RNA, 22 nt, Human
uuaugacaggaaaaucacagaa

SEQ ID NO: 878292 - RNA, 22 nt, Human
ucaacagacauuuuuaagcacu

SEQ ID NO: 878293 - RNA, 22 nt, Human
cagcagcucaggcugcuuccca

SEQ ID NO: 878294 - RNA, 22 nt, Human
gaggccugguuugcaugagaau

SEQ ID NO: 878295 - RNA, 22 nt, Human
auacagcuuacaguucuaaugc

SEQ ID NO: 878296 - RNA, 22 nt, Human
auacagaaaaugaugcagaguu

SEQ ID NO: 878297 - RNA, 22 nt, Human
ugaggccauggaacuagcuugg

SEQ ID NO: 878298 - RNA, 19 nt, Human
ugaagcaauaccauuuuug

SEQ ID NO: 878299 - RNA, 22 nt, Human
cuuuaguuuguaagagcaagag

SEQ ID NO: 878300 - RNA, 22 nt, Human
uaaaguauaagcauuggaguau

SEQ ID NO: 878301 - RNA, 22 nt, Human
cagcucaguuucaauaccaggu

SEQ ID NO: 878302 - RNA, 23 nt, Human
cugcugugaaacaugguuuuggu

SEQ ID NO: 878303 - RNA, 22 nt, Human
gucaccaucuacagcuccaaac

SEQ ID NO: 878304 - RNA, 22 nt, Human
agcccaugguguacucuguggc

SEQ ID NO: 878305 - RNA, 23 nt, Human
agggccaggugcggaaacagcuc

SEQ ID NO: 878306 - RNA, 22 nt, Human
ccugagagcauuccacacugaa

SEQ ID NO: 878307 - RNA, 22 nt, Human
gagguggucgaggagggguacc

SEQ ID NO: 878308 - RNA, 19 nt, Human
gcaucagagcagaaggggu

SEQ ID NO: 878309 - RNA, 22 nt, Human
uuuguauaaauuggagcaaugu

SEQ ID NO: 878310 - RNA, 22 nt, Human
uauuaaauuauggauuuaggag

SEQ ID NO: 878311 - RNA, 22 nt, Human
cucucuuucugaaugaggacua

SEQ ID NO: 878312 - RNA, 23 nt, Human
agaagcagcuucuggaguaucgg

SEQ ID NO: 878313 - RNA, 22 nt, Human
cagcagugacaagacuaagaag

SEQ ID NO: 878314 - RNA, 23 nt, Human
agaaggguccuuggcagcgacag

SEQ ID NO: 878315 - RNA, 22 nt, Human
aggugggcaccaggcuuguggu

SEQ ID NO: 878316 - RNA, 22 nt, Human
uguuucauguggacauaguugu

SEQ ID NO: 878317 - RNA, 22 nt, Human
uguuaaaugagauuggaauuug

SEQ ID NO: 878318 - RNA, 22 nt, Human
caggggccggcuguccgugccc

SEQ ID NO: 878319 - RNA, 22 nt, Human
ccuggggauucugacacggagu

SEQ ID NO: 878320 - RNA, 20 nt, Human
cuggcccaucuaccgcucug

SEQ ID NO: 878321 - RNA, 22 nt, Human
gaacaguaacugucugcugugu

SEQ ID NO: 878322 - RNA, 22 nt, Human
guccccuuaaacaugcucucuu

SEQ ID NO: 878323 - RNA, 21 nt, Human
ggcagcugugguuaauugaac

SEQ ID NO: 878324 - RNA, 22 nt, Human
cagcagagcugugugggaaggg

SEQ ID NO: 878325 - RNA, 22 nt, Human
gugauucucacucuagugcuug

SEQ ID NO: 878326 - RNA, 22 nt, Human
ggcagucauuuaaucccugcau

SEQ ID NO: 878327 - RNA, 22 nt, Human
uuuuucuuaaauguggguuggc

SEQ ID NO: 878328 - RNA, 22 nt, Human
uuuguacaugaaugugcaccca

SEQ ID NO: 878329 - RNA, 22 nt, Human
uccagagaucacacugggcagg

SEQ ID NO: 878330 - RNA, 22 nt, Human
ugcagcucaggauucucagggc

SEQ ID NO: 878331 - RNA, 22 nt, Human
uaacaagauuuguaaaauugua

SEQ ID NO: 878332 - RNA, 22 nt, Human
uuacaguuagaaucugaugaaa

SEQ ID NO: 878333 - RNA, 22 nt, Human
agaggcugggcaggacccacag

SEQ ID NO: 878334 - RNA, 22 nt, Human
gaaaaugccucuggcauuaaac

SEQ ID NO: 878335 - RNA, 21 nt, Human
ucugccugagacuuugcuggu

SEQ ID NO: 878336 - RNA, 22 nt, Human
cuucuggcaaaacaggcagaaa

SEQ ID NO: 878337 - RNA, 22 nt, Human
cucaacaugccuacucagucug

SEQ ID NO: 878338 - RNA, 22 nt, Human
aucacaaaggcugcuucaugau

SEQ ID NO: 878339 - RNA, 22 nt, Human
aacauuuguuuggcuucaauua

SEQ ID NO: 878340 - RNA, 22 nt, Human
guuacaauguccuuacaugaaa

SEQ ID NO: 878341 - RNA, 22 nt, Human
cucuuugguuaaucacacagau

SEQ ID NO: 878342 - RNA, 22 nt, Human
aagguagauucuggaucgaagg

SEQ ID NO: 878343 - RNA, 22 nt, Human
gugcauauaugcacauaugugu

SEQ ID NO: 878344 - RNA, 22 nt, Human
augaggcaucugcagucacuag

SEQ ID NO: 878345 - RNA, 22 nt, Human
uucuccaguuucucccuucagu

SEQ ID NO: 878346 - RNA, 22 nt, Human
gcaagugucugagguuuuguau

SEQ ID NO: 878347 - RNA, 22 nt, Human
cagaauaauauuggucucauag

SEQ ID NO: 878348 - RNA, 22 nt, Human
ucucugagcgcauuccuccggc

SEQ ID NO: 878349 - RNA, 22 nt, Human
augccaaguaugauucacaugu

SEQ ID NO: 878350 - RNA, 22 nt, Human
caggaaauaucucaacacuuua

SEQ ID NO: 878351 - RNA, 22 nt, Human
acuuccuuuucaaccauacagc

SEQ ID NO: 878352 - RNA, 22 nt, Human
cccagugccaggcacaggcagc

SEQ ID NO: 878353 - RNA, 22 nt, Human
ggcugccugcuccuccugcacg

SEQ ID NO: 878354 - RNA, 22 nt, Human
aguucaucuuacuuagaguaca

SEQ ID NO: 878355 - RNA, 22 nt, Human
aggccucaguuugucaucugua

SEQ ID NO: 878356 - RNA, 22 nt, Human
acaaauuguugcuucaugaaug

SEQ ID NO: 878357 - RNA, 16 nt, Human
gagggcagaggcggaa

SEQ ID NO: 878358 - RNA, 22 nt, Human
ggcagaggagcuggaaacaugg

SEQ ID NO: 878359 - RNA, 22 nt, Human
uaguuucucagggaggaaagaa

SEQ ID NO: 878360 - RNA, 22 nt, Human
cuuuccuagaaauauauacuua

SEQ ID NO: 878361 - RNA, 22 nt, Human
cugugcugaggaugcaguuucu

SEQ ID NO: 878362 - RNA, 22 nt, Human
gcagggugaaggucacauagaa

SEQ ID NO: 878363 - RNA, 19 nt, Human
uucugggcagcacaugaau

SEQ ID NO: 878364 - RNA, 22 nt, Human
cccaggcugaugggaugggcca

SEQ ID NO: 878365 - RNA, 20 nt, Human
ggaagccagggugcagggga

SEQ ID NO: 878366 - RNA, 22 nt, Human
gaggaggggcacuugucuccua

SEQ ID NO: 878367 - RNA, 22 nt, Human
aaauaagaaauucuucuuugca

SEQ ID NO: 878368 - RNA, 22 nt, Human
ucccugccuccuggcagugcca

SEQ ID NO: 878369 - RNA, 17 nt, Human
guaauauaauaagccuu

SEQ ID NO: 878370 - RNA, 22 nt, Human
caguggaugauuuggcugcuag

SEQ ID NO: 878371 - RNA, 22 nt, Human
uccugugucaauuccucauucu

SEQ ID NO: 878372 - RNA, 23 nt, Human
gugcaugugucuuuacaguagca

SEQ ID NO: 878373 - RNA, 22 nt, Human
ucucacauuuuaaaaggacaua

SEQ ID NO: 878374 - RNA, 22 nt, Human
cuggcccuguggaggcaggaac

SEQ ID NO: 878375 - RNA, 22 nt, Human
agcagcugaucaaagcacuuau

SEQ ID NO: 878376 - RNA, 22 nt, Human
ucaaaggcaccaaggucacugc

SEQ ID NO: 878377 - RNA, 22 nt, Human
uuuagacagcggcucugaacca

SEQ ID NO: 878378 - RNA, 22 nt, Human
uucugacaugugagauuuuguu

SEQ ID NO: 878379 - RNA, 22 nt, Human
caggcuguguuccuggaacccc

SEQ ID NO: 878380 - RNA, 22 nt, Human
ccuccaguacuccaguccagcg

SEQ ID NO: 878381 - RNA, 22 nt, Human
augacaccauauuagccuagag

SEQ ID NO: 878382 - RNA, 22 nt, Human
ucuggcaggccuugucaaucug

SEQ ID NO: 878383 - RNA, 22 nt, Human
uuagaacuuuucaacuccauuc

SEQ ID NO: 878384 - RNA, 22 nt, Human
ucucugagcccaauguagcaau

SEQ ID NO: 878385 - RNA, 22 nt, Human
gaugaaaugugaaaguucuggg

SEQ ID NO: 878386 - RNA, 22 nt, Human
agcuguuuaaaugacuuacuuu

SEQ ID NO: 878387 - RNA, 22 nt, Human
ucagcauuucagaaguggcaua

SEQ ID NO: 878388 - RNA, 22 nt, Human
uacagguaaaauuaucagaaac

SEQ ID NO: 878389 - RNA, 22 nt, Human
uuuauccaucaucugcugaagg

SEQ ID NO: 878390 - RNA, 22 nt, Human
cuuccucugaggcuucugaguc

SEQ ID NO: 878391 - RNA, 22 nt, Human
uagacauuauuucuacccacaa

SEQ ID NO: 878392 - RNA, 22 nt, Human
caguuaucaaauacuaugaagg

SEQ ID NO: 878393 - RNA, 22 nt, Human
aggcaacaugacucacuugcac

SEQ ID NO: 878394 - RNA, 22 nt, Human
cauucucuugacaggacagccc

SEQ ID NO: 878395 - RNA, 22 nt, Human
aaaauugucgaacaguaguaac

SEQ ID NO: 878396 - RNA, 22 nt, Human
uuccugggaggcuguguacuug

SEQ ID NO: 878397 - RNA, 22 nt, Human
uugucugaaucuggagcucucu

SEQ ID NO: 878398 - RNA, 22 nt, Human
cagagcaggaauaggguguuga

SEQ ID NO: 878399 - RNA, 22 nt, Human
gcuccucuccucggagucgggg

SEQ ID NO: 878400 - RNA, 22 nt, Human
gcagagugaagcaguauggaaa

SEQ ID NO: 878401 - RNA, 22 nt, Human
acacccagcugggccaccucca

SEQ ID NO: 878402 - RNA, 21 nt, Human
aggcucagagaucaaacagua

SEQ ID NO: 878403 - RNA, 22 nt, Human
cagcucagucuugaagcacugg

SEQ ID NO: 878404 - RNA, 22 nt, Human
uaagugaugagcacaguaauua

SEQ ID NO: 878405 - RNA, 22 nt, Human
gccaccucggcuuucucugcuc

SEQ ID NO: 878406 - RNA, 22 nt, Human
ugacuucugauugcuucuauuu

SEQ ID NO: 878407 - RNA, 22 nt, Human
auucuagcugaguaucagcccc

SEQ ID NO: 878408 - RNA, 22 nt, Human
ucagcagggaggcucugugccc

SEQ ID NO: 878409 - RNA, 22 nt, Human
agccuggccaggccugcccagg

SEQ ID NO: 878410 - RNA, 22 nt, Human
agaaucuuguuucuuguguguu

SEQ ID NO: 878411 - RNA, 22 nt, Human
agaugaguaaauggagucuucc

SEQ ID NO: 878412 - RNA, 22 nt, Human
uacaguacccugaugaacuaaa

SEQ ID NO: 878413 - RNA, 22 nt, Human
ccuucaaagaguauuuccugag

SEQ ID NO: 878414 - RNA, 22 nt, Human
ucuuuuaaccuaacuagcuugg

SEQ ID NO: 878415 - RNA, 22 nt, Human
agauucaguuaaggcugguaga

SEQ ID NO: 878416 - RNA, 22 nt, Human
ccauggcaacuggcguccaggg

SEQ ID NO: 878417 - RNA, 22 nt, Human
ugcauauuauguguaucugucu

SEQ ID NO: 878418 - RNA, 22 nt, Human
aacaguauaugaaauguuagga

SEQ ID NO: 878419 - RNA, 22 nt, Human
auaguuuaaggaacuaugcgau

SEQ ID NO: 878420 - RNA, 22 nt, Human
caauuucuaacauuccauggau

SEQ ID NO: 878421 - RNA, 22 nt, Human
uguuuacaaaaccgugguacug

SEQ ID NO: 878422 - RNA, 22 nt, Human
aagauaauauucauuaacuaga

SEQ ID NO: 878423 - RNA, 22 nt, Human
aaagcagcagaaucucucaggg

SEQ ID NO: 878424 - RNA, 22 nt, Human
ccagcagcaggccaggcccucc

SEQ ID NO: 878425 - RNA, 22 nt, Human
uuugacaggagguggcuacuca

SEQ ID NO: 878426 - RNA, 22 nt, Human
acugcacuucacccugggugac

SEQ ID NO: 878427 - RNA, 22 nt, Human
augaaucaagugagaacagcau

SEQ ID NO: 878428 - RNA, 21 nt, Human
agcaccaguuuuaugccaggc

SEQ ID NO: 878429 - RNA, 22 nt, Human
cagagcugauuggauccagaga

SEQ ID NO: 878430 - RNA, 22 nt, Human
ggucuagaugaaauuaaauguu

SEQ ID NO: 878431 - RNA, 22 nt, Human
auuacaguggguaaacagaauu

SEQ ID NO: 878432 - RNA, 22 nt, Human
uccacaguuuugccacuagcug

SEQ ID NO: 878433 - RNA, 22 nt, Human
auugacaguguuaaaguugccu

SEQ ID NO: 878434 - RNA, 22 nt, Human
gggcauggugaugugcaccugu

SEQ ID NO: 878435 - RNA, 20 nt, Human
uguauuuaaugaaggcuuuu

SEQ ID NO: 878436 - RNA, 22 nt, Human
gcacagagaggcugugagcgcc

SEQ ID NO: 878437 - RNA, 22 nt, Human
gugucacaagagcccaggaaac

SEQ ID NO: 878438 - RNA, 22 nt, Human
aggcgcagacauacagggucug

SEQ ID NO: 878439 - RNA, 22 nt, Human
ucugggagaagcugaugugaag

SEQ ID NO: 878440 - RNA, 22 nt, Human
uuugcugucagccgcuauuuuc

SEQ ID NO: 878441 - RNA, 23 nt, Human
cccagaccuugugcugcccuugg

SEQ ID NO: 878442 - RNA, 22 nt, Human
uucaaguuuuauauccauggcu

SEQ ID NO: 878443 - RNA, 22 nt, Human
auuauaggcuugagccaccgug

SEQ ID NO: 878444 - RNA, 22 nt, Human
caggcuggacauuagauacaua

SEQ ID NO: 878445 - RNA, 22 nt, Human
ggcagcucgucaggcugcggcg

SEQ ID NO: 878446 - RNA, 22 nt, Human
acuuuacaauauccugugacuu

SEQ ID NO: 878447 - RNA, 22 nt, Human
gaaaauaggcagaugcauugua

SEQ ID NO: 878448 - RNA, 22 nt, Human
cuggcaagugguugggauggau

SEQ ID NO: 878449 - RNA, 22 nt, Human
auggcagcaugggauugguaga

SEQ ID NO: 878450 - RNA, 22 nt, Human
aucuguuaacaaagaagacagc

SEQ ID NO: 878451 - RNA, 22 nt, Human
cacuauuuucucuucagauggc

SEQ ID NO: 878452 - RNA, 22 nt, Human
ugggucagagcugugcugccca

SEQ ID NO: 878453 - RNA, 22 nt, Human
cuccuccacagaguccuugcca

SEQ ID NO: 878454 - RNA, 23 nt, Human
ucaaaggaggcaucguucugcag

SEQ ID NO: 878455 - RNA, 19 nt, Human
ggcuggcaagugacagugu

SEQ ID NO: 878456 - RNA, 22 nt, Human
uacagaguuuuccugccaagaa

SEQ ID NO: 878457 - RNA, 22 nt, Human
cacugccugcuggcugucacuu

SEQ ID NO: 878458 - RNA, 22 nt, Human
auugucaguuuaauauagucaa

SEQ ID NO: 878459 - RNA, 22 nt, Human
augccuccccugugucuuuuau

SEQ ID NO: 878460 - RNA, 22 nt, Human
uguaggaauggauucuagaagg

SEQ ID NO: 878461 - RNA, 22 nt, Human
cuggagcucuccagagccccgu

SEQ ID NO: 878462 - RNA, 22 nt, Human
caggaccugaagacaggcaggu

SEQ ID NO: 878463 - RNA, 22 nt, Human
caaagcccuggaaagaugaaga

SEQ ID NO: 878464 - RNA, 22 nt, Human
cuggugcuuugcucauuugaua

SEQ ID NO: 878465 - RNA, 22 nt, Human
aggcuccuaucgcuuucagcaa

SEQ ID NO: 878466 - RNA, 22 nt, Human
gcugcccuguccggcucuccug

SEQ ID NO: 878467 - RNA, 22 nt, Human
agucugugugaaugugggcuuu

SEQ ID NO: 878468 - RNA, 22 nt, Human
acauugcagauguguuuaaugu

SEQ ID NO: 878469 - RNA, 22 nt, Human
gagggggacguauccugguaug

SEQ ID NO: 878470 - RNA, 22 nt, Human
ucuuuucacagacaaauggaga

SEQ ID NO: 878471 - RNA, 22 nt, Human
gaugaggggucauuggcuggga

SEQ ID NO: 878472 - RNA, 22 nt, Human
ccugucucuuucaaucugagag

SEQ ID NO: 878473 - RNA, 22 nt, Human
cagaauaagcuguguugucaag

SEQ ID NO: 878474 - RNA, 22 nt, Human
aggacagagcccuaguuucaua

SEQ ID NO: 878475 - RNA, 22 nt, Human
ccucccugcuccucaacuggca

SEQ ID NO: 878476 - RNA, 22 nt, Human
ggcccugggcagaggagugggc

SEQ ID NO: 878477 - RNA, 22 nt, Human
gcagcaggagaguaauagcggu

SEQ ID NO: 878478 - RNA, 22 nt, Human
ugacacuucugaaacggaaguu

SEQ ID NO: 878479 - RNA, 22 nt, Human
uggaagguggauauccuaguca

SEQ ID NO: 878480 - RNA, 22 nt, Human
cugguggaauggcagagggaac

SEQ ID NO: 878481 - RNA, 22 nt, Human
uacagacauuuacuccacuccu

SEQ ID NO: 878482 - RNA, 22 nt, Human
uaagaagugcugaauugaauau

SEQ ID NO: 878483 - RNA, 22 nt, Human
ucaugaacaucucaaauaacca

SEQ ID NO: 878484 - RNA, 22 nt, Human
aaagugcucggauuacagguau

SEQ ID NO: 878485 - RNA, 22 nt, Human
ucuuccucuagaucugaggccc

SEQ ID NO: 878486 - RNA, 22 nt, Human
cacugcucgcugcagcauggcc

SEQ ID NO: 878487 - RNA, 22 nt, Human
aaaugcagauuccuaggcccca

SEQ ID NO: 878488 - RNA, 23 nt, Human
uugugucuacuuccuaucuaggg

SEQ ID NO: 878489 - RNA, 22 nt, Human
ccuggcuuccauauggcacaua

SEQ ID NO: 878490 - RNA, 22 nt, Human
ccaguguggacucucuccuuug

SEQ ID NO: 878491 - RNA, 22 nt, Human
gcagggaaggggacggaaccag

SEQ ID NO: 878492 - RNA, 22 nt, Human
acucuguaucccucucaaauug

SEQ ID NO: 878493 - RNA, 22 nt, Human
agaaacaucauuggaacacaag

SEQ ID NO: 878494 - RNA, 22 nt, Human
uuauaagaguauauaguguacu

SEQ ID NO: 878495 - RNA, 22 nt, Human
uccacacacauuucuaugugca

SEQ ID NO: 878496 - RNA, 22 nt, Human
ccaggcuccccaggaggcccuu

SEQ ID NO: 878497 - RNA, 22 nt, Human
ugaaggugucuuugugaacauc

SEQ ID NO: 878498 - RNA, 22 nt, Human
aucaggcuaguguguguguuca

SEQ ID NO: 878499 - RNA, 22 nt, Human
uacacauauguguguauaugug

SEQ ID NO: 878500 - RNA, 22 nt, Human
gggcuucagauccagggaccuc

SEQ ID NO: 878501 - RNA, 21 nt, Human
acugggcuagccugacuucug

SEQ ID NO: 878502 - RNA, 22 nt, Human
gagcagugaugggaggacguca

SEQ ID NO: 878503 - RNA, 22 nt, Human
cuuauauuuuaggaacagacaa

SEQ ID NO: 878504 - RNA, 22 nt, Human
cuggcugugaaauggcaguguc

SEQ ID NO: 878505 - RNA, 19 nt, Human
uuuccuaaaaagcugugcu

SEQ ID NO: 878506 - RNA, 22 nt, Human
ccuuuuauauggcucaucacag

SEQ ID NO: 878507 - RNA, 23 nt, Human
agagcuuucuaaaauguaaaucu

SEQ ID NO: 878508 - RNA, 22 nt, Human
gcagcuguucagcuggccagau

SEQ ID NO: 878509 - RNA, 22 nt, Human
cacauuuagagguuagcauggu

SEQ ID NO: 878510 - RNA, 22 nt, Human
gauaaaauucuuauuuuacccg

SEQ ID NO: 878511 - RNA, 22 nt, Human
uauggcagaggagaggcacuag

SEQ ID NO: 878512 - RNA, 22 nt, Human
uaaggcuuauauacuuagacau

SEQ ID NO: 878513 - RNA, 22 nt, Human
aaggccagagcguguccugccu

SEQ ID NO: 878514 - RNA, 22 nt, Human
gcagaagaccaugguggaaaga

SEQ ID NO: 878515 - RNA, 22 nt, Human
gaggcuguuggcugaucugagu

SEQ ID NO: 878516 - RNA, 22 nt, Human
acacaccaugauuuauuuaccc

SEQ ID NO: 878517 - RNA, 22 nt, Human
uggcaugggccagggagagcug

SEQ ID NO: 878518 - RNA, 20 nt, Human
uugaccugcaagucaucauu

SEQ ID NO: 878519 - RNA, 22 nt, Human
ugagauaauaaacaucuccuua

SEQ ID NO: 878520 - RNA, 22 nt, Human
uuacaaagagaaguuguagaau

SEQ ID NO: 878521 - RNA, 22 nt, Human
gcagcaagagguuucuguugac

SEQ ID NO: 878522 - RNA, 22 nt, Human
ggauaaucugggagaaaacuga

SEQ ID NO: 878523 - RNA, 22 nt, Human
aggcuccaggcccuucaccagc

SEQ ID NO: 878524 - RNA, 22 nt, Human
gcagaaagcuccuugcgaucug

SEQ ID NO: 878525 - RNA, 22 nt, Human
uacaggaacugggcaggacauu

SEQ ID NO: 878526 - RNA, 22 nt, Human
uggagauggguuaauggagaga

SEQ ID NO: 878527 - RNA, 22 nt, Human
cagggucaagagacuccagcag

SEQ ID NO: 878528 - RNA, 22 nt, Human
uacccaguuccacacacugaug

SEQ ID NO: 878529 - RNA, 22 nt, Human
ucaggaagugguaaaggauguu

SEQ ID NO: 878530 - RNA, 22 nt, Human
gugggcaggagugagcaacagg

SEQ ID NO: 878531 - RNA, 22 nt, Human
ggaggucauaaguguauagaug

SEQ ID NO: 878532 - RNA, 22 nt, Human
gaggagacggggugccuggagc

SEQ ID NO: 878533 - RNA, 22 nt, Human
agaacagcacaggaaguguauc

SEQ ID NO: 878534 - RNA, 23 nt, Human
uuucugaugagggaugugguaug

SEQ ID NO: 878535 - RNA, 22 nt, Human
uguccaugggcgucaggcagga

SEQ ID NO: 878536 - RNA, 22 nt, Human
ugccuuagaggauagugaagcc

SEQ ID NO: 878537 - RNA, 22 nt, Human
cuggaauauuuguaggaugaaa

SEQ ID NO: 878538 - RNA, 22 nt, Human
acuguacauauggauucuaaga

SEQ ID NO: 878539 - RNA, 22 nt, Human
ucaguuuucaauuucaucagag

SEQ ID NO: 878540 - RNA, 20 nt, Human
cuugcaggaguggguagagu

SEQ ID NO: 878541 - RNA, 22 nt, Human
agcaccugugugguagggaggu

SEQ ID NO: 878542 - RNA, 22 nt, Human
aagaaucauccugcaagagucu

SEQ ID NO: 878543 - RNA, 22 nt, Human
cuagcagcaucacaggaagacu

SEQ ID NO: 878544 - RNA, 22 nt, Human
gaaguucugggaguggcgcccu

SEQ ID NO: 878545 - RNA, 22 nt, Human
uuauucugagaguugaaguaau

SEQ ID NO: 878546 - RNA, 22 nt, Human
gccacagucacugcugcagggg

SEQ ID NO: 878547 - RNA, 23 nt, Human
uucucaggagcccccaggucagg

SEQ ID NO: 878548 - RNA, 22 nt, Human
agcagccuggacuuggaugugg

SEQ ID NO: 878549 - RNA, 22 nt, Human
gaggcauggccugaggcuagga

SEQ ID NO: 878550 - RNA, 22 nt, Human
ggggugggcgugcagggacacc

SEQ ID NO: 878551 - RNA, 22 nt, Human
aaauuccagaaacucaguauau

SEQ ID NO: 878552 - RNA, 22 nt, Human
uaccacugcucccugccuguga

SEQ ID NO: 878553 - RNA, 22 nt, Human
uucuagaagaacuagccaggaa

SEQ ID NO: 878554 - RNA, 19 nt, Human
uagcagcugccaaaggaga

SEQ ID NO: 878555 - RNA, 22 nt, Human
cucugggcggcccaggccaacc

SEQ ID NO: 878556 - RNA, 22 nt, Human
uaguaacacacugguauuugga

SEQ ID NO: 878557 - RNA, 20 nt, Human
guggagaggcuggcgggacu

SEQ ID NO: 878558 - RNA, 19 nt, Human
acagagggcaacugagaaa

SEQ ID NO: 878559 - RNA, 22 nt, Human
ccuccagcgcgauccacuccgg

SEQ ID NO: 878560 - RNA, 22 nt, Human
cugucaguucuuccagauagag

SEQ ID NO: 878561 - RNA, 19 nt, Human
cugaggugcaguaagaggc

SEQ ID NO: 878562 - RNA, 22 nt, Human
uuucuugugccuaauuuugggc

SEQ ID NO: 878563 - RNA, 20 nt, Human
aggcucugcauuucugagug

SEQ ID NO: 878564 - RNA, 22 nt, Human
uuucaggauuaguuuaagcagg

SEQ ID NO: 878565 - RNA, 22 nt, Human
uaguaacacauugaacgaucgc

SEQ ID NO: 878566 - RNA, 22 nt, Human
auagacaacacuuauuauuccu

SEQ ID NO: 878567 - RNA, 22 nt, Human
cucagauaaucuuugagucuuc

SEQ ID NO: 878568 - RNA, 22 nt, Human
ugacagcccaccucacaggauu

SEQ ID NO: 878569 - RNA, 23 nt, Human
uggccacaguccaugcaugccca

SEQ ID NO: 878570 - RNA, 22 nt, Human
acggaguauuuacaagaggaaa

SEQ ID NO: 878571 - RNA, 22 nt, Human
aaacuuuaaauuuguaccucug

SEQ ID NO: 878572 - RNA, 22 nt, Human
auacaacuuuaucuguaaugag

SEQ ID NO: 878573 - RNA, 22 nt, Human
acauucuagauauguuauauuu

SEQ ID NO: 878574 - RNA, 22 nt, Human
agugaucuuuuaaaaagaagug

SEQ ID NO: 878575 - RNA, 22 nt, Human
guccugugagauucaugcucaa

SEQ ID NO: 878576 - RNA, 22 nt, Human
uuuggaaauuucaucaauagcc

SEQ ID NO: 878577 - RNA, 20 nt, Human
cugcucugcuuugcaggugg

SEQ ID NO: 878578 - RNA, 22 nt, Human
ggagcuggaauauauugaaacc

SEQ ID NO: 878579 - RNA, 22 nt, Human
ucagaagugcuguccuuauccc

SEQ ID NO: 878580 - RNA, 22 nt, Human
ugcauacuuguauguguuacau

SEQ ID NO: 878581 - RNA, 19 nt, Human
aaggacacaacagagauag

SEQ ID NO: 878582 - RNA, 22 nt, Human
ucugugcuagcacgcagcaagg

SEQ ID NO: 878583 - RNA, 22 nt, Human
uacaaggcaaauccaugauguc

SEQ ID NO: 878584 - RNA, 22 nt, Human
aagcuuuaaggaauuuuaugga

SEQ ID NO: 878585 - RNA, 22 nt, Human
uguaaacugaggguagcugauu

SEQ ID NO: 878586 - RNA, 23 nt, Human
ugcucccaggugacgcugcuguu

SEQ ID NO: 878587 - RNA, 22 nt, Human
caguggcaugguugacugcagu

SEQ ID NO: 878588 - RNA, 22 nt, Human
gaauugucuuggccagugagaa

SEQ ID NO: 878589 - RNA, 22 nt, Human
guucagcaagaauguuucuauu

SEQ ID NO: 878590 - RNA, 19 nt, Human
caggaacauggagggaggg

SEQ ID NO: 878591 - RNA, 22 nt, Human
gaaagaaucaacuaugucucug

SEQ ID NO: 878592 - RNA, 22 nt, Human
accacaggaauugcucuguggu

SEQ ID NO: 878593 - RNA, 22 nt, Human
auguacauacugcauuuucaaa

SEQ ID NO: 878594 - RNA, 22 nt, Human
cuucacaaucaccuuuucggaa

SEQ ID NO: 878595 - RNA, 22 nt, Human
uaacaguaaaguaaguuagcuu

SEQ ID NO: 878596 - RNA, 22 nt, Human
uuacagauguaggaacugaagu

SEQ ID NO: 878597 - RNA, 23 nt, Human
uuucagcauucuaguucagguuc

SEQ ID NO: 878598 - RNA, 22 nt, Human
gccgaggcucugcccagcugcu

SEQ ID NO: 878599 - RNA, 22 nt, Human
ugcaucaaccuaauaucagcuc

SEQ ID NO: 878600 - RNA, 22 nt, Human
guuuggugagcagcuuggguau

SEQ ID NO: 878601 - RNA, 22 nt, Human
cugggccugagcucugaagagu

SEQ ID NO: 878602 - RNA, 22 nt, Human
agccucugcuggcccuggcacu

SEQ ID NO: 878603 - RNA, 22 nt, Human
agugucugcucagacagcuaca

SEQ ID NO: 878604 - RNA, 22 nt, Human
aaguauuuggaauggcauuuuu

SEQ ID NO: 878605 - RNA, 22 nt, Human
ucauuguugcguuaaugucuuc

SEQ ID NO: 878606 - RNA, 22 nt, Human
uguguugguagaucugaggucu

SEQ ID NO: 878607 - RNA, 22 nt, Human
aaaguuuggauccagcaaaaga

SEQ ID NO: 878608 - RNA, 22 nt, Human
cacauuuacauauaaaacuuuc

SEQ ID NO: 878609 - RNA, 18 nt, Human
acacaguggaugccuggu

SEQ ID NO: 878610 - RNA, 22 nt, Human
gccugccuguuggcugaggugc

SEQ ID NO: 878611 - RNA, 22 nt, Human
cucugucuaucccauucugugc

SEQ ID NO: 878612 - RNA, 22 nt, Human
ccacaggaccagaggagaucac

SEQ ID NO: 878613 - RNA, 22 nt, Human
aagaagcacuuuccuacauguu

SEQ ID NO: 878614 - RNA, 22 nt, Human
ucucuucagcccauuauaaggg

SEQ ID NO: 878615 - RNA, 22 nt, Human
ucugugcuaaugcuucacaaua

SEQ ID NO: 878616 - RNA, 22 nt, Human
ucugcguggcugcugugagcgu

SEQ ID NO: 878617 - RNA, 22 nt, Human
acagagacacggaagcuaaaga

SEQ ID NO: 878618 - RNA, 22 nt, Human
uaguggaggguguagcugcugg

SEQ ID NO: 878619 - RNA, 22 nt, Human
caggcuuggcagggaggcuggu

SEQ ID NO: 878620 - RNA, 22 nt, Human
gggcccugccuaaggaacacac

SEQ ID NO: 878621 - RNA, 22 nt, Human
ugggcagagaguagaggcaacg

SEQ ID NO: 878622 - RNA, 19 nt, Human
uagaaccuggauuucagga

SEQ ID NO: 878623 - RNA, 22 nt, Human
cugaggccggagcacugaagag

SEQ ID NO: 878624 - RNA, 22 nt, Human
cagcacaguacaaggcacggau

SEQ ID NO: 878625 - RNA, 22 nt, Human
cuucugggugccugugaguguu

SEQ ID NO: 878626 - RNA, 23 nt, Human
acauaaacagaaggugugcuucc

SEQ ID NO: 878627 - RNA, 22 nt, Human
guccugugggcccaccaugagc

SEQ ID NO: 878628 - RNA, 22 nt, Human
uguuauuaucuguuagguguuc

SEQ ID NO: 878629 - RNA, 22 nt, Human
ucugauuacuugaguuauuuag

SEQ ID NO: 878630 - RNA, 22 nt, Human
gcaggcaguuugcuuuucccuc

SEQ ID NO: 878631 - RNA, 22 nt, Human
uucuguuucuggggucucugac

SEQ ID NO: 878632 - RNA, 22 nt, Human
aaacuaucccugccauaauuuu

SEQ ID NO: 878633 - RNA, 22 nt, Human
aggcugccaaagcuucugucuc

SEQ ID NO: 878634 - RNA, 22 nt, Human
augugcuuugcuggaaauguca

SEQ ID NO: 878635 - RNA, 22 nt, Human
cagaaaauaaaguuucuacgca

SEQ ID NO: 878636 - RNA, 22 nt, Human
augcuuuaaaacguauguguaa

SEQ ID NO: 878637 - RNA, 22 nt, Human
gacagcuucuagaaauggucac

SEQ ID NO: 878638 - RNA, 22 nt, Human
uaacagcccucccuccauccug

SEQ ID NO: 878639 - RNA, 22 nt, Human
uguauacaauucacacuuccca

SEQ ID NO: 878640 - RNA, 22 nt, Human
ucagcaggcaccggaaguguuu

SEQ ID NO: 878641 - RNA, 22 nt, Human
ggaagcuggacaggcuuugagu

SEQ ID NO: 878642 - RNA, 22 nt, Human
uauuggaaugcacugggagaga

SEQ ID NO: 878643 - RNA, 22 nt, Human
ggggaaugagugcccagaaagc

SEQ ID NO: 878644 - RNA, 23 nt, Human
ucauuucagguugcaugguacca

SEQ ID NO: 878645 - RNA, 22 nt, Human
gcaggaugagugaguacauuua

SEQ ID NO: 878646 - RNA, 23 nt, Human
agagaaagggauaacacguugaa

SEQ ID NO: 878647 - RNA, 22 nt, Human
aaauguauccuacuuccugagu

SEQ ID NO: 878648 - RNA, 22 nt, Human
ggcugccuguugaguauguccc

SEQ ID NO: 878649 - RNA, 23 nt, Human
agagcaaggaaaugaggugugau

SEQ ID NO: 878650 - RNA, 22 nt, Human
cugggccugguagggcuugaaa

SEQ ID NO: 878651 - RNA, 22 nt, Human
caaggcagcguuccuuucugga

SEQ ID NO: 878652 - RNA, 20 nt, Human
uugcuuuaucagacaugaua

SEQ ID NO: 878653 - RNA, 22 nt, Human
gugcaggguagcgacggcagga

SEQ ID NO: 878654 - RNA, 22 nt, Human
gccuggagaggaagccggugga

SEQ ID NO: 878655 - RNA, 22 nt, Human
gagcagcaaagggaggguaaau

SEQ ID NO: 878656 - RNA, 22 nt, Human
uauaguacauggaaucuucaua

SEQ ID NO: 878657 - RNA, 21 nt, Human
gcucuaagcuuugggaagaau

SEQ ID NO: 878658 - RNA, 22 nt, Human
uaagagcuaggauuuuaaauca

SEQ ID NO: 878659 - RNA, 22 nt, Human
cuuaggaauauccacagcaggu

SEQ ID NO: 878660 - RNA, 22 nt, Human
agggcucuguuggggucagcac

SEQ ID NO: 878661 - RNA, 22 nt, Human
cugugcuuucgagaugugaucu

SEQ ID NO: 878662 - RNA, 22 nt, Human
auuacuagauugucaagauuua

SEQ ID NO: 878663 - RNA, 22 nt, Human
ugagccuggccugcagagacca

SEQ ID NO: 878664 - RNA, 22 nt, Human
auaauggcuugugguguuauuc

SEQ ID NO: 878665 - RNA, 22 nt, Human
ugaagccaccgaaccagaagag

SEQ ID NO: 878666 - RNA, 22 nt, Human
uccugggagcacaugguccugc

SEQ ID NO: 878667 - RNA, 22 nt, Human
uccuucucuacaaauccaggca

SEQ ID NO: 878668 - RNA, 23 nt, Human
ugugaagguggguccaagggcug

SEQ ID NO: 878669 - RNA, 22 nt, Human
cuggcucccgucugguggccau

SEQ ID NO: 878670 - RNA, 22 nt, Human
aggccugggucucgugccuacc

SEQ ID NO: 878671 - RNA, 22 nt, Human
aaaugguaagacaacacauuau

SEQ ID NO: 878672 - RNA, 22 nt, Human
ugugcaugucugggccuguaag

SEQ ID NO: 878673 - RNA, 22 nt, Human
ccagcucuuuuggcugagugag

SEQ ID NO: 878674 - RNA, 23 nt, Human
cagguauugauuuuucuucuagg

SEQ ID NO: 878675 - RNA, 22 nt, Human
guggguggaggcgucgagggca

SEQ ID NO: 878676 - RNA, 22 nt, Human
auuggaaauacugagagauaaa

SEQ ID NO: 878677 - RNA, 22 nt, Human
cuuugagcaauucugagaugca

SEQ ID NO: 878678 - RNA, 22 nt, Human
uuaaucuucagggacucuugcu

SEQ ID NO: 878679 - RNA, 21 nt, Human
ccugugccagucuauguguuc

SEQ ID NO: 878680 - RNA, 19 nt, Human
uggaacaaacugcaaugac

SEQ ID NO: 878681 - RNA, 22 nt, Human
gaaaggaagaaaggucauuuua

SEQ ID NO: 878682 - RNA, 22 nt, Human
gucuucuguucugugaggcuuc

SEQ ID NO: 878683 - RNA, 22 nt, Human
cucacugcaaguuccaccuacc

SEQ ID NO: 878684 - RNA, 22 nt, Human
aagcugaaacauuagccuaaac

SEQ ID NO: 878685 - RNA, 22 nt, Human
uuuaguaaguucacugcaaagc

SEQ ID NO: 878686 - RNA, 22 nt, Human
cuccuguggucaagggugggac

SEQ ID NO: 878687 - RNA, 22 nt, Human
gaguauaaugauuuucauucac

SEQ ID NO: 878688 - RNA, 22 nt, Human
caagcucuuuaaacuuauguca

SEQ ID NO: 878689 - RNA, 22 nt, Human
cucccagguuccgacgccucuu

SEQ ID NO: 878690 - RNA, 22 nt, Human
uggcacagacagcacagcaaug

SEQ ID NO: 878691 - RNA, 22 nt, Human
ccugccuggggacaaaggaggg

SEQ ID NO: 878692 - RNA, 22 nt, Human
uauuugaugguucuaaaacagc

SEQ ID NO: 878693 - RNA, 22 nt, Human
uggccaguguuggcuagggaca

SEQ ID NO: 878694 - RNA, 22 nt, Human
uccaucaccauuucugcgagcu

SEQ ID NO: 878695 - RNA, 22 nt, Human
ggaguguggagaggacaugggu

SEQ ID NO: 878696 - RNA, 22 nt, Human
ugagguaauaaguguuuguuuu

SEQ ID NO: 878697 - RNA, 22 nt, Human
ggucagagccauggagcaacug

SEQ ID NO: 878698 - RNA, 22 nt, Human
ggcuaaagauguguucuuugga

SEQ ID NO: 878699 - RNA, 22 nt, Human
agaaucaggaagacagccuggc

SEQ ID NO: 878700 - RNA, 22 nt, Human
caugccaguuuugagaugcacc

SEQ ID NO: 878701 - RNA, 22 nt, Human
cugcugcaggaugggcacucug

SEQ ID NO: 878702 - RNA, 22 nt, Human
gggcagcugccagaggccaugg

SEQ ID NO: 878703 - RNA, 22 nt, Human
agaaagcacucugucuuuuacc

SEQ ID NO: 878704 - RNA, 22 nt, Human
aagagcaucgguggagccccca

SEQ ID NO: 878705 - RNA, 22 nt, Human
ugcugaaguucuuccccuaaug

SEQ ID NO: 878706 - RNA, 22 nt, Human
cucacaggcaucucaucaggcu

SEQ ID NO: 878707 - RNA, 22 nt, Human
gcaaacaucuuuauuuggcaag

SEQ ID NO: 878708 - RNA, 22 nt, Human
gaugaaauccagaucacaggug

SEQ ID NO: 878709 - RNA, 22 nt, Human
ugaggcucagagcaccugcucc

SEQ ID NO: 878710 - RNA, 22 nt, Human
gaugaaauagcaaaggcauuug

SEQ ID NO: 878711 - RNA, 22 nt, Human
ugccugggcucaccgccucuuu

SEQ ID NO: 878712 - RNA, 22 nt, Human
uuugauaugcaaaauuauggac

SEQ ID NO: 878713 - RNA, 22 nt, Human
ugcuggcuuuuugugucaaaga

SEQ ID NO: 878714 - RNA, 22 nt, Human
ccuggcagcgccgaagcuggcc

SEQ ID NO: 878715 - RNA, 22 nt, Human
agcagagguuuguuggaaaccu

SEQ ID NO: 878716 - RNA, 22 nt, Human
ucauaguuuaguuaguaugauu

SEQ ID NO: 878717 - RNA, 22 nt, Human
ucagcuucccuaucugaccaua

SEQ ID NO: 878718 - RNA, 22 nt, Human
gagccuggauugucaccgacuu

SEQ ID NO: 878719 - RNA, 22 nt, Human
ucuuuauaaaagucauuauguc

SEQ ID NO: 878720 - RNA, 22 nt, Human
agugugaguuacaaagugugaa

SEQ ID NO: 878721 - RNA, 22 nt, Human
agggaggaucugcuccuugucu

SEQ ID NO: 878722 - RNA, 22 nt, Human
aggcaguggagcuggaauaggc

SEQ ID NO: 878723 - RNA, 22 nt, Human
cauucaaagcaggaaaggccuu

SEQ ID NO: 878724 - RNA, 22 nt, Human
gcuucucuuucuccccuggcgg

SEQ ID NO: 878725 - RNA, 22 nt, Human
aauuaguauugcgauucauuag

SEQ ID NO: 878726 - RNA, 22 nt, Human
aaaugucugagacuucugaacu

SEQ ID NO: 878727 - RNA, 22 nt, Human
caggacagacagaaugccuaac

SEQ ID NO: 878728 - RNA, 22 nt, Human
ggccccagccucaguccccuga

SEQ ID NO: 878729 - RNA, 22 nt, Human
acugcacagaugaagcuguaaa

SEQ ID NO: 878730 - RNA, 22 nt, Human
uaagaaacuaaugcaauaagag

SEQ ID NO: 878731 - RNA, 22 nt, Human
agguguggcuggggcagaggcc

SEQ ID NO: 878732 - RNA, 22 nt, Human
aacaggcagcagacugaaucug

SEQ ID NO: 878733 - RNA, 22 nt, Human
agagagaggcagcagugcucac

SEQ ID NO: 878734 - RNA, 20 nt, Human
uguggaugagguaaggauag

SEQ ID NO: 878735 - RNA, 22 nt, Human
uuuaauucuggcauaauagcuc

SEQ ID NO: 878736 - RNA, 22 nt, Human
uuagucaauagugaauauagag

SEQ ID NO: 878737 - RNA, 23 nt, Human
ggggacagagggcagcccgcauc

SEQ ID NO: 878738 - RNA, 22 nt, Human
agacaauuguucuaaguaaaaa

SEQ ID NO: 878739 - RNA, 22 nt, Human
ugacacagggcaugcagcagaa

SEQ ID NO: 878740 - RNA, 22 nt, Human
ugagguggugcuaaucucugcu

SEQ ID NO: 878741 - RNA, 20 nt, Human
ucacaggggaccaggagcag

SEQ ID NO: 878742 - RNA, 22 nt, Human
gcaaacaugcugagaaauaaga

SEQ ID NO: 878743 - RNA, 22 nt, Human
cauagaaaucaggugagaaucu

SEQ ID NO: 878744 - RNA, 22 nt, Human
acauuucagcgugcaugacaug

SEQ ID NO: 878745 - RNA, 22 nt, Human
auguaaauuguacugacacacg

SEQ ID NO: 878746 - RNA, 22 nt, Human
agccuggcuuagcucucucacu

SEQ ID NO: 878747 - RNA, 22 nt, Human
acuuucauggaucucuguucag

SEQ ID NO: 878748 - RNA, 21 nt, Human
cugccaggauagcaugcaggc

SEQ ID NO: 878749 - RNA, 21 nt, Human
uaauaauuccacuacagagua

SEQ ID NO: 878750 - RNA, 22 nt, Human
gaugcagggaacuuagugggcu

SEQ ID NO: 878751 - RNA, 22 nt, Human
uguggcccagaugagugugcua

SEQ ID NO: 878752 - RNA, 18 nt, Human
uauaaacacacuuagguu

SEQ ID NO: 878753 - RNA, 22 nt, Human
ugaggcugaaacuggcgauaga

SEQ ID NO: 878754 - RNA, 22 nt, Human
ggcauacaagagaaauauaaga

SEQ ID NO: 878755 - RNA, 20 nt, Human
augugucuuagagcaucagg

SEQ ID NO: 878756 - RNA, 22 nt, Human
ggggccgaccgcgguucaggcc

SEQ ID NO: 878757 - RNA, 22 nt, Human
uucugauaauaccacaucgcag

SEQ ID NO: 878758 - RNA, 22 nt, Human
uuuggaagggaaccaaaacaug

SEQ ID NO: 878759 - RNA, 22 nt, Human
cugcugugauugggagaaaccg

SEQ ID NO: 878760 - RNA, 22 nt, Human
ggccccagggauuaggccaacc

SEQ ID NO: 878761 - RNA, 22 nt, Human
ggccucuguuuggagccaggau

SEQ ID NO: 878762 - RNA, 22 nt, Human
uuuuucucuucuguaaaguggu

SEQ ID NO: 878763 - RNA, 22 nt, Human
aacauugauugcaucuguucac

SEQ ID NO: 878764 - RNA, 22 nt, Human
uuguaaacuuguuugaagguau

SEQ ID NO: 878765 - RNA, 22 nt, Human
ugaggcucaagaaucugcauuu

SEQ ID NO: 878766 - RNA, 22 nt, Human
cuccaaauacaauauuguuguu

SEQ ID NO: 878767 - RNA, 22 nt, Human
caggcugcggccgugugagcau

SEQ ID NO: 878768 - RNA, 22 nt, Human
uucuagcacugccuggaagaca

SEQ ID NO: 878769 - RNA, 22 nt, Human
ucuggguggcuucagaggccac

SEQ ID NO: 878770 - RNA, 20 nt, Human
cuuguuaaauaugcagguag

SEQ ID NO: 878771 - RNA, 22 nt, Human
auggcagcaaaugucuggcugg

SEQ ID NO: 878772 - RNA, 22 nt, Human
ugagugagacauccugucuuaa

SEQ ID NO: 878773 - RNA, 22 nt, Human
augauugccugugugugagaaa

SEQ ID NO: 878774 - RNA, 22 nt, Human
gucauuuucuagaauuauuuga

SEQ ID NO: 878775 - RNA, 22 nt, Human
ucaauuucuugguuugauaaua

SEQ ID NO: 878776 - RNA, 23 nt, Human
uggaagaaaaugguuuggcugug

SEQ ID NO: 878777 - RNA, 22 nt, Human
aaguagcauuuucaaaauguau

SEQ ID NO: 878778 - RNA, 22 nt, Human
agcuucuucugauuugucaguc

SEQ ID NO: 878779 - RNA, 22 nt, Human
ugccuggcucuaucaguggugg

SEQ ID NO: 878780 - RNA, 22 nt, Human
ucuucaauuuagaauggauuua

SEQ ID NO: 878781 - RNA, 22 nt, Human
auuugcugagcucaaagaaaag

SEQ ID NO: 878782 - RNA, 22 nt, Human
uuagucucuuugcauugccaua

SEQ ID NO: 878783 - RNA, 22 nt, Human
auaugcuugggacugauacagu

SEQ ID NO: 878784 - RNA, 22 nt, Human
cuacaacaccaggcacggagug

SEQ ID NO: 878785 - RNA, 22 nt, Human
aguucaauuguuuuguaaaagu

SEQ ID NO: 878786 - RNA, 22 nt, Human
ugggacagugaccccagagguc

SEQ ID NO: 878787 - RNA, 22 nt, Human
agguccuuaacauagugauauc

SEQ ID NO: 878788 - RNA, 22 nt, Human
aagauacaccaagagccuagua

SEQ ID NO: 878789 - RNA, 22 nt, Human
acaugcagagggagggccaggc

SEQ ID NO: 878790 - RNA, 22 nt, Human
uccaggagacacccuugugugu

SEQ ID NO: 878791 - RNA, 21 nt, Human
agcugccuuuagagagaacca

SEQ ID NO: 878792 - RNA, 22 nt, Human
acacuuuuguguauauccaguu

SEQ ID NO: 878793 - RNA, 22 nt, Human
agagggcaugcuugguggccug

SEQ ID NO: 878794 - RNA, 22 nt, Human
accagagagccuaggcugggca

SEQ ID NO: 878795 - RNA, 22 nt, Human
cugggcagugcagcuauagaac

SEQ ID NO: 878796 - RNA, 22 nt, Human
ucuggccaggauggcaagacca

SEQ ID NO: 878797 - RNA, 22 nt, Human
uugauuugggaauggucuggca

SEQ ID NO: 878798 - RNA, 22 nt, Human
cagggcggggucugccggcccu

SEQ ID NO: 878799 - RNA, 22 nt, Human
gcaugcagucaaccaguaaggg

SEQ ID NO: 878800 - RNA, 22 nt, Human
ugugugggcgaagacagccuuu

SEQ ID NO: 878801 - RNA, 22 nt, Human
guaaacaauagcauugccugau

SEQ ID NO: 878802 - RNA, 22 nt, Human
accaggccuggcugggcagcca

SEQ ID NO: 878803 - RNA, 22 nt, Human
aaauacagaguuauggaccuca

SEQ ID NO: 878804 - RNA, 18 nt, Human
uccagcucacagaugggc

SEQ ID NO: 878805 - RNA, 22 nt, Human
ugcuucaugaggcugagagaag

SEQ ID NO: 878806 - RNA, 22 nt, Human
cagccugcccuggaagcccagc

SEQ ID NO: 878807 - RNA, 22 nt, Human
cucaaauauaagcuaaaugugg

SEQ ID NO: 878808 - RNA, 22 nt, Human
ugggguaggagucagcgagaga

SEQ ID NO: 878809 - RNA, 22 nt, Human
cauggccccaaaucccaugcau

SEQ ID NO: 878810 - RNA, 22 nt, Human
uggcccuguucuguaccucaua

SEQ ID NO: 878811 - RNA, 22 nt, Human
cagcacagggcuugagaggugu

SEQ ID NO: 878812 - RNA, 22 nt, Human
uuuuagauaguuuaacugcacu

SEQ ID NO: 878813 - RNA, 22 nt, Human
ggaagaggaggagccaggcuuu

SEQ ID NO: 878814 - RNA, 22 nt, Human
ccaggagagcaggcgugcagcu

SEQ ID NO: 878815 - RNA, 22 nt, Human
uucagugcacaguacugagacu

SEQ ID NO: 878816 - RNA, 22 nt, Human
uacaauaugugaacuuuggugu

SEQ ID NO: 878817 - RNA, 22 nt, Human
ggcaugaguggcagugggcagu

SEQ ID NO: 878818 - RNA, 22 nt, Human
acaccagggauaugaggaagga

SEQ ID NO: 878819 - RNA, 18 nt, Human
auauucaagaagacagag

SEQ ID NO: 878820 - RNA, 22 nt, Human
cccucccaagcacucugacaua

SEQ ID NO: 878821 - RNA, 22 nt, Human
agaggugagucauuaccuagug

SEQ ID NO: 878822 - RNA, 22 nt, Human
uuguuucagcuguaugcuaugu

SEQ ID NO: 878823 - RNA, 22 nt, Human
acagugaggaagcagcugugcu

SEQ ID NO: 878824 - RNA, 22 nt, Human
ucccuagucgcaucuguggaga

SEQ ID NO: 878825 - RNA, 22 nt, Human
uugagaaauaagcaugucuaga

SEQ ID NO: 878826 - RNA, 18 nt, Human
ucaaaauauuucugugga

SEQ ID NO: 878827 - RNA, 22 nt, Human
cagcaauauacacagucuaugg

SEQ ID NO: 878828 - RNA, 20 nt, Human
uccuguggacauugcuggcc

SEQ ID NO: 878829 - RNA, 22 nt, Human
uccuuuuuauaguuagagaaac

SEQ ID NO: 878830 - RNA, 22 nt, Human
uugggaagaauggaggugguua

SEQ ID NO: 878831 - RNA, 22 nt, Human
acaggcuucuuuugaaaucaga

SEQ ID NO: 878832 - RNA, 22 nt, Human
aagcaaguagguauuugacaaa

SEQ ID NO: 878833 - RNA, 22 nt, Human
uacaucauguaagcagaaucau

SEQ ID NO: 878834 - RNA, 17 nt, Human
ugcaugcgucugugaua

SEQ ID NO: 878835 - RNA, 17 nt, Human
gcucagaguacacgugu

SEQ ID NO: 878836 - RNA, 22 nt, Human
gacagacacaauugauccauga

SEQ ID NO: 878837 - RNA, 22 nt, Human
uacuuguuaucccuuacucuug

SEQ ID NO: 878838 - RNA, 22 nt, Human
uuucuuccccaagugaauuuua

SEQ ID NO: 878839 - RNA, 22 nt, Human
uggguccacggaagacuuaggg

SEQ ID NO: 878840 - RNA, 22 nt, Human
guucguugcuugguuuccucua

SEQ ID NO: 878841 - RNA, 22 nt, Human
cagcugagaaauggggaaaggg

SEQ ID NO: 878842 - RNA, 22 nt, Human
aguaaugugccugaaauacuug

SEQ ID NO: 878843 - RNA, 22 nt, Human
aaggcucccucuucucgagugu

SEQ ID NO: 878844 - RNA, 22 nt, Human
caggccucagagaguggcgggg

SEQ ID NO: 878845 - RNA, 22 nt, Human
uugaggagucaggggcacggaa

SEQ ID NO: 878846 - RNA, 22 nt, Human
uacaccagguuaccaaucacug

SEQ ID NO: 878847 - RNA, 22 nt, Human
ugggcccugacuucaagcaucc

SEQ ID NO: 878848 - RNA, 22 nt, Human
ugcccagcuucuuacuuuuaaa

SEQ ID NO: 878849 - RNA, 19 nt, Human
uuucaauggcuuagagaaa

SEQ ID NO: 878850 - RNA, 22 nt, Human
gggaagugugcagaguucucuu

SEQ ID NO: 878851 - RNA, 21 nt, Human
uacuguauagauguguucuug

SEQ ID NO: 878852 - RNA, 22 nt, Human
auguaacaaaugguauacaugu

SEQ ID NO: 878853 - RNA, 22 nt, Human
guacauauccuuuacguuuugu

SEQ ID NO: 878854 - RNA, 22 nt, Human
gcuuucucuucacugauguuca

SEQ ID NO: 878855 - RNA, 22 nt, Human
aaccuagaaguuagaguaucau

SEQ ID NO: 878856 - RNA, 22 nt, Human
gagggcugccacguugggcgag

SEQ ID NO: 878857 - RNA, 19 nt, Human
ccaacaguacugaagcacu

SEQ ID NO: 878858 - RNA, 22 nt, Human
acuuuacauuugaucucucuaa

SEQ ID NO: 878859 - RNA, 19 nt, Human
gcaggcccagucgggcugg

SEQ ID NO: 878860 - RNA, 22 nt, Human
cauggcaggaaggacaugcacu

SEQ ID NO: 878861 - RNA, 22 nt, Human
cagaauuuagcacaauguaugg

SEQ ID NO: 878862 - RNA, 22 nt, Human
augagaaagaguuguaucuaga

SEQ ID NO: 878863 - RNA, 22 nt, Human
agccacaggccaugagauacca

SEQ ID NO: 878864 - RNA, 22 nt, Human
aucaccugcacaaauguguucc

SEQ ID NO: 878865 - RNA, 22 nt, Human
gcaggcugauagaggauuccau

SEQ ID NO: 878866 - RNA, 22 nt, Human
augcaggguuauuucaaaaaua

SEQ ID NO: 878867 - RNA, 22 nt, Human
aacaugucuuacuuugcuuucu

SEQ ID NO: 878868 - RNA, 22 nt, Human
uccaggaggugaggggaccaaa

SEQ ID NO: 878869 - RNA, 22 nt, Human
ggcuggcuggcuuagcagagga

SEQ ID NO: 878870 - RNA, 22 nt, Human
acaguggagcucagaugaaaau

SEQ ID NO: 878871 - RNA, 22 nt, Human
ucaggaaaguguucucagagga

SEQ ID NO: 878872 - RNA, 22 nt, Human
gauacaguguguuaacgagaaa

SEQ ID NO: 878873 - RNA, 22 nt, Human
agaagugccgaaaggaagacag

SEQ ID NO: 878874 - RNA, 22 nt, Human
caccagcuacagacuacugugu

SEQ ID NO: 878875 - RNA, 22 nt, Human
uguguucuggaaagcucacuga

SEQ ID NO: 878876 - RNA, 22 nt, Human
acaauucaagaugagauucagg

SEQ ID NO: 878877 - RNA, 22 nt, Human
gcucacagaacuucucuuccca

SEQ ID NO: 878878 - RNA, 22 nt, Human
aggcucugcuuuucuggauaua

SEQ ID NO: 878879 - RNA, 22 nt, Human
cccuggugguacggcacuggca

SEQ ID NO: 878880 - RNA, 22 nt, Human
cacagagacagaucuauuuugc

SEQ ID NO: 878881 - RNA, 18 nt, Human
gagcugccauauuuaguu

SEQ ID NO: 878882 - RNA, 17 nt, Human
gaaaggaggcaacacug

SEQ ID NO: 878883 - RNA, 22 nt, Human
ugcuuggcuagcuuggcagcuc

SEQ ID NO: 878884 - RNA, 22 nt, Human
gagcaaagcuuuuagggccuuu

SEQ ID NO: 878885 - RNA, 22 nt, Human
aucaaaguuucccagaaguugu

SEQ ID NO: 878886 - RNA, 21 nt, Human
cuguuucuugugaagugacac

SEQ ID NO: 878887 - RNA, 22 nt, Human
gcagcagcaggcgcucggccgu

SEQ ID NO: 878888 - RNA, 22 nt, Human
cacaugcuccauacagaauggg

SEQ ID NO: 878889 - RNA, 22 nt, Human
uggcaauuuguagaguaaauua

SEQ ID NO: 878890 - RNA, 22 nt, Human
ccaugggcgcacaggccuggag

SEQ ID NO: 878891 - RNA, 22 nt, Human
uucagagguaagggucucagaa

SEQ ID NO: 878892 - RNA, 22 nt, Human
uuccacagguuucagacuguuc

SEQ ID NO: 878893 - RNA, 22 nt, Human
uagcaagaucgugucucuaaaa

SEQ ID NO: 878894 - RNA, 22 nt, Human
acaaguauuuaagguuaguaua

SEQ ID NO: 878895 - RNA, 22 nt, Human
ucaaugacauuguaucagaguu

SEQ ID NO: 878896 - RNA, 22 nt, Human
gucacccacucccugcugcugu

SEQ ID NO: 878897 - RNA, 22 nt, Human
gugcugaacauuugggacuugu

SEQ ID NO: 878898 - RNA, 22 nt, Human
ugccacaggguccucaggccag

SEQ ID NO: 878899 - RNA, 22 nt, Human
ucccugaaccacuagugaugag

SEQ ID NO: 878900 - RNA, 22 nt, Human
agggugcaaaagcaaggacagu

SEQ ID NO: 878901 - RNA, 22 nt, Human
ucaauuacuaaccaaauaaugu

SEQ ID NO: 878902 - RNA, 22 nt, Human
aagcugcaaaaaauuucugucu

SEQ ID NO: 878903 - RNA, 22 nt, Human
aaaaaccucaauuacuuuugca

SEQ ID NO: 878904 - RNA, 22 nt, Human
uucaaucauuagaaucucaggc

SEQ ID NO: 878905 - RNA, 22 nt, Human
gcugccacgaucucugcuguag

SEQ ID NO: 878906 - RNA, 22 nt, Human
uguuacugauuugauauacagu

SEQ ID NO: 878907 - RNA, 22 nt, Human
acagacagaggcuccaugagga

SEQ ID NO: 878908 - RNA, 22 nt, Human
ccacccuuccauucuuccucuu

SEQ ID NO: 878909 - RNA, 22 nt, Human
aacuuccuuggguaugaaaaca

SEQ ID NO: 878910 - RNA, 22 nt, Human
gcucccaggaagagaagggcca

SEQ ID NO: 878911 - RNA, 20 nt, Human
ggagaugcagcccaggugcc

SEQ ID NO: 878912 - RNA, 22 nt, Human
gggcagcaggcuccacguuccu

SEQ ID NO: 878913 - RNA, 23 nt, Human
ccacauggcaagaugaugcauuc

SEQ ID NO: 878914 - RNA, 22 nt, Human
acccccacggaaggccguacgc

SEQ ID NO: 878915 - RNA, 22 nt, Human
uguuccugacggccaaagaggu

SEQ ID NO: 878916 - RNA, 22 nt, Human
acacuucauagcaagguuggag

SEQ ID NO: 878917 - RNA, 22 nt, Human
gacagcaggugcuugggaaagg

SEQ ID NO: 878918 - RNA, 22 nt, Human
ccaggaaggccuggaugccccc

SEQ ID NO: 878919 - RNA, 22 nt, Human
uaggacuuggaaggagcuccca

SEQ ID NO: 878920 - RNA, 22 nt, Human
uccugaggaaaguucaugaaug

SEQ ID NO: 878921 - RNA, 22 nt, Human
agggccaguucagaggacaugg

SEQ ID NO: 878922 - RNA, 22 nt, Human
ccccaaaguguuggauaauuga

SEQ ID NO: 878923 - RNA, 22 nt, Human
uggcuggaguauaggaguagga

SEQ ID NO: 878924 - RNA, 22 nt, Human
agggccugcaucaggagcuugg

SEQ ID NO: 878925 - RNA, 22 nt, Human
aucuucucauguguaaugaggu

SEQ ID NO: 878926 - RNA, 22 nt, Human
aaugcuuucaaaaaugugcagu

SEQ ID NO: 878927 - RNA, 22 nt, Human
aacuaaaacugguuuguucucu

SEQ ID NO: 878928 - RNA, 18 nt, Human
uccuaacuuagauacucc

SEQ ID NO: 878929 - RNA, 22 nt, Human
auugucagcucgaaaugcauca

SEQ ID NO: 878930 - RNA, 22 nt, Human
uaucaaccaacuacucguguug

SEQ ID NO: 878931 - RNA, 19 nt, Human
ucucugugucucuguuuau

SEQ ID NO: 878932 - RNA, 22 nt, Human
aauugucuuggugcaaucauga

SEQ ID NO: 878933 - RNA, 22 nt, Human
gucaugugaauaaguguggggu

SEQ ID NO: 878934 - RNA, 22 nt, Human
gagcagcuguccccaaagcuuc

SEQ ID NO: 878935 - RNA, 21 nt, Human
aggagcuggagaaaacuuucc

SEQ ID NO: 878936 - RNA, 22 nt, Human
gaacagaauuaccgaagaucug

SEQ ID NO: 878937 - RNA, 22 nt, Human
cacauuaaaauccuaacuucca

SEQ ID NO: 878938 - RNA, 22 nt, Human
ggccuugggcagacacgucaca

SEQ ID NO: 878939 - RNA, 22 nt, Human
uuguccaaggucccacaguuag

SEQ ID NO: 878940 - RNA, 22 nt, Human
acaggcuugcacuaggguggca

SEQ ID NO: 878941 - RNA, 22 nt, Human
acagggcaccugagguaggaag

SEQ ID NO: 878942 - RNA, 22 nt, Human
ucugaaagcccuaguuuguaau

SEQ ID NO: 878943 - RNA, 22 nt, Human
uggcucaggaucuaagcagaau

SEQ ID NO: 878944 - RNA, 21 nt, Human
gcugugcacauaguagaagug

SEQ ID NO: 878945 - RNA, 22 nt, Human
gcaaugcauaacagagugggcc

SEQ ID NO: 878946 - RNA, 22 nt, Human
uagcaacagaaaauaggagugc

SEQ ID NO: 878947 - RNA, 22 nt, Human
uugaaucucucugagauucagu

SEQ ID NO: 878948 - RNA, 19 nt, Human
uagacucuaauguuaagcu

SEQ ID NO: 878949 - RNA, 22 nt, Human
ggcacacagcuuggcaggagau

SEQ ID NO: 878950 - RNA, 18 nt, Human
uagggcucuagggaguga

SEQ ID NO: 878951 - RNA, 23 nt, Human
cccauuuagcggaugagggaagu

SEQ ID NO: 878952 - RNA, 22 nt, Human
ucauacaucuuguauaucuauc

SEQ ID NO: 878953 - RNA, 22 nt, Human
cugagcaguuucuuagggcuca

SEQ ID NO: 878954 - RNA, 22 nt, Human
agcagacaacccagaugaccca

SEQ ID NO: 878955 - RNA, 22 nt, Human
gauucucucuggaucccaugga

SEQ ID NO: 878956 - RNA, 22 nt, Human
gcagcagcucaguucugggagg

SEQ ID NO: 878957 - RNA, 22 nt, Human
gcucugagucacacugcccugu

SEQ ID NO: 878958 - RNA, 22 nt, Human
ugggccuguugccugaguccau

SEQ ID NO: 878959 - RNA, 22 nt, Human
cucuggcacacuccuuccaggu

SEQ ID NO: 878960 - RNA, 22 nt, Human
ucaguccccagaugugugcugu

SEQ ID NO: 878961 - RNA, 21 nt, Human
cccaggaggagcuccggcucc

SEQ ID NO: 878962 - RNA, 22 nt, Human
gaggcagcagaacauggaagag

SEQ ID NO: 878963 - RNA, 22 nt, Human
agaugucagcaggguugguuuc

SEQ ID NO: 878964 - RNA, 20 nt, Human
auacacauucauagaaaaau

SEQ ID NO: 878965 - RNA, 22 nt, Human
agucucugcaugccugcugugc

SEQ ID NO: 878966 - RNA, 22 nt, Human
ggccagggggcuucagacucca

SEQ ID NO: 878967 - RNA, 22 nt, Human
uauuauuauauuggaugagacu

SEQ ID NO: 878968 - RNA, 22 nt, Human
cacuauaucucuuucaucuuuu

SEQ ID NO: 878969 - RNA, 22 nt, Human
uuuaaugaauaauucaaaucug

SEQ ID NO: 878970 - RNA, 22 nt, Human
uggccugccuucgcugagcuga

SEQ ID NO: 878971 - RNA, 19 nt, Human
agcuucuuuggaaacauuu

SEQ ID NO: 878972 - RNA, 22 nt, Human
agccucagcacgcagcucugug

SEQ ID NO: 878973 - RNA, 22 nt, Human
cuggcugaggcagagccugggg

SEQ ID NO: 878974 - RNA, 22 nt, Human
accuggcuuguuucuaccuccu

SEQ ID NO: 878975 - RNA, 22 nt, Human
gucccaggugcccagugggcag

SEQ ID NO: 878976 - RNA, 22 nt, Human
cugagccuguguuucucuggca

SEQ ID NO: 878977 - RNA, 22 nt, Human
uucaucaccuugguagcacucc

SEQ ID NO: 878978 - RNA, 22 nt, Human
ugggcucagccucagucugugg

SEQ ID NO: 878979 - RNA, 22 nt, Human
ccugggcuugcaucugugcugg

SEQ ID NO: 878980 - RNA, 22 nt, Human
uuacaaugcacucaccuuuaga

SEQ ID NO: 878981 - RNA, 22 nt, Human
uauugucucacaguuuuggagg

SEQ ID NO: 878982 - RNA, 22 nt, Human
aaggugggcagaucacaagguc

SEQ ID NO: 878983 - RNA, 22 nt, Human
gguggggccugcuccagcggcc

SEQ ID NO: 878984 - RNA, 21 nt, Human
uggcggggacuuguggcugcc

SEQ ID NO: 878985 - RNA, 22 nt, Human
agugaccgaggcacuuggcaac

SEQ ID NO: 878986 - RNA, 22 nt, Human
agccuggcugggaagagccucu

SEQ ID NO: 878987 - RNA, 22 nt, Human
ucuggucccugcucacuucuug

SEQ ID NO: 878988 - RNA, 22 nt, Human
aaggaagagcaaagaauuaugu

SEQ ID NO: 878989 - RNA, 22 nt, Human
cugugcccuuucgcugcacugu

SEQ ID NO: 878990 - RNA, 22 nt, Human
gcccagagagaugaagugaugg

SEQ ID NO: 878991 - RNA, 22 nt, Human
ggagccugugcccaagcccaga

SEQ ID NO: 878992 - RNA, 22 nt, Human
uuggacugagaguuccaccauu

SEQ ID NO: 878993 - RNA, 22 nt, Human
uuuaucugggauuuugcagucu

SEQ ID NO: 878994 - RNA, 22 nt, Human
ucaccauuaaggacuuucagcu

SEQ ID NO: 878995 - RNA, 22 nt, Human
agcauauugucuuuggugucuc

SEQ ID NO: 878996 - RNA, 22 nt, Human
ugacuuuagacuuagucaaguu

SEQ ID NO: 878997 - RNA, 22 nt, Human
cggagcugccugccaagccugc

SEQ ID NO: 878998 - RNA, 22 nt, Human
agaaggcugagacugggaugaa

SEQ ID NO: 878999 - RNA, 22 nt, Human
uuucuuguuucauggugucuca

SEQ ID NO: 879000 - RNA, 22 nt, Human
uuucuaagcuuaguaugaggca

SEQ ID NO: 879001 - RNA, 22 nt, Human
cacaaguggcuggggaaaggga

SEQ ID NO: 879002 - RNA, 22 nt, Human
ccugcagguugcagaggcggaa

SEQ ID NO: 879003 - RNA, 21 nt, Human
acagcugucuuagcuugggcu

SEQ ID NO: 879004 - RNA, 22 nt, Human
uauguuucauucuuuucuggua

SEQ ID NO: 879005 - RNA, 22 nt, Human
auguacacaugcaugcaugugc

SEQ ID NO: 879006 - RNA, 22 nt, Human
ugcacacacaggagucuccucc

SEQ ID NO: 879007 - RNA, 22 nt, Human
guuugcugcccucuccuguccg

SEQ ID NO: 879008 - RNA, 19 nt, Human
ucucuggggacacuuucac

SEQ ID NO: 879009 - RNA, 22 nt, Human
aggucuuaggagcauggugcug

SEQ ID NO: 879010 - RNA, 22 nt, Human
cauggcccucuucuggagcaau

SEQ ID NO: 879011 - RNA, 22 nt, Human
ggagaaagggacugaucugcuc

SEQ ID NO: 879012 - RNA, 21 nt, Human
agaguaauuccugcuggaaag

SEQ ID NO: 879013 - RNA, 22 nt, Human
gcagcauggagaaguagcuaga

SEQ ID NO: 879014 - RNA, 22 nt, Human
uagaacaguauaggcuaaacau

SEQ ID NO: 879015 - RNA, 22 nt, Human
cagcaguugaaauugacaugug

SEQ ID NO: 879016 - RNA, 22 nt, Human
gagccuguguuuccuguagcca

SEQ ID NO: 879017 - RNA, 23 nt, Human
ucuucauggccaucugguucuuc

SEQ ID NO: 879018 - RNA, 22 nt, Human
gagacagaugcugcuggagcau

SEQ ID NO: 879019 - RNA, 22 nt, Human
uucucuuccagccgggcuugca

SEQ ID NO: 879020 - RNA, 22 nt, Human
ugcuggaauuauagaaaaauag

SEQ ID NO: 879021 - RNA, 22 nt, Human
uaaaugcaguacaaauuguucu

SEQ ID NO: 879022 - RNA, 22 nt, Human
uuuaaaccuaucuaagaaauag

SEQ ID NO: 879023 - RNA, 22 nt, Human
gaauauuuuuaaagggacuaau

SEQ ID NO: 879024 - RNA, 22 nt, Human
gacagcugggaggaugacauaa

SEQ ID NO: 879025 - RNA, 22 nt, Human
aaucagaaaauucaguggaauu

SEQ ID NO: 879026 - RNA, 22 nt, Human
cuguauuucuuggacaguugcu

SEQ ID NO: 879027 - RNA, 22 nt, Human
cuguacagaccuauuagcccag

SEQ ID NO: 879028 - RNA, 22 nt, Human
cagggagaggcugguggaguaa

SEQ ID NO: 879029 - RNA, 22 nt, Human
ugaaggagaaauggaaaguggg

SEQ ID NO: 879030 - RNA, 22 nt, Human
auuauuuuaugugcggccugau

SEQ ID NO: 879031 - RNA, 22 nt, Human
ugcccuggagucaguggcuauu

SEQ ID NO: 879032 - RNA, 22 nt, Human
auggcaguauuucugaaaggcu

SEQ ID NO: 879033 - RNA, 22 nt, Human
acagaguuuauguguguacaaa

SEQ ID NO: 879034 - RNA, 22 nt, Human
gccuugaucugcuguguuugag

SEQ ID NO: 879035 - RNA, 22 nt, Human
gggcggcgucggcgaggccauc

SEQ ID NO: 879036 - RNA, 21 nt, Human
ugaugaggucauagcacccuc

SEQ ID NO: 879037 - RNA, 22 nt, Human
agcauuuaccucaaugcaucug

SEQ ID NO: 879038 - RNA, 22 nt, Human
acagacaugcuguuuggguggu

SEQ ID NO: 879039 - RNA, 22 nt, Human
gagcagcucugugccuggagac

SEQ ID NO: 879040 - RNA, 22 nt, Human
ccaggcucugacauagauggga

SEQ ID NO: 879041 - RNA, 22 nt, Human
cugggccagaccuuguggucuu

SEQ ID NO: 879042 - RNA, 22 nt, Human
auaauguugaugauugucuuug

SEQ ID NO: 879043 - RNA, 22 nt, Human
uccugggcgaguggugguacac

SEQ ID NO: 879044 - RNA, 18 nt, Human
gaggauggaaggagaugc

SEQ ID NO: 879045 - RNA, 22 nt, Human
ggcugccugccgcccacuuggc

SEQ ID NO: 879046 - RNA, 22 nt, Human
uggcugagagcaauugacucug

SEQ ID NO: 879047 - RNA, 22 nt, Human
agauacaaaaagggagaagauu

SEQ ID NO: 879048 - RNA, 22 nt, Human
uauauagaaaagcagauguugg

SEQ ID NO: 879049 - RNA, 22 nt, Human
aagagaaugacaaggagaaccu

SEQ ID NO: 879050 - RNA, 22 nt, Human
ggacugggcaugggugcucugc

SEQ ID NO: 879051 - RNA, 22 nt, Human
aaggucagagcaggaaggaguc

SEQ ID NO: 879052 - RNA, 22 nt, Human
uaaguucagaguucucauuugu

SEQ ID NO: 879053 - RNA, 22 nt, Human
agucuauuugcuguccgagcaa

SEQ ID NO: 879054 - RNA, 22 nt, Human
aggauacaagucucagaaugcu

SEQ ID NO: 879055 - RNA, 22 nt, Human
auuuugaaaccaaguuauuucc

SEQ ID NO: 879056 - RNA, 22 nt, Human
ccuggagcgcgggucaagcugg

SEQ ID NO: 879057 - RNA, 22 nt, Human
ugauucucugauggagaaagac

SEQ ID NO: 879058 - RNA, 19 nt, Human
auggaaaaugccagacuga

SEQ ID NO: 879059 - RNA, 22 nt, Human
uucagugucacaagagcaagcc

SEQ ID NO: 879060 - RNA, 22 nt, Human
gaggcugucuguuagccuggga

SEQ ID NO: 879061 - RNA, 22 nt, Human
aaacaagcugcagacaagccau

SEQ ID NO: 879062 - RNA, 22 nt, Human
gaguuuauuugacuggauucuc

SEQ ID NO: 879063 - RNA, 22 nt, Human
aggcugcagaggugcugccaga

SEQ ID NO: 879064 - RNA, 22 nt, Human
gcucagggcuaaggcugagggg

SEQ ID NO: 879065 - RNA, 22 nt, Human
uuugcaaauuagccacccuguu

SEQ ID NO: 879066 - RNA, 22 nt, Human
uccagggaagagcagaggcuac

SEQ ID NO: 879067 - RNA, 22 nt, Human
ccugccuggcugucagcagagc

SEQ ID NO: 879068 - RNA, 22 nt, Human
ucugcaagauggucuuagaggu

SEQ ID NO: 879069 - RNA, 22 nt, Human
ucauguuuuagcugcaaaauga

SEQ ID NO: 879070 - RNA, 22 nt, Human
uucaauguuucuuaucaaguug

SEQ ID NO: 879071 - RNA, 22 nt, Human
gagucuuaggcaaaaauaaugg

SEQ ID NO: 879072 - RNA, 22 nt, Human
uugagguaggcauuguucaaaa

SEQ ID NO: 879073 - RNA, 22 nt, Human
uucacauuccgcggcuauuuuc

SEQ ID NO: 879074 - RNA, 19 nt, Human
gacaggaaggcuaccagua

SEQ ID NO: 879075 - RNA, 22 nt, Human
ggagcagggaauuacagcgcag

SEQ ID NO: 879076 - RNA, 22 nt, Human
cagcaucuguaggacuccucuu

SEQ ID NO: 879077 - RNA, 22 nt, Human
uccugggaggaacauuuaccua

SEQ ID NO: 879078 - RNA, 22 nt, Human
ugugugccagggcaugcacagg

SEQ ID NO: 879079 - RNA, 22 nt, Human
cccuggaggaccccaauguggc

SEQ ID NO: 879080 - RNA, 22 nt, Human
aauacuggcugucaaagaugga

SEQ ID NO: 879081 - RNA, 22 nt, Human
aggugggggcuguguccuugac

SEQ ID NO: 879082 - RNA, 22 nt, Human
aaaauaacuucuacuauuugca

SEQ ID NO: 879083 - RNA, 22 nt, Human
guaaauuauuucaagaucaucu

SEQ ID NO: 879084 - RNA, 22 nt, Human
cuuugaaauucuucagcugaag

SEQ ID NO: 879085 - RNA, 22 nt, Human
aauguuguuggcucuucaugau

SEQ ID NO: 879086 - RNA, 22 nt, Human
uccuccuguuucucaggccugg

SEQ ID NO: 879087 - RNA, 22 nt, Human
uuuguaaauagcaguacucaug

SEQ ID NO: 879088 - RNA, 22 nt, Human
gagcuaggauaucaugagggua

SEQ ID NO: 879089 - RNA, 22 nt, Human
guucaaauugauuuugguaaag

SEQ ID NO: 879090 - RNA, 23 nt, Human
cugagguaaaauauucugaagga

SEQ ID NO: 879091 - RNA, 22 nt, Human
aaaucauagcccccauccgauu

SEQ ID NO: 879092 - RNA, 22 nt, Human
ccucuucuaggacguccuugug

SEQ ID NO: 879093 - RNA, 22 nt, Human
cauccugguuaccccauaguca

SEQ ID NO: 879094 - RNA, 22 nt, Human
uggccugggucacaccaggguc

SEQ ID NO: 879095 - RNA, 22 nt, Human
uuucuacagaagauacacugcu

SEQ ID NO: 879096 - RNA, 22 nt, Human
uuccuccacgugacaggagcca

SEQ ID NO: 879097 - RNA, 22 nt, Human
cuagggccaaaggcugugaugc

SEQ ID NO: 879098 - RNA, 22 nt, Human
aacaguuuaucaaguuuuuaca

SEQ ID NO: 879099 - RNA, 20 nt, Human
cuucuucaguaguuuguucu

SEQ ID NO: 879100 - RNA, 22 nt, Human
ggagcugcacgcucugaagccu

SEQ ID NO: 879101 - RNA, 22 nt, Human
uucucauagagacaugauuaua

SEQ ID NO: 879102 - RNA, 22 nt, Human
guuuccaaccccaccaaagugc

SEQ ID NO: 879103 - RNA, 22 nt, Human
ucagaggacaagcucccuggug

SEQ ID NO: 879104 - RNA, 22 nt, Human
acuauuagcauaucaugaaugg

SEQ ID NO: 879105 - RNA, 22 nt, Human
aauauuugcaucauuagcuauu

SEQ ID NO: 879106 - RNA, 22 nt, Human
gugaggagggcuggucccaggc

SEQ ID NO: 879107 - RNA, 22 nt, Human
gaggaaaauauucagggagguu

SEQ ID NO: 879108 - RNA, 22 nt, Human
uuauagcagcaugauuuacaau

SEQ ID NO: 879109 - RNA, 22 nt, Human
ugagugcuuuaaauguuauuuu

SEQ ID NO: 879110 - RNA, 22 nt, Human
gggcucuggauggagccugcag

SEQ ID NO: 879111 - RNA, 22 nt, Human
ggcagcaagagagguucagcuu

SEQ ID NO: 879112 - RNA, 23 nt, Human
gcugauggagacuuguggccucc

SEQ ID NO: 879113 - RNA, 22 nt, Human
cugccaggcacugggcucugca

SEQ ID NO: 879114 - RNA, 21 nt, Human
ucauauuucucuugcuauugu

SEQ ID NO: 879115 - RNA, 20 nt, Human
gauaaauugucucuuaagug

SEQ ID NO: 879116 - RNA, 22 nt, Human
ugacauuuuaucaauaucacag

SEQ ID NO: 879117 - RNA, 22 nt, Human
gcuggcaggagccuuucccuuu

SEQ ID NO: 879118 - RNA, 22 nt, Human
ccaagcagaaccauucaggcac

SEQ ID NO: 879119 - RNA, 22 nt, Human
gagggagugagacacaaaagaa

SEQ ID NO: 879120 - RNA, 22 nt, Human
caguucugagcuuucccagaag

SEQ ID NO: 879121 - RNA, 22 nt, Human
uuucacagucaauuuggaguca

SEQ ID NO: 879122 - RNA, 22 nt, Human
gagucaguaauggauaugucau

SEQ ID NO: 879123 - RNA, 22 nt, Human
uagagguguugacgccaaggua

SEQ ID NO: 879124 - RNA, 22 nt, Human
auccacaggguguguuaagaug

SEQ ID NO: 879125 - RNA, 22 nt, Human
cugaggccccucuugugagcau

SEQ ID NO: 879126 - RNA, 22 nt, Human
cgcagccccaacaaaugggaca

SEQ ID NO: 879127 - RNA, 19 nt, Human
uaggaauguagaauccuag

SEQ ID NO: 879128 - RNA, 22 nt, Human
ggaggaggggcgcuuugucuau

SEQ ID NO: 879129 - RNA, 22 nt, Human
aaguuuagcgcucucucaagga

SEQ ID NO: 879130 - RNA, 22 nt, Human
uauuauguagaguaaggguuaa

SEQ ID NO: 879131 - RNA, 22 nt, Human
aggccacaggauugcacagcau

SEQ ID NO: 879132 - RNA, 22 nt, Human
ugucaccaaguugaugaaugca

SEQ ID NO: 879133 - RNA, 22 nt, Human
aggagcugagucagcccgacag

SEQ ID NO: 879134 - RNA, 22 nt, Human
gaauacaaacuuaaggcuuuac

SEQ ID NO: 879135 - RNA, 22 nt, Human
cuagaaacauuacauguguuaa

SEQ ID NO: 879136 - RNA, 22 nt, Human
ccugucaggguuugccucagaa

SEQ ID NO: 879137 - RNA, 22 nt, Human
cauaacuagagugaaauguuga

SEQ ID NO: 879138 - RNA, 22 nt, Human
augcugaagaguucaugauuau

SEQ ID NO: 879139 - RNA, 22 nt, Human
gauguauauaccugguguggaa

SEQ ID NO: 879140 - RNA, 22 nt, Human
augauauuuuaguaaagugaua

SEQ ID NO: 879141 - RNA, 22 nt, Human
ucauaauguaguucauggcugg

SEQ ID NO: 879142 - RNA, 22 nt, Human
cuuaggaaugucccuucccaca

SEQ ID NO: 879143 - RNA, 22 nt, Human
uagcagcaccuuucuaaucuga

SEQ ID NO: 879144 - RNA, 20 nt, Human
gcagggcaagggauaugaaa

SEQ ID NO: 879145 - RNA, 22 nt, Human
cuauauauaucaucuuccaguu

SEQ ID NO: 879146 - RNA, 22 nt, Human
aucagaaaucuaggauucagaa

SEQ ID NO: 879147 - RNA, 22 nt, Human
uacaagaagaggcagagcugga

SEQ ID NO: 879148 - RNA, 22 nt, Human
gagcucagagccuauaguuggu

SEQ ID NO: 879149 - RNA, 22 nt, Human
ucacaguugauugaaacacagc

SEQ ID NO: 879150 - RNA, 22 nt, Human
uagcagggauacaaggucgccu

SEQ ID NO: 879151 - RNA, 22 nt, Human
ucugauuagagcauucuugagu

SEQ ID NO: 879152 - RNA, 22 nt, Human
aaagauguuaugaaauaacuau

SEQ ID NO: 879153 - RNA, 22 nt, Human
aucuuaaacagaggaaugacuu

SEQ ID NO: 879154 - RNA, 18 nt, Human
ggagagugacagagucgu

SEQ ID NO: 879155 - RNA, 22 nt, Human
caaggccagagccagcgauaag

SEQ ID NO: 879156 - RNA, 22 nt, Human
aacacugaguaucagaguuggg

SEQ ID NO: 879157 - RNA, 22 nt, Human
gcaaagcaagauucagauguag

SEQ ID NO: 879158 - RNA, 22 nt, Human
cagcugccccauaaaucacagu

SEQ ID NO: 879159 - RNA, 22 nt, Human
auucuucugccuacuuucaucc

SEQ ID NO: 879160 - RNA, 22 nt, Human
cagggcuuugaacaggcaucaa

SEQ ID NO: 879161 - RNA, 22 nt, Human
ugucaccacuggcugaaacacc

SEQ ID NO: 879162 - RNA, 18 nt, Human
aaaauguucccccauuaa

SEQ ID NO: 879163 - RNA, 22 nt, Human
agggauguuaguugugagcuca

SEQ ID NO: 879164 - RNA, 22 nt, Human
auugaagaucagggaaagauuc

SEQ ID NO: 879165 - RNA, 22 nt, Human
gauauuuucgcagggagaauuc

SEQ ID NO: 879166 - RNA, 22 nt, Human
gucuucugccuccauuagaguu

SEQ ID NO: 879167 - RNA, 22 nt, Human
gccuagggguaagaguacuggc

SEQ ID NO: 879168 - RNA, 22 nt, Human
gcccaaagucacucagcuagga

SEQ ID NO: 879169 - RNA, 22 nt, Human
gcccagcaggggauggcagcuc

SEQ ID NO: 879170 - RNA, 20 nt, Human
cuggguggcaagcaaggggg

SEQ ID NO: 879171 - RNA, 22 nt, Human
auacacagcgaugagaggaggc

SEQ ID NO: 879172 - RNA, 22 nt, Human
cucucagggacccagccagccu

SEQ ID NO: 879173 - RNA, 22 nt, Human
ccagcucagggucacauggcac

SEQ ID NO: 879174 - RNA, 22 nt, Human
auucucucuagaagcugagaug

SEQ ID NO: 879175 - RNA, 22 nt, Human
ugaaggcacuugccuaggggca

SEQ ID NO: 879176 - RNA, 22 nt, Human
gacaccagagacugaugaggcc

SEQ ID NO: 879177 - RNA, 22 nt, Human
ucugaggagugacccucuugca

SEQ ID NO: 879178 - RNA, 22 nt, Human
gccucagggauaggaugagcau

SEQ ID NO: 879179 - RNA, 18 nt, Human
gggaagccgggaagccgg

SEQ ID NO: 879180 - RNA, 22 nt, Human
cugcucuagagagcauuaguca

SEQ ID NO: 879181 - RNA, 22 nt, Human
aaggccagaguacuagaggcug

SEQ ID NO: 879182 - RNA, 22 nt, Human
aauaaugucugcuauuuuaaaa

SEQ ID NO: 879183 - RNA, 21 nt, Human
uugcacagaaaaccauagaga

SEQ ID NO: 879184 - RNA, 22 nt, Human
acaggcuggaggaggaccaaga

SEQ ID NO: 879185 - RNA, 22 nt, Human
caucugcucugucugccauguu

SEQ ID NO: 879186 - RNA, 17 nt, Human
uuguuucuucucugugg

SEQ ID NO: 879187 - RNA, 22 nt, Human
caaauguuagugcccaucccuc

SEQ ID NO: 879188 - RNA, 22 nt, Human
aguauuuggugugguauugacc

SEQ ID NO: 879189 - RNA, 22 nt, Human
uggcagcuauuacaaggaaguc

SEQ ID NO: 879190 - RNA, 22 nt, Human
gcagguggagcaguagucuggu

SEQ ID NO: 879191 - RNA, 22 nt, Human
cuacauacuguguguaaagaau

SEQ ID NO: 879192 - RNA, 22 nt, Human
uggcaacaccuggaagacaugg

SEQ ID NO: 879193 - RNA, 22 nt, Human
uuucauguacugucgaaguuga

SEQ ID NO: 879194 - RNA, 21 nt, Human
ggacaguaguagucaggagag

SEQ ID NO: 879195 - RNA, 22 nt, Human
agcagcugucccuuaacaucag

SEQ ID NO: 879196 - RNA, 22 nt, Human
cugcagguuaggagcacuccuu

SEQ ID NO: 879197 - RNA, 22 nt, Human
uggcagcuggcucugcgcaggc

SEQ ID NO: 879198 - RNA, 22 nt, Human
cucauggcagagucaccugucc

SEQ ID NO: 879199 - RNA, 22 nt, Human
ccuguauggcuauuccuuggac

SEQ ID NO: 879200 - RNA, 22 nt, Human
aauauagaaucacuuuccuuca

SEQ ID NO: 879201 - RNA, 22 nt, Human
uuacuuaaaaauucuaagcccc

SEQ ID NO: 879202 - RNA, 22 nt, Human
caggcaagauuagagaugagca

SEQ ID NO: 879203 - RNA, 22 nt, Human
uccagagccugcgcacuggcug

SEQ ID NO: 879204 - RNA, 22 nt, Human
uguccuguccuuccuggaaguc

SEQ ID NO: 879205 - RNA, 22 nt, Human
uuagaaucuuuagagucucacu

SEQ ID NO: 879206 - RNA, 22 nt, Human
uugcagcauauugaucuccugu

SEQ ID NO: 879207 - RNA, 22 nt, Human
ggcagaccucuccagccccaca

SEQ ID NO: 879208 - RNA, 22 nt, Human
ugguauaugcauggagguauca

SEQ ID NO: 879209 - RNA, 22 nt, Human
cagggccuccccggcagucuuu

SEQ ID NO: 879210 - RNA, 22 nt, Human
uaaucuuagcaaccuccagugu

SEQ ID NO: 879211 - RNA, 22 nt, Human
uggauaaauagauacacuugca

SEQ ID NO: 879212 - RNA, 22 nt, Human
gauugcccagaauauucucauu

SEQ ID NO: 879213 - RNA, 22 nt, Human
cucucucuaugcguuguuccua

SEQ ID NO: 879214 - RNA, 17 nt, Human
gcugagaggcagcacag

SEQ ID NO: 879215 - RNA, 22 nt, Human
ucagcaggucugaggcggggcc

SEQ ID NO: 879216 - RNA, 22 nt, Human
ucucuccuguguucugauguuu

SEQ ID NO: 879217 - RNA, 22 nt, Human
cacucacuuauuucuaacagaa

SEQ ID NO: 879218 - RNA, 22 nt, Human
ugccugcugcuaagcucuuugu

SEQ ID NO: 879219 - RNA, 22 nt, Human
gggaugagagcugggacagaag

SEQ ID NO: 879220 - RNA, 19 nt, Human
cucuuuggagauccuugga

SEQ ID NO: 879221 - RNA, 20 nt, Human
cugcaagcagguuauuccag

SEQ ID NO: 879222 - RNA, 22 nt, Human
agcuacuucccuguaggaaaca

SEQ ID NO: 879223 - RNA, 22 nt, Human
gagccagccgcaagagcuguga

SEQ ID NO: 879224 - RNA, 22 nt, Human
caacauuugaguaaagaaaugg

SEQ ID NO: 879225 - RNA, 22 nt, Human
auggcugggaugggguagagaa

SEQ ID NO: 879226 - RNA, 18 nt, Human
gcccagaggucugggccc

SEQ ID NO: 879227 - RNA, 23 nt, Human
cuggggcuuucaaaucugggcag

SEQ ID NO: 879228 - RNA, 22 nt, Human
ucuaggaaauuguuacuauauu

SEQ ID NO: 879229 - RNA, 22 nt, Human
aagaaaaucaguucuggucagu

SEQ ID NO: 879230 - RNA, 22 nt, Human
augcaggggcuguguuuugggu

SEQ ID NO: 879231 - RNA, 22 nt, Human
caggcaccuuugugcaugggca

SEQ ID NO: 879232 - RNA, 21 nt, Human
uauugcauaccaugaaucuga

SEQ ID NO: 879233 - RNA, 22 nt, Human
uccuccuccucacagucaccug

SEQ ID NO: 879234 - RNA, 23 nt, Human
cuucuagagucagcuccaaguuu

SEQ ID NO: 879235 - RNA, 22 nt, Human
uaguguuuucuagaaugguuuu

SEQ ID NO: 879236 - RNA, 22 nt, Human
uccagccaacugccuagggagc

SEQ ID NO: 879237 - RNA, 20 nt, Human
uacuucugaggcacucugaa

SEQ ID NO: 879238 - RNA, 22 nt, Human
aaugucuacaccguauguuguu

SEQ ID NO: 879239 - RNA, 22 nt, Human
agacauauauugcaauucacug

SEQ ID NO: 879240 - RNA, 19 nt, Human
auagaaaggguuaaagaca

SEQ ID NO: 879241 - RNA, 22 nt, Human
aucuuauugcuguugccagaua

SEQ ID NO: 879242 - RNA, 22 nt, Human
ccugcuggacguggaggagggg

SEQ ID NO: 879243 - RNA, 22 nt, Human
uuuaauuguuguggguacauag

SEQ ID NO: 879244 - RNA, 22 nt, Human
uaguuaaugcuaauuaacaaau

SEQ ID NO: 879245 - RNA, 22 nt, Human
ugcaagaaacauauuccacaag

SEQ ID NO: 879246 - RNA, 22 nt, Human
agggcaucagguauuuuaugcu

SEQ ID NO: 879247 - RNA, 21 nt, Human
aaguuuggaagaaagcaaggg

SEQ ID NO: 879248 - RNA, 22 nt, Human
aaggccagacucuggaaugaca

SEQ ID NO: 879249 - RNA, 22 nt, Human
cugagacaugguuugacuggca

SEQ ID NO: 879250 - RNA, 22 nt, Human
caaguucuacugggacaucagu

SEQ ID NO: 879251 - RNA, 22 nt, Human
ucugccuggcggacucccggaa

SEQ ID NO: 879252 - RNA, 22 nt, Human
augcucuauaaauaugacaugu

SEQ ID NO: 879253 - RNA, 22 nt, Human
gugcugagaacaaaaguggaca

SEQ ID NO: 879254 - RNA, 22 nt, Human
ccuugagaggaaguuuguagaa

SEQ ID NO: 879255 - RNA, 22 nt, Human
ucugggaauuuauuggcacuuu

SEQ ID NO: 879256 - RNA, 22 nt, Human
ccuaggcccuaggcuuccauca

SEQ ID NO: 879257 - RNA, 22 nt, Human
caucuucagugauuaccuaaaa

SEQ ID NO: 879258 - RNA, 22 nt, Human
aauauccauugggagcaaaugg

SEQ ID NO: 879259 - RNA, 22 nt, Human
agguccaggauuuguggggucu

SEQ ID NO: 879260 - RNA, 22 nt, Human
uccaaauauucggucuuucuga

SEQ ID NO: 879261 - RNA, 22 nt, Human
ugcuggggcagaagagccaaga

SEQ ID NO: 879262 - RNA, 22 nt, Human
ucuucaaaauauuccauccauu

SEQ ID NO: 879263 - RNA, 22 nt, Human
ggaguggcagcgaggaucagau

SEQ ID NO: 879264 - RNA, 22 nt, Human
accugggaggcagagguugcag

SEQ ID NO: 879265 - RNA, 22 nt, Human
gacaaaggaucagagguuggga

SEQ ID NO: 879266 - RNA, 22 nt, Human
gggcaaaggcagaaagcggugu

SEQ ID NO: 879267 - RNA, 22 nt, Human
caggacgggcaaacaggauggu

SEQ ID NO: 879268 - RNA, 22 nt, Human
uucaagguucagggagaaauug

SEQ ID NO: 879269 - RNA, 22 nt, Human
uagcagaagaacaacaugaucu

SEQ ID NO: 879270 - RNA, 22 nt, Human
ugucuucagauaggcauucuuc

SEQ ID NO: 879271 - RNA, 22 nt, Human
ucauggaugggcccagcucugu

SEQ ID NO: 879272 - RNA, 22 nt, Human
gacuccucccgcucccaugccg

SEQ ID NO: 879273 - RNA, 22 nt, Human
augcuacaacauuaucuggggu

SEQ ID NO: 879274 - RNA, 17 nt, Human
ggauugcauauacagug

SEQ ID NO: 879275 - RNA, 22 nt, Human
aguuugaagaaggugagaugca

SEQ ID NO: 879276 - RNA, 22 nt, Human
ccuuuggagaguuuguuagggg

SEQ ID NO: 879277 - RNA, 22 nt, Human
ggaggaugagcuacgaggagcu

SEQ ID NO: 879278 - RNA, 22 nt, Human
aaucaacauuguuuuaagucaa

SEQ ID NO: 879279 - RNA, 22 nt, Human
cagcuuccaucuccacugcccu

SEQ ID NO: 879280 - RNA, 22 nt, Human
gccagagccggcuucacaggau

SEQ ID NO: 879281 - RNA, 22 nt, Human
aaggaggcccucuccuucugga

SEQ ID NO: 879282 - RNA, 22 nt, Human
uccugaggaugguugaagugca

SEQ ID NO: 879283 - RNA, 22 nt, Human
cugccugcugauuaguauuguc

SEQ ID NO: 879284 - RNA, 23 nt, Human
agcccagcagagaaccuaggucc

SEQ ID NO: 879285 - RNA, 18 nt, Human
guuuugaauugucuuaca

SEQ ID NO: 879286 - RNA, 22 nt, Human
agcuccugggcaccucuuucac

SEQ ID NO: 879287 - RNA, 19 nt, Human
caaaguaccuggcacagug

SEQ ID NO: 879288 - RNA, 22 nt, Human
agauuuccuaugguaauuauag

SEQ ID NO: 879289 - RNA, 22 nt, Human
ugcauuaagggccuggagauac

SEQ ID NO: 879290 - RNA, 22 nt, Human
aaggcuggagaugguuggaaug

SEQ ID NO: 879291 - RNA, 22 nt, Human
ggagggggaauucagccccagc

SEQ ID NO: 879292 - RNA, 18 nt, Human
cugagggcaacagaggcu

SEQ ID NO: 879293 - RNA, 22 nt, Human
ugaguaauucacaaaacagaug

SEQ ID NO: 879294 - RNA, 22 nt, Human
agucuggaauuuggccugagca

SEQ ID NO: 879295 - RNA, 22 nt, Human
uguguauacauacauacacacg

SEQ ID NO: 879296 - RNA, 22 nt, Human
ugcacagauagugauagauagc

SEQ ID NO: 879297 - RNA, 22 nt, Human
agagcuuuguuugauugucaga

SEQ ID NO: 879298 - RNA, 17 nt, Human
ugucuuaucuguccugu

SEQ ID NO: 879299 - RNA, 22 nt, Human
ugggugugcccagauggugucc

SEQ ID NO: 879300 - RNA, 22 nt, Human
cuggaggcaguugccccaguca

SEQ ID NO: 879301 - RNA, 22 nt, Human
uaaauucagugaguaauuucug

SEQ ID NO: 879302 - RNA, 22 nt, Human
auuaggcauucugaaugagguc

SEQ ID NO: 879303 - RNA, 22 nt, Human
uuaguuaauaggucuucagcuu

SEQ ID NO: 879304 - RNA, 22 nt, Human
ccacaguuucuucaucuauaaa

SEQ ID NO: 879305 - RNA, 22 nt, Human
uuucauugccuuuggaaggucu

SEQ ID NO: 879306 - RNA, 23 nt, Human
ugacaagucucagccaaugcaga

SEQ ID NO: 879307 - RNA, 22 nt, Human
ugaucaaagugcuggaauuaca

SEQ ID NO: 879308 - RNA, 22 nt, Human
cugggccacagacucaaggcag

SEQ ID NO: 879309 - RNA, 22 nt, Human
caggaagcugugaaggagacgg

SEQ ID NO: 879310 - RNA, 22 nt, Human
caccugccucauuugucccugc

SEQ ID NO: 879311 - RNA, 22 nt, Human
ggggaaggauugaguugaccca

SEQ ID NO: 879312 - RNA, 22 nt, Human
aaauacaaaaauuagccaggca

SEQ ID NO: 879313 - RNA, 22 nt, Human
accaggccaacagcuaaguuaa

SEQ ID NO: 879314 - RNA, 22 nt, Human
uggcugagggcacuaugaagcc

SEQ ID NO: 879315 - RNA, 22 nt, Human
guuaauacaaccaugaucuucu

SEQ ID NO: 879316 - RNA, 22 nt, Human
uagcugaagggcauuuaauaaa

SEQ ID NO: 879317 - RNA, 22 nt, Human
uaacacuggcuuuugcugaggc

SEQ ID NO: 879318 - RNA, 19 nt, Human
ggaaggagagaaaugcaug

SEQ ID NO: 879319 - RNA, 22 nt, Human
uuuaaauuauaguuaaugucug

SEQ ID NO: 879320 - RNA, 22 nt, Human
guuaucuucuauuucucauacu

SEQ ID NO: 879321 - RNA, 21 nt, Human
guucccuuauuggggcaggca

SEQ ID NO: 879322 - RNA, 22 nt, Human
uagcuguguaugguuuacaaau

SEQ ID NO: 879323 - RNA, 22 nt, Human
ugcagcucgggcuuaggguggg

SEQ ID NO: 879324 - RNA, 22 nt, Human
ugcgucuggaguggaguuugaa

SEQ ID NO: 879325 - RNA, 22 nt, Human
agcccaggagguggagguugca

SEQ ID NO: 879326 - RNA, 23 nt, Human
ugguggcuugugguggccaccag

SEQ ID NO: 879327 - RNA, 22 nt, Human
uuucuuaugagcaagacucuau

SEQ ID NO: 879328 - RNA, 22 nt, Human
cacaaggcugggacaagugcug

SEQ ID NO: 879329 - RNA, 22 nt, Human
aagaguuuuagacaaacugauu

SEQ ID NO: 879330 - RNA, 22 nt, Human
uuuagcagaaacucauuaaauu

SEQ ID NO: 879331 - RNA, 19 nt, Human
ccucugugggagucaguga

SEQ ID NO: 879332 - RNA, 22 nt, Human
uagaaugagaaaguguagcagg

SEQ ID NO: 879333 - RNA, 22 nt, Human
uccuggagauaauugcagugaa

SEQ ID NO: 879334 - RNA, 22 nt, Human
ugaggccacaggaaagggcccg

SEQ ID NO: 879335 - RNA, 22 nt, Human
cuuccuugcugucugcuccagg

SEQ ID NO: 879336 - RNA, 22 nt, Human
aaaugcaugguaaaugauugcc

SEQ ID NO: 879337 - RNA, 22 nt, Human
cagauuuaagauauuuguauug

SEQ ID NO: 879338 - RNA, 22 nt, Human
uagaaaagaauuuuauuugaua

SEQ ID NO: 879339 - RNA, 22 nt, Human
agcaggcuaaucuugcugaaca

SEQ ID NO: 879340 - RNA, 22 nt, Human
agccagcuggugggucagcugg

SEQ ID NO: 879341 - RNA, 23 nt, Human
gcuaaauugaagucucaggggaa

SEQ ID NO: 879342 - RNA, 22 nt, Human
cauaacuuuaaagacagugugg

SEQ ID NO: 879343 - RNA, 22 nt, Human
cugcuguguggauucaauggcu

SEQ ID NO: 879344 - RNA, 22 nt, Human
cugauuccugauucaugcucuu

SEQ ID NO: 879345 - RNA, 22 nt, Human
uuaaggcauucuccuacuaaua

SEQ ID NO: 879346 - RNA, 22 nt, Human
cagaguccuggacacagagaca

SEQ ID NO: 879347 - RNA, 22 nt, Human
aaguaugcaaaucgucuuagaa

SEQ ID NO: 879348 - RNA, 22 nt, Human
auucaaacuguguuaggcagca

SEQ ID NO: 879349 - RNA, 22 nt, Human
gcauucauucauucauuaggua

SEQ ID NO: 879350 - RNA, 22 nt, Human
cugugggcuccugcagcucagg

SEQ ID NO: 879351 - RNA, 22 nt, Human
cucucagauggagugugaaugg

SEQ ID NO: 879352 - RNA, 22 nt, Human
aggcucagugcaaaucauucug

SEQ ID NO: 879353 - RNA, 22 nt, Human
ucagaaguugaaggcucuuuuu

SEQ ID NO: 879354 - RNA, 22 nt, Human
gcuacauaguaacccacaaauc

SEQ ID NO: 879355 - RNA, 17 nt, Human
uacuagaauagagacag

SEQ ID NO: 879356 - RNA, 22 nt, Human
uauaaaugcacuuuugaaauau

SEQ ID NO: 879357 - RNA, 22 nt, Human
aucuuugaucuuuauugcuaag

SEQ ID NO: 879358 - RNA, 22 nt, Human
guccagugacaaguagcuggcc

SEQ ID NO: 879359 - RNA, 22 nt, Human
aacuacaguauguccaaagaau

SEQ ID NO: 879360 - RNA, 22 nt, Human
ucauagaaguaguauccacauu

SEQ ID NO: 879361 - RNA, 22 nt, Human
uguaauguuagaaacaauugcu

SEQ ID NO: 879362 - RNA, 22 nt, Human
ucaaguauuuauuucugcuggc

SEQ ID NO: 879363 - RNA, 22 nt, Human
cagaggcugacccugcuguugu

SEQ ID NO: 879364 - RNA, 22 nt, Human
uugugccuuugcuuuuacaagu

SEQ ID NO: 879365 - RNA, 22 nt, Human
ucaggcugaaggaggccuaucu

SEQ ID NO: 879366 - RNA, 22 nt, Human
aucuccuuggucucguuccagg

SEQ ID NO: 879367 - RNA, 22 nt, Human
aacauuucuucugaaacugagu

SEQ ID NO: 879368 - RNA, 22 nt, Human
uaacagaauagcagaaacagaa

SEQ ID NO: 879369 - RNA, 22 nt, Human
ggaaugagcucggagcagaagg

SEQ ID NO: 879370 - RNA, 22 nt, Human
ugggagcaagcuacuuagggaa

SEQ ID NO: 879371 - RNA, 22 nt, Human
cuccaggcccacggccgcggcc

SEQ ID NO: 879372 - RNA, 21 nt, Human
agauucaggacagcagucacu

SEQ ID NO: 879373 - RNA, 23 nt, Human
uugcuuucaucaugagaugcucc

SEQ ID NO: 879374 - RNA, 22 nt, Human
acacagagggcagaagauacau

SEQ ID NO: 879375 - RNA, 22 nt, Human
gauaaaauaacuauggaauacu

SEQ ID NO: 879376 - RNA, 22 nt, Human
cuggggugucucgucugccauu

SEQ ID NO: 879377 - RNA, 22 nt, Human
ugcuaauaaacuccaggcugag

SEQ ID NO: 879378 - RNA, 22 nt, Human
ccugugccagccccuucugcug

SEQ ID NO: 879379 - RNA, 22 nt, Human
acuggacuccccaagggccagg

SEQ ID NO: 879380 - RNA, 22 nt, Human
cuaaacuucuuggcaauuuuau

SEQ ID NO: 879381 - RNA, 22 nt, Human
aucuguagaagauacucugaga

SEQ ID NO: 879382 - RNA, 22 nt, Human
uccuggggcucaugggauuugu

SEQ ID NO: 879383 - RNA, 20 nt, Human
uuauuuccaguccagguccu

SEQ ID NO: 879384 - RNA, 19 nt, Human
acugggaaaaaggcacugg

SEQ ID NO: 879385 - RNA, 22 nt, Human
ggaguccaugcagcuugagaca

SEQ ID NO: 879386 - RNA, 22 nt, Human
aaauaaucaauuuuuguagaua

SEQ ID NO: 879387 - RNA, 22 nt, Human
ugugggacagggacagcaagag

SEQ ID NO: 879388 - RNA, 22 nt, Human
aagugaguucagcauucacucg

SEQ ID NO: 879389 - RNA, 22 nt, Human
aagaugauagaucugucaaugu

SEQ ID NO: 879390 - RNA, 18 nt, Human
ccgggcuuuggugacaca

SEQ ID NO: 879391 - RNA, 22 nt, Human
auacacauauguguguauaugu

SEQ ID NO: 879392 - RNA, 22 nt, Human
acaaagugaauugcaucgaguu

SEQ ID NO: 879393 - RNA, 22 nt, Human
uugccacaguagcaaaagguuc

SEQ ID NO: 879394 - RNA, 22 nt, Human
uacaagaaugucuuaaaagcuc

SEQ ID NO: 879395 - RNA, 22 nt, Human
ucagagaggcaauacuguuuaa

SEQ ID NO: 879396 - RNA, 22 nt, Human
ggucagggggaucugugaggua

SEQ ID NO: 879397 - RNA, 22 nt, Human
uauacaaugaguacauucuggg

SEQ ID NO: 879398 - RNA, 22 nt, Human
ccaggagguggcaggacuugcc

SEQ ID NO: 879399 - RNA, 22 nt, Human
gucccagggaagaaggcagcac

SEQ ID NO: 879400 - RNA, 22 nt, Human
acuuucaugguaguuguauucu

SEQ ID NO: 879401 - RNA, 22 nt, Human
uccacagaauguaagauccaca

SEQ ID NO: 879402 - RNA, 20 nt, Human
uuuaagaaguuucugaggaa

SEQ ID NO: 879403 - RNA, 22 nt, Human
gcuggggccugaacagucagcu

SEQ ID NO: 879404 - RNA, 19 nt, Human
uugagaacaccaaguacug

SEQ ID NO: 879405 - RNA, 17 nt, Human
gccaggagguuugagcu

SEQ ID NO: 879406 - RNA, 22 nt, Human
uuuucucagcugcacuguauua

SEQ ID NO: 879407 - RNA, 22 nt, Human
aaagcaguauauugguaguugu

SEQ ID NO: 879408 - RNA, 22 nt, Human
cuaaggaaaggaaauacaguaa

SEQ ID NO: 879409 - RNA, 22 nt, Human
uguucugcaagcccugccaccu

SEQ ID NO: 879410 - RNA, 22 nt, Human
cuuuguucaugacaucugcuuc

SEQ ID NO: 879411 - RNA, 18 nt, Human
ucucuuuuccccucauug

SEQ ID NO: 879412 - RNA, 22 nt, Human
cuuuggaauauuuuauugagaa

SEQ ID NO: 879413 - RNA, 22 nt, Human
aaggcaguaggaucuuccacag

SEQ ID NO: 879414 - RNA, 20 nt, Human
cacaagaggaguucccugag

SEQ ID NO: 879415 - RNA, 22 nt, Human
agagcagacauccuugucuugu

SEQ ID NO: 879416 - RNA, 22 nt, Human
uauggcaauauguaucaagauc

SEQ ID NO: 879417 - RNA, 22 nt, Human
ugguuuuagaugccuuuacugc

SEQ ID NO: 879418 - RNA, 22 nt, Human
uacaagaaauuucugcauauau

SEQ ID NO: 879419 - RNA, 22 nt, Human
ggucuggagcuuggcuaaggga

SEQ ID NO: 879420 - RNA, 20 nt, Human
ucuucuguugccuuguucug

SEQ ID NO: 879421 - RNA, 22 nt, Human
agacauuuugauaccccuaccg

SEQ ID NO: 879422 - RNA, 22 nt, Human
ggcccagcccgagucagccuuc

SEQ ID NO: 879423 - RNA, 22 nt, Human
uggcuucagagacagaaucuau

SEQ ID NO: 879424 - RNA, 22 nt, Human
uguaaacuguagaaaauacuuu

SEQ ID NO: 879425 - RNA, 22 nt, Human
gcucugggaaggaucguaguga

SEQ ID NO: 879426 - RNA, 22 nt, Human
ccugggagcuguggaaaggcug

SEQ ID NO: 879427 - RNA, 22 nt, Human
uaugcacacauuagcacagggu

SEQ ID NO: 879428 - RNA, 22 nt, Human
ggucagccccugcucaaggccg

SEQ ID NO: 879429 - RNA, 22 nt, Human
aggcugugcgaggucucagagu

SEQ ID NO: 879430 - RNA, 22 nt, Human
agacaugccaagaaacccagug

SEQ ID NO: 879431 - RNA, 22 nt, Human
aauguggggaagccauggcuga

SEQ ID NO: 879432 - RNA, 22 nt, Human
auaacagaauaagucauuaccg

SEQ ID NO: 879433 - RNA, 22 nt, Human
uucuguguggguagcuccuguu

SEQ ID NO: 879434 - RNA, 22 nt, Human
uguagaaagaauauguuucaua

SEQ ID NO: 879435 - RNA, 22 nt, Human
uuuuauacacaugaacaugcag

SEQ ID NO: 879436 - RNA, 19 nt, Human
acacugguuguucaagggc

SEQ ID NO: 879437 - RNA, 22 nt, Human
gggagcuggaugauugaggcaa

SEQ ID NO: 879438 - RNA, 22 nt, Human
uccuuggccuaaggagaagagg

SEQ ID NO: 879439 - RNA, 22 nt, Human
agagccugaggaugucccagcu

SEQ ID NO: 879440 - RNA, 22 nt, Human
uaaagcuacacauuauuaaucc

SEQ ID NO: 879441 - RNA, 22 nt, Human
uaaagugaaggucauaaugauu

SEQ ID NO: 879442 - RNA, 22 nt, Human
uggucuuugagagaaguugauu

SEQ ID NO: 879443 - RNA, 22 nt, Human
cauguacacucauguaacuaua

SEQ ID NO: 879444 - RNA, 22 nt, Human
cugucuccuccacugcauggga

SEQ ID NO: 879445 - RNA, 22 nt, Human
ugggccaguuggaauggauacu

SEQ ID NO: 879446 - RNA, 22 nt, Human
ccugggcuucugucuagauguu

SEQ ID NO: 879447 - RNA, 22 nt, Human
accaggagaggcacuugcaaug

SEQ ID NO: 879448 - RNA, 22 nt, Human
gcacugggaaugugagcagcug

SEQ ID NO: 879449 - RNA, 22 nt, Human
ggaggagacggagugauuagug

SEQ ID NO: 879450 - RNA, 21 nt, Human
cacagagauauuggugagccu

SEQ ID NO: 879451 - RNA, 22 nt, Human
aaagagaaacuuagaagccuga

SEQ ID NO: 879452 - RNA, 22 nt, Human
ugcaguggugguaaagaugcuc

SEQ ID NO: 879453 - RNA, 22 nt, Human
cagacugagggcaucacauacg

SEQ ID NO: 879454 - RNA, 22 nt, Human
uacauacaguggaugcuuuagg

SEQ ID NO: 879455 - RNA, 22 nt, Human
agguguguauaaacauacauau

SEQ ID NO: 879456 - RNA, 22 nt, Human
aaauagauuucucuggguuugu

SEQ ID NO: 879457 - RNA, 18 nt, Human
uggagcagguaggcauga

SEQ ID NO: 879458 - RNA, 19 nt, Human
ggcugccuccugggagauu

SEQ ID NO: 879459 - RNA, 22 nt, Human
ucccaggaagaucccagggacc

SEQ ID NO: 879460 - RNA, 22 nt, Human
gugauucugcacgucauuccug

SEQ ID NO: 879461 - RNA, 22 nt, Human
uagaaauggguuacauuuagag

SEQ ID NO: 879462 - RNA, 22 nt, Human
uauugaaauccauuacguucuu

SEQ ID NO: 879463 - RNA, 22 nt, Human
acacaaaguuggaugacaaaau

SEQ ID NO: 879464 - RNA, 22 nt, Human
uuuuagaaguucaugugggauu

SEQ ID NO: 879465 - RNA, 22 nt, Human
acauacaaauagagcuguagua

SEQ ID NO: 879466 - RNA, 22 nt, Human
agccaggcagacucucuuucuu

SEQ ID NO: 879467 - RNA, 22 nt, Human
uuuaucugaggaaagcagacaa

SEQ ID NO: 879468 - RNA, 22 nt, Human
agcagcuguggaaaaguaacua

SEQ ID NO: 879469 - RNA, 20 nt, Human
ugggcagcacugcuggcugg

SEQ ID NO: 879470 - RNA, 20 nt, Human
uccuccaaccagcugcuaau

SEQ ID NO: 879471 - RNA, 22 nt, Human
ugcauuugucuugucucaugaa

SEQ ID NO: 879472 - RNA, 22 nt, Human
uacaucugucuggcuuuccauu

SEQ ID NO: 879473 - RNA, 22 nt, Human
aucuuuggaaagccaagcacag

SEQ ID NO: 879474 - RNA, 22 nt, Human
uccaggcuucacgucugcccuc

SEQ ID NO: 879475 - RNA, 22 nt, Human
ccugagcuccaguagcagccag

SEQ ID NO: 879476 - RNA, 22 nt, Human
ggaaggugcucccuggacagag

SEQ ID NO: 879477 - RNA, 22 nt, Human
aggagggagcacuauaugggga

SEQ ID NO: 879478 - RNA, 22 nt, Human
aucuagcaccaaacuagcuuuu

SEQ ID NO: 879479 - RNA, 22 nt, Human
cauacauauguggaugucauau

SEQ ID NO: 879480 - RNA, 22 nt, Human
ucucccacagucucccauggcu

SEQ ID NO: 879481 - RNA, 22 nt, Human
agaaggcuuaaaacauggaaua

SEQ ID NO: 879482 - RNA, 22 nt, Human
acuucacagauauuuauuuggu

SEQ ID NO: 879483 - RNA, 22 nt, Human
cucuggcuccauuucccuaugu

SEQ ID NO: 879484 - RNA, 22 nt, Human
gcucugugaaggguguugcuca

SEQ ID NO: 879485 - RNA, 22 nt, Human
gcagauggcucagacacugggg

SEQ ID NO: 879486 - RNA, 22 nt, Human
gagcauaggacacagaggugug

SEQ ID NO: 879487 - RNA, 22 nt, Human
ucaugcuuugguugcuguccuu

SEQ ID NO: 879488 - RNA, 22 nt, Human
aaaugguauaaugucauguauu

SEQ ID NO: 879489 - RNA, 22 nt, Human
augggaggcaaagaucgcagaa

SEQ ID NO: 879490 - RNA, 22 nt, Human
ugagcucuaagauccccucaag

SEQ ID NO: 879491 - RNA, 22 nt, Human
cagugguauuugagagaaugga

SEQ ID NO: 879492 - RNA, 21 nt, Human
cagugaggcccuccuguuccc

SEQ ID NO: 879493 - RNA, 22 nt, Human
uuuguuaauucuuauguuagag

SEQ ID NO: 879494 - RNA, 22 nt, Human
aagugcuaggauuacaggugug

SEQ ID NO: 879495 - RNA, 22 nt, Human
ugucauuuucagcuuaugcuuc

SEQ ID NO: 879496 - RNA, 22 nt, Human
augcauucagcggaaugcuuag

SEQ ID NO: 879497 - RNA, 22 nt, Human
uaacaaguucugacagcauugu

SEQ ID NO: 879498 - RNA, 22 nt, Human
gcugggagcccuggucugcucc

SEQ ID NO: 879499 - RNA, 22 nt, Human
gaaggccacggaauggagcugg

SEQ ID NO: 879500 - RNA, 22 nt, Human
agcugggaggcuccucugugac

SEQ ID NO: 879501 - RNA, 22 nt, Human
aggguggagggagucccugagc

SEQ ID NO: 879502 - RNA, 22 nt, Human
ggaggccaaggcagguggaucg

SEQ ID NO: 879503 - RNA, 22 nt, Human
guuuccagagugagggcacuug

SEQ ID NO: 879504 - RNA, 22 nt, Human
ucagugguuggaugauggucgc

SEQ ID NO: 879505 - RNA, 22 nt, Human
uacaugaacaaaauagcagaaa

SEQ ID NO: 879506 - RNA, 22 nt, Human
uauuuccagcaguaagaagaca

SEQ ID NO: 879507 - RNA, 22 nt, Human
cgugccuuggucccaaccccca

SEQ ID NO: 879508 - RNA, 22 nt, Human
ccagugagaaugaagauaaggc

SEQ ID NO: 879509 - RNA, 22 nt, Human
uguccuguuauauguuggguag

SEQ ID NO: 879510 - RNA, 22 nt, Human
uuggaaggaccaggccuugauu

SEQ ID NO: 879511 - RNA, 22 nt, Human
gggauuugugggauggccagug

SEQ ID NO: 879512 - RNA, 22 nt, Human
auucugucuuuuuaaaauaaua

SEQ ID NO: 879513 - RNA, 22 nt, Human
uugcauguccuacaucuguguc

SEQ ID NO: 879514 - RNA, 23 nt, Human
uuguuuuuagagguggcaugaga

SEQ ID NO: 879515 - RNA, 22 nt, Human
agcuggcuaugcccugugaacc

SEQ ID NO: 879516 - RNA, 22 nt, Human
ggcccugcgauuagguggcagg

SEQ ID NO: 879517 - RNA, 22 nt, Human
aggcagacugugcgggaagagu

SEQ ID NO: 879518 - RNA, 22 nt, Human
guccuauuagcauauugaauac

SEQ ID NO: 879519 - RNA, 22 nt, Human
ugcagcagcuccagguuacccu

SEQ ID NO: 879520 - RNA, 22 nt, Human
aaggugucacugggacaggaaa

SEQ ID NO: 879521 - RNA, 22 nt, Human
aggaaacuucagaguuuugguc

SEQ ID NO: 879522 - RNA, 22 nt, Human
aggcuggcugagcugcagccug

SEQ ID NO: 879523 - RNA, 22 nt, Human
gguauuuauaguggugcuuagu

SEQ ID NO: 879524 - RNA, 22 nt, Human
ggaacuuuuuaacaagcugcug

SEQ ID NO: 879525 - RNA, 18 nt, Human
gcuuccugaaagcugccc

SEQ ID NO: 879526 - RNA, 22 nt, Human
uauacagauaucuaagauguaa

SEQ ID NO: 879527 - RNA, 22 nt, Human
aggaaagaaaggaggugcauuu

SEQ ID NO: 879528 - RNA, 22 nt, Human
uuauuacacugaaagaauugcg

SEQ ID NO: 879529 - RNA, 22 nt, Human
ugucaucugauauuacuuauag

SEQ ID NO: 879530 - RNA, 22 nt, Human
cugccucagccuucugggugac

SEQ ID NO: 879531 - RNA, 22 nt, Human
auauuuuggcaaaugucuagau

SEQ ID NO: 879532 - RNA, 22 nt, Human
uauaauuuggggaaaguggugu

SEQ ID NO: 879533 - RNA, 22 nt, Human
uuaaagagucuacugcacaucc

SEQ ID NO: 879534 - RNA, 22 nt, Human
cucagugcuuaguguguuuugg

SEQ ID NO: 879535 - RNA, 22 nt, Human
acagugucuccugguacccagu

SEQ ID NO: 879536 - RNA, 22 nt, Human
uuuccuucucagggagcuucaa

SEQ ID NO: 879537 - RNA, 22 nt, Human
ugccugucucugacugccauua

SEQ ID NO: 879538 - RNA, 22 nt, Human
cucagaauuuagggcucugagg

SEQ ID NO: 879539 - RNA, 22 nt, Human
cuggaagagcauuugcauaggg

SEQ ID NO: 879540 - RNA, 22 nt, Human
uauuucacucaguauaccauag

SEQ ID NO: 879541 - RNA, 22 nt, Human
guggccagaggucccauguguc

SEQ ID NO: 879542 - RNA, 22 nt, Human
uccugcucugauggguucuccu

SEQ ID NO: 879543 - RNA, 22 nt, Human
aguggcaaagucuucagaaguu

SEQ ID NO: 879544 - RNA, 21 nt, Human
ccugggagaauuggguguggc

SEQ ID NO: 879545 - RNA, 22 nt, Human
aaaaaguauuggccaugguuga

SEQ ID NO: 879546 - RNA, 22 nt, Human
uagaaccucauaagaaucgaaa

SEQ ID NO: 879547 - RNA, 22 nt, Human
ccagcuccagcauagccaccau

SEQ ID NO: 879548 - RNA, 22 nt, Human
augcauuuguaaaauauaaucg

SEQ ID NO: 879549 - RNA, 17 nt, Human
acagggcagaaacagcu

SEQ ID NO: 879550 - RNA, 22 nt, Human
ugcuggccaagcagaggucaau

SEQ ID NO: 879551 - RNA, 22 nt, Human
gguauacaagagcaauuuaggg

SEQ ID NO: 879552 - RNA, 22 nt, Human
cucagugcuagaaguagauugc

SEQ ID NO: 879553 - RNA, 22 nt, Human
agucuugaaagcacauuagagu

SEQ ID NO: 879554 - RNA, 22 nt, Human
caucuuuggagaaacuuccguu

SEQ ID NO: 879555 - RNA, 22 nt, Human
agguggagugaaggaaaggcag

SEQ ID NO: 879556 - RNA, 22 nt, Human
augcaccugaacuccaucagcu

SEQ ID NO: 879557 - RNA, 22 nt, Human
acaagaauaaggauaagagauu

SEQ ID NO: 879558 - RNA, 22 nt, Human
cugagaauuacucugaugagua

SEQ ID NO: 879559 - RNA, 22 nt, Human
cagcagaacaguuaaagaaacc

SEQ ID NO: 879560 - RNA, 22 nt, Human
gagaaacaggaauugagucgcu

SEQ ID NO: 879561 - RNA, 19 nt, Human
ucuccaggugccccaaaca

SEQ ID NO: 879562 - RNA, 19 nt, Human
auguuugcuugaguaauaa

SEQ ID NO: 879563 - RNA, 22 nt, Human
agcccugucucucacuccaggu

SEQ ID NO: 879564 - RNA, 23 nt, Human
acugggaaguuuggagagacgca

SEQ ID NO: 879565 - RNA, 22 nt, Human
aucuguuguuuucucauauguu

SEQ ID NO: 879566 - RNA, 22 nt, Human
uacaguguauguauuuguaggu

SEQ ID NO: 879567 - RNA, 22 nt, Human
aaugaugaguucuaauagaccc

SEQ ID NO: 879568 - RNA, 22 nt, Human
uugaaauuuuaggccuugcaau

SEQ ID NO: 879569 - RNA, 22 nt, Human
gucuucuuguguugccugucuu

SEQ ID NO: 879570 - RNA, 22 nt, Human
uucccuccgaaccucagugcug

SEQ ID NO: 879571 - RNA, 22 nt, Human
gauuuguccacagagugaugaa

SEQ ID NO: 879572 - RNA, 21 nt, Human
gcagcagaggcuugacagaca

SEQ ID NO: 879573 - RNA, 18 nt, Human
uuucacaaccuccagagg

SEQ ID NO: 879574 - RNA, 22 nt, Human
agcuuuguggcuuugcaagacu

SEQ ID NO: 879575 - RNA, 19 nt, Human
ugccagcauuaggcugaag

SEQ ID NO: 879576 - RNA, 22 nt, Human
ugcuucagcagggaucgggggg

SEQ ID NO: 879577 - RNA, 22 nt, Human
gcccaagccgccuuccagagac

SEQ ID NO: 879578 - RNA, 22 nt, Human
auaaaaguucaagagaguacag

SEQ ID NO: 879579 - RNA, 20 nt, Human
cccugagaccagagagcagc

SEQ ID NO: 879580 - RNA, 22 nt, Human
gagaagaaaauuccgugaacac

SEQ ID NO: 879581 - RNA, 22 nt, Human
gaaacaauuuuuguugucuaag

SEQ ID NO: 879582 - RNA, 22 nt, Human
gagcugccugugugccaugaug

SEQ ID NO: 879583 - RNA, 22 nt, Human
acacagaugcuauuuagucucu

SEQ ID NO: 879584 - RNA, 22 nt, Human
uguuauuaaauaauucucucuu

SEQ ID NO: 879585 - RNA, 22 nt, Human
augcauaaagaaagcuaucugg

SEQ ID NO: 879586 - RNA, 22 nt, Human
ugagcuucaaaguuggaucuga

SEQ ID NO: 879587 - RNA, 22 nt, Human
aucgagggugaguacagcggac

SEQ ID NO: 879588 - RNA, 19 nt, Human
gcucaggcugugugugggg

SEQ ID NO: 879589 - RNA, 22 nt, Human
ccugagccugcagccgagcaga

SEQ ID NO: 879590 - RNA, 23 nt, Human
acugagccagggccugggucagc

SEQ ID NO: 879591 - RNA, 22 nt, Human
ucccaggauguuggcggcaggu

SEQ ID NO: 879592 - RNA, 22 nt, Human
agcugucuuucauuaccucauu

SEQ ID NO: 879593 - RNA, 22 nt, Human
aaugagauggaauucccgccua

SEQ ID NO: 879594 - RNA, 22 nt, Human
auacuucaugcuucaugucugu

SEQ ID NO: 879595 - RNA, 23 nt, Human
uugcuugagcccaggaaguggag

SEQ ID NO: 879596 - RNA, 22 nt, Human
ucuuaagcagagaagaaguuga

SEQ ID NO: 879597 - RNA, 22 nt, Human
guaauaaugguccccaaacacu

SEQ ID NO: 879598 - RNA, 22 nt, Human
uagacauuuucucaacaucucu

SEQ ID NO: 879599 - RNA, 22 nt, Human
gugcucuggcuggucucccggu

SEQ ID NO: 879600 - RNA, 22 nt, Human
agggcugacaaauggcagugac

SEQ ID NO: 879601 - RNA, 22 nt, Human
auagugaaaaugcugucagcau

SEQ ID NO: 879602 - RNA, 22 nt, Human
cagcugaggaauacuagaugua

SEQ ID NO: 879603 - RNA, 22 nt, Human
ccucagaagcucaaggacauug

SEQ ID NO: 879604 - RNA, 22 nt, Human
gcugaaaugccuuguaaauauu

SEQ ID NO: 879605 - RNA, 22 nt, Human
aaucugucccuuaacuagucau

SEQ ID NO: 879606 - RNA, 22 nt, Human
uuagagcugggauggauuuucc

SEQ ID NO: 879607 - RNA, 22 nt, Human
uccaggccuaggccaagugauu

SEQ ID NO: 879608 - RNA, 22 nt, Human
ucugaagauucuuuccacuauu

SEQ ID NO: 879609 - RNA, 22 nt, Human
gagcccugcccacuugucugag

SEQ ID NO: 879610 - RNA, 22 nt, Human
uuuaucaaacaaauuauccagc

SEQ ID NO: 879611 - RNA, 22 nt, Human
gaauucugucgcuuacuagaug

SEQ ID NO: 879612 - RNA, 22 nt, Human
ggaccugccagaacucaggcua

SEQ ID NO: 879613 - RNA, 22 nt, Human
ucccacugugccuguuguaauc

SEQ ID NO: 879614 - RNA, 22 nt, Human
aggaaaagugugaaguauggag

SEQ ID NO: 879615 - RNA, 22 nt, Human
acagagcuuaggaugacuccca

SEQ ID NO: 879616 - RNA, 22 nt, Human
auuucucuuccuccuaggguug

SEQ ID NO: 879617 - RNA, 22 nt, Human
aauuucaaugcacucaugguug

SEQ ID NO: 879618 - RNA, 22 nt, Human
ccaggcccaccuuggccacuua

SEQ ID NO: 879619 - RNA, 22 nt, Human
agcaaggaaacuauggagagau

SEQ ID NO: 879620 - RNA, 18 nt, Human
aaugcacacauuuacucc

SEQ ID NO: 879621 - RNA, 22 nt, Human
gcaguguuuuucaaugcuucca

SEQ ID NO: 879622 - RNA, 22 nt, Human
ugcucugggcucaauggcagcu

SEQ ID NO: 879623 - RNA, 22 nt, Human
ccucuggccuaggccgggagag

SEQ ID NO: 879624 - RNA, 22 nt, Human
cuauucuagucugucaugucca

SEQ ID NO: 879625 - RNA, 22 nt, Human
gacacagagcucacagucuccu

SEQ ID NO: 879626 - RNA, 21 nt, Human
aagacagaaaagccuauuuuc

SEQ ID NO: 879627 - RNA, 22 nt, Human
uuuggaaauuuucauccagaca

SEQ ID NO: 879628 - RNA, 22 nt, Human
caggggacaguaugguggauga

SEQ ID NO: 879629 - RNA, 20 nt, Human
ucuagacagggcacaggaau

SEQ ID NO: 879630 - RNA, 22 nt, Human
cccacucccuacgacacgcucc

SEQ ID NO: 879631 - RNA, 22 nt, Human
auuucucacaguggaaucucug

SEQ ID NO: 879632 - RNA, 22 nt, Human
ggucuggaauaagguccaggaa

SEQ ID NO: 879633 - RNA, 21 nt, Human
uagcuucuugaggcuuggccg

SEQ ID NO: 879634 - RNA, 22 nt, Human
ccacugagguuuugugguuaug

SEQ ID NO: 879635 - RNA, 22 nt, Human
uuucauuguccccaggcaagac

SEQ ID NO: 879636 - RNA, 22 nt, Human
gagccccagcccugcuucuaua

SEQ ID NO: 879637 - RNA, 22 nt, Human
gggaagugauggagccaggauu

SEQ ID NO: 879638 - RNA, 22 nt, Human
cagcugcccauccugggaaaug

SEQ ID NO: 879639 - RNA, 22 nt, Human
uucuacauauauuuuucucacu

SEQ ID NO: 879640 - RNA, 22 nt, Human
gggcagcaguugcccuaaucaa

SEQ ID NO: 879641 - RNA, 20 nt, Human
acuaacauuugcaaggggcu

SEQ ID NO: 879642 - RNA, 20 nt, Human
gcccaggaauuugcauuucu

SEQ ID NO: 879643 - RNA, 22 nt, Human
uuagauaacaguagaauaucaa

SEQ ID NO: 879644 - RNA, 22 nt, Human
uugucaccccuagaggaauucu

SEQ ID NO: 879645 - RNA, 22 nt, Human
acagauggagguuauuaugaac

SEQ ID NO: 879646 - RNA, 22 nt, Human
gcucucugggugugucuagaua

SEQ ID NO: 879647 - RNA, 22 nt, Human
gugaaagacagcauuaauggcu

SEQ ID NO: 879648 - RNA, 22 nt, Human
uuuccuaagguagugauaauuu

SEQ ID NO: 879649 - RNA, 22 nt, Human
aggcagccugguuugaauggaa

SEQ ID NO: 879650 - RNA, 22 nt, Human
augcaaaugucaccacuucuaa

SEQ ID NO: 879651 - RNA, 22 nt, Human
uggcugagugaacauguccauu

SEQ ID NO: 879652 - RNA, 22 nt, Human
agcagggggccacagucacagc

SEQ ID NO: 879653 - RNA, 22 nt, Human
uguaaacauauguauguaugua

SEQ ID NO: 879654 - RNA, 22 nt, Human
aaagugcugaaauuacaggugu

SEQ ID NO: 879655 - RNA, 22 nt, Human
cagcuuucuuuccauaagguuu

SEQ ID NO: 879656 - RNA, 22 nt, Human
gcaguggaagccucuuuaagca

SEQ ID NO: 879657 - RNA, 22 nt, Human
ccucccugucuaccuguugugg

SEQ ID NO: 879658 - RNA, 22 nt, Human
uauuucaacguaugaaaagcug

SEQ ID NO: 879659 - RNA, 21 nt, Human
augugugcuagaggacuacug

SEQ ID NO: 879660 - RNA, 22 nt, Human
augccuuauuccaacaaucuag

SEQ ID NO: 879661 - RNA, 20 nt, Human
ggcagcaauucacccuaucc

SEQ ID NO: 879662 - RNA, 22 nt, Human
cacucuaagaacacaaaggccc

SEQ ID NO: 879663 - RNA, 20 nt, Human
acagaugaggaaaaugaagu

SEQ ID NO: 879664 - RNA, 21 nt, Human
uaauauagguucacaacuagu

SEQ ID NO: 879665 - RNA, 22 nt, Human
ugcugccagccaggccauggag

SEQ ID NO: 879666 - RNA, 22 nt, Human
ucacuccucaggcuagcaucau

SEQ ID NO: 879667 - RNA, 22 nt, Human
gcugcccugucugcagcaggac

SEQ ID NO: 879668 - RNA, 22 nt, Human
ugaggcucaagaaagauuuguu

SEQ ID NO: 879669 - RNA, 22 nt, Human
ucccagcccagguaugaugaua

SEQ ID NO: 879670 - RNA, 22 nt, Human
uuagaaaauggaggugggaggg

SEQ ID NO: 879671 - RNA, 22 nt, Human
gacuucauaauauugagcaugu

SEQ ID NO: 879672 - RNA, 22 nt, Human
acuuaugaggagaaaauauaua

SEQ ID NO: 879673 - RNA, 22 nt, Human
cacuggcaucuaguggguugag

SEQ ID NO: 879674 - RNA, 22 nt, Human
cacauggaagagauacagugag

SEQ ID NO: 879675 - RNA, 22 nt, Human
uuaaggaaagccaaaaugaauu

SEQ ID NO: 879676 - RNA, 22 nt, Human
cuuuccaacugggugggcagcu

SEQ ID NO: 879677 - RNA, 22 nt, Human
aaugcugcucucauaauuauag

SEQ ID NO: 879678 - RNA, 22 nt, Human
uugaucccuggaaauugaaaug

SEQ ID NO: 879679 - RNA, 22 nt, Human
uccccagguccugucggcuccu

SEQ ID NO: 879680 - RNA, 22 nt, Human
gucucagauucagacaucuaca

SEQ ID NO: 879681 - RNA, 22 nt, Human
ugcuaggcauugucugggagua

SEQ ID NO: 879682 - RNA, 22 nt, Human
aaaguuuaggcuuugaaaccag

SEQ ID NO: 879683 - RNA, 22 nt, Human
aucuuugguacuauucuuauca

SEQ ID NO: 879684 - RNA, 22 nt, Human
agagucugauauuuguaccaga

SEQ ID NO: 879685 - RNA, 22 nt, Human
uucacaauuucccuucaucagg

SEQ ID NO: 879686 - RNA, 22 nt, Human
uuggcccacaguaccaugcugu

SEQ ID NO: 879687 - RNA, 22 nt, Human
auucacaguucauuagcuguaa

SEQ ID NO: 879688 - RNA, 22 nt, Human
gcuucaggaggucggucuccuu

SEQ ID NO: 879689 - RNA, 22 nt, Human
aaguccauucuuccagccagcu

SEQ ID NO: 879690 - RNA, 22 nt, Human
gcaccugaacgaccugcuccag

SEQ ID NO: 879691 - RNA, 22 nt, Human
caggacuggcucgcagugggug

SEQ ID NO: 879692 - RNA, 22 nt, Human
aaggauguucuaguuugcugag

SEQ ID NO: 879693 - RNA, 22 nt, Human
ucugggagagucacaggcauug

SEQ ID NO: 879694 - RNA, 22 nt, Human
cagugaguccaagauggcugaa

SEQ ID NO: 879695 - RNA, 22 nt, Human
auguuauucaauuugaauccaa

SEQ ID NO: 879696 - RNA, 22 nt, Human
uuguacuaucaccaugucaugu

SEQ ID NO: 879697 - RNA, 22 nt, Human
gaagagcugacagugucauccu

SEQ ID NO: 879698 - RNA, 21 nt, Human
gacagcaacuguaguccucuu

SEQ ID NO: 879699 - RNA, 22 nt, Human
gacacagagacuugcaguugua

SEQ ID NO: 879700 - RNA, 22 nt, Human
gugguuuugccauuacaaguaa

SEQ ID NO: 879701 - RNA, 22 nt, Human
ucuggccaacaaaaacuaaguc

SEQ ID NO: 879702 - RNA, 22 nt, Human
gcugcaggcagaaucucccaau

SEQ ID NO: 879703 - RNA, 18 nt, Human
uaacauguuuucauuaag

SEQ ID NO: 879704 - RNA, 22 nt, Human
aaaagacauaugugggcauucu

SEQ ID NO: 879705 - RNA, 22 nt, Human
ucuuggaaguagaacacagucu

SEQ ID NO: 879706 - RNA, 22 nt, Human
gccaggcauuuguuaggugcug

SEQ ID NO: 879707 - RNA, 22 nt, Human
auguuauaaauagagacacugg

SEQ ID NO: 879708 - RNA, 19 nt, Human
uggcugggugccaauggcc

SEQ ID NO: 879709 - RNA, 22 nt, Human
ucucagagaugucaagagucua

SEQ ID NO: 879710 - RNA, 22 nt, Human
aaacacuuccuguaacaugaca

SEQ ID NO: 879711 - RNA, 22 nt, Human
agaaacaucuuggcaacuggaa

SEQ ID NO: 879712 - RNA, 22 nt, Human
ccagugugauuguugcaagaau

SEQ ID NO: 879713 - RNA, 22 nt, Human
cuguaaagaucacagagcuggu

SEQ ID NO: 879714 - RNA, 23 nt, Human
cagugcugguucugccugugggg

SEQ ID NO: 879715 - RNA, 22 nt, Human
caguaagaguugacaauggcca

SEQ ID NO: 879716 - RNA, 22 nt, Human
cugcagcugccagugauuucag

SEQ ID NO: 879717 - RNA, 22 nt, Human
gcucugagcagggagaaacagg

SEQ ID NO: 879718 - RNA, 22 nt, Human
uccucaaauauuuacuuacuga

SEQ ID NO: 879719 - RNA, 22 nt, Human
uguaugugcuugagaagguggg

SEQ ID NO: 879720 - RNA, 22 nt, Human
aacagcauauuucauauauuga

SEQ ID NO: 879721 - RNA, 22 nt, Human
cuggugggagcagcaggcagcu

SEQ ID NO: 879722 - RNA, 22 nt, Human
ccugccaggagcuggugcugca

SEQ ID NO: 879723 - RNA, 22 nt, Human
ccagccugguucagaauuggcu

SEQ ID NO: 879724 - RNA, 22 nt, Human
uagaaaguaaacacgaagucuc

SEQ ID NO: 879725 - RNA, 22 nt, Human
caguggcacgaucucagcucac

SEQ ID NO: 879726 - RNA, 20 nt, Human
uuaugcaagcaucaauauug

SEQ ID NO: 879727 - RNA, 22 nt, Human
ggcccugugauggauguauuag

SEQ ID NO: 879728 - RNA, 22 nt, Human
uggcccagcccugcucuagggc

SEQ ID NO: 879729 - RNA, 22 nt, Human
uccagagcugggucugugcuca

SEQ ID NO: 879730 - RNA, 22 nt, Human
ugucagcaauucuggcuuacuc

SEQ ID NO: 879731 - RNA, 23 nt, Human
auaaauuacuaucucccuagagc

SEQ ID NO: 879732 - RNA, 22 nt, Human
cagcccuggugagguuggcuau

SEQ ID NO: 879733 - RNA, 23 nt, Human
acaggcaauaaagggagucucca

SEQ ID NO: 879734 - RNA, 22 nt, Human
cacagugacuggcacauaguaa

SEQ ID NO: 879735 - RNA, 22 nt, Human
uuuuucuacugcccacauugua

SEQ ID NO: 879736 - RNA, 22 nt, Human
gcccagcuggcuuccagcacau

SEQ ID NO: 879737 - RNA, 22 nt, Human
gcucaggccuggcuauccauug

SEQ ID NO: 879738 - RNA, 22 nt, Human
agcagggcagugaucagaaagg

SEQ ID NO: 879739 - RNA, 22 nt, Human
uuugugugguggauacugggua

SEQ ID NO: 879740 - RNA, 22 nt, Human
gcacugcagguggguggagagg

SEQ ID NO: 879741 - RNA, 22 nt, Human
cugaacauucuugaacaucugu

SEQ ID NO: 879742 - RNA, 19 nt, Human
guuuugcaggcagagggga

SEQ ID NO: 879743 - RNA, 22 nt, Human
acacaugaaucacugguggaag

SEQ ID NO: 879744 - RNA, 22 nt, Human
cucagugucuuauuguacacau

SEQ ID NO: 879745 - RNA, 22 nt, Human
agggcgugguggugcuggagca

SEQ ID NO: 879746 - RNA, 22 nt, Human
acucugccugaaccuccugcaa

SEQ ID NO: 879747 - RNA, 21 nt, Human
uucugcuccagcuccucuggg

SEQ ID NO: 879748 - RNA, 22 nt, Human
gcccagcugucuggcagggaug

SEQ ID NO: 879749 - RNA, 22 nt, Human
acaaggcucuggagaagcagaa

SEQ ID NO: 879750 - RNA, 22 nt, Human
ucacaaagggagggauagcugg

SEQ ID NO: 879751 - RNA, 22 nt, Human
uucauacuaaaguguaagaugu

SEQ ID NO: 879752 - RNA, 22 nt, Human
agggcagaaaccaccuugaugg

SEQ ID NO: 879753 - RNA, 22 nt, Human
ggcagaggugacagugucuuuu

SEQ ID NO: 879754 - RNA, 22 nt, Human
gaauucugguccuguccaaggu

SEQ ID NO: 879755 - RNA, 22 nt, Human
cggggcugcgcucuuccugccg

SEQ ID NO: 879756 - RNA, 22 nt, Human
uuuaggccagauuuauuugaca

SEQ ID NO: 879757 - RNA, 22 nt, Human
ucacaagauacaguuagaagca

SEQ ID NO: 879758 - RNA, 23 nt, Human
agcagcugugguuuaccuuagua

SEQ ID NO: 879759 - RNA, 22 nt, Human
gagcccagcuguccuuggcaaa

SEQ ID NO: 879760 - RNA, 22 nt, Human
uggcuggaugugagaucaagag

SEQ ID NO: 879761 - RNA, 22 nt, Human
auuccacagcuacaucaaucua

SEQ ID NO: 879762 - RNA, 22 nt, Human
aaagccagugguaugagagaaa

SEQ ID NO: 879763 - RNA, 22 nt, Human
gaacacauguccuccuuggauu

SEQ ID NO: 879764 - RNA, 22 nt, Human
uacuuucuagcucuccccaguu

SEQ ID NO: 879765 - RNA, 22 nt, Human
uccaggauugcaggugcacaac

SEQ ID NO: 879766 - RNA, 22 nt, Human
uacaauuuaguggugugugguu

SEQ ID NO: 879767 - RNA, 22 nt, Human
ucaucaucacucuggcaagcau

SEQ ID NO: 879768 - RNA, 22 nt, Human
gcuggcuguguuccuucugcca

SEQ ID NO: 879769 - RNA, 22 nt, Human
gacauucauugaugucuuccuc

SEQ ID NO: 879770 - RNA, 22 nt, Human
caugcaggccuauggagcagug

SEQ ID NO: 879771 - RNA, 22 nt, Human
ugaugaaaaccagaacucucau

SEQ ID NO: 879772 - RNA, 22 nt, Human
uacacaccugccugcagacucu

SEQ ID NO: 879773 - RNA, 22 nt, Human
aggacacagguaagccagugga

SEQ ID NO: 879774 - RNA, 22 nt, Human
ucuuuccuguaacugcuguuca

SEQ ID NO: 879775 - RNA, 22 nt, Human
guaucuuuccacaucuucagua

SEQ ID NO: 879776 - RNA, 22 nt, Human
uaacagaagaugaaacuucuuu

SEQ ID NO: 879777 - RNA, 22 nt, Human
gcucugagaggaugcugagcag

SEQ ID NO: 879778 - RNA, 22 nt, Human
ugcuccugauaucuaaugugua

SEQ ID NO: 879779 - RNA, 22 nt, Human
aacaggcaacaguugacucuga

SEQ ID NO: 879780 - RNA, 22 nt, Human
gaaggcaguaaauggcuguuuu

SEQ ID NO: 879781 - RNA, 22 nt, Human
agcuccagccucuucuggaggu

SEQ ID NO: 879782 - RNA, 22 nt, Human
aggcuggagggcaauggcaaga

SEQ ID NO: 879783 - RNA, 20 nt, Human
ugggccuguggcagaagucu

SEQ ID NO: 879784 - RNA, 22 nt, Human
gggcaccuggcuagugacagug

SEQ ID NO: 879785 - RNA, 22 nt, Human
uagcagcuccuaaacaguggug

SEQ ID NO: 879786 - RNA, 22 nt, Human
gaaguggaagccaucggcaguc

SEQ ID NO: 879787 - RNA, 22 nt, Human
gugcuaggauuacaggcauggg

SEQ ID NO: 879788 - RNA, 22 nt, Human
agcagccuuugaucaucuggga

SEQ ID NO: 879789 - RNA, 22 nt, Human
ccagggccugccacuuagcaag

SEQ ID NO: 879790 - RNA, 22 nt, Human
ccuggcucuucugugucagccc

SEQ ID NO: 879791 - RNA, 22 nt, Human
uuucccaggcccucagggcugc

SEQ ID NO: 879792 - RNA, 22 nt, Human
ugcaugcacuaucuagaugaug

SEQ ID NO: 879793 - RNA, 22 nt, Human
agcagcucacaggauuccugaa

SEQ ID NO: 879794 - RNA, 22 nt, Human
uggcagaggaggcucagauuga

SEQ ID NO: 879795 - RNA, 22 nt, Human
ugggaggcuuccagaccuugcu

SEQ ID NO: 879796 - RNA, 22 nt, Human
aacacugauggaaaguauguuu

SEQ ID NO: 879797 - RNA, 22 nt, Human
gcagcccugcaggcagcuccag

SEQ ID NO: 879798 - RNA, 22 nt, Human
acccaggcgggagugcaguguc

SEQ ID NO: 879799 - RNA, 22 nt, Human
ucacauuuauuucaaaguuacu

SEQ ID NO: 879800 - RNA, 22 nt, Human
uuuggucuuggauuuaucagug

SEQ ID NO: 879801 - RNA, 22 nt, Human
uggugggcacagugcccaggcu

SEQ ID NO: 879802 - RNA, 22 nt, Human
aaucuauaugcuuuucacauac

SEQ ID NO: 879803 - RNA, 22 nt, Human
gagagaaaaaugagcuucauug

SEQ ID NO: 879804 - RNA, 22 nt, Human
uccuguguuaaagggggugcua

SEQ ID NO: 879805 - RNA, 22 nt, Human
aagguauuggcagggcugaguu

SEQ ID NO: 879806 - RNA, 22 nt, Human
agaggcuggauugagcauagac

SEQ ID NO: 879807 - RNA, 22 nt, Human
guuauaaaaugcacaguuguuu

SEQ ID NO: 879808 - RNA, 22 nt, Human
cuccagaggaugcaggugaggg

SEQ ID NO: 879809 - RNA, 22 nt, Human
gggccccaguccucccacgugg

SEQ ID NO: 879810 - RNA, 19 nt, Human
cacuuuauuucuguuuugu

SEQ ID NO: 879811 - RNA, 22 nt, Human
ucuagucaauagaggucacacu

SEQ ID NO: 879812 - RNA, 20 nt, Human
ucccaggcugggcuccagcu

SEQ ID NO: 879813 - RNA, 21 nt, Human
cugcuuuacuucagaggaucu

SEQ ID NO: 879814 - RNA, 22 nt, Human
gagguguguuacagauugucau

SEQ ID NO: 879815 - RNA, 22 nt, Human
uuccaauggaaucaugucuuga

SEQ ID NO: 879816 - RNA, 21 nt, Human
ggcuggucgcgugcaugucuc

SEQ ID NO: 879817 - RNA, 22 nt, Human
aauugugcauuuuuaaaucacg

SEQ ID NO: 879818 - RNA, 22 nt, Human
cagucccaguuugagacucugg

SEQ ID NO: 879819 - RNA, 22 nt, Human
agugucugccaacugcaugguc

SEQ ID NO: 879820 - RNA, 23 nt, Human
agaaaguuugugccuugugacac

SEQ ID NO: 879821 - RNA, 22 nt, Human
uaaaaaguagugagaauggcgc

SEQ ID NO: 879822 - RNA, 20 nt, Human
ucugacccagagcccaggcu

SEQ ID NO: 879823 - RNA, 21 nt, Human
ucaauacaggugcaugugucu

SEQ ID NO: 879824 - RNA, 22 nt, Human
uuacuguuccucucucaaagag

SEQ ID NO: 879825 - RNA, 22 nt, Human
uguaucaaucauguaauuuggu

SEQ ID NO: 879826 - RNA, 22 nt, Human
aucauuugccucaagugaaagu

SEQ ID NO: 879827 - RNA, 22 nt, Human
uuugugugcuugguauugaaga

SEQ ID NO: 879828 - RNA, 22 nt, Human
gaggcacagagcccuaggagcu

SEQ ID NO: 879829 - RNA, 22 nt, Human
ugggugggagcacccugucugg

SEQ ID NO: 879830 - RNA, 22 nt, Human
ugguauuuccucauucugcuuu

SEQ ID NO: 879831 - RNA, 22 nt, Human
aagggcuggcccugggaagagu

SEQ ID NO: 879832 - RNA, 19 nt, Human
uucauuuguaucugcucac

SEQ ID NO: 879833 - RNA, 22 nt, Human
cugcccugucuuuuucugauga

SEQ ID NO: 879834 - RNA, 22 nt, Human
auaacagugaccucucagcacc

SEQ ID NO: 879835 - RNA, 22 nt, Human
caggcaggugcagauuccucuu

SEQ ID NO: 879836 - RNA, 22 nt, Human
ucuuacaagaaauaagccaaug

SEQ ID NO: 879837 - RNA, 22 nt, Human
aggcagguuggggaaaagcacu

SEQ ID NO: 879838 - RNA, 22 nt, Human
gcagaacauuucacaguaucuu

SEQ ID NO: 879839 - RNA, 22 nt, Human
accuuaaaggccgaaguaaaga

SEQ ID NO: 879840 - RNA, 22 nt, Human
ccaaacaaauccccauucuuag

SEQ ID NO: 879841 - RNA, 22 nt, Human
agguaaaugaauguuuagucuu

SEQ ID NO: 879842 - RNA, 22 nt, Human
ggcagguggacgugcuaaagcu

SEQ ID NO: 879843 - RNA, 22 nt, Human
cagcaguucuguacuuuagagu

SEQ ID NO: 879844 - RNA, 22 nt, Human
aaaaggcauggagguugauagu

SEQ ID NO: 879845 - RNA, 22 nt, Human
uaacacugugcccagaguccca

SEQ ID NO: 879846 - RNA, 22 nt, Human
cugucuucccgaggcccuggag

SEQ ID NO: 879847 - RNA, 22 nt, Human
uguggaaugggagugagaagac

SEQ ID NO: 879848 - RNA, 22 nt, Human
ccaguggcuacagggggguuga

SEQ ID NO: 879849 - RNA, 22 nt, Human
ucuagcaugggaaaaucacagc

SEQ ID NO: 879850 - RNA, 22 nt, Human
aggcucaguucuguggugagcc

SEQ ID NO: 879851 - RNA, 23 nt, Human
uccagggcaguggcugggucugc

SEQ ID NO: 879852 - RNA, 20 nt, Human
agccaggcucaagcuccccc

SEQ ID NO: 879853 - RNA, 22 nt, Human
uggccucaaucuguccuccagc

SEQ ID NO: 879854 - RNA, 22 nt, Human
caaugacauggauaaucauauu

SEQ ID NO: 879855 - RNA, 22 nt, Human
ccacugugcccagccucauggg

SEQ ID NO: 879856 - RNA, 22 nt, Human
cugauggagacuccacugugau

SEQ ID NO: 879857 - RNA, 22 nt, Human
ccucucuuuccuacaccuugga

SEQ ID NO: 879858 - RNA, 22 nt, Human
cagaaugaaauguaagaacacc

SEQ ID NO: 879859 - RNA, 22 nt, Human
cagagccaaaaccguaacagcc

SEQ ID NO: 879860 - RNA, 23 nt, Human
ucaguuauuggugauaaagcugg

SEQ ID NO: 879861 - RNA, 22 nt, Human
augaaggcaguuaaacgucauc

SEQ ID NO: 879862 - RNA, 22 nt, Human
ggcuucaccgcgggguugcagg

SEQ ID NO: 879863 - RNA, 22 nt, Human
augagguaucucauuuccugaa

SEQ ID NO: 879864 - RNA, 22 nt, Human
ccuggcucugccguaaccacca

SEQ ID NO: 879865 - RNA, 22 nt, Human
aagaaucauagagccacugaua

SEQ ID NO: 879866 - RNA, 22 nt, Human
uagggacaaagagcugaggccu

SEQ ID NO: 879867 - RNA, 22 nt, Human
guagucugaacaguaauuuugu

SEQ ID NO: 879868 - RNA, 20 nt, Human
gccugcagguuggaugggau

SEQ ID NO: 879869 - RNA, 22 nt, Human
gccuggggcaugcagcugauac

SEQ ID NO: 879870 - RNA, 22 nt, Human
ucucuaaagauagcugccucga

SEQ ID NO: 879871 - RNA, 22 nt, Human
agguauuuguuauuugagagug

SEQ ID NO: 879872 - RNA, 22 nt, Human
aggagccaagcagaacuaagga

SEQ ID NO: 879873 - RNA, 22 nt, Human
uucugucucccugauguagagc

SEQ ID NO: 879874 - RNA, 22 nt, Human
cuuuuccuauugauucuguuac

SEQ ID NO: 879875 - RNA, 22 nt, Human
ggcuuccagcugggccuuggag

SEQ ID NO: 879876 - RNA, 22 nt, Human
ccuuccaaaggagccacaucug

SEQ ID NO: 879877 - RNA, 22 nt, Human
uagauucaaguauucaguuugg

SEQ ID NO: 879878 - RNA, 22 nt, Human
ucuuaguuguuugcugucuaac

SEQ ID NO: 879879 - RNA, 22 nt, Human
ucuagcagagggaagaggcuuu

SEQ ID NO: 879880 - RNA, 22 nt, Human
cuugggagacacaagaagacau

SEQ ID NO: 879881 - RNA, 22 nt, Human
ugucaccaguuccaggaaauaa

SEQ ID NO: 879882 - RNA, 22 nt, Human
augagcaguagguucauggcug

SEQ ID NO: 879883 - RNA, 22 nt, Human
cccagccuuugcuuccugguuc

SEQ ID NO: 879884 - RNA, 18 nt, Human
gccuucagacugcaugcu

SEQ ID NO: 879885 - RNA, 22 nt, Human
cucaggccuugaagucuuuucu

SEQ ID NO: 879886 - RNA, 22 nt, Human
uaaaacagcagggcagagaagu

SEQ ID NO: 879887 - RNA, 22 nt, Human
gggcugaaaggccgccucagau

SEQ ID NO: 879888 - RNA, 22 nt, Human
acagauggccauauuacuauau

SEQ ID NO: 879889 - RNA, 22 nt, Human
gugagaaugagauuggaaugua

SEQ ID NO: 879890 - RNA, 21 nt, Human
gccuggcagguggaagggcuc

SEQ ID NO: 879891 - RNA, 22 nt, Human
ucccagcccagacuucuccagu

SEQ ID NO: 879892 - RNA, 21 nt, Human
ugugcaguccaaugugcuagc

SEQ ID NO: 879893 - RNA, 22 nt, Human
uacauugagaaccacugcuuag

SEQ ID NO: 879894 - RNA, 22 nt, Human
ugaaaagacugcaagagagcau

SEQ ID NO: 879895 - RNA, 22 nt, Human
uccaggaggaggaaggcugcca

SEQ ID NO: 879896 - RNA, 22 nt, Human
uguccuugugacauucuggcuu

SEQ ID NO: 879897 - RNA, 21 nt, Human
aaauuucugcaagccucaacu

SEQ ID NO: 879898 - RNA, 22 nt, Human
agggcugacaguggcguggcgu

SEQ ID NO: 879899 - RNA, 22 nt, Human
aacacuguaucagucuucaaua

SEQ ID NO: 879900 - RNA, 22 nt, Human
aaagcagucuguuuuaaccuga

SEQ ID NO: 879901 - RNA, 20 nt, Human
ccaggcuggcaaaugggggc

SEQ ID NO: 879902 - RNA, 22 nt, Human
caggaagaggacaggcuucccc

SEQ ID NO: 879903 - RNA, 22 nt, Human
aaauagagcuggguuaaacuuu

SEQ ID NO: 879904 - RNA, 20 nt, Human
ugcccacaucacucaggagu

SEQ ID NO: 879905 - RNA, 22 nt, Human
aguguauuaaaaugcuccuaag

SEQ ID NO: 879906 - RNA, 22 nt, Human
gacccuggcuagggcuuaaccu

SEQ ID NO: 879907 - RNA, 22 nt, Human
cugcuuggaguccuccagcacc

SEQ ID NO: 879908 - RNA, 22 nt, Human
gaaguguuuuaguucuucaggu

SEQ ID NO: 879909 - RNA, 22 nt, Human
ucuacuugucagucuucaaauc

SEQ ID NO: 879910 - RNA, 22 nt, Human
ucaauucagacugagaaaugau

SEQ ID NO: 879911 - RNA, 22 nt, Human
uuuuuaaugcagucugagacau

SEQ ID NO: 879912 - RNA, 22 nt, Human
caggcuccuuaucuuacaacuu

SEQ ID NO: 879913 - RNA, 22 nt, Human
cuucaguguugccagggccuag

SEQ ID NO: 879914 - RNA, 22 nt, Human
auauacaggugguauguguaaa

SEQ ID NO: 879915 - RNA, 22 nt, Human
uguguuaauuccacaaacauuc

SEQ ID NO: 879916 - RNA, 22 nt, Human
ugugggaagauguugcaggaga

SEQ ID NO: 879917 - RNA, 22 nt, Human
cuccagugcccuccuugggggc

SEQ ID NO: 879918 - RNA, 22 nt, Human
agagcuggcugugggugacuuu

SEQ ID NO: 879919 - RNA, 19 nt, Human
auucaugaaggcuugaagg

SEQ ID NO: 879920 - RNA, 22 nt, Human
auuauuguacuuucaauaaggu

SEQ ID NO: 879921 - RNA, 20 nt, Human
ugugugcuaggacuacagug

SEQ ID NO: 879922 - RNA, 22 nt, Human
cugcuuccaugcaauggcaguc

SEQ ID NO: 879923 - RNA, 22 nt, Human
gaccugguccuuguacuuugaa

SEQ ID NO: 879924 - RNA, 22 nt, Human
cagcugccuguauuguccucau

SEQ ID NO: 879925 - RNA, 22 nt, Human
acaguuuaugguguuuuauaua

SEQ ID NO: 879926 - RNA, 22 nt, Human
ccagcaccuugaucuuggaguu

SEQ ID NO: 879927 - RNA, 22 nt, Human
gagugcagaugaacagaagauu

SEQ ID NO: 879928 - RNA, 22 nt, Human
guucuucaucauuuuagauagg

SEQ ID NO: 879929 - RNA, 22 nt, Human
gcugcagagaugggugcccuuu

SEQ ID NO: 879930 - RNA, 22 nt, Human
ugacccuuggucagagugcccu

SEQ ID NO: 879931 - RNA, 22 nt, Human
guuucauaauucaaucaaauga

SEQ ID NO: 879932 - RNA, 22 nt, Human
uggggcaguggcuuuucacccu

SEQ ID NO: 879933 - RNA, 22 nt, Human
ucaaagcacacuuagugguaga

SEQ ID NO: 879934 - RNA, 22 nt, Human
augaaugcauacauuugucaag

SEQ ID NO: 879935 - RNA, 22 nt, Human
augggcaugauauuaguaccua

SEQ ID NO: 879936 - RNA, 20 nt, Human
auauuucuuaagaacuuuca

SEQ ID NO: 879937 - RNA, 22 nt, Human
acuguggcucaucaggcuggug

SEQ ID NO: 879938 - RNA, 22 nt, Human
uagauguaucuucucuuaucgu

SEQ ID NO: 879939 - RNA, 22 nt, Human
gcugagcagguuugaugcuuuu

SEQ ID NO: 879940 - RNA, 21 nt, Human
uucuucaugaugauuaauggc

SEQ ID NO: 879941 - RNA, 22 nt, Human
aaaguaaccuaguaauaguguc

SEQ ID NO: 879942 - RNA, 22 nt, Human
aaggccaccaccagcgaggggg

SEQ ID NO: 879943 - RNA, 22 nt, Human
gcugccuuugugagccaagggg

SEQ ID NO: 879944 - RNA, 22 nt, Human
ugucagugguaagguugggagu

SEQ ID NO: 879945 - RNA, 22 nt, Human
cuuuguauucaguugggcugug

SEQ ID NO: 879946 - RNA, 22 nt, Human
cugggguggagauuggcaaucu

SEQ ID NO: 879947 - RNA, 22 nt, Human
ucacuccaucuuugcuacuggu

SEQ ID NO: 879948 - RNA, 22 nt, Human
acacauaucuaagauagaugac

SEQ ID NO: 879949 - RNA, 22 nt, Human
augacaaaagaagacaugaggu

SEQ ID NO: 879950 - RNA, 22 nt, Human
acacagauggguagaaaacaga

SEQ ID NO: 879951 - RNA, 22 nt, Human
ccacugaguacccgauggcugc

SEQ ID NO: 879952 - RNA, 22 nt, Human
aggugcaggagcugugcaggga

SEQ ID NO: 879953 - RNA, 22 nt, Human
auacauacauguacacauaaau

SEQ ID NO: 879954 - RNA, 19 nt, Human
ugaagcaggcagagaagau

SEQ ID NO: 879955 - RNA, 22 nt, Human
gcugugugcuaggauauguuuu

SEQ ID NO: 879956 - RNA, 22 nt, Human
agaauaugccuuagcaagccca

SEQ ID NO: 879957 - RNA, 22 nt, Human
augcagaaugaguucacgaucu

SEQ ID NO: 879958 - RNA, 22 nt, Human
aggcaacucaucaugaaagacu

SEQ ID NO: 879959 - RNA, 22 nt, Human
aguacaguuauaaguggucuug

SEQ ID NO: 879960 - RNA, 22 nt, Human
acucccacuccagaguagaagc

SEQ ID NO: 879961 - RNA, 22 nt, Human
ugugugugacaaccuaguucag

SEQ ID NO: 879962 - RNA, 22 nt, Human
uuccacagcccaagcugguggc

SEQ ID NO: 879963 - RNA, 22 nt, Human
cuucacuaaucacugaacucca

SEQ ID NO: 879964 - RNA, 20 nt, Human
ccagagaguagguuagugau

SEQ ID NO: 879965 - RNA, 22 nt, Human
acugggaaggagcaggaucugu

SEQ ID NO: 879966 - RNA, 22 nt, Human
uauaggaauaaagugggguaua

SEQ ID NO: 879967 - RNA, 21 nt, Human
auuagaagguauuuagggccu

SEQ ID NO: 879968 - RNA, 22 nt, Human
ccuggcagcuguuuggcuuggc

SEQ ID NO: 879969 - RNA, 22 nt, Human
gcacccaggccggcgacugcag

SEQ ID NO: 879970 - RNA, 22 nt, Human
uuuuuaagagauucuccagucu

SEQ ID NO: 879971 - RNA, 22 nt, Human
agagcuuuagcugcuggucugg

SEQ ID NO: 879972 - RNA, 22 nt, Human
uccugcuggaauggaaaaugaa

SEQ ID NO: 879973 - RNA, 22 nt, Human
cucugggacaucccuuggccua

SEQ ID NO: 879974 - RNA, 22 nt, Human
cgcccagggcaggaggccgcuc

SEQ ID NO: 879975 - RNA, 22 nt, Human
aagguguggaguggugcgacug

SEQ ID NO: 879976 - RNA, 22 nt, Human
agcuucucucuuugcacucaca

SEQ ID NO: 879977 - RNA, 22 nt, Human
auguuacagaaagcaaagauga

SEQ ID NO: 879978 - RNA, 22 nt, Human
ucccugcugcacucacaccuac

SEQ ID NO: 879979 - RNA, 22 nt, Human
cugaggagaacaaugagaucaa

SEQ ID NO: 879980 - RNA, 22 nt, Human
ccagagaguaggaggcauuauu

SEQ ID NO: 879981 - RNA, 22 nt, Human
cuggacuucucuucaaagacag

SEQ ID NO: 879982 - RNA, 21 nt, Human
cagugccagccacaggacgcc

SEQ ID NO: 879983 - RNA, 20 nt, Human
uuuccuaagugguuugcuga

SEQ ID NO: 879984 - RNA, 22 nt, Human
uacaagacgagggaaguucuuu

SEQ ID NO: 879985 - RNA, 22 nt, Human
cuuggaacaaauuaaacaauac

SEQ ID NO: 879986 - RNA, 22 nt, Human
ggcugccuccugcugggcugga

SEQ ID NO: 879987 - RNA, 22 nt, Human
agggaaugugaaaacaccucuc

SEQ ID NO: 879988 - RNA, 22 nt, Human
gcugaagcugcagcaggaggaa

SEQ ID NO: 879989 - RNA, 22 nt, Human
agggcacaucugcugggaaugg

SEQ ID NO: 879990 - RNA, 22 nt, Human
uaaagcuuguauugcaauauuu

SEQ ID NO: 879991 - RNA, 22 nt, Human
ucagggcacauucugcaguggc

SEQ ID NO: 879992 - RNA, 22 nt, Human
ucaguagucuaggauuucaccu

SEQ ID NO: 879993 - RNA, 22 nt, Human
ucuagagcuggaguagaaugug

SEQ ID NO: 879994 - RNA, 23 nt, Human
uuucaguugagaaugcacggacc

SEQ ID NO: 879995 - RNA, 22 nt, Human
auaugcaagcacauagaauacu

SEQ ID NO: 879996 - RNA, 22 nt, Human
ucacuaaugagcuaaggaaaag

SEQ ID NO: 879997 - RNA, 19 nt, Human
aggcuugguugcagcaagc

SEQ ID NO: 879998 - RNA, 22 nt, Human
auggcagugauaggcuagugau

SEQ ID NO: 879999 - RNA, 22 nt, Human
agaugugauguuaggcccuugg

SEQ ID NO: 880000 - RNA, 22 nt, Human
cucagcaccccgacaggacauu

SEQ ID NO: 880001 - RNA, 20 nt, Human
ucaguguauccucaguggcu

SEQ ID NO: 880002 - RNA, 22 nt, Human
cacagcuggggaagcugaggcc

SEQ ID NO: 880003 - RNA, 22 nt, Human
aggacuucaucaccuguauaaa

SEQ ID NO: 880004 - RNA, 21 nt, Human
cagagcuguccaaacccugac

SEQ ID NO: 880005 - RNA, 22 nt, Human
agcugguucaguuucugggccu

SEQ ID NO: 880006 - RNA, 22 nt, Human
cuacauucugggaaaucagaug

SEQ ID NO: 880007 - RNA, 22 nt, Human
aggcagcugcccucuccuuccu

SEQ ID NO: 880008 - RNA, 19 nt, Human
ucaacccucuuugccuagc

SEQ ID NO: 880009 - RNA, 22 nt, Human
ucugagaacaugcuuugaucau

SEQ ID NO: 880010 - RNA, 22 nt, Human
caaauccucaccucaucaugaa

SEQ ID NO: 880011 - RNA, 22 nt, Human
acacaguauuacaauaggugcu

SEQ ID NO: 880012 - RNA, 22 nt, Human
ucugcauauuguuaauggaaug

SEQ ID NO: 880013 - RNA, 22 nt, Human
cacacaccaaucaaaugucaga

SEQ ID NO: 880014 - RNA, 20 nt, Human
gcccaggaucucugaggcau

SEQ ID NO: 880015 - RNA, 22 nt, Human
agugugacaaaucuauggcuca

SEQ ID NO: 880016 - RNA, 22 nt, Human
cgcaggugaaagaggcugggca

SEQ ID NO: 880017 - RNA, 22 nt, Human
aaggcugaccaguuuacacuuu

SEQ ID NO: 880018 - RNA, 22 nt, Human
uggaaagguaggauuucaagac

SEQ ID NO: 880019 - RNA, 22 nt, Human
aaauucuuucauggcuaauaag

SEQ ID NO: 880020 - RNA, 22 nt, Human
ccuggccgguaucccaccuccu

SEQ ID NO: 880021 - RNA, 22 nt, Human
uacuuguuuuguguuccuaaac

SEQ ID NO: 880022 - RNA, 23 nt, Human
agugagcagcuguagggcaagga

SEQ ID NO: 880023 - RNA, 22 nt, Human
ucugagaauggagcuaaaaauc

SEQ ID NO: 880024 - RNA, 22 nt, Human
ugaaauuccaggagaguuaaaa

SEQ ID NO: 880025 - RNA, 22 nt, Human
uccuuagagauacugucuugaa

SEQ ID NO: 880026 - RNA, 22 nt, Human
ugucccagcagcuggguucucu

SEQ ID NO: 880027 - RNA, 22 nt, Human
agggagaagguuuagcugugag

SEQ ID NO: 880028 - RNA, 22 nt, Human
uccaauguuauuaucuagaggc

SEQ ID NO: 880029 - RNA, 22 nt, Human
aggcugcucaguagauggagcu

SEQ ID NO: 880030 - RNA, 22 nt, Human
auugauucuguaagucaacaau

SEQ ID NO: 880031 - RNA, 22 nt, Human
cagagguagaaggcaugcagug

SEQ ID NO: 880032 - RNA, 22 nt, Human
uuagaaucuaacauucuuaucu

SEQ ID NO: 880033 - RNA, 18 nt, Human
aggauauuaagaguacag

SEQ ID NO: 880034 - RNA, 22 nt, Human
ugggaccugcccuggccccauc

SEQ ID NO: 880035 - RNA, 22 nt, Human
aucuguauauuuuucaaugcaa

SEQ ID NO: 880036 - RNA, 22 nt, Human
accagagacugcauuucucuga

SEQ ID NO: 880037 - RNA, 22 nt, Human
cucuggcucccgcagcccccau

SEQ ID NO: 880038 - RNA, 22 nt, Human
uacaaagauggaagguuauguu

SEQ ID NO: 880039 - RNA, 22 nt, Human
gccucugggcucugccccuggc

SEQ ID NO: 880040 - RNA, 22 nt, Human
uuccugggcuuuccccucuggu

SEQ ID NO: 880041 - RNA, 22 nt, Human
gggacacagguaucucaaauga

SEQ ID NO: 880042 - RNA, 22 nt, Human
uaguguaaacuuaugcugagcc

SEQ ID NO: 880043 - RNA, 22 nt, Human
gcagggaaguuugaucuuuuuc

SEQ ID NO: 880044 - RNA, 22 nt, Human
ugcuggcuggaucagagauugg

SEQ ID NO: 880045 - RNA, 22 nt, Human
gguaacuuacagggccccuuua

SEQ ID NO: 880046 - RNA, 22 nt, Human
uuuauacuccacucugcaagcg

SEQ ID NO: 880047 - RNA, 22 nt, Human
ucuucaaagaauuuuaguaauu

SEQ ID NO: 880048 - RNA, 22 nt, Human
aagaagcuauacauaauuuggg

SEQ ID NO: 880049 - RNA, 22 nt, Human
auaaaagucugcuuauuugggc

SEQ ID NO: 880050 - RNA, 23 nt, Human
gcucuggagcugggccuggcagg

SEQ ID NO: 880051 - RNA, 22 nt, Human
ugagcuggagucuguggcuccu

SEQ ID NO: 880052 - RNA, 21 nt, Human
ucuccaguauccuucucugag

SEQ ID NO: 880053 - RNA, 22 nt, Human
augggaucuugcccugagggcu

SEQ ID NO: 880054 - RNA, 22 nt, Human
ugaaaagugaucauggauuagg

SEQ ID NO: 880055 - RNA, 23 nt, Human
agaaguucaagaccagccugccc

SEQ ID NO: 880056 - RNA, 22 nt, Human
ggcagcaaaaagccugguugaa

SEQ ID NO: 880057 - RNA, 22 nt, Human
gcuccuggugcaaaguuucuuc

SEQ ID NO: 880058 - RNA, 22 nt, Human
auggcucugcugggcaaagcaa

SEQ ID NO: 880059 - RNA, 22 nt, Human
agagaagggccuguauguaauc

SEQ ID NO: 880060 - RNA, 22 nt, Human
aaagccaguuucuggaaguacc

SEQ ID NO: 880061 - RNA, 22 nt, Human
gcucuccacugaccacggggca

SEQ ID NO: 880062 - RNA, 18 nt, Human
gccugggaggaggaaaug

SEQ ID NO: 880063 - RNA, 22 nt, Human
ucaaguaugacaucaaguuucu

SEQ ID NO: 880064 - RNA, 22 nt, Human
guggcagagggugagcuggacu

SEQ ID NO: 880065 - RNA, 22 nt, Human
cuucagaaugggacuguguuug

SEQ ID NO: 880066 - RNA, 18 nt, Human
uggcuucuauuuuacuca

SEQ ID NO: 880067 - RNA, 22 nt, Human
gaagaaucugaggacagucauu

SEQ ID NO: 880068 - RNA, 22 nt, Human
uggggaggaagucagauuucag

SEQ ID NO: 880069 - RNA, 22 nt, Human
auaagagucuuguuuucuuauu

SEQ ID NO: 880070 - RNA, 22 nt, Human
guacaucuuuaaauuguucagu

SEQ ID NO: 880071 - RNA, 22 nt, Human
aaagauguuuuauaaguuaugg

SEQ ID NO: 880072 - RNA, 22 nt, Human
auuuaugacagaagauaugcug

SEQ ID NO: 880073 - RNA, 21 nt, Human
agagagggagaugaaacaucc

SEQ ID NO: 880074 - RNA, 22 nt, Human
cccucacagucuaggagcagcu

SEQ ID NO: 880075 - RNA, 22 nt, Human
ugcuuuauuaagagagaaauuu

SEQ ID NO: 880076 - RNA, 22 nt, Human
cagaugagggcuggaggugagc

SEQ ID NO: 880077 - RNA, 22 nt, Human
augguugaaucaagguagacaa

SEQ ID NO: 880078 - RNA, 22 nt, Human
cacagcugcccccucucuaacu

SEQ ID NO: 880079 - RNA, 22 nt, Human
gacaguuuugcugaaauugagc

SEQ ID NO: 880080 - RNA, 21 nt, Human
cugggcucaagcaauccuuuc

SEQ ID NO: 880081 - RNA, 22 nt, Human
agcccuguuaacuguuuugaag

SEQ ID NO: 880082 - RNA, 22 nt, Human
aggcacugacagauucuguguc

SEQ ID NO: 880083 - RNA, 22 nt, Human
aggccaaagcacagagcuggaa

SEQ ID NO: 880084 - RNA, 22 nt, Human
cgugucuguguaugcaggccgu

SEQ ID NO: 880085 - RNA, 18 nt, Human
uccaggccugaagugucc

SEQ ID NO: 880086 - RNA, 21 nt, Human
aauauccaaaugauuagaucu

SEQ ID NO: 880087 - RNA, 22 nt, Human
acacugugcuuagaugcugaac

SEQ ID NO: 880088 - RNA, 22 nt, Human
uggaagaauagaagaugguuga

SEQ ID NO: 880089 - RNA, 22 nt, Human
gcucaggccuccagaggggcaa

SEQ ID NO: 880090 - RNA, 22 nt, Human
caagcacuguggcacucgcagg

SEQ ID NO: 880091 - RNA, 22 nt, Human
aucaacugccccaaauguauuu

SEQ ID NO: 880092 - RNA, 22 nt, Human
cugcagcugggccagggccacc

SEQ ID NO: 880093 - RNA, 22 nt, Human
ggcaguggguuccccaaggcac

SEQ ID NO: 880094 - RNA, 22 nt, Human
guguccagggcuggaagugagg

SEQ ID NO: 880095 - RNA, 21 nt, Human
gagaaucaggaaggauugaug

SEQ ID NO: 880096 - RNA, 22 nt, Human
ugucuucaugccugaaagaaga

SEQ ID NO: 880097 - RNA, 22 nt, Human
auucucuagucucuuccauaaa

SEQ ID NO: 880098 - RNA, 17 nt, Human
ugggggcgccagggucu

SEQ ID NO: 880099 - RNA, 22 nt, Human
aaaauggucucagcuggcacca

SEQ ID NO: 880100 - RNA, 22 nt, Human
auccauuuaauugaggggaagg

SEQ ID NO: 880101 - RNA, 22 nt, Human
aagcagcagccugaaguacguc

SEQ ID NO: 880102 - RNA, 22 nt, Human
gugaacugcugaguuuuaucau

SEQ ID NO: 880103 - RNA, 22 nt, Human
uguucucacuggaugcuucaca

SEQ ID NO: 880104 - RNA, 22 nt, Human
ucauggauaaaauauugguuaa

SEQ ID NO: 880105 - RNA, 22 nt, Human
aaggaggguucccagguccugg

SEQ ID NO: 880106 - RNA, 22 nt, Human
gcuguccagcuccagccagcca

SEQ ID NO: 880107 - RNA, 22 nt, Human
uuucuaaguguguuucauagga

SEQ ID NO: 880108 - RNA, 22 nt, Human
uguuuccuaagugucucugaag

SEQ ID NO: 880109 - RNA, 20 nt, Human
gggcuccagcugugauucuu

SEQ ID NO: 880110 - RNA, 22 nt, Human
cugagcaggauauucacagcag

SEQ ID NO: 880111 - RNA, 22 nt, Human
acagugugcaagaaauggggga

SEQ ID NO: 880112 - RNA, 22 nt, Human
uacaguaaucuggacaugauuu

SEQ ID NO: 880113 - RNA, 22 nt, Human
caggaacauguuggaaagaaau

SEQ ID NO: 880114 - RNA, 22 nt, Human
ugcagcuggauuuaucuuuucc

SEQ ID NO: 880115 - RNA, 22 nt, Human
ucaggaaggagcuggccugcca

SEQ ID NO: 880116 - RNA, 22 nt, Human
cccaggucugccagccuguggg

SEQ ID NO: 880117 - RNA, 22 nt, Human
auuccaaaggcuggccuggagg

SEQ ID NO: 880118 - RNA, 22 nt, Human
cucuucaguaaaugacacuguu

SEQ ID NO: 880119 - RNA, 22 nt, Human
uggcuccauucuuuaugaguug

SEQ ID NO: 880120 - RNA, 22 nt, Human
ucccugagggcagcucaagucc

SEQ ID NO: 880121 - RNA, 22 nt, Human
ugaaugagucaaucauuuagcu

SEQ ID NO: 880122 - RNA, 22 nt, Human
aaauggcaaucagcagaagcua

SEQ ID NO: 880123 - RNA, 22 nt, Human
aaucacauugaaucugcuaccu

SEQ ID NO: 880124 - RNA, 22 nt, Human
uguacuguaugccaggcacuau

SEQ ID NO: 880125 - RNA, 22 nt, Human
acugucaccuaaauuuucauug

SEQ ID NO: 880126 - RNA, 22 nt, Human
auaaagcaaauaggacuauugc

SEQ ID NO: 880127 - RNA, 19 nt, Human
ucagaauucugucucuuga

SEQ ID NO: 880128 - RNA, 22 nt, Human
aaagcagcaacgugcauauaac

SEQ ID NO: 880129 - RNA, 22 nt, Human
gugcuguaucagaaucugcucu

SEQ ID NO: 880130 - RNA, 22 nt, Human
auuugcuuguaaauguaugccu

SEQ ID NO: 880131 - RNA, 22 nt, Human
gucucugggugugugaugccaa

SEQ ID NO: 880132 - RNA, 23 nt, Human
augugcaaagugcuacaguauag

SEQ ID NO: 880133 - RNA, 22 nt, Human
aagcuaaguggaagucuuauca

SEQ ID NO: 880134 - RNA, 22 nt, Human
acaguuaucuuugaaauagaga

SEQ ID NO: 880135 - RNA, 23 nt, Human
agcaaugcugggagacucuguaa

SEQ ID NO: 880136 - RNA, 22 nt, Human
uauauaauuuucugccauaucc

SEQ ID NO: 880137 - RNA, 22 nt, Human
uuuucuuauggugaagcacaaa

SEQ ID NO: 880138 - RNA, 22 nt, Human
uuaucguacgcuucagaaauuu

SEQ ID NO: 880139 - RNA, 22 nt, Human
gaaaaguauguuuauuuugacu

SEQ ID NO: 880140 - RNA, 22 nt, Human
acagaauagagacugccugcuc

SEQ ID NO: 880141 - RNA, 22 nt, Human
uaaguucugaagaggcgaggua

SEQ ID NO: 880142 - RNA, 22 nt, Human
ccccuucuggucuucaauggug

SEQ ID NO: 880143 - RNA, 22 nt, Human
aagaguaaauucaggacuuuaa

SEQ ID NO: 880144 - RNA, 22 nt, Human
gucugccucuauugccuaccug

SEQ ID NO: 880145 - RNA, 22 nt, Human
agugaaaugauaguguaaauac

SEQ ID NO: 880146 - RNA, 22 nt, Human
ccaaggcauauggcugaaacca

SEQ ID NO: 880147 - RNA, 22 nt, Human
ccuggagagcucgggccaggca

SEQ ID NO: 880148 - RNA, 23 nt, Human
ccagugugguagguccacaggug

SEQ ID NO: 880149 - RNA, 22 nt, Human
ucagggaagacuucuuagagga

SEQ ID NO: 880150 - RNA, 22 nt, Human
uguggggaucuucuagcuuuuc

SEQ ID NO: 880151 - RNA, 22 nt, Human
agcagaaccacagcacuguuga

SEQ ID NO: 880152 - RNA, 22 nt, Human
ugguauuucugugcccagcuca

SEQ ID NO: 880153 - RNA, 22 nt, Human
gcagagguggaugcaauugggg

SEQ ID NO: 880154 - RNA, 22 nt, Human
uccaggagagguguggggacug

SEQ ID NO: 880155 - RNA, 20 nt, Human
ccugcuguuuccauggggcc

SEQ ID NO: 880156 - RNA, 22 nt, Human
uucauugagcuguacacuuagg

SEQ ID NO: 880157 - RNA, 22 nt, Human
ugcuuaaacacauacauacaua

SEQ ID NO: 880158 - RNA, 22 nt, Human
aaggaagaagggaaguuacuua

SEQ ID NO: 880159 - RNA, 18 nt, Human
gcaggcccuguuucuggg

SEQ ID NO: 880160 - RNA, 22 nt, Human
ggagcuggcagcgcaacccaga

SEQ ID NO: 880161 - RNA, 22 nt, Human
cagaggaggccaccgcauaggc

SEQ ID NO: 880162 - RNA, 22 nt, Human
cuugcuguugugggagacuggg

SEQ ID NO: 880163 - RNA, 22 nt, Human
gggcugcaaugcuucaguuguu

SEQ ID NO: 880164 - RNA, 22 nt, Human
agcagcagccguagccuuauua

SEQ ID NO: 880165 - RNA, 22 nt, Human
aguuucuagccucacuguuuag

SEQ ID NO: 880166 - RNA, 19 nt, Human
uuuuccuucuauauguuuc

SEQ ID NO: 880167 - RNA, 22 nt, Human
uaguaguaauuguuaucuuauu

SEQ ID NO: 880168 - RNA, 22 nt, Human
acacacagaaggaagccccacu

SEQ ID NO: 880169 - RNA, 22 nt, Human
aaguugauuuaaacuacuaguc

SEQ ID NO: 880170 - RNA, 17 nt, Human
ucucaggggcuagcccu

SEQ ID NO: 880171 - RNA, 22 nt, Human
cagaggcgaggcagcugaaccu

SEQ ID NO: 880172 - RNA, 22 nt, Human
augggaggcagacacuaaguuc

SEQ ID NO: 880173 - RNA, 22 nt, Human
cuaucaaacagccauuaauaua

SEQ ID NO: 880174 - RNA, 22 nt, Human
aaaagagcaaacauguaauagu

SEQ ID NO: 880175 - RNA, 22 nt, Human
ugucugaaggcagguggagaac

SEQ ID NO: 880176 - RNA, 20 nt, Human
ccucacagggcagagagggg

SEQ ID NO: 880177 - RNA, 22 nt, Human
augcaucaauuaggggcagaca

SEQ ID NO: 880178 - RNA, 22 nt, Human
uccuggugucgccuggucaguu

SEQ ID NO: 880179 - RNA, 22 nt, Human
cuagcaucagaugagaagcugu

SEQ ID NO: 880180 - RNA, 22 nt, Human
gcacagagagcagugggggaca

SEQ ID NO: 880181 - RNA, 22 nt, Human
gaaguuuuagucaaaauguaga

SEQ ID NO: 880182 - RNA, 22 nt, Human
ugucuucacaaagcagaaggga

SEQ ID NO: 880183 - RNA, 22 nt, Human
aaugcuuauaacguuagaaugu

SEQ ID NO: 880184 - RNA, 22 nt, Human
aaugacaagacauagucucuga

SEQ ID NO: 880185 - RNA, 22 nt, Human
uucagcaguuucugagaagcaa

SEQ ID NO: 880186 - RNA, 22 nt, Human
cauggcagccugcccugcuugc

SEQ ID NO: 880187 - RNA, 21 nt, Human
ugccuggccuuugcuuuuccu

SEQ ID NO: 880188 - RNA, 22 nt, Human
acucauuugcaugaugugcuau

SEQ ID NO: 880189 - RNA, 22 nt, Human
caggaaaugggucguuuuauaa

SEQ ID NO: 880190 - RNA, 19 nt, Human
agccuggagggcuggucac

SEQ ID NO: 880191 - RNA, 22 nt, Human
acaaaacaguguuccugccccu

SEQ ID NO: 880192 - RNA, 22 nt, Human
cacugagggcggagcccaggga

SEQ ID NO: 880193 - RNA, 22 nt, Human
auguguuuugguggaucauuca

SEQ ID NO: 880194 - RNA, 22 nt, Human
aagauucccagagaaguuccac

SEQ ID NO: 880195 - RNA, 22 nt, Human
gcccagccuccaagcuccaagg

SEQ ID NO: 880196 - RNA, 22 nt, Human
uggcacugagcagccgcggcag

SEQ ID NO: 880197 - RNA, 22 nt, Human
cuagucucuggaggucagggcu

SEQ ID NO: 880198 - RNA, 23 nt, Human
agaguggccuacucacacucauu

SEQ ID NO: 880199 - RNA, 22 nt, Human
acccagaggcggagguugcagu

SEQ ID NO: 880200 - RNA, 22 nt, Human
acagauuuuucagcuccugugu

SEQ ID NO: 880201 - RNA, 22 nt, Human
gaaacugugaggaucuuaacuu

SEQ ID NO: 880202 - RNA, 22 nt, Human
aaggaaagacauauaaaugacu

SEQ ID NO: 880203 - RNA, 22 nt, Human
ugggacaggaugaccagaaggu

SEQ ID NO: 880204 - RNA, 22 nt, Human
guccugagaugucacaagguuu

SEQ ID NO: 880205 - RNA, 22 nt, Human
cacagaacauccuuagcucaug

SEQ ID NO: 880206 - RNA, 22 nt, Human
acaggcacuuugacaugccauc

SEQ ID NO: 880207 - RNA, 17 nt, Human
agagcauguguaggagc

SEQ ID NO: 880208 - RNA, 22 nt, Human
aguuugauggcuuaauaguaga

SEQ ID NO: 880209 - RNA, 22 nt, Human
acagagacaaauguuaguaguu

SEQ ID NO: 880210 - RNA, 22 nt, Human
ggcagcaucucuggcagcagcu

SEQ ID NO: 880211 - RNA, 22 nt, Human
uuauuuugccacaggugaccuu

SEQ ID NO: 880212 - RNA, 22 nt, Human
aguuauaaaaggagcacugauu

SEQ ID NO: 880213 - RNA, 22 nt, Human
agggcucaguaaacgguggauu

SEQ ID NO: 880214 - RNA, 22 nt, Human
ccagcagcagcguccaaggaga

SEQ ID NO: 880215 - RNA, 22 nt, Human
aggugggcaaugaggccugagu

SEQ ID NO: 880216 - RNA, 20 nt, Human
aguagcagugugacauugac

SEQ ID NO: 880217 - RNA, 22 nt, Human
aaagcaaucuaguuccaauucu

SEQ ID NO: 880218 - RNA, 22 nt, Human
ugcuucugcuuuacuugguuca

SEQ ID NO: 880219 - RNA, 22 nt, Human
ugcuucuccauugaugcuaagu

SEQ ID NO: 880220 - RNA, 22 nt, Human
aagaagagaaaugugcugcugg

SEQ ID NO: 880221 - RNA, 22 nt, Human
uagcuaauggugaagauucaga

SEQ ID NO: 880222 - RNA, 22 nt, Human
ccacugcccccugaagaccagg

SEQ ID NO: 880223 - RNA, 22 nt, Human
aagaagucuggagcaaugcaau

SEQ ID NO: 880224 - RNA, 22 nt, Human
uauuugucacuagaaaggguaa

SEQ ID NO: 880225 - RNA, 22 nt, Human
uagggcuguuuaaaagugaggu

SEQ ID NO: 880226 - RNA, 17 nt, Human
acauuuccuaacugaag

SEQ ID NO: 880227 - RNA, 22 nt, Human
aaaguguagagacuuuggaacc

SEQ ID NO: 880228 - RNA, 19 nt, Human
gugguuuucugaggagucu

SEQ ID NO: 880229 - RNA, 22 nt, Human
auuaggaaauguguugcaagca

SEQ ID NO: 880230 - RNA, 19 nt, Human
uggcccagaugguccuggg

SEQ ID NO: 880231 - RNA, 22 nt, Human
auguucaacaguuugcacacau

SEQ ID NO: 880232 - RNA, 23 nt, Human
ucacagggcacuggcugggguug

SEQ ID NO: 880233 - RNA, 22 nt, Human
aguuuacauaaaaaggcagagg

SEQ ID NO: 880234 - RNA, 22 nt, Human
gggcuggagccagcuguggcug

SEQ ID NO: 880235 - RNA, 19 nt, Human
ccucugccagcccgccucu

SEQ ID NO: 880236 - RNA, 22 nt, Human
caggccagaguccaacuccaga

SEQ ID NO: 880237 - RNA, 22 nt, Human
caucuauuuucugugagguauc

SEQ ID NO: 880238 - RNA, 22 nt, Human
gaacuucacgauagccaaagcu

SEQ ID NO: 880239 - RNA, 22 nt, Human
ccagggaggguccuguggcuuc

SEQ ID NO: 880240 - RNA, 22 nt, Human
uguaaauugaaggaaauuugug

SEQ ID NO: 880241 - RNA, 22 nt, Human
auggguaaagcaggaagagagu

SEQ ID NO: 880242 - RNA, 22 nt, Human
ggcugugaaguagcaggggcag

SEQ ID NO: 880243 - RNA, 22 nt, Human
uaggaaauugccaauauaugac

SEQ ID NO: 880244 - RNA, 22 nt, Human
augaaacagugaauuagucaag

SEQ ID NO: 880245 - RNA, 22 nt, Human
ucaauucugcauacauuucacu

SEQ ID NO: 880246 - RNA, 22 nt, Human
uagcauuauuuccucuuuuugu

SEQ ID NO: 880247 - RNA, 22 nt, Human
auuuuacuucauuugaaaugcc

SEQ ID NO: 880248 - RNA, 22 nt, Human
uguauacauguguucaugcaug

SEQ ID NO: 880249 - RNA, 22 nt, Human
cauucaguggaguauuauucag

SEQ ID NO: 880250 - RNA, 22 nt, Human
ggagagaaauugagguagcaag

SEQ ID NO: 880251 - RNA, 22 nt, Human
uacauugacugugugcaucaca

SEQ ID NO: 880252 - RNA, 22 nt, Human
guuuaaguuucagaagcuaaga

SEQ ID NO: 880253 - RNA, 22 nt, Human
uucuuucucaacaugaauguuu

SEQ ID NO: 880254 - RNA, 22 nt, Human
ucucaguccaaaugagagguug

SEQ ID NO: 880255 - RNA, 22 nt, Human
cuaagacucugcaaaucagcuu

SEQ ID NO: 880256 - RNA, 22 nt, Human
ccagucuggcaggagggggaac

SEQ ID NO: 880257 - RNA, 22 nt, Human
uuacagaaguauugagagaucc

SEQ ID NO: 880258 - RNA, 22 nt, Human
uggcugcagaucaagggcaggc

SEQ ID NO: 880259 - RNA, 22 nt, Human
ugagggagcacacacugaagug

SEQ ID NO: 880260 - RNA, 22 nt, Human
auaauccauuaauuaaugacca

SEQ ID NO: 880261 - RNA, 22 nt, Human
ugucugaaagaggacgagcugg

SEQ ID NO: 880262 - RNA, 22 nt, Human
guggggugggcugaguuaggcc

SEQ ID NO: 880263 - RNA, 22 nt, Human
cagcagaaacccagcaaagcca

SEQ ID NO: 880264 - RNA, 18 nt, Human
gagagggaucccucagga

SEQ ID NO: 880265 - RNA, 22 nt, Human
auacaucauuucccaucaaucg

SEQ ID NO: 880266 - RNA, 22 nt, Human
gacaccauuaccuuucuauauu

SEQ ID NO: 880267 - RNA, 22 nt, Human
aagcuguuguucauccugaauu

SEQ ID NO: 880268 - RNA, 22 nt, Human
cauaauuacugauaugcugauu

SEQ ID NO: 880269 - RNA, 22 nt, Human
auggcacagugggaaaugaccu

SEQ ID NO: 880270 - RNA, 17 nt, Human
gcacagugauauuauuu

SEQ ID NO: 880271 - RNA, 22 nt, Human
uacaauguucauagcuuuggca

SEQ ID NO: 880272 - RNA, 22 nt, Human
cugugugcaggugcuggguacc

SEQ ID NO: 880273 - RNA, 22 nt, Human
ggccugucucacccccgggugc

SEQ ID NO: 880274 - RNA, 22 nt, Human
uuucucaaggugucauguauuu

SEQ ID NO: 880275 - RNA, 22 nt, Human
gguggcagaauaauugaagguc

SEQ ID NO: 880276 - RNA, 22 nt, Human
augcauucuguagagcauuuau

SEQ ID NO: 880277 - RNA, 22 nt, Human
ugauguuuaauacuaugcuuuu

SEQ ID NO: 880278 - RNA, 22 nt, Human
aggcuacaaauaagcauguaau

SEQ ID NO: 880279 - RNA, 22 nt, Human
aucuucaaagcacaucguuugu

SEQ ID NO: 880280 - RNA, 22 nt, Human
auuaugaaguugagggacccug

SEQ ID NO: 880281 - RNA, 22 nt, Human
acagcacagagugguauggcug

SEQ ID NO: 880282 - RNA, 22 nt, Human
uucuguacuucaggggcucugu

SEQ ID NO: 880283 - RNA, 22 nt, Human
aauaacagagucuucaagauag

SEQ ID NO: 880284 - RNA, 22 nt, Human
gagaggccauggggugggaugc

SEQ ID NO: 880285 - RNA, 22 nt, Human
uuuuacuuuggauacaguacuu

SEQ ID NO: 880286 - RNA, 22 nt, Human
agcugguggaagggagcccaaa

SEQ ID NO: 880287 - RNA, 22 nt, Human
agacaaaugaacaaauauguga

SEQ ID NO: 880288 - RNA, 22 nt, Human
uccugagauaggaguugaaggc

SEQ ID NO: 880289 - RNA, 22 nt, Human
gagauggagucuuuuucuguca

SEQ ID NO: 880290 - RNA, 22 nt, Human
ccugguguugccaaucugugcc

SEQ ID NO: 880291 - RNA, 22 nt, Human
aggaauugagauccuagguuuu

SEQ ID NO: 880292 - RNA, 22 nt, Human
cugaagccaguuugcugcccuu

SEQ ID NO: 880293 - RNA, 22 nt, Human
augcccuuaugccagaggcaau

SEQ ID NO: 880294 - RNA, 22 nt, Human
ccacagugaguuagauugacca

SEQ ID NO: 880295 - RNA, 22 nt, Human
agggugcguucuaugagaaucu

SEQ ID NO: 880296 - RNA, 22 nt, Human
cuggcuuucucugugguguuca

SEQ ID NO: 880297 - RNA, 22 nt, Human
uuucccaguuagugaagacaug

SEQ ID NO: 880298 - RNA, 22 nt, Human
ucuagaagggugccgaucuuag

SEQ ID NO: 880299 - RNA, 22 nt, Human
aaugaagaaauggacaucuuua

SEQ ID NO: 880300 - RNA, 22 nt, Human
ugaaugcuuuggagccuucuaa

SEQ ID NO: 880301 - RNA, 22 nt, Human
gccagguggagguugcagugag

SEQ ID NO: 880302 - RNA, 22 nt, Human
uaagaaauuuaguuauagaaug

SEQ ID NO: 880303 - RNA, 20 nt, Human
uauuacacacaaugagcagu

SEQ ID NO: 880304 - RNA, 22 nt, Human
ucuuuggauuaaaauauuugua

SEQ ID NO: 880305 - RNA, 19 nt, Human
uaguguuuuucuggagcag

SEQ ID NO: 880306 - RNA, 23 nt, Human
uuauuuggauuuuaguggaaaga

SEQ ID NO: 880307 - RNA, 22 nt, Human
aaaauuauggaguaucccaaag

SEQ ID NO: 880308 - RNA, 22 nt, Human
uucaacuuuaugcauauguauu

SEQ ID NO: 880309 - RNA, 22 nt, Human
gcccaggaguugguggcugcag

SEQ ID NO: 880310 - RNA, 22 nt, Human
caccucuuugauuugaggcaag

SEQ ID NO: 880311 - RNA, 22 nt, Human
augcucucuguccugcucagag

SEQ ID NO: 880312 - RNA, 22 nt, Human
aggcagcuggaaaacuccaggc

SEQ ID NO: 880313 - RNA, 22 nt, Human
augcuacauuuugguuuauaaa

SEQ ID NO: 880314 - RNA, 22 nt, Human
uauucucugcagcugaauguuu

SEQ ID NO: 880315 - RNA, 22 nt, Human
uccucccuucucacugggaagg

SEQ ID NO: 880316 - RNA, 22 nt, Human
gaaagugcuuuugagugugugc

SEQ ID NO: 880317 - RNA, 22 nt, Human
aagacacagcgaaauguuccug

SEQ ID NO: 880318 - RNA, 22 nt, Human
uauuacagggcuaguuaugagu

SEQ ID NO: 880319 - RNA, 22 nt, Human
aagauaaacucuugauuucuga

SEQ ID NO: 880320 - RNA, 19 nt, Human
aaagauguccuuuugggcu

SEQ ID NO: 880321 - RNA, 22 nt, Human
cagcuucaacugcacagucaac

SEQ ID NO: 880322 - RNA, 22 nt, Human
cuguggcucaauugccuacuga

SEQ ID NO: 880323 - RNA, 17 nt, Human
ugguccagguggagcca

SEQ ID NO: 880324 - RNA, 17 nt, Human
cuuggcaccucugccau

SEQ ID NO: 880325 - RNA, 22 nt, Human
gagggccucugcugcuccacau

SEQ ID NO: 880326 - RNA, 22 nt, Human
aaagaaucagaagucucaaaca

SEQ ID NO: 880327 - RNA, 22 nt, Human
ggcauuuuugacaaagagcaau

SEQ ID NO: 880328 - RNA, 22 nt, Human
ucccuggguccugcuugcucuc

SEQ ID NO: 880329 - RNA, 22 nt, Human
ccuuugcauucuagauguuuag

SEQ ID NO: 880330 - RNA, 22 nt, Human
aaguaacagaggggguguugcu

SEQ ID NO: 880331 - RNA, 22 nt, Human
cagcaagugauggaaaucagag

SEQ ID NO: 880332 - RNA, 22 nt, Human
uccagggccccccaguugcacg

SEQ ID NO: 880333 - RNA, 22 nt, Human
uuucauugugaugcuuuuauca

SEQ ID NO: 880334 - RNA, 23 nt, Human
uuuauuuauuuaggcugagggau

SEQ ID NO: 880335 - RNA, 22 nt, Human
uccuagaggaugguaggaagcu

SEQ ID NO: 880336 - RNA, 22 nt, Human
uuagcaaaguuugccaucuagu

SEQ ID NO: 880337 - RNA, 22 nt, Human
agcaggaaguagucuguaagca

SEQ ID NO: 880338 - RNA, 22 nt, Human
ucugcagacaggaagcugaggc

SEQ ID NO: 880339 - RNA, 22 nt, Human
cagagcagggugcaccuugggc

SEQ ID NO: 880340 - RNA, 22 nt, Human
agagcuggaaucagaccucagg

SEQ ID NO: 880341 - RNA, 22 nt, Human
uaaacacucacuucauagccau

SEQ ID NO: 880342 - RNA, 22 nt, Human
gcucccugguauugcugccacu

SEQ ID NO: 880343 - RNA, 22 nt, Human
caaguugcucugccucuguagg

SEQ ID NO: 880344 - RNA, 22 nt, Human
cuggggaggaugcuacgaccug

SEQ ID NO: 880345 - RNA, 22 nt, Human
auggcuggauuugauccauggg

SEQ ID NO: 880346 - RNA, 22 nt, Human
agugucugagccagaauuagaa

SEQ ID NO: 880347 - RNA, 22 nt, Human
agcuucaugccuaaagacagcg

SEQ ID NO: 880348 - RNA, 22 nt, Human
ggggcucaguucggacagccug

SEQ ID NO: 880349 - RNA, 22 nt, Human
cugagguaauuuuccagauaau

SEQ ID NO: 880350 - RNA, 22 nt, Human
guuccuuguauuucagacauga

SEQ ID NO: 880351 - RNA, 22 nt, Human
gaaauucacuguauuucuuggg

SEQ ID NO: 880352 - RNA, 22 nt, Human
agccacagggggugagggacaa

SEQ ID NO: 880353 - RNA, 20 nt, Human
aucaaaauccuauugagguu

SEQ ID NO: 880354 - RNA, 22 nt, Human
agaaaguucacugguauauuuu

SEQ ID NO: 880355 - RNA, 22 nt, Human
agguaaaauagauaguauuucu

SEQ ID NO: 880356 - RNA, 20 nt, Human
ccagagcugauggcugcccg

SEQ ID NO: 880357 - RNA, 22 nt, Human
cagucaccuugaggacucagac

SEQ ID NO: 880358 - RNA, 22 nt, Human
uagaaaagcucuaaggccucuc

SEQ ID NO: 880359 - RNA, 22 nt, Human
ccacagugggcacagcaggacu

SEQ ID NO: 880360 - RNA, 22 nt, Human
guucuucaucauuaacacucug

SEQ ID NO: 880361 - RNA, 22 nt, Human
uacaguuuguuacauuguuagu

SEQ ID NO: 880362 - RNA, 22 nt, Human
ugccugugaucagcugaguuca

SEQ ID NO: 880363 - RNA, 22 nt, Human
uaaagcauguuucaguaagguu

SEQ ID NO: 880364 - RNA, 22 nt, Human
uccagggcuccccaacauccag

SEQ ID NO: 880365 - RNA, 22 nt, Human
aagcugcagcacagagaggugg

SEQ ID NO: 880366 - RNA, 22 nt, Human
ucaucuguugauuuuaagucuu

SEQ ID NO: 880367 - RNA, 22 nt, Human
gaagaauauucuugaucuuaga

SEQ ID NO: 880368 - RNA, 22 nt, Human
ucucacagcaucauugcucaug

SEQ ID NO: 880369 - RNA, 21 nt, Human
gcugcagggcccagggcaccc

SEQ ID NO: 880370 - RNA, 22 nt, Human
uacaggagcacaaaagaguuga

SEQ ID NO: 880371 - RNA, 22 nt, Human
uaagacacgggcugaucuaaag

SEQ ID NO: 880372 - RNA, 22 nt, Human
cagcugcaaucagaagcuaagg

SEQ ID NO: 880373 - RNA, 22 nt, Human
gcugaauaauguguaaugucuc

SEQ ID NO: 880374 - RNA, 22 nt, Human
acauauguguuguacaugcaug

SEQ ID NO: 880375 - RNA, 22 nt, Human
aaaacauuuuacugccaucuca

SEQ ID NO: 880376 - RNA, 22 nt, Human
agggcaguguggugggacugac

SEQ ID NO: 880377 - RNA, 22 nt, Human
uucaagucugaagaggacuaau

SEQ ID NO: 880378 - RNA, 14 nt, Human
gcagguggaucacc

SEQ ID NO: 880379 - RNA, 14 nt, Human
gcaggcggaucacu

SEQ ID NO: 880380 - RNA, 21 nt, Human
agacaggucagggagagguga

SEQ ID NO: 880381 - RNA, 22 nt, Human
augcuguguuugagaaccuagg

SEQ ID NO: 880382 - RNA, 19 nt, Human
uuccaguucuaaucucuuc

SEQ ID NO: 880383 - RNA, 22 nt, Human
agggaagcagcagccgccuguc

SEQ ID NO: 880384 - RNA, 22 nt, Human
cagacuguggcuucuuggaggg

SEQ ID NO: 880385 - RNA, 22 nt, Human
gaggcagcaugguaccuuggag

SEQ ID NO: 880386 - RNA, 22 nt, Human
cuggccccagaguuucacuugg

SEQ ID NO: 880387 - RNA, 22 nt, Human
cuuguuauuggaaaugucaugc

SEQ ID NO: 880388 - RNA, 22 nt, Human
gcugagccacaggcagugcacu

SEQ ID NO: 880389 - RNA, 22 nt, Human
cacaggacucgacugcagacag

SEQ ID NO: 880390 - RNA, 22 nt, Human
gucagcaagaugaaucagcagg

SEQ ID NO: 880391 - RNA, 20 nt, Human
uguaggaaggacccugucug

SEQ ID NO: 880392 - RNA, 22 nt, Human
gugaaggcagccaucgacaguu

SEQ ID NO: 880393 - RNA, 22 nt, Human
ggagccugguuacuagagccug

SEQ ID NO: 880394 - RNA, 22 nt, Human
caccaggguacaauuucgcaga

SEQ ID NO: 880395 - RNA, 22 nt, Human
uaagugaguucuugcuagauuu

SEQ ID NO: 880396 - RNA, 22 nt, Human
cucagcuucuaccuccugagug

SEQ ID NO: 880397 - RNA, 22 nt, Human
gagggcaguagccucguacccu

SEQ ID NO: 880398 - RNA, 22 nt, Human
ucagcuguaucagaaauacaau

SEQ ID NO: 880399 - RNA, 22 nt, Human
aaagagcuugcuugcuuuauau

SEQ ID NO: 880400 - RNA, 22 nt, Human
gcuggagaguaguaagcaguua

SEQ ID NO: 880401 - RNA, 22 nt, Human
uugggaaguuuaaugacagacu

SEQ ID NO: 880402 - RNA, 22 nt, Human
ccaggccugugcaaggagggag

SEQ ID NO: 880403 - RNA, 22 nt, Human
gcuuuucuagcuagaacauccg

SEQ ID NO: 880404 - RNA, 22 nt, Human
uaguauuuccuguaagcuauag

SEQ ID NO: 880405 - RNA, 19 nt, Human
cugcagcugcaccauccca

SEQ ID NO: 880406 - RNA, 22 nt, Human
ugacagcagcauagugagcaau

SEQ ID NO: 880407 - RNA, 22 nt, Human
aacaugucuuuagagaaacauu

SEQ ID NO: 880408 - RNA, 22 nt, Human
acuuuucugcagaugaucucuu

SEQ ID NO: 880409 - RNA, 22 nt, Human
gcugagggccgcauagggucau

SEQ ID NO: 880410 - RNA, 22 nt, Human
aucauugaaauguaguuucauc

SEQ ID NO: 880411 - RNA, 22 nt, Human
cagcauccuuugcugguuuccc

SEQ ID NO: 880412 - RNA, 22 nt, Human
uggcuuuacuuaaacugaauca

SEQ ID NO: 880413 - RNA, 22 nt, Human
aaacaaagcaucuugcuaugca

SEQ ID NO: 880414 - RNA, 20 nt, Human
ugggugagaguguuugcucu

SEQ ID NO: 880415 - RNA, 22 nt, Human
cauuuguugguugcugucuuau

SEQ ID NO: 880416 - RNA, 22 nt, Human
uccugagggcauuuuggugacu

SEQ ID NO: 880417 - RNA, 22 nt, Human
uguaagaaucagucuuuaaugu

SEQ ID NO: 880418 - RNA, 22 nt, Human
caguuucuucaauucagacacu

SEQ ID NO: 880419 - RNA, 22 nt, Human
aucucuuagcagucuagugacc

SEQ ID NO: 880420 - RNA, 22 nt, Human
uucuuugcccuuaaugaaauaa

SEQ ID NO: 880421 - RNA, 22 nt, Human
auucagaauugugggcaguaca

SEQ ID NO: 880422 - RNA, 22 nt, Human
gaggagaaauuauccuuggugu

SEQ ID NO: 880423 - RNA, 22 nt, Human
cacaugaaggcuggggucguga

SEQ ID NO: 880424 - RNA, 22 nt, Human
gcuucuaugcuucaagagagag

SEQ ID NO: 880425 - RNA, 22 nt, Human
ugcauauacccgcauuuacaua

SEQ ID NO: 880426 - RNA, 21 nt, Human
uccugccuuaguccagagcag

SEQ ID NO: 880427 - RNA, 22 nt, Human
ccuacaggaaauuguaucaaaa

SEQ ID NO: 880428 - RNA, 22 nt, Human
aggguggccaccaaguauguca

SEQ ID NO: 880429 - RNA, 22 nt, Human
ucaaaaauuuucugaggaugag

SEQ ID NO: 880430 - RNA, 21 nt, Human
ugggccaguagaaaggaaggc

SEQ ID NO: 880431 - RNA, 22 nt, Human
gaggagguggagucaugcagag

SEQ ID NO: 880432 - RNA, 22 nt, Human
gugaaacuucacauuuugauag

SEQ ID NO: 880433 - RNA, 22 nt, Human
aguuguauuagagaacacaaac

SEQ ID NO: 880434 - RNA, 22 nt, Human
uuugcucugacagugccagaga

SEQ ID NO: 880435 - RNA, 22 nt, Human
ugccuuaauuucccuguuuugu

SEQ ID NO: 880436 - RNA, 22 nt, Human
guuauaaaggugauaaugguca

SEQ ID NO: 880437 - RNA, 21 nt, Human
cagcuccacuaaagcagcugu

SEQ ID NO: 880438 - RNA, 22 nt, Human
cacacaggaaaauuggaauuaa

SEQ ID NO: 880439 - RNA, 22 nt, Human
ggcccagagucugcaauggagu

SEQ ID NO: 880440 - RNA, 22 nt, Human
cuccagcuuuagcucuccaggg

SEQ ID NO: 880441 - RNA, 22 nt, Human
uagagaugcccuagcugaagua

SEQ ID NO: 880442 - RNA, 22 nt, Human
ggccagugugggaguaguucuu

SEQ ID NO: 880443 - RNA, 18 nt, Human
cugagggcagccccuggg

SEQ ID NO: 880444 - RNA, 21 nt, Human
uggcucuggguaggagagugc

SEQ ID NO: 880445 - RNA, 22 nt, Human
cugacuuuuccaaauaauacuu

SEQ ID NO: 880446 - RNA, 22 nt, Human
uguacagacuuugcagugugca

SEQ ID NO: 880447 - RNA, 22 nt, Human
guuuuucuuugugugaagacaa

SEQ ID NO: 880448 - RNA, 22 nt, Human
ucauucauucuuucugaauaua

SEQ ID NO: 880449 - RNA, 22 nt, Human
gacuauuuauuuacagaaagcu

SEQ ID NO: 880450 - RNA, 22 nt, Human
ugauucugccccuuggcucugg

SEQ ID NO: 880451 - RNA, 22 nt, Human
aguccuagcccuggauccauca

SEQ ID NO: 880452 - RNA, 22 nt, Human
ccaggagcaaagaucacuggga

SEQ ID NO: 880453 - RNA, 22 nt, Human
gaggaaaugguuguucaggugg

SEQ ID NO: 880454 - RNA, 22 nt, Human
aaagccagggacagugugcaug

SEQ ID NO: 880455 - RNA, 22 nt, Human
uacccagggcuuuucugaugca

SEQ ID NO: 880456 - RNA, 22 nt, Human
auuuuguugaugguggaguagc

SEQ ID NO: 880457 - RNA, 22 nt, Human
aucacugaaugcaaagcuggga

SEQ ID NO: 880458 - RNA, 22 nt, Human
uccucagggguuucagguguac

SEQ ID NO: 880459 - RNA, 22 nt, Human
aaagaagcauaggcuagacuuc

SEQ ID NO: 880460 - RNA, 22 nt, Human
caagacuuuggaaggcugaggc

SEQ ID NO: 880461 - RNA, 22 nt, Human
aaacacugguaugauguauagu

SEQ ID NO: 880462 - RNA, 22 nt, Human
caauucaauggcaaaguauugu

SEQ ID NO: 880463 - RNA, 22 nt, Human
agauucuaccagagcuaguuug

SEQ ID NO: 880464 - RNA, 22 nt, Human
gucaggagauagggcaagcuuc

SEQ ID NO: 880465 - RNA, 22 nt, Human
cugaauauuagucaugucugau

SEQ ID NO: 880466 - RNA, 22 nt, Human
aggaagcuuguguguauugguc

SEQ ID NO: 880467 - RNA, 22 nt, Human
aaaccuucacaucuacucuaca

SEQ ID NO: 880468 - RNA, 22 nt, Human
cuucccuuuagcauauaguagu

SEQ ID NO: 880469 - RNA, 22 nt, Human
guuucaaaggugucaggcaguu

SEQ ID NO: 880470 - RNA, 19 nt, Human
ucagccaccagaagagaua

SEQ ID NO: 880471 - RNA, 22 nt, Human
ggagaagcaggugcuuuggguc

SEQ ID NO: 880472 - RNA, 22 nt, Human
ugcuggggguucagaugaguaa

SEQ ID NO: 880473 - RNA, 22 nt, Human
ugugcugcucucagugacagcc

SEQ ID NO: 880474 - RNA, 22 nt, Human
aaauuaagggugagaagaguug

SEQ ID NO: 880475 - RNA, 22 nt, Human
cagaugaaguauuacagacauu

SEQ ID NO: 880476 - RNA, 22 nt, Human
cugugggagaaguugcuggagu

SEQ ID NO: 880477 - RNA, 22 nt, Human
guucaagguuuuacagagugua

SEQ ID NO: 880478 - RNA, 22 nt, Human
ucaggacagaaggcugccaggg

SEQ ID NO: 880479 - RNA, 22 nt, Human
gccuggcugucuggcaagguuc

SEQ ID NO: 880480 - RNA, 22 nt, Human
uaacguuugauaacuucuguuc

SEQ ID NO: 880481 - RNA, 22 nt, Human
cauuguugugagaucaagcagu

SEQ ID NO: 880482 - RNA, 17 nt, Human
ugcucuguggucuuuua

SEQ ID NO: 880483 - RNA, 22 nt, Human
ucaaaguauuuuaacuguaucc

SEQ ID NO: 880484 - RNA, 22 nt, Human
ucacugaacucucauagagaaa

SEQ ID NO: 880485 - RNA, 23 nt, Human
cccugcacuaagaggagaaggug

SEQ ID NO: 880486 - RNA, 22 nt, Human
cuagaaccuaggaguacuaaag

SEQ ID NO: 880487 - RNA, 22 nt, Human
ccagcucugauuuugaccucca

SEQ ID NO: 880488 - RNA, 22 nt, Human
gcugcucuggcucugcaguguc

SEQ ID NO: 880489 - RNA, 22 nt, Human
gccuggggggcaugucauaaua

SEQ ID NO: 880490 - RNA, 20 nt, Human
acugagaccaauaaguagaa

SEQ ID NO: 880491 - RNA, 22 nt, Human
uugaaucucuugaaucucuguu

SEQ ID NO: 880492 - RNA, 22 nt, Human
aagggcuggccacauucugggu

SEQ ID NO: 880493 - RNA, 22 nt, Human
agugucauaugccacugcaucc

SEQ ID NO: 880494 - RNA, 22 nt, Human
uguauguauacacauagauacg

SEQ ID NO: 880495 - RNA, 22 nt, Human
ucagcuuuccugcagcuaaggg

SEQ ID NO: 880496 - RNA, 22 nt, Human
ugaaauucauuguuuuaugugu

SEQ ID NO: 880497 - RNA, 22 nt, Human
uucuguuuauuccuaggagcuc

SEQ ID NO: 880498 - RNA, 22 nt, Human
aaaguugcuggcuuugguucau

SEQ ID NO: 880499 - RNA, 20 nt, Human
cuccagacuacagaagagcc

SEQ ID NO: 880500 - RNA, 21 nt, Human
ugauacaggaaugguucuaug

SEQ ID NO: 880501 - RNA, 22 nt, Human
acuguggccaaagccucuggga

SEQ ID NO: 880502 - RNA, 20 nt, Human
agcuaggagaaagcauggag

SEQ ID NO: 880503 - RNA, 22 nt, Human
uaaacaaggguuacugagcaug

SEQ ID NO: 880504 - RNA, 22 nt, Human
cauguaaaaagaagaaucugga

SEQ ID NO: 880505 - RNA, 22 nt, Human
ggcuggcaccugcccuccgcug

SEQ ID NO: 880506 - RNA, 22 nt, Human
aagcccuguuaggcacugggga

SEQ ID NO: 880507 - RNA, 22 nt, Human
agugaaaacacuaguucuugcc

SEQ ID NO: 880508 - RNA, 22 nt, Human
cauaucauaggucuuggauaau

SEQ ID NO: 880509 - RNA, 22 nt, Human
uuuugguuuggcuccaaauagg

SEQ ID NO: 880510 - RNA, 22 nt, Human
acucuaaauagccucuuaaaca

SEQ ID NO: 880511 - RNA, 22 nt, Human
acucacugggucccggaagccc

SEQ ID NO: 880512 - RNA, 21 nt, Human
aguuugaugcaauuucugaga

SEQ ID NO: 880513 - RNA, 22 nt, Human
aucagaagcuuguagucucucu

SEQ ID NO: 880514 - RNA, 22 nt, Human
aggcagugagugugacuucaca

SEQ ID NO: 880515 - RNA, 22 nt, Human
cauuuacagcagacugaugaaa

SEQ ID NO: 880516 - RNA, 22 nt, Human
agugcagagagcaauacucuac

SEQ ID NO: 880517 - RNA, 22 nt, Human
uuuaaaugcuuuaagcaagggu

SEQ ID NO: 880518 - RNA, 22 nt, Human
caguuucuuaucuucaaaauug

SEQ ID NO: 880519 - RNA, 22 nt, Human
aaggcagccucugccagccggg

SEQ ID NO: 880520 - RNA, 22 nt, Human
gcagcagcagggagucugacuu

SEQ ID NO: 880521 - RNA, 22 nt, Human
uacuagaaauuaccuucucacu

SEQ ID NO: 880522 - RNA, 19 nt, Human
gcagcagcauuugguaaua

SEQ ID NO: 880523 - RNA, 22 nt, Human
ucagcugccucucccuggaaga

SEQ ID NO: 880524 - RNA, 20 nt, Human
uaagaacaagacuaggaagc

SEQ ID NO: 880525 - RNA, 22 nt, Human
acacagaaccucauagccucuc

SEQ ID NO: 880526 - RNA, 22 nt, Human
guuuaugaaauuucaggcauuu

SEQ ID NO: 880527 - RNA, 22 nt, Human
uuagcauuucuggaaucacaag

SEQ ID NO: 880528 - RNA, 22 nt, Human
gggcugaacucaagucagcucc

SEQ ID NO: 880529 - RNA, 21 nt, Human
auggagucaggggaaugggcc

SEQ ID NO: 880530 - RNA, 22 nt, Human
uaguuucugccucggaagcuga

SEQ ID NO: 880531 - RNA, 22 nt, Human
uucuacacuuuucauuagcuag

SEQ ID NO: 880532 - RNA, 22 nt, Human
cagagcacccaaggagcauuug

SEQ ID NO: 880533 - RNA, 22 nt, Human
agugucugggcucccuuggagc

SEQ ID NO: 880534 - RNA, 22 nt, Human
uucagaggugggcugagaggau

SEQ ID NO: 880535 - RNA, 22 nt, Human
ucagggcaaaagggaaaccauu

SEQ ID NO: 880536 - RNA, 22 nt, Human
ggcaggugcuaagagagguaaa

SEQ ID NO: 880537 - RNA, 22 nt, Human
cugcugugcagacagacucucu

SEQ ID NO: 880538 - RNA, 22 nt, Human
uggcagcauuuuuuccagaaca

SEQ ID NO: 880539 - RNA, 22 nt, Human
ucuugcagaagaagcugccaag

SEQ ID NO: 880540 - RNA, 22 nt, Human
gguguugcaguugaagacuggu

SEQ ID NO: 880541 - RNA, 22 nt, Human
ucagcaaaggaccagcacaggc

SEQ ID NO: 880542 - RNA, 22 nt, Human
auuccaggcaaagcagagaaga

SEQ ID NO: 880543 - RNA, 22 nt, Human
uagcuguuuuuugugaggaaau

SEQ ID NO: 880544 - RNA, 22 nt, Human
aauugagugcuagacaucauga

SEQ ID NO: 880545 - RNA, 22 nt, Human
ggugucagauacauaggaagua

SEQ ID NO: 880546 - RNA, 22 nt, Human
aaaguuuccugcuaagugcuau

SEQ ID NO: 880547 - RNA, 22 nt, Human
agaggcugugcagagggagugc

SEQ ID NO: 880548 - RNA, 22 nt, Human
aggcagcguagcaaggcuagua

SEQ ID NO: 880549 - RNA, 22 nt, Human
gcucugcuguguuuguucagca

SEQ ID NO: 880550 - RNA, 22 nt, Human
acugcuuacccggccugacuuc

SEQ ID NO: 880551 - RNA, 22 nt, Human
uguuuuaagagcgcacuuuaua

SEQ ID NO: 880552 - RNA, 22 nt, Human
cggcuucagcucaggccccucg

SEQ ID NO: 880553 - RNA, 22 nt, Human
gcagggugacguugcccaccuc

SEQ ID NO: 880554 - RNA, 22 nt, Human
ugagguggguggcuucuguuau

SEQ ID NO: 880555 - RNA, 22 nt, Human
gaagcaagugcaaggaagaggc

SEQ ID NO: 880556 - RNA, 22 nt, Human
cucuccccacacccucugcaug

SEQ ID NO: 880557 - RNA, 19 nt, Human
uuucuaagcuaaaugcuuc

SEQ ID NO: 880558 - RNA, 22 nt, Human
uuuguacaauuagcagaggcua

SEQ ID NO: 880559 - RNA, 22 nt, Human
auuauucuugagguguuuauug

SEQ ID NO: 880560 - RNA, 22 nt, Human
cuggcagguggagguugcagug

SEQ ID NO: 880561 - RNA, 22 nt, Human
uuuugguucugggauacagaga

SEQ ID NO: 880562 - RNA, 22 nt, Human
uuauguagucacuguggucuug

SEQ ID NO: 880563 - RNA, 22 nt, Human
ugggccacgugacccuuacccu

SEQ ID NO: 880564 - RNA, 22 nt, Human
ccucccuggccagagcagcagc

SEQ ID NO: 880565 - RNA, 22 nt, Human
gugucaugggagucagaaguga

SEQ ID NO: 880566 - RNA, 22 nt, Human
uuuucaguuugcacugcagugc

SEQ ID NO: 880567 - RNA, 22 nt, Human
cagagcaguggagaguaggucu

SEQ ID NO: 880568 - RNA, 22 nt, Human
ucugucuuugucaggaccagag

SEQ ID NO: 880569 - RNA, 22 nt, Human
agaggggugggcacagcgccca

SEQ ID NO: 880570 - RNA, 22 nt, Human
uuugucuuauccaaucucucag

SEQ ID NO: 880571 - RNA, 22 nt, Human
gcucccagcauugcuucccagg

SEQ ID NO: 880572 - RNA, 22 nt, Human
gaacuuuaaaacaaaguacagu

SEQ ID NO: 880573 - RNA, 22 nt, Human
aauaagaauugccagauuugaa

SEQ ID NO: 880574 - RNA, 22 nt, Human
uuccuuguggaaacuauggacg

SEQ ID NO: 880575 - RNA, 22 nt, Human
uaaauuacucaaugcacauaaa

SEQ ID NO: 880576 - RNA, 19 nt, Human
aguccaugaauggaggaug

SEQ ID NO: 880577 - RNA, 22 nt, Human
gaaguuauuuuaccuguuaaag

SEQ ID NO: 880578 - RNA, 22 nt, Human
aucucuuaugucacauaaacca

SEQ ID NO: 880579 - RNA, 22 nt, Human
ccaggggcuggugcugagcugg

SEQ ID NO: 880580 - RNA, 22 nt, Human
auuccacagccgauaccaugac

SEQ ID NO: 880581 - RNA, 22 nt, Human
uccugccuaccuugcggaggug

SEQ ID NO: 880582 - RNA, 22 nt, Human
ccuuucuugcuaagaguuuaug

SEQ ID NO: 880583 - RNA, 22 nt, Human
gaaguuuauuuuacacauccau

SEQ ID NO: 880584 - RNA, 22 nt, Human
gcugcaggcauuuuccugggca

SEQ ID NO: 880585 - RNA, 17 nt, Human
ugcaagaagauuaggaa

SEQ ID NO: 880586 - RNA, 22 nt, Human
ucauaacaaccuggaaggccag

SEQ ID NO: 880587 - RNA, 22 nt, Human
cugagcuguggccaccaauuua

SEQ ID NO: 880588 - RNA, 22 nt, Human
agugcaaagggcuguugagaag

SEQ ID NO: 880589 - RNA, 22 nt, Human
ucuggcuccaccuccuuuacua

SEQ ID NO: 880590 - RNA, 22 nt, Human
uguuuauucauggcuaaugaaa

SEQ ID NO: 880591 - RNA, 22 nt, Human
uccugagcaccuaugccauggc

SEQ ID NO: 880592 - RNA, 22 nt, Human
cucucugagugagggacaagcu

SEQ ID NO: 880593 - RNA, 22 nt, Human
uuucuaguccucaugcaucauu

SEQ ID NO: 880594 - RNA, 22 nt, Human
augcuugcccauguuucugaag

SEQ ID NO: 880595 - RNA, 22 nt, Human
acccugugucacaguggccugu

SEQ ID NO: 880596 - RNA, 22 nt, Human
aucacauuauguagugaaaagg

SEQ ID NO: 880597 - RNA, 22 nt, Human
gcugccccgagccauccuucag

SEQ ID NO: 880598 - RNA, 22 nt, Human
caugcagguuauaugugcuucu

SEQ ID NO: 880599 - RNA, 22 nt, Human
gagcuuccugcaggucacugug

SEQ ID NO: 880600 - RNA, 20 nt, Human
auggaggaagggcaagagaa

SEQ ID NO: 880601 - RNA, 22 nt, Human
accucucuuguagcugcuggug

SEQ ID NO: 880602 - RNA, 22 nt, Human
uaccauuucaguaaaaacuuag

SEQ ID NO: 880603 - RNA, 22 nt, Human
uagaacuugaaugugaaaucag

SEQ ID NO: 880604 - RNA, 22 nt, Human
cuucucuuccuuugucaacuga

SEQ ID NO: 880605 - RNA, 22 nt, Human
cagcagccuaggguuccaucau

SEQ ID NO: 880606 - RNA, 23 nt, Human
uugaauuucucuugcaauauuua

SEQ ID NO: 880607 - RNA, 22 nt, Human
uccugaccucuugcucugaccu

SEQ ID NO: 880608 - RNA, 16 nt, Human
gugacagacaauaggc

SEQ ID NO: 880609 - RNA, 22 nt, Human
cagucuuugaugcauccuagcc

SEQ ID NO: 880610 - RNA, 22 nt, Human
agauuugggggcuagggcuggu

SEQ ID NO: 880611 - RNA, 22 nt, Human
gagagcugggcuuugggugaag

SEQ ID NO: 880612 - RNA, 23 nt, Human
caguggagacucaugcuuccuua

SEQ ID NO: 880613 - RNA, 22 nt, Human
cagcccugcacgcugccuccgc

SEQ ID NO: 880614 - RNA, 22 nt, Human
agggcugagugggagagaguug

SEQ ID NO: 880615 - RNA, 22 nt, Human
cagccuggccugggacugcuga

SEQ ID NO: 880616 - RNA, 22 nt, Human
gaaaggagugcuuuccaggucu

SEQ ID NO: 880617 - RNA, 20 nt, Human
agugaggcaguucagugggc

SEQ ID NO: 880618 - RNA, 22 nt, Human
aggggagcuugccuggucaccc

SEQ ID NO: 880619 - RNA, 22 nt, Human
agagaugaaucuugagacucug

SEQ ID NO: 880620 - RNA, 22 nt, Human
uaggaaacaaaguaaugcaacu

SEQ ID NO: 880621 - RNA, 22 nt, Human
gccugcccacggggcuggcaua

SEQ ID NO: 880622 - RNA, 22 nt, Human
aauguuaauucacagccaaaua

SEQ ID NO: 880623 - RNA, 22 nt, Human
ucacacaggguucuggucucau

SEQ ID NO: 880624 - RNA, 22 nt, Human
cagcagcaacaacggaagccuu

SEQ ID NO: 880625 - RNA, 22 nt, Human
ucauggcuuuuucacuguucgc

SEQ ID NO: 880626 - RNA, 22 nt, Human
gaagaagacauggaacaauagu

SEQ ID NO: 880627 - RNA, 22 nt, Human
augugcacacagugucaugcaa

SEQ ID NO: 880628 - RNA, 22 nt, Human
gcuccaggagcucacagcucgc

SEQ ID NO: 880629 - RNA, 22 nt, Human
ggacgcagcgagggaagcagcc

SEQ ID NO: 880630 - RNA, 23 nt, Human
aagaguuuagagucuugcagagu

SEQ ID NO: 880631 - RNA, 22 nt, Human
ucucuguauucugauauucacu

SEQ ID NO: 880632 - RNA, 22 nt, Human
gcugucacaagcaucuggggca

SEQ ID NO: 880633 - RNA, 22 nt, Human
agaguuuggugaagcaauuuga

SEQ ID NO: 880634 - RNA, 22 nt, Human
auucuauuaauauuucuaggaa

SEQ ID NO: 880635 - RNA, 22 nt, Human
gugcugaagugaaauucaucaa

SEQ ID NO: 880636 - RNA, 22 nt, Human
ucugucacuuauuaagauggau

SEQ ID NO: 880637 - RNA, 22 nt, Human
ucuggaagguuggcucccaguu

SEQ ID NO: 880638 - RNA, 22 nt, Human
aguaaaacagagaaaucacuca

SEQ ID NO: 880639 - RNA, 22 nt, Human
uacaauguugguaaaguaucau

SEQ ID NO: 880640 - RNA, 22 nt, Human
gagcuuccauccuuacugugug

SEQ ID NO: 880641 - RNA, 22 nt, Human
agccuagcugugugaggccauc

SEQ ID NO: 880642 - RNA, 22 nt, Human
uuggaccucaguuauucuauca

SEQ ID NO: 880643 - RNA, 22 nt, Human
gaaggagggugcggaucugagc

SEQ ID NO: 880644 - RNA, 22 nt, Human
auauguguaaaugcauuuguuu

SEQ ID NO: 880645 - RNA, 22 nt, Human
ugccuggcaacuguggugggcu

SEQ ID NO: 880646 - RNA, 21 nt, Human
gcagagccugagguucuugag

SEQ ID NO: 880647 - RNA, 22 nt, Human
caucuguuuccuaaucuguagc

SEQ ID NO: 880648 - RNA, 22 nt, Human
uacugcauaacuggcauguggg

SEQ ID NO: 880649 - RNA, 22 nt, Human
aggcuucugcuguauuaacacu

SEQ ID NO: 880650 - RNA, 21 nt, Human
aggcagcaggauccagggaca

SEQ ID NO: 880651 - RNA, 22 nt, Human
cucugguuuuucuuccauuaag

SEQ ID NO: 880652 - RNA, 21 nt, Human
cagagcagcguucugcugugg

SEQ ID NO: 880653 - RNA, 20 nt, Human
aaguuuaggggaaagugaca

SEQ ID NO: 880654 - RNA, 22 nt, Human
ggcacagagcccagcuuccuag

SEQ ID NO: 880655 - RNA, 22 nt, Human
uggcaggggaggugcuugcuua

SEQ ID NO: 880656 - RNA, 22 nt, Human
uaaggacauuagaaaugaugcu

SEQ ID NO: 880657 - RNA, 17 nt, Human
ugguacaggcugaggga

SEQ ID NO: 880658 - RNA, 22 nt, Human
gcacagaaguaaaauacaaguc

SEQ ID NO: 880659 - RNA, 22 nt, Human
ccagagccucaacacagguccu

SEQ ID NO: 880660 - RNA, 22 nt, Human
uugggaaauuacucugcuagga

SEQ ID NO: 880661 - RNA, 22 nt, Human
ggcuccaggagggccuuggcca

SEQ ID NO: 880662 - RNA, 23 nt, Human
cagggcugguagggaagagcgug

SEQ ID NO: 880663 - RNA, 22 nt, Human
agccccagccccucucucacaa

SEQ ID NO: 880664 - RNA, 17 nt, Human
ggcuuacaggugccagc

SEQ ID NO: 880665 - RNA, 22 nt, Human
gguucagggaugugggugaugc

SEQ ID NO: 880666 - RNA, 22 nt, Human
agcuuuagaauuguucagcaag

SEQ ID NO: 880667 - RNA, 22 nt, Human
uaaagacaauaggaaaguuguu

SEQ ID NO: 880668 - RNA, 22 nt, Human
agagcugauuugauuacagugc

SEQ ID NO: 880669 - RNA, 22 nt, Human
ugggguucuuuguuuccugccu

SEQ ID NO: 880670 - RNA, 22 nt, Human
aggagaggucucccuuccccag

SEQ ID NO: 880671 - RNA, 22 nt, Human
ccuggcugccgagugugcagcg

SEQ ID NO: 880672 - RNA, 22 nt, Human
ugcgcccagccaagucuggcac

SEQ ID NO: 880673 - RNA, 22 nt, Human
guggacugcgcuugagggggcc

SEQ ID NO: 880674 - RNA, 22 nt, Human
uagaugaaugacuuauauguca

SEQ ID NO: 880675 - RNA, 22 nt, Human
cagcuggaggagcagcuuccag

SEQ ID NO: 880676 - RNA, 22 nt, Human
uuucaucuugauucuauauggc

SEQ ID NO: 880677 - RNA, 22 nt, Human
uauguacuuuccugggaauguu

SEQ ID NO: 880678 - RNA, 22 nt, Human
ccccucauucucugagcuaguu

SEQ ID NO: 880679 - RNA, 22 nt, Human
ugagauaacaaaauuaucuuca

SEQ ID NO: 880680 - RNA, 22 nt, Human
agucacaguucugcugucugag

SEQ ID NO: 880681 - RNA, 22 nt, Human
gcauuucagaaagguuaccaac

SEQ ID NO: 880682 - RNA, 22 nt, Human
ggagggcagaguccccugcuga

SEQ ID NO: 880683 - RNA, 22 nt, Human
aaggccaggccuagcacggagg

SEQ ID NO: 880684 - RNA, 22 nt, Human
acaugggagagaaauaaaugua

SEQ ID NO: 880685 - RNA, 22 nt, Human
uaagaacauuuucggaaagaua

SEQ ID NO: 880686 - RNA, 20 nt, Human
auaguaaugaagucuuguuc

SEQ ID NO: 880687 - RNA, 22 nt, Human
aacuuuaaagaggaggcuuggg

SEQ ID NO: 880688 - RNA, 22 nt, Human
ucuguuccucaaggucugugug

SEQ ID NO: 880689 - RNA, 22 nt, Human
ugaggccucauuuagggagagg

SEQ ID NO: 880690 - RNA, 22 nt, Human
cagacaggagacuggaucaugg

SEQ ID NO: 880691 - RNA, 22 nt, Human
agucuuugaaguucugacagag

SEQ ID NO: 880692 - RNA, 22 nt, Human
gguugaaucauucuuugcaccg

SEQ ID NO: 880693 - RNA, 22 nt, Human
gugauacaggauggugauaaau

SEQ ID NO: 880694 - RNA, 19 nt, Human
aucaccugguguuuccuug

SEQ ID NO: 880695 - RNA, 22 nt, Human
ggagggugcauuuuacccugug

SEQ ID NO: 880696 - RNA, 22 nt, Human
cucuuuguauuucuuugggcca

SEQ ID NO: 880697 - RNA, 22 nt, Human
ugguauaaaagaguaaacuaug

SEQ ID NO: 880698 - RNA, 22 nt, Human
aguguuggaccgagguggagcc

SEQ ID NO: 880699 - RNA, 22 nt, Human
auuccuugggaauuauugaaug

SEQ ID NO: 880700 - RNA, 22 nt, Human
gcuuucugguucucaaagcacu

SEQ ID NO: 880701 - RNA, 22 nt, Human
guuucuguguuagaugagucuu

SEQ ID NO: 880702 - RNA, 22 nt, Human
uccuuuggagcuugacugguag

SEQ ID NO: 880703 - RNA, 22 nt, Human
uuuacgaaaagugacuaauagg

SEQ ID NO: 880704 - RNA, 22 nt, Human
ucucacacaacauguuacuuug

SEQ ID NO: 880705 - RNA, 22 nt, Human
acaaugaugcagaugaguaaga

SEQ ID NO: 880706 - RNA, 21 nt, Human
agcugagguaaggcaagagag

SEQ ID NO: 880707 - RNA, 22 nt, Human
ugaggcaggacugagcgggaug

SEQ ID NO: 880708 - RNA, 22 nt, Human
uauuccaauugguuguaaagaa

SEQ ID NO: 880709 - RNA, 22 nt, Human
uaaguagucagacauaccccau

SEQ ID NO: 880710 - RNA, 22 nt, Human
ggguuggauuacuuagggagaa

SEQ ID NO: 880711 - RNA, 16 nt, Human
aaggcugauuuucccu

SEQ ID NO: 880712 - RNA, 22 nt, Human
ucccucagcucauauuuaugcc

SEQ ID NO: 880713 - RNA, 22 nt, Human
auaagguuaacaucaucaguga

SEQ ID NO: 880714 - RNA, 22 nt, Human
uucauucuuuuacaugugaaua

SEQ ID NO: 880715 - RNA, 22 nt, Human
cuuuuucauuggcuuuaggaca

SEQ ID NO: 880716 - RNA, 22 nt, Human
acagggccaggugagaggugcu

SEQ ID NO: 880717 - RNA, 21 nt, Human
uucaucagccagaaaucaagc

SEQ ID NO: 880718 - RNA, 22 nt, Human
ugauuauauucuaacuucauaa

SEQ ID NO: 880719 - RNA, 22 nt, Human
cuuuugauugagcaguuucaaa

SEQ ID NO: 880720 - RNA, 22 nt, Human
cuuguacaggauauuauaggcu

SEQ ID NO: 880721 - RNA, 22 nt, Human
aaacacacagaaaugaaugagg

SEQ ID NO: 880722 - RNA, 19 nt, Human
ggaagagaggaaaggugga

SEQ ID NO: 880723 - RNA, 22 nt, Human
cacaggaauuagcagccuaaaa

SEQ ID NO: 880724 - RNA, 22 nt, Human
agggcuccuaugaugcucugcc

SEQ ID NO: 880725 - RNA, 22 nt, Human
ugagguggccgaggagcaggac

SEQ ID NO: 880726 - RNA, 22 nt, Human
uagaaagucaaaacacuguguu

SEQ ID NO: 880727 - RNA, 22 nt, Human
ggcuagaguggaacuggagcgg

SEQ ID NO: 880728 - RNA, 22 nt, Human
auguagaauuccuucuacuuug

SEQ ID NO: 880729 - RNA, 22 nt, Human
auguauuugcuuguuauggauu

SEQ ID NO: 880730 - RNA, 22 nt, Human
uuuaucaguagcaaaguuuuaa

SEQ ID NO: 880731 - RNA, 19 nt, Human
ugcuggagugacauucuga

SEQ ID NO: 880732 - RNA, 22 nt, Human
acugcuuuuagaaaucuauaga

SEQ ID NO: 880733 - RNA, 22 nt, Human
cacaaggcacauuccuugucca

SEQ ID NO: 880734 - RNA, 22 nt, Human
cccagcucugcagaccugcccu

SEQ ID NO: 880735 - RNA, 21 nt, Human
aagagcuggaucaaggauaag

SEQ ID NO: 880736 - RNA, 22 nt, Human
agcuggaauccuacuucuaaca

SEQ ID NO: 880737 - RNA, 22 nt, Human
ucaggaggcggugcugccuuug

SEQ ID NO: 880738 - RNA, 22 nt, Human
uggccagccuggugcuugcucc

SEQ ID NO: 880739 - RNA, 22 nt, Human
cagguguugauacuaaucgugg

SEQ ID NO: 880740 - RNA, 22 nt, Human
aaaaguauaggguuuggaguca

SEQ ID NO: 880741 - RNA, 22 nt, Human
uccuugcacauuaucugggaaa

SEQ ID NO: 880742 - RNA, 22 nt, Human
aggcaguggaugucaggaaugg

SEQ ID NO: 880743 - RNA, 22 nt, Human
caucuuuaacaauuuacaaugu

SEQ ID NO: 880744 - RNA, 22 nt, Human
uaauccaauggcacaauguaug

SEQ ID NO: 880745 - RNA, 22 nt, Human
ugugugcagcggcaggugaagu

SEQ ID NO: 880746 - RNA, 22 nt, Human
aacaucuuuguaguguucuccu

SEQ ID NO: 880747 - RNA, 22 nt, Human
augauguaccacuuucucaguu

SEQ ID NO: 880748 - RNA, 22 nt, Human
cugccuggcccagggaugggcc

SEQ ID NO: 880749 - RNA, 22 nt, Human
agagucuuccaggcagccugag

SEQ ID NO: 880750 - RNA, 18 nt, Human
gcagugaagaaagagcuu

SEQ ID NO: 880751 - RNA, 17 nt, Human
agcuucaguugcaaaac

SEQ ID NO: 880752 - RNA, 21 nt, Human
ccagacuggccuaugugguag

SEQ ID NO: 880753 - RNA, 22 nt, Human
aaccacuggucugagguacaag

SEQ ID NO: 880754 - RNA, 22 nt, Human
gaaguauuauagcauauuagcc

SEQ ID NO: 880755 - RNA, 21 nt, Human
uuuauuaacaacuguggacgu

SEQ ID NO: 880756 - RNA, 22 nt, Human
uaaucucuagcccaugcaaaga

SEQ ID NO: 880757 - RNA, 22 nt, Human
ccagcucucaaggcucccuggg

SEQ ID NO: 880758 - RNA, 19 nt, Human
aggcugugagggaggacuc

SEQ ID NO: 880759 - RNA, 22 nt, Human
gacuccagcauauacuuuuagu

SEQ ID NO: 880760 - RNA, 22 nt, Human
cgccccagucuguaggugcccc

SEQ ID NO: 880761 - RNA, 22 nt, Human
uccuggcccaaucugcccauga

SEQ ID NO: 880762 - RNA, 22 nt, Human
cagaaaggacagagugagggug

SEQ ID NO: 880763 - RNA, 22 nt, Human
uggaggcauuugauguucauaa

SEQ ID NO: 880764 - RNA, 22 nt, Human
uggccugucuuguugugcuaga

SEQ ID NO: 880765 - RNA, 23 nt, Human
uccuccugacacagccugaguga

SEQ ID NO: 880766 - RNA, 22 nt, Human
acagagguuaggauggguugua

SEQ ID NO: 880767 - RNA, 22 nt, Human
uccuuuaugugaguuguuuccc

SEQ ID NO: 880768 - RNA, 22 nt, Human
ucauauaacuggauauuuucaa

SEQ ID NO: 880769 - RNA, 22 nt, Human
caggcuauauuuaaagaagaac

SEQ ID NO: 880770 - RNA, 22 nt, Human
agcccagcccgggcugcgcuuu

SEQ ID NO: 880771 - RNA, 22 nt, Human
uugcaucagcaggcauaauugg

SEQ ID NO: 880772 - RNA, 22 nt, Human
cauacaagcgugcaugugcuug

SEQ ID NO: 880773 - RNA, 22 nt, Human
cacagcugccaugcagucagug

SEQ ID NO: 880774 - RNA, 22 nt, Human
ccugaggggcugcaggccagcu

SEQ ID NO: 880775 - RNA, 22 nt, Human
gcacggcuaauuuuuguauuuu

SEQ ID NO: 880776 - RNA, 22 nt, Human
uucaauucuaaacuaauauucu

SEQ ID NO: 880777 - RNA, 22 nt, Human
uuucuuuugaauaguguguggu

SEQ ID NO: 880778 - RNA, 22 nt, Human
ucaagccacuggcagaagauua

SEQ ID NO: 880779 - RNA, 22 nt, Human
augccagguacagggguagggu

SEQ ID NO: 880780 - RNA, 22 nt, Human
cuacagaggacacaaagaucuu

SEQ ID NO: 880781 - RNA, 22 nt, Human
uugauucuggugacugauggaa

SEQ ID NO: 880782 - RNA, 22 nt, Human
ucugagacaacuuagcccucga

SEQ ID NO: 880783 - RNA, 22 nt, Human
uagggguguuucgagagagguu

SEQ ID NO: 880784 - RNA, 22 nt, Human
gaggccugggagccuguccucc

SEQ ID NO: 880785 - RNA, 22 nt, Human
uauaugcagugugucauucaag

SEQ ID NO: 880786 - RNA, 21 nt, Human
gccugcugccuguggccgguc

SEQ ID NO: 880787 - RNA, 20 nt, Human
cguguguggcuauuuugggu

SEQ ID NO: 880788 - RNA, 22 nt, Human
uggcuggcccugggagugcaga

SEQ ID NO: 880789 - RNA, 22 nt, Human
gaagcuguguugauggcaugga

SEQ ID NO: 880790 - RNA, 22 nt, Human
uaauuggcuuuacuuaaagucc

SEQ ID NO: 880791 - RNA, 22 nt, Human
gucaaugcuuuaguuucuggua

SEQ ID NO: 880792 - RNA, 22 nt, Human
agagguaaagagaggggaaauu

SEQ ID NO: 880793 - RNA, 22 nt, Human
ugccuggcaaugccagaagcca

SEQ ID NO: 880794 - RNA, 22 nt, Human
ggagcugugcagugacuacaga

SEQ ID NO: 880795 - RNA, 22 nt, Human
uggcucuggggacaguaagucc

SEQ ID NO: 880796 - RNA, 22 nt, Human
uucaacaauuaaguaucagccu

SEQ ID NO: 880797 - RNA, 22 nt, Human
ggugagucauuuggcucaagag

SEQ ID NO: 880798 - RNA, 22 nt, Human
auuuggauucuuauuuagcacu

SEQ ID NO: 880799 - RNA, 22 nt, Human
ugagaaugugcaauauccuucc

SEQ ID NO: 880800 - RNA, 22 nt, Human
caggcagcgcucguggccuggc

SEQ ID NO: 880801 - RNA, 22 nt, Human
caucagugcccuuggggaugcc

SEQ ID NO: 880802 - RNA, 22 nt, Human
gugugggaauggcggucgugca

SEQ ID NO: 880803 - RNA, 22 nt, Human
caaagccaggcuuucuaaugua

SEQ ID NO: 880804 - RNA, 22 nt, Human
uugcaaagagauaauccuaggc

SEQ ID NO: 880805 - RNA, 22 nt, Human
cagccacuguggucuagcugca

SEQ ID NO: 880806 - RNA, 22 nt, Human
agacagugauggacaggcagac

SEQ ID NO: 880807 - RNA, 22 nt, Human
gagguggcugucagcuucacuu

SEQ ID NO: 880808 - RNA, 19 nt, Human
uguguguuuauauauguau

SEQ ID NO: 880809 - RNA, 22 nt, Human
ggaacuggagaaugcccucuuu

SEQ ID NO: 880810 - RNA, 22 nt, Human
uuauuccaguaaucucuguaau

SEQ ID NO: 880811 - RNA, 22 nt, Human
ggaagauuuuccauuccucuuu

SEQ ID NO: 880812 - RNA, 22 nt, Human
ucuguguuugccauccuugcuc

SEQ ID NO: 880813 - RNA, 22 nt, Human
uuagaaguaaggucagauuucu

SEQ ID NO: 880814 - RNA, 22 nt, Human
gugcaguugaagcauggggaga

SEQ ID NO: 880815 - RNA, 22 nt, Human
aaggcaugaaagcgaaaugaga

SEQ ID NO: 880816 - RNA, 22 nt, Human
ugcagaauguggacaguggguu

SEQ ID NO: 880817 - RNA, 22 nt, Human
auucaacauauucugaguaaaa

SEQ ID NO: 880818 - RNA, 22 nt, Human
agcucacaguguccuuccucaa

SEQ ID NO: 880819 - RNA, 22 nt, Human
aaacuuuguucguccagacuca

SEQ ID NO: 880820 - RNA, 19 nt, Human
ugggugugaccaucucugc

SEQ ID NO: 880821 - RNA, 22 nt, Human
cccaggcuggagggcaguguca

SEQ ID NO: 880822 - RNA, 22 nt, Human
uaagugauuuguaguauacuau

SEQ ID NO: 880823 - RNA, 22 nt, Human
ggucuggaugcugagguuccca

SEQ ID NO: 880824 - RNA, 22 nt, Human
ggaaacauauucugaugugcau

SEQ ID NO: 880825 - RNA, 21 nt, Human
ucugggcccaugcugccucac

SEQ ID NO: 880826 - RNA, 22 nt, Human
agcccagcaaagggguuugaga

SEQ ID NO: 880827 - RNA, 22 nt, Human
cauggcugaacacucagugacu

SEQ ID NO: 880828 - RNA, 22 nt, Human
aaagccaggguccaggccugcc

SEQ ID NO: 880829 - RNA, 21 nt, Human
uggacuggugaguuuaggcug

SEQ ID NO: 880830 - RNA, 22 nt, Human
cacccugcucugcugugcggcc

SEQ ID NO: 880831 - RNA, 22 nt, Human
aaaagucuuggggaaggccagg

SEQ ID NO: 880832 - RNA, 22 nt, Human
guuuggcucugggugccugugc

SEQ ID NO: 880833 - RNA, 22 nt, Human
gcuguggccuggcgcagagcug

SEQ ID NO: 880834 - RNA, 22 nt, Human
cugagguaaaauuucuauuuug

SEQ ID NO: 880835 - RNA, 22 nt, Human
uuccuaaaagaauacacuggau

SEQ ID NO: 880836 - RNA, 22 nt, Human
uuggcagaugagaccagggguu

SEQ ID NO: 880837 - RNA, 21 nt, Human
uagcuuuaauauucccacauu

SEQ ID NO: 880838 - RNA, 22 nt, Human
gaggagggcaguuccucuuuua

SEQ ID NO: 880839 - RNA, 22 nt, Human
uuaacaaaguaacgggaaaaga

SEQ ID NO: 880840 - RNA, 22 nt, Human
aauuuggaagauguuguuuauc

SEQ ID NO: 880841 - RNA, 22 nt, Human
caucaaauacuacauggguugg

SEQ ID NO: 880842 - RNA, 22 nt, Human
gcagaugauguagacagacagu

SEQ ID NO: 880843 - RNA, 22 nt, Human
aggaucuugcuguagaggauag

SEQ ID NO: 880844 - RNA, 22 nt, Human
ggggaggaccuuuccaaggcuu

SEQ ID NO: 880845 - RNA, 22 nt, Human
uccuuagacaaagagugggcuu

SEQ ID NO: 880846 - RNA, 22 nt, Human
ggcugcaggaugcccagccgug

SEQ ID NO: 880847 - RNA, 22 nt, Human
aauucaaggaucuguuaaaucu

SEQ ID NO: 880848 - RNA, 22 nt, Human
acucuaaaagugaagugugguc

SEQ ID NO: 880849 - RNA, 22 nt, Human
cuuagaaauuguuacucauuca

SEQ ID NO: 880850 - RNA, 20 nt, Human
acuggcagccugccugcugu

SEQ ID NO: 880851 - RNA, 22 nt, Human
uccagaggcaaaaagguaugga

SEQ ID NO: 880852 - RNA, 22 nt, Human
gggcagguguuuccaaggugag

SEQ ID NO: 880853 - RNA, 22 nt, Human
uguucacacagucuauacggau

SEQ ID NO: 880854 - RNA, 22 nt, Human
cacuauaugccuuugaaauaca

SEQ ID NO: 880855 - RNA, 21 nt, Human
uauacagaggggaacaggaga

SEQ ID NO: 880856 - RNA, 22 nt, Human
agugcagagaccuggucaggca

SEQ ID NO: 880857 - RNA, 22 nt, Human
aguaaacauaauuuaccuguag

SEQ ID NO: 880858 - RNA, 22 nt, Human
cuaaggaauuggagcauguguu

SEQ ID NO: 880859 - RNA, 22 nt, Human
acccagagauggaccuggcugc

SEQ ID NO: 880860 - RNA, 22 nt, Human
auuagcauugcuacucucaaga

SEQ ID NO: 880861 - RNA, 22 nt, Human
augugggaaauacaagcuaaaa

SEQ ID NO: 880862 - RNA, 22 nt, Human
aguucugaaugaggaaucuggg

SEQ ID NO: 880863 - RNA, 22 nt, Human
auggccagcuuauaggggcuca

SEQ ID NO: 880864 - RNA, 22 nt, Human
ccccuccuggccacacugucag

SEQ ID NO: 880865 - RNA, 22 nt, Human
uuguuauuuacaacaauccuau

SEQ ID NO: 880866 - RNA, 22 nt, Human
uggaagagguggaaguggcuuc

SEQ ID NO: 880867 - RNA, 22 nt, Human
ugcauagggaaccucaugcauu

SEQ ID NO: 880868 - RNA, 22 nt, Human
ccugggugguuccggcaaggag

SEQ ID NO: 880869 - RNA, 22 nt, Human
uaggaaauuugaaauauguggg

SEQ ID NO: 880870 - RNA, 22 nt, Human
uugcagggcuggaacauggaau

SEQ ID NO: 880871 - RNA, 19 nt, Human
ugucuccucaugcaagugu

SEQ ID NO: 880872 - RNA, 22 nt, Human
agcuuuuucacuuuggauggga

SEQ ID NO: 880873 - RNA, 22 nt, Human
auucaggagugugccaggaagg

SEQ ID NO: 880874 - RNA, 22 nt, Human
acagugauauuuuuacucaaau

SEQ ID NO: 880875 - RNA, 22 nt, Human
gcccugagacugagcauggguu

SEQ ID NO: 880876 - RNA, 22 nt, Human
uauuuucuguggaggaccagau

SEQ ID NO: 880877 - RNA, 22 nt, Human
aggccaggaccauuagcccaga

SEQ ID NO: 880878 - RNA, 22 nt, Human
aggaaggguggauaguaacgug

SEQ ID NO: 880879 - RNA, 22 nt, Human
auuuugugaacccucaagcaau

SEQ ID NO: 880880 - RNA, 22 nt, Human
uaugauaugcacuuuaucagaa

SEQ ID NO: 880881 - RNA, 22 nt, Human
ugccugaugcaggaguaucaga

SEQ ID NO: 880882 - RNA, 22 nt, Human
cugcugucucacuggugugguu

SEQ ID NO: 880883 - RNA, 22 nt, Human
ucaggcuguaaauggugugggu

SEQ ID NO: 880884 - RNA, 22 nt, Human
caucuucacauauuuccaauga

SEQ ID NO: 880885 - RNA, 22 nt, Human
acagaauugaaaguauaaucug

SEQ ID NO: 880886 - RNA, 22 nt, Human
aacauaucauuuaacccucacc

SEQ ID NO: 880887 - RNA, 22 nt, Human
ucugcauaccccuuuagcagag

SEQ ID NO: 880888 - RNA, 22 nt, Human
guacaacaggauugauguacca

SEQ ID NO: 880889 - RNA, 22 nt, Human
guccuuggcacccaugugauuc

SEQ ID NO: 880890 - RNA, 22 nt, Human
gaugcaaacugugacauagagu

SEQ ID NO: 880891 - RNA, 22 nt, Human
uacuauacucuccauuuuauag

SEQ ID NO: 880892 - RNA, 18 nt, Human
ucuuuuccuuccacuucc

SEQ ID NO: 880893 - RNA, 22 nt, Human
uguggaaaagccccacaggacu

SEQ ID NO: 880894 - RNA, 22 nt, Human
acacaguguccuucuacuugcc

SEQ ID NO: 880895 - RNA, 22 nt, Human
aagcuguguccuagagguguaa

SEQ ID NO: 880896 - RNA, 22 nt, Human
uugaaagauagugaagccagcc

SEQ ID NO: 880897 - RNA, 22 nt, Human
ugaggcuuccaacaugugagaa

SEQ ID NO: 880898 - RNA, 22 nt, Human
ucauuuaauaauuuuugaguag

SEQ ID NO: 880899 - RNA, 22 nt, Human
ugucagugacagauuuaugauc

SEQ ID NO: 880900 - RNA, 22 nt, Human
aaugacauaagugcagaugcua

SEQ ID NO: 880901 - RNA, 22 nt, Human
ugagccagguuuuccaucauuc

SEQ ID NO: 880902 - RNA, 22 nt, Human
ccaggugugcucugcaguggau

SEQ ID NO: 880903 - RNA, 22 nt, Human
guucuucccuuuggggauugug

SEQ ID NO: 880904 - RNA, 22 nt, Human
ucauucuugcguaugccauggu

SEQ ID NO: 880905 - RNA, 22 nt, Human
auggaagaaagagacaauuuga

SEQ ID NO: 880906 - RNA, 20 nt, Human
gcaacucacccacagcagcu

SEQ ID NO: 880907 - RNA, 22 nt, Human
ugaguauuuuaaguucucaauc

SEQ ID NO: 880908 - RNA, 22 nt, Human
ugcuauaagcuccacgcuguag

SEQ ID NO: 880909 - RNA, 22 nt, Human
cuggaagggaaaucucuuggca

SEQ ID NO: 880910 - RNA, 22 nt, Human
cagcgguggcaaggugacugug

SEQ ID NO: 880911 - RNA, 22 nt, Human
uggccagacagagaggcuuugu

SEQ ID NO: 880912 - RNA, 22 nt, Human
ugagguaugagguucuaugauc

SEQ ID NO: 880913 - RNA, 22 nt, Human
cagacugggagucaggaagaag

SEQ ID NO: 880914 - RNA, 22 nt, Human
acuggacagaggaaauauggag

SEQ ID NO: 880915 - RNA, 22 nt, Human
acagauuuguucuuuugggcua

SEQ ID NO: 880916 - RNA, 22 nt, Human
aggucuagauuuauagacagca

SEQ ID NO: 880917 - RNA, 22 nt, Human
gaggcagcugaaggagugacag

SEQ ID NO: 880918 - RNA, 22 nt, Human
ugcagggugguuugaagggucu

SEQ ID NO: 880919 - RNA, 22 nt, Human
aaggcccuggaugguuuugaga

SEQ ID NO: 880920 - RNA, 22 nt, Human
uuauucauuaacagggaccaaa

SEQ ID NO: 880921 - RNA, 20 nt, Human
gggcucugcauccaucagcc

SEQ ID NO: 880922 - RNA, 22 nt, Human
cacaugcaguuuacgucacuga

SEQ ID NO: 880923 - RNA, 22 nt, Human
uaggcaaggcauuuggcucuug

SEQ ID NO: 880924 - RNA, 22 nt, Human
aaagaccauguuuacagcuagg

SEQ ID NO: 880925 - RNA, 22 nt, Human
caggcuucgcucugugggcagg

SEQ ID NO: 880926 - RNA, 22 nt, Human
uuggcagcuacuuccccagugc

SEQ ID NO: 880927 - RNA, 22 nt, Human
gacauugugguuauuaaauguu

SEQ ID NO: 880928 - RNA, 22 nt, Human
ugcccucccuguacugucagga

SEQ ID NO: 880929 - RNA, 22 nt, Human
agcaccuccuuagcuaugacca

SEQ ID NO: 880930 - RNA, 22 nt, Human
uuauucaucagugcauuaauuu

SEQ ID NO: 880931 - RNA, 22 nt, Human
aaugcuuauuauuaauagaaug

SEQ ID NO: 880932 - RNA, 22 nt, Human
ucccugggccuaucuuagcucc

SEQ ID NO: 880933 - RNA, 22 nt, Human
ugaaagacaagguuuuuucaga

SEQ ID NO: 880934 - RNA, 22 nt, Human
acuuucauguuggugaaggguu

SEQ ID NO: 880935 - RNA, 22 nt, Human
caucaucaacuggcagguaagu

SEQ ID NO: 880936 - RNA, 22 nt, Human
uagaaacauucaguugcagucc

SEQ ID NO: 880937 - RNA, 22 nt, Human
auguccuugagacccuccucgg

SEQ ID NO: 880938 - RNA, 22 nt, Human
acagcagccagccacugugagc

SEQ ID NO: 880939 - RNA, 22 nt, Human
uccugggcuucacagacucugu

SEQ ID NO: 880940 - RNA, 22 nt, Human
caggacacaggguguggcugau

SEQ ID NO: 880941 - RNA, 22 nt, Human
uaaaggcacggaguuguuaugg

SEQ ID NO: 880942 - RNA, 21 nt, Human
cagaggccuaucacagacucc

SEQ ID NO: 880943 - RNA, 22 nt, Human
accagaggaagggaaucucaag

SEQ ID NO: 880944 - RNA, 20 nt, Human
ucuguguuucagcugcuuga

SEQ ID NO: 880945 - RNA, 22 nt, Human
cagauaaauagauagauaaacu

SEQ ID NO: 880946 - RNA, 22 nt, Human
acagcuucacccauuaucccug

SEQ ID NO: 880947 - RNA, 22 nt, Human
cuuccccaggaccucugcuaaa

SEQ ID NO: 880948 - RNA, 22 nt, Human
uggcuuccuguuucccagaaag

SEQ ID NO: 880949 - RNA, 22 nt, Human
uagcagcuccauuucucuggca

SEQ ID NO: 880950 - RNA, 22 nt, Human
uuuggucucugugcauccuccu

SEQ ID NO: 880951 - RNA, 22 nt, Human
auuugcuuccuaauacucauau

SEQ ID NO: 880952 - RNA, 22 nt, Human
ccuggguuggagagcaauggug

SEQ ID NO: 880953 - RNA, 22 nt, Human
uaaguccuagaugauucacaga

SEQ ID NO: 880954 - RNA, 22 nt, Human
uccaggcaugguguaauuuugc

SEQ ID NO: 880955 - RNA, 22 nt, Human
ccagcucucuguccuccccaca

SEQ ID NO: 880956 - RNA, 22 nt, Human
cccaggagguggagguugcggu

SEQ ID NO: 880957 - RNA, 22 nt, Human
ccuggccauagggcccaggaaa

SEQ ID NO: 880958 - RNA, 22 nt, Human
ucugagaauagugccacugugg

SEQ ID NO: 880959 - RNA, 21 nt, Human
caauuucaugggaagauggga

SEQ ID NO: 880960 - RNA, 22 nt, Human
aucccugcccucauggagcuua

SEQ ID NO: 880961 - RNA, 22 nt, Human
augggcagaguggggacaggaa

SEQ ID NO: 880962 - RNA, 22 nt, Human
aacaucucagaagugacccuga

SEQ ID NO: 880963 - RNA, 22 nt, Human
uucagugcuaaaaagucucaag

SEQ ID NO: 880964 - RNA, 21 nt, Human
gaggccacuaauaggggcaga

SEQ ID NO: 880965 - RNA, 22 nt, Human
uuuugaaagggugauuuggcuu

SEQ ID NO: 880966 - RNA, 22 nt, Human
caggaggaagaacucugcaaca

SEQ ID NO: 880967 - RNA, 22 nt, Human
ucugcaaguagaugacagugag

SEQ ID NO: 880968 - RNA, 22 nt, Human
auguuuccagcucagcugcagg

SEQ ID NO: 880969 - RNA, 22 nt, Human
ucaguaaaugagcaaaaauuuc

SEQ ID NO: 880970 - RNA, 22 nt, Human
cuagaggggaaaaaggucuugu

SEQ ID NO: 880971 - RNA, 22 nt, Human
ugaugugaacucuugauaugau

SEQ ID NO: 880972 - RNA, 22 nt, Human
ggugggcaggucacucugccuc

SEQ ID NO: 880973 - RNA, 22 nt, Human
ugcuggaauaauuucauguuaa

SEQ ID NO: 880974 - RNA, 22 nt, Human
uucuaacuaaagucuuuguuuu

SEQ ID NO: 880975 - RNA, 22 nt, Human
auggccagauuauaugguuuuu

SEQ ID NO: 880976 - RNA, 22 nt, Human
uggugcugccaccuccucugcu

SEQ ID NO: 880977 - RNA, 22 nt, Human
ugcacagcuggcucuccuuuuc

SEQ ID NO: 880978 - RNA, 20 nt, Human
ucugggagggacaagucucc

SEQ ID NO: 880979 - RNA, 22 nt, Human
cagauuucaugcgaaauggggu

SEQ ID NO: 880980 - RNA, 22 nt, Human
auaguacacauccuacaauguu

SEQ ID NO: 880981 - RNA, 22 nt, Human
auguguauuacccuuucauucc

SEQ ID NO: 880982 - RNA, 22 nt, Human
aggcuucauuacagugguucaa

SEQ ID NO: 880983 - RNA, 22 nt, Human
agugugacauaagagcccugga

SEQ ID NO: 880984 - RNA, 22 nt, Human
gggcugagugaccucaggccaa

SEQ ID NO: 880985 - RNA, 22 nt, Human
auaugagagaggaaagauuuua

SEQ ID NO: 880986 - RNA, 22 nt, Human
aagggagaaaacuuguggcuua

SEQ ID NO: 880987 - RNA, 22 nt, Human
cuucucaaaguugugaaucagg

SEQ ID NO: 880988 - RNA, 22 nt, Human
uguggcucggccagcugcugaa

SEQ ID NO: 880989 - RNA, 22 nt, Human
cauuuguaguaucuguuuauau

SEQ ID NO: 880990 - RNA, 22 nt, Human
uguaucaagaucagcagcuguu

SEQ ID NO: 880991 - RNA, 22 nt, Human
uggcucugggcaccguguccac

SEQ ID NO: 880992 - RNA, 22 nt, Human
uuuuccucuguuauuaguguga

SEQ ID NO: 880993 - RNA, 22 nt, Human
cuguucuucuaguccacugaca

SEQ ID NO: 880994 - RNA, 22 nt, Human
gcaggcagccacgauucccuug

SEQ ID NO: 880995 - RNA, 22 nt, Human
ggccgugcuccaaagucaucgu

SEQ ID NO: 880996 - RNA, 22 nt, Human
guucaucucacagauaggcagu

SEQ ID NO: 880997 - RNA, 22 nt, Human
uucucuuauucuggauaugcag

SEQ ID NO: 880998 - RNA, 22 nt, Human
uacauugaccuuuguuagguug

SEQ ID NO: 880999 - RNA, 22 nt, Human
cuuugcagaaauaaacuugaug

SEQ ID NO: 881000 - RNA, 22 nt, Human
aguucugauaaaggaggaagau

SEQ ID NO: 881001 - RNA, 22 nt, Human
ugcuggaaaguuaaauuuugga

SEQ ID NO: 881002 - RNA, 22 nt, Human
caguauguacucuuaucaugua

SEQ ID NO: 881003 - RNA, 19 nt, Human
ugugugcugacugccagag

SEQ ID NO: 881004 - RNA, 22 nt, Human
gaacuccagaugacucaggaac

SEQ ID NO: 881005 - RNA, 22 nt, Human
ggcccuguccuggcugucuccg

SEQ ID NO: 881006 - RNA, 22 nt, Human
uagcagcauuuuuguagaguau

SEQ ID NO: 881007 - RNA, 21 nt, Human
auauuguagguaaagugcagg

SEQ ID NO: 881008 - RNA, 22 nt, Human
cuuuccuaguaguuacagaaug

SEQ ID NO: 881009 - RNA, 20 nt, Human
ugaauaugaccuuauuugga

SEQ ID NO: 881010 - RNA, 22 nt, Human
auacuucucaugggcucugagc

SEQ ID NO: 881011 - RNA, 22 nt, Human
ucacaaauguuugcaugugucu

SEQ ID NO: 881012 - RNA, 22 nt, Human
acaucacagagcccagauaaag

SEQ ID NO: 881013 - RNA, 22 nt, Human
aaugaaacuauauuuagagagg

SEQ ID NO: 881014 - RNA, 22 nt, Human
uuaaaauguacaggggaaagug

SEQ ID NO: 881015 - RNA, 22 nt, Human
gcagagguccuagccaggaguc

SEQ ID NO: 881016 - RNA, 22 nt, Human
uuucagaucacuuucaggaaag

SEQ ID NO: 881017 - RNA, 22 nt, Human
ccucaagaugcacugaacauau

SEQ ID NO: 881018 - RNA, 22 nt, Human
gccugcugaaccucaugcaguc

SEQ ID NO: 881019 - RNA, 22 nt, Human
aaguaacaucugaacaugaugu

SEQ ID NO: 881020 - RNA, 19 nt, Human
agcacagacaagaccagca

SEQ ID NO: 881021 - RNA, 22 nt, Human
gccaggcucaguagcgauuccu

SEQ ID NO: 881022 - RNA, 22 nt, Human
guugggagcagcagaccaagag

SEQ ID NO: 881023 - RNA, 22 nt, Human
cuggagcauccaugcccagggu

SEQ ID NO: 881024 - RNA, 18 nt, Human
ugacccuuucucccugug

SEQ ID NO: 881025 - RNA, 22 nt, Human
ucugccacugugaugcaugaua

SEQ ID NO: 881026 - RNA, 22 nt, Human
uagggcaggugaagaaaagcua

SEQ ID NO: 881027 - RNA, 22 nt, Human
uuauguacucugcaauguuuga

SEQ ID NO: 881028 - RNA, 22 nt, Human
uaaaguccuugaaccggaugua

SEQ ID NO: 881029 - RNA, 22 nt, Human
aagcaacuccuaggaggaaagg

SEQ ID NO: 881030 - RNA, 22 nt, Human
ggaaaagaauugcagugaagua

SEQ ID NO: 881031 - RNA, 22 nt, Human
uguccuguucauggcucuggac

SEQ ID NO: 881032 - RNA, 22 nt, Human
cucagggcggcgggcagcccag

SEQ ID NO: 881033 - RNA, 22 nt, Human
gcaaaggcuucuuuuauucucc

SEQ ID NO: 881034 - RNA, 22 nt, Human
ucuggagauaagacagacagau

SEQ ID NO: 881035 - RNA, 22 nt, Human
uugaagagacaauuuggaaagc

SEQ ID NO: 881036 - RNA, 22 nt, Human
gauuucuuugcaagcuguguuc

SEQ ID NO: 881037 - RNA, 22 nt, Human
uucugaggcauagaggaugaga

SEQ ID NO: 881038 - RNA, 22 nt, Human
gaguccuuaauacacuggugga

SEQ ID NO: 881039 - RNA, 22 nt, Human
cccaggucccggggccagcugc

SEQ ID NO: 881040 - RNA, 22 nt, Human
augucagauccucagaaagucu

SEQ ID NO: 881041 - RNA, 22 nt, Human
cuucuguagccaguaacauaua

SEQ ID NO: 881042 - RNA, 22 nt, Human
aagaguaugcaugcauguuugu

SEQ ID NO: 881043 - RNA, 22 nt, Human
ugccugugacccaaggaugcga

SEQ ID NO: 881044 - RNA, 22 nt, Human
uuggcagagccccagccuugga

SEQ ID NO: 881045 - RNA, 22 nt, Human
gacagggaaacauugaaguguc

SEQ ID NO: 881046 - RNA, 22 nt, Human
uacaguaguaagaaugccuuau

SEQ ID NO: 881047 - RNA, 18 nt, Human
ggggaaaagccagguguc

SEQ ID NO: 881048 - RNA, 22 nt, Human
cucugucccagacccaccucuc

SEQ ID NO: 881049 - RNA, 22 nt, Human
acaaacuucccagacaagcucc

SEQ ID NO: 881050 - RNA, 22 nt, Human
aaaauucuaacaugcagccaag

SEQ ID NO: 881051 - RNA, 22 nt, Human
uaacacauauuucaagaguagu

SEQ ID NO: 881052 - RNA, 22 nt, Human
cagcccucaucucagcuucuuu

SEQ ID NO: 881053 - RNA, 22 nt, Human
caggcuucagcauccacuuagu

SEQ ID NO: 881054 - RNA, 22 nt, Human
agauggaaaauauagacagaga

SEQ ID NO: 881055 - RNA, 20 nt, Human
ggcaaugccagaugacagga

SEQ ID NO: 881056 - RNA, 22 nt, Human
uuuccuaagauagauacuucag

SEQ ID NO: 881057 - RNA, 22 nt, Human
caguaacuaggacaaggaggaa

SEQ ID NO: 881058 - RNA, 22 nt, Human
aggcugaggcuuuccuuggaga

SEQ ID NO: 881059 - RNA, 22 nt, Human
ugcuucugucucuuaugccuug

SEQ ID NO: 881060 - RNA, 22 nt, Human
ucugcacaauugaucauggcaa

SEQ ID NO: 881061 - RNA, 22 nt, Human
aaagacauauuucuaaguuuau

SEQ ID NO: 881062 - RNA, 22 nt, Human
aaugggaagccagaagacaagg

SEQ ID NO: 881063 - RNA, 22 nt, Human
ggguggaguagaaagaugaauu

SEQ ID NO: 881064 - RNA, 22 nt, Human
ucacugaaggaagacacuguca

SEQ ID NO: 881065 - RNA, 22 nt, Human
gagcccagcuugcacauggagc

SEQ ID NO: 881066 - RNA, 22 nt, Human
cuggcagcccaaccuagagucu

SEQ ID NO: 881067 - RNA, 22 nt, Human
ccaaagugugggagaagaggua

SEQ ID NO: 881068 - RNA, 22 nt, Human
uuccuucuggaagcuucagggg

SEQ ID NO: 881069 - RNA, 22 nt, Human
aaacacucauguguuacucucc

SEQ ID NO: 881070 - RNA, 22 nt, Human
ugggggacugcacuggcgucag

SEQ ID NO: 881071 - RNA, 22 nt, Human
aggcccugggagcagagaugca

SEQ ID NO: 881072 - RNA, 22 nt, Human
uuuguuaaggaguauugcuucu

SEQ ID NO: 881073 - RNA, 22 nt, Human
gggcagcagaauuggacagaaa

SEQ ID NO: 881074 - RNA, 22 nt, Human
cagaaccaggaacugauggaga

SEQ ID NO: 881075 - RNA, 22 nt, Human
auguagaaauaauuucaguucc

SEQ ID NO: 881076 - RNA, 22 nt, Human
acuugggucacaugaccuaccu

SEQ ID NO: 881077 - RNA, 22 nt, Human
cccagacugcagagcgggcaga

SEQ ID NO: 881078 - RNA, 22 nt, Human
auuuggucagaacucucuuuag

SEQ ID NO: 881079 - RNA, 22 nt, Human
cggcccugcugagcuugucugg

SEQ ID NO: 881080 - RNA, 22 nt, Human
aggccagcaugcaguucuaagg

SEQ ID NO: 881081 - RNA, 22 nt, Human
gaucaguaagugaauaaugagu

SEQ ID NO: 881082 - RNA, 22 nt, Human
acccagccuacaaagcucaccu

SEQ ID NO: 881083 - RNA, 22 nt, Human
uugggagguaauggagccaagu

SEQ ID NO: 881084 - RNA, 22 nt, Human
uuuuugcugauaagcagaauuc

SEQ ID NO: 881085 - RNA, 22 nt, Human
uguuuuuuccuuaugcaaucug

SEQ ID NO: 881086 - RNA, 22 nt, Human
uucuuuggcugccagucuggag

SEQ ID NO: 881087 - RNA, 22 nt, Human
uacaguuacccuggaaagaaau

SEQ ID NO: 881088 - RNA, 22 nt, Human
aagggcggacagggcacauuuc

SEQ ID NO: 881089 - RNA, 22 nt, Human
uggccuggccacauccagcagg

SEQ ID NO: 881090 - RNA, 21 nt, Human
ccucuggcuugugcugugccc

SEQ ID NO: 881091 - RNA, 22 nt, Human
agcccacuguuuucauuucucu

SEQ ID NO: 881092 - RNA, 22 nt, Human
guuucuaaauguucugaguuuu

SEQ ID NO: 881093 - RNA, 23 nt, Human
augcaucaugaaaacuagagagc

SEQ ID NO: 881094 - RNA, 22 nt, Human
aagucauuaucucuucuaaucu

SEQ ID NO: 881095 - RNA, 18 nt, Human
auguguggcuuggggucc

SEQ ID NO: 881096 - RNA, 20 nt, Human
cagagaccugucuucacaga

SEQ ID NO: 881097 - RNA, 22 nt, Human
cagguccacggcgcccaggggu

SEQ ID NO: 881098 - RNA, 22 nt, Human
uccccaccuaagauacccaucu

SEQ ID NO: 881099 - RNA, 22 nt, Human
gaaagauaaucaauuacuccuu

SEQ ID NO: 881100 - RNA, 22 nt, Human
gugagguaaagcacagaaauag

SEQ ID NO: 881101 - RNA, 22 nt, Human
ccagaacugagaaaauaaauuu

SEQ ID NO: 881102 - RNA, 22 nt, Human
augcuguguccuagugaaagaa

SEQ ID NO: 881103 - RNA, 22 nt, Human
aauucacaggaucacaggagag

SEQ ID NO: 881104 - RNA, 22 nt, Human
caucucugagaccucagcuggg

SEQ ID NO: 881105 - RNA, 22 nt, Human
uacaauauguggccuuuuguga

SEQ ID NO: 881106 - RNA, 22 nt, Human
gcucuugauacaucaagaacuu

SEQ ID NO: 881107 - RNA, 22 nt, Human
cccauuuugcuuaugcugcugu

SEQ ID NO: 881108 - RNA, 22 nt, Human
uucucuggacagugaagagagg

SEQ ID NO: 881109 - RNA, 22 nt, Human
agcugcccagauaggaggaggc

SEQ ID NO: 881110 - RNA, 22 nt, Human
caauuacuuuugcaccaauaua

SEQ ID NO: 881111 - RNA, 22 nt, Human
cugccagguaaacugcaggaau

SEQ ID NO: 881112 - RNA, 22 nt, Human
cagaacagaaguaaaauuuacc

SEQ ID NO: 881113 - RNA, 22 nt, Human
cuucacaacgacaucugguuag

SEQ ID NO: 881114 - RNA, 22 nt, Human
ucugggucuuuacccauggaau

SEQ ID NO: 881115 - RNA, 20 nt, Human
agcugaagaucuggaugggg

SEQ ID NO: 881116 - RNA, 22 nt, Human
acaaaguaggcagugggcugga

SEQ ID NO: 881117 - RNA, 22 nt, Human
uuagagaugucccaaaaugaag

SEQ ID NO: 881118 - RNA, 22 nt, Human
aaugacuuugaaauauuugagu

SEQ ID NO: 881119 - RNA, 22 nt, Human
agcagccuauucuucucuugga

SEQ ID NO: 881120 - RNA, 22 nt, Human
ggcucaggagaggggcuaaaag

SEQ ID NO: 881121 - RNA, 22 nt, Human
ccauugaauuagaaggggaagg

SEQ ID NO: 881122 - RNA, 22 nt, Human
gaccagcucucugaagaaagag

SEQ ID NO: 881123 - RNA, 22 nt, Human
guuguaaauacaguacugaaac

SEQ ID NO: 881124 - RNA, 22 nt, Human
gaagugugcacaucuuacaagu

SEQ ID NO: 881125 - RNA, 22 nt, Human
agaggcccuggcuagagcagcu

SEQ ID NO: 881126 - RNA, 22 nt, Human
guauucaagcgagcagaugucu

SEQ ID NO: 881127 - RNA, 22 nt, Human
ugcucugggcaacagccucccu

SEQ ID NO: 881128 - RNA, 22 nt, Human
caguggaaauauuggcagcauc

SEQ ID NO: 881129 - RNA, 22 nt, Human
agcagccauagauagcaugcaa

SEQ ID NO: 881130 - RNA, 22 nt, Human
gaaguucucaaggaucacagaa

SEQ ID NO: 881131 - RNA, 22 nt, Human
ugagaauacugcauuguuagga

SEQ ID NO: 881132 - RNA, 22 nt, Human
uagcuguuaaguuguuuggaaa

SEQ ID NO: 881133 - RNA, 22 nt, Human
acucugacauuuaaaaagcaau

SEQ ID NO: 881134 - RNA, 22 nt, Human
aauuuuauuagaaggcaagggg

SEQ ID NO: 881135 - RNA, 22 nt, Human
uccaggccucuagcccucucuu

SEQ ID NO: 881136 - RNA, 21 nt, Human
cccagagccuagggagggcac

SEQ ID NO: 881137 - RNA, 22 nt, Human
cugcuccugugggccaguggcc

SEQ ID NO: 881138 - RNA, 22 nt, Human
ccagugcaggugagcaccaggu

SEQ ID NO: 881139 - RNA, 19 nt, Human
uggcucuguuucucuggag

SEQ ID NO: 881140 - RNA, 22 nt, Human
guccuugggauagaaagaugaa

SEQ ID NO: 881141 - RNA, 22 nt, Human
uuuacacuugaggaaacugagg

SEQ ID NO: 881142 - RNA, 22 nt, Human
aaagguuuauuuaaucagggag

SEQ ID NO: 881143 - RNA, 22 nt, Human
ucacaguugagcagguugugca

SEQ ID NO: 881144 - RNA, 22 nt, Human
gcuguuucugaguagcuaggcu

SEQ ID NO: 881145 - RNA, 22 nt, Human
acacagcaaggucugacuuugg

SEQ ID NO: 881146 - RNA, 18 nt, Human
ucccuucucccuugccuc

SEQ ID NO: 881147 - RNA, 21 nt, Human
acugagggccagagaggaccu

SEQ ID NO: 881148 - RNA, 22 nt, Human
cauguguguggacgagcguggc

SEQ ID NO: 881149 - RNA, 22 nt, Human
augauacaucuucaugucagug

SEQ ID NO: 881150 - RNA, 22 nt, Human
cagugugugacucuggggguac

SEQ ID NO: 881151 - RNA, 18 nt, Human
auacaagaucaaguguuc

SEQ ID NO: 881152 - RNA, 22 nt, Human
gguugaauaucuuuauguuggu

SEQ ID NO: 881153 - RNA, 22 nt, Human
gaaggggguugcagucuagggu

SEQ ID NO: 881154 - RNA, 22 nt, Human
gagagcuguguucauucuacca

SEQ ID NO: 881155 - RNA, 18 nt, Human
uuuuaauuucaggggugg

SEQ ID NO: 881156 - RNA, 22 nt, Human
uugugaauggugccgcaauaaa

SEQ ID NO: 881157 - RNA, 22 nt, Human
auguacauguuuaagugaagga

SEQ ID NO: 881158 - RNA, 22 nt, Human
ucaggaagccacuccacagaga

SEQ ID NO: 881159 - RNA, 21 nt, Human
gggcagaggggccuccugggu

SEQ ID NO: 881160 - RNA, 22 nt, Human
ugggcuagcagggaagagagac

SEQ ID NO: 881161 - RNA, 22 nt, Human
uggcccugagggcucggagcca

SEQ ID NO: 881162 - RNA, 21 nt, Human
aacugagaccagcuaaagugg

SEQ ID NO: 881163 - RNA, 22 nt, Human
cacaaaugacugaaacgacugu

SEQ ID NO: 881164 - RNA, 22 nt, Human
acugaagcacauuugccaugaa

SEQ ID NO: 881165 - RNA, 22 nt, Human
cagagcccucaaggccgaugca

SEQ ID NO: 881166 - RNA, 22 nt, Human
cucaggccagguuucucccaca

SEQ ID NO: 881167 - RNA, 22 nt, Human
gugcucagggccuggcugggga

SEQ ID NO: 881168 - RNA, 18 nt, Human
cccucuccugcuaguggg

SEQ ID NO: 881169 - RNA, 22 nt, Human
uaccuucucuagaucuuuauuc

SEQ ID NO: 881170 - RNA, 22 nt, Human
acccugagggguauagcagaag

SEQ ID NO: 881171 - RNA, 22 nt, Human
acauugugauccgacugauuaa

SEQ ID NO: 881172 - RNA, 22 nt, Human
agucaggacagauuuucugggg

SEQ ID NO: 881173 - RNA, 22 nt, Human
acucugaacuccaggaggcuca

SEQ ID NO: 881174 - RNA, 22 nt, Human
cuggagauuaaguucucagcca

SEQ ID NO: 881175 - RNA, 22 nt, Human
ugauacauaaaccaucauuuug

SEQ ID NO: 881176 - RNA, 22 nt, Human
agugugcuagcaagaacugggg

SEQ ID NO: 881177 - RNA, 22 nt, Human
gagcccaggcugggguucagag

SEQ ID NO: 881178 - RNA, 19 nt, Human
uuucacaaagagagcguga

SEQ ID NO: 881179 - RNA, 22 nt, Human
guggcagagaacaaggagaggu

SEQ ID NO: 881180 - RNA, 22 nt, Human
ugcuggggguagcucugcguag

SEQ ID NO: 881181 - RNA, 22 nt, Human
aaacaauguuccuauauuagag

SEQ ID NO: 881182 - RNA, 22 nt, Human
acagccagguaaaggcauggca

SEQ ID NO: 881183 - RNA, 22 nt, Human
ugugggcucccccucacucugu

SEQ ID NO: 881184 - RNA, 22 nt, Human
uaauacuuaccuugcagagucu

SEQ ID NO: 881185 - RNA, 22 nt, Human
gaaagucauggaugaacacuac

SEQ ID NO: 881186 - RNA, 22 nt, Human
ugccaggcccagcagggcggcc

SEQ ID NO: 881187 - RNA, 22 nt, Human
aagcaucuuaaaaaguaucaga

SEQ ID NO: 881188 - RNA, 21 nt, Human
agauuugucccuucccauuua

SEQ ID NO: 881189 - RNA, 22 nt, Human
augcucugggcuuuugaagugg

SEQ ID NO: 881190 - RNA, 20 nt, Human
uucuaacuacucucccuuug

SEQ ID NO: 881191 - RNA, 22 nt, Human
ggcuauuucauuuaguacuagg

SEQ ID NO: 881192 - RNA, 22 nt, Human
ccuguguguaggccaggggagu

SEQ ID NO: 881193 - RNA, 22 nt, Human
gcaccagccugagccucuugca

SEQ ID NO: 881194 - RNA, 22 nt, Human
uuaucuuggguaacuuugugca

SEQ ID NO: 881195 - RNA, 18 nt, Human
acaaaggucugcaagacc

SEQ ID NO: 881196 - RNA, 22 nt, Human
uggaucuaucuccagggguccu

SEQ ID NO: 881197 - RNA, 21 nt, Human
aggguccuacagggcucagga

SEQ ID NO: 881198 - RNA, 22 nt, Human
uguauauacauacacacaugaa

SEQ ID NO: 881199 - RNA, 22 nt, Human
gaauuacauaguuucuagguuc

SEQ ID NO: 881200 - RNA, 22 nt, Human
uagcaagaggugaagguuucau

SEQ ID NO: 881201 - RNA, 22 nt, Human
cagguggguguaugaaugcaaa

SEQ ID NO: 881202 - RNA, 22 nt, Human
aauacagauggcaugugaagau

SEQ ID NO: 881203 - RNA, 22 nt, Human
agcucccagucuccucuccaug

SEQ ID NO: 881204 - RNA, 22 nt, Human
uucacaucucagcacugccucu

SEQ ID NO: 881205 - RNA, 22 nt, Human
uugcuguaaguaucuuucuacc

SEQ ID NO: 881206 - RNA, 22 nt, Human
ugagaaacauaugagagauuug

SEQ ID NO: 881207 - RNA, 22 nt, Human
gcugagggcagccuccuagguc

SEQ ID NO: 881208 - RNA, 22 nt, Human
uaguggaggggaugcaaagcuu

SEQ ID NO: 881209 - RNA, 22 nt, Human
aaacaaugagcuuuuacacacu

SEQ ID NO: 881210 - RNA, 22 nt, Human
guggcaaguguuccaagaggcg

SEQ ID NO: 881211 - RNA, 22 nt, Human
uuagagcuagaugaggucauga

SEQ ID NO: 881212 - RNA, 22 nt, Human
ccagaggugcucuuuggaagug

SEQ ID NO: 881213 - RNA, 22 nt, Human
ugggagcagcuuugcgagggag

SEQ ID NO: 881214 - RNA, 22 nt, Human
cuccuagaugucuucagagaaa

SEQ ID NO: 881215 - RNA, 22 nt, Human
acaaaugaaccugaaaucucag

SEQ ID NO: 881216 - RNA, 22 nt, Human
caucaguguggcaguucacugu

SEQ ID NO: 881217 - RNA, 22 nt, Human
cucucuggcacuucauugcugu

SEQ ID NO: 881218 - RNA, 22 nt, Human
ugcuucugacauguucuugguu

SEQ ID NO: 881219 - RNA, 20 nt, Human
cuguccccgaggucaccagg

SEQ ID NO: 881220 - RNA, 22 nt, Human
ccugcccauacugaccucuaau

SEQ ID NO: 881221 - RNA, 20 nt, Human
acaguguaauauucacauuc

SEQ ID NO: 881222 - RNA, 22 nt, Human
ucagcaguggcucucaugcagu

SEQ ID NO: 881223 - RNA, 22 nt, Human
gauuucucaauccuaguacuau

SEQ ID NO: 881224 - RNA, 22 nt, Human
ggcuucaccaggugcaugcaug

SEQ ID NO: 881225 - RNA, 22 nt, Human
aagacaucagugaugacauuug

SEQ ID NO: 881226 - RNA, 22 nt, Human
auguauacuaacacaugcaguu

SEQ ID NO: 881227 - RNA, 20 nt, Human
cugggcucgguggcccuggc

SEQ ID NO: 881228 - RNA, 22 nt, Human
acuuuuuacaggguguauacca

SEQ ID NO: 881229 - RNA, 22 nt, Human
augugcaguugguggccaggag

SEQ ID NO: 881230 - RNA, 22 nt, Human
aaacuccagugaauacuagaau

SEQ ID NO: 881231 - RNA, 21 nt, Human
uucacaaccugcuuuaguggg

SEQ ID NO: 881232 - RNA, 22 nt, Human
uuucucuuaaugucucugugcu

SEQ ID NO: 881233 - RNA, 22 nt, Human
agccacagcaacaagugcaauu

SEQ ID NO: 881234 - RNA, 21 nt, Human
cggaaaggacuagggcucaga

SEQ ID NO: 881235 - RNA, 22 nt, Human
cuguggagcagggcagggucac

SEQ ID NO: 881236 - RNA, 22 nt, Human
ccaggagcaacuugaaggcaag

SEQ ID NO: 881237 - RNA, 23 nt, Human
agacaaaagccucagucuuaggc

SEQ ID NO: 881238 - RNA, 22 nt, Human
cacaugcauaccuauguguaua

SEQ ID NO: 881239 - RNA, 19 nt, Human
ucucacaagcaacauuguu

SEQ ID NO: 881240 - RNA, 22 nt, Human
ucugucacucuagagauggcag

SEQ ID NO: 881241 - RNA, 22 nt, Human
agucacaugcauuuucuucaau

SEQ ID NO: 881242 - RNA, 22 nt, Human
cugugcaaauaaagagcaacau

SEQ ID NO: 881243 - RNA, 23 nt, Human
agacuucuccaacaagcuuggcu

SEQ ID NO: 881244 - RNA, 22 nt, Human
ggugugcaggcuaucacagaca

SEQ ID NO: 881245 - RNA, 22 nt, Human
aggacagcaaccguuauucaca

SEQ ID NO: 881246 - RNA, 22 nt, Human
ugucuccaacucacuguauacu

SEQ ID NO: 881247 - RNA, 21 nt, Human
ugucacagauucucagcuugc

SEQ ID NO: 881248 - RNA, 22 nt, Human
guuucagauuugguuucagaag

SEQ ID NO: 881249 - RNA, 22 nt, Human
aggcagguguugggagacacca

SEQ ID NO: 881250 - RNA, 16 nt, Human
uccuaacuggcaguuc

SEQ ID NO: 881251 - RNA, 22 nt, Human
uauauuaucauaaaaccauuca

SEQ ID NO: 881252 - RNA, 22 nt, Human
cuguccagaaagggggcaacaa

SEQ ID NO: 881253 - RNA, 21 nt, Human
uccuccuggccaggcggcccc

SEQ ID NO: 881254 - RNA, 22 nt, Human
ugggcaucucugcugccggccu

SEQ ID NO: 881255 - RNA, 22 nt, Human
acaguuaauuaacauuaagggg

SEQ ID NO: 881256 - RNA, 22 nt, Human
agaaucuucagaugauuuguca

SEQ ID NO: 881257 - RNA, 21 nt, Human
aaacugaggcuucaagcagug

SEQ ID NO: 881258 - RNA, 22 nt, Human
acagcuggacaggggagaguuu

SEQ ID NO: 881259 - RNA, 22 nt, Human
cagcaggaggugaguagcaggu

SEQ ID NO: 881260 - RNA, 22 nt, Human
uaaaacuagaccgugagucuaa

SEQ ID NO: 881261 - RNA, 22 nt, Human
ucauaaauauuugugggggcuu

SEQ ID NO: 881262 - RNA, 22 nt, Human
accagcaguuaugaggccagga

SEQ ID NO: 881263 - RNA, 22 nt, Human
aggcugucugaccccagagccc

SEQ ID NO: 881264 - RNA, 22 nt, Human
aagauauucaaagauuuauuag

SEQ ID NO: 881265 - RNA, 22 nt, Human
uucucuggguuaggggaacuau

SEQ ID NO: 881266 - RNA, 22 nt, Human
caucagaagaaagacaaaugau

SEQ ID NO: 881267 - RNA, 22 nt, Human
caaaacuaucaggcucaaagcu

SEQ ID NO: 881268 - RNA, 22 nt, Human
uggcuucaaggugauaauuuac

SEQ ID NO: 881269 - RNA, 22 nt, Human
acauuuggcaucuuguaacacu

SEQ ID NO: 881270 - RNA, 22 nt, Human
caguggcugagaguggacacug

SEQ ID NO: 881271 - RNA, 22 nt, Human
uuucuauuuacagugcuaggua

SEQ ID NO: 881272 - RNA, 22 nt, Human
gagcaagauuuuauaaguugug

SEQ ID NO: 881273 - RNA, 22 nt, Human
aagaagaugguuaacuuucagu

SEQ ID NO: 881274 - RNA, 22 nt, Human
auguuuuauauuuugcagcagu

SEQ ID NO: 881275 - RNA, 18 nt, Human
ugucucuccuuucugugu

SEQ ID NO: 881276 - RNA, 17 nt, Human
agaaagaggauccacag

SEQ ID NO: 881277 - RNA, 22 nt, Human
caggagacaauggcuguggggc

SEQ ID NO: 881278 - RNA, 22 nt, Human
caggguuucaccauguuagcag

SEQ ID NO: 881279 - RNA, 22 nt, Human
cacuuaaagucuuagcuuacag

SEQ ID NO: 881280 - RNA, 22 nt, Human
auggccagcucagagcacucag

SEQ ID NO: 881281 - RNA, 22 nt, Human
augaaaugagucaaugcgacua

SEQ ID NO: 881282 - RNA, 22 nt, Human
gaggguggaagagcugcugaga

SEQ ID NO: 881283 - RNA, 23 nt, Human
ugaguucuaggcuuaaaacuagc

SEQ ID NO: 881284 - RNA, 22 nt, Human
ccucucccgggugccgcugggc

SEQ ID NO: 881285 - RNA, 22 nt, Human
cugcagcugcucauguuacuug

SEQ ID NO: 881286 - RNA, 22 nt, Human
auagaauaaugguugucaggag

SEQ ID NO: 881287 - RNA, 22 nt, Human
uaaggccaccguuauagaacca

SEQ ID NO: 881288 - RNA, 22 nt, Human
ucacaguaaaagcauggaagag

SEQ ID NO: 881289 - RNA, 22 nt, Human
uggggaagaauaauguauguac

SEQ ID NO: 881290 - RNA, 22 nt, Human
ugguggagccuaggcuaagucu

SEQ ID NO: 881291 - RNA, 21 nt, Human
aaugcugcccaguaagauggc

SEQ ID NO: 881292 - RNA, 22 nt, Human
agccaaaucuaaagugaauauu

SEQ ID NO: 881293 - RNA, 22 nt, Human
gaacagggaguacggcacauuu

SEQ ID NO: 881294 - RNA, 22 nt, Human
cuauauuuggugagggaugucu

SEQ ID NO: 881295 - RNA, 22 nt, Human
gaaggagcuaaagggagcccug

SEQ ID NO: 881296 - RNA, 22 nt, Human
uuuggaauucugcagcucaugu

SEQ ID NO: 881297 - RNA, 18 nt, Human
aaagcuguuauuccagaa

SEQ ID NO: 881298 - RNA, 22 nt, Human
aaauacugggcucaaaaggguu

SEQ ID NO: 881299 - RNA, 22 nt, Human
ugugaggaggcggccagaagag

SEQ ID NO: 881300 - RNA, 22 nt, Human
uacaggcccauagucccugcuu

SEQ ID NO: 881301 - RNA, 22 nt, Human
uguuacaaacuguuguuucuau

SEQ ID NO: 881302 - RNA, 22 nt, Human
gagacccccugaguuauggccu

SEQ ID NO: 881303 - RNA, 22 nt, Human
auugcaggauacccagguagag

SEQ ID NO: 881304 - RNA, 22 nt, Human
agugcuguccaguuucacaggu

SEQ ID NO: 881305 - RNA, 22 nt, Human
ggaugcugacuuuggagcaugg

SEQ ID NO: 881306 - RNA, 22 nt, Human
acuguacacauucgucaagacu

SEQ ID NO: 881307 - RNA, 22 nt, Human
ucuuguuaucaggaaaacagua

SEQ ID NO: 881308 - RNA, 22 nt, Human
uuaaauuccagccucauaauag

SEQ ID NO: 881309 - RNA, 22 nt, Human
caggguugcaugcaucuguggg

SEQ ID NO: 881310 - RNA, 22 nt, Human
ccaaugcagauaagacaaacac

SEQ ID NO: 881311 - RNA, 18 nt, Human
cugaggcuuagagagguu

SEQ ID NO: 881312 - RNA, 22 nt, Human
cuaaacauguagcuuuuguggu

SEQ ID NO: 881313 - RNA, 22 nt, Human
acuagcagggauguuauuacuu

SEQ ID NO: 881314 - RNA, 18 nt, Human
cuccugggcugcagaugc

SEQ ID NO: 881315 - RNA, 22 nt, Human
ugccuuaaaaaauucuaaacau

SEQ ID NO: 881316 - RNA, 22 nt, Human
agugaaauugcuguaagaggaa

SEQ ID NO: 881317 - RNA, 22 nt, Human
aagccaagguuuuggucacagc

SEQ ID NO: 881318 - RNA, 22 nt, Human
ugggagaaucuugcucugcuac

SEQ ID NO: 881319 - RNA, 22 nt, Human
agggcuuguaggguggcuguag

SEQ ID NO: 881320 - RNA, 22 nt, Human
acagggcagcaacuuugugccu

SEQ ID NO: 881321 - RNA, 22 nt, Human
uggcuccagcguccacguccug

SEQ ID NO: 881322 - RNA, 22 nt, Human
acauauuccauuguugggaucc

SEQ ID NO: 881323 - RNA, 22 nt, Human
cagguuucuaguucuaagaaua

SEQ ID NO: 881324 - RNA, 20 nt, Human
guccugggagccacagcaca

SEQ ID NO: 881325 - RNA, 22 nt, Human
cuuaagaauauugaaguugugg

SEQ ID NO: 881326 - RNA, 22 nt, Human
ugaaagugucauagaaacccau

SEQ ID NO: 881327 - RNA, 22 nt, Human
auuaaugucuaccaguugugug

SEQ ID NO: 881328 - RNA, 22 nt, Human
acuugaaagaaguuuccuuaaa

SEQ ID NO: 881329 - RNA, 22 nt, Human
cagagggcuguguaaggauguu

SEQ ID NO: 881330 - RNA, 21 nt, Human
agggagucuggaggaagcguu

SEQ ID NO: 881331 - RNA, 22 nt, Human
ucugaggcugcaucuaugugac

SEQ ID NO: 881332 - RNA, 20 nt, Human
aguuagugaguaauugagcu

SEQ ID NO: 881333 - RNA, 22 nt, Human
aaauagauugcugaggcauuac

SEQ ID NO: 881334 - RNA, 22 nt, Human
gccugcuguugagggaagagcu

SEQ ID NO: 881335 - RNA, 22 nt, Human
agaggcuugacaauaugauugg

SEQ ID NO: 881336 - RNA, 22 nt, Human
cauucuuauauuuacucauuca

SEQ ID NO: 881337 - RNA, 22 nt, Human
agggugcagucacaggaaaugu

SEQ ID NO: 881338 - RNA, 22 nt, Human
auuuggaaggagcugcacagca

SEQ ID NO: 881339 - RNA, 17 nt, Human
uauacacagacagacug

SEQ ID NO: 881340 - RNA, 22 nt, Human
guguguggaaugcucauuuauu

SEQ ID NO: 881341 - RNA, 23 nt, Human
cuuuaaugaaauucucugugaag

SEQ ID NO: 881342 - RNA, 22 nt, Human
ucccagaaguccagccaugggc

SEQ ID NO: 881343 - RNA, 22 nt, Human
cccucagagccugaagcaagca

SEQ ID NO: 881344 - RNA, 22 nt, Human
gaauuccacuuuggcuuuuggg

SEQ ID NO: 881345 - RNA, 21 nt, Human
ccugugugucugacugggcua

SEQ ID NO: 881346 - RNA, 21 nt, Human
guccagagagccggcuccuga

SEQ ID NO: 881347 - RNA, 22 nt, Human
acguguguuuaacaaaccugca

SEQ ID NO: 881348 - RNA, 18 nt, Human
agcagcugucagaaugcc

SEQ ID NO: 881349 - RNA, 22 nt, Human
acaaaugacucaaacaccacuu

SEQ ID NO: 881350 - RNA, 22 nt, Human
guccauccgugguagcauggau

SEQ ID NO: 881351 - RNA, 20 nt, Human
ggugcugauaagaaagaagu

SEQ ID NO: 881352 - RNA, 22 nt, Human
gcacagagugggugagaugugg

SEQ ID NO: 881353 - RNA, 22 nt, Human
ggcgaggccgggacaggcugga

SEQ ID NO: 881354 - RNA, 18 nt, Human
uucugcggugacagauau

SEQ ID NO: 881355 - RNA, 22 nt, Human
ucacacauuguugcuuaaguug

SEQ ID NO: 881356 - RNA, 22 nt, Human
cagaggucccuguucuuaagga

SEQ ID NO: 881357 - RNA, 22 nt, Human
cugugucuccuuggugggauau

SEQ ID NO: 881358 - RNA, 22 nt, Human
acaaggcaguuaaaaugguuaa

SEQ ID NO: 881359 - RNA, 22 nt, Human
gccucaaaaguguuguagaggg

SEQ ID NO: 881360 - RNA, 22 nt, Human
gacacagagauaggccuguguu

SEQ ID NO: 881361 - RNA, 22 nt, Human
uauuccaacuucacuauugucu

SEQ ID NO: 881362 - RNA, 22 nt, Human
gagcuuccauggacgccaucug

SEQ ID NO: 881363 - RNA, 22 nt, Human
uccccucugguugacccaggag

SEQ ID NO: 881364 - RNA, 22 nt, Human
agcaauuuuugauuuucagugu

SEQ ID NO: 881365 - RNA, 22 nt, Human
cagacaggaaguucagaagaaa

SEQ ID NO: 881366 - RNA, 22 nt, Human
ugaagccacacuagcuuguccu

SEQ ID NO: 881367 - RNA, 22 nt, Human
aggccagcaccagagucaagaa

SEQ ID NO: 881368 - RNA, 22 nt, Human
uuugagaacccuguauuuuaag

SEQ ID NO: 881369 - RNA, 22 nt, Human
gcaggacauucagugaaugggc

SEQ ID NO: 881370 - RNA, 22 nt, Human
ccugagcaacuucaagggccug

SEQ ID NO: 881371 - RNA, 19 nt, Human
cacagggagaccacauguc

SEQ ID NO: 881372 - RNA, 22 nt, Human
aagaacuuuaaagcacuuauga

SEQ ID NO: 881373 - RNA, 18 nt, Human
aucuguccuuucucugcc

SEQ ID NO: 881374 - RNA, 22 nt, Human
aaacucuagcuacuaggauaac

SEQ ID NO: 881375 - RNA, 22 nt, Human
acuauacaguauguacgugcac

SEQ ID NO: 881376 - RNA, 22 nt, Human
guucauuuuuagaaugcuagua

SEQ ID NO: 881377 - RNA, 22 nt, Human
cagcaggucuuguugcugcuga

SEQ ID NO: 881378 - RNA, 22 nt, Human
ucccauuucuugcauccuugcu

SEQ ID NO: 881379 - RNA, 22 nt, Human
ggcaguucuggaugcauuguca

SEQ ID NO: 881380 - RNA, 22 nt, Human
ccaaaguuuuuauaguuagcau

SEQ ID NO: 881381 - RNA, 22 nt, Human
ucuagaauggcugggcacagcu

SEQ ID NO: 881382 - RNA, 22 nt, Human
auaaacuugagucucagaguau

SEQ ID NO: 881383 - RNA, 22 nt, Human
aagagcuggaagugaagauaac

SEQ ID NO: 881384 - RNA, 22 nt, Human
uauaagucuggcauauguaugc

SEQ ID NO: 881385 - RNA, 22 nt, Human
agugugagccuacaggccaaag

SEQ ID NO: 881386 - RNA, 22 nt, Human
agcuuacugggcaguaaagauu

SEQ ID NO: 881387 - RNA, 21 nt, Human
uccagggaauuucaacuuuua

SEQ ID NO: 881388 - RNA, 23 nt, Human
ugaagguauuaccugagaugcuc

SEQ ID NO: 881389 - RNA, 19 nt, Human
ccaggucuggggccagauu

SEQ ID NO: 881390 - RNA, 22 nt, Human
ucuucacauauuccuugagcua

SEQ ID NO: 881391 - RNA, 22 nt, Human
uccccacacuuucacuccuggc

SEQ ID NO: 881392 - RNA, 22 nt, Human
agguuuucacaggaaguauguu

SEQ ID NO: 881393 - RNA, 22 nt, Human
ggugguggagccagcugggagu

SEQ ID NO: 881394 - RNA, 22 nt, Human
uaguuucauaugcaaaauagua

SEQ ID NO: 881395 - RNA, 22 nt, Human
gccuguuggguaacagaguuca

SEQ ID NO: 881396 - RNA, 21 nt, Human
uagggggcagugggaugcuua

SEQ ID NO: 881397 - RNA, 22 nt, Human
gccucuguaggagugagagcau

SEQ ID NO: 881398 - RNA, 22 nt, Human
cuuuuucaagucaaagagggua

SEQ ID NO: 881399 - RNA, 22 nt, Human
uguucuaugcucuuuaagguga

SEQ ID NO: 881400 - RNA, 22 nt, Human
augcuuuauguucuggcauuuu

SEQ ID NO: 881401 - RNA, 22 nt, Human
uuucuuuguuguuaucacauca

SEQ ID NO: 881402 - RNA, 21 nt, Human
agaggcaggcauuaaguacac

SEQ ID NO: 881403 - RNA, 18 nt, Human
aagcagacagcagacagu

SEQ ID NO: 881404 - RNA, 22 nt, Human
aauguugcagagugauugucca

SEQ ID NO: 881405 - RNA, 20 nt, Human
ggcaggaccccaguggcauc

SEQ ID NO: 881406 - RNA, 22 nt, Human
cagagugauuugaugaguugca

SEQ ID NO: 881407 - RNA, 22 nt, Human
augcuuugaaguuuuuccucau

SEQ ID NO: 881408 - RNA, 22 nt, Human
caggugcccagcuccugcugug

SEQ ID NO: 881409 - RNA, 22 nt, Human
aggggcugcuggguccgccccu

SEQ ID NO: 881410 - RNA, 22 nt, Human
acaguguuucacuuaaccguuu

SEQ ID NO: 881411 - RNA, 22 nt, Human
gguuggggcgagcuggaggccc

SEQ ID NO: 881412 - RNA, 22 nt, Human
agcuucuuaguucacuuuuaau

SEQ ID NO: 881413 - RNA, 19 nt, Human
gggcucuggccucaguggg

SEQ ID NO: 881414 - RNA, 22 nt, Human
ucucuggguaaaguucucucau

SEQ ID NO: 881415 - RNA, 22 nt, Human
cagcaacuccuguagcuuaugc

SEQ ID NO: 881416 - RNA, 22 nt, Human
agggaagcaaugauuauuauuc

SEQ ID NO: 881417 - RNA, 22 nt, Human
aucucuagcuaacccucuggca

SEQ ID NO: 881418 - RNA, 22 nt, Human
gcucugagaaccaggaacacag

SEQ ID NO: 881419 - RNA, 22 nt, Human
gucauauacacugcauguaauc

SEQ ID NO: 881420 - RNA, 22 nt, Human
acucuaaauagauaaccaugca

SEQ ID NO: 881421 - RNA, 22 nt, Human
uagggcaauauuucccagaaaa

SEQ ID NO: 881422 - RNA, 22 nt, Human
gagccagggcugugagcugagc

SEQ ID NO: 881423 - RNA, 22 nt, Human
auugagcacaugcuaugugcca

SEQ ID NO: 881424 - RNA, 22 nt, Human
uacucacuauucuaucagauag

SEQ ID NO: 881425 - RNA, 22 nt, Human
uuaaaaugcagauucugauuca

SEQ ID NO: 881426 - RNA, 22 nt, Human
ggacuggguaggagcccagggc

SEQ ID NO: 881427 - RNA, 22 nt, Human
ugagcuuuguuguuaguauauu

SEQ ID NO: 881428 - RNA, 22 nt, Human
acaugacuuuucucuuccagag

SEQ ID NO: 881429 - RNA, 22 nt, Human
aaaagucuacaagcuucaacaa

SEQ ID NO: 881430 - RNA, 22 nt, Human
gaaauguugucucugcagcaau

SEQ ID NO: 881431 - RNA, 23 nt, Human
agaaagucauggccagguuugau

SEQ ID NO: 881432 - RNA, 22 nt, Human
aauugaaauucuuuguggucca

SEQ ID NO: 881433 - RNA, 22 nt, Human
gagcuguguugucuaguaccga

SEQ ID NO: 881434 - RNA, 22 nt, Human
ucugggaggucacauuggucuu

SEQ ID NO: 881435 - RNA, 22 nt, Human
agaaauacugccuaagacugua

SEQ ID NO: 881436 - RNA, 22 nt, Human
gaacuauaucuucaagaaaaug

SEQ ID NO: 881437 - RNA, 23 nt, Human
gaauaguuuuagaaauuggagaa

SEQ ID NO: 881438 - RNA, 22 nt, Human
ucaugacaaugguagccuguua

SEQ ID NO: 881439 - RNA, 22 nt, Human
ugauuuccuggcuuuggaguuc

SEQ ID NO: 881440 - RNA, 22 nt, Human
agggaggcauuagcuacugcga

SEQ ID NO: 881441 - RNA, 22 nt, Human
uuaggaagaauauauuuagagc

SEQ ID NO: 881442 - RNA, 22 nt, Human
aaagauuauggcauugaaauac

SEQ ID NO: 881443 - RNA, 22 nt, Human
uuuaugacaagcauuacugauu

SEQ ID NO: 881444 - RNA, 22 nt, Human
ccuguggcugccacuuggguga

SEQ ID NO: 881445 - RNA, 22 nt, Human
ucugccagaagccagggucugg

SEQ ID NO: 881446 - RNA, 22 nt, Human
uacaaugugugcuucuugucac

SEQ ID NO: 881447 - RNA, 22 nt, Human
augcacagcagugaguucagug

SEQ ID NO: 881448 - RNA, 22 nt, Human
ggccuggcucuugcccagccug

SEQ ID NO: 881449 - RNA, 22 nt, Human
uuggaaggauuuagagaugucu

SEQ ID NO: 881450 - RNA, 19 nt, Human
gucucuggauuucaggucc

SEQ ID NO: 881451 - RNA, 22 nt, Human
aauagcauaagaugucaaauag

SEQ ID NO: 881452 - RNA, 22 nt, Human
agccaguagaucgggaggaugu

SEQ ID NO: 881453 - RNA, 22 nt, Human
cugugcugggugugcuuaugau

SEQ ID NO: 881454 - RNA, 21 nt, Human
uguguaauuuuuuaaauggcc

SEQ ID NO: 881455 - RNA, 22 nt, Human
gcccuggccuucaucucagaca

SEQ ID NO: 881456 - RNA, 22 nt, Human
uuguagcaucaaucaguacuuu

SEQ ID NO: 881457 - RNA, 22 nt, Human
aguuucuaugugaaaugcacau

SEQ ID NO: 881458 - RNA, 22 nt, Human
cagauggcugccuucuugcugu

SEQ ID NO: 881459 - RNA, 22 nt, Human
uggaggccagugaaaguagauu

SEQ ID NO: 881460 - RNA, 22 nt, Human
gagcaggaaggccagaaggguc

SEQ ID NO: 881461 - RNA, 22 nt, Human
uuugcuauugugaauagugcca

SEQ ID NO: 881462 - RNA, 22 nt, Human
aacccgggaggcagagguugug

SEQ ID NO: 881463 - RNA, 22 nt, Human
gggcaguagcuucguaggcauc

SEQ ID NO: 881464 - RNA, 21 nt, Human
ugucuccuguuggcacauggc

SEQ ID NO: 881465 - RNA, 22 nt, Human
uggcagcucauuuggaaaugga

SEQ ID NO: 881466 - RNA, 22 nt, Human
gcaguuagcuugucacaguccu

SEQ ID NO: 881467 - RNA, 22 nt, Human
ucaagaauuuuuaaugugacug

SEQ ID NO: 881468 - RNA, 22 nt, Human
cugaagcuuuacuucaaauaca

SEQ ID NO: 881469 - RNA, 22 nt, Human
guucccauacaguaucagugcu

SEQ ID NO: 881470 - RNA, 22 nt, Human
agauguggaaagaaguuagaag

SEQ ID NO: 881471 - RNA, 22 nt, Human
aaggaggacacccaggacuggg

SEQ ID NO: 881472 - RNA, 21 nt, Human
gccuggcuucacaggcacuga

SEQ ID NO: 881473 - RNA, 22 nt, Human
uaaaguauauuuuuucucaaua

SEQ ID NO: 881474 - RNA, 22 nt, Human
ccaggccuguguuguguggagg

SEQ ID NO: 881475 - RNA, 22 nt, Human
gaaauuaagcaggggucugugg

SEQ ID NO: 881476 - RNA, 21 nt, Human
ucagggcagcugcucuucaga

SEQ ID NO: 881477 - RNA, 22 nt, Human
guuugccuuuuagauaggaaug

SEQ ID NO: 881478 - RNA, 18 nt, Human
aaaaugcaggcgacaugg

SEQ ID NO: 881479 - RNA, 17 nt, Human
agcugagcuggccaggg

SEQ ID NO: 881480 - RNA, 22 nt, Human
ugaagcuauauaaguuacagca

SEQ ID NO: 881481 - RNA, 22 nt, Human
cucauaaagugagaauaugacc

SEQ ID NO: 881482 - RNA, 22 nt, Human
agcagcaacuuauuuuucuuau

SEQ ID NO: 881483 - RNA, 22 nt, Human
ugcagcaaacaggccuucaggg

SEQ ID NO: 881484 - RNA, 22 nt, Human
cuucugggccauggccuuccuc

SEQ ID NO: 881485 - RNA, 19 nt, Human
ugaacagagaggacucugg

SEQ ID NO: 881486 - RNA, 22 nt, Human
uuaacuucaacacucucuugua

SEQ ID NO: 881487 - RNA, 18 nt, Human
uggugaaggguggaggag

SEQ ID NO: 881488 - RNA, 17 nt, Human
augugucuagugcaacc

SEQ ID NO: 881489 - RNA, 22 nt, Human
uuguaaacuguuaaaagccaga

SEQ ID NO: 881490 - RNA, 18 nt, Human
ucagagagcagcuuuauu

SEQ ID NO: 881491 - RNA, 22 nt, Human
ugcuccagcuggagaugggggc

SEQ ID NO: 881492 - RNA, 22 nt, Human
gugugucagagcucagagaagu

SEQ ID NO: 881493 - RNA, 22 nt, Human
uggcccaggugcaagagacaga

SEQ ID NO: 881494 - RNA, 22 nt, Human
auacagaauacuaauuccugag

SEQ ID NO: 881495 - RNA, 22 nt, Human
uuucuacauuuguaaccagauu

SEQ ID NO: 881496 - RNA, 22 nt, Human
aggcccauguucacuugcucag

SEQ ID NO: 881497 - RNA, 22 nt, Human
cagaagugauguugagcuaguc

SEQ ID NO: 881498 - RNA, 21 nt, Human
uaagccaccaugugaaaccag

SEQ ID NO: 881499 - RNA, 22 nt, Human
acaugccagcccauuuaaaugg

SEQ ID NO: 881500 - RNA, 22 nt, Human
ucuguccaggcuuacuauauau

SEQ ID NO: 881501 - RNA, 22 nt, Human
aaagacacacagugcuucaguu

SEQ ID NO: 881502 - RNA, 21 nt, Human
gcaaagugugggcauaaacag

SEQ ID NO: 881503 - RNA, 22 nt, Human
gggagguguuccaguguuggua

SEQ ID NO: 881504 - RNA, 22 nt, Human
uuccuugagaaaggcacaaguu

SEQ ID NO: 881505 - RNA, 22 nt, Human
ccugggccucacccagcucuug

SEQ ID NO: 881506 - RNA, 18 nt, Human
gagcccugagucugcaca

SEQ ID NO: 881507 - RNA, 22 nt, Human
aaaggcaugugcaacuacaaau

SEQ ID NO: 881508 - RNA, 22 nt, Human
uuaugugcuucaacugagccua

SEQ ID NO: 881509 - RNA, 22 nt, Human
aagcagcaacaaacuggauaaa

SEQ ID NO: 881510 - RNA, 22 nt, Human
ccagcccugccagagagagcug

SEQ ID NO: 881511 - RNA, 22 nt, Human
aguaagcaauagagugagaauu

SEQ ID NO: 881512 - RNA, 22 nt, Human
aauucacaaaaguuagauccau

SEQ ID NO: 881513 - RNA, 22 nt, Human
ggacagacuuuacagccccggg

SEQ ID NO: 881514 - RNA, 22 nt, Human
ucucaucugcgagcucugccag

SEQ ID NO: 881515 - RNA, 21 nt, Human
gcccaugugggagggguagaa

SEQ ID NO: 881516 - RNA, 22 nt, Human
agauacauauagaaaacaucaa

SEQ ID NO: 881517 - RNA, 22 nt, Human
acccagggcagccagcggggag

SEQ ID NO: 881518 - RNA, 22 nt, Human
uguuucauuaguacugacaaua

SEQ ID NO: 881519 - RNA, 17 nt, Human
ucugaggugaggaugca

SEQ ID NO: 881520 - RNA, 20 nt, Human
agggcagcuugaggagccgg

SEQ ID NO: 881521 - RNA, 22 nt, Human
cuuaggaagcgggaccugugca

SEQ ID NO: 881522 - RNA, 18 nt, Human
cuccuuucccuacaccuc

SEQ ID NO: 881523 - RNA, 22 nt, Human
uuuccaaagguggcaggaacaa

SEQ ID NO: 881524 - RNA, 22 nt, Human
ugccucugugugcaggugagca

SEQ ID NO: 881525 - RNA, 22 nt, Human
cuuguuuucuaaaacaucauuu

SEQ ID NO: 881526 - RNA, 22 nt, Human
uuuugucuaagaacuuugcaaa

SEQ ID NO: 881527 - RNA, 22 nt, Human
gaaauugucagcuucuuucagu

SEQ ID NO: 881528 - RNA, 22 nt, Human
gaauagauaagugacuauuugg

SEQ ID NO: 881529 - RNA, 22 nt, Human
ucaacaguucuguccaauuaau

SEQ ID NO: 881530 - RNA, 22 nt, Human
gaauucugguuuugaaaugaau

SEQ ID NO: 881531 - RNA, 23 nt, Human
augaacauuaguuucagauauug

SEQ ID NO: 881532 - RNA, 22 nt, Human
aacaguguguacacaucauagg

SEQ ID NO: 881533 - RNA, 22 nt, Human
gacagguaaagaugguggcagg

SEQ ID NO: 881534 - RNA, 22 nt, Human
gggccagguggaccccagccuc

SEQ ID NO: 881535 - RNA, 22 nt, Human
agucucagaaaauaugcuuuuu

SEQ ID NO: 881536 - RNA, 22 nt, Human
uuacuguagcuugacauauguc

SEQ ID NO: 881537 - RNA, 22 nt, Human
caaguuauuucauuggaacaau

SEQ ID NO: 881538 - RNA, 22 nt, Human
uaucuacauguagguauguaug

SEQ ID NO: 881539 - RNA, 22 nt, Human
cagggucaccagagaucugcau

SEQ ID NO: 881540 - RNA, 22 nt, Human
ggccaaggaugguggcucuggu

SEQ ID NO: 881541 - RNA, 18 nt, Human
gccugccuagagcuugcc

SEQ ID NO: 881542 - RNA, 22 nt, Human
aacuccaggcagggaggccacu

SEQ ID NO: 881543 - RNA, 22 nt, Human
aggacaauuagacucuuuguuu

SEQ ID NO: 881544 - RNA, 22 nt, Human
cauuucauaguugucacaauaa

SEQ ID NO: 881545 - RNA, 22 nt, Human
aaaguuagcauucucucuugcu

SEQ ID NO: 881546 - RNA, 22 nt, Human
ucacagugaggaguuacaguuu

SEQ ID NO: 881547 - RNA, 22 nt, Human
gcacauuugccacugagcuccu

SEQ ID NO: 881548 - RNA, 22 nt, Human
uugaaaacagcguagauucaca

SEQ ID NO: 881549 - RNA, 22 nt, Human
uguaguaaacacuauucugauc

SEQ ID NO: 881550 - RNA, 16 nt, Human
aggcagcauguuagug

SEQ ID NO: 881551 - RNA, 22 nt, Human
ugagauggguguccagggagga

SEQ ID NO: 881552 - RNA, 22 nt, Human
auaugugaaguggguuauuuug

SEQ ID NO: 881553 - RNA, 22 nt, Human
gguccagaagcugguaggguag

SEQ ID NO: 881554 - RNA, 22 nt, Human
agagggcccauguugggcugcu

SEQ ID NO: 881555 - RNA, 21 nt, Human
accaaaaccuauacuuucugu

SEQ ID NO: 881556 - RNA, 22 nt, Human
ugacagcaugaccacagggucu

SEQ ID NO: 881557 - RNA, 22 nt, Human
agccaugcaccuuacucuugcu

SEQ ID NO: 881558 - RNA, 22 nt, Human
gcauggagaagugggaacaggu

SEQ ID NO: 881559 - RNA, 22 nt, Human
ucaaaugcuguauuguaguaau

SEQ ID NO: 881560 - RNA, 22 nt, Human
cugaugagcccaggugaccaug

SEQ ID NO: 881561 - RNA, 22 nt, Human
cuacauuuguucuauagcuuuu

SEQ ID NO: 881562 - RNA, 22 nt, Human
acaaacugggauaggauccugu

SEQ ID NO: 881563 - RNA, 22 nt, Human
uggcacuggaaucguagccuug

SEQ ID NO: 881564 - RNA, 22 nt, Human
uccauuuuagagaugaagaaac

SEQ ID NO: 881565 - RNA, 22 nt, Human
gcugucccaugguugcaagaug

SEQ ID NO: 881566 - RNA, 22 nt, Human
uuguccaucuguauuucccaug

SEQ ID NO: 881567 - RNA, 22 nt, Human
gcccugaauaauagagugggga

SEQ ID NO: 881568 - RNA, 22 nt, Human
ugugagaggagaaaugcauuaa

SEQ ID NO: 881569 - RNA, 22 nt, Human
auggaagaguccccauggauga

SEQ ID NO: 881570 - RNA, 23 nt, Human
gcccugacugcggccucccacuc

SEQ ID NO: 881571 - RNA, 22 nt, Human
guggguggagacugggugcaag

SEQ ID NO: 881572 - RNA, 22 nt, Human
guggccuggcgagcuggcgcgg

SEQ ID NO: 881573 - RNA, 22 nt, Human
gcaggcccuuagccuugguggg

SEQ ID NO: 881574 - RNA, 22 nt, Human
gaggaagaaucaggguggugag

SEQ ID NO: 881575 - RNA, 22 nt, Human
uuucaagacguuaagucagcuu

SEQ ID NO: 881576 - RNA, 22 nt, Human
ugcaauguguuagaugguuuua

SEQ ID NO: 881577 - RNA, 22 nt, Human
cucugagcccgcugcagcccca

SEQ ID NO: 881578 - RNA, 22 nt, Human
gagacugcauagauggccacaa

SEQ ID NO: 881579 - RNA, 22 nt, Human
gcuaucuuucugcaccauaauu

SEQ ID NO: 881580 - RNA, 22 nt, Human
uccugugggcucucggccucca

SEQ ID NO: 881581 - RNA, 23 nt, Human
agggaagggggcuuauuccacag

SEQ ID NO: 881582 - RNA, 22 nt, Human
gccaggcuggugcaaggauauu

SEQ ID NO: 881583 - RNA, 22 nt, Human
ugugaaaucugaugaauugacc

SEQ ID NO: 881584 - RNA, 22 nt, Human
cagguccuggcagcugacucag

SEQ ID NO: 881585 - RNA, 22 nt, Human
ccagaaagauaggaaaucaagu

SEQ ID NO: 881586 - RNA, 22 nt, Human
gaggugaguggaucacgagguc

SEQ ID NO: 881587 - RNA, 22 nt, Human
acccuggagguggaggugcagu

SEQ ID NO: 881588 - RNA, 21 nt, Human
acugcacacuaugugaauuga

SEQ ID NO: 881589 - RNA, 22 nt, Human
ugggccugcuggggcauuuuca

SEQ ID NO: 881590 - RNA, 22 nt, Human
ugaaggaggaauguggccucca

SEQ ID NO: 881591 - RNA, 22 nt, Human
ucuucagaagaucacaucagug

SEQ ID NO: 881592 - RNA, 22 nt, Human
gcugucuuggguagaaagaggu

SEQ ID NO: 881593 - RNA, 22 nt, Human
agucccagaucuacaggaggga

SEQ ID NO: 881594 - RNA, 22 nt, Human
cuacagugacagaauuaaacag

SEQ ID NO: 881595 - RNA, 22 nt, Human
acaugcuuucuagguccuucug

SEQ ID NO: 881596 - RNA, 22 nt, Human
uauuucuuguucccuccaaguu

SEQ ID NO: 881597 - RNA, 22 nt, Human
ccucccagugccggggccggcu

SEQ ID NO: 881598 - RNA, 22 nt, Human
agacagaauuugucagauaaau

SEQ ID NO: 881599 - RNA, 22 nt, Human
gaaggcaggcuucugauuaggu

SEQ ID NO: 881600 - RNA, 23 nt, Human
auuuuuugucuuuguaacuagau

SEQ ID NO: 881601 - RNA, 22 nt, Human
caagauauguccuguuacuaag

SEQ ID NO: 881602 - RNA, 22 nt, Human
agcugccauccgaggugucaga

SEQ ID NO: 881603 - RNA, 22 nt, Human
cagugauuaaaacaugacagcc

SEQ ID NO: 881604 - RNA, 22 nt, Human
cagacagggcccugugauggua

SEQ ID NO: 881605 - RNA, 22 nt, Human
aaacaugaugccuguacuaaga

SEQ ID NO: 881606 - RNA, 22 nt, Human
uaggggcucagaacauguccuu

SEQ ID NO: 881607 - RNA, 22 nt, Human
cauuuaguuuugcaguagcagg

SEQ ID NO: 881608 - RNA, 23 nt, Human
gccaauuuuugacugucaguagg

SEQ ID NO: 881609 - RNA, 22 nt, Human
cuugggcuauaaauauaaccau

SEQ ID NO: 881610 - RNA, 22 nt, Human
cagaagcaaguagugauucuuu

SEQ ID NO: 881611 - RNA, 22 nt, Human
gcccucuguuauugcauccuua

SEQ ID NO: 881612 - RNA, 22 nt, Human
acuuccaaagaagugauuacag

SEQ ID NO: 881613 - RNA, 22 nt, Human
gcccagagugaguccugggccc

SEQ ID NO: 881614 - RNA, 22 nt, Human
cugcuucacccaacuuugggau

SEQ ID NO: 881615 - RNA, 21 nt, Human
gggaagacugucaggauuccu

SEQ ID NO: 881616 - RNA, 22 nt, Human
uaaauugaaaaucuacagaaca

SEQ ID NO: 881617 - RNA, 21 nt, Human
uagcugugcaacuuugggcaa

SEQ ID NO: 881618 - RNA, 22 nt, Human
cugugggccugauguucuucuc

SEQ ID NO: 881619 - RNA, 22 nt, Human
cugucuguagacauuuuugguu

SEQ ID NO: 881620 - RNA, 22 nt, Human
cagcaaggucugucaauagugg

SEQ ID NO: 881621 - RNA, 22 nt, Human
acugaggcgcaguccggcuguc

SEQ ID NO: 881622 - RNA, 22 nt, Human
ugcuuuguguacacaagaauca

SEQ ID NO: 881623 - RNA, 17 nt, Human
agauggcaggaggcaga

SEQ ID NO: 881624 - RNA, 22 nt, Human
auugaaaauaaggccagaaaca

SEQ ID NO: 881625 - RNA, 22 nt, Human
gggaagcugcguggucuagggc

SEQ ID NO: 881626 - RNA, 22 nt, Human
gcagccaggaagccuuucccuc

SEQ ID NO: 881627 - RNA, 22 nt, Human
ucaagaaaugugcuuggauaua

SEQ ID NO: 881628 - RNA, 22 nt, Human
cuggcuccagugacaagucgau

SEQ ID NO: 881629 - RNA, 22 nt, Human
gucuagcacaucaucucacugc

SEQ ID NO: 881630 - RNA, 22 nt, Human
ugcugcagcagugcgggcagcu

SEQ ID NO: 881631 - RNA, 22 nt, Human
aggagcuaauucauaagccacu

SEQ ID NO: 881632 - RNA, 22 nt, Human
uuuccccagguagauagauaau

SEQ ID NO: 881633 - RNA, 22 nt, Human
ggaggccaggaugggaacucaa

SEQ ID NO: 881634 - RNA, 22 nt, Human
gcugugaguggaggaggcugag

SEQ ID NO: 881635 - RNA, 22 nt, Human
gcuggcuggaacuagcaguugg

SEQ ID NO: 881636 - RNA, 22 nt, Human
auaugugaaugauaucacuuug

SEQ ID NO: 881637 - RNA, 23 nt, Human
ucuguucuuuuagcugaucauuu

SEQ ID NO: 881638 - RNA, 22 nt, Human
acaggccagagguggggcagcc

SEQ ID NO: 881639 - RNA, 22 nt, Human
gcaguggggcgcugggaguugg

SEQ ID NO: 881640 - RNA, 22 nt, Human
ugggcagagaucuggaucaaac

SEQ ID NO: 881641 - RNA, 22 nt, Human
ccaggaggaucauccuguuuuc

SEQ ID NO: 881642 - RNA, 22 nt, Human
ccagggcugcugggggaguuga

SEQ ID NO: 881643 - RNA, 22 nt, Human
auaguacaaucaguuaauuagu

SEQ ID NO: 881644 - RNA, 22 nt, Human
uaaaauguuugcaagagaccag

SEQ ID NO: 881645 - RNA, 22 nt, Human
aaacccagagacuagaaagacc

SEQ ID NO: 881646 - RNA, 23 nt, Human
ucugagaagguuucagccagacu

SEQ ID NO: 881647 - RNA, 22 nt, Human
ccagauaucacugccguguugu

SEQ ID NO: 881648 - RNA, 22 nt, Human
auguucauuuucuuaaugugcc

SEQ ID NO: 881649 - RNA, 22 nt, Human
augggcugacccagucguggca

SEQ ID NO: 881650 - RNA, 22 nt, Human
uuguucauuagcgcuugggcac

SEQ ID NO: 881651 - RNA, 22 nt, Human
uucugucuucccacugaggagc

SEQ ID NO: 881652 - RNA, 22 nt, Human
acaaacuaaaauucuuuauuga

SEQ ID NO: 881653 - RNA, 22 nt, Human
uauguacuacacuagaacauuu

SEQ ID NO: 881654 - RNA, 22 nt, Human
auaguuuucuaugcacuguuau

SEQ ID NO: 881655 - RNA, 18 nt, Human
augucugugcacuggaua

SEQ ID NO: 881656 - RNA, 22 nt, Human
ugucuuaauuuggaugauguuu

SEQ ID NO: 881657 - RNA, 22 nt, Human
uccugcaggcuugaguccucag

SEQ ID NO: 881658 - RNA, 22 nt, Human
auucaguucugcugguucugcu

SEQ ID NO: 881659 - RNA, 22 nt, Human
uuccauuuauucuuguccagau

SEQ ID NO: 881660 - RNA, 22 nt, Human
ggugcugacuucacagucuuac

SEQ ID NO: 881661 - RNA, 22 nt, Human
uucuaauuaaaucuacgcuagg

SEQ ID NO: 881662 - RNA, 22 nt, Human
augcuuuaaaugucuuuugcuu

SEQ ID NO: 881663 - RNA, 22 nt, Human
aaguuaagcauggccaugugac

SEQ ID NO: 881664 - RNA, 22 nt, Human
aggccaguguggcuggagcaca

SEQ ID NO: 881665 - RNA, 22 nt, Human
ugguugaauguagcauuuaugg

SEQ ID NO: 881666 - RNA, 22 nt, Human
cugagcagucuagccagguguu

SEQ ID NO: 881667 - RNA, 22 nt, Human
aaaguucugaugcugaucaaag

SEQ ID NO: 881668 - RNA, 22 nt, Human
agaaaacauaggagacaggaaa

SEQ ID NO: 881669 - RNA, 22 nt, Human
uggcagauaaacaugugauaaa

SEQ ID NO: 881670 - RNA, 22 nt, Human
auggcagaccugggcuggagaa

SEQ ID NO: 881671 - RNA, 20 nt, Human
ugcucuggaaauggucugag

SEQ ID NO: 881672 - RNA, 22 nt, Human
uguucucuaagccacccauuuu

SEQ ID NO: 881673 - RNA, 22 nt, Human
auggaagacagauaaggcagaa

SEQ ID NO: 881674 - RNA, 23 nt, Human
cccaggagccugaguccucucug

SEQ ID NO: 881675 - RNA, 20 nt, Human
cuagaacugagaaauuuaaa

SEQ ID NO: 881676 - RNA, 22 nt, Human
ugggccugugaugcugggcuau

SEQ ID NO: 881677 - RNA, 22 nt, Human
uugagaauaaauuagcagacau

SEQ ID NO: 881678 - RNA, 22 nt, Human
gagggccaacuagcaccacuuu

SEQ ID NO: 881679 - RNA, 22 nt, Human
aaauaugaaugauaagaguuau

SEQ ID NO: 881680 - RNA, 21 nt, Human
ucuaagaacaugauucucccu

SEQ ID NO: 881681 - RNA, 22 nt, Human
gaaggcucuugaggccagguaa

SEQ ID NO: 881682 - RNA, 18 nt, Human
agaggcuggacaggggau

SEQ ID NO: 881683 - RNA, 22 nt, Human
gcagaaguuaaucgaaggccau

SEQ ID NO: 881684 - RNA, 22 nt, Human
uccuucaccuuagcccuccuag

SEQ ID NO: 881685 - RNA, 22 nt, Human
uuuccagugauggggucuggcu

SEQ ID NO: 881686 - RNA, 22 nt, Human
aagcacagagaugggcacgccu

SEQ ID NO: 881687 - RNA, 22 nt, Human
guuuacaugcaugcaagaauga

SEQ ID NO: 881688 - RNA, 22 nt, Human
gggagcuguaagggacagguag

SEQ ID NO: 881689 - RNA, 22 nt, Human
acguguguaugaguguacauau

SEQ ID NO: 881690 - RNA, 22 nt, Human
ucuggagaucauguggggugga

SEQ ID NO: 881691 - RNA, 22 nt, Human
auguuuucuccauguuaugcuu

SEQ ID NO: 881692 - RNA, 22 nt, Human
guguucauggaugucaauuuga

SEQ ID NO: 881693 - RNA, 22 nt, Human
augccuggacugacaugcacug

SEQ ID NO: 881694 - RNA, 22 nt, Human
ucugggcagcagcagcuaguag

SEQ ID NO: 881695 - RNA, 22 nt, Human
uaaugugauauuccuguccuuu

SEQ ID NO: 881696 - RNA, 22 nt, Human
acaaggcuggcugggaaaaacu

SEQ ID NO: 881697 - RNA, 22 nt, Human
ccugucugagccagggugggca

SEQ ID NO: 881698 - RNA, 22 nt, Human
ucacaguuuuagaaaauagaua

SEQ ID NO: 881699 - RNA, 22 nt, Human
ucucuuguaauuuaaaaaaucu

SEQ ID NO: 881700 - RNA, 22 nt, Human
aaggaagacuugagaagguucc

SEQ ID NO: 881701 - RNA, 22 nt, Human
gaaguuugauuuuucuccuaga

SEQ ID NO: 881702 - RNA, 22 nt, Human
agaaacaacuuguuucucuugc

SEQ ID NO: 881703 - RNA, 22 nt, Human
ucccaggugaugcugaggccac

SEQ ID NO: 881704 - RNA, 22 nt, Human
ggcgagcagcgcugugucaggu

SEQ ID NO: 881705 - RNA, 22 nt, Human
ucagaacauugacauucuuauu

SEQ ID NO: 881706 - RNA, 22 nt, Human
gauaacaauaugaaguagauau

SEQ ID NO: 881707 - RNA, 22 nt, Human
agccuuagauaaaugcuagcuc

SEQ ID NO: 881708 - RNA, 22 nt, Human
aagugaaauugccauucuuaua

SEQ ID NO: 881709 - RNA, 22 nt, Human
ucuguucuaagcauucuaugug

SEQ ID NO: 881710 - RNA, 22 nt, Human
uuuggcaagaaaaugugauuga

SEQ ID NO: 881711 - RNA, 22 nt, Human
gagguggcgcgccaucccugcc

SEQ ID NO: 881712 - RNA, 22 nt, Human
aacagacagaaaaaugugaucu

SEQ ID NO: 881713 - RNA, 23 nt, Human
cacugccuucaguugcuucaccu

SEQ ID NO: 881714 - RNA, 22 nt, Human
aggugugaagaguugacacauu

SEQ ID NO: 881715 - RNA, 23 nt, Human
ccugucugugcuggguggacaca

SEQ ID NO: 881716 - RNA, 22 nt, Human
acccagagucauggcacuuagc

SEQ ID NO: 881717 - RNA, 22 nt, Human
uaguuugagaauugaaauagaa

SEQ ID NO: 881718 - RNA, 20 nt, Human
caggccuucaggauggcugg

SEQ ID NO: 881719 - RNA, 22 nt, Human
auuugaaaucuggguuacucug

SEQ ID NO: 881720 - RNA, 22 nt, Human
aggcuggcuggcaggggacaca

SEQ ID NO: 881721 - RNA, 22 nt, Human
ucugcaaacuuaaguugaaaua

SEQ ID NO: 881722 - RNA, 22 nt, Human
ccacagagacaggguccuugcu

SEQ ID NO: 881723 - RNA, 22 nt, Human
uccagccaagccuugguagcug

SEQ ID NO: 881724 - RNA, 22 nt, Human
ugaccugcagucaagaggggaa

SEQ ID NO: 881725 - RNA, 22 nt, Human
uccugaggaaugugaagagaac

SEQ ID NO: 881726 - RNA, 22 nt, Human
uguaaagagaaugguauaugga

SEQ ID NO: 881727 - RNA, 22 nt, Human
ugaaccuucauaaaauuaagug

SEQ ID NO: 881728 - RNA, 22 nt, Human
cagagcaugaauaaaaguuaca

SEQ ID NO: 881729 - RNA, 20 nt, Human
gggcuggcgcauggggaaag

SEQ ID NO: 881730 - RNA, 22 nt, Human
aguugggauucuugguucuggg

SEQ ID NO: 881731 - RNA, 22 nt, Human
ugugcacaggaagcuauucucu

SEQ ID NO: 881732 - RNA, 22 nt, Human
ugagcccaggaguaugaggcug

SEQ ID NO: 881733 - RNA, 22 nt, Human
ucagugcugaguagcgugcacc

SEQ ID NO: 881734 - RNA, 22 nt, Human
uccuggcuuccacuccucuguu

SEQ ID NO: 881735 - RNA, 23 nt, Human
aaaugcugaaucuuuacuguuua

SEQ ID NO: 881736 - RNA, 22 nt, Human
aggugugagaaacgugaccagu

SEQ ID NO: 881737 - RNA, 22 nt, Human
uccuuagggauuuuuccaguca

SEQ ID NO: 881738 - RNA, 22 nt, Human
gcaugggcaagaggacuggggg

SEQ ID NO: 881739 - RNA, 22 nt, Human
gggugcagggucuccagcagcu

SEQ ID NO: 881740 - RNA, 22 nt, Human
guggcagggcuuugcuguucuu

SEQ ID NO: 881741 - RNA, 19 nt, Human
acccagcccaggaguggca

SEQ ID NO: 881742 - RNA, 21 nt, Human
accuuagagagaaagccauca

SEQ ID NO: 881743 - RNA, 22 nt, Human
cugggugguucuaacuguugau

SEQ ID NO: 881744 - RNA, 22 nt, Human
uggcaggaagacguggggcacc

SEQ ID NO: 881745 - RNA, 22 nt, Human
ccugggaccucgcgggaagcgg

SEQ ID NO: 881746 - RNA, 22 nt, Human
cacuagaaagguacagauuaug

SEQ ID NO: 881747 - RNA, 22 nt, Human
gggagagagagcucauguugaa

SEQ ID NO: 881748 - RNA, 22 nt, Human
aaaagagguuaaccaggugugu

SEQ ID NO: 881749 - RNA, 22 nt, Human
uucuuuguagcaaaacguguau

SEQ ID NO: 881750 - RNA, 22 nt, Human
gugggaagaacuucaaguggcu

SEQ ID NO: 881751 - RNA, 22 nt, Human
agcacaggugaaacagucaggu

SEQ ID NO: 881752 - RNA, 22 nt, Human
ucuugagaaauaauuaaacaug

SEQ ID NO: 881753 - RNA, 22 nt, Human
ggaaagagaaguugggaggaau

SEQ ID NO: 881754 - RNA, 22 nt, Human
guuucacacauccugcacauag

SEQ ID NO: 881755 - RNA, 22 nt, Human
cucaaguuucauauuugucuag

SEQ ID NO: 881756 - RNA, 22 nt, Human
acacauuuucuaacagggauca

SEQ ID NO: 881757 - RNA, 22 nt, Human
auauucuugugauuauaaagua

SEQ ID NO: 881758 - RNA, 22 nt, Human
uaggcaauguucuaaggaauga

SEQ ID NO: 881759 - RNA, 22 nt, Human
agcauuuauuucuuagaaauug

SEQ ID NO: 881760 - RNA, 22 nt, Human
uugcauuugcucauuugauaug

SEQ ID NO: 881761 - RNA, 22 nt, Human
uguggcugcaggcgauggagga

SEQ ID NO: 881762 - RNA, 22 nt, Human
cugccucucaggucccugagau

SEQ ID NO: 881763 - RNA, 22 nt, Human
cagugauucaggugccuguugg

SEQ ID NO: 881764 - RNA, 22 nt, Human
augaaauguaaguagagaguuu

SEQ ID NO: 881765 - RNA, 22 nt, Human
cuggcagcauuaacagagagca

SEQ ID NO: 881766 - RNA, 21 nt, Human
aggcccaggaauaugcauuuu

SEQ ID NO: 881767 - RNA, 22 nt, Human
ugguaagguucuacaguguuga

SEQ ID NO: 881768 - RNA, 22 nt, Human
cuuggugagacucccacccacc

SEQ ID NO: 881769 - RNA, 22 nt, Human
aacuuuucauaagggcaaauuu

SEQ ID NO: 881770 - RNA, 17 nt, Human
ggcuggaggggacccgg

SEQ ID NO: 881771 - RNA, 22 nt, Human
gcucugagugauuaaggagcuu

SEQ ID NO: 881772 - RNA, 22 nt, Human
uuggaaagggaggaauguagac

SEQ ID NO: 881773 - RNA, 22 nt, Human
cagauucucacuguauucaggu

SEQ ID NO: 881774 - RNA, 22 nt, Human
aacuacauuguccuuucugaag

SEQ ID NO: 881775 - RNA, 22 nt, Human
uucuuuucugcagcugguauuu

SEQ ID NO: 881776 - RNA, 22 nt, Human
cugcuucacuucgguugcauag

SEQ ID NO: 881777 - RNA, 22 nt, Human
acuugggucaaguagcucacag

SEQ ID NO: 881778 - RNA, 17 nt, Human
aaguccagccugcagcu

SEQ ID NO: 881779 - RNA, 22 nt, Human
uggagguguauaagguagcuuc

SEQ ID NO: 881780 - RNA, 22 nt, Human
agauuucucuuucccuggcuga

SEQ ID NO: 881781 - RNA, 22 nt, Human
uguauuaucaaguaaauacaug

SEQ ID NO: 881782 - RNA, 22 nt, Human
aucauggaagccuaucuugaga

SEQ ID NO: 881783 - RNA, 22 nt, Human
uaauaagucuguuguuuaauug

SEQ ID NO: 881784 - RNA, 22 nt, Human
ccagagcccagcacacggugcu

SEQ ID NO: 881785 - RNA, 22 nt, Human
uggccacaugcgucugugaggc

SEQ ID NO: 881786 - RNA, 22 nt, Human
acaggagaauuaucuggaacaa

SEQ ID NO: 881787 - RNA, 22 nt, Human
auuuccuuugcaaagacugugc

SEQ ID NO: 881788 - RNA, 22 nt, Human
aaggcagcaacuaauggaucuc

SEQ ID NO: 881789 - RNA, 22 nt, Human
guguggggccaggaucagggcu

SEQ ID NO: 881790 - RNA, 22 nt, Human
aguaaacauuucagauuuauuu

SEQ ID NO: 881791 - RNA, 22 nt, Human
ggcaaacagacuugaccaucuu

SEQ ID NO: 881792 - RNA, 22 nt, Human
aaacuugacagugagacaguuu

SEQ ID NO: 881793 - RNA, 22 nt, Human
uggcaaugaggucagaugucuu

SEQ ID NO: 881794 - RNA, 22 nt, Human
uuauguucccuuaagagaacag

SEQ ID NO: 881795 - RNA, 22 nt, Human
agugauuugcaguauuuacuaa

SEQ ID NO: 881796 - RNA, 22 nt, Human
aaaggacuagucuuucuaccau

SEQ ID NO: 881797 - RNA, 22 nt, Human
uucugucacagugcugguauca

SEQ ID NO: 881798 - RNA, 22 nt, Human
ugcuccacuaagccaucccauu

SEQ ID NO: 881799 - RNA, 22 nt, Human
cacaugcaucacgacuuccuuu

SEQ ID NO: 881800 - RNA, 22 nt, Human
gcuccugcagagauguuccaug

SEQ ID NO: 881801 - RNA, 22 nt, Human
uucuuaauggcaaaggauuuua

SEQ ID NO: 881802 - RNA, 22 nt, Human
aacauuuaugauugagguaaau

SEQ ID NO: 881803 - RNA, 22 nt, Human
aaaggcauuuuaauucuaaaga

SEQ ID NO: 881804 - RNA, 22 nt, Human
auuugcuuguucaccaguacuu

SEQ ID NO: 881805 - RNA, 22 nt, Human
cuuccuuggcuucuggggugug

SEQ ID NO: 881806 - RNA, 20 nt, Human
caggcaguuugugguuaggg

SEQ ID NO: 881807 - RNA, 22 nt, Human
auaaaaaggacagauguggucu

SEQ ID NO: 881808 - RNA, 22 nt, Human
accuggcuuuggggauaggcuu

SEQ ID NO: 881809 - RNA, 22 nt, Human
aaauugcuauaugugaauguga

SEQ ID NO: 881810 - RNA, 22 nt, Human
agaguggcuugcucagcuagca

SEQ ID NO: 881811 - RNA, 22 nt, Human
acuggggaguugaagcacuuuc

SEQ ID NO: 881812 - RNA, 22 nt, Human
uguguguguuuauaaaucuaaa

SEQ ID NO: 881813 - RNA, 22 nt, Human
ugcucccagggacucuggcugg

SEQ ID NO: 881814 - RNA, 22 nt, Human
uugagguagagaaaggaaauga

SEQ ID NO: 881815 - RNA, 22 nt, Human
ugauggaggacccagcguggga

SEQ ID NO: 881816 - RNA, 22 nt, Human
caagucaaagacuagaacuagu

SEQ ID NO: 881817 - RNA, 22 nt, Human
auuuauuaagcaucugcuaugu

SEQ ID NO: 881818 - RNA, 22 nt, Human
caguuuuauugguugaaaucug

SEQ ID NO: 881819 - RNA, 22 nt, Human
aaacuuugguauguagcaaaac

SEQ ID NO: 881820 - RNA, 22 nt, Human
gccuggcuaguuagugucaggu

SEQ ID NO: 881821 - RNA, 22 nt, Human
aggagggaccuaggaauauugc

SEQ ID NO: 881822 - RNA, 22 nt, Human
ggucccaggcucccucuugucc

SEQ ID NO: 881823 - RNA, 22 nt, Human
uauuuugcuuuagcugacuguu

SEQ ID NO: 881824 - RNA, 22 nt, Human
uuaacaaauauuucccaugccc

SEQ ID NO: 881825 - RNA, 20 nt, Human
gaaggcaaugguuuggcaca

SEQ ID NO: 881826 - RNA, 23 nt, Human
gggcaccaggagcaccggacagg

SEQ ID NO: 881827 - RNA, 22 nt, Human
gcagacagacugcagugauuuu

SEQ ID NO: 881828 - RNA, 22 nt, Human
augaaaguguuuaaguuuaugu

SEQ ID NO: 881829 - RNA, 22 nt, Human
aaggccauacaaugaaaggggc

SEQ ID NO: 881830 - RNA, 22 nt, Human
acaauguuuuuguucaaagagu

SEQ ID NO: 881831 - RNA, 22 nt, Human
ccuaauuaucucccaaagaucc

SEQ ID NO: 881832 - RNA, 22 nt, Human
gcagagcagagccugcauuggc

SEQ ID NO: 881833 - RNA, 22 nt, Human
cuaauucucagcaugaacuggu

SEQ ID NO: 881834 - RNA, 22 nt, Human
ggcagggcagcgcugauuaggg

SEQ ID NO: 881835 - RNA, 22 nt, Human
uguuuacaaggagaauuugagg

SEQ ID NO: 881836 - RNA, 22 nt, Human
auggacagcaacuggaagcuuc

SEQ ID NO: 881837 - RNA, 22 nt, Human
caggcagaaggaaguaccaggc

SEQ ID NO: 881838 - RNA, 22 nt, Human
gcucuccaggggcucccaggau

SEQ ID NO: 881839 - RNA, 22 nt, Human
ugaaggaaaugacggcagaaga

SEQ ID NO: 881840 - RNA, 22 nt, Human
uccuaacugcccugggcaaggu

SEQ ID NO: 881841 - RNA, 22 nt, Human
ccuaagaauuaaugaauacacc

SEQ ID NO: 881842 - RNA, 22 nt, Human
uuucuaaguaaacacagcauac

SEQ ID NO: 881843 - RNA, 22 nt, Human
gcucugggugaacuuggagcaa

SEQ ID NO: 881844 - RNA, 22 nt, Human
aggugccagaugcacagcugaa

SEQ ID NO: 881845 - RNA, 22 nt, Human
gaagauuugaaacacauagaca

SEQ ID NO: 881846 - RNA, 22 nt, Human
ggcugccuuuagaacggaugcu

SEQ ID NO: 881847 - RNA, 22 nt, Human
ugggccacaagccaugggacca

SEQ ID NO: 881848 - RNA, 22 nt, Human
uugcuauacucauuaguuauuu

SEQ ID NO: 881849 - RNA, 22 nt, Human
agaagccaauccuugucucucu

SEQ ID NO: 881850 - RNA, 22 nt, Human
agcuggaagugcauuucucacu

SEQ ID NO: 881851 - RNA, 22 nt, Human
uuguaucaguuagcuauugcug

SEQ ID NO: 881852 - RNA, 23 nt, Human
guucauuuuauugucugauugcu

SEQ ID NO: 881853 - RNA, 22 nt, Human
guacauauggcacaugcuauuu

SEQ ID NO: 881854 - RNA, 20 nt, Human
cagaaagaagguagauuuuu

SEQ ID NO: 881855 - RNA, 22 nt, Human
uuuggcggggcaauucugaagc

SEQ ID NO: 881856 - RNA, 23 nt, Human
ucaaaguaguuuuauccaauaaa

SEQ ID NO: 881857 - RNA, 22 nt, Human
uuguuaaaauauuggagaaagg

SEQ ID NO: 881858 - RNA, 22 nt, Human
ugcaaaugcccauuuauuuucu

SEQ ID NO: 881859 - RNA, 22 nt, Human
uuauuuaauuuucucacucaga

SEQ ID NO: 881860 - RNA, 22 nt, Human
uacaugcauguguguaaauaua

SEQ ID NO: 881861 - RNA, 22 nt, Human
ucagcauucuuuacaaggauga

SEQ ID NO: 881862 - RNA, 22 nt, Human
uugacaaaggaauugaaucucu

SEQ ID NO: 881863 - RNA, 22 nt, Human
cagugcaggcugggggcccugc

SEQ ID NO: 881864 - RNA, 22 nt, Human
auguuucauccacuggccuuuc

SEQ ID NO: 881865 - RNA, 16 nt, Human
uaacauuuuuaaaagg

SEQ ID NO: 881866 - RNA, 22 nt, Human
ucugaugauaaagcauccuuua

SEQ ID NO: 881867 - RNA, 22 nt, Human
cugcugucaaaaaucacuccau

SEQ ID NO: 881868 - RNA, 22 nt, Human
uauggauggaaagggccaagcu

SEQ ID NO: 881869 - RNA, 22 nt, Human
gaacuuuguggggcugagagga

SEQ ID NO: 881870 - RNA, 22 nt, Human
uccugaaaugugcacaugacau

SEQ ID NO: 881871 - RNA, 22 nt, Human
gcagaccugaccuugggcagca

SEQ ID NO: 881872 - RNA, 22 nt, Human
uggaauguuaugaugaugguaa

SEQ ID NO: 881873 - RNA, 22 nt, Human
auuuuccuuguggguuagcgaa

SEQ ID NO: 881874 - RNA, 22 nt, Human
uagcuuuuaagucauaaccuca

SEQ ID NO: 881875 - RNA, 22 nt, Human
agcaacaguguauaucauaggc

SEQ ID NO: 881876 - RNA, 22 nt, Human
guaacauuauucaugagauaca

SEQ ID NO: 881877 - RNA, 22 nt, Human
ugaaggagaauuaauaggcauu

SEQ ID NO: 881878 - RNA, 22 nt, Human
aagaaagcugaauauucugugu

SEQ ID NO: 881879 - RNA, 22 nt, Human
caaaagcaguucuaucugaguu

SEQ ID NO: 881880 - RNA, 21 nt, Human
gcucaaguuucucuggcaaca

SEQ ID NO: 881881 - RNA, 22 nt, Human
cuggccaggcucucacgugguc

SEQ ID NO: 881882 - RNA, 21 nt, Human
ugugaccugauguaguacauu

SEQ ID NO: 881883 - RNA, 22 nt, Human
acuacaguaagggaggcagcau

SEQ ID NO: 881884 - RNA, 22 nt, Human
cugagaguauuggcaggcuugg

SEQ ID NO: 881885 - RNA, 22 nt, Human
cagaagacugcagggaagggac

SEQ ID NO: 881886 - RNA, 23 nt, Human
guguguggaaagugcaugggccu

SEQ ID NO: 881887 - RNA, 22 nt, Human
ggugucugauuccaaggccaca

SEQ ID NO: 881888 - RNA, 22 nt, Human
uuccaaagaaauugaccaagac

SEQ ID NO: 881889 - RNA, 22 nt, Human
gcuuuucuccuuagugucccug

SEQ ID NO: 881890 - RNA, 22 nt, Human
uaaucuaccacuauugcaauau

SEQ ID NO: 881891 - RNA, 22 nt, Human
caaagugccuguaccacuuugc

SEQ ID NO: 881892 - RNA, 18 nt, Human
ccuguuacacacuggggu

SEQ ID NO: 881893 - RNA, 22 nt, Human
agcuugcuguauuuucuggagg

SEQ ID NO: 881894 - RNA, 22 nt, Human
acugagcauaaauaugugucca

SEQ ID NO: 881895 - RNA, 22 nt, Human
ucucuggaguauaaccagggau

SEQ ID NO: 881896 - RNA, 22 nt, Human
auuacaacuggaauggugcugg

SEQ ID NO: 881897 - RNA, 22 nt, Human
aaucagaauuuauugaaucuuu

SEQ ID NO: 881898 - RNA, 22 nt, Human
uacauacaagauguguuuaaaa

SEQ ID NO: 881899 - RNA, 22 nt, Human
cuucauguacaguuauuggaga

SEQ ID NO: 881900 - RNA, 22 nt, Human
gcuauacaaguguagaauagag

SEQ ID NO: 881901 - RNA, 22 nt, Human
auguagcuugucccacaucaua

SEQ ID NO: 881902 - RNA, 22 nt, Human
caucuacuuuaaggauucuggg

SEQ ID NO: 881903 - RNA, 20 nt, Human
cagguauuacuuccuuuaug

SEQ ID NO: 881904 - RNA, 21 nt, Human
uucugcauuaagguggagaua

SEQ ID NO: 881905 - RNA, 22 nt, Human
cagucaacagagagcccgucag

SEQ ID NO: 881906 - RNA, 22 nt, Human
auuggugcucuggcacauuccu

SEQ ID NO: 881907 - RNA, 22 nt, Human
uguaguccaggaauugugucug

SEQ ID NO: 881908 - RNA, 22 nt, Human
ggaagcugugcucucaggccuc

SEQ ID NO: 881909 - RNA, 22 nt, Human
ucaguaaacagguuuaaguccu

SEQ ID NO: 881910 - RNA, 18 nt, Human
gcuuggcugcagagagag

SEQ ID NO: 881911 - RNA, 22 nt, Human
uuguuuuggagaugagcuaaaa

SEQ ID NO: 881912 - RNA, 22 nt, Human
cagggcugguuugucgaagaaa

SEQ ID NO: 881913 - RNA, 22 nt, Human
ggcaggugacggggaugaguau

SEQ ID NO: 881914 - RNA, 22 nt, Human
gcauuaauguaagacccacucc

SEQ ID NO: 881915 - RNA, 22 nt, Human
uuucaucaucaaaauagugagg

SEQ ID NO: 881916 - RNA, 22 nt, Human
uaggcaggcugaauguagauuu

SEQ ID NO: 881917 - RNA, 22 nt, Human
guccuuggcuugaggcaccuca

SEQ ID NO: 881918 - RNA, 22 nt, Human
uacuuaaaaauuaucaaagugg

SEQ ID NO: 881919 - RNA, 22 nt, Human
acugccagaagacagcuuuuca

SEQ ID NO: 881920 - RNA, 22 nt, Human
caugggagguuggcuuggcaug

SEQ ID NO: 881921 - RNA, 22 nt, Human
cucaaagaagggagguauuugg

SEQ ID NO: 881922 - RNA, 22 nt, Human
gccugugcauagcagcggacuc

SEQ ID NO: 881923 - RNA, 22 nt, Human
gugcuguauaugcaagaggaag

SEQ ID NO: 881924 - RNA, 22 nt, Human
caguacagaaucuauuccugca

SEQ ID NO: 881925 - RNA, 22 nt, Human
uagaacagaaggcaccuucucu

SEQ ID NO: 881926 - RNA, 22 nt, Human
guaaaguaaacccacuuuguag

SEQ ID NO: 881927 - RNA, 20 nt, Human
auccucacccucaguccuag

SEQ ID NO: 881928 - RNA, 22 nt, Human
gccuacauuucccaguugaaug

SEQ ID NO: 881929 - RNA, 22 nt, Human
aggcugccucuuuugagagggu

SEQ ID NO: 881930 - RNA, 22 nt, Human
auauuuacugcuguggugaagg

SEQ ID NO: 881931 - RNA, 20 nt, Human
uggcccuguuuucuccaggc

SEQ ID NO: 881932 - RNA, 22 nt, Human
uguaucugugauguagggguuu

SEQ ID NO: 881933 - RNA, 19 nt, Human
uguguggguuuagaguagu

SEQ ID NO: 881934 - RNA, 22 nt, Human
aacagugaggugaauaugcucc

SEQ ID NO: 881935 - RNA, 22 nt, Human
ugggacacccucacgccugcac

SEQ ID NO: 881936 - RNA, 22 nt, Human
ggagccuggcccggcccuuggc

SEQ ID NO: 881937 - RNA, 22 nt, Human
gcugcaacuguugcucucugca

SEQ ID NO: 881938 - RNA, 22 nt, Human
caggccuugggacccagacugg

SEQ ID NO: 881939 - RNA, 22 nt, Human
augcaauaccuucugaaaauaa

SEQ ID NO: 881940 - RNA, 22 nt, Human
uaggcagugcucugugcuucag

SEQ ID NO: 881941 - RNA, 20 nt, Human
cuccugggacugcugguuau

SEQ ID NO: 881942 - RNA, 22 nt, Human
acucacagggccucaguuuucc

SEQ ID NO: 881943 - RNA, 22 nt, Human
acuaguuuuccauaauauagga

SEQ ID NO: 881944 - RNA, 22 nt, Human
ggcagaaggccucccagcuccu

SEQ ID NO: 881945 - RNA, 22 nt, Human
aacuuagacuuguuucuuggua

SEQ ID NO: 881946 - RNA, 22 nt, Human
gcccugcucuguuggucaccug

SEQ ID NO: 881947 - RNA, 22 nt, Human
guucacaagaguuacagacaga

SEQ ID NO: 881948 - RNA, 22 nt, Human
augaaucaaacuguacacugag

SEQ ID NO: 881949 - RNA, 23 nt, Human
uugcaaaaugcaauugaguuaga

SEQ ID NO: 881950 - RNA, 22 nt, Human
ggucagagccguuagcauucag

SEQ ID NO: 881951 - RNA, 22 nt, Human
ucaaggcaaaguaaauauucaa

SEQ ID NO: 881952 - RNA, 22 nt, Human
gucagcaaaaaauuuaugugag

SEQ ID NO: 881953 - RNA, 22 nt, Human
aaggugugcugugagaccuggu

SEQ ID NO: 881954 - RNA, 22 nt, Human
cccaggaguuggaggcuacggu

SEQ ID NO: 881955 - RNA, 22 nt, Human
cuaauaacaugaacuacuuucu

SEQ ID NO: 881956 - RNA, 22 nt, Human
uuaaaaugaauauugauuagca

SEQ ID NO: 881957 - RNA, 22 nt, Human
uuacaguaugaucaacuuuuca

SEQ ID NO: 881958 - RNA, 22 nt, Human
uguacacacacguguguaucua

SEQ ID NO: 881959 - RNA, 22 nt, Human
uggcugcaggggugucugacau

SEQ ID NO: 881960 - RNA, 22 nt, Human
gucaaauauacuaagagguaaa

SEQ ID NO: 881961 - RNA, 22 nt, Human
acauacuuaugcuaaaaauaua

SEQ ID NO: 881962 - RNA, 22 nt, Human
auaucacagaugcagaaagaga

SEQ ID NO: 881963 - RNA, 22 nt, Human
auagaauguauuauaguacaga

SEQ ID NO: 881964 - RNA, 22 nt, Human
uucuauugcacacaaauaauua

SEQ ID NO: 881965 - RNA, 22 nt, Human
aaauucuaaggucacaauguug

SEQ ID NO: 881966 - RNA, 22 nt, Human
ccagugcuaagguagccucugc

SEQ ID NO: 881967 - RNA, 22 nt, Human
gcugagugauugauauuuuagu

SEQ ID NO: 881968 - RNA, 22 nt, Human
ugaggcucagaagugccaagug

SEQ ID NO: 881969 - RNA, 21 nt, Human
ugcuccaggagggggcagucc

SEQ ID NO: 881970 - RNA, 22 nt, Human
gccuggagcucaugugggcauu

SEQ ID NO: 881971 - RNA, 22 nt, Human
agagaugaaaaggguacugagg

SEQ ID NO: 881972 - RNA, 22 nt, Human
gcucugagcccccagaagcaga

SEQ ID NO: 881973 - RNA, 22 nt, Human
gucuuuuugucuggcagagguc

SEQ ID NO: 881974 - RNA, 22 nt, Human
cuauuuucauucuuacauuguc

SEQ ID NO: 881975 - RNA, 22 nt, Human
ugaggcuuggaggcuccagugg

SEQ ID NO: 881976 - RNA, 22 nt, Human
ugcagcagucagucaggccugg

SEQ ID NO: 881977 - RNA, 22 nt, Human
agguaaggggcucccaaguccc

SEQ ID NO: 881978 - RNA, 19 nt, Human
ggggccugugauggucaca

SEQ ID NO: 881979 - RNA, 18 nt, Human
gcucuggcucaccuccag

SEQ ID NO: 881980 - RNA, 22 nt, Human
ugugugcauacacacgguaaca

SEQ ID NO: 881981 - RNA, 22 nt, Human
gggugggaacaggaugccagga

SEQ ID NO: 881982 - RNA, 22 nt, Human
auuguaaaguacuguguacaau

SEQ ID NO: 881983 - RNA, 22 nt, Human
gguggcugggauuaguagccca

SEQ ID NO: 881984 - RNA, 22 nt, Human
uguguucaugucacuggaaucc

SEQ ID NO: 881985 - RNA, 22 nt, Human
ggcuucauuucuguccuugauu

SEQ ID NO: 881986 - RNA, 22 nt, Human
ucagaaagcuuagugucuugca

SEQ ID NO: 881987 - RNA, 22 nt, Human
aacaucugggcccugauuuugg

SEQ ID NO: 881988 - RNA, 22 nt, Human
ccuuguccucugguuuccuguu

SEQ ID NO: 881989 - RNA, 22 nt, Human
caggcugcugccuagaaugaca

SEQ ID NO: 881990 - RNA, 22 nt, Human
uuauagaaugguggauuuucug

SEQ ID NO: 881991 - RNA, 22 nt, Human
ugacaggugcugggggcagugu

SEQ ID NO: 881992 - RNA, 22 nt, Human
uagggcagccacccaggcugcu

SEQ ID NO: 881993 - RNA, 22 nt, Human
uauugucuaggaauuguuuaaa

SEQ ID NO: 881994 - RNA, 22 nt, Human
ggcuggcucaugcaaaggguga

SEQ ID NO: 881995 - RNA, 22 nt, Human
gacacaguucuguucuaguagg

SEQ ID NO: 881996 - RNA, 22 nt, Human
uuuuccucaggaaugcuaagcu

SEQ ID NO: 881997 - RNA, 16 nt, Human
uccaguguuccuggau

SEQ ID NO: 881998 - RNA, 22 nt, Human
agguauguacacacagcucuaa

SEQ ID NO: 881999 - RNA, 22 nt, Human
aucauacauguaacuaaguaaa

SEQ ID NO: 882000 - RNA, 20 nt, Human
cugcugugauucccuccucc

SEQ ID NO: 882001 - RNA, 22 nt, Human
ucuaggagcuuaaaggaggcca

SEQ ID NO: 882002 - RNA, 22 nt, Human
caaaugcauaguuuauaagaag

SEQ ID NO: 882003 - RNA, 22 nt, Human
acaauauuguacccagaaguuu

SEQ ID NO: 882004 - RNA, 22 nt, Human
ggcaggguaaaccgagguaagu

SEQ ID NO: 882005 - RNA, 22 nt, Human
uccugagcccuggggucagugu

SEQ ID NO: 882006 - RNA, 22 nt, Human
acugaaaaugaauuagaaacag

SEQ ID NO: 882007 - RNA, 22 nt, Human
uaaggaaggggaaagacauguc

SEQ ID NO: 882008 - RNA, 22 nt, Human
ugcagaagugagucaugaggaa

SEQ ID NO: 882009 - RNA, 22 nt, Human
caggagcuucugcccauggcca

SEQ ID NO: 882010 - RNA, 22 nt, Human
uuacacaugcuuuguguguaug

SEQ ID NO: 882011 - RNA, 22 nt, Human
cuuauugugucuuugaauaagu

SEQ ID NO: 882012 - RNA, 22 nt, Human
uccaggcccacucgguggggcu

SEQ ID NO: 882013 - RNA, 22 nt, Human
gagugaguggccaggaggcaga

SEQ ID NO: 882014 - RNA, 22 nt, Human
uuuucucuauauugucugugaa

SEQ ID NO: 882015 - RNA, 22 nt, Human
agugcaaacuuuauugugaccu

SEQ ID NO: 882016 - RNA, 22 nt, Human
auuuagaaguuggagggcaaga

SEQ ID NO: 882017 - RNA, 22 nt, Human
aaacacuguacaaucugcaggg

SEQ ID NO: 882018 - RNA, 22 nt, Human
aaccugaagaaaauauuugcug

SEQ ID NO: 882019 - RNA, 22 nt, Human
auagcaauuugcccaauuaccu

SEQ ID NO: 882020 - RNA, 22 nt, Human
auuauucaaucauauuaaaagu

SEQ ID NO: 882021 - RNA, 22 nt, Human
uguacaggaggccacauuggaa

SEQ ID NO: 882022 - RNA, 22 nt, Human
cuggcuuccaugcuguaguggc

SEQ ID NO: 882023 - RNA, 22 nt, Human
cuguggcauugugaggacugca

SEQ ID NO: 882024 - RNA, 17 nt, Human
agcaggcugcagaggcc

SEQ ID NO: 882025 - RNA, 22 nt, Human
accucccagcucugagcuuggg

SEQ ID NO: 882026 - RNA, 22 nt, Human
cucugggcaccaaagagcagcu

SEQ ID NO: 882027 - RNA, 21 nt, Human
acccaggggaagcagaaacug

SEQ ID NO: 882028 - RNA, 22 nt, Human
cuguccauauucaagggguagg

SEQ ID NO: 882029 - RNA, 22 nt, Human
ugcauuaagguaauuguauaau

SEQ ID NO: 882030 - RNA, 21 nt, Human
ugcagcagauuugggggaaga

SEQ ID NO: 882031 - RNA, 22 nt, Human
gccugggugucgaucacuagug

SEQ ID NO: 882032 - RNA, 22 nt, Human
gcucugugggggaaauccuggg

SEQ ID NO: 882033 - RNA, 22 nt, Human
gcagagcuaucuucuggauuug

SEQ ID NO: 882034 - RNA, 22 nt, Human
aagaauuuuccagcaugucagu

SEQ ID NO: 882035 - RNA, 22 nt, Human
uacagcauguccuuagcaaggc

SEQ ID NO: 882036 - RNA, 22 nt, Human
ucaaacuggcagacuucuacuu

SEQ ID NO: 882037 - RNA, 20 nt, Human
uuucaaacugcaccuuugcu

SEQ ID NO: 882038 - RNA, 20 nt, Human
gggugaggauggagaauuug

SEQ ID NO: 882039 - RNA, 22 nt, Human
accugagaccuaaucugacugu

SEQ ID NO: 882040 - RNA, 22 nt, Human
auuagcaauuguuucauugauc

SEQ ID NO: 882041 - RNA, 22 nt, Human
agagaaacugauguccuuugaa

SEQ ID NO: 882042 - RNA, 22 nt, Human
gggugggguucaggaaucuuca

SEQ ID NO: 882043 - RNA, 22 nt, Human
gcgccuggcacacagcaagggc

SEQ ID NO: 882044 - RNA, 22 nt, Human
agcuggcaccaaauauaguaaa

SEQ ID NO: 882045 - RNA, 22 nt, Human
aaggagcacacaaucuagaacc

SEQ ID NO: 882046 - RNA, 22 nt, Human
uagaaaucauuuagaaguauug

SEQ ID NO: 882047 - RNA, 22 nt, Human
ucagaggugagcuucuugcuaa

SEQ ID NO: 882048 - RNA, 22 nt, Human
uacagaagcuuuugaaaagaug

SEQ ID NO: 882049 - RNA, 22 nt, Human
aacagcuaguaccaauccacua

SEQ ID NO: 882050 - RNA, 17 nt, Human
cugggauguggacucuu

SEQ ID NO: 882051 - RNA, 18 nt, Human
cugggcucgagagauccu

SEQ ID NO: 882052 - RNA, 22 nt, Human
ugaaaccuuggcuagagauuga

SEQ ID NO: 882053 - RNA, 22 nt, Human
acugcagccuagggaccacagu

SEQ ID NO: 882054 - RNA, 22 nt, Human
gugggcaguucaauucugggag

SEQ ID NO: 882055 - RNA, 23 nt, Human
agccucuuguggauggucagcga

SEQ ID NO: 882056 - RNA, 20 nt, Human
aacaaacuacaaaauuaugu

SEQ ID NO: 882057 - RNA, 22 nt, Human
ugacaguuuaguguaauaguua

SEQ ID NO: 882058 - RNA, 22 nt, Human
guuuccuuuaauagugauauug

SEQ ID NO: 882059 - RNA, 20 nt, Human
uggaaggcaucugcauuauu

SEQ ID NO: 882060 - RNA, 21 nt, Human
ugcaauauauauuugccugaa

SEQ ID NO: 882061 - RNA, 22 nt, Human
gccaaauaaguggaaucacaca

SEQ ID NO: 882062 - RNA, 22 nt, Human
uuuaccaaauagauuaugucag

SEQ ID NO: 882063 - RNA, 22 nt, Human
uuucaggcagguggaaugagua

SEQ ID NO: 882064 - RNA, 22 nt, Human
uaacaagucauuuuaucagcag

SEQ ID NO: 882065 - RNA, 22 nt, Human
agagggcuggacgcagguugga

SEQ ID NO: 882066 - RNA, 22 nt, Human
gauguaaauggucuuuggcaga

SEQ ID NO: 882067 - RNA, 22 nt, Human
cuuuggaggucauagccaagag

SEQ ID NO: 882068 - RNA, 22 nt, Human
ccuggcacgaagggcugagguu

SEQ ID NO: 882069 - RNA, 22 nt, Human
ucuggcucagggcucugaggga

SEQ ID NO: 882070 - RNA, 22 nt, Human
auucaaagaaccuuuagcauug

SEQ ID NO: 882071 - RNA, 22 nt, Human
gcuggcagucccaucagcuggg

SEQ ID NO: 882072 - RNA, 22 nt, Human
ggaagcugaggcccagugaagg

SEQ ID NO: 882073 - RNA, 22 nt, Human
uucacccuggaccagaaauugg

SEQ ID NO: 882074 - RNA, 21 nt, Human
uuucauugaaugagauaaggu

SEQ ID NO: 882075 - RNA, 20 nt, Human
cucucuggaaggugggagcc

SEQ ID NO: 882076 - RNA, 22 nt, Human
uucaguguuaaucuugggagaa

SEQ ID NO: 882077 - RNA, 22 nt, Human
ucuucaugucucugcuugaguc

SEQ ID NO: 882078 - RNA, 23 nt, Human
cuagaugcaagcuccaugaggga

SEQ ID NO: 882079 - RNA, 22 nt, Human
caacagaaggaagcagggucag

SEQ ID NO: 882080 - RNA, 23 nt, Human
cuucaucaaaaguuaacacuagu

SEQ ID NO: 882081 - RNA, 22 nt, Human
agggggcucagugacugaagug

SEQ ID NO: 882082 - RNA, 22 nt, Human
ucagcacuggcgcugggcaggu

SEQ ID NO: 882083 - RNA, 22 nt, Human
ugugugucagcccaagggccuu

SEQ ID NO: 882084 - RNA, 22 nt, Human
aagccuuggcccuucauuauaa

SEQ ID NO: 882085 - RNA, 22 nt, Human
ccucuccaguuuuaacgugacc

SEQ ID NO: 882086 - RNA, 22 nt, Human
aagaguggagaauaaaauagga

SEQ ID NO: 882087 - RNA, 22 nt, Human
gaugggcaucaaacaugacgug

SEQ ID NO: 882088 - RNA, 22 nt, Human
agaaggcucacuaagagugacu

SEQ ID NO: 882089 - RNA, 22 nt, Human
uagaaaugcccagauucugcua

SEQ ID NO: 882090 - RNA, 22 nt, Human
aggaacuggauauaaugugaga

SEQ ID NO: 882091 - RNA, 22 nt, Human
gugagguccaguaacuugucca

SEQ ID NO: 882092 - RNA, 22 nt, Human
aggacauguaaauggagaggga

SEQ ID NO: 882093 - RNA, 21 nt, Human
guauucuuuaugaagugaaaa

SEQ ID NO: 882094 - RNA, 22 nt, Human
ucacaggcucuccaccaugagg

SEQ ID NO: 882095 - RNA, 22 nt, Human
aggaagaacagauaauggacgc

SEQ ID NO: 882096 - RNA, 19 nt, Human
uugaagaauaaaaacacau

SEQ ID NO: 882097 - RNA, 22 nt, Human
gaagcccaagcuucacagcuau

SEQ ID NO: 882098 - RNA, 22 nt, Human
auguuguugaacucuuugcaug

SEQ ID NO: 882099 - RNA, 22 nt, Human
cugcaagggaucuucagguagc

SEQ ID NO: 882100 - RNA, 18 nt, Human
cauuuguuauugugugug

SEQ ID NO: 882101 - RNA, 22 nt, Human
gcuccaggaggcucccgcgucu

SEQ ID NO: 882102 - RNA, 22 nt, Human
auuaaacugagcaaauuaacau

SEQ ID NO: 882103 - RNA, 22 nt, Human
ucaugcucugguuuagcuguuu

SEQ ID NO: 882104 - RNA, 22 nt, Human
aagcagcauaugacagcaucca

SEQ ID NO: 882105 - RNA, 22 nt, Human
gcuggggaccagcugucucuga

SEQ ID NO: 882106 - RNA, 22 nt, Human
gacagacaggaggcauucaggg

SEQ ID NO: 882107 - RNA, 19 nt, Human
ugugggcaagggauggcag

SEQ ID NO: 882108 - RNA, 22 nt, Human
cucccugggccucaguuucucu

SEQ ID NO: 882109 - RNA, 22 nt, Human
aagguacaggcauugcugcagc

SEQ ID NO: 882110 - RNA, 22 nt, Human
guggcagccaugagaauauaac

SEQ ID NO: 882111 - RNA, 22 nt, Human
ggagacugaucugagugauaac

SEQ ID NO: 882112 - RNA, 22 nt, Human
auguuuugauugguuaggucug

SEQ ID NO: 882113 - RNA, 22 nt, Human
acacugcagaugaaagcauaag

SEQ ID NO: 882114 - RNA, 22 nt, Human
cuggcauugagggucacaaggc

SEQ ID NO: 882115 - RNA, 22 nt, Human
acaucuguuugagaaaaagaag

SEQ ID NO: 882116 - RNA, 22 nt, Human
uuuucccagagcuguccucaag

SEQ ID NO: 882117 - RNA, 22 nt, Human
acugaaacacugagugaauugu

SEQ ID NO: 882118 - RNA, 22 nt, Human
aaaccugaauguaugucagaag

SEQ ID NO: 882119 - RNA, 22 nt, Human
cagaguacugggagaacagaag

SEQ ID NO: 882120 - RNA, 22 nt, Human
aggcugugaguaguucuuguug

SEQ ID NO: 882121 - RNA, 19 nt, Human
gagcugccuuuugaagacc

SEQ ID NO: 882122 - RNA, 17 nt, Human
uguuuuuucccuguucu

SEQ ID NO: 882123 - RNA, 22 nt, Human
uacaaagucagaauaacaggug

SEQ ID NO: 882124 - RNA, 23 nt, Human
auguaaacuucagagucauugcc

SEQ ID NO: 882125 - RNA, 22 nt, Human
ucaggagggauuguugccuauu

SEQ ID NO: 882126 - RNA, 22 nt, Human
aggcugcagaacagucaggugc

SEQ ID NO: 882127 - RNA, 22 nt, Human
uugcugauucuguauuuaaggu

SEQ ID NO: 882128 - RNA, 22 nt, Human
aaggcauauauucuaaacagga

SEQ ID NO: 882129 - RNA, 22 nt, Human
cugaugccucucuucuuggcuu

SEQ ID NO: 882130 - RNA, 23 nt, Human
ucuguggccccuucgccccacuc

SEQ ID NO: 882131 - RNA, 22 nt, Human
uggcugcaguugggcccucaga

SEQ ID NO: 882132 - RNA, 22 nt, Human
uacaaagagguaauugcauaua

SEQ ID NO: 882133 - RNA, 22 nt, Human
ucaaaguaccauuaucagugga

SEQ ID NO: 882134 - RNA, 22 nt, Human
ucacagugagccaugucagaga

SEQ ID NO: 882135 - RNA, 22 nt, Human
cagagggaaaaggggaguaaua

SEQ ID NO: 882136 - RNA, 22 nt, Human
gcuacugauugaccuuggagag

SEQ ID NO: 882137 - RNA, 22 nt, Human
cugagaagaggguauguggcgc

SEQ ID NO: 882138 - RNA, 22 nt, Human
acucuugucucaacuuuuguau

SEQ ID NO: 882139 - RNA, 22 nt, Human
gagccaggagauaccuaagggg

SEQ ID NO: 882140 - RNA, 22 nt, Human
aaaauuuugcccuauccuucau

SEQ ID NO: 882141 - RNA, 22 nt, Human
gcagcuggacccacacggcuua

SEQ ID NO: 882142 - RNA, 22 nt, Human
uauugaauuagacccuaaaaug

SEQ ID NO: 882143 - RNA, 22 nt, Human
gcaagcuguccuuuugcauggc

SEQ ID NO: 882144 - RNA, 22 nt, Human
uuaggaaguuucagaaaaugca

SEQ ID NO: 882145 - RNA, 22 nt, Human
uuggcagcccugacccaauggg

SEQ ID NO: 882146 - RNA, 22 nt, Human
ucagagagccucaggcacugcc

SEQ ID NO: 882147 - RNA, 22 nt, Human
uguucuguaccuguccuggggc

SEQ ID NO: 882148 - RNA, 22 nt, Human
gcugggcaccucucccagauug

SEQ ID NO: 882149 - RNA, 19 nt, Human
gagcagcuuccuaucuggu

SEQ ID NO: 882150 - RNA, 22 nt, Human
agcagcugcuuuucuucauugg

SEQ ID NO: 882151 - RNA, 22 nt, Human
aaggccacugaagaaaucacaa

SEQ ID NO: 882152 - RNA, 22 nt, Human
cugaagcucuccaguuuguuuc

SEQ ID NO: 882153 - RNA, 22 nt, Human
acacaggaagucagcacugaug

SEQ ID NO: 882154 - RNA, 22 nt, Human
caacaucaguccucaugagaca

SEQ ID NO: 882155 - RNA, 22 nt, Human
aguuuggaagaauuuggucugu

SEQ ID NO: 882156 - RNA, 22 nt, Human
agggcagcuaaggugcugacug

SEQ ID NO: 882157 - RNA, 22 nt, Human
gaaacuugccugaagucaacca

SEQ ID NO: 882158 - RNA, 21 nt, Human
ccacucaugacuccacucacc

SEQ ID NO: 882159 - RNA, 22 nt, Human
ccucugggccuggaagggcagu

SEQ ID NO: 882160 - RNA, 22 nt, Human
gcagugugaugcuuccagccac

SEQ ID NO: 882161 - RNA, 22 nt, Human
gcucucuuucacagagguagga

SEQ ID NO: 882162 - RNA, 22 nt, Human
ugagaguuccuccucuuuccac

SEQ ID NO: 882163 - RNA, 22 nt, Human
auucuggggcugguuauuuuga

SEQ ID NO: 882164 - RNA, 22 nt, Human
cagggcuuuccugagaagugau

SEQ ID NO: 882165 - RNA, 22 nt, Human
cagucccagcugcucagaaggc

SEQ ID NO: 882166 - RNA, 22 nt, Human
ugugcucagccaggggcaggcc

SEQ ID NO: 882167 - RNA, 20 nt, Human
aggcagcuggccaggcaggu

SEQ ID NO: 882168 - RNA, 22 nt, Human
acuaaauuugucaaugacacuu

SEQ ID NO: 882169 - RNA, 22 nt, Human
aaucaaagaaugggcuaguugg

SEQ ID NO: 882170 - RNA, 22 nt, Human
cucuguuucucagccuauuucc

SEQ ID NO: 882171 - RNA, 22 nt, Human
cucugaggucuaggaccauggc

SEQ ID NO: 882172 - RNA, 19 nt, Human
agcaggcagguggcccagg

SEQ ID NO: 882173 - RNA, 17 nt, Human
ggagcagauccaccauu

SEQ ID NO: 882174 - RNA, 22 nt, Human
aaaauauguauaacucuucugc

SEQ ID NO: 882175 - RNA, 22 nt, Human
ugacccuugccaaguuccuuuu

SEQ ID NO: 882176 - RNA, 21 nt, Human
acuuggccaggcccccaccug

SEQ ID NO: 882177 - RNA, 22 nt, Human
gggccuguguguucaggagccu

SEQ ID NO: 882178 - RNA, 22 nt, Human
gaagugcaaccugaaauacuag

SEQ ID NO: 882179 - RNA, 22 nt, Human
uaacaguaccauuaacuuugau

SEQ ID NO: 882180 - RNA, 22 nt, Human
uuaggcaaugcucucaaauuug

SEQ ID NO: 882181 - RNA, 22 nt, Human
gcaccaggcuuagagccccagg

SEQ ID NO: 882182 - RNA, 22 nt, Human
caccucugccucaagcuuccca

SEQ ID NO: 882183 - RNA, 22 nt, Human
uuuccacacucacugcacucau

SEQ ID NO: 882184 - RNA, 22 nt, Human
aguauuuguggauuuguauugg

SEQ ID NO: 882185 - RNA, 22 nt, Human
agccagugggauuagagccucu

SEQ ID NO: 882186 - RNA, 22 nt, Human
uccuaagaagcaugggucccaa

SEQ ID NO: 882187 - RNA, 22 nt, Human
gugcagugagcagugcagcacc

SEQ ID NO: 882188 - RNA, 22 nt, Human
agcagggcucugccaugggccc

SEQ ID NO: 882189 - RNA, 23 nt, Human
agaggcugcaggguauugagaau

SEQ ID NO: 882190 - RNA, 19 nt, Human
ugcugaaguugucagucug

SEQ ID NO: 882191 - RNA, 22 nt, Human
gcaaauguuuuugaguguuuac

SEQ ID NO: 882192 - RNA, 22 nt, Human
cuggagagaauguggaaugauu

SEQ ID NO: 882193 - RNA, 22 nt, Human
cagcagccuacaaugcacagaa

SEQ ID NO: 882194 - RNA, 22 nt, Human
agcaggcuccuuccuucucugg

SEQ ID NO: 882195 - RNA, 22 nt, Human
cugaggcugggcugaggguaua

SEQ ID NO: 882196 - RNA, 22 nt, Human
ugagacaaaauugacagacaaa

SEQ ID NO: 882197 - RNA, 22 nt, Human
ucuuccagauacuuccugacuu

SEQ ID NO: 882198 - RNA, 22 nt, Human
gccuucugcgcucgugucuccg

SEQ ID NO: 882199 - RNA, 22 nt, Human
cuagagaaucuuuuaagaagug

SEQ ID NO: 882200 - RNA, 22 nt, Human
uggcuggucacaugguaggucu

SEQ ID NO: 882201 - RNA, 22 nt, Human
ggcaggagauaaaauauuaguu

SEQ ID NO: 882202 - RNA, 22 nt, Human
gggaggugaaaggucaugugug

SEQ ID NO: 882203 - RNA, 22 nt, Human
gggaugcagucagagccccugu

SEQ ID NO: 882204 - RNA, 22 nt, Human
ugacacacugccaggcgcucgg

SEQ ID NO: 882205 - RNA, 22 nt, Human
uccuggcucugcugccuccuag

SEQ ID NO: 882206 - RNA, 22 nt, Human
ucucccaagccuggcaggggca

SEQ ID NO: 882207 - RNA, 22 nt, Human
ucuguacaccaggggccauucu

SEQ ID NO: 882208 - RNA, 20 nt, Human
gggcagccucgggagugggu

SEQ ID NO: 882209 - RNA, 19 nt, Human
gaguuuaucuccuagcccu

SEQ ID NO: 882210 - RNA, 22 nt, Human
augcuagaagggagcacuaugu

SEQ ID NO: 882211 - RNA, 22 nt, Human
gacuuugccacuugcuccagcu

SEQ ID NO: 882212 - RNA, 22 nt, Human
agacaucagcuugugugcaggg

SEQ ID NO: 882213 - RNA, 20 nt, Human
gagagcuggggaugaggcug

SEQ ID NO: 882214 - RNA, 22 nt, Human
uguuuugucuaauagggcaggu

SEQ ID NO: 882215 - RNA, 22 nt, Human
ucuagaaaaaaacugcugugga

SEQ ID NO: 882216 - RNA, 22 nt, Human
auguuauuuauuauccucgguu

SEQ ID NO: 882217 - RNA, 22 nt, Human
aguucaaacucuauaagaacuu

SEQ ID NO: 882218 - RNA, 22 nt, Human
aaaaucugcuuccuuuuacaga

SEQ ID NO: 882219 - RNA, 19 nt, Human
cuugcugggugguuucugc

SEQ ID NO: 882220 - RNA, 22 nt, Human
augaguuuugggggauguuaga

SEQ ID NO: 882221 - RNA, 22 nt, Human
ugcuggcacgugacugggaagu

SEQ ID NO: 882222 - RNA, 17 nt, Human
auccccagcaucuagaa

SEQ ID NO: 882223 - RNA, 22 nt, Human
gccagagguucaacaacugucu

SEQ ID NO: 882224 - RNA, 22 nt, Human
gacuggccuggagaugcagcug

SEQ ID NO: 882225 - RNA, 22 nt, Human
agccaggccagcugucuugagu

SEQ ID NO: 882226 - RNA, 22 nt, Human
ugccuggguguaaagggccaac

SEQ ID NO: 882227 - RNA, 22 nt, Human
uccuuggcacacucggaucuga

SEQ ID NO: 882228 - RNA, 22 nt, Human
gaccuuagaacgugacacaaga

SEQ ID NO: 882229 - RNA, 22 nt, Human
aaaguaucuuacugcagccgag

SEQ ID NO: 882230 - RNA, 22 nt, Human
cuggcugugucuuggaggagcu

SEQ ID NO: 882231 - RNA, 22 nt, Human
aagggcugggucugguuaaccc

SEQ ID NO: 882232 - RNA, 22 nt, Human
gcaggggaguggcaggcccgga

SEQ ID NO: 882233 - RNA, 22 nt, Human
agcucucccauagggcaagauc

SEQ ID NO: 882234 - RNA, 22 nt, Human
gccugccacgcaugcagaguca

SEQ ID NO: 882235 - RNA, 22 nt, Human
agcagagucugugugcacuuua

SEQ ID NO: 882236 - RNA, 22 nt, Human
agcagggggaguuagacuagau

SEQ ID NO: 882237 - RNA, 20 nt, Human
ggcagcucuagucgaggccc

SEQ ID NO: 882238 - RNA, 23 nt, Human
agugaagcugguuagugaugacc

SEQ ID NO: 882239 - RNA, 22 nt, Human
cagcucugugcaggccugggga

SEQ ID NO: 882240 - RNA, 22 nt, Human
aauaagauccugaagauauguu

SEQ ID NO: 882241 - RNA, 22 nt, Human
aagcugccauagaacgagaggu

SEQ ID NO: 882242 - RNA, 22 nt, Human
aauaacuuaagaaauuucccca

SEQ ID NO: 882243 - RNA, 22 nt, Human
ccagagagucgaugggggacac

SEQ ID NO: 882244 - RNA, 21 nt, Human
agugacagaggaaggugcaua

SEQ ID NO: 882245 - RNA, 22 nt, Human
guauguguaaguaugccaccuu

SEQ ID NO: 882246 - RNA, 22 nt, Human
uacauucauggugacuuguaug

SEQ ID NO: 882247 - RNA, 22 nt, Human
ccuaggcaagaguuggugugga

SEQ ID NO: 882248 - RNA, 22 nt, Human
ucacugcucucuaagcaucgcc

SEQ ID NO: 882249 - RNA, 22 nt, Human
uggcaaaacccacaauuauauc

SEQ ID NO: 882250 - RNA, 22 nt, Human
gcagccagugggaugagaaaga

SEQ ID NO: 882251 - RNA, 22 nt, Human
cugaaaaauauguuuuggagaa

SEQ ID NO: 882252 - RNA, 22 nt, Human
uggcacugggaugcuacuguua

SEQ ID NO: 882253 - RNA, 22 nt, Human
ugcacgaaaucuuucuagucuu

SEQ ID NO: 882254 - RNA, 22 nt, Human
gggcagugucugcaaaugaaca

SEQ ID NO: 882255 - RNA, 22 nt, Human
cucagccagugaucuuuccuuu

SEQ ID NO: 882256 - RNA, 22 nt, Human
aguuauauaacuaucuagaugc

SEQ ID NO: 882257 - RNA, 22 nt, Human
augugugcaaugcuauuuuggc

SEQ ID NO: 882258 - RNA, 17 nt, Human
gucaauauuguugacag

SEQ ID NO: 882259 - RNA, 22 nt, Human
agacacagcuaccauaauacca

SEQ ID NO: 882260 - RNA, 22 nt, Human
gcugugcaguaguagguacagu

SEQ ID NO: 882261 - RNA, 22 nt, Human
uucucagggucuggauggccug

SEQ ID NO: 882262 - RNA, 22 nt, Human
aucucagaaaguuuaauuuuuc

SEQ ID NO: 882263 - RNA, 22 nt, Human
aguggcuguaggcuaugagaga

SEQ ID NO: 882264 - RNA, 22 nt, Human
cugcagggaugugaggcccguu

SEQ ID NO: 882265 - RNA, 22 nt, Human
uuuuuccuagugcuuucuggua

SEQ ID NO: 882266 - RNA, 22 nt, Human
uggcccugccgccacgacgucu

SEQ ID NO: 882267 - RNA, 22 nt, Human
gcacucaggacucucaucagua

SEQ ID NO: 882268 - RNA, 22 nt, Human
ugugaggauggaguucuacagg

SEQ ID NO: 882269 - RNA, 22 nt, Human
gcuaaauuuaagccuuucuccu

SEQ ID NO: 882270 - RNA, 22 nt, Human
aaaaaggcuaagcaucuugugc

SEQ ID NO: 882271 - RNA, 22 nt, Human
ccugggcaacauagugagaccc

SEQ ID NO: 882272 - RNA, 22 nt, Human
ucagugccaauucugccauggg

SEQ ID NO: 882273 - RNA, 20 nt, Human
uauugccuaaauaccagaau

SEQ ID NO: 882274 - RNA, 22 nt, Human
gggggcuagagagaugaaauau

SEQ ID NO: 882275 - RNA, 19 nt, Human
uguuaugacuuugccuuuu

SEQ ID NO: 882276 - RNA, 22 nt, Human
gucaucuuaucauuguugcugu

SEQ ID NO: 882277 - RNA, 22 nt, Human
auuuccaccaucucucugggcc

SEQ ID NO: 882278 - RNA, 22 nt, Human
ccuaggcuggcugucuucaggu

SEQ ID NO: 882279 - RNA, 22 nt, Human
uugugaauagugccgcuauaaa

SEQ ID NO: 882280 - RNA, 22 nt, Human
cccugcagagaccacugaccuu

SEQ ID NO: 882281 - RNA, 22 nt, Human
agcuccugauucucagagauag

SEQ ID NO: 882282 - RNA, 19 nt, Human
uuugacagaguuugagcau

SEQ ID NO: 882283 - RNA, 22 nt, Human
cucagaggcaagcaaggagcug

SEQ ID NO: 882284 - RNA, 22 nt, Human
uacaucaugaaagcauacauca

SEQ ID NO: 882285 - RNA, 22 nt, Human
uagagguagaguuacauuaguc

SEQ ID NO: 882286 - RNA, 22 nt, Human
aaaacagaggugccugggccca

SEQ ID NO: 882287 - RNA, 22 nt, Human
uauuccaacugucauagucaua

SEQ ID NO: 882288 - RNA, 17 nt, Human
ggcaguggaggaagaga

SEQ ID NO: 882289 - RNA, 22 nt, Human
aggccaaguuacuugggaaagc

SEQ ID NO: 882290 - RNA, 22 nt, Human
cucugugagggucuguacagaa

SEQ ID NO: 882291 - RNA, 22 nt, Human
uggcacauagcagguacucagu

SEQ ID NO: 882292 - RNA, 22 nt, Human
ucaugacagccagagcucugac

SEQ ID NO: 882293 - RNA, 22 nt, Human
gugggcagugugucaguaucuu

SEQ ID NO: 882294 - RNA, 22 nt, Human
gauuuuauuagcccaaacuuug

SEQ ID NO: 882295 - RNA, 22 nt, Human
aaaguucauugaugacugaggu

SEQ ID NO: 882296 - RNA, 22 nt, Human
agagggcaaguguaguccagua

SEQ ID NO: 882297 - RNA, 22 nt, Human
aggcagugcagaguccucuucu

SEQ ID NO: 882298 - RNA, 22 nt, Human
gcccaggaagugacucagaugu

SEQ ID NO: 882299 - RNA, 22 nt, Human
guucauuuuacuguaaauagca

SEQ ID NO: 882300 - RNA, 22 nt, Human
aauggcagagacuguugaaaua

SEQ ID NO: 882301 - RNA, 22 nt, Human
aggcugagggcuccugagggca

SEQ ID NO: 882302 - RNA, 22 nt, Human
uggaccagggucccagaguaug

SEQ ID NO: 882303 - RNA, 22 nt, Human
ucacaggguuuggaagccuccu

SEQ ID NO: 882304 - RNA, 22 nt, Human
ggguauuugacaaacugacacu

SEQ ID NO: 882305 - RNA, 22 nt, Human
ugagcagaugucuaacuuuuac

SEQ ID NO: 882306 - RNA, 18 nt, Human
caagagcugcuccuggcc

SEQ ID NO: 882307 - RNA, 23 nt, Human
gauguauauaugagccgucacau

SEQ ID NO: 882308 - RNA, 20 nt, Human
uucugggaauuggguagcug

SEQ ID NO: 882309 - RNA, 22 nt, Human
ucugugccagcagccuccugga

SEQ ID NO: 882310 - RNA, 18 nt, Human
cugcacuguggguagcuc

SEQ ID NO: 882311 - RNA, 22 nt, Human
aaggugugaagagaugggaaga

SEQ ID NO: 882312 - RNA, 22 nt, Human
agcauaggcggugguaggaccc

SEQ ID NO: 882313 - RNA, 22 nt, Human
aacacagcaucccuuaggucgu

SEQ ID NO: 882314 - RNA, 22 nt, Human
gccaggcaggugucggagcccu

SEQ ID NO: 882315 - RNA, 22 nt, Human
auuagguaaucuuuagauacac

SEQ ID NO: 882316 - RNA, 22 nt, Human
agugcaggccccaggccaggcc

SEQ ID NO: 882317 - RNA, 22 nt, Human
acacugaaugcuguuuagaaau

SEQ ID NO: 882318 - RNA, 22 nt, Human
uggaaugaugacuaggaauugu

SEQ ID NO: 882319 - RNA, 20 nt, Human
gcugggaacaggauugaauc

SEQ ID NO: 882320 - RNA, 22 nt, Human
cuauuauuagauaaucuacuug

SEQ ID NO: 882321 - RNA, 19 nt, Human
aguacagaaaagagcccug

SEQ ID NO: 882322 - RNA, 22 nt, Human
gcaaugcagggcaacauggggu

SEQ ID NO: 882323 - RNA, 22 nt, Human
aaggcagguauugaugccacag

SEQ ID NO: 882324 - RNA, 22 nt, Human
uugucauugggguuauuuguua

SEQ ID NO: 882325 - RNA, 22 nt, Human
acaggcugcccgcuccccaccu

SEQ ID NO: 882326 - RNA, 22 nt, Human
uuugcuuaacugguagaaugcg

SEQ ID NO: 882327 - RNA, 22 nt, Human
auguggauagcacaggaauggu

SEQ ID NO: 882328 - RNA, 22 nt, Human
aaacuacacuuugggaccagca

SEQ ID NO: 882329 - RNA, 22 nt, Human
uaugucuggcauguuguaauua

SEQ ID NO: 882330 - RNA, 22 nt, Human
ggccaaaugaaaucugagcaau

SEQ ID NO: 882331 - RNA, 22 nt, Human
acaguggaaaugugggagggga

SEQ ID NO: 882332 - RNA, 22 nt, Human
aauacauauggaauuccauguu

SEQ ID NO: 882333 - RNA, 22 nt, Human
acaaagacgggauaagguuugg

SEQ ID NO: 882334 - RNA, 22 nt, Human
uuugacucauugauuuucucug

SEQ ID NO: 882335 - RNA, 22 nt, Human
guggagcauaacacacuagccu

SEQ ID NO: 882336 - RNA, 22 nt, Human
aaucuaagggaaauuggagaug

SEQ ID NO: 882337 - RNA, 17 nt, Human
uccuuggcaaccaguuc

SEQ ID NO: 882338 - RNA, 22 nt, Human
uaagauuuuuaaaauguccuca

SEQ ID NO: 882339 - RNA, 22 nt, Human
agcaccugggcuggaagacccc

SEQ ID NO: 882340 - RNA, 22 nt, Human
aggagcucuugaugcuugaggg

SEQ ID NO: 882341 - RNA, 22 nt, Human
aaggucugugaggcuguuuguc

SEQ ID NO: 882342 - RNA, 22 nt, Human
agccaguggaauucccaggggu

SEQ ID NO: 882343 - RNA, 22 nt, Human
aauaguugugaaucaggacuag

SEQ ID NO: 882344 - RNA, 22 nt, Human
auuuggucacuaggaaaaucaa

SEQ ID NO: 882345 - RNA, 22 nt, Human
aguuaaacuugccuuuauuccu

SEQ ID NO: 882346 - RNA, 22 nt, Human
gauguggcugccauggagccug

SEQ ID NO: 882347 - RNA, 22 nt, Human
gaagagagccgcgggacaucag

SEQ ID NO: 882348 - RNA, 22 nt, Human
uggcccugggcagaggcaacau

SEQ ID NO: 882349 - RNA, 20 nt, Human
gggaggccccagaguccagg

SEQ ID NO: 882350 - RNA, 22 nt, Human
ucucagucccauugaagaggug

SEQ ID NO: 882351 - RNA, 22 nt, Human
guuauuucagccacagagugca

SEQ ID NO: 882352 - RNA, 22 nt, Human
aauaaaaugaacugguagaguu

SEQ ID NO: 882353 - RNA, 22 nt, Human
acccaggccugagagacaggag

SEQ ID NO: 882354 - RNA, 22 nt, Human
acacuguguggucucucucgga

SEQ ID NO: 882355 - RNA, 22 nt, Human
cacagcugcuuguuagaauagc

SEQ ID NO: 882356 - RNA, 19 nt, Human
uauauuuguugaauaaaaa

SEQ ID NO: 882357 - RNA, 22 nt, Human
ucuaggggcaaugugcaaggac

SEQ ID NO: 882358 - RNA, 22 nt, Human
gaaucagccugaguuugcagcu

SEQ ID NO: 882359 - RNA, 22 nt, Human
ucaaugauaucagcaggaugug

SEQ ID NO: 882360 - RNA, 22 nt, Human
cucucuuuuucgugugccgaag

SEQ ID NO: 882361 - RNA, 22 nt, Human
uggcagcugucagaaugcaaau

SEQ ID NO: 882362 - RNA, 22 nt, Human
cauggcggucaggauguaggug

SEQ ID NO: 882363 - RNA, 22 nt, Human
gggcaggugccagcucccuguc

SEQ ID NO: 882364 - RNA, 22 nt, Human
cagcuucagaagaagccgugag

SEQ ID NO: 882365 - RNA, 22 nt, Human
guucugaaugugccuguacucu

SEQ ID NO: 882366 - RNA, 22 nt, Human
aguggcuggcauaggaacagac

SEQ ID NO: 882367 - RNA, 22 nt, Human
ucacucagguucaugucuuugu

SEQ ID NO: 882368 - RNA, 22 nt, Human
cucaaauagaacugaucuauaa

SEQ ID NO: 882369 - RNA, 22 nt, Human
ggacugaaggacaaucugguuc

SEQ ID NO: 882370 - RNA, 22 nt, Human
ugccuguccugaggaugagggu

SEQ ID NO: 882371 - RNA, 22 nt, Human
gccucaggugcaucucucauuc

SEQ ID NO: 882372 - RNA, 22 nt, Human
ggccagagaagucagacccuug

SEQ ID NO: 882373 - RNA, 22 nt, Human
cagucuccaaaucaaucugaau

SEQ ID NO: 882374 - RNA, 22 nt, Human
uggcuggcguuggggccaguga

SEQ ID NO: 882375 - RNA, 22 nt, Human
aaaggcacacacuccuuguuau

SEQ ID NO: 882376 - RNA, 22 nt, Human
uaucugggaaggggagaauaga

SEQ ID NO: 882377 - RNA, 22 nt, Human
cagcccuggcccaggugccuua

SEQ ID NO: 882378 - RNA, 19 nt, Human
auaaauaaaaagugggaga

SEQ ID NO: 882379 - RNA, 22 nt, Human
cuggccagcauuuuugcuuuag

SEQ ID NO: 882380 - RNA, 22 nt, Human
cagagcaggcccacugcccucc

SEQ ID NO: 882381 - RNA, 20 nt, Human
aacaguaccauuuaucucag

SEQ ID NO: 882382 - RNA, 22 nt, Human
cugagccauaagggaggcuggg

SEQ ID NO: 882383 - RNA, 22 nt, Human
ggaggugggcuaaggacucucu

SEQ ID NO: 882384 - RNA, 22 nt, Human
gaugcaaaaguaucauuuuaau

SEQ ID NO: 882385 - RNA, 18 nt, Human
guuuccugaggugaaggg

SEQ ID NO: 882386 - RNA, 22 nt, Human
uucugagggcuaauguacugua

SEQ ID NO: 882387 - RNA, 22 nt, Human
uugggaggucauaaaucuguuc

SEQ ID NO: 882388 - RNA, 22 nt, Human
gcagggcagugugucugugggg

SEQ ID NO: 882389 - RNA, 22 nt, Human
ucccaggccauaaaacucagag

SEQ ID NO: 882390 - RNA, 22 nt, Human
ucucuguaagagaggcuuucau

SEQ ID NO: 882391 - RNA, 22 nt, Human
gaguacauguauagagauuaac

SEQ ID NO: 882392 - RNA, 22 nt, Human
aaacagcugggagguagaggcg

SEQ ID NO: 882393 - RNA, 22 nt, Human
gaaacagguggcaggcuagauu

SEQ ID NO: 882394 - RNA, 20 nt, Human
gaggcucugggcauggcgcc

SEQ ID NO: 882395 - RNA, 22 nt, Human
auguaaacuuagauaagcagua

SEQ ID NO: 882396 - RNA, 22 nt, Human
ugcagggacaggcucuggggau

SEQ ID NO: 882397 - RNA, 22 nt, Human
cagcagccuagaagcucuacca

SEQ ID NO: 882398 - RNA, 22 nt, Human
cuggcugugcugacugagaggg

SEQ ID NO: 882399 - RNA, 22 nt, Human
aaauucauuuuucuuagugugc

SEQ ID NO: 882400 - RNA, 22 nt, Human
cacauuuaucuguucuuucuag

SEQ ID NO: 882401 - RNA, 22 nt, Human
ucacauguguggcagugcaagu

SEQ ID NO: 882402 - RNA, 22 nt, Human
cagaccuggaaaacaggcuugc

SEQ ID NO: 882403 - RNA, 22 nt, Human
uugagguauugauauuuuauga

SEQ ID NO: 882404 - RNA, 22 nt, Human
guauuauuggguaguaugguaa

SEQ ID NO: 882405 - RNA, 23 nt, Human
ccauucaucucagucauugcuuu

SEQ ID NO: 882406 - RNA, 21 nt, Human
uggagcugccacuuguccucc

SEQ ID NO: 882407 - RNA, 22 nt, Human
gggcagguacaagaugcuucuu

SEQ ID NO: 882408 - RNA, 22 nt, Human
caagagcuagacuuugucagga

SEQ ID NO: 882409 - RNA, 22 nt, Human
cuggaggugccuagaugagcuc

SEQ ID NO: 882410 - RNA, 22 nt, Human
gcaggccauucaggagaugugc

SEQ ID NO: 882411 - RNA, 22 nt, Human
cuggccucacagaggcuaagcc

SEQ ID NO: 882412 - RNA, 22 nt, Human
ucugagggugggagaaggagcu

SEQ ID NO: 882413 - RNA, 22 nt, Human
gaggcccaguccugcaagcacg

SEQ ID NO: 882414 - RNA, 22 nt, Human
gugguauuuaugacagugcccg

SEQ ID NO: 882415 - RNA, 22 nt, Human
ugaaauaucauuuucaucuccc

SEQ ID NO: 882416 - RNA, 22 nt, Human
uccaaugugacuaucagggagc

SEQ ID NO: 882417 - RNA, 22 nt, Human
gacaaugugacagaccaaugau

SEQ ID NO: 882418 - RNA, 22 nt, Human
gcuugggcuuaacuguagguuc

SEQ ID NO: 882419 - RNA, 22 nt, Human
aacaguacuggacaaggaguca

SEQ ID NO: 882420 - RNA, 19 nt, Human
cuggugcuugagugaguca

SEQ ID NO: 882421 - RNA, 20 nt, Human
uaacagaaguagaagugggu

SEQ ID NO: 882422 - RNA, 22 nt, Human
cagcuuugaaacauggcucuag

SEQ ID NO: 882423 - RNA, 22 nt, Human
augugugguacagucccguuua

SEQ ID NO: 882424 - RNA, 23 nt, Human
gaaguucuguucagccagacaag

SEQ ID NO: 882425 - RNA, 22 nt, Human
ccuguagaaucuguagacccau

SEQ ID NO: 882426 - RNA, 22 nt, Human
gcuucucuuaaugccuggcuuu

SEQ ID NO: 882427 - RNA, 22 nt, Human
cugccugcucaccagggcucug

SEQ ID NO: 882428 - RNA, 22 nt, Human
uggaauguuuuccuaaaucaga

SEQ ID NO: 882429 - RNA, 21 nt, Human
acaaaggaagucucuuuuaag

SEQ ID NO: 882430 - RNA, 22 nt, Human
uauguucuagacuuuugcugug

SEQ ID NO: 882431 - RNA, 16 nt, Human
gagaagagcccggcag

SEQ ID NO: 882432 - RNA, 22 nt, Human
gaagguuuuguuugcaaaucau

SEQ ID NO: 882433 - RNA, 22 nt, Human
uguauauaagcauuuacuuguu

SEQ ID NO: 882434 - RNA, 22 nt, Human
ucugaaaugaacucuugaacuu

SEQ ID NO: 882435 - RNA, 18 nt, Human
gcagacacucguggaggg

SEQ ID NO: 882436 - RNA, 21 nt, Human
uccugcagggcagcagagugg

SEQ ID NO: 882437 - RNA, 22 nt, Human
aagacugaguucaaaucacagc

SEQ ID NO: 882438 - RNA, 22 nt, Human
uccugucagugaggcagaugaa

SEQ ID NO: 882439 - RNA, 22 nt, Human
aggaagagcauucacaugguag

SEQ ID NO: 882440 - RNA, 22 nt, Human
ucuuccuaugccaacauucugu

SEQ ID NO: 882441 - RNA, 17 nt, Human
ugucuucugaagagagc

SEQ ID NO: 882442 - RNA, 22 nt, Human
cuguuuccuaccguuuuucauu

SEQ ID NO: 882443 - RNA, 22 nt, Human
gagacagcagggccagggccug

SEQ ID NO: 882444 - RNA, 22 nt, Human
uaguuaaaauaauggagauguu

SEQ ID NO: 882445 - RNA, 22 nt, Human
aaacauucccuaauguguccgu

SEQ ID NO: 882446 - RNA, 22 nt, Human
cugaggcugcccagggccaggu

SEQ ID NO: 882447 - RNA, 22 nt, Human
ucaggcagagggagaagccaag

SEQ ID NO: 882448 - RNA, 22 nt, Human
uucuauguuaguaugggucucc

SEQ ID NO: 882449 - RNA, 22 nt, Human
ugaaaggugacauuucuuggau

SEQ ID NO: 882450 - RNA, 22 nt, Human
uaaugcuugcaaauuaugggac

SEQ ID NO: 882451 - RNA, 17 nt, Human
uuuacauugcucgcagu

SEQ ID NO: 882452 - RNA, 22 nt, Human
agacacagugaguuucuuuccc

SEQ ID NO: 882453 - RNA, 22 nt, Human
ggaguggcagcuaggcugucag

SEQ ID NO: 882454 - RNA, 22 nt, Human
aacauucuauuuugcuaaaaca

SEQ ID NO: 882455 - RNA, 22 nt, Human
uccagagcuguccuacugugag

SEQ ID NO: 882456 - RNA, 22 nt, Human
uccagagaucucucuucccugu

SEQ ID NO: 882457 - RNA, 22 nt, Human
auugcuuuugagcuagaauuuu

SEQ ID NO: 882458 - RNA, 22 nt, Human
ggcugccuuggggguugucauu

SEQ ID NO: 882459 - RNA, 22 nt, Human
ugccugcgaggcaugggugaga

SEQ ID NO: 882460 - RNA, 22 nt, Human
aaggagagagcuuugcuggaac

SEQ ID NO: 882461 - RNA, 22 nt, Human
ccagcagcauccugcagcacuu

SEQ ID NO: 882462 - RNA, 22 nt, Human
aauguaaaauaucuuguacuug

SEQ ID NO: 882463 - RNA, 22 nt, Human
agucccagcucagaaccacuag

SEQ ID NO: 882464 - RNA, 22 nt, Human
acagggcagguggcuacugguc

SEQ ID NO: 882465 - RNA, 22 nt, Human
caggcccagugaucagggcucu

SEQ ID NO: 882466 - RNA, 22 nt, Human
cacaugaauaaggcuuuauugu

SEQ ID NO: 882467 - RNA, 20 nt, Human
aaauggcacaugggaagucc

SEQ ID NO: 882468 - RNA, 22 nt, Human
agcaaggcugggucuaaugggg

SEQ ID NO: 882469 - RNA, 22 nt, Human
ggcugaaaccguuauccacuga

SEQ ID NO: 882470 - RNA, 22 nt, Human
aagguucccucucuggaagccu

SEQ ID NO: 882471 - RNA, 22 nt, Human
ugcauucugaacguaaauguga

SEQ ID NO: 882472 - RNA, 22 nt, Human
gauucaauguugcagauggaau

SEQ ID NO: 882473 - RNA, 22 nt, Human
agccuggcacugaggcagggcg

SEQ ID NO: 882474 - RNA, 22 nt, Human
agcaagguggagaaggaugggu

SEQ ID NO: 882475 - RNA, 22 nt, Human
ugcacuuugcaggcauggaaac

SEQ ID NO: 882476 - RNA, 22 nt, Human
ggcucugggccagaguuggcuu

SEQ ID NO: 882477 - RNA, 20 nt, Human
cccagaagcuuaacagagca

SEQ ID NO: 882478 - RNA, 22 nt, Human
ggccagcccuccucccuggguu

SEQ ID NO: 882479 - RNA, 22 nt, Human
uaggaaacuaauacagucugga

SEQ ID NO: 882480 - RNA, 22 nt, Human
auuuuuuguuaacucaggauag

SEQ ID NO: 882481 - RNA, 22 nt, Human
cccaacaacaugaaacuaccua

SEQ ID NO: 882482 - RNA, 22 nt, Human
agcagggaggcccagggcacug

SEQ ID NO: 882483 - RNA, 22 nt, Human
uagcaguauauuuuaaggaagc

SEQ ID NO: 882484 - RNA, 22 nt, Human
ggaggccaaggcaggcggauca

SEQ ID NO: 882485 - RNA, 22 nt, Human
uagcaaaagcucaacaggaagg

SEQ ID NO: 882486 - RNA, 22 nt, Human
agagcacaggguuuugugccgg

SEQ ID NO: 882487 - RNA, 22 nt, Human
cuggccagccucccagguaccc

SEQ ID NO: 882488 - RNA, 19 nt, Human
cucuggagaacaauagugc

SEQ ID NO: 882489 - RNA, 22 nt, Human
ugggagaagcagugggacagua

SEQ ID NO: 882490 - RNA, 22 nt, Human
ccaggcugagcaugauuggagc

SEQ ID NO: 882491 - RNA, 22 nt, Human
ggcucugggucuguggggagcg

SEQ ID NO: 882492 - RNA, 20 nt, Human
caguugaaauaauuuguuug

SEQ ID NO: 882493 - RNA, 22 nt, Human
ccagaggugcugggagaggucu

SEQ ID NO: 882494 - RNA, 22 nt, Human
gaagaggaugacaggagccggu

SEQ ID NO: 882495 - RNA, 22 nt, Human
gccaccuggacagcugugcccu

SEQ ID NO: 882496 - RNA, 22 nt, Human
uaguuaaagcccuaaauugaua

SEQ ID NO: 882497 - RNA, 20 nt, Human
auagaucagugagacuaaag

SEQ ID NO: 882498 - RNA, 22 nt, Human
aacuuagagcucuccuaaauga

SEQ ID NO: 882499 - RNA, 22 nt, Human
ucaggaagacaaucuuuggcuc

SEQ ID NO: 882500 - RNA, 22 nt, Human
cucuugaguggcaugcucuaac

SEQ ID NO: 882501 - RNA, 22 nt, Human
caggccgggcacugcgcuaggu

SEQ ID NO: 882502 - RNA, 22 nt, Human
auaaucaaaguccuaugacauc

SEQ ID NO: 882503 - RNA, 22 nt, Human
ugucucuucccacucagacccc

SEQ ID NO: 882504 - RNA, 22 nt, Human
aaugcaaagugaggugaguggc

SEQ ID NO: 882505 - RNA, 22 nt, Human
aguggcaggcggagauguagga

SEQ ID NO: 882506 - RNA, 23 nt, Human
gugucauuacuguaauuauugug

SEQ ID NO: 882507 - RNA, 22 nt, Human
aucaucuggguuaaugugcuca

SEQ ID NO: 882508 - RNA, 20 nt, Human
acaucaacuagucacagaca

SEQ ID NO: 882509 - RNA, 23 nt, Human
cacaugcaggcaguggccuucaa

SEQ ID NO: 882510 - RNA, 22 nt, Human
uagcauuuauuccagauuugga

SEQ ID NO: 882511 - RNA, 22 nt, Human
cuuaaaagagaugacggcaggg

SEQ ID NO: 882512 - RNA, 22 nt, Human
caaaugcuaacuucuuuccaaa

SEQ ID NO: 882513 - RNA, 22 nt, Human
cagacccaggauccaaauguug

SEQ ID NO: 882514 - RNA, 22 nt, Human
cugccugcugcccuccagagcc

SEQ ID NO: 882515 - RNA, 22 nt, Human
acugauuucagggaugagaaga

SEQ ID NO: 882516 - RNA, 22 nt, Human
ccugugugcacacgaggccaug

SEQ ID NO: 882517 - RNA, 22 nt, Human
gaucaaaagcuggguucuaaaa

SEQ ID NO: 882518 - RNA, 22 nt, Human
ugcucugaaggggaagggaugg

SEQ ID NO: 882519 - RNA, 22 nt, Human
caggcuuucaggacagcgagcc

SEQ ID NO: 882520 - RNA, 22 nt, Human
caugacauccugaagcugcaca

SEQ ID NO: 882521 - RNA, 22 nt, Human
uggccugguuguugcugccguu

SEQ ID NO: 882522 - RNA, 22 nt, Human
cugccugugugugccugcagaa

SEQ ID NO: 882523 - RNA, 22 nt, Human
gcagugaaacaauaggaucaaa

SEQ ID NO: 882524 - RNA, 22 nt, Human
auccucagaccucagcaaagcc

SEQ ID NO: 882525 - RNA, 22 nt, Human
ucuccugauaucugcagaccua

SEQ ID NO: 882526 - RNA, 21 nt, Human
aggagcuguguuagcuggucg

SEQ ID NO: 882527 - RNA, 22 nt, Human
aauuucaagucuugaagaagua

SEQ ID NO: 882528 - RNA, 22 nt, Human
ucccuucaagauuuggggaaau

SEQ ID NO: 882529 - RNA, 22 nt, Human
ucacauuucaagugcucaaaag

SEQ ID NO: 882530 - RNA, 22 nt, Human
agcuggcucagccggguggucu

SEQ ID NO: 882531 - RNA, 22 nt, Human
uggcuucagagucugaguucuu

SEQ ID NO: 882532 - RNA, 21 nt, Human
cauuucaguaaggaagccugu

SEQ ID NO: 882533 - RNA, 22 nt, Human
gguauggaucagaugggcucaa

SEQ ID NO: 882534 - RNA, 22 nt, Human
ccugaguguaauaaugaaggca

SEQ ID NO: 882535 - RNA, 22 nt, Human
gggcacagaagucuaagacauc

SEQ ID NO: 882536 - RNA, 22 nt, Human
cuguucuuuaguuccacugcaa

SEQ ID NO: 882537 - RNA, 22 nt, Human
ggacagagcagacgagcagcgg

SEQ ID NO: 882538 - RNA, 22 nt, Human
ucuaacuaacuacaguaagagg

SEQ ID NO: 882539 - RNA, 22 nt, Human
cacauuaagaauaaugagacua

SEQ ID NO: 882540 - RNA, 20 nt, Human
gccagcccugacacaggagc

SEQ ID NO: 882541 - RNA, 22 nt, Human
ucagcuucucaaaauggcuuag

SEQ ID NO: 882542 - RNA, 22 nt, Human
ccuggcugaacaaagucccucc

SEQ ID NO: 882543 - RNA, 22 nt, Human
ccugugugcugaugacgacaga

SEQ ID NO: 882544 - RNA, 22 nt, Human
ugaaaugaaugugauucgauag

SEQ ID NO: 882545 - RNA, 22 nt, Human
ggagugaauaaguagggggaaa

SEQ ID NO: 882546 - RNA, 22 nt, Human
auccucucugugacagggaacg

SEQ ID NO: 882547 - RNA, 22 nt, Human
uaugcuuuacuuuucauuguga

SEQ ID NO: 882548 - RNA, 22 nt, Human
cuccagagacacuucucaugau

SEQ ID NO: 882549 - RNA, 22 nt, Human
guaaaauagaauaacguggcua

SEQ ID NO: 882550 - RNA, 22 nt, Human
ggaaagccaggugcucuggugu

SEQ ID NO: 882551 - RNA, 22 nt, Human
cugggcugcggugguagguugu

SEQ ID NO: 882552 - RNA, 22 nt, Human
aggcuagaggcuucuggcuuca

SEQ ID NO: 882553 - RNA, 22 nt, Human
cuggaaggggcagucuuugggc

SEQ ID NO: 882554 - RNA, 23 nt, Human
cagcaagugaauuccaagagaga

SEQ ID NO: 882555 - RNA, 22 nt, Human
caagagcuggagaggcagucua

SEQ ID NO: 882556 - RNA, 21 nt, Human
cauuucuauugaugagaaaag

SEQ ID NO: 882557 - RNA, 19 nt, Human
ucaaugucuggccaauggu

SEQ ID NO: 882558 - RNA, 22 nt, Human
uaucagcaccgcggacagcauc

SEQ ID NO: 882559 - RNA, 22 nt, Human
agcacagguaauacagaguaac

SEQ ID NO: 882560 - RNA, 22 nt, Human
aaucuucaaaauguucugcuug

SEQ ID NO: 882561 - RNA, 22 nt, Human
aaugagucaaaacagcauauag

SEQ ID NO: 882562 - RNA, 22 nt, Human
uccugggaggcaggaccccuuu

SEQ ID NO: 882563 - RNA, 20 nt, Human
uaacaguugaagaacaagga

SEQ ID NO: 882564 - RNA, 22 nt, Human
gccuucccacccugcgaggcug

SEQ ID NO: 882565 - RNA, 22 nt, Human
gccuggcaggccuguuggggcu

SEQ ID NO: 882566 - RNA, 22 nt, Human
ccagccuggacugggucuugug

SEQ ID NO: 882567 - RNA, 22 nt, Human
gaggcggcggccgagccuggcu

SEQ ID NO: 882568 - RNA, 22 nt, Human
augucacaugguucuggggccu

SEQ ID NO: 882569 - RNA, 22 nt, Human
uuccugggugguccugguagag

SEQ ID NO: 882570 - RNA, 22 nt, Human
uagcaggauuugaagaagaucu

SEQ ID NO: 882571 - RNA, 22 nt, Human
gagucccaggauaugugcuguu

SEQ ID NO: 882572 - RNA, 22 nt, Human
gggugggaaggcuaagggauug

SEQ ID NO: 882573 - RNA, 22 nt, Human
uacuguaggugggucacuagua

SEQ ID NO: 882574 - RNA, 22 nt, Human
caggcagcccugcaccaagugu

SEQ ID NO: 882575 - RNA, 22 nt, Human
ugcuggcucugggccaagcagg

SEQ ID NO: 882576 - RNA, 22 nt, Human
ucuucuguuaccacagcgauga

SEQ ID NO: 882577 - RNA, 22 nt, Human
augcuuaacucuguacauaguu

SEQ ID NO: 882578 - RNA, 22 nt, Human
gaagauuuuucuuaaugcuccg

SEQ ID NO: 882579 - RNA, 19 nt, Human
uucuuacaacacccuggga

SEQ ID NO: 882580 - RNA, 22 nt, Human
aggcagcugaccacaguaugau

SEQ ID NO: 882581 - RNA, 22 nt, Human
acucugggcccacccucagagu

SEQ ID NO: 882582 - RNA, 22 nt, Human
caguuacauuaauaaugcacau

SEQ ID NO: 882583 - RNA, 22 nt, Human
acagcccaggacuccagugggc

SEQ ID NO: 882584 - RNA, 19 nt, Human
gcucucccucucaguugag

SEQ ID NO: 882585 - RNA, 22 nt, Human
aaccuggaggcuguguagucuu

SEQ ID NO: 882586 - RNA, 22 nt, Human
ucccaggcaggugacaggggga

SEQ ID NO: 882587 - RNA, 22 nt, Human
cucugcuuuuaugugccggcgc

SEQ ID NO: 882588 - RNA, 22 nt, Human
gaggaaguucuaugauuacauc

SEQ ID NO: 882589 - RNA, 18 nt, Human
cagaggagagacauucag

SEQ ID NO: 882590 - RNA, 22 nt, Human
uccugggaguaauugagucaug

SEQ ID NO: 882591 - RNA, 22 nt, Human
gggcucagucggcaagccccuu

SEQ ID NO: 882592 - RNA, 22 nt, Human
aaagccauaagccuaauacuaa

SEQ ID NO: 882593 - RNA, 22 nt, Human
aacaguuugagcuuugaauuuc

SEQ ID NO: 882594 - RNA, 22 nt, Human
acuagccaaguuuuacgacuaa

SEQ ID NO: 882595 - RNA, 22 nt, Human
aggcuuguggggaaucugugug

SEQ ID NO: 882596 - RNA, 22 nt, Human
uccaugagggacacuggaugcu

SEQ ID NO: 882597 - RNA, 22 nt, Human
gucacaggaaaggguguaaggg

SEQ ID NO: 882598 - RNA, 22 nt, Human
ggcugcaguugugugaaggccg

SEQ ID NO: 882599 - RNA, 22 nt, Human
ugcagcaaaaggucagagggag

SEQ ID NO: 882600 - RNA, 22 nt, Human
aggcuguguuuccccuggagcu

SEQ ID NO: 882601 - RNA, 22 nt, Human
uugagaagguggucauuugcaa

SEQ ID NO: 882602 - RNA, 18 nt, Human
agcaagacagugguguga

SEQ ID NO: 882603 - RNA, 15 nt, Human
cccaggaguucgaga

SEQ ID NO: 882604 - RNA, 17 nt, Human
uccaagccagcuugccu

SEQ ID NO: 882605 - RNA, 21 nt, Human
gucaggagccgucuuacauuc

SEQ ID NO: 882606 - RNA, 22 nt, Human
caaaucuauauguugauauucu

SEQ ID NO: 882607 - RNA, 22 nt, Human
aguagcagaguuggacuaugca

SEQ ID NO: 882608 - RNA, 21 nt, Human
agcuuacauuaccauuguugc

SEQ ID NO: 882609 - RNA, 22 nt, Human
guccucuguguaggcugcagac

SEQ ID NO: 882610 - RNA, 22 nt, Human
agccagcaggaacgucuagguu

SEQ ID NO: 882611 - RNA, 22 nt, Human
ggcugaaguucuuuuuguucag

SEQ ID NO: 882612 - RNA, 22 nt, Human
auguucaaagaucgugcuaucc

SEQ ID NO: 882613 - RNA, 22 nt, Human
uauguacauggagagcaauuga

SEQ ID NO: 882614 - RNA, 17 nt, Human
gcucugccccagccucu

SEQ ID NO: 882615 - RNA, 20 nt, Human
gugcaauggcgcaaucucgg

SEQ ID NO: 882616 - RNA, 22 nt, Human
uucucuccuccuagaggcuuuu

SEQ ID NO: 882617 - RNA, 22 nt, Human
auucaguuucauggcacagcua

SEQ ID NO: 882618 - RNA, 22 nt, Human
ugcucccaggcauucucuguug

SEQ ID NO: 882619 - RNA, 22 nt, Human
uuuauuccaaagcuugcacuuu

SEQ ID NO: 882620 - RNA, 22 nt, Human
cuuuucuuguauuggaugcccc

SEQ ID NO: 882621 - RNA, 22 nt, Human
uugcagaauacuuauucuguau

SEQ ID NO: 882622 - RNA, 22 nt, Human
ucucuacagauccuauauagaa

SEQ ID NO: 882623 - RNA, 22 nt, Human
ugaggcugccuugggaagaggg

SEQ ID NO: 882624 - RNA, 17 nt, Human
ugaagaugcauggcagc

SEQ ID NO: 882625 - RNA, 22 nt, Human
ggccugugcacaugugcaggaa

SEQ ID NO: 882626 - RNA, 22 nt, Human
aagaaaacaaugacuugccagc

SEQ ID NO: 882627 - RNA, 22 nt, Human
aggcugugagcaagaacaccua

SEQ ID NO: 882628 - RNA, 22 nt, Human
uggggcugucccgguuuggcga

SEQ ID NO: 882629 - RNA, 22 nt, Human
ugaaaucauugggguugaauaa

SEQ ID NO: 882630 - RNA, 22 nt, Human
acaaaguaagggcuaaugagca

SEQ ID NO: 882631 - RNA, 22 nt, Human
aaggcugguuccaucccuggug

SEQ ID NO: 882632 - RNA, 22 nt, Human
acccugagucagacagccugac

SEQ ID NO: 882633 - RNA, 22 nt, Human
ucccacucccaggcaggccucu

SEQ ID NO: 882634 - RNA, 22 nt, Human
uuaugaaaacaaucaguaggca

SEQ ID NO: 882635 - RNA, 21 nt, Human
gcauuaaaagcaguuguuggu

SEQ ID NO: 882636 - RNA, 22 nt, Human
ugucccauggcuuuucuggugg

SEQ ID NO: 882637 - RNA, 22 nt, Human
caggcccugccuugagggaccu

SEQ ID NO: 882638 - RNA, 22 nt, Human
ggauaguucuggauauuuuaag

SEQ ID NO: 882639 - RNA, 20 nt, Human
uguggacucaguuucuugcu

SEQ ID NO: 882640 - RNA, 22 nt, Human
uggccaggcuggucuggaacgc

SEQ ID NO: 882641 - RNA, 22 nt, Human
cugggcuaauuaagcacagcug

SEQ ID NO: 882642 - RNA, 22 nt, Human
cccugaggggaguggugaggug

SEQ ID NO: 882643 - RNA, 22 nt, Human
aucacaaaggucucagagcaca

SEQ ID NO: 882644 - RNA, 22 nt, Human
agucugguauuggucuuuaauc

SEQ ID NO: 882645 - RNA, 22 nt, Human
acugucuuguuccaagacuaaa

SEQ ID NO: 882646 - RNA, 22 nt, Human
caugucacuuuaacaaauuagu

SEQ ID NO: 882647 - RNA, 22 nt, Human
ugcuccuguuucaucagcuaua

SEQ ID NO: 882648 - RNA, 22 nt, Human
guguaguauaagguuaaaaccu

SEQ ID NO: 882649 - RNA, 22 nt, Human
agaggucuuuuggucugcagaa

SEQ ID NO: 882650 - RNA, 22 nt, Human
ucuucagaggagcugaauauau

SEQ ID NO: 882651 - RNA, 22 nt, Human
ccugccagggccuuggaagaaa

SEQ ID NO: 882652 - RNA, 22 nt, Human
uucucagggcccuguguuagcu

SEQ ID NO: 882653 - RNA, 22 nt, Human
uagaagcaguaauagaaauagg

SEQ ID NO: 882654 - RNA, 19 nt, Human
aauaauguucaugagauug

SEQ ID NO: 882655 - RNA, 22 nt, Human
gugaguuacucugguucucauu

SEQ ID NO: 882656 - RNA, 22 nt, Human
cccaguaccucuguucccugcu

SEQ ID NO: 882657 - RNA, 22 nt, Human
auuucugauaaacguaagcugc

SEQ ID NO: 882658 - RNA, 22 nt, Human
cuuguuuaaauaagauagcagu

SEQ ID NO: 882659 - RNA, 22 nt, Human
agcaagcacacuucaugugaac

SEQ ID NO: 882660 - RNA, 21 nt, Human
ugggcacugagggugcugcuc

SEQ ID NO: 882661 - RNA, 22 nt, Human
ucauuaaauguuuguugugcca

SEQ ID NO: 882662 - RNA, 21 nt, Human
agugugugauaggcaggaaga

SEQ ID NO: 882663 - RNA, 22 nt, Human
cagaguggcacucugcuggaug

SEQ ID NO: 882664 - RNA, 22 nt, Human
cugggcagcuccauaccaccca

SEQ ID NO: 882665 - RNA, 22 nt, Human
uuucaguuuccagcuuugucau

SEQ ID NO: 882666 - RNA, 22 nt, Human
cugggaagggacgccagugccu

SEQ ID NO: 882667 - RNA, 22 nt, Human
agagugggccucugagucccag

SEQ ID NO: 882668 - RNA, 22 nt, Human
gcugcucagugggccugagccu

SEQ ID NO: 882669 - RNA, 22 nt, Human
auauuucuccaaauguuuucaa

SEQ ID NO: 882670 - RNA, 22 nt, Human
cuggcacagagacagaaggauu

SEQ ID NO: 882671 - RNA, 22 nt, Human
gcuuuagaaauguaggagauac

SEQ ID NO: 882672 - RNA, 22 nt, Human
ugcugaggcuagaccuggaagu

SEQ ID NO: 882673 - RNA, 22 nt, Human
uugagaaaagcuguguaaggau

SEQ ID NO: 882674 - RNA, 22 nt, Human
gcaggagcagucaggggcagcu

SEQ ID NO: 882675 - RNA, 22 nt, Human
auuuugacugcauuacagaaca

SEQ ID NO: 882676 - RNA, 22 nt, Human
uuugagaaacugauuauuaugg

SEQ ID NO: 882677 - RNA, 22 nt, Human
aucuuuggugcuuggugcuccc

SEQ ID NO: 882678 - RNA, 22 nt, Human
uaggggaggggaucaugugcug

SEQ ID NO: 882679 - RNA, 22 nt, Human
uccaggagggggagccgugccg

SEQ ID NO: 882680 - RNA, 22 nt, Human
ucagacagugugaucagucucu

SEQ ID NO: 882681 - RNA, 22 nt, Human
ccugcagggugcugccacagau

SEQ ID NO: 882682 - RNA, 22 nt, Human
gcccagcacagcuggaagaguc

SEQ ID NO: 882683 - RNA, 22 nt, Human
uauuacaauuuacauugcacuu

SEQ ID NO: 882684 - RNA, 22 nt, Human
ucauugaaagugccuccucgga

SEQ ID NO: 882685 - RNA, 22 nt, Human
auaaacaagacuggccaacuuu

SEQ ID NO: 882686 - RNA, 22 nt, Human
ucuuccugcuuuggugaggcuu

SEQ ID NO: 882687 - RNA, 22 nt, Human
cuuuuguugcccuugucgcagg

SEQ ID NO: 882688 - RNA, 22 nt, Human
aagccaaguuggaagacugaau

SEQ ID NO: 882689 - RNA, 22 nt, Human
uaagaauuccaucgcagaguau

SEQ ID NO: 882690 - RNA, 22 nt, Human
uaguaaagugucuuaacacaua

SEQ ID NO: 882691 - RNA, 22 nt, Human
cccugcugaaucccauggaguc

SEQ ID NO: 882692 - RNA, 22 nt, Human
auuguuuuccaaagaugcugcu

SEQ ID NO: 882693 - RNA, 22 nt, Human
ccuggaagauucaccacuacca

SEQ ID NO: 882694 - RNA, 22 nt, Human
ugcucuucggggccacugcuug

SEQ ID NO: 882695 - RNA, 22 nt, Human
agaggcuccucggugccucgug

SEQ ID NO: 882696 - RNA, 22 nt, Human
ggagccugcgggagcucccauu

SEQ ID NO: 882697 - RNA, 22 nt, Human
ugaagaaacagaccaagaggau

SEQ ID NO: 882698 - RNA, 22 nt, Human
aaaucuuccugaaauuuguuca

SEQ ID NO: 882699 - RNA, 22 nt, Human
cuggcagcucuacucagagccu

SEQ ID NO: 882700 - RNA, 22 nt, Human
gaggcccagagagguugcauga

SEQ ID NO: 882701 - RNA, 22 nt, Human
caguuaaagugcuuaucacaga

SEQ ID NO: 882702 - RNA, 23 nt, Human
ugucauugugacuacagaaccag

SEQ ID NO: 882703 - RNA, 22 nt, Human
uucuucuuuaucucaguauccu

SEQ ID NO: 882704 - RNA, 22 nt, Human
ugaguguguauuauguaucagg

SEQ ID NO: 882705 - RNA, 22 nt, Human
ugccauagcaaugguaagcuga

SEQ ID NO: 882706 - RNA, 22 nt, Human
agcaagaaaucuucaguguucu

SEQ ID NO: 882707 - RNA, 22 nt, Human
cacagaggacuguagcggggag

SEQ ID NO: 882708 - RNA, 22 nt, Human
auccagggauaaaaguaagguu

SEQ ID NO: 882709 - RNA, 22 nt, Human
cuucaaagauuauugaaaacaa

SEQ ID NO: 882710 - RNA, 22 nt, Human
gcaagaacgaauccuacuugcu

SEQ ID NO: 882711 - RNA, 22 nt, Human
ucuggccccgcaugcacuuuau

SEQ ID NO: 882712 - RNA, 22 nt, Human
aauaauguuuauuuguauucuc

SEQ ID NO: 882713 - RNA, 22 nt, Human
ggagaggugagagguacaaguu

SEQ ID NO: 882714 - RNA, 22 nt, Human
ggcagcaguaggagcuaaucuu

SEQ ID NO: 882715 - RNA, 22 nt, Human
agcacagcagcgucuaaccgau

SEQ ID NO: 882716 - RNA, 22 nt, Human
ccuguugucucuuccuguugac

SEQ ID NO: 882717 - RNA, 22 nt, Human
caugcccuccuugccuucacug

SEQ ID NO: 882718 - RNA, 21 nt, Human
uuagaacaauauuugguauag

SEQ ID NO: 882719 - RNA, 22 nt, Human
cauaaaguaaagaugucuucca

SEQ ID NO: 882720 - RNA, 22 nt, Human
uuaccaaaugaaauagagauuu

SEQ ID NO: 882721 - RNA, 19 nt, Human
aaauacugaaguuguucau

SEQ ID NO: 882722 - RNA, 21 nt, Human
cugugggaccaagcacuggga

SEQ ID NO: 882723 - RNA, 22 nt, Human
aggcauggcacugagcagcuuc

SEQ ID NO: 882724 - RNA, 22 nt, Human
gcagguccagucaccagagaga

SEQ ID NO: 882725 - RNA, 22 nt, Human
caguggauuaaggagggcagcu

SEQ ID NO: 882726 - RNA, 22 nt, Human
cagcagucccugcaguggggaa

SEQ ID NO: 882727 - RNA, 22 nt, Human
aaugugaaaccgcacagaauaa

SEQ ID NO: 882728 - RNA, 22 nt, Human
aucucuggccuuccuuuuccaa

SEQ ID NO: 882729 - RNA, 22 nt, Human
aggcaguugaguggcuuuuuca

SEQ ID NO: 882730 - RNA, 22 nt, Human
ccugugcuggacagggcugggc

SEQ ID NO: 882731 - RNA, 22 nt, Human
aaagguuuuuauuuauccugga

SEQ ID NO: 882732 - RNA, 22 nt, Human
cuguacaaauggcaguugaguu

SEQ ID NO: 882733 - RNA, 22 nt, Human
ucuggggaugaggaccuagaug

SEQ ID NO: 882734 - RNA, 22 nt, Human
caggccagggagaauaugaagc

SEQ ID NO: 882735 - RNA, 22 nt, Human
uaggccagauuacuagaguagg

SEQ ID NO: 882736 - RNA, 22 nt, Human
ugcuuaauauugugauguaaua

SEQ ID NO: 882737 - RNA, 22 nt, Human
uagcauuagucagauauguuuu

SEQ ID NO: 882738 - RNA, 22 nt, Human
agucugaaguagucuuuagugu

SEQ ID NO: 882739 - RNA, 22 nt, Human
caggcccucgcccgcagcgacc

SEQ ID NO: 882740 - RNA, 22 nt, Human
ugggggaagagcuuguuaaagu

SEQ ID NO: 882741 - RNA, 19 nt, Human
acccuaggaggucugguga

SEQ ID NO: 882742 - RNA, 22 nt, Human
ugaggggcggccugcagaggcc

SEQ ID NO: 882743 - RNA, 17 nt, Human
agcuacaaggcaguuca

SEQ ID NO: 882744 - RNA, 22 nt, Human
gaggagcugaggcugaggccuc

SEQ ID NO: 882745 - RNA, 22 nt, Human
agguagaggccuccaggcagca

SEQ ID NO: 882746 - RNA, 22 nt, Human
augcuuuacaguuuuccaaaca

SEQ ID NO: 882747 - RNA, 22 nt, Human
uaacaacuggacaauguugcuc

SEQ ID NO: 882748 - RNA, 22 nt, Human
ggcugcagcggauuggggauug

SEQ ID NO: 882749 - RNA, 22 nt, Human
ggaagggcaaaagagaugaacu

SEQ ID NO: 882750 - RNA, 22 nt, Human
ccucaaaguagagggagaugag

SEQ ID NO: 882751 - RNA, 22 nt, Human
uaaacagugauacguuccagcu

SEQ ID NO: 882752 - RNA, 22 nt, Human
ugugacuugauguuugcaccag

SEQ ID NO: 882753 - RNA, 22 nt, Human
gcugcaggcuguggcaggggag

SEQ ID NO: 882754 - RNA, 22 nt, Human
gcccaauagagaaauagugaaa

SEQ ID NO: 882755 - RNA, 21 nt, Human
aaguccaauaccuaaggcucc

SEQ ID NO: 882756 - RNA, 22 nt, Human
cccagagguuccuuagggacca

SEQ ID NO: 882757 - RNA, 22 nt, Human
uuugcauugcauacaaggaacu

SEQ ID NO: 882758 - RNA, 22 nt, Human
accugaaaccaacuuguguacu

SEQ ID NO: 882759 - RNA, 22 nt, Human
caacacagggguuaugccaugg

SEQ ID NO: 882760 - RNA, 22 nt, Human
ucuagaagauaccugcugccaa

SEQ ID NO: 882761 - RNA, 22 nt, Human
ggucccagcugcucaagaggcu

SEQ ID NO: 882762 - RNA, 22 nt, Human
cauucccacguguucuuugcuu

SEQ ID NO: 882763 - RNA, 22 nt, Human
ggcuuuagggcaggcaguguua

SEQ ID NO: 882764 - RNA, 22 nt, Human
ucuguggcuuucuuauguugua

SEQ ID NO: 882765 - RNA, 22 nt, Human
uaagugaaauggugcaucaaau

SEQ ID NO: 882766 - RNA, 22 nt, Human
ucccucagucccuggacaggca

SEQ ID NO: 882767 - RNA, 22 nt, Human
augaaaugcugagaggugcuuc

SEQ ID NO: 882768 - RNA, 22 nt, Human
ucacaucugugugauugucauu

SEQ ID NO: 882769 - RNA, 22 nt, Human
gacuggaaagccuguccucaga

SEQ ID NO: 882770 - RNA, 22 nt, Human
uuuggaaaaagccugaacauag

SEQ ID NO: 882771 - RNA, 22 nt, Human
cugacacccagcagaacuggga

SEQ ID NO: 882772 - RNA, 22 nt, Human
gucccuggaucugggacagcug

SEQ ID NO: 882773 - RNA, 22 nt, Human
cuagugaaauuugcaaguaauu

SEQ ID NO: 882774 - RNA, 22 nt, Human
aauaguucuagcucagaagcuc

SEQ ID NO: 882775 - RNA, 22 nt, Human
uauggaaauaauuagacaagug

SEQ ID NO: 882776 - RNA, 21 nt, Human
cacaggcuucuauacacaaug

SEQ ID NO: 882777 - RNA, 16 nt, Human
uacaauguagaaaaca

SEQ ID NO: 882778 - RNA, 22 nt, Human
gaggcucagagugguuaaauaa

SEQ ID NO: 882779 - RNA, 22 nt, Human
augucagauguuuaucugauuu

SEQ ID NO: 882780 - RNA, 22 nt, Human
aguggggaagauuuugcaguca

SEQ ID NO: 882781 - RNA, 22 nt, Human
uucucaaaacucaggguaucug

SEQ ID NO: 882782 - RNA, 22 nt, Human
auagaaauguauuuuggacuag

SEQ ID NO: 882783 - RNA, 22 nt, Human
uggccugaguugucugcaggcc

SEQ ID NO: 882784 - RNA, 22 nt, Human
ugcuggcacguggaccaggaga

SEQ ID NO: 882785 - RNA, 22 nt, Human
agcaugaaaggcgugccaacuu

SEQ ID NO: 882786 - RNA, 22 nt, Human
agagaacauuagcaaaaacagc

SEQ ID NO: 882787 - RNA, 22 nt, Human
uucuuagaugauuaaugauggg

SEQ ID NO: 882788 - RNA, 22 nt, Human
acagcuguauccccagagcuca

SEQ ID NO: 882789 - RNA, 22 nt, Human
cuaaggguugaaacagcaagaa

SEQ ID NO: 882790 - RNA, 22 nt, Human
uccuggguagccuguccaagau

SEQ ID NO: 882791 - RNA, 22 nt, Human
gaauaauugugaugcuugaagu

SEQ ID NO: 882792 - RNA, 22 nt, Human
aggcuacuucuagagggacaau

SEQ ID NO: 882793 - RNA, 21 nt, Human
ccugagaucuggaguggcuuu

SEQ ID NO: 882794 - RNA, 22 nt, Human
aaugucuuacauuuacugagca

SEQ ID NO: 882795 - RNA, 22 nt, Human
ccacagggucagccacucugca

SEQ ID NO: 882796 - RNA, 22 nt, Human
aauaaagcaggguccuugcacu

SEQ ID NO: 882797 - RNA, 22 nt, Human
guuauaaaugacugcaaaaguu

SEQ ID NO: 882798 - RNA, 22 nt, Human
ucucugggaucguuuugggcuc

SEQ ID NO: 882799 - RNA, 22 nt, Human
acagguuuuuggauaauccuuu

SEQ ID NO: 882800 - RNA, 22 nt, Human
aggccacagccugggaggugac

SEQ ID NO: 882801 - RNA, 22 nt, Human
ucuccaggcacuuggcugcuac

SEQ ID NO: 882802 - RNA, 22 nt, Human
gacaagacuauguagaaaguau

SEQ ID NO: 882803 - RNA, 22 nt, Human
ucagugauugguggacugccua

SEQ ID NO: 882804 - RNA, 22 nt, Human
uucuucagucccacuagccaca

SEQ ID NO: 882805 - RNA, 18 nt, Human
agaaauaccaguauugga

SEQ ID NO: 882806 - RNA, 22 nt, Human
gacaaacugaaguauauuuaga

SEQ ID NO: 882807 - RNA, 22 nt, Human
auuuucuguaacuauuucuaua

SEQ ID NO: 882808 - RNA, 22 nt, Human
ucauaaagagugcuguuguuuu

SEQ ID NO: 882809 - RNA, 22 nt, Human
aggcuaggggcagugccagcau

SEQ ID NO: 882810 - RNA, 22 nt, Human
uuuuccuuaacagagggagaaa

SEQ ID NO: 882811 - RNA, 18 nt, Human
cugcuucugucugccagu

SEQ ID NO: 882812 - RNA, 22 nt, Human
ugcaaggcccagacaagagcuc

SEQ ID NO: 882813 - RNA, 22 nt, Human
uugagaaaaccaucguaagaau

SEQ ID NO: 882814 - RNA, 22 nt, Human
agguggggaguauauguaauug

SEQ ID NO: 882815 - RNA, 22 nt, Human
uccuuuuucucacacaacgaac

SEQ ID NO: 882816 - RNA, 22 nt, Human
uuuggaagacagggcaggaaag

SEQ ID NO: 882817 - RNA, 22 nt, Human
ucagaggaaaggucagauggcu

SEQ ID NO: 882818 - RNA, 22 nt, Human
aaguccuaauuuuaggaggaga

SEQ ID NO: 882819 - RNA, 22 nt, Human
cuuccugggcaauguucugcuu

SEQ ID NO: 882820 - RNA, 22 nt, Human
cuuuguugugccugagugcacc

SEQ ID NO: 882821 - RNA, 19 nt, Human
ugccucagggcuuugagga

SEQ ID NO: 882822 - RNA, 22 nt, Human
gaguggcuuuuuuaugguaaug

SEQ ID NO: 882823 - RNA, 22 nt, Human
gcauuuauuucuuuacugcauc

SEQ ID NO: 882824 - RNA, 22 nt, Human
gcagggcggcccagagcaggcc

SEQ ID NO: 882825 - RNA, 22 nt, Human
ugacauuucagauaugguauuu

SEQ ID NO: 882826 - RNA, 22 nt, Human
agaacucuuuaucuguggaaug

SEQ ID NO: 882827 - RNA, 22 nt, Human
uuuucauuagaaugacugagaa

SEQ ID NO: 882828 - RNA, 23 nt, Human
cccugcucaggggucugauucuc

SEQ ID NO: 882829 - RNA, 23 nt, Human
ugcagcaggguggucuacuucuc

SEQ ID NO: 882830 - RNA, 22 nt, Human
uguuuaauuucacaaaguugac

SEQ ID NO: 882831 - RNA, 22 nt, Human
uggcaagagggaugcaagguuu

SEQ ID NO: 882832 - RNA, 22 nt, Human
agcccaggcagagggaugcuug

SEQ ID NO: 882833 - RNA, 22 nt, Human
caucuuucaguuuauaagucug

SEQ ID NO: 882834 - RNA, 22 nt, Human
gcagaagggaauaaggagcuuu

SEQ ID NO: 882835 - RNA, 22 nt, Human
uauguauauguguguugacaac

SEQ ID NO: 882836 - RNA, 18 nt, Human
gcuucauggaaggguugu

SEQ ID NO: 882837 - RNA, 22 nt, Human
gcacaggaggccgaugcucaug

SEQ ID NO: 882838 - RNA, 22 nt, Human
ggugaagcguauuuguggagcu

SEQ ID NO: 882839 - RNA, 22 nt, Human
cucugggauagagccucggucu

SEQ ID NO: 882840 - RNA, 18 nt, Human
agagggaaucaguuggau

SEQ ID NO: 882841 - RNA, 22 nt, Human
ugcuggggucauggggcgcccg

SEQ ID NO: 882842 - RNA, 22 nt, Human
gugauaauugcagagaaaggag

SEQ ID NO: 882843 - RNA, 21 nt, Human
agaaaaguauuugaaucaaga

SEQ ID NO: 882844 - RNA, 22 nt, Human
uaugaaguagagcagagaugcc

SEQ ID NO: 882845 - RNA, 22 nt, Human
acacuguuccugaaauuguuau

SEQ ID NO: 882846 - RNA, 22 nt, Human
augcuauuuuacauaggaaugg

SEQ ID NO: 882847 - RNA, 22 nt, Human
aggcucagugauguaaaauaua

SEQ ID NO: 882848 - RNA, 22 nt, Human
gcugcccugacuccagcagccu

SEQ ID NO: 882849 - RNA, 22 nt, Human
aaugaguuuguucuauuauuug

SEQ ID NO: 882850 - RNA, 22 nt, Human
acaugcuuuaucggauugacac

SEQ ID NO: 882851 - RNA, 22 nt, Human
gcugccaucagaguucaggaau

SEQ ID NO: 882852 - RNA, 22 nt, Human
agggugagggucuggccuugag

SEQ ID NO: 882853 - RNA, 22 nt, Human
auuccugaagaagguauguugc

SEQ ID NO: 882854 - RNA, 22 nt, Human
uaucagauauagcauucacugg

SEQ ID NO: 882855 - RNA, 22 nt, Human
acagcuacucugcagauaaauc

SEQ ID NO: 882856 - RNA, 22 nt, Human
gaaguuauuugcuaucuacuga

SEQ ID NO: 882857 - RNA, 22 nt, Human
ggccugcugcagugugacaguu

SEQ ID NO: 882858 - RNA, 18 nt, Human
ucaagacaucaugaaaua

SEQ ID NO: 882859 - RNA, 22 nt, Human
ugaggcaaagacaaagcagcau

SEQ ID NO: 882860 - RNA, 22 nt, Human
uaaggucuuuaacaggucuuuu

SEQ ID NO: 882861 - RNA, 22 nt, Human
guggaaauaguuugguuauaga

SEQ ID NO: 882862 - RNA, 19 nt, Human
agaaucuaaauuauuucug

SEQ ID NO: 882863 - RNA, 22 nt, Human
auguaacauaugugaucgcauu

SEQ ID NO: 882864 - RNA, 22 nt, Human
agcucccaauugacuugaacua

SEQ ID NO: 882865 - RNA, 18 nt, Human
agugugugcccuuucagg

SEQ ID NO: 882866 - RNA, 22 nt, Human
ugcaucauuuauaaugucuuug

SEQ ID NO: 882867 - RNA, 22 nt, Human
gcagugaaaaagugcacccugu

SEQ ID NO: 882868 - RNA, 23 nt, Human
cagaggugucagugcccaguguc

SEQ ID NO: 882869 - RNA, 22 nt, Human
aauucugcauaagguggcucug

SEQ ID NO: 882870 - RNA, 22 nt, Human
ugggcagcauccuccacaguca

SEQ ID NO: 882871 - RNA, 22 nt, Human
aggaccugacuggcuccugcuu

SEQ ID NO: 882872 - RNA, 22 nt, Human
aggagugggggcgagaaguuaa

SEQ ID NO: 882873 - RNA, 22 nt, Human
caggccuuaucuccacccugca

SEQ ID NO: 882874 - RNA, 22 nt, Human
uguucacauguacaugaauauu

SEQ ID NO: 882875 - RNA, 21 nt, Human
cacugaggucagggguagggu

SEQ ID NO: 882876 - RNA, 22 nt, Human
aucuggaauccuuguggacaau

SEQ ID NO: 882877 - RNA, 22 nt, Human
gcagcugggacacugaggccag

SEQ ID NO: 882878 - RNA, 22 nt, Human
uauuguacauuucaaaguagcu

SEQ ID NO: 882879 - RNA, 22 nt, Human
acuucaaauuuucagaagaaau

SEQ ID NO: 882880 - RNA, 22 nt, Human
aggaaauugucuuuuuccuugu

SEQ ID NO: 882881 - RNA, 22 nt, Human
cuggaaggagcccgggcggauc

SEQ ID NO: 882882 - RNA, 22 nt, Human
acagugaaaauaauaucuucaa

SEQ ID NO: 882883 - RNA, 22 nt, Human
uagaacagaguuccagugauca

SEQ ID NO: 882884 - RNA, 22 nt, Human
ucagcaaguggaccauccuggg

SEQ ID NO: 882885 - RNA, 23 nt, Human
uagaacaucggugucuuggagca

SEQ ID NO: 882886 - RNA, 22 nt, Human
aggaggccgcugaugggcuccc

SEQ ID NO: 882887 - RNA, 22 nt, Human
uugguaaauaacaaucacagug

SEQ ID NO: 882888 - RNA, 22 nt, Human
ugggaauagaacaagauagaga

SEQ ID NO: 882889 - RNA, 22 nt, Human
uggcagugcugcagugcccuua

SEQ ID NO: 882890 - RNA, 22 nt, Human
acacaucuaucucuacacaagg

SEQ ID NO: 882891 - RNA, 22 nt, Human
ucagaaagcuauaugguguguc

SEQ ID NO: 882892 - RNA, 22 nt, Human
uagacauuagguagguucaugg

SEQ ID NO: 882893 - RNA, 22 nt, Human
uagggcagcugcaucaggcacu

SEQ ID NO: 882894 - RNA, 22 nt, Human
agucaacagcauuauggaugaa

SEQ ID NO: 882895 - RNA, 22 nt, Human
acccucagcuggagauugaauu

SEQ ID NO: 882896 - RNA, 22 nt, Human
ggcacugaucugauuucccucc

SEQ ID NO: 882897 - RNA, 22 nt, Human
ucccagcauuaaugccugucag

SEQ ID NO: 882898 - RNA, 23 nt, Human
augggccaagcaagacccaugac

SEQ ID NO: 882899 - RNA, 22 nt, Human
agcaauaaauguaaagguuaag

SEQ ID NO: 882900 - RNA, 22 nt, Human
uggaauguugcauaagaucuga

SEQ ID NO: 882901 - RNA, 22 nt, Human
uguugagacugagggagucagc

SEQ ID NO: 882902 - RNA, 22 nt, Human
cuuagaaugucuacucuuacca

SEQ ID NO: 882903 - RNA, 22 nt, Human
cccagcaguuguuggugcacau

SEQ ID NO: 882904 - RNA, 22 nt, Human
uuugcuaaaauguauugggauu

SEQ ID NO: 882905 - RNA, 22 nt, Human
auguuuacaauucaguauuaca

SEQ ID NO: 882906 - RNA, 22 nt, Human
agcaaguaguaccaaguagcuc

SEQ ID NO: 882907 - RNA, 22 nt, Human
augucucucagguuuaacuuua

SEQ ID NO: 882908 - RNA, 22 nt, Human
auuucuguuauaccuuucucag

SEQ ID NO: 882909 - RNA, 22 nt, Human
agcaggcuuguuaugucugaga

SEQ ID NO: 882910 - RNA, 22 nt, Human
aagauaaguaacgagccucagu

SEQ ID NO: 882911 - RNA, 21 nt, Human
gaagagaguccucauccugag

SEQ ID NO: 882912 - RNA, 22 nt, Human
uauaaagaaggcacagcaagac

SEQ ID NO: 882913 - RNA, 22 nt, Human
cucaccaggaacagcugcggag

SEQ ID NO: 882914 - RNA, 22 nt, Human
auacaaguugcccaaaugauua

SEQ ID NO: 882915 - RNA, 22 nt, Human
agcugggacucaacugucuggg

SEQ ID NO: 882916 - RNA, 22 nt, Human
cagguguuauacaugaaauuua

SEQ ID NO: 882917 - RNA, 22 nt, Human
uggccucuuaggacauccucua

SEQ ID NO: 882918 - RNA, 21 nt, Human
uaauuuauucagcacaguguu

SEQ ID NO: 882919 - RNA, 22 nt, Human
ccauaggagcccuggucccuga

SEQ ID NO: 882920 - RNA, 22 nt, Human
gagaggcagaggccugaaaccg

SEQ ID NO: 882921 - RNA, 19 nt, Human
gcaggcagcugggguaucc

SEQ ID NO: 882922 - RNA, 19 nt, Human
ugagauuucuuaggugauu

SEQ ID NO: 882923 - RNA, 22 nt, Human
gagggagagugauggaccauug

SEQ ID NO: 882924 - RNA, 22 nt, Human
acagagcacauagauuggaguu

SEQ ID NO: 882925 - RNA, 22 nt, Human
ucugaggcugaauggacuccgu

SEQ ID NO: 882926 - RNA, 22 nt, Human
uuccuacauuugccucacuccc

SEQ ID NO: 882927 - RNA, 22 nt, Human
ucccaaagaacugaauaguaau

SEQ ID NO: 882928 - RNA, 22 nt, Human
ggucagaggggauuccuuggga

SEQ ID NO: 882929 - RNA, 22 nt, Human
uuuuauuaguggcuagaugggg

SEQ ID NO: 882930 - RNA, 22 nt, Human
cacauucagguggcauguuaga

SEQ ID NO: 882931 - RNA, 22 nt, Human
ugggcuggcccaccacaccucg

SEQ ID NO: 882932 - RNA, 22 nt, Human
acaguuuacuggccuugccguu

SEQ ID NO: 882933 - RNA, 22 nt, Human
cugccagcucucuggaggcucu

SEQ ID NO: 882934 - RNA, 22 nt, Human
cagcuuuugcagacuucuugcc

SEQ ID NO: 882935 - RNA, 22 nt, Human
agcuggagaaaccugggagggu

SEQ ID NO: 882936 - RNA, 22 nt, Human
gauugaaaggucuuuaaauugg

SEQ ID NO: 882937 - RNA, 22 nt, Human
aucugggagcggagguugcagu

SEQ ID NO: 882938 - RNA, 22 nt, Human
cacucuaaccuccaucuuccau

SEQ ID NO: 882939 - RNA, 22 nt, Human
acuuuggaaauugucuauaaga

SEQ ID NO: 882940 - RNA, 23 nt, Human
caccccacccugaggaggaggga

SEQ ID NO: 882941 - RNA, 22 nt, Human
agcuuagaagugugcugagagg

SEQ ID NO: 882942 - RNA, 22 nt, Human
ucaggccacuucacaggugauu

SEQ ID NO: 882943 - RNA, 22 nt, Human
ucccugugagaaaugaagcagg

SEQ ID NO: 882944 - RNA, 22 nt, Human
ggcugcucggagccuccuguga

SEQ ID NO: 882945 - RNA, 22 nt, Human
ggagugaggcauuuguagcuga

SEQ ID NO: 882946 - RNA, 22 nt, Human
ucuggcucuguguccccaccca

SEQ ID NO: 882947 - RNA, 22 nt, Human
caggcugccgaggcugcagaau

SEQ ID NO: 882948 - RNA, 23 nt, Human
ccuccccuucccacagcugggug

SEQ ID NO: 882949 - RNA, 22 nt, Human
ccugguggagaggggcggagcg

SEQ ID NO: 882950 - RNA, 22 nt, Human
gcugugcagauguagggagugg

SEQ ID NO: 882951 - RNA, 22 nt, Human
auguucuuugaaauauuuuaga

SEQ ID NO: 882952 - RNA, 17 nt, Human
uuagagcuacauguuga

SEQ ID NO: 882953 - RNA, 22 nt, Human
ugcuagaauuugcagaagcaua

SEQ ID NO: 882954 - RNA, 22 nt, Human
agacagcuguuccuucauguuu

SEQ ID NO: 882955 - RNA, 22 nt, Human
aaguuucaugauguaauuauug

SEQ ID NO: 882956 - RNA, 22 nt, Human
aauggcuucaugucuguggaaa

SEQ ID NO: 882957 - RNA, 22 nt, Human
cagagccaucaugauauggagu

SEQ ID NO: 882958 - RNA, 22 nt, Human
aaaguucaugguguuauagaaa

SEQ ID NO: 882959 - RNA, 22 nt, Human
uauuagauuaacuuuaaugucu

SEQ ID NO: 882960 - RNA, 22 nt, Human
aagucaaguacuacaggaaaca

SEQ ID NO: 882961 - RNA, 22 nt, Human
ccaagaggggcagagggcugca

SEQ ID NO: 882962 - RNA, 22 nt, Human
gcauuucaaaauuccaggcaag

SEQ ID NO: 882963 - RNA, 22 nt, Human
ccauuucacccacugcuuuagg

SEQ ID NO: 882964 - RNA, 22 nt, Human
gcagggcagcuuagucccuguc

SEQ ID NO: 882965 - RNA, 22 nt, Human
uuuuagaaauacugauuuagug

SEQ ID NO: 882966 - RNA, 22 nt, Human
agccagcaggugagugcagccu

SEQ ID NO: 882967 - RNA, 22 nt, Human
uucacaaaaugguuuguugaug

SEQ ID NO: 882968 - RNA, 22 nt, Human
ugccaguugggaaaacagacau

SEQ ID NO: 882969 - RNA, 22 nt, Human
acaugcaugguguuggguugga

SEQ ID NO: 882970 - RNA, 17 nt, Human
cugccuggagucccauc

SEQ ID NO: 882971 - RNA, 22 nt, Human
gcugggagucgcgucuguggcc

SEQ ID NO: 882972 - RNA, 22 nt, Human
gggucuccugagagaagaugcu

SEQ ID NO: 882973 - RNA, 22 nt, Human
caucucaucagugagagucagc

SEQ ID NO: 882974 - RNA, 22 nt, Human
uaucuagaacuccagaauguag

SEQ ID NO: 882975 - RNA, 22 nt, Human
gaacuuuaauuagcuuuugucu

SEQ ID NO: 882976 - RNA, 22 nt, Human
agcagcugugggcaauauguaa

SEQ ID NO: 882977 - RNA, 22 nt, Human
ccugaggcaaggacuugguggc

SEQ ID NO: 882978 - RNA, 22 nt, Human
cucuccaggcugggacaggacc

SEQ ID NO: 882979 - RNA, 22 nt, Human
gagcaucuuguucccaacuucu

SEQ ID NO: 882980 - RNA, 22 nt, Human
aaaguauauuuacuuacuguga

SEQ ID NO: 882981 - RNA, 22 nt, Human
gaaucucaggggaguuacugga

SEQ ID NO: 882982 - RNA, 22 nt, Human
uuucacauggaagcucucgaga

SEQ ID NO: 882983 - RNA, 22 nt, Human
aaguacaacgcauacagagaaa

SEQ ID NO: 882984 - RNA, 22 nt, Human
agaauaaacugcuuuagggcag

SEQ ID NO: 882985 - RNA, 22 nt, Human
gugcuccauugucuagaacugg

SEQ ID NO: 882986 - RNA, 22 nt, Human
agccaggcggggcagguuuccu

SEQ ID NO: 882987 - RNA, 22 nt, Human
caguuacauauuuaguagguua

SEQ ID NO: 882988 - RNA, 22 nt, Human
agcggcugcucuuuucagaucc

SEQ ID NO: 882989 - RNA, 22 nt, Human
uggcagauacccaggcaaaugg

SEQ ID NO: 882990 - RNA, 22 nt, Human
uuggugcaaauuccuguaagag

SEQ ID NO: 882991 - RNA, 22 nt, Human
acuuagcauuauguaauuacua

SEQ ID NO: 882992 - RNA, 22 nt, Human
ccagggaagcuggucacgcagg

SEQ ID NO: 882993 - RNA, 22 nt, Human
cagaggcuggauggacuugccu

SEQ ID NO: 882994 - RNA, 23 nt, Human
auguccaaagggauucgucugau

SEQ ID NO: 882995 - RNA, 22 nt, Human
gcugagagugggugcagugcuu

SEQ ID NO: 882996 - RNA, 22 nt, Human
uuaugagauauuuauacugcug

SEQ ID NO: 882997 - RNA, 22 nt, Human
gggauccauccgugcagcagag

SEQ ID NO: 882998 - RNA, 22 nt, Human
ucugagagagcaccuauccacu

SEQ ID NO: 882999 - RNA, 18 nt, Human
agccucuggcagagagaa

SEQ ID NO: 883000 - RNA, 22 nt, Human
uggaaggggagcuggaaagggg

SEQ ID NO: 883001 - RNA, 20 nt, Human
uacaggagugaguggguggg

SEQ ID NO: 883002 - RNA, 22 nt, Human
aacagugauaucaagacagaca

SEQ ID NO: 883003 - RNA, 22 nt, Human
ggccagagagcagccaggauuc

SEQ ID NO: 883004 - RNA, 22 nt, Human
ucuguuaugcauaagcaucagu

SEQ ID NO: 883005 - RNA, 22 nt, Human
caggaugccaucugcugcugcu

SEQ ID NO: 883006 - RNA, 22 nt, Human
agcugcagcuguuuucugagug

SEQ ID NO: 883007 - RNA, 22 nt, Human
aaagcuauuuauuacagagaau

SEQ ID NO: 883008 - RNA, 22 nt, Human
aaacaguagaaguguauuuuau

SEQ ID NO: 883009 - RNA, 22 nt, Human
uuagaacuuaagaauacugucu

SEQ ID NO: 883010 - RNA, 22 nt, Human
aggcuguggugcugaaggaggg

SEQ ID NO: 883011 - RNA, 22 nt, Human
auaacuuaaugggucaugcucu

SEQ ID NO: 883012 - RNA, 22 nt, Human
uaacacaaaagaauaugugugu

SEQ ID NO: 883013 - RNA, 22 nt, Human
uuaggaaggcacugggugccaa

SEQ ID NO: 883014 - RNA, 22 nt, Human
uucaaacucuugcucugcuagu

SEQ ID NO: 883015 - RNA, 22 nt, Human
guuuaugaguuacguagggguu

SEQ ID NO: 883016 - RNA, 22 nt, Human
uuugguaaaugcagguucuucu

SEQ ID NO: 883017 - RNA, 22 nt, Human
uuugugcauaaagggcuauagu

SEQ ID NO: 883018 - RNA, 22 nt, Human
aacagcauaaguauuuauuuca

SEQ ID NO: 883019 - RNA, 22 nt, Human
uauuauugaaucaguucuuuga

SEQ ID NO: 883020 - RNA, 22 nt, Human
aacauacauauuucagugucca

SEQ ID NO: 883021 - RNA, 22 nt, Human
uaaugcuuauguuaugcaauuu

SEQ ID NO: 883022 - RNA, 19 nt, Human
aggcagcaggccagggaug

SEQ ID NO: 883023 - RNA, 22 nt, Human
gguuacauggaagaaauauaau

SEQ ID NO: 883024 - RNA, 22 nt, Human
gaaauacaaagccagccauuuu

SEQ ID NO: 883025 - RNA, 22 nt, Human
ucuuuagagccuuuccucccga

SEQ ID NO: 883026 - RNA, 18 nt, Human
ugcaugcuuuuguuucca

SEQ ID NO: 883027 - RNA, 22 nt, Human
uggucaaagaccaggaaaugcu

SEQ ID NO: 883028 - RNA, 22 nt, Human
uaugucaugucuuagagaauga

SEQ ID NO: 883029 - RNA, 21 nt, Human
uccugggggguaggugaguuu

SEQ ID NO: 883030 - RNA, 23 nt, Human
auuagaaaggcuuucuggugaaa

SEQ ID NO: 883031 - RNA, 22 nt, Human
uuagaagugguaaguagaaaga

SEQ ID NO: 883032 - RNA, 22 nt, Human
ucugaaaucuaaugcucugugg

SEQ ID NO: 883033 - RNA, 22 nt, Human
aguucucuccccugcuguucag

SEQ ID NO: 883034 - RNA, 22 nt, Human
gacaguuacccccaaaagaauu

SEQ ID NO: 883035 - RNA, 22 nt, Human
augaaauugaucuugaacuuuu

SEQ ID NO: 883036 - RNA, 22 nt, Human
cauuuguuaaccaguguggauu

SEQ ID NO: 883037 - RNA, 22 nt, Human
aggaagagguagcugucaaggg

SEQ ID NO: 883038 - RNA, 22 nt, Human
gggagcugagggaccucugugg

SEQ ID NO: 883039 - RNA, 22 nt, Human
ccagagggagccaccagggugu

SEQ ID NO: 883040 - RNA, 22 nt, Human
gagacagagaucuugcugaguc

SEQ ID NO: 883041 - RNA, 22 nt, Human
gggcuuggguauugugagaggu

SEQ ID NO: 883042 - RNA, 19 nt, Human
ucagugcuccuauguccuu

SEQ ID NO: 883043 - RNA, 22 nt, Human
uuguucaucaggugacacauac

SEQ ID NO: 883044 - RNA, 22 nt, Human
agacaguguaauguaauuguua

SEQ ID NO: 883045 - RNA, 22 nt, Human
ccagggcaauaggaacacuuuu

SEQ ID NO: 883046 - RNA, 22 nt, Human
uccaggagcucauccacgucaa

SEQ ID NO: 883047 - RNA, 22 nt, Human
ugaggcuuggagaggucaggga

SEQ ID NO: 883048 - RNA, 22 nt, Human
gagggggcucccugaagccagu

SEQ ID NO: 883049 - RNA, 22 nt, Human
uucugcugaagucacugggagc

SEQ ID NO: 883050 - RNA, 22 nt, Human
uggcauggcauuuagagaauua

SEQ ID NO: 883051 - RNA, 22 nt, Human
gauuugucuauauucaaauaug

SEQ ID NO: 883052 - RNA, 22 nt, Human
gggcucuggaaggugcaccaug

SEQ ID NO: 883053 - RNA, 22 nt, Human
gcagacagccagacugcacugg

SEQ ID NO: 883054 - RNA, 22 nt, Human
ucucuuggugauagucuuucuu

SEQ ID NO: 883055 - RNA, 22 nt, Human
uuacaaagagugccagagugug

SEQ ID NO: 883056 - RNA, 22 nt, Human
acuccacauuugaacacaguuc

SEQ ID NO: 883057 - RNA, 22 nt, Human
uagcagcacaaauggacuauga

SEQ ID NO: 883058 - RNA, 22 nt, Human
ugaacuuuugcacagaggauuu

SEQ ID NO: 883059 - RNA, 22 nt, Human
uaaugucuucuuuuaauuuggc

SEQ ID NO: 883060 - RNA, 22 nt, Human
uuugcauuccugccugcauuca

SEQ ID NO: 883061 - RNA, 22 nt, Human
gcuguggcugaccaccaggggg

SEQ ID NO: 883062 - RNA, 22 nt, Human
ucuagcaccacauuaaauagca

SEQ ID NO: 883063 - RNA, 22 nt, Human
cagaagcauugacuccuugcuc

SEQ ID NO: 883064 - RNA, 22 nt, Human
agaaugugaagacccgguuugu

SEQ ID NO: 883065 - RNA, 22 nt, Human
agagcacagcagaucucugaug

SEQ ID NO: 883066 - RNA, 22 nt, Human
ggcagagcgcaugcgucgcaga

SEQ ID NO: 883067 - RNA, 22 nt, Human
uaacacaguguccucagaaaca

SEQ ID NO: 883068 - RNA, 22 nt, Human
cucagagcaaugaacaugcaaa

SEQ ID NO: 883069 - RNA, 22 nt, Human
acagcuccuaacaaaggcucuc

SEQ ID NO: 883070 - RNA, 22 nt, Human
cccucaugccagacagcaugca

SEQ ID NO: 883071 - RNA, 22 nt, Human
aauagagucaguucuacauucu

SEQ ID NO: 883072 - RNA, 22 nt, Human
uagacauuuuaagacauauacc

SEQ ID NO: 883073 - RNA, 22 nt, Human
ccuggcucccggaacagggucu

SEQ ID NO: 883074 - RNA, 22 nt, Human
ucuuuacauaguguggacuacu

SEQ ID NO: 883075 - RNA, 22 nt, Human
cugccugugauuuuucucuagu

SEQ ID NO: 883076 - RNA, 22 nt, Human
cagugucuuauuuguagcucag

SEQ ID NO: 883077 - RNA, 22 nt, Human
agacccuggggaaagucacuuc

SEQ ID NO: 883078 - RNA, 22 nt, Human
cugcccuggaaaacguaucuua

SEQ ID NO: 883079 - RNA, 22 nt, Human
uacauacauuaccucauuuagu

SEQ ID NO: 883080 - RNA, 22 nt, Human
aagaggcauaaaauuuauaugg

SEQ ID NO: 883081 - RNA, 22 nt, Human
cugaucuuaaguaacauuauuu

SEQ ID NO: 883082 - RNA, 22 nt, Human
aagggagacaguugugugagga

SEQ ID NO: 883083 - RNA, 22 nt, Human
cccuggcuuaaaaaccucauau

SEQ ID NO: 883084 - RNA, 23 nt, Human
ucugagcugucuuuucagcagaa

SEQ ID NO: 883085 - RNA, 22 nt, Human
ugccaaggguaugggcaagaua

SEQ ID NO: 883086 - RNA, 22 nt, Human
gaggaggccaguggaaggaagc

SEQ ID NO: 883087 - RNA, 22 nt, Human
cauguucaccuguggcacuagu

SEQ ID NO: 883088 - RNA, 22 nt, Human
ccaggguggggcaggcccacug

SEQ ID NO: 883089 - RNA, 22 nt, Human
uuucauugaacuaaagaaucug

SEQ ID NO: 883090 - RNA, 22 nt, Human
cugaggagcugaaggcccucca

SEQ ID NO: 883091 - RNA, 22 nt, Human
uacaucucaucugugcucuccg

SEQ ID NO: 883092 - RNA, 22 nt, Human
agggucuuuccugggagccagc

SEQ ID NO: 883093 - RNA, 22 nt, Human
agcaacaggaauauuauggcaa

SEQ ID NO: 883094 - RNA, 22 nt, Human
uucagggacuuugauguaucag

SEQ ID NO: 883095 - RNA, 22 nt, Human
aguaucaauaauagaggagcua

SEQ ID NO: 883096 - RNA, 22 nt, Human
uaagugagaacuaaaccuucug

SEQ ID NO: 883097 - RNA, 22 nt, Human
uuacuguuugaaaaaugaaugu

SEQ ID NO: 883098 - RNA, 22 nt, Human
ugucuuuagaaagaagcagaca

SEQ ID NO: 883099 - RNA, 22 nt, Human
ccugggccaggcuugggaaugc

SEQ ID NO: 883100 - RNA, 22 nt, Human
ccucccagaugugcccaaugga

SEQ ID NO: 883101 - RNA, 22 nt, Human
ugaugaggcauaugcuacacau

SEQ ID NO: 883102 - RNA, 22 nt, Human
gcagcaaacuuccacaaguaga

SEQ ID NO: 883103 - RNA, 22 nt, Human
cuuccucuauguucagguagaa

SEQ ID NO: 883104 - RNA, 22 nt, Human
gcucugugccagggcugggcca

SEQ ID NO: 883105 - RNA, 22 nt, Human
uuaaaagagcagcccagcauau

SEQ ID NO: 883106 - RNA, 22 nt, Human
cagggcuuggaucuguggucag

SEQ ID NO: 883107 - RNA, 21 nt, Human
aggcugcucuuucuuguggua

SEQ ID NO: 883108 - RNA, 22 nt, Human
auguuugugggauaaacaaaug

SEQ ID NO: 883109 - RNA, 22 nt, Human
gggagugguugauggugaaaau

SEQ ID NO: 883110 - RNA, 22 nt, Human
augcaggaugcagaggggcccg

SEQ ID NO: 883111 - RNA, 22 nt, Human
aucaguuucugugaagaacaca

SEQ ID NO: 883112 - RNA, 22 nt, Human
aguucagcuucaagcuaugagg

SEQ ID NO: 883113 - RNA, 19 nt, Human
cuccaaguuaagagggagg

SEQ ID NO: 883114 - RNA, 22 nt, Human
ccauggcuccuugcccuguagc

SEQ ID NO: 883115 - RNA, 22 nt, Human
uggcuucuuuccacuguccugu

SEQ ID NO: 883116 - RNA, 22 nt, Human
cagcccugcugacacugucuga

SEQ ID NO: 883117 - RNA, 22 nt, Human
aucucaccaaguuauuacgaga

SEQ ID NO: 883118 - RNA, 22 nt, Human
ugcccagccaguuuaugguaau

SEQ ID NO: 883119 - RNA, 22 nt, Human
acuguacacgugucauuuacag

SEQ ID NO: 883120 - RNA, 22 nt, Human
ucucagugcagagaggcuaucu

SEQ ID NO: 883121 - RNA, 22 nt, Human
uuucaugaggcugcauaaggag

SEQ ID NO: 883122 - RNA, 22 nt, Human
gacaauaaagugauacauggga

SEQ ID NO: 883123 - RNA, 22 nt, Human
caggcugagcucuggccugggc

SEQ ID NO: 883124 - RNA, 22 nt, Human
uuuucguuuauuugacauguaa

SEQ ID NO: 883125 - RNA, 22 nt, Human
aaagucuccacugggaaccaaa

SEQ ID NO: 883126 - RNA, 22 nt, Human
augugcuggcuaacuggauggg

SEQ ID NO: 883127 - RNA, 22 nt, Human
acucucccuuggagccucaggc

SEQ ID NO: 883128 - RNA, 22 nt, Human
aaauugcucuuuaaaaguacug

SEQ ID NO: 883129 - RNA, 22 nt, Human
gagcugaaggagaaagcagggg

SEQ ID NO: 883130 - RNA, 22 nt, Human
ugucuggaggucagguccuggg

SEQ ID NO: 883131 - RNA, 22 nt, Human
agauuuuggcuggcuggagaga

SEQ ID NO: 883132 - RNA, 22 nt, Human
gaacacaugauuauaaaugcua

SEQ ID NO: 883133 - RNA, 22 nt, Human
cagagcugcuucccaguuugug

SEQ ID NO: 883134 - RNA, 22 nt, Human
uuuuaauacugcuauuguagga

SEQ ID NO: 883135 - RNA, 22 nt, Human
cccaguguuacgugacagccug

SEQ ID NO: 883136 - RNA, 17 nt, Human
uggggaugguucaugag

SEQ ID NO: 883137 - RNA, 22 nt, Human
caauacuauucggaccaucucu

SEQ ID NO: 883138 - RNA, 22 nt, Human
auuucuugugggaaaugcagca

SEQ ID NO: 883139 - RNA, 22 nt, Human
uggaguugugucaucuuuguaa

SEQ ID NO: 883140 - RNA, 22 nt, Human
cuuauauuugucaacuuuacaa

SEQ ID NO: 883141 - RNA, 22 nt, Human
auauguuacucuuucaagcaga

SEQ ID NO: 883142 - RNA, 22 nt, Human
uaauacaucauucaucuaagga

SEQ ID NO: 883143 - RNA, 22 nt, Human
cagcugaacauguagagcaucu

SEQ ID NO: 883144 - RNA, 22 nt, Human
agaaggcuggccauggugcccu

SEQ ID NO: 883145 - RNA, 22 nt, Human
cugucucuguugccuguaggug

SEQ ID NO: 883146 - RNA, 22 nt, Human
uuauuuuguagcucugaucuuu

SEQ ID NO: 883147 - RNA, 22 nt, Human
uucuuuuuaucuucccauaaga

SEQ ID NO: 883148 - RNA, 22 nt, Human
auggugguagaagcacuaugug

SEQ ID NO: 883149 - RNA, 22 nt, Human
ggcugugacaaggcugcgggaa

SEQ ID NO: 883150 - RNA, 21 nt, Human
ucccacagaaacugcgaaauu

SEQ ID NO: 883151 - RNA, 22 nt, Human
gucuucuuguuuugaaggaaau

SEQ ID NO: 883152 - RNA, 22 nt, Human
uucuguccuguuggaugaauca

SEQ ID NO: 883153 - RNA, 22 nt, Human
uggaggaaguggacaguugugu

SEQ ID NO: 883154 - RNA, 22 nt, Human
cauggaucauaaaugugcuaaa

SEQ ID NO: 883155 - RNA, 22 nt, Human
ccuuuaaagacugcauaacuuc

SEQ ID NO: 883156 - RNA, 22 nt, Human
gccagccagaguggcugugugu

SEQ ID NO: 883157 - RNA, 22 nt, Human
aaucagagucccaagaucugua

SEQ ID NO: 883158 - RNA, 22 nt, Human
cugagcgaggaguuggagcuuu

SEQ ID NO: 883159 - RNA, 22 nt, Human
ggcaggcaggagcgugcuuggg

SEQ ID NO: 883160 - RNA, 22 nt, Human
uuucuguaaguucaggcuuucc

SEQ ID NO: 883161 - RNA, 22 nt, Human
gcagguggauuaucagaagugc

SEQ ID NO: 883162 - RNA, 22 nt, Human
auagauuugaauuuaagacuug

SEQ ID NO: 883163 - RNA, 19 nt, Human
cagugcccacccuagcaca

SEQ ID NO: 883164 - RNA, 22 nt, Human
acacacagguaaaggagccugg

SEQ ID NO: 883165 - RNA, 19 nt, Human
uuauauacuugguuucucu

SEQ ID NO: 883166 - RNA, 22 nt, Human
cagcuguggagggaggaaaugc

SEQ ID NO: 883167 - RNA, 22 nt, Human
acagauguuagcaaugaugaug

SEQ ID NO: 883168 - RNA, 21 nt, Human
ccuucuccacagggucuccgg

SEQ ID NO: 883169 - RNA, 22 nt, Human
cugcacagccugucugggggcc

SEQ ID NO: 883170 - RNA, 23 nt, Human
aguacauucgaaaaauucuguga

SEQ ID NO: 883171 - RNA, 22 nt, Human
uuuuacaaaugaggagcuggag

SEQ ID NO: 883172 - RNA, 22 nt, Human
agugcugggauuacaggcauaa

SEQ ID NO: 883173 - RNA, 22 nt, Human
agugcugggauugcaggcauga

SEQ ID NO: 883174 - RNA, 22 nt, Human
agaacaauugccccaaagcuug

SEQ ID NO: 883175 - RNA, 21 nt, Human
aggcuuuaccucuggguaggu

SEQ ID NO: 883176 - RNA, 22 nt, Human
agacaaaugguaauuaugucua

SEQ ID NO: 883177 - RNA, 22 nt, Human
cccaggcugcaugaguccaugg

SEQ ID NO: 883178 - RNA, 22 nt, Human
gcugaaguugaauauucuggga

SEQ ID NO: 883179 - RNA, 22 nt, Human
agaauuuaggaugcaugugaau

SEQ ID NO: 883180 - RNA, 22 nt, Human
uuagaaaugauuucaccucuuu

SEQ ID NO: 883181 - RNA, 22 nt, Human
ucuuuccuuagaauaauucuuu

SEQ ID NO: 883182 - RNA, 22 nt, Human
cucauggagggagugcucuucc

SEQ ID NO: 883183 - RNA, 22 nt, Human
uuucuauuggcgucacuguugu

SEQ ID NO: 883184 - RNA, 22 nt, Human
ucucuucuuuggggugggcuca

SEQ ID NO: 883185 - RNA, 22 nt, Human
uuugacaguacucuguaggauc

SEQ ID NO: 883186 - RNA, 22 nt, Human
aaagcuauuuguuaugagagaa

SEQ ID NO: 883187 - RNA, 22 nt, Human
cuguuauuucugaaugccaucc

SEQ ID NO: 883188 - RNA, 22 nt, Human
uuugcuuucccuuguagaaagu

SEQ ID NO: 883189 - RNA, 22 nt, Human
uagaugugagcccaggcugcuu

SEQ ID NO: 883190 - RNA, 19 nt, Human
agugguagaugagcaggag

SEQ ID NO: 883191 - RNA, 22 nt, Human
agaagugucagugcaggcagcu

SEQ ID NO: 883192 - RNA, 22 nt, Human
aaauuccauuaggaaacuucca

SEQ ID NO: 883193 - RNA, 22 nt, Human
aagcaugggaggccuggaggag

SEQ ID NO: 883194 - RNA, 22 nt, Human
ccacgcucauccucucugagag

SEQ ID NO: 883195 - RNA, 22 nt, Human
augucaaaucaguuuuaucaga

SEQ ID NO: 883196 - RNA, 22 nt, Human
uaggcugggcugagcuggacgg

SEQ ID NO: 883197 - RNA, 22 nt, Human
gaaauucugugucccagagugc

SEQ ID NO: 883198 - RNA, 19 nt, Human
auguucuauccuccaaguu

SEQ ID NO: 883199 - RNA, 22 nt, Human
cucugaagguuucuguuacugu

SEQ ID NO: 883200 - RNA, 20 nt, Human
cugaaaggagucgggauguc

SEQ ID NO: 883201 - RNA, 20 nt, Human
ggcaggugcucgcuuggucu

SEQ ID NO: 883202 - RNA, 19 nt, Human
uagaagcagggaagcugag

SEQ ID NO: 883203 - RNA, 22 nt, Human
augucuuuuauggagaugucau

SEQ ID NO: 883204 - RNA, 22 nt, Human
gggagucagagagguaauggga

SEQ ID NO: 883205 - RNA, 22 nt, Human
gccaagccugggaagagcccau

SEQ ID NO: 883206 - RNA, 22 nt, Human
ugccgccugguuucuccgcccc

SEQ ID NO: 883207 - RNA, 22 nt, Human
aaaugauaguauggaacuagga

SEQ ID NO: 883208 - RNA, 22 nt, Human
gccaggucgucuccauguccaa

SEQ ID NO: 883209 - RNA, 22 nt, Human
gcugccuccugagauuugggca

SEQ ID NO: 883210 - RNA, 22 nt, Human
uacaaacuguuauuauuauugu

SEQ ID NO: 883211 - RNA, 22 nt, Human
ugcuggccggccaggugcugag

SEQ ID NO: 883212 - RNA, 22 nt, Human
cugccagaagagaacaccaguu

SEQ ID NO: 883213 - RNA, 22 nt, Human
auuaauauacacuguuagcaug

SEQ ID NO: 883214 - RNA, 22 nt, Human
agacagugcaagaagagcaggc

SEQ ID NO: 883215 - RNA, 22 nt, Human
cucugccaucuuggagcucaag

SEQ ID NO: 883216 - RNA, 22 nt, Human
ccaggaagccucagaugcugag

SEQ ID NO: 883217 - RNA, 22 nt, Human
aauguauucugggaaaauguua

SEQ ID NO: 883218 - RNA, 22 nt, Human
uuucacaugcagcagggaagug

SEQ ID NO: 883219 - RNA, 22 nt, Human
gccuggcuuggggcucaguggu

SEQ ID NO: 883220 - RNA, 22 nt, Human
gacaguuuagguucaaaucuca

SEQ ID NO: 883221 - RNA, 22 nt, Human
auuuacucgugucuccagugcu

SEQ ID NO: 883222 - RNA, 21 nt, Human
uauacaugugugcauacgugu

SEQ ID NO: 883223 - RNA, 22 nt, Human
gccuggcacucacugaagaggc

SEQ ID NO: 883224 - RNA, 22 nt, Human
cuuauuucagcccugggcaccc

SEQ ID NO: 883225 - RNA, 22 nt, Human
uuagaaaaaacgucuucuagug

SEQ ID NO: 883226 - RNA, 22 nt, Human
aguggcaguggcugggcagagc

SEQ ID NO: 883227 - RNA, 16 nt, Human
agccuuaggaacagcc

SEQ ID NO: 883228 - RNA, 22 nt, Human
aauuucaauuacuuuugcacca

SEQ ID NO: 883229 - RNA, 22 nt, Human
agcugcugggaccccagaucca

SEQ ID NO: 883230 - RNA, 22 nt, Human
cuuauaguaugauguugagaau

SEQ ID NO: 883231 - RNA, 23 nt, Human
ccacaggcacagaggcuugcauc

SEQ ID NO: 883232 - RNA, 22 nt, Human
ccagaagugucuaucaagaugu

SEQ ID NO: 883233 - RNA, 18 nt, Human
acagugauuguucuaugc

SEQ ID NO: 883234 - RNA, 22 nt, Human
uuggcagaaugggcagcuugag

SEQ ID NO: 883235 - RNA, 22 nt, Human
ggaggaagggcccaggcuuuau

SEQ ID NO: 883236 - RNA, 22 nt, Human
uaagauaauccauuauaauguu

SEQ ID NO: 883237 - RNA, 22 nt, Human
cagacccucuucuauugguggg

SEQ ID NO: 883238 - RNA, 22 nt, Human
auacacguguguguacaugcac

SEQ ID NO: 883239 - RNA, 22 nt, Human
uggaaugacagagagucugaau

SEQ ID NO: 883240 - RNA, 22 nt, Human
aagguuuccagugauauugugg

SEQ ID NO: 883241 - RNA, 22 nt, Human
aaaucagagucugauuuuaagg

SEQ ID NO: 883242 - RNA, 22 nt, Human
acaugcugggcaauguuguuuu

SEQ ID NO: 883243 - RNA, 22 nt, Human
ugagcacagcucgcaccagcuu

SEQ ID NO: 883244 - RNA, 22 nt, Human
gcucaggcauguaugugguugc

SEQ ID NO: 883245 - RNA, 22 nt, Human
ucuggcccagccccugagguca

SEQ ID NO: 883246 - RNA, 22 nt, Human
gcaggcaccgcggcggcagguu

SEQ ID NO: 883247 - RNA, 22 nt, Human
auacuacaagguaugugcuaaa

SEQ ID NO: 883248 - RNA, 22 nt, Human
guagugcgcauggccuguuugu

SEQ ID NO: 883249 - RNA, 22 nt, Human
ugucccagguccuagaugacca

SEQ ID NO: 883250 - RNA, 22 nt, Human
auauuugcaggaaacuaguuuu

SEQ ID NO: 883251 - RNA, 22 nt, Human
ugucacaugaaacuugcucauc

SEQ ID NO: 883252 - RNA, 22 nt, Human
accugcagcuaaagauguaggg

SEQ ID NO: 883253 - RNA, 22 nt, Human
uccaaggacauuguucuaguug

SEQ ID NO: 883254 - RNA, 22 nt, Human
guguccagucauagcccagggc

SEQ ID NO: 883255 - RNA, 22 nt, Human
agugccuugugugugggcagcc

SEQ ID NO: 883256 - RNA, 22 nt, Human
caucuaaauuugacuccaagga

SEQ ID NO: 883257 - RNA, 22 nt, Human
gagguggcuccuucagggaaua

SEQ ID NO: 883258 - RNA, 22 nt, Human
uguuuuaaucucccauugcucu

SEQ ID NO: 883259 - RNA, 22 nt, Human
aguggcuguaucagucaacccu

SEQ ID NO: 883260 - RNA, 21 nt, Human
uaaguucugaucccuaucaac

SEQ ID NO: 883261 - RNA, 22 nt, Human
aagacuuucaaaccuauguuug

SEQ ID NO: 883262 - RNA, 22 nt, Human
acacuguaaagugaugcuuaaa

SEQ ID NO: 883263 - RNA, 21 nt, Human
gcagaugggagucaucaggcu

SEQ ID NO: 883264 - RNA, 22 nt, Human
agcagcauuuaaguuucuucua

SEQ ID NO: 883265 - RNA, 22 nt, Human
uuucacaaucaaauggugaaau

SEQ ID NO: 883266 - RNA, 22 nt, Human
uuaaaaucacagucacccagua

SEQ ID NO: 883267 - RNA, 22 nt, Human
uaguccauuaaauuagauucaa

SEQ ID NO: 883268 - RNA, 22 nt, Human
uggcugcagacaccuauggcag

SEQ ID NO: 883269 - RNA, 20 nt, Human
gcagucugccucuguguggu

SEQ ID NO: 883270 - RNA, 22 nt, Human
acuauucaagugcucauucaga

SEQ ID NO: 883271 - RNA, 22 nt, Human
cuuucaguuaaugacuccauag

SEQ ID NO: 883272 - RNA, 22 nt, Human
uucagaaagguuaaucuggauu

SEQ ID NO: 883273 - RNA, 18 nt, Human
uccaggcuccaggcuaac

SEQ ID NO: 883274 - RNA, 22 nt, Human
gaacaaugagucauucagguga

SEQ ID NO: 883275 - RNA, 22 nt, Human
aggaauuguguuguaguggaga

SEQ ID NO: 883276 - RNA, 22 nt, Human
agcccagcugccugccugcugu

SEQ ID NO: 883277 - RNA, 22 nt, Human
agcguggacugcugggcaaggu

SEQ ID NO: 883278 - RNA, 22 nt, Human
cuaaagugccaggaauacaggu

SEQ ID NO: 883279 - RNA, 22 nt, Human
uuacaguuguucuaucagcaug

SEQ ID NO: 883280 - RNA, 22 nt, Human
ucccugggaccggcagcucaca

SEQ ID NO: 883281 - RNA, 22 nt, Human
ggucccagguugacagggagac

SEQ ID NO: 883282 - RNA, 22 nt, Human
auugaaagcauggauuuggauu

SEQ ID NO: 883283 - RNA, 22 nt, Human
uccugggagaguuugauucauu

SEQ ID NO: 883284 - RNA, 22 nt, Human
ugagcccagaagcccacucggc

SEQ ID NO: 883285 - RNA, 20 nt, Human
ccagucccugagcaccaggg

SEQ ID NO: 883286 - RNA, 22 nt, Human
uggucuuuaagguagcugucau

SEQ ID NO: 883287 - RNA, 20 nt, Human
auggcaguccguguucaggg

SEQ ID NO: 883288 - RNA, 22 nt, Human
acaguacaagcaaugcauuuuu

SEQ ID NO: 883289 - RNA, 22 nt, Human
ggcagcuguaagaugagugaau

SEQ ID NO: 883290 - RNA, 22 nt, Human
auguuuaauuaucuggguuuug

SEQ ID NO: 883291 - RNA, 21 nt, Human
agagcuggccugccaggcccu

SEQ ID NO: 883292 - RNA, 22 nt, Human
cugugccucaguguccucgagu

SEQ ID NO: 883293 - RNA, 22 nt, Human
aguaacagcaucuccacuggaa

SEQ ID NO: 883294 - RNA, 22 nt, Human
gagucugaggggagagcugggu

SEQ ID NO: 883295 - RNA, 23 nt, Human
cccauuuucauguuaacuccugg

SEQ ID NO: 883296 - RNA, 22 nt, Human
aguguuaagagaaaauucugcu

SEQ ID NO: 883297 - RNA, 22 nt, Human
uuaaagaggcagguuaaauaau

SEQ ID NO: 883298 - RNA, 18 nt, Human
agcaggugugcagaaugu

SEQ ID NO: 883299 - RNA, 22 nt, Human
cuguggcauuaauaaaagugca

SEQ ID NO: 883300 - RNA, 22 nt, Human
caagucaaugauuauaagaguc

SEQ ID NO: 883301 - RNA, 20 nt, Human
auuagugcaucuggacaugc

SEQ ID NO: 883302 - RNA, 22 nt, Human
cuggaggagagucugaaugaca

SEQ ID NO: 883303 - RNA, 22 nt, Human
ucuucacagaugcauauacuuc

SEQ ID NO: 883304 - RNA, 22 nt, Human
ucuggaugggaugaggcaacaa

SEQ ID NO: 883305 - RNA, 22 nt, Human
uuucugaaaacugaaguagugc

SEQ ID NO: 883306 - RNA, 22 nt, Human
gcuguucuagcuucaguuucgc

SEQ ID NO: 883307 - RNA, 22 nt, Human
uacucaaaaaguuaugaaucau

SEQ ID NO: 883308 - RNA, 19 nt, Human
aggcugugaggggaaggaa

SEQ ID NO: 883309 - RNA, 22 nt, Human
accuagaguagucaaauucaua

SEQ ID NO: 883310 - RNA, 22 nt, Human
gguggggauuccugaucacugu

SEQ ID NO: 883311 - RNA, 22 nt, Human
agagcuguguccugugcacuag

SEQ ID NO: 883312 - RNA, 22 nt, Human
ucaauaaauagcuuggcucagc

SEQ ID NO: 883313 - RNA, 22 nt, Human
ugcuucugggccugguguuccc

SEQ ID NO: 883314 - RNA, 22 nt, Human
uccagagaggcauauuuacaag

SEQ ID NO: 883315 - RNA, 22 nt, Human
gaguucuaaaggcagaacauaa

SEQ ID NO: 883316 - RNA, 22 nt, Human
agaacauuaaugcgagguauua

SEQ ID NO: 883317 - RNA, 21 nt, Human
ugcuauuuaauuuuucuguuc

SEQ ID NO: 883318 - RNA, 22 nt, Human
ugaauucuuuuagaauucagug

SEQ ID NO: 883319 - RNA, 22 nt, Human
aaauucuguccugaaugccauu

SEQ ID NO: 883320 - RNA, 22 nt, Human
agcuguggggcaggcagcgagg

SEQ ID NO: 883321 - RNA, 22 nt, Human
cuuuccccaguauaucauugcc

SEQ ID NO: 883322 - RNA, 22 nt, Human
aaaugacaauaaaaguccaugc

SEQ ID NO: 883323 - RNA, 22 nt, Human
aguggugaggggcaugugugau

SEQ ID NO: 883324 - RNA, 22 nt, Human
uuucuuuccauacauauugcua

SEQ ID NO: 883325 - RNA, 22 nt, Human
gcuagcagaaagcaggcugcuc

SEQ ID NO: 883326 - RNA, 22 nt, Human
guauaucuucagaaauuauagg

SEQ ID NO: 883327 - RNA, 22 nt, Human
ucaggagguuuggauucaguua

SEQ ID NO: 883328 - RNA, 22 nt, Human
agcauacaggucugaaacagcu

SEQ ID NO: 883329 - RNA, 22 nt, Human
gaagucugacucuuuguaagcu

SEQ ID NO: 883330 - RNA, 22 nt, Human
ggucacuucagauaacuggugu

SEQ ID NO: 883331 - RNA, 22 nt, Human
ggagcagagcucuucaucugca

SEQ ID NO: 883332 - RNA, 22 nt, Human
gggugggccacugagcagcgug

SEQ ID NO: 883333 - RNA, 22 nt, Human
uuucugucugacaucccugccu

SEQ ID NO: 883334 - RNA, 22 nt, Human
agucuagaaugugcaccaagcu

SEQ ID NO: 883335 - RNA, 16 nt, Human
uuucucauugucauca

SEQ ID NO: 883336 - RNA, 22 nt, Human
augagguacuuacauugagcuu

SEQ ID NO: 883337 - RNA, 22 nt, Human
ccaggugcuagcaaucacuguc

SEQ ID NO: 883338 - RNA, 22 nt, Human
aggacuucuccgauaagucaga

SEQ ID NO: 883339 - RNA, 22 nt, Human
uucauagaaagugcuuagauug

SEQ ID NO: 883340 - RNA, 22 nt, Human
aacauauuuggcugauauuccc

SEQ ID NO: 883341 - RNA, 20 nt, Human
cacuaacugcucaugacucc

SEQ ID NO: 883342 - RNA, 22 nt, Human
ugcagcagguuccaaaggguua

SEQ ID NO: 883343 - RNA, 22 nt, Human
gcuucuccucccgcucccaggc

SEQ ID NO: 883344 - RNA, 18 nt, Human
cacaauuuacagaugaca

SEQ ID NO: 883345 - RNA, 22 nt, Human
gcucagggagcgauuuaccaug

SEQ ID NO: 883346 - RNA, 22 nt, Human
guucacaagcugauugucuuuc

SEQ ID NO: 883347 - RNA, 22 nt, Human
uguagaaccuguuuauuauaga

SEQ ID NO: 883348 - RNA, 22 nt, Human
uacuuuagaaggaaauaaguuc

SEQ ID NO: 883349 - RNA, 22 nt, Human
uuucacauuuaggcgugaauug

SEQ ID NO: 883350 - RNA, 22 nt, Human
caguggaagcuggcugugaaga

SEQ ID NO: 883351 - RNA, 22 nt, Human
aaagugcauucgaaaguccauc

SEQ ID NO: 883352 - RNA, 22 nt, Human
uccaggucuuccuauuccaggu

SEQ ID NO: 883353 - RNA, 22 nt, Human
guccagggaaauagcgacaggg

SEQ ID NO: 883354 - RNA, 22 nt, Human
ggucaggguuccagguaucuuc

SEQ ID NO: 883355 - RNA, 22 nt, Human
cuuucacagucauaugaugaau

SEQ ID NO: 883356 - RNA, 22 nt, Human
ugaaucaaagcugaaguuuuca

SEQ ID NO: 883357 - RNA, 21 nt, Human
agagcggcggggcgcgucugc

SEQ ID NO: 883358 - RNA, 22 nt, Human
guucagugucucucuauuuuau

SEQ ID NO: 883359 - RNA, 22 nt, Human
aggcuggcuggggaugcgucuu

SEQ ID NO: 883360 - RNA, 22 nt, Human
ggacaaaccaauagacacuggc

SEQ ID NO: 883361 - RNA, 22 nt, Human
aaugugugaacuucagagcauc

SEQ ID NO: 883362 - RNA, 22 nt, Human
ccagcagagcuggaagugugcu

SEQ ID NO: 883363 - RNA, 22 nt, Human
gagagaccuugcuaagugccuu

SEQ ID NO: 883364 - RNA, 22 nt, Human
cagagccugccaccuuucuccc

SEQ ID NO: 883365 - RNA, 19 nt, Human
aacagcaacuuccuaguca

SEQ ID NO: 883366 - RNA, 22 nt, Human
agauuuguaugucuaaauguaa

SEQ ID NO: 883367 - RNA, 22 nt, Human
acaacagugugguggaaggagc

SEQ ID NO: 883368 - RNA, 22 nt, Human
ugaaggcaaaacauguuacacc

SEQ ID NO: 883369 - RNA, 22 nt, Human
cacaguaaccccaggacuggga

SEQ ID NO: 883370 - RNA, 22 nt, Human
agaaaguuagcagacucuuggc

SEQ ID NO: 883371 - RNA, 22 nt, Human
gagagcugcaagguagggcggg

SEQ ID NO: 883372 - RNA, 22 nt, Human
uugagguauaguugacaauuua

SEQ ID NO: 883373 - RNA, 22 nt, Human
uuggaaaacuuacacagagcug

SEQ ID NO: 883374 - RNA, 22 nt, Human
uucuguauggaaacauccucca

SEQ ID NO: 883375 - RNA, 22 nt, Human
uucacugaaguuucuuccaugu

SEQ ID NO: 883376 - RNA, 22 nt, Human
guauacacugucuccucuaggu

SEQ ID NO: 883377 - RNA, 19 nt, Human
gugaagugccagaagucag

SEQ ID NO: 883378 - RNA, 19 nt, Human
aggugaggggcaccauguc

SEQ ID NO: 883379 - RNA, 22 nt, Human
gaaggaagccguuucucuccag

SEQ ID NO: 883380 - RNA, 22 nt, Human
agagagcauggcacagaggggu

SEQ ID NO: 883381 - RNA, 22 nt, Human
uuuucuuccuggauuuuggcau

SEQ ID NO: 883382 - RNA, 22 nt, Human
uuguuaaaggcaaaacaagcac

SEQ ID NO: 883383 - RNA, 22 nt, Human
cagagcagggguuucccagguu

SEQ ID NO: 883384 - RNA, 22 nt, Human
ucagaagcauguggggagccug

SEQ ID NO: 883385 - RNA, 20 nt, Human
ugaggcucagagagguugag

SEQ ID NO: 883386 - RNA, 22 nt, Human
uguacagagacuaccauuaaua

SEQ ID NO: 883387 - RNA, 22 nt, Human
guguguguacucuguauauaaa

SEQ ID NO: 883388 - RNA, 23 nt, Human
gguccaggaaaggcagcagcacc

SEQ ID NO: 883389 - RNA, 22 nt, Human
ccgaggacauugggcuucuguu

SEQ ID NO: 883390 - RNA, 22 nt, Human
aucaccacuacaaacaucauug

SEQ ID NO: 883391 - RNA, 22 nt, Human
uguccuguucuggcgugagugg

SEQ ID NO: 883392 - RNA, 22 nt, Human
uuagugcuucuguccaaauaua

SEQ ID NO: 883393 - RNA, 22 nt, Human
gagucugaugucccccaggcca

SEQ ID NO: 883394 - RNA, 22 nt, Human
ugaaaucugucccacuuuagcu

SEQ ID NO: 883395 - RNA, 22 nt, Human
caggguggcccuguggucucau

SEQ ID NO: 883396 - RNA, 22 nt, Human
acauaacauaguugacauuuuu

SEQ ID NO: 883397 - RNA, 22 nt, Human
gugucagcuaauuugggagcuc

SEQ ID NO: 883398 - RNA, 22 nt, Human
auguaguacuggguauguuucu

SEQ ID NO: 883399 - RNA, 22 nt, Human
ccguguguaugguggaacugcu

SEQ ID NO: 883400 - RNA, 22 nt, Human
gggcagucacagugcuggagca

SEQ ID NO: 883401 - RNA, 22 nt, Human
ccaugcacaccagcaggcagac

SEQ ID NO: 883402 - RNA, 23 nt, Human
augagguaaagaucagcuuuaaa

SEQ ID NO: 883403 - RNA, 17 nt, Human
ccugagugggagaggaa

SEQ ID NO: 883404 - RNA, 22 nt, Human
ggggcugggauuugaacccagg

SEQ ID NO: 883405 - RNA, 22 nt, Human
ugccagcuagagaagcuagaaa

SEQ ID NO: 883406 - RNA, 22 nt, Human
ugugugcacugccuuuugugga

SEQ ID NO: 883407 - RNA, 22 nt, Human
uugauuuugccugaucugagag

SEQ ID NO: 883408 - RNA, 19 nt, Human
acaaacugaguacacuugu

SEQ ID NO: 883409 - RNA, 20 nt, Human
uacauuguagaaauauucaa

SEQ ID NO: 883410 - RNA, 22 nt, Human
gcagggcuccacuguggccaag

SEQ ID NO: 883411 - RNA, 22 nt, Human
gggcacuggaaggcucucaggc

SEQ ID NO: 883412 - RNA, 20 nt, Human
ggcagggcaucaacagcucu

SEQ ID NO: 883413 - RNA, 22 nt, Human
gagagucuagugcaccuaguuu

SEQ ID NO: 883414 - RNA, 20 nt, Human
agugccagggcaggugagag

SEQ ID NO: 883415 - RNA, 22 nt, Human
guccuguguacuccugauacuu

SEQ ID NO: 883416 - RNA, 22 nt, Human
gcagggcugagucaugugugcc

SEQ ID NO: 883417 - RNA, 22 nt, Human
agggggcauuaugaggcuuuuc

SEQ ID NO: 883418 - RNA, 22 nt, Human
cugcagcagugugucucauuuu

SEQ ID NO: 883419 - RNA, 22 nt, Human
gcugccauguugugaggacacu

SEQ ID NO: 883420 - RNA, 22 nt, Human
uguaacaaugaauauagugacu

SEQ ID NO: 883421 - RNA, 22 nt, Human
gcagcuggagaaauaccacccu

SEQ ID NO: 883422 - RNA, 22 nt, Human
gaggugcugcuguacuucuugc

SEQ ID NO: 883423 - RNA, 22 nt, Human
aaauuucuaagcagccacuucc

SEQ ID NO: 883424 - RNA, 22 nt, Human
ugucucuugagcugccugaugc

SEQ ID NO: 883425 - RNA, 20 nt, Human
agcaacaauaaaauguccug

SEQ ID NO: 883426 - RNA, 22 nt, Human
cccagcucucucaguucugcuu

SEQ ID NO: 883427 - RNA, 22 nt, Human
aggcccuggcccccagagauuc

SEQ ID NO: 883428 - RNA, 22 nt, Human
uguaaaaccaaaucaaucuagu

SEQ ID NO: 883429 - RNA, 22 nt, Human
augaaauaaauacccacacaua

SEQ ID NO: 883430 - RNA, 22 nt, Human
ucuguuuucucuguauuuugac

SEQ ID NO: 883431 - RNA, 22 nt, Human
ucaguaaccuuuagcacaguug

SEQ ID NO: 883432 - RNA, 22 nt, Human
ggaggcucuaaacuuuccuugg

SEQ ID NO: 883433 - RNA, 22 nt, Human
uagauacauuuuucuuuccugu

SEQ ID NO: 883434 - RNA, 22 nt, Human
uucaaguucuaguguucacuuc

SEQ ID NO: 883435 - RNA, 22 nt, Human
uagcaaauguguuaugcuaugc

SEQ ID NO: 883436 - RNA, 22 nt, Human
uaaagguugaaaacugacugcc

SEQ ID NO: 883437 - RNA, 22 nt, Human
uagaaagcaguaucuccauuuu

SEQ ID NO: 883438 - RNA, 20 nt, Human
caaauggcuuuuauuuccuu

SEQ ID NO: 883439 - RNA, 22 nt, Human
cuucuucccagcuucccucacc

SEQ ID NO: 883440 - RNA, 22 nt, Human
guggagggugauugccggcugu

SEQ ID NO: 883441 - RNA, 22 nt, Human
gcucuccaggucucaugcacug

SEQ ID NO: 883442 - RNA, 22 nt, Human
uguuuagaaucauucaaaaguu

SEQ ID NO: 883443 - RNA, 22 nt, Human
ucacagccuggucacucugccc

SEQ ID NO: 883444 - RNA, 22 nt, Human
uugcauguguauaaaaguugga

SEQ ID NO: 883445 - RNA, 22 nt, Human
gcaguggauggccagcaggggc

SEQ ID NO: 883446 - RNA, 22 nt, Human
cagcucugcuuccuuguacagg

SEQ ID NO: 883447 - RNA, 22 nt, Human
caggugucuaauucucaccccc

SEQ ID NO: 883448 - RNA, 22 nt, Human
gcuuagaaagugauugauacau

SEQ ID NO: 883449 - RNA, 22 nt, Human
gcuggcagggacagcugcgugu

SEQ ID NO: 883450 - RNA, 22 nt, Human
ugacaguagaagaugcuguuac

SEQ ID NO: 883451 - RNA, 21 nt, Human
gcaggcuggucaaaccucagu

SEQ ID NO: 883452 - RNA, 23 nt, Human
gggcuccagucucugcucaguug

SEQ ID NO: 883453 - RNA, 22 nt, Human
auaacuuucuucacccuugcug

SEQ ID NO: 883454 - RNA, 22 nt, Human
aaguacaaauuuugaagagcuu

SEQ ID NO: 883455 - RNA, 20 nt, Human
ccuggccaaugagauaggaa

SEQ ID NO: 883456 - RNA, 17 nt, Human
ugguggcuggagucagg

SEQ ID NO: 883457 - RNA, 22 nt, Human
ucacaagguccugguggauaga

SEQ ID NO: 883458 - RNA, 22 nt, Human
gagcuuugcuggaagccugggg

SEQ ID NO: 883459 - RNA, 22 nt, Human
ggggccagagaggacccaggug

SEQ ID NO: 883460 - RNA, 22 nt, Human
uuuuuaguagagguggguuuca

SEQ ID NO: 883461 - RNA, 19 nt, Human
augaagcauuguuuuugua

SEQ ID NO: 883462 - RNA, 22 nt, Human
gcaugcaggagagaaagacggc

SEQ ID NO: 883463 - RNA, 22 nt, Human
gcuuucuuaguguguuaauugg

SEQ ID NO: 883464 - RNA, 22 nt, Human
aauucagagacaugaagugaca

SEQ ID NO: 883465 - RNA, 22 nt, Human
uuucucuccuccaaaccaaaga

SEQ ID NO: 883466 - RNA, 22 nt, Human
uuaacauccuguuuaaauuugg

SEQ ID NO: 883467 - RNA, 22 nt, Human
aauuauguagccauaugaaaca

SEQ ID NO: 883468 - RNA, 22 nt, Human
ggaggcuccuaagcugacuuga

SEQ ID NO: 883469 - RNA, 22 nt, Human
cagcagcagacauuugaucuuc

SEQ ID NO: 883470 - RNA, 22 nt, Human
agccagaguugaaugugagucu

SEQ ID NO: 883471 - RNA, 22 nt, Human
uagaguguuguaauugaaaagg

SEQ ID NO: 883472 - RNA, 22 nt, Human
gacagugguuccaaggcagcuu

SEQ ID NO: 883473 - RNA, 22 nt, Human
cuaucauuuuacaugguuggug

SEQ ID NO: 883474 - RNA, 22 nt, Human
uuccuaacucuggcaccuaguc

SEQ ID NO: 883475 - RNA, 22 nt, Human
uuugugcugacauuugggucau

SEQ ID NO: 883476 - RNA, 22 nt, Human
cuuuggaaaaauaccuggcaua

SEQ ID NO: 883477 - RNA, 22 nt, Human
ggcagcuauuccaagcagcacu

SEQ ID NO: 883478 - RNA, 22 nt, Human
auuugguuacucaguugucuga

SEQ ID NO: 883479 - RNA, 22 nt, Human
gccaggagccagcuucuuagca

SEQ ID NO: 883480 - RNA, 18 nt, Human
ucaaacugucauugguga

SEQ ID NO: 883481 - RNA, 17 nt, Human
cccagagaugcugccuu

SEQ ID NO: 883482 - RNA, 17 nt, Human
cccugccaccaggaagc

SEQ ID NO: 883483 - RNA, 22 nt, Human
aaaguacauagcauauuccaac

SEQ ID NO: 883484 - RNA, 22 nt, Human
ugucaguggucauaguagaaaa

SEQ ID NO: 883485 - RNA, 22 nt, Human
cagagggcacucggagugacau

SEQ ID NO: 883486 - RNA, 22 nt, Human
cagcugagaaaggcaggcucac

SEQ ID NO: 883487 - RNA, 22 nt, Human
ggcuccagguuuaaggguaugu

SEQ ID NO: 883488 - RNA, 22 nt, Human
ucuacaagucaagucuaucaag

SEQ ID NO: 883489 - RNA, 22 nt, Human
gugggcugcauguuuacuauuc

SEQ ID NO: 883490 - RNA, 22 nt, Human
guagaaauagugguugacagga

SEQ ID NO: 883491 - RNA, 22 nt, Human
uuuuggcucugucuguaucuuu

SEQ ID NO: 883492 - RNA, 22 nt, Human
gcacacagccagcugagggcua

SEQ ID NO: 883493 - RNA, 22 nt, Human
auuagccuuaauaauuuagaag

SEQ ID NO: 883494 - RNA, 22 nt, Human
ugcagccuuggcaaccagggac

SEQ ID NO: 883495 - RNA, 22 nt, Human
cuggccagugacugcucacccg

SEQ ID NO: 883496 - RNA, 22 nt, Human
uugaaucuuagcucugccacuu

SEQ ID NO: 883497 - RNA, 22 nt, Human
aggucacccguuugacuaucca

SEQ ID NO: 883498 - RNA, 21 nt, Human
uagagaaaagaagcuguuccu

SEQ ID NO: 883499 - RNA, 22 nt, Human
cccaggagguguagcugcgugg

SEQ ID NO: 883500 - RNA, 22 nt, Human
ggucugaguagagggcuggcga

SEQ ID NO: 883501 - RNA, 22 nt, Human
ugagccaggaguuugaggcugu

SEQ ID NO: 883502 - RNA, 22 nt, Human
uauuacacagugaaagcaugga

SEQ ID NO: 883503 - RNA, 22 nt, Human
acaaaauuuuuagacaaggcuu

SEQ ID NO: 883504 - RNA, 17 nt, Human
agcugccucucccacca

SEQ ID NO: 883505 - RNA, 20 nt, Human
cuuguugauucuaggaauga

SEQ ID NO: 883506 - RNA, 18 nt, Human
agaagccacgaggagucc

SEQ ID NO: 883507 - RNA, 19 nt, Human
cuucuccagcuucuagaag

SEQ ID NO: 883508 - RNA, 22 nt, Human
uguuuaugugugugcauauaua

SEQ ID NO: 883509 - RNA, 22 nt, Human
gagcacagggaauagacagaua

SEQ ID NO: 883510 - RNA, 22 nt, Human
guuuccaucuccaggacauaau

SEQ ID NO: 883511 - RNA, 22 nt, Human
agcuagcuuagccugugaggua

SEQ ID NO: 883512 - RNA, 20 nt, Human
guccuagguuugaagguaaa

SEQ ID NO: 883513 - RNA, 22 nt, Human
cuggagaaaauccauguguaug

SEQ ID NO: 883514 - RNA, 22 nt, Human
ucacugcagacaaccucaguca

SEQ ID NO: 883515 - RNA, 22 nt, Human
gcuggagucuggaggugugcca

SEQ ID NO: 883516 - RNA, 22 nt, Human
gcugccaugguccaggcuccag

SEQ ID NO: 883517 - RNA, 20 nt, Human
cucaucucugagccuccugg

SEQ ID NO: 883518 - RNA, 22 nt, Human
guugaugaaaaugaauugcaug

SEQ ID NO: 883519 - RNA, 22 nt, Human
cagagacaaugucucugcuugu

SEQ ID NO: 883520 - RNA, 21 nt, Human
cugcaucucauagaacauguc

SEQ ID NO: 883521 - RNA, 22 nt, Human
ucucuccuuaucauuguguuua

SEQ ID NO: 883522 - RNA, 22 nt, Human
ugcucacugaacucuugcuguc

SEQ ID NO: 883523 - RNA, 22 nt, Human
ucagccuccgaaagugcuggga

SEQ ID NO: 883524 - RNA, 22 nt, Human
aagagccagcuagugaagaggc

SEQ ID NO: 883525 - RNA, 22 nt, Human
cccagcucucugcucuuagccu

SEQ ID NO: 883526 - RNA, 22 nt, Human
uuaucugguauaguggggaaga

SEQ ID NO: 883527 - RNA, 22 nt, Human
acugcuuuaucugagaaguccu

SEQ ID NO: 883528 - RNA, 20 nt, Human
cccaggugucugaagcucug

SEQ ID NO: 883529 - RNA, 22 nt, Human
uuggcugacaaauggaaucucu

SEQ ID NO: 883530 - RNA, 22 nt, Human
gucauuuuucacugcauauaga

SEQ ID NO: 883531 - RNA, 22 nt, Human
cauuagcaugguagccagguca

SEQ ID NO: 883532 - RNA, 22 nt, Human
cugucagagauggggagucaga

SEQ ID NO: 883533 - RNA, 22 nt, Human
agcaguuuuagggagacacauu

SEQ ID NO: 883534 - RNA, 22 nt, Human
gacccaggagagaggguugcau

SEQ ID NO: 883535 - RNA, 22 nt, Human
ggcaggcugggugucauggagu

SEQ ID NO: 883536 - RNA, 22 nt, Human
gggcuagaaguuagcuagagaa

SEQ ID NO: 883537 - RNA, 22 nt, Human
cuguuuuccuggguuccaugag

SEQ ID NO: 883538 - RNA, 22 nt, Human
aggcugugaacucuaugcugaa

SEQ ID NO: 883539 - RNA, 22 nt, Human
caggugggcuugggagaacacu

SEQ ID NO: 883540 - RNA, 22 nt, Human
aggggagcuaacaccagagccc

SEQ ID NO: 883541 - RNA, 22 nt, Human
uuggaugagguugagaaucauu

SEQ ID NO: 883542 - RNA, 22 nt, Human
uuuaagaugguauuuuauaaag

SEQ ID NO: 883543 - RNA, 22 nt, Human
augcuuuaguucaaaggacuua

SEQ ID NO: 883544 - RNA, 19 nt, Human
ccauggagagagaugcauu

SEQ ID NO: 883545 - RNA, 22 nt, Human
ccuggcucuggggcggacagcu

SEQ ID NO: 883546 - RNA, 22 nt, Human
uuccugggauuauugucaagca

SEQ ID NO: 883547 - RNA, 22 nt, Human
cauauacacuuccaccucugug

SEQ ID NO: 883548 - RNA, 22 nt, Human
auucuugcaguauacaacuacu

SEQ ID NO: 883549 - RNA, 22 nt, Human
aaugaucaccugguaaagagag

SEQ ID NO: 883550 - RNA, 22 nt, Human
uacuuuacaguauuagauaauu

SEQ ID NO: 883551 - RNA, 22 nt, Human
aaaucaaggagggauuauauuu

SEQ ID NO: 883552 - RNA, 22 nt, Human
aagagacaaugacacuugggag

SEQ ID NO: 883553 - RNA, 22 nt, Human
augucuuucuaguuaagagcua

SEQ ID NO: 883554 - RNA, 22 nt, Human
ucccaggaauugaagccagugu

SEQ ID NO: 883555 - RNA, 22 nt, Human
aaauaguuagcccugcauauau

SEQ ID NO: 883556 - RNA, 22 nt, Human
aacuuuggguaaugcuucaauu

SEQ ID NO: 883557 - RNA, 22 nt, Human
aaacaggcuuauauuuugcucu

SEQ ID NO: 883558 - RNA, 22 nt, Human
auauuaguuuggagacuacaau

SEQ ID NO: 883559 - RNA, 17 nt, Human
agaacuguaguagcucc

SEQ ID NO: 883560 - RNA, 22 nt, Human
ccaugcagugcuggagcugauu

SEQ ID NO: 883561 - RNA, 22 nt, Human
agcugcagugaacuguuuuguc

SEQ ID NO: 883562 - RNA, 22 nt, Human
ugcugagggagcaucaaagaaa

SEQ ID NO: 883563 - RNA, 22 nt, Human
gcucccacgcaauucuuuucag

SEQ ID NO: 883564 - RNA, 22 nt, Human
gccugcugcauccaggcuauug

SEQ ID NO: 883565 - RNA, 22 nt, Human
auuauccaacacccaguuacau

SEQ ID NO: 883566 - RNA, 22 nt, Human
agcuuuauuaacucuccaggug

SEQ ID NO: 883567 - RNA, 22 nt, Human
ucagaaaugaucguuauucauu

SEQ ID NO: 883568 - RNA, 22 nt, Human
gaagaaacaggggcuuggggag

SEQ ID NO: 883569 - RNA, 22 nt, Human
agguauaagucucauuucuguu

SEQ ID NO: 883570 - RNA, 22 nt, Human
aaaugcuacauacacaucaggg

SEQ ID NO: 883571 - RNA, 21 nt, Human
ggccuuccccugcagucuccg

SEQ ID NO: 883572 - RNA, 22 nt, Human
ugcuuuaucaaagcuauaguga

SEQ ID NO: 883573 - RNA, 22 nt, Human
guggaucuacuguaugggauag

SEQ ID NO: 883574 - RNA, 22 nt, Human
cauuucucauaauauuagcacu

SEQ ID NO: 883575 - RNA, 22 nt, Human
acagcacaggaguugaaugggc

SEQ ID NO: 883576 - RNA, 22 nt, Human
gcugaaguggcgugaucagaau

SEQ ID NO: 883577 - RNA, 22 nt, Human
uuuggaaauaauuccaucucau

SEQ ID NO: 883578 - RNA, 22 nt, Human
ugggaguguucuuggcuugcuu

SEQ ID NO: 883579 - RNA, 22 nt, Human
aaagcaaugcuuguggaaugua

SEQ ID NO: 883580 - RNA, 18 nt, Human
uccaggcuggauugauga

SEQ ID NO: 883581 - RNA, 22 nt, Human
cauaauuucacugucguauggc

SEQ ID NO: 883582 - RNA, 22 nt, Human
agguagggcuaggcugcgucug

SEQ ID NO: 883583 - RNA, 20 nt, Human
aagcacugugguggcaugga

SEQ ID NO: 883584 - RNA, 22 nt, Human
uccuggguaaacacugaccuuu

SEQ ID NO: 883585 - RNA, 22 nt, Human
ucccuguguccaugccaggagg

SEQ ID NO: 883586 - RNA, 20 nt, Human
uguuucuuuuaaugagcggc

SEQ ID NO: 883587 - RNA, 22 nt, Human
ugccuggcaucuagcccuggga

SEQ ID NO: 883588 - RNA, 22 nt, Human
ccagggugaccagcuggccuag

SEQ ID NO: 883589 - RNA, 22 nt, Human
augugagguagauaggaugcag

SEQ ID NO: 883590 - RNA, 22 nt, Human
uuucaguucaguuuauuauauc

SEQ ID NO: 883591 - RNA, 22 nt, Human
gagauuucaccccucuuaaccu

SEQ ID NO: 883592 - RNA, 22 nt, Human
uuuacaugucaagacuggcagu

SEQ ID NO: 883593 - RNA, 21 nt, Human
gggaaugagauucuuggagau

SEQ ID NO: 883594 - RNA, 22 nt, Human
uccaggcuacuuggauuccugg

SEQ ID NO: 883595 - RNA, 22 nt, Human
acuuuucccuugguagaguugc

SEQ ID NO: 883596 - RNA, 22 nt, Human
aaaggcuggaaacugaagauaa

SEQ ID NO: 883597 - RNA, 22 nt, Human
ugggccauuuuuggaagacugg

SEQ ID NO: 883598 - RNA, 22 nt, Human
guuauauuggcagaagagaaga

SEQ ID NO: 883599 - RNA, 23 nt, Human
uuuguacauugaggaggcagaau

SEQ ID NO: 883600 - RNA, 22 nt, Human
uuacauagguauguuugcuuug

SEQ ID NO: 883601 - RNA, 22 nt, Human
accugggucugguguugggacg

SEQ ID NO: 883602 - RNA, 18 nt, Human
uguguaugucucagggaa

SEQ ID NO: 883603 - RNA, 22 nt, Human
caugggaggccugcugcuggug

SEQ ID NO: 883604 - RNA, 22 nt, Human
acugccuucuuuaauccuaguu

SEQ ID NO: 883605 - RNA, 22 nt, Human
gccucugaguuuggagaagagc

SEQ ID NO: 883606 - RNA, 22 nt, Human
ggcugcagauuguagucuguua

SEQ ID NO: 883607 - RNA, 20 nt, Human
caacacugcccauuguuugc

SEQ ID NO: 883608 - RNA, 22 nt, Human
agguggcagagugacaggcuga

SEQ ID NO: 883609 - RNA, 22 nt, Human
aaguacagaaggagcgaacaau

SEQ ID NO: 883610 - RNA, 22 nt, Human
gcccuguucuggacaggcacaa

SEQ ID NO: 883611 - RNA, 22 nt, Human
ccugggucccugagagaugauu

SEQ ID NO: 883612 - RNA, 21 nt, Human
gggcagcagcagcaacaaggg

SEQ ID NO: 883613 - RNA, 22 nt, Human
agagaagauucuuauaugucuu

SEQ ID NO: 883614 - RNA, 22 nt, Human
gggcagcuccuguggaauccac

SEQ ID NO: 883615 - RNA, 22 nt, Human
ucaugcaaagccaauuccagcu

SEQ ID NO: 883616 - RNA, 22 nt, Human
uuucagagaauuagaagcugau

SEQ ID NO: 883617 - RNA, 22 nt, Human
caaaaguaauugcaguuuuugc

SEQ ID NO: 883618 - RNA, 22 nt, Human
ucuuugcaaauguuauuaucuu

SEQ ID NO: 883619 - RNA, 22 nt, Human
ugguauggucaaagccugugua

SEQ ID NO: 883620 - RNA, 18 nt, Human
uuagauacuagugugcua

SEQ ID NO: 883621 - RNA, 22 nt, Human
gccacaggaaagcacccuggag

SEQ ID NO: 883622 - RNA, 22 nt, Human
uuaaaaauauguagggcccgau

SEQ ID NO: 883623 - RNA, 22 nt, Human
agggcagcugugagccacugug

SEQ ID NO: 883624 - RNA, 22 nt, Human
uaaacauggcuguuucaguuau

SEQ ID NO: 883625 - RNA, 22 nt, Human
gcugcuucucugauggagucca

SEQ ID NO: 883626 - RNA, 22 nt, Human
acaaagcucuggaaggcucguc

SEQ ID NO: 883627 - RNA, 22 nt, Human
cugagguacgcuggcucccugg

SEQ ID NO: 883628 - RNA, 22 nt, Human
aaucacauuuacauugcuaauu

SEQ ID NO: 883629 - RNA, 22 nt, Human
ggcuguggcagcuggaaguggu

SEQ ID NO: 883630 - RNA, 22 nt, Human
gcagacacagggaaggcaagga

SEQ ID NO: 883631 - RNA, 22 nt, Human
acacacguauauauacguaugu

SEQ ID NO: 883632 - RNA, 18 nt, Human
uagcagggcuuguccuuu

SEQ ID NO: 883633 - RNA, 22 nt, Human
aaugucucuauaucucauaaga

SEQ ID NO: 883634 - RNA, 19 nt, Human
uaauccaaggcugcucuua

SEQ ID NO: 883635 - RNA, 22 nt, Human
agauauuuguaucuugcuauug

SEQ ID NO: 883636 - RNA, 17 nt, Human
caccaauuaagacccuc

SEQ ID NO: 883637 - RNA, 22 nt, Human
uucaacuaauguuuauuuuaug

SEQ ID NO: 883638 - RNA, 22 nt, Human
aaaguacagauggugagguugg

SEQ ID NO: 883639 - RNA, 22 nt, Human
gacagacaccugggggguugcu

SEQ ID NO: 883640 - RNA, 22 nt, Human
uacaagcucgggcagcucauua

SEQ ID NO: 883641 - RNA, 23 nt, Human
uuacaaguucugaaauuuccuuc

SEQ ID NO: 883642 - RNA, 22 nt, Human
auugaaagauaggcuacugugg

SEQ ID NO: 883643 - RNA, 22 nt, Human
ccagugcaccaagaggccuaga

SEQ ID NO: 883644 - RNA, 22 nt, Human
ccaggagcgggaaaaggaagaa

SEQ ID NO: 883645 - RNA, 22 nt, Human
caucugaauuugccuuaguuuc

SEQ ID NO: 883646 - RNA, 22 nt, Human
uacaguaagaugaaauagcaau

SEQ ID NO: 883647 - RNA, 21 nt, Human
ggcagagaagcuggaaguugg

SEQ ID NO: 883648 - RNA, 22 nt, Human
uuccucagacccucauugugag

SEQ ID NO: 883649 - RNA, 22 nt, Human
uuagaacaucucucuucugcca

SEQ ID NO: 883650 - RNA, 22 nt, Human
agcagacaggcugccacagugc

SEQ ID NO: 883651 - RNA, 22 nt, Human
ucugagugauguugagucagaa

SEQ ID NO: 883652 - RNA, 22 nt, Human
ccucaggcaagucacuuaacau

SEQ ID NO: 883653 - RNA, 22 nt, Human
uaagagcuccaauauuuguggc

SEQ ID NO: 883654 - RNA, 22 nt, Human
uguaugugcaauguuuauaugu

SEQ ID NO: 883655 - RNA, 22 nt, Human
gcacccagccagcaucucagag

SEQ ID NO: 883656 - RNA, 22 nt, Human
ugcagagugaggaagaacugca

SEQ ID NO: 883657 - RNA, 22 nt, Human
uguggcagaaggcuaagguguc

SEQ ID NO: 883658 - RNA, 22 nt, Human
uugcugaaaacaggucaucagg

SEQ ID NO: 883659 - RNA, 22 nt, Human
ggccuuccuguuguguccaccg

SEQ ID NO: 883660 - RNA, 22 nt, Human
uuuucucuuguuaauguacuga

SEQ ID NO: 883661 - RNA, 22 nt, Human
caggugacccucucaccugcuu

SEQ ID NO: 883662 - RNA, 22 nt, Human
aagguacagaaauuaacaagga

SEQ ID NO: 883663 - RNA, 22 nt, Human
uucugcaugcccucuguguggc

SEQ ID NO: 883664 - RNA, 22 nt, Human
ucuuaaaugacugauaagagga

SEQ ID NO: 883665 - RNA, 22 nt, Human
ggacaggcccggggagccugga

SEQ ID NO: 883666 - RNA, 22 nt, Human
agagcacaguaucugcacauca

SEQ ID NO: 883667 - RNA, 22 nt, Human
auuuggugguuccuuuuccgaa

SEQ ID NO: 883668 - RNA, 22 nt, Human
ugggccucuguuuccucaucug

SEQ ID NO: 883669 - RNA, 20 nt, Human
ugcugcaguuucaugggacu

SEQ ID NO: 883670 - RNA, 22 nt, Human
aggagggaauaagaaagaguca

SEQ ID NO: 883671 - RNA, 22 nt, Human
uggggagaguuacaaggaaucu

SEQ ID NO: 883672 - RNA, 22 nt, Human
ugugugaggugguucugagaag

SEQ ID NO: 883673 - RNA, 22 nt, Human
cuguguuucuaaguaaaggagc

SEQ ID NO: 883674 - RNA, 20 nt, Human
uuucacaaugaacaugucuc

SEQ ID NO: 883675 - RNA, 22 nt, Human
agagccaggacugugucucacu

SEQ ID NO: 883676 - RNA, 22 nt, Human
ucuggggaugagguccagugau

SEQ ID NO: 883677 - RNA, 22 nt, Human
uugaucagguugcuguggugua

SEQ ID NO: 883678 - RNA, 21 nt, Human
acagacagggccagugucccc

SEQ ID NO: 883679 - RNA, 22 nt, Human
acagcaguuacugaaauaaagu

SEQ ID NO: 883680 - RNA, 22 nt, Human
ucuaaagaaacauugagaccug

SEQ ID NO: 883681 - RNA, 22 nt, Human
cuggcccccacaccugucaggg

SEQ ID NO: 883682 - RNA, 22 nt, Human
ucauggcugaaacaguaacaca

SEQ ID NO: 883683 - RNA, 19 nt, Human
ccccaaaguuuagauguug

SEQ ID NO: 883684 - RNA, 22 nt, Human
ugugcccaucccucuggagugu

SEQ ID NO: 883685 - RNA, 22 nt, Human
uuaugcuaguauaguccuuaga

SEQ ID NO: 883686 - RNA, 22 nt, Human
auacaugacucacacauucugc

SEQ ID NO: 883687 - RNA, 22 nt, Human
gcagcuuccugaguguggacag

SEQ ID NO: 883688 - RNA, 22 nt, Human
ucagaaauagucuuuaaaauga

SEQ ID NO: 883689 - RNA, 22 nt, Human
ucccaagaugacacaguggacg

SEQ ID NO: 883690 - RNA, 22 nt, Human
gggucccagcauaggggaagca

SEQ ID NO: 883691 - RNA, 20 nt, Human
caguuuaucuuuccggagcu

SEQ ID NO: 883692 - RNA, 20 nt, Human
aaacuugauggcauagaaua

SEQ ID NO: 883693 - RNA, 22 nt, Human
gggagaaggagcuaguucuuga

SEQ ID NO: 883694 - RNA, 22 nt, Human
agugcuuuguggagaauuugua

SEQ ID NO: 883695 - RNA, 22 nt, Human
aagcagcauagcucccuuaguu

SEQ ID NO: 883696 - RNA, 19 nt, Human
uaaaaggauguggaaggau

SEQ ID NO: 883697 - RNA, 22 nt, Human
agccugucugucuccaaagcug

SEQ ID NO: 883698 - RNA, 22 nt, Human
aaggcagcaagaauuccagguu

SEQ ID NO: 883699 - RNA, 20 nt, Human
aagcagaagcugcucucagc

SEQ ID NO: 883700 - RNA, 21 nt, Human
gcccuaggcuaccuggagcgc

SEQ ID NO: 883701 - RNA, 19 nt, Human
cgcucuggguuucguguca

SEQ ID NO: 883702 - RNA, 22 nt, Human
ucucuaaaugcucucccauccc

SEQ ID NO: 883703 - RNA, 22 nt, Human
auucugaguuagagucagccag

SEQ ID NO: 883704 - RNA, 22 nt, Human
auacaagacucagcacagacgg

SEQ ID NO: 883705 - RNA, 22 nt, Human
uccaggcccacucagcugaaau

SEQ ID NO: 883706 - RNA, 22 nt, Human
ccugugggcccuggacagagac

SEQ ID NO: 883707 - RNA, 22 nt, Human
auuucuugccccugcucccuga

SEQ ID NO: 883708 - RNA, 22 nt, Human
ucaaacaccaucugaccuuaug

SEQ ID NO: 883709 - RNA, 22 nt, Human
auuuagcuuaccucguuacuga

SEQ ID NO: 883710 - RNA, 22 nt, Human
gguguccuugcagaaggcggcg

SEQ ID NO: 883711 - RNA, 22 nt, Human
agaguuuaacacaagaaaaguu

SEQ ID NO: 883712 - RNA, 22 nt, Human
uucugggcccaacccuagagug

SEQ ID NO: 883713 - RNA, 22 nt, Human
cagguggcaugacugccuacaa

SEQ ID NO: 883714 - RNA, 22 nt, Human
cuccucccacggucucaggaag

SEQ ID NO: 883715 - RNA, 22 nt, Human
caggugggccgggguuuguucu

SEQ ID NO: 883716 - RNA, 22 nt, Human
uucuguuugccauauauaguag

SEQ ID NO: 883717 - RNA, 22 nt, Human
cugagaggggaccaggguguuu

SEQ ID NO: 883718 - RNA, 22 nt, Human
ggagcuguugcgcaugcgcucg

SEQ ID NO: 883719 - RNA, 22 nt, Human
cugcugggaaggucugcucagu

SEQ ID NO: 883720 - RNA, 22 nt, Human
cauaauccuugauucaaauaau

SEQ ID NO: 883721 - RNA, 22 nt, Human
uuuagcagcaaauaaguagugc

SEQ ID NO: 883722 - RNA, 22 nt, Human
gagcgcgccacaaggagcggcg

SEQ ID NO: 883723 - RNA, 22 nt, Human
cauuaacacuuuggauuuagac

SEQ ID NO: 883724 - RNA, 22 nt, Human
gagcacagcgcaguuuguaauu

SEQ ID NO: 883725 - RNA, 22 nt, Human
uauuagcagacaagcugcugga

SEQ ID NO: 883726 - RNA, 22 nt, Human
ggaguuggaggcuccagggaac

SEQ ID NO: 883727 - RNA, 22 nt, Human
cuggcccuaggcaaacacagau

SEQ ID NO: 883728 - RNA, 22 nt, Human
gcagaggccaggccaccagcaa

SEQ ID NO: 883729 - RNA, 22 nt, Human
cauaggaaugaggacaauuagc

SEQ ID NO: 883730 - RNA, 19 nt, Human
ugagugucacgucagugcc

SEQ ID NO: 883731 - RNA, 23 nt, Human
uaauugcuugaguuaguaauaca

SEQ ID NO: 883732 - RNA, 22 nt, Human
agagccuugaagaucuggaaaa

SEQ ID NO: 883733 - RNA, 22 nt, Human
ccuuuuaugaacuugagcaggu

SEQ ID NO: 883734 - RNA, 22 nt, Human
aaugguuuaacauaugcuugag

SEQ ID NO: 883735 - RNA, 22 nt, Human
aagccaaauaauguagguacau

SEQ ID NO: 883736 - RNA, 22 nt, Human
gggaagggacuuguuuaagguc

SEQ ID NO: 883737 - RNA, 22 nt, Human
ugaacuacaaaaaucaacauuu

SEQ ID NO: 883738 - RNA, 22 nt, Human
cauuauuaauucagcacaugcu

SEQ ID NO: 883739 - RNA, 22 nt, Human
auagcaagcguucccaagccac

SEQ ID NO: 883740 - RNA, 22 nt, Human
ggcaggaggugaguggcgggug

SEQ ID NO: 883741 - RNA, 22 nt, Human
gaaucaaaucaaguucuuuuga

SEQ ID NO: 883742 - RNA, 22 nt, Human
ugacaguauacuugugauggga

SEQ ID NO: 883743 - RNA, 22 nt, Human
acugucacugacagaaucaaca

SEQ ID NO: 883744 - RNA, 22 nt, Human
ugagcaguggggccugcauucu

SEQ ID NO: 883745 - RNA, 23 nt, Human
uuguccagcugguuugggccaca

SEQ ID NO: 883746 - RNA, 23 nt, Human
caguucccacugucugucacaag

SEQ ID NO: 883747 - RNA, 22 nt, Human
aucucaggugaaacuucuaggu

SEQ ID NO: 883748 - RNA, 22 nt, Human
ucucugucccuaggagccuugc

SEQ ID NO: 883749 - RNA, 22 nt, Human
uuccaucuuucagcuuuguugg

SEQ ID NO: 883750 - RNA, 22 nt, Human
uagauucuuaguuucauagaau

SEQ ID NO: 883751 - RNA, 22 nt, Human
ucuucuuccucauuuauacaua

SEQ ID NO: 883752 - RNA, 22 nt, Human
agagugcuaaaaucuuaucuuu

SEQ ID NO: 883753 - RNA, 22 nt, Human
gagaagccgagucagcugagcc

SEQ ID NO: 883754 - RNA, 22 nt, Human
ugcauuugaagucagacaggcu

SEQ ID NO: 883755 - RNA, 22 nt, Human
ggcucagcuuggugcgcagaaa

SEQ ID NO: 883756 - RNA, 22 nt, Human
guucagugccaguucuaagacu

SEQ ID NO: 883757 - RNA, 22 nt, Human
agagaaauauuuaggaaaggag

SEQ ID NO: 883758 - RNA, 22 nt, Human
ucuuuuguugauggaauuaaug

SEQ ID NO: 883759 - RNA, 22 nt, Human
ucaacagccagaaauauuagcc

SEQ ID NO: 883760 - RNA, 22 nt, Human
cuggagcagcagguggccaggg

SEQ ID NO: 883761 - RNA, 22 nt, Human
uucaaagcugcagacuccuggg

SEQ ID NO: 883762 - RNA, 22 nt, Human
aggcuggcccuacuggcugccu

SEQ ID NO: 883763 - RNA, 22 nt, Human
caagggaaggcuaagggcaaca

SEQ ID NO: 883764 - RNA, 22 nt, Human
ggggccccucggacacgugcgg

SEQ ID NO: 883765 - RNA, 22 nt, Human
cugacccuagcaucucugugca

SEQ ID NO: 883766 - RNA, 22 nt, Human
agacaguggcucagccccaguc

SEQ ID NO: 883767 - RNA, 23 nt, Human
acagggcuagcugacagugguau

SEQ ID NO: 883768 - RNA, 22 nt, Human
gugcaggggaucagguugcagc

SEQ ID NO: 883769 - RNA, 22 nt, Human
aaugcuuccaaaauaccaagcc

SEQ ID NO: 883770 - RNA, 22 nt, Human
ugcuauuaaugaggcugcauuu

SEQ ID NO: 883771 - RNA, 23 nt, Human
aaacugcuuccaauuccugccau

SEQ ID NO: 883772 - RNA, 17 nt, Human
gcccugccugcugcccu

SEQ ID NO: 883773 - RNA, 22 nt, Human
caauaucagguccgcguaaguc

SEQ ID NO: 883774 - RNA, 22 nt, Human
uccaggagguugagugaguucc

SEQ ID NO: 883775 - RNA, 22 nt, Human
aaucccuucccuucucugggac

SEQ ID NO: 883776 - RNA, 22 nt, Human
gugagucuuuggagacaguuca

SEQ ID NO: 883777 - RNA, 22 nt, Human
uggccggccaccuccaggguug

SEQ ID NO: 883778 - RNA, 22 nt, Human
cuccaggacagauucagggcca

SEQ ID NO: 883779 - RNA, 22 nt, Human
aacugaaaccaaacacuuuagg

SEQ ID NO: 883780 - RNA, 22 nt, Human
ccauuauuauaggaggcucauu

SEQ ID NO: 883781 - RNA, 22 nt, Human
ugcagcugugaaagggaaccaa

SEQ ID NO: 883782 - RNA, 22 nt, Human
aaacucuauaggcagaagcaau

SEQ ID NO: 883783 - RNA, 20 nt, Human
aagaggugauaacaggugag

SEQ ID NO: 883784 - RNA, 22 nt, Human
aacagcagggaugacauggcca

SEQ ID NO: 883785 - RNA, 23 nt, Human
ucuguacaauugagaagagaaca

SEQ ID NO: 883786 - RNA, 22 nt, Human
uucaaagauaauguagcauuuu

SEQ ID NO: 883787 - RNA, 23 nt, Human
uaagaacagacaagcauuuacau

SEQ ID NO: 883788 - RNA, 22 nt, Human
aguuuucugggaucacuggaau

SEQ ID NO: 883789 - RNA, 22 nt, Human
gcauucauacaucaauaagcuu

SEQ ID NO: 883790 - RNA, 22 nt, Human
ccugagaauguuuaacagagaa

SEQ ID NO: 883791 - RNA, 22 nt, Human
uggccuagagaagccaaaagau

SEQ ID NO: 883792 - RNA, 23 nt, Human
acuaaggcuucuuuaagacagag

SEQ ID NO: 883793 - RNA, 22 nt, Human
cucugccugccacuguucaggc

SEQ ID NO: 883794 - RNA, 18 nt, Human
ccucuggguuuuguuccc

SEQ ID NO: 883795 - RNA, 22 nt, Human
cuccugagaauuuucaguugga

SEQ ID NO: 883796 - RNA, 22 nt, Human
uuugggaaacuuaggggucaga

SEQ ID NO: 883797 - RNA, 22 nt, Human
caguggauuagccagagcugga

SEQ ID NO: 883798 - RNA, 22 nt, Human
aggcagaccaugaaucaugacc

SEQ ID NO: 883799 - RNA, 22 nt, Human
aauucacauguugaaguccuaa

SEQ ID NO: 883800 - RNA, 22 nt, Human
aaauuucuaagucaagaagaac

SEQ ID NO: 883801 - RNA, 22 nt, Human
uacaggaaccagauuguucagc

SEQ ID NO: 883802 - RNA, 22 nt, Human
agauacaucuugaacuucuaga

SEQ ID NO: 883803 - RNA, 22 nt, Human
gagggggcgaacagaagcaagg

SEQ ID NO: 883804 - RNA, 22 nt, Human
ucacaguucaucugauaaacua

SEQ ID NO: 883805 - RNA, 22 nt, Human
auguaaaagauuauuuuccugu

SEQ ID NO: 883806 - RNA, 22 nt, Human
augucaauuuguucucucgaag

SEQ ID NO: 883807 - RNA, 22 nt, Human
guccuuggccuggguagagugg

SEQ ID NO: 883808 - RNA, 22 nt, Human
uucugggaacaaaguggagugg

SEQ ID NO: 883809 - RNA, 22 nt, Human
gcaggcacuccuaggaccauca

SEQ ID NO: 883810 - RNA, 22 nt, Human
agagggguuaagugcuaguccg

SEQ ID NO: 883811 - RNA, 22 nt, Human
aggugggcauagcuagaauauu

SEQ ID NO: 883812 - RNA, 21 nt, Human
augagguaauucacuaagcag

SEQ ID NO: 883813 - RNA, 22 nt, Human
aguguacaaaaugauagauaaa

SEQ ID NO: 883814 - RNA, 22 nt, Human
cuuugaaaacacacgaauagac

SEQ ID NO: 883815 - RNA, 22 nt, Human
aacacugaaguagugaauacug

SEQ ID NO: 883816 - RNA, 22 nt, Human
ucugucugacaggguaugaacu

SEQ ID NO: 883817 - RNA, 22 nt, Human
ugcuggcuuggaaggaaagcgc

SEQ ID NO: 883818 - RNA, 22 nt, Human
ggacaaaauccaaacuucuuag

SEQ ID NO: 883819 - RNA, 22 nt, Human
auggcagugacuugaaggguag

SEQ ID NO: 883820 - RNA, 22 nt, Human
ggccucaggguugggcccauua

SEQ ID NO: 883821 - RNA, 22 nt, Human
cucuucaaaugauuuccuuagg

SEQ ID NO: 883822 - RNA, 22 nt, Human
ugagaauauuugaagauguuag

SEQ ID NO: 883823 - RNA, 22 nt, Human
gaagagagagcccugggguccg

SEQ ID NO: 883824 - RNA, 22 nt, Human
agaaauucuaagcaucaauagc

SEQ ID NO: 883825 - RNA, 22 nt, Human
uagacauuuggaguuuuaugac

SEQ ID NO: 883826 - RNA, 22 nt, Human
ggcucuagagacucuagagaaa

SEQ ID NO: 883827 - RNA, 22 nt, Human
cagagagcuuagugugcugcau

SEQ ID NO: 883828 - RNA, 22 nt, Human
caaagcaagggcugaagacucc

SEQ ID NO: 883829 - RNA, 22 nt, Human
cucagcaguaaacguccggaac

SEQ ID NO: 883830 - RNA, 22 nt, Human
gccugcagugagugcagaaggu

SEQ ID NO: 883831 - RNA, 22 nt, Human
ugucugcccauucaugggcaca

SEQ ID NO: 883832 - RNA, 22 nt, Human
agucugaaccagauggcaaggu

SEQ ID NO: 883833 - RNA, 22 nt, Human
uguuucaacuguuaagauaugc

SEQ ID NO: 883834 - RNA, 22 nt, Human
ugagccuggguggucgaggcug

SEQ ID NO: 883835 - RNA, 22 nt, Human
augugacuuugugucuuccauc

SEQ ID NO: 883836 - RNA, 22 nt, Human
gcccagcuuuuugaggcaggca

SEQ ID NO: 883837 - RNA, 22 nt, Human
cgacagcagaagaagcaagcca

SEQ ID NO: 883838 - RNA, 22 nt, Human
aagcuaauagccaguuuucuuc

SEQ ID NO: 883839 - RNA, 22 nt, Human
agucccuguacuuuccacugcc

SEQ ID NO: 883840 - RNA, 22 nt, Human
accuuaaaugugacauagucua

SEQ ID NO: 883841 - RNA, 22 nt, Human
acagcaaaugguuuucugucug

SEQ ID NO: 883842 - RNA, 22 nt, Human
ccagugcgagccugugcuggcc

SEQ ID NO: 883843 - RNA, 22 nt, Human
ugccugcugauuggaguugaau

SEQ ID NO: 883844 - RNA, 22 nt, Human
gccaggcuguuuuuauuacugu

SEQ ID NO: 883845 - RNA, 22 nt, Human
agcagggcucuguggagggugg

SEQ ID NO: 883846 - RNA, 22 nt, Human
aggcaguggagaagguuuguga

SEQ ID NO: 883847 - RNA, 22 nt, Human
ugcaauuucaaauaucagaaag

SEQ ID NO: 883848 - RNA, 22 nt, Human
gaaugauauauuagcagauuuu

SEQ ID NO: 883849 - RNA, 22 nt, Human
ucauuuuuugcauaccuguguc

SEQ ID NO: 883850 - RNA, 22 nt, Human
ugcagcaagcaaguaugguucu

SEQ ID NO: 883851 - RNA, 22 nt, Human
aagaggcuggcauugaugguag

SEQ ID NO: 883852 - RNA, 22 nt, Human
aaauuuguucaaugucuauuug

SEQ ID NO: 883853 - RNA, 22 nt, Human
aggcaggugggagugauuccuu

SEQ ID NO: 883854 - RNA, 22 nt, Human
auaauuuacaacugcuuuuaau

SEQ ID NO: 883855 - RNA, 22 nt, Human
uggcagagguaauucaaauccc

SEQ ID NO: 883856 - RNA, 22 nt, Human
ggcucuggaauguguagucagg

SEQ ID NO: 883857 - RNA, 22 nt, Human
acagaacugggggcacagauag

SEQ ID NO: 883858 - RNA, 22 nt, Human
ugugcugcugugaauaagaccu

SEQ ID NO: 883859 - RNA, 23 nt, Human
ucacauuuaaccccucagaccuc

SEQ ID NO: 883860 - RNA, 22 nt, Human
gaggaagggacuuuauuaucug

SEQ ID NO: 883861 - RNA, 22 nt, Human
aaguauucauaaggacauaugu

SEQ ID NO: 883862 - RNA, 22 nt, Human
uugucugauguucccucaugau

SEQ ID NO: 883863 - RNA, 22 nt, Human
auccugggcaaaguaugcuguc

SEQ ID NO: 883864 - RNA, 23 nt, Human
gugugccaagcacugugccagga

SEQ ID NO: 883865 - RNA, 22 nt, Human
cacaggcucuucucacuugauu

SEQ ID NO: 883866 - RNA, 22 nt, Human
uuguacagggaaguaauacaag

SEQ ID NO: 883867 - RNA, 19 nt, Human
gcugggugaggucguugga

SEQ ID NO: 883868 - RNA, 20 nt, Human
ggcugcagugcaccucaucu

SEQ ID NO: 883869 - RNA, 18 nt, Human
ggaacagcucagggcagc

SEQ ID NO: 883870 - RNA, 21 nt, Human
auuuagaaggaaauuuugcaa

SEQ ID NO: 883871 - RNA, 22 nt, Human
agagguaugugaagugauacca

SEQ ID NO: 883872 - RNA, 22 nt, Human
ucucagggaguugaggcugccu

SEQ ID NO: 883873 - RNA, 22 nt, Human
gggcucuggaaaugggagcucc

SEQ ID NO: 883874 - RNA, 22 nt, Human
auucaguuccuugaggguauag

SEQ ID NO: 883875 - RNA, 22 nt, Human
auuucagugucuucuucucccu

SEQ ID NO: 883876 - RNA, 22 nt, Human
acagacugggguggggaauagg

SEQ ID NO: 883877 - RNA, 22 nt, Human
acaguucugcaagauauuuuuu

SEQ ID NO: 883878 - RNA, 22 nt, Human
uucuaguuuagggcucuucaac

SEQ ID NO: 883879 - RNA, 22 nt, Human
cccaaagggugucagcagcaag

SEQ ID NO: 883880 - RNA, 22 nt, Human
gcugggaggcagcaccuuuagc

SEQ ID NO: 883881 - RNA, 22 nt, Human
ccagaccugcaaggcugagagg

SEQ ID NO: 883882 - RNA, 22 nt, Human
acugucuuuauuagaaucuuau

SEQ ID NO: 883883 - RNA, 22 nt, Human
agaugagaauuuuuagagugcu

SEQ ID NO: 883884 - RNA, 22 nt, Human
auuucuguauccugcugucaga

SEQ ID NO: 883885 - RNA, 22 nt, Human
ggccucaguuucuccauggguu

SEQ ID NO: 883886 - RNA, 22 nt, Human
ugaagacaagugugcugguguu

SEQ ID NO: 883887 - RNA, 22 nt, Human
ugaagcaaauuguuuagccuga

SEQ ID NO: 883888 - RNA, 22 nt, Human
cugggcugucaauggcccucug

SEQ ID NO: 883889 - RNA, 22 nt, Human
ccccagccagcaggaccucuga

SEQ ID NO: 883890 - RNA, 22 nt, Human
aacauugcagcuuaauugcagg

SEQ ID NO: 883891 - RNA, 21 nt, Human
uagcaaauugcuauuaaggca

SEQ ID NO: 883892 - RNA, 22 nt, Human
acaguuugcacuguucaucaaa

SEQ ID NO: 883893 - RNA, 22 nt, Human
aacuaaaguaaccaaggauauc

SEQ ID NO: 883894 - RNA, 23 nt, Human
ggcaugcaauggacagagcugga

SEQ ID NO: 883895 - RNA, 22 nt, Human
gacaguaacugagagauguaau

SEQ ID NO: 883896 - RNA, 22 nt, Human
gcugaccugcucucagcagaga

SEQ ID NO: 883897 - RNA, 22 nt, Human
gccacagcucacguuccccauu

SEQ ID NO: 883898 - RNA, 22 nt, Human
uaccaugaucaggcucauccuu

SEQ ID NO: 883899 - RNA, 22 nt, Human
agaggccauggggcauuuuuca

SEQ ID NO: 883900 - RNA, 22 nt, Human
ucagggcauccauugccuguug

SEQ ID NO: 883901 - RNA, 22 nt, Human
ucuagggugaugauucaggaug

SEQ ID NO: 883902 - RNA, 21 nt, Human
agaguuacugucauccuaggu

SEQ ID NO: 883903 - RNA, 22 nt, Human
ucaauacucacaaagagauuuu

SEQ ID NO: 883904 - RNA, 22 nt, Human
guguggcuagaagugucuuguu

SEQ ID NO: 883905 - RNA, 22 nt, Human
agcucugggauucucaggccac

SEQ ID NO: 883906 - RNA, 22 nt, Human
uauguuuaaauguauguguaug

SEQ ID NO: 883907 - RNA, 22 nt, Human
gccacagguggaauuaagaaau

SEQ ID NO: 883908 - RNA, 18 nt, Human
aagccaggucaagauaag

SEQ ID NO: 883909 - RNA, 20 nt, Human
augcaaacucacaaaauacc

SEQ ID NO: 883910 - RNA, 22 nt, Human
guauuuccucgcuugugggauu

SEQ ID NO: 883911 - RNA, 22 nt, Human
ucuccuggaagaauaccacacu

SEQ ID NO: 883912 - RNA, 22 nt, Human
uuucuaaucuuuaguuacaaaa

SEQ ID NO: 883913 - RNA, 22 nt, Human
aauggcaugggaaaugcagugg

SEQ ID NO: 883914 - RNA, 23 nt, Human
ugugaauugaggacaucaaaagc

SEQ ID NO: 883915 - RNA, 22 nt, Human
aaguuuauuaauugacuugugc

SEQ ID NO: 883916 - RNA, 22 nt, Human
caggcaugagccaggccccucc

SEQ ID NO: 883917 - RNA, 22 nt, Human
gugccgugggccuuagugaucu

SEQ ID NO: 883918 - RNA, 22 nt, Human
auuuucacccugaauauauuga

SEQ ID NO: 883919 - RNA, 22 nt, Human
caaguacaaaaugauauuuagu

SEQ ID NO: 883920 - RNA, 22 nt, Human
ccagggaaaggagguugacuug

SEQ ID NO: 883921 - RNA, 22 nt, Human
uuccuggggugaagauauuuuu

SEQ ID NO: 883922 - RNA, 22 nt, Human
ugaguccaauaggggccuggaa

SEQ ID NO: 883923 - RNA, 22 nt, Human
acagaauaguagcuuaaaguca

SEQ ID NO: 883924 - RNA, 22 nt, Human
ugucuugucugugagggcauug

SEQ ID NO: 883925 - RNA, 22 nt, Human
augcugugguagacagcauucc

SEQ ID NO: 883926 - RNA, 22 nt, Human
uuuugaagaagaugggaauuua

SEQ ID NO: 883927 - RNA, 22 nt, Human
cugggccucaaucucagaguuu

SEQ ID NO: 883928 - RNA, 19 nt, Human
cuuucaugugguucuucuu

SEQ ID NO: 883929 - RNA, 22 nt, Human
aauuggaaaaagacuuaauugc

SEQ ID NO: 883930 - RNA, 22 nt, Human
ucuuagaaaaaugguauguuuu

SEQ ID NO: 883931 - RNA, 22 nt, Human
ucugcaagggguucuuuaggcc

SEQ ID NO: 883932 - RNA, 22 nt, Human
gaauacaucugaaggcuaugaa

SEQ ID NO: 883933 - RNA, 22 nt, Human
agagcuucacuggagagcacau

SEQ ID NO: 883934 - RNA, 17 nt, Human
aaggagcugagagaugg

SEQ ID NO: 883935 - RNA, 22 nt, Human
ugccugucuuaauaucuggaaa

SEQ ID NO: 883936 - RNA, 20 nt, Human
cuaggcagcgagugacugag

SEQ ID NO: 883937 - RNA, 22 nt, Human
gaggaggguuggccuuagguag

SEQ ID NO: 883938 - RNA, 22 nt, Human
agaguucacacucagugcaccc

SEQ ID NO: 883939 - RNA, 22 nt, Human
acugagacugccccuguaacaa

SEQ ID NO: 883940 - RNA, 20 nt, Human
agcuccuggacuagagagug

SEQ ID NO: 883941 - RNA, 22 nt, Human
ccugagagcccuagccaggcgc

SEQ ID NO: 883942 - RNA, 22 nt, Human
ucagcaggcacggacaggcugc

SEQ ID NO: 883943 - RNA, 22 nt, Human
uacacagacucuucaauucaga

SEQ ID NO: 883944 - RNA, 22 nt, Human
ucucuguggcaagcaugcugcu

SEQ ID NO: 883945 - RNA, 22 nt, Human
cugacccuggucaaguugccuc

SEQ ID NO: 883946 - RNA, 22 nt, Human
ucaaacaggacuacauucucau

SEQ ID NO: 883947 - RNA, 22 nt, Human
uacuuuaaaaacugauaauuca

SEQ ID NO: 883948 - RNA, 22 nt, Human
uauaaagagucucaaagaaguu

SEQ ID NO: 883949 - RNA, 22 nt, Human
gcuacagagcucugugaagaga

SEQ ID NO: 883950 - RNA, 22 nt, Human
agcauggggcaaugcaugugcu

SEQ ID NO: 883951 - RNA, 21 nt, Human
aagcaggacauaugaugcccu

SEQ ID NO: 883952 - RNA, 22 nt, Human
gcauuuguuugggcuaaucuua

SEQ ID NO: 883953 - RNA, 22 nt, Human
uucuaguuuugccacaggauac

SEQ ID NO: 883954 - RNA, 22 nt, Human
aaaguuguucaguaagaaacuc

SEQ ID NO: 883955 - RNA, 22 nt, Human
cuucuccuguaagaagaucaaa

SEQ ID NO: 883956 - RNA, 21 nt, Human
ucugggggugagccuagaaau

SEQ ID NO: 883957 - RNA, 22 nt, Human
ugugaggauuaaaugcauagug

SEQ ID NO: 883958 - RNA, 21 nt, Human
ucugggcagcccaguccugag

SEQ ID NO: 883959 - RNA, 22 nt, Human
uguauauauuucuuucauucua

SEQ ID NO: 883960 - RNA, 22 nt, Human
uuaaagcuugauucgaagcuua

SEQ ID NO: 883961 - RNA, 22 nt, Human
uugcuguaggcugauugcugaa

SEQ ID NO: 883962 - RNA, 22 nt, Human
uagaacauaagucauucauuug

SEQ ID NO: 883963 - RNA, 22 nt, Human
acagagcugggugcccccugga

SEQ ID NO: 883964 - RNA, 22 nt, Human
agcccaggucuggcccagccug

SEQ ID NO: 883965 - RNA, 22 nt, Human
gcuccagggaguacauuuauca

SEQ ID NO: 883966 - RNA, 22 nt, Human
acuggguggcugccuccuucuc

SEQ ID NO: 883967 - RNA, 22 nt, Human
ggaugcugauauagagcauucu

SEQ ID NO: 883968 - RNA, 22 nt, Human
uuuaauuauaucugggcaguua

SEQ ID NO: 883969 - RNA, 22 nt, Human
aauaacagugccaugaaauuga

SEQ ID NO: 883970 - RNA, 22 nt, Human
uaaaggcuuuuacaggagugca

SEQ ID NO: 883971 - RNA, 22 nt, Human
ccuggcucugcagccacuccag

SEQ ID NO: 883972 - RNA, 22 nt, Human
uguauguggcuacuuuucuugc

SEQ ID NO: 883973 - RNA, 22 nt, Human
gauuuuuauauaaagugagaaa

SEQ ID NO: 883974 - RNA, 22 nt, Human
acacccagagcgccagugccga

SEQ ID NO: 883975 - RNA, 22 nt, Human
cccacaggcaggggcagagaca

SEQ ID NO: 883976 - RNA, 19 nt, Human
uuguucguuccugacaggc

SEQ ID NO: 883977 - RNA, 22 nt, Human
guggggaggccuaagcaaguug

SEQ ID NO: 883978 - RNA, 22 nt, Human
uucauuuaaucagaaucucuaa

SEQ ID NO: 883979 - RNA, 22 nt, Human
acugauuaugcguacucucuac

SEQ ID NO: 883980 - RNA, 22 nt, Human
acauuucucagggaguuuugcu

SEQ ID NO: 883981 - RNA, 22 nt, Human
acuucaaauucugggggaagag

SEQ ID NO: 883982 - RNA, 22 nt, Human
gggaggcugccauccuucagga

SEQ ID NO: 883983 - RNA, 22 nt, Human
ugacacuuggaagcuuggcaac

SEQ ID NO: 883984 - RNA, 22 nt, Human
uggcuggggccugaauccugca

SEQ ID NO: 883985 - RNA, 22 nt, Human
uucauuccuucuguaccuugcc

SEQ ID NO: 883986 - RNA, 22 nt, Human
gguccagggaacuuugaaggau

SEQ ID NO: 883987 - RNA, 22 nt, Human
uuuccugagucagagacaccag

SEQ ID NO: 883988 - RNA, 22 nt, Human
cggggcagagggucuucuccag

SEQ ID NO: 883989 - RNA, 20 nt, Human
aggaggaaaaaaugacgagc

SEQ ID NO: 883990 - RNA, 21 nt, Human
acuuugggcacuuuccugccc

SEQ ID NO: 883991 - RNA, 22 nt, Human
auucaauaagucacuguggaau

SEQ ID NO: 883992 - RNA, 22 nt, Human
cuucaaguccagcucaugcucu

SEQ ID NO: 883993 - RNA, 17 nt, Human
ugccugccagcauugga

SEQ ID NO: 883994 - RNA, 22 nt, Human
ugaccaaagaguugcuuguauu

SEQ ID NO: 883995 - RNA, 20 nt, Human
agucacaggccuggaacaug

SEQ ID NO: 883996 - RNA, 22 nt, Human
ucaaaggcccauugucccguug

SEQ ID NO: 883997 - RNA, 21 nt, Human
uguguuugagacuauguuucc

SEQ ID NO: 883998 - RNA, 22 nt, Human
aaaugcagcugggcaugagagg

SEQ ID NO: 883999 - RNA, 20 nt, Human
aggcugaguucuaugcacuu

SEQ ID NO: 884000 - RNA, 22 nt, Human
acacagagcuucucaacuggga

SEQ ID NO: 884001 - RNA, 20 nt, Human
ugucugcugagcugcugccc

SEQ ID NO: 884002 - RNA, 22 nt, Human
aagagccucuguguuucagccu

SEQ ID NO: 884003 - RNA, 22 nt, Human
uucaagaugcacaguggcauuc

SEQ ID NO: 884004 - RNA, 22 nt, Human
uaagaagguaguuuccaaguca

SEQ ID NO: 884005 - RNA, 22 nt, Human
agcaguucauaaacauuuugag

SEQ ID NO: 884006 - RNA, 21 nt, Human
cccaggucguggucuucccag

SEQ ID NO: 884007 - RNA, 22 nt, Human
ucagcacuguguccagucuccc

SEQ ID NO: 884008 - RNA, 22 nt, Human
uggcaagaacugcaauugcuuu

SEQ ID NO: 884009 - RNA, 22 nt, Human
uagcaaaaacugcaguuacuuu

SEQ ID NO: 884010 - RNA, 22 nt, Human
auuauuauauagggaaaguccc

SEQ ID NO: 884011 - RNA, 22 nt, Human
cugugaaaugcuuugcgauggu

SEQ ID NO: 884012 - RNA, 22 nt, Human
aaugguuugauggacaaaauga

SEQ ID NO: 884013 - RNA, 23 nt, Human
augaaaugcuggcucagggaggu

SEQ ID NO: 884014 - RNA, 22 nt, Human
gagguccaggguggggccugag

SEQ ID NO: 884015 - RNA, 22 nt, Human
ucuucauuccguagauauuuau

SEQ ID NO: 884016 - RNA, 22 nt, Human
uaugugcuaucaaaugcucauu

SEQ ID NO: 884017 - RNA, 22 nt, Human
cugagguacaagaaaggcaccu

SEQ ID NO: 884018 - RNA, 22 nt, Human
uuuauuguuguuagucauaagu

SEQ ID NO: 884019 - RNA, 22 nt, Human
ugcauguguuugccacagugag

SEQ ID NO: 884020 - RNA, 22 nt, Human
aguaccauuauccaguaaagga

SEQ ID NO: 884021 - RNA, 22 nt, Human
ucaaacauccccaccagggacu

SEQ ID NO: 884022 - RNA, 22 nt, Human
aggaauguggcaaucuucaagu

SEQ ID NO: 884023 - RNA, 22 nt, Human
agacugggccauuuccccagcu

SEQ ID NO: 884024 - RNA, 20 nt, Human
gccuagggguugggaaagca

SEQ ID NO: 884025 - RNA, 22 nt, Human
ggugcuguggcagcuccuccuc

SEQ ID NO: 884026 - RNA, 22 nt, Human
auaguguguaaagugcagugau

SEQ ID NO: 884027 - RNA, 22 nt, Human
uguuauacagacacgaugguau

SEQ ID NO: 884028 - RNA, 22 nt, Human
cggagcugcgccgggacacggg

SEQ ID NO: 884029 - RNA, 22 nt, Human
auacccaguccaaucucuuagc

SEQ ID NO: 884030 - RNA, 22 nt, Human
ggcagcugaagaggaacuuugg

SEQ ID NO: 884031 - RNA, 22 nt, Human
cacaugacacuauuuuguucua

SEQ ID NO: 884032 - RNA, 22 nt, Human
uacaguuuuggugaugaugaug

SEQ ID NO: 884033 - RNA, 22 nt, Human
caaacuguaugacccuaggccg

SEQ ID NO: 884034 - RNA, 22 nt, Human
cucugagguccuucccagcucu

SEQ ID NO: 884035 - RNA, 22 nt, Human
uguucguagcacguaguuucuu

SEQ ID NO: 884036 - RNA, 22 nt, Human
ggagauaauccagggagggacu

SEQ ID NO: 884037 - RNA, 20 nt, Human
cuuugccuauucucugccug

SEQ ID NO: 884038 - RNA, 22 nt, Human
gggccagcaguaucggaggcau

SEQ ID NO: 884039 - RNA, 22 nt, Human
guguuauuagagcauuaauuuu

SEQ ID NO: 884040 - RNA, 22 nt, Human
aguuggugggugugagcuggac

SEQ ID NO: 884041 - RNA, 22 nt, Human
gcuggugccuuguuguuguuac

SEQ ID NO: 884042 - RNA, 22 nt, Human
cacaggaaguggucagugccag

SEQ ID NO: 884043 - RNA, 19 nt, Human
gauaaguuuccagguaacu

SEQ ID NO: 884044 - RNA, 22 nt, Human
gggagacccccaaugccagguc

SEQ ID NO: 884045 - RNA, 22 nt, Human
uggugggacaucugaggagagg

SEQ ID NO: 884046 - RNA, 22 nt, Human
aggguggcuggaggaaucagaa

SEQ ID NO: 884047 - RNA, 22 nt, Human
gcuuuagaaaugaguaaauuag

SEQ ID NO: 884048 - RNA, 22 nt, Human
cugggagacaagagagggcuga

SEQ ID NO: 884049 - RNA, 22 nt, Human
uggggagagauugaggaguuuu

SEQ ID NO: 884050 - RNA, 22 nt, Human
ucuuaaaaguaugccaauugga

SEQ ID NO: 884051 - RNA, 22 nt, Human
aggcuuguuuuacuaaaagcaa

SEQ ID NO: 884052 - RNA, 22 nt, Human
ccuggcucucugcagauccugg

SEQ ID NO: 884053 - RNA, 22 nt, Human
ucccuggguucccguggaagug

SEQ ID NO: 884054 - RNA, 22 nt, Human
ccaagggaaggauguauaugau

SEQ ID NO: 884055 - RNA, 22 nt, Human
uguguucugaaggagaagagug

SEQ ID NO: 884056 - RNA, 22 nt, Human
cauguauagcaaauauuuguuc

SEQ ID NO: 884057 - RNA, 22 nt, Human
uacauuguguuaaaacagaaga

SEQ ID NO: 884058 - RNA, 22 nt, Human
gaugcaaagauaaaacagacgc

SEQ ID NO: 884059 - RNA, 22 nt, Human
gcugggcagcugaggccucuca

SEQ ID NO: 884060 - RNA, 22 nt, Human
cauugucauucuaugcuauuca

SEQ ID NO: 884061 - RNA, 22 nt, Human
cugggagauucaggugaaguuu

SEQ ID NO: 884062 - RNA, 22 nt, Human
aauaaguugccuguugaaucau

SEQ ID NO: 884063 - RNA, 22 nt, Human
uggaaaggacaguugcugauag

SEQ ID NO: 884064 - RNA, 22 nt, Human
ggaacccagagcucauaaaauu

SEQ ID NO: 884065 - RNA, 22 nt, Human
aucaaaguaggcauauguuuuu

SEQ ID NO: 884066 - RNA, 22 nt, Human
ugcaaggcugccucugaggacc

SEQ ID NO: 884067 - RNA, 22 nt, Human
caguaagaauaugaaucaggau

SEQ ID NO: 884068 - RNA, 22 nt, Human
aggacggggacgcaagucagca

SEQ ID NO: 884069 - RNA, 22 nt, Human
uacugucugcuucuuauagcuu

SEQ ID NO: 884070 - RNA, 22 nt, Human
auagcaaugaucaagacagaca

SEQ ID NO: 884071 - RNA, 20 nt, Human
gaccugugucugggaugcgg

SEQ ID NO: 884072 - RNA, 16 nt, Human
augcugcuauuagagg

SEQ ID NO: 884073 - RNA, 22 nt, Human
cacauucaauuacacagauagg

SEQ ID NO: 884074 - RNA, 22 nt, Human
agugaaauagcauuuaugaagc

SEQ ID NO: 884075 - RNA, 22 nt, Human
uucaaguucauguguagucagu

SEQ ID NO: 884076 - RNA, 22 nt, Human
cugucccucaucaccucugggu

SEQ ID NO: 884077 - RNA, 22 nt, Human
uugaaaggccuguuuauccagc

SEQ ID NO: 884078 - RNA, 22 nt, Human
uaagaacaagauguuccuguuu

SEQ ID NO: 884079 - RNA, 22 nt, Human
uucaaacuuaaggagcagcaga

SEQ ID NO: 884080 - RNA, 22 nt, Human
ugcuuauuaaacaugcauauuc

SEQ ID NO: 884081 - RNA, 19 nt, Human
agaaaaacugguacugcug

SEQ ID NO: 884082 - RNA, 22 nt, Human
uucaggaggugagcaagaaggg

SEQ ID NO: 884083 - RNA, 22 nt, Human
ucuuucaagggcccuaguuugg

SEQ ID NO: 884084 - RNA, 22 nt, Human
uuuuugcaccaaccuaauagaa

SEQ ID NO: 884085 - RNA, 22 nt, Human
aguuggugagcgugugguaauc

SEQ ID NO: 884086 - RNA, 22 nt, Human
cugcuagcccaggaugcaggga

SEQ ID NO: 884087 - RNA, 22 nt, Human
ggagcucaguggggggacugug

SEQ ID NO: 884088 - RNA, 22 nt, Human
ugcacaggccuugaagggagag

SEQ ID NO: 884089 - RNA, 22 nt, Human
acagagcuucccagccugagca

SEQ ID NO: 884090 - RNA, 22 nt, Human
gcuggccugaccugaggcuggg

SEQ ID NO: 884091 - RNA, 22 nt, Human
ucccaggcgccugguggggagc

SEQ ID NO: 884092 - RNA, 22 nt, Human
ugccaggcugcccuccagucug

SEQ ID NO: 884093 - RNA, 22 nt, Human
gcuuccaccuacuaaaugccac

SEQ ID NO: 884094 - RNA, 22 nt, Human
uuagaguuaggauuugucuuua

SEQ ID NO: 884095 - RNA, 22 nt, Human
gccauaaauugcuggucaaaau

SEQ ID NO: 884096 - RNA, 22 nt, Human
uaaagccacgcuggaaaucagg

SEQ ID NO: 884097 - RNA, 22 nt, Human
uccugagauguggagcuccaug

SEQ ID NO: 884098 - RNA, 22 nt, Human
uguaaaugaaacagcuaaaucc

SEQ ID NO: 884099 - RNA, 22 nt, Human
agggagaguuugauguuuccuc

SEQ ID NO: 884100 - RNA, 22 nt, Human
acagaacaagaccugcuuauug

SEQ ID NO: 884101 - RNA, 19 nt, Human
agggccaggauucuggaac

SEQ ID NO: 884102 - RNA, 22 nt, Human
aaugacuaguccacauuuguaa

SEQ ID NO: 884103 - RNA, 22 nt, Human
agugggcaggcagggugcgcag

SEQ ID NO: 884104 - RNA, 22 nt, Human
aaagcugaugucuacuagagaa

SEQ ID NO: 884105 - RNA, 22 nt, Human
gccaugaggcuccgagaaguca

SEQ ID NO: 884106 - RNA, 22 nt, Human
uuucaucuucccagagaccuug

SEQ ID NO: 884107 - RNA, 22 nt, Human
uugcauuuuuagaugcuucugu

SEQ ID NO: 884108 - RNA, 22 nt, Human
gcaguaggggcuggagggcugu

SEQ ID NO: 884109 - RNA, 22 nt, Human
ggcacugagaggcucuuccuaa

SEQ ID NO: 884110 - RNA, 23 nt, Human
acuuuagauaaauuaugugcaca

SEQ ID NO: 884111 - RNA, 22 nt, Human
cacaucuucuuaacuccaaagu

SEQ ID NO: 884112 - RNA, 22 nt, Human
agguuaggaaccaguguuugac

SEQ ID NO: 884113 - RNA, 21 nt, Human
aaggcuggagaugcaggucug

SEQ ID NO: 884114 - RNA, 20 nt, Human
ggcuuggcugccuggggagg

SEQ ID NO: 884115 - RNA, 22 nt, Human
uggcccagucagcaggagaggg

SEQ ID NO: 884116 - RNA, 22 nt, Human
auucaaagcccaguaaacauug

SEQ ID NO: 884117 - RNA, 22 nt, Human
gcugcagccaaauucauuguca

SEQ ID NO: 884118 - RNA, 22 nt, Human
gaacaguacuaagagcuuuaca

SEQ ID NO: 884119 - RNA, 22 nt, Human
gcugccucccccauggcuggaa

SEQ ID NO: 884120 - RNA, 22 nt, Human
aacaguguuuugcucuuugccc

SEQ ID NO: 884121 - RNA, 23 nt, Human
acagcuguugaaauuucaguggg

SEQ ID NO: 884122 - RNA, 21 nt, Human
ucugcacagccccgcaggagg

SEQ ID NO: 884123 - RNA, 22 nt, Human
aggcucuggacagugaggaguu

SEQ ID NO: 884124 - RNA, 22 nt, Human
guucugcacaucacacaggugc

SEQ ID NO: 884125 - RNA, 22 nt, Human
cagaggcagaggucaucucugg

SEQ ID NO: 884126 - RNA, 22 nt, Human
uccagccucauuucuccugcuu

SEQ ID NO: 884127 - RNA, 22 nt, Human
caugggccauggugaagccagg

SEQ ID NO: 884128 - RNA, 22 nt, Human
aagcaauucagcaaaccuagaa

SEQ ID NO: 884129 - RNA, 22 nt, Human
uuaauauacaauuuuacgggcu

SEQ ID NO: 884130 - RNA, 22 nt, Human
uaguguaaugacauuuagacga

SEQ ID NO: 884131 - RNA, 22 nt, Human
gcugucugccgcaggcugccac

SEQ ID NO: 884132 - RNA, 22 nt, Human
aacaagaacaccuacaguucua

SEQ ID NO: 884133 - RNA, 22 nt, Human
ccaguggacuucucccuguggu

SEQ ID NO: 884134 - RNA, 22 nt, Human
uccugggagcccuugcuccacc

SEQ ID NO: 884135 - RNA, 22 nt, Human
aggccaagcucccagagaagcu

SEQ ID NO: 884136 - RNA, 22 nt, Human
aagggcagcuuaaauugguagc

SEQ ID NO: 884137 - RNA, 22 nt, Human
auuucucauuuugcuucaaagg

SEQ ID NO: 884138 - RNA, 22 nt, Human
uuuuccucugcagagcaguuag

SEQ ID NO: 884139 - RNA, 22 nt, Human
ugagaaccaagaccaagggccu

SEQ ID NO: 884140 - RNA, 22 nt, Human
acauacacaagcguacaugaac

SEQ ID NO: 884141 - RNA, 22 nt, Human
cugagccacugcuuguucagug

SEQ ID NO: 884142 - RNA, 17 nt, Human
ugcuccuguggcagccu

SEQ ID NO: 884143 - RNA, 22 nt, Human
gguggcaggcuggcauuggcaa

SEQ ID NO: 884144 - RNA, 22 nt, Human
acuucaaaucucuugaaagcaa

SEQ ID NO: 884145 - RNA, 22 nt, Human
aaacaguuucauuuucaugacc

SEQ ID NO: 884146 - RNA, 22 nt, Human
uggccagccagaaagaagccuu

SEQ ID NO: 884147 - RNA, 20 nt, Human
uguacacaguacuuuacaau

SEQ ID NO: 884148 - RNA, 22 nt, Human
ugaaucuuuuuggaaauaaaga

SEQ ID NO: 884149 - RNA, 22 nt, Human
uggcgagcuuuguucuccagga

SEQ ID NO: 884150 - RNA, 22 nt, Human
aggaaaggccucagcagaaacc

SEQ ID NO: 884151 - RNA, 22 nt, Human
ccuccaggccuugcagguuaac

SEQ ID NO: 884152 - RNA, 22 nt, Human
uuugcugauauuuugcugauac

SEQ ID NO: 884153 - RNA, 22 nt, Human
aguuauuuuggaaaaugaguca

SEQ ID NO: 884154 - RNA, 22 nt, Human
gugggcaggccccaaagcaggg

SEQ ID NO: 884155 - RNA, 22 nt, Human
agacaacaucacuaaagcugag

SEQ ID NO: 884156 - RNA, 22 nt, Human
acacagggcagagagcuggcuc

SEQ ID NO: 884157 - RNA, 22 nt, Human
uucucuaaggcuuggcuucccu

SEQ ID NO: 884158 - RNA, 22 nt, Human
uuaauacaacuguugucacugg

SEQ ID NO: 884159 - RNA, 22 nt, Human
ugcaaaauaaugaacgauuuuu

SEQ ID NO: 884160 - RNA, 22 nt, Human
uagcuuuuaguacuuaauggcu

SEQ ID NO: 884161 - RNA, 22 nt, Human
aaguguggggucucagagcuga

SEQ ID NO: 884162 - RNA, 22 nt, Human
ccuuggcccuagccucaggcaa

SEQ ID NO: 884163 - RNA, 22 nt, Human
gcaacacagaucuucuuuguug

SEQ ID NO: 884164 - RNA, 22 nt, Human
uacacaaaggcacucuguuguu

SEQ ID NO: 884165 - RNA, 22 nt, Human
gcugggaagaacaggagagaau

SEQ ID NO: 884166 - RNA, 22 nt, Human
agaguaauuucugcugaaaagg

SEQ ID NO: 884167 - RNA, 22 nt, Human
guucuacaugacacucaacauu

SEQ ID NO: 884168 - RNA, 23 nt, Human
ugguggggucuuggagacagcac

SEQ ID NO: 884169 - RNA, 20 nt, Human
gcagggcaucuuggccccca

SEQ ID NO: 884170 - RNA, 22 nt, Human
augugcuucauucuacaugaca

SEQ ID NO: 884171 - RNA, 22 nt, Human
ccaggacugcagggggcgagga

SEQ ID NO: 884172 - RNA, 22 nt, Human
augaggcuaugaauggggagau

SEQ ID NO: 884173 - RNA, 22 nt, Human
gcugccaucuccugaggacagg

SEQ ID NO: 884174 - RNA, 22 nt, Human
ucuaacucugccaggacacaga

SEQ ID NO: 884175 - RNA, 22 nt, Human
uccagggccaguccuugucugu

SEQ ID NO: 884176 - RNA, 22 nt, Human
cuucacaauucuaacagggcaa

SEQ ID NO: 884177 - RNA, 22 nt, Human
ucucugagcaugccauauugcu

SEQ ID NO: 884178 - RNA, 22 nt, Human
acauuacacugugguccuguuc

SEQ ID NO: 884179 - RNA, 22 nt, Human
aagcagcuggaagaguaagaug

SEQ ID NO: 884180 - RNA, 22 nt, Human
agcagaaacagccagucuggac

SEQ ID NO: 884181 - RNA, 22 nt, Human
guuuccugucugcuuuacuaua

SEQ ID NO: 884182 - RNA, 22 nt, Human
uuccuggguucccucucauucu

SEQ ID NO: 884183 - RNA, 22 nt, Human
gcuggcagguccaagauagagc

SEQ ID NO: 884184 - RNA, 22 nt, Human
ggcccugcugaagccgggucua

SEQ ID NO: 884185 - RNA, 22 nt, Human
uaccugagaagaaacccguguu

SEQ ID NO: 884186 - RNA, 22 nt, Human
ccugcugugaagccaggccugu

SEQ ID NO: 884187 - RNA, 22 nt, Human
ggcucugaagggugacagguuu

SEQ ID NO: 884188 - RNA, 22 nt, Human
agaaaaguuuucugagacugac

SEQ ID NO: 884189 - RNA, 23 nt, Human
ugcucugggaggcccuggagagc

SEQ ID NO: 884190 - RNA, 22 nt, Human
ugcagggaaaacccaggaugcu

SEQ ID NO: 884191 - RNA, 22 nt, Human
uaauuguagcuuuguaaucagc

SEQ ID NO: 884192 - RNA, 22 nt, Human
uucucuucuguucagugcccaa

SEQ ID NO: 884193 - RNA, 22 nt, Human
agugcagccgagaucaggugcu

SEQ ID NO: 884194 - RNA, 22 nt, Human
cagcugccacaggacuuucuga

SEQ ID NO: 884195 - RNA, 20 nt, Human
ugucauuuauuuaucaaaug

SEQ ID NO: 884196 - RNA, 22 nt, Human
agcugcccaauccugcagggcg

SEQ ID NO: 884197 - RNA, 22 nt, Human
aaggcauuaugauuugaguacc

SEQ ID NO: 884198 - RNA, 22 nt, Human
gugagaaaugacaaaugugucg

SEQ ID NO: 884199 - RNA, 22 nt, Human
agagcacagccaccauuuacaa

SEQ ID NO: 884200 - RNA, 22 nt, Human
auaagaaacauuauucuuucca

SEQ ID NO: 884201 - RNA, 23 nt, Human
uucucuuuagauuuacauuacuc

SEQ ID NO: 884202 - RNA, 22 nt, Human
uucuucaauuuuccauauacug

SEQ ID NO: 884203 - RNA, 22 nt, Human
uagaaacagcauauauuagccc

SEQ ID NO: 884204 - RNA, 22 nt, Human
gggccucagagauggucaguga

SEQ ID NO: 884205 - RNA, 22 nt, Human
gaggggcuggcacgauggcugc

SEQ ID NO: 884206 - RNA, 22 nt, Human
uacagauaaauuuuaaguagaa

SEQ ID NO: 884207 - RNA, 22 nt, Human
aguagucacuucacccauccca

SEQ ID NO: 884208 - RNA, 22 nt, Human
agauaugugccaauuguuauaa

SEQ ID NO: 884209 - RNA, 22 nt, Human
aucaucuuaagguaucucaagc

SEQ ID NO: 884210 - RNA, 22 nt, Human
gggcuucuauucaagucuguuu

SEQ ID NO: 884211 - RNA, 22 nt, Human
ccucugggccagccuggacccu

SEQ ID NO: 884212 - RNA, 22 nt, Human
ggaggccaggguggguggaucg

SEQ ID NO: 884213 - RNA, 22 nt, Human
acacagccgugaaucugcuucu

SEQ ID NO: 884214 - RNA, 22 nt, Human
gcccccagaccucagugggcug

SEQ ID NO: 884215 - RNA, 22 nt, Human
ugcacuugaggauuuuccacag

SEQ ID NO: 884216 - RNA, 22 nt, Human
ucugcaggcucuagaugagguu

SEQ ID NO: 884217 - RNA, 23 nt, Human
cacaggcagaaaucaagacggua

SEQ ID NO: 884218 - RNA, 21 nt, Human
ccugaaauucucacuagcuua

SEQ ID NO: 884219 - RNA, 21 nt, Human
ucuuuccugcccaguugcccu

SEQ ID NO: 884220 - RNA, 22 nt, Human
uagaacaggcugucagagcggg

SEQ ID NO: 884221 - RNA, 19 nt, Human
ggagucugagcccagguau

SEQ ID NO: 884222 - RNA, 22 nt, Human
caguggagaggcaugcuuggca

SEQ ID NO: 884223 - RNA, 22 nt, Human
uggucagaaggaagggcuccua

SEQ ID NO: 884224 - RNA, 22 nt, Human
cuuaaaaguugcuucccuaacu

SEQ ID NO: 884225 - RNA, 22 nt, Human
acuguguguuugucuagcacag

SEQ ID NO: 884226 - RNA, 22 nt, Human
gcugcagcccggcgcgccugag

SEQ ID NO: 884227 - RNA, 22 nt, Human
ucugaggccuuggcagcuaagg

SEQ ID NO: 884228 - RNA, 22 nt, Human
ugaggucaagcccagagcagca

SEQ ID NO: 884229 - RNA, 22 nt, Human
cugagcagggaccaaaagcauu

SEQ ID NO: 884230 - RNA, 22 nt, Human
aauugaaagaagugggauugcc

SEQ ID NO: 884231 - RNA, 22 nt, Human
gccugguggacacugggcauca

SEQ ID NO: 884232 - RNA, 22 nt, Human
ugaguuauaaugaauauuugaa

SEQ ID NO: 884233 - RNA, 22 nt, Human
uaauuauugucugaagaguuau

SEQ ID NO: 884234 - RNA, 22 nt, Human
acauauuuccaugcagcauguc

SEQ ID NO: 884235 - RNA, 22 nt, Human
uggugcugcaggugggcacagu

SEQ ID NO: 884236 - RNA, 22 nt, Human
augaacacaauacgugcaugca

SEQ ID NO: 884237 - RNA, 20 nt, Human
aaguuuggagucaggagacc

SEQ ID NO: 884238 - RNA, 22 nt, Human
uuuuguguugccauguuaagca

SEQ ID NO: 884239 - RNA, 22 nt, Human
cuucuuaacuguauauacuaug

SEQ ID NO: 884240 - RNA, 22 nt, Human
ugucuacugagaagcuaugcaa

SEQ ID NO: 884241 - RNA, 22 nt, Human
caggcagcugaggacuuugcua

SEQ ID NO: 884242 - RNA, 22 nt, Human
guggcaugacagugaaugggca

SEQ ID NO: 884243 - RNA, 22 nt, Human
acuuuacagaugguuuccugac

SEQ ID NO: 884244 - RNA, 22 nt, Human
gaggcacauauauacagagccc

SEQ ID NO: 884245 - RNA, 22 nt, Human
auuccacagcucagccucucuu

SEQ ID NO: 884246 - RNA, 22 nt, Human
guuuccauuguccuaucuauag

SEQ ID NO: 884247 - RNA, 22 nt, Human
ggccaggagcaagccaggcucu

SEQ ID NO: 884248 - RNA, 22 nt, Human
gagaaucuacaggaaaccgaag

SEQ ID NO: 884249 - RNA, 22 nt, Human
agcuucagcuugcagcugugau

SEQ ID NO: 884250 - RNA, 22 nt, Human
gugcugagaguuuauuaugaua

SEQ ID NO: 884251 - RNA, 19 nt, Human
augucucuguagcacauac

SEQ ID NO: 884252 - RNA, 22 nt, Human
uacugaaacucuuguaaauauc

SEQ ID NO: 884253 - RNA, 22 nt, Human
cucugcagaauuugagcugcuc

SEQ ID NO: 884254 - RNA, 22 nt, Human
agacagacugguuugaauuggu

SEQ ID NO: 884255 - RNA, 22 nt, Human
ugaaggcaacugagaaaaagca

SEQ ID NO: 884256 - RNA, 22 nt, Human
uaaucacaucaggguaaauggg

SEQ ID NO: 884257 - RNA, 22 nt, Human
gaggaagaagcaaaccagcuaa

SEQ ID NO: 884258 - RNA, 22 nt, Human
ggcagcugggugccuaauaaug

SEQ ID NO: 884259 - RNA, 18 nt, Human
caggagcaggaguugaac

SEQ ID NO: 884260 - RNA, 22 nt, Human
ugagggugugcggcccagacag

SEQ ID NO: 884261 - RNA, 22 nt, Human
agggccuugcugucugaagcug

SEQ ID NO: 884262 - RNA, 22 nt, Human
gaaagaagcuuuagauggcuau

SEQ ID NO: 884263 - RNA, 22 nt, Human
auaaaagaaguuuugguacuug

SEQ ID NO: 884264 - RNA, 22 nt, Human
aggcugugcacagggcaccugc

SEQ ID NO: 884265 - RNA, 22 nt, Human
gcaguggcuaagcucgcaugca

SEQ ID NO: 884266 - RNA, 22 nt, Human
uaggaagaugaguaucaacuug

SEQ ID NO: 884267 - RNA, 22 nt, Human
aaacagaugaguuauaauagcc

SEQ ID NO: 884268 - RNA, 22 nt, Human
gucaucuuccuaguguuaacua

SEQ ID NO: 884269 - RNA, 22 nt, Human
ugcugccucagcuuccugggcu

SEQ ID NO: 884270 - RNA, 15 nt, Human
ccaagaacuaauuag

SEQ ID NO: 884271 - RNA, 22 nt, Human
caggacaauggucauacuggau

SEQ ID NO: 884272 - RNA, 21 nt, Human
ggcaggugggucucuguugcu

SEQ ID NO: 884273 - RNA, 22 nt, Human
uggaagcagcauuaaugaguua

SEQ ID NO: 884274 - RNA, 22 nt, Human
uccauacccagcuuucucacac

SEQ ID NO: 884275 - RNA, 22 nt, Human
gauggggcuggcuuugaggguu

SEQ ID NO: 884276 - RNA, 22 nt, Human
guccuggggauuauagaguguu

SEQ ID NO: 884277 - RNA, 22 nt, Human
agucagaggaaugggccaggcu

SEQ ID NO: 884278 - RNA, 22 nt, Human
gcucugagucucagcuaccaca

SEQ ID NO: 884279 - RNA, 22 nt, Human
ccuagaauuauaaacuuauuag

SEQ ID NO: 884280 - RNA, 22 nt, Human
gaccaaggccaggccagggcgu

SEQ ID NO: 884281 - RNA, 22 nt, Human
auuagcagugccuugccugucu

SEQ ID NO: 884282 - RNA, 22 nt, Human
cucuucuuggcccccaugaggg

SEQ ID NO: 884283 - RNA, 22 nt, Human
cuccugggagcuguggcagagc

SEQ ID NO: 884284 - RNA, 22 nt, Human
aaaauuuucagcuugacuugau

SEQ ID NO: 884285 - RNA, 19 nt, Human
gccaugggcuggcagcaga

SEQ ID NO: 884286 - RNA, 22 nt, Human
agcagcuggaacuaauaguggu

SEQ ID NO: 884287 - RNA, 22 nt, Human
uuuuggcagauuacuuaauaug

SEQ ID NO: 884288 - RNA, 22 nt, Human
uccaggcuggaaaugucaaacu

SEQ ID NO: 884289 - RNA, 22 nt, Human
cagccugcaggaggccgucagc

SEQ ID NO: 884290 - RNA, 22 nt, Human
gugcaugaagacucagaaaguc

SEQ ID NO: 884291 - RNA, 22 nt, Human
acauaugaguacuauacagugc

SEQ ID NO: 884292 - RNA, 22 nt, Human
uucacaauggcaaaccauuaaa

SEQ ID NO: 884293 - RNA, 22 nt, Human
uuacuuuagaaauagucaucaa

SEQ ID NO: 884294 - RNA, 22 nt, Human
uggccugggccggcagauauac

SEQ ID NO: 884295 - RNA, 22 nt, Human
aguauuugaagauguugaguac

SEQ ID NO: 884296 - RNA, 22 nt, Human
cagucccaucucccagguggcu

SEQ ID NO: 884297 - RNA, 22 nt, Human
cuggcucuguggcuuccuucau

SEQ ID NO: 884298 - RNA, 22 nt, Human
gcauuagaaacuauugcugcaa

SEQ ID NO: 884299 - RNA, 22 nt, Human
augucuguauguggagaggggu

SEQ ID NO: 884300 - RNA, 22 nt, Human
ugaggccaagccuccucugcca

SEQ ID NO: 884301 - RNA, 20 nt, Human
aaugcugcuucuuuuugcau

SEQ ID NO: 884302 - RNA, 22 nt, Human
ugccauauuauugagcauauua

SEQ ID NO: 884303 - RNA, 21 nt, Human
ucucguuguauggucuugggg

SEQ ID NO: 884304 - RNA, 22 nt, Human
aaagugcaguccaugaaauuaa

SEQ ID NO: 884305 - RNA, 22 nt, Human
uuugugcacuucuguagcugcc

SEQ ID NO: 884306 - RNA, 22 nt, Human
gagagggcaaacuuguagcuaa

SEQ ID NO: 884307 - RNA, 21 nt, Human
cagcacaguacugggucuugc

SEQ ID NO: 884308 - RNA, 23 nt, Human
gcaucuuaaaaccuacauaugug

SEQ ID NO: 884309 - RNA, 22 nt, Human
ccuggagcaaaaaucuaaggag

SEQ ID NO: 884310 - RNA, 22 nt, Human
gcuuccagcaaacacuggcugc

SEQ ID NO: 884311 - RNA, 22 nt, Human
cuggcaggcaaauuggugggag

SEQ ID NO: 884312 - RNA, 22 nt, Human
gcuucaugggugugcaaccugu

SEQ ID NO: 884313 - RNA, 22 nt, Human
aagguuuuuuuccaguaucucu

SEQ ID NO: 884314 - RNA, 22 nt, Human
cucauuuacuacucaugugacc

SEQ ID NO: 884315 - RNA, 22 nt, Human
cccucucuuagaagaaacacag

SEQ ID NO: 884316 - RNA, 22 nt, Human
cagugcaggaagugagaugccu

SEQ ID NO: 884317 - RNA, 21 nt, Human
agguuucugugagcagagcag

SEQ ID NO: 884318 - RNA, 22 nt, Human
uguuaaauguuccuuuacugga

SEQ ID NO: 884319 - RNA, 22 nt, Human
acauucacgcucucaaagcuga

SEQ ID NO: 884320 - RNA, 22 nt, Human
ggaaguguuuccuugggcagca

SEQ ID NO: 884321 - RNA, 22 nt, Human
uaaguucaagucuuggauauaa

SEQ ID NO: 884322 - RNA, 21 nt, Human
cucuggaguuugaaggcuggg

SEQ ID NO: 884323 - RNA, 22 nt, Human
auuugcauaaggaugcuacugu

SEQ ID NO: 884324 - RNA, 22 nt, Human
agugggagagaagcaaguagua

SEQ ID NO: 884325 - RNA, 22 nt, Human
uuauuucuacuauuuugccuga

SEQ ID NO: 884326 - RNA, 22 nt, Human
agcagcaggagccgugggguga

SEQ ID NO: 884327 - RNA, 22 nt, Human
cugucucagcaggaagucauca

SEQ ID NO: 884328 - RNA, 22 nt, Human
gaaagcagcuaagucuuaugau

SEQ ID NO: 884329 - RNA, 20 nt, Human
agcugccccugggcacugcc

SEQ ID NO: 884330 - RNA, 22 nt, Human
cccuguggaggaggagagcagu

SEQ ID NO: 884331 - RNA, 22 nt, Human
cacucccuucaggagccuagga

SEQ ID NO: 884332 - RNA, 22 nt, Human
cacaaaaucuuucucgauuauu

SEQ ID NO: 884333 - RNA, 22 nt, Human
aggcccuguccauggugcugaa

SEQ ID NO: 884334 - RNA, 22 nt, Human
gaacacugagaaagucagcuuu

SEQ ID NO: 884335 - RNA, 22 nt, Human
ugguagugacucccccagggcu

SEQ ID NO: 884336 - RNA, 18 nt, Human
acauugauggcuuuaagc

SEQ ID NO: 884337 - RNA, 22 nt, Human
gucauauugaagaagacuggca

SEQ ID NO: 884338 - RNA, 22 nt, Human
agagaugucgccuugcccaggg

SEQ ID NO: 884339 - RNA, 22 nt, Human
acucaggaauggggcugggacu

SEQ ID NO: 884340 - RNA, 22 nt, Human
cuucuuuugaagggcguugugu

SEQ ID NO: 884341 - RNA, 22 nt, Human
gggcccugccccguggcucuga

SEQ ID NO: 884342 - RNA, 18 nt, Human
uaaaggaagugggagagg

SEQ ID NO: 884343 - RNA, 22 nt, Human
cacagaacaccaaagaaccuuc

SEQ ID NO: 884344 - RNA, 22 nt, Human
uggaaugugcuagggcuguggc

SEQ ID NO: 884345 - RNA, 22 nt, Human
gaugcuccuuggugauagaaua

SEQ ID NO: 884346 - RNA, 22 nt, Human
aaacacauuagcccuguggaaa

SEQ ID NO: 884347 - RNA, 22 nt, Human
caggugggagccacagcguaca

SEQ ID NO: 884348 - RNA, 22 nt, Human
cuguccuccagacgacaguccc

SEQ ID NO: 884349 - RNA, 22 nt, Human
gaaguuuaccucugccuugcuu

SEQ ID NO: 884350 - RNA, 22 nt, Human
auuuuagauuuaagaauaaggu

SEQ ID NO: 884351 - RNA, 22 nt, Human
ccaaaggccaggcacugagguu

SEQ ID NO: 884352 - RNA, 22 nt, Human
gcagcugcucacauucucacaa

SEQ ID NO: 884353 - RNA, 22 nt, Human
agcaauguugggguuagaggac

SEQ ID NO: 884354 - RNA, 17 nt, Human
aaacagugaguguuaug

SEQ ID NO: 884355 - RNA, 22 nt, Human
ucaaagcaauuucaccagugcc

SEQ ID NO: 884356 - RNA, 22 nt, Human
ugcagcaacaagauagaauggc

SEQ ID NO: 884357 - RNA, 22 nt, Human
aaaugcuuguauauuucuuggu

SEQ ID NO: 884358 - RNA, 22 nt, Human
agaaucuaaguacacagacaga

SEQ ID NO: 884359 - RNA, 22 nt, Human
ugaagcaagauagaaagcugcu

SEQ ID NO: 884360 - RNA, 22 nt, Human
ggcugugagcaggcagaaugcu

SEQ ID NO: 884361 - RNA, 22 nt, Human
cuggagggcugcagcgaggcug

SEQ ID NO: 884362 - RNA, 20 nt, Human
cuccagggaacagacuggag

SEQ ID NO: 884363 - RNA, 22 nt, Human
augcagggcagaguacguuagc

SEQ ID NO: 884364 - RNA, 20 nt, Human
ggcagcaaccauaugcuaca

SEQ ID NO: 884365 - RNA, 22 nt, Human
gauguauagggccaugacacca

SEQ ID NO: 884366 - RNA, 22 nt, Human
aagagcugcaucuaagccauga

SEQ ID NO: 884367 - RNA, 22 nt, Human
uccacagcuuuuaaaugucuag

SEQ ID NO: 884368 - RNA, 22 nt, Human
ucagcauuccugaagacaagca

SEQ ID NO: 884369 - RNA, 22 nt, Human
gcuucuguuaacuuauguuccc

SEQ ID NO: 884370 - RNA, 22 nt, Human
ggaagccaggccaaugagaaca

SEQ ID NO: 884371 - RNA, 22 nt, Human
aucaugacaucugaguuuaagu

SEQ ID NO: 884372 - RNA, 22 nt, Human
ugacccuucaaauauccucaaa

SEQ ID NO: 884373 - RNA, 22 nt, Human
caucugaagugaauugcuuuuu

SEQ ID NO: 884374 - RNA, 22 nt, Human
uucaguguucuuuucuguuagc

SEQ ID NO: 884375 - RNA, 22 nt, Human
cagcaugacagucugcagcaga

SEQ ID NO: 884376 - RNA, 22 nt, Human
acugcagacucuacaguuauaa

SEQ ID NO: 884377 - RNA, 19 nt, Human
uggaaaauggauugaauca

SEQ ID NO: 884378 - RNA, 22 nt, Human
uacuuccuguuuccaugucugu

SEQ ID NO: 884379 - RNA, 22 nt, Human
acaacaaaaucacuagucuucc

SEQ ID NO: 884380 - RNA, 22 nt, Human
uggucucucuccugcaacaacu

SEQ ID NO: 884381 - RNA, 22 nt, Human
aguggaauugcugauugaaaua

SEQ ID NO: 884382 - RNA, 22 nt, Human
ugcauuaaggccauugaaauuu

SEQ ID NO: 884383 - RNA, 22 nt, Human
uauguguuguauaugugcagag

SEQ ID NO: 884384 - RNA, 19 nt, Human
uggcagccuccacuuuugc

SEQ ID NO: 884385 - RNA, 22 nt, Human
ccaacagguugagagucugaau

SEQ ID NO: 884386 - RNA, 22 nt, Human
caguaacaugaagagacaugga

SEQ ID NO: 884387 - RNA, 22 nt, Human
gccuguccuugugaggucccag

SEQ ID NO: 884388 - RNA, 22 nt, Human
cugaggccucucuccugggcuu

SEQ ID NO: 884389 - RNA, 22 nt, Human
ucugcagcuucuugccagagag

SEQ ID NO: 884390 - RNA, 22 nt, Human
uagcauuccuuguggcuucuga

SEQ ID NO: 884391 - RNA, 22 nt, Human
gcugcuagggcauuaugauaaa

SEQ ID NO: 884392 - RNA, 22 nt, Human
ugaguauauacccagaagugga

SEQ ID NO: 884393 - RNA, 22 nt, Human
uuguccuuggaugaagcuggga

SEQ ID NO: 884394 - RNA, 22 nt, Human
aauaaccuuacuuauuacaugg

SEQ ID NO: 884395 - RNA, 22 nt, Human
guauacaacuauuguuggguaa

SEQ ID NO: 884396 - RNA, 22 nt, Human
cacccagacauguggucccaga

SEQ ID NO: 884397 - RNA, 22 nt, Human
caaaguaaacuaccacuguuuc

SEQ ID NO: 884398 - RNA, 22 nt, Human
uguuuuaugagccauauaaccu

SEQ ID NO: 884399 - RNA, 22 nt, Human
aagagcuggagcugcuacagga

SEQ ID NO: 884400 - RNA, 22 nt, Human
uuguuuuuaugaacauccagga

SEQ ID NO: 884401 - RNA, 22 nt, Human
cugggcugcuugcugaaggggu

SEQ ID NO: 884402 - RNA, 22 nt, Human
agagcaggggcaauguguugca

SEQ ID NO: 884403 - RNA, 15 nt, Human
uacauucauuuccac

SEQ ID NO: 884404 - RNA, 22 nt, Human
agucuagaaacaagguagagcu

SEQ ID NO: 884405 - RNA, 22 nt, Human
ugcuccaucucucgugguucca

SEQ ID NO: 884406 - RNA, 22 nt, Human
guccuuggggucauccauuauc

SEQ ID NO: 884407 - RNA, 22 nt, Human
aguuuacaucuucaaucucauu

SEQ ID NO: 884408 - RNA, 22 nt, Human
ucaaggugacugaacuauaaac

SEQ ID NO: 884409 - RNA, 22 nt, Human
caucacaucuacuauaagugau

SEQ ID NO: 884410 - RNA, 22 nt, Human
uugauaaaaugaugaaaucacu

SEQ ID NO: 884411 - RNA, 22 nt, Human
ucacagaaggagggaagcuagu

SEQ ID NO: 884412 - RNA, 22 nt, Human
agcugaagauccaggguugggg

SEQ ID NO: 884413 - RNA, 22 nt, Human
gaguucaguguuucuaguagug

SEQ ID NO: 884414 - RNA, 22 nt, Human
ccguguacauaaagcccuggua

SEQ ID NO: 884415 - RNA, 22 nt, Human
gcugaaaucccagcauucccca

SEQ ID NO: 884416 - RNA, 22 nt, Human
acacugugauuucuggguucca

SEQ ID NO: 884417 - RNA, 22 nt, Human
uuuggagauagggccuagcaau

SEQ ID NO: 884418 - RNA, 22 nt, Human
uuucauguuauuaauagugcug

SEQ ID NO: 884419 - RNA, 22 nt, Human
aaugccaacuuggauauacauu

SEQ ID NO: 884420 - RNA, 22 nt, Human
uauuagcaacagagcucuuguu

SEQ ID NO: 884421 - RNA, 22 nt, Human
ugagaggauauuuugggaggau

SEQ ID NO: 884422 - RNA, 22 nt, Human
aucucauaaucgucauugcuuu

SEQ ID NO: 884423 - RNA, 22 nt, Human
ugcugcccguaccugugcacuu

SEQ ID NO: 884424 - RNA, 22 nt, Human
ugaguggguuaucaggaaaggu

SEQ ID NO: 884425 - RNA, 19 nt, Human
caagacaaagcccaucuuc

SEQ ID NO: 884426 - RNA, 22 nt, Human
ucuggagaccugcauuuauauu

SEQ ID NO: 884427 - RNA, 22 nt, Human
ucuauguauggaccuuuucugu

SEQ ID NO: 884428 - RNA, 21 nt, Human
uaggcaauuuguugucauagc

SEQ ID NO: 884429 - RNA, 22 nt, Human
uagaacuuagcacuagacuugu

SEQ ID NO: 884430 - RNA, 21 nt, Human
aucaguaagguuggaggaaga

SEQ ID NO: 884431 - RNA, 22 nt, Human
ugagagugaaaugucacauguc

SEQ ID NO: 884432 - RNA, 22 nt, Human
uucucuuagcacuuuguguuac

SEQ ID NO: 884433 - RNA, 22 nt, Human
ugcuagaagauagcuagaagau

SEQ ID NO: 884434 - RNA, 18 nt, Human
acuaugcugaauaaaugg

SEQ ID NO: 884435 - RNA, 22 nt, Human
uuggccuucugguguucauuuu

SEQ ID NO: 884436 - RNA, 22 nt, Human
ucugucaccgagggcauccaaa

SEQ ID NO: 884437 - RNA, 22 nt, Human
cagcccuggccccagguggucu

SEQ ID NO: 884438 - RNA, 22 nt, Human
uugcugcucccaagaggcagcu

SEQ ID NO: 884439 - RNA, 22 nt, Human
gccagcuggaaaucugcuugaa

SEQ ID NO: 884440 - RNA, 22 nt, Human
uggggagguucgggaaucuugu

SEQ ID NO: 884441 - RNA, 20 nt, Human
gauuucaaagcagaguggcc

SEQ ID NO: 884442 - RNA, 22 nt, Human
agugcaugccuuccuguggaug

SEQ ID NO: 884443 - RNA, 22 nt, Human
uuucagggucagccuguaugug

SEQ ID NO: 884444 - RNA, 22 nt, Human
aggggagccccugguccuggug

SEQ ID NO: 884445 - RNA, 22 nt, Human
ccagggcaacgcugucucagag

SEQ ID NO: 884446 - RNA, 22 nt, Human
agacagcucuggguuccacacu

SEQ ID NO: 884447 - RNA, 22 nt, Human
cuacauucaacagcagaguuuu

SEQ ID NO: 884448 - RNA, 22 nt, Human
cacaguaagguaucccagugaa

SEQ ID NO: 884449 - RNA, 22 nt, Human
cccuuuuuuaugucaagcauug

SEQ ID NO: 884450 - RNA, 21 nt, Human
gcugcugugggccagggaggc

SEQ ID NO: 884451 - RNA, 18 nt, Human
accugccuguucuucucu

SEQ ID NO: 884452 - RNA, 22 nt, Human
uuucuaaguaucuugcaguuuu

SEQ ID NO: 884453 - RNA, 22 nt, Human
agaggucagagcaggaaaggca

SEQ ID NO: 884454 - RNA, 22 nt, Human
ggugggugagcccugggagcug

SEQ ID NO: 884455 - RNA, 22 nt, Human
cagcuuuaccuuuaggaguaac

SEQ ID NO: 884456 - RNA, 21 nt, Human
auacagaacauugauccaaga

SEQ ID NO: 884457 - RNA, 22 nt, Human
acaaaauuaccuaguuauuuuc

SEQ ID NO: 884458 - RNA, 22 nt, Human
agaguuuaaacacugucacaga

SEQ ID NO: 884459 - RNA, 15 nt, Human
ggcagguggaucacu

SEQ ID NO: 884460 - RNA, 22 nt, Human
uaaggcaauggcauucuugaca

SEQ ID NO: 884461 - RNA, 22 nt, Human
uauucugcaugaaaauaaacag

SEQ ID NO: 884462 - RNA, 22 nt, Human
gggagcaguuaaaaugauuccu

SEQ ID NO: 884463 - RNA, 22 nt, Human
ccaaauagucuuucauugaauu

SEQ ID NO: 884464 - RNA, 20 nt, Human
aaagucuguuuaucucugga

SEQ ID NO: 884465 - RNA, 22 nt, Human
ugcguaguacgaauuugugccu

SEQ ID NO: 884466 - RNA, 22 nt, Human
ggacaugugcaacuucuuugga

SEQ ID NO: 884467 - RNA, 22 nt, Human
gaauacaagccugccaccugga

SEQ ID NO: 884468 - RNA, 22 nt, Human
uuauaaagugagaagugcuaug

SEQ ID NO: 884469 - RNA, 22 nt, Human
uaagugagcccucagaguaugg

SEQ ID NO: 884470 - RNA, 22 nt, Human
ugagacaguuuuucuauuucca

SEQ ID NO: 884471 - RNA, 22 nt, Human
ugcuggaggcaguggaggugcc

SEQ ID NO: 884472 - RNA, 22 nt, Human
aaacugaggaacaaggaaggau

SEQ ID NO: 884473 - RNA, 17 nt, Human
ccagagaguaguuagga

SEQ ID NO: 884474 - RNA, 22 nt, Human
uguuuucuauuaccugagauug

SEQ ID NO: 884475 - RNA, 22 nt, Human
caggaagaaggguggugagucc

SEQ ID NO: 884476 - RNA, 22 nt, Human
gcugccugauguccagcaggac

SEQ ID NO: 884477 - RNA, 22 nt, Human
ucugagagcaggaggagcugcu

SEQ ID NO: 884478 - RNA, 22 nt, Human
agcccagcuuucaccccucugg

SEQ ID NO: 884479 - RNA, 22 nt, Human
uagcaaaggaugacuauguacc

SEQ ID NO: 884480 - RNA, 22 nt, Human
cccaggaggguggccucugccc

SEQ ID NO: 884481 - RNA, 22 nt, Human
ccagcccuugaggucuguccau

SEQ ID NO: 884482 - RNA, 20 nt, Human
uacugggcaagcccacagac

SEQ ID NO: 884483 - RNA, 22 nt, Human
uggacuaaagaggaaagaugua

SEQ ID NO: 884484 - RNA, 20 nt, Human
aucaucuuuacaaugucagu

SEQ ID NO: 884485 - RNA, 22 nt, Human
acauucucuuccuaaauauacu

SEQ ID NO: 884486 - RNA, 22 nt, Human
uggggaggacgggcgccuuccu

SEQ ID NO: 884487 - RNA, 21 nt, Human
uuucuuaucuguaaaguggga

SEQ ID NO: 884488 - RNA, 22 nt, Human
cagugccaguggaugaacuguu

SEQ ID NO: 884489 - RNA, 22 nt, Human
uguccuuuucuuuagugcagcu

SEQ ID NO: 884490 - RNA, 22 nt, Human
agggaagcccuggcugagaccc

SEQ ID NO: 884491 - RNA, 22 nt, Human
aaugugauuuucccaguagaau

SEQ ID NO: 884492 - RNA, 22 nt, Human
uccaguugccugucucugauua

SEQ ID NO: 884493 - RNA, 19 nt, Human
agcuuugccaaaaacuuag

SEQ ID NO: 884494 - RNA, 22 nt, Human
aguagauucucauugaucuggu

SEQ ID NO: 884495 - RNA, 22 nt, Human
cuucuuccugcugcagccucca

SEQ ID NO: 884496 - RNA, 22 nt, Human
ggcagcaggguagccauuucuc

SEQ ID NO: 884497 - RNA, 17 nt, Human
ugcuagggggagaguag

SEQ ID NO: 884498 - RNA, 22 nt, Human
caucuacaggagaaugucacug

SEQ ID NO: 884499 - RNA, 22 nt, Human
cugugcuuguguucauuguuaa

SEQ ID NO: 884500 - RNA, 22 nt, Human
auaauuaauuucaguaaucucc

SEQ ID NO: 884501 - RNA, 22 nt, Human
agggagccagaguugggagcuc

SEQ ID NO: 884502 - RNA, 22 nt, Human
gggccggagcugggucccgcgc

SEQ ID NO: 884503 - RNA, 22 nt, Human
uggaggaaaaaaccaggcagag

SEQ ID NO: 884504 - RNA, 22 nt, Human
auaguucucacucagaauuuga

SEQ ID NO: 884505 - RNA, 22 nt, Human
aggagcuggguuccuuuggugg

SEQ ID NO: 884506 - RNA, 22 nt, Human
aucuuugggcaaugaugaggga

SEQ ID NO: 884507 - RNA, 22 nt, Human
gugaugucacagaauaagugau

SEQ ID NO: 884508 - RNA, 22 nt, Human
ucagaggugguaaaggacagca

SEQ ID NO: 884509 - RNA, 22 nt, Human
cucugcaggccuugaguguggu

SEQ ID NO: 884510 - RNA, 22 nt, Human
agguauuuuaaguccaccagag

SEQ ID NO: 884511 - RNA, 22 nt, Human
ugguagcaacaucucaguggcu

SEQ ID NO: 884512 - RNA, 22 nt, Human
gaggcaguggucugaugcaagg

SEQ ID NO: 884513 - RNA, 22 nt, Human
cugcagggcuuaccuugcucug

SEQ ID NO: 884514 - RNA, 22 nt, Human
gaguuauagauggacuauuauu

SEQ ID NO: 884515 - RNA, 22 nt, Human
uuccauauguauauagcuguua

SEQ ID NO: 884516 - RNA, 22 nt, Human
cugucaggggcggguggagcgg

SEQ ID NO: 884517 - RNA, 16 nt, Human
gcagguggaucaccug

SEQ ID NO: 884518 - RNA, 22 nt, Human
cuggggagaagcgacucggcug

SEQ ID NO: 884519 - RNA, 22 nt, Human
agaaacagcauuagcaucaauu

SEQ ID NO: 884520 - RNA, 22 nt, Human
ucuugacauuguuguuagcagg

SEQ ID NO: 884521 - RNA, 22 nt, Human
aaaugcuagggagaaacucucc

SEQ ID NO: 884522 - RNA, 22 nt, Human
uuccuggagaguuuucccaaag

SEQ ID NO: 884523 - RNA, 22 nt, Human
ccaaagcaagucacaugaucaa

SEQ ID NO: 884524 - RNA, 22 nt, Human
cuauuuaugugcuauuuuguau

SEQ ID NO: 884525 - RNA, 22 nt, Human
acccuuuugccuuuaauucaug

SEQ ID NO: 884526 - RNA, 22 nt, Human
uguacaccugucuuuacacaua

SEQ ID NO: 884527 - RNA, 22 nt, Human
ucauagaaauaucacgucuuuu

SEQ ID NO: 884528 - RNA, 22 nt, Human
gguggggcuaggaccucaggau

SEQ ID NO: 884529 - RNA, 22 nt, Human
caguaacagugaucaccugugg

SEQ ID NO: 884530 - RNA, 22 nt, Human
aguggcagagccaaguagagcc

SEQ ID NO: 884531 - RNA, 22 nt, Human
ccugugugucugucacugcaca

SEQ ID NO: 884532 - RNA, 22 nt, Human
uuuuucauauuccccucucugg

SEQ ID NO: 884533 - RNA, 22 nt, Human
ccuugauggugagagcugcaga

SEQ ID NO: 884534 - RNA, 22 nt, Human
agguuucugcagcauaguggca

SEQ ID NO: 884535 - RNA, 22 nt, Human
ccauuuauagauguauuuggcu

SEQ ID NO: 884536 - RNA, 21 nt, Human
aaggacgagguuuugauuaca

SEQ ID NO: 884537 - RNA, 22 nt, Human
acauggaagcaaaguucuauuu

SEQ ID NO: 884538 - RNA, 22 nt, Human
agaggggaaguaaugaaugaua

SEQ ID NO: 884539 - RNA, 22 nt, Human
agcugagcacauucaaacaggu

SEQ ID NO: 884540 - RNA, 22 nt, Human
uaguaaaaguuuaguugaaagu

SEQ ID NO: 884541 - RNA, 22 nt, Human
auccuugggaagagaggaauau

SEQ ID NO: 884542 - RNA, 22 nt, Human
ucuguucuuuagccugcuugag

SEQ ID NO: 884543 - RNA, 22 nt, Human
acauucuucuugugaauuuacu

SEQ ID NO: 884544 - RNA, 22 nt, Human
uuucauugucaucuaucuuaga

SEQ ID NO: 884545 - RNA, 22 nt, Human
cuuggucuacuagagaaaaaga

SEQ ID NO: 884546 - RNA, 22 nt, Human
ucagggccaggacuaggaugag

SEQ ID NO: 884547 - RNA, 22 nt, Human
gagggugugaacacuggcugug

SEQ ID NO: 884548 - RNA, 22 nt, Human
ugcagagagauccucaggguuu

SEQ ID NO: 884549 - RNA, 22 nt, Human
gagcucauccccaugguccguc

SEQ ID NO: 884550 - RNA, 23 nt, Human
ccugugugcccuuaauucacagc

SEQ ID NO: 884551 - RNA, 18 nt, Human
agcuggcccuggcugccg

SEQ ID NO: 884552 - RNA, 22 nt, Human
uuagaaaucaccucugaagauc

SEQ ID NO: 884553 - RNA, 22 nt, Human
ucugccaggagccaugagcaag

SEQ ID NO: 884554 - RNA, 22 nt, Human
gcuggacuucaugcauuccugu

SEQ ID NO: 884555 - RNA, 22 nt, Human
uagaaauccccagucucauagu

SEQ ID NO: 884556 - RNA, 22 nt, Human
aggggagcaaggccguggugua

SEQ ID NO: 884557 - RNA, 22 nt, Human
uggucuguucaagguggcugau

SEQ ID NO: 884558 - RNA, 22 nt, Human
cuggggaggcagggcugccccu

SEQ ID NO: 884559 - RNA, 22 nt, Human
uaacugauauugaaaaacauca

SEQ ID NO: 884560 - RNA, 22 nt, Human
cccagccugaucucggccagcu

SEQ ID NO: 884561 - RNA, 22 nt, Human
aucuuacaauuacaagacacuc

SEQ ID NO: 884562 - RNA, 22 nt, Human
uugaacauuuucuauguuauag

SEQ ID NO: 884563 - RNA, 22 nt, Human
uucuuuuaauagagauccugug

SEQ ID NO: 884564 - RNA, 22 nt, Human
uaauguaccuccagauguugua

SEQ ID NO: 884565 - RNA, 22 nt, Human
gaccacagauuccuaaguggca

SEQ ID NO: 884566 - RNA, 22 nt, Human
auacagaacaagccucaccucc

SEQ ID NO: 884567 - RNA, 22 nt, Human
caagggaauugugugugagagg

SEQ ID NO: 884568 - RNA, 18 nt, Human
caggugggucuccugccc

SEQ ID NO: 884569 - RNA, 22 nt, Human
uugucugaauauguauguaucc

SEQ ID NO: 884570 - RNA, 22 nt, Human
gauucucuucauauggcaaagg

SEQ ID NO: 884571 - RNA, 22 nt, Human
acauucuuucaccuugugucca

SEQ ID NO: 884572 - RNA, 23 nt, Human
uggauaaaauacuuacauucaac

SEQ ID NO: 884573 - RNA, 22 nt, Human
ucaugaguggauuaauauggcu

SEQ ID NO: 884574 - RNA, 22 nt, Human
uggaggcaguaacugagcaaca

SEQ ID NO: 884575 - RNA, 18 nt, Human
uuaucucuggcaugugcc

SEQ ID NO: 884576 - RNA, 22 nt, Human
gcucggccccgacggccggcgg

SEQ ID NO: 884577 - RNA, 22 nt, Human
agggccuggugaccuggguccu

SEQ ID NO: 884578 - RNA, 22 nt, Human
gucuaaggaucuguuagcuuuu

SEQ ID NO: 884579 - RNA, 22 nt, Human
uaacacuggagaguugguugug

SEQ ID NO: 884580 - RNA, 20 nt, Human
cccucccagaugcuucccaa

SEQ ID NO: 884581 - RNA, 22 nt, Human
cagucucugggaaagaggacag

SEQ ID NO: 884582 - RNA, 22 nt, Human
cccuuagaugucuuccuccgga

SEQ ID NO: 884583 - RNA, 22 nt, Human
ggccaccuaggagccacaguga

SEQ ID NO: 884584 - RNA, 22 nt, Human
ugcuguuucauuuuccucaucc

SEQ ID NO: 884585 - RNA, 22 nt, Human
acauagaacuucgaugucuuuu

SEQ ID NO: 884586 - RNA, 22 nt, Human
ggaagagaaugauggcuauggg

SEQ ID NO: 884587 - RNA, 22 nt, Human
uacagaauauagaagcuggaag

SEQ ID NO: 884588 - RNA, 22 nt, Human
cagagcuggagcuugaauggag

SEQ ID NO: 884589 - RNA, 16 nt, Human
ucagggcagaauggca

SEQ ID NO: 884590 - RNA, 23 nt, Human
ucacauaauccuucauccacagg

SEQ ID NO: 884591 - RNA, 22 nt, Human
aauaacuuguaugguuauucca

SEQ ID NO: 884592 - RNA, 22 nt, Human
ggaggagcugcugugggggccc

SEQ ID NO: 884593 - RNA, 22 nt, Human
uccugguggucugugcuucuuc

SEQ ID NO: 884594 - RNA, 22 nt, Human
uccuugcaaauagcuuucugag

SEQ ID NO: 884595 - RNA, 22 nt, Human
cuggcagguuuggugucuggug

SEQ ID NO: 884596 - RNA, 22 nt, Human
caguuuuccaugacucagagag

SEQ ID NO: 884597 - RNA, 22 nt, Human
aauucaaauuacaauaguuguu

SEQ ID NO: 884598 - RNA, 22 nt, Human
cucuguguucagccuagcagaa

SEQ ID NO: 884599 - RNA, 22 nt, Human
aaagaauagccuuuguccaaau

SEQ ID NO: 884600 - RNA, 21 nt, Human
uggcagacuagaguauagaug

SEQ ID NO: 884601 - RNA, 22 nt, Human
aaaaguaauugcgguuuuugcu

SEQ ID NO: 884602 - RNA, 22 nt, Human
ugagaauuugcauuucuaacaa

SEQ ID NO: 884603 - RNA, 22 nt, Human
aggcagucuaguccccaggcaa

SEQ ID NO: 884604 - RNA, 22 nt, Human
aggucauuuccuuagaggcaga

SEQ ID NO: 884605 - RNA, 22 nt, Human
cuggcagcagcugguaccuuau

SEQ ID NO: 884606 - RNA, 22 nt, Human
guugaaaauacagauuccuagg

SEQ ID NO: 884607 - RNA, 22 nt, Human
ccaggguaccccaagggcaggu

SEQ ID NO: 884608 - RNA, 22 nt, Human
uuuugugagcugagaaauguau

SEQ ID NO: 884609 - RNA, 22 nt, Human
agguauauuuuguauauacucu

SEQ ID NO: 884610 - RNA, 22 nt, Human
uauguauucucagauuuacuaa

SEQ ID NO: 884611 - RNA, 22 nt, Human
cucaggccugaguggcaguccc

SEQ ID NO: 884612 - RNA, 22 nt, Human
aauguuccaccaacauuuggga

SEQ ID NO: 884613 - RNA, 22 nt, Human
uuucuagaucaaacuuuuauau

SEQ ID NO: 884614 - RNA, 19 nt, Human
cacaugagggcugagggac

SEQ ID NO: 884615 - RNA, 22 nt, Human
uuucaguuugaaggaaaggcca

SEQ ID NO: 884616 - RNA, 22 nt, Human
uaugcauuauacauuaauuucu

SEQ ID NO: 884617 - RNA, 22 nt, Human
acuugagagaaucggaggaguc

SEQ ID NO: 884618 - RNA, 22 nt, Human
gagguggcacugugaggagcac

SEQ ID NO: 884619 - RNA, 22 nt, Human
agggagcuucuacuucaaggca

SEQ ID NO: 884620 - RNA, 22 nt, Human
uguuucaugauugcugucauuu

SEQ ID NO: 884621 - RNA, 22 nt, Human
gcagagccagaauggccaggac

SEQ ID NO: 884622 - RNA, 22 nt, Human
agacacaguauaagcacaacaa

SEQ ID NO: 884623 - RNA, 22 nt, Human
cugccugugcaugcagucagaa

SEQ ID NO: 884624 - RNA, 22 nt, Human
uuggcugcuggucuuuggauau

SEQ ID NO: 884625 - RNA, 22 nt, Human
gaugucugucugagccgcugga

SEQ ID NO: 884626 - RNA, 22 nt, Human
agcuuugugacuuugagcuagu

SEQ ID NO: 884627 - RNA, 22 nt, Human
ugcaucaaauucugaaauuagc

SEQ ID NO: 884628 - RNA, 22 nt, Human
acaugguugaaugcuuuauuug

SEQ ID NO: 884629 - RNA, 22 nt, Human
agcccugauuaaccuuggcuuu

SEQ ID NO: 884630 - RNA, 22 nt, Human
auguuacacauaggcauaaaug

SEQ ID NO: 884631 - RNA, 22 nt, Human
ucaggagaaucagggcuguccu

SEQ ID NO: 884632 - RNA, 22 nt, Human
auuuguguuguauuaagcugcu

SEQ ID NO: 884633 - RNA, 22 nt, Human
uuaaauuagucaagcuucucug

SEQ ID NO: 884634 - RNA, 23 nt, Human
ucugccagugugugccaggagcc

SEQ ID NO: 884635 - RNA, 20 nt, Human
auguuuuauaaaagaacggg

SEQ ID NO: 884636 - RNA, 22 nt, Human
uaagaauuaucucauggauaau

SEQ ID NO: 884637 - RNA, 22 nt, Human
ggcuggcagugugagagaggga

SEQ ID NO: 884638 - RNA, 22 nt, Human
gccuggcccagggcucuuguug

SEQ ID NO: 884639 - RNA, 22 nt, Human
auguauguuaguguauuaucua

SEQ ID NO: 884640 - RNA, 22 nt, Human
uucauucccuuauauuagcauu

SEQ ID NO: 884641 - RNA, 22 nt, Human
aauggcagaggcaaagauggua

SEQ ID NO: 884642 - RNA, 22 nt, Human
auuggucuggggaaaugaagag

SEQ ID NO: 884643 - RNA, 19 nt, Human
gcagcugugggaagagcca

SEQ ID NO: 884644 - RNA, 22 nt, Human
cagaggucaagaucugaaguga

SEQ ID NO: 884645 - RNA, 22 nt, Human
agcuguugaaaaugguguccua

SEQ ID NO: 884646 - RNA, 22 nt, Human
ugagccuggggccugggcagcg

SEQ ID NO: 884647 - RNA, 22 nt, Human
ccagagucccuugcagcucagu

SEQ ID NO: 884648 - RNA, 22 nt, Human
uuccaaggcuagguuguaaagg

SEQ ID NO: 884649 - RNA, 22 nt, Human
ucagggcacaggccuguggguu

SEQ ID NO: 884650 - RNA, 22 nt, Human
agaggucagauuucuccuggug

SEQ ID NO: 884651 - RNA, 22 nt, Human
ucuucaaagaagccuuggauua

SEQ ID NO: 884652 - RNA, 23 nt, Human
gggcuucauuuuaauucagcugc

SEQ ID NO: 884653 - RNA, 22 nt, Human
cagugcagucaaggaagaacca

SEQ ID NO: 884654 - RNA, 22 nt, Human
acaggacauggcuucugugacg

SEQ ID NO: 884655 - RNA, 22 nt, Human
uggcccagggcacagcagggag

SEQ ID NO: 884656 - RNA, 22 nt, Human
uguauuuucagaguggcauuuc

SEQ ID NO: 884657 - RNA, 22 nt, Human
cugucacugaugggcucaccag

SEQ ID NO: 884658 - RNA, 16 nt, Human
ggggaaggcaagaggg

SEQ ID NO: 884659 - RNA, 22 nt, Human
gcgugugugauaugccucugca

SEQ ID NO: 884660 - RNA, 22 nt, Human
ucaggaaaauacugcuuaucca

SEQ ID NO: 884661 - RNA, 22 nt, Human
aguccuggguccagcagguccu

SEQ ID NO: 884662 - RNA, 19 nt, Human
cuccuggcucugucauuuu

SEQ ID NO: 884663 - RNA, 22 nt, Human
ugucuccaugugauaguggccu

SEQ ID NO: 884664 - RNA, 22 nt, Human
uugauacauuuuuaggauaaac

SEQ ID NO: 884665 - RNA, 22 nt, Human
gaguccagacaccauaccugau

SEQ ID NO: 884666 - RNA, 22 nt, Human
aagagucauagagacauugauu

SEQ ID NO: 884667 - RNA, 22 nt, Human
uauuagcaguuguaugugucug

SEQ ID NO: 884668 - RNA, 22 nt, Human
uucucugugagggugcuggauu

SEQ ID NO: 884669 - RNA, 22 nt, Human
agaguuaaaugaaaugguaugu

SEQ ID NO: 884670 - RNA, 22 nt, Human
ccaggaguuggagguugcagug

SEQ ID NO: 884671 - RNA, 22 nt, Human
ggcagauguugcagugagcaga

SEQ ID NO: 884672 - RNA, 22 nt, Human
ucucaucucaaauuguaauccc

SEQ ID NO: 884673 - RNA, 22 nt, Human
ucagucccuuaaagguggcagc

SEQ ID NO: 884674 - RNA, 22 nt, Human
uggcccagggucuacagccuca

SEQ ID NO: 884675 - RNA, 22 nt, Human
uggugggaguccgcugugcugc

SEQ ID NO: 884676 - RNA, 22 nt, Human
gaguccaguguuuaccaggggu

SEQ ID NO: 884677 - RNA, 22 nt, Human
aguauuuguugauugauaugaa

SEQ ID NO: 884678 - RNA, 22 nt, Human
cuaguaaaguacucaaauagcc

SEQ ID NO: 884679 - RNA, 21 nt, Human
aaguggagaagaaaagcugga

SEQ ID NO: 884680 - RNA, 22 nt, Human
guccuuggagguguggaaucug

SEQ ID NO: 884681 - RNA, 22 nt, Human
gggcagguacuggguggugagc

SEQ ID NO: 884682 - RNA, 22 nt, Human
agcaaggcucuuaaugcccaaa

SEQ ID NO: 884683 - RNA, 22 nt, Human
ggagaugcuauguaguuugguu

SEQ ID NO: 884684 - RNA, 18 nt, Human
ugaaacaagaauggugca

SEQ ID NO: 884685 - RNA, 22 nt, Human
uggcuggaauauguggagacca

SEQ ID NO: 884686 - RNA, 22 nt, Human
uccaggccucuagccccuaucu

SEQ ID NO: 884687 - RNA, 22 nt, Human
agcagugggugguuuuugagca

SEQ ID NO: 884688 - RNA, 19 nt, Human
ugcagcuguaugagcuuaa

SEQ ID NO: 884689 - RNA, 22 nt, Human
gaaccucuuuagugcauccuuc

SEQ ID NO: 884690 - RNA, 22 nt, Human
ggcuggcagaagugugcuggcu

SEQ ID NO: 884691 - RNA, 22 nt, Human
gucuucugcccaggcagacgga

SEQ ID NO: 884692 - RNA, 22 nt, Human
cugguuuugcccagucuugcac

SEQ ID NO: 884693 - RNA, 22 nt, Human
agcuggcuucucugcagacauu

SEQ ID NO: 884694 - RNA, 22 nt, Human
uccauucauucagguauuuagu

SEQ ID NO: 884695 - RNA, 22 nt, Human
uuauuguagcacuuuggcagug

SEQ ID NO: 884696 - RNA, 22 nt, Human
cagaugaacugugacugaaaau

SEQ ID NO: 884697 - RNA, 19 nt, Human
auuaacaucaguguuggcc

SEQ ID NO: 884698 - RNA, 22 nt, Human
auaacauggaguuugucauuua

SEQ ID NO: 884699 - RNA, 22 nt, Human
ucaugagucugcaaauuaugga

SEQ ID NO: 884700 - RNA, 22 nt, Human
auggcagcccacgauggcaaug

SEQ ID NO: 884701 - RNA, 22 nt, Human
uugcaaagugucaugcaaagua

SEQ ID NO: 884702 - RNA, 22 nt, Human
auguacagccacuucacaguua

SEQ ID NO: 884703 - RNA, 22 nt, Human
aagaauguucaacgcuuuuuug

SEQ ID NO: 884704 - RNA, 23 nt, Human
ccaggcucuuucaccugcuauuc

SEQ ID NO: 884705 - RNA, 22 nt, Human
cugggcuggacacacuuaaccu

SEQ ID NO: 884706 - RNA, 22 nt, Human
cugcuggugcagaguggggcug

SEQ ID NO: 884707 - RNA, 22 nt, Human
cuggcagguccagcuggacuca

SEQ ID NO: 884708 - RNA, 22 nt, Human
uuccugguaacaaucucaaagu

SEQ ID NO: 884709 - RNA, 22 nt, Human
ugaagccauaggacagaggaua

SEQ ID NO: 884710 - RNA, 22 nt, Human
ggcuguggccagcggggcugag

SEQ ID NO: 884711 - RNA, 22 nt, Human
ucccucugcuagugcuugagcu

SEQ ID NO: 884712 - RNA, 20 nt, Human
aaaauggccuuguauuaaaa

SEQ ID NO: 884713 - RNA, 22 nt, Human
agccagcuaagggaagcaugau

SEQ ID NO: 884714 - RNA, 22 nt, Human
aagcucugauacuuccuaccug

SEQ ID NO: 884715 - RNA, 22 nt, Human
uacugaaagucuguggguccuc

SEQ ID NO: 884716 - RNA, 23 nt, Human
ucugagggagugggcaguggcac

SEQ ID NO: 884717 - RNA, 22 nt, Human
ccucagaauaguccucagauca

SEQ ID NO: 884718 - RNA, 22 nt, Human
gaaugaagcaggucacacaguu

SEQ ID NO: 884719 - RNA, 22 nt, Human
ggcagcaggcgacuucccuauu

SEQ ID NO: 884720 - RNA, 22 nt, Human
aaacacugaagaccuaucuggu

SEQ ID NO: 884721 - RNA, 22 nt, Human
acauaacaaucauaggacauag

SEQ ID NO: 884722 - RNA, 22 nt, Human
caggccaauaucacaugcuaug

SEQ ID NO: 884723 - RNA, 22 nt, Human
aacaugaugugaagcaugaacu

SEQ ID NO: 884724 - RNA, 22 nt, Human
uuccaacuuugaaaauguuaug

SEQ ID NO: 884725 - RNA, 22 nt, Human
aaacuguaaauacuaguaagug

SEQ ID NO: 884726 - RNA, 22 nt, Human
uggcucaguagcagugugguca

SEQ ID NO: 884727 - RNA, 22 nt, Human
agcucagagauaaucaagagac

SEQ ID NO: 884728 - RNA, 22 nt, Human
gccauuuugaaaaccguugcua

SEQ ID NO: 884729 - RNA, 22 nt, Human
gaaaggagaggguuaaggagcu

SEQ ID NO: 884730 - RNA, 17 nt, Human
aaucagauuucugagga

SEQ ID NO: 884731 - RNA, 22 nt, Human
uuccaagaagucaacagguagu

SEQ ID NO: 884732 - RNA, 22 nt, Human
ugaacagauggcccagcagagg

SEQ ID NO: 884733 - RNA, 22 nt, Human
uuuguugugaacagaauaauau

SEQ ID NO: 884734 - RNA, 22 nt, Human
uacagauuuggggaguaaaguu

SEQ ID NO: 884735 - RNA, 22 nt, Human
augucuuucaaauucugccuag

SEQ ID NO: 884736 - RNA, 22 nt, Human
gugcugaauuugagaaacucug

SEQ ID NO: 884737 - RNA, 22 nt, Human
uuacaguaacauuuucagucug

SEQ ID NO: 884738 - RNA, 22 nt, Human
gaugugucccuuucaacucaga

SEQ ID NO: 884739 - RNA, 22 nt, Human
agggccagaguacaucagggcu

SEQ ID NO: 884740 - RNA, 22 nt, Human
uaacugaaaaucccucuucucc

SEQ ID NO: 884741 - RNA, 22 nt, Human
caggccuuaguaggugcucccu

SEQ ID NO: 884742 - RNA, 22 nt, Human
acugccugugucccuucagugc

SEQ ID NO: 884743 - RNA, 22 nt, Human
guauucauuuauuuacucaucc

SEQ ID NO: 884744 - RNA, 22 nt, Human
cccaggaggcagagguugcagu

SEQ ID NO: 884745 - RNA, 22 nt, Human
gagggggcgugcaaggcuccgc

SEQ ID NO: 884746 - RNA, 22 nt, Human
agcaggcaccagggcucguccu

SEQ ID NO: 884747 - RNA, 22 nt, Human
uguccaggcggccuugccuguu

SEQ ID NO: 884748 - RNA, 22 nt, Human
acucaucaacuguuacaaaugu

SEQ ID NO: 884749 - RNA, 22 nt, Human
cagugcuggaggggugcuugca

SEQ ID NO: 884750 - RNA, 22 nt, Human
uucaaaucacuuuggagcuuaa

SEQ ID NO: 884751 - RNA, 22 nt, Human
gaggagaagcuauuggaaggac

SEQ ID NO: 884752 - RNA, 22 nt, Human
acagagcaacuuuauuucaugg

SEQ ID NO: 884753 - RNA, 22 nt, Human
ccagccaugcacaaaccaugag

SEQ ID NO: 884754 - RNA, 22 nt, Human
accuucuggucugccugacagc

SEQ ID NO: 884755 - RNA, 22 nt, Human
uuguaacacucccacucuucuu

SEQ ID NO: 884756 - RNA, 22 nt, Human
uauuugcuuuugugccacagau

SEQ ID NO: 884757 - RNA, 22 nt, Human
uggccaguagauaggcaggcaa

SEQ ID NO: 884758 - RNA, 22 nt, Human
uucaugaauggaaucaaugcuc

SEQ ID NO: 884759 - RNA, 22 nt, Human
acugagacuuuguugaguucuu

SEQ ID NO: 884760 - RNA, 21 nt, Human
ggcaggauggcaguggacccc

SEQ ID NO: 884761 - RNA, 22 nt, Human
cucacauaccuguuuucccuuu

SEQ ID NO: 884762 - RNA, 22 nt, Human
guagaugagcucacaugaccuu

SEQ ID NO: 884763 - RNA, 22 nt, Human
uccagggcaccagcgucccccu

SEQ ID NO: 884764 - RNA, 22 nt, Human
ugccugcucuuaccacucuccc

SEQ ID NO: 884765 - RNA, 21 nt, Human
uaccaagaaguuugggaaagc

SEQ ID NO: 884766 - RNA, 22 nt, Human
ugcuccugcugcaugcaucucc

SEQ ID NO: 884767 - RNA, 22 nt, Human
cacuugaaaaucagaggaaauu

SEQ ID NO: 884768 - RNA, 22 nt, Human
uucugucucuguguuuacauua

SEQ ID NO: 884769 - RNA, 22 nt, Human
ccagggcaggagaaagacucac

SEQ ID NO: 884770 - RNA, 22 nt, Human
ucugggucuaucccaugccuuu

SEQ ID NO: 884771 - RNA, 22 nt, Human
cagcagccacuagagggcucac

SEQ ID NO: 884772 - RNA, 22 nt, Human
uuucuguacacccacuauucau

SEQ ID NO: 884773 - RNA, 22 nt, Human
ugcugcauuugcaguccuuuaa

SEQ ID NO: 884774 - RNA, 19 nt, Human
aucagcaagguaggaugug

SEQ ID NO: 884775 - RNA, 22 nt, Human
agcagcugguaggaguggccac

SEQ ID NO: 884776 - RNA, 22 nt, Human
agucagacauaauucuaacauu

SEQ ID NO: 884777 - RNA, 22 nt, Human
aaacauuuuucuaggucuuggu

SEQ ID NO: 884778 - RNA, 22 nt, Human
gcccucugcacagcucugagca

SEQ ID NO: 884779 - RNA, 22 nt, Human
cugcagggcuguggucuggagu

SEQ ID NO: 884780 - RNA, 22 nt, Human
gcuagcaaguggcauagcaggg

SEQ ID NO: 884781 - RNA, 22 nt, Human
acauaaaggugacuaacaucuu

SEQ ID NO: 884782 - RNA, 22 nt, Human
ugguguguacauuuuugcuucu

SEQ ID NO: 884783 - RNA, 23 nt, Human
ucuccaggccuuacuccaggccu

SEQ ID NO: 884784 - RNA, 21 nt, Human
guuauuuuaagugagcuuugc

SEQ ID NO: 884785 - RNA, 22 nt, Human
aagggagacccaccguccugga

SEQ ID NO: 884786 - RNA, 22 nt, Human
auuucuuucuggccacgguuuu

SEQ ID NO: 884787 - RNA, 22 nt, Human
gggccuggugcuucugacuccu

SEQ ID NO: 884788 - RNA, 22 nt, Human
ccagcagcucagcuacugguca

SEQ ID NO: 884789 - RNA, 23 nt, Human
ucacugcuacucagccugagauu

SEQ ID NO: 884790 - RNA, 19 nt, Human
agcagagcagggccguggg

SEQ ID NO: 884791 - RNA, 22 nt, Human
gauguucagugguugaccauaa

SEQ ID NO: 884792 - RNA, 22 nt, Human
gagauggaaucuguguggaggg

SEQ ID NO: 884793 - RNA, 22 nt, Human
uaacagaagagcaggcagcccu

SEQ ID NO: 884794 - RNA, 22 nt, Human
auaguuuacaaaaaugaugcau

SEQ ID NO: 884795 - RNA, 22 nt, Human
cuucuucuggacaggcagcucc

SEQ ID NO: 884796 - RNA, 22 nt, Human
ggccucuggugccugaagcgcc

SEQ ID NO: 884797 - RNA, 22 nt, Human
gacccuguggcucuguggcaga

SEQ ID NO: 884798 - RNA, 22 nt, Human
uugaggcccggcaggccgagcg

SEQ ID NO: 884799 - RNA, 22 nt, Human
ucuacuuuucccuauacaguuu

SEQ ID NO: 884800 - RNA, 22 nt, Human
uuucucaaguucagauauuuga

SEQ ID NO: 884801 - RNA, 22 nt, Human
ugugucaaauuguuuuacacag

SEQ ID NO: 884802 - RNA, 22 nt, Human
uagcugugacguaucucuaugg

SEQ ID NO: 884803 - RNA, 22 nt, Human
uguuaacacaauucuggagaga

SEQ ID NO: 884804 - RNA, 22 nt, Human
ggucacaagguacuguaagaaa

SEQ ID NO: 884805 - RNA, 22 nt, Human
cugaaauaguuucauagaacuu

SEQ ID NO: 884806 - RNA, 23 nt, Human
aucucucugguggucacagucag

SEQ ID NO: 884807 - RNA, 22 nt, Human
acugaugucuggggcagagucu

SEQ ID NO: 884808 - RNA, 22 nt, Human
ugcugugcuccauugucuucac

SEQ ID NO: 884809 - RNA, 21 nt, Human
acauggaagagaaauuaacca

SEQ ID NO: 884810 - RNA, 22 nt, Human
ggugugggagagauucuuuccu

SEQ ID NO: 884811 - RNA, 22 nt, Human
agcaaugugaccccugacagca

SEQ ID NO: 884812 - RNA, 22 nt, Human
cagcugccaugacauguccugc

SEQ ID NO: 884813 - RNA, 22 nt, Human
gggcuuggcacaugggcucagc

SEQ ID NO: 884814 - RNA, 22 nt, Human
agguucccagagauagagcugu

SEQ ID NO: 884815 - RNA, 22 nt, Human
cuccuccacagaccuacugaau

SEQ ID NO: 884816 - RNA, 22 nt, Human
caggggcucuaaugcaugauca

SEQ ID NO: 884817 - RNA, 22 nt, Human
cacagcagaaauaugaaggcag

SEQ ID NO: 884818 - RNA, 23 nt, Human
aagguguuuguuuucagaaagca

SEQ ID NO: 884819 - RNA, 22 nt, Human
aacaguguuuuucuucagcacu

SEQ ID NO: 884820 - RNA, 22 nt, Human
uaaucacagaaacagacuguuu

SEQ ID NO: 884821 - RNA, 23 nt, Human
ucagugauguugaaccuagcagu

SEQ ID NO: 884822 - RNA, 22 nt, Human
uaucuguauccccaucuagcua

SEQ ID NO: 884823 - RNA, 22 nt, Human
caucagugagccccuugaugag

SEQ ID NO: 884824 - RNA, 22 nt, Human
ucaggaguuucagguguaagug

SEQ ID NO: 884825 - RNA, 22 nt, Human
gcaaggaccuuugagcgugcca

SEQ ID NO: 884826 - RNA, 22 nt, Human
cuauuuugccugccuagaaauc

SEQ ID NO: 884827 - RNA, 22 nt, Human
ugcugguggagaaaguggaggu

SEQ ID NO: 884828 - RNA, 22 nt, Human
auaaaccagaaguaaaagcuac

SEQ ID NO: 884829 - RNA, 22 nt, Human
caggucugcagacagggccaug

SEQ ID NO: 884830 - RNA, 22 nt, Human
auaacagauacucucugugagg

SEQ ID NO: 884831 - RNA, 22 nt, Human
gcauggaauucccuuaugggcc

SEQ ID NO: 884832 - RNA, 22 nt, Human
uccagcagugcucuagagcgug

SEQ ID NO: 884833 - RNA, 22 nt, Human
agacaggaugcauacucuuggu

SEQ ID NO: 884834 - RNA, 22 nt, Human
agcagggacugagccaguggga

SEQ ID NO: 884835 - RNA, 22 nt, Human
ggcagugaaugaaacagaggcu

SEQ ID NO: 884836 - RNA, 22 nt, Human
ggcuucagauuucucaguuguu

SEQ ID NO: 884837 - RNA, 22 nt, Human
gggaaauugucaacacucucaa

SEQ ID NO: 884838 - RNA, 22 nt, Human
ucugcagcuuuuugguggggug

SEQ ID NO: 884839 - RNA, 22 nt, Human
uggcaagcuggguuggguagcc

SEQ ID NO: 884840 - RNA, 22 nt, Human
gggaaauuguaacaagucuguu

SEQ ID NO: 884841 - RNA, 22 nt, Human
cuaaacaugaacuacauuuagg

SEQ ID NO: 884842 - RNA, 22 nt, Human
aacaguuuauguaaauguccag

SEQ ID NO: 884843 - RNA, 22 nt, Human
ucugaggcaaacagaggagugu

SEQ ID NO: 884844 - RNA, 22 nt, Human
gugugucuuuauaagaagaggg

SEQ ID NO: 884845 - RNA, 22 nt, Human
cuagggacugggaccuuaguua

SEQ ID NO: 884846 - RNA, 20 nt, Human
ugcuggcacggguggacucc

SEQ ID NO: 884847 - RNA, 20 nt, Human
ucucuuuuagcuuacagcug

SEQ ID NO: 884848 - RNA, 21 nt, Human
ccuggcuccagaacuuccggu

SEQ ID NO: 884849 - RNA, 22 nt, Human
gcagcuguguaaugagcccaca

SEQ ID NO: 884850 - RNA, 22 nt, Human
uucauaaguuugucacugaugu

SEQ ID NO: 884851 - RNA, 22 nt, Human
caaucucuggugcuucugagag

SEQ ID NO: 884852 - RNA, 22 nt, Human
acauuucagugagcuauugaag

SEQ ID NO: 884853 - RNA, 17 nt, Human
ugcacaagagacaauag

SEQ ID NO: 884854 - RNA, 21 nt, Human
auuuggucaaggacaacucug

SEQ ID NO: 884855 - RNA, 22 nt, Human
gccuggagaagauggaacuagc

SEQ ID NO: 884856 - RNA, 22 nt, Human
agucccaggcagccgagccggu

SEQ ID NO: 884857 - RNA, 22 nt, Human
aaugcauaaugguuugugacaa

SEQ ID NO: 884858 - RNA, 22 nt, Human
caucaaagcuuuuuucuguguu

SEQ ID NO: 884859 - RNA, 22 nt, Human
uuuguucaaaaauuauaagaua

SEQ ID NO: 884860 - RNA, 22 nt, Human
cucuuguuuccuuucugcaguc

SEQ ID NO: 884861 - RNA, 22 nt, Human
acucagcucaggagcuggcugg

SEQ ID NO: 884862 - RNA, 22 nt, Human
cuucaugccuguuuuuaaauuu

SEQ ID NO: 884863 - RNA, 17 nt, Human
agcccccacucccaagu

SEQ ID NO: 884864 - RNA, 22 nt, Human
ugcuucuaaucuacugcauuag

SEQ ID NO: 884865 - RNA, 22 nt, Human
uguggcauggcagaagggcaca

SEQ ID NO: 884866 - RNA, 22 nt, Human
uuuaaaauuuagaccucuccac

SEQ ID NO: 884867 - RNA, 22 nt, Human
ucccagaaaaaggaggcuauga

SEQ ID NO: 884868 - RNA, 22 nt, Human
ggcucugccgugugcucacaug

SEQ ID NO: 884869 - RNA, 22 nt, Human
ucuauacaaguuucacuuugac

SEQ ID NO: 884870 - RNA, 22 nt, Human
caaauggcuggcauccuucuac

SEQ ID NO: 884871 - RNA, 17 nt, Human
uagcacagugccuggua

SEQ ID NO: 884872 - RNA, 22 nt, Human
ugcacugauccugaccagugaa

SEQ ID NO: 884873 - RNA, 22 nt, Human
ggacaacacuucauuccagcua

SEQ ID NO: 884874 - RNA, 20 nt, Human
cacccucccagcaccuaugc

SEQ ID NO: 884875 - RNA, 19 nt, Human
uccaguuuggcaggaagac

SEQ ID NO: 884876 - RNA, 22 nt, Human
caaacuuucaguuauaacauga

SEQ ID NO: 884877 - RNA, 22 nt, Human
ugaagccagucaauguuaaguu

SEQ ID NO: 884878 - RNA, 22 nt, Human
auacucuuuaugacauuccagc

SEQ ID NO: 884879 - RNA, 22 nt, Human
uuggcaacacauggaaaaauuu

SEQ ID NO: 884880 - RNA, 22 nt, Human
cauuuaaagguuguggguaaaa

SEQ ID NO: 884881 - RNA, 22 nt, Human
ucccacagugguacagcccuga

SEQ ID NO: 884882 - RNA, 22 nt, Human
aaaacaguuauaaacagaguca

SEQ ID NO: 884883 - RNA, 22 nt, Human
uuggaagcaguguacacuguac

SEQ ID NO: 884884 - RNA, 22 nt, Human
guuaugaaauaaauauagauca

SEQ ID NO: 884885 - RNA, 22 nt, Human
ucucuguggagcaguguguuca

SEQ ID NO: 884886 - RNA, 22 nt, Human
uuucugugaauuauaaaauuug

SEQ ID NO: 884887 - RNA, 22 nt, Human
agagcacaaauuaguuggucuu

SEQ ID NO: 884888 - RNA, 22 nt, Human
ggcuaggcucaccuggagaguu

SEQ ID NO: 884889 - RNA, 20 nt, Human
cugcaucagcggccgcgucu

SEQ ID NO: 884890 - RNA, 22 nt, Human
ggccuugggauguggcugcagc

SEQ ID NO: 884891 - RNA, 22 nt, Human
auagaaccacccagagccuuuu

SEQ ID NO: 884892 - RNA, 22 nt, Human
acuuuggaauaagcuauauaac

SEQ ID NO: 884893 - RNA, 22 nt, Human
uuucaguguuaugacuuucauu

SEQ ID NO: 884894 - RNA, 22 nt, Human
agaauaguggcaaugacugcac

SEQ ID NO: 884895 - RNA, 20 nt, Human
ugugugcacacaugacauuc

SEQ ID NO: 884896 - RNA, 22 nt, Human
caggcccugggcaggaucagcc

SEQ ID NO: 884897 - RNA, 22 nt, Human
aggagggagaugcccauccugg

SEQ ID NO: 884898 - RNA, 22 nt, Human
auugacagaaaagauguuggau

SEQ ID NO: 884899 - RNA, 17 nt, Human
gcuugggcugccuguug

SEQ ID NO: 884900 - RNA, 22 nt, Human
uaaucacaauucagaugucuua

SEQ ID NO: 884901 - RNA, 22 nt, Human
accaggcccaccgcaugcuccu

SEQ ID NO: 884902 - RNA, 22 nt, Human
ucguguguauucccucuccuuc

SEQ ID NO: 884903 - RNA, 22 nt, Human
cuguuaaucugcuugcaugaug

SEQ ID NO: 884904 - RNA, 22 nt, Human
ccuggcucagcagcucuuucuc

SEQ ID NO: 884905 - RNA, 22 nt, Human
uauauuguaggugcuauuugaa

SEQ ID NO: 884906 - RNA, 22 nt, Human
agcccuggggugcagaaccaug

SEQ ID NO: 884907 - RNA, 22 nt, Human
guuucaaaaugaugcuguaacu

SEQ ID NO: 884908 - RNA, 22 nt, Human
ucuguggccuccuuccacuuac

SEQ ID NO: 884909 - RNA, 22 nt, Human
ccuuuguauuuaccuagucuca

SEQ ID NO: 884910 - RNA, 23 nt, Human
gaggcagcuccugcagugcccug

SEQ ID NO: 884911 - RNA, 22 nt, Human
aucugguuuuggcugugucccu

SEQ ID NO: 884912 - RNA, 22 nt, Human
aauauagcucacuauaccaugg

SEQ ID NO: 884913 - RNA, 22 nt, Human
aaaauuauucauggcuuuugga

SEQ ID NO: 884914 - RNA, 22 nt, Human
ccacccugccuugggccaguga

SEQ ID NO: 884915 - RNA, 22 nt, Human
ccuccccacagcccaggagacu

SEQ ID NO: 884916 - RNA, 22 nt, Human
uagagagguuugaauuggcugc

SEQ ID NO: 884917 - RNA, 22 nt, Human
uuaaaaucuaaagcaguugucu

SEQ ID NO: 884918 - RNA, 22 nt, Human
agcuaguuaaacuaugaauaca

SEQ ID NO: 884919 - RNA, 22 nt, Human
cugaggugugaaaugguggcaa

SEQ ID NO: 884920 - RNA, 22 nt, Human
gccccaggauaaauuuguaaga

SEQ ID NO: 884921 - RNA, 22 nt, Human
uguggugagaaacugguagauu

SEQ ID NO: 884922 - RNA, 20 nt, Human
uuggggcauccaccgaaugg

SEQ ID NO: 884923 - RNA, 22 nt, Human
aaucagaacuucucaggguggg

SEQ ID NO: 884924 - RNA, 22 nt, Human
cugaggcugaagagggccuacg

SEQ ID NO: 884925 - RNA, 22 nt, Human
ugaaaugaagggcuuguucugg

SEQ ID NO: 884926 - RNA, 22 nt, Human
auguaaacuacugacuacacua

SEQ ID NO: 884927 - RNA, 22 nt, Human
agagaagagcaaugauaaauuu

SEQ ID NO: 884928 - RNA, 22 nt, Human
gccuggcugguagagggggcuc

SEQ ID NO: 884929 - RNA, 22 nt, Human
aguggcagggcuggcugcugca

SEQ ID NO: 884930 - RNA, 22 nt, Human
uuuccucuucuucccaugucau

SEQ ID NO: 884931 - RNA, 22 nt, Human
aagucuaguauccuucuugacu

SEQ ID NO: 884932 - RNA, 22 nt, Human
agagugaaguucaucgugcagc

SEQ ID NO: 884933 - RNA, 22 nt, Human
gagaaccucuccacaagucugg

SEQ ID NO: 884934 - RNA, 22 nt, Human
ucacagaaugucuagcauaauu

SEQ ID NO: 884935 - RNA, 22 nt, Human
augcaagagggaaaaggaaaua

SEQ ID NO: 884936 - RNA, 22 nt, Human
aguuauaccuuauacacauaug

SEQ ID NO: 884937 - RNA, 22 nt, Human
gucccaggcagagucaggaggg

SEQ ID NO: 884938 - RNA, 22 nt, Human
uggagugaaguaaagaggacaa

SEQ ID NO: 884939 - RNA, 22 nt, Human
cugcgugcauuaauauuuccuu

SEQ ID NO: 884940 - RNA, 22 nt, Human
ccaguacuugcuaccucaauug

SEQ ID NO: 884941 - RNA, 22 nt, Human
auuuguucucauaaagaaugaa

SEQ ID NO: 884942 - RNA, 22 nt, Human
augcaagucuuaauaguuuagg

SEQ ID NO: 884943 - RNA, 22 nt, Human
cuccuucccaugagugugggca

SEQ ID NO: 884944 - RNA, 22 nt, Human
ucagaggaacacuguuucaugc

SEQ ID NO: 884945 - RNA, 23 nt, Human
uggccagguagaggagguaguga

SEQ ID NO: 884946 - RNA, 22 nt, Human
uuaaguacaggguuagugacgg

SEQ ID NO: 884947 - RNA, 22 nt, Human
gacccuuugacuugugacauua

SEQ ID NO: 884948 - RNA, 22 nt, Human
ccuggaaaaugccacuuucaca

SEQ ID NO: 884949 - RNA, 22 nt, Human
gcaggcugcugagauccuuagg

SEQ ID NO: 884950 - RNA, 21 nt, Human
uccagccuuucccucacuucc

SEQ ID NO: 884951 - RNA, 21 nt, Human
uccaaaccugucucuggcucu

SEQ ID NO: 884952 - RNA, 22 nt, Human
accugaaacucaacuuuaucuc

SEQ ID NO: 884953 - RNA, 22 nt, Human
uuucauguuggauacuguuuca

SEQ ID NO: 884954 - RNA, 22 nt, Human
cacaaugucugguaggccacuu

SEQ ID NO: 884955 - RNA, 22 nt, Human
ucaggagggaguguggauagag

SEQ ID NO: 884956 - RNA, 22 nt, Human
gagucaugcacugucuuucucc

SEQ ID NO: 884957 - RNA, 22 nt, Human
cccaggcuucccaaucagaagg

SEQ ID NO: 884958 - RNA, 22 nt, Human
agcagcauaucagagaaaguca

SEQ ID NO: 884959 - RNA, 22 nt, Human
aggcccuaauccaacaugacug

SEQ ID NO: 884960 - RNA, 22 nt, Human
ugacagaugaagcuggggacca

SEQ ID NO: 884961 - RNA, 22 nt, Human
aggcuucaaggaccugagggaa

SEQ ID NO: 884962 - RNA, 22 nt, Human
gucacacacauuucuuuggugc

SEQ ID NO: 884963 - RNA, 22 nt, Human
cccaggaggcgcagguugcggu

SEQ ID NO: 884964 - RNA, 17 nt, Human
ugaaaucagcacccagg

SEQ ID NO: 884965 - RNA, 22 nt, Human
cuuccuggaugaagcccagcau

SEQ ID NO: 884966 - RNA, 22 nt, Human
uggagccuguucugagaagccg

SEQ ID NO: 884967 - RNA, 22 nt, Human
ugugcauguauugauuuguacc

SEQ ID NO: 884968 - RNA, 22 nt, Human
uaagaacagugucugucucaca

SEQ ID NO: 884969 - RNA, 22 nt, Human
cguagguggcucagcaccuggg

SEQ ID NO: 884970 - RNA, 22 nt, Human
cuaggguggauuugugcagagu

SEQ ID NO: 884971 - RNA, 22 nt, Human
gaacacaguuuagaaaaugcug

SEQ ID NO: 884972 - RNA, 22 nt, Human
agaucaaaucugggauuucuaa

SEQ ID NO: 884973 - RNA, 22 nt, Human
gugccuggagcuaauguguaua

SEQ ID NO: 884974 - RNA, 22 nt, Human
cccagggcugcagauggaggcu

SEQ ID NO: 884975 - RNA, 22 nt, Human
uucauguucauauguguauauc

SEQ ID NO: 884976 - RNA, 22 nt, Human
uuuguuuugaacuagcucagaa

SEQ ID NO: 884977 - RNA, 22 nt, Human
ucaugcucaucauuagagugac

SEQ ID NO: 884978 - RNA, 22 nt, Human
cagcccacuucccagcaccuac

SEQ ID NO: 884979 - RNA, 22 nt, Human
cuucuaauucuuauguaagcuu

SEQ ID NO: 884980 - RNA, 22 nt, Human
gugauucugauauagcuaaagu

SEQ ID NO: 884981 - RNA, 22 nt, Human
uuuucaaagacuggaggcugau

SEQ ID NO: 884982 - RNA, 20 nt, Human
guuuuucuugggcgagcuau

SEQ ID NO: 884983 - RNA, 22 nt, Human
gccuggcagggcccggacggca

SEQ ID NO: 884984 - RNA, 22 nt, Human
acagggccuggcuccaaaagau

SEQ ID NO: 884985 - RNA, 22 nt, Human
aggcuucugugagcucauacaa

SEQ ID NO: 884986 - RNA, 22 nt, Human
caggaccuaacucaccugucuc

SEQ ID NO: 884987 - RNA, 22 nt, Human
gggcagcaugucacuagcaugg

SEQ ID NO: 884988 - RNA, 22 nt, Human
gggcugaguuccugccucacuc

SEQ ID NO: 884989 - RNA, 22 nt, Human
uauauauaugcacacacaccua

SEQ ID NO: 884990 - RNA, 22 nt, Human
agcuuuggggacagccaagguu

SEQ ID NO: 884991 - RNA, 22 nt, Human
ucugaggccuucagcaugaauc

SEQ ID NO: 884992 - RNA, 22 nt, Human
ugaaauguguccauguuauuuc

SEQ ID NO: 884993 - RNA, 22 nt, Human
uaaacugugaaaggcuuaacau

SEQ ID NO: 884994 - RNA, 23 nt, Human
gggagcuguggugaaaagaggug

SEQ ID NO: 884995 - RNA, 22 nt, Human
ugacugccgauuguccuucucu

SEQ ID NO: 884996 - RNA, 22 nt, Human
auuguuaaacugaagcauuacu

SEQ ID NO: 884997 - RNA, 22 nt, Human
ugcagggcuacaggacuacaac

SEQ ID NO: 884998 - RNA, 22 nt, Human
acaauacuauuuucaguauccu

SEQ ID NO: 884999 - RNA, 22 nt, Human
uugacugugaugggcucagcug

SEQ ID NO: 885000 - RNA, 22 nt, Human
ucucacugcaaauauuauguau

SEQ ID NO: 885001 - RNA, 22 nt, Human
agguacaguagacagacaguua

SEQ ID NO: 885002 - RNA, 22 nt, Human
aggccugagccccagguuuguu

SEQ ID NO: 885003 - RNA, 22 nt, Human
cuuuagugguauuuuagcaagu

SEQ ID NO: 885004 - RNA, 22 nt, Human
caguuauaggagccauuguaua

SEQ ID NO: 885005 - RNA, 22 nt, Human
uucuuuggcuuacgucuggccu

SEQ ID NO: 885006 - RNA, 22 nt, Human
uggaaagagguagaggaucugg

SEQ ID NO: 885007 - RNA, 22 nt, Human
uccugcuucuucgagcuucugg

SEQ ID NO: 885008 - RNA, 22 nt, Human
uccugugaagaauagcacucaa

SEQ ID NO: 885009 - RNA, 22 nt, Human
gugccugugcggacucagggaa

SEQ ID NO: 885010 - RNA, 21 nt, Human
uucuaacugggugggccuuga

SEQ ID NO: 885011 - RNA, 22 nt, Human
uggcugaguuacgaacagagca

SEQ ID NO: 885012 - RNA, 20 nt, Human
uucauuugggaaaaucugcg

SEQ ID NO: 885013 - RNA, 22 nt, Human
uuugugcacauugcuuuucuau

SEQ ID NO: 885014 - RNA, 22 nt, Human
uuuauuauccaguguugucaug

SEQ ID NO: 885015 - RNA, 22 nt, Human
gaagauacacagagcugucuuu

SEQ ID NO: 885016 - RNA, 22 nt, Human
aggaagccugcaggugacugcu

SEQ ID NO: 885017 - RNA, 22 nt, Human
caggaggcuccuagggcucugu

SEQ ID NO: 885018 - RNA, 22 nt, Human
aaggcuucuuugcaggcuuuag

SEQ ID NO: 885019 - RNA, 22 nt, Human
agugaggggauucaggcaaggu

SEQ ID NO: 885020 - RNA, 22 nt, Human
auaaguuugucuuuguaaagau

SEQ ID NO: 885021 - RNA, 22 nt, Human
uuugacaauuagguagaaaaag

SEQ ID NO: 885022 - RNA, 22 nt, Human
ggcucugaguuuagaagggugg

SEQ ID NO: 885023 - RNA, 22 nt, Human
aguaacaaagugggagaaugau

SEQ ID NO: 885024 - RNA, 22 nt, Human
uccugggguuuuggccgcagcu

SEQ ID NO: 885025 - RNA, 22 nt, Human
uacacagccuguaaugaugacu

SEQ ID NO: 885026 - RNA, 22 nt, Human
gggucagggcugccugggcuca

SEQ ID NO: 885027 - RNA, 22 nt, Human
ccugcagaugugggacagcugu

SEQ ID NO: 885028 - RNA, 22 nt, Human
uccaaauaccagaugggcuaau

SEQ ID NO: 885029 - RNA, 22 nt, Human
ccugcuccaugcucaccaucag

SEQ ID NO: 885030 - RNA, 22 nt, Human
cugcaggcucgaagacacggau

SEQ ID NO: 885031 - RNA, 22 nt, Human
uaagagauucuaaagcuacugg

SEQ ID NO: 885032 - RNA, 22 nt, Human
cuguggccuuuguuggaggucc

SEQ ID NO: 885033 - RNA, 19 nt, Human
acaguucuaauuucugugg

SEQ ID NO: 885034 - RNA, 22 nt, Human
ugggccagcugaagugccgccc

SEQ ID NO: 885035 - RNA, 22 nt, Human
aguuugauuguauggguuuuaa

SEQ ID NO: 885036 - RNA, 22 nt, Human
cacccaguugacuacaaagggg

SEQ ID NO: 885037 - RNA, 22 nt, Human
gcaggccugcccagcaggaugg

SEQ ID NO: 885038 - RNA, 22 nt, Human
uguauuuugaguccaaucuccu

SEQ ID NO: 885039 - RNA, 22 nt, Human
uuuacaccaaaaugacacagag

SEQ ID NO: 885040 - RNA, 22 nt, Human
ugcacacacucugcauauacuu

SEQ ID NO: 885041 - RNA, 22 nt, Human
acuuugcccuacagcagcucug

SEQ ID NO: 885042 - RNA, 23 nt, Human
uccugcagauaagcugguugaca

SEQ ID NO: 885043 - RNA, 22 nt, Human
aaaagcuuuguuaauagguuug

SEQ ID NO: 885044 - RNA, 22 nt, Human
cagggucaggcugcuagaagcu

SEQ ID NO: 885045 - RNA, 22 nt, Human
gagggggucuaugagguagagc

SEQ ID NO: 885046 - RNA, 22 nt, Human
acaagcaguaaaggccacaguc

SEQ ID NO: 885047 - RNA, 22 nt, Human
uuggcacuuuuaggcaguaccg

SEQ ID NO: 885048 - RNA, 22 nt, Human
cagggucauggcaccugcacgg

SEQ ID NO: 885049 - RNA, 22 nt, Human
ugggagagcacugcagccccgg

SEQ ID NO: 885050 - RNA, 19 nt, Human
ccaggccaucccaguuccc

SEQ ID NO: 885051 - RNA, 22 nt, Human
cauaacauuaagccucuauuuc

SEQ ID NO: 885052 - RNA, 22 nt, Human
gccugccuuugugaggaagcgg

SEQ ID NO: 885053 - RNA, 22 nt, Human
uauugcauagaaggaaggaguu

SEQ ID NO: 885054 - RNA, 22 nt, Human
aggcuucaaggacagcagccac

SEQ ID NO: 885055 - RNA, 22 nt, Human
aaugagggggaugggaaagugu

SEQ ID NO: 885056 - RNA, 22 nt, Human
gggccuucagccuuggacugag

SEQ ID NO: 885057 - RNA, 22 nt, Human
agacaucucuaugcaggaucuc

SEQ ID NO: 885058 - RNA, 22 nt, Human
acaugaaaccugagucuaacuc

SEQ ID NO: 885059 - RNA, 22 nt, Human
ccacaguuuaggaagucacucu

SEQ ID NO: 885060 - RNA, 22 nt, Human
ucacauuaggaaguaauguugu

SEQ ID NO: 885061 - RNA, 22 nt, Human
uccauggggcccaggaugagag

SEQ ID NO: 885062 - RNA, 22 nt, Human
uauaggaaggcagauuuuagcu

SEQ ID NO: 885063 - RNA, 22 nt, Human
aaagagccgcugaugucagccc

SEQ ID NO: 885064 - RNA, 22 nt, Human
uucuaaacggcuucacaggaau

SEQ ID NO: 885065 - RNA, 22 nt, Human
ugcuaauaucuagaaguuuguu

SEQ ID NO: 885066 - RNA, 22 nt, Human
gagcucuguucucguccugcug

SEQ ID NO: 885067 - RNA, 22 nt, Human
acucaacagggaacaagaucag

SEQ ID NO: 885068 - RNA, 22 nt, Human
ggagccugggcauuaguaauuu

SEQ ID NO: 885069 - RNA, 22 nt, Human
uacacagauaugugaucaauca

SEQ ID NO: 885070 - RNA, 22 nt, Human
uggcugugggauaugugacuga

SEQ ID NO: 885071 - RNA, 22 nt, Human
aggcaaagaggauauuuugggg

SEQ ID NO: 885072 - RNA, 22 nt, Human
ucugucugcgcuugcccuggug

SEQ ID NO: 885073 - RNA, 22 nt, Human
gcacaugucuuauucacuguua

SEQ ID NO: 885074 - RNA, 22 nt, Human
uaugaagugaguuaugguugcu

SEQ ID NO: 885075 - RNA, 23 nt, Human
uaaagugcugauggugagggagc

SEQ ID NO: 885076 - RNA, 22 nt, Human
gggguggauuccuacaggucca

SEQ ID NO: 885077 - RNA, 22 nt, Human
aucuaaaguguuucaugaaaga

SEQ ID NO: 885078 - RNA, 22 nt, Human
aggugccugucgucucugguua

SEQ ID NO: 885079 - RNA, 22 nt, Human
aaguaagucuuacauucacauu

SEQ ID NO: 885080 - RNA, 22 nt, Human
caguucaggccggcugacucag

SEQ ID NO: 885081 - RNA, 22 nt, Human
uccagcucccacucucacugcu

SEQ ID NO: 885082 - RNA, 22 nt, Human
gggggacuggaccguccugggu

SEQ ID NO: 885083 - RNA, 23 nt, Human
aaaaaaccauguaggcacucagu

SEQ ID NO: 885084 - RNA, 21 nt, Human
ucagcuguagagauuacauuc

SEQ ID NO: 885085 - RNA, 22 nt, Human
ggcaggugagagcucuuugaaa

SEQ ID NO: 885086 - RNA, 22 nt, Human
guggcagagccgugcagguagg

SEQ ID NO: 885087 - RNA, 22 nt, Human
acaggcuuacuguuucauaggg

SEQ ID NO: 885088 - RNA, 22 nt, Human
gccaggcagagccccgugcagc

SEQ ID NO: 885089 - RNA, 22 nt, Human
auacccagccccagcugcagga

SEQ ID NO: 885090 - RNA, 22 nt, Human
agugugucuuauccugggagaa

SEQ ID NO: 885091 - RNA, 22 nt, Human
cagguggccuugccaucuccug

SEQ ID NO: 885092 - RNA, 22 nt, Human
uucuaggaagggaagcauggca

SEQ ID NO: 885093 - RNA, 22 nt, Human
guuccugugggguuaacccuga

SEQ ID NO: 885094 - RNA, 23 nt, Human
cugggcuguccugaggucaccuc

SEQ ID NO: 885095 - RNA, 22 nt, Human
uggccuggggaagaccaugggc

SEQ ID NO: 885096 - RNA, 22 nt, Human
caaggccacugcucagguuucc

SEQ ID NO: 885097 - RNA, 21 nt, Human
uuugaaagugggugauucuuu

SEQ ID NO: 885098 - RNA, 22 nt, Human
cagaaagcuuaggcaaguugga

SEQ ID NO: 885099 - RNA, 22 nt, Human
ggaggagcacuucugagcucag

SEQ ID NO: 885100 - RNA, 22 nt, Human
cugaagagaaauguacacaugg

SEQ ID NO: 885101 - RNA, 20 nt, Human
aaaauauguauaacucuucu

SEQ ID NO: 885102 - RNA, 22 nt, Human
auuucagagcuuugcagcuaau

SEQ ID NO: 885103 - RNA, 22 nt, Human
aggauguguuuugagcugacua

SEQ ID NO: 885104 - RNA, 22 nt, Human
uccagucucuacucugagauaa

SEQ ID NO: 885105 - RNA, 22 nt, Human
agugauguaacaaacagaguua

SEQ ID NO: 885106 - RNA, 22 nt, Human
ucauccugucucacuuuuugcu

SEQ ID NO: 885107 - RNA, 23 nt, Human
agcuuugugaaagcagacauggg

SEQ ID NO: 885108 - RNA, 22 nt, Human
ugacuaaacgcaugaauagcuc

SEQ ID NO: 885109 - RNA, 22 nt, Human
gaggaagagcauggccaguuuc

SEQ ID NO: 885110 - RNA, 22 nt, Human
agcugcugcggaaagaugccac

SEQ ID NO: 885111 - RNA, 22 nt, Human
ugacgucaacugcaaaggccuu

SEQ ID NO: 885112 - RNA, 22 nt, Human
uauuugucaagagagggggaua

SEQ ID NO: 885113 - RNA, 22 nt, Human
cugacaguaacuaauguggaga

SEQ ID NO: 885114 - RNA, 22 nt, Human
auauuuugguagcucucaauga

SEQ ID NO: 885115 - RNA, 21 nt, Human
auacagaagguggcaaaguac

SEQ ID NO: 885116 - RNA, 21 nt, Human
auauuucucauaagguuaugg

SEQ ID NO: 885117 - RNA, 22 nt, Human
aagacaggaacauagcaaaucc

SEQ ID NO: 885118 - RNA, 22 nt, Human
uauuagcagcaugagaaugggc

SEQ ID NO: 885119 - RNA, 22 nt, Human
agcuucuggaaggcaaggcuug

SEQ ID NO: 885120 - RNA, 22 nt, Human
ugaccucuugucggagcuccag

SEQ ID NO: 885121 - RNA, 22 nt, Human
aaagaacaaaugauauaugguu

SEQ ID NO: 885122 - RNA, 22 nt, Human
cacuucaaauauggcuucauga

SEQ ID NO: 885123 - RNA, 22 nt, Human
cugagguaugugggacuagccu

SEQ ID NO: 885124 - RNA, 22 nt, Human
ucagcucuaaguuuuaugcaaa

SEQ ID NO: 885125 - RNA, 22 nt, Human
acacuucagcaguaugcuuggg

SEQ ID NO: 885126 - RNA, 22 nt, Human
aguuuucugcuaaaccagcuaa

SEQ ID NO: 885127 - RNA, 22 nt, Human
gacccuuggcugcagcaucaca

SEQ ID NO: 885128 - RNA, 22 nt, Human
ugagguaugauuuacaugcagu

SEQ ID NO: 885129 - RNA, 22 nt, Human
ccuggcugguggcagcgacaag

SEQ ID NO: 885130 - RNA, 22 nt, Human
cagggcucuuccggagcaggga

SEQ ID NO: 885131 - RNA, 22 nt, Human
cauucacauucuucuuacuguu

SEQ ID NO: 885132 - RNA, 22 nt, Human
aguacuuugcacuuugcucaga

SEQ ID NO: 885133 - RNA, 22 nt, Human
gcuggggacuccccaccauagc

SEQ ID NO: 885134 - RNA, 22 nt, Human
uggcacagcccagagcucuuga

SEQ ID NO: 885135 - RNA, 22 nt, Human
uggagcaggccggaaguggcuu

SEQ ID NO: 885136 - RNA, 22 nt, Human
ccugaaauuugaagaccugaau

SEQ ID NO: 885137 - RNA, 22 nt, Human
uuaaaagaccuguugagguuag

SEQ ID NO: 885138 - RNA, 22 nt, Human
aggcuccauuuuccugcagcug

SEQ ID NO: 885139 - RNA, 22 nt, Human
uggggggauacuugcuacuggc

SEQ ID NO: 885140 - RNA, 22 nt, Human
cagcuacuccucccaugacuuc

SEQ ID NO: 885141 - RNA, 22 nt, Human
ucagaaucugaaaagcgcuugg

SEQ ID NO: 885142 - RNA, 22 nt, Human
cguucucucaugaucuucccga

SEQ ID NO: 885143 - RNA, 22 nt, Human
gugaauggggcaggaaggaugg

SEQ ID NO: 885144 - RNA, 22 nt, Human
cagcucuggccagaucuauccu

SEQ ID NO: 885145 - RNA, 22 nt, Human
caggcagaugcugacaagaguu

SEQ ID NO: 885146 - RNA, 22 nt, Human
gauuggucuacucaacagcaga

SEQ ID NO: 885147 - RNA, 22 nt, Human
agcugccugugcugggagccca

SEQ ID NO: 885148 - RNA, 22 nt, Human
ugaugggaggugcugcaggacc

SEQ ID NO: 885149 - RNA, 22 nt, Human
uucuuugggauuguagcugucu

SEQ ID NO: 885150 - RNA, 22 nt, Human
ucaacugauuuagucugugcca

SEQ ID NO: 885151 - RNA, 22 nt, Human
uauuuuacaugacagguguuua

SEQ ID NO: 885152 - RNA, 22 nt, Human
auuguauaacagcauguauuuu

SEQ ID NO: 885153 - RNA, 22 nt, Human
uacaucuagccuuacaauuauu

SEQ ID NO: 885154 - RNA, 22 nt, Human
aaagacacaugucucuuagauu

SEQ ID NO: 885155 - RNA, 22 nt, Human
aagggcagccugacucacgguc

SEQ ID NO: 885156 - RNA, 22 nt, Human
gccuucugauugcuggacugac

SEQ ID NO: 885157 - RNA, 22 nt, Human
gggcuggaugggagccuuggcc

SEQ ID NO: 885158 - RNA, 22 nt, Human
guacccagugauuccuucuuca

SEQ ID NO: 885159 - RNA, 22 nt, Human
ucacaugcacauacuuccugug

SEQ ID NO: 885160 - RNA, 22 nt, Human
auuugaagaaaguuuucuagau

SEQ ID NO: 885161 - RNA, 22 nt, Human
agagccugaggcccugagaggg

SEQ ID NO: 885162 - RNA, 22 nt, Human
acagcuaggaaauggaagaacu

SEQ ID NO: 885163 - RNA, 22 nt, Human
uagcgcaaugagagagcggugc

SEQ ID NO: 885164 - RNA, 22 nt, Human
cuggagucagcaaggacgaggc

SEQ ID NO: 885165 - RNA, 19 nt, Human
aacaugacagccacucugg

SEQ ID NO: 885166 - RNA, 20 nt, Human
ccugguguauuuccuggggu

SEQ ID NO: 885167 - RNA, 22 nt, Human
ucacaggcaaagaagauuggug

SEQ ID NO: 885168 - RNA, 22 nt, Human
ucugccaggcauugugcugcuc

SEQ ID NO: 885169 - RNA, 22 nt, Human
gccugggaagacuaagugggag

SEQ ID NO: 885170 - RNA, 22 nt, Human
aucauaagacccagccaguauu

SEQ ID NO: 885171 - RNA, 22 nt, Human
gacagagguguccuugagucca

SEQ ID NO: 885172 - RNA, 21 nt, Human
uacuguagccuugcacuguag

SEQ ID NO: 885173 - RNA, 22 nt, Human
ucuugcaccacacaaaaauuug

SEQ ID NO: 885174 - RNA, 22 nt, Human
agagcugucacauagagccaga

SEQ ID NO: 885175 - RNA, 21 nt, Human
acaauugauggcuuaaguugc

SEQ ID NO: 885176 - RNA, 22 nt, Human
ggacagugcgagacacaguaac

SEQ ID NO: 885177 - RNA, 22 nt, Human
aggcagaaaauagucauccaaa

SEQ ID NO: 885178 - RNA, 21 nt, Human
aguguccuugaucuugccuug

SEQ ID NO: 885179 - RNA, 23 nt, Human
gaggaaagaauauagaugcaauc

SEQ ID NO: 885180 - RNA, 22 nt, Human
uaaaauagcaugugcagugaaa

SEQ ID NO: 885181 - RNA, 22 nt, Human
cugaaguucgccagacucgggc

SEQ ID NO: 885182 - RNA, 22 nt, Human
aggcagaucacaggagggccug

SEQ ID NO: 885183 - RNA, 22 nt, Human
agcugcugggauacaguaguga

SEQ ID NO: 885184 - RNA, 22 nt, Human
cugucucugauaagcucgaggg

SEQ ID NO: 885185 - RNA, 22 nt, Human
cugccagagaucugggcagagu

SEQ ID NO: 885186 - RNA, 22 nt, Human
ucucccaguggugcagaaagca

SEQ ID NO: 885187 - RNA, 22 nt, Human
uaauuucuaauucauuuucagu

SEQ ID NO: 885188 - RNA, 22 nt, Human
uagggaugauggagccuaugua

SEQ ID NO: 885189 - RNA, 22 nt, Human
ucacagaguuaaaaguuucuuu

SEQ ID NO: 885190 - RNA, 22 nt, Human
gcuuagaaguacacaugccuuu

SEQ ID NO: 885191 - RNA, 22 nt, Human
cuauucaauuuugcuauuguag

SEQ ID NO: 885192 - RNA, 22 nt, Human
augggcuggcagccugaacagc

SEQ ID NO: 885193 - RNA, 22 nt, Human
cuggguccccucagugacacug

SEQ ID NO: 885194 - RNA, 22 nt, Human
ggaugggcagacaggacggcac

SEQ ID NO: 885195 - RNA, 22 nt, Human
ggcagcaacgaggcuugauacc

SEQ ID NO: 885196 - RNA, 22 nt, Human
uacugaaagagugguggacucu

SEQ ID NO: 885197 - RNA, 22 nt, Human
cagaggacuucccacucaucug

SEQ ID NO: 885198 - RNA, 21 nt, Human
agcagagugcuuugacuuugu

SEQ ID NO: 885199 - RNA, 22 nt, Human
ugaaacauuugaugaucuuugg

SEQ ID NO: 885200 - RNA, 22 nt, Human
auagaaccuguugugaaauuca

SEQ ID NO: 885201 - RNA, 22 nt, Human
aacaugaagguaggaugguuuu

SEQ ID NO: 885202 - RNA, 21 nt, Human
uuuugcuguuuuagaaugaga

SEQ ID NO: 885203 - RNA, 22 nt, Human
caaucacaaagagacaaguguc

SEQ ID NO: 885204 - RNA, 22 nt, Human
gcacucuccuggcugccacagu

SEQ ID NO: 885205 - RNA, 22 nt, Human
cuagagaagaggcucagccagc

SEQ ID NO: 885206 - RNA, 22 nt, Human
ugucucugucuuccagggcugu

SEQ ID NO: 885207 - RNA, 22 nt, Human
acguauauugaaauaucaugag

SEQ ID NO: 885208 - RNA, 22 nt, Human
aucuuuagacaggaagcaauca

SEQ ID NO: 885209 - RNA, 22 nt, Human
ucaggcugcagcugucagcagc

SEQ ID NO: 885210 - RNA, 22 nt, Human
auugacaagaaagauauuuuua

SEQ ID NO: 885211 - RNA, 22 nt, Human
caggacagugcagguccauccu

SEQ ID NO: 885212 - RNA, 22 nt, Human
acuuucaagcaagaacacuuug

SEQ ID NO: 885213 - RNA, 22 nt, Human
ugaggggagcuagcaugccuug

SEQ ID NO: 885214 - RNA, 22 nt, Human
cgugggaggaaaaaugggcuuc

SEQ ID NO: 885215 - RNA, 21 nt, Human
ugcucugguagaaacucuuuc

SEQ ID NO: 885216 - RNA, 22 nt, Human
ucuucuccauaaucaacacucu

SEQ ID NO: 885217 - RNA, 22 nt, Human
uuuccuuguuauuauuuguccu

SEQ ID NO: 885218 - RNA, 22 nt, Human
ugcuauuuuggucuacagcacu

SEQ ID NO: 885219 - RNA, 22 nt, Human
guacaaauuuugacaucuagga

SEQ ID NO: 885220 - RNA, 22 nt, Human
agaaaucuauuauuucagaguu

SEQ ID NO: 885221 - RNA, 22 nt, Human
uugacucuaaauuuacuuuucc

SEQ ID NO: 885222 - RNA, 22 nt, Human
gcugcucuguuaauugcuguaa

SEQ ID NO: 885223 - RNA, 21 nt, Human
acaguuuauuagaguaagugc

SEQ ID NO: 885224 - RNA, 22 nt, Human
auuuauaacgugcagccagggu

SEQ ID NO: 885225 - RNA, 22 nt, Human
aagaacaguguccugggacucg

SEQ ID NO: 885226 - RNA, 22 nt, Human
ucuccagaaauggggcugggga

SEQ ID NO: 885227 - RNA, 22 nt, Human
gcgugcauggccguguguaugc

SEQ ID NO: 885228 - RNA, 23 nt, Human
aggaagcuuggcaauaagguuug

SEQ ID NO: 885229 - RNA, 22 nt, Human
caauuauauuuagaaugauaca

SEQ ID NO: 885230 - RNA, 22 nt, Human
gaucugcacucugagaggcuug

SEQ ID NO: 885231 - RNA, 22 nt, Human
gcugggccccaucccucgagca

SEQ ID NO: 885232 - RNA, 22 nt, Human
caggcuuuacuuucucucugaa

SEQ ID NO: 885233 - RNA, 22 nt, Human
acaugaaacuguugcauuagaa

SEQ ID NO: 885234 - RNA, 22 nt, Human
gugccuggcaugcgccggugcu

SEQ ID NO: 885235 - RNA, 22 nt, Human
aggaagcaguuuauaaugcauu

SEQ ID NO: 885236 - RNA, 18 nt, Human
aguccaugcauggcuaua

SEQ ID NO: 885237 - RNA, 22 nt, Human
ccuccucugugcagcugugggu

SEQ ID NO: 885238 - RNA, 22 nt, Human
cagcagcaguguucuagaaucu

SEQ ID NO: 885239 - RNA, 22 nt, Human
auucaaguacaguuuucuucuu

SEQ ID NO: 885240 - RNA, 22 nt, Human
ggcugagacuagagugaggcau

SEQ ID NO: 885241 - RNA, 22 nt, Human
uucauguaacuuuucuucucca

SEQ ID NO: 885242 - RNA, 22 nt, Human
ggaguuggugagcaccaggcuu

SEQ ID NO: 885243 - RNA, 22 nt, Human
ccagggcuccauugcucauccu

SEQ ID NO: 885244 - RNA, 22 nt, Human
uugcugauuuguuucuauucca

SEQ ID NO: 885245 - RNA, 22 nt, Human
gaaugacauugaaaagacauug

SEQ ID NO: 885246 - RNA, 22 nt, Human
uguacagagguguacauaugau

SEQ ID NO: 885247 - RNA, 22 nt, Human
agugaaggaaguuugucuuggg

SEQ ID NO: 885248 - RNA, 22 nt, Human
agcaaugacuuugaaaucauga

SEQ ID NO: 885249 - RNA, 22 nt, Human
ugauuaaagguggaaggcaggu

SEQ ID NO: 885250 - RNA, 22 nt, Human
aggcugcucugcgaagucagcu

SEQ ID NO: 885251 - RNA, 22 nt, Human
ugauuuaugaccaaguuagaau

SEQ ID NO: 885252 - RNA, 22 nt, Human
gguuccugugccucuagcuggc

SEQ ID NO: 885253 - RNA, 22 nt, Human
uggaaucucugguaucugggga

SEQ ID NO: 885254 - RNA, 22 nt, Human
uagucacacaauuguguacauu

SEQ ID NO: 885255 - RNA, 22 nt, Human
agaacuuuuggagacuuuuagu

SEQ ID NO: 885256 - RNA, 22 nt, Human
cacuugcagacuuugccugguu

SEQ ID NO: 885257 - RNA, 22 nt, Human
ccauggaucuggaucuaucuuu

SEQ ID NO: 885258 - RNA, 22 nt, Human
ccuggcucaguguugaaggggu

SEQ ID NO: 885259 - RNA, 22 nt, Human
ugggggaguauagucuggccuc

SEQ ID NO: 885260 - RNA, 22 nt, Human
aauagcauguucaugauaaaau

SEQ ID NO: 885261 - RNA, 22 nt, Human
uguuuauugcugcaauugugcc

SEQ ID NO: 885262 - RNA, 22 nt, Human
gcaaaacagucgaugccuccca

SEQ ID NO: 885263 - RNA, 18 nt, Human
aaguccauggguuuggga

SEQ ID NO: 885264 - RNA, 22 nt, Human
caggcagagugagaagcccuug

SEQ ID NO: 885265 - RNA, 22 nt, Human
ggggauggaauguaguagugau

SEQ ID NO: 885266 - RNA, 22 nt, Human
agagcccuuucuccaggcaccu

SEQ ID NO: 885267 - RNA, 22 nt, Human
agggcugccauuucuggcccaa

SEQ ID NO: 885268 - RNA, 22 nt, Human
augaaaauguacauguguauaa

SEQ ID NO: 885269 - RNA, 22 nt, Human
cacauacaaugguguuauuugg

SEQ ID NO: 885270 - RNA, 22 nt, Human
agccauucauugugcucucaga

SEQ ID NO: 885271 - RNA, 21 nt, Human
aaccacauggauuagucagag

SEQ ID NO: 885272 - RNA, 22 nt, Human
uuucucuuuggaggggcugaau

SEQ ID NO: 885273 - RNA, 22 nt, Human
gaaacauuggucugccccuuau

SEQ ID NO: 885274 - RNA, 22 nt, Human
guccugcuuguuaggccuaguc

SEQ ID NO: 885275 - RNA, 22 nt, Human
cuuaaaggagguuuuguuucca

SEQ ID NO: 885276 - RNA, 20 nt, Human
uggaagaagaacucaggcuu

SEQ ID NO: 885277 - RNA, 22 nt, Human
aaguuugugucagagcuguuac

SEQ ID NO: 885278 - RNA, 22 nt, Human
ggggccuuggaucugugccccg

SEQ ID NO: 885279 - RNA, 22 nt, Human
cagagccagucagucagaaacu

SEQ ID NO: 885280 - RNA, 22 nt, Human
ggcuauggaagauaaggcugaa

SEQ ID NO: 885281 - RNA, 22 nt, Human
uacugcaucgaaaugcuuuuau

SEQ ID NO: 885282 - RNA, 22 nt, Human
cauguaaaacacucagaacagu

SEQ ID NO: 885283 - RNA, 22 nt, Human
augcagcacugaucuuuagcca

SEQ ID NO: 885284 - RNA, 22 nt, Human
uaaacaguuaacaugccagaau

SEQ ID NO: 885285 - RNA, 22 nt, Human
acagauggagcuacuagguaaa

SEQ ID NO: 885286 - RNA, 22 nt, Human
uaugcaaaucauuagauuuccu

SEQ ID NO: 885287 - RNA, 22 nt, Human
aggcaguguguagcuggaagag

SEQ ID NO: 885288 - RNA, 22 nt, Human
agugauuuuaucaauuuacuca

SEQ ID NO: 885289 - RNA, 22 nt, Human
acacaguucgugcuuuucuauu

SEQ ID NO: 885290 - RNA, 22 nt, Human
gggccagagcuuggcagcuggg

SEQ ID NO: 885291 - RNA, 22 nt, Human
ucaguuaacaacuauuuauuga

SEQ ID NO: 885292 - RNA, 22 nt, Human
cucagaagaacccaggguccca

SEQ ID NO: 885293 - RNA, 22 nt, Human
uucaaguacauuguguuuuccu

SEQ ID NO: 885294 - RNA, 22 nt, Human
auaucucauuaccuugcuguuc

SEQ ID NO: 885295 - RNA, 22 nt, Human
acugaggcuuacaaagguaaag

SEQ ID NO: 885296 - RNA, 22 nt, Human
cuucugagauguuguuuuacag

SEQ ID NO: 885297 - RNA, 22 nt, Human
cugcagagagugccgggcagcc

SEQ ID NO: 885298 - RNA, 19 nt, Human
gagcaacauauguaaacuc

SEQ ID NO: 885299 - RNA, 20 nt, Human
acacauagauaagaagcuga

SEQ ID NO: 885300 - RNA, 22 nt, Human
gcuggcugcuaggacagcuaca

SEQ ID NO: 885301 - RNA, 22 nt, Human
guggcuggcccuggacccuaag

SEQ ID NO: 885302 - RNA, 22 nt, Human
ggcagaggaaggaugaauucac

SEQ ID NO: 885303 - RNA, 22 nt, Human
cauagcaaggugcuuuccacau

SEQ ID NO: 885304 - RNA, 22 nt, Human
uaagacuucauuaguaauaugg

SEQ ID NO: 885305 - RNA, 22 nt, Human
cuagaaguuggggcuagggaua

SEQ ID NO: 885306 - RNA, 22 nt, Human
ugcuggcuuuaagguuaaagug

SEQ ID NO: 885307 - RNA, 19 nt, Human
ggaaggugacaguggugaa

SEQ ID NO: 885308 - RNA, 23 nt, Human
ucauuccacaaauacuuaucuag

SEQ ID NO: 885309 - RNA, 22 nt, Human
ucaaagcaugguuuugaaagac

SEQ ID NO: 885310 - RNA, 22 nt, Human
aauguguagucauugaucaaga

SEQ ID NO: 885311 - RNA, 22 nt, Human
aaguguauauaugacuuauaaa

SEQ ID NO: 885312 - RNA, 22 nt, Human
gagagaaauuaguugguuugcu

SEQ ID NO: 885313 - RNA, 22 nt, Human
acaguuuauugcacagguaacc

SEQ ID NO: 885314 - RNA, 22 nt, Human
ugauuucucauauuguucaaaa

SEQ ID NO: 885315 - RNA, 22 nt, Human
gauggaggagauggcagggugc

SEQ ID NO: 885316 - RNA, 22 nt, Human
aaacacaauguuucuuuguucu

SEQ ID NO: 885317 - RNA, 22 nt, Human
uaauguuacacugcaugguuca

SEQ ID NO: 885318 - RNA, 22 nt, Human
cgugugcgcacaccuguuucca

SEQ ID NO: 885319 - RNA, 22 nt, Human
agagggguuaugcuugacauuu

SEQ ID NO: 885320 - RNA, 22 nt, Human
gccuggcucugaguuucucucc

SEQ ID NO: 885321 - RNA, 17 nt, Human
gcccaggaaggacggcc

SEQ ID NO: 885322 - RNA, 22 nt, Human
ggcccaugcauccugugcagcc

SEQ ID NO: 885323 - RNA, 22 nt, Human
augcauaugcaucuguguacau

SEQ ID NO: 885324 - RNA, 18 nt, Human
caauguuuuagaucucua

SEQ ID NO: 885325 - RNA, 22 nt, Human
gcugggcuuguggccagcuggg

SEQ ID NO: 885326 - RNA, 22 nt, Human
uaugcaugucuuugcacacaaa

SEQ ID NO: 885327 - RNA, 22 nt, Human
ucucagaaggguggugcuggag

SEQ ID NO: 885328 - RNA, 22 nt, Human
auggcugggauuuccuuugcgu

SEQ ID NO: 885329 - RNA, 23 nt, Human
ugccaaaguuuaccuaacacugg

SEQ ID NO: 885330 - RNA, 22 nt, Human
cuuagaauaaaagggggcuaua

SEQ ID NO: 885331 - RNA, 22 nt, Human
uccuuagaccuggcaaaugggg

SEQ ID NO: 885332 - RNA, 22 nt, Human
gggaagugagcuggaaucaagg

SEQ ID NO: 885333 - RNA, 22 nt, Human
agggucagugaugagggagccc

SEQ ID NO: 885334 - RNA, 22 nt, Human
auaaaguagccacuggaaagcu

SEQ ID NO: 885335 - RNA, 22 nt, Human
ggcaggcaacggaccacuaguc

SEQ ID NO: 885336 - RNA, 22 nt, Human
ugaaggcagcaugcacacuagu

SEQ ID NO: 885337 - RNA, 22 nt, Human
uccaagaagucaucuaaacugu

SEQ ID NO: 885338 - RNA, 22 nt, Human
ugucccaggcugaaguacagug

SEQ ID NO: 885339 - RNA, 22 nt, Human
gggagagaagggcauguacacu

SEQ ID NO: 885340 - RNA, 22 nt, Human
uugagaggauggauuagacaaa

SEQ ID NO: 885341 - RNA, 19 nt, Human
ggcaggugugcuuaugcuu

SEQ ID NO: 885342 - RNA, 22 nt, Human
acauuucacuguucacagcagg

SEQ ID NO: 885343 - RNA, 22 nt, Human
uauucacaggcuggagugaugu

SEQ ID NO: 885344 - RNA, 22 nt, Human
ugcuggcuuucugucccuggca

SEQ ID NO: 885345 - RNA, 22 nt, Human
uccugccucuccaugcuaacua

SEQ ID NO: 885346 - RNA, 22 nt, Human
aacuucauuuauaaugucauua

SEQ ID NO: 885347 - RNA, 22 nt, Human
aaaguucuccuggauugugcug

SEQ ID NO: 885348 - RNA, 22 nt, Human
acucuggggugaugucucugag

SEQ ID NO: 885349 - RNA, 22 nt, Human
cuccugaggaaaagcuugguca

SEQ ID NO: 885350 - RNA, 22 nt, Human
uaauuccuuaagcugaagacuu

SEQ ID NO: 885351 - RNA, 22 nt, Human
cugcagcuuaagggagggguug

SEQ ID NO: 885352 - RNA, 22 nt, Human
uggcuucauguaguuugaguug

SEQ ID NO: 885353 - RNA, 22 nt, Human
ccaggcagagggaauagcaagu

SEQ ID NO: 885354 - RNA, 22 nt, Human
uugggggaagaggauagacagu

SEQ ID NO: 885355 - RNA, 22 nt, Human
ccucugaggucauggacuuggc

SEQ ID NO: 885356 - RNA, 22 nt, Human
auaccuguguauccacaagcgu

SEQ ID NO: 885357 - RNA, 22 nt, Human
cagggcacuuaaauugccucgu

SEQ ID NO: 885358 - RNA, 22 nt, Human
uggaggcccacacuggguagau

SEQ ID NO: 885359 - RNA, 22 nt, Human
acaugugaggugugagugauac

SEQ ID NO: 885360 - RNA, 22 nt, Human
ggagucugagcuuguguccugg

SEQ ID NO: 885361 - RNA, 22 nt, Human
uguuaggacuccccagaagcug

SEQ ID NO: 885362 - RNA, 22 nt, Human
agagaacagacagaugcaauga

SEQ ID NO: 885363 - RNA, 21 nt, Human
gauuaaauuuaagcuacaugc

SEQ ID NO: 885364 - RNA, 22 nt, Human
ucuucauguuaguuggguuuuc

SEQ ID NO: 885365 - RNA, 22 nt, Human
cagcccuguccagcagagggug

SEQ ID NO: 885366 - RNA, 22 nt, Human
agugccaggagcaaggagcucc

SEQ ID NO: 885367 - RNA, 22 nt, Human
uggguggcagcuucagcauguu

SEQ ID NO: 885368 - RNA, 22 nt, Human
ugaggcagcuuuuucugugugu

SEQ ID NO: 885369 - RNA, 22 nt, Human
cuucaugagacuccacugccau

SEQ ID NO: 885370 - RNA, 22 nt, Human
agcuuguuuuguugaauacuua

SEQ ID NO: 885371 - RNA, 22 nt, Human
agaggcugauggaguagugucu

SEQ ID NO: 885372 - RNA, 22 nt, Human
agcuucuuggcucagcacuugg

SEQ ID NO: 885373 - RNA, 22 nt, Human
agucaucuccaauauacaaagc

SEQ ID NO: 885374 - RNA, 22 nt, Human
aggaggugcguggugauccccu

SEQ ID NO: 885375 - RNA, 22 nt, Human
gggcugacgaaggccaugugug

SEQ ID NO: 885376 - RNA, 22 nt, Human
ucacugaugcuuaugaaagugu

SEQ ID NO: 885377 - RNA, 22 nt, Human
guuacacaggaaaacauuagca

SEQ ID NO: 885378 - RNA, 22 nt, Human
ggccugccucacagucagcacc

SEQ ID NO: 885379 - RNA, 22 nt, Human
acugugugcccugacgccaggg

SEQ ID NO: 885380 - RNA, 22 nt, Human
caaggacacucccugcugggca

SEQ ID NO: 885381 - RNA, 18 nt, Human
gugugcaguugcaggggu

SEQ ID NO: 885382 - RNA, 22 nt, Human
gagcugaggccagagucuucug

SEQ ID NO: 885383 - RNA, 21 nt, Human
uggauaaaggcacuuuucauc

SEQ ID NO: 885384 - RNA, 22 nt, Human
acacacaacucauuguguaaua

SEQ ID NO: 885385 - RNA, 22 nt, Human
aguggcugcuucugguugcucc

SEQ ID NO: 885386 - RNA, 22 nt, Human
uuccccuuuuugugugcagcug

SEQ ID NO: 885387 - RNA, 22 nt, Human
ugcuucuggguaggccucagga

SEQ ID NO: 885388 - RNA, 19 nt, Human
uggaggagaggaaaaguca

SEQ ID NO: 885389 - RNA, 22 nt, Human
ucauuuugccugccauuugagu

SEQ ID NO: 885390 - RNA, 22 nt, Human
aggaagcucagagaagucuuuu

SEQ ID NO: 885391 - RNA, 22 nt, Human
agauugguuccuugcuuugaaa

SEQ ID NO: 885392 - RNA, 22 nt, Human
uuccuggcucacagcagugggg

SEQ ID NO: 885393 - RNA, 22 nt, Human
aaccaguuguauguccuccagc

SEQ ID NO: 885394 - RNA, 22 nt, Human
ggcuucugaaccaggcccugga

SEQ ID NO: 885395 - RNA, 22 nt, Human
cugcccugaccugccucagagu

SEQ ID NO: 885396 - RNA, 20 nt, Human
ucacagaugaaaguucaaga

SEQ ID NO: 885397 - RNA, 22 nt, Human
cuggggcuucaaugcuucggug

SEQ ID NO: 885398 - RNA, 19 nt, Human
cagagcugcuggccucguc

SEQ ID NO: 885399 - RNA, 22 nt, Human
cauuuguaauacugacuugcag

SEQ ID NO: 885400 - RNA, 22 nt, Human
aaagcuuucuagcuauguucua

SEQ ID NO: 885401 - RNA, 22 nt, Human
aaguuuggggagaauuucauuu

SEQ ID NO: 885402 - RNA, 22 nt, Human
aagucacauucugagguauugg

SEQ ID NO: 885403 - RNA, 22 nt, Human
guuuccugcacacguguuauau

SEQ ID NO: 885404 - RNA, 22 nt, Human
gugaaggauuggagggcaucuu

SEQ ID NO: 885405 - RNA, 22 nt, Human
gggcuccugccuccuggcaccu

SEQ ID NO: 885406 - RNA, 22 nt, Human
ugcacagggagggggccagcuc

SEQ ID NO: 885407 - RNA, 22 nt, Human
ggagcugagacccaguggcuga

SEQ ID NO: 885408 - RNA, 23 nt, Human
ggcucugugcugggccugcagga

SEQ ID NO: 885409 - RNA, 22 nt, Human
agccugagagccaagcugugca

SEQ ID NO: 885410 - RNA, 22 nt, Human
ggaggugggagccuccaguggu

SEQ ID NO: 885411 - RNA, 22 nt, Human
aaggcaguuaccgcaauggagg

SEQ ID NO: 885412 - RNA, 22 nt, Human
agaagauguugcaguugaugcg

SEQ ID NO: 885413 - RNA, 22 nt, Human
ccuggcagguggagguugcagu

SEQ ID NO: 885414 - RNA, 22 nt, Human
guggcagaguucaggcguuugg

SEQ ID NO: 885415 - RNA, 22 nt, Human
uagagcagccuucagagcaguu

SEQ ID NO: 885416 - RNA, 22 nt, Human
agagaaaguccugaucucucua

SEQ ID NO: 885417 - RNA, 22 nt, Human
aguaacauuuagcuucucacug

SEQ ID NO: 885418 - RNA, 22 nt, Human
uauauucauuuuaaagccaucu

SEQ ID NO: 885419 - RNA, 20 nt, Human
auuagcuuggagacaguggc

SEQ ID NO: 885420 - RNA, 23 nt, Human
uuucaacaggcagagaagacuua

SEQ ID NO: 885421 - RNA, 22 nt, Human
aguucugugacaauaucauuac

SEQ ID NO: 885422 - RNA, 22 nt, Human
uugcuuuaaaauggcuaagucu

SEQ ID NO: 885423 - RNA, 22 nt, Human
agcuguguaggaucauaacacg

SEQ ID NO: 885424 - RNA, 22 nt, Human
cucagucugucuugucuguguu

SEQ ID NO: 885425 - RNA, 22 nt, Human
gaugucuuugcuguuauccacu

SEQ ID NO: 885426 - RNA, 22 nt, Human
uggauggccccacuggauccau

SEQ ID NO: 885427 - RNA, 22 nt, Human
auaugauuguccuuagcaaauu

SEQ ID NO: 885428 - RNA, 22 nt, Human
gacccagugggggccugaucug

SEQ ID NO: 885429 - RNA, 22 nt, Human
ggggagugacgcagggccauag

SEQ ID NO: 885430 - RNA, 22 nt, Human
uuccuuggccccaugcccaggg

SEQ ID NO: 885431 - RNA, 22 nt, Human
cauguccuucucauugccucau

SEQ ID NO: 885432 - RNA, 22 nt, Human
cugugcuggagaugggccagag

SEQ ID NO: 885433 - RNA, 22 nt, Human
agccuuggccguaagguaugcu

SEQ ID NO: 885434 - RNA, 22 nt, Human
agcugaaggcuagaacagcugg

SEQ ID NO: 885435 - RNA, 22 nt, Human
gauugaaacauaggcagucgag

SEQ ID NO: 885436 - RNA, 22 nt, Human
ucagacagauuuugacacuugc

SEQ ID NO: 885437 - RNA, 22 nt, Human
acauucuuucucuucaggaaac

SEQ ID NO: 885438 - RNA, 22 nt, Human
ggcccagcugugcuuccagccc

SEQ ID NO: 885439 - RNA, 22 nt, Human
uuagccauguugaagauuuaga

SEQ ID NO: 885440 - RNA, 22 nt, Human
caucagcucuucauucuugauu

SEQ ID NO: 885441 - RNA, 22 nt, Human
guggcucaucuuugggaaguaa

SEQ ID NO: 885442 - RNA, 22 nt, Human
guggcucacgucugucaucuca

SEQ ID NO: 885443 - RNA, 22 nt, Human
agcaccauuuaucaucuaggua

SEQ ID NO: 885444 - RNA, 22 nt, Human
agcagccuuagguauugugauu

SEQ ID NO: 885445 - RNA, 22 nt, Human
ucagugcagggugggagagaga

SEQ ID NO: 885446 - RNA, 22 nt, Human
ugaggcaggagguugagaacug

SEQ ID NO: 885447 - RNA, 22 nt, Human
augaaugcugaauuaugaacug

SEQ ID NO: 885448 - RNA, 22 nt, Human
aaggaagacacagaugaaguga

SEQ ID NO: 885449 - RNA, 22 nt, Human
uucacauaggagcaugguuuuu

SEQ ID NO: 885450 - RNA, 22 nt, Human
guggcagcugguaugcagacag

SEQ ID NO: 885451 - RNA, 22 nt, Human
aagcagagccaccagcuuugga

SEQ ID NO: 885452 - RNA, 22 nt, Human
uuccaccauucaugcuaauauu

SEQ ID NO: 885453 - RNA, 22 nt, Human
gacagacacuguguccucacuu

SEQ ID NO: 885454 - RNA, 22 nt, Human
cugugcccagcucccugacugc

SEQ ID NO: 885455 - RNA, 22 nt, Human
ucacacaugcuaagccagagau

SEQ ID NO: 885456 - RNA, 22 nt, Human
guuucucuguaccucuguccca

SEQ ID NO: 885457 - RNA, 22 nt, Human
aaugucuuuucccuuacuuucc

SEQ ID NO: 885458 - RNA, 22 nt, Human
aaguaucuuggaaaacucuucu

SEQ ID NO: 885459 - RNA, 22 nt, Human
ugggaccuguuacauugaguua

SEQ ID NO: 885460 - RNA, 22 nt, Human
uuucucuggcauuagguauaaa

SEQ ID NO: 885461 - RNA, 22 nt, Human
cggcucagcuagcuuggcccca

SEQ ID NO: 885462 - RNA, 23 nt, Human
cuuuucauugccuuagcgcagag

SEQ ID NO: 885463 - RNA, 22 nt, Human
aaaugcaaggauuuuguuaggc

SEQ ID NO: 885464 - RNA, 22 nt, Human
acaacacagcaaaaccccaucu

SEQ ID NO: 885465 - RNA, 20 nt, Human
uuuuagcacuuguuauggug

SEQ ID NO: 885466 - RNA, 21 nt, Human
ugaauuucgguauggcuauaa

SEQ ID NO: 885467 - RNA, 22 nt, Human
acaggugauucaggcucuggga

SEQ ID NO: 885468 - RNA, 22 nt, Human
cuguccugaaagggagauuggg

SEQ ID NO: 885469 - RNA, 22 nt, Human
auugagaagcuugcagauuuuu

SEQ ID NO: 885470 - RNA, 22 nt, Human
uccaguggaacagauguugccu

SEQ ID NO: 885471 - RNA, 22 nt, Human
uacaaauggguuaaaauauagu

SEQ ID NO: 885472 - RNA, 22 nt, Human
uacaagaaggauggagcccacu

SEQ ID NO: 885473 - RNA, 22 nt, Human
ugaguucucacccauucuucuu

SEQ ID NO: 885474 - RNA, 22 nt, Human
aagagcagccuccaggggugga

SEQ ID NO: 885475 - RNA, 22 nt, Human
uggagcugggaguccugggcug

SEQ ID NO: 885476 - RNA, 22 nt, Human
uuaugacagaaaugaaaagcug

SEQ ID NO: 885477 - RNA, 22 nt, Human
gaggccacgguuuuccuugggg

SEQ ID NO: 885478 - RNA, 22 nt, Human
cugugcagcuggcuuccuggaa

SEQ ID NO: 885479 - RNA, 22 nt, Human
gugcuuuccauccucccugcug

SEQ ID NO: 885480 - RNA, 22 nt, Human
cacaaagcccucccugcgccag

SEQ ID NO: 885481 - RNA, 22 nt, Human
accugaggcuguuagucuaggu

SEQ ID NO: 885482 - RNA, 22 nt, Human
ucagaauuggaacgugaagauu

SEQ ID NO: 885483 - RNA, 22 nt, Human
uucaucuugauggcuuccuaau

SEQ ID NO: 885484 - RNA, 19 nt, Human
ugaggggcucacagucuca

SEQ ID NO: 885485 - RNA, 22 nt, Human
ugggaauacaaguuauucaccu

SEQ ID NO: 885486 - RNA, 22 nt, Human
ccugggauuuccugagcacucu

SEQ ID NO: 885487 - RNA, 22 nt, Human
cuuggugcccagcagguggcug

SEQ ID NO: 885488 - RNA, 22 nt, Human
aaggccuuucuuaucaguagau

SEQ ID NO: 885489 - RNA, 22 nt, Human
aggcagguguuaacccucugag

SEQ ID NO: 885490 - RNA, 22 nt, Human
aggcuuuugcucuggcuccucu

SEQ ID NO: 885491 - RNA, 22 nt, Human
acaugcauguuguguagggggg

SEQ ID NO: 885492 - RNA, 22 nt, Human
ugggaagauggagugacaggca

SEQ ID NO: 885493 - RNA, 22 nt, Human
caggguggaauggaaugcuggc

SEQ ID NO: 885494 - RNA, 22 nt, Human
ugcaggaguuaagugcucuccu

SEQ ID NO: 885495 - RNA, 22 nt, Human
ugucagugugcaccgggaggcc

SEQ ID NO: 885496 - RNA, 22 nt, Human
cacacagcucaggggcacugcc

SEQ ID NO: 885497 - RNA, 23 nt, Human
ccagcuccgugagccucgggcuc

SEQ ID NO: 885498 - RNA, 22 nt, Human
ugggaccugcuccuggaaugag

SEQ ID NO: 885499 - RNA, 20 nt, Human
ugggaguacaaucaugagca

SEQ ID NO: 885500 - RNA, 22 nt, Human
gcagagcugggucuguauccaa

SEQ ID NO: 885501 - RNA, 22 nt, Human
uagaaacagaauaugagugaga

SEQ ID NO: 885502 - RNA, 22 nt, Human
uuugaucaugaagaggauaaac

SEQ ID NO: 885503 - RNA, 22 nt, Human
ugucuuuuaccuaaugagcugg

SEQ ID NO: 885504 - RNA, 22 nt, Human
ggccuggaaugcuuuccuacca

SEQ ID NO: 885505 - RNA, 22 nt, Human
aaugguaaauguaacagcauuc

SEQ ID NO: 885506 - RNA, 22 nt, Human
ggcuguguuucuguuugacauu

SEQ ID NO: 885507 - RNA, 22 nt, Human
gagcagcuggacaggccucccu

SEQ ID NO: 885508 - RNA, 19 nt, Human
gccuggcaguguacaaggc

SEQ ID NO: 885509 - RNA, 22 nt, Human
aggcagcuucugauuagcagcg

SEQ ID NO: 885510 - RNA, 22 nt, Human
ugugaauaccuugaauucauca

SEQ ID NO: 885511 - RNA, 22 nt, Human
aaggcucaauuaacuaagaagu

SEQ ID NO: 885512 - RNA, 22 nt, Human
gacaggggcuuugcaugcuuua

SEQ ID NO: 885513 - RNA, 22 nt, Human
ggccucaguuucuucaacugua

SEQ ID NO: 885514 - RNA, 22 nt, Human
cacuagagguugaugagaggug

SEQ ID NO: 885515 - RNA, 20 nt, Human
auuuguuucuacucucugac

SEQ ID NO: 885516 - RNA, 22 nt, Human
aagugcaguggcgugaucuugg

SEQ ID NO: 885517 - RNA, 22 nt, Human
gcucugccagacacuguggcca

SEQ ID NO: 885518 - RNA, 22 nt, Human
gggagguguucugccaacgcgg

SEQ ID NO: 885519 - RNA, 22 nt, Human
ugcaggcuguaaucugaggcua

SEQ ID NO: 885520 - RNA, 22 nt, Human
ucuucauacaauuucagacauc

SEQ ID NO: 885521 - RNA, 22 nt, Human
ugagguucaguucuuggccaca

SEQ ID NO: 885522 - RNA, 22 nt, Human
caccagcuuacagucucacccc

SEQ ID NO: 885523 - RNA, 22 nt, Human
gccugucucuuggaacuuggua

SEQ ID NO: 885524 - RNA, 22 nt, Human
ugcugugggcaguacauaagcu

SEQ ID NO: 885525 - RNA, 22 nt, Human
gugcuuaauacaugucaauaac

SEQ ID NO: 885526 - RNA, 22 nt, Human
ugcaaauaagcuauuauggaau

SEQ ID NO: 885527 - RNA, 22 nt, Human
ugagaaaagguugagaugauaa

SEQ ID NO: 885528 - RNA, 22 nt, Human
ccuggcucugcgugcagcuccg

SEQ ID NO: 885529 - RNA, 22 nt, Human
uuucauugacaguugggggaaa

SEQ ID NO: 885530 - RNA, 22 nt, Human
uucuccagacccuccugcagac

SEQ ID NO: 885531 - RNA, 22 nt, Human
gcuuucugaugagcuuaagaaa

SEQ ID NO: 885532 - RNA, 22 nt, Human
gcuucagacugugcuucuguug

SEQ ID NO: 885533 - RNA, 22 nt, Human
gugugcaugugcuugcacagau

SEQ ID NO: 885534 - RNA, 22 nt, Human
acagggugacuuugugacagau

SEQ ID NO: 885535 - RNA, 22 nt, Human
aagcugccaccagcccagggca

SEQ ID NO: 885536 - RNA, 22 nt, Human
aaaucagucccucuuggaauuu

SEQ ID NO: 885537 - RNA, 22 nt, Human
acagugaaaaguagcuaacaca

SEQ ID NO: 885538 - RNA, 22 nt, Human
ggcagcucugcuaauugagccu

SEQ ID NO: 885539 - RNA, 22 nt, Human
aggucacagcuuucucgugagg

SEQ ID NO: 885540 - RNA, 22 nt, Human
uauuuugaaagucuguuuugaa

SEQ ID NO: 885541 - RNA, 22 nt, Human
uccuggggcucuuugaugugau

SEQ ID NO: 885542 - RNA, 22 nt, Human
uuacaagaugggaaagggaagu

SEQ ID NO: 885543 - RNA, 22 nt, Human
uguucuaaauuugcauggucca

SEQ ID NO: 885544 - RNA, 22 nt, Human
gcagagugggagcccagggcug

SEQ ID NO: 885545 - RNA, 22 nt, Human
ugcagggcaguuuguuucggca

SEQ ID NO: 885546 - RNA, 22 nt, Human
ccuagcagaagcugcaaugccu

SEQ ID NO: 885547 - RNA, 22 nt, Human
uucuggaaaugcacaacuaauu

SEQ ID NO: 885548 - RNA, 22 nt, Human
gcagccagggcuaagcugggga

SEQ ID NO: 885549 - RNA, 22 nt, Human
caggggcucugagauugucuaa

SEQ ID NO: 885550 - RNA, 22 nt, Human
ucugccuguugcuagaauguca

SEQ ID NO: 885551 - RNA, 22 nt, Human
cccuccagccauggacccaggu

SEQ ID NO: 885552 - RNA, 22 nt, Human
ugcagagaaaccaguggaggac

SEQ ID NO: 885553 - RNA, 22 nt, Human
cucugugucugaagcccuauuu

SEQ ID NO: 885554 - RNA, 22 nt, Human
gugaugucagcaagaauaggaa

SEQ ID NO: 885555 - RNA, 22 nt, Human
aggcaggcucaggcccaugcuu

SEQ ID NO: 885556 - RNA, 22 nt, Human
gcagcagcggggccccugcgcg

SEQ ID NO: 885557 - RNA, 22 nt, Human
gaacauuauuguacaaaugucu

SEQ ID NO: 885558 - RNA, 22 nt, Human
ucuuuuaaaagcccugcugucu

SEQ ID NO: 885559 - RNA, 22 nt, Human
aauggagacugacacaaagaua

SEQ ID NO: 885560 - RNA, 22 nt, Human
cacagcuggugacagagcccag

SEQ ID NO: 885561 - RNA, 22 nt, Human
auagacauagccguaauuuauu

SEQ ID NO: 885562 - RNA, 22 nt, Human
gccuuggcugaugugcgaauga

SEQ ID NO: 885563 - RNA, 20 nt, Human
ugguugaauuuuuagugacc

SEQ ID NO: 885564 - RNA, 22 nt, Human
gccuggcaggccugggccagca

SEQ ID NO: 885565 - RNA, 22 nt, Human
acaggacuguggaaggaucucu

SEQ ID NO: 885566 - RNA, 22 nt, Human
ugugucaggagauagcaaaggg

SEQ ID NO: 885567 - RNA, 22 nt, Human
uaacauuacagacaccuugugu

SEQ ID NO: 885568 - RNA, 22 nt, Human
cagggccuggagcugggccugc

SEQ ID NO: 885569 - RNA, 22 nt, Human
uuuuccuucugauacuccauuu

SEQ ID NO: 885570 - RNA, 22 nt, Human
gccaggcuaagaaaggugugau

SEQ ID NO: 885571 - RNA, 22 nt, Human
ugggaccugcucuuggaaugag

SEQ ID NO: 885572 - RNA, 23 nt, Human
ucagugugcaagaauggagaagc

SEQ ID NO: 885573 - RNA, 22 nt, Human
gagcugaguuaccuccagauca

SEQ ID NO: 885574 - RNA, 22 nt, Human
ugagauggggagggcugcagaa

SEQ ID NO: 885575 - RNA, 22 nt, Human
auuggaacugauugaugauaau

SEQ ID NO: 885576 - RNA, 22 nt, Human
aaagaguuuccauugacauuuc

SEQ ID NO: 885577 - RNA, 22 nt, Human
caagguuugaaaacgccauggc

SEQ ID NO: 885578 - RNA, 22 nt, Human
uaguacaguggcauucaaacuu

SEQ ID NO: 885579 - RNA, 22 nt, Human
gaacaaggauucccaaagaaga

SEQ ID NO: 885580 - RNA, 22 nt, Human
uuuuagaaucagguugucuggg

SEQ ID NO: 885581 - RNA, 22 nt, Human
ggagcauguggggugagcaggg

SEQ ID NO: 885582 - RNA, 22 nt, Human
gugccgcgacgcagucggugcc

SEQ ID NO: 885583 - RNA, 22 nt, Human
agcauuugauauguuuaaaaag

SEQ ID NO: 885584 - RNA, 22 nt, Human
gaagccacuauagauauucuaa

SEQ ID NO: 885585 - RNA, 22 nt, Human
cagcagccagacaagauacauc

SEQ ID NO: 885586 - RNA, 22 nt, Human
uaagaguaagugauuaagaaga

SEQ ID NO: 885587 - RNA, 22 nt, Human
uagggggcuuugcugcuugaca

SEQ ID NO: 885588 - RNA, 22 nt, Human
augugucuggcauggaaagugu

SEQ ID NO: 885589 - RNA, 22 nt, Human
ccugggcaggaugggcccggug

SEQ ID NO: 885590 - RNA, 22 nt, Human
uuccuucagcaaguccugagca

SEQ ID NO: 885591 - RNA, 22 nt, Human
gugcuuaaggcagucugucaaa

SEQ ID NO: 885592 - RNA, 22 nt, Human
aagggcaggcacccacccucac

SEQ ID NO: 885593 - RNA, 22 nt, Human
aggaaccagagguugagcaacu

SEQ ID NO: 885594 - RNA, 22 nt, Human
aggccaagauuuuggaucagcu

SEQ ID NO: 885595 - RNA, 22 nt, Human
ucugccacuguggccaugggag

SEQ ID NO: 885596 - RNA, 22 nt, Human
uuugcuuaaaguucuuucuggu

SEQ ID NO: 885597 - RNA, 22 nt, Human
cauaaauuguacccauuccaac

SEQ ID NO: 885598 - RNA, 22 nt, Human
uuuuggugcccugguucccacc

SEQ ID NO: 885599 - RNA, 20 nt, Human
aguggggagucaggagugcc

SEQ ID NO: 885600 - RNA, 22 nt, Human
aagcaaauauuucuagagacug

SEQ ID NO: 885601 - RNA, 20 nt, Human
aaguugcagagaguugucuu

SEQ ID NO: 885602 - RNA, 22 nt, Human
uccagaguuguaaguguugaca

SEQ ID NO: 885603 - RNA, 22 nt, Human
cagccacucucagacaguccca

SEQ ID NO: 885604 - RNA, 22 nt, Human
ggccagagucuauaugcagaca

SEQ ID NO: 885605 - RNA, 22 nt, Human
aacaguaguggucaauaugcca

SEQ ID NO: 885606 - RNA, 22 nt, Human
auaacaaguauuuauugagcau

SEQ ID NO: 885607 - RNA, 22 nt, Human
acuagauuuuggccauuauaca

SEQ ID NO: 885608 - RNA, 22 nt, Human
cuuuggugucauguuucugcgg

SEQ ID NO: 885609 - RNA, 17 nt, Human
ucaaauguacagaacua

SEQ ID NO: 885610 - RNA, 21 nt, Human
ugggcucuuuaacccaggcac

SEQ ID NO: 885611 - RNA, 22 nt, Human
aaggccagccugagagcuaaca

SEQ ID NO: 885612 - RNA, 22 nt, Human
aacaugaugacaaagguauauu

SEQ ID NO: 885613 - RNA, 22 nt, Human
cuuccucuguggccagagugua

SEQ ID NO: 885614 - RNA, 22 nt, Human
uacagagaguacagcauccaca

SEQ ID NO: 885615 - RNA, 22 nt, Human
agucauaucugaggaggaaucc

SEQ ID NO: 885616 - RNA, 22 nt, Human
ucuuuaugcacauaaagaaacu

SEQ ID NO: 885617 - RNA, 22 nt, Human
gcagggccuuagcagcggcugc

SEQ ID NO: 885618 - RNA, 21 nt, Human
uggagcugaauuuuuggcauc

SEQ ID NO: 885619 - RNA, 22 nt, Human
ucuacagguggggccuggcaau

SEQ ID NO: 885620 - RNA, 23 nt, Human
gugacccaaggaccuuccagaau

SEQ ID NO: 885621 - RNA, 22 nt, Human
gggcccugcgacucgcggcgga

SEQ ID NO: 885622 - RNA, 22 nt, Human
gaaugaaaaccuuggcucaaau

SEQ ID NO: 885623 - RNA, 22 nt, Human
gagggggcucugccaaccuguc

SEQ ID NO: 885624 - RNA, 20 nt, Human
agggccuguugcaagcguuu

SEQ ID NO: 885625 - RNA, 22 nt, Human
uaaauagagaaucagcuuggag

SEQ ID NO: 885626 - RNA, 22 nt, Human
uuguacagaaaaaauucuuggu

SEQ ID NO: 885627 - RNA, 22 nt, Human
cugccagggcccuacucaguuu

SEQ ID NO: 885628 - RNA, 18 nt, Human
caggcccugucuggccuc

SEQ ID NO: 885629 - RNA, 22 nt, Human
uaacaaaguauuguuuguguau

SEQ ID NO: 885630 - RNA, 21 nt, Human
aaucaaaugucauauccccag

SEQ ID NO: 885631 - RNA, 22 nt, Human
gucucagaccacccucuuuggc

SEQ ID NO: 885632 - RNA, 22 nt, Human
ugaaugaccuuugaggauggaa

SEQ ID NO: 885633 - RNA, 22 nt, Human
uacauuuucuaggggaccaaga

SEQ ID NO: 885634 - RNA, 23 nt, Human
aaaguucuagaaugacuuccugu

SEQ ID NO: 885635 - RNA, 22 nt, Human
acagaauuugcuugggcaaugg

SEQ ID NO: 885636 - RNA, 22 nt, Human
gaggcgagaagcuggagauggu

SEQ ID NO: 885637 - RNA, 20 nt, Human
cuggccagaacgccuacaca

SEQ ID NO: 885638 - RNA, 22 nt, Human
ccuucugcucccuggccagggc

SEQ ID NO: 885639 - RNA, 22 nt, Human
uacaguaaagcugcuaugaauu

SEQ ID NO: 885640 - RNA, 22 nt, Human
uauuaucauuaacuguugaauu

SEQ ID NO: 885641 - RNA, 22 nt, Human
augccaaauucuacuuucagca

SEQ ID NO: 885642 - RNA, 22 nt, Human
aaaagggaaagcagaaugacuu

SEQ ID NO: 885643 - RNA, 23 nt, Human
ucuuuucaaugguucuuuaugug

SEQ ID NO: 885644 - RNA, 21 nt, Human
cacaugcaugcacagguugua

SEQ ID NO: 885645 - RNA, 22 nt, Human
acaauguaggauauguacuugu

SEQ ID NO: 885646 - RNA, 22 nt, Human
uuagaaguacauuuagaacaua

SEQ ID NO: 885647 - RNA, 22 nt, Human
gcaggcaauuuuggaaggucag

SEQ ID NO: 885648 - RNA, 22 nt, Human
gcuccuggucuggagcuucaag

SEQ ID NO: 885649 - RNA, 22 nt, Human
acagagucuuacguggugauaa

SEQ ID NO: 885650 - RNA, 19 nt, Human
cucuggagucauugcuccc

SEQ ID NO: 885651 - RNA, 22 nt, Human
cugggcuuguguuagcugacaa

SEQ ID NO: 885652 - RNA, 22 nt, Human
cagacagagcucacaagucuuu

SEQ ID NO: 885653 - RNA, 22 nt, Human
gaauuucuggacccuuugagaa

SEQ ID NO: 885654 - RNA, 22 nt, Human
acacagagcuggaacugcuuca

SEQ ID NO: 885655 - RNA, 22 nt, Human
gagagcugcauucucagacaca

SEQ ID NO: 885656 - RNA, 22 nt, Human
ugcugcagauugcagauuaacu

SEQ ID NO: 885657 - RNA, 22 nt, Human
gaauuucagagguaacaucauc

SEQ ID NO: 885658 - RNA, 20 nt, Human
uacccagugguggaugguaa

SEQ ID NO: 885659 - RNA, 22 nt, Human
gagcaacacgcaguaguauacg

SEQ ID NO: 885660 - RNA, 22 nt, Human
gagccacagugguggcccacgu

SEQ ID NO: 885661 - RNA, 22 nt, Human
cuaaagauaaggaaaguauccu

SEQ ID NO: 885662 - RNA, 22 nt, Human
gugucuuaggguugcacagagu

SEQ ID NO: 885663 - RNA, 22 nt, Human
uugaaugauuaaagucaucuga

SEQ ID NO: 885664 - RNA, 22 nt, Human
agcagccguauuauggugguuu

SEQ ID NO: 885665 - RNA, 22 nt, Human
gcucagagaaguuaaggaauuu

SEQ ID NO: 885666 - RNA, 19 nt, Human
ucacaaggccucuuagucu

SEQ ID NO: 885667 - RNA, 22 nt, Human
aaaggcuggggacugaggaagg

SEQ ID NO: 885668 - RNA, 22 nt, Human
aacaaguucuaccucacaaggu

SEQ ID NO: 885669 - RNA, 22 nt, Human
ucuccagguagauaugucagga

SEQ ID NO: 885670 - RNA, 23 nt, Human
caaguuauucugacacucaucaa

SEQ ID NO: 885671 - RNA, 22 nt, Human
aagggcagagggaaucccacau

SEQ ID NO: 885672 - RNA, 18 nt, Human
uggcuucugaacaacugc

SEQ ID NO: 885673 - RNA, 22 nt, Human
cccauuuuggaacgaguagcca

SEQ ID NO: 885674 - RNA, 22 nt, Human
aggcagccauccaggaggcuca

SEQ ID NO: 885675 - RNA, 22 nt, Human
cagcuggcccuuugguagccuu

SEQ ID NO: 885676 - RNA, 22 nt, Human
gugugcaggccacaggccaggg

SEQ ID NO: 885677 - RNA, 22 nt, Human
acacuacaacagcagaggugag

SEQ ID NO: 885678 - RNA, 22 nt, Human
gcucuaugucgaaagccaguua

SEQ ID NO: 885679 - RNA, 22 nt, Human
aauggacaaacuugggaaguau

SEQ ID NO: 885680 - RNA, 22 nt, Human
auccauuuuuucagaaugcucu

SEQ ID NO: 885681 - RNA, 22 nt, Human
acugaucuguuuucagauucug

SEQ ID NO: 885682 - RNA, 22 nt, Human
gcuccaggcagcauaguggaug

SEQ ID NO: 885683 - RNA, 22 nt, Human
aaaccuuucucagugcuaaaau

SEQ ID NO: 885684 - RNA, 22 nt, Human
aagacagagggaagcaaugaug

SEQ ID NO: 885685 - RNA, 22 nt, Human
augcuccucgagugucucacag

SEQ ID NO: 885686 - RNA, 22 nt, Human
caaguuuagucauggugguagu

SEQ ID NO: 885687 - RNA, 22 nt, Human
cugccacuuucacccagugcuc

SEQ ID NO: 885688 - RNA, 22 nt, Human
ugcugcaguuauugaaacuaug

SEQ ID NO: 885689 - RNA, 22 nt, Human
acaaaaaccguggauucagcau

SEQ ID NO: 885690 - RNA, 22 nt, Human
uuuacagcuucuauacuaugug

SEQ ID NO: 885691 - RNA, 23 nt, Human
aggcugagcucucccagcuucag

SEQ ID NO: 885692 - RNA, 22 nt, Human
ggaaggcuuuguagaagugcca

SEQ ID NO: 885693 - RNA, 20 nt, Human
aggguggcaaguuagugaca

SEQ ID NO: 885694 - RNA, 22 nt, Human
agaagccauaguaucucagggu

SEQ ID NO: 885695 - RNA, 20 nt, Human
auacacaugcagacagaugc

SEQ ID NO: 885696 - RNA, 17 nt, Human
gccaaaggguuccaauc

SEQ ID NO: 885697 - RNA, 22 nt, Human
gaggggucacaugggcuggcuu

SEQ ID NO: 885698 - RNA, 22 nt, Human
uugacagaaauguauuugcaug

SEQ ID NO: 885699 - RNA, 22 nt, Human
acauaaugaaaugcagaaauca

SEQ ID NO: 885700 - RNA, 22 nt, Human
uagggcagauucgguggaguuu

SEQ ID NO: 885701 - RNA, 22 nt, Human
cauguaaaccauugugagcauc

SEQ ID NO: 885702 - RNA, 22 nt, Human
uuugcauauuaauaucugcgcu

SEQ ID NO: 885703 - RNA, 22 nt, Human
aauacuuugccaaguucgaaga

SEQ ID NO: 885704 - RNA, 21 nt, Human
gggcucagcgcucggcuccuc

SEQ ID NO: 885705 - RNA, 22 nt, Human
ccuucaugauggaaaggguuca

SEQ ID NO: 885706 - RNA, 22 nt, Human
aaugcuuuuugcgaaaugugca

SEQ ID NO: 885707 - RNA, 22 nt, Human
acaguaaggguaaauaagaaca

SEQ ID NO: 885708 - RNA, 22 nt, Human
uuuguguguguauaggaaagga

SEQ ID NO: 885709 - RNA, 22 nt, Human
ucuuauuauuguuguaaaagca

SEQ ID NO: 885710 - RNA, 22 nt, Human
uauuuccugcauggugauguaa

SEQ ID NO: 885711 - RNA, 22 nt, Human
uaagacacaguccgcacucucu

SEQ ID NO: 885712 - RNA, 22 nt, Human
uucuggauauggauuuugguga

SEQ ID NO: 885713 - RNA, 22 nt, Human
aagacauuuauuugaaucaauu

SEQ ID NO: 885714 - RNA, 22 nt, Human
uuuccuugcacauugguuucca

SEQ ID NO: 885715 - RNA, 22 nt, Human
gaauccaggguuguuugagcua

SEQ ID NO: 885716 - RNA, 22 nt, Human
uaagcaggugccuucugugacc

SEQ ID NO: 885717 - RNA, 23 nt, Human
aaugcuggaaauucaggcaugau

SEQ ID NO: 885718 - RNA, 21 nt, Human
aggcuguccuuugccagcccu

SEQ ID NO: 885719 - RNA, 22 nt, Human
ccugcagguccccggaugcgca

SEQ ID NO: 885720 - RNA, 22 nt, Human
gaaaggcucacuuuagaucaug

SEQ ID NO: 885721 - RNA, 22 nt, Human
gggaauaggacaaaugaaggag

SEQ ID NO: 885722 - RNA, 20 nt, Human
gggaguggugguagccugug

SEQ ID NO: 885723 - RNA, 22 nt, Human
gcugggaaugauuuuggagagg

SEQ ID NO: 885724 - RNA, 22 nt, Human
aaagacauugaagaaggacuua

SEQ ID NO: 885725 - RNA, 22 nt, Human
uaguuacagugcauagcaagau

SEQ ID NO: 885726 - RNA, 23 nt, Human
cuauuucucauaguucaggucuu

SEQ ID NO: 885727 - RNA, 22 nt, Human
aggggaagagcccuuuacaugg

SEQ ID NO: 885728 - RNA, 22 nt, Human
agccagggaaggauaacaagaa

SEQ ID NO: 885729 - RNA, 22 nt, Human
gcucugcugcuuacuagauggu

SEQ ID NO: 885730 - RNA, 22 nt, Human
uggcuuucgcuauagagcacgg

SEQ ID NO: 885731 - RNA, 22 nt, Human
aagauucuuauuagguaauuuu

SEQ ID NO: 885732 - RNA, 22 nt, Human
ugguggcuucugaggauggcga

SEQ ID NO: 885733 - RNA, 22 nt, Human
uucaauucugcucugaucuuag

SEQ ID NO: 885734 - RNA, 22 nt, Human
cccagaggaggcaaagcucugu

SEQ ID NO: 885735 - RNA, 22 nt, Human
uucuuaacucaaauauauaucc

SEQ ID NO: 885736 - RNA, 22 nt, Human
cacagugcaugaugggcagaag

SEQ ID NO: 885737 - RNA, 22 nt, Human
uuauacauguuuauaagguuga

SEQ ID NO: 885738 - RNA, 22 nt, Human
cagucagggacaccagcuagga

SEQ ID NO: 885739 - RNA, 22 nt, Human
uuugguuugaaugagcauaaga

SEQ ID NO: 885740 - RNA, 22 nt, Human
acuacaaaagcacuggguauua

SEQ ID NO: 885741 - RNA, 22 nt, Human
ugccuugguuuccccaucugua

SEQ ID NO: 885742 - RNA, 22 nt, Human
ggacccuuggcuucugcagauu

SEQ ID NO: 885743 - RNA, 16 nt, Human
cucuuuggcuuccaag

SEQ ID NO: 885744 - RNA, 19 nt, Human
agagaaagaauugagucua

SEQ ID NO: 885745 - RNA, 23 nt, Human
aggcccagguauguuuguuuugg

SEQ ID NO: 885746 - RNA, 22 nt, Human
aguucugccuauauagaaacuc

SEQ ID NO: 885747 - RNA, 22 nt, Human
uucugagcaagcuggacagucu

SEQ ID NO: 885748 - RNA, 22 nt, Human
uccugcagcugcagaccugggg

SEQ ID NO: 885749 - RNA, 22 nt, Human
gcacaaagaugaauacagaaug

SEQ ID NO: 885750 - RNA, 22 nt, Human
ugcuuucuccugucugaaagau

SEQ ID NO: 885751 - RNA, 22 nt, Human
guggaaggugcuagaacaagga

SEQ ID NO: 885752 - RNA, 22 nt, Human
guagcuauuuaugauacucaug

SEQ ID NO: 885753 - RNA, 22 nt, Human
gaaaucaaacccuuuucugaua

SEQ ID NO: 885754 - RNA, 22 nt, Human
ugacaacaaggauccugccugg

SEQ ID NO: 885755 - RNA, 22 nt, Human
cuggagaguaaucucuguguua

SEQ ID NO: 885756 - RNA, 19 nt, Human
aggguggcaaaggagggug

SEQ ID NO: 885757 - RNA, 22 nt, Human
cucuccauucccuacaguuuuc

SEQ ID NO: 885758 - RNA, 22 nt, Human
agcaauauuuaaagguuugcaa

SEQ ID NO: 885759 - RNA, 22 nt, Human
uugucucuggaaggaaaaagca

SEQ ID NO: 885760 - RNA, 22 nt, Human
ucuguguguugucaggaggauu

SEQ ID NO: 885761 - RNA, 22 nt, Human
ugagcuguagcagaugcuguug

SEQ ID NO: 885762 - RNA, 22 nt, Human
aguggcugauguaggcaguggg

SEQ ID NO: 885763 - RNA, 22 nt, Human
ucugugggggugucuuaaccua

SEQ ID NO: 885764 - RNA, 22 nt, Human
guaaagaaguuuuugaaugcau

SEQ ID NO: 885765 - RNA, 22 nt, Human
acuguucugcauguaccugagg

SEQ ID NO: 885766 - RNA, 22 nt, Human
agcaguuuggaaaauacuagaa

SEQ ID NO: 885767 - RNA, 22 nt, Human
cacucugagaaguacaagcucc

SEQ ID NO: 885768 - RNA, 22 nt, Human
caguucagcuagaagaaacaaa

SEQ ID NO: 885769 - RNA, 22 nt, Human
ucacauuuucuacuacuguacg

SEQ ID NO: 885770 - RNA, 21 nt, Human
cgacaguguauagauuagagc

SEQ ID NO: 885771 - RNA, 21 nt, Human
ucucugagacacucuggagcc

SEQ ID NO: 885772 - RNA, 22 nt, Human
ugcaggagaaaguacggagcgu

SEQ ID NO: 885773 - RNA, 18 nt, Human
agaagccugccucaaugc

SEQ ID NO: 885774 - RNA, 22 nt, Human
agugucugaaccugcaguggga

SEQ ID NO: 885775 - RNA, 22 nt, Human
gagaauuucccagucugugcug

SEQ ID NO: 885776 - RNA, 22 nt, Human
cagugaggaugauaauuaaggu

SEQ ID NO: 885777 - RNA, 22 nt, Human
augaaacaaaccucuauggagu

SEQ ID NO: 885778 - RNA, 22 nt, Human
aaagaagguagggcuggugacu

SEQ ID NO: 885779 - RNA, 22 nt, Human
auugcacagcugaauauuuugg

SEQ ID NO: 885780 - RNA, 22 nt, Human
uuagaagugggccuauaguccu

SEQ ID NO: 885781 - RNA, 18 nt, Human
gcagauggagauucaggg

SEQ ID NO: 885782 - RNA, 22 nt, Human
ccagccuggagggcaguggugg

SEQ ID NO: 885783 - RNA, 22 nt, Human
uucugggcagagcuggagcugc

SEQ ID NO: 885784 - RNA, 22 nt, Human
uuugaagacauauuguuacaua

SEQ ID NO: 885785 - RNA, 22 nt, Human
gguauaguauuauuugaaagag

SEQ ID NO: 885786 - RNA, 19 nt, Human
ucccaggaaccuuuuauuu

SEQ ID NO: 885787 - RNA, 22 nt, Human
uuccagcuaacucacaucccuu

SEQ ID NO: 885788 - RNA, 22 nt, Human
aaauauagugacacuuauaguc

SEQ ID NO: 885789 - RNA, 21 nt, Human
agccagcaacacagcaucucc

SEQ ID NO: 885790 - RNA, 23 nt, Human
aucaccagcggaagcugcagacc

SEQ ID NO: 885791 - RNA, 22 nt, Human
uucuucaguguagcaacuguau

SEQ ID NO: 885792 - RNA, 22 nt, Human
uggcagauguggcauagagcau

SEQ ID NO: 885793 - RNA, 22 nt, Human
gccagcagguugucaaggagcu

SEQ ID NO: 885794 - RNA, 22 nt, Human
gagguuuuaaguugaaggggga

SEQ ID NO: 885795 - RNA, 22 nt, Human
aucuacaaugucuggcugcacu

SEQ ID NO: 885796 - RNA, 22 nt, Human
uuguguacuguugguugauauu

SEQ ID NO: 885797 - RNA, 22 nt, Human
ucacauucucagcaucuauaca

SEQ ID NO: 885798 - RNA, 22 nt, Human
ugucugaaucucgguuuccuca

SEQ ID NO: 885799 - RNA, 22 nt, Human
ccaggcucugucuggucagaag

SEQ ID NO: 885800 - RNA, 22 nt, Human
acacaucagaaauaugaaugag

SEQ ID NO: 885801 - RNA, 22 nt, Human
uacauugaacuaugaguucagu

SEQ ID NO: 885802 - RNA, 19 nt, Human
aagcauggugccucaccuc

SEQ ID NO: 885803 - RNA, 22 nt, Human
ugauucaacuuucuugaaugca

SEQ ID NO: 885804 - RNA, 22 nt, Human
aucuguguaugaaaguauaacu

SEQ ID NO: 885805 - RNA, 22 nt, Human
ucuuaaaggcacauagugucua

SEQ ID NO: 885806 - RNA, 22 nt, Human
uagacugugagcuccuugaggg

SEQ ID NO: 885807 - RNA, 22 nt, Human
caacaugccagacauuaguuug

SEQ ID NO: 885808 - RNA, 21 nt, Human
aguucauacugaguaacaaaa

SEQ ID NO: 885809 - RNA, 22 nt, Human
uagcugugaaacagcagaagag

SEQ ID NO: 885810 - RNA, 22 nt, Human
ugggagcucugagccugcugug

SEQ ID NO: 885811 - RNA, 22 nt, Human
ugaucagacaguuaugugcaug

SEQ ID NO: 885812 - RNA, 22 nt, Human
uuggaaggaagaaccgcgguag

SEQ ID NO: 885813 - RNA, 22 nt, Human
auacaucuuccuuuuaaaaugc

SEQ ID NO: 885814 - RNA, 22 nt, Human
ugagacaggagaggccccuccu

SEQ ID NO: 885815 - RNA, 22 nt, Human
caggcuggcaaugcgucaagca

SEQ ID NO: 885816 - RNA, 22 nt, Human
acaaggcaguacaaugaugaca

SEQ ID NO: 885817 - RNA, 22 nt, Human
acuggguguaaaggacuuaagc

SEQ ID NO: 885818 - RNA, 22 nt, Human
gagcccagggcaggcaaggcag

SEQ ID NO: 885819 - RNA, 22 nt, Human
aggugcagugaaggaaaaggaa

SEQ ID NO: 885820 - RNA, 22 nt, Human
gagaggcuuaagggcugugaag

SEQ ID NO: 885821 - RNA, 23 nt, Human
aggugcagcccuggaccugcccc

SEQ ID NO: 885822 - RNA, 19 nt, Human
aggugacaugugacagccu

SEQ ID NO: 885823 - RNA, 22 nt, Human
guccccuggcccccagcgucgg

SEQ ID NO: 885824 - RNA, 22 nt, Human
ccaggggcucucagggugugug

SEQ ID NO: 885825 - RNA, 17 nt, Human
gcugcagcgguaggcag

SEQ ID NO: 885826 - RNA, 22 nt, Human
ugagcuaggugugcagauauga

SEQ ID NO: 885827 - RNA, 22 nt, Human
uucuuucugaauacaguugagu

SEQ ID NO: 885828 - RNA, 20 nt, Human
ccuggcuuugcaucugugau

SEQ ID NO: 885829 - RNA, 22 nt, Human
ccaggucugucuucuuagcuca

SEQ ID NO: 885830 - RNA, 22 nt, Human
uagacauuuggcaugguuuuca

SEQ ID NO: 885831 - RNA, 22 nt, Human
auauacaguauguacugugguu

SEQ ID NO: 885832 - RNA, 22 nt, Human
gagcaagacuacaggcagauga

SEQ ID NO: 885833 - RNA, 22 nt, Human
cugaagccacgauagcuuccua

SEQ ID NO: 885834 - RNA, 22 nt, Human
aucaggaaaaauugugaaaggg

SEQ ID NO: 885835 - RNA, 22 nt, Human
acauucuuauaagagugaggca

SEQ ID NO: 885836 - RNA, 22 nt, Human
gcagaugcuguggugauagaag

SEQ ID NO: 885837 - RNA, 22 nt, Human
agaggcaggagguugacuugag

SEQ ID NO: 885838 - RNA, 22 nt, Human
augaggcaugugaggagaaggg

SEQ ID NO: 885839 - RNA, 22 nt, Human
ucuuggcaauuugaucucaguu

SEQ ID NO: 885840 - RNA, 22 nt, Human
gcagacagcauguugggcuauu

SEQ ID NO: 885841 - RNA, 20 nt, Human
gugcuucagaagccauugcu

SEQ ID NO: 885842 - RNA, 22 nt, Human
guucagugauucucgguguuca

SEQ ID NO: 885843 - RNA, 22 nt, Human
aggucaccauggcaugcuccac

SEQ ID NO: 885844 - RNA, 21 nt, Human
ucagggcagugggagguuccu

SEQ ID NO: 885845 - RNA, 22 nt, Human
auuugcauuuagaaagaucacu

SEQ ID NO: 885846 - RNA, 22 nt, Human
uuuguguuguacuucugugcau

SEQ ID NO: 885847 - RNA, 19 nt, Human
agccagcagcguagcaucu

SEQ ID NO: 885848 - RNA, 22 nt, Human
uccaggccaggguaagaggaga

SEQ ID NO: 885849 - RNA, 22 nt, Human
ggcagcuccaaaaggaaacacu

SEQ ID NO: 885850 - RNA, 22 nt, Human
auucaucuaugacucuaaugug

SEQ ID NO: 885851 - RNA, 22 nt, Human
cccugccugugggcaucaacau

SEQ ID NO: 885852 - RNA, 22 nt, Human
gcugccucaggcaccuccuggc

SEQ ID NO: 885853 - RNA, 22 nt, Human
uagaguccugugugcucugugg

SEQ ID NO: 885854 - RNA, 22 nt, Human
gccaggcaguucaaguacacca

SEQ ID NO: 885855 - RNA, 22 nt, Human
guuuucuuccugcaauuggcau

SEQ ID NO: 885856 - RNA, 22 nt, Human
gugccugguuuggggaguguuc

SEQ ID NO: 885857 - RNA, 22 nt, Human
ucuguggcacgauugcacugca

SEQ ID NO: 885858 - RNA, 22 nt, Human
gccacagccucugggaaaacuc

SEQ ID NO: 885859 - RNA, 22 nt, Human
cagcagcuguuuacggaacacc

SEQ ID NO: 885860 - RNA, 22 nt, Human
auagacauuuugcauucaagca

SEQ ID NO: 885861 - RNA, 22 nt, Human
agagcuggacgucugagcccua

SEQ ID NO: 885862 - RNA, 22 nt, Human
uugcucugauuagguggaaaca

SEQ ID NO: 885863 - RNA, 23 nt, Human
gccuccuagcaguaaacauguua

SEQ ID NO: 885864 - RNA, 22 nt, Human
ggccccagcuguggugaauaga

SEQ ID NO: 885865 - RNA, 22 nt, Human
cuccuccaguccuccaaggaca

SEQ ID NO: 885866 - RNA, 22 nt, Human
gcaggguggauggcagggccag

SEQ ID NO: 885867 - RNA, 22 nt, Human
ccagcucaucucagugaaaugc

SEQ ID NO: 885868 - RNA, 22 nt, Human
acuguaaaguuacgaucaaguu

SEQ ID NO: 885869 - RNA, 22 nt, Human
cugcacagcugggcaagauaua

SEQ ID NO: 885870 - RNA, 22 nt, Human
uggcacugaccccaggccugug

SEQ ID NO: 885871 - RNA, 22 nt, Human
ucauuucuccgaccugcugucc

SEQ ID NO: 885872 - RNA, 22 nt, Human
agaaggaguguacaggucaugc

SEQ ID NO: 885873 - RNA, 22 nt, Human
gcagggcacaaggacgcacagg

SEQ ID NO: 885874 - RNA, 22 nt, Human
auacaaaggaacacaggcaugu

SEQ ID NO: 885875 - RNA, 22 nt, Human
aacagugagaagguggacagga

SEQ ID NO: 885876 - RNA, 22 nt, Human
aaucagccauuuuuccaaggag

SEQ ID NO: 885877 - RNA, 22 nt, Human
uuuucauuuacauuagggaaga

SEQ ID NO: 885878 - RNA, 22 nt, Human
aaggcagcccuggcucagccug

SEQ ID NO: 885879 - RNA, 22 nt, Human
cuuucauaauucagcacauuga

SEQ ID NO: 885880 - RNA, 22 nt, Human
gggcugagcuaagcuggguuga

SEQ ID NO: 885881 - RNA, 22 nt, Human
uuauuaaucuuaucuuuggaaa

SEQ ID NO: 885882 - RNA, 22 nt, Human
acuuugugcccaacagaaagaa

SEQ ID NO: 885883 - RNA, 21 nt, Human
cauugagauaggagagauugu

SEQ ID NO: 885884 - RNA, 22 nt, Human
gagcugaggcucaggcuggcgu

SEQ ID NO: 885885 - RNA, 22 nt, Human
aaggccagauucacuuuacaau

SEQ ID NO: 885886 - RNA, 22 nt, Human
aguggcuguuccaggugaggac

SEQ ID NO: 885887 - RNA, 22 nt, Human
uauuugaaggcauacauuuuga

SEQ ID NO: 885888 - RNA, 20 nt, Human
gcaauguugguuccugucac

SEQ ID NO: 885889 - RNA, 22 nt, Human
ugcuggccaacaaggcuccaag

SEQ ID NO: 885890 - RNA, 22 nt, Human
uuuagugccugggccaguucca

SEQ ID NO: 885891 - RNA, 22 nt, Human
caugcaaacacguaaacauuca

SEQ ID NO: 885892 - RNA, 22 nt, Human
ucacucuguuuuacucacuguu

SEQ ID NO: 885893 - RNA, 22 nt, Human
gcugggcagccccuacagagag

SEQ ID NO: 885894 - RNA, 21 nt, Human
agacucuggggaucucugucc

SEQ ID NO: 885895 - RNA, 22 nt, Human
agaaugcauuuuguguagcuau

SEQ ID NO: 885896 - RNA, 22 nt, Human
caagaggcaaauugucuagaag

SEQ ID NO: 885897 - RNA, 22 nt, Human
gcugggagaggcagcuuucgga

SEQ ID NO: 885898 - RNA, 22 nt, Human
gagaaggagcucaaauauggcu

SEQ ID NO: 885899 - RNA, 22 nt, Human
cuuuuauuuugaauuaagggcu

SEQ ID NO: 885900 - RNA, 22 nt, Human
uuucaugugcaauuagcaauau

SEQ ID NO: 885901 - RNA, 22 nt, Human
ugggggagaguuuagaugauuu

SEQ ID NO: 885902 - RNA, 22 nt, Human
ugggacuucaaugcaaugaggu

SEQ ID NO: 885903 - RNA, 22 nt, Human
uauguaaguugcaaaugaagga

SEQ ID NO: 885904 - RNA, 22 nt, Human
augucuuuuaugauuacgggau

SEQ ID NO: 885905 - RNA, 22 nt, Human
uacaugcacaugaacaugugug

SEQ ID NO: 885906 - RNA, 22 nt, Human
gucagcgugcucagccuauuau

SEQ ID NO: 885907 - RNA, 22 nt, Human
augaaugaaugagaguagguca

SEQ ID NO: 885908 - RNA, 22 nt, Human
gugaaaaaugauuuguuaacug

SEQ ID NO: 885909 - RNA, 22 nt, Human
ccuggcagcaggugggcccgug

SEQ ID NO: 885910 - RNA, 22 nt, Human
agcuggcuuugagcugggaggu

SEQ ID NO: 885911 - RNA, 22 nt, Human
augacaggaauaacuaugaugg

SEQ ID NO: 885912 - RNA, 22 nt, Human
ucccagcugagauugagcaagg

SEQ ID NO: 885913 - RNA, 22 nt, Human
aggcaggcuggucugaagagug

SEQ ID NO: 885914 - RNA, 22 nt, Human
cacagcuucugucugacccaug

SEQ ID NO: 885915 - RNA, 22 nt, Human
cagcagagggagccauugaaau

SEQ ID NO: 885916 - RNA, 22 nt, Human
cagagcaccagugggagacaag

SEQ ID NO: 885917 - RNA, 22 nt, Human
cugcagggccauggguucuaua

SEQ ID NO: 885918 - RNA, 17 nt, Human
ugcugccaagucccaac

SEQ ID NO: 885919 - RNA, 22 nt, Human
guguacaguaagugaaucuagg

SEQ ID NO: 885920 - RNA, 22 nt, Human
agcaucuuuaggaagagaaaga

SEQ ID NO: 885921 - RNA, 22 nt, Human
aguucuauuucuaacauguuau

SEQ ID NO: 885922 - RNA, 22 nt, Human
gggcuucucccuaaggacucug

SEQ ID NO: 885923 - RNA, 22 nt, Human
gaaggggaguggcuagugugug

SEQ ID NO: 885924 - RNA, 22 nt, Human
caggcccacgaggcacacagag

SEQ ID NO: 885925 - RNA, 22 nt, Human
gagggugggcuuuguuccucca

SEQ ID NO: 885926 - RNA, 19 nt, Human
acccauuuucaguauuggc

SEQ ID NO: 885927 - RNA, 22 nt, Human
ugcaugaacggaggguaagcug

SEQ ID NO: 885928 - RNA, 22 nt, Human
uuacuagccaugugugagaaga

SEQ ID NO: 885929 - RNA, 21 nt, Human
gcuccuggugcugcguggcgc

SEQ ID NO: 885930 - RNA, 22 nt, Human
uggcucagaggggaagugguuu

SEQ ID NO: 885931 - RNA, 22 nt, Human
ccauuuuucauaaacuauccaa

SEQ ID NO: 885932 - RNA, 22 nt, Human
gaucaacaacuuuugaauagcu

SEQ ID NO: 885933 - RNA, 22 nt, Human
caacuauauagaaauugauugu

SEQ ID NO: 885934 - RNA, 22 nt, Human
uggcuggagaacuuggggaucu

SEQ ID NO: 885935 - RNA, 22 nt, Human
ucugggucacugugggagggca

SEQ ID NO: 885936 - RNA, 22 nt, Human
guggucaguuaggcaaucaugu

SEQ ID NO: 885937 - RNA, 22 nt, Human
caauuucuggaacuaauucuga

SEQ ID NO: 885938 - RNA, 22 nt, Human
gcugggcugcgucggggaagcc

SEQ ID NO: 885939 - RNA, 22 nt, Human
caggcugugggagucaggaccc

SEQ ID NO: 885940 - RNA, 22 nt, Human
uguauuuugugaggaucacucu

SEQ ID NO: 885941 - RNA, 22 nt, Human
ucacagaacacaaaugccacuu

SEQ ID NO: 885942 - RNA, 22 nt, Human
uauuagauuuguuucuguagau

SEQ ID NO: 885943 - RNA, 22 nt, Human
ugagagagcgccugggaucauu

SEQ ID NO: 885944 - RNA, 19 nt, Human
agcagcagaagugugccuu

SEQ ID NO: 885945 - RNA, 22 nt, Human
auauuccaguuauaucaaauca

SEQ ID NO: 885946 - RNA, 22 nt, Human
ucucucuuuuuaaucauguaau

SEQ ID NO: 885947 - RNA, 22 nt, Human
aucuguuguuuguuugcuaaag

SEQ ID NO: 885948 - RNA, 23 nt, Human
acauagaacagaauauauuugug

SEQ ID NO: 885949 - RNA, 22 nt, Human
cagcuucuguccuagaaacugg

SEQ ID NO: 885950 - RNA, 22 nt, Human
agaaggaaggaagcauucuguu

SEQ ID NO: 885951 - RNA, 22 nt, Human
agcaauaagggauccucuauaa

SEQ ID NO: 885952 - RNA, 21 nt, Human
cagcagugugucugagcuaga

SEQ ID NO: 885953 - RNA, 22 nt, Human
ucagggaggugucugccagaga

SEQ ID NO: 885954 - RNA, 22 nt, Human
ggucccugcccaccugggagcu

SEQ ID NO: 885955 - RNA, 22 nt, Human
gaggacgugccaggcgaucucc

SEQ ID NO: 885956 - RNA, 22 nt, Human
cagugagggcauucagugcugg

SEQ ID NO: 885957 - RNA, 23 nt, Human
aaagacucuccagagggaaguag

SEQ ID NO: 885958 - RNA, 22 nt, Human
gacuacaggugugugccaccau

SEQ ID NO: 885959 - RNA, 22 nt, Human
auauugcauggcuuugcugguu

SEQ ID NO: 885960 - RNA, 22 nt, Human
gcagguggggcugcuaccagaa

SEQ ID NO: 885961 - RNA, 22 nt, Human
cagaacaguaccuagcacauag

SEQ ID NO: 885962 - RNA, 19 nt, Human
ucaguaacuuuuaagagga

SEQ ID NO: 885963 - RNA, 22 nt, Human
uguaguguuucucagauauuug

SEQ ID NO: 885964 - RNA, 22 nt, Human
gaaauauucuugucuuguuuuc

SEQ ID NO: 885965 - RNA, 21 nt, Human
acaguucugccggcaucuuuc

SEQ ID NO: 885966 - RNA, 22 nt, Human
gccagccacguuagacuggccc

SEQ ID NO: 885967 - RNA, 22 nt, Human
ccuggcagcagcacaugccuuc

SEQ ID NO: 885968 - RNA, 22 nt, Human
accaaaaauuguggggcugaau

SEQ ID NO: 885969 - RNA, 22 nt, Human
cucuuuuucaccucugucagcg

SEQ ID NO: 885970 - RNA, 22 nt, Human
auuuaauuuucucaacagugcu

SEQ ID NO: 885971 - RNA, 22 nt, Human
uucccacagagauuacauugaa

SEQ ID NO: 885972 - RNA, 22 nt, Human
ccagccagaugauaagcucuau

SEQ ID NO: 885973 - RNA, 23 nt, Human
acuuuaagaguauaugacuuccc

SEQ ID NO: 885974 - RNA, 20 nt, Human
cccugagacgacugagcucc

SEQ ID NO: 885975 - RNA, 22 nt, Human
cagcaacuggucauugcucucc

SEQ ID NO: 885976 - RNA, 22 nt, Human
auauuuguuuggcagaguucag

SEQ ID NO: 885977 - RNA, 22 nt, Human
auuucauguugaucuuucgagg

SEQ ID NO: 885978 - RNA, 22 nt, Human
cagaagcacuaggaggaaacgu

SEQ ID NO: 885979 - RNA, 22 nt, Human
gcucuagaucauaggucauuau

SEQ ID NO: 885980 - RNA, 22 nt, Human
uccaugguuucagucuggcugg

SEQ ID NO: 885981 - RNA, 22 nt, Human
ccugagcugacucuccuuucag

SEQ ID NO: 885982 - RNA, 23 nt, Human
gcagagguuauguuuuuuaggcu

SEQ ID NO: 885983 - RNA, 22 nt, Human
uggcuugguaaggaccagcagg

SEQ ID NO: 885984 - RNA, 22 nt, Human
guuuuaugagaccucaggaaua

SEQ ID NO: 885985 - RNA, 22 nt, Human
augucaacaggccuuuaaacau

SEQ ID NO: 885986 - RNA, 22 nt, Human
ugcaaggcugcagagggugcua

SEQ ID NO: 885987 - RNA, 22 nt, Human
cuccagagucacacugccuggg

SEQ ID NO: 885988 - RNA, 22 nt, Human
gagaugggcgagaagguggacu

SEQ ID NO: 885989 - RNA, 20 nt, Human
gccugugucuucucugcugu

SEQ ID NO: 885990 - RNA, 22 nt, Human
aaauuauuauaggcagagcuga

SEQ ID NO: 885991 - RNA, 22 nt, Human
aguuuacaaaguuucacuguuc

SEQ ID NO: 885992 - RNA, 22 nt, Human
aaggcaccauaggcaaauccag

SEQ ID NO: 885993 - RNA, 22 nt, Human
cagcagcaucaggucugugguu

SEQ ID NO: 885994 - RNA, 22 nt, Human
agugauaaugugguaauuauuu

SEQ ID NO: 885995 - RNA, 22 nt, Human
ugucauuccuucaauguagaua

SEQ ID NO: 885996 - RNA, 22 nt, Human
gugcagagagguggagggacuu

SEQ ID NO: 885997 - RNA, 22 nt, Human
aaaguaagaccaagugaucauu

SEQ ID NO: 885998 - RNA, 22 nt, Human
gaagccaggggccugacaggca

SEQ ID NO: 885999 - RNA, 22 nt, Human
uguuagaaguuaaucacuaauu

SEQ ID NO: 886000 - RNA, 22 nt, Human
cucccuucaggagaggcucaca

SEQ ID NO: 886001 - RNA, 21 nt, Human
acuuuaugaccuacccuuuuu

SEQ ID NO: 886002 - RNA, 22 nt, Human
acugaguguaggacuuugaguu

SEQ ID NO: 886003 - RNA, 18 nt, Human
aaagaaggauuggagagc

SEQ ID NO: 886004 - RNA, 22 nt, Human
ggagggagagugacccuaccaa

SEQ ID NO: 886005 - RNA, 22 nt, Human
uuguucagaaguuuaaagaauu

SEQ ID NO: 886006 - RNA, 22 nt, Human
uggguccucgucuuccaaggca

SEQ ID NO: 886007 - RNA, 22 nt, Human
acaaaggcagagaauucaacau

SEQ ID NO: 886008 - RNA, 22 nt, Human
agagcuuugggacauuugcuag

SEQ ID NO: 886009 - RNA, 20 nt, Human
cgauucaguggaguuugaaa

SEQ ID NO: 886010 - RNA, 22 nt, Human
caacagaagguguacuacugaa

SEQ ID NO: 886011 - RNA, 22 nt, Human
auaauuuggcuuccuagaugua

SEQ ID NO: 886012 - RNA, 19 nt, Human
cuccaggauggcugggcga

SEQ ID NO: 886013 - RNA, 22 nt, Human
cuagaauugcauucuaugaaua

SEQ ID NO: 886014 - RNA, 22 nt, Human
gcuggccugagggccgaggcuc

SEQ ID NO: 886015 - RNA, 22 nt, Human
cggcucagacuucccaagaaca

SEQ ID NO: 886016 - RNA, 22 nt, Human
aucauuugaacagaauuuguuu

SEQ ID NO: 886017 - RNA, 22 nt, Human
gcucucuggguggugggcaaca

SEQ ID NO: 886018 - RNA, 22 nt, Human
uauuccuggguuccagcccaga

SEQ ID NO: 886019 - RNA, 22 nt, Human
caggcuucagggaacgcagucu

SEQ ID NO: 886020 - RNA, 22 nt, Human
aucaggaaagaguggaacucug

SEQ ID NO: 886021 - RNA, 22 nt, Human
ugcagcuuugcucuggucccca

SEQ ID NO: 886022 - RNA, 22 nt, Human
ugguuugucuaaaugaguaaua

SEQ ID NO: 886023 - RNA, 21 nt, Human
acuaagagaucucugucucau

SEQ ID NO: 886024 - RNA, 22 nt, Human
auugcagguuguagcccauuag

SEQ ID NO: 886025 - RNA, 22 nt, Human
agcugcagugaauucgcuaacu

SEQ ID NO: 886026 - RNA, 22 nt, Human
ucagcugcugugguauguacau

SEQ ID NO: 886027 - RNA, 22 nt, Human
aaacaguauuaucaauauauuu

SEQ ID NO: 886028 - RNA, 22 nt, Human
uuguuuuaacgacucagcuugu

SEQ ID NO: 886029 - RNA, 22 nt, Human
ccagauuuguaggggcucuuac

SEQ ID NO: 886030 - RNA, 23 nt, Human
gcuaagaaccuggguacgcaacu

SEQ ID NO: 886031 - RNA, 22 nt, Human
cugggccuuuaccuacggaguu

SEQ ID NO: 886032 - RNA, 17 nt, Human
cuggggaugugggacuc

SEQ ID NO: 886033 - RNA, 23 nt, Human
ugcuggcuaagaaucugcauuuu

SEQ ID NO: 886034 - RNA, 22 nt, Human
ucaguguguuacuuucuccuau

SEQ ID NO: 886035 - RNA, 18 nt, Human
cuauuacaaugcaguggu

SEQ ID NO: 886036 - RNA, 22 nt, Human
cuggcuuuuccuaaacugggaa

SEQ ID NO: 886037 - RNA, 22 nt, Human
uaaauuauggcuggcagagcag

SEQ ID NO: 886038 - RNA, 22 nt, Human
cagggggcagcguagaaaauga

SEQ ID NO: 886039 - RNA, 22 nt, Human
cagguauuuucaaggcuugugu

SEQ ID NO: 886040 - RNA, 22 nt, Human
ucugucucuuuguucugugagu

SEQ ID NO: 886041 - RNA, 22 nt, Human
uuugugcuaaugcuagauuacu

SEQ ID NO: 886042 - RNA, 22 nt, Human
uagcaugucagucgccacacgu

SEQ ID NO: 886043 - RNA, 22 nt, Human
augcugagcagagcugacaugc

SEQ ID NO: 886044 - RNA, 22 nt, Human
augguggugaagagcacaguga

SEQ ID NO: 886045 - RNA, 18 nt, Human
uuuaggaauuccaagaga

SEQ ID NO: 886046 - RNA, 22 nt, Human
cuggcuuuuagugugaagacuu

SEQ ID NO: 886047 - RNA, 22 nt, Human
ccaagguuuauuuugauacauu

SEQ ID NO: 886048 - RNA, 22 nt, Human
ucauuguuaauuguaugaucug

SEQ ID NO: 886049 - RNA, 22 nt, Human
ccucuccuugcacccgucccgc

SEQ ID NO: 886050 - RNA, 22 nt, Human
caggcccaucugcucccaggcu

SEQ ID NO: 886051 - RNA, 22 nt, Human
aaauucucaagugauccuguug

SEQ ID NO: 886052 - RNA, 22 nt, Human
aucagagcugcauuuuagagcc

SEQ ID NO: 886053 - RNA, 22 nt, Human
cagagccuggcgaugucaugga

SEQ ID NO: 886054 - RNA, 22 nt, Human
gcagagguuggauuggugacuu

SEQ ID NO: 886055 - RNA, 22 nt, Human
uggccaagaaugauaugugaag

SEQ ID NO: 886056 - RNA, 22 nt, Human
cugcccugugguuguggguucu

SEQ ID NO: 886057 - RNA, 22 nt, Human
cccugagagugagugccaccuu

SEQ ID NO: 886058 - RNA, 22 nt, Human
aauuaggagaaaacuguugucu

SEQ ID NO: 886059 - RNA, 22 nt, Human
ggaugacaaggaaagcaaacca

SEQ ID NO: 886060 - RNA, 22 nt, Human
gagugggggguccgucucagug

SEQ ID NO: 886061 - RNA, 22 nt, Human
guuuaugaggaaaaguuaugau

SEQ ID NO: 886062 - RNA, 22 nt, Human
caagcagagacuagauagcugu

SEQ ID NO: 886063 - RNA, 22 nt, Human
agauaacauguugcagauucug

SEQ ID NO: 886064 - RNA, 22 nt, Human
cuggugaccuugccccagguca

SEQ ID NO: 886065 - RNA, 22 nt, Human
aaugcaaacuucuuguuacuug

SEQ ID NO: 886066 - RNA, 22 nt, Human
gaggcucuuuaaaucuuuugga

SEQ ID NO: 886067 - RNA, 22 nt, Human
auggcccacucuggucccggca

SEQ ID NO: 886068 - RNA, 22 nt, Human
uggagguggggcucaggaaucu

SEQ ID NO: 886069 - RNA, 22 nt, Human
gggcgagggcgaaagcgagagc

SEQ ID NO: 886070 - RNA, 22 nt, Human
cugggaagaagggacaacagcg

SEQ ID NO: 886071 - RNA, 22 nt, Human
agguaaugcauauaaagugcuu

SEQ ID NO: 886072 - RNA, 22 nt, Human
ucaacccuuccuccauauuucc

SEQ ID NO: 886073 - RNA, 22 nt, Human
uuuccagucaccacuagaucag

SEQ ID NO: 886074 - RNA, 22 nt, Human
ggcacagggagccgcaguugca

SEQ ID NO: 886075 - RNA, 22 nt, Human
aauucaaugguuuuuaggauau

SEQ ID NO: 886076 - RNA, 22 nt, Human
uccuaacuccacuagccuuggg

SEQ ID NO: 886077 - RNA, 22 nt, Human
uuucuucucacccaggacagag

SEQ ID NO: 886078 - RNA, 22 nt, Human
ucuauaaaacucaagagcaauu

SEQ ID NO: 886079 - RNA, 19 nt, Human
uguuuucaagugggauuau

SEQ ID NO: 886080 - RNA, 19 nt, Human
uccuucagucagaucuggg

SEQ ID NO: 886081 - RNA, 22 nt, Human
aaagcauuguuucaagauuaac

SEQ ID NO: 886082 - RNA, 20 nt, Human
uuuuccuuguugccgcugcu

SEQ ID NO: 886083 - RNA, 22 nt, Human
uuugauucuaaguucugucaac

SEQ ID NO: 886084 - RNA, 22 nt, Human
ggagaggguguggaaaguuauc

SEQ ID NO: 886085 - RNA, 22 nt, Human
cccagcaugcacgcugacacuc

SEQ ID NO: 886086 - RNA, 22 nt, Human
ucaaucaaugguuuccaaauuu

SEQ ID NO: 886087 - RNA, 19 nt, Human
uucucaguucaggagaaga

SEQ ID NO: 886088 - RNA, 18 nt, Human
gccuguucccuacuaucc

SEQ ID NO: 886089 - RNA, 22 nt, Human
gcccuccaugagacacagugua

SEQ ID NO: 886090 - RNA, 22 nt, Human
uggucagcguuugucagagcag

SEQ ID NO: 886091 - RNA, 22 nt, Human
gugucgugcuugccauggguac

SEQ ID NO: 886092 - RNA, 22 nt, Human
ucuaucugaggaggugacauuu

SEQ ID NO: 886093 - RNA, 22 nt, Human
aggcagauuuaggagaaaagaa

SEQ ID NO: 886094 - RNA, 22 nt, Human
ggcagccauacucagaccuggg

SEQ ID NO: 886095 - RNA, 22 nt, Human
ugcuggcucccaggagccgcug

SEQ ID NO: 886096 - RNA, 22 nt, Human
auaaauucucugauguauagua

SEQ ID NO: 886097 - RNA, 22 nt, Human
agcauuagaagaaaugauuaua

SEQ ID NO: 886098 - RNA, 22 nt, Human
aggacuuuaacauauuaacugu

SEQ ID NO: 886099 - RNA, 23 nt, Human
ugggcaucuccucugugccaggc

SEQ ID NO: 886100 - RNA, 21 nt, Human
uggaaggcugcucugccaggg

SEQ ID NO: 886101 - RNA, 22 nt, Human
ucccagccuggacccugccagu

SEQ ID NO: 886102 - RNA, 22 nt, Human
agaggcucagaggccugguccu

SEQ ID NO: 886103 - RNA, 22 nt, Human
auaugggggggcgugcagagga

SEQ ID NO: 886104 - RNA, 22 nt, Human
ugugccuacugauagagccaag

SEQ ID NO: 886105 - RNA, 21 nt, Human
ucucuccucaagcucgacccc

SEQ ID NO: 886106 - RNA, 22 nt, Human
agcugcaaguguugccuccuac

SEQ ID NO: 886107 - RNA, 22 nt, Human
uccuuaaaugaacucugcauga

SEQ ID NO: 886108 - RNA, 22 nt, Human
ccagaggaugcuggucagccuc

SEQ ID NO: 886109 - RNA, 22 nt, Human
gcuggaggauggacuggaagaa

SEQ ID NO: 886110 - RNA, 22 nt, Human
ugcauccuuccauggguuucaa

SEQ ID NO: 886111 - RNA, 22 nt, Human
ccuuggcaaaccagggcagcug

SEQ ID NO: 886112 - RNA, 22 nt, Human
auaggaaaucgcuauuaaccua

SEQ ID NO: 886113 - RNA, 22 nt, Human
aaacauggccauucagacugug

SEQ ID NO: 886114 - RNA, 22 nt, Human
uuuuacaggucauagguauagu

SEQ ID NO: 886115 - RNA, 22 nt, Human
agguggggaggagugucucuuu

SEQ ID NO: 886116 - RNA, 22 nt, Human
aaugcauguuuccucucagcag

SEQ ID NO: 886117 - RNA, 22 nt, Human
uacuguuucaagcccucacaga

SEQ ID NO: 886118 - RNA, 20 nt, Human
aggauagcaugcaagugaga

SEQ ID NO: 886119 - RNA, 22 nt, Human
cagagccuaaaacgacuccacu

SEQ ID NO: 886120 - RNA, 22 nt, Human
aagcaacuggcucauugucuca

SEQ ID NO: 886121 - RNA, 22 nt, Human
aagaggacaguauucaauauga

SEQ ID NO: 886122 - RNA, 22 nt, Human
uuguuucugaguuuucauguau

SEQ ID NO: 886123 - RNA, 22 nt, Human
ccaggcaaagcccaugcaagag

SEQ ID NO: 886124 - RNA, 22 nt, Human
ugaggcaguucuuacuuguauu

SEQ ID NO: 886125 - RNA, 22 nt, Human
ccuacaguuauauucuugauug

SEQ ID NO: 886126 - RNA, 19 nt, Human
ggcagcuggacgcuguuca

SEQ ID NO: 886127 - RNA, 22 nt, Human
auaugugugaugcauggacuaa

SEQ ID NO: 886128 - RNA, 22 nt, Human
cccaggcagccccagaagcuug

SEQ ID NO: 886129 - RNA, 22 nt, Human
aguauacaaauaaauguguaau

SEQ ID NO: 886130 - RNA, 22 nt, Human
guagauuccaguggucuguguc

SEQ ID NO: 886131 - RNA, 22 nt, Human
uggagcugagaguuaauaagga

SEQ ID NO: 886132 - RNA, 22 nt, Human
ggacagcacagcucuugacaac

SEQ ID NO: 886133 - RNA, 22 nt, Human
agacacagugcugggugcugag

SEQ ID NO: 886134 - RNA, 23 nt, Human
cccagcuuucccacugccgagag

SEQ ID NO: 886135 - RNA, 22 nt, Human
ucauuacagagauauaaucuac

SEQ ID NO: 886136 - RNA, 22 nt, Human
uuucauguacuuuuuugauaga

SEQ ID NO: 886137 - RNA, 22 nt, Human
uccaggcccauggagcagagcu

SEQ ID NO: 886138 - RNA, 22 nt, Human
ggcagauggaaggacagacgga

SEQ ID NO: 886139 - RNA, 22 nt, Human
aaugagcuagaccugcuuccuc

SEQ ID NO: 886140 - RNA, 22 nt, Human
ugucucuugaguuuguuuuaau

SEQ ID NO: 886141 - RNA, 22 nt, Human
ugaaguuugaacuguguugcug

SEQ ID NO: 886142 - RNA, 22 nt, Human
cugccagugaaauugugucagu

SEQ ID NO: 886143 - RNA, 22 nt, Human
aggcuaagugggugucagggcc

SEQ ID NO: 886144 - RNA, 22 nt, Human
uggcucagugcauucacaguaa

SEQ ID NO: 886145 - RNA, 22 nt, Human
ucuggcuccugaguccaugcuc

SEQ ID NO: 886146 - RNA, 22 nt, Human
aggaagcccuugucauuucugu

SEQ ID NO: 886147 - RNA, 22 nt, Human
ccccagggucaguguguggagg

SEQ ID NO: 886148 - RNA, 19 nt, Human
uguacaaggauuaugcagg

SEQ ID NO: 886149 - RNA, 22 nt, Human
ugcagcucaagcuggugaggug

SEQ ID NO: 886150 - RNA, 22 nt, Human
gcuggcuuccuucugcagcuag

SEQ ID NO: 886151 - RNA, 22 nt, Human
caguuugcauaacaagagauuc

SEQ ID NO: 886152 - RNA, 22 nt, Human
ggcagucagugugguucauaaa

SEQ ID NO: 886153 - RNA, 22 nt, Human
ccacaggcggaguggcgggcag

SEQ ID NO: 886154 - RNA, 22 nt, Human
uccugcagagccgcccucaggu

SEQ ID NO: 886155 - RNA, 22 nt, Human
uagcugccaaaagggugggcua

SEQ ID NO: 886156 - RNA, 22 nt, Human
aagaugcagcuuccacuuuugc

SEQ ID NO: 886157 - RNA, 21 nt, Human
ggucacacagcugguaaauag

SEQ ID NO: 886158 - RNA, 22 nt, Human
uagaaacagagagauaugcccc

SEQ ID NO: 886159 - RNA, 22 nt, Human
aagcuuauaucagaacaaugcu

SEQ ID NO: 886160 - RNA, 22 nt, Human
cagcauggggaucacuguaggc

SEQ ID NO: 886161 - RNA, 22 nt, Human
auaugcuuacagcuuaaaaucc

SEQ ID NO: 886162 - RNA, 22 nt, Human
aaaguacuugaugcuacagagu

SEQ ID NO: 886163 - RNA, 22 nt, Human
aguaaagcauugucuucagagu

SEQ ID NO: 886164 - RNA, 22 nt, Human
cuacaguaugaaaccuuuacuc

SEQ ID NO: 886165 - RNA, 22 nt, Human
aguucucuaugaagucuauugu

SEQ ID NO: 886166 - RNA, 22 nt, Human
uggcuggcaguaggcuaguggc

SEQ ID NO: 886167 - RNA, 22 nt, Human
auuucccuccagggaaagcuua

SEQ ID NO: 886168 - RNA, 22 nt, Human
uuuguccucuccauguacaaua

SEQ ID NO: 886169 - RNA, 22 nt, Human
acagaggccucggccugcccag

SEQ ID NO: 886170 - RNA, 22 nt, Human
gcaagacaauggagcauaaacg

SEQ ID NO: 886171 - RNA, 17 nt, Human
cuccuggcagccucagg

SEQ ID NO: 886172 - RNA, 22 nt, Human
ggcacugauuccauucaugaag

SEQ ID NO: 886173 - RNA, 22 nt, Human
cucagaggguugaaggugcucu

SEQ ID NO: 886174 - RNA, 22 nt, Human
gccugugguuugauuaagcauu

SEQ ID NO: 886175 - RNA, 23 nt, Human
cagcaggagggugccugggcugc

SEQ ID NO: 886176 - RNA, 22 nt, Human
uucaaguuaacucuccuuguac

SEQ ID NO: 886177 - RNA, 22 nt, Human
uucugaaagccaauucauugaa

SEQ ID NO: 886178 - RNA, 21 nt, Human
aaagaacaggcagauguucuu

SEQ ID NO: 886179 - RNA, 22 nt, Human
uaccauuguaccaagguaauuu

SEQ ID NO: 886180 - RNA, 22 nt, Human
ugagcccuaagggucaagcagg

SEQ ID NO: 886181 - RNA, 22 nt, Human
ccccaaagccucagccugccug

SEQ ID NO: 886182 - RNA, 22 nt, Human
cagcccagugcacgcccguuuc

SEQ ID NO: 886183 - RNA, 22 nt, Human
acuuuccuuauggauggggaaa

SEQ ID NO: 886184 - RNA, 22 nt, Human
gcaggcagguggcaucuuguga

SEQ ID NO: 886185 - RNA, 22 nt, Human
agggaagccaagccuuagagaa

SEQ ID NO: 886186 - RNA, 22 nt, Human
auauucuuccaaaacaucauuu

SEQ ID NO: 886187 - RNA, 22 nt, Human
uggcacagacagaucaggaguc

SEQ ID NO: 886188 - RNA, 22 nt, Human
uauauuaacacccacuugccuc

SEQ ID NO: 886189 - RNA, 22 nt, Human
uggcagugguaccggcucucag

SEQ ID NO: 886190 - RNA, 21 nt, Human
ccugugcuccacacagggucc

SEQ ID NO: 886191 - RNA, 22 nt, Human
aauauacuauacuacuuucugg

SEQ ID NO: 886192 - RNA, 22 nt, Human
auauuuugaaguuaauaaugug

SEQ ID NO: 886193 - RNA, 22 nt, Human
ugggcugcagagcccggccuuc

SEQ ID NO: 886194 - RNA, 21 nt, Human
ucuggaccaccuuguaaagcu

SEQ ID NO: 886195 - RNA, 22 nt, Human
auucucucuucugcugcccgug

SEQ ID NO: 886196 - RNA, 22 nt, Human
agggcugagacuaaggccagau

SEQ ID NO: 886197 - RNA, 22 nt, Human
acauucugucaacagugagcag

SEQ ID NO: 886198 - RNA, 22 nt, Human
cagcaggauaugguggagagag

SEQ ID NO: 886199 - RNA, 22 nt, Human
agcuuuauuugucauucacggc

SEQ ID NO: 886200 - RNA, 17 nt, Human
gggcagggacuccuggg

SEQ ID NO: 886201 - RNA, 22 nt, Human
uauaauccauucauugauuucu

SEQ ID NO: 886202 - RNA, 22 nt, Human
uggcaguuucaugugauucaac

SEQ ID NO: 886203 - RNA, 22 nt, Human
aaaggcucuaacaaggagagag

SEQ ID NO: 886204 - RNA, 22 nt, Human
gcccaggagguggaggugcagu

SEQ ID NO: 886205 - RNA, 18 nt, Human
aguuuuuaggaagaaaug

SEQ ID NO: 886206 - RNA, 22 nt, Human
acaguguuuaaaaaucagaucu

SEQ ID NO: 886207 - RNA, 22 nt, Human
aguccuuugggaaaaaugacua

SEQ ID NO: 886208 - RNA, 22 nt, Human
cuccugggcuaugucugcuugg

SEQ ID NO: 886209 - RNA, 22 nt, Human
ucuacaaagaagaauuaauguc

SEQ ID NO: 886210 - RNA, 22 nt, Human
uauguuuacgcugguagaauua

SEQ ID NO: 886211 - RNA, 22 nt, Human
ucacaguuuccauaggucagca

SEQ ID NO: 886212 - RNA, 16 nt, Human
ccugggcucuguugga

SEQ ID NO: 886213 - RNA, 22 nt, Human
uagauaucagaaauagaauuua

SEQ ID NO: 886214 - RNA, 22 nt, Human
aguuugaagaaggaucuaugaa

SEQ ID NO: 886215 - RNA, 22 nt, Human
ugucccagacacaguaugcgcu

SEQ ID NO: 886216 - RNA, 22 nt, Human
cauucuaucuuggacuggaucu

SEQ ID NO: 886217 - RNA, 22 nt, Human
uacacacaugcauuugccuuau

SEQ ID NO: 886218 - RNA, 19 nt, Human
cgccuggcaggcccugcgc

SEQ ID NO: 886219 - RNA, 22 nt, Human
caagagcugcaaauagcgugac

SEQ ID NO: 886220 - RNA, 22 nt, Human
uaaaaguuuuaguuguacauaa

SEQ ID NO: 886221 - RNA, 22 nt, Human
uuuguacaccuaccuaauacag

SEQ ID NO: 886222 - RNA, 22 nt, Human
ugguucauagccucacaggaua

SEQ ID NO: 886223 - RNA, 22 nt, Human
gaggcagugcauugucuagggg

SEQ ID NO: 886224 - RNA, 22 nt, Human
gcagcugggccccagccucucc

SEQ ID NO: 886225 - RNA, 22 nt, Human
caguguggugagauuccaggug

SEQ ID NO: 886226 - RNA, 22 nt, Human
ggccucgcggcuucugguggcu

SEQ ID NO: 886227 - RNA, 19 nt, Human
agauggggaagagugugag

SEQ ID NO: 886228 - RNA, 22 nt, Human
auuuguaauuucuuaucugugu

SEQ ID NO: 886229 - RNA, 22 nt, Human
ggcaguguccuugcagcucuac

SEQ ID NO: 886230 - RNA, 22 nt, Human
uaggguggagacuggaagcagg

SEQ ID NO: 886231 - RNA, 23 nt, Human
uucuaggcucugauugggcuucc

SEQ ID NO: 886232 - RNA, 22 nt, Human
gcagcugucggaaagcuaagug

SEQ ID NO: 886233 - RNA, 23 nt, Human
gagugcagaauagacaugcagug

SEQ ID NO: 886234 - RNA, 22 nt, Human
uuuuguaauuuccugacgacua

SEQ ID NO: 886235 - RNA, 22 nt, Human
uaaagugccucagguccugggu

SEQ ID NO: 886236 - RNA, 22 nt, Human
aguggcagagcaggugcuggaa

SEQ ID NO: 886237 - RNA, 22 nt, Human
auuccacagcuacguuuugagc

SEQ ID NO: 886238 - RNA, 23 nt, Human
uugaaagguagcuggcagcuaga

SEQ ID NO: 886239 - RNA, 22 nt, Human
cacagggaacaacuagaacaaa

SEQ ID NO: 886240 - RNA, 22 nt, Human
ccugugugccuggccgcgggag

SEQ ID NO: 886241 - RNA, 22 nt, Human
uggcugagaaguucugguggga

SEQ ID NO: 886242 - RNA, 22 nt, Human
cauguuuucuaggcuuucacaa

SEQ ID NO: 886243 - RNA, 22 nt, Human
aagacuguaugagacaauauaa

SEQ ID NO: 886244 - RNA, 22 nt, Human
aagugugagacacacaaaauua

SEQ ID NO: 886245 - RNA, 22 nt, Human
uucuggaguuugaagaucaggu

SEQ ID NO: 886246 - RNA, 22 nt, Human
aguguuauugaggcaaaacugu

SEQ ID NO: 886247 - RNA, 22 nt, Human
gagcuccugaaacguuccugcc

SEQ ID NO: 886248 - RNA, 22 nt, Human
cucuccagggcaugaguuccac

SEQ ID NO: 886249 - RNA, 22 nt, Human
ucagugugucucugcauuuggg

SEQ ID NO: 886250 - RNA, 22 nt, Human
gauguggaugaucuuagauggu

SEQ ID NO: 886251 - RNA, 22 nt, Human
cugggcugauuuagucacguuu

SEQ ID NO: 886252 - RNA, 22 nt, Human
ccugggcuccacuccaagagca

SEQ ID NO: 886253 - RNA, 23 nt, Human
aauaucaaggugauguucccaga

SEQ ID NO: 886254 - RNA, 22 nt, Human
cucugggcaaagaugccucauc

SEQ ID NO: 886255 - RNA, 22 nt, Human
cuuaugauucaaauaggaucuu

SEQ ID NO: 886256 - RNA, 22 nt, Human
gaagaacaagcagugcuuuccu

SEQ ID NO: 886257 - RNA, 22 nt, Human
cauauuagacacuuauguccac

SEQ ID NO: 886258 - RNA, 21 nt, Human
ggagggcagcccagacuggcu

SEQ ID NO: 886259 - RNA, 19 nt, Human
ggcucagugacauaggugc

SEQ ID NO: 886260 - RNA, 21 nt, Human
aacuaaggaacugaaaaaugg

SEQ ID NO: 886261 - RNA, 22 nt, Human
ugcagggaaugcuugcagcaug

SEQ ID NO: 886262 - RNA, 22 nt, Human
auuaaaugauggcaugucuuau

SEQ ID NO: 886263 - RNA, 22 nt, Human
uccugguggugccagcugcagg

SEQ ID NO: 886264 - RNA, 22 nt, Human
uagaccugaaauauggaccugg

SEQ ID NO: 886265 - RNA, 22 nt, Human
gggcaguuuauucuagaugguu

SEQ ID NO: 886266 - RNA, 22 nt, Human
uuucacagaacucacuaaggag

SEQ ID NO: 886267 - RNA, 19 nt, Human
gggcacagccuccccccag

SEQ ID NO: 886268 - RNA, 22 nt, Human
uccagaauacucugaaaucauu

SEQ ID NO: 886269 - RNA, 22 nt, Human
cacagucacauaucuaugugug

SEQ ID NO: 886270 - RNA, 22 nt, Human
uucguuuucuaggaccaacaga

SEQ ID NO: 886271 - RNA, 22 nt, Human
uccaguguggaccccugcaguc

SEQ ID NO: 886272 - RNA, 22 nt, Human
acacaguucuuagcaggugucu

SEQ ID NO: 886273 - RNA, 20 nt, Human
ugcuccaggaacacuggccg

SEQ ID NO: 886274 - RNA, 22 nt, Human
ccucacagcccuccucuagcac

SEQ ID NO: 886275 - RNA, 22 nt, Human
gaguggggcuuuaaaggcucag

SEQ ID NO: 886276 - RNA, 23 nt, Human
ucugaagaugcuguuuccaguga

SEQ ID NO: 886277 - RNA, 22 nt, Human
ccagccaggcauugcaaacuga

SEQ ID NO: 886278 - RNA, 22 nt, Human
guggcugguuuccugcaugcaa

SEQ ID NO: 886279 - RNA, 22 nt, Human
ugggaaccaggacuggcugagg

SEQ ID NO: 886280 - RNA, 22 nt, Human
aagguauuguucccuaguuucu

SEQ ID NO: 886281 - RNA, 22 nt, Human
gcugucugcaagccaggaaaug

SEQ ID NO: 886282 - RNA, 22 nt, Human
aagcagccuggacuugggcugg

SEQ ID NO: 886283 - RNA, 22 nt, Human
agaaaagggcaggagggauaca

SEQ ID NO: 886284 - RNA, 22 nt, Human
ugccauuuaaaaaugaccaaau

SEQ ID NO: 886285 - RNA, 22 nt, Human
ucugccaucaagaugcucuggc

SEQ ID NO: 886286 - RNA, 22 nt, Human
ucauugaagacuuacuggcuuc

SEQ ID NO: 886287 - RNA, 19 nt, Human
ugagacugggugcaguacu

SEQ ID NO: 886288 - RNA, 22 nt, Human
ugccaggcauguaguagacuug

SEQ ID NO: 886289 - RNA, 22 nt, Human
cagagggcccccuggccacagu

SEQ ID NO: 886290 - RNA, 22 nt, Human
gcagugggcaacaagagcugga

SEQ ID NO: 886291 - RNA, 18 nt, Human
ugaggcucagcuccuggu

SEQ ID NO: 886292 - RNA, 22 nt, Human
uccacagugguugaacuaguuu

SEQ ID NO: 886293 - RNA, 20 nt, Human
gccuagggucacuucaguga

SEQ ID NO: 886294 - RNA, 22 nt, Human
uauucagugacaggguauuaug

SEQ ID NO: 886295 - RNA, 22 nt, Human
aaacacugcaggguuuacuuga

SEQ ID NO: 886296 - RNA, 22 nt, Human
uaaggcaaagugauuucuuaaa

SEQ ID NO: 886297 - RNA, 22 nt, Human
ggaccaucucuagccagagcuu

SEQ ID NO: 886298 - RNA, 22 nt, Human
ugugugcuuaagggcugaaccu

SEQ ID NO: 886299 - RNA, 22 nt, Human
aguucugcaugaaaaaggacua

SEQ ID NO: 886300 - RNA, 22 nt, Human
gcuacaggggucaguccuuugc

SEQ ID NO: 886301 - RNA, 22 nt, Human
uuccuuggugcccgauguauuu

SEQ ID NO: 886302 - RNA, 22 nt, Human
caucacauuagucucaagagaa

SEQ ID NO: 886303 - RNA, 22 nt, Human
ugaaguaucuauggauauaaga

SEQ ID NO: 886304 - RNA, 21 nt, Human
gagugcagcaagguagagucu

SEQ ID NO: 886305 - RNA, 22 nt, Human
uuucacauuuguuuuaagaagu

SEQ ID NO: 886306 - RNA, 22 nt, Human
ucuccugcucccaacugcugca

SEQ ID NO: 886307 - RNA, 22 nt, Human
gaguccagcucauugucuggga

SEQ ID NO: 886308 - RNA, 20 nt, Human
gcucuaaagccacagauuga

SEQ ID NO: 886309 - RNA, 22 nt, Human
ccugggcaucaacaagcagaga

SEQ ID NO: 886310 - RNA, 18 nt, Human
aagaggaggaaacccagg

SEQ ID NO: 886311 - RNA, 23 nt, Human
agccacagccagagcuaucucca

SEQ ID NO: 886312 - RNA, 22 nt, Human
gcugauggcuugcuggcugaca

SEQ ID NO: 886313 - RNA, 22 nt, Human
cccauuuaaacacaagcuuuca

SEQ ID NO: 886314 - RNA, 21 nt, Human
aaagagguuaauauuguaagu

SEQ ID NO: 886315 - RNA, 22 nt, Human
auuugggcaguccaugaaauaa

SEQ ID NO: 886316 - RNA, 22 nt, Human
gagcuugggugccaugcugagc

SEQ ID NO: 886317 - RNA, 22 nt, Human
gucaacauguucugggugaaug

SEQ ID NO: 886318 - RNA, 22 nt, Human
ucaguggagcuaagcaugagau

SEQ ID NO: 886319 - RNA, 22 nt, Human
gcuauguucccuuuugcuauaa

SEQ ID NO: 886320 - RNA, 22 nt, Human
uccuguguguggccuuucccag

SEQ ID NO: 886321 - RNA, 22 nt, Human
ucuuggaagccucaagauacuc

SEQ ID NO: 886322 - RNA, 18 nt, Human
gaggaaacaaggcagagg

SEQ ID NO: 886323 - RNA, 18 nt, Human
ccagcugugcagcaucug

SEQ ID NO: 886324 - RNA, 22 nt, Human
ccuagaaugugcagacuuaggg

SEQ ID NO: 886325 - RNA, 22 nt, Human
ccagcuccuucugucuguggag

SEQ ID NO: 886326 - RNA, 22 nt, Human
cgcaccacugaauuccagccug

SEQ ID NO: 886327 - RNA, 22 nt, Human
cuauguuuaucuguauuucugu

SEQ ID NO: 886328 - RNA, 22 nt, Human
gcugcugcuggucuggggccac

SEQ ID NO: 886329 - RNA, 22 nt, Human
agucacaguuucccugagagag

SEQ ID NO: 886330 - RNA, 22 nt, Human
aaauacauaaagguuguaccag

SEQ ID NO: 886331 - RNA, 22 nt, Human
ugcuggagcuccgggcuguagg

SEQ ID NO: 886332 - RNA, 22 nt, Human
gauguacaagauuguaggaaug

SEQ ID NO: 886333 - RNA, 22 nt, Human
cauugcugccacuggauauuuc

SEQ ID NO: 886334 - RNA, 22 nt, Human
uauuucuauuccccaggcaagu

SEQ ID NO: 886335 - RNA, 18 nt, Human
uacaggaaaaguguuaca

SEQ ID NO: 886336 - RNA, 22 nt, Human
ccuggggcuccagagcagcgga

SEQ ID NO: 886337 - RNA, 22 nt, Human
ugucacaaacauacauuauaga

SEQ ID NO: 886338 - RNA, 22 nt, Human
cuagggucaggggccugcgucg

SEQ ID NO: 886339 - RNA, 22 nt, Human
cagugagagagaacgcauucau

SEQ ID NO: 886340 - RNA, 22 nt, Human
uuacaauuacuugaucucagcu

SEQ ID NO: 886341 - RNA, 22 nt, Human
uccugagggcucggggcucaug

SEQ ID NO: 886342 - RNA, 22 nt, Human
uugggcaggaacagaugcuuga

SEQ ID NO: 886343 - RNA, 22 nt, Human
agcugccuccuggugccccauc

SEQ ID NO: 886344 - RNA, 22 nt, Human
gcuuucugauugcgaaaacaaa

SEQ ID NO: 886345 - RNA, 23 nt, Human
ucacauaucaagaaagugguaga

SEQ ID NO: 886346 - RNA, 22 nt, Human
cuccucagggcugguuacaugg

SEQ ID NO: 886347 - RNA, 22 nt, Human
agggugcagguguggagucuag

SEQ ID NO: 886348 - RNA, 22 nt, Human
cuggaaggucuguccccacugc

SEQ ID NO: 886349 - RNA, 22 nt, Human
gcuggcuuuugaagucuagcua

SEQ ID NO: 886350 - RNA, 22 nt, Human
uugauacacaauggaacaaugu

SEQ ID NO: 886351 - RNA, 19 nt, Human
uuugaugagaauuuaagca

SEQ ID NO: 886352 - RNA, 22 nt, Human
cagcugucuaaguugagcagga

SEQ ID NO: 886353 - RNA, 22 nt, Human
agugccuggaccccaugacaua

SEQ ID NO: 886354 - RNA, 20 nt, Human
uuaagaaaagcacauccugc

SEQ ID NO: 886355 - RNA, 22 nt, Human
uacuuacacagcuguagaaggu

SEQ ID NO: 886356 - RNA, 22 nt, Human
gaucccuugggccaaggaguug

SEQ ID NO: 886357 - RNA, 22 nt, Human
caggcaggucagugaagaagga

SEQ ID NO: 886358 - RNA, 22 nt, Human
ugucagugcuauagugggaaua

SEQ ID NO: 886359 - RNA, 22 nt, Human
acauagaagugaugcuuaucca

SEQ ID NO: 886360 - RNA, 18 nt, Human
gaucucugcagugccuac

SEQ ID NO: 886361 - RNA, 22 nt, Human
agguuuccagcauggggaaggc

SEQ ID NO: 886362 - RNA, 21 nt, Human
gaauaguucuguggcagcagu

SEQ ID NO: 886363 - RNA, 22 nt, Human
aaaacuguaucuucuugggacu

SEQ ID NO: 886364 - RNA, 22 nt, Human
acaguggaguugggguagcccu

SEQ ID NO: 886365 - RNA, 22 nt, Human
uaggaaacucaaagggaagugg

SEQ ID NO: 886366 - RNA, 22 nt, Human
cugcagcagggcuugcccaccu

SEQ ID NO: 886367 - RNA, 22 nt, Human
gucccuuccucauuccacuuua

SEQ ID NO: 886368 - RNA, 22 nt, Human
cacagagaucggaacagaagua

SEQ ID NO: 886369 - RNA, 22 nt, Human
cuguacuaauugcuuuacaugu

SEQ ID NO: 886370 - RNA, 22 nt, Human
acauguguacuuuuaaggaugu

SEQ ID NO: 886371 - RNA, 22 nt, Human
auuggauagacauaagaaaaau

SEQ ID NO: 886372 - RNA, 22 nt, Human
gcuuaggaguuucaggcucuca

SEQ ID NO: 886373 - RNA, 22 nt, Human
acaguguuauuucugaguaaug

SEQ ID NO: 886374 - RNA, 19 nt, Human
cugagcagcggcagcacuu

SEQ ID NO: 886375 - RNA, 22 nt, Human
ucuuuauugcuacugguuuguc

SEQ ID NO: 886376 - RNA, 22 nt, Human
guuccugguggucauggcagcu

SEQ ID NO: 886377 - RNA, 22 nt, Human
acacauuucuaaauuuuuaccg

SEQ ID NO: 886378 - RNA, 22 nt, Human
auucauagcucaguacagacuc

SEQ ID NO: 886379 - RNA, 22 nt, Human
uugcuuuacaaaaauugauggu

SEQ ID NO: 886380 - RNA, 22 nt, Human
gcauauggcuucauuuaauucu

SEQ ID NO: 886381 - RNA, 22 nt, Human
uuaaacaguauaucugagcaag

SEQ ID NO: 886382 - RNA, 22 nt, Human
aagauguugacuccuuugaugu

SEQ ID NO: 886383 - RNA, 22 nt, Human
ugucagugaccuagcacggugc

SEQ ID NO: 886384 - RNA, 22 nt, Human
ucugauuagcaguuuagggaaa

SEQ ID NO: 886385 - RNA, 22 nt, Human
gugcuggaacugugcuaagaga

SEQ ID NO: 886386 - RNA, 22 nt, Human
ucucuucuaacacuagaaauuc

SEQ ID NO: 886387 - RNA, 22 nt, Human
agaaacugcagcucagagaagu

SEQ ID NO: 886388 - RNA, 22 nt, Human
ucagaacagguuguacuauguc

SEQ ID NO: 886389 - RNA, 22 nt, Human
caggguggggcuggcuaucaaa

SEQ ID NO: 886390 - RNA, 18 nt, Human
gaagugaagugacucaau

SEQ ID NO: 886391 - RNA, 22 nt, Human
gagggugucuggaugcuagacu

SEQ ID NO: 886392 - RNA, 22 nt, Human
ugcaggagagugagucaguagg

SEQ ID NO: 886393 - RNA, 22 nt, Human
uaguuuuagucccauuuuacag

SEQ ID NO: 886394 - RNA, 22 nt, Human
uccucugggcucccugcaacag

SEQ ID NO: 886395 - RNA, 22 nt, Human
aggcuccaggccucccugcaug

SEQ ID NO: 886396 - RNA, 22 nt, Human
ggcugccuucauagaccauggg

SEQ ID NO: 886397 - RNA, 20 nt, Human
aaucagaaagugugagcucu

SEQ ID NO: 886398 - RNA, 22 nt, Human
ggcuuggcuugggcucagaggc

SEQ ID NO: 886399 - RNA, 22 nt, Human
uagaacuugugaaauaucaaug

SEQ ID NO: 886400 - RNA, 22 nt, Human
caagaaggcauccccagucccu

SEQ ID NO: 886401 - RNA, 22 nt, Human
cccagagaagugaagugacuug

SEQ ID NO: 886402 - RNA, 22 nt, Human
uuauuuauggcacuguuggugg

SEQ ID NO: 886403 - RNA, 22 nt, Human
aacagcugcaaaagguugccug

SEQ ID NO: 886404 - RNA, 22 nt, Human
gcagagcuucuguccuucagga

SEQ ID NO: 886405 - RNA, 22 nt, Human
ucugccaggccacacagggcac

SEQ ID NO: 886406 - RNA, 22 nt, Human
cccucaggagaugucagcugga

SEQ ID NO: 886407 - RNA, 22 nt, Human
ucuucagacccuuagcugugau

SEQ ID NO: 886408 - RNA, 22 nt, Human
cuccagggagcugcgggagcca

SEQ ID NO: 886409 - RNA, 22 nt, Human
ugaggcagugcugggaagccug

SEQ ID NO: 886410 - RNA, 22 nt, Human
caaguuaucagggcaguuagag

SEQ ID NO: 886411 - RNA, 22 nt, Human
uacugaaaacugagucuuccgu

SEQ ID NO: 886412 - RNA, 22 nt, Human
gagggccagaguccugggguca

SEQ ID NO: 886413 - RNA, 22 nt, Human
uuuacacaaaagauagcacacc

SEQ ID NO: 886414 - RNA, 22 nt, Human
ugucauaaucaguuuugcaugu

SEQ ID NO: 886415 - RNA, 22 nt, Human
gcugugucagaaacucugggga

SEQ ID NO: 886416 - RNA, 20 nt, Human
gaggcugaaguguuuuugcu

SEQ ID NO: 886417 - RNA, 22 nt, Human
gagggagucugugcaaagaauu

SEQ ID NO: 886418 - RNA, 22 nt, Human
uagcauuucacugaucuucacu

SEQ ID NO: 886419 - RNA, 17 nt, Human
aggaaagucugcugucc

SEQ ID NO: 886420 - RNA, 16 nt, Human
ccucuggcaauuagau

SEQ ID NO: 886421 - RNA, 22 nt, Human
gaaccuguccugagugaggagu

SEQ ID NO: 886422 - RNA, 22 nt, Human
aggaaacuaacuuaucuuuaua

SEQ ID NO: 886423 - RNA, 22 nt, Human
agguuaggaauuuggacagaga

SEQ ID NO: 886424 - RNA, 22 nt, Human
uguuaaggagacacaugaaaaa

SEQ ID NO: 886425 - RNA, 22 nt, Human
agggucuguggaugcaucuggg

SEQ ID NO: 886426 - RNA, 22 nt, Human
cagcauuuaucuuguagcagga

SEQ ID NO: 886427 - RNA, 22 nt, Human
acccaccacaguggcuggcaca

SEQ ID NO: 886428 - RNA, 22 nt, Human
ucugcacauguaguaaauauua

SEQ ID NO: 886429 - RNA, 22 nt, Human
aaacagaaggguagguaaacau

SEQ ID NO: 886430 - RNA, 22 nt, Human
cuuccucucuugcccauaagag

SEQ ID NO: 886431 - RNA, 22 nt, Human
acagaauuaggagauccucuug

SEQ ID NO: 886432 - RNA, 23 nt, Human
caguacuuaguguagcguuaauu

SEQ ID NO: 886433 - RNA, 22 nt, Human
gaggcaggcagauugcuugagg

SEQ ID NO: 886434 - RNA, 22 nt, Human
aacaugcucuguuucuuggaug

SEQ ID NO: 886435 - RNA, 22 nt, Human
ucugccuagugggacagcagcc

SEQ ID NO: 886436 - RNA, 22 nt, Human
uccucuggucuucgguguggac

SEQ ID NO: 886437 - RNA, 22 nt, Human
cagugccaaggcucuuggucug

SEQ ID NO: 886438 - RNA, 22 nt, Human
ucuacgaagccaccauggagac

SEQ ID NO: 886439 - RNA, 22 nt, Human
uggcugagccuuuggggcuuuc

SEQ ID NO: 886440 - RNA, 22 nt, Human
ucacacauuucucaaguguagg

SEQ ID NO: 886441 - RNA, 22 nt, Human
acucuaaaaugcuaugagaucu

SEQ ID NO: 886442 - RNA, 22 nt, Human
ugcuuuuaggagauuaaaauua

SEQ ID NO: 886443 - RNA, 22 nt, Human
uagccaggcgaggucagugucg

SEQ ID NO: 886444 - RNA, 22 nt, Human
cuggcccugcuccgcgccgcgg

SEQ ID NO: 886445 - RNA, 22 nt, Human
uguacacauuaagcucuuuaga

SEQ ID NO: 886446 - RNA, 22 nt, Human
uccugggaccaggcaccuacug

SEQ ID NO: 886447 - RNA, 22 nt, Human
uaaagacauaggaucagggaga

SEQ ID NO: 886448 - RNA, 21 nt, Human
cagaaacuugcuuugccuucu

SEQ ID NO: 886449 - RNA, 22 nt, Human
uacaaagcaguuccaacacgaa

SEQ ID NO: 886450 - RNA, 22 nt, Human
ccaggaggcucugacuggaccc

SEQ ID NO: 886451 - RNA, 22 nt, Human
agacaauuagcacaucacgggg

SEQ ID NO: 886452 - RNA, 22 nt, Human
caaaaugugagucccaccucaa

SEQ ID NO: 886453 - RNA, 22 nt, Human
gaaaguauucucccugaauuuu

SEQ ID NO: 886454 - RNA, 22 nt, Human
ucucuccuaauuucaggugcuu

SEQ ID NO: 886455 - RNA, 22 nt, Human
agagucuuggcugagaacaaga

SEQ ID NO: 886456 - RNA, 22 nt, Human
agcaaacauucagcagauuggc

SEQ ID NO: 886457 - RNA, 22 nt, Human
ugaaacuuuugagguucuucca

SEQ ID NO: 886458 - RNA, 22 nt, Human
gccacagcaacaauaaugcagc

SEQ ID NO: 886459 - RNA, 22 nt, Human
aguggcuggucuaaggucacag

SEQ ID NO: 886460 - RNA, 19 nt, Human
cucugccauuugcugccug

SEQ ID NO: 886461 - RNA, 18 nt, Human
uccaccagucaaucuguc

SEQ ID NO: 886462 - RNA, 22 nt, Human
aauguauaauauuuaaugcuuu

SEQ ID NO: 886463 - RNA, 18 nt, Human
gggcucacacaggucauc

SEQ ID NO: 886464 - RNA, 22 nt, Human
gcucugggccgggcaccagccu

SEQ ID NO: 886465 - RNA, 22 nt, Human
aaaucaugaggacauuaugcca

SEQ ID NO: 886466 - RNA, 22 nt, Human
ggaagccagaaagugagaauau

SEQ ID NO: 886467 - RNA, 22 nt, Human
uuucuaaguguauugagcuugg

SEQ ID NO: 886468 - RNA, 19 nt, Human
ugguggaggccccauguuc

SEQ ID NO: 886469 - RNA, 22 nt, Human
ggcugugggaugcauaggagcu

SEQ ID NO: 886470 - RNA, 22 nt, Human
aucccaggcggcacagguugca

SEQ ID NO: 886471 - RNA, 22 nt, Human
uccuuggcaagcugcaauggga

SEQ ID NO: 886472 - RNA, 18 nt, Human
acagacacuuaguaugag

SEQ ID NO: 886473 - RNA, 22 nt, Human
cccaggaaaagcagugccagca

SEQ ID NO: 886474 - RNA, 22 nt, Human
acuguuucucaaauuauguggu

SEQ ID NO: 886475 - RNA, 22 nt, Human
agucuucagcaggguuaaaccc

SEQ ID NO: 886476 - RNA, 22 nt, Human
aaauccuugauaguuugcccua

SEQ ID NO: 886477 - RNA, 22 nt, Human
ggugggcacauucagucucugu

SEQ ID NO: 886478 - RNA, 22 nt, Human
ucuuuccuaggugauaugcaau

SEQ ID NO: 886479 - RNA, 22 nt, Human
uuuucaguggcuugcauauguu

SEQ ID NO: 886480 - RNA, 22 nt, Human
aaagcagcagcaccugcauuuc

SEQ ID NO: 886481 - RNA, 22 nt, Human
cucugggugagacagaccuggu

SEQ ID NO: 886482 - RNA, 22 nt, Human
cacauacauacguauguauaca

SEQ ID NO: 886483 - RNA, 22 nt, Human
aucucucuaugcacugaggacu

SEQ ID NO: 886484 - RNA, 22 nt, Human
ugcagguggacacgggagacgg

SEQ ID NO: 886485 - RNA, 22 nt, Human
agcagcucccuccucagccacc

SEQ ID NO: 886486 - RNA, 22 nt, Human
cuggaagaccccccaggacuca

SEQ ID NO: 886487 - RNA, 22 nt, Human
caaguuggucuccuguagcaac

SEQ ID NO: 886488 - RNA, 22 nt, Human
ggcugagggucccagacccuaa

SEQ ID NO: 886489 - RNA, 22 nt, Human
cuggcaggcucucuggucgguu

SEQ ID NO: 886490 - RNA, 22 nt, Human
ucacugaauacuugucucaucc

SEQ ID NO: 886491 - RNA, 22 nt, Human
ugcucccaaacgaccuacugug

SEQ ID NO: 886492 - RNA, 22 nt, Human
uucacaaagcugguuccuucug

SEQ ID NO: 886493 - RNA, 22 nt, Human
agcugcagauaggauguuauuu

SEQ ID NO: 886494 - RNA, 22 nt, Human
uaaauguuggcauuggaggccg

SEQ ID NO: 886495 - RNA, 22 nt, Human
agugggcuuacugagggagugu

SEQ ID NO: 886496 - RNA, 22 nt, Human
aggcugggaaaccugaaguugu

SEQ ID NO: 886497 - RNA, 22 nt, Human
ccucacucugcacccugcagca

SEQ ID NO: 886498 - RNA, 22 nt, Human
aagcucugcucagcagacuagg

SEQ ID NO: 886499 - RNA, 22 nt, Human
acaguacaccacuguguacagu

SEQ ID NO: 886500 - RNA, 18 nt, Human
uggaagcuggugagcaga

SEQ ID NO: 886501 - RNA, 22 nt, Human
uuucugacagagugcucagagu

SEQ ID NO: 886502 - RNA, 22 nt, Human
ucuuccaaaugcagcuaaagcu

SEQ ID NO: 886503 - RNA, 22 nt, Human
uguuaugugccacacuugaggg

SEQ ID NO: 886504 - RNA, 22 nt, Human
uucuagaauguuuugaaaggga

SEQ ID NO: 886505 - RNA, 22 nt, Human
cucuaaggaacucccccaaacu

SEQ ID NO: 886506 - RNA, 22 nt, Human
auaugaguugauuuuuagaaua

SEQ ID NO: 886507 - RNA, 22 nt, Human
ucugggauuuuugacacugaag

SEQ ID NO: 886508 - RNA, 22 nt, Human
cuccauggaaccggggcugcuu

SEQ ID NO: 886509 - RNA, 22 nt, Human
ugugucccuuggaaccucagcu

SEQ ID NO: 886510 - RNA, 22 nt, Human
gagccagauuuuaugcaagaca

SEQ ID NO: 886511 - RNA, 22 nt, Human
cuuuucaugccagcccaucaca

SEQ ID NO: 886512 - RNA, 22 nt, Human
gauacaagacuaauaggaaaca

SEQ ID NO: 886513 - RNA, 22 nt, Human
auuccaggauuccaggacaaau

SEQ ID NO: 886514 - RNA, 17 nt, Human
gcccacccuuaggagcu

SEQ ID NO: 886515 - RNA, 22 nt, Human
ggcuauggaaauggcaggacau

SEQ ID NO: 886516 - RNA, 20 nt, Human
aagaagccgggaaggcaggc

SEQ ID NO: 886517 - RNA, 22 nt, Human
cagagagaaucuuggcagcuga

SEQ ID NO: 886518 - RNA, 22 nt, Human
ccuggcucccccaucauagcug

SEQ ID NO: 886519 - RNA, 22 nt, Human
gauacacacccuugauaggacu

SEQ ID NO: 886520 - RNA, 22 nt, Human
aaggaucugacagacuauagaa

SEQ ID NO: 886521 - RNA, 22 nt, Human
cuggcaggaucuaaccagggaa

SEQ ID NO: 886522 - RNA, 21 nt, Human
ugcccaggggccaaccgcugc

SEQ ID NO: 886523 - RNA, 22 nt, Human
gacagacaggagcucacaggca

SEQ ID NO: 886524 - RNA, 22 nt, Human
ccagggcagcgccccuccacgc

SEQ ID NO: 886525 - RNA, 21 nt, Human
uacagcaacggagguuuucua

SEQ ID NO: 886526 - RNA, 22 nt, Human
auccauuuguaaauguuagagu

SEQ ID NO: 886527 - RNA, 22 nt, Human
cagcaagacaaggaacaaacug

SEQ ID NO: 886528 - RNA, 22 nt, Human
gcuuggggagcucaguguccuu

SEQ ID NO: 886529 - RNA, 22 nt, Human
ugagcaccucccugacaguggg

SEQ ID NO: 886530 - RNA, 22 nt, Human
ugaagcaaugauagcagaauga

SEQ ID NO: 886531 - RNA, 22 nt, Human
aaaauuacuauuguuccugggc

SEQ ID NO: 886532 - RNA, 22 nt, Human
cucucucuuguguugcugcaga

SEQ ID NO: 886533 - RNA, 22 nt, Human
gggcuggcaggaccugggcuga

SEQ ID NO: 886534 - RNA, 22 nt, Human
agaacucugaacacugucugga

SEQ ID NO: 886535 - RNA, 22 nt, Human
cugagaggcacaaggcauuucg

SEQ ID NO: 886536 - RNA, 22 nt, Human
auggaagacuaacagaaacaug

SEQ ID NO: 886537 - RNA, 18 nt, Human
uagcagcacuggccgcuu

SEQ ID NO: 886538 - RNA, 22 nt, Human
gaugggcuucuuccaugaagaa

SEQ ID NO: 886539 - RNA, 22 nt, Human
caggagcaguuagaagcccacu

SEQ ID NO: 886540 - RNA, 22 nt, Human
uuccugagaaauuuguaccugg

SEQ ID NO: 886541 - RNA, 22 nt, Human
acagugucaugucguguucccc

SEQ ID NO: 886542 - RNA, 22 nt, Human
uagucacaguacaggauaaaga

SEQ ID NO: 886543 - RNA, 22 nt, Human
auuucucacccuaccucacucc

SEQ ID NO: 886544 - RNA, 22 nt, Human
cucucagguagagcccaagaau

SEQ ID NO: 886545 - RNA, 22 nt, Human
cuuuaacaguuccauucaauuu

SEQ ID NO: 886546 - RNA, 22 nt, Human
ugcugaggacuaaaggagauga

SEQ ID NO: 886547 - RNA, 22 nt, Human
auacauacauguaugcacauac

SEQ ID NO: 886548 - RNA, 22 nt, Human
cagaggcugacaaaauauugcu

SEQ ID NO: 886549 - RNA, 22 nt, Human
ccaggcagcaaauuuucugaau

SEQ ID NO: 886550 - RNA, 22 nt, Human
cggggaagcgguucuggcggua

SEQ ID NO: 886551 - RNA, 23 nt, Human
accaugaugggagugcaaauaag

SEQ ID NO: 886552 - RNA, 22 nt, Human
aaggauuuuuggaaugagaugg

SEQ ID NO: 886553 - RNA, 22 nt, Human
ucccagccuuucuuucuccagc

SEQ ID NO: 886554 - RNA, 22 nt, Human
ggcucuggggaagcucucuuca

SEQ ID NO: 886555 - RNA, 22 nt, Human
aagcacugagcacaguggcuga

SEQ ID NO: 886556 - RNA, 22 nt, Human
auuagccugcucuuuagugaaa

SEQ ID NO: 886557 - RNA, 19 nt, Human
accaaacaguggacggagc

SEQ ID NO: 886558 - RNA, 22 nt, Human
ugagccugcaauaagcacagcc

SEQ ID NO: 886559 - RNA, 22 nt, Human
gcuggagaaacaggaggaggaa

SEQ ID NO: 886560 - RNA, 22 nt, Human
cacagcugcccuaacuguacuc

SEQ ID NO: 886561 - RNA, 22 nt, Human
uggagacauuucucauuaaaaa

SEQ ID NO: 886562 - RNA, 20 nt, Human
uacaggaaucaagacugcau

SEQ ID NO: 886563 - RNA, 22 nt, Human
uuaauuuauacauaaucacagg

SEQ ID NO: 886564 - RNA, 22 nt, Human
ucagagucuaugcaacagaauu

SEQ ID NO: 886565 - RNA, 22 nt, Human
aagauuuacuuucuuuguaaua

SEQ ID NO: 886566 - RNA, 22 nt, Human
aauccauugcugugcugccagg

SEQ ID NO: 886567 - RNA, 22 nt, Human
augccuggauuugggacucaaa

SEQ ID NO: 886568 - RNA, 20 nt, Human
gggaggcauuggucccucac

SEQ ID NO: 886569 - RNA, 22 nt, Human
agacauuuggagccaacuuucc

SEQ ID NO: 886570 - RNA, 20 nt, Human
uucuacaaaacugauucuga

SEQ ID NO: 886571 - RNA, 22 nt, Human
ugcuucugaugugagcagcccc

SEQ ID NO: 886572 - RNA, 22 nt, Human
ucaaagaacaucaucugaaaug

SEQ ID NO: 886573 - RNA, 22 nt, Human
augcaaaugaacauguugcuag

SEQ ID NO: 886574 - RNA, 22 nt, Human
aagucuuaggaaauagcaaaga

SEQ ID NO: 886575 - RNA, 22 nt, Human
gagcuuggaugucuuuuguuca

SEQ ID NO: 886576 - RNA, 22 nt, Human
gcugccuuuagggggugcucag

SEQ ID NO: 886577 - RNA, 20 nt, Human
gugaccagaagacagugggu

SEQ ID NO: 886578 - RNA, 22 nt, Human
caugccaugugugaggagagga

SEQ ID NO: 886579 - RNA, 22 nt, Human
cagagcggccacuagagggcgc

SEQ ID NO: 886580 - RNA, 22 nt, Human
ggacugccucugucaccccagc

SEQ ID NO: 886581 - RNA, 22 nt, Human
aguaauuuguuauaaagcaaua

SEQ ID NO: 886582 - RNA, 22 nt, Human
aguccaugguuguaguucucuc

SEQ ID NO: 886583 - RNA, 22 nt, Human
gcugcccuacccgaggcacucu

SEQ ID NO: 886584 - RNA, 22 nt, Human
ucccucagacagauguguuccu

SEQ ID NO: 886585 - RNA, 22 nt, Human
uggcuacauuuauacucucauu

SEQ ID NO: 886586 - RNA, 22 nt, Human
ucuuuguuauugcuuuaucuau

SEQ ID NO: 886587 - RNA, 22 nt, Human
ccacagccauuccagggaggcu

SEQ ID NO: 886588 - RNA, 22 nt, Human
cagugccucaggccagccugca

SEQ ID NO: 886589 - RNA, 22 nt, Human
auucauuugcuauuguguaugg

SEQ ID NO: 886590 - RNA, 22 nt, Human
uuucagagaacugaguccuugc

SEQ ID NO: 886591 - RNA, 22 nt, Human
ugucauuuauuuugcugucugu

SEQ ID NO: 886592 - RNA, 22 nt, Human
aagcacauuuuccagcagcucu

SEQ ID NO: 886593 - RNA, 17 nt, Human
ugcuccugggacaagga

SEQ ID NO: 886594 - RNA, 22 nt, Human
aucaagcauauauaaaacugca

SEQ ID NO: 886595 - RNA, 22 nt, Human
acuucacagaaauuuuaugagg

SEQ ID NO: 886596 - RNA, 22 nt, Human
ggcuggaauguguggaugugau

SEQ ID NO: 886597 - RNA, 22 nt, Human
agagaaggucacuaaggaccca

SEQ ID NO: 886598 - RNA, 22 nt, Human
cuggccugggagcugcuagcgu

SEQ ID NO: 886599 - RNA, 22 nt, Human
caggggcggguaaaaggccucc

SEQ ID NO: 886600 - RNA, 22 nt, Human
ugcucaggagcuuagagcacag

SEQ ID NO: 886601 - RNA, 22 nt, Human
uccagggcuguuacuuuacaua

SEQ ID NO: 886602 - RNA, 22 nt, Human
uuugcaaaugcucugcagagcu

SEQ ID NO: 886603 - RNA, 21 nt, Human
ugaaugcuucgucauccuggc

SEQ ID NO: 886604 - RNA, 22 nt, Human
ucuggguggcugccaaucugcc

SEQ ID NO: 886605 - RNA, 22 nt, Human
aaugucaugggaauuuauucau

SEQ ID NO: 886606 - RNA, 22 nt, Human
gugauaacucaggcagagaaua

SEQ ID NO: 886607 - RNA, 22 nt, Human
cagccagaucaaacucagaugu

SEQ ID NO: 886608 - RNA, 21 nt, Human
ccugccaggaaacugaguguc

SEQ ID NO: 886609 - RNA, 22 nt, Human
acagagcauuugggacagagag

SEQ ID NO: 886610 - RNA, 22 nt, Human
aaguguuuauuuauaacgaucu

SEQ ID NO: 886611 - RNA, 22 nt, Human
ugagguaugagugugccaggug

SEQ ID NO: 886612 - RNA, 22 nt, Human
acagugauuggcacugauucag

SEQ ID NO: 886613 - RNA, 22 nt, Human
uuugaacaucacuguaggguga

SEQ ID NO: 886614 - RNA, 22 nt, Human
accagguggccccagcgugguu

SEQ ID NO: 886615 - RNA, 22 nt, Human
ggcugaugggcaugagcuguca

SEQ ID NO: 886616 - RNA, 22 nt, Human
augucuauggaauuuccacaca

SEQ ID NO: 886617 - RNA, 22 nt, Human
augcuacagcccucuuugcaua

SEQ ID NO: 886618 - RNA, 22 nt, Human
ucuccaggggcagggucuggag

SEQ ID NO: 886619 - RNA, 22 nt, Human
agaaaggucaaaaucgugacau

SEQ ID NO: 886620 - RNA, 22 nt, Human
uaaccaaagggccuaaggaaug

SEQ ID NO: 886621 - RNA, 22 nt, Human
uggcuggggagccccgacuccc

SEQ ID NO: 886622 - RNA, 22 nt, Human
aaacauuccauauauaccuugu

SEQ ID NO: 886623 - RNA, 22 nt, Human
cugcaucauuggugauucagga

SEQ ID NO: 886624 - RNA, 22 nt, Human
agcagcagaaaguugauggcag

SEQ ID NO: 886625 - RNA, 22 nt, Human
aaaugacauuaggauccugcau

SEQ ID NO: 886626 - RNA, 17 nt, Human
agggucaggugaaguuc

SEQ ID NO: 886627 - RNA, 22 nt, Human
uagcuucuggaguguuugaaaa

SEQ ID NO: 886628 - RNA, 22 nt, Human
guuccagggaagggaaggcaga

SEQ ID NO: 886629 - RNA, 22 nt, Human
aagacacugggggcugcagcca

SEQ ID NO: 886630 - RNA, 22 nt, Human
ggagaggggcaaguuuaucuag

SEQ ID NO: 886631 - RNA, 22 nt, Human
agggaagccccgaggaggcacc

SEQ ID NO: 886632 - RNA, 22 nt, Human
gaaagugccucaguccucuuau

SEQ ID NO: 886633 - RNA, 22 nt, Human
uguguacacaugacaggcaccc

SEQ ID NO: 886634 - RNA, 22 nt, Human
aggaaagccaaucucucuugac

SEQ ID NO: 886635 - RNA, 22 nt, Human
uucagcaaacacgaugcuuguu

SEQ ID NO: 886636 - RNA, 22 nt, Human
cucuggcuguuugcagcucaag

SEQ ID NO: 886637 - RNA, 22 nt, Human
gaagggaaggaaagaaccagca

SEQ ID NO: 886638 - RNA, 22 nt, Human
uuacuuuggcaaacuccugccc

SEQ ID NO: 886639 - RNA, 22 nt, Human
aggaauuggcacggccuucuca

SEQ ID NO: 886640 - RNA, 22 nt, Human
gggcaggagaagguggaugucc

SEQ ID NO: 886641 - RNA, 22 nt, Human
uaaaggcaguuggaguugagga

SEQ ID NO: 886642 - RNA, 22 nt, Human
acauugaagggaaugcaaagau

SEQ ID NO: 886643 - RNA, 22 nt, Human
uggcuuuauguacucaagucac

SEQ ID NO: 886644 - RNA, 22 nt, Human
gcagaacauggaaagagaacua

SEQ ID NO: 886645 - RNA, 22 nt, Human
agcuccuugaaggcaguagcug

SEQ ID NO: 886646 - RNA, 21 nt, Human
uguucuaucagcucagguguc

SEQ ID NO: 886647 - RNA, 22 nt, Human
aggugggaacccagcagggccc

SEQ ID NO: 886648 - RNA, 22 nt, Human
gaggcucagagaagucauggua

SEQ ID NO: 886649 - RNA, 22 nt, Human
aaguuuaguagggacagaugga

SEQ ID NO: 886650 - RNA, 22 nt, Human
cauucauaggaagaaaaugggc

SEQ ID NO: 886651 - RNA, 22 nt, Human
auuguuaugaaaauaagauguu

SEQ ID NO: 886652 - RNA, 22 nt, Human
agugcguggaccccuggcugcu

SEQ ID NO: 886653 - RNA, 23 nt, Human
acucguggaauucucugcgaucg

SEQ ID NO: 886654 - RNA, 22 nt, Human
ugggcagccaucccagccucuc

SEQ ID NO: 886655 - RNA, 22 nt, Human
ggcucuggcgagcuuuaguaca

SEQ ID NO: 886656 - RNA, 22 nt, Human
cagcagagaugagauuccuaua

SEQ ID NO: 886657 - RNA, 22 nt, Human
gcaucccaaaucugaaagucca

SEQ ID NO: 886658 - RNA, 22 nt, Human
aaaggcaugugggcugguugua

SEQ ID NO: 886659 - RNA, 20 nt, Human
ugcagaauccugugaucagu

SEQ ID NO: 886660 - RNA, 22 nt, Human
aacagcuuugcuucuggagaca

SEQ ID NO: 886661 - RNA, 22 nt, Human
guuaaguaccagauugucugaa

SEQ ID NO: 886662 - RNA, 22 nt, Human
auucacaugcccaagcagcacc

SEQ ID NO: 886663 - RNA, 22 nt, Human
cugucuguaucccuguugguaa

SEQ ID NO: 886664 - RNA, 22 nt, Human
guaaugaaucaacauuaaugau

SEQ ID NO: 886665 - RNA, 22 nt, Human
caucugccuaaguggcccuguu

SEQ ID NO: 886666 - RNA, 22 nt, Human
gugagcuggaauaguggagaaa

SEQ ID NO: 886667 - RNA, 22 nt, Human
gaaucuuuugucucgugaauaa

SEQ ID NO: 886668 - RNA, 23 nt, Human
agugcugaauugaaagcuccagg

SEQ ID NO: 886669 - RNA, 22 nt, Human
auggguaggauuuacucagaug

SEQ ID NO: 886670 - RNA, 22 nt, Human
cuggcccagguggucguugagg

SEQ ID NO: 886671 - RNA, 22 nt, Human
uuccuugguagagagaauauuu

SEQ ID NO: 886672 - RNA, 22 nt, Human
accagagcuggcucugagcacc

SEQ ID NO: 886673 - RNA, 22 nt, Human
caggugagaggcgguccugcau

SEQ ID NO: 886674 - RNA, 22 nt, Human
gcagcaaggaugaagcacuugg

SEQ ID NO: 886675 - RNA, 22 nt, Human
aaacuucaguaggagccaaccu

SEQ ID NO: 886676 - RNA, 22 nt, Human
ccuggccagcgccggcugcucg

SEQ ID NO: 886677 - RNA, 22 nt, Human
agaaguuugggggcgaaggcag

SEQ ID NO: 886678 - RNA, 22 nt, Human
caguaaaagauggaaauagaau

SEQ ID NO: 886679 - RNA, 19 nt, Human
gcagaugaugaggcugguc

SEQ ID NO: 886680 - RNA, 22 nt, Human
ggucugaguggggccugagauu

SEQ ID NO: 886681 - RNA, 22 nt, Human
auugagaagaaaaucuaauaua

SEQ ID NO: 886682 - RNA, 22 nt, Human
gaggagcucaugaaagcggugu

SEQ ID NO: 886683 - RNA, 22 nt, Human
aaguuugucucauuugaucuuc

SEQ ID NO: 886684 - RNA, 22 nt, Human
cuacaaagaaaguauacuggac

SEQ ID NO: 886685 - RNA, 22 nt, Human
uuauagaacagccuccucuaga

SEQ ID NO: 886686 - RNA, 22 nt, Human
guggcuuucauuucaggaugug

SEQ ID NO: 886687 - RNA, 20 nt, Human
ccucucugaagaggucaucu

SEQ ID NO: 886688 - RNA, 22 nt, Human
cagugugucucuuguccuggcu

SEQ ID NO: 886689 - RNA, 22 nt, Human
acgaugaugaaagagaacauuc

SEQ ID NO: 886690 - RNA, 22 nt, Human
gauauuuuugcagacaccuggg

SEQ ID NO: 886691 - RNA, 22 nt, Human
uguguggccuccauaggguacu

SEQ ID NO: 886692 - RNA, 21 nt, Human
cccugcaggccagggcugagc

SEQ ID NO: 886693 - RNA, 22 nt, Human
auucuaguguuuccauuacaag

SEQ ID NO: 886694 - RNA, 22 nt, Human
uccucaggaugugggguagaau

SEQ ID NO: 886695 - RNA, 23 nt, Human
ucucugugugccucaguuucuuc

SEQ ID NO: 886696 - RNA, 22 nt, Human
gcaaauauucaagacuuuucca

SEQ ID NO: 886697 - RNA, 22 nt, Human
uggcccugcuaugauccugcaa

SEQ ID NO: 886698 - RNA, 22 nt, Human
uuccaauuuguggugaguuaau

SEQ ID NO: 886699 - RNA, 18 nt, Human
aggugcagccucugaggc

SEQ ID NO: 886700 - RNA, 22 nt, Human
uauuucauucuuuaucaggagc

SEQ ID NO: 886701 - RNA, 22 nt, Human
caaaguauaguguaggauggca

SEQ ID NO: 886702 - RNA, 22 nt, Human
gcaggcugaugacuggaguugg

SEQ ID NO: 886703 - RNA, 22 nt, Human
uugcugaucugaaacguuacug

SEQ ID NO: 886704 - RNA, 22 nt, Human
acugucacuccaacugagucgu

SEQ ID NO: 886705 - RNA, 22 nt, Human
agguuugguuugacaagacuga

SEQ ID NO: 886706 - RNA, 22 nt, Human
guguacagugauuugaguucac

SEQ ID NO: 886707 - RNA, 22 nt, Human
gggagcugagcucugagccacg

SEQ ID NO: 886708 - RNA, 22 nt, Human
gccugcagggugaugggcugcc

SEQ ID NO: 886709 - RNA, 22 nt, Human
ugugcucugcaaucaguucuuu

SEQ ID NO: 886710 - RNA, 22 nt, Human
cccacagguccccaugaacucg

SEQ ID NO: 886711 - RNA, 22 nt, Human
aagugauuaaccaugcucugcu

SEQ ID NO: 886712 - RNA, 22 nt, Human
gagagccugccagugaguguau

SEQ ID NO: 886713 - RNA, 22 nt, Human
uauuguacauuuccaaauugcu

SEQ ID NO: 886714 - RNA, 22 nt, Human
gcaggagaacaaagcaagcugc

SEQ ID NO: 886715 - RNA, 22 nt, Human
gcuuuuguggugauggagaggc

SEQ ID NO: 886716 - RNA, 22 nt, Human
ugcccucuaggcuacaguucca

SEQ ID NO: 886717 - RNA, 22 nt, Human
gcagcuggugcaaaugucacuc

SEQ ID NO: 886718 - RNA, 22 nt, Human
aauaauuauuugagagcagacc

SEQ ID NO: 886719 - RNA, 22 nt, Human
uucacauuugcccuuaugugug

SEQ ID NO: 886720 - RNA, 22 nt, Human
uuuguucauuaaaagugcugua

SEQ ID NO: 886721 - RNA, 22 nt, Human
aacaagcagaugcaaugcacuu

SEQ ID NO: 886722 - RNA, 20 nt, Human
agcugcagaacccacuggac

SEQ ID NO: 886723 - RNA, 22 nt, Human
aaaugugauacuguucuuuuua

SEQ ID NO: 886724 - RNA, 22 nt, Human
aacacaugaaaguuggugagua

SEQ ID NO: 886725 - RNA, 22 nt, Human
caugagaaugaagaagacuuaa

SEQ ID NO: 886726 - RNA, 20 nt, Human
uuggcagcuucaggguacua

SEQ ID NO: 886727 - RNA, 22 nt, Human
cgaggugggcagaucacagagu

SEQ ID NO: 886728 - RNA, 22 nt, Human
ucugggagguguuuugagaacu

SEQ ID NO: 886729 - RNA, 22 nt, Human
aaauacauuagacggagaguua

SEQ ID NO: 886730 - RNA, 22 nt, Human
acaacaaggcuuuucauucaua

SEQ ID NO: 886731 - RNA, 22 nt, Human
uccagcuccugaguucacugcu

SEQ ID NO: 886732 - RNA, 22 nt, Human
gaguuuaaaacgcuuguauuua

SEQ ID NO: 886733 - RNA, 22 nt, Human
ucucacaggugcacguggcugu

SEQ ID NO: 886734 - RNA, 22 nt, Human
acaguguaugauauuucacagu

SEQ ID NO: 886735 - RNA, 22 nt, Human
ugcuuuauuuauaaaauagcaa

SEQ ID NO: 886736 - RNA, 22 nt, Human
auagcuuuuugucauagagucu

SEQ ID NO: 886737 - RNA, 22 nt, Human
uuacaaacaacagacauuuauu

SEQ ID NO: 886738 - RNA, 22 nt, Human
cagcuccugggccaucuccuag

SEQ ID NO: 886739 - RNA, 22 nt, Human
ugucucugcuuuccuugcaggg

SEQ ID NO: 886740 - RNA, 22 nt, Human
cuucuugaaguccuccagaagu

SEQ ID NO: 886741 - RNA, 22 nt, Human
cuggagaaguacugagacauuu

SEQ ID NO: 886742 - RNA, 22 nt, Human
gaaggaggucugcauucuacag

SEQ ID NO: 886743 - RNA, 22 nt, Human
cuuacaacuuguaugugauugu

SEQ ID NO: 886744 - RNA, 22 nt, Human
agcugguggauuaugcuguaca

SEQ ID NO: 886745 - RNA, 18 nt, Human
augugucuuucuuguuug

SEQ ID NO: 886746 - RNA, 22 nt, Human
acccugcuuuaugccguccucu

SEQ ID NO: 886747 - RNA, 22 nt, Human
agucaacacauuaaaccuaggg

SEQ ID NO: 886748 - RNA, 22 nt, Human
aaauguauugcauaggauauuu

SEQ ID NO: 886749 - RNA, 22 nt, Human
uaagugaaauaagucagauaca

SEQ ID NO: 886750 - RNA, 22 nt, Human
auggcagaaagaauagaggcua

SEQ ID NO: 886751 - RNA, 22 nt, Human
cagugggauugggauuggaacc

SEQ ID NO: 886752 - RNA, 17 nt, Human
uagcugccccgaaugcu

SEQ ID NO: 886753 - RNA, 22 nt, Human
gccaggcuggugucacaacucu

SEQ ID NO: 886754 - RNA, 22 nt, Human
cagcaagggauaaagaguuacu

SEQ ID NO: 886755 - RNA, 22 nt, Human
uucagcaaccagaaaggcuggg

SEQ ID NO: 886756 - RNA, 22 nt, Human
auaggacugagauugucaguuu

SEQ ID NO: 886757 - RNA, 19 nt, Human
uucuacuuuguuucccccu

SEQ ID NO: 886758 - RNA, 22 nt, Human
agggagcucuaaguagagggac

SEQ ID NO: 886759 - RNA, 22 nt, Human
uugcucuaucacagugauggga

SEQ ID NO: 886760 - RNA, 23 nt, Human
uuguucuaucaaccuagacuuag

SEQ ID NO: 886761 - RNA, 22 nt, Human
gacaggaauguguggaugcgga

SEQ ID NO: 886762 - RNA, 22 nt, Human
aggaagggauacauaggauagu

SEQ ID NO: 886763 - RNA, 22 nt, Human
ucaacccuguuuucuuugcaau

SEQ ID NO: 886764 - RNA, 18 nt, Human
ugcucuggucucacuugg

SEQ ID NO: 886765 - RNA, 22 nt, Human
ggagaggcgaugagucacagcc

SEQ ID NO: 886766 - RNA, 22 nt, Human
cagcuuggcuucacauucugua

SEQ ID NO: 886767 - RNA, 22 nt, Human
auguauaugaagcuaguauuuu

SEQ ID NO: 886768 - RNA, 22 nt, Human
aagcagcauaauugcuauuuua

SEQ ID NO: 886769 - RNA, 22 nt, Human
aaagacacaaauguagaccaaa

SEQ ID NO: 886770 - RNA, 22 nt, Human
uuacaaguuucuggcuucaucc

SEQ ID NO: 886771 - RNA, 22 nt, Human
agugcagcaugaagcacaugug

SEQ ID NO: 886772 - RNA, 22 nt, Human
aaugaugacaggauaaagaaca

SEQ ID NO: 886773 - RNA, 21 nt, Human
aaugucauugaauggugagac

SEQ ID NO: 886774 - RNA, 22 nt, Human
uugagcuugaggaguuauuuga

SEQ ID NO: 886775 - RNA, 22 nt, Human
ggcugggcaaacaagacucuuc

SEQ ID NO: 886776 - RNA, 17 nt, Human
cagagucugucugcauc

SEQ ID NO: 886777 - RNA, 22 nt, Human
agucagagucgccgacagucaa

SEQ ID NO: 886778 - RNA, 22 nt, Human
caggggcaagaaugcugucagc

SEQ ID NO: 886779 - RNA, 22 nt, Human
ggcagcaagcagaaguucuaug

SEQ ID NO: 886780 - RNA, 22 nt, Human
cacaugagugagaacaugcagu

SEQ ID NO: 886781 - RNA, 22 nt, Human
ucugcagggaugugagggguga

SEQ ID NO: 886782 - RNA, 22 nt, Human
augacacuguccuaguaaggaa

SEQ ID NO: 886783 - RNA, 22 nt, Human
aggccaggaauccuugucccag

SEQ ID NO: 886784 - RNA, 22 nt, Human
cacuuucaaguuucagaggaua

SEQ ID NO: 886785 - RNA, 22 nt, Human
cagcuacaaauacuuuuguaug

SEQ ID NO: 886786 - RNA, 22 nt, Human
agacagcauggagcugauaaca

SEQ ID NO: 886787 - RNA, 22 nt, Human
ugcagcugacccacuccagucc

SEQ ID NO: 886788 - RNA, 22 nt, Human
caguuuaggagagacgcguucu

SEQ ID NO: 886789 - RNA, 22 nt, Human
cagcuguggagauggggugcau

SEQ ID NO: 886790 - RNA, 18 nt, Human
cccugagaugaugcugug

SEQ ID NO: 886791 - RNA, 22 nt, Human
gcugauuauuacaugucugugg

SEQ ID NO: 886792 - RNA, 22 nt, Human
ucacagaaagcuguguccugac

SEQ ID NO: 886793 - RNA, 22 nt, Human
aggcagacaaggucccuggucu

SEQ ID NO: 886794 - RNA, 18 nt, Human
gccugcucugcucucccc

SEQ ID NO: 886795 - RNA, 22 nt, Human
aggcugugaugagccucaugga

SEQ ID NO: 886796 - RNA, 17 nt, Human
ugagcaguagaagaugc

SEQ ID NO: 886797 - RNA, 23 nt, Human
aaugaugucagaagaugaagucu

SEQ ID NO: 886798 - RNA, 22 nt, Human
cuacucuuuugagucuucagau

SEQ ID NO: 886799 - RNA, 21 nt, Human
ugcagggaucuuucugccuga

SEQ ID NO: 886800 - RNA, 22 nt, Human
agggccugggaagaggaacccu

SEQ ID NO: 886801 - RNA, 17 nt, Human
ccacagccuggcacuug

SEQ ID NO: 886802 - RNA, 22 nt, Human
uccugggcaaagaggggcagug

SEQ ID NO: 886803 - RNA, 18 nt, Human
ugccugccccguaagggu

SEQ ID NO: 886804 - RNA, 22 nt, Human
acuuuccuggcccuguccucug

SEQ ID NO: 886805 - RNA, 22 nt, Human
caugaaagcaggaaugguuuua

SEQ ID NO: 886806 - RNA, 22 nt, Human
ugaguuauauauacuggcucug

SEQ ID NO: 886807 - RNA, 22 nt, Human
aaauauguaagauuagcacuag

SEQ ID NO: 886808 - RNA, 22 nt, Human
gccaguuuaaaccuugugaaua

SEQ ID NO: 886809 - RNA, 22 nt, Human
cccuggacggggaauaugacuu

SEQ ID NO: 886810 - RNA, 22 nt, Human
cugaaaugguugccuggagaau

SEQ ID NO: 886811 - RNA, 22 nt, Human
aggcaagagugacuacgugaaa

SEQ ID NO: 886812 - RNA, 22 nt, Human
uuugucauucuguguauuuaaa

SEQ ID NO: 886813 - RNA, 22 nt, Human
gagacacaaucucauuuacauu

SEQ ID NO: 886814 - RNA, 22 nt, Human
ugagggugggccugcaggaaga

SEQ ID NO: 886815 - RNA, 20 nt, Human
uccauucagcauuguggaaa

SEQ ID NO: 886816 - RNA, 22 nt, Human
uacaaacuuguuuuaaguaagu

SEQ ID NO: 886817 - RNA, 22 nt, Human
uggcuagcaacucaacuguuaa

SEQ ID NO: 886818 - RNA, 22 nt, Human
acaaauagagauucaaauaaag

SEQ ID NO: 886819 - RNA, 22 nt, Human
agauacagaaugguuguuuguc

SEQ ID NO: 886820 - RNA, 22 nt, Human
uguggucucguuauguugccca

SEQ ID NO: 886821 - RNA, 22 nt, Human
uuucacauguauauaggcauua

SEQ ID NO: 886822 - RNA, 19 nt, Human
uucuguguuaauuccuuua

SEQ ID NO: 886823 - RNA, 22 nt, Human
ucagucccuaaggauaugggcu

SEQ ID NO: 886824 - RNA, 22 nt, Human
auggaacugaucaggagugcca

SEQ ID NO: 886825 - RNA, 22 nt, Human
augugucuggcauggcucuauu

SEQ ID NO: 886826 - RNA, 22 nt, Human
guucacaauuuuuacugauugg

SEQ ID NO: 886827 - RNA, 22 nt, Human
uucugggcaguuggaaauuuca

SEQ ID NO: 886828 - RNA, 22 nt, Human
aaauguaguugaaaaguuaagg

SEQ ID NO: 886829 - RNA, 22 nt, Human
gaccagagaaaggcacuggaag

SEQ ID NO: 886830 - RNA, 22 nt, Human
gcaguggcagcugaggggguau

SEQ ID NO: 886831 - RNA, 22 nt, Human
guuacaauguucuucaguucug

SEQ ID NO: 886832 - RNA, 22 nt, Human
cacccacauggaaauucacagu

SEQ ID NO: 886833 - RNA, 17 nt, Human
ucuaggagagcagagcu

SEQ ID NO: 886834 - RNA, 23 nt, Human
uggcaggaaaugagaauguuccu

SEQ ID NO: 886835 - RNA, 22 nt, Human
aggucuggaggcggagucagga

SEQ ID NO: 886836 - RNA, 20 nt, Human
gcaaauggacacucagggaa

SEQ ID NO: 886837 - RNA, 22 nt, Human
ucagaauugauuuucaaaacag

SEQ ID NO: 886838 - RNA, 22 nt, Human
gcuuuagagcccagcuuggugg

SEQ ID NO: 886839 - RNA, 22 nt, Human
uucaugaauaccccuucuguaa

SEQ ID NO: 886840 - RNA, 22 nt, Human
gauaaacacaaggugauuucau

SEQ ID NO: 886841 - RNA, 22 nt, Human
uauuuauaccaggugaucggag

SEQ ID NO: 886842 - RNA, 22 nt, Human
agauuuccguucucucuucagu

SEQ ID NO: 886843 - RNA, 22 nt, Human
acccaggauagagugcugcagu

SEQ ID NO: 886844 - RNA, 22 nt, Human
cagcaagaacagccugaugugc

SEQ ID NO: 886845 - RNA, 19 nt, Human
gauuuaaacguggcucuau

SEQ ID NO: 886846 - RNA, 22 nt, Human
uguauacacguaccuuuucuuu

SEQ ID NO: 886847 - RNA, 22 nt, Human
ggcauuaacucuguuucaauuu

SEQ ID NO: 886848 - RNA, 22 nt, Human
ggagaacaggcaagcaucuggc

SEQ ID NO: 886849 - RNA, 22 nt, Human
uuuguguuuuagcuggugaggc

SEQ ID NO: 886850 - RNA, 22 nt, Human
uggcuggcugucaguaggcugu

SEQ ID NO: 886851 - RNA, 22 nt, Human
ugccauauugaugugcuguacc

SEQ ID NO: 886852 - RNA, 22 nt, Human
cagcaaauacuacuaguuuuua

SEQ ID NO: 886853 - RNA, 22 nt, Human
gcugaaggucucuggagagguc

SEQ ID NO: 886854 - RNA, 22 nt, Human
ggcuccuguccccucagcugcu

SEQ ID NO: 886855 - RNA, 23 nt, Human
aaacauuucucuuuuccugccuc

SEQ ID NO: 886856 - RNA, 22 nt, Human
caguacauaaugcgcaaaaccg

SEQ ID NO: 886857 - RNA, 22 nt, Human
gcccagggcagggcaagaguga

SEQ ID NO: 886858 - RNA, 22 nt, Human
ugcagaguccucuggagggacu

SEQ ID NO: 886859 - RNA, 22 nt, Human
agcuugaaccacaugaaauugc

SEQ ID NO: 886860 - RNA, 22 nt, Human
auccauuucuaucuugcugagg

SEQ ID NO: 886861 - RNA, 22 nt, Human
uuuccacccagagcauuuguuu

SEQ ID NO: 886862 - RNA, 22 nt, Human
ugaaccagagucuccagugguu

SEQ ID NO: 886863 - RNA, 22 nt, Human
cugccagcucaaagcgcagcua

SEQ ID NO: 886864 - RNA, 22 nt, Human
caaguuuugauuuugcaguaaa

SEQ ID NO: 886865 - RNA, 22 nt, Human
ucugugaacaucacauugacag

SEQ ID NO: 886866 - RNA, 22 nt, Human
uuacaagacagugugguaaaua

SEQ ID NO: 886867 - RNA, 22 nt, Human
uuaugauuugccacagauuggu

SEQ ID NO: 886868 - RNA, 17 nt, Human
augcucuauagucagug

SEQ ID NO: 886869 - RNA, 22 nt, Human
cagcuugggaguuugguuuuau

SEQ ID NO: 886870 - RNA, 21 nt, Human
cugagcuggggugaagguugc

SEQ ID NO: 886871 - RNA, 22 nt, Human
uggccguguuagauguuuggcu

SEQ ID NO: 886872 - RNA, 22 nt, Human
acauagaacuucccagugagca

SEQ ID NO: 886873 - RNA, 22 nt, Human
uuaaaugacuuuuauuauucuc

SEQ ID NO: 886874 - RNA, 22 nt, Human
acaauucucucauaucuuauua

SEQ ID NO: 886875 - RNA, 22 nt, Human
ucauaaauugauuaugugcuuu

SEQ ID NO: 886876 - RNA, 22 nt, Human
aaaggcaagcauuuauauagga

SEQ ID NO: 886877 - RNA, 22 nt, Human
ugaggggaacugaugcccauug

SEQ ID NO: 886878 - RNA, 22 nt, Human
aaagcacucguuaguauuucug

SEQ ID NO: 886879 - RNA, 22 nt, Human
caagagacgggcaaggcaagag

SEQ ID NO: 886880 - RNA, 22 nt, Human
guuaaacaguuacaugugcugg

SEQ ID NO: 886881 - RNA, 19 nt, Human
ggaaccuuagagcuucagc

SEQ ID NO: 886882 - RNA, 22 nt, Human
ucacacagugguaaaacccuga

SEQ ID NO: 886883 - RNA, 22 nt, Human
caaaggcuucaucucagagcag

SEQ ID NO: 886884 - RNA, 22 nt, Human
agaacagcugcaaaacuuaauc

SEQ ID NO: 886885 - RNA, 22 nt, Human
gaagucucauaguuaaaauucu

SEQ ID NO: 886886 - RNA, 22 nt, Human
uacuuuauuguaaaugcugaug

SEQ ID NO: 886887 - RNA, 22 nt, Human
ccaguacuuugugcaacaaaug

SEQ ID NO: 886888 - RNA, 22 nt, Human
gcugccugcaguguuuucccag

SEQ ID NO: 886889 - RNA, 23 nt, Human
ucagaaguuugguuguaacaugg

SEQ ID NO: 886890 - RNA, 22 nt, Human
aaggcuuggucuagucaugcca

SEQ ID NO: 886891 - RNA, 22 nt, Human
uugacaauguccuuugaauuuc

SEQ ID NO: 886892 - RNA, 17 nt, Human
ccugucuuguuucugcc

SEQ ID NO: 886893 - RNA, 22 nt, Human
uuacuugcuuauaaucaaaaca

SEQ ID NO: 886894 - RNA, 22 nt, Human
gaacugucauuggggacaucag

SEQ ID NO: 886895 - RNA, 22 nt, Human
cacagugaacauucugucaggg

SEQ ID NO: 886896 - RNA, 22 nt, Human
aagcaaagugaauuuugccaag

SEQ ID NO: 886897 - RNA, 22 nt, Human
gugcaggagcuucuggccugac

SEQ ID NO: 886898 - RNA, 22 nt, Human
gggcuucaggagggucagccca

SEQ ID NO: 886899 - RNA, 22 nt, Human
uucuaacucaaagcuucuuuca

SEQ ID NO: 886900 - RNA, 22 nt, Human
auguggccuaguauagaaauga

SEQ ID NO: 886901 - RNA, 22 nt, Human
gccagcagggcggagccaucua

SEQ ID NO: 886902 - RNA, 22 nt, Human
gaggcucuggaguagguacaca

SEQ ID NO: 886903 - RNA, 22 nt, Human
cacagagaccccuucuggggcc

SEQ ID NO: 886904 - RNA, 22 nt, Human
ggcaucagcccgguccugggcu

SEQ ID NO: 886905 - RNA, 22 nt, Human
uccuggcucaggccccuggugc

SEQ ID NO: 886906 - RNA, 22 nt, Human
auucagugaccuaauuacuuac

SEQ ID NO: 886907 - RNA, 22 nt, Human
caaaccuuguuccagucaacuc

SEQ ID NO: 886908 - RNA, 22 nt, Human
aauggguuguagggaaagucaa

SEQ ID NO: 886909 - RNA, 22 nt, Human
uccuggguccugggaagcccug

SEQ ID NO: 886910 - RNA, 22 nt, Human
aaacaguuuucucauuuagugu

SEQ ID NO: 886911 - RNA, 19 nt, Human
uuuuuacaaguagguguga

SEQ ID NO: 886912 - RNA, 22 nt, Human
cagaggaagagauacaagcccu

SEQ ID NO: 886913 - RNA, 21 nt, Human
cucugcccagggccuccugcc

SEQ ID NO: 886914 - RNA, 22 nt, Human
ucaggaggccaccaggaccugu

SEQ ID NO: 886915 - RNA, 22 nt, Human
caguggaugguuugucuugccu

SEQ ID NO: 886916 - RNA, 22 nt, Human
ugugugugcaggagagcaggug

SEQ ID NO: 886917 - RNA, 22 nt, Human
ugauaucuaagaaauucuacca

SEQ ID NO: 886918 - RNA, 22 nt, Human
uggcuggauaucagaggaagug

SEQ ID NO: 886919 - RNA, 22 nt, Human
uuuaccaaaugagacuauuguu

SEQ ID NO: 886920 - RNA, 22 nt, Human
uuuggugagcugcgagugagga

SEQ ID NO: 886921 - RNA, 23 nt, Human
uagugucaagagggaguguaauu

SEQ ID NO: 886922 - RNA, 22 nt, Human
ccaguguggccaggucuucugg

SEQ ID NO: 886923 - RNA, 19 nt, Human
uuugagaaguuauuaucua

SEQ ID NO: 886924 - RNA, 22 nt, Human
acaauguguuuuuauacauuug

SEQ ID NO: 886925 - RNA, 22 nt, Human
gccagcugagaaaucauugaua

SEQ ID NO: 886926 - RNA, 22 nt, Human
gcuguguggcugugccgucacg

SEQ ID NO: 886927 - RNA, 21 nt, Human
aaaaaugaaguuguucaggaa

SEQ ID NO: 886928 - RNA, 22 nt, Human
ugcuacaugcacugugaucuag

SEQ ID NO: 886929 - RNA, 22 nt, Human
cccuguccuuggcugugaggcu

SEQ ID NO: 886930 - RNA, 22 nt, Human
acauuagagaagcuuggagaug

SEQ ID NO: 886931 - RNA, 22 nt, Human
gccagagagacugauacaugcu

SEQ ID NO: 886932 - RNA, 22 nt, Human
ucacugaaagaaugacauuaug

SEQ ID NO: 886933 - RNA, 22 nt, Human
uuuauacauggagaauuuuugc

SEQ ID NO: 886934 - RNA, 22 nt, Human
auucagaauggcaaacuucuag

SEQ ID NO: 886935 - RNA, 22 nt, Human
gaccccaaacccuguauucuuc

SEQ ID NO: 886936 - RNA, 21 nt, Human
guauaucagcagugaauucaa

SEQ ID NO: 886937 - RNA, 22 nt, Human
uggcucucaauggcuguacuau

SEQ ID NO: 886938 - RNA, 22 nt, Human
ucauuuuucacacagggucacc

SEQ ID NO: 886939 - RNA, 22 nt, Human
cucugucacuucuccagcugag

SEQ ID NO: 886940 - RNA, 22 nt, Human
ucaggaguaaggguaacccaga

SEQ ID NO: 886941 - RNA, 22 nt, Human
gagaaacuaacaucugaaggug

SEQ ID NO: 886942 - RNA, 22 nt, Human
aucucuccuucagcugaggccc

SEQ ID NO: 886943 - RNA, 22 nt, Human
aauacagugaaagugagcaagg

SEQ ID NO: 886944 - RNA, 23 nt, Human
gaggagggucugacaaguguagc

SEQ ID NO: 886945 - RNA, 22 nt, Human
aguaaagcggugucacagaaug

SEQ ID NO: 886946 - RNA, 22 nt, Human
caauuuuauugguccaaauaca

SEQ ID NO: 886947 - RNA, 19 nt, Human
aggcuggaugcccaucuua

SEQ ID NO: 886948 - RNA, 22 nt, Human
cacacauggucaguggcuacuc

SEQ ID NO: 886949 - RNA, 18 nt, Human
cugcugcaggcacucagg

SEQ ID NO: 886950 - RNA, 22 nt, Human
gaaaucuuccaauggucacauc

SEQ ID NO: 886951 - RNA, 22 nt, Human
cugccaggccuggggugcuguc

SEQ ID NO: 886952 - RNA, 22 nt, Human
ggcagccacccugggaggcaga

SEQ ID NO: 886953 - RNA, 22 nt, Human
ugaguuuuggaagacaacacaa

SEQ ID NO: 886954 - RNA, 22 nt, Human
aagucuugguagagaaggacuu

SEQ ID NO: 886955 - RNA, 22 nt, Human
gcugucacaucaaggcacuaaa

SEQ ID NO: 886956 - RNA, 22 nt, Human
aggcagccagauggcagccugc

SEQ ID NO: 886957 - RNA, 22 nt, Human
gcaggagcccuggcauguucuu

SEQ ID NO: 886958 - RNA, 21 nt, Human
cagaucuguagguacuaccau

SEQ ID NO: 886959 - RNA, 22 nt, Human
aagcuauagaguguaagaugau

SEQ ID NO: 886960 - RNA, 22 nt, Human
augcauauuucuuggagcaccu

SEQ ID NO: 886961 - RNA, 23 nt, Human
cacagucauuuacuuugccauca

SEQ ID NO: 886962 - RNA, 18 nt, Human
cuacauucauaggaaagg

SEQ ID NO: 886963 - RNA, 22 nt, Human
aaacagcagcuguuuaauuugc

SEQ ID NO: 886964 - RNA, 22 nt, Human
ggcagcugggucacaccgaucu

SEQ ID NO: 886965 - RNA, 22 nt, Human
uuuagaaggacuacagugugau

SEQ ID NO: 886966 - RNA, 22 nt, Human
uuugauaagagcugcugaaacu

SEQ ID NO: 886967 - RNA, 22 nt, Human
ccugcugugaaacuggcauaug

SEQ ID NO: 886968 - RNA, 22 nt, Human
cagcaucuguuuuucugaccca

SEQ ID NO: 886969 - RNA, 22 nt, Human
acagagggggccuuggagugca

SEQ ID NO: 886970 - RNA, 22 nt, Human
aaagucugagcagaauuucuca

SEQ ID NO: 886971 - RNA, 22 nt, Human
gccugggugaauuugauccuaa

SEQ ID NO: 886972 - RNA, 22 nt, Human
aaaugaacaucaagaauagccu

SEQ ID NO: 886973 - RNA, 22 nt, Human
auuuccuucggacaguuugggu

SEQ ID NO: 886974 - RNA, 22 nt, Human
uuacagagaggugauugugaag

SEQ ID NO: 886975 - RNA, 22 nt, Human
aggcaauuguuuguguaauagg

SEQ ID NO: 886976 - RNA, 22 nt, Human
gcauugaagaucuuagacuagg

SEQ ID NO: 886977 - RNA, 22 nt, Human
uacucaaacucacuaagacaga

SEQ ID NO: 886978 - RNA, 22 nt, Human
cugggacccugcccuguggccu

SEQ ID NO: 886979 - RNA, 22 nt, Human
uuugaagacuacugggagugaa

SEQ ID NO: 886980 - RNA, 22 nt, Human
gggggagaagauucugcugcuu

SEQ ID NO: 886981 - RNA, 22 nt, Human
ccugcuggaccucaacacauuu

SEQ ID NO: 886982 - RNA, 22 nt, Human
agucagcuuggcuccucccaug

SEQ ID NO: 886983 - RNA, 22 nt, Human
aagaggcaguggugaugaaugg

SEQ ID NO: 886984 - RNA, 22 nt, Human
cagaggcuagacugugcuuccu

SEQ ID NO: 886985 - RNA, 22 nt, Human
ggucagaggucccagaagaagc

SEQ ID NO: 886986 - RNA, 22 nt, Human
aggaaaacacaguauugaugga

SEQ ID NO: 886987 - RNA, 22 nt, Human
augacagaggauuguaaagagg

SEQ ID NO: 886988 - RNA, 22 nt, Human
ggcuaggcgggcacauggugga

SEQ ID NO: 886989 - RNA, 23 nt, Human
uccucgcaggagggagaugaugc

SEQ ID NO: 886990 - RNA, 22 nt, Human
uucucuuugacauuauucaggu

SEQ ID NO: 886991 - RNA, 22 nt, Human
uccaacuuucuccuccggcuug

SEQ ID NO: 886992 - RNA, 22 nt, Human
gcucugcucuaacauuccugac

SEQ ID NO: 886993 - RNA, 22 nt, Human
uguaagaaaaguaaauagugac

SEQ ID NO: 886994 - RNA, 22 nt, Human
ggagucaccugggaggacuggg

SEQ ID NO: 886995 - RNA, 22 nt, Human
ugauuagacaaaggaaucaugc

SEQ ID NO: 886996 - RNA, 22 nt, Human
gacccugccaugagugacaggg

SEQ ID NO: 886997 - RNA, 22 nt, Human
gucugggacaggacuggggaac

SEQ ID NO: 886998 - RNA, 22 nt, Human
gaggagagccugcacuuugacc

SEQ ID NO: 886999 - RNA, 22 nt, Human
uggcuucagaucugccccggag

SEQ ID NO: 887000 - RNA, 22 nt, Human
ucagggcccuggacaacccucc

SEQ ID NO: 887001 - RNA, 22 nt, Human
ugggucccucuggaguaguaca

SEQ ID NO: 887002 - RNA, 22 nt, Human
aggccugacuugaauuuagggc

SEQ ID NO: 887003 - RNA, 22 nt, Human
uggccuccucgggcugacccug

SEQ ID NO: 887004 - RNA, 22 nt, Human
ugcuccagcaugacccucaaug

SEQ ID NO: 887005 - RNA, 22 nt, Human
cuggaggugggggcaagagugu

SEQ ID NO: 887006 - RNA, 22 nt, Human
ggcaggcaccagcucagcaaua

SEQ ID NO: 887007 - RNA, 22 nt, Human
cugagggcuggagcugaggccu

SEQ ID NO: 887008 - RNA, 22 nt, Human
uuugagaagauguaauguuaag

SEQ ID NO: 887009 - RNA, 22 nt, Human
auggcacugaccucccuuguaa

SEQ ID NO: 887010 - RNA, 18 nt, Human
aacuucaacuacaaugga

SEQ ID NO: 887011 - RNA, 22 nt, Human
ggaggcucagugaggaaaugga

SEQ ID NO: 887012 - RNA, 22 nt, Human
gugauucuaaagcuuugagcag

SEQ ID NO: 887013 - RNA, 22 nt, Human
agggauguaaauucuucuucuu

SEQ ID NO: 887014 - RNA, 22 nt, Human
ugggcucagggucgaggacuuu

SEQ ID NO: 887015 - RNA, 22 nt, Human
aacaucucauggacuacauucu

SEQ ID NO: 887016 - RNA, 18 nt, Human
cugggucuccaggcugcc

SEQ ID NO: 887017 - RNA, 22 nt, Human
caaguuugcugauccuuguuuu

SEQ ID NO: 887018 - RNA, 22 nt, Human
cacaggaaucagcauuaauggc

SEQ ID NO: 887019 - RNA, 18 nt, Human
gccaggaagaggaaugug

SEQ ID NO: 887020 - RNA, 21 nt, Human
ucacaguucaagaugaacccc

SEQ ID NO: 887021 - RNA, 23 nt, Human
ucccuguguacagccugcaugag

SEQ ID NO: 887022 - RNA, 22 nt, Human
ggcagccaugcuccaggugcag

SEQ ID NO: 887023 - RNA, 22 nt, Human
gcauaauuaaacaggcaagauu

SEQ ID NO: 887024 - RNA, 22 nt, Human
cagugcagguggcagaggacag

SEQ ID NO: 887025 - RNA, 22 nt, Human
uuacuguucauguuguacacuu

SEQ ID NO: 887026 - RNA, 22 nt, Human
cauguacauucuguagauggag

SEQ ID NO: 887027 - RNA, 23 nt, Human
uggcucugugucacauacaggau

SEQ ID NO: 887028 - RNA, 22 nt, Human
uccugaaggcagauggggauca

SEQ ID NO: 887029 - RNA, 22 nt, Human
aucuguuguuuuucaccaccca

SEQ ID NO: 887030 - RNA, 23 nt, Human
uguguguguauucuacgcaaggu

SEQ ID NO: 887031 - RNA, 22 nt, Human
gcaggaauauaguauuucgagg

SEQ ID NO: 887032 - RNA, 22 nt, Human
ggagguauuugucaaucuguuu

SEQ ID NO: 887033 - RNA, 22 nt, Human
uccaggagggguaggcaguaug

SEQ ID NO: 887034 - RNA, 22 nt, Human
uuguggcucaucuucagcuccc

SEQ ID NO: 887035 - RNA, 22 nt, Human
guuuuucucugaaauaguugac

SEQ ID NO: 887036 - RNA, 22 nt, Human
agaaguuugaaauuaggagaaa

SEQ ID NO: 887037 - RNA, 22 nt, Human
gugucaugcacacucaguguug

SEQ ID NO: 887038 - RNA, 22 nt, Human
auuucaugaaugcugcuguuga

SEQ ID NO: 887039 - RNA, 22 nt, Human
aaggcagggaaaguggauuagg

SEQ ID NO: 887040 - RNA, 22 nt, Human
ccagcagguguagggcucaugg

SEQ ID NO: 887041 - RNA, 22 nt, Human
uggccagaccugacugucaggg

SEQ ID NO: 887042 - RNA, 22 nt, Human
cauuaacaauuguuuaugcugu

SEQ ID NO: 887043 - RNA, 22 nt, Human
accaggcuggagugcaguggcg

SEQ ID NO: 887044 - RNA, 22 nt, Human
aagaucauaauauuuaucucau

SEQ ID NO: 887045 - RNA, 22 nt, Human
ugugugcacaugauuugaaaug

SEQ ID NO: 887046 - RNA, 22 nt, Human
cucagggacguuagaggacagg

SEQ ID NO: 887047 - RNA, 22 nt, Human
ucagguuuuucucaaaucaggu

SEQ ID NO: 887048 - RNA, 22 nt, Human
cuuggauucauugugggaggga

SEQ ID NO: 887049 - RNA, 22 nt, Human
auguuucugaguguauauacau

SEQ ID NO: 887050 - RNA, 22 nt, Human
ucucccacuggccuuguaugau

SEQ ID NO: 887051 - RNA, 22 nt, Human
aagagcuggcucuugcagcagc

SEQ ID NO: 887052 - RNA, 22 nt, Human
agguccaggcauuuggguuggg

SEQ ID NO: 887053 - RNA, 22 nt, Human
cccugcacagccuggcucucuu

SEQ ID NO: 887054 - RNA, 22 nt, Human
ccucugagagaaggccuucagc

SEQ ID NO: 887055 - RNA, 22 nt, Human
cuucaaacacuagaaacacagg

SEQ ID NO: 887056 - RNA, 22 nt, Human
aaguuaggagaguaaaguggua

SEQ ID NO: 887057 - RNA, 22 nt, Human
aggcagccauuaccaagggcau

SEQ ID NO: 887058 - RNA, 22 nt, Human
gagcugcagacauagauaagcg

SEQ ID NO: 887059 - RNA, 22 nt, Human
gaggccugggagaacuguuuuu

SEQ ID NO: 887060 - RNA, 22 nt, Human
uagggcugcagaacaauggccu

SEQ ID NO: 887061 - RNA, 16 nt, Human
acacaguuuuaaggca

SEQ ID NO: 887062 - RNA, 22 nt, Human
cugggcuucucccccuggcaga

SEQ ID NO: 887063 - RNA, 22 nt, Human
aaucacaaaugcaaguugucac

SEQ ID NO: 887064 - RNA, 22 nt, Human
cagaacauuccaugugcccugc

SEQ ID NO: 887065 - RNA, 22 nt, Human
gcccuugggagguuccacuggg

SEQ ID NO: 887066 - RNA, 22 nt, Human
gagagcuguaauagucaugucu

SEQ ID NO: 887067 - RNA, 21 nt, Human
cugcugcuggggucugggcag

SEQ ID NO: 887068 - RNA, 22 nt, Human
agggcuagaguugagaugggga

SEQ ID NO: 887069 - RNA, 22 nt, Human
gacauucauuaagccuuucugu

SEQ ID NO: 887070 - RNA, 22 nt, Human
auagaauucguguuuguaauuc

SEQ ID NO: 887071 - RNA, 22 nt, Human
ccucuggaucuuucuccacacu

SEQ ID NO: 887072 - RNA, 22 nt, Human
ccagggggcuuggugaggccau

SEQ ID NO: 887073 - RNA, 22 nt, Human
acagugugaugggccugccuga

SEQ ID NO: 887074 - RNA, 22 nt, Human
caggggggcaggagucauugau

SEQ ID NO: 887075 - RNA, 22 nt, Human
uaauuuauauggaauuguugcu

SEQ ID NO: 887076 - RNA, 19 nt, Human
cuuccuugcuccccaugug

SEQ ID NO: 887077 - RNA, 22 nt, Human
cagaguacauaggagcaaauca

SEQ ID NO: 887078 - RNA, 18 nt, Human
gccuggcuucggagccgc

SEQ ID NO: 887079 - RNA, 17 nt, Human
gacuucaacuucugcug

SEQ ID NO: 887080 - RNA, 22 nt, Human
cagcaucccucaggggccucug

SEQ ID NO: 887081 - RNA, 22 nt, Human
ccaguccauauuuauacugccg

SEQ ID NO: 887082 - RNA, 22 nt, Human
ggggaacaccgggcagaggcgc

SEQ ID NO: 887083 - RNA, 22 nt, Human
ugaaacauuauagaauauuuau

SEQ ID NO: 887084 - RNA, 22 nt, Human
acacugaaucagaaauuguugg

SEQ ID NO: 887085 - RNA, 22 nt, Human
acagccaguaaggaaagaccca

SEQ ID NO: 887086 - RNA, 22 nt, Human
cauaaaguuaagcuguaaguau

SEQ ID NO: 887087 - RNA, 22 nt, Human
uucucaaagaaagcugucauua

SEQ ID NO: 887088 - RNA, 22 nt, Human
gucuuauuuaaagagaucauac

SEQ ID NO: 887089 - RNA, 22 nt, Human
cugccacuuuggagugcucaga

SEQ ID NO: 887090 - RNA, 22 nt, Human
ucuuuauguaagacugggcuug

SEQ ID NO: 887091 - RNA, 19 nt, Human
agccagaguggcccagggg

SEQ ID NO: 887092 - RNA, 22 nt, Human
acuaaauggaaugauuacuaua

SEQ ID NO: 887093 - RNA, 22 nt, Human
uucacagugagcuaugucuugu

SEQ ID NO: 887094 - RNA, 22 nt, Human
caggcagcagaggaguguggga

SEQ ID NO: 887095 - RNA, 20 nt, Human
cuguggcucaugcaucugcc

SEQ ID NO: 887096 - RNA, 22 nt, Human
uaucagugugguuucuggacug

SEQ ID NO: 887097 - RNA, 22 nt, Human
acauuucauuugcaguauggau

SEQ ID NO: 887098 - RNA, 22 nt, Human
cacaggagcccugaggccuccc

SEQ ID NO: 887099 - RNA, 23 nt, Human
acaacuuuacagauacauuuugu

SEQ ID NO: 887100 - RNA, 22 nt, Human
aggacucacauagcuucagaug

SEQ ID NO: 887101 - RNA, 22 nt, Human
gucuggagccccagucaaugag

SEQ ID NO: 887102 - RNA, 22 nt, Human
cuuuacuugcuuuguuacaaaa

SEQ ID NO: 887103 - RNA, 22 nt, Human
uugcugaggacgcagugcagug

SEQ ID NO: 887104 - RNA, 22 nt, Human
acagagcaugauggaagaucga

SEQ ID NO: 887105 - RNA, 18 nt, Human
ggguccuguucuuggaag

SEQ ID NO: 887106 - RNA, 22 nt, Human
ucccugcucagcucaccuggca

SEQ ID NO: 887107 - RNA, 22 nt, Human
uucucauaugcacucuauuuga

SEQ ID NO: 887108 - RNA, 22 nt, Human
ugcuagggauauaguggcgagu

SEQ ID NO: 887109 - RNA, 22 nt, Human
uggcuucaaaaucuaguggucu

SEQ ID NO: 887110 - RNA, 22 nt, Human
ccacccuggacaggccucugag

SEQ ID NO: 887111 - RNA, 22 nt, Human
gugcagagaaggagcaguaguu

SEQ ID NO: 887112 - RNA, 23 nt, Human
ccagggagguugauugguuaccc

SEQ ID NO: 887113 - RNA, 22 nt, Human
cacagcauaaugaaauauacuu

SEQ ID NO: 887114 - RNA, 22 nt, Human
aaugaauaccguuucacucagu

SEQ ID NO: 887115 - RNA, 22 nt, Human
gccaggaggggagaguguguca

SEQ ID NO: 887116 - RNA, 22 nt, Human
gaggcagagacuccaccuucag

SEQ ID NO: 887117 - RNA, 22 nt, Human
agauaucaccaguuuuacauac

SEQ ID NO: 887118 - RNA, 22 nt, Human
guuccacauaacacaucuacaa

SEQ ID NO: 887119 - RNA, 22 nt, Human
ugaauuuaccuugccuauauuu

SEQ ID NO: 887120 - RNA, 22 nt, Human
ugcuguguuccucaguuucaug

SEQ ID NO: 887121 - RNA, 22 nt, Human
auccugggaaugggagggucau

SEQ ID NO: 887122 - RNA, 22 nt, Human
ggcagcaaguaggauucuuauu

SEQ ID NO: 887123 - RNA, 22 nt, Human
uguuucacugaaagccuuacua

SEQ ID NO: 887124 - RNA, 22 nt, Human
aaaggcagugugauacuguggu

SEQ ID NO: 887125 - RNA, 22 nt, Human
uugagauauucaguuccauuga

SEQ ID NO: 887126 - RNA, 22 nt, Human
acuuaacagacauuauuuaccu

SEQ ID NO: 887127 - RNA, 22 nt, Human
agucaguggcuccgagccuggu

SEQ ID NO: 887128 - RNA, 22 nt, Human
agcugccuaguagauugauugg

SEQ ID NO: 887129 - RNA, 22 nt, Human
gcaggccuccccugcuggagcu

SEQ ID NO: 887130 - RNA, 22 nt, Human
gccuggcauuggagccggggca

SEQ ID NO: 887131 - RNA, 22 nt, Human
uaaaugcuaucgcauaaaaccu

SEQ ID NO: 887132 - RNA, 20 nt, Human
acagaguagaacauaugcca

SEQ ID NO: 887133 - RNA, 22 nt, Human
gauggcaggcaggugaguagag

SEQ ID NO: 887134 - RNA, 22 nt, Human
uccuggagaaacucagagaucu

SEQ ID NO: 887135 - RNA, 22 nt, Human
uccagggaucuuuagagucuuu

SEQ ID NO: 887136 - RNA, 22 nt, Human
ucugcauggagaggagaugcua

SEQ ID NO: 887137 - RNA, 22 nt, Human
uguucuuuucucuaaacugaua

SEQ ID NO: 887138 - RNA, 22 nt, Human
uugcagagccaugaggcuggcu

SEQ ID NO: 887139 - RNA, 22 nt, Human
gaaaaggcucucacucccuccg

SEQ ID NO: 887140 - RNA, 22 nt, Human
auuuccuaauuuaugcaggagu

SEQ ID NO: 887141 - RNA, 22 nt, Human
gauuaauaguacagguucuuag

SEQ ID NO: 887142 - RNA, 18 nt, Human
aggaagcaggaggaaggc

SEQ ID NO: 887143 - RNA, 22 nt, Human
cugcacauguucaucaugacaa

SEQ ID NO: 887144 - RNA, 22 nt, Human
uauaugcuugugcaugucuuug

SEQ ID NO: 887145 - RNA, 22 nt, Human
uucuggaguucaggucccuaaa

SEQ ID NO: 887146 - RNA, 22 nt, Human
ugggugccaaccucugguggcc

SEQ ID NO: 887147 - RNA, 22 nt, Human
uucuagacaaauguguucauuc

SEQ ID NO: 887148 - RNA, 22 nt, Human
aagccuugcagcauuaggcucu

SEQ ID NO: 887149 - RNA, 22 nt, Human
ucuucucccagggucgcccaag

SEQ ID NO: 887150 - RNA, 22 nt, Human
agcagugagugggaggaccaug

SEQ ID NO: 887151 - RNA, 22 nt, Human
acuuuaugugcuugcucuuucc

SEQ ID NO: 887152 - RNA, 21 nt, Human
ccugaccuaauuugccaucag

SEQ ID NO: 887153 - RNA, 22 nt, Human
caggcugggcuccggagauaaa

SEQ ID NO: 887154 - RNA, 22 nt, Human
ugacccuuguggcagaaaacag

SEQ ID NO: 887155 - RNA, 22 nt, Human
uuauauguuucuguuuggaggc

SEQ ID NO: 887156 - RNA, 22 nt, Human
ugcagagagauauggcaagagg

SEQ ID NO: 887157 - RNA, 22 nt, Human
uucuaguucuuaggaacagaca

SEQ ID NO: 887158 - RNA, 22 nt, Human
uuaggaaacaucauuuuugcug

SEQ ID NO: 887159 - RNA, 22 nt, Human
ucccucagaugagcuccuagca

SEQ ID NO: 887160 - RNA, 22 nt, Human
uagguuuacugaauuaguggaa

SEQ ID NO: 887161 - RNA, 22 nt, Human
ucacuuuugaucccuaugcagu

SEQ ID NO: 887162 - RNA, 22 nt, Human
aaaggcucagaugaggcccugg

SEQ ID NO: 887163 - RNA, 22 nt, Human
aacauuuaugguagucauugca

SEQ ID NO: 887164 - RNA, 23 nt, Human
aagauguauuuuuaccaaauguc

SEQ ID NO: 887165 - RNA, 19 nt, Human
acuggcaguuucugcaugg

SEQ ID NO: 887166 - RNA, 22 nt, Human
ucuuuuauccuacauuuagcuc

SEQ ID NO: 887167 - RNA, 22 nt, Human
gaagauuuguuguaauuuuuag

SEQ ID NO: 887168 - RNA, 22 nt, Human
acccagagaacugugccuugag

SEQ ID NO: 887169 - RNA, 22 nt, Human
auccucucuguuuucguguaug

SEQ ID NO: 887170 - RNA, 22 nt, Human
uaugcuuucauucauaugugag

SEQ ID NO: 887171 - RNA, 19 nt, Human
ggaaggcagaggggcugug

SEQ ID NO: 887172 - RNA, 20 nt, Human
gugggcagagcaccaccugg

SEQ ID NO: 887173 - RNA, 22 nt, Human
aggacuuccaaaccucccaaau

SEQ ID NO: 887174 - RNA, 22 nt, Human
ggccagcugggccaccaggugc

SEQ ID NO: 887175 - RNA, 23 nt, Human
uuccacaaugaaaauaaagcagg

SEQ ID NO: 887176 - RNA, 22 nt, Human
gggcagcauaacaaucacugaa

SEQ ID NO: 887177 - RNA, 22 nt, Human
agccuggaguucccaggagaag

SEQ ID NO: 887178 - RNA, 22 nt, Human
aaugguaauauuggcacagaaa

SEQ ID NO: 887179 - RNA, 22 nt, Human
aaguccagguccucauuccauc

SEQ ID NO: 887180 - RNA, 20 nt, Human
augccucuaauuuugcaaac

SEQ ID NO: 887181 - RNA, 20 nt, Human
augcagcauuguuguggcaa

SEQ ID NO: 887182 - RNA, 22 nt, Human
gggcucuggacccaggcaagag

SEQ ID NO: 887183 - RNA, 22 nt, Human
ccagcuccucuugucucuagca

SEQ ID NO: 887184 - RNA, 22 nt, Human
caguggguaguggggauuagca

SEQ ID NO: 887185 - RNA, 22 nt, Human
uuucuucagagagagcuuuccc

SEQ ID NO: 887186 - RNA, 22 nt, Human
caggaagcaccagcccggcccc

SEQ ID NO: 887187 - RNA, 22 nt, Human
ugaaguuugguggaaauuuccu

SEQ ID NO: 887188 - RNA, 22 nt, Human
uuuuucuugugcuggaucuaau

SEQ ID NO: 887189 - RNA, 22 nt, Human
ucccaagauuagguuggaaagg

SEQ ID NO: 887190 - RNA, 22 nt, Human
acaacuuuucuaucauguggaa

SEQ ID NO: 887191 - RNA, 22 nt, Human
aggggaaggccagccuguagag

SEQ ID NO: 887192 - RNA, 22 nt, Human
uucauuuucuuucacgcugcug

SEQ ID NO: 887193 - RNA, 22 nt, Human
agcuguguggugucugacagcu

SEQ ID NO: 887194 - RNA, 22 nt, Human
aagugugaauuuuagagucagg

SEQ ID NO: 887195 - RNA, 22 nt, Human
agcuggcagcucucagggguac

SEQ ID NO: 887196 - RNA, 22 nt, Human
aagauuuaccacuuuauucaag

SEQ ID NO: 887197 - RNA, 22 nt, Human
gccuggcauuacagcacuccug

SEQ ID NO: 887198 - RNA, 22 nt, Human
aggaccagaggccagagucagc

SEQ ID NO: 887199 - RNA, 22 nt, Human
aucaaguucugucacauuuguc

SEQ ID NO: 887200 - RNA, 22 nt, Human
ugucuccugcaggggugugggc

SEQ ID NO: 887201 - RNA, 22 nt, Human
gcagcugucauuuacaacaggg

SEQ ID NO: 887202 - RNA, 22 nt, Human
cagugauuguacuguugugccu

SEQ ID NO: 887203 - RNA, 22 nt, Human
aggcagcagucaugaggaaaga

SEQ ID NO: 887204 - RNA, 22 nt, Human
gagcaagacccuggguucucuc

SEQ ID NO: 887205 - RNA, 22 nt, Human
uucugaagcucccuuuuguagu

SEQ ID NO: 887206 - RNA, 22 nt, Human
auccccagaaaauaggugccua

SEQ ID NO: 887207 - RNA, 22 nt, Human
cuugcuggagcggagcgggugu

SEQ ID NO: 887208 - RNA, 22 nt, Human
cagguucuggggcuccacugug

SEQ ID NO: 887209 - RNA, 22 nt, Human
ggguccagauggugagaguuaa

SEQ ID NO: 887210 - RNA, 22 nt, Human
gugcugugcgcuuuuucuguau

SEQ ID NO: 887211 - RNA, 22 nt, Human
guuugcauaaaguggaugcagg

SEQ ID NO: 887212 - RNA, 22 nt, Human
gcugucaggaacaugccuuggu

SEQ ID NO: 887213 - RNA, 21 nt, Human
agagcugggacuugccugaga

SEQ ID NO: 887214 - RNA, 20 nt, Human
auuggcugggguucugaugc

SEQ ID NO: 887215 - RNA, 22 nt, Human
uauacacauaucuucuaggccu

SEQ ID NO: 887216 - RNA, 22 nt, Human
uugucugaagucacacagaugc

SEQ ID NO: 887217 - RNA, 22 nt, Human
ggcuccacugcugaccacucca

SEQ ID NO: 887218 - RNA, 22 nt, Human
cuggcaggaagaggaaagguca

SEQ ID NO: 887219 - RNA, 22 nt, Human
cagcccagcagggucuggcccu

SEQ ID NO: 887220 - RNA, 22 nt, Human
agauucuaaacuugauucugcu

SEQ ID NO: 887221 - RNA, 22 nt, Human
gauuacauucuccuuguauuag

SEQ ID NO: 887222 - RNA, 22 nt, Human
uuauuaagugcguacuguaugc

SEQ ID NO: 887223 - RNA, 22 nt, Human
ggcagccagcacgcaguugaug

SEQ ID NO: 887224 - RNA, 22 nt, Human
cuuccucuagccuaguaaugcc

SEQ ID NO: 887225 - RNA, 22 nt, Human
uccauuuuguagguaugcuaca

SEQ ID NO: 887226 - RNA, 22 nt, Human
aaauagcuucuaagccuuuuga

SEQ ID NO: 887227 - RNA, 22 nt, Human
agcauauacaaacucauauaca

SEQ ID NO: 887228 - RNA, 22 nt, Human
ucaaauaaugccauucaucauc

SEQ ID NO: 887229 - RNA, 18 nt, Human
cugaaggcaccagggcag

SEQ ID NO: 887230 - RNA, 19 nt, Human
ucugucacuggggguauuc

SEQ ID NO: 887231 - RNA, 22 nt, Human
auuuaugacaaccaaagaguga

SEQ ID NO: 887232 - RNA, 21 nt, Human
gcagacugcccugcugucccc

SEQ ID NO: 887233 - RNA, 22 nt, Human
ggacccuggagacccacuggga

SEQ ID NO: 887234 - RNA, 22 nt, Human
caaugcugugcuccucaugagg

SEQ ID NO: 887235 - RNA, 22 nt, Human
ggcaggugugagaucgaggcca

SEQ ID NO: 887236 - RNA, 22 nt, Human
gccugccuucggugcgcagcgg

SEQ ID NO: 887237 - RNA, 22 nt, Human
agccugcugggaagggaggcuu

SEQ ID NO: 887238 - RNA, 22 nt, Human
gacuccagagugacuauuuguc

SEQ ID NO: 887239 - RNA, 22 nt, Human
caaaguuuggcucucaugacau

SEQ ID NO: 887240 - RNA, 22 nt, Human
ucucacagggcuaggcccugcc

SEQ ID NO: 887241 - RNA, 22 nt, Human
acagacugucccaccacaugga

SEQ ID NO: 887242 - RNA, 22 nt, Human
gccugcaagauggcuggucacu

SEQ ID NO: 887243 - RNA, 22 nt, Human
gggaaagacuuauuuugacuuc

SEQ ID NO: 887244 - RNA, 22 nt, Human
uucuggaagcugcagguggccg

SEQ ID NO: 887245 - RNA, 22 nt, Human
cacuggaccaaggaaacucuuc

SEQ ID NO: 887246 - RNA, 22 nt, Human
auguuucccagagcaaaucugg

SEQ ID NO: 887247 - RNA, 22 nt, Human
cacauaagaaaugaauaugaga

SEQ ID NO: 887248 - RNA, 22 nt, Human
gaauacauaucagauguguuuc

SEQ ID NO: 887249 - RNA, 22 nt, Human
aguaacagaaggccugacuuaa

SEQ ID NO: 887250 - RNA, 19 nt, Human
acuuucuccaggaccuguu

SEQ ID NO: 887251 - RNA, 22 nt, Human
aggaggugacagccugcaucug

SEQ ID NO: 887252 - RNA, 22 nt, Human
gauggucaggcuuuaacaucug

SEQ ID NO: 887253 - RNA, 22 nt, Human
gugaugucacacccuugauaga

SEQ ID NO: 887254 - RNA, 22 nt, Human
agaaaagaggcuuucuaagcau

SEQ ID NO: 887255 - RNA, 18 nt, Human
ugucuuuggaccacugaa

SEQ ID NO: 887256 - RNA, 22 nt, Human
ggugcggagacuccaugaggcc

SEQ ID NO: 887257 - RNA, 17 nt, Human
caucuuuaaaauccuga

SEQ ID NO: 887258 - RNA, 22 nt, Human
agcuuugggcagaagaggauuc

SEQ ID NO: 887259 - RNA, 21 nt, Human
aaaguguucagaccaguucug

SEQ ID NO: 887260 - RNA, 23 nt, Human
cuucacagguucaggggauuaag

SEQ ID NO: 887261 - RNA, 18 nt, Human
aggcagacacuagagguc

SEQ ID NO: 887262 - RNA, 22 nt, Human
uuauucuguugcuuuuacagua

SEQ ID NO: 887263 - RNA, 22 nt, Human
cuuauuuacugauccacagaug

SEQ ID NO: 887264 - RNA, 22 nt, Human
ccagugcucuuaaaggucauaa

SEQ ID NO: 887265 - RNA, 22 nt, Human
ugugcccauuccacuugaguac

SEQ ID NO: 887266 - RNA, 19 nt, Human
aggguccagggagcggcuc

SEQ ID NO: 887267 - RNA, 22 nt, Human
agcccugugggccuuguggcac

SEQ ID NO: 887268 - RNA, 22 nt, Human
ucagaagucccagaauucacau

SEQ ID NO: 887269 - RNA, 23 nt, Human
gccugggacucaggaggagcuca

SEQ ID NO: 887270 - RNA, 22 nt, Human
ucagacaugggauaugaagcuc

SEQ ID NO: 887271 - RNA, 22 nt, Human
caggcuagauuggggccaguag

SEQ ID NO: 887272 - RNA, 22 nt, Human
cuguuuuugugcugugucuccc

SEQ ID NO: 887273 - RNA, 22 nt, Human
ccugcuccugcuauucuucugg

SEQ ID NO: 887274 - RNA, 23 nt, Human
acauuacacgcaguaauugcccc

SEQ ID NO: 887275 - RNA, 22 nt, Human
cagaggcuguguaggcagacug

SEQ ID NO: 887276 - RNA, 22 nt, Human
uucaguguuacucaaggggcag

SEQ ID NO: 887277 - RNA, 22 nt, Human
ucucaaaucaaacuuugagcuu

SEQ ID NO: 887278 - RNA, 22 nt, Human
auuucucacugagcagauaaaa

SEQ ID NO: 887279 - RNA, 22 nt, Human
ccuggcagguuacaaccaguua

SEQ ID NO: 887280 - RNA, 22 nt, Human
uccaccuagcauucaccuccua

SEQ ID NO: 887281 - RNA, 22 nt, Human
auuuaugauagcugcauuaaag

SEQ ID NO: 887282 - RNA, 22 nt, Human
ggcugccacgucgaggguccaa

SEQ ID NO: 887283 - RNA, 22 nt, Human
aagcagaauuucccacuaguug

SEQ ID NO: 887284 - RNA, 22 nt, Human
uuugacaacguuguugugagga

SEQ ID NO: 887285 - RNA, 22 nt, Human
caaaaguucucacccagacaug

SEQ ID NO: 887286 - RNA, 22 nt, Human
uuuuccuuugaaaggugagggc

SEQ ID NO: 887287 - RNA, 22 nt, Human
agguaugagagccacucuguag

SEQ ID NO: 887288 - RNA, 23 nt, Human
uagauagcacacugacaucugac

SEQ ID NO: 887289 - RNA, 22 nt, Human
gcagacacauccacuccuacag

SEQ ID NO: 887290 - RNA, 22 nt, Human
ggaggccauaguuugggaguca

SEQ ID NO: 887291 - RNA, 22 nt, Human
uccaaauauucaucuacuucug

SEQ ID NO: 887292 - RNA, 22 nt, Human
gaaacauucauaugagaaaccu

SEQ ID NO: 887293 - RNA, 22 nt, Human
auucuuuuuuaaggaauagaac

SEQ ID NO: 887294 - RNA, 22 nt, Human
caggaauguagcagcgauggaa

SEQ ID NO: 887295 - RNA, 22 nt, Human
uguauuuaauuguaucaucaca

SEQ ID NO: 887296 - RNA, 22 nt, Human
cugcccugugcacaggaaacug

SEQ ID NO: 887297 - RNA, 20 nt, Human
uuucaguuaucuugaccuuc

SEQ ID NO: 887298 - RNA, 22 nt, Human
caugaaccaaaccaaagugucc

SEQ ID NO: 887299 - RNA, 22 nt, Human
uguguauguaagcaugugcaua

SEQ ID NO: 887300 - RNA, 22 nt, Human
cccuggagugugacgaggcauu

SEQ ID NO: 887301 - RNA, 22 nt, Human
gacaccaggaauaguucugucu

SEQ ID NO: 887302 - RNA, 22 nt, Human
aggcccuauucaauggggccca

SEQ ID NO: 887303 - RNA, 18 nt, Human
cagaaaguuauuuacucu

SEQ ID NO: 887304 - RNA, 22 nt, Human
aagaucaggcguggaaaacacu

SEQ ID NO: 887305 - RNA, 21 nt, Human
acaggcaaauuuuagacaaug

SEQ ID NO: 887306 - RNA, 22 nt, Human
uguuacaguacuacaauucugc

SEQ ID NO: 887307 - RNA, 18 nt, Human
cuuucaguaauuucagcc

SEQ ID NO: 887308 - RNA, 22 nt, Human
ccagggcugagcugugaccaug

SEQ ID NO: 887309 - RNA, 22 nt, Human
uuuagguuuuuucacguggcua

SEQ ID NO: 887310 - RNA, 22 nt, Human
cuuuauauauucccaggcugcc

SEQ ID NO: 887311 - RNA, 23 nt, Human
uugaaaaauauagucccauuguc

SEQ ID NO: 887312 - RNA, 22 nt, Human
aggccagacuuuggccaaaucc

SEQ ID NO: 887313 - RNA, 22 nt, Human
agagaaaguaaagauucuaccu

SEQ ID NO: 887314 - RNA, 22 nt, Human
accauacacaauuugcaacggu

SEQ ID NO: 887315 - RNA, 22 nt, Human
gcgcgccucugcccgguguucc

SEQ ID NO: 887316 - RNA, 22 nt, Human
ggauacagcggcuucugcgcga

SEQ ID NO: 887317 - RNA, 22 nt, Human
uuacuuuaugugauggauuagu

SEQ ID NO: 887318 - RNA, 20 nt, Human
aaguguuuugacuucugacc

SEQ ID NO: 887319 - RNA, 22 nt, Human
uaaaacuuaacuauccagauua

SEQ ID NO: 887320 - RNA, 18 nt, Human
gucaggcaugaaucuggg

SEQ ID NO: 887321 - RNA, 22 nt, Human
ccuuagaaggcugaauaauucu

SEQ ID NO: 887322 - RNA, 20 nt, Human
acaaaguauugaggacaagu

SEQ ID NO: 887323 - RNA, 22 nt, Human
acagagcaacuugaguauccuc

SEQ ID NO: 887324 - RNA, 22 nt, Human
guuuacauguaauguguuauug

SEQ ID NO: 887325 - RNA, 20 nt, Human
gggugagauguaggagaggg

SEQ ID NO: 887326 - RNA, 22 nt, Human
cucuagggcucugugagguugg

SEQ ID NO: 887327 - RNA, 22 nt, Human
gcugagagcaaagcaugucuag

SEQ ID NO: 887328 - RNA, 22 nt, Human
cugaaguuaaaguaguuuuuau

SEQ ID NO: 887329 - RNA, 22 nt, Human
gcagcuggauuucaagagggag

SEQ ID NO: 887330 - RNA, 22 nt, Human
gauauucaacuaaagugaauua

SEQ ID NO: 887331 - RNA, 22 nt, Human
aaaguauucuugacuguuuuuc

SEQ ID NO: 887332 - RNA, 22 nt, Human
aagugcuuuuucuugagcugcu

SEQ ID NO: 887333 - RNA, 22 nt, Human
cugggccugucccugauugagg

SEQ ID NO: 887334 - RNA, 22 nt, Human
gggguggauuucaggcgguguc

SEQ ID NO: 887335 - RNA, 22 nt, Human
agcugaaguguuggugguuuca

SEQ ID NO: 887336 - RNA, 22 nt, Human
uuucacagagaaauauaacagg

SEQ ID NO: 887337 - RNA, 22 nt, Human
aggaaaaagaguugcugccuuc

SEQ ID NO: 887338 - RNA, 21 nt, Human
uuaaagcuaugguagugggcu

SEQ ID NO: 887339 - RNA, 22 nt, Human
acauauaugcgugggcucaugg

SEQ ID NO: 887340 - RNA, 22 nt, Human
uguuucuagagaaaauauuuac

SEQ ID NO: 887341 - RNA, 22 nt, Human
uuaggaaguguguccagaagcg

SEQ ID NO: 887342 - RNA, 22 nt, Human
ucugucaucuguucagugcuca

SEQ ID NO: 887343 - RNA, 22 nt, Human
aacaggaaaacagcacaauagc

SEQ ID NO: 887344 - RNA, 21 nt, Human
uccuucccccuuggccuggga

SEQ ID NO: 887345 - RNA, 22 nt, Human
augcuacuauccuucugcuuaa

SEQ ID NO: 887346 - RNA, 22 nt, Human
ggucccagcuggucacugucag

SEQ ID NO: 887347 - RNA, 22 nt, Human
cagugaggaagcugucuggacc

SEQ ID NO: 887348 - RNA, 22 nt, Human
aagauuauuuaagacaggaacc

SEQ ID NO: 887349 - RNA, 22 nt, Human
cacaggcaggagguucuccagu

SEQ ID NO: 887350 - RNA, 22 nt, Human
uguccucuuccagugcuccuuc

SEQ ID NO: 887351 - RNA, 22 nt, Human
caauguuucuuguaaccaguga

SEQ ID NO: 887352 - RNA, 22 nt, Human
uguguguuaucuuaguucaucu

SEQ ID NO: 887353 - RNA, 22 nt, Human
ggccccagcagugcuuguuuau

SEQ ID NO: 887354 - RNA, 18 nt, Human
acaaaggaucaugaggga

SEQ ID NO: 887355 - RNA, 22 nt, Human
gauuucucauuuguggauugaa

SEQ ID NO: 887356 - RNA, 22 nt, Human
ggacaggugacugcccagagug

SEQ ID NO: 887357 - RNA, 22 nt, Human
auucaucucugcauauagaguc

SEQ ID NO: 887358 - RNA, 22 nt, Human
ucuaggagcugagaguguguac

SEQ ID NO: 887359 - RNA, 22 nt, Human
uucuaaacuucaauucuaaauu

SEQ ID NO: 887360 - RNA, 22 nt, Human
uucaaacuaugacuucagcuac

SEQ ID NO: 887361 - RNA, 22 nt, Human
ggcuuuauauuguuugagcaga

SEQ ID NO: 887362 - RNA, 22 nt, Human
ucccauuguggaaggcagaaga

SEQ ID NO: 887363 - RNA, 22 nt, Human
uaucuugugcagaugaaagaau

SEQ ID NO: 887364 - RNA, 22 nt, Human
uuaaagcaguuuguauacaugg

SEQ ID NO: 887365 - RNA, 22 nt, Human
augagguaggacaucaggaaau

SEQ ID NO: 887366 - RNA, 22 nt, Human
uccuggcugcaccagugacccu

SEQ ID NO: 887367 - RNA, 22 nt, Human
aggcuuggaaguggcagaacug

SEQ ID NO: 887368 - RNA, 22 nt, Human
uuuggacuuagccugcagaauu

SEQ ID NO: 887369 - RNA, 22 nt, Human
agccagagaguguuggagaugu

SEQ ID NO: 887370 - RNA, 22 nt, Human
ucuguucuucuccacuguaugu

SEQ ID NO: 887371 - RNA, 22 nt, Human
auugcauuguuugaggcagagg

SEQ ID NO: 887372 - RNA, 17 nt, Human
aaaggucgauaaggugg

SEQ ID NO: 887373 - RNA, 22 nt, Human
gaaggcugagcagacaggccaa

SEQ ID NO: 887374 - RNA, 22 nt, Human
acaugcaugucaucagcccuuu

SEQ ID NO: 887375 - RNA, 22 nt, Human
aaugaacauggacaaguuaaua

SEQ ID NO: 887376 - RNA, 20 nt, Human
ugaaaaggucaggagacaug

SEQ ID NO: 887377 - RNA, 22 nt, Human
agggaccaaucaccgacaggcu

SEQ ID NO: 887378 - RNA, 23 nt, Human
cuucuggcucuauaucagaauuc

SEQ ID NO: 887379 - RNA, 22 nt, Human
gggcacugagggcccacaggau

SEQ ID NO: 887380 - RNA, 22 nt, Human
guucuucucuuguaauggaauc

SEQ ID NO: 887381 - RNA, 22 nt, Human
aaagacuuucaccuagcaaaga

SEQ ID NO: 887382 - RNA, 22 nt, Human
ccauuuugucuccugaaaucua

SEQ ID NO: 887383 - RNA, 22 nt, Human
gucccugacacccggguggagg

SEQ ID NO: 887384 - RNA, 22 nt, Human
aggugggcacagauggagaagu

SEQ ID NO: 887385 - RNA, 22 nt, Human
gccaggaggucagccccucaac

SEQ ID NO: 887386 - RNA, 22 nt, Human
aggccagcagacgugggacuga

SEQ ID NO: 887387 - RNA, 22 nt, Human
acagaaagaugauuugaaaugg

SEQ ID NO: 887388 - RNA, 22 nt, Human
augccagccucuaagcacuuua

SEQ ID NO: 887389 - RNA, 22 nt, Human
gcauugaaccaucuagauuucu

SEQ ID NO: 887390 - RNA, 22 nt, Human
ggcuccaaagggcagugugagg

SEQ ID NO: 887391 - RNA, 22 nt, Human
agcugccuuauggaguaugaaa

SEQ ID NO: 887392 - RNA, 22 nt, Human
ugaaaacagaauccuuguuuuc

SEQ ID NO: 887393 - RNA, 22 nt, Human
caguaauaagcuggagggugug

SEQ ID NO: 887394 - RNA, 22 nt, Human
ucauugaagcauuuuguguauu

SEQ ID NO: 887395 - RNA, 22 nt, Human
uaggaaauuggaaacucuucac

SEQ ID NO: 887396 - RNA, 22 nt, Human
ggagggaguuucauuccugccc

SEQ ID NO: 887397 - RNA, 22 nt, Human
acagauagaugauaauggcuuu

SEQ ID NO: 887398 - RNA, 22 nt, Human
cagccccucacagagcuguccu

SEQ ID NO: 887399 - RNA, 22 nt, Human
gcugggccagagcagcagcacu

SEQ ID NO: 887400 - RNA, 22 nt, Human
uuugcuuugacugucagcaagu

SEQ ID NO: 887401 - RNA, 22 nt, Human
aaaaugagccaugaaccaacca

SEQ ID NO: 887402 - RNA, 22 nt, Human
aaguccagaacuccugugauag

SEQ ID NO: 887403 - RNA, 22 nt, Human
uggcucaguuuagcagcucagu

SEQ ID NO: 887404 - RNA, 22 nt, Human
aggcuaaaagagaaucauuuag

SEQ ID NO: 887405 - RNA, 22 nt, Human
cuggugccauucuguggccuag

SEQ ID NO: 887406 - RNA, 22 nt, Human
guuuccuuugccaguaaauggg

SEQ ID NO: 887407 - RNA, 22 nt, Human
gcagcauuucucaaaggguggu

SEQ ID NO: 887408 - RNA, 22 nt, Human
ugggaaaguguagccugcaggc

SEQ ID NO: 887409 - RNA, 22 nt, Human
ugggccagcucccugccccugg

SEQ ID NO: 887410 - RNA, 22 nt, Human
ugcuccuggaugagguacucca

SEQ ID NO: 887411 - RNA, 22 nt, Human
cuguuuaucucuaaccuguuua

SEQ ID NO: 887412 - RNA, 22 nt, Human
ucccagaaucuccagugcuaca

SEQ ID NO: 887413 - RNA, 20 nt, Human
gcugaggucauuaugccuca

SEQ ID NO: 887414 - RNA, 22 nt, Human
uugcccugcagcggugaguggu

SEQ ID NO: 887415 - RNA, 22 nt, Human
auuuggaacugggcaugcaaac

SEQ ID NO: 887416 - RNA, 22 nt, Human
cagagccaggccugcccucuuu

SEQ ID NO: 887417 - RNA, 22 nt, Human
uuacaaagcaggucagcugaaa

SEQ ID NO: 887418 - RNA, 22 nt, Human
ugacaauuuauagaaugugacu

SEQ ID NO: 887419 - RNA, 22 nt, Human
ugacuugucaaagaaaugugug

SEQ ID NO: 887420 - RNA, 22 nt, Human
uaucucuuuauugacaauaaaa

SEQ ID NO: 887421 - RNA, 22 nt, Human
uacauguggccagaaauuugag

SEQ ID NO: 887422 - RNA, 22 nt, Human
auccugggcaguuuugagugcu

SEQ ID NO: 887423 - RNA, 22 nt, Human
uuaaaaugcagauuaugacuca

SEQ ID NO: 887424 - RNA, 22 nt, Human
acaugcauucucuaaaagcaaa

SEQ ID NO: 887425 - RNA, 22 nt, Human
ugaaaugucugaaagccaaucu

SEQ ID NO: 887426 - RNA, 22 nt, Human
aagagucuauuggaacuagaca

SEQ ID NO: 887427 - RNA, 22 nt, Human
uaaagacacugguuuuaaucau

SEQ ID NO: 887428 - RNA, 22 nt, Human
agaucacaguggcaacucccuu

SEQ ID NO: 887429 - RNA, 22 nt, Human
aucuuucuuauuugaagaaaga

SEQ ID NO: 887430 - RNA, 22 nt, Human
cuucauuuggagaacugugcuu

SEQ ID NO: 887431 - RNA, 22 nt, Human
uggacagagaggaaggccauuu

SEQ ID NO: 887432 - RNA, 22 nt, Human
aaaaugauauccugacuuuuau

SEQ ID NO: 887433 - RNA, 18 nt, Human
gcugcaggcgccugcggu

SEQ ID NO: 887434 - RNA, 22 nt, Human
cacaauuagcagcucuuuauuu

SEQ ID NO: 887435 - RNA, 20 nt, Human
ccacuccaggugauucugau

SEQ ID NO: 887436 - RNA, 22 nt, Human
auguaauuuauguuauccauaa

SEQ ID NO: 887437 - RNA, 22 nt, Human
gagcugaguaugaaggauguga

SEQ ID NO: 887438 - RNA, 22 nt, Human
ggaaaauacugauucaugccau

SEQ ID NO: 887439 - RNA, 22 nt, Human
ugagaaccacgacugugcuuaa

SEQ ID NO: 887440 - RNA, 22 nt, Human
aaacugcaauuauuuuugcaau

SEQ ID NO: 887441 - RNA, 22 nt, Human
uccaccugggcaacagugccuc

SEQ ID NO: 887442 - RNA, 22 nt, Human
aucuaagauguauugagcacuu

SEQ ID NO: 887443 - RNA, 22 nt, Human
cuggccgccgucccaaccucga

SEQ ID NO: 887444 - RNA, 22 nt, Human
uggcuccaaaucaacugcuguu

SEQ ID NO: 887445 - RNA, 22 nt, Human
uuguuucuggaaaaggcgagaa

SEQ ID NO: 887446 - RNA, 20 nt, Human
aauuuuaucuccauccuuug

SEQ ID NO: 887447 - RNA, 22 nt, Human
cagagcuucagggaauaagaau

SEQ ID NO: 887448 - RNA, 22 nt, Human
cugagguguggucugggaguau

SEQ ID NO: 887449 - RNA, 22 nt, Human
cucuggguccuggggcuacaag

SEQ ID NO: 887450 - RNA, 22 nt, Human
uuuuauucucaagacaauggga

SEQ ID NO: 887451 - RNA, 22 nt, Human
ugggccacacacagaagaauca

SEQ ID NO: 887452 - RNA, 22 nt, Human
cugaagauucgccuuuguuuau

SEQ ID NO: 887453 - RNA, 15 nt, Human
ccaggcaagcaggaa

SEQ ID NO: 887454 - RNA, 22 nt, Human
caguggcaaugggacagagcac

SEQ ID NO: 887455 - RNA, 20 nt, Human
acaguguuagguuuuuccuu

SEQ ID NO: 887456 - RNA, 22 nt, Human
cagcagccucuugugccugugg

SEQ ID NO: 887457 - RNA, 19 nt, Human
agcagcagcuaccacuugu

SEQ ID NO: 887458 - RNA, 22 nt, Human
aagagguugucugugaugaguu

SEQ ID NO: 887459 - RNA, 22 nt, Human
aagcagcauugugguaggggag

SEQ ID NO: 887460 - RNA, 20 nt, Human
caggcagaggaugcugacca

SEQ ID NO: 887461 - RNA, 22 nt, Human
uggcuucaguuucccagucugg

SEQ ID NO: 887462 - RNA, 20 nt, Human
ggcaccaggcuaggauugga

SEQ ID NO: 887463 - RNA, 22 nt, Human
guggaagggucacagccccuac

SEQ ID NO: 887464 - RNA, 22 nt, Human
aggcgugggaggaucugaggcc

SEQ ID NO: 887465 - RNA, 22 nt, Human
uuucuaggucuuccauacugcc

SEQ ID NO: 887466 - RNA, 22 nt, Human
acuuuuaucaaggaagugaucu

SEQ ID NO: 887467 - RNA, 22 nt, Human
aguuucccccuucacagcuuaa

SEQ ID NO: 887468 - RNA, 22 nt, Human
uguggcaggaugcggaagaugc

SEQ ID NO: 887469 - RNA, 22 nt, Human
gagcccaggcagagguugcagu

SEQ ID NO: 887470 - RNA, 22 nt, Human
ggugggaggcaggcugcuccca

SEQ ID NO: 887471 - RNA, 22 nt, Human
ccccucagguacccgugcagca

SEQ ID NO: 887472 - RNA, 22 nt, Human
gugugagcucagccuugggaga

SEQ ID NO: 887473 - RNA, 22 nt, Human
uuuccucacuucaugagaguuu

SEQ ID NO: 887474 - RNA, 22 nt, Human
auuagacaucauaugauucagc

SEQ ID NO: 887475 - RNA, 20 nt, Human
uccagcccugcuucucucuu

SEQ ID NO: 887476 - RNA, 22 nt, Human
ccugucaccuagguacugagca

SEQ ID NO: 887477 - RNA, 22 nt, Human
gaggcuucuguucacucacgcu

SEQ ID NO: 887478 - RNA, 22 nt, Human
ugugaagaauuaaugugaauca

SEQ ID NO: 887479 - RNA, 22 nt, Human
ucaggccuggagaaaggaauga

SEQ ID NO: 887480 - RNA, 22 nt, Human
aucuagcaguucauugugcuau

SEQ ID NO: 887481 - RNA, 22 nt, Human
uuaacaaggugacugcauuaaa

SEQ ID NO: 887482 - RNA, 22 nt, Human
uaauuuuguauugccauuguag

SEQ ID NO: 887483 - RNA, 22 nt, Human
uacauagugaacauuuacagag

SEQ ID NO: 887484 - RNA, 21 nt, Human
gcuguucuuucagcuggucuu

SEQ ID NO: 887485 - RNA, 22 nt, Human
acagaggucaccuuuguaucuu

SEQ ID NO: 887486 - RNA, 22 nt, Human
gaaaaggccuccccauaggaau

SEQ ID NO: 887487 - RNA, 22 nt, Human
acaggcagguccugucccagcu

SEQ ID NO: 887488 - RNA, 22 nt, Human
aaacacugcgugguggcaacuc

SEQ ID NO: 887489 - RNA, 22 nt, Human
ccuggcucuucagagguuccua

SEQ ID NO: 887490 - RNA, 22 nt, Human
cagggaugagaaagcucucuaa

SEQ ID NO: 887491 - RNA, 23 nt, Human
ugugucuguuuagggaggaugug

SEQ ID NO: 887492 - RNA, 22 nt, Human
uccaggggcugucuuggaaucu

SEQ ID NO: 887493 - RNA, 22 nt, Human
guuggcuaugagagcuuuagug

SEQ ID NO: 887494 - RNA, 22 nt, Human
gaugggcuggggagaaagcaug

SEQ ID NO: 887495 - RNA, 22 nt, Human
acucuggguucuuucacuugac

SEQ ID NO: 887496 - RNA, 22 nt, Human
uuacuuucaaguggcugggggu

SEQ ID NO: 887497 - RNA, 22 nt, Human
caguccugcuagugugaaaagc

SEQ ID NO: 887498 - RNA, 23 nt, Human
agggccacugggaaggauuacug

SEQ ID NO: 887499 - RNA, 22 nt, Human
gggccugugcacaguucuguua

SEQ ID NO: 887500 - RNA, 22 nt, Human
acacauguauguuuuguauuug

SEQ ID NO: 887501 - RNA, 22 nt, Human
guacauuucauuuaaaugaugu

SEQ ID NO: 887502 - RNA, 23 nt, Human
acauacauggagauaaagugaug

SEQ ID NO: 887503 - RNA, 22 nt, Human
agucugcaggcugugauuuuuu

SEQ ID NO: 887504 - RNA, 22 nt, Human
acauagaaauuuauuucuuaca

SEQ ID NO: 887505 - RNA, 22 nt, Human
uccuggauuuaacccuggcucu

SEQ ID NO: 887506 - RNA, 22 nt, Human
uaucauuuagaguauuucuuca

SEQ ID NO: 887507 - RNA, 22 nt, Human
agcacaugagcugauggugggc

SEQ ID NO: 887508 - RNA, 22 nt, Human
auuugccuuacugaagaaggag

SEQ ID NO: 887509 - RNA, 22 nt, Human
cuggcucccaugagcucucacg

SEQ ID NO: 887510 - RNA, 22 nt, Human
ugugcagagcccacaggcagcu

SEQ ID NO: 887511 - RNA, 22 nt, Human
acuuagcagagugaguugacua

SEQ ID NO: 887512 - RNA, 22 nt, Human
agagguucagagaaggcgaucu

SEQ ID NO: 887513 - RNA, 22 nt, Human
gggaaggcaggauucucuggug

SEQ ID NO: 887514 - RNA, 22 nt, Human
guucuccuuguggcugcagcag

SEQ ID NO: 887515 - RNA, 22 nt, Human
gaguccuuuguuccuugccaca

SEQ ID NO: 887516 - RNA, 22 nt, Human
aauguuuucugacugcuaacuu

SEQ ID NO: 887517 - RNA, 22 nt, Human
uuaauccaauaacaagguucaa

SEQ ID NO: 887518 - RNA, 22 nt, Human
aggguaggguaaaugaugcauc

SEQ ID NO: 887519 - RNA, 21 nt, Human
uaagcauaucagauagacucu

SEQ ID NO: 887520 - RNA, 22 nt, Human
gcucagaguggccuggcuaggg

SEQ ID NO: 887521 - RNA, 22 nt, Human
uaagugcaugauugaacuuggc

SEQ ID NO: 887522 - RNA, 22 nt, Human
gcauccaggcugccccucugcg

SEQ ID NO: 887523 - RNA, 22 nt, Human
uuaaauuauugagggauuguca

SEQ ID NO: 887524 - RNA, 22 nt, Human
ucagaggcagcugauguucugu

SEQ ID NO: 887525 - RNA, 18 nt, Human
cccagugcucacugccuc

SEQ ID NO: 887526 - RNA, 22 nt, Human
auucacuguggguccuuuggau

SEQ ID NO: 887527 - RNA, 22 nt, Human
auaguuugcuuuaauacaacug

SEQ ID NO: 887528 - RNA, 22 nt, Human
cucugugggggagaggcagcug

SEQ ID NO: 887529 - RNA, 22 nt, Human
ucaugggguuuggcuggauguc

SEQ ID NO: 887530 - RNA, 22 nt, Human
gggacacagccaucuguguuuu

SEQ ID NO: 887531 - RNA, 22 nt, Human
cagggugcuuccguggagcugu

SEQ ID NO: 887532 - RNA, 22 nt, Human
auuagcaacucuuauguaagca

SEQ ID NO: 887533 - RNA, 22 nt, Human
gcccaggauaaugcugucccug

SEQ ID NO: 887534 - RNA, 22 nt, Human
agagcacacugacgucagucug

SEQ ID NO: 887535 - RNA, 22 nt, Human
ugcugugguucccagaguggau

SEQ ID NO: 887536 - RNA, 22 nt, Human
acagacuaaaauugcacagugg

SEQ ID NO: 887537 - RNA, 19 nt, Human
accaggcuuauggucagug

SEQ ID NO: 887538 - RNA, 22 nt, Human
ggguguccugugccaagcuggg

SEQ ID NO: 887539 - RNA, 22 nt, Human
uguccucagauaugucuacucu

SEQ ID NO: 887540 - RNA, 22 nt, Human
guauuacaaauaaauguuacug

SEQ ID NO: 887541 - RNA, 22 nt, Human
uggaaucaguuacaugugguug

SEQ ID NO: 887542 - RNA, 22 nt, Human
gccaggcagcaggaagccagug

SEQ ID NO: 887543 - RNA, 22 nt, Human
cauuuauucaugaucuguagcu

SEQ ID NO: 887544 - RNA, 22 nt, Human
ccacagggcacagacaggaagc

SEQ ID NO: 887545 - RNA, 22 nt, Human
auaugagaguaaaugccgaucu

SEQ ID NO: 887546 - RNA, 22 nt, Human
ucaguaacuuacuuauucaccu

SEQ ID NO: 887547 - RNA, 22 nt, Human
aacaaguuagggucuuuuacuu

SEQ ID NO: 887548 - RNA, 22 nt, Human
uuucuagcuguaggaagcugag

SEQ ID NO: 887549 - RNA, 22 nt, Human
cuggcucugggccucagacacu

SEQ ID NO: 887550 - RNA, 22 nt, Human
agaguuuggauuuuaggacauc

SEQ ID NO: 887551 - RNA, 22 nt, Human
caguacuuuucaaccaguauga

SEQ ID NO: 887552 - RNA, 22 nt, Human
cacuggcagauuugggaucugg

SEQ ID NO: 887553 - RNA, 22 nt, Human
cacagcagacagggaggcggcu

SEQ ID NO: 887554 - RNA, 22 nt, Human
uucucaggcuguggagccgucu

SEQ ID NO: 887555 - RNA, 22 nt, Human
aggccuggccccaguugcuagg

SEQ ID NO: 887556 - RNA, 22 nt, Human
uucaggugggccuuuugagcau

SEQ ID NO: 887557 - RNA, 22 nt, Human
auaagguauaaggccuauuuuu

SEQ ID NO: 887558 - RNA, 22 nt, Human
gccagccuucuguggccugcaa

SEQ ID NO: 887559 - RNA, 22 nt, Human
acagaacagaggguuuuagaau

SEQ ID NO: 887560 - RNA, 22 nt, Human
caguggccaugguggcaggggu

SEQ ID NO: 887561 - RNA, 22 nt, Human
agggagcaugggugaagcaggc

SEQ ID NO: 887562 - RNA, 23 nt, Human
uggcacagcaggugugcuuuguu

SEQ ID NO: 887563 - RNA, 22 nt, Human
ucuuggcugcguccuggcugug

SEQ ID NO: 887564 - RNA, 22 nt, Human
aacauuaagauggcggaacagu

SEQ ID NO: 887565 - RNA, 22 nt, Human
uuauacuaaaacgcauugaauu

SEQ ID NO: 887566 - RNA, 22 nt, Human
cuacccagcaccuaggcugccu

SEQ ID NO: 887567 - RNA, 22 nt, Human
aagcagcugauuucacagcuca

SEQ ID NO: 887568 - RNA, 22 nt, Human
aaguccaugaucaagauguggc

SEQ ID NO: 887569 - RNA, 22 nt, Human
ucuuggaggagaguaaguaccu

SEQ ID NO: 887570 - RNA, 22 nt, Human
auaaagauuucuuuuucucuac

SEQ ID NO: 887571 - RNA, 22 nt, Human
uauaacaccauguucuacagau

SEQ ID NO: 887572 - RNA, 22 nt, Human
ugcucuggcugggaugagugca

SEQ ID NO: 887573 - RNA, 22 nt, Human
aaguucuauaucugccucacca

SEQ ID NO: 887574 - RNA, 21 nt, Human
auggaaauuggcaaaugcuac

SEQ ID NO: 887575 - RNA, 22 nt, Human
uaaaguaauccuucauaaggag

SEQ ID NO: 887576 - RNA, 22 nt, Human
uggaaucugugcuguuuuagug

SEQ ID NO: 887577 - RNA, 22 nt, Human
agcaugaaaacaugaaacagca

SEQ ID NO: 887578 - RNA, 21 nt, Human
auccuauuucugaaaaccugc

SEQ ID NO: 887579 - RNA, 22 nt, Human
auucaguuaagggucuugagau

SEQ ID NO: 887580 - RNA, 22 nt, Human
augucuuucuuauggucuguug

SEQ ID NO: 887581 - RNA, 22 nt, Human
gccagcaguccugcugugugcc

SEQ ID NO: 887582 - RNA, 22 nt, Human
agcugagagccccugcccugug

SEQ ID NO: 887583 - RNA, 22 nt, Human
auucuucagaauaucuggcacu

SEQ ID NO: 887584 - RNA, 22 nt, Human
cucugagcugaaacaugagcau

SEQ ID NO: 887585 - RNA, 22 nt, Human
uuuguucuagaucguguuugug

SEQ ID NO: 887586 - RNA, 22 nt, Human
uuugaaaagaaccaucgccuua

SEQ ID NO: 887587 - RNA, 22 nt, Human
aauuccaacagacaaaguuaga

SEQ ID NO: 887588 - RNA, 22 nt, Human
ugcacagagagaugagacacgu

SEQ ID NO: 887589 - RNA, 23 nt, Human
agcugcagaugcucagcgggcag

SEQ ID NO: 887590 - RNA, 22 nt, Human
uccauaaaccagaaaaucaaga

SEQ ID NO: 887591 - RNA, 22 nt, Human
aagugcaaugaauagcugcaau

SEQ ID NO: 887592 - RNA, 22 nt, Human
ucccaggaggugcuuccuagga

SEQ ID NO: 887593 - RNA, 22 nt, Human
cucuccagaucugcugagccag

SEQ ID NO: 887594 - RNA, 21 nt, Human
ugugugaccuuggacuugagc

SEQ ID NO: 887595 - RNA, 22 nt, Human
uguuuucugauucucguguggu

SEQ ID NO: 887596 - RNA, 22 nt, Human
gccaaggauaccagcugugaga

SEQ ID NO: 887597 - RNA, 22 nt, Human
ugagccaggcucaagugauccu

SEQ ID NO: 887598 - RNA, 22 nt, Human
acuguuauuuguaauccauuau

SEQ ID NO: 887599 - RNA, 22 nt, Human
uuuuaugugucaaagcaguggu

SEQ ID NO: 887600 - RNA, 22 nt, Human
ccagcugugcuguuggcuuguc

SEQ ID NO: 887601 - RNA, 18 nt, Human
aggcaggugcuggaaguc

SEQ ID NO: 887602 - RNA, 22 nt, Human
acuucccugugggcagguagug

SEQ ID NO: 887603 - RNA, 22 nt, Human
uauaaagugugaacugugagua

SEQ ID NO: 887604 - RNA, 22 nt, Human
uaagaccauacauuuccacaga

SEQ ID NO: 887605 - RNA, 22 nt, Human
gaacccaggagguugcagugag

SEQ ID NO: 887606 - RNA, 22 nt, Human
gggggcuguccugugcauugua

SEQ ID NO: 887607 - RNA, 22 nt, Human
ugagcaacugugcucugcuaaa

SEQ ID NO: 887608 - RNA, 22 nt, Human
gcccaggaguuugcauuuuaac

SEQ ID NO: 887609 - RNA, 22 nt, Human
ggaacuccugcuccaagcagcu

SEQ ID NO: 887610 - RNA, 22 nt, Human
aacaugauggggaagaacaaga

SEQ ID NO: 887611 - RNA, 22 nt, Human
guguggcugauugacaugguca

SEQ ID NO: 887612 - RNA, 22 nt, Human
ugccugggggacuaaggccaaa

SEQ ID NO: 887613 - RNA, 19 nt, Human
cucuuggguggcagaggcc

SEQ ID NO: 887614 - RNA, 22 nt, Human
gcauguguuauuuuauguauga

SEQ ID NO: 887615 - RNA, 20 nt, Human
cuccacaccuguucgcaggc

SEQ ID NO: 887616 - RNA, 22 nt, Human
agaaugcuccagagcugaaaga

SEQ ID NO: 887617 - RNA, 22 nt, Human
gaagacauuuuaugcauacucu

SEQ ID NO: 887618 - RNA, 22 nt, Human
aaacaugaauagauauuaaaca

SEQ ID NO: 887619 - RNA, 22 nt, Human
aggugggcggaucacaagguca

SEQ ID NO: 887620 - RNA, 22 nt, Human
ucuuuucaggaauggcucuagu

SEQ ID NO: 887621 - RNA, 23 nt, Human
gcccagagaggcucaccaggaau

SEQ ID NO: 887622 - RNA, 17 nt, Human
gacuuuggaguuucaua

SEQ ID NO: 887623 - RNA, 17 nt, Human
cgggcauggagggcagg

SEQ ID NO: 887624 - RNA, 22 nt, Human
uucucuugacuaccaguuagga

SEQ ID NO: 887625 - RNA, 22 nt, Human
ccuccacaggagcugcagugcu

SEQ ID NO: 887626 - RNA, 22 nt, Human
agcuuugggggagguagucugu

SEQ ID NO: 887627 - RNA, 22 nt, Human
uucugagccucauucaugaggc

SEQ ID NO: 887628 - RNA, 22 nt, Human
agccagcuguccucccuuuccu

SEQ ID NO: 887629 - RNA, 19 nt, Human
acauuuagaauguacuugc

SEQ ID NO: 887630 - RNA, 22 nt, Human
uucugcccaccacacuuuaucu

SEQ ID NO: 887631 - RNA, 22 nt, Human
acaggagacccugcugguucug

SEQ ID NO: 887632 - RNA, 22 nt, Human
gugaaaaaucaucaugacuuga

SEQ ID NO: 887633 - RNA, 18 nt, Human
uuucucagacucucuuuc

SEQ ID NO: 887634 - RNA, 22 nt, Human
cacagagaggcuugucuccaag

SEQ ID NO: 887635 - RNA, 22 nt, Human
ugagaaaauuacuauaauuguc

SEQ ID NO: 887636 - RNA, 22 nt, Human
aguguuucaccguauguucuca

SEQ ID NO: 887637 - RNA, 22 nt, Human
aaauccaucaaaucuucuagaa

SEQ ID NO: 887638 - RNA, 22 nt, Human
gagagcccucacuccuucccug

SEQ ID NO: 887639 - RNA, 22 nt, Human
guguuaauuauuggugaauaga

SEQ ID NO: 887640 - RNA, 22 nt, Human
aacauuaauuacagucaaacau

SEQ ID NO: 887641 - RNA, 22 nt, Human
acaaggacauaggaaacuacaa

SEQ ID NO: 887642 - RNA, 22 nt, Human
uggcccugguggcacagccugc

SEQ ID NO: 887643 - RNA, 22 nt, Human
ggcgccagcgguaaguaagaca

SEQ ID NO: 887644 - RNA, 22 nt, Human
ccugugcaauguugagguuuca

SEQ ID NO: 887645 - RNA, 22 nt, Human
ccucacaguguucgugucagau

SEQ ID NO: 887646 - RNA, 22 nt, Human
ugcuucauuaaaacaauauuuu

SEQ ID NO: 887647 - RNA, 17 nt, Human
uauguguguguuuauac

SEQ ID NO: 887648 - RNA, 22 nt, Human
ucaguugcuaaaugguguagug

SEQ ID NO: 887649 - RNA, 22 nt, Human
agccaaggcagcuagagcucug

SEQ ID NO: 887650 - RNA, 22 nt, Human
aaaaaauuaucauaguuccuga

SEQ ID NO: 887651 - RNA, 22 nt, Human
uguuugcaaccccuugugagaa

SEQ ID NO: 887652 - RNA, 21 nt, Human
acaguaaauucccugcaaaga

SEQ ID NO: 887653 - RNA, 22 nt, Human
uguguucuuaaaagcagugaua

SEQ ID NO: 887654 - RNA, 22 nt, Human
aggaagcugcuggaguagugug

SEQ ID NO: 887655 - RNA, 22 nt, Human
aacauaauguggccaaagucac

SEQ ID NO: 887656 - RNA, 22 nt, Human
augcagcuucaggauuaugaug

SEQ ID NO: 887657 - RNA, 22 nt, Human
aggaucugugccucaacccaga

SEQ ID NO: 887658 - RNA, 22 nt, Human
auguacaauucuccuugguagg

SEQ ID NO: 887659 - RNA, 22 nt, Human
aggugaggauagguggccaagg

SEQ ID NO: 887660 - RNA, 22 nt, Human
cucuucuuggaaugcugacugu

SEQ ID NO: 887661 - RNA, 22 nt, Human
gcagagugagccgaggcugcuc

SEQ ID NO: 887662 - RNA, 22 nt, Human
ugggccuguggcuuggcucuag

SEQ ID NO: 887663 - RNA, 22 nt, Human
caacuuuaauuugggugucaga

SEQ ID NO: 887664 - RNA, 23 nt, Human
auucuaagaugugaucuuauaac

SEQ ID NO: 887665 - RNA, 22 nt, Human
aauagcauccuaaaacauacuu

SEQ ID NO: 887666 - RNA, 19 nt, Human
ucugaagaauuagagagca

SEQ ID NO: 887667 - RNA, 22 nt, Human
gauucuuuggccuuuauugaca

SEQ ID NO: 887668 - RNA, 22 nt, Human
caguuacagcugcaccagagcc

SEQ ID NO: 887669 - RNA, 22 nt, Human
cacaucugcgcucugccucaua

SEQ ID NO: 887670 - RNA, 22 nt, Human
aagccauggcugcaucagccug

SEQ ID NO: 887671 - RNA, 19 nt, Human
auacaagacuagcauuuac

SEQ ID NO: 887672 - RNA, 22 nt, Human
uccugggguccugacugcuucc

SEQ ID NO: 887673 - RNA, 22 nt, Human
ugacagaacuuuuucacaucuc

SEQ ID NO: 887674 - RNA, 22 nt, Human
augauguaugacuguguucaaa

SEQ ID NO: 887675 - RNA, 22 nt, Human
ccaggaagauuuauuuuggcuu

SEQ ID NO: 887676 - RNA, 22 nt, Human
uuucauugucuacauaugacau

SEQ ID NO: 887677 - RNA, 22 nt, Human
ucaucuaauuuuggaacagaga

SEQ ID NO: 887678 - RNA, 22 nt, Human
uaacauuugcugucuccuaugu

SEQ ID NO: 887679 - RNA, 22 nt, Human
cagagccuuaguucuccuagaa

SEQ ID NO: 887680 - RNA, 22 nt, Human
uccugggcagaaugggauggcu

SEQ ID NO: 887681 - RNA, 22 nt, Human
gaggcagcaggcugaggaggau

SEQ ID NO: 887682 - RNA, 22 nt, Human
agcagcugccacuggaauagga

SEQ ID NO: 887683 - RNA, 22 nt, Human
uagugucagggagugauaaaug

SEQ ID NO: 887684 - RNA, 22 nt, Human
aggcccugcauuguacugaggg

SEQ ID NO: 887685 - RNA, 22 nt, Human
ucuggcauuucaggcaucuaua

SEQ ID NO: 887686 - RNA, 22 nt, Human
aaaggccuugagcugggugcca

SEQ ID NO: 887687 - RNA, 22 nt, Human
gacuggccuggggcugggcaca

SEQ ID NO: 887688 - RNA, 22 nt, Human
aaaauguaaagcuugaguguag

SEQ ID NO: 887689 - RNA, 22 nt, Human
aaagguuuuguucaucgauuuu

SEQ ID NO: 887690 - RNA, 20 nt, Human
agcuccaugaaguagucacu

SEQ ID NO: 887691 - RNA, 22 nt, Human
gaaggcugaguggguacggagg

SEQ ID NO: 887692 - RNA, 21 nt, Human
aggauuucugucauuucagau

SEQ ID NO: 887693 - RNA, 22 nt, Human
uggccagucuguggaagccagg

SEQ ID NO: 887694 - RNA, 21 nt, Human
aggcucagagagaaacucuug

SEQ ID NO: 887695 - RNA, 22 nt, Human
caagauuugggggcacggaauc

SEQ ID NO: 887696 - RNA, 22 nt, Human
uuggaagacagccgucuuuauu

SEQ ID NO: 887697 - RNA, 21 nt, Human
caccuuauagauaaaauuaga

SEQ ID NO: 887698 - RNA, 22 nt, Human
uagaaauguuagauguauugag

SEQ ID NO: 887699 - RNA, 22 nt, Human
agagccuuuggagcugcuauua

SEQ ID NO: 887700 - RNA, 22 nt, Human
gcccugagugccuguguaagaa

SEQ ID NO: 887701 - RNA, 22 nt, Human
uguuccuggaaagccagguggg

SEQ ID NO: 887702 - RNA, 22 nt, Human
gugccuuaucugcacccucccc

SEQ ID NO: 887703 - RNA, 22 nt, Human
uugagaaacucuggguuagaau

SEQ ID NO: 887704 - RNA, 22 nt, Human
ugaaacaagggaccguccuuuc

SEQ ID NO: 887705 - RNA, 22 nt, Human
ucaggaguccugccugcagccu

SEQ ID NO: 887706 - RNA, 22 nt, Human
cucucugcuguauccuuaggcu

SEQ ID NO: 887707 - RNA, 22 nt, Human
agagaggcauucggugauccca

SEQ ID NO: 887708 - RNA, 22 nt, Human
aaaggagauaaagggcccuuca

SEQ ID NO: 887709 - RNA, 22 nt, Human
uaaaacuagugguugggacuaa

SEQ ID NO: 887710 - RNA, 22 nt, Human
agguuccuuauggggauggcua

SEQ ID NO: 887711 - RNA, 22 nt, Human
uccugggcacaagugagucucc

SEQ ID NO: 887712 - RNA, 22 nt, Human
agacauuaugcugagugaaaga

SEQ ID NO: 887713 - RNA, 22 nt, Human
uaucuguuagcuaaugaaugag

SEQ ID NO: 887714 - RNA, 22 nt, Human
aucccagauggaggcuggucac

SEQ ID NO: 887715 - RNA, 22 nt, Human
gauuguggaagucagugguucu

SEQ ID NO: 887716 - RNA, 22 nt, Human
cuggucacuggucucauccagc

SEQ ID NO: 887717 - RNA, 22 nt, Human
augaagcagcguuguagaguga

SEQ ID NO: 887718 - RNA, 22 nt, Human
uccagacauuuuauagcagucu

SEQ ID NO: 887719 - RNA, 22 nt, Human
gugcauuugugcaugcacaugu

SEQ ID NO: 887720 - RNA, 22 nt, Human
aagauuucucuccuggaaagca

SEQ ID NO: 887721 - RNA, 22 nt, Human
auuuuccaaaauaauuguuacu

SEQ ID NO: 887722 - RNA, 22 nt, Human
caggccugagacaucugagaua

SEQ ID NO: 887723 - RNA, 22 nt, Human
gauucccaugucugaggaggug

SEQ ID NO: 887724 - RNA, 22 nt, Human
aacaguuuccugacuccuauga

SEQ ID NO: 887725 - RNA, 22 nt, Human
ccugaaaugaguucugcucacu

SEQ ID NO: 887726 - RNA, 22 nt, Human
cuuaacucuacacugcacuuua

SEQ ID NO: 887727 - RNA, 22 nt, Human
gccugagugcaucugcagacau

SEQ ID NO: 887728 - RNA, 22 nt, Human
uagagcaguuggcagcuguauu

SEQ ID NO: 887729 - RNA, 22 nt, Human
aggaagcuggugugaggaugaa

SEQ ID NO: 887730 - RNA, 22 nt, Human
caggguggcacucagcgcaucu

SEQ ID NO: 887731 - RNA, 18 nt, Human
gugugcucagagagugag

SEQ ID NO: 887732 - RNA, 22 nt, Human
aagugugacacuguguuaauua

SEQ ID NO: 887733 - RNA, 22 nt, Human
gguagacugucaaacacuagcc

SEQ ID NO: 887734 - RNA, 22 nt, Human
auuaugcauauacauuugacua

SEQ ID NO: 887735 - RNA, 22 nt, Human
gaaugucuguuucaacaagcac

SEQ ID NO: 887736 - RNA, 22 nt, Human
ccagaggcuggggaaggauaca

SEQ ID NO: 887737 - RNA, 23 nt, Human
aaguacauauauuuagauaguga

SEQ ID NO: 887738 - RNA, 22 nt, Human
uuugaaaauuagacacaggcua

SEQ ID NO: 887739 - RNA, 22 nt, Human
auguuaaauaaucccuuaaagc

SEQ ID NO: 887740 - RNA, 22 nt, Human
uauuuccacaccuuuugaaucu

SEQ ID NO: 887741 - RNA, 22 nt, Human
uccaaauauacagaaucuccuc

SEQ ID NO: 887742 - RNA, 22 nt, Human
uggggagucgcugcagagcgau

SEQ ID NO: 887743 - RNA, 21 nt, Human
aguguuaauggaaauuauauu

SEQ ID NO: 887744 - RNA, 22 nt, Human
accaggagagauuuuauugaga

SEQ ID NO: 887745 - RNA, 22 nt, Human
uuucaaagguggaagagugaau

SEQ ID NO: 887746 - RNA, 22 nt, Human
gcacugaugcaaaaaucacuca

SEQ ID NO: 887747 - RNA, 22 nt, Human
ugaagcaggugaauggaugucg

SEQ ID NO: 887748 - RNA, 22 nt, Human
uucagcacuguuauggauuugc

SEQ ID NO: 887749 - RNA, 22 nt, Human
gcuggccgaacggugcccuggc

SEQ ID NO: 887750 - RNA, 22 nt, Human
cagauucuucauucauucuaca

SEQ ID NO: 887751 - RNA, 22 nt, Human
acccaaagcaauauucaucagu

SEQ ID NO: 887752 - RNA, 22 nt, Human
gugaagcauaugcuucucugcc

SEQ ID NO: 887753 - RNA, 22 nt, Human
auugugcagcacagaucaugac

SEQ ID NO: 887754 - RNA, 22 nt, Human
ccucaggcuucuaguucaguga

SEQ ID NO: 887755 - RNA, 22 nt, Human
guuacagugcuuggcaauaagu

SEQ ID NO: 887756 - RNA, 22 nt, Human
caugaagucaggauuuccauga

SEQ ID NO: 887757 - RNA, 22 nt, Human
aucauuuacaaacucagcauug

SEQ ID NO: 887758 - RNA, 22 nt, Human
uaauagaauaguggaaacauug

SEQ ID NO: 887759 - RNA, 22 nt, Human
uugugucuuaaagauuaaaugg

SEQ ID NO: 887760 - RNA, 22 nt, Human
uggugcagguguugaugcagga

SEQ ID NO: 887761 - RNA, 22 nt, Human
uccagccaagggagguuacuag

SEQ ID NO: 887762 - RNA, 22 nt, Human
gaucaucugggcuccuuguagu

SEQ ID NO: 887763 - RNA, 22 nt, Human
gcccugaggauuugcauuuccu

SEQ ID NO: 887764 - RNA, 22 nt, Human
ucugggcucacgagucuggaca

SEQ ID NO: 887765 - RNA, 22 nt, Human
agaaggcucauuugacugcauu

SEQ ID NO: 887766 - RNA, 22 nt, Human
uaccuguggcuuguuggaugga

SEQ ID NO: 887767 - RNA, 22 nt, Human
cugcccugcagcuccacggacu

SEQ ID NO: 887768 - RNA, 22 nt, Human
ugaggguaaccuggagcugcug

SEQ ID NO: 887769 - RNA, 20 nt, Human
acauaugaaugauagagcca

SEQ ID NO: 887770 - RNA, 19 nt, Human
gcuuccagcacugcaggag

SEQ ID NO: 887771 - RNA, 22 nt, Human
agcagcuguacuuucaucuguu

SEQ ID NO: 887772 - RNA, 22 nt, Human
aaaguacugggauuacaggucu

SEQ ID NO: 887773 - RNA, 22 nt, Human
acagacacaggcguggagucgc

SEQ ID NO: 887774 - RNA, 22 nt, Human
ugggucuuuaugggggccagga

SEQ ID NO: 887775 - RNA, 22 nt, Human
agaggccagaaaguaugccacc

SEQ ID NO: 887776 - RNA, 22 nt, Human
auggaacugcuaauaauaguug

SEQ ID NO: 887777 - RNA, 23 nt, Human
acugcagccuccgccugccgggu

SEQ ID NO: 887778 - RNA, 17 nt, Human
cauucuguaaucuuucu

SEQ ID NO: 887779 - RNA, 22 nt, Human
ucagaggagggacucagaccca

SEQ ID NO: 887780 - RNA, 22 nt, Human
ggcugcccuagagcuggcaagg

SEQ ID NO: 887781 - RNA, 22 nt, Human
gaggggcguccugagugggccu

SEQ ID NO: 887782 - RNA, 23 nt, Human
uuacaacaguguccauauuugua

SEQ ID NO: 887783 - RNA, 22 nt, Human
acagccugauuuauggagcagu

SEQ ID NO: 887784 - RNA, 22 nt, Human
acccaggacaaaauaaccaggu

SEQ ID NO: 887785 - RNA, 22 nt, Human
auaaaguuuaaaagucaauagu

SEQ ID NO: 887786 - RNA, 22 nt, Human
uggcauggaccuuggaagaauu

SEQ ID NO: 887787 - RNA, 20 nt, Human
gcuuuuucuaauagcagucc

SEQ ID NO: 887788 - RNA, 22 nt, Human
gaggaggucgcugcugagcccc

SEQ ID NO: 887789 - RNA, 22 nt, Human
ugagggagcugaccuuucugug

SEQ ID NO: 887790 - RNA, 22 nt, Human
ugcauucaaauccugauccugc

SEQ ID NO: 887791 - RNA, 22 nt, Human
agagugcaaccgaaacaagcag

SEQ ID NO: 887792 - RNA, 22 nt, Human
caaguuguuuaggagguguugu

SEQ ID NO: 887793 - RNA, 18 nt, Human
gauguaaaauaguagcuu

SEQ ID NO: 887794 - RNA, 22 nt, Human
aauuucucucucaugcuucaug

SEQ ID NO: 887795 - RNA, 22 nt, Human
auucacaaguugauggauauuu

SEQ ID NO: 887796 - RNA, 22 nt, Human
ucucuucuugauuuucacugga

SEQ ID NO: 887797 - RNA, 23 nt, Human
acucugacuuaguuauagcuauu

SEQ ID NO: 887798 - RNA, 22 nt, Human
caguuuauauucuagugcuguu

SEQ ID NO: 887799 - RNA, 22 nt, Human
aauuuaguccuuacagugcaga

SEQ ID NO: 887800 - RNA, 20 nt, Human
agugaguuaucagcuacagu

SEQ ID NO: 887801 - RNA, 22 nt, Human
ccuucugugugcccacguuuau

SEQ ID NO: 887802 - RNA, 19 nt, Human
ucugaggcuucuccccuug

SEQ ID NO: 887803 - RNA, 22 nt, Human
gcgggggcggcgcagaccucag

SEQ ID NO: 887804 - RNA, 22 nt, Human
agcugcaggcccaugcucaguc

SEQ ID NO: 887805 - RNA, 22 nt, Human
agcaccugugcccugauggaga

SEQ ID NO: 887806 - RNA, 22 nt, Human
cugugucccacacgagguguau

SEQ ID NO: 887807 - RNA, 22 nt, Human
uguggcucugcccccugguaag

SEQ ID NO: 887808 - RNA, 22 nt, Human
auguaauaggguaacauaacau

SEQ ID NO: 887809 - RNA, 22 nt, Human
acaauuucuaauauagaucuua

SEQ ID NO: 887810 - RNA, 22 nt, Human
uggcuucacugcucaagugauu

SEQ ID NO: 887811 - RNA, 22 nt, Human
aguagaggccaggccucccugg

SEQ ID NO: 887812 - RNA, 22 nt, Human
agcugggaagacuggaagacag

SEQ ID NO: 887813 - RNA, 22 nt, Human
aguggguguagucuuccuccug

SEQ ID NO: 887814 - RNA, 20 nt, Human
agccaggccucaaguuaagu

SEQ ID NO: 887815 - RNA, 22 nt, Human
agcuguuuuccugguuagagac

SEQ ID NO: 887816 - RNA, 22 nt, Human
cagggcuggcucaugaaaaguu

SEQ ID NO: 887817 - RNA, 22 nt, Human
aaggaaaggaugagcaugcauu

SEQ ID NO: 887818 - RNA, 22 nt, Human
gaacacagugguuguuuggagg

SEQ ID NO: 887819 - RNA, 22 nt, Human
acacauauauuugcauauacac

SEQ ID NO: 887820 - RNA, 22 nt, Human
ugggcugagcagugaagcucau

SEQ ID NO: 887821 - RNA, 22 nt, Human
gugcccaggggccagcugccgg

SEQ ID NO: 887822 - RNA, 22 nt, Human
uccauuuucuugcucuagguaa

SEQ ID NO: 887823 - RNA, 22 nt, Human
ucagagacaucagguuguagca

SEQ ID NO: 887824 - RNA, 22 nt, Human
gauauuccugaaggacaggguu

SEQ ID NO: 887825 - RNA, 22 nt, Human
auggcagcaguccauugccuca

SEQ ID NO: 887826 - RNA, 22 nt, Human
auuaucacauggacuuugcuuu

SEQ ID NO: 887827 - RNA, 22 nt, Human
ccagaauuuggaucaugauuuu

SEQ ID NO: 887828 - RNA, 22 nt, Human
agagucugugcuuucaucagga

SEQ ID NO: 887829 - RNA, 22 nt, Human
uccagcacagaauuuccuagcu

SEQ ID NO: 887830 - RNA, 22 nt, Human
cauauuuauagaucuggcauuu

SEQ ID NO: 887831 - RNA, 22 nt, Human
uuauuugaaucuggcuagagaa

SEQ ID NO: 887832 - RNA, 22 nt, Human
uucuaagagucauuaauggccu

SEQ ID NO: 887833 - RNA, 22 nt, Human
agggaagugauggaguucgauc

SEQ ID NO: 887834 - RNA, 22 nt, Human
cuacaaugacagaauugaguag

SEQ ID NO: 887835 - RNA, 22 nt, Human
aagggcaggcagagaucauaua

SEQ ID NO: 887836 - RNA, 22 nt, Human
agcauuuucugagaguauagau

SEQ ID NO: 887837 - RNA, 22 nt, Human
uaucuuuaacuugcaguauuua

SEQ ID NO: 887838 - RNA, 22 nt, Human
gacacaguagccagugcaguga

SEQ ID NO: 887839 - RNA, 22 nt, Human
aaacaucuacuguaggcuggag

SEQ ID NO: 887840 - RNA, 18 nt, Human
augggaggggccaagaga

SEQ ID NO: 887841 - RNA, 22 nt, Human
ccuggagaggagaaagggccca

SEQ ID NO: 887842 - RNA, 22 nt, Human
ugucccacugacuucacaucca

SEQ ID NO: 887843 - RNA, 22 nt, Human
auacauagcagagucaauuaau

SEQ ID NO: 887844 - RNA, 22 nt, Human
uuucaaggcuaguuuuaauuag

SEQ ID NO: 887845 - RNA, 22 nt, Human
cauugaaaaacguugacugagu

SEQ ID NO: 887846 - RNA, 22 nt, Human
gugcccugucucuugucuccag

SEQ ID NO: 887847 - RNA, 22 nt, Human
uugggcagaggcugugcagagg

SEQ ID NO: 887848 - RNA, 22 nt, Human
aggcccugagaaaaucccugca

SEQ ID NO: 887849 - RNA, 22 nt, Human
ccuggagcuuggucacgcugcg

SEQ ID NO: 887850 - RNA, 22 nt, Human
ucccucaggugguucuuguuuc

SEQ ID NO: 887851 - RNA, 22 nt, Human
uuccaagggaauguuuaugagu

SEQ ID NO: 887852 - RNA, 18 nt, Human
cuugagcuaagggacccc

SEQ ID NO: 887853 - RNA, 20 nt, Human
aggagcugaauuagaggguu

SEQ ID NO: 887854 - RNA, 22 nt, Human
ugguuccugguucacuuggcag

SEQ ID NO: 887855 - RNA, 22 nt, Human
cuggccuggucuggccucucca

SEQ ID NO: 887856 - RNA, 22 nt, Human
ggagucaaggaaggcucuguga

SEQ ID NO: 887857 - RNA, 22 nt, Human
ucaauuuuaugaaacaaaguga

SEQ ID NO: 887858 - RNA, 22 nt, Human
aggcuucaagguucuuggcagg

SEQ ID NO: 887859 - RNA, 19 nt, Human
cuggaaaguuggcagugag

SEQ ID NO: 887860 - RNA, 22 nt, Human
aagcacaauuuaggacugaaau

SEQ ID NO: 887861 - RNA, 22 nt, Human
cauuaaacaaccuugaaucaau

SEQ ID NO: 887862 - RNA, 22 nt, Human
agccucugugacucacagguca

SEQ ID NO: 887863 - RNA, 20 nt, Human
uuguuuauuauguucugauc

SEQ ID NO: 887864 - RNA, 22 nt, Human
ugugacugagcugcagaguguc

SEQ ID NO: 887865 - RNA, 22 nt, Human
gggcgaggacugacucugggca

SEQ ID NO: 887866 - RNA, 22 nt, Human
cuagcagcauucuucuaguuag

SEQ ID NO: 887867 - RNA, 19 nt, Human
ggcugccuucugcucaucu

SEQ ID NO: 887868 - RNA, 20 nt, Human
uugguugagccagggccugg

SEQ ID NO: 887869 - RNA, 22 nt, Human
gacagcagcauaauacaugaac

SEQ ID NO: 887870 - RNA, 22 nt, Human
auauuucaugggguuccauacu

SEQ ID NO: 887871 - RNA, 22 nt, Human
caguaauagcagagucuuccau

SEQ ID NO: 887872 - RNA, 22 nt, Human
uagcagggaaggugugcugagc

SEQ ID NO: 887873 - RNA, 22 nt, Human
ugagcccaggaggcagagguug

SEQ ID NO: 887874 - RNA, 22 nt, Human
agguguggcuugaagucucuau

SEQ ID NO: 887875 - RNA, 16 nt, Human
ugguaagguuaccaga

SEQ ID NO: 887876 - RNA, 22 nt, Human
ugucucugucucccagguugug

SEQ ID NO: 887877 - RNA, 21 nt, Human
acagccugucaucucaugguc

SEQ ID NO: 887878 - RNA, 22 nt, Human
ucccagauuguugauggcuuaa

SEQ ID NO: 887879 - RNA, 21 nt, Human
uuuuaacaaggauuucccuag

SEQ ID NO: 887880 - RNA, 22 nt, Human
cggcagcaucgaaacuacauuc

SEQ ID NO: 887881 - RNA, 22 nt, Human
aggagcugcuuaaaugguuggu

SEQ ID NO: 887882 - RNA, 22 nt, Human
uguaguuaggcugggaauuggc

SEQ ID NO: 887883 - RNA, 22 nt, Human
uccugggagcauggugccguga

SEQ ID NO: 887884 - RNA, 22 nt, Human
acauuucucuugaugucucuau

SEQ ID NO: 887885 - RNA, 22 nt, Human
cagcuguggcugccacugcucc

SEQ ID NO: 887886 - RNA, 19 nt, Human
gacuacagggggaagaagu

SEQ ID NO: 887887 - RNA, 22 nt, Human
agccuucucugaaauucuguuu

SEQ ID NO: 887888 - RNA, 20 nt, Human
uuggaaucaccuggagaggu

SEQ ID NO: 887889 - RNA, 22 nt, Human
cuucuuaaugcauaaacugugu

SEQ ID NO: 887890 - RNA, 22 nt, Human
ugcaucuuucugcauauguaaa

SEQ ID NO: 887891 - RNA, 22 nt, Human
uggggugacagugcagugguca

SEQ ID NO: 887892 - RNA, 22 nt, Human
agaucuuuagugaagcuaaauc

SEQ ID NO: 887893 - RNA, 22 nt, Human
uucugggugccaccuaagacau

SEQ ID NO: 887894 - RNA, 22 nt, Human
cuguggagaugcagaccaggcc

SEQ ID NO: 887895 - RNA, 22 nt, Human
aauagaggagcuuuggacuccc

SEQ ID NO: 887896 - RNA, 22 nt, Human
uggcucucugggagguccuggc

SEQ ID NO: 887897 - RNA, 22 nt, Human
gggcagcagccacucauuuagc

SEQ ID NO: 887898 - RNA, 22 nt, Human
gaggacagagccgccuggcaag

SEQ ID NO: 887899 - RNA, 22 nt, Human
agcaggggcaggguuuugugcu

SEQ ID NO: 887900 - RNA, 22 nt, Human
guccucaggcuugaguguuuau

SEQ ID NO: 887901 - RNA, 22 nt, Human
acuugucuuuguaaaauagaaa

SEQ ID NO: 887902 - RNA, 20 nt, Human
ugcauuuguuauuuguacuc

SEQ ID NO: 887903 - RNA, 22 nt, Human
ucccagggauuaggacauggau

SEQ ID NO: 887904 - RNA, 19 nt, Human
ugcauauaucuaugaaaga

SEQ ID NO: 887905 - RNA, 22 nt, Human
aacuuucagcaaguaauucugg

SEQ ID NO: 887906 - RNA, 19 nt, Human
uugagaaaguugauuuggg

SEQ ID NO: 887907 - RNA, 22 nt, Human
uggaaaaucaggggacauugau

SEQ ID NO: 887908 - RNA, 22 nt, Human
gcuuucuguggugauguaaagg

SEQ ID NO: 887909 - RNA, 22 nt, Human
uguauuaacauuaauaaaaugg

SEQ ID NO: 887910 - RNA, 22 nt, Human
agggucugacugaauggaaaag

SEQ ID NO: 887911 - RNA, 22 nt, Human
auacaguagacaaucucaugaa

SEQ ID NO: 887912 - RNA, 19 nt, Human
agcagcucagggaggcacc

SEQ ID NO: 887913 - RNA, 22 nt, Human
aggcuaugguggggccaguggc

SEQ ID NO: 887914 - RNA, 22 nt, Human
uagcuuuuauccacugcuuuug

SEQ ID NO: 887915 - RNA, 22 nt, Human
uguguaaauggcaucucucagc

SEQ ID NO: 887916 - RNA, 22 nt, Human
uuuccaauguagaugucucugg

SEQ ID NO: 887917 - RNA, 22 nt, Human
cugaauaucauuuacauuugga

SEQ ID NO: 887918 - RNA, 22 nt, Human
aaaggccacacagagcagggag

SEQ ID NO: 887919 - RNA, 22 nt, Human
agcagauggagaauggagucag

SEQ ID NO: 887920 - RNA, 22 nt, Human
caggagaggaggcuacuucuua

SEQ ID NO: 887921 - RNA, 22 nt, Human
ccagcauucacacugguuccuu

SEQ ID NO: 887922 - RNA, 22 nt, Human
augaaaugaaguuggccuggcu

SEQ ID NO: 887923 - RNA, 19 nt, Human
uguccagugaugucaagga

SEQ ID NO: 887924 - RNA, 22 nt, Human
gagggccuggcacagggaggcu

SEQ ID NO: 887925 - RNA, 22 nt, Human
gagauucugugaaacggacauu

SEQ ID NO: 887926 - RNA, 22 nt, Human
uuccuuccugucuuccuuacug

SEQ ID NO: 887927 - RNA, 22 nt, Human
cuggcugaucuccugaaugucu

SEQ ID NO: 887928 - RNA, 22 nt, Human
uuuauguaauuucauaggugug

SEQ ID NO: 887929 - RNA, 22 nt, Human
gagugcagaugccagccccagu

SEQ ID NO: 887930 - RNA, 22 nt, Human
gcccaucuucuagcagcuguua

SEQ ID NO: 887931 - RNA, 22 nt, Human
uccagcucuaaggcugauagcc

SEQ ID NO: 887932 - RNA, 22 nt, Human
uucucaggguagaggugacacu

SEQ ID NO: 887933 - RNA, 22 nt, Human
gagauggggaauaggagcaagc

SEQ ID NO: 887934 - RNA, 22 nt, Human
caugaucagaaagagaagcuag

SEQ ID NO: 887935 - RNA, 22 nt, Human
ucugauguugaugcuucugccu

SEQ ID NO: 887936 - RNA, 22 nt, Human
ugguccagcuugauucucuucu

SEQ ID NO: 887937 - RNA, 22 nt, Human
ggcagcaugagccuggugaauu

SEQ ID NO: 887938 - RNA, 22 nt, Human
cacaggccugucucuuucuaac

SEQ ID NO: 887939 - RNA, 22 nt, Human
gagaucuucaagguuuuagaua

SEQ ID NO: 887940 - RNA, 22 nt, Human
aggcuuggcucuccuaugagaa

SEQ ID NO: 887941 - RNA, 22 nt, Human
cagcuguguagaugcaggguca

SEQ ID NO: 887942 - RNA, 22 nt, Human
ccaccgccauggcguuguacag

SEQ ID NO: 887943 - RNA, 22 nt, Human
ugagguggcacacacuuccugc

SEQ ID NO: 887944 - RNA, 22 nt, Human
ugugugcaggcacugugccaga

SEQ ID NO: 887945 - RNA, 18 nt, Human
uuacacuagccuugguuc

SEQ ID NO: 887946 - RNA, 22 nt, Human
ugggaggcagguaggugaugau

SEQ ID NO: 887947 - RNA, 22 nt, Human
gcucugagccgggggccugucc

SEQ ID NO: 887948 - RNA, 22 nt, Human
aacagcuaguggucuagacuuu

SEQ ID NO: 887949 - RNA, 22 nt, Human
ccagaagcuucuacacaggaga

SEQ ID NO: 887950 - RNA, 17 nt, Human
gagugcugguggagcuc

SEQ ID NO: 887951 - RNA, 22 nt, Human
gacugcauaggaccaaauagua

SEQ ID NO: 887952 - RNA, 23 nt, Human
ggugggagauuauccagaauuau

SEQ ID NO: 887953 - RNA, 22 nt, Human
gacaggcacgaaauugggcugg

SEQ ID NO: 887954 - RNA, 22 nt, Human
gcaagcucucugcaggcagagc

SEQ ID NO: 887955 - RNA, 22 nt, Human
gggcaccuugggucucaggcaa

SEQ ID NO: 887956 - RNA, 19 nt, Human
aggagaagacucucucccc

SEQ ID NO: 887957 - RNA, 22 nt, Human
aaagugcagggugcucugguau

SEQ ID NO: 887958 - RNA, 22 nt, Human
auuauguaacugugguucagca

SEQ ID NO: 887959 - RNA, 22 nt, Human
uauccuuguacuauaguauuua

SEQ ID NO: 887960 - RNA, 22 nt, Human
cauuguacaguuauuuuaaaau

SEQ ID NO: 887961 - RNA, 22 nt, Human
aacacuuuccugccuuucugau

SEQ ID NO: 887962 - RNA, 22 nt, Human
aaaguuuccaaguuacaccauu

SEQ ID NO: 887963 - RNA, 22 nt, Human
aggcugugggaauggcugcuug

SEQ ID NO: 887964 - RNA, 22 nt, Human
ccauggcuuacagauggagcau

SEQ ID NO: 887965 - RNA, 22 nt, Human
cugacagucucauugauuugcu

SEQ ID NO: 887966 - RNA, 22 nt, Human
gccaccuggacucagagccagg

SEQ ID NO: 887967 - RNA, 22 nt, Human
cuccaggauaccuguuccuaua

SEQ ID NO: 887968 - RNA, 22 nt, Human
aacuacaguaguuugcccuucu

SEQ ID NO: 887969 - RNA, 22 nt, Human
uuuauuauguacaggcacuaua

SEQ ID NO: 887970 - RNA, 22 nt, Human
aagugucugcuggcucuacccu

SEQ ID NO: 887971 - RNA, 22 nt, Human
uauguuauuuucauacaacaga

SEQ ID NO: 887972 - RNA, 22 nt, Human
agggacagucuacuguucacug

SEQ ID NO: 887973 - RNA, 21 nt, Human
gcuggcuggcugaccggccuu

SEQ ID NO: 887974 - RNA, 22 nt, Human
uugcgcgcggcuaggucucggu

SEQ ID NO: 887975 - RNA, 22 nt, Human
gaggagggccuggugucccuuc

SEQ ID NO: 887976 - RNA, 22 nt, Human
cucuggucuucaaggccaccuc

SEQ ID NO: 887977 - RNA, 22 nt, Human
aguuucuuauucuuaguuaugu

SEQ ID NO: 887978 - RNA, 22 nt, Human
aacaucugugaacuccgaaaau

SEQ ID NO: 887979 - RNA, 22 nt, Human
aguuuuugagaauuuacuaugu

SEQ ID NO: 887980 - RNA, 19 nt, Human
ucagcaucaauuugguccu

SEQ ID NO: 887981 - RNA, 21 nt, Human
cucuugucuuugcucaguagc

SEQ ID NO: 887982 - RNA, 22 nt, Human
aucucuugccagucagaauggu

SEQ ID NO: 887983 - RNA, 22 nt, Human
gugcaugugguaaagaggagag

SEQ ID NO: 887984 - RNA, 22 nt, Human
cagaccagccauuugccucuuc

SEQ ID NO: 887985 - RNA, 22 nt, Human
cuguacaggucaaugauaagau

SEQ ID NO: 887986 - RNA, 22 nt, Human
gcagcaucuagggcacuggccu

SEQ ID NO: 887987 - RNA, 22 nt, Human
uccucugguccugcagcagauc

SEQ ID NO: 887988 - RNA, 22 nt, Human
acuggcaggcugcuggccggcg

SEQ ID NO: 887989 - RNA, 22 nt, Human
agccagugaugaagacucugga

SEQ ID NO: 887990 - RNA, 22 nt, Human
aagcugccuuccaugugaggaa

SEQ ID NO: 887991 - RNA, 22 nt, Human
uguccaggacccuauucucacu

SEQ ID NO: 887992 - RNA, 22 nt, Human
gccuggaguggacuuggccccu

SEQ ID NO: 887993 - RNA, 23 nt, Human
ucauggaaugaauucuucuguua

SEQ ID NO: 887994 - RNA, 22 nt, Human
auuccuucuuugagaauaagca

SEQ ID NO: 887995 - RNA, 22 nt, Human
ugccucugugggccuuccuggc

SEQ ID NO: 887996 - RNA, 22 nt, Human
acacagcaacuugcaguaugga

SEQ ID NO: 887997 - RNA, 22 nt, Human
ugugaaaugcuauugugacaaa

SEQ ID NO: 887998 - RNA, 22 nt, Human
cuaaaugucauggaguuguaga

SEQ ID NO: 887999 - RNA, 22 nt, Human
aggggugacacauaucagugca

SEQ ID NO: 888000 - RNA, 23 nt, Human
ugugucugaggauauaugugcau

SEQ ID NO: 888001 - RNA, 22 nt, Human
uggcccugcacccagagcaguu

SEQ ID NO: 888002 - RNA, 22 nt, Human
aauauuuaugacaggaaguagc

SEQ ID NO: 888003 - RNA, 22 nt, Human
aagggcaggaaaagauggaugu

SEQ ID NO: 888004 - RNA, 22 nt, Human
cagucacauugcccugcauuua

SEQ ID NO: 888005 - RNA, 17 nt, Human
agcugcagaugaaguug

SEQ ID NO: 888006 - RNA, 22 nt, Human
uuccagaauuuuguucugcuug

SEQ ID NO: 888007 - RNA, 22 nt, Human
uggaagcuucugaccauuuuug

SEQ ID NO: 888008 - RNA, 22 nt, Human
uuuauuguuuagaagggggcug

SEQ ID NO: 888009 - RNA, 22 nt, Human
ggcuccaguuugugccuucagc

SEQ ID NO: 888010 - RNA, 22 nt, Human
ugaacagugguucaugucacgg

SEQ ID NO: 888011 - RNA, 22 nt, Human
uacauuuguuauagaaaugaag

SEQ ID NO: 888012 - RNA, 22 nt, Human
gaguggggcccacugcugggug

SEQ ID NO: 888013 - RNA, 22 nt, Human
cuggggagugaagguaauuaca

SEQ ID NO: 888014 - RNA, 22 nt, Human
uggcuggaagucagaaauggga

SEQ ID NO: 888015 - RNA, 22 nt, Human
ugucaguucugguuggcuccca

SEQ ID NO: 888016 - RNA, 22 nt, Human
uagaacuuauuagaaaggcuca

SEQ ID NO: 888017 - RNA, 22 nt, Human
aaaugucagagcuggaaggggc

SEQ ID NO: 888018 - RNA, 22 nt, Human
acugggccagaucagagcaacu

SEQ ID NO: 888019 - RNA, 22 nt, Human
uuaucagaguccccaaaagaaa

SEQ ID NO: 888020 - RNA, 22 nt, Human
uuugauuuucagcaauaguggc

SEQ ID NO: 888021 - RNA, 22 nt, Human
uauuucaggggguacaagaaga

SEQ ID NO: 888022 - RNA, 23 nt, Human
ggcagagagcauggcuggggccc

SEQ ID NO: 888023 - RNA, 22 nt, Human
aucucugcaucccucaagguug

SEQ ID NO: 888024 - RNA, 22 nt, Human
uuacaagauuaauuauuggagu

SEQ ID NO: 888025 - RNA, 22 nt, Human
aaucacauuagugaaacacuga

SEQ ID NO: 888026 - RNA, 22 nt, Human
aucauaaaauugcaccauuucu

SEQ ID NO: 888027 - RNA, 21 nt, Human
gauuuguauuauugguuccaa

SEQ ID NO: 888028 - RNA, 19 nt, Human
ccugaggugggguggaagg

SEQ ID NO: 888029 - RNA, 22 nt, Human
uuguagaacaugcagcacaaug

SEQ ID NO: 888030 - RNA, 22 nt, Human
acagauuuuauuauucagguau

SEQ ID NO: 888031 - RNA, 22 nt, Human
gugcucugccuggggucauggc

SEQ ID NO: 888032 - RNA, 22 nt, Human
cagagccccucagcucucuccc

SEQ ID NO: 888033 - RNA, 22 nt, Human
auugagaaaauucgagcaaguu

SEQ ID NO: 888034 - RNA, 22 nt, Human
agugucugaaggauuuggcuuc

SEQ ID NO: 888035 - RNA, 22 nt, Human
gacuuuauucguuaacuguuaa

SEQ ID NO: 888036 - RNA, 23 nt, Human
ggcugggagcuccgggugcacgu

SEQ ID NO: 888037 - RNA, 22 nt, Human
agaacaggaggaagccagcucc

SEQ ID NO: 888038 - RNA, 22 nt, Human
ucugugucucaaucccaugcug

SEQ ID NO: 888039 - RNA, 22 nt, Human
ucacaaagcuuugauaagcaga

SEQ ID NO: 888040 - RNA, 22 nt, Human
gaaguuaucaaagauguauucu

SEQ ID NO: 888041 - RNA, 22 nt, Human
ggucagaggaggaauaggacau

SEQ ID NO: 888042 - RNA, 22 nt, Human
ccauuacuuagaaaggaacuga

SEQ ID NO: 888043 - RNA, 22 nt, Human
cagcugcuuacuagcuguguga

SEQ ID NO: 888044 - RNA, 22 nt, Human
acauuugagcauauuucuuguc

SEQ ID NO: 888045 - RNA, 22 nt, Human
gcuccagguggcuuauuuguau

SEQ ID NO: 888046 - RNA, 22 nt, Human
uauuacaagaaagggcaugaau

SEQ ID NO: 888047 - RNA, 22 nt, Human
ugaggcagcccacuuuccuuag

SEQ ID NO: 888048 - RNA, 22 nt, Human
agguagcgcaauuuccugggac

SEQ ID NO: 888049 - RNA, 22 nt, Human
acccagcucuuugauggucuug

SEQ ID NO: 888050 - RNA, 22 nt, Human
uuuugcuguguccuugagccgg

SEQ ID NO: 888051 - RNA, 22 nt, Human
aaacuuucauguaucucuuuca

SEQ ID NO: 888052 - RNA, 22 nt, Human
acauucuuggacuccacucuag

SEQ ID NO: 888053 - RNA, 22 nt, Human
ugauuuaugcauuauacuguug

SEQ ID NO: 888054 - RNA, 22 nt, Human
aggcccaguagugcugccuuua

SEQ ID NO: 888055 - RNA, 22 nt, Human
aaaagucucucugaguaaaagu

SEQ ID NO: 888056 - RNA, 22 nt, Human
aguaaguuuugauagcauuagg

SEQ ID NO: 888057 - RNA, 22 nt, Human
auuuuucaacuuuggaaauggc

SEQ ID NO: 888058 - RNA, 22 nt, Human
ucuuagaaacuguaucgauuag

SEQ ID NO: 888059 - RNA, 22 nt, Human
ccugucucuguuaccacauuug

SEQ ID NO: 888060 - RNA, 22 nt, Human
uguagacuuucuuuguguuagu

SEQ ID NO: 888061 - RNA, 22 nt, Human
guaggccagugugaaaccuggu

SEQ ID NO: 888062 - RNA, 22 nt, Human
acauucuuaacaguuaaaaacu

SEQ ID NO: 888063 - RNA, 22 nt, Human
agaaaagguugaaaguaggauu

SEQ ID NO: 888064 - RNA, 22 nt, Human
gcaaacaagcugccugaagauu

SEQ ID NO: 888065 - RNA, 22 nt, Human
ccacuggcauccagcugccauc

SEQ ID NO: 888066 - RNA, 22 nt, Human
uugcugaugguauuaugcuagu

SEQ ID NO: 888067 - RNA, 22 nt, Human
agggcuguuuuuggcaccuggg

SEQ ID NO: 888068 - RNA, 22 nt, Human
caauguguuugcauauuaaaau

SEQ ID NO: 888069 - RNA, 22 nt, Human
gcuguggcccuuggcaucugcg

SEQ ID NO: 888070 - RNA, 22 nt, Human
uugcaaaugaccauugccacau

SEQ ID NO: 888071 - RNA, 22 nt, Human
ugagaucauugacuuguuccug

SEQ ID NO: 888072 - RNA, 22 nt, Human
acuuuguugaugaaauaguuuu

SEQ ID NO: 888073 - RNA, 22 nt, Human
ucaucaaagcgcuuggaguagg

SEQ ID NO: 888074 - RNA, 22 nt, Human
gcuucucauguuuauuuuuaca

SEQ ID NO: 888075 - RNA, 22 nt, Human
agacagacauagaaauuaguaa

SEQ ID NO: 888076 - RNA, 22 nt, Human
cagagugaaauaggggaucaag

SEQ ID NO: 888077 - RNA, 22 nt, Human
agcucuccacacauaggacuag

SEQ ID NO: 888078 - RNA, 22 nt, Human
uauguacuaacuuucauucuag

SEQ ID NO: 888079 - RNA, 22 nt, Human
uuucuacagcuggugcaacuuu

SEQ ID NO: 888080 - RNA, 22 nt, Human
uuauguaugaauauaguagaag

SEQ ID NO: 888081 - RNA, 22 nt, Human
uccugcugccauuucaagugcu

SEQ ID NO: 888082 - RNA, 22 nt, Human
caguuuaguguugcauuuggag

SEQ ID NO: 888083 - RNA, 20 nt, Human
auagauaucaucuuuagaag

SEQ ID NO: 888084 - RNA, 22 nt, Human
uugugaaaagccgcaaguauag

SEQ ID NO: 888085 - RNA, 22 nt, Human
aauauaguucuagaaauauuuu

SEQ ID NO: 888086 - RNA, 22 nt, Human
ucacagcauucgcaauggacag

SEQ ID NO: 888087 - RNA, 22 nt, Human
uugcuuauuugauuaaaugucu

SEQ ID NO: 888088 - RNA, 22 nt, Human
cagagugagggccugcaccugc

SEQ ID NO: 888089 - RNA, 22 nt, Human
uggcuacagacauuccuaggga

SEQ ID NO: 888090 - RNA, 19 nt, Human
uaagacagauuccuagagu

SEQ ID NO: 888091 - RNA, 22 nt, Human
ugagggugggcccugggcaucu

SEQ ID NO: 888092 - RNA, 22 nt, Human
ugaaacaagauccacagacuug

SEQ ID NO: 888093 - RNA, 22 nt, Human
acauuucuuucuauucaguagc

SEQ ID NO: 888094 - RNA, 22 nt, Human
gaggugaguggggucuccaggg

SEQ ID NO: 888095 - RNA, 22 nt, Human
cagacccucgggugaguuggcc

SEQ ID NO: 888096 - RNA, 22 nt, Human
auuaguaaaacauuguauaugu

SEQ ID NO: 888097 - RNA, 22 nt, Human
uggaggaggaacuucuuaucuc

SEQ ID NO: 888098 - RNA, 22 nt, Human
caguccaggccuggaggagcca

SEQ ID NO: 888099 - RNA, 23 nt, Human
ugcugaaguguuggcccugccca

SEQ ID NO: 888100 - RNA, 22 nt, Human
cuaguuugguuagauaagucuc

SEQ ID NO: 888101 - RNA, 22 nt, Human
acagguccuuauaagagcacuc

SEQ ID NO: 888102 - RNA, 22 nt, Human
ucugcaggcuuauaggaugggu

SEQ ID NO: 888103 - RNA, 22 nt, Human
ugugacaccacacccgacuaau

SEQ ID NO: 888104 - RNA, 22 nt, Human
agccaggcuaaaugagccauga

SEQ ID NO: 888105 - RNA, 22 nt, Human
uuuucguuggucauuccccagc

SEQ ID NO: 888106 - RNA, 22 nt, Human
ugcugugcucuuuaaggugcug

SEQ ID NO: 888107 - RNA, 23 nt, Human
agucugaauugagaugugcugug

SEQ ID NO: 888108 - RNA, 22 nt, Human
gcacacuccuggauccuagaga

SEQ ID NO: 888109 - RNA, 22 nt, Human
uuuggagagcagcuaggcccuu

SEQ ID NO: 888110 - RNA, 22 nt, Human
ggcacacucacuucugcccuga

SEQ ID NO: 888111 - RNA, 22 nt, Human
uggaaguggcagaggaaguggu

SEQ ID NO: 888112 - RNA, 22 nt, Human
ugacagggacaguggagaugga

SEQ ID NO: 888113 - RNA, 22 nt, Human
gguuuuauagcaguacuaucag

SEQ ID NO: 888114 - RNA, 22 nt, Human
agauaucugcaauauaauuuaa

SEQ ID NO: 888115 - RNA, 22 nt, Human
ucccaggauguuuauggcuggu

SEQ ID NO: 888116 - RNA, 22 nt, Human
augacuuauuacaagucauauu

SEQ ID NO: 888117 - RNA, 22 nt, Human
cugccagaucauuggauucaca

SEQ ID NO: 888118 - RNA, 22 nt, Human
ccuccuggccugugcagagccc

SEQ ID NO: 888119 - RNA, 22 nt, Human
uccuguguuacccuugcaguga

SEQ ID NO: 888120 - RNA, 17 nt, Human
cucuggaauuggugaag

SEQ ID NO: 888121 - RNA, 22 nt, Human
agcugggccugagcuggaagcu

SEQ ID NO: 888122 - RNA, 22 nt, Human
ucauugaauauggggccauaca

SEQ ID NO: 888123 - RNA, 22 nt, Human
agcuauuuauugagcuccauug

SEQ ID NO: 888124 - RNA, 22 nt, Human
ugucugaagcagccagugcugu

SEQ ID NO: 888125 - RNA, 22 nt, Human
guauaucucuuacauacacaca

SEQ ID NO: 888126 - RNA, 22 nt, Human
cucagggaugggcagauguuaa

SEQ ID NO: 888127 - RNA, 22 nt, Human
aguuuccugggagauucuuaca

SEQ ID NO: 888128 - RNA, 17 nt, Human
guauucuuugccuucca

SEQ ID NO: 888129 - RNA, 22 nt, Human
agccagggagguggagguugca

SEQ ID NO: 888130 - RNA, 22 nt, Human
ugcccucaguuucacaugagug

SEQ ID NO: 888131 - RNA, 22 nt, Human
agcugcaauucuggacauaguc

SEQ ID NO: 888132 - RNA, 22 nt, Human
aggcuggcaaggcagaugugug

SEQ ID NO: 888133 - RNA, 22 nt, Human
ugcugccuugaccuccugggcu

SEQ ID NO: 888134 - RNA, 22 nt, Human
agaaugaagaugacuucggaga

SEQ ID NO: 888135 - RNA, 22 nt, Human
acuucauauuguuuccacuaga

SEQ ID NO: 888136 - RNA, 22 nt, Human
acugauaaguugcuugcucuca

SEQ ID NO: 888137 - RNA, 22 nt, Human
ucugggcaguucggauccucug

SEQ ID NO: 888138 - RNA, 22 nt, Human
augaauugaggaaaacagucgu

SEQ ID NO: 888139 - RNA, 22 nt, Human
uuagacaagggcuccuuaaaag

SEQ ID NO: 888140 - RNA, 22 nt, Human
agaaguaggcagggcuguauca

SEQ ID NO: 888141 - RNA, 22 nt, Human
guggcugcugguacucugggaa

SEQ ID NO: 888142 - RNA, 22 nt, Human
cagaggcaaaagagguggaggu

SEQ ID NO: 888143 - RNA, 22 nt, Human
aggcuuaaugaguuaaaucacu

SEQ ID NO: 888144 - RNA, 22 nt, Human
cagacagcugcuuucuugcugu

SEQ ID NO: 888145 - RNA, 22 nt, Human
uggggaaaaugcuuguagucag

SEQ ID NO: 888146 - RNA, 22 nt, Human
cuaacuuuauuugcuaaguaga

SEQ ID NO: 888147 - RNA, 22 nt, Human
auuuuguuuccuuuggaguaga

SEQ ID NO: 888148 - RNA, 22 nt, Human
gaaccuuaugguaaaucuagag

SEQ ID NO: 888149 - RNA, 22 nt, Human
ugccuggggauugcucugggcc

SEQ ID NO: 888150 - RNA, 23 nt, Human
uuauugcaagguaaaauugcuga

SEQ ID NO: 888151 - RNA, 22 nt, Human
aucacaaucccucucucugaua

SEQ ID NO: 888152 - RNA, 22 nt, Human
agaaaucagaacccugaaguuc

SEQ ID NO: 888153 - RNA, 22 nt, Human
augucacaucugggauggcccu

SEQ ID NO: 888154 - RNA, 22 nt, Human
acagacugugagucucauuuuc

SEQ ID NO: 888155 - RNA, 20 nt, Human
gaagugucuuguuucuggau

SEQ ID NO: 888156 - RNA, 22 nt, Human
ugaggccugaagccuggagccu

SEQ ID NO: 888157 - RNA, 22 nt, Human
uggagguggugcccagcaauuu

SEQ ID NO: 888158 - RNA, 22 nt, Human
cucagugcagcuaggcaugaga

SEQ ID NO: 888159 - RNA, 22 nt, Human
gcuuccaggucauucucacccu

SEQ ID NO: 888160 - RNA, 22 nt, Human
uucaacaugcaaacauguuugu

SEQ ID NO: 888161 - RNA, 22 nt, Human
uuuacagucaccaaacuuugcu

SEQ ID NO: 888162 - RNA, 22 nt, Human
cagguuuagguggacgugcagg

SEQ ID NO: 888163 - RNA, 22 nt, Human
ccugggcaaaugccagagacaa

SEQ ID NO: 888164 - RNA, 22 nt, Human
aaguuauuuuucaagauccuuu

SEQ ID NO: 888165 - RNA, 22 nt, Human
cacagagaaaauguuggugcuu

SEQ ID NO: 888166 - RNA, 20 nt, Human
cagcagaaauggggugggaa

SEQ ID NO: 888167 - RNA, 22 nt, Human
ucuacaggguaaggggcuugcc

SEQ ID NO: 888168 - RNA, 20 nt, Human
caaagcaguaggauaaaaau

SEQ ID NO: 888169 - RNA, 22 nt, Human
ccaggucucgggucugcucgug

SEQ ID NO: 888170 - RNA, 22 nt, Human
auauuucuugagcaccugguau

SEQ ID NO: 888171 - RNA, 22 nt, Human
ugggcugcugcggugcucuugg

SEQ ID NO: 888172 - RNA, 22 nt, Human
ucuccuucgaggcccagcuccc

SEQ ID NO: 888173 - RNA, 22 nt, Human
uggcugcccucaugggccugau

SEQ ID NO: 888174 - RNA, 22 nt, Human
agacagcauuucuagcaccagg

SEQ ID NO: 888175 - RNA, 22 nt, Human
aauucuguaaagcuugucaugc

SEQ ID NO: 888176 - RNA, 20 nt, Human
ucuaggcaggcaggcucgug

SEQ ID NO: 888177 - RNA, 22 nt, Human
uucugcaggagcccuaguguau

SEQ ID NO: 888178 - RNA, 22 nt, Human
uugucuuucccagcuucuagag

SEQ ID NO: 888179 - RNA, 22 nt, Human
gagcaacaguuuaugguuuuuc

SEQ ID NO: 888180 - RNA, 22 nt, Human
agagcuuuuugacaucucucua

SEQ ID NO: 888181 - RNA, 22 nt, Human
uguuuacaaggaguuuauauug

SEQ ID NO: 888182 - RNA, 22 nt, Human
ugcacacauguauguauaugug

SEQ ID NO: 888183 - RNA, 22 nt, Human
aauuucuucagcucuaaaaugg

SEQ ID NO: 888184 - RNA, 20 nt, Human
uauuccaaggguagagaaaa

SEQ ID NO: 888185 - RNA, 20 nt, Human
acccuuugccggaugccaag

SEQ ID NO: 888186 - RNA, 22 nt, Human
acugaaauauuuagaagugaag

SEQ ID NO: 888187 - RNA, 22 nt, Human
guggagugcaacgguuggaguu

SEQ ID NO: 888188 - RNA, 22 nt, Human
auuucucagugugaucaggccu

SEQ ID NO: 888189 - RNA, 22 nt, Human
ccugccugacagagaagguuca

SEQ ID NO: 888190 - RNA, 22 nt, Human
auggcacaggagaggagggcug

SEQ ID NO: 888191 - RNA, 22 nt, Human
ccaggcaaggacaugaaacuga

SEQ ID NO: 888192 - RNA, 22 nt, Human
caauuugguuuauguguucaga

SEQ ID NO: 888193 - RNA, 22 nt, Human
uccagcagaaaagagguaggga

SEQ ID NO: 888194 - RNA, 22 nt, Human
gcagaaggauccgcaggugcaa

SEQ ID NO: 888195 - RNA, 22 nt, Human
uaaaacuucucauuuuuauggu

SEQ ID NO: 888196 - RNA, 22 nt, Human
aaaaguauuuuggaucucagau

SEQ ID NO: 888197 - RNA, 22 nt, Human
aggccaaagcucaccugcagcu

SEQ ID NO: 888198 - RNA, 22 nt, Human
agcuucuuuuaccaggaaguug

SEQ ID NO: 888199 - RNA, 22 nt, Human
ccugggagguggagguugcagu

SEQ ID NO: 888200 - RNA, 22 nt, Human
gaauguuccucagacuucccca

SEQ ID NO: 888201 - RNA, 22 nt, Human
acaugcauaaacuacuucuuau

SEQ ID NO: 888202 - RNA, 22 nt, Human
aacaguuucuauguuagugguu

SEQ ID NO: 888203 - RNA, 22 nt, Human
auuuguaucaaucucaauauau

SEQ ID NO: 888204 - RNA, 22 nt, Human
uuuucagaaagaugagaaauua

SEQ ID NO: 888205 - RNA, 22 nt, Human
accugugucuccucuguguucu

SEQ ID NO: 888206 - RNA, 22 nt, Human
caggcccucugcacccucgucu

SEQ ID NO: 888207 - RNA, 22 nt, Human
caucuugugaggaccuucuugc

SEQ ID NO: 888208 - RNA, 22 nt, Human
uugcuuuacauguucugguaaa

SEQ ID NO: 888209 - RNA, 22 nt, Human
gaagaguauauuuagugaaauc

SEQ ID NO: 888210 - RNA, 22 nt, Human
gccuggaggggacagucucugg

SEQ ID NO: 888211 - RNA, 22 nt, Human
gacacagggacgugcucugccu

SEQ ID NO: 888212 - RNA, 22 nt, Human
agcuuucacgauuuggaacagg

SEQ ID NO: 888213 - RNA, 16 nt, Human
aucucaggagagucuu

SEQ ID NO: 888214 - RNA, 22 nt, Human
cuucagaagccugcagccuuug

SEQ ID NO: 888215 - RNA, 22 nt, Human
ucaggaagcugaauuacaaaaa

SEQ ID NO: 888216 - RNA, 22 nt, Human
gcucuguguuccucuggauugc

SEQ ID NO: 888217 - RNA, 22 nt, Human
gcugccuguggcccuucugggu

SEQ ID NO: 888218 - RNA, 22 nt, Human
ugcauauuuguaugauguuuag

SEQ ID NO: 888219 - RNA, 22 nt, Human
gugauaaaauucaaauagcucu

SEQ ID NO: 888220 - RNA, 22 nt, Human
ggggcagcuaccggaaguaggg

SEQ ID NO: 888221 - RNA, 21 nt, Human
gggaaauuaggauugcucauc

SEQ ID NO: 888222 - RNA, 22 nt, Human
cauguacaguuuuucuguccug

SEQ ID NO: 888223 - RNA, 22 nt, Human
ucucugucugagccuggcagac

SEQ ID NO: 888224 - RNA, 17 nt, Human
gccuggcccagccuggc

SEQ ID NO: 888225 - RNA, 22 nt, Human
uagacucugcauuuaccuccca

SEQ ID NO: 888226 - RNA, 22 nt, Human
gagaacaguguuguauuuuuuc

SEQ ID NO: 888227 - RNA, 22 nt, Human
ucuuugauuuuguuacuaagac

SEQ ID NO: 888228 - RNA, 22 nt, Human
ugaguccugucuuugucacuua

SEQ ID NO: 888229 - RNA, 21 nt, Human
ucugccagcugaagaggugga

SEQ ID NO: 888230 - RNA, 22 nt, Human
agcuguggggaggaggcuagca

SEQ ID NO: 888231 - RNA, 22 nt, Human
aagaguuuaugauauaacaugu

SEQ ID NO: 888232 - RNA, 22 nt, Human
uucagugucccuaguagaaguu

SEQ ID NO: 888233 - RNA, 22 nt, Human
ugaguccauaguggauccuuca

SEQ ID NO: 888234 - RNA, 22 nt, Human
gagaagcagguuuagcagacaa

SEQ ID NO: 888235 - RNA, 22 nt, Human
aaaauggcuuaauaggcaauaa

SEQ ID NO: 888236 - RNA, 22 nt, Human
ucuccugcucagaacagccuca

SEQ ID NO: 888237 - RNA, 22 nt, Human
uagaauguggagguaacagacu

SEQ ID NO: 888238 - RNA, 22 nt, Human
cuguuauuugagaguguugaau

SEQ ID NO: 888239 - RNA, 20 nt, Human
agggucaguagcacagagcu

SEQ ID NO: 888240 - RNA, 22 nt, Human
cuuucuuaauuuuuaaggacac

SEQ ID NO: 888241 - RNA, 22 nt, Human
ugaaagcacaaguucuaacagg

SEQ ID NO: 888242 - RNA, 22 nt, Human
aaaugguauuuacucuguauua

SEQ ID NO: 888243 - RNA, 22 nt, Human
acugacuuuggaauauuucuag

SEQ ID NO: 888244 - RNA, 22 nt, Human
agucacugagauggugaggcua

SEQ ID NO: 888245 - RNA, 22 nt, Human
uggucaggggcuucugagcugu

SEQ ID NO: 888246 - RNA, 23 nt, Human
gcugccuccuacaaaagcccagc

SEQ ID NO: 888247 - RNA, 22 nt, Human
uuugacaguguuggggcaggcu

SEQ ID NO: 888248 - RNA, 22 nt, Human
cagauguaauuacucaagucaa

SEQ ID NO: 888249 - RNA, 22 nt, Human
agaaacaucgcuuaguccucau

SEQ ID NO: 888250 - RNA, 22 nt, Human
ccaggcaucacgggcauguggc

SEQ ID NO: 888251 - RNA, 22 nt, Human
acacagauauuuugaauacaua

SEQ ID NO: 888252 - RNA, 22 nt, Human
gaaggcuguggcuggucucagu

SEQ ID NO: 888253 - RNA, 22 nt, Human
cugggcucagugucucacuccu

SEQ ID NO: 888254 - RNA, 22 nt, Human
uucuaguuauagaaaaagcauu

SEQ ID NO: 888255 - RNA, 22 nt, Human
uagauuguucuuaacuuuauaa

SEQ ID NO: 888256 - RNA, 22 nt, Human
guuuucagccaggagcacauuu

SEQ ID NO: 888257 - RNA, 23 nt, Human
ugguccugguugaggugggcccc

SEQ ID NO: 888258 - RNA, 20 nt, Human
gccuggcacccggggcuggc

SEQ ID NO: 888259 - RNA, 22 nt, Human
cagggaugugaugagcugagcc

SEQ ID NO: 888260 - RNA, 22 nt, Human
ugccugcuaggcccugcugggu

SEQ ID NO: 888261 - RNA, 22 nt, Human
gaaagaggaaggagauguauua

SEQ ID NO: 888262 - RNA, 22 nt, Human
ugagguaguaaagguguuaguu

SEQ ID NO: 888263 - RNA, 22 nt, Human
agugcccugggccuuccaggac

SEQ ID NO: 888264 - RNA, 22 nt, Human
cgcagcugccuugucagccguu

SEQ ID NO: 888265 - RNA, 22 nt, Human
ugccugggccuucccaccucug

SEQ ID NO: 888266 - RNA, 22 nt, Human
guauauaagguaaagcgauugu

SEQ ID NO: 888267 - RNA, 22 nt, Human
uaauuuaugaugcaaagaaaag

SEQ ID NO: 888268 - RNA, 22 nt, Human
aucuuucagggccauuuguauu

SEQ ID NO: 888269 - RNA, 22 nt, Human
gcagacaccuuguaggugugua

SEQ ID NO: 888270 - RNA, 22 nt, Human
gaaaucaucugaguaauaaucu

SEQ ID NO: 888271 - RNA, 22 nt, Human
uucugaggcacuggcucuccca

SEQ ID NO: 888272 - RNA, 22 nt, Human
uuagcaaacaaaugaaaugguu

SEQ ID NO: 888273 - RNA, 23 nt, Human
ugucacauuuaguuggcauuguu

SEQ ID NO: 888274 - RNA, 23 nt, Human
cuggcuccgaagacuccaggauc

SEQ ID NO: 888275 - RNA, 22 nt, Human
agcugugguacuugauucacaa

SEQ ID NO: 888276 - RNA, 22 nt, Human
ucaagcaaaguuuagcugguua

SEQ ID NO: 888277 - RNA, 22 nt, Human
caguguuacugggccugggugu

SEQ ID NO: 888278 - RNA, 22 nt, Human
cuucuggggauggagcccagaa

SEQ ID NO: 888279 - RNA, 22 nt, Human
uaagaaguaccucuuuuccuga

SEQ ID NO: 888280 - RNA, 22 nt, Human
uuggaaauguagaaaagcagau

SEQ ID NO: 888281 - RNA, 22 nt, Human
gagagagagcuaauauuaagcu

SEQ ID NO: 888282 - RNA, 22 nt, Human
gcagauuucauuuaaaccuuuc

SEQ ID NO: 888283 - RNA, 22 nt, Human
uguuaucugagcaacgucgacg

SEQ ID NO: 888284 - RNA, 22 nt, Human
caagguucuauagcaaaaucug

SEQ ID NO: 888285 - RNA, 22 nt, Human
aggaagaggugugcaauggugu

SEQ ID NO: 888286 - RNA, 21 nt, Human
gcugcccuggcucagcauuca

SEQ ID NO: 888287 - RNA, 22 nt, Human
uacaacaggaauuucaacuuug

SEQ ID NO: 888288 - RNA, 22 nt, Human
ugccugaaugaucagucagauu

SEQ ID NO: 888289 - RNA, 22 nt, Human
augcaaaucuuaaguaugugug

SEQ ID NO: 888290 - RNA, 17 nt, Human
uuaucuugcuguuucua

SEQ ID NO: 888291 - RNA, 20 nt, Human
agaaucugacccagagagac

SEQ ID NO: 888292 - RNA, 22 nt, Human
ucugccugcuucuucauagucu

SEQ ID NO: 888293 - RNA, 22 nt, Human
gccugcuggaggagccucaggg

SEQ ID NO: 888294 - RNA, 22 nt, Human
gucagugucuuaacagagauua

SEQ ID NO: 888295 - RNA, 22 nt, Human
agaccuuguaacuagaggccca

SEQ ID NO: 888296 - RNA, 22 nt, Human
uaagaaucuauuaggaauaugu

SEQ ID NO: 888297 - RNA, 22 nt, Human
guccuuggcuucuuguugacug

SEQ ID NO: 888298 - RNA, 22 nt, Human
acagaagagcacauuuaguaug

SEQ ID NO: 888299 - RNA, 22 nt, Human
ccauuuguuguguauuaauauu

SEQ ID NO: 888300 - RNA, 23 nt, Human
ucagcugcuuccuccugccugcc

SEQ ID NO: 888301 - RNA, 22 nt, Human
gagggcagugaauuuugaagcu

SEQ ID NO: 888302 - RNA, 22 nt, Human
aggcugaggugugcugugaucg

SEQ ID NO: 888303 - RNA, 22 nt, Human
gagcaaggauggccggggccgu

SEQ ID NO: 888304 - RNA, 22 nt, Human
agagccuugccuggggcccugu

SEQ ID NO: 888305 - RNA, 22 nt, Human
ucucucuugaaguauuagcuag

SEQ ID NO: 888306 - RNA, 22 nt, Human
cuugcagggcugaugggaagug

SEQ ID NO: 888307 - RNA, 22 nt, Human
acagugacaacccaggauaaau

SEQ ID NO: 888308 - RNA, 22 nt, Human
uuaucuguuuaacaaaguaucu

SEQ ID NO: 888309 - RNA, 22 nt, Human
cauggcugccuguggacacugc

SEQ ID NO: 888310 - RNA, 22 nt, Human
ugucuguccuuguuugguauca

SEQ ID NO: 888311 - RNA, 22 nt, Human
uggagucugugaugcucugggu

SEQ ID NO: 888312 - RNA, 22 nt, Human
aggcaaagcgauaccagagcua

SEQ ID NO: 888313 - RNA, 22 nt, Human
gccuggcugcugguucugagga

SEQ ID NO: 888314 - RNA, 22 nt, Human
uagcugugaagagcuaaaaaau

SEQ ID NO: 888315 - RNA, 22 nt, Human
aguauuuagagacacaagaugg

SEQ ID NO: 888316 - RNA, 21 nt, Human
uggcugccuacaugcugcagg

SEQ ID NO: 888317 - RNA, 22 nt, Human
gagcugaauugcugccauuugc

SEQ ID NO: 888318 - RNA, 22 nt, Human
aaggcagaaauucaacuacugg

SEQ ID NO: 888319 - RNA, 18 nt, Human
ggcugccuguuccugaag

SEQ ID NO: 888320 - RNA, 22 nt, Human
gcacagaauaacacucugggcu

SEQ ID NO: 888321 - RNA, 22 nt, Human
gaaagccauagcccagcuuuac

SEQ ID NO: 888322 - RNA, 22 nt, Human
ggcugagguguggggaacuaua

SEQ ID NO: 888323 - RNA, 22 nt, Human
aaggcagauauaaagacuagag

SEQ ID NO: 888324 - RNA, 22 nt, Human
ugacuuuagagaugggagguca

SEQ ID NO: 888325 - RNA, 22 nt, Human
ugagggcaaaguggugcugagg

SEQ ID NO: 888326 - RNA, 22 nt, Human
uccucccugcacucagugaagu

SEQ ID NO: 888327 - RNA, 22 nt, Human
ggcugcagagcuggugcccugg

SEQ ID NO: 888328 - RNA, 22 nt, Human
acugaugaaaacuaauaaauua

SEQ ID NO: 888329 - RNA, 22 nt, Human
cugacugucucuucucccauga

SEQ ID NO: 888330 - RNA, 22 nt, Human
gugcagggcccuccuaacaucu

SEQ ID NO: 888331 - RNA, 22 nt, Human
cagaaucucgacuucuggcccc

SEQ ID NO: 888332 - RNA, 22 nt, Human
uuagaauuucugcucacuuuga

SEQ ID NO: 888333 - RNA, 22 nt, Human
gagcuuccuuuuucugcaugac

SEQ ID NO: 888334 - RNA, 22 nt, Human
aaacacagauuucuuuguccca

SEQ ID NO: 888335 - RNA, 22 nt, Human
cugggaguugacgaggcuugua

SEQ ID NO: 888336 - RNA, 22 nt, Human
ucagucccaagguccugaggug

SEQ ID NO: 888337 - RNA, 22 nt, Human
uucuuuaaaauagugagaaaga

SEQ ID NO: 888338 - RNA, 22 nt, Human
cugaccuguaacuguaagagac

SEQ ID NO: 888339 - RNA, 22 nt, Human
aauuaauggaaaguaaggaagg

SEQ ID NO: 888340 - RNA, 22 nt, Human
ccagcugucacucagaaaggcc

SEQ ID NO: 888341 - RNA, 22 nt, Human
ucuccaagcagggcugcaaggc

SEQ ID NO: 888342 - RNA, 22 nt, Human
aggcaggucuguaucuagucuc

SEQ ID NO: 888343 - RNA, 22 nt, Human
gccagcuguucagacauucuuu

SEQ ID NO: 888344 - RNA, 22 nt, Human
aauuugccuuaccuucuuccaa

SEQ ID NO: 888345 - RNA, 22 nt, Human
ugaucaaaacauuacuccacca

SEQ ID NO: 888346 - RNA, 22 nt, Human
agggccugagcuggcugaccuc

SEQ ID NO: 888347 - RNA, 22 nt, Human
aagauuaaaggggagacaagcu

SEQ ID NO: 888348 - RNA, 22 nt, Human
caggaagcaagugauuuucuug

SEQ ID NO: 888349 - RNA, 22 nt, Human
aagauguugucguuagugauga

SEQ ID NO: 888350 - RNA, 22 nt, Human
uugagguaaagcuacuaguuag

SEQ ID NO: 888351 - RNA, 22 nt, Human
gaggcugaaguguacaugggug

SEQ ID NO: 888352 - RNA, 22 nt, Human
cauauuuaguguuuggagaucg

SEQ ID NO: 888353 - RNA, 22 nt, Human
gguggagagcuggaugagaggu

SEQ ID NO: 888354 - RNA, 22 nt, Human
agugacagauuaccggcagagc

SEQ ID NO: 888355 - RNA, 21 nt, Human
uccuguaagcuuggguggcuc

SEQ ID NO: 888356 - RNA, 22 nt, Human
caugccauuucuucucuuuaug

SEQ ID NO: 888357 - RNA, 22 nt, Human
ggagccugacagugcccagcau

SEQ ID NO: 888358 - RNA, 22 nt, Human
cucugcaucaggcauuauggau

SEQ ID NO: 888359 - RNA, 22 nt, Human
gggcuugaggugaagguaggga

SEQ ID NO: 888360 - RNA, 22 nt, Human
gugcuuuaaaccacugugcugu

SEQ ID NO: 888361 - RNA, 22 nt, Human
gacccaggaagcuacuucuggu

SEQ ID NO: 888362 - RNA, 22 nt, Human
uggggagguaacaauuucaggc

SEQ ID NO: 888363 - RNA, 22 nt, Human
ggagcuggucagccuugagcau

SEQ ID NO: 888364 - RNA, 22 nt, Human
aaggaagguucauagucaaaga

SEQ ID NO: 888365 - RNA, 22 nt, Human
cagcaagggauaaacaaggacg

SEQ ID NO: 888366 - RNA, 22 nt, Human
cagggcagaaggcacucuacuc

SEQ ID NO: 888367 - RNA, 22 nt, Human
gggagggagaggacaguucuau

SEQ ID NO: 888368 - RNA, 22 nt, Human
gacauaaaugaaguuugacuau

SEQ ID NO: 888369 - RNA, 22 nt, Human
uuuuacauugggaaaugccucu

SEQ ID NO: 888370 - RNA, 22 nt, Human
aaagaugucacaagaugugaug

SEQ ID NO: 888371 - RNA, 22 nt, Human
aaaaauuuaugguucuucucug

SEQ ID NO: 888372 - RNA, 22 nt, Human
cugugaggcggaaaggacucuc

SEQ ID NO: 888373 - RNA, 22 nt, Human
auagcaauggcaacaacuaagc

SEQ ID NO: 888374 - RNA, 22 nt, Human
uuuauucuugagagugagaaga

SEQ ID NO: 888375 - RNA, 23 nt, Human
acagcuuccuggcauggagaacc

SEQ ID NO: 888376 - RNA, 22 nt, Human
agcagcaguguguggucauguu

SEQ ID NO: 888377 - RNA, 22 nt, Human
uuucauuacguguuugacuugu

SEQ ID NO: 888378 - RNA, 22 nt, Human
caaagcagugauccuuaaagga

SEQ ID NO: 888379 - RNA, 20 nt, Human
gcugaccccugcugucaugc

SEQ ID NO: 888380 - RNA, 22 nt, Human
aaaagguuuugaguacaaauau

SEQ ID NO: 888381 - RNA, 19 nt, Human
ucuuucauuucuagcucug

SEQ ID NO: 888382 - RNA, 22 nt, Human
uuuuauaaagagagucaguugg

SEQ ID NO: 888383 - RNA, 22 nt, Human
aagacuuucccucaucagaacg

SEQ ID NO: 888384 - RNA, 22 nt, Human
aaaggagagugagucagaugcc

SEQ ID NO: 888385 - RNA, 22 nt, Human
aagucucuggugaugcaggaaa

SEQ ID NO: 888386 - RNA, 22 nt, Human
acagauuuuaaauuuguaguug

SEQ ID NO: 888387 - RNA, 22 nt, Human
guguuuuaucagacaaaguaua

SEQ ID NO: 888388 - RNA, 22 nt, Human
aaguccauagguuucaugaggg

SEQ ID NO: 888389 - RNA, 22 nt, Human
aaaucaugguggaagaaacaga

SEQ ID NO: 888390 - RNA, 22 nt, Human
ugcuuaaaaacaguaugguagu

SEQ ID NO: 888391 - RNA, 22 nt, Human
acagguguugaaugaugucaca

SEQ ID NO: 888392 - RNA, 17 nt, Human
acagagugucccgcagu

SEQ ID NO: 888393 - RNA, 22 nt, Human
gaaggcaagcuuuggauaugag

SEQ ID NO: 888394 - RNA, 22 nt, Human
agcaccugcuuaaugugcagug

SEQ ID NO: 888395 - RNA, 22 nt, Human
agccuuacauaaacagccuuau

SEQ ID NO: 888396 - RNA, 20 nt, Human
aggaaagccugugugagucu

SEQ ID NO: 888397 - RNA, 22 nt, Human
uuuagagaggcucuguaaaaug

SEQ ID NO: 888398 - RNA, 22 nt, Human
uaauuauagccgcuauuuugcu

SEQ ID NO: 888399 - RNA, 22 nt, Human
cuuacccaaauuagaguuacca

SEQ ID NO: 888400 - RNA, 22 nt, Human
ucaaucaaagccagauguccuu

SEQ ID NO: 888401 - RNA, 23 nt, Human
ucguugaauagcaauagcacaac

SEQ ID NO: 888402 - RNA, 22 nt, Human
acaaugcauaccuagcagcuca

SEQ ID NO: 888403 - RNA, 22 nt, Human
ugaggugguccaaagacuguuu

SEQ ID NO: 888404 - RNA, 22 nt, Human
ugcccagucuccgggccagccc

SEQ ID NO: 888405 - RNA, 22 nt, Human
caaauugaucugucuuuaugaa

SEQ ID NO: 888406 - RNA, 22 nt, Human
acugccugaugugguucuaaau

SEQ ID NO: 888407 - RNA, 19 nt, Human
ggcuucgaggcuggggaag

SEQ ID NO: 888408 - RNA, 22 nt, Human
agugugugaccuuuuaauuuaa

SEQ ID NO: 888409 - RNA, 22 nt, Human
agucacuuuaugagagaaccau

SEQ ID NO: 888410 - RNA, 22 nt, Human
aaggcagaggaaggucuaguuu

SEQ ID NO: 888411 - RNA, 22 nt, Human
ugguaccugaaugaagggagga

SEQ ID NO: 888412 - RNA, 22 nt, Human
uucuaagagaguacaagcaauu

SEQ ID NO: 888413 - RNA, 22 nt, Human
gucagaggaggcugaguaggaa

SEQ ID NO: 888414 - RNA, 22 nt, Human
aaagcaguccuucccuuaaggu

SEQ ID NO: 888415 - RNA, 22 nt, Human
ucaauaaaauuguuuuccuauc

SEQ ID NO: 888416 - RNA, 17 nt, Human
gaugaaaugaugcacac

SEQ ID NO: 888417 - RNA, 22 nt, Human
uuugcaaauaccaugaaacuug

SEQ ID NO: 888418 - RNA, 22 nt, Human
ccugaggcuggcccuuccaucc

SEQ ID NO: 888419 - RNA, 22 nt, Human
ugucuagacaagaaguauugcc

SEQ ID NO: 888420 - RNA, 22 nt, Human
cugccuguuuucugauagauuu

SEQ ID NO: 888421 - RNA, 22 nt, Human
ucuugucaugcccuugguaacu

SEQ ID NO: 888422 - RNA, 22 nt, Human
cuaccuuacuuuaacccugcaa

SEQ ID NO: 888423 - RNA, 22 nt, Human
uuuaaugugagucccuuucaag

SEQ ID NO: 888424 - RNA, 22 nt, Human
ucuuuucuugcauuauugcacu

SEQ ID NO: 888425 - RNA, 22 nt, Human
aagaacaugcuauaauuaucuu

SEQ ID NO: 888426 - RNA, 22 nt, Human
uguucuucuagauugccuuuua

SEQ ID NO: 888427 - RNA, 22 nt, Human
gcagagucaggauuccauccca

SEQ ID NO: 888428 - RNA, 22 nt, Human
ggcugcucggcagcuccugagc

SEQ ID NO: 888429 - RNA, 22 nt, Human
auauuuuuccaugugggacucu

SEQ ID NO: 888430 - RNA, 22 nt, Human
cugguggaccagccuccccagc

SEQ ID NO: 888431 - RNA, 22 nt, Human
uucaaacaaaacucuuuccuau

SEQ ID NO: 888432 - RNA, 22 nt, Human
cugagguaccuggagcaggucc

SEQ ID NO: 888433 - RNA, 22 nt, Human
agccacaggaaacagagacagc

SEQ ID NO: 888434 - RNA, 22 nt, Human
uacucacauucuguuucuugcu

SEQ ID NO: 888435 - RNA, 22 nt, Human
cugcagcuggcucaugggauau

SEQ ID NO: 888436 - RNA, 22 nt, Human
agcuuuguuucacauacaccuu

SEQ ID NO: 888437 - RNA, 22 nt, Human
uuugucuaauugcaaggcaagu

SEQ ID NO: 888438 - RNA, 22 nt, Human
uuggaagggaacaccauuugac

SEQ ID NO: 888439 - RNA, 22 nt, Human
gcugggcuguaguuugcugacc

SEQ ID NO: 888440 - RNA, 18 nt, Human
cagucccaaaccuuagga

SEQ ID NO: 888441 - RNA, 22 nt, Human
agcagcaaggaagcgaggaugg

SEQ ID NO: 888442 - RNA, 22 nt, Human
aaaagugaggcagcccaaggga

SEQ ID NO: 888443 - RNA, 22 nt, Human
acccuuugccuagaggggcuuu

SEQ ID NO: 888444 - RNA, 22 nt, Human
acuuuguucuaauaguaucucu

SEQ ID NO: 888445 - RNA, 22 nt, Human
acugcucuguuuucauauguuu

SEQ ID NO: 888446 - RNA, 22 nt, Human
gagaagguggaccugaaggagc

SEQ ID NO: 888447 - RNA, 22 nt, Human
acugugcauuucaugucuuuuc

SEQ ID NO: 888448 - RNA, 22 nt, Human
uucuaugugaacguuauaguuu

SEQ ID NO: 888449 - RNA, 22 nt, Human
acaugaaauucuagcugaaccc

SEQ ID NO: 888450 - RNA, 22 nt, Human
aggaauuacucaucugugguau

SEQ ID NO: 888451 - RNA, 22 nt, Human
uaagcaaauagcuagaucagag

SEQ ID NO: 888452 - RNA, 22 nt, Human
gucacacagguugaaaugcagu

SEQ ID NO: 888453 - RNA, 22 nt, Human
agcuuguuagggcaguggucgc

SEQ ID NO: 888454 - RNA, 22 nt, Human
uguguauauguaaauauaguug

SEQ ID NO: 888455 - RNA, 22 nt, Human
ggcuucacugacugguucuagg

SEQ ID NO: 888456 - RNA, 22 nt, Human
uaccguacacauuaacuacagu

SEQ ID NO: 888457 - RNA, 22 nt, Human
uuacaaugacagguguaucauu

SEQ ID NO: 888458 - RNA, 22 nt, Human
cuucaugucggcggcucucggg

SEQ ID NO: 888459 - RNA, 22 nt, Human
uggagguggaguuggaaacuga

SEQ ID NO: 888460 - RNA, 22 nt, Human
guagaggggugauucugugaga

SEQ ID NO: 888461 - RNA, 22 nt, Human
cccaggacucuucacugcagcc

SEQ ID NO: 888462 - RNA, 22 nt, Human
gagacguggccuuugccugagc

SEQ ID NO: 888463 - RNA, 22 nt, Human
ugagaugggucaucagguuugg

SEQ ID NO: 888464 - RNA, 22 nt, Human
cccacaggcuagggguagggca

SEQ ID NO: 888465 - RNA, 22 nt, Human
uguuuucucuugaaaagcaguc

SEQ ID NO: 888466 - RNA, 22 nt, Human
ccagcagagggucuuggccauu

SEQ ID NO: 888467 - RNA, 20 nt, Human
uuguuagaggaaugccauag

SEQ ID NO: 888468 - RNA, 22 nt, Human
uuucaagaagcaaauuaaaguc

SEQ ID NO: 888469 - RNA, 20 nt, Human
uuggaugugcauggccgugc

SEQ ID NO: 888470 - RNA, 22 nt, Human
auucaguugucuacuacugccu

SEQ ID NO: 888471 - RNA, 22 nt, Human
gaauaucugggagugggaagcu

SEQ ID NO: 888472 - RNA, 22 nt, Human
agaaggccagauggacggggcu

SEQ ID NO: 888473 - RNA, 22 nt, Human
ggcgagcagagcacugccagga

SEQ ID NO: 888474 - RNA, 22 nt, Human
gaggaugcugcagugcaggaca

SEQ ID NO: 888475 - RNA, 22 nt, Human
aaagcacuugaaaucuggcagu

SEQ ID NO: 888476 - RNA, 22 nt, Human
auccugucucuacccaucggcu

SEQ ID NO: 888477 - RNA, 22 nt, Human
cuuguaaaagguacauuaugcu

SEQ ID NO: 888478 - RNA, 22 nt, Human
ugagucacagccuugccuuggu

SEQ ID NO: 888479 - RNA, 22 nt, Human
aggugggcccagugggcuccag

SEQ ID NO: 888480 - RNA, 22 nt, Human
gauaaaagaggaaauuuguuca

SEQ ID NO: 888481 - RNA, 22 nt, Human
uacagaaaucacaucgcuuuga

SEQ ID NO: 888482 - RNA, 22 nt, Human
agcugaaguuuagaauugugaa

SEQ ID NO: 888483 - RNA, 23 nt, Human
uggggagaguuacccuggaagcg

SEQ ID NO: 888484 - RNA, 22 nt, Human
acaaugaccaaaauguuuccag

SEQ ID NO: 888485 - RNA, 22 nt, Human
uuuauauagagauuugugcaug

SEQ ID NO: 888486 - RNA, 19 nt, Human
guucccauugcaguugugg

SEQ ID NO: 888487 - RNA, 22 nt, Human
uuucugcaaaaucuaaguuaga

SEQ ID NO: 888488 - RNA, 22 nt, Human
ggaaaucaugggagaguuggaa

SEQ ID NO: 888489 - RNA, 22 nt, Human
uuuauaaaauagacugggucua

SEQ ID NO: 888490 - RNA, 22 nt, Human
ucagugaaugagauaacuuuag

SEQ ID NO: 888491 - RNA, 22 nt, Human
cacaggagugcugcuauuguug

SEQ ID NO: 888492 - RNA, 22 nt, Human
aaagguuuauugcuaugguugu

SEQ ID NO: 888493 - RNA, 22 nt, Human
aagucagagcaacugagacauu

SEQ ID NO: 888494 - RNA, 20 nt, Human
cccuaggaacgcagcaggag

SEQ ID NO: 888495 - RNA, 22 nt, Human
gaacacugacauuuuccugacu

SEQ ID NO: 888496 - RNA, 22 nt, Human
acuuauuuauucauucagcuca

SEQ ID NO: 888497 - RNA, 22 nt, Human
uuuuacuucauuccugacuuca

SEQ ID NO: 888498 - RNA, 22 nt, Human
auguuuaugaccuccauaagga

SEQ ID NO: 888499 - RNA, 19 nt, Human
cugcuucaggcgccuugcc

SEQ ID NO: 888500 - RNA, 22 nt, Human
aguucuaagaugcuccacagag

SEQ ID NO: 888501 - RNA, 22 nt, Human
cagggaaggcugcaaauguuaa

SEQ ID NO: 888502 - RNA, 22 nt, Human
uaccagcaaugcuagucaacuc

SEQ ID NO: 888503 - RNA, 22 nt, Human
agcagcugaccagugaguccug

SEQ ID NO: 888504 - RNA, 21 nt, Human
auuucagaaauauugguggga

SEQ ID NO: 888505 - RNA, 22 nt, Human
cuguguggacugguugaggccc

SEQ ID NO: 888506 - RNA, 22 nt, Human
aucauacagaaccugagcacuu

SEQ ID NO: 888507 - RNA, 22 nt, Human
auguguuuugguaauuucugcu

SEQ ID NO: 888508 - RNA, 22 nt, Human
ugcauuuuacuuaccuguuagu

SEQ ID NO: 888509 - RNA, 22 nt, Human
cucagccccagcccagauagca

SEQ ID NO: 888510 - RNA, 22 nt, Human
gggccugagacugagggugagg

SEQ ID NO: 888511 - RNA, 22 nt, Human
uaagccacuagucuguuaugaa

SEQ ID NO: 888512 - RNA, 22 nt, Human
gggacccucaacaucugcuucu

SEQ ID NO: 888513 - RNA, 22 nt, Human
gcacagagccugguaccgagaa

SEQ ID NO: 888514 - RNA, 22 nt, Human
augcugugagugugccgcagag

SEQ ID NO: 888515 - RNA, 22 nt, Human
gaugcagggcagcucugggaca

SEQ ID NO: 888516 - RNA, 22 nt, Human
uauaaaauggcaucagcuccaa

SEQ ID NO: 888517 - RNA, 22 nt, Human
uauuuguuccagagauaaaaau

SEQ ID NO: 888518 - RNA, 20 nt, Human
ugcuguguggcccagcauga

SEQ ID NO: 888519 - RNA, 22 nt, Human
acauuagaugacucuuucuuuc

SEQ ID NO: 888520 - RNA, 20 nt, Human
gucuuuauguuuuaugaccu

SEQ ID NO: 888521 - RNA, 22 nt, Human
cugagaaaagcuuucuuauaca

SEQ ID NO: 888522 - RNA, 22 nt, Human
gucuuucuuaaacaacagaaca

SEQ ID NO: 888523 - RNA, 22 nt, Human
uuaagauuuguagagaaaaagc

SEQ ID NO: 888524 - RNA, 22 nt, Human
caguaauauuuuacucuaggcc

SEQ ID NO: 888525 - RNA, 22 nt, Human
ucauaaacacacuaguaugauu

SEQ ID NO: 888526 - RNA, 22 nt, Human
auguucauuugacaaguaguga

SEQ ID NO: 888527 - RNA, 22 nt, Human
acuguguggaaauuugugaggg

SEQ ID NO: 888528 - RNA, 22 nt, Human
aggcuuuuagaaucuuauuucu

SEQ ID NO: 888529 - RNA, 22 nt, Human
uucuagaaauccguaagugaau

SEQ ID NO: 888530 - RNA, 23 nt, Human
ucugcucugaaguucggcugagc

SEQ ID NO: 888531 - RNA, 21 nt, Human
gcagccacugccuucaacaau

SEQ ID NO: 888532 - RNA, 23 nt, Human
uucugcauguuucagagcuggga

SEQ ID NO: 888533 - RNA, 22 nt, Human
aaagccaaaugaaagaugguuc

SEQ ID NO: 888534 - RNA, 22 nt, Human
gagaggagguggcuaugacagc

SEQ ID NO: 888535 - RNA, 22 nt, Human
aguuuuaagaugcgcuucuguu

SEQ ID NO: 888536 - RNA, 22 nt, Human
aacuccagacuacuaauuuagu

SEQ ID NO: 888537 - RNA, 18 nt, Human
ucuauauggacauagaga

SEQ ID NO: 888538 - RNA, 22 nt, Human
agccacagcacauuguaagaaa

SEQ ID NO: 888539 - RNA, 22 nt, Human
uccugggaaguggcuggcugag

SEQ ID NO: 888540 - RNA, 22 nt, Human
ucauuucaaugauacuacuaag

SEQ ID NO: 888541 - RNA, 19 nt, Human
ugcuuugccuugauuagcu

SEQ ID NO: 888542 - RNA, 22 nt, Human
guauacuugcagacauuuauau

SEQ ID NO: 888543 - RNA, 19 nt, Human
aggaaggaaccugagucug

SEQ ID NO: 888544 - RNA, 22 nt, Human
uguauacauuuaacuagauaga

SEQ ID NO: 888545 - RNA, 22 nt, Human
aguaaaaaguucagaaugguug

SEQ ID NO: 888546 - RNA, 22 nt, Human
ggcuggcugauaaaggguugag

SEQ ID NO: 888547 - RNA, 22 nt, Human
gggccugggaacuugcauuuag

SEQ ID NO: 888548 - RNA, 22 nt, Human
auuuuguugagguaauugucaa

SEQ ID NO: 888549 - RNA, 22 nt, Human
ugggaaugcugauuucaggaac

SEQ ID NO: 888550 - RNA, 22 nt, Human
ggcugcagcagagggacucacg

SEQ ID NO: 888551 - RNA, 18 nt, Human
ucaggaguuuguggaugg

SEQ ID NO: 888552 - RNA, 22 nt, Human
uucaggagaaaguucaguacuu

SEQ ID NO: 888553 - RNA, 22 nt, Human
ccagcugcugugcagggaggcu

SEQ ID NO: 888554 - RNA, 22 nt, Human
aagcuguugaaguaauucagcc

SEQ ID NO: 888555 - RNA, 22 nt, Human
caguccugggcacagcccuggg

SEQ ID NO: 888556 - RNA, 22 nt, Human
agcauucucagaaugucauuuu

SEQ ID NO: 888557 - RNA, 22 nt, Human
ugcaggugacaccacucuuccu

SEQ ID NO: 888558 - RNA, 22 nt, Human
caguaauagagugccagggaug

SEQ ID NO: 888559 - RNA, 22 nt, Human
uaaacaugugagugugcauaua

SEQ ID NO: 888560 - RNA, 22 nt, Human
auucuucacauggauaggaucu

SEQ ID NO: 888561 - RNA, 22 nt, Human
guucaaauugagaugguauaaa

SEQ ID NO: 888562 - RNA, 22 nt, Human
guucuagguuagaaggacagau

SEQ ID NO: 888563 - RNA, 22 nt, Human
gcuagcagagugcauccuucua

SEQ ID NO: 888564 - RNA, 18 nt, Human
cagaugagaugcaaucuc

SEQ ID NO: 888565 - RNA, 22 nt, Human
ucuauuuuguuuccagcucuac

SEQ ID NO: 888566 - RNA, 20 nt, Human
uguaaauaggcauuguaguu

SEQ ID NO: 888567 - RNA, 22 nt, Human
uacagcugaguuuagguacagg

SEQ ID NO: 888568 - RNA, 22 nt, Human
gcagugcugagaggugaucgga

SEQ ID NO: 888569 - RNA, 22 nt, Human
aagggugguguaggagaucaaa

SEQ ID NO: 888570 - RNA, 22 nt, Human
cacauucagcucauuaaugguc

SEQ ID NO: 888571 - RNA, 22 nt, Human
uauacugagagcaaauacauuc

SEQ ID NO: 888572 - RNA, 22 nt, Human
cagcaucugaccaauaucuaca

SEQ ID NO: 888573 - RNA, 20 nt, Human
agccaaaggagaacagugcu

SEQ ID NO: 888574 - RNA, 22 nt, Human
auguauaaugcuaauuagcuag

SEQ ID NO: 888575 - RNA, 22 nt, Human
aagacagcucaggacagauuca

SEQ ID NO: 888576 - RNA, 22 nt, Human
cccacuguguugcagucuagug

SEQ ID NO: 888577 - RNA, 22 nt, Human
uccuccagaaacugaggcagaa

SEQ ID NO: 888578 - RNA, 23 nt, Human
uucuuccaaggugcuuugugguu

SEQ ID NO: 888579 - RNA, 22 nt, Human
uguggucuccccagugccagcu

SEQ ID NO: 888580 - RNA, 22 nt, Human
ucugaaauuguuaguaaaaaug

SEQ ID NO: 888581 - RNA, 22 nt, Human
ccauacacacaccaaauuugua

SEQ ID NO: 888582 - RNA, 19 nt, Human
aguuuauuauaggugauuc

SEQ ID NO: 888583 - RNA, 22 nt, Human
uauuuuugccucucagauaaaa

SEQ ID NO: 888584 - RNA, 22 nt, Human
ccugaggcucgcgcgccccugg

SEQ ID NO: 888585 - RNA, 22 nt, Human
acuguuacagggcacugaacau

SEQ ID NO: 888586 - RNA, 22 nt, Human
cagggcuguggaaaacuggugc

SEQ ID NO: 888587 - RNA, 22 nt, Human
acauagaaggaagaguaguagg

SEQ ID NO: 888588 - RNA, 22 nt, Human
gugaagaccagggaacgcuggc

SEQ ID NO: 888589 - RNA, 22 nt, Human
ggcuggcuggaugaauggauua

SEQ ID NO: 888590 - RNA, 22 nt, Human
auauauauugcccaggcugguu

SEQ ID NO: 888591 - RNA, 22 nt, Human
uuguagcauuuuaaaugagcau

SEQ ID NO: 888592 - RNA, 22 nt, Human
ugugaaaagcguguguucuagg

SEQ ID NO: 888593 - RNA, 22 nt, Human
gagggagcuggagcagacgccg

SEQ ID NO: 888594 - RNA, 22 nt, Human
ugggaggcccaggccuggcagg

SEQ ID NO: 888595 - RNA, 22 nt, Human
uauuucugaggcccaggaagug

SEQ ID NO: 888596 - RNA, 22 nt, Human
aaugauguuuuuaaagaacaua

SEQ ID NO: 888597 - RNA, 22 nt, Human
gggcaggagagaacagucaugg

SEQ ID NO: 888598 - RNA, 22 nt, Human
ugggugaaaauuuugguggcac

SEQ ID NO: 888599 - RNA, 19 nt, Human
ucagggaaguucaaagcuc

SEQ ID NO: 888600 - RNA, 22 nt, Human
gaggccagaagucugagaucag

SEQ ID NO: 888601 - RNA, 22 nt, Human
cuugagaaucuucucugaagag

SEQ ID NO: 888602 - RNA, 22 nt, Human
ugugagaauuccugaucacagg

SEQ ID NO: 888603 - RNA, 19 nt, Human
cuguacagguugcuucugg

SEQ ID NO: 888604 - RNA, 22 nt, Human
ccugagcuggcagugaccugga

SEQ ID NO: 888605 - RNA, 22 nt, Human
caggcucccuaagucagcagcc

SEQ ID NO: 888606 - RNA, 22 nt, Human
agggaugguggagguugcaagu

SEQ ID NO: 888607 - RNA, 18 nt, Human
ggaagaaaaggaacucag

SEQ ID NO: 888608 - RNA, 22 nt, Human
gaguuuaaagcauacauauuuu

SEQ ID NO: 888609 - RNA, 19 nt, Human
caggccagugucagggggc

SEQ ID NO: 888610 - RNA, 22 nt, Human
gaggccagauacucucuucugc

SEQ ID NO: 888611 - RNA, 22 nt, Human
uuugauaacagugaauaucaug

SEQ ID NO: 888612 - RNA, 23 nt, Human
aagaacuuugguccugcagaguc

SEQ ID NO: 888613 - RNA, 22 nt, Human
cagaacagagucaaaaguaugu

SEQ ID NO: 888614 - RNA, 22 nt, Human
acacauggguggggagcuaagu

SEQ ID NO: 888615 - RNA, 22 nt, Human
agaggucauaucucagaagaga

SEQ ID NO: 888616 - RNA, 20 nt, Human
gccaugaggggaggugacug

SEQ ID NO: 888617 - RNA, 22 nt, Human
cuggccagagguuccucugccc

SEQ ID NO: 888618 - RNA, 22 nt, Human
acauaaaguacugagagacucu

SEQ ID NO: 888619 - RNA, 18 nt, Human
caguuuuuauaucuggca

SEQ ID NO: 888620 - RNA, 22 nt, Human
ccagagaguaaacauuuuccgg

SEQ ID NO: 888621 - RNA, 22 nt, Human
aaaggcaggcuuucacaucuca

SEQ ID NO: 888622 - RNA, 22 nt, Human
acauucauugccaggguggaag

SEQ ID NO: 888623 - RNA, 18 nt, Human
augggcagguaagaucca

SEQ ID NO: 888624 - RNA, 22 nt, Human
uaccugagcccagugcagcaua

SEQ ID NO: 888625 - RNA, 22 nt, Human
uguguaugucuguaugcacaca

SEQ ID NO: 888626 - RNA, 22 nt, Human
agcauccaggccagguugggca

SEQ ID NO: 888627 - RNA, 23 nt, Human
uuucacaaugagcauuacagaau

SEQ ID NO: 888628 - RNA, 22 nt, Human
ggagccaguauuuaguggucuu

SEQ ID NO: 888629 - RNA, 22 nt, Human
agcagcugggcucagagcuggg

SEQ ID NO: 888630 - RNA, 23 nt, Human
gggaagugaggagccccucugcc

SEQ ID NO: 888631 - RNA, 22 nt, Human
ccuucagccaguuuucuuuguu

SEQ ID NO: 888632 - RNA, 21 nt, Human
gccuggcuagaagcuccuagc

SEQ ID NO: 888633 - RNA, 22 nt, Human
uuuugccugcacuguauauaua

SEQ ID NO: 888634 - RNA, 19 nt, Human
gcucuaaaagauuuugaag

SEQ ID NO: 888635 - RNA, 22 nt, Human
uugagguauauucacauauauc

SEQ ID NO: 888636 - RNA, 22 nt, Human
caccuguuguuuauucaucucu

SEQ ID NO: 888637 - RNA, 22 nt, Human
ccucugugcuuuguccagccuc

SEQ ID NO: 888638 - RNA, 22 nt, Human
uuuguaaaaggaggaagcaugg

SEQ ID NO: 888639 - RNA, 22 nt, Human
uauuucaccuuacuaagcugug

SEQ ID NO: 888640 - RNA, 22 nt, Human
ggaggcacuucccgucucagcc

SEQ ID NO: 888641 - RNA, 22 nt, Human
uguguuucucugaggggucccu

SEQ ID NO: 888642 - RNA, 20 nt, Human
uuggcucugaucaguggagc

SEQ ID NO: 888643 - RNA, 22 nt, Human
ugagggucuggaaucugggcuu

SEQ ID NO: 888644 - RNA, 22 nt, Human
cggggugggaauagaccugucu

SEQ ID NO: 888645 - RNA, 22 nt, Human
gaggcugacggcaccaucuucu

SEQ ID NO: 888646 - RNA, 22 nt, Human
gagggugcaggaggaugguagu

SEQ ID NO: 888647 - RNA, 23 nt, Human
acagaguacagugugcuuagugg

SEQ ID NO: 888648 - RNA, 22 nt, Human
aaaugccucccauucuacugac

SEQ ID NO: 888649 - RNA, 22 nt, Human
uauguacauacaugugcauacg

SEQ ID NO: 888650 - RNA, 22 nt, Human
uuuucuaacaucuaguaauuug

SEQ ID NO: 888651 - RNA, 22 nt, Human
ucuuucuuccuggagcccaaca

SEQ ID NO: 888652 - RNA, 22 nt, Human
agaggugacauaggagaggcuc

SEQ ID NO: 888653 - RNA, 22 nt, Human
gauuuauuuuuaaucagcaggg

SEQ ID NO: 888654 - RNA, 22 nt, Human
agggcccucuggcaggccaggc

SEQ ID NO: 888655 - RNA, 22 nt, Human
ucugcuugugucuguccagccu

SEQ ID NO: 888656 - RNA, 21 nt, Human
aggaggaacccguggcugggc

SEQ ID NO: 888657 - RNA, 22 nt, Human
ugcuaaauaaguggaauagaca

SEQ ID NO: 888658 - RNA, 22 nt, Human
ucuuccuuuuguaccuucugaa

SEQ ID NO: 888659 - RNA, 22 nt, Human
gagaaaugcaugcaugucauca

SEQ ID NO: 888660 - RNA, 22 nt, Human
caucucuguguccccagagcuu

SEQ ID NO: 888661 - RNA, 22 nt, Human
gcucugggccauccuggccggg

SEQ ID NO: 888662 - RNA, 22 nt, Human
uuggaagaucuaacagaggcau

SEQ ID NO: 888663 - RNA, 22 nt, Human
accaggagguguuugcucaagu

SEQ ID NO: 888664 - RNA, 22 nt, Human
cagcccugggaguuggggccga

SEQ ID NO: 888665 - RNA, 22 nt, Human
ucaggcugaggucaucugcauc

SEQ ID NO: 888666 - RNA, 22 nt, Human
aguugcagacgcagagauguug

SEQ ID NO: 888667 - RNA, 22 nt, Human
uucugggggccaggacaguggu

SEQ ID NO: 888668 - RNA, 22 nt, Human
aauaauguaggaugauaaauga

SEQ ID NO: 888669 - RNA, 22 nt, Human
accugaggccuccccagcagac

SEQ ID NO: 888670 - RNA, 22 nt, Human
cacaguuugcauaggaaaaaca

SEQ ID NO: 888671 - RNA, 22 nt, Human
ccugcuggccaguggagggcug

SEQ ID NO: 888672 - RNA, 22 nt, Human
ccagcagcccacaggcgucccu

SEQ ID NO: 888673 - RNA, 22 nt, Human
cacacagggagaaagaaagccu

SEQ ID NO: 888674 - RNA, 18 nt, Human
agcagagagugaauggga

SEQ ID NO: 888675 - RNA, 22 nt, Human
cauagcaacagcaucaagucaa

SEQ ID NO: 888676 - RNA, 22 nt, Human
ggugagaggcagugcuguggaa

SEQ ID NO: 888677 - RNA, 22 nt, Human
uuggaaggcagcauuuguccau

SEQ ID NO: 888678 - RNA, 22 nt, Human
cuucuuccaagcuuaugcucaa

SEQ ID NO: 888679 - RNA, 19 nt, Human
ucugcagaaggcauacaug

SEQ ID NO: 888680 - RNA, 22 nt, Human
ccaagcuggauuuagcugcaca

SEQ ID NO: 888681 - RNA, 22 nt, Human
ggacagaaaccauaugagugua

SEQ ID NO: 888682 - RNA, 20 nt, Human
uacagacaugacaauaaugg

SEQ ID NO: 888683 - RNA, 22 nt, Human
caacauauauaaggauuuacua

SEQ ID NO: 888684 - RNA, 22 nt, Human
uauugaagauuuugugguugcu

SEQ ID NO: 888685 - RNA, 22 nt, Human
cuccccagcucgcgggugacgg

SEQ ID NO: 888686 - RNA, 22 nt, Human
uuuaaaaaacuagucugagucu

SEQ ID NO: 888687 - RNA, 22 nt, Human
uacagauaacugaaugcagacu

SEQ ID NO: 888688 - RNA, 22 nt, Human
agggcagccucucagccuaggu

SEQ ID NO: 888689 - RNA, 22 nt, Human
aauauuucugcagaaugguuuu

SEQ ID NO: 888690 - RNA, 22 nt, Human
aacagcugcuucaguacuugaa

SEQ ID NO: 888691 - RNA, 22 nt, Human
auagaacaagguagacagcuuu

SEQ ID NO: 888692 - RNA, 23 nt, Human
uaagugauuccaaguuucaggga

SEQ ID NO: 888693 - RNA, 22 nt, Human
uaguucuagccagugaaaugua

SEQ ID NO: 888694 - RNA, 22 nt, Human
gauauaucacagcuuacuguca

SEQ ID NO: 888695 - RNA, 22 nt, Human
ccuggcucuggugaggagaagu

SEQ ID NO: 888696 - RNA, 22 nt, Human
aggaaggcacauuguuggcuaa

SEQ ID NO: 888697 - RNA, 22 nt, Human
auauauuuacucuccuguugca

SEQ ID NO: 888698 - RNA, 22 nt, Human
cugaggccucguuggcuggaac

SEQ ID NO: 888699 - RNA, 22 nt, Human
uucuugcucaaugucuguuuaa

SEQ ID NO: 888700 - RNA, 22 nt, Human
gggcaggugcccagggccagag

SEQ ID NO: 888701 - RNA, 22 nt, Human
caguuucuuagugacacaaauc

SEQ ID NO: 888702 - RNA, 22 nt, Human
ucuccucugcgcggcagugccc

SEQ ID NO: 888703 - RNA, 22 nt, Human
caggagaagguuuggagugcag

SEQ ID NO: 888704 - RNA, 22 nt, Human
ugcagcagccaagguucugugc

SEQ ID NO: 888705 - RNA, 22 nt, Human
aacagcaagggcggggucaaga

SEQ ID NO: 888706 - RNA, 22 nt, Human
gcaggugaugugaugugagcau

SEQ ID NO: 888707 - RNA, 22 nt, Human
ucugacauuagauuaauuggaa

SEQ ID NO: 888708 - RNA, 22 nt, Human
ugcugaaguccaagagcuccaa

SEQ ID NO: 888709 - RNA, 22 nt, Human
agagccccugggucacacagcc

SEQ ID NO: 888710 - RNA, 22 nt, Human
uuggcugaagguuaagugcugg

SEQ ID NO: 888711 - RNA, 22 nt, Human
uagcagcuguggaggggcugug

SEQ ID NO: 888712 - RNA, 21 nt, Human
uaagcuaaacauucaguuaac

SEQ ID NO: 888713 - RNA, 22 nt, Human
cuauuauuuccucaucuauaaa

SEQ ID NO: 888714 - RNA, 22 nt, Human
ugcugcagggccuucccugcau

SEQ ID NO: 888715 - RNA, 22 nt, Human
uggcugagguaacuaugaauaa

SEQ ID NO: 888716 - RNA, 21 nt, Human
uugcaacaaccuauauauuuu

SEQ ID NO: 888717 - RNA, 22 nt, Human
guggguggaucaccugagguca

SEQ ID NO: 888718 - RNA, 22 nt, Human
agcuggccuucggugucacugg

SEQ ID NO: 888719 - RNA, 22 nt, Human
ucugugugaccauaagccagcu

SEQ ID NO: 888720 - RNA, 22 nt, Human
agccauuuuccugaaauauaac

SEQ ID NO: 888721 - RNA, 22 nt, Human
uggcauuucuguuagacucuca

SEQ ID NO: 888722 - RNA, 22 nt, Human
acagacuggagcccuuuugccc

SEQ ID NO: 888723 - RNA, 22 nt, Human
gaggccagcuacccaaggguca

SEQ ID NO: 888724 - RNA, 18 nt, Human
guuucaugcaugugaaac

SEQ ID NO: 888725 - RNA, 22 nt, Human
aaucacaucucauucaacagcc

SEQ ID NO: 888726 - RNA, 22 nt, Human
ugcuucagugugucauuauuua

SEQ ID NO: 888727 - RNA, 22 nt, Human
gcagagcaggaaggaagucagg

SEQ ID NO: 888728 - RNA, 22 nt, Human
agagccccucgguggagggguc

SEQ ID NO: 888729 - RNA, 22 nt, Human
gcagggcuauuggaaggagaug

SEQ ID NO: 888730 - RNA, 22 nt, Human
cagucucugucaucucauggga

SEQ ID NO: 888731 - RNA, 22 nt, Human
acauuucuaauuuaauguaaca

SEQ ID NO: 888732 - RNA, 22 nt, Human
ucuucuccagugcuucugcaca

SEQ ID NO: 888733 - RNA, 22 nt, Human
ugcaaggcuauucacauguauu

SEQ ID NO: 888734 - RNA, 22 nt, Human
cacugcccuggggguugccauc

SEQ ID NO: 888735 - RNA, 22 nt, Human
ugggcacuguagcuggugcugg

SEQ ID NO: 888736 - RNA, 22 nt, Human
auguguauuuuguacuauuggg

SEQ ID NO: 888737 - RNA, 22 nt, Human
uuuggaauucagauggcuuagg

SEQ ID NO: 888738 - RNA, 22 nt, Human
uauuuggacaccaaguagaagu

SEQ ID NO: 888739 - RNA, 22 nt, Human
ggccagcuccuuggcagugccu

SEQ ID NO: 888740 - RNA, 22 nt, Human
aagcaacuaaggcaaggaaaug

SEQ ID NO: 888741 - RNA, 22 nt, Human
aaacuacaucucauggaugagg

SEQ ID NO: 888742 - RNA, 22 nt, Human
ucucuguaucccagaaccaaaa

SEQ ID NO: 888743 - RNA, 22 nt, Human
aggcaugugcuguuugucucca

SEQ ID NO: 888744 - RNA, 22 nt, Human
gagauuguuuagcuaccauggc

SEQ ID NO: 888745 - RNA, 22 nt, Human
gcugccacauuuucaggacuaa

SEQ ID NO: 888746 - RNA, 22 nt, Human
ggguccagagccucagcccaga

SEQ ID NO: 888747 - RNA, 22 nt, Human
gccugcagaacugugaggcaau

SEQ ID NO: 888748 - RNA, 22 nt, Human
uugggcaguagccucuuggugu

SEQ ID NO: 888749 - RNA, 22 nt, Human
gucaggagagaucaggacagca

SEQ ID NO: 888750 - RNA, 21 nt, Human
ucucuguauccauggguucca

SEQ ID NO: 888751 - RNA, 22 nt, Human
uacagcaaagaaacccucaguc

SEQ ID NO: 888752 - RNA, 22 nt, Human
ucagggccuuugcaguuguuuu

SEQ ID NO: 888753 - RNA, 17 nt, Human
auggcuuccauugacca

SEQ ID NO: 888754 - RNA, 22 nt, Human
cugagaaacauauuuccaucua

SEQ ID NO: 888755 - RNA, 22 nt, Human
uucugggcaccaccacagacuu

SEQ ID NO: 888756 - RNA, 22 nt, Human
guuauauugccaaguauauugu

SEQ ID NO: 888757 - RNA, 23 nt, Human
cagggcccugcucaauuucucca

SEQ ID NO: 888758 - RNA, 22 nt, Human
ggaauguucuggaacaccgcuu

SEQ ID NO: 888759 - RNA, 22 nt, Human
agcagcuggugcaacucuaaga

SEQ ID NO: 888760 - RNA, 22 nt, Human
caccagcuuugcccacugccca

SEQ ID NO: 888761 - RNA, 22 nt, Human
caacauuauauagccacaugcc

SEQ ID NO: 888762 - RNA, 21 nt, Human
uuccucugcaacugaugcuca

SEQ ID NO: 888763 - RNA, 22 nt, Human
cagggagucaacaaacagauca

SEQ ID NO: 888764 - RNA, 22 nt, Human
uagugauuccaaugugaagugg

SEQ ID NO: 888765 - RNA, 22 nt, Human
caguuuaugcagcuggaauaga

SEQ ID NO: 888766 - RNA, 22 nt, Human
ugccuuuuagugcucaauaaag

SEQ ID NO: 888767 - RNA, 22 nt, Human
aauuaugagguagauaucacau

SEQ ID NO: 888768 - RNA, 22 nt, Human
ucuucaugaccucuguguuuua

SEQ ID NO: 888769 - RNA, 22 nt, Human
aaaaguucauuagugagcuucu

SEQ ID NO: 888770 - RNA, 22 nt, Human
uugcugaucugugaaucagcca

SEQ ID NO: 888771 - RNA, 22 nt, Human
uaauuuuuccacguacacuggg

SEQ ID NO: 888772 - RNA, 22 nt, Human
uaacaugaaacuccaaauggua

SEQ ID NO: 888773 - RNA, 22 nt, Human
gggcuggaccgcgaccccugag

SEQ ID NO: 888774 - RNA, 21 nt, Human
ggaagcuguguccaugcuccu

SEQ ID NO: 888775 - RNA, 22 nt, Human
ugcauccuagggaaggcacuga

SEQ ID NO: 888776 - RNA, 22 nt, Human
aagcagcagcaggauuaaagag

SEQ ID NO: 888777 - RNA, 21 nt, Human
ugggagagggcucagcuaccc

SEQ ID NO: 888778 - RNA, 22 nt, Human
ggucugugaucuuauggauucu

SEQ ID NO: 888779 - RNA, 22 nt, Human
ccuggguggcugccugccuuuc

SEQ ID NO: 888780 - RNA, 22 nt, Human
gaaaccuauuuauaacuucuag

SEQ ID NO: 888781 - RNA, 22 nt, Human
acaacauuuaaggaggcacuga

SEQ ID NO: 888782 - RNA, 22 nt, Human
cuccagaggcccuaucccacua

SEQ ID NO: 888783 - RNA, 22 nt, Human
uggcccagcucagggugggcgg

SEQ ID NO: 888784 - RNA, 22 nt, Human
ccucacuggccagccaggggug

SEQ ID NO: 888785 - RNA, 22 nt, Human
aaagacauggaacuagagaugg

SEQ ID NO: 888786 - RNA, 22 nt, Human
aggagguggccugagcgugccc

SEQ ID NO: 888787 - RNA, 17 nt, Human
aggaagggcaaguuucu

SEQ ID NO: 888788 - RNA, 22 nt, Human
uaucuaauaaaucugauaagua

SEQ ID NO: 888789 - RNA, 18 nt, Human
auccauuuaaugccugga

SEQ ID NO: 888790 - RNA, 22 nt, Human
cagaugaggcaaccucauugcu

SEQ ID NO: 888791 - RNA, 22 nt, Human
uucuaaauuuuggaagaugcag

SEQ ID NO: 888792 - RNA, 22 nt, Human
aaggaagaagacucuuuacucc

SEQ ID NO: 888793 - RNA, 22 nt, Human
uuuauauaacagagacugcuau

SEQ ID NO: 888794 - RNA, 22 nt, Human
agugcccaccucucuucagcua

SEQ ID NO: 888795 - RNA, 22 nt, Human
ugcaggcuccaggugcacauau

SEQ ID NO: 888796 - RNA, 22 nt, Human
ccagcucuuggugcacuuacau

SEQ ID NO: 888797 - RNA, 22 nt, Human
ucaugcugugaacuguauacau

SEQ ID NO: 888798 - RNA, 22 nt, Human
aaaauagaugaaaggaagucug

SEQ ID NO: 888799 - RNA, 22 nt, Human
ugcaggugucuccagggcaggu

SEQ ID NO: 888800 - RNA, 17 nt, Human
agacuguacuguaaagc

SEQ ID NO: 888801 - RNA, 22 nt, Human
uauuucuaagcuguaagucuga

SEQ ID NO: 888802 - RNA, 22 nt, Human
cucuccagccacagaagcugcu

SEQ ID NO: 888803 - RNA, 22 nt, Human
ugcuuguucauggccuaguggc

SEQ ID NO: 888804 - RNA, 21 nt, Human
uuguguuuccccagucacuuu

SEQ ID NO: 888805 - RNA, 22 nt, Human
ccagccccgggaaccuggccgu

SEQ ID NO: 888806 - RNA, 18 nt, Human
gaugggagcaagagaaga

SEQ ID NO: 888807 - RNA, 22 nt, Human
gagcugugaaaagugccugggg

SEQ ID NO: 888808 - RNA, 20 nt, Human
agaaaucagcauguccucug

SEQ ID NO: 888809 - RNA, 22 nt, Human
aguccaaggagagacagcauuu

SEQ ID NO: 888810 - RNA, 22 nt, Human
ugacccugcuucuuggugcagg

SEQ ID NO: 888811 - RNA, 22 nt, Human
aaugaaguucuauucauuuucu

SEQ ID NO: 888812 - RNA, 22 nt, Human
agauucucgguccgggcagccc

SEQ ID NO: 888813 - RNA, 22 nt, Human
gcuuuugugagauuaagcuacu

SEQ ID NO: 888814 - RNA, 22 nt, Human
uggaagaagcuacaagcgguga

SEQ ID NO: 888815 - RNA, 22 nt, Human
aggccaaagcaagacccuguaa

SEQ ID NO: 888816 - RNA, 22 nt, Human
uguccuuuguucccugucucug

SEQ ID NO: 888817 - RNA, 22 nt, Human
auacaaugaaguauagaugaaa

SEQ ID NO: 888818 - RNA, 22 nt, Human
caaagcaaggcucaguuugaac

SEQ ID NO: 888819 - RNA, 22 nt, Human
uugaagcauuugcuauagcauu

SEQ ID NO: 888820 - RNA, 22 nt, Human
accacaguuucauucaugcagg

SEQ ID NO: 888821 - RNA, 22 nt, Human
ggaggccaauuuucuaacugca

SEQ ID NO: 888822 - RNA, 22 nt, Human
uucagagcucagaaaagugucu

SEQ ID NO: 888823 - RNA, 22 nt, Human
cuuccuuccuuccccgaaaugc

SEQ ID NO: 888824 - RNA, 22 nt, Human
augccagggucauccccugggu

SEQ ID NO: 888825 - RNA, 22 nt, Human
ucucuuccuugaccuauuguaa

SEQ ID NO: 888826 - RNA, 22 nt, Human
aagagcugauuaagucaugagg

SEQ ID NO: 888827 - RNA, 22 nt, Human
cagggcucugccuugagggaug

SEQ ID NO: 888828 - RNA, 22 nt, Human
ugagcaggagauaaacagguag

SEQ ID NO: 888829 - RNA, 22 nt, Human
ggccagcuucuggacaaagucc

SEQ ID NO: 888830 - RNA, 22 nt, Human
acagagccacuuuggugccuac

SEQ ID NO: 888831 - RNA, 21 nt, Human
gcagggaccgcgacuucuggg

SEQ ID NO: 888832 - RNA, 17 nt, Human
auuuguaacuagcucuu

SEQ ID NO: 888833 - RNA, 22 nt, Human
cagaauuuaaguggauuauucu

SEQ ID NO: 888834 - RNA, 22 nt, Human
gaauauguguuccuggacaaga

SEQ ID NO: 888835 - RNA, 22 nt, Human
ugaagcagagugaaggugaauu

SEQ ID NO: 888836 - RNA, 22 nt, Human
cagcagcaaaucuagaagagga

SEQ ID NO: 888837 - RNA, 22 nt, Human
uacugucuuuccauccuugccu

SEQ ID NO: 888838 - RNA, 22 nt, Human
gacaggaaaggggucuguuuuc

SEQ ID NO: 888839 - RNA, 22 nt, Human
cugcaaggcuggggugagcugg

SEQ ID NO: 888840 - RNA, 22 nt, Human
augguugaacuuaaagggaaug

SEQ ID NO: 888841 - RNA, 22 nt, Human
guuuccuuuuggaauuagagcu

SEQ ID NO: 888842 - RNA, 22 nt, Human
agggaagcugcuggguccaccu

SEQ ID NO: 888843 - RNA, 22 nt, Human
uccuucagccaugggcucucca

SEQ ID NO: 888844 - RNA, 22 nt, Human
gccagccccuuagggcucuccc

SEQ ID NO: 888845 - RNA, 22 nt, Human
aaacauucucagcccugcuugc

SEQ ID NO: 888846 - RNA, 22 nt, Human
uggccaagccacugcugggucu

SEQ ID NO: 888847 - RNA, 22 nt, Human
ccagggugaggaggcucccacg

SEQ ID NO: 888848 - RNA, 22 nt, Human
ucucaucugccauuugcaggag

SEQ ID NO: 888849 - RNA, 22 nt, Human
aacagauaauuucuaaguuacu

SEQ ID NO: 888850 - RNA, 22 nt, Human
uugcugugaaaccaugggaagu

SEQ ID NO: 888851 - RNA, 22 nt, Human
ccacagcaccugcagccaguug

SEQ ID NO: 888852 - RNA, 23 nt, Human
cucagcagccugcugcagauaag

SEQ ID NO: 888853 - RNA, 22 nt, Human
ggcugguggggaaagaggacca

SEQ ID NO: 888854 - RNA, 22 nt, Human
aagccagauuccuuaagcacag

SEQ ID NO: 888855 - RNA, 22 nt, Human
uuugcagggcugguaggaccac

SEQ ID NO: 888856 - RNA, 20 nt, Human
gccagaguuaugaugagagg

SEQ ID NO: 888857 - RNA, 22 nt, Human
ucaacacuggcuacaguuaugc

SEQ ID NO: 888858 - RNA, 19 nt, Human
ugcauguguucucccauug

SEQ ID NO: 888859 - RNA, 22 nt, Human
aagcauuugguucugaagacuc

SEQ ID NO: 888860 - RNA, 20 nt, Human
uaaacaguauuuacuaggag

SEQ ID NO: 888861 - RNA, 22 nt, Human
acagugugugggaaaugugacu

SEQ ID NO: 888862 - RNA, 22 nt, Human
gggcuggcgggaaaggcaauuc

SEQ ID NO: 888863 - RNA, 22 nt, Human
gucugggguccuuuuggcuuua

SEQ ID NO: 888864 - RNA, 22 nt, Human
uccuggguccauggcagccgaa

SEQ ID NO: 888865 - RNA, 22 nt, Human
agcugcuguggggcucggccug

SEQ ID NO: 888866 - RNA, 20 nt, Human
uguguagcaggugcugugcc

SEQ ID NO: 888867 - RNA, 22 nt, Human
gcaggguccauggaggcagccc

SEQ ID NO: 888868 - RNA, 22 nt, Human
cagugucaccaggcgagucucc

SEQ ID NO: 888869 - RNA, 22 nt, Human
acuauacauugaauguuaaggu

SEQ ID NO: 888870 - RNA, 22 nt, Human
auauagaauacacagggaaagu

SEQ ID NO: 888871 - RNA, 22 nt, Human
caucauuuguucacuugauucc

SEQ ID NO: 888872 - RNA, 22 nt, Human
uuucaagggaauaugaaauuca

SEQ ID NO: 888873 - RNA, 22 nt, Human
gcacacugcggugaugugaguc

SEQ ID NO: 888874 - RNA, 22 nt, Human
aagaaauggcuucaucugagua

SEQ ID NO: 888875 - RNA, 22 nt, Human
cugagcugucaggaauggaaag

SEQ ID NO: 888876 - RNA, 22 nt, Human
acucauguccuaggaguaaagc

SEQ ID NO: 888877 - RNA, 22 nt, Human
cugugcuucagagucagugcug

SEQ ID NO: 888878 - RNA, 22 nt, Human
aaguucguaggugagcugcugc

SEQ ID NO: 888879 - RNA, 22 nt, Human
cugccucuugacagaucguggc

SEQ ID NO: 888880 - RNA, 22 nt, Human
uaacaacuugcuuuuaucuuag

SEQ ID NO: 888881 - RNA, 22 nt, Human
gucagcaccucuuuggggagcu

SEQ ID NO: 888882 - RNA, 22 nt, Human
gcuuagaaguuccuauaaaaug

SEQ ID NO: 888883 - RNA, 22 nt, Human
ugcuauauaauggaauuucuaa

SEQ ID NO: 888884 - RNA, 22 nt, Human
cucuucaguuggucacuauucu

SEQ ID NO: 888885 - RNA, 22 nt, Human
ugcagagggacagccacagcuc

SEQ ID NO: 888886 - RNA, 22 nt, Human
gaaggcuaaaggggcagagguu

SEQ ID NO: 888887 - RNA, 22 nt, Human
agugaaaugauucugagcaaga

SEQ ID NO: 888888 - RNA, 22 nt, Human
agcaauguaaacccugaaguug

SEQ ID NO: 888889 - RNA, 22 nt, Human
ccuggaaaugcaaaagccauga

SEQ ID NO: 888890 - RNA, 22 nt, Human
ucaagcaaguguuugguguaaa

SEQ ID NO: 888891 - RNA, 22 nt, Human
uuugacagugaugauauauaca

SEQ ID NO: 888892 - RNA, 22 nt, Human
cacauucacuucucuguccacc

SEQ ID NO: 888893 - RNA, 22 nt, Human
ccagggugcucuguggcgucgc

SEQ ID NO: 888894 - RNA, 22 nt, Human
uucccagaauuguugggaacug

SEQ ID NO: 888895 - RNA, 22 nt, Human
ucucugucuuuguugucuucac

SEQ ID NO: 888896 - RNA, 22 nt, Human
guuucauuuacaucuguaggua

SEQ ID NO: 888897 - RNA, 22 nt, Human
agauacagcuuuuuugucaguc

SEQ ID NO: 888898 - RNA, 22 nt, Human
agcuucucaucuuccaaaauug

SEQ ID NO: 888899 - RNA, 22 nt, Human
ccagagcccgggaccuggacuu

SEQ ID NO: 888900 - RNA, 22 nt, Human
ugcauguguguauucagagacu

SEQ ID NO: 888901 - RNA, 22 nt, Human
uuagaaucagaagagagguauu

SEQ ID NO: 888902 - RNA, 22 nt, Human
agcaggcuuucaagagucuucu

SEQ ID NO: 888903 - RNA, 22 nt, Human
cccucccaggaguggccagaga

SEQ ID NO: 888904 - RNA, 22 nt, Human
gacaggcuuagggagggugcuc

SEQ ID NO: 888905 - RNA, 22 nt, Human
ucuguggaaauuuccugaggca

SEQ ID NO: 888906 - RNA, 22 nt, Human
ucuuaacauauuauuuuagcac

SEQ ID NO: 888907 - RNA, 22 nt, Human
uaggagaagagucagggccuaa

SEQ ID NO: 888908 - RNA, 20 nt, Human
ugcugaggccugaggccugg

SEQ ID NO: 888909 - RNA, 22 nt, Human
uauacagaacauuaagaacugu

SEQ ID NO: 888910 - RNA, 22 nt, Human
uggagagguugaauaacuuguc

SEQ ID NO: 888911 - RNA, 22 nt, Human
aagacagcauugcugagggcuu

SEQ ID NO: 888912 - RNA, 22 nt, Human
cugagccaguagucagggacaa

SEQ ID NO: 888913 - RNA, 22 nt, Human
uguuaugaguccucauauacua

SEQ ID NO: 888914 - RNA, 22 nt, Human
aaugcauuaaaguuagagacuu

SEQ ID NO: 888915 - RNA, 22 nt, Human
gcccugcuccuccgucccacga

SEQ ID NO: 888916 - RNA, 22 nt, Human
aaauguucugaaagacccgcuc

SEQ ID NO: 888917 - RNA, 22 nt, Human
uggcucuggugcgggcuccugc

SEQ ID NO: 888918 - RNA, 22 nt, Human
uucacagaugccugaugugugg

SEQ ID NO: 888919 - RNA, 22 nt, Human
uuccaacucugaaaugugaaau

SEQ ID NO: 888920 - RNA, 22 nt, Human
aucugcauuuacauugcuugua

SEQ ID NO: 888921 - RNA, 22 nt, Human
ugacugaggccugauaacaguu

SEQ ID NO: 888922 - RNA, 22 nt, Human
gugcugugugauccaugcuggc

SEQ ID NO: 888923 - RNA, 22 nt, Human
ugagggacugcauacccagcuu

SEQ ID NO: 888924 - RNA, 22 nt, Human
cuuuacauaaggauaaaccugg

SEQ ID NO: 888925 - RNA, 22 nt, Human
aagagcuggaguuugcagcccu

SEQ ID NO: 888926 - RNA, 22 nt, Human
guggcccaggcacccugaugac

SEQ ID NO: 888927 - RNA, 21 nt, Human
ucauuucagggccuuggcuuc

SEQ ID NO: 888928 - RNA, 22 nt, Human
cugccugcuucugagccagagg

SEQ ID NO: 888929 - RNA, 22 nt, Human
agcagcaucuucuguucuccgc

SEQ ID NO: 888930 - RNA, 22 nt, Human
auucuucaucagagaugcacua

SEQ ID NO: 888931 - RNA, 22 nt, Human
uguucuaaguguuuuguucaug

SEQ ID NO: 888932 - RNA, 22 nt, Human
ugaaauguaagcauagagguug

SEQ ID NO: 888933 - RNA, 22 nt, Human
cugggccuugcaucccagagcc

SEQ ID NO: 888934 - RNA, 22 nt, Human
uacuuacagagcuuauaaguua

SEQ ID NO: 888935 - RNA, 22 nt, Human
gcacaugaggcugucuuugucu

SEQ ID NO: 888936 - RNA, 20 nt, Human
uguugaauucauggugacuu

SEQ ID NO: 888937 - RNA, 22 nt, Human
uagagaaauaagcuuugccuug

SEQ ID NO: 888938 - RNA, 22 nt, Human
acuagaaagcacuaagcuaggc

SEQ ID NO: 888939 - RNA, 22 nt, Human
gagggucagaagggccugguuc

SEQ ID NO: 888940 - RNA, 22 nt, Human
uuccuuuucuuaugcaucauua

SEQ ID NO: 888941 - RNA, 22 nt, Human
auauuauuuucccuggaguugu

SEQ ID NO: 888942 - RNA, 20 nt, Human
ucaggcaguggggaaaggca

SEQ ID NO: 888943 - RNA, 22 nt, Human
caguuugucuugauucagaaca

SEQ ID NO: 888944 - RNA, 22 nt, Human
ugcugagagccagggcuggcau

SEQ ID NO: 888945 - RNA, 22 nt, Human
cuuugaauuccaguacaauaac

SEQ ID NO: 888946 - RNA, 22 nt, Human
agaaugcaucuaaaagcagaga

SEQ ID NO: 888947 - RNA, 22 nt, Human
aaauuauucucauguguuucuu

SEQ ID NO: 888948 - RNA, 22 nt, Human
augacaauacuucaauaagcug

SEQ ID NO: 888949 - RNA, 22 nt, Human
acuccacaccacgggggccgcc

SEQ ID NO: 888950 - RNA, 22 nt, Human
auuucucagggcugaggaggag

SEQ ID NO: 888951 - RNA, 22 nt, Human
ugagaagauugggcagagugga

SEQ ID NO: 888952 - RNA, 22 nt, Human
cagguccagucacuggucugca

SEQ ID NO: 888953 - RNA, 22 nt, Human
auucaagguauuuaaaacauaa

SEQ ID NO: 888954 - RNA, 22 nt, Human
uucuuucuuggggaacacacuc

SEQ ID NO: 888955 - RNA, 22 nt, Human
uagaggagaacacaaauuauag

SEQ ID NO: 888956 - RNA, 22 nt, Human
uuuagugagugugaaucaaaug

SEQ ID NO: 888957 - RNA, 22 nt, Human
cugcaaggucaugacucucugg

SEQ ID NO: 888958 - RNA, 21 nt, Human
acuggccaccacuggcagggg

SEQ ID NO: 888959 - RNA, 19 nt, Human
aagcugagggcuguccacc

SEQ ID NO: 888960 - RNA, 22 nt, Human
cuuaagauugucagcuucagcc

SEQ ID NO: 888961 - RNA, 22 nt, Human
guguacauagaauugugcuuug

SEQ ID NO: 888962 - RNA, 22 nt, Human
aagaacaugaagucacaaaugc

SEQ ID NO: 888963 - RNA, 22 nt, Human
ucucuacacaggauucacauga

SEQ ID NO: 888964 - RNA, 22 nt, Human
gcccugugagauuagaacagca

SEQ ID NO: 888965 - RNA, 22 nt, Human
ugcagcaggagccaggccuggu

SEQ ID NO: 888966 - RNA, 21 nt, Human
ccagcuguuccucguccgaug

SEQ ID NO: 888967 - RNA, 22 nt, Human
ggccaggccaagaggguuggaa

SEQ ID NO: 888968 - RNA, 22 nt, Human
uagaguccuucauucugugcag

SEQ ID NO: 888969 - RNA, 22 nt, Human
ucaagcaacagaacugugagac

SEQ ID NO: 888970 - RNA, 22 nt, Human
uacacuuauaacucugugugug

SEQ ID NO: 888971 - RNA, 22 nt, Human
uaagacacauuggaguagauga

SEQ ID NO: 888972 - RNA, 22 nt, Human
caauucaacuugccuuuguagc

SEQ ID NO: 888973 - RNA, 22 nt, Human
agcuagagaaugacagagucug

SEQ ID NO: 888974 - RNA, 20 nt, Human
acuuucucgguuucucaccu

SEQ ID NO: 888975 - RNA, 22 nt, Human
uauuuccuguggauacuuuuag

SEQ ID NO: 888976 - RNA, 20 nt, Human
agacacccccugacagggaa

SEQ ID NO: 888977 - RNA, 22 nt, Human
ugggggcugaguaagaugagau

SEQ ID NO: 888978 - RNA, 22 nt, Human
ucugugccaccucuccaguguc

SEQ ID NO: 888979 - RNA, 22 nt, Human
ggcucagauuccgaguggcccu

SEQ ID NO: 888980 - RNA, 22 nt, Human
aauuuugugugggaucaaagga

SEQ ID NO: 888981 - RNA, 22 nt, Human
uguuucaaagguuauacaguca

SEQ ID NO: 888982 - RNA, 22 nt, Human
ggccuguggcuuuggcgucuaa

SEQ ID NO: 888983 - RNA, 22 nt, Human
auuacacagcgguuacuacuag

SEQ ID NO: 888984 - RNA, 22 nt, Human
uccagggagauacuggcugcca

SEQ ID NO: 888985 - RNA, 22 nt, Human
ucagagccaaucauggugcauu

SEQ ID NO: 888986 - RNA, 22 nt, Human
ucagcaggcccauccuccaggc

SEQ ID NO: 888987 - RNA, 22 nt, Human
uugcuucauuuuaaauaaagac

SEQ ID NO: 888988 - RNA, 22 nt, Human
uaugaaauugccauuuuuaugg

SEQ ID NO: 888989 - RNA, 22 nt, Human
uuggcagaauuaaccacugaag

SEQ ID NO: 888990 - RNA, 22 nt, Human
uacaagagugagauuaucaugu

SEQ ID NO: 888991 - RNA, 22 nt, Human
ugugucugaacuaguugcucuc

SEQ ID NO: 888992 - RNA, 22 nt, Human
uugcauaugaagcugacuuaaa

SEQ ID NO: 888993 - RNA, 22 nt, Human
acuguccucgaaguaccugugc

SEQ ID NO: 888994 - RNA, 22 nt, Human
gguuuccaagugguugaaaagu

SEQ ID NO: 888995 - RNA, 19 nt, Human
acauauguggauauacaug

SEQ ID NO: 888996 - RNA, 22 nt, Human
ccaggcuuuaagagguggaaac

SEQ ID NO: 888997 - RNA, 22 nt, Human
uggccaguugaagacaaugcuc

SEQ ID NO: 888998 - RNA, 22 nt, Human
uacacagaggcagcugucugcu

SEQ ID NO: 888999 - RNA, 22 nt, Human
gagagugagauccuccugggga

SEQ ID NO: 889000 - RNA, 18 nt, Human
cggcagagugcuucuagc

SEQ ID NO: 889001 - RNA, 19 nt, Human
ugugucagcagggggcuuc

SEQ ID NO: 889002 - RNA, 22 nt, Human
ccccaggccuguuggauggcgc

SEQ ID NO: 889003 - RNA, 22 nt, Human
aauccauuuaccuuugcuugaa

SEQ ID NO: 889004 - RNA, 19 nt, Human
uuacagauguggaaauuga

SEQ ID NO: 889005 - RNA, 22 nt, Human
uggcucagaacuacuucuaguu

SEQ ID NO: 889006 - RNA, 22 nt, Human
ugggcucugcugcguaccaguu

SEQ ID NO: 889007 - RNA, 22 nt, Human
ugcucugguccucccucggcgc

SEQ ID NO: 889008 - RNA, 22 nt, Human
gccuucaguaguauccucauga

SEQ ID NO: 889009 - RNA, 20 nt, Human
caggcuccgcaggacuaggg

SEQ ID NO: 889010 - RNA, 22 nt, Human
cugaguucugcccaaggucugg

SEQ ID NO: 889011 - RNA, 22 nt, Human
aggcagagaaaaaccagauaug

SEQ ID NO: 889012 - RNA, 22 nt, Human
ucugacccguggcucugccucc

SEQ ID NO: 889013 - RNA, 22 nt, Human
uuuuauguuccugaagcuaucu

SEQ ID NO: 889014 - RNA, 22 nt, Human
cgcuggggcuuuuugcuugaga

SEQ ID NO: 889015 - RNA, 18 nt, Human
ugacucacccugucagug

SEQ ID NO: 889016 - RNA, 22 nt, Human
uaguucaaagucugucaaagga

SEQ ID NO: 889017 - RNA, 22 nt, Human
gugcugaauuggagaugcuccu

SEQ ID NO: 889018 - RNA, 22 nt, Human
cucuuguauuggaguuaguggg

SEQ ID NO: 889019 - RNA, 22 nt, Human
agcugcagcuacaguguugguu

SEQ ID NO: 889020 - RNA, 22 nt, Human
ucuagaauuugcguagguuaga

SEQ ID NO: 889021 - RNA, 22 nt, Human
cuuggagcaacacaugacaucu

SEQ ID NO: 889022 - RNA, 22 nt, Human
aagagaacagucaccaugcaca

SEQ ID NO: 889023 - RNA, 22 nt, Human
uagaacuugagaucaggucuuc

SEQ ID NO: 889024 - RNA, 22 nt, Human
gcugucugucucugugacuuaa

SEQ ID NO: 889025 - RNA, 22 nt, Human
ugcuccuggcuucagguugggc

SEQ ID NO: 889026 - RNA, 22 nt, Human
agucuguguacuggguuucugu

SEQ ID NO: 889027 - RNA, 22 nt, Human
ugguuucccauuaucugcagga

SEQ ID NO: 889028 - RNA, 22 nt, Human
gacuuugugccaaacgccagaa

SEQ ID NO: 889029 - RNA, 22 nt, Human
ugaagcuuuaggauggguucau

SEQ ID NO: 889030 - RNA, 22 nt, Human
auguguaugagugugcuucuuu

SEQ ID NO: 889031 - RNA, 22 nt, Human
uuaaggaaggagucuuaaaugg

SEQ ID NO: 889032 - RNA, 22 nt, Human
gaaaacauccagagauagaccu

SEQ ID NO: 889033 - RNA, 22 nt, Human
guuuccuggaaacugcuccacu

SEQ ID NO: 889034 - RNA, 19 nt, Human
agucacagaccuugucucc

SEQ ID NO: 889035 - RNA, 22 nt, Human
uugcacagaaugacaauaugua

SEQ ID NO: 889036 - RNA, 22 nt, Human
aacuuucuuugcaucuaaguuu

SEQ ID NO: 889037 - RNA, 22 nt, Human
caggccugugaguugaggcccc

SEQ ID NO: 889038 - RNA, 22 nt, Human
uggggacccggacuccuggguc

SEQ ID NO: 889039 - RNA, 22 nt, Human
cucaggaggugguagaggcccu

SEQ ID NO: 889040 - RNA, 17 nt, Human
agccagcaguagcuggu

SEQ ID NO: 889041 - RNA, 23 nt, Human
cccagaggagcagggcgugagau

SEQ ID NO: 889042 - RNA, 22 nt, Human
uucugccaaaggcuuuguuuug

SEQ ID NO: 889043 - RNA, 22 nt, Human
ucagauacuagcucucagccuc

SEQ ID NO: 889044 - RNA, 22 nt, Human
cuccucucaggcuggauggcgc

SEQ ID NO: 889045 - RNA, 22 nt, Human
uggcuucuuacuagggcucagu

SEQ ID NO: 889046 - RNA, 22 nt, Human
uguauaguugagucaaguuuca

SEQ ID NO: 889047 - RNA, 22 nt, Human
cuuucaugcacuucuuuagauc

SEQ ID NO: 889048 - RNA, 22 nt, Human
cuguguggccucaagccagccu

SEQ ID NO: 889049 - RNA, 22 nt, Human
aagagcugugggugguaguccu

SEQ ID NO: 889050 - RNA, 18 nt, Human
uggcagugccaccuucuc

SEQ ID NO: 889051 - RNA, 22 nt, Human
cauuuacauaacaguaacgcug

SEQ ID NO: 889052 - RNA, 22 nt, Human
auaaaaguuuccaaucaugccu

SEQ ID NO: 889053 - RNA, 22 nt, Human
agcuguccuggcucaggcugug

SEQ ID NO: 889054 - RNA, 22 nt, Human
ucugccuggauuccauucucca

SEQ ID NO: 889055 - RNA, 22 nt, Human
uuuaugcacacuuagacauggc

SEQ ID NO: 889056 - RNA, 22 nt, Human
agggcagcacaaggcauggacu

SEQ ID NO: 889057 - RNA, 19 nt, Human
ugcccugcacgcuguccug

SEQ ID NO: 889058 - RNA, 22 nt, Human
gucagcugggcaucugcagaug

SEQ ID NO: 889059 - RNA, 22 nt, Human
uacaguauagaauguguauuaa

SEQ ID NO: 889060 - RNA, 22 nt, Human
ggcugggcauccauccaugaga

SEQ ID NO: 889061 - RNA, 22 nt, Human
gcccaggaguugaaugcagcag

SEQ ID NO: 889062 - RNA, 22 nt, Human
cgaggcggcggaagugcccgua

SEQ ID NO: 889063 - RNA, 22 nt, Human
caucuucugggacuucucaguu

SEQ ID NO: 889064 - RNA, 22 nt, Human
acagccagaggugguccugggu

SEQ ID NO: 889065 - RNA, 22 nt, Human
uggcaguguauagguggcuccu

SEQ ID NO: 889066 - RNA, 22 nt, Human
gcagcuguggguuccaagucua

SEQ ID NO: 889067 - RNA, 22 nt, Human
uagggcugccuauggcuagaua

SEQ ID NO: 889068 - RNA, 22 nt, Human
ugcuuugcuuuggagagccagc

SEQ ID NO: 889069 - RNA, 22 nt, Human
gaccugaaagagauuaaaugac

SEQ ID NO: 889070 - RNA, 22 nt, Human
aucaguuauuuuuaagcuauaa

SEQ ID NO: 889071 - RNA, 22 nt, Human
uacaugcucaguaacuuucagu

SEQ ID NO: 889072 - RNA, 22 nt, Human
cauguguaugcauucauacaua

SEQ ID NO: 889073 - RNA, 22 nt, Human
aucuguaauuuugaaugcaaau

SEQ ID NO: 889074 - RNA, 22 nt, Human
uagguauaauauuuugaagaaa

SEQ ID NO: 889075 - RNA, 22 nt, Human
aggucaaagaaccuagcuauag

SEQ ID NO: 889076 - RNA, 22 nt, Human
cuuauucuacuccacaagcucu

SEQ ID NO: 889077 - RNA, 22 nt, Human
uacuagaaccucacaacaaucc

SEQ ID NO: 889078 - RNA, 22 nt, Human
uagacacaggggaaugugaggu

SEQ ID NO: 889079 - RNA, 22 nt, Human
gcaaagcagucuucugugccua

SEQ ID NO: 889080 - RNA, 22 nt, Human
agcagagccaggucucucugua

SEQ ID NO: 889081 - RNA, 22 nt, Human
ucuauaaagggccagauaguag

SEQ ID NO: 889082 - RNA, 21 nt, Human
ccuuagucuuccacauagucc

SEQ ID NO: 889083 - RNA, 22 nt, Human
ucaucugucaaauugcaauaag

SEQ ID NO: 889084 - RNA, 22 nt, Human
gacaggaaauauggggguuguu

SEQ ID NO: 889085 - RNA, 22 nt, Human
uaauuuaugguauguguguaau

SEQ ID NO: 889086 - RNA, 22 nt, Human
gugcauuuauauuugccuuugg

SEQ ID NO: 889087 - RNA, 22 nt, Human
acagccuguguaccagcuggga

SEQ ID NO: 889088 - RNA, 22 nt, Human
uauguacaguccuuaacuuaaa

SEQ ID NO: 889089 - RNA, 22 nt, Human
gugacagagauuaauagcuugg

SEQ ID NO: 889090 - RNA, 22 nt, Human
uccccagccgugaaggagagga

SEQ ID NO: 889091 - RNA, 22 nt, Human
uaugucaacugugcugguuaau

SEQ ID NO: 889092 - RNA, 22 nt, Human
ccacaugaugaggaagcugaac

SEQ ID NO: 889093 - RNA, 22 nt, Human
ucauacauucagcagauauuug

SEQ ID NO: 889094 - RNA, 22 nt, Human
uggaagugcucuucugaccaac

SEQ ID NO: 889095 - RNA, 22 nt, Human
gggggaagacugggcuagugau

SEQ ID NO: 889096 - RNA, 22 nt, Human
augcuuuauacaaaacacuuaa

SEQ ID NO: 889097 - RNA, 22 nt, Human
ucugaaagaaagauuuuguuuc

SEQ ID NO: 889098 - RNA, 22 nt, Human
ggcuuuaguguagguuucuguu

SEQ ID NO: 889099 - RNA, 22 nt, Human
guuuggggucugcagagcggcg

SEQ ID NO: 889100 - RNA, 22 nt, Human
agccagcacggcgccauggagu

SEQ ID NO: 889101 - RNA, 22 nt, Human
cagagcccugugugccauguga

SEQ ID NO: 889102 - RNA, 22 nt, Human
aagcauaacuugcugcacauag

SEQ ID NO: 889103 - RNA, 22 nt, Human
aagaccauaauguaagaugaau

SEQ ID NO: 889104 - RNA, 22 nt, Human
cugggugaguugaugaaggaga

SEQ ID NO: 889105 - RNA, 22 nt, Human
gcagcugucacuuucacaaugc

SEQ ID NO: 889106 - RNA, 22 nt, Human
ucccagccggugccuggguccc

SEQ ID NO: 889107 - RNA, 22 nt, Human
cccaagggguguugauggagga

SEQ ID NO: 889108 - RNA, 22 nt, Human
ggagauggccaaaaacacaaau

SEQ ID NO: 889109 - RNA, 23 nt, Human
gagaaaccucgguaagcaggagg

SEQ ID NO: 889110 - RNA, 22 nt, Human
caaacauuuaggaggagggagg

SEQ ID NO: 889111 - RNA, 22 nt, Human
agauuuccaucuuuuucaugug

SEQ ID NO: 889112 - RNA, 22 nt, Human
uguauacaagucguguaaacuu

SEQ ID NO: 889113 - RNA, 22 nt, Human
uccagccuuucuacucacugag

SEQ ID NO: 889114 - RNA, 22 nt, Human
cuaggaccacuguaacaaagua

SEQ ID NO: 889115 - RNA, 22 nt, Human
uuaacauuaaaagcagcauuuu

SEQ ID NO: 889116 - RNA, 22 nt, Human
cagaagaugcagugucugagaa

SEQ ID NO: 889117 - RNA, 22 nt, Human
agcuuugcuucuuuuccauagc

SEQ ID NO: 889118 - RNA, 22 nt, Human
gcggcccgagcaggacgggugg

SEQ ID NO: 889119 - RNA, 22 nt, Human
uuuugcugggguggcuagcuua

SEQ ID NO: 889120 - RNA, 22 nt, Human
caggugggagcgaggagcuacu

SEQ ID NO: 889121 - RNA, 22 nt, Human
agcacagggcccagccuaggcc

SEQ ID NO: 889122 - RNA, 22 nt, Human
agcuccaggauaagacaggugc

SEQ ID NO: 889123 - RNA, 22 nt, Human
guuuccaggcugggcagcgagc

SEQ ID NO: 889124 - RNA, 22 nt, Human
uucaguguggugcacaguuuug

SEQ ID NO: 889125 - RNA, 20 nt, Human
uuugcuaugcauaucugacc

SEQ ID NO: 889126 - RNA, 22 nt, Human
uuaaaacugcaaauccuacuga

SEQ ID NO: 889127 - RNA, 22 nt, Human
ccugucacucugagccgcuccg

SEQ ID NO: 889128 - RNA, 22 nt, Human
auccuuaagaaaguuuucuaua

SEQ ID NO: 889129 - RNA, 22 nt, Human
uccuccaggucuaggguggcuu

SEQ ID NO: 889130 - RNA, 22 nt, Human
auucugggucugggugugauca

SEQ ID NO: 889131 - RNA, 22 nt, Human
gacaggaagucugaaggaggga

SEQ ID NO: 889132 - RNA, 22 nt, Human
auaauaauacugugcaauggau

SEQ ID NO: 889133 - RNA, 22 nt, Human
ggcccugaagugauugugaguu

SEQ ID NO: 889134 - RNA, 22 nt, Human
aggcugggaaauguauuccagc

SEQ ID NO: 889135 - RNA, 22 nt, Human
gugcguccugggggcugggucg

SEQ ID NO: 889136 - RNA, 22 nt, Human
aggcuggaucucuguugccuuc

SEQ ID NO: 889137 - RNA, 22 nt, Human
guggcagguuccguagacagca

SEQ ID NO: 889138 - RNA, 22 nt, Human
gaagguuugauccuuauuuaua

SEQ ID NO: 889139 - RNA, 22 nt, Human
aaaagcaaggcagucugucuga

SEQ ID NO: 889140 - RNA, 22 nt, Human
aggcuucgcaagguuagagcug

SEQ ID NO: 889141 - RNA, 22 nt, Human
uccugggaggcugugccuggcu

SEQ ID NO: 889142 - RNA, 22 nt, Human
cccaggucugugccagcucuga

SEQ ID NO: 889143 - RNA, 22 nt, Human
agccagaggccagccugccuca

SEQ ID NO: 889144 - RNA, 23 nt, Human
cagaccuggcagucauccucaac

SEQ ID NO: 889145 - RNA, 22 nt, Human
ccacauucaccagcugcacgac

SEQ ID NO: 889146 - RNA, 22 nt, Human
ucaggaagaagacggggcagga

SEQ ID NO: 889147 - RNA, 22 nt, Human
ugagaaaugggucugcugaaga

SEQ ID NO: 889148 - RNA, 22 nt, Human
uaucauuguguuauuucuucca

SEQ ID NO: 889149 - RNA, 22 nt, Human
gagaagggauauggcuucuuga

SEQ ID NO: 889150 - RNA, 22 nt, Human
ccugugccugccugugaguucu

SEQ ID NO: 889151 - RNA, 22 nt, Human
uaauuagaguuugguaaacaau

SEQ ID NO: 889152 - RNA, 22 nt, Human
uggugcugccucagaugccuua

SEQ ID NO: 889153 - RNA, 22 nt, Human
ugaagccugaaagcuggacagg

SEQ ID NO: 889154 - RNA, 22 nt, Human
uuuccauauuuggucuuuggga

SEQ ID NO: 889155 - RNA, 22 nt, Human
ucccaaauauaaugcaagagac

SEQ ID NO: 889156 - RNA, 22 nt, Human
acugugcuuucucuggaggcau

SEQ ID NO: 889157 - RNA, 22 nt, Human
aggcaggugcuuaugacuugcu

SEQ ID NO: 889158 - RNA, 22 nt, Human
aggaccuuuggcaaggcugcuc

SEQ ID NO: 889159 - RNA, 22 nt, Human
auagaagcugauaaacuacuuc

SEQ ID NO: 889160 - RNA, 22 nt, Human
cccucucucgguugcugugguu

SEQ ID NO: 889161 - RNA, 22 nt, Human
cagguguugucuaaagcuucag

SEQ ID NO: 889162 - RNA, 19 nt, Human
cauggcugcugcuugggag

SEQ ID NO: 889163 - RNA, 22 nt, Human
ucucaucuagacucugcccuug

SEQ ID NO: 889164 - RNA, 22 nt, Human
ucagccucauuuucugcucugu

SEQ ID NO: 889165 - RNA, 22 nt, Human
aaaaugcucaucagcgauggcu

SEQ ID NO: 889166 - RNA, 22 nt, Human
uaaaugcaagggaaaggcaaga

SEQ ID NO: 889167 - RNA, 22 nt, Human
ucaggcaggaagccccugcaca

SEQ ID NO: 889168 - RNA, 22 nt, Human
cagcagaguaggugcuacuucu

SEQ ID NO: 889169 - RNA, 22 nt, Human
guagcagcuucagcccaaauua

SEQ ID NO: 889170 - RNA, 22 nt, Human
uauacauguuuuacauaaguga

SEQ ID NO: 889171 - RNA, 19 nt, Human
ggcaaauugaggccaguca

SEQ ID NO: 889172 - RNA, 22 nt, Human
caugucacaauucuuaauggga

SEQ ID NO: 889173 - RNA, 22 nt, Human
cugugucucguuaaagcauugg

SEQ ID NO: 889174 - RNA, 22 nt, Human
aucaaagaaugugacugaaaua

SEQ ID NO: 889175 - RNA, 22 nt, Human
agcagagcugcaguggccugcu

SEQ ID NO: 889176 - RNA, 22 nt, Human
ccuggaagagcugaaucaggca

SEQ ID NO: 889177 - RNA, 22 nt, Human
ucugcagcuugcacaggcaggc

SEQ ID NO: 889178 - RNA, 22 nt, Human
acccuggagcuuuucuggcccu

SEQ ID NO: 889179 - RNA, 20 nt, Human
ugggcugaggaucaggugcc

SEQ ID NO: 889180 - RNA, 22 nt, Human
uguuugaaguucuucugugacu

SEQ ID NO: 889181 - RNA, 22 nt, Human
gcugcucugaaaaugacuguug

SEQ ID NO: 889182 - RNA, 20 nt, Human
acauguacagacagguuucu

SEQ ID NO: 889183 - RNA, 22 nt, Human
aaguaaaacacacaguccaccg

SEQ ID NO: 889184 - RNA, 22 nt, Human
aaguuuguuuuagucuaaugau

SEQ ID NO: 889185 - RNA, 22 nt, Human
aagccaguguccagaaugggca

SEQ ID NO: 889186 - RNA, 22 nt, Human
agcagugugcuucguuucauga

SEQ ID NO: 889187 - RNA, 22 nt, Human
aaauccuuuucuauacagcaua

SEQ ID NO: 889188 - RNA, 22 nt, Human
acuucaaacaauuaacagagaa

SEQ ID NO: 889189 - RNA, 22 nt, Human
aaaguacaauauugagauugau

SEQ ID NO: 889190 - RNA, 22 nt, Human
ucccagagaagagcuggaugga

SEQ ID NO: 889191 - RNA, 22 nt, Human
ugcuucaaaaggcagcuuaaug

SEQ ID NO: 889192 - RNA, 22 nt, Human
cugcgugucucugucucauggc

SEQ ID NO: 889193 - RNA, 22 nt, Human
ugcuggcuuuagugauuggggu

SEQ ID NO: 889194 - RNA, 22 nt, Human
aacacauagacguuugauauca

SEQ ID NO: 889195 - RNA, 22 nt, Human
ucuucaaaugaguguggauuau

SEQ ID NO: 889196 - RNA, 22 nt, Human
acuuuuuuauaaggaagaagau

SEQ ID NO: 889197 - RNA, 22 nt, Human
ggcagauggagaagcagcaggu

SEQ ID NO: 889198 - RNA, 23 nt, Human
aguuuuuaauggucauagcugag

SEQ ID NO: 889199 - RNA, 22 nt, Human
ucauugaggaaagguaguggcu

SEQ ID NO: 889200 - RNA, 22 nt, Human
ugcuauuugggggcuacaugau

SEQ ID NO: 889201 - RNA, 22 nt, Human
agcagugggggaguguuaguuu

SEQ ID NO: 889202 - RNA, 22 nt, Human
aaaguccaggggcuggaggcgg

SEQ ID NO: 889203 - RNA, 21 nt, Human
uguucaaacguacacauuucu

SEQ ID NO: 889204 - RNA, 22 nt, Human
caggccuugcgucccauggccu

SEQ ID NO: 889205 - RNA, 22 nt, Human
uacauugauucaggauauaggc

SEQ ID NO: 889206 - RNA, 22 nt, Human
auagacauggucuuuugucauu

SEQ ID NO: 889207 - RNA, 22 nt, Human
agcugggaagaguuuucugcag

SEQ ID NO: 889208 - RNA, 22 nt, Human
uuuuccuuuggaagaugcauau

SEQ ID NO: 889209 - RNA, 22 nt, Human
gcugccugguuucucagcugca

SEQ ID NO: 889210 - RNA, 22 nt, Human
aagccaguccucuacugggcac

SEQ ID NO: 889211 - RNA, 22 nt, Human
cccccaggggcuccgccucgug

SEQ ID NO: 889212 - RNA, 22 nt, Human
agcaggugggcaugaaagcuga

SEQ ID NO: 889213 - RNA, 20 nt, Human
ggcaggcuuuauauggaggg

SEQ ID NO: 889214 - RNA, 22 nt, Human
ucagaccuugucgucacuuaga

SEQ ID NO: 889215 - RNA, 20 nt, Human
aggccugagagaugacuggg

SEQ ID NO: 889216 - RNA, 19 nt, Human
caucuuggaguacuccuuu

SEQ ID NO: 889217 - RNA, 22 nt, Human
cuuguauacagagaaggcucau

SEQ ID NO: 889218 - RNA, 22 nt, Human
ccaggaagccuuuuucuuugac

SEQ ID NO: 889219 - RNA, 22 nt, Human
ucaaacuguucagaacuccuuu

SEQ ID NO: 889220 - RNA, 22 nt, Human
aaguuuguucagggcuuacauu

SEQ ID NO: 889221 - RNA, 22 nt, Human
gcccugucccuuggcuucuagg

SEQ ID NO: 889222 - RNA, 22 nt, Human
uaagacaccucucugcccuuca

SEQ ID NO: 889223 - RNA, 22 nt, Human
cauuucaaugccuucaacauag

SEQ ID NO: 889224 - RNA, 22 nt, Human
cugucguguucacuguggccua

SEQ ID NO: 889225 - RNA, 22 nt, Human
uguauguauacacugaucauca

SEQ ID NO: 889226 - RNA, 22 nt, Human
ucagaggagaccaaggggaaua

SEQ ID NO: 889227 - RNA, 22 nt, Human
ggcaguggaggacccugugucu

SEQ ID NO: 889228 - RNA, 22 nt, Human
gucuuuuucuacgauagcgccu

SEQ ID NO: 889229 - RNA, 22 nt, Human
cuggggcccgagccuugggcca

SEQ ID NO: 889230 - RNA, 22 nt, Human
gucuccugcuagcaagcaccac

SEQ ID NO: 889231 - RNA, 22 nt, Human
uaggguacaugugcacaacaug

SEQ ID NO: 889232 - RNA, 22 nt, Human
uccagcagugcucaggacucac

SEQ ID NO: 889233 - RNA, 22 nt, Human
uucauacaaugggauauuauga

SEQ ID NO: 889234 - RNA, 19 nt, Human
gggcauggaugagcuuacc

SEQ ID NO: 889235 - RNA, 22 nt, Human
ggaggcagaacuucccgucagu

SEQ ID NO: 889236 - RNA, 22 nt, Human
gggcuggcugauuuuccucucu

SEQ ID NO: 889237 - RNA, 22 nt, Human
cagugcuagggcagagcacucc

SEQ ID NO: 889238 - RNA, 22 nt, Human
cagggguauucaagguaguuua

SEQ ID NO: 889239 - RNA, 22 nt, Human
cagaggaagcuggguguggagu

SEQ ID NO: 889240 - RNA, 22 nt, Human
gggugaggcccauuugaggcca

SEQ ID NO: 889241 - RNA, 23 nt, Human
cucuccugaaggacaagcugccg

SEQ ID NO: 889242 - RNA, 22 nt, Human
gaaccuguaaguauagaugugg

SEQ ID NO: 889243 - RNA, 22 nt, Human
gagagggccagggugagaacua

SEQ ID NO: 889244 - RNA, 22 nt, Human
agauggagaccuuggaugaacu

SEQ ID NO: 889245 - RNA, 19 nt, Human
uuacacuccugggcagugg

SEQ ID NO: 889246 - RNA, 21 nt, Human
ccagcccagccuccuucucuu

SEQ ID NO: 889247 - RNA, 23 nt, Human
ugaggaccucucaggggccaggc

SEQ ID NO: 889248 - RNA, 22 nt, Human
gcuggcccagugacccacagug

SEQ ID NO: 889249 - RNA, 22 nt, Human
cucucucaguguaauacaggau

SEQ ID NO: 889250 - RNA, 19 nt, Human
agcugccugugcgcgcccg

SEQ ID NO: 889251 - RNA, 22 nt, Human
gccccaggggaggugcccugca

SEQ ID NO: 889252 - RNA, 20 nt, Human
cccagcccgggccgcgcucg

SEQ ID NO: 889253 - RNA, 22 nt, Human
gaccucugaaggcagagcaggg

SEQ ID NO: 889254 - RNA, 23 nt, Human
uuugcaaauuggacacaaccaca

SEQ ID NO: 889255 - RNA, 19 nt, Human
acaagucacuuacuuagua

SEQ ID NO: 889256 - RNA, 22 nt, Human
aggucagaaaaggagagcauug

SEQ ID NO: 889257 - RNA, 22 nt, Human
gguaguacauggaagaguacac

SEQ ID NO: 889258 - RNA, 19 nt, Human
cagaacagaggucauggcc

SEQ ID NO: 889259 - RNA, 22 nt, Human
uccagggccugagguugaagug

SEQ ID NO: 889260 - RNA, 22 nt, Human
agacauuuugcauucccugaag

SEQ ID NO: 889261 - RNA, 22 nt, Human
ugucagcaagacaucagaguga

SEQ ID NO: 889262 - RNA, 22 nt, Human
cagcugcccaagccccagaugu

SEQ ID NO: 889263 - RNA, 20 nt, Human
uuuagcaaaagggacugcuc

SEQ ID NO: 889264 - RNA, 22 nt, Human
acacaucuuagacugaaauaug

SEQ ID NO: 889265 - RNA, 22 nt, Human
cucccugaccuggauuccaggc

SEQ ID NO: 889266 - RNA, 22 nt, Human
auuagaaugaaguauaggauuu

SEQ ID NO: 889267 - RNA, 22 nt, Human
uccugggucucuuccuuaguuc

SEQ ID NO: 889268 - RNA, 22 nt, Human
gcccugaacgaggggucuggag

SEQ ID NO: 889269 - RNA, 22 nt, Human
acuugacaccuaauuagucauc

SEQ ID NO: 889270 - RNA, 22 nt, Human
cuuucaaucaaaguuucuagug

SEQ ID NO: 889271 - RNA, 22 nt, Human
cugccuguuccugaucauucua

SEQ ID NO: 889272 - RNA, 22 nt, Human
aaucuucaacagaaugguagga

SEQ ID NO: 889273 - RNA, 22 nt, Human
cuuuuguucuacagcuggggaa

SEQ ID NO: 889274 - RNA, 22 nt, Human
accagagaugucuaauaggggc

SEQ ID NO: 889275 - RNA, 22 nt, Human
auuggucuaggcuuuaaaaaga

SEQ ID NO: 889276 - RNA, 22 nt, Human
ucuauuuucuugccaaaacugc

SEQ ID NO: 889277 - RNA, 22 nt, Human
uggcaaccgcauggccugcuuc

SEQ ID NO: 889278 - RNA, 22 nt, Human
ccugggcucaagugauccuccu

SEQ ID NO: 889279 - RNA, 22 nt, Human
ccuucuuaaacaucauuuuggc

SEQ ID NO: 889280 - RNA, 22 nt, Human
ucuuaacugacaguuuaauggg

SEQ ID NO: 889281 - RNA, 20 nt, Human
ccaggacugcuggggacucu

SEQ ID NO: 889282 - RNA, 22 nt, Human
uuucaauuuccaggcuagaauu

SEQ ID NO: 889283 - RNA, 22 nt, Human
ucuuuaagggauguucugcuuu

SEQ ID NO: 889284 - RNA, 22 nt, Human
ucagagcacuggugcuaccuug

SEQ ID NO: 889285 - RNA, 22 nt, Human
caaaguucucggcucaaguccu

SEQ ID NO: 889286 - RNA, 18 nt, Human
ggccuuaguaugugccuu

SEQ ID NO: 889287 - RNA, 22 nt, Human
cagaaggcaaacaaaaggauuu

SEQ ID NO: 889288 - RNA, 22 nt, Human
acuuugcagguacaugagcauc

SEQ ID NO: 889289 - RNA, 22 nt, Human
ugugucagaaguacuuuuggaa

SEQ ID NO: 889290 - RNA, 22 nt, Human
guauccaugggggauugguucc

SEQ ID NO: 889291 - RNA, 22 nt, Human
cccucagcuccacccucagcag

SEQ ID NO: 889292 - RNA, 22 nt, Human
agacaaugucaaggugaucauc

SEQ ID NO: 889293 - RNA, 22 nt, Human
uuucucuauuaggggcuagcuu

SEQ ID NO: 889294 - RNA, 22 nt, Human
aaggcuagagagguauucaagu

SEQ ID NO: 889295 - RNA, 22 nt, Human
ggcugagcguggcugccguggg

SEQ ID NO: 889296 - RNA, 22 nt, Human
caggaugagaggcccagggaag

SEQ ID NO: 889297 - RNA, 22 nt, Human
aagaugccuguagcaggaagau

SEQ ID NO: 889298 - RNA, 22 nt, Human
uguauaagccuagugaaauuuc

SEQ ID NO: 889299 - RNA, 22 nt, Human
ucugggaacacacgucacuuca

SEQ ID NO: 889300 - RNA, 22 nt, Human
aauguuauuucugcauaguagu

SEQ ID NO: 889301 - RNA, 22 nt, Human
gugucacaugguuuacugcagc

SEQ ID NO: 889302 - RNA, 22 nt, Human
uuggaaacuuggauggaaaacc

SEQ ID NO: 889303 - RNA, 22 nt, Human
cugggacucagaccaguucugu

SEQ ID NO: 889304 - RNA, 22 nt, Human
ggaggcucuccuggccuugucu

SEQ ID NO: 889305 - RNA, 22 nt, Human
uuucuacaugucaauccaaacc

SEQ ID NO: 889306 - RNA, 22 nt, Human
ugaggcagggagaguggauaug

SEQ ID NO: 889307 - RNA, 22 nt, Human
uuauuguuagugagacuguaga

SEQ ID NO: 889308 - RNA, 22 nt, Human
uuucacaaguuucaggauucug

SEQ ID NO: 889309 - RNA, 22 nt, Human
auggcuugcuuuuagagagauc

SEQ ID NO: 889310 - RNA, 22 nt, Human
auuuuucagcuucauugaggca

SEQ ID NO: 889311 - RNA, 22 nt, Human
gaggccagggaugcaaugagag

SEQ ID NO: 889312 - RNA, 22 nt, Human
gaggugugcugcggcccggugc

SEQ ID NO: 889313 - RNA, 22 nt, Human
cgcagcugcugcucugaaacag

SEQ ID NO: 889314 - RNA, 22 nt, Human
gaauuaguguugaaaucagggc

SEQ ID NO: 889315 - RNA, 22 nt, Human
uagugccaucuugagcugcuuu

SEQ ID NO: 889316 - RNA, 22 nt, Human
gacucccaagcuuggaggaagg

SEQ ID NO: 889317 - RNA, 22 nt, Human
uggcccaggucucucugagccc

SEQ ID NO: 889318 - RNA, 22 nt, Human
acucucugugauggaggccagc

SEQ ID NO: 889319 - RNA, 22 nt, Human
aguugggaguuauagacucuau

SEQ ID NO: 889320 - RNA, 22 nt, Human
cagaggcuggcggccgccccga

SEQ ID NO: 889321 - RNA, 22 nt, Human
cuggugggaggcaagguggaag

SEQ ID NO: 889322 - RNA, 22 nt, Human
uccugugaccagcuuccaugcu

SEQ ID NO: 889323 - RNA, 20 nt, Human
gacuucaauuucuaucuuuu

SEQ ID NO: 889324 - RNA, 21 nt, Human
ucaggcaggucccacugaaca

SEQ ID NO: 889325 - RNA, 22 nt, Human
gaacuuugcgcaguucccgggg

SEQ ID NO: 889326 - RNA, 22 nt, Human
cuucuuuucauggcuugggaag

SEQ ID NO: 889327 - RNA, 22 nt, Human
uucacugcagcccaugaaggga

SEQ ID NO: 889328 - RNA, 22 nt, Human
uaucauuauacagacguauaca

SEQ ID NO: 889329 - RNA, 22 nt, Human
auuauuugacuugagaacaggu

SEQ ID NO: 889330 - RNA, 22 nt, Human
agaggggaaggaugugauguga

SEQ ID NO: 889331 - RNA, 22 nt, Human
ugauucaucagaauaggaguuu

SEQ ID NO: 889332 - RNA, 22 nt, Human
cagggcagaacauauagauagu

SEQ ID NO: 889333 - RNA, 22 nt, Human
acuccagguuuucucucaaguu

SEQ ID NO: 889334 - RNA, 22 nt, Human
uacagggacucccgcagagaua

SEQ ID NO: 889335 - RNA, 22 nt, Human
cucugacagccuucauuaugca

SEQ ID NO: 889336 - RNA, 22 nt, Human
gguuuaaaagccaugcaugggg

SEQ ID NO: 889337 - RNA, 22 nt, Human
gugcccuggagggguugaaggg

SEQ ID NO: 889338 - RNA, 22 nt, Human
aaagcagccacagagagagcgu

SEQ ID NO: 889339 - RNA, 22 nt, Human
aagagucccaaaaugauucuua

SEQ ID NO: 889340 - RNA, 22 nt, Human
ugcugcagggaagucggggggu

SEQ ID NO: 889341 - RNA, 22 nt, Human
aagagugaguauuuccugauua

SEQ ID NO: 889342 - RNA, 22 nt, Human
uggguaggaaucgaguguaugg

SEQ ID NO: 889343 - RNA, 22 nt, Human
aggcucuggcaacagcuggugu

SEQ ID NO: 889344 - RNA, 22 nt, Human
uucuguccaggcgcccagcuau

SEQ ID NO: 889345 - RNA, 22 nt, Human
ugcaauaaggaguaauaguaaa

SEQ ID NO: 889346 - RNA, 22 nt, Human
ucugagagcuguagaagccuau

SEQ ID NO: 889347 - RNA, 22 nt, Human
uuggaacuggaggaacaugcua

SEQ ID NO: 889348 - RNA, 22 nt, Human
caaaggaaauacuaaucuggaa

SEQ ID NO: 889349 - RNA, 22 nt, Human
guuccaaauuuggaucuuuagg

SEQ ID NO: 889350 - RNA, 22 nt, Human
ccggcgggcgcggugacgucag

SEQ ID NO: 889351 - RNA, 19 nt, Human
cagauguuuucaguucauu

SEQ ID NO: 889352 - RNA, 22 nt, Human
uaaguaguuccauccaaacagc

SEQ ID NO: 889353 - RNA, 22 nt, Human
cugaaguuuaugcuuuucgggu

SEQ ID NO: 889354 - RNA, 18 nt, Human
auugucagaagucaugug

SEQ ID NO: 889355 - RNA, 22 nt, Human
ucuuccuucuuugaugacaagg

SEQ ID NO: 889356 - RNA, 22 nt, Human
uuuggcauagcucuuuguuccu

SEQ ID NO: 889357 - RNA, 22 nt, Human
ugcucuagcucauaggacucau

SEQ ID NO: 889358 - RNA, 22 nt, Human
aagcuggacucugccauuuacu

SEQ ID NO: 889359 - RNA, 20 nt, Human
augcaucugguaucuuuccu

SEQ ID NO: 889360 - RNA, 22 nt, Human
guccaaauuuuucacauguaga

SEQ ID NO: 889361 - RNA, 22 nt, Human
acuucuguccuccaagccacgu

SEQ ID NO: 889362 - RNA, 22 nt, Human
uuucaaaccuacuuguauguuu

SEQ ID NO: 889363 - RNA, 22 nt, Human
ggugggacagguaggaguggcu

SEQ ID NO: 889364 - RNA, 22 nt, Human
uuucagugaaagcuacuguuag

SEQ ID NO: 889365 - RNA, 22 nt, Human
uucuagacuucaggcauucucc

SEQ ID NO: 889366 - RNA, 22 nt, Human
ccaggcagcucugauuuauguc

SEQ ID NO: 889367 - RNA, 20 nt, Human
auuauucauacaugugugac

SEQ ID NO: 889368 - RNA, 23 nt, Human
ucccuggaggcagguccagggcc

SEQ ID NO: 889369 - RNA, 22 nt, Human
ggcagcuuugcccucacugucc

SEQ ID NO: 889370 - RNA, 22 nt, Human
uuucacagcauauagguguacu

SEQ ID NO: 889371 - RNA, 22 nt, Human
auuaggcauuauggggauaagg

SEQ ID NO: 889372 - RNA, 22 nt, Human
cugggccuuggauugacacugu

SEQ ID NO: 889373 - RNA, 22 nt, Human
aagcugcccucauucccagugc

SEQ ID NO: 889374 - RNA, 22 nt, Human
uguggcuuuugcuagcuuugca

SEQ ID NO: 889375 - RNA, 22 nt, Human
augagguaauacuuucaguccu

SEQ ID NO: 889376 - RNA, 22 nt, Human
gagcuggcagugguagacaugg

SEQ ID NO: 889377 - RNA, 22 nt, Human
uguguucaguaugacauucaca

SEQ ID NO: 889378 - RNA, 22 nt, Human
uuuaaucaggcaaagcauaaua

SEQ ID NO: 889379 - RNA, 22 nt, Human
auggcacacaggucugcaaggg

SEQ ID NO: 889380 - RNA, 22 nt, Human
uggcauuucaguauuuucauaa

SEQ ID NO: 889381 - RNA, 22 nt, Human
auuuaugacuggugaauagaac

SEQ ID NO: 889382 - RNA, 22 nt, Human
uucugcaugauauuaaauguaa

SEQ ID NO: 889383 - RNA, 22 nt, Human
acaugcauacaagcacauguag

SEQ ID NO: 889384 - RNA, 22 nt, Human
augcaagauucagcaggaagau

SEQ ID NO: 889385 - RNA, 22 nt, Human
gggacccugggaggcuggcgca

SEQ ID NO: 889386 - RNA, 22 nt, Human
auucuuuggacaauaaguggug

SEQ ID NO: 889387 - RNA, 22 nt, Human
ucagaacauggcauguuccauc

SEQ ID NO: 889388 - RNA, 22 nt, Human
gccaugggcaaaugcagagcug

SEQ ID NO: 889389 - RNA, 22 nt, Human
gcagagccuugcgucaugugcc

SEQ ID NO: 889390 - RNA, 22 nt, Human
uuuucacauugucccagcacua

SEQ ID NO: 889391 - RNA, 22 nt, Human
ugucaguuuggcucuaaaguuu

SEQ ID NO: 889392 - RNA, 22 nt, Human
cuaacuacaagcggggcauccu

SEQ ID NO: 889393 - RNA, 22 nt, Human
aguguuauaaaggccaaguuuu

SEQ ID NO: 889394 - RNA, 21 nt, Human
auuuucauuaauucagugugg

SEQ ID NO: 889395 - RNA, 22 nt, Human
aauagcuuaguccugauucugu

SEQ ID NO: 889396 - RNA, 22 nt, Human
agagucugcauuucuacaagcu

SEQ ID NO: 889397 - RNA, 19 nt, Human
agucacagggaagaggaac

SEQ ID NO: 889398 - RNA, 22 nt, Human
agagacuguaaugagagguaca

SEQ ID NO: 889399 - RNA, 20 nt, Human
ucucugcuguccacauuugc

SEQ ID NO: 889400 - RNA, 22 nt, Human
cugcugugcauauuuaucuagg

SEQ ID NO: 889401 - RNA, 22 nt, Human
aggagccugugccuggcacucc

SEQ ID NO: 889402 - RNA, 22 nt, Human
gugucuacugaucugauucaga

SEQ ID NO: 889403 - RNA, 22 nt, Human
aaagguuuuauucugagcucug

SEQ ID NO: 889404 - RNA, 20 nt, Human
ugacucugcaaccgucucuc

SEQ ID NO: 889405 - RNA, 21 nt, Human
uucuucuuggacuguuuuggc

SEQ ID NO: 889406 - RNA, 22 nt, Human
acagggcuggcguugggacaga

SEQ ID NO: 889407 - RNA, 22 nt, Human
cccagcucaagcagagagcuaa

SEQ ID NO: 889408 - RNA, 22 nt, Human
aucuuccaggugccggggguca

SEQ ID NO: 889409 - RNA, 22 nt, Human
cgaggcagacaaaaguuggaag

SEQ ID NO: 889410 - RNA, 22 nt, Human
guuuauuaacugucaagugauu

SEQ ID NO: 889411 - RNA, 23 nt, Human
agguacauauacuuggaggucag

SEQ ID NO: 889412 - RNA, 22 nt, Human
aaaugcucuccaaaaugaaagu

SEQ ID NO: 889413 - RNA, 22 nt, Human
uaagaaugacaaccauaccauu

SEQ ID NO: 889414 - RNA, 22 nt, Human
uggaagggguuacgcagcagga

SEQ ID NO: 889415 - RNA, 22 nt, Human
gagaagcaaucagcagccaccc

SEQ ID NO: 889416 - RNA, 20 nt, Human
uuccuuggauugugucuuga

SEQ ID NO: 889417 - RNA, 22 nt, Human
uucuggggcuaauacagagguc

SEQ ID NO: 889418 - RNA, 19 nt, Human
uagaagcacuaggcaaacu

SEQ ID NO: 889419 - RNA, 22 nt, Human
uuuuaagaggaggcuguuugaa

SEQ ID NO: 889420 - RNA, 22 nt, Human
uaguggaguagaaaccaaagaa

SEQ ID NO: 889421 - RNA, 22 nt, Human
uggaaauuuugaacaguuucua

SEQ ID NO: 889422 - RNA, 21 nt, Human
ggccucagccaccuggcucug

SEQ ID NO: 889423 - RNA, 22 nt, Human
augucuauguucuuuacugugu

SEQ ID NO: 889424 - RNA, 22 nt, Human
agcuccaggaucugaaaguucg

SEQ ID NO: 889425 - RNA, 22 nt, Human
auuuccaagaaagcuuuaggau

SEQ ID NO: 889426 - RNA, 22 nt, Human
uuacaaugaugggauucagcca

SEQ ID NO: 889427 - RNA, 22 nt, Human
cagaaauguuuaugcuuuugaa

SEQ ID NO: 889428 - RNA, 22 nt, Human
uaauuauaacaugcuuucuggc

SEQ ID NO: 889429 - RNA, 22 nt, Human
agacaggacacaagcugcauaa

SEQ ID NO: 889430 - RNA, 22 nt, Human
acucaggcuacaggggcagaag

SEQ ID NO: 889431 - RNA, 22 nt, Human
gacacagaguauuuuaaguacu

SEQ ID NO: 889432 - RNA, 22 nt, Human
uggccuuguguuuaagcaagaa

SEQ ID NO: 889433 - RNA, 22 nt, Human
agacacagaugguaccugagcc

SEQ ID NO: 889434 - RNA, 22 nt, Human
aguguauuaguuguccagcagu

SEQ ID NO: 889435 - RNA, 22 nt, Human
agucacuguuuaaucuagcuaa

SEQ ID NO: 889436 - RNA, 22 nt, Human
uccagagagccacggacagggg

SEQ ID NO: 889437 - RNA, 22 nt, Human
auuuccuugcaaguuucuguaa

SEQ ID NO: 889438 - RNA, 22 nt, Human
cugagcaugcuccucuuuucca

SEQ ID NO: 889439 - RNA, 22 nt, Human
augugaaacgcaaugggaucau

SEQ ID NO: 889440 - RNA, 22 nt, Human
cuggcugguagaauugugaccu

SEQ ID NO: 889441 - RNA, 22 nt, Human
uuaguacagaaucaaaagcaau

SEQ ID NO: 889442 - RNA, 19 nt, Human
ucugggaagccgggcucca

SEQ ID NO: 889443 - RNA, 22 nt, Human
ggcaggccugagaggcagggcu

SEQ ID NO: 889444 - RNA, 22 nt, Human
cugugucuucugcuuacagucu

SEQ ID NO: 889445 - RNA, 22 nt, Human
agcaagaagggcaaggaaguuu

SEQ ID NO: 889446 - RNA, 22 nt, Human
ccuccauguaaagguccccuca

SEQ ID NO: 889447 - RNA, 22 nt, Human
cccaggguccggauaacccugg

SEQ ID NO: 889448 - RNA, 22 nt, Human
aggacaggauugagcugaacug

SEQ ID NO: 889449 - RNA, 22 nt, Human
auguucaaacuuuuuacacacc

SEQ ID NO: 889450 - RNA, 21 nt, Human
gaguccuuccaauguccucag

SEQ ID NO: 889451 - RNA, 22 nt, Human
gcagggcucaacaggacacccc

SEQ ID NO: 889452 - RNA, 22 nt, Human
auuuacaggacagcuuggcauu

SEQ ID NO: 889453 - RNA, 22 nt, Human
gggaugaauugagucagaaggg

SEQ ID NO: 889454 - RNA, 22 nt, Human
gacaugcaugaaugcaggucuc

SEQ ID NO: 889455 - RNA, 22 nt, Human
gauacacagggcuaagauggau

SEQ ID NO: 889456 - RNA, 22 nt, Human
uugagcauaugcauuuccaauu

SEQ ID NO: 889457 - RNA, 22 nt, Human
uugcugauuuccccuugagugu

SEQ ID NO: 889458 - RNA, 22 nt, Human
gccucacagacugacugaaagc

SEQ ID NO: 889459 - RNA, 22 nt, Human
uccaggacagcggcaggcagau

SEQ ID NO: 889460 - RNA, 22 nt, Human
gagcugaauugaagcaaggagc

SEQ ID NO: 889461 - RNA, 22 nt, Human
auugaacauacauauccacacc

SEQ ID NO: 889462 - RNA, 22 nt, Human
caaggcuguguuagcugcccuc

SEQ ID NO: 889463 - RNA, 22 nt, Human
aaaaagcuuaaaugagcaguuc

SEQ ID NO: 889464 - RNA, 22 nt, Human
uuucagagcucuaggcucucag

SEQ ID NO: 889465 - RNA, 22 nt, Human
cgugauuggcuucugcauugga

SEQ ID NO: 889466 - RNA, 22 nt, Human
ggaguagcugcauuccgagcac

SEQ ID NO: 889467 - RNA, 22 nt, Human
ggcacuguguacacacagagac

SEQ ID NO: 889468 - RNA, 22 nt, Human
ucugcgugaugagggugcagca

SEQ ID NO: 889469 - RNA, 22 nt, Human
uuccucucaacaugccugccgg

SEQ ID NO: 889470 - RNA, 22 nt, Human
cagaaauguuuauauguggugu

SEQ ID NO: 889471 - RNA, 22 nt, Human
uaaaaucauucuggugucagua

SEQ ID NO: 889472 - RNA, 22 nt, Human
gugccuggacccucuuuccgga

SEQ ID NO: 889473 - RNA, 22 nt, Human
gugucauacagaaugcauaagu

SEQ ID NO: 889474 - RNA, 20 nt, Human
cuguaaaccaggcuucuugg

SEQ ID NO: 889475 - RNA, 22 nt, Human
uuguaugaguaugguguauagg

SEQ ID NO: 889476 - RNA, 22 nt, Human
gccuggagacaaggacaaaggg

SEQ ID NO: 889477 - RNA, 22 nt, Human
gggcugagggccaauuccuacu

SEQ ID NO: 889478 - RNA, 22 nt, Human
gcacaggcucucuuggggacac

SEQ ID NO: 889479 - RNA, 22 nt, Human
cucuccuugcagauggcugccu

SEQ ID NO: 889480 - RNA, 22 nt, Human
aaaauacacauacuaggggaaa

SEQ ID NO: 889481 - RNA, 22 nt, Human
ugagguaugcugaacucuguuu

SEQ ID NO: 889482 - RNA, 22 nt, Human
cacgaaaucuaggagaguaaca

SEQ ID NO: 889483 - RNA, 22 nt, Human
ugggccugggucuuugcugcca

SEQ ID NO: 889484 - RNA, 22 nt, Human
gauuuucauuauagcuaguuuc

SEQ ID NO: 889485 - RNA, 22 nt, Human
uuuacaaggcagaacugauuaa

SEQ ID NO: 889486 - RNA, 22 nt, Human
ucauccagccucaucaggagcu

SEQ ID NO: 889487 - RNA, 22 nt, Human
ggcccagaauacaugaaguaua

SEQ ID NO: 889488 - RNA, 22 nt, Human
uguuuaaucuucaggacagucu

SEQ ID NO: 889489 - RNA, 22 nt, Human
cagcugcagugggggaccacaa

SEQ ID NO: 889490 - RNA, 22 nt, Human
aguuucacagaauaugaagguu

SEQ ID NO: 889491 - RNA, 22 nt, Human
agcccugggcguuacugggaug

SEQ ID NO: 889492 - RNA, 22 nt, Human
ucuagcaguagcccaaauccag

SEQ ID NO: 889493 - RNA, 22 nt, Human
acagacauucauauccucggua

SEQ ID NO: 889494 - RNA, 22 nt, Human
cugaguccuugggcuuagagug

SEQ ID NO: 889495 - RNA, 22 nt, Human
cacccaggcagguggcugagaa

SEQ ID NO: 889496 - RNA, 22 nt, Human
uugauguaaagauaguuucugu

SEQ ID NO: 889497 - RNA, 22 nt, Human
agucuuaugguuaaauagaugc

SEQ ID NO: 889498 - RNA, 22 nt, Human
caggagggcccgagacucuucc

SEQ ID NO: 889499 - RNA, 22 nt, Human
gagcugggaggacugggaacuu

SEQ ID NO: 889500 - RNA, 22 nt, Human
uuuguaugugauaagacuauuc

SEQ ID NO: 889501 - RNA, 22 nt, Human
gccagcagcccagaaggacuuu

SEQ ID NO: 889502 - RNA, 22 nt, Human
ccugagugccaugagagcaccc

SEQ ID NO: 889503 - RNA, 22 nt, Human
agccugagccccauccagcuga

SEQ ID NO: 889504 - RNA, 22 nt, Human
cagguccaauugcgcuaaaauc

SEQ ID NO: 889505 - RNA, 22 nt, Human
ucaaaucccagcucagccucuc

SEQ ID NO: 889506 - RNA, 22 nt, Human
auguucauccaugucguagcag

SEQ ID NO: 889507 - RNA, 22 nt, Human
aaagcuuuucaguauguucaug

SEQ ID NO: 889508 - RNA, 22 nt, Human
uuucaguguguaaauugaaaua

SEQ ID NO: 889509 - RNA, 22 nt, Human
caaaaggcaggggaaagagugc

SEQ ID NO: 889510 - RNA, 22 nt, Human
cuucacuggaaucuguaauagu

SEQ ID NO: 889511 - RNA, 22 nt, Human
cagcacaggaagugggccuuca

SEQ ID NO: 889512 - RNA, 22 nt, Human
acaaagugugcggagcccaggg

SEQ ID NO: 889513 - RNA, 21 nt, Human
gugagguauuaggaccuacau

SEQ ID NO: 889514 - RNA, 22 nt, Human
ccuggggagccgccugagcccc

SEQ ID NO: 889515 - RNA, 22 nt, Human
ggagucagccugucagagugua

SEQ ID NO: 889516 - RNA, 22 nt, Human
gcaggagagucugugccagguu

SEQ ID NO: 889517 - RNA, 19 nt, Human
acucagggaaaggagaauu

SEQ ID NO: 889518 - RNA, 22 nt, Human
acauuccugaggaaauacauuc

SEQ ID NO: 889519 - RNA, 22 nt, Human
ccauucauagcaagcuacaucu

SEQ ID NO: 889520 - RNA, 22 nt, Human
uaucuguuucugaggauacaug

SEQ ID NO: 889521 - RNA, 22 nt, Human
uagaaagucaugaauuacacca

SEQ ID NO: 889522 - RNA, 19 nt, Human
ugugugcaugcgcacgugu

SEQ ID NO: 889523 - RNA, 20 nt, Human
uacaaagagccccucucuuc

SEQ ID NO: 889524 - RNA, 22 nt, Human
agaauguguuauuagagaagga

SEQ ID NO: 889525 - RNA, 22 nt, Human
gcagggaaggggcaugcuggag

SEQ ID NO: 889526 - RNA, 22 nt, Human
uuguacaaagauuucacagcuc

SEQ ID NO: 889527 - RNA, 22 nt, Human
uggcaggaaccaggaggcucuc

SEQ ID NO: 889528 - RNA, 22 nt, Human
agggcucaguugccuggagccc

SEQ ID NO: 889529 - RNA, 22 nt, Human
agaaccucacgagauuccuuca

SEQ ID NO: 889530 - RNA, 22 nt, Human
ggggccagguccagcuuccaaa

SEQ ID NO: 889531 - RNA, 22 nt, Human
uuucucucuacaguacuuucau

SEQ ID NO: 889532 - RNA, 22 nt, Human
cagaaucuacacccucagaaau

SEQ ID NO: 889533 - RNA, 22 nt, Human
aguaaacauuuucauauuuucu

SEQ ID NO: 889534 - RNA, 22 nt, Human
accaugggucagccaccucagc

SEQ ID NO: 889535 - RNA, 22 nt, Human
auaacucuguuuuuuucaugca

SEQ ID NO: 889536 - RNA, 22 nt, Human
acaaagagggaccagugacuug

SEQ ID NO: 889537 - RNA, 22 nt, Human
uuucuaacagcaaauguuuauc

SEQ ID NO: 889538 - RNA, 22 nt, Human
aaugccuugccugcuacaacuu

SEQ ID NO: 889539 - RNA, 22 nt, Human
guuccagguggucacagagcuc

SEQ ID NO: 889540 - RNA, 22 nt, Human
aagcuuuagagaugaguuccuu

SEQ ID NO: 889541 - RNA, 22 nt, Human
ugcugugucuuucugugaaaag

SEQ ID NO: 889542 - RNA, 23 nt, Human
ucuuccugaacuaucaggcacau

SEQ ID NO: 889543 - RNA, 22 nt, Human
ccaggagagcagaagcccaggc

SEQ ID NO: 889544 - RNA, 18 nt, Human
uggccccuuaucaguccu

SEQ ID NO: 889545 - RNA, 22 nt, Human
uuguuuuaaugagggagguuga

SEQ ID NO: 889546 - RNA, 22 nt, Human
aggacaguccgggguccuccac

SEQ ID NO: 889547 - RNA, 16 nt, Human
gcagaggaaaggggag

SEQ ID NO: 889548 - RNA, 22 nt, Human
guaacuuuggauuuaggguacc

SEQ ID NO: 889549 - RNA, 22 nt, Human
uggacagcaaacauggagagaa

SEQ ID NO: 889550 - RNA, 22 nt, Human
caugaggauccaggugacaggc

SEQ ID NO: 889551 - RNA, 22 nt, Human
cagaaauaucaguugaaagugc

SEQ ID NO: 889552 - RNA, 22 nt, Human
auuauuuauccucuuggucuau

SEQ ID NO: 889553 - RNA, 22 nt, Human
ugggcucugaagggucccggau

SEQ ID NO: 889554 - RNA, 22 nt, Human
cccugcaggcucagacuggagu

SEQ ID NO: 889555 - RNA, 22 nt, Human
cugcaucacagcaggaggcaca

SEQ ID NO: 889556 - RNA, 22 nt, Human
uccuggcuccuggagaccugcu

SEQ ID NO: 889557 - RNA, 22 nt, Human
cugcccugggccaggaagcggc

SEQ ID NO: 889558 - RNA, 22 nt, Human
aagcaauuugacaguacauauc

SEQ ID NO: 889559 - RNA, 22 nt, Human
uuuuccuucuagagcagauuuc

SEQ ID NO: 889560 - RNA, 22 nt, Human
uuacagauucaagcucuuugaa

SEQ ID NO: 889561 - RNA, 22 nt, Human
agcuucccaggagaaucaggga

SEQ ID NO: 889562 - RNA, 22 nt, Human
guggcagaguugcugacuagaa

SEQ ID NO: 889563 - RNA, 22 nt, Human
aacaaacaguuaaguguggaug

SEQ ID NO: 889564 - RNA, 22 nt, Human
ucaaagcacuggggaaagccug

SEQ ID NO: 889565 - RNA, 22 nt, Human
uuuuuguugcagagaggccacu

SEQ ID NO: 889566 - RNA, 22 nt, Human
aaauuguaggaucacaugaccu

SEQ ID NO: 889567 - RNA, 22 nt, Human
ggugcugaauaaauacuaguua

SEQ ID NO: 889568 - RNA, 22 nt, Human
ucuggcagcgaagcguguacuu

SEQ ID NO: 889569 - RNA, 22 nt, Human
aaaagacaucuauuucaggcag

SEQ ID NO: 889570 - RNA, 22 nt, Human
gcagccucugcaguucaggagg

SEQ ID NO: 889571 - RNA, 22 nt, Human
cagggacccgcacagguagcau

SEQ ID NO: 889572 - RNA, 22 nt, Human
gaaguucuuugcuccccaguac

SEQ ID NO: 889573 - RNA, 22 nt, Human
ucccagugagguccuggcuguc

SEQ ID NO: 889574 - RNA, 22 nt, Human
augcaaaauaaggcagaaacau

SEQ ID NO: 889575 - RNA, 22 nt, Human
ccuuuguauacaguucuuguga

SEQ ID NO: 889576 - RNA, 22 nt, Human
cuggcuggaggugagucacuga

SEQ ID NO: 889577 - RNA, 22 nt, Human
gugaaauauuuaacguccaggu

SEQ ID NO: 889578 - RNA, 22 nt, Human
uuauuuauggcccucaccugau

SEQ ID NO: 889579 - RNA, 22 nt, Human
gcugucacaaauuggguucuuu

SEQ ID NO: 889580 - RNA, 19 nt, Human
cugcugggugcugagggag

SEQ ID NO: 889581 - RNA, 22 nt, Human
auguauaugugaaagauguuua

SEQ ID NO: 889582 - RNA, 22 nt, Human
auuuguucuucaugauccuguc

SEQ ID NO: 889583 - RNA, 22 nt, Human
uaucagcaacucagagcagucu

SEQ ID NO: 889584 - RNA, 22 nt, Human
uacugcaugggugcaugcugcu

SEQ ID NO: 889585 - RNA, 22 nt, Human
gcccugugcuuggauggcagau

SEQ ID NO: 889586 - RNA, 22 nt, Human
uacagaauguuaugaagcauag

SEQ ID NO: 889587 - RNA, 22 nt, Human
cuccagugagcgcggggcaugg

SEQ ID NO: 889588 - RNA, 22 nt, Human
uccagcagagucucugaggggg

SEQ ID NO: 889589 - RNA, 22 nt, Human
cugaggcuuggaggggucuggu

SEQ ID NO: 889590 - RNA, 22 nt, Human
augugcuaaacucaacaaaucu

SEQ ID NO: 889591 - RNA, 22 nt, Human
auuucacagcgugguugacugc

SEQ ID NO: 889592 - RNA, 22 nt, Human
ccucuuccagcuguugcuucca

SEQ ID NO: 889593 - RNA, 22 nt, Human
gaaaucaauuucuugguugaua

SEQ ID NO: 889594 - RNA, 22 nt, Human
ugugggcacuaaugacaugcag

SEQ ID NO: 889595 - RNA, 22 nt, Human
uaauugguagcugguauaaugc

SEQ ID NO: 889596 - RNA, 22 nt, Human
ccagaauagaaggcagcuguca

SEQ ID NO: 889597 - RNA, 22 nt, Human
cugaaaauguuacacaggaaga

SEQ ID NO: 889598 - RNA, 22 nt, Human
acugugagaguuuuucuaggag

SEQ ID NO: 889599 - RNA, 22 nt, Human
ggcagagaaucuggcuguuuac

SEQ ID NO: 889600 - RNA, 23 nt, Human
uaugaacugcauugcuggugugu

SEQ ID NO: 889601 - RNA, 22 nt, Human
acaguuuggcgugauugauagu

SEQ ID NO: 889602 - RNA, 22 nt, Human
aggggagguguccccaaaucuc

SEQ ID NO: 889603 - RNA, 22 nt, Human
ugugaagauuuggcaugcagaa

SEQ ID NO: 889604 - RNA, 22 nt, Human
ggugucagugagagcacaguac

SEQ ID NO: 889605 - RNA, 22 nt, Human
ggggaugguagaccggugacgu

SEQ ID NO: 889606 - RNA, 22 nt, Human
ccucagccuuggccccaggcag

SEQ ID NO: 889607 - RNA, 22 nt, Human
ugcaaaugucaaggguuagugu

SEQ ID NO: 889608 - RNA, 21 nt, Human
ugcagagauaucugaagcaga

SEQ ID NO: 889609 - RNA, 21 nt, Human
agguuucucuuuuauggaggg

SEQ ID NO: 889610 - RNA, 22 nt, Human
cagcuccugcagcugcugccgu

SEQ ID NO: 889611 - RNA, 22 nt, Human
gugcgugugccuaucaauaaag

SEQ ID NO: 889612 - RNA, 22 nt, Human
cugcucuguuucuuagcugggu

SEQ ID NO: 889613 - RNA, 15 nt, Human
aacaggcauuuauau

SEQ ID NO: 889614 - RNA, 22 nt, Human
auccuaaagcagacagcagguu

SEQ ID NO: 889615 - RNA, 22 nt, Human
uucauguaugaggccaaucuuu

SEQ ID NO: 889616 - RNA, 22 nt, Human
uaacagcaggguuacaggcauu

SEQ ID NO: 889617 - RNA, 22 nt, Human
auguuuuaaauauguguguaaa

SEQ ID NO: 889618 - RNA, 21 nt, Human
uuucugaaggcaacaucuauc

SEQ ID NO: 889619 - RNA, 22 nt, Human
agcagcauagaagcugggagga

SEQ ID NO: 889620 - RNA, 22 nt, Human
ucuugcacuucaugaauauguu

SEQ ID NO: 889621 - RNA, 22 nt, Human
gggcuggagacaagugagccgc

SEQ ID NO: 889622 - RNA, 22 nt, Human
uauuuugacgauuuuaugcaaa

SEQ ID NO: 889623 - RNA, 22 nt, Human
gaggguggggaauagacugcua

SEQ ID NO: 889624 - RNA, 22 nt, Human
uuugaaagagcugauacaugaa

SEQ ID NO: 889625 - RNA, 22 nt, Human
uguguggcguugcguggcuagg

SEQ ID NO: 889626 - RNA, 22 nt, Human
aggcaguuuauccccagagccu

SEQ ID NO: 889627 - RNA, 22 nt, Human
auuucacaaagaacagaugcag

SEQ ID NO: 889628 - RNA, 22 nt, Human
ccaagcuacuuaggagucugag

SEQ ID NO: 889629 - RNA, 22 nt, Human
auccugcugcuguggacuucuc

SEQ ID NO: 889630 - RNA, 22 nt, Human
cacauugcuccacaggguuaac

SEQ ID NO: 889631 - RNA, 22 nt, Human
ccuguuguggaaaaagccugau

SEQ ID NO: 889632 - RNA, 22 nt, Human
agaaaugugagccccuuaucaa

SEQ ID NO: 889633 - RNA, 22 nt, Human
uuugagaagcaucugguccacu

SEQ ID NO: 889634 - RNA, 22 nt, Human
aagaaggaaguguggacaucac

SEQ ID NO: 889635 - RNA, 22 nt, Human
uacuuacaguuacggcaagugg

SEQ ID NO: 889636 - RNA, 22 nt, Human
ugacagcauuacuaauacaugu

SEQ ID NO: 889637 - RNA, 22 nt, Human
agacaacuagaaaacuagacag

SEQ ID NO: 889638 - RNA, 22 nt, Human
cacaugcaucugucauguuugg

SEQ ID NO: 889639 - RNA, 22 nt, Human
ggcaggcugggagucaucagag

SEQ ID NO: 889640 - RNA, 22 nt, Human
auugagcaauaguguuugcagc

SEQ ID NO: 889641 - RNA, 22 nt, Human
aagacucuguaucaugagggag

SEQ ID NO: 889642 - RNA, 22 nt, Human
caggguggaaaagcuaguugga

SEQ ID NO: 889643 - RNA, 22 nt, Human
gaacauuuggauuuguaaauuu

SEQ ID NO: 889644 - RNA, 22 nt, Human
uucuggaguguauugggucugc

SEQ ID NO: 889645 - RNA, 19 nt, Human
augcuuuauguuauuucuu

SEQ ID NO: 889646 - RNA, 22 nt, Human
gcugcuggaacaaaucacccca

SEQ ID NO: 889647 - RNA, 21 nt, Human
uguucacauggagcagaaugu

SEQ ID NO: 889648 - RNA, 22 nt, Human
aggagaauuaggaacucaagau

SEQ ID NO: 889649 - RNA, 22 nt, Human
acaaggcauuccggaaguaacc

SEQ ID NO: 889650 - RNA, 22 nt, Human
uguucauuacccaucccagguc

SEQ ID NO: 889651 - RNA, 22 nt, Human
ucagaaauaaugaaugaugggg

SEQ ID NO: 889652 - RNA, 20 nt, Human
agaagccaagugacauguuu

SEQ ID NO: 889653 - RNA, 22 nt, Human
acagcagccugcagcccugugu

SEQ ID NO: 889654 - RNA, 22 nt, Human
gcacuugacccccagagcuggu

SEQ ID NO: 889655 - RNA, 22 nt, Human
gagggcuccucacauucucuau

SEQ ID NO: 889656 - RNA, 22 nt, Human
uaggcaaguugcccaaucucuc

SEQ ID NO: 889657 - RNA, 22 nt, Human
acuguaaauuuugguugcaggu

SEQ ID NO: 889658 - RNA, 22 nt, Human
augauguagacaaaaauaugcu

SEQ ID NO: 889659 - RNA, 22 nt, Human
aaagcauuauucuguggaaaaa

SEQ ID NO: 889660 - RNA, 22 nt, Human
agcagccaagguaaccugugcu

SEQ ID NO: 889661 - RNA, 18 nt, Human
acagugguuugaugugcu

SEQ ID NO: 889662 - RNA, 22 nt, Human
guuacaaaggaagcuucacugc

SEQ ID NO: 889663 - RNA, 22 nt, Human
uucugggcccacuguagcaucc

SEQ ID NO: 889664 - RNA, 20 nt, Human
agaaauaccacauuuggcaa

SEQ ID NO: 889665 - RNA, 22 nt, Human
ugggugugagcccgggagccgc

SEQ ID NO: 889666 - RNA, 22 nt, Human
cuggaggggcuggcaugguagc

SEQ ID NO: 889667 - RNA, 22 nt, Human
ggcuucuguccucuggaucugu

SEQ ID NO: 889668 - RNA, 22 nt, Human
caggcuaaagcuuugagcaugu

SEQ ID NO: 889669 - RNA, 22 nt, Human
gggagcuguaguccagauaccg

SEQ ID NO: 889670 - RNA, 22 nt, Human
ucagggcauguauguuucuuua

SEQ ID NO: 889671 - RNA, 22 nt, Human
cacuacagggguccacagcuga

SEQ ID NO: 889672 - RNA, 23 nt, Human
auauuuccagguuagugagguaa

SEQ ID NO: 889673 - RNA, 23 nt, Human
gaauggcuaagcacauagacuug

SEQ ID NO: 889674 - RNA, 22 nt, Human
aaacauguuuagaaagcagcug

SEQ ID NO: 889675 - RNA, 22 nt, Human
aacuucaaaugugacuuugcau

SEQ ID NO: 889676 - RNA, 22 nt, Human
ugaugcugcugggaguggugcu

SEQ ID NO: 889677 - RNA, 22 nt, Human
agggccaguauuaagguaauua

SEQ ID NO: 889678 - RNA, 22 nt, Human
aggccugggcaagaaggggcgu

SEQ ID NO: 889679 - RNA, 22 nt, Human
aacacauuuugccuaggcaaua

SEQ ID NO: 889680 - RNA, 22 nt, Human
guugaaacuuaguugaaauuua

SEQ ID NO: 889681 - RNA, 17 nt, Human
ggcagccucaggcguuu

SEQ ID NO: 889682 - RNA, 22 nt, Human
uccuguguuacugccuggagcg

SEQ ID NO: 889683 - RNA, 22 nt, Human
gauauuuuuaggugaugcaggc

SEQ ID NO: 889684 - RNA, 22 nt, Human
accaaaugcugacagcaugacu

SEQ ID NO: 889685 - RNA, 22 nt, Human
cgccugcucuguuuccaugugg

SEQ ID NO: 889686 - RNA, 22 nt, Human
gaggcccaggucaagcagccac

SEQ ID NO: 889687 - RNA, 22 nt, Human
aggcagcaugggcccagagucc

SEQ ID NO: 889688 - RNA, 22 nt, Human
auguucuauaucauuauuguga

SEQ ID NO: 889689 - RNA, 22 nt, Human
acagccuggacuggcucucugc

SEQ ID NO: 889690 - RNA, 22 nt, Human
cuccugagggaugcuuaggcuu

SEQ ID NO: 889691 - RNA, 22 nt, Human
aacauugaguuagggagcguau

SEQ ID NO: 889692 - RNA, 22 nt, Human
cagggcuggauuucauuucuag

SEQ ID NO: 889693 - RNA, 23 nt, Human
cagcuucuuugggauucuuuaua

SEQ ID NO: 889694 - RNA, 20 nt, Human
gcugucuggauuagaagccu

SEQ ID NO: 889695 - RNA, 22 nt, Human
cccagcacucagcaggcucaua

SEQ ID NO: 889696 - RNA, 22 nt, Human
uuaaauuauuucuagugaggug

SEQ ID NO: 889697 - RNA, 22 nt, Human
aggaagcuagagccaccggacu

SEQ ID NO: 889698 - RNA, 22 nt, Human
gacagcagggacauguaggaag

SEQ ID NO: 889699 - RNA, 22 nt, Human
uuccagcaggguacuuguaauu

SEQ ID NO: 889700 - RNA, 22 nt, Human
aggagagagaacacuugggucc

SEQ ID NO: 889701 - RNA, 22 nt, Human
agcuuuaccugccuuggggcac

SEQ ID NO: 889702 - RNA, 22 nt, Human
uguucauuacugcuguuugcca

SEQ ID NO: 889703 - RNA, 22 nt, Human
uucuguaucuuucuucaagauu

SEQ ID NO: 889704 - RNA, 22 nt, Human
uagacaggagucaggcuagaau

SEQ ID NO: 889705 - RNA, 22 nt, Human
ugcagcaguguuccuuggcuug

SEQ ID NO: 889706 - RNA, 22 nt, Human
gagggcugcaaugagacagaga

SEQ ID NO: 889707 - RNA, 22 nt, Human
ucuucaaaugcuaguaauauca

SEQ ID NO: 889708 - RNA, 22 nt, Human
auuggaacggcuccgcgucuga

SEQ ID NO: 889709 - RNA, 22 nt, Human
ccuggagccccucuggccagcc

SEQ ID NO: 889710 - RNA, 17 nt, Human
aggggagagugggaaga

SEQ ID NO: 889711 - RNA, 22 nt, Human
ccugaaauccauaguuuacacu

SEQ ID NO: 889712 - RNA, 23 nt, Human
uuggcagcgggucaggcuguggg

SEQ ID NO: 889713 - RNA, 22 nt, Human
uaggaaggccugucacuacuug

SEQ ID NO: 889714 - RNA, 22 nt, Human
ggcagugggaaauaagugagaa

SEQ ID NO: 889715 - RNA, 22 nt, Human
aaggcugauuagacugauagcu

SEQ ID NO: 889716 - RNA, 22 nt, Human
uuagaacacugagaaagugaug

SEQ ID NO: 889717 - RNA, 22 nt, Human
cuggccaguuacugcuauuggc

SEQ ID NO: 889718 - RNA, 22 nt, Human
ugaggggagaagcagcagccug

SEQ ID NO: 889719 - RNA, 22 nt, Human
ugcauguggaccccuggugccu

SEQ ID NO: 889720 - RNA, 22 nt, Human
gagugcaguaugagaggcugcu

SEQ ID NO: 889721 - RNA, 20 nt, Human
aggggccuggaacaggccuu

SEQ ID NO: 889722 - RNA, 22 nt, Human
uauuuugacuauuaaaccaaca

SEQ ID NO: 889723 - RNA, 22 nt, Human
cagcuccugaggacugcuggga

SEQ ID NO: 889724 - RNA, 22 nt, Human
uaaagcauguguuagaagugca

SEQ ID NO: 889725 - RNA, 22 nt, Human
gcucacugcaaccucugcuucc

SEQ ID NO: 889726 - RNA, 22 nt, Human
auagauacauuguuauauuugu

SEQ ID NO: 889727 - RNA, 22 nt, Human
gucugagggucaugggucucac

SEQ ID NO: 889728 - RNA, 22 nt, Human
agccuggcuuaauccuccuuuu

SEQ ID NO: 889729 - RNA, 22 nt, Human
gaaaaggauugguaaaauaucu

SEQ ID NO: 889730 - RNA, 22 nt, Human
acccagagcacugggugugggc

SEQ ID NO: 889731 - RNA, 21 nt, Human
ggccacaagcggaggagccgc

SEQ ID NO: 889732 - RNA, 22 nt, Human
acugggcaucccauggcagagc

SEQ ID NO: 889733 - RNA, 22 nt, Human
agacagacggcuuuauacacag

SEQ ID NO: 889734 - RNA, 22 nt, Human
acugagcucuagguuuugaacc

SEQ ID NO: 889735 - RNA, 19 nt, Human
agcagcaacuguugauuca

SEQ ID NO: 889736 - RNA, 22 nt, Human
ugcuccaggccgccuggggcug

SEQ ID NO: 889737 - RNA, 22 nt, Human
caggcacacauccgugagagau

SEQ ID NO: 889738 - RNA, 22 nt, Human
uucauuacugcgguagucacac

SEQ ID NO: 889739 - RNA, 22 nt, Human
ggcugguccuuucucuguccua

SEQ ID NO: 889740 - RNA, 21 nt, Human
aguacaucucaaauguaaauc

SEQ ID NO: 889741 - RNA, 22 nt, Human
caagaacauugugaucacuuca

SEQ ID NO: 889742 - RNA, 22 nt, Human
uggcagugucuuaucaggagug

SEQ ID NO: 889743 - RNA, 22 nt, Human
ugggaaugggccuagaaggcug

SEQ ID NO: 889744 - RNA, 21 nt, Human
ccuuggcuggcaucuagcacc

SEQ ID NO: 889745 - RNA, 22 nt, Human
uguguguguccucauuugcaga

SEQ ID NO: 889746 - RNA, 22 nt, Human
uucuucagggaagcuuguuaau

SEQ ID NO: 889747 - RNA, 23 nt, Human
acaggaggggacagguggccgug

SEQ ID NO: 889748 - RNA, 22 nt, Human
uccaggaggcaccuuuggacca

SEQ ID NO: 889749 - RNA, 22 nt, Human
caccaggagccaucaggagucc

SEQ ID NO: 889750 - RNA, 20 nt, Human
aagcacauuucuacaauaau

SEQ ID NO: 889751 - RNA, 22 nt, Human
cugagaguguggcuuccaggcc

SEQ ID NO: 889752 - RNA, 22 nt, Human
uuguucuuggagcaggcagaga

SEQ ID NO: 889753 - RNA, 20 nt, Human
cugcccacuagaacuaccug

SEQ ID NO: 889754 - RNA, 20 nt, Human
uuuaucaggcacuuacuauu

SEQ ID NO: 889755 - RNA, 21 nt, Human
uucuucaguuuaauauaaaau

SEQ ID NO: 889756 - RNA, 22 nt, Human
ucuaaggagccaggacuauuag

SEQ ID NO: 889757 - RNA, 22 nt, Human
uacagggauuguuuuaaucacc

SEQ ID NO: 889758 - RNA, 22 nt, Human
auccuucuucugcuagugucua

SEQ ID NO: 889759 - RNA, 22 nt, Human
aggcugcccugccgccaguggg

SEQ ID NO: 889760 - RNA, 22 nt, Human
agucccagugacuuggccagaa

SEQ ID NO: 889761 - RNA, 17 nt, Human
agagagaaaagggccau

SEQ ID NO: 889762 - RNA, 22 nt, Human
agcggcuggaccagcguucaag

SEQ ID NO: 889763 - RNA, 22 nt, Human
aaugugcaggcucaaaccuugu

SEQ ID NO: 889764 - RNA, 22 nt, Human
gaggcucccaaggggcuaggcc

SEQ ID NO: 889765 - RNA, 22 nt, Human
uuucugcugugcuuucuugcgu

SEQ ID NO: 889766 - RNA, 22 nt, Human
gcccacacaccagcucaggagg

SEQ ID NO: 889767 - RNA, 22 nt, Human
caccugccugcaggggcuccac

SEQ ID NO: 889768 - RNA, 22 nt, Human
ggcugccaggagggaggccagu

SEQ ID NO: 889769 - RNA, 22 nt, Human
guggcuucuucuugggagcugc

SEQ ID NO: 889770 - RNA, 22 nt, Human
ucucaaauucccuuuuccuccu

SEQ ID NO: 889771 - RNA, 22 nt, Human
ggugggagagcucugucuccag

SEQ ID NO: 889772 - RNA, 20 nt, Human
gccugcagagaaggucagag

SEQ ID NO: 889773 - RNA, 22 nt, Human
ugccuuagagcacucaagagug

SEQ ID NO: 889774 - RNA, 18 nt, Human
agcucuggggagaugggc

SEQ ID NO: 889775 - RNA, 22 nt, Human
agcaccuugagaucaagcagug

SEQ ID NO: 889776 - RNA, 22 nt, Human
cagucccugggggagucaccag

SEQ ID NO: 889777 - RNA, 22 nt, Human
ggucuggccaauagacagcccc

SEQ ID NO: 889778 - RNA, 22 nt, Human
ugggguacuuguaucaaagcac

SEQ ID NO: 889779 - RNA, 22 nt, Human
aagauuuccuucaguagagcua

SEQ ID NO: 889780 - RNA, 22 nt, Human
uaucuagcaaguaacaugcuga

SEQ ID NO: 889781 - RNA, 22 nt, Human
agaaauguugaauacaucagga

SEQ ID NO: 889782 - RNA, 22 nt, Human
caugaucugguccuacuguggg

SEQ ID NO: 889783 - RNA, 22 nt, Human
agacucuuggucauuggcauua

SEQ ID NO: 889784 - RNA, 22 nt, Human
cagcagcugccucagcugggga

SEQ ID NO: 889785 - RNA, 22 nt, Human
gcagggcagggcaagaacuggg

SEQ ID NO: 889786 - RNA, 22 nt, Human
ucacagcuuugagcagagacca

SEQ ID NO: 889787 - RNA, 22 nt, Human
uggcagaggcucugugauguug

SEQ ID NO: 889788 - RNA, 22 nt, Human
cucugagaauaugagcucuuug

SEQ ID NO: 889789 - RNA, 22 nt, Human
gcagcuguaaagcagaaauagu

SEQ ID NO: 889790 - RNA, 22 nt, Human
gcagggaaguuguaauguaaug

SEQ ID NO: 889791 - RNA, 22 nt, Human
gcccucagaguuccccacagug

SEQ ID NO: 889792 - RNA, 20 nt, Human
cucuucaaauauuuuauucu

SEQ ID NO: 889793 - RNA, 22 nt, Human
gaggucaggcucaagcugggcc

SEQ ID NO: 889794 - RNA, 22 nt, Human
acacaauacagggcucaaaaua

SEQ ID NO: 889795 - RNA, 22 nt, Human
agggaaggaggccauguguccc

SEQ ID NO: 889796 - RNA, 17 nt, Human
ccugaaggcacuuccag

SEQ ID NO: 889797 - RNA, 22 nt, Human
gccagccaguuugcugauggcu

SEQ ID NO: 889798 - RNA, 22 nt, Human
cuguggcuaugguguacauacu

SEQ ID NO: 889799 - RNA, 22 nt, Human
aacaaauuaguugcaagacugg

SEQ ID NO: 889800 - RNA, 22 nt, Human
cuggagcugguauagggacaaa

SEQ ID NO: 889801 - RNA, 22 nt, Human
cucaucugucugggcugguuuu

SEQ ID NO: 889802 - RNA, 22 nt, Human
gacagcuguggagaggcaugug

SEQ ID NO: 889803 - RNA, 22 nt, Human
uuauaaagauccuuccagaguu

SEQ ID NO: 889804 - RNA, 22 nt, Human
ccuuaucacaauggagugucac

SEQ ID NO: 889805 - RNA, 22 nt, Human
cuccagcaggugcgucucagag

SEQ ID NO: 889806 - RNA, 22 nt, Human
gccuguguggaugggccccugg

SEQ ID NO: 889807 - RNA, 22 nt, Human
uuauguaggauaaugaauugcc

SEQ ID NO: 889808 - RNA, 22 nt, Human
ugaaaaacuuuaauccauaaag

SEQ ID NO: 889809 - RNA, 22 nt, Human
cacugugucaguuugguuagac

SEQ ID NO: 889810 - RNA, 22 nt, Human
gucuuggccgugcagaugaaga

SEQ ID NO: 889811 - RNA, 22 nt, Human
cacaugugugcugaggacugug

SEQ ID NO: 889812 - RNA, 22 nt, Human
ugguaagaauaggggcuuugga

SEQ ID NO: 889813 - RNA, 22 nt, Human
agcagaugagccucaugacugg

SEQ ID NO: 889814 - RNA, 22 nt, Human
ugagguaguuuguuguacagua

SEQ ID NO: 889815 - RNA, 22 nt, Human
gaauagaugaaagugucucuua

SEQ ID NO: 889816 - RNA, 22 nt, Human
cugaagcaaaugaaacagcucu

SEQ ID NO: 889817 - RNA, 19 nt, Human
ugucaguaguugucuaggg

SEQ ID NO: 889818 - RNA, 22 nt, Human
gagaccaggaaguacagcagcc

SEQ ID NO: 889819 - RNA, 22 nt, Human
gugucccaggagaggagacaau

SEQ ID NO: 889820 - RNA, 19 nt, Human
cuucuucuuggcagccaag

SEQ ID NO: 889821 - RNA, 18 nt, Human
aagcucuuaaaugguuca

SEQ ID NO: 889822 - RNA, 22 nt, Human
gggcauggccaggugagggguc

SEQ ID NO: 889823 - RNA, 22 nt, Human
agagccucugucauggagagaa

SEQ ID NO: 889824 - RNA, 22 nt, Human
acagugugugcuuucccuuacg

SEQ ID NO: 889825 - RNA, 22 nt, Human
cagcagaguauggcacucaacu

SEQ ID NO: 889826 - RNA, 22 nt, Human
aaagcugggggcccuggucuag

SEQ ID NO: 889827 - RNA, 22 nt, Human
guguggcuguuuagugacuuuc

SEQ ID NO: 889828 - RNA, 22 nt, Human
guguuaaaaaucccaugauaug

SEQ ID NO: 889829 - RNA, 22 nt, Human
gcagggagguuugcugaccugg

SEQ ID NO: 889830 - RNA, 22 nt, Human
aaugucugaaaaucagacugca

SEQ ID NO: 889831 - RNA, 22 nt, Human
cagugccaaggagaaggacagc

SEQ ID NO: 889832 - RNA, 22 nt, Human
aaggcaauaguauuaaacugga

SEQ ID NO: 889833 - RNA, 22 nt, Human
agacuaagcgguucuuuucaau

SEQ ID NO: 889834 - RNA, 22 nt, Human
ucagaacagcucucagauaucc

SEQ ID NO: 889835 - RNA, 22 nt, Human
ucugccuuagcaauugucaagg

SEQ ID NO: 889836 - RNA, 22 nt, Human
uugcagggcaaauggucagaua

SEQ ID NO: 889837 - RNA, 22 nt, Human
aaauguuccuuuggauuaaacu

SEQ ID NO: 889838 - RNA, 22 nt, Human
augaacaauaaucaugucuaug

SEQ ID NO: 889839 - RNA, 15 nt, Human
ggaggccaggcugug

SEQ ID NO: 889840 - RNA, 22 nt, Human
aguuucuaacauauagcauugg

SEQ ID NO: 889841 - RNA, 22 nt, Human
caaguuuugcauaguucuguau

SEQ ID NO: 889842 - RNA, 18 nt, Human
cagagcagagguggagcg

SEQ ID NO: 889843 - RNA, 22 nt, Human
aggugaguccugggcacaggua

SEQ ID NO: 889844 - RNA, 22 nt, Human
aaaggacacacaggaggugucu

SEQ ID NO: 889845 - RNA, 22 nt, Human
ugauuauauuaacuauguuccu

SEQ ID NO: 889846 - RNA, 22 nt, Human
agcaugcauuuuuggacugugc

SEQ ID NO: 889847 - RNA, 22 nt, Human
uguacauacauagauauacaca

SEQ ID NO: 889848 - RNA, 22 nt, Human
aggcccugcccagagcuccucg

SEQ ID NO: 889849 - RNA, 22 nt, Human
cugugugugucugcagcauacu

SEQ ID NO: 889850 - RNA, 22 nt, Human
ugcagccuuuagaaguucagau

SEQ ID NO: 889851 - RNA, 22 nt, Human
ucuuuacaguccucugucaauc

SEQ ID NO: 889852 - RNA, 20 nt, Human
ucagagaaggagcuuuccug

SEQ ID NO: 889853 - RNA, 22 nt, Human
ccaggcuguuuucaaacuuggg

SEQ ID NO: 889854 - RNA, 22 nt, Human
auguaaacuuuaccagcucuga

SEQ ID NO: 889855 - RNA, 22 nt, Human
auuuaaauuuucugauggagag

SEQ ID NO: 889856 - RNA, 22 nt, Human
uccaggggagacuagacccaca

SEQ ID NO: 889857 - RNA, 22 nt, Human
ccaggaagacacaugcucaucc

SEQ ID NO: 889858 - RNA, 22 nt, Human
agcagcaggcugggaugagucu

SEQ ID NO: 889859 - RNA, 22 nt, Human
uguguucaaugacuucaucuuu

SEQ ID NO: 889860 - RNA, 22 nt, Human
uagggaaguguauaggggucau

SEQ ID NO: 889861 - RNA, 22 nt, Human
uuauuuccaaacuggauauacc

SEQ ID NO: 889862 - RNA, 22 nt, Human
ugcagcucugggguaaggggug

SEQ ID NO: 889863 - RNA, 22 nt, Human
auauuauucuaguaacagugau

SEQ ID NO: 889864 - RNA, 22 nt, Human
agcucccugcacgacccugccc

SEQ ID NO: 889865 - RNA, 22 nt, Human
uaccagcaacuggaagucagau

SEQ ID NO: 889866 - RNA, 22 nt, Human
auacuaaaguauagaacuuagu

SEQ ID NO: 889867 - RNA, 22 nt, Human
cccagacuccucuggcuggugg

SEQ ID NO: 889868 - RNA, 22 nt, Human
uguccccaagguucagcccaca

SEQ ID NO: 889869 - RNA, 22 nt, Human
aaaucuguuucucauaggguag

SEQ ID NO: 889870 - RNA, 22 nt, Human
ugcuccagggcugccagacccu

SEQ ID NO: 889871 - RNA, 22 nt, Human
acaaauagguagauuugcaaca

SEQ ID NO: 889872 - RNA, 22 nt, Human
gcugggaggaucucucccuguc

SEQ ID NO: 889873 - RNA, 22 nt, Human
augcaaucauauggcauacagc

SEQ ID NO: 889874 - RNA, 22 nt, Human
ugaugugugggcaugcagacag

SEQ ID NO: 889875 - RNA, 22 nt, Human
cucccucauauacccagcgaga

SEQ ID NO: 889876 - RNA, 22 nt, Human
uauuucuugaguggucaguuuc

SEQ ID NO: 889877 - RNA, 22 nt, Human
uggucccuaggaaagcaguguu

SEQ ID NO: 889878 - RNA, 22 nt, Human
ccugaguuaguugcugugucuc

SEQ ID NO: 889879 - RNA, 22 nt, Human
acauaugugcuuauauccauga

SEQ ID NO: 889880 - RNA, 22 nt, Human
agucuagauccccagugcuguc

SEQ ID NO: 889881 - RNA, 22 nt, Human
cagggccuguacaagucccacc

SEQ ID NO: 889882 - RNA, 23 nt, Human
acagugaaacacgcaguaagagu

SEQ ID NO: 889883 - RNA, 22 nt, Human
accagcugaguaggggagggcc

SEQ ID NO: 889884 - RNA, 22 nt, Human
ugggagcaccuugagggcagaa

SEQ ID NO: 889885 - RNA, 22 nt, Human
gugaagagcuguugcagagauu

SEQ ID NO: 889886 - RNA, 22 nt, Human
uccucuggggcgugguccugga

SEQ ID NO: 889887 - RNA, 20 nt, Human
cugcaggguuagaggcucca

SEQ ID NO: 889888 - RNA, 23 nt, Human
uacauucuguauuuuuauagagu

SEQ ID NO: 889889 - RNA, 22 nt, Human
uuagaacauuccaucacugggu

SEQ ID NO: 889890 - RNA, 22 nt, Human
cugcagggagguuccuuguucu

SEQ ID NO: 889891 - RNA, 22 nt, Human
ucagggagagccugucugacgu

SEQ ID NO: 889892 - RNA, 22 nt, Human
ggcugccauaacugauaccaua

SEQ ID NO: 889893 - RNA, 21 nt, Human
agacuucuagaagugagauag

SEQ ID NO: 889894 - RNA, 19 nt, Human
uuuuuaaugggcuggagca

SEQ ID NO: 889895 - RNA, 22 nt, Human
aggaacugauuuauaacuuuag

SEQ ID NO: 889896 - RNA, 22 nt, Human
ccaggccuggccaggggaugcc

SEQ ID NO: 889897 - RNA, 20 nt, Human
aaagagaagccucaccuugu

SEQ ID NO: 889898 - RNA, 22 nt, Human
ccagcuggcaggagagucaggg

SEQ ID NO: 889899 - RNA, 23 nt, Human
cuagggcaguauuucacagacac

SEQ ID NO: 889900 - RNA, 22 nt, Human
uaggccaguugguggcccugga

SEQ ID NO: 889901 - RNA, 22 nt, Human
caggagaaacauaauuuucugg

SEQ ID NO: 889902 - RNA, 22 nt, Human
aguguuucaagugaugcuuugg

SEQ ID NO: 889903 - RNA, 22 nt, Human
uucugacaguaaucaguuugcu

SEQ ID NO: 889904 - RNA, 22 nt, Human
uugagguaguggccuccaaaug

SEQ ID NO: 889905 - RNA, 22 nt, Human
auguuauggcucaaacauuugg

SEQ ID NO: 889906 - RNA, 18 nt, Human
ugaucuuugaguauaaug

SEQ ID NO: 889907 - RNA, 22 nt, Human
caaauccugcagggcuuagaug

SEQ ID NO: 889908 - RNA, 23 nt, Human
uggcuggcgccugccucacccug

SEQ ID NO: 889909 - RNA, 22 nt, Human
acagugcugaucuagacugacc

SEQ ID NO: 889910 - RNA, 22 nt, Human
acaguaaucauaugauuuucuc

SEQ ID NO: 889911 - RNA, 22 nt, Human
cacacaguaguaugaggcaaaa

SEQ ID NO: 889912 - RNA, 22 nt, Human
uuggauccaucucaggcauagg

SEQ ID NO: 889913 - RNA, 22 nt, Human
cccugagccacacagagcaggu

SEQ ID NO: 889914 - RNA, 22 nt, Human
cuggagcccugaaugggcagga

SEQ ID NO: 889915 - RNA, 22 nt, Human
agugaaauaugcccauugcugu

SEQ ID NO: 889916 - RNA, 22 nt, Human
agaggaaguaaucaggaccugc

SEQ ID NO: 889917 - RNA, 22 nt, Human
auugcugugaugauguucugag

SEQ ID NO: 889918 - RNA, 23 nt, Human
cucugcaggagagugggcagggc

SEQ ID NO: 889919 - RNA, 23 nt, Human
auguuuuaugucucuagcugcca

SEQ ID NO: 889920 - RNA, 20 nt, Human
ugguggagagaagcuauuug

SEQ ID NO: 889921 - RNA, 22 nt, Human
uugcucugaaccacaccaucac

SEQ ID NO: 889922 - RNA, 22 nt, Human
gcacaacaccaagggagguauc

SEQ ID NO: 889923 - RNA, 22 nt, Human
uaaaauagaggaugucaugcua

SEQ ID NO: 889924 - RNA, 22 nt, Human
aaaauagcauauugcuuucuuu

SEQ ID NO: 889925 - RNA, 22 nt, Human
uucaggagugucaggagugccu

SEQ ID NO: 889926 - RNA, 22 nt, Human
uuucuucucugauuaaggcuca

SEQ ID NO: 889927 - RNA, 22 nt, Human
gcccugaaggcagagguggagc

SEQ ID NO: 889928 - RNA, 22 nt, Human
cucuccacucagcgucaugucc

SEQ ID NO: 889929 - RNA, 21 nt, Human
uaacacauuuugguacuuugg

SEQ ID NO: 889930 - RNA, 22 nt, Human
aacaauuacuaccaaggccugu

SEQ ID NO: 889931 - RNA, 20 nt, Human
auacacauauucuugcaacu

SEQ ID NO: 889932 - RNA, 20 nt, Human
ucagacagucgcaguucugg

SEQ ID NO: 889933 - RNA, 22 nt, Human
cucuugaaaauuggaacacaga

SEQ ID NO: 889934 - RNA, 22 nt, Human
ucuauguugugugucacacaga

SEQ ID NO: 889935 - RNA, 22 nt, Human
cugugucucuaccuccccaucc

SEQ ID NO: 889936 - RNA, 22 nt, Human
guguuaaacauguucacagcau

SEQ ID NO: 889937 - RNA, 22 nt, Human
cauuucuagggaucauaaagua

SEQ ID NO: 889938 - RNA, 22 nt, Human
ugggcacauaguuuuaugguca

SEQ ID NO: 889939 - RNA, 22 nt, Human
agccccaguccgcugcgggcgg

SEQ ID NO: 889940 - RNA, 22 nt, Human
auguggcugguaguugacaacu

SEQ ID NO: 889941 - RNA, 22 nt, Human
gccaguuccuguggagucagag

SEQ ID NO: 889942 - RNA, 22 nt, Human
ggcaggugccuucugugcuagc

SEQ ID NO: 889943 - RNA, 22 nt, Human
guuucauaggcaugugaccuau

SEQ ID NO: 889944 - RNA, 22 nt, Human
uggcaggaaaguaacagagcac

SEQ ID NO: 889945 - RNA, 22 nt, Human
ggucacaggggagaagagugau

SEQ ID NO: 889946 - RNA, 22 nt, Human
cagagccucucagaggucagac

SEQ ID NO: 889947 - RNA, 22 nt, Human
cacacaggagagugcuggaggu

SEQ ID NO: 889948 - RNA, 22 nt, Human
uaucaauugggccaaaugguac

SEQ ID NO: 889949 - RNA, 22 nt, Human
ccagguccuguuuucaccacag

SEQ ID NO: 889950 - RNA, 22 nt, Human
cuucucucggugcaucccucac

SEQ ID NO: 889951 - RNA, 22 nt, Human
uggcagcagcuaacuuaggcag

SEQ ID NO: 889952 - RNA, 22 nt, Human
agucuuagaacuacagugccua

SEQ ID NO: 889953 - RNA, 22 nt, Human
cuauacagcagcuuacuaguua

SEQ ID NO: 889954 - RNA, 22 nt, Human
ugugccugaguuggcugaguac

SEQ ID NO: 889955 - RNA, 21 nt, Human
agaagccugaugaggucugcu

SEQ ID NO: 889956 - RNA, 22 nt, Human
gagcaagguagcucucuggggc

SEQ ID NO: 889957 - RNA, 19 nt, Human
auauacauacugugugcau

SEQ ID NO: 889958 - RNA, 22 nt, Human
cuagugcucuaggggcugaagg

SEQ ID NO: 889959 - RNA, 22 nt, Human
ccugagaccaaguugcagccau

SEQ ID NO: 889960 - RNA, 22 nt, Human
cucaucagaaauaccugacaaa

SEQ ID NO: 889961 - RNA, 22 nt, Human
uuucucauggcccuuggcuuuu

SEQ ID NO: 889962 - RNA, 22 nt, Human
accaaauauaucuuuugaccug

SEQ ID NO: 889963 - RNA, 22 nt, Human
guucuucagucacaucacagaa

SEQ ID NO: 889964 - RNA, 22 nt, Human
agggaagaagcugguaguaggu

SEQ ID NO: 889965 - RNA, 22 nt, Human
uugauuuuaaaauagugacacu

SEQ ID NO: 889966 - RNA, 22 nt, Human
uauuuuaucugccagaguggag

SEQ ID NO: 889967 - RNA, 17 nt, Human
ggcagggugcuggguau

SEQ ID NO: 889968 - RNA, 22 nt, Human
uauguacaaucagcaguucaua

SEQ ID NO: 889969 - RNA, 22 nt, Human
uaggaaugucuaugcagugagg

SEQ ID NO: 889970 - RNA, 17 nt, Human
caguggcagaucuucuc

SEQ ID NO: 889971 - RNA, 23 nt, Human
cagaagcaccuguugacugcugc

SEQ ID NO: 889972 - RNA, 22 nt, Human
cacagcuuagaaaagaagccau

SEQ ID NO: 889973 - RNA, 17 nt, Human
cuguggccaccuggaug

SEQ ID NO: 889974 - RNA, 22 nt, Human
ggcagcaauucuucagaaucau

SEQ ID NO: 889975 - RNA, 22 nt, Human
cagcuuuagagaaaacauauuu

SEQ ID NO: 889976 - RNA, 22 nt, Human
ucacaacugggugucuucauca

SEQ ID NO: 889977 - RNA, 22 nt, Human
uagagcugaguugacuccauuu

SEQ ID NO: 889978 - RNA, 22 nt, Human
acagaaugcagagaugcccaga

SEQ ID NO: 889979 - RNA, 22 nt, Human
agcaguggagcgagauguuuaa

SEQ ID NO: 889980 - RNA, 19 nt, Human
agcagcuuaauuuuguagc

SEQ ID NO: 889981 - RNA, 22 nt, Human
caguggaggcucaagugugcuu

SEQ ID NO: 889982 - RNA, 22 nt, Human
uaguucuauaagcagauagagu

SEQ ID NO: 889983 - RNA, 22 nt, Human
aagauacauauuuguucuagug

SEQ ID NO: 889984 - RNA, 22 nt, Human
cucuagaacugauugggaagaa

SEQ ID NO: 889985 - RNA, 22 nt, Human
agcugcagccgcagcuguggcc

SEQ ID NO: 889986 - RNA, 22 nt, Human
uaauugcugaacuacuaucccu

SEQ ID NO: 889987 - RNA, 22 nt, Human
ucucugaauuguuuaaguuauu

SEQ ID NO: 889988 - RNA, 21 nt, Human
uacauuugagagcuauaagcu

SEQ ID NO: 889989 - RNA, 22 nt, Human
cagaaggcauagaugaaggccu

SEQ ID NO: 889990 - RNA, 19 nt, Human
auuuggaaauaaggucuuc

SEQ ID NO: 889991 - RNA, 23 nt, Human
aagguauuuauuuuaaagguaag

SEQ ID NO: 889992 - RNA, 23 nt, Human
uacuuaggaauggggacggcaag

SEQ ID NO: 889993 - RNA, 22 nt, Human
gaaguuuagaguguuguaauuu

SEQ ID NO: 889994 - RNA, 22 nt, Human
acucugggaucuugaaaagagu

SEQ ID NO: 889995 - RNA, 22 nt, Human
agacucugauaagcaacucuug

SEQ ID NO: 889996 - RNA, 22 nt, Human
cucuggugucuccccuaagcua

SEQ ID NO: 889997 - RNA, 17 nt, Human
uacaaugugauucaauc

SEQ ID NO: 889998 - RNA, 22 nt, Human
gcgcgggguacacgcgguggcc

SEQ ID NO: 889999 - RNA, 22 nt, Human
uuugugaacuuaggcaauuagg

SEQ ID NO: 890000 - RNA, 22 nt, Human
agagggcauuaacucugucuug

SEQ ID NO: 890001 - RNA, 22 nt, Human
uugagggacagaggugcugucu

SEQ ID NO: 890002 - RNA, 22 nt, Human
ccaccaggcacucacagggaag

SEQ ID NO: 890003 - RNA, 20 nt, Human
aacaaucuagaagcuauucu

SEQ ID NO: 890004 - RNA, 22 nt, Human
agcagcagauccaaaaaaugug

SEQ ID NO: 890005 - RNA, 21 nt, Human
guuugcaguugaguccuuccc

SEQ ID NO: 890006 - RNA, 22 nt, Human
agagacaaugccaaugcacacg

SEQ ID NO: 890007 - RNA, 22 nt, Human
uaggaaacaaaguggaugaaau

SEQ ID NO: 890008 - RNA, 22 nt, Human
aguauuuccuggcuuaucugcu

SEQ ID NO: 890009 - RNA, 21 nt, Human
aucugaaguuugagaggaaag

SEQ ID NO: 890010 - RNA, 22 nt, Human
cagaggcuucaagucauucucc

SEQ ID NO: 890011 - RNA, 22 nt, Human
cagcaggaggcauggcuucccu

SEQ ID NO: 890012 - RNA, 22 nt, Human
ucagcuguuuugaguuuaauug

SEQ ID NO: 890013 - RNA, 18 nt, Human
guccauggccuccaccca

SEQ ID NO: 890014 - RNA, 22 nt, Human
agaaucuacauuuuaacaagau

SEQ ID NO: 890015 - RNA, 22 nt, Human
uucacaggcuuggagguggggg

SEQ ID NO: 890016 - RNA, 22 nt, Human
ugccgugcccauauugugggug

SEQ ID NO: 890017 - RNA, 22 nt, Human
gcaggagucacugacuuggucc

SEQ ID NO: 890018 - RNA, 22 nt, Human
aaugaaacaauuagcuguaaua

SEQ ID NO: 890019 - RNA, 22 nt, Human
aaucacaguggguacuagauug

SEQ ID NO: 890020 - RNA, 21 nt, Human
caggccgggugagcaggcagc

SEQ ID NO: 890021 - RNA, 22 nt, Human
cugucacugaugcuccugccac

SEQ ID NO: 890022 - RNA, 22 nt, Human
acaugcuacacagagcuccucg

SEQ ID NO: 890023 - RNA, 22 nt, Human
aaguguuuaaugguuuugauga

SEQ ID NO: 890024 - RNA, 22 nt, Human
uguccaaugcccuuuccacaug

SEQ ID NO: 890025 - RNA, 22 nt, Human
aguuaacacagucaggaguaac

SEQ ID NO: 890026 - RNA, 20 nt, Human
acacauauagcagcauaaac

SEQ ID NO: 890027 - RNA, 22 nt, Human
ugcuagggaagaacgagggaau

SEQ ID NO: 890028 - RNA, 22 nt, Human
auccauuugaaagaacagucca

SEQ ID NO: 890029 - RNA, 22 nt, Human
augguugagaagguaagguacc

SEQ ID NO: 890030 - RNA, 22 nt, Human
uuuuuggcccuuagcucuguau

SEQ ID NO: 890031 - RNA, 22 nt, Human
auagcauauaaguuauaaaacu

SEQ ID NO: 890032 - RNA, 22 nt, Human
cucuccugguguggaggacagg

SEQ ID NO: 890033 - RNA, 22 nt, Human
uauuuagaggagaaaaguggcu

SEQ ID NO: 890034 - RNA, 22 nt, Human
uugugcuaagcaauuugcuuaa

SEQ ID NO: 890035 - RNA, 22 nt, Human
auggaaagggaagcaaggaaca

SEQ ID NO: 890036 - RNA, 22 nt, Human
uuacaguauuguuaaacucuuu

SEQ ID NO: 890037 - RNA, 20 nt, Human
ucccucaguuuccagcccug

SEQ ID NO: 890038 - RNA, 21 nt, Human
agcagcaaccacauaguuuuu

SEQ ID NO: 890039 - RNA, 22 nt, Human
cuguggcuccauagaaguugca

SEQ ID NO: 890040 - RNA, 22 nt, Human
ggcacuggguuguaggaauuaa

SEQ ID NO: 890041 - RNA, 22 nt, Human
cagggaagagccgaugcugcag

SEQ ID NO: 890042 - RNA, 22 nt, Human
gaagaauauggcucucagcaau

SEQ ID NO: 890043 - RNA, 22 nt, Human
caagauuuauauuuucacacaa

SEQ ID NO: 890044 - RNA, 22 nt, Human
aaacaguuuuuuaagucucuag

SEQ ID NO: 890045 - RNA, 22 nt, Human
agaccugggugcccugugcuuu

SEQ ID NO: 890046 - RNA, 22 nt, Human
aagggagccaagaaagcagggc

SEQ ID NO: 890047 - RNA, 21 nt, Human
gaggaaaugcucugguguuca

SEQ ID NO: 890048 - RNA, 22 nt, Human
uuguaacagcugcuuaauagag

SEQ ID NO: 890049 - RNA, 22 nt, Human
uacugauaagaguuguaggagu

SEQ ID NO: 890050 - RNA, 22 nt, Human
auguuuacaaaaaggaggcuug

SEQ ID NO: 890051 - RNA, 22 nt, Human
cucugggugugacagcaccugg

SEQ ID NO: 890052 - RNA, 22 nt, Human
auaauaaaccaggaugggucug

SEQ ID NO: 890053 - RNA, 22 nt, Human
uuagaaccacugaagacucaca

SEQ ID NO: 890054 - RNA, 22 nt, Human
uuaaucaagaguggggacugug

SEQ ID NO: 890055 - RNA, 22 nt, Human
gucuggcucaguccuagcugua

SEQ ID NO: 890056 - RNA, 22 nt, Human
ccucaaauugucaaauaagaau

SEQ ID NO: 890057 - RNA, 22 nt, Human
accuugggcaaccugcuccugc

SEQ ID NO: 890058 - RNA, 20 nt, Human
aggagggaccuggauuggcg

SEQ ID NO: 890059 - RNA, 22 nt, Human
aucuagauuagguauaagagcu

SEQ ID NO: 890060 - RNA, 22 nt, Human
uuguuucuuugaaguuucuaga

SEQ ID NO: 890061 - RNA, 22 nt, Human
uccugcagaccucagucagguc

SEQ ID NO: 890062 - RNA, 22 nt, Human
aacuucauguaauuuaaaacag

SEQ ID NO: 890063 - RNA, 22 nt, Human
uccucugccaaagggaguugcc

SEQ ID NO: 890064 - RNA, 22 nt, Human
ugugaggaacaggacuagagca

SEQ ID NO: 890065 - RNA, 22 nt, Human
auaugaaaguaagcaugugugu

SEQ ID NO: 890066 - RNA, 22 nt, Human
ucugacagguugggauauggaa

SEQ ID NO: 890067 - RNA, 20 nt, Human
uauuuguauuugggaaaguu

SEQ ID NO: 890068 - RNA, 22 nt, Human
uggcuucuugggaugggucauu

SEQ ID NO: 890069 - RNA, 22 nt, Human
ucugucaccccuguuucuggcu

SEQ ID NO: 890070 - RNA, 22 nt, Human
caggaccuggaaugcuugugaa

SEQ ID NO: 890071 - RNA, 22 nt, Human
aguggcagcugucaugcccuag

SEQ ID NO: 890072 - RNA, 22 nt, Human
agagacuggagaugggcagugu

SEQ ID NO: 890073 - RNA, 22 nt, Human
uggagugggcaauguaggcaag

SEQ ID NO: 890074 - RNA, 22 nt, Human
ucaaaaguuucacauagagaua

SEQ ID NO: 890075 - RNA, 22 nt, Human
agauugggauuagagaucugua

SEQ ID NO: 890076 - RNA, 22 nt, Human
uagcuucuaauacuuaccaauu

SEQ ID NO: 890077 - RNA, 22 nt, Human
aagcugccugggaggaagggcu

SEQ ID NO: 890078 - RNA, 22 nt, Human
uguccuuuuccccaaauucacu

SEQ ID NO: 890079 - RNA, 22 nt, Human
aagaacauugauauugucuaug

SEQ ID NO: 890080 - RNA, 22 nt, Human
ugggugaggaugaugaggcagc

SEQ ID NO: 890081 - RNA, 17 nt, Human
gggaaguggagaaagcu

SEQ ID NO: 890082 - RNA, 22 nt, Human
gaagggaauuuggaggguuuca

SEQ ID NO: 890083 - RNA, 22 nt, Human
cauucauaggaggagaugauua

SEQ ID NO: 890084 - RNA, 22 nt, Human
cuggaggagcauggacuggagu

SEQ ID NO: 890085 - RNA, 18 nt, Human
ucuuggaguaaugaucaa

SEQ ID NO: 890086 - RNA, 22 nt, Human
cuggccuggcagggagggcaug

SEQ ID NO: 890087 - RNA, 22 nt, Human
ggacauuuagaacagaguauuu

SEQ ID NO: 890088 - RNA, 22 nt, Human
aggaagugggaagggucugcca

SEQ ID NO: 890089 - RNA, 20 nt, Human
uauuuacaacuuagagccuc

SEQ ID NO: 890090 - RNA, 22 nt, Human
auuuggaagguuuacaaagaga

SEQ ID NO: 890091 - RNA, 17 nt, Human
cugggccucugcccuuu

SEQ ID NO: 890092 - RNA, 22 nt, Human
aggaugagauugcuguguugua

SEQ ID NO: 890093 - RNA, 21 nt, Human
ccaggaaggacugagcucccu

SEQ ID NO: 890094 - RNA, 22 nt, Human
agccugugaaaucucugccacu

SEQ ID NO: 890095 - RNA, 22 nt, Human
ucuuuuaucuguuguguaacaa

SEQ ID NO: 890096 - RNA, 22 nt, Human
uguuuugugcacuucuauagca

SEQ ID NO: 890097 - RNA, 22 nt, Human
cagagagcacauaggauacuuu

SEQ ID NO: 890098 - RNA, 22 nt, Human
uggaguggacuucaugaggcca

SEQ ID NO: 890099 - RNA, 22 nt, Human
cagcucccagagugaccagcag

SEQ ID NO: 890100 - RNA, 22 nt, Human
cuaauuuuuguucugcauugaa

SEQ ID NO: 890101 - RNA, 22 nt, Human
gcagggcaguaagagcuagagu

SEQ ID NO: 890102 - RNA, 22 nt, Human
ccugggcaacauagggagaccc

SEQ ID NO: 890103 - RNA, 20 nt, Human
uauuuugcaauuaugguuca

SEQ ID NO: 890104 - RNA, 17 nt, Human
ugaaacaccaagacugu

SEQ ID NO: 890105 - RNA, 22 nt, Human
agucugcauucacagcaauuau

SEQ ID NO: 890106 - RNA, 22 nt, Human
ucugugcaguucuugucuugac

SEQ ID NO: 890107 - RNA, 23 nt, Human
ugggagcucaagggaggcugccc

SEQ ID NO: 890108 - RNA, 22 nt, Human
aaggcagucugguuucaaagca

SEQ ID NO: 890109 - RNA, 22 nt, Human
ugaaagcuuugggacaguguga

SEQ ID NO: 890110 - RNA, 22 nt, Human
ugccucagagaccugacaguac

SEQ ID NO: 890111 - RNA, 22 nt, Human
ggccaaaagcauaauccucaca

SEQ ID NO: 890112 - RNA, 22 nt, Human
auucugauucauuaggucuagg

SEQ ID NO: 890113 - RNA, 22 nt, Human
caggacaguuugcuuugcccug

SEQ ID NO: 890114 - RNA, 23 nt, Human
ucagcagcagaagugcugggaug

SEQ ID NO: 890115 - RNA, 22 nt, Human
ucugucuucaucagcaugugau

SEQ ID NO: 890116 - RNA, 22 nt, Human
ccagggccuacagcuuaagucc

SEQ ID NO: 890117 - RNA, 22 nt, Human
ggagaaggaagaaagcuacuau

SEQ ID NO: 890118 - RNA, 22 nt, Human
uucauagacccaugugaggaag

SEQ ID NO: 890119 - RNA, 23 nt, Human
uaggggaaaaaucuucugcaauu

SEQ ID NO: 890120 - RNA, 22 nt, Human
uaaaguguguggguucuaaauu

SEQ ID NO: 890121 - RNA, 22 nt, Human
ucccaggacaggccacauggaa

SEQ ID NO: 890122 - RNA, 22 nt, Human
gcccaggaaauaaaagugggcu

SEQ ID NO: 890123 - RNA, 22 nt, Human
aguaacaaauagcugccuuuaa

SEQ ID NO: 890124 - RNA, 17 nt, Human
uuuuggugaccuuggcc

SEQ ID NO: 890125 - RNA, 22 nt, Human
uggcaguccagacccuggacuc

SEQ ID NO: 890126 - RNA, 22 nt, Human
auuuguaagcuagagccaugau

SEQ ID NO: 890127 - RNA, 22 nt, Human
cuggccagugccugugggcccc

SEQ ID NO: 890128 - RNA, 22 nt, Human
ggagggagcauccccuugcuga

SEQ ID NO: 890129 - RNA, 22 nt, Human
ggggggugcugaucaguggagc

SEQ ID NO: 890130 - RNA, 22 nt, Human
ugucugaacugcacugaaagac

SEQ ID NO: 890131 - RNA, 22 nt, Human
augugaggaagaaagagguaag

SEQ ID NO: 890132 - RNA, 22 nt, Human
guuagagggaaaaaucauuugc

SEQ ID NO: 890133 - RNA, 21 nt, Human
uccaccagcucuuccucuuca

SEQ ID NO: 890134 - RNA, 22 nt, Human
cuguuuccauacagguuuuugg

SEQ ID NO: 890135 - RNA, 22 nt, Human
cacagugaagcaugcagacauc

SEQ ID NO: 890136 - RNA, 22 nt, Human
aggaggcucucagguccucccc

SEQ ID NO: 890137 - RNA, 22 nt, Human
ucacauuugauaaugcccauug

SEQ ID NO: 890138 - RNA, 22 nt, Human
uccaggagagguagaggguucc

SEQ ID NO: 890139 - RNA, 22 nt, Human
cccuagaacacgcagacacuga

SEQ ID NO: 890140 - RNA, 22 nt, Human
ugcagccuagacauucugguca

SEQ ID NO: 890141 - RNA, 22 nt, Human
ugcaggaauuuuuugcagaaag

SEQ ID NO: 890142 - RNA, 22 nt, Human
ggcuugagacccgggagccaga

SEQ ID NO: 890143 - RNA, 22 nt, Human
uagggaugaaguugcuauuuac

SEQ ID NO: 890144 - RNA, 22 nt, Human
ugccaggccaauucuauuugac

SEQ ID NO: 890145 - RNA, 22 nt, Human
uacaguuacuuugaaaauugau

SEQ ID NO: 890146 - RNA, 22 nt, Human
ccaggaagguaugggaagaaaa

SEQ ID NO: 890147 - RNA, 22 nt, Human
caggcugccaaggcuggggagg

SEQ ID NO: 890148 - RNA, 22 nt, Human
uggaaugaagacauguuguuug

SEQ ID NO: 890149 - RNA, 22 nt, Human
agagaaggcauagaacuugagu

SEQ ID NO: 890150 - RNA, 22 nt, Human
uagcugugcccagggaaguugu

SEQ ID NO: 890151 - RNA, 22 nt, Human
cugcagcugugagugcuggaug

SEQ ID NO: 890152 - RNA, 22 nt, Human
auuuccaaaaccacuuauugcc

SEQ ID NO: 890153 - RNA, 22 nt, Human
ucccucagcaggaauguggcag

SEQ ID NO: 890154 - RNA, 22 nt, Human
agccuggauccauguggcuacc

SEQ ID NO: 890155 - RNA, 22 nt, Human
gcagggaagaucuuggagcugc

SEQ ID NO: 890156 - RNA, 22 nt, Human
uaucagaaaugccuuaaauugg

SEQ ID NO: 890157 - RNA, 19 nt, Human
uguuucuuccuccaucuga

SEQ ID NO: 890158 - RNA, 22 nt, Human
auuuccuauuucuuguccccua

SEQ ID NO: 890159 - RNA, 22 nt, Human
ccaguccagugccaugcauggc

SEQ ID NO: 890160 - RNA, 22 nt, Human
gucaggcagccuggagauucag

SEQ ID NO: 890161 - RNA, 18 nt, Human
aggaagaccaucagauau

SEQ ID NO: 890162 - RNA, 22 nt, Human
uuggcccagacucggggacuga

SEQ ID NO: 890163 - RNA, 22 nt, Human
gugaagacuuggagaaguuaag

SEQ ID NO: 890164 - RNA, 22 nt, Human
caucucuccacggcagcucucg

SEQ ID NO: 890165 - RNA, 22 nt, Human
uugggcagcauugcaguucccu

SEQ ID NO: 890166 - RNA, 22 nt, Human
ucuaggaaagccuuucacaacu

SEQ ID NO: 890167 - RNA, 22 nt, Human
gagcuuggcagugucacuaggg

SEQ ID NO: 890168 - RNA, 23 nt, Human
ucucccugagguuguuagcauua

SEQ ID NO: 890169 - RNA, 22 nt, Human
gcgucucaaggcccccaggcca

SEQ ID NO: 890170 - RNA, 22 nt, Human
auuccacaugaaaggagcugaa

SEQ ID NO: 890171 - RNA, 22 nt, Human
gaucugagaucuaaaccagagg

SEQ ID NO: 890172 - RNA, 22 nt, Human
uaaugucuuaguaccuuaauuu

SEQ ID NO: 890173 - RNA, 22 nt, Human
ugggugguuuaugaguggguuu

SEQ ID NO: 890174 - RNA, 22 nt, Human
cagagacaggagugcucccagu

SEQ ID NO: 890175 - RNA, 22 nt, Human
ucacccagccuuggcggguuug

SEQ ID NO: 890176 - RNA, 22 nt, Human
aagcacagacucccucugagug

SEQ ID NO: 890177 - RNA, 22 nt, Human
gggugacauagugauggggcau

SEQ ID NO: 890178 - RNA, 22 nt, Human
aguuucauccgaucuggucuca

SEQ ID NO: 890179 - RNA, 22 nt, Human
ccugaggauuguuggugcuucc

SEQ ID NO: 890180 - RNA, 22 nt, Human
cagucuccugggggcuguuguu

SEQ ID NO: 890181 - RNA, 22 nt, Human
guucuucacauuuuggggucac

SEQ ID NO: 890182 - RNA, 21 nt, Human
cuuggaguugguugaggaugc

SEQ ID NO: 890183 - RNA, 22 nt, Human
aaugguaauauuucauaguugu

SEQ ID NO: 890184 - RNA, 22 nt, Human
aagcuuuuuggauuugcuucag

SEQ ID NO: 890185 - RNA, 22 nt, Human
gcugagucuugccugugcuguc

SEQ ID NO: 890186 - RNA, 22 nt, Human
uucauaaggguggccauauaaa

SEQ ID NO: 890187 - RNA, 22 nt, Human
ccugggucuccuccugcuggcu

SEQ ID NO: 890188 - RNA, 20 nt, Human
caggcacacucauuccugcu

SEQ ID NO: 890189 - RNA, 20 nt, Human
acacacagagacaugcgcau

SEQ ID NO: 890190 - RNA, 22 nt, Human
aagacaauuugauacuaguugc

SEQ ID NO: 890191 - RNA, 22 nt, Human
uggcagcagccauggaaggccc

SEQ ID NO: 890192 - RNA, 22 nt, Human
uauuuauaacagugagaacggg

SEQ ID NO: 890193 - RNA, 22 nt, Human
agucucuuaaugggcagaaagu

SEQ ID NO: 890194 - RNA, 23 nt, Human
aaagccaagucagucuacuggaa

SEQ ID NO: 890195 - RNA, 22 nt, Human
aggcuucaggaagucuccuggg

SEQ ID NO: 890196 - RNA, 22 nt, Human
cuggcugugugcccccggcacc

SEQ ID NO: 890197 - RNA, 22 nt, Human
gcagggacgccagggacagcaa

SEQ ID NO: 890198 - RNA, 22 nt, Human
agaggcugucccuugcuauucc

SEQ ID NO: 890199 - RNA, 23 nt, Human
uguacaaguacgaccucucccuc

SEQ ID NO: 890200 - RNA, 22 nt, Human
aagggcagggaguuugugucua

SEQ ID NO: 890201 - RNA, 22 nt, Human
gugacagagcugggauuugaag

SEQ ID NO: 890202 - RNA, 22 nt, Human
agaugaaaauacgugacuuuaa

SEQ ID NO: 890203 - RNA, 22 nt, Human
auguacuaaagaaauuugcagg

SEQ ID NO: 890204 - RNA, 22 nt, Human
uccacagucuauuuuuagucua

SEQ ID NO: 890205 - RNA, 22 nt, Human
augaggcagaaaaaagucggag

SEQ ID NO: 890206 - RNA, 22 nt, Human
aagucagaaaacagagcaauua

SEQ ID NO: 890207 - RNA, 22 nt, Human
caguguggguuugggaggagua

SEQ ID NO: 890208 - RNA, 22 nt, Human
aggagcagauugguaagaucau

SEQ ID NO: 890209 - RNA, 22 nt, Human
ccacagaaaauaaagcacgauu

SEQ ID NO: 890210 - RNA, 22 nt, Human
uuugaagugggcauuagaaccu

SEQ ID NO: 890211 - RNA, 22 nt, Human
cagaaugagauaacccagauug

SEQ ID NO: 890212 - RNA, 22 nt, Human
ugauagaaaaugcugucaagcu

SEQ ID NO: 890213 - RNA, 22 nt, Human
ccuuuguucauugccuucaguc

SEQ ID NO: 890214 - RNA, 22 nt, Human
agugucuuuagcaaguuuaguc

SEQ ID NO: 890215 - RNA, 22 nt, Human
uacagaauaaagcgugaagcuu

SEQ ID NO: 890216 - RNA, 22 nt, Human
uucucuuuauguauuuaguggg

SEQ ID NO: 890217 - RNA, 22 nt, Human
ggcugggcuccgggagcaugcg

SEQ ID NO: 890218 - RNA, 22 nt, Human
cucucuuucauuggucgccuug

SEQ ID NO: 890219 - RNA, 22 nt, Human
aauauaaugcuguuuuaugcca

SEQ ID NO: 890220 - RNA, 22 nt, Human
auccugaaaauugaauggaagg

SEQ ID NO: 890221 - RNA, 22 nt, Human
uaauuggauguucucuggaagc

SEQ ID NO: 890222 - RNA, 22 nt, Human
ccuggaugauccaugucaugga

SEQ ID NO: 890223 - RNA, 22 nt, Human
uucacacacagcuuccuauugu

SEQ ID NO: 890224 - RNA, 22 nt, Human
uaacaacaugcaauuuaaccuu

SEQ ID NO: 890225 - RNA, 22 nt, Human
augggggaaaguacgagcaugg

SEQ ID NO: 890226 - RNA, 22 nt, Human
aggagccaggaaaccugcucug

SEQ ID NO: 890227 - RNA, 20 nt, Human
ggguccugacuuggucuccu

SEQ ID NO: 890228 - RNA, 22 nt, Human
ggagagaauuccauggacaugu

SEQ ID NO: 890229 - RNA, 22 nt, Human
uuugugugugcucacauagaug

SEQ ID NO: 890230 - RNA, 22 nt, Human
aggcucuggaguuagccaggca

SEQ ID NO: 890231 - RNA, 22 nt, Human
ugcuuuauguggcugauacuca

SEQ ID NO: 890232 - RNA, 22 nt, Human
uuaacagacauauauauuugua

SEQ ID NO: 890233 - RNA, 19 nt, Human
ccacagccugcugucuucc

SEQ ID NO: 890234 - RNA, 22 nt, Human
gcagauggcagcccaggcuggg

SEQ ID NO: 890235 - RNA, 22 nt, Human
gguccuggaaauugacggaaag

SEQ ID NO: 890236 - RNA, 22 nt, Human
agcaggcacaagaaagggaggu

SEQ ID NO: 890237 - RNA, 22 nt, Human
ucugcaagcgucacaugauucu

SEQ ID NO: 890238 - RNA, 22 nt, Human
gaagcagcuuucuggugaggag

SEQ ID NO: 890239 - RNA, 22 nt, Human
ccaggccugauugggaaucuug

SEQ ID NO: 890240 - RNA, 22 nt, Human
aaaaguaauugcaguuuucgcc

SEQ ID NO: 890241 - RNA, 22 nt, Human
aagguuaguuuucaauaauuac

SEQ ID NO: 890242 - RNA, 22 nt, Human
aagcugaagccggaucaaaaag

SEQ ID NO: 890243 - RNA, 22 nt, Human
gguuuccaggagaagagauuug

SEQ ID NO: 890244 - RNA, 22 nt, Human
uccuaagauagaagauagugaa

SEQ ID NO: 890245 - RNA, 22 nt, Human
auuauguagguuaggugguugu

SEQ ID NO: 890246 - RNA, 22 nt, Human
ugaggggcauguguuuacacau

SEQ ID NO: 890247 - RNA, 22 nt, Human
uccaggcugacgcagcuauuua

SEQ ID NO: 890248 - RNA, 22 nt, Human
acaguuuaucgauucaccuacc

SEQ ID NO: 890249 - RNA, 23 nt, Human
uguaacaauuucauauacaugca

SEQ ID NO: 890250 - RNA, 22 nt, Human
acauuaaaauggagaauuuuga

SEQ ID NO: 890251 - RNA, 22 nt, Human
cagggcuggcuguggcaaucuc

SEQ ID NO: 890252 - RNA, 22 nt, Human
cugcccacacucauggggaagg

SEQ ID NO: 890253 - RNA, 22 nt, Human
agcccggcuuccccgguugcua

SEQ ID NO: 890254 - RNA, 22 nt, Human
gaaugucuuauugcucguugua

SEQ ID NO: 890255 - RNA, 22 nt, Human
caaugcacauggacaucaggcu

SEQ ID NO: 890256 - RNA, 22 nt, Human
auacauacguacauacguaugu

SEQ ID NO: 890257 - RNA, 22 nt, Human
uccccacacagauacagaguag

SEQ ID NO: 890258 - RNA, 17 nt, Human
ugaaagaaucagggaga

SEQ ID NO: 890259 - RNA, 22 nt, Human
ugagaacauugggaaagcuaug

SEQ ID NO: 890260 - RNA, 22 nt, Human
gcuguaggucauuuaaucaccu

SEQ ID NO: 890261 - RNA, 22 nt, Human
auacaaguugugauaauguaaa

SEQ ID NO: 890262 - RNA, 22 nt, Human
agcagggaagccuccagaaccu

SEQ ID NO: 890263 - RNA, 22 nt, Human
uucaaguuuugacuuaguccuu

SEQ ID NO: 890264 - RNA, 22 nt, Human
ugcaccaagucuggcacugaau

SEQ ID NO: 890265 - RNA, 22 nt, Human
ucuucacaucauguuuuuuaau

SEQ ID NO: 890266 - RNA, 18 nt, Human
gcucagguauagacaggg

SEQ ID NO: 890267 - RNA, 22 nt, Human
uuggaggggccacugcagagcu

SEQ ID NO: 890268 - RNA, 22 nt, Human
uaguaauaaguugugcuuugau

SEQ ID NO: 890269 - RNA, 22 nt, Human
aauguuugaacuuugcauauuu

SEQ ID NO: 890270 - RNA, 22 nt, Human
uucugaaggucagcagcuuggu

SEQ ID NO: 890271 - RNA, 22 nt, Human
guggaggacaaaagaagccuuu

SEQ ID NO: 890272 - RNA, 22 nt, Human
cugagcugggacucaguagcaa

SEQ ID NO: 890273 - RNA, 22 nt, Human
uccagccuaggggaacagcugc

SEQ ID NO: 890274 - RNA, 22 nt, Human
acuccuggggauccauuccuuu

SEQ ID NO: 890275 - RNA, 22 nt, Human
uggcagagaugaagaguuguuu

SEQ ID NO: 890276 - RNA, 22 nt, Human
ccagagguggugggugcuacag

SEQ ID NO: 890277 - RNA, 22 nt, Human
acuauaaaaggauaaaccagaa

SEQ ID NO: 890278 - RNA, 22 nt, Human
ccugucuguccucucaugagcc

SEQ ID NO: 890279 - RNA, 22 nt, Human
guccugagcccucagcacagca

SEQ ID NO: 890280 - RNA, 22 nt, Human
gugugugugccugcacacacac

SEQ ID NO: 890281 - RNA, 22 nt, Human
ucugcacaccgccaggcugacu

SEQ ID NO: 890282 - RNA, 22 nt, Human
acauacaucaaguaucacaaga

SEQ ID NO: 890283 - RNA, 22 nt, Human
gaucuuucaucuauguauuuag

SEQ ID NO: 890284 - RNA, 18 nt, Human
guggucuuucugucuucu

SEQ ID NO: 890285 - RNA, 22 nt, Human
aucuagaacaauuauugucaca

SEQ ID NO: 890286 - RNA, 22 nt, Human
ugaaugaaugaauuaauagagu

SEQ ID NO: 890287 - RNA, 22 nt, Human
cuugggggccauuaaggggccu

SEQ ID NO: 890288 - RNA, 22 nt, Human
gaauuuuaaguguucgccucuu

SEQ ID NO: 890289 - RNA, 22 nt, Human
ucuccaggagaaauaugaagga

SEQ ID NO: 890290 - RNA, 22 nt, Human
agaacucucgcuggaucagacu

SEQ ID NO: 890291 - RNA, 22 nt, Human
gcuuuagaucugacuuucugug

SEQ ID NO: 890292 - RNA, 22 nt, Human
auuugugauaauuuguuacagc

SEQ ID NO: 890293 - RNA, 18 nt, Human
gugagcagagagcaucac

SEQ ID NO: 890294 - RNA, 22 nt, Human
auuuuacuuaguguaaugucca

SEQ ID NO: 890295 - RNA, 22 nt, Human
aaguguuaaagacuugaacacu

SEQ ID NO: 890296 - RNA, 18 nt, Human
augcucuagucuuuccug

SEQ ID NO: 890297 - RNA, 22 nt, Human
aucucagggcuggagcccugga

SEQ ID NO: 890298 - RNA, 22 nt, Human
cagaggcacagugcgggccacu

SEQ ID NO: 890299 - RNA, 22 nt, Human
uuuaaauguucaugauacugaa

SEQ ID NO: 890300 - RNA, 22 nt, Human
agcaauuucucgcaccagacgc

SEQ ID NO: 890301 - RNA, 22 nt, Human
ugagacaguuggugaaaucuaa

SEQ ID NO: 890302 - RNA, 22 nt, Human
uuauucuuggaucugagucucu

SEQ ID NO: 890303 - RNA, 22 nt, Human
ccaaacauuucaaauuuagaga

SEQ ID NO: 890304 - RNA, 22 nt, Human
augucagaagaacaaugagaua

SEQ ID NO: 890305 - RNA, 22 nt, Human
cuagggaguggcagagcuggga

SEQ ID NO: 890306 - RNA, 22 nt, Human
ucaugaaaauagaucagaaauu

SEQ ID NO: 890307 - RNA, 22 nt, Human
ucaaucuguuccauuagaacau

SEQ ID NO: 890308 - RNA, 22 nt, Human
auuacacaggauuugccuuacu

SEQ ID NO: 890309 - RNA, 21 nt, Human
agauuacaggugugauccacc

SEQ ID NO: 890310 - RNA, 22 nt, Human
acucccagguugccuggcaggc

SEQ ID NO: 890311 - RNA, 22 nt, Human
cuauuugggguagaagauggau

SEQ ID NO: 890312 - RNA, 22 nt, Human
acauucuucagcuuugucaggc

SEQ ID NO: 890313 - RNA, 22 nt, Human
ugggaugagggugagccacaug

SEQ ID NO: 890314 - RNA, 22 nt, Human
cugcuguguuggcauuggauag

SEQ ID NO: 890315 - RNA, 22 nt, Human
ggucuagaguggggccuggaaa

SEQ ID NO: 890316 - RNA, 22 nt, Human
auauacuuggagacuaucauug

SEQ ID NO: 890317 - RNA, 22 nt, Human
guguaaaaacauacuauuucua

SEQ ID NO: 890318 - RNA, 22 nt, Human
ccucaagucauuccggagaccu

SEQ ID NO: 890319 - RNA, 22 nt, Human
cacagauuaugagacgagauac

SEQ ID NO: 890320 - RNA, 22 nt, Human
augggccuugacacauggagug

SEQ ID NO: 890321 - RNA, 22 nt, Human
auuucucagaccagagaggugu

SEQ ID NO: 890322 - RNA, 20 nt, Human
ucuggggaugaggucuagga

SEQ ID NO: 890323 - RNA, 22 nt, Human
ucucagugggaagggcacaguu

SEQ ID NO: 890324 - RNA, 22 nt, Human
gggagagguuacccgagcaacu

SEQ ID NO: 890325 - RNA, 22 nt, Human
ucgccagggaugcuguaaggaa

SEQ ID NO: 890326 - RNA, 22 nt, Human
ucuguggcugucuuuccagagg

SEQ ID NO: 890327 - RNA, 18 nt, Human
guucaaggucaagagaga

SEQ ID NO: 890328 - RNA, 22 nt, Human
uuaugacauaugaguacaagua

SEQ ID NO: 890329 - RNA, 22 nt, Human
ccagcuguuucugaugcuaggc

SEQ ID NO: 890330 - RNA, 18 nt, Human
uguuuauucuccugacag

SEQ ID NO: 890331 - RNA, 22 nt, Human
cuccugagucuccacgccccgu

SEQ ID NO: 890332 - RNA, 22 nt, Human
ucaauucaguccaacaguaauu

SEQ ID NO: 890333 - RNA, 22 nt, Human
agucuuagagucugugucauga

SEQ ID NO: 890334 - RNA, 22 nt, Human
gagguauuuuugcaugccugau

SEQ ID NO: 890335 - RNA, 22 nt, Human
caucuuuguuucaucuguccag

SEQ ID NO: 890336 - RNA, 22 nt, Human
ccagcccuguuuaugugucacu

SEQ ID NO: 890337 - RNA, 22 nt, Human
cugggucuggcuacugcuuccu

SEQ ID NO: 890338 - RNA, 22 nt, Human
gccaaaguccuccagccaugca

SEQ ID NO: 890339 - RNA, 22 nt, Human
gcuuuucauagauaaaauucua

SEQ ID NO: 890340 - RNA, 22 nt, Human
ggccagcuuucugucuucuagg

SEQ ID NO: 890341 - RNA, 22 nt, Human
gugcuuuaaaaauaggagauga

SEQ ID NO: 890342 - RNA, 22 nt, Human
uuuagcaaggagaaauaauccu

SEQ ID NO: 890343 - RNA, 22 nt, Human
uugugcucuaaggucagggcga

SEQ ID NO: 890344 - RNA, 22 nt, Human
ggccaaaucuguaaggcaagau

SEQ ID NO: 890345 - RNA, 20 nt, Human
agcagcauuguucuagagca

SEQ ID NO: 890346 - RNA, 21 nt, Human
gcaggggauagaaauggucug

SEQ ID NO: 890347 - RNA, 22 nt, Human
ucugggcuuuuccaugccugug

SEQ ID NO: 890348 - RNA, 22 nt, Human
uugcuuuuaauuaaucauugcu

SEQ ID NO: 890349 - RNA, 22 nt, Human
caggaaaucacucugauuuugg

SEQ ID NO: 890350 - RNA, 22 nt, Human
cagaggcaggauaagaacugcg

SEQ ID NO: 890351 - RNA, 22 nt, Human
auuagcaaaacaacuuuucuau

SEQ ID NO: 890352 - RNA, 22 nt, Human
uacacagugaguccucucugcc

SEQ ID NO: 890353 - RNA, 22 nt, Human
ugcagcugcuugauucaucuug

SEQ ID NO: 890354 - RNA, 22 nt, Human
gcacugggugugaggcagcguc

SEQ ID NO: 890355 - RNA, 22 nt, Human
cagcaucaacauucucagcucu

SEQ ID NO: 890356 - RNA, 22 nt, Human
ccuuuugcucucccauccagaa

SEQ ID NO: 890357 - RNA, 22 nt, Human
gagugcaauguagacaucaggg

SEQ ID NO: 890358 - RNA, 22 nt, Human
gaggccuugggaugugccacgg

SEQ ID NO: 890359 - RNA, 22 nt, Human
uaagcaagggucucuguaucag

SEQ ID NO: 890360 - RNA, 22 nt, Human
ccagcucuguaagcugugaaau

SEQ ID NO: 890361 - RNA, 22 nt, Human
cuagaaaugcucaagagaaagu

SEQ ID NO: 890362 - RNA, 22 nt, Human
ugccuggcugaggugacagguu

SEQ ID NO: 890363 - RNA, 22 nt, Human
caugaucaccacuugacagccc

SEQ ID NO: 890364 - RNA, 22 nt, Human
ugaccauggugugcccugugcg

SEQ ID NO: 890365 - RNA, 22 nt, Human
uaagacauccuggauguucaaa

SEQ ID NO: 890366 - RNA, 19 nt, Human
aggcaggugcagagguccc

SEQ ID NO: 890367 - RNA, 18 nt, Human
uggguggcuagggaguuu

SEQ ID NO: 890368 - RNA, 23 nt, Human
agagacauuuggauacagaaaca

SEQ ID NO: 890369 - RNA, 22 nt, Human
agguggugaugacagaagacag

SEQ ID NO: 890370 - RNA, 19 nt, Human
ggggagaacuagagacagc

SEQ ID NO: 890371 - RNA, 22 nt, Human
gaugagguuuuugaaaugugga

SEQ ID NO: 890372 - RNA, 19 nt, Human
cucugcuugguccauaugc

SEQ ID NO: 890373 - RNA, 22 nt, Human
cgccugggaguccacaccugcu

SEQ ID NO: 890374 - RNA, 22 nt, Human
agcuggaauuacaggcacgcac

SEQ ID NO: 890375 - RNA, 22 nt, Human
aacaugcagugagccgaugagg

SEQ ID NO: 890376 - RNA, 22 nt, Human
cauaaugucugacacaguaaga

SEQ ID NO: 890377 - RNA, 22 nt, Human
acacaguuuaaacgauuaguac

SEQ ID NO: 890378 - RNA, 19 nt, Human
uguggggagucagggggcu

SEQ ID NO: 890379 - RNA, 22 nt, Human
caggggccaaggguccagaccu

SEQ ID NO: 890380 - RNA, 22 nt, Human
ugucagcagcugguuugcuguu

SEQ ID NO: 890381 - RNA, 22 nt, Human
agaaaaguuuaaaucuuggcac

SEQ ID NO: 890382 - RNA, 22 nt, Human
ccagcagcugcaaagccugggu

SEQ ID NO: 890383 - RNA, 22 nt, Human
ccauaaucuggcuuugagagag

SEQ ID NO: 890384 - RNA, 22 nt, Human
acagcuucgaggaucucauccc

SEQ ID NO: 890385 - RNA, 22 nt, Human
ucugugucagaagauaucaugg

SEQ ID NO: 890386 - RNA, 22 nt, Human
cuggagccacugggucuuguau

SEQ ID NO: 890387 - RNA, 22 nt, Human
ugcaggugcuccgggggugccc

SEQ ID NO: 890388 - RNA, 22 nt, Human
uauauuauaagcccuuucagaa

SEQ ID NO: 890389 - RNA, 22 nt, Human
caguguggcuuagggaauaggc

SEQ ID NO: 890390 - RNA, 23 nt, Human
acucacaaagcaggaucauguug

SEQ ID NO: 890391 - RNA, 22 nt, Human
agacacaguuugggauggguug

SEQ ID NO: 890392 - RNA, 22 nt, Human
gcagccaggaaagcuggacccu

SEQ ID NO: 890393 - RNA, 22 nt, Human
ucacacauaaaaagaagacuag

SEQ ID NO: 890394 - RNA, 22 nt, Human
augcauuugacgggauauauuu

SEQ ID NO: 890395 - RNA, 20 nt, Human
uggcggggaugagggaguua

SEQ ID NO: 890396 - RNA, 22 nt, Human
acuacaguacuauaucuauagg

SEQ ID NO: 890397 - RNA, 22 nt, Human
aagagcuccaggcaaugcgguc

SEQ ID NO: 890398 - RNA, 22 nt, Human
uuucuuauacuauauugucauc

SEQ ID NO: 890399 - RNA, 22 nt, Human
cuguagagaaagcauggaagcu

SEQ ID NO: 890400 - RNA, 22 nt, Human
cugcaguuggauaaagauacuu

SEQ ID NO: 890401 - RNA, 22 nt, Human
uuaggaauauagacuaaguaga

SEQ ID NO: 890402 - RNA, 22 nt, Human
caauguuuacuggggacccaga

SEQ ID NO: 890403 - RNA, 22 nt, Human
ggagguaugauagcuguguccu

SEQ ID NO: 890404 - RNA, 22 nt, Human
gcacugggaaugagggcagcuu

SEQ ID NO: 890405 - RNA, 23 nt, Human
uuauaagaagcaucacaggaaga

SEQ ID NO: 890406 - RNA, 21 nt, Human
uucuguuuuuuguaccagggc

SEQ ID NO: 890407 - RNA, 22 nt, Human
agcagcucuggcacuguagcau

SEQ ID NO: 890408 - RNA, 22 nt, Human
ucuuccuugcuccuugucacuu

SEQ ID NO: 890409 - RNA, 21 nt, Human
ugcaagaaucaggaagcugcc

SEQ ID NO: 890410 - RNA, 22 nt, Human
cagcuucuaaagugugaagcca

SEQ ID NO: 890411 - RNA, 23 nt, Human
uacagaaggaguagucacuaaga

SEQ ID NO: 890412 - RNA, 22 nt, Human
guguggcuugggugaggcgccu

SEQ ID NO: 890413 - RNA, 22 nt, Human
ggaagcugaauccagagacagg

SEQ ID NO: 890414 - RNA, 22 nt, Human
cauuuguacagaacagcuuuau

SEQ ID NO: 890415 - RNA, 22 nt, Human
uagcagggagggccagugucaa

SEQ ID NO: 890416 - RNA, 23 nt, Human
gagagcugacugucaagacuguu

SEQ ID NO: 890417 - RNA, 22 nt, Human
augcuucccuuugcuccacaug

SEQ ID NO: 890418 - RNA, 22 nt, Human
acucauauacuguuguuuuuaa

SEQ ID NO: 890419 - RNA, 22 nt, Human
gaauuacauaauaaaaugagag

SEQ ID NO: 890420 - RNA, 22 nt, Human
uuggcacugaccaaagaagucc

SEQ ID NO: 890421 - RNA, 23 nt, Human
gccaauuuaguaaaggcaguggg

SEQ ID NO: 890422 - RNA, 22 nt, Human
ugaaagaguuugacaugauucu

SEQ ID NO: 890423 - RNA, 23 nt, Human
gcucuaucaggaacaagccaggu

SEQ ID NO: 890424 - RNA, 22 nt, Human
ugcagcauugcaaagcagucuu

SEQ ID NO: 890425 - RNA, 22 nt, Human
cagcaauggcaggcggagagug

SEQ ID NO: 890426 - RNA, 23 nt, Human
ccugcagcugccacgcccugcuc

SEQ ID NO: 890427 - RNA, 22 nt, Human
ugucuuaugcugcauagacuau

SEQ ID NO: 890428 - RNA, 22 nt, Human
agcugggguugcacacauuuug

SEQ ID NO: 890429 - RNA, 22 nt, Human
caguggcacccacgggcugggc

SEQ ID NO: 890430 - RNA, 22 nt, Human
ccaggccagccuggagcauggc

SEQ ID NO: 890431 - RNA, 22 nt, Human
gugggcagauuauagaugaugc

SEQ ID NO: 890432 - RNA, 22 nt, Human
caugccauuugguggauugaga

SEQ ID NO: 890433 - RNA, 22 nt, Human
agccuccuggaguuucugggau

SEQ ID NO: 890434 - RNA, 21 nt, Human
gcagaggcacggcaccaaggg

SEQ ID NO: 890435 - RNA, 22 nt, Human
cacagagacaugaugucauugc

SEQ ID NO: 890436 - RNA, 22 nt, Human
uuugacagcuugcagugagacc

SEQ ID NO: 890437 - RNA, 22 nt, Human
cuaccuuaucagagugguaagg

SEQ ID NO: 890438 - RNA, 22 nt, Human
gcucugaggcugggagcacucu

SEQ ID NO: 890439 - RNA, 22 nt, Human
uacacagauuucaguaucauca

SEQ ID NO: 890440 - RNA, 22 nt, Human
agcuggcaggugaagaugauuu

SEQ ID NO: 890441 - RNA, 22 nt, Human
uggcuucacacaggcacuuccg

SEQ ID NO: 890442 - RNA, 22 nt, Human
auuauuuagaaaucgauugaaa

SEQ ID NO: 890443 - RNA, 22 nt, Human
gauaaauugcacuuuuucuuac

SEQ ID NO: 890444 - RNA, 22 nt, Human
acauuuuuacugggcaucugca

SEQ ID NO: 890445 - RNA, 22 nt, Human
caugcugggccuugggugcacu

SEQ ID NO: 890446 - RNA, 22 nt, Human
uucucuaagcuggcugaggucu

SEQ ID NO: 890447 - RNA, 22 nt, Human
ucucuaaagauauuuauggcaa

SEQ ID NO: 890448 - RNA, 22 nt, Human
ugccuggguucccaccccaaag

SEQ ID NO: 890449 - RNA, 22 nt, Human
aggcuguggcccuggucuagca

SEQ ID NO: 890450 - RNA, 22 nt, Human
uucaugaauguuccaugugagu

SEQ ID NO: 890451 - RNA, 22 nt, Human
auuucagauucgagaggaagug

SEQ ID NO: 890452 - RNA, 22 nt, Human
uuccucuuauuuucccagugau

SEQ ID NO: 890453 - RNA, 22 nt, Human
auguuucaaugcacuuuagccu

SEQ ID NO: 890454 - RNA, 22 nt, Human
gugcuggacccuggaagguggu

SEQ ID NO: 890455 - RNA, 23 nt, Human
acagggcuggcagcugcaagacc

SEQ ID NO: 890456 - RNA, 22 nt, Human
uuggcagccaggacccgccugg

SEQ ID NO: 890457 - RNA, 22 nt, Human
cucaggaugucggugacuauug

SEQ ID NO: 890458 - RNA, 22 nt, Human
gcagccacuuugcaaccaagag

SEQ ID NO: 890459 - RNA, 22 nt, Human
uaaugcuuuuccuucaaauaag

SEQ ID NO: 890460 - RNA, 22 nt, Human
aaguuucugauauuguuaaagc

SEQ ID NO: 890461 - RNA, 22 nt, Human
uuugccucucagagucuacaca

SEQ ID NO: 890462 - RNA, 22 nt, Human
cagagguguacagagggaggcc

SEQ ID NO: 890463 - RNA, 22 nt, Human
gcacagcucgagcucaggaggg

SEQ ID NO: 890464 - RNA, 19 nt, Human
agcccagcuuauuugucag

SEQ ID NO: 890465 - RNA, 23 nt, Human
uuucucugagaagcaguucucua

SEQ ID NO: 890466 - RNA, 20 nt, Human
auugugaauacugcauaugu

SEQ ID NO: 890467 - RNA, 22 nt, Human
cagaaguuagugucugccagua

SEQ ID NO: 890468 - RNA, 21 nt, Human
aaaguucaugcuuuaauauuc

SEQ ID NO: 890469 - RNA, 22 nt, Human
gacagugcuaugguaggacauu

SEQ ID NO: 890470 - RNA, 22 nt, Human
cuggucccagcucugccaccaa

SEQ ID NO: 890471 - RNA, 22 nt, Human
cugggccuggggcuguugagag

SEQ ID NO: 890472 - RNA, 22 nt, Human
caaucagauaugugacauauuu

SEQ ID NO: 890473 - RNA, 20 nt, Human
uuugcuguggguguaagaau

SEQ ID NO: 890474 - RNA, 22 nt, Human
augucaaacacaacaccagugg

SEQ ID NO: 890475 - RNA, 22 nt, Human
ugucuuuuaguuugugagaucu

SEQ ID NO: 890476 - RNA, 22 nt, Human
uugcaaaaaccacaauuacuuu

SEQ ID NO: 890477 - RNA, 23 nt, Human
uuuauacaagaaaccgcuggccu

SEQ ID NO: 890478 - RNA, 22 nt, Human
aagaaauauugggccuuauaaa

SEQ ID NO: 890479 - RNA, 22 nt, Human
gggugggauggcaggagccgcu

SEQ ID NO: 890480 - RNA, 22 nt, Human
aggaacugucauguauugcuca

SEQ ID NO: 890481 - RNA, 22 nt, Human
gggcugagagcuggaaucugag

SEQ ID NO: 890482 - RNA, 22 nt, Human
cugggcccacgagggcucuggg

SEQ ID NO: 890483 - RNA, 22 nt, Human
cugcuuuaauguaagauauacc

SEQ ID NO: 890484 - RNA, 22 nt, Human
cuugccugcuggagcagggcuc

SEQ ID NO: 890485 - RNA, 22 nt, Human
ggcagguguuuuuauauuaaag

SEQ ID NO: 890486 - RNA, 22 nt, Human
aguuuccaggcaggagcuaauu

SEQ ID NO: 890487 - RNA, 22 nt, Human
cugcccaccacaccugcuccug

SEQ ID NO: 890488 - RNA, 22 nt, Human
gugcagaaguaacaauuaaaga

SEQ ID NO: 890489 - RNA, 22 nt, Human
agucacuguucugucaugucaa

SEQ ID NO: 890490 - RNA, 22 nt, Human
ugguauauguguuagcacaagu

SEQ ID NO: 890491 - RNA, 22 nt, Human
uacauucaaacgauuuauugau

SEQ ID NO: 890492 - RNA, 22 nt, Human
uuaagguagucagccucugugu

SEQ ID NO: 890493 - RNA, 22 nt, Human
ccugccagaaaagagggaguuc

SEQ ID NO: 890494 - RNA, 22 nt, Human
gaauaucuuguacaucuaagua

SEQ ID NO: 890495 - RNA, 22 nt, Human
cucuagcagcagcccuuccuua

SEQ ID NO: 890496 - RNA, 22 nt, Human
caccugccugguccuuagggcu

SEQ ID NO: 890497 - RNA, 18 nt, Human
ugguuccuugaaggggca

SEQ ID NO: 890498 - RNA, 22 nt, Human
aaguuuuugguagagaaaagua

SEQ ID NO: 890499 - RNA, 22 nt, Human
cagcaugcagccccuggcagcu

SEQ ID NO: 890500 - RNA, 22 nt, Human
cuaaauuauuugcacauuagag

SEQ ID NO: 890501 - RNA, 22 nt, Human
ugcaaauuucuuuaguacauaa

SEQ ID NO: 890502 - RNA, 22 nt, Human
acugagagucaagauagcaugg

SEQ ID NO: 890503 - RNA, 21 nt, Human
ggcagcugaccgcgcggugca

SEQ ID NO: 890504 - RNA, 22 nt, Human
cagacagcaaaucugcuugcau

SEQ ID NO: 890505 - RNA, 22 nt, Human
uggccagaacucagacaugugg

SEQ ID NO: 890506 - RNA, 22 nt, Human
gaggccaaguuggagaccaggu

SEQ ID NO: 890507 - RNA, 22 nt, Human
cugggcagguauacaaaaaaug

SEQ ID NO: 890508 - RNA, 22 nt, Human
aaugucuucuucagcugaauaa

SEQ ID NO: 890509 - RNA, 22 nt, Human
ggcccagcucuauugaauuaca

SEQ ID NO: 890510 - RNA, 22 nt, Human
cuggccugaggucggcuguagg

SEQ ID NO: 890511 - RNA, 22 nt, Human
gcugggcucugucaugccuucc

SEQ ID NO: 890512 - RNA, 22 nt, Human
gugauucuguucuggugcugcc

SEQ ID NO: 890513 - RNA, 16 nt, Human
ccucugggauguuugc

SEQ ID NO: 890514 - RNA, 20 nt, Human
ucucacaggggcuuuucucu

SEQ ID NO: 890515 - RNA, 22 nt, Human
auccucucucccauaccagucu

SEQ ID NO: 890516 - RNA, 20 nt, Human
gccaacgcgcuggggcugcc

SEQ ID NO: 890517 - RNA, 22 nt, Human
aggaauucaagaccagcugggc

SEQ ID NO: 890518 - RNA, 22 nt, Human
cccugcagacgucuugaugccu

SEQ ID NO: 890519 - RNA, 22 nt, Human
aaugucaauuaccagaacagaa

SEQ ID NO: 890520 - RNA, 22 nt, Human
gugccaggcccagggagcgggg

SEQ ID NO: 890521 - RNA, 22 nt, Human
caggcagcugggucaccguccc

SEQ ID NO: 890522 - RNA, 23 nt, Human
uccucccaaauuucagccucauu

SEQ ID NO: 890523 - RNA, 22 nt, Human
uagccaaaaaguagcaauuauu

SEQ ID NO: 890524 - RNA, 22 nt, Human
gcugaagguaugaguuuuaucu

SEQ ID NO: 890525 - RNA, 22 nt, Human
agaagcaaggucugucaguaua

SEQ ID NO: 890526 - RNA, 22 nt, Human
aauuaaaaaaggagagcuugcu

SEQ ID NO: 890527 - RNA, 22 nt, Human
uugaauaauguguauguuguua

SEQ ID NO: 890528 - RNA, 22 nt, Human
gaucaucuuuuccugcuuccag

SEQ ID NO: 890529 - RNA, 22 nt, Human
cuccaggaguggccuggacacc

SEQ ID NO: 890530 - RNA, 22 nt, Human
augucacuguuguuauuguuau

SEQ ID NO: 890531 - RNA, 22 nt, Human
ucugagaacaucauuuccuaca

SEQ ID NO: 890532 - RNA, 22 nt, Human
acaacaucagcugagaccuuca

SEQ ID NO: 890533 - RNA, 22 nt, Human
ucccacaggggcucuguggguu

SEQ ID NO: 890534 - RNA, 22 nt, Human
guuuccaggcuuugguaugguu

SEQ ID NO: 890535 - RNA, 22 nt, Human
acaaaguuugugguauuccaag

SEQ ID NO: 890536 - RNA, 22 nt, Human
aacugaaacguauuuuugagau

SEQ ID NO: 890537 - RNA, 22 nt, Human
gagcuuccucagccuuucucac

SEQ ID NO: 890538 - RNA, 22 nt, Human
cccuaagaagcaaagugauacc

SEQ ID NO: 890539 - RNA, 22 nt, Human
cagcugccugcaacacaagcuu

SEQ ID NO: 890540 - RNA, 22 nt, Human
gggacaucuuucuagucagggu

SEQ ID NO: 890541 - RNA, 22 nt, Human
cagugaggcucugcugagcggu

SEQ ID NO: 890542 - RNA, 23 nt, Human
uggucagugccuugcauguggga

SEQ ID NO: 890543 - RNA, 22 nt, Human
uguuuagcauaaagauuuucca

SEQ ID NO: 890544 - RNA, 21 nt, Human
uucuccaggcaaccauuucag

SEQ ID NO: 890545 - RNA, 18 nt, Human
auauggaaugccuggcua

SEQ ID NO: 890546 - RNA, 22 nt, Human
agggcagcagcggcccaggccu

SEQ ID NO: 890547 - RNA, 23 nt, Human
cagaagacagucucaagacaagg

SEQ ID NO: 890548 - RNA, 22 nt, Human
agaccagcugccucccagggcc

SEQ ID NO: 890549 - RNA, 21 nt, Human
uggcucugcucagagcagucc

SEQ ID NO: 890550 - RNA, 22 nt, Human
uggcaggaaaaacauuggagau

SEQ ID NO: 890551 - RNA, 20 nt, Human
ucagugcucaggcaccaggu

SEQ ID NO: 890552 - RNA, 22 nt, Human
gccuggcugggcugaaugcuua

SEQ ID NO: 890553 - RNA, 22 nt, Human
caaggcaggaagccugucuuau

SEQ ID NO: 890554 - RNA, 18 nt, Human
cuuuuguuuucccuccuc

SEQ ID NO: 890555 - RNA, 22 nt, Human
agguuuccagcaggccauagau

SEQ ID NO: 890556 - RNA, 22 nt, Human
ggcaguguuauuuuucagaaau

SEQ ID NO: 890557 - RNA, 22 nt, Human
acauuucuaguuguucaucucc

SEQ ID NO: 890558 - RNA, 17 nt, Human
uccaggagaggcaaugg

SEQ ID NO: 890559 - RNA, 19 nt, Human
gcugcacacccagcaacug

SEQ ID NO: 890560 - RNA, 20 nt, Human
aaaaucucccagaaacuuau

SEQ ID NO: 890561 - RNA, 22 nt, Human
aagggaggaggauuuauuguac

SEQ ID NO: 890562 - RNA, 22 nt, Human
uuucucggcagagaugaugggc

SEQ ID NO: 890563 - RNA, 22 nt, Human
auggcagcagggcuugauuaug

SEQ ID NO: 890564 - RNA, 22 nt, Human
ggcucuggcguccaauggagcg

SEQ ID NO: 890565 - RNA, 22 nt, Human
ucagaaguccaauaccauggga

SEQ ID NO: 890566 - RNA, 21 nt, Human
aguuuucugaguuauaaaaua

SEQ ID NO: 890567 - RNA, 22 nt, Human
aagggagguaaagcuauuuaaa

SEQ ID NO: 890568 - RNA, 22 nt, Human
aaguccagacuccuuugcgugg

SEQ ID NO: 890569 - RNA, 22 nt, Human
augaagcaguuaaggugcauga

SEQ ID NO: 890570 - RNA, 22 nt, Human
uucuaugauucauuuagaaguu

SEQ ID NO: 890571 - RNA, 22 nt, Human
acauuuaaccuuugaggaacug

SEQ ID NO: 890572 - RNA, 22 nt, Human
uuugcagcaaggagagagcauu

SEQ ID NO: 890573 - RNA, 19 nt, Human
ccugggagucagcugaagg

SEQ ID NO: 890574 - RNA, 22 nt, Human
gcaugcaauuaugguauuagau

SEQ ID NO: 890575 - RNA, 22 nt, Human
gagcugagccuggguggaccgc

SEQ ID NO: 890576 - RNA, 22 nt, Human
ugcaagaaggcaauaaacucuu

SEQ ID NO: 890577 - RNA, 22 nt, Human
ugggcucuggggaaacugugau

SEQ ID NO: 890578 - RNA, 22 nt, Human
ggcuggcuacauuggaggaagg

SEQ ID NO: 890579 - RNA, 22 nt, Human
aguggagaagaggauggucucc

SEQ ID NO: 890580 - RNA, 22 nt, Human
cucuaaauccacgguauaguug

SEQ ID NO: 890581 - RNA, 22 nt, Human
agauucaggacuggccacagcc

SEQ ID NO: 890582 - RNA, 22 nt, Human
cuguggagguaggagcaggaca

SEQ ID NO: 890583 - RNA, 22 nt, Human
guguccugggcugguagagcug

SEQ ID NO: 890584 - RNA, 22 nt, Human
auguguguauauauagucauuu

SEQ ID NO: 890585 - RNA, 22 nt, Human
uaucuagauggauuuuagugaa

SEQ ID NO: 890586 - RNA, 17 nt, Human
aguggcaggcagauggg

SEQ ID NO: 890587 - RNA, 22 nt, Human
ucagcucucugggcucgaaccu

SEQ ID NO: 890588 - RNA, 22 nt, Human
cugaagcaggaacagcgagauu

SEQ ID NO: 890589 - RNA, 22 nt, Human
cccugagcagucugcagagagc

SEQ ID NO: 890590 - RNA, 19 nt, Human
agaggcaaggguggaagua

SEQ ID NO: 890591 - RNA, 22 nt, Human
guguuuuggccauuagugugau

SEQ ID NO: 890592 - RNA, 22 nt, Human
caggccugcaggaaaggcuccc

SEQ ID NO: 890593 - RNA, 22 nt, Human
agauguuuuagaguuugacuug

SEQ ID NO: 890594 - RNA, 22 nt, Human
aggcaggcagggcucacugucu

SEQ ID NO: 890595 - RNA, 22 nt, Human
cugagagaaucaugcugcaggu

SEQ ID NO: 890596 - RNA, 22 nt, Human
ccucugggcggagaucugcugc

SEQ ID NO: 890597 - RNA, 22 nt, Human
uguuuauagggucugucacuug

SEQ ID NO: 890598 - RNA, 22 nt, Human
uucucacuauguauguagauug

SEQ ID NO: 890599 - RNA, 22 nt, Human
ucaaaugcggucauggcuuuua

SEQ ID NO: 890600 - RNA, 21 nt, Human
uagggcaggcauuggaagaga

SEQ ID NO: 890601 - RNA, 22 nt, Human
cagcaguuguuucggauuggga

SEQ ID NO: 890602 - RNA, 22 nt, Human
ugaugagguggauucaaagcag

SEQ ID NO: 890603 - RNA, 22 nt, Human
gucugaagccagugguaguccg

SEQ ID NO: 890604 - RNA, 22 nt, Human
agcagagcagauaguauuaucu

SEQ ID NO: 890605 - RNA, 23 nt, Human
ugaaucaauuaugggauucaaug

SEQ ID NO: 890606 - RNA, 22 nt, Human
cagcaguucacacuuaacaagu

SEQ ID NO: 890607 - RNA, 22 nt, Human
aaauuagaaauacuuucaaagc

SEQ ID NO: 890608 - RNA, 22 nt, Human
cugagguguuuaguaggggcgg

SEQ ID NO: 890609 - RNA, 22 nt, Human
aauguacaccguggguuuuuua

SEQ ID NO: 890610 - RNA, 22 nt, Human
ggaagcuggcucuuauaaauau

SEQ ID NO: 890611 - RNA, 22 nt, Human
uccuaggaauacugccugaaau

SEQ ID NO: 890612 - RNA, 22 nt, Human
uugcagagugguugugaggauu

SEQ ID NO: 890613 - RNA, 22 nt, Human
guacaaauuaggaagcuuugug

SEQ ID NO: 890614 - RNA, 22 nt, Human
ucagaggaccuuacugagaacc

SEQ ID NO: 890615 - RNA, 18 nt, Human
agagcagcggcaucacac

SEQ ID NO: 890616 - RNA, 22 nt, Human
cagagacaggaucucgaagacu

SEQ ID NO: 890617 - RNA, 22 nt, Human
acagccagucaucucagcaggg

SEQ ID NO: 890618 - RNA, 22 nt, Human
aggacaguggcaaggcaggaca

SEQ ID NO: 890619 - RNA, 22 nt, Human
gcugggcuucaccuccagaguu

SEQ ID NO: 890620 - RNA, 22 nt, Human
aaagcucugagaagcacugcaa

SEQ ID NO: 890621 - RNA, 22 nt, Human
aguuuuaucuguaagcuguuca

SEQ ID NO: 890622 - RNA, 22 nt, Human
ugagcccagagaucugagcuau

SEQ ID NO: 890623 - RNA, 22 nt, Human
cuuguguggucuggucuugcua

SEQ ID NO: 890624 - RNA, 22 nt, Human
auaguuugaaggcuguucuacu

SEQ ID NO: 890625 - RNA, 22 nt, Human
auuacaacuguucccacugucu

SEQ ID NO: 890626 - RNA, 22 nt, Human
gcucccucccaccagccugcag

SEQ ID NO: 890627 - RNA, 22 nt, Human
aguacagaccugucucuuccug

SEQ ID NO: 890628 - RNA, 19 nt, Human
ccuuuuuuaacuucagcaa

SEQ ID NO: 890629 - RNA, 22 nt, Human
aguuuaguauaccaguacaucu

SEQ ID NO: 890630 - RNA, 22 nt, Human
ugcuccacccucacacucuucc

SEQ ID NO: 890631 - RNA, 22 nt, Human
cugggcagcugugcaaacaaua

SEQ ID NO: 890632 - RNA, 17 nt, Human
acaguaacuauguuaug

SEQ ID NO: 890633 - RNA, 22 nt, Human
ccagccaguccagcauuggugu

SEQ ID NO: 890634 - RNA, 22 nt, Human
ucucuaggcagugucagaauca

SEQ ID NO: 890635 - RNA, 22 nt, Human
auaaguguguaaggcauucugu

SEQ ID NO: 890636 - RNA, 22 nt, Human
uuccauaaaggugauaguauac

SEQ ID NO: 890637 - RNA, 22 nt, Human
agguaagggucacaguucauau

SEQ ID NO: 890638 - RNA, 22 nt, Human
aagcaguaaugagguacuauuu

SEQ ID NO: 890639 - RNA, 22 nt, Human
gucaauaucgccaagugucucu

SEQ ID NO: 890640 - RNA, 22 nt, Human
uguucugugcaucuagccagua

SEQ ID NO: 890641 - RNA, 22 nt, Human
cuucaguuuaucccaucaucca

SEQ ID NO: 890642 - RNA, 21 nt, Human
ucagaauuaccccuggaucug

SEQ ID NO: 890643 - RNA, 21 nt, Human
auggcugguggcucagccucc

SEQ ID NO: 890644 - RNA, 22 nt, Human
cucaacacguccucgagaagcg

SEQ ID NO: 890645 - RNA, 19 nt, Human
aucagcugaagccuucaga

SEQ ID NO: 890646 - RNA, 22 nt, Human
cauaauaucuccgauuacuugc

SEQ ID NO: 890647 - RNA, 22 nt, Human
auuuucagagacaucuggacuu

SEQ ID NO: 890648 - RNA, 22 nt, Human
caggcccacugcuugucuaguc

SEQ ID NO: 890649 - RNA, 19 nt, Human
ccucugcuccaguuuccuu

SEQ ID NO: 890650 - RNA, 22 nt, Human
gcagcugagagaagaacagggc

SEQ ID NO: 890651 - RNA, 22 nt, Human
aauagaauguaaucuaauacau

SEQ ID NO: 890652 - RNA, 20 nt, Human
guuuagcauggcagugaaag

SEQ ID NO: 890653 - RNA, 22 nt, Human
ccagauaaggcuuuuuaaaagc

SEQ ID NO: 890654 - RNA, 22 nt, Human
cauauugucuauugcuguuuuu

SEQ ID NO: 890655 - RNA, 22 nt, Human
ugugaggauguaaccagaaguc

SEQ ID NO: 890656 - RNA, 20 nt, Human
uuucaaaggcaccuaugaag

SEQ ID NO: 890657 - RNA, 22 nt, Human
ucuuuaucaagucuguucuuug

SEQ ID NO: 890658 - RNA, 22 nt, Human
ggaaggggugucgcccauggau

SEQ ID NO: 890659 - RNA, 22 nt, Human
uuaugcagauggcaugaggagg

SEQ ID NO: 890660 - RNA, 22 nt, Human
ggaagagggaaccacgacugua

SEQ ID NO: 890661 - RNA, 22 nt, Human
aguucuuugugauggaaauuua

SEQ ID NO: 890662 - RNA, 21 nt, Human
gaguggaacgcucuucacacc

SEQ ID NO: 890663 - RNA, 22 nt, Human
gcgcacauguucagauguguga

SEQ ID NO: 890664 - RNA, 22 nt, Human
guuuugauauaugcauacauua

SEQ ID NO: 890665 - RNA, 22 nt, Human
aauuuuauuaacuggauguagc

SEQ ID NO: 890666 - RNA, 22 nt, Human
acagucuggaagcagggggcaa

SEQ ID NO: 890667 - RNA, 22 nt, Human
ggccugaaugccugaguguggg

SEQ ID NO: 890668 - RNA, 22 nt, Human
ugcugacuccuggcugugacac

SEQ ID NO: 890669 - RNA, 22 nt, Human
uacauguauguguacgugcaug

SEQ ID NO: 890670 - RNA, 22 nt, Human
agugcaaagaaaucagcuuugu

SEQ ID NO: 890671 - RNA, 22 nt, Human
uccucuacucgcuugcccuuug

SEQ ID NO: 890672 - RNA, 22 nt, Human
auuccacauaggccuucaugac

SEQ ID NO: 890673 - RNA, 22 nt, Human
cauaaacucuugagauucuugu

SEQ ID NO: 890674 - RNA, 22 nt, Human
acuccugguucccaguugagau

SEQ ID NO: 890675 - RNA, 22 nt, Human
aauaaagcaugaggcauuuauc

SEQ ID NO: 890676 - RNA, 22 nt, Human
gugaccagagcgggagauuggg

SEQ ID NO: 890677 - RNA, 19 nt, Human
ccuaaaguuugaacccugg

SEQ ID NO: 890678 - RNA, 22 nt, Human
agugaugugaggugugagaggg

SEQ ID NO: 890679 - RNA, 22 nt, Human
uaucaauaucucagugugcuuc

SEQ ID NO: 890680 - RNA, 22 nt, Human
ugucaguucaucaguuggcuaa

SEQ ID NO: 890681 - RNA, 22 nt, Human
ucugucacccagagugcagugg

SEQ ID NO: 890682 - RNA, 22 nt, Human
gcaguaagaugggguaaucgua

SEQ ID NO: 890683 - RNA, 22 nt, Human
uuguuucucuggucuugaguga

SEQ ID NO: 890684 - RNA, 19 nt, Human
ggccagccaccucgccugg

SEQ ID NO: 890685 - RNA, 22 nt, Human
cugaggcuuugugugcaugccu

SEQ ID NO: 890686 - RNA, 21 nt, Human
acuuaaauuccuugauauuua

SEQ ID NO: 890687 - RNA, 22 nt, Human
agaggcugcaggcuggaaauca

SEQ ID NO: 890688 - RNA, 22 nt, Human
cugauacaaugucugcuuuaua

SEQ ID NO: 890689 - RNA, 22 nt, Human
gucaggcugcuggagcuugggu

SEQ ID NO: 890690 - RNA, 18 nt, Human
agggucagugucacuggc

SEQ ID NO: 890691 - RNA, 22 nt, Human
ugcuauuucucugcuguaaaau

SEQ ID NO: 890692 - RNA, 18 nt, Human
guucccagauggugcuga

SEQ ID NO: 890693 - RNA, 22 nt, Human
agcaaugacuaaggcacuuugg

SEQ ID NO: 890694 - RNA, 22 nt, Human
aguggugccauuaaaaucauug

SEQ ID NO: 890695 - RNA, 22 nt, Human
aagcaaaggaaagcugacuuuu

SEQ ID NO: 890696 - RNA, 22 nt, Human
uacaacauuguguugcuucaua

SEQ ID NO: 890697 - RNA, 22 nt, Human
ccaggccuccugugaguggacc

SEQ ID NO: 890698 - RNA, 22 nt, Human
gcccucagcauccucagggcca

SEQ ID NO: 890699 - RNA, 22 nt, Human
cugggcuugcacugcagcgaga

SEQ ID NO: 890700 - RNA, 22 nt, Human
acauuuauauaacucacuagga

SEQ ID NO: 890701 - RNA, 17 nt, Human
uccagagcacagagcuc

SEQ ID NO: 890702 - RNA, 22 nt, Human
ccagagacuggcugagagaucu

SEQ ID NO: 890703 - RNA, 22 nt, Human
cuucuuuaccaagagauagagu

SEQ ID NO: 890704 - RNA, 22 nt, Human
cuucccuuucuggugacuucuc

SEQ ID NO: 890705 - RNA, 20 nt, Human
ucuguggcagguggcgcuug

SEQ ID NO: 890706 - RNA, 22 nt, Human
cuguacaauguuaccuauuuau

SEQ ID NO: 890707 - RNA, 22 nt, Human
ggcuuccaagguccucuccacc

SEQ ID NO: 890708 - RNA, 22 nt, Human
uggcuucugcuuucaguggagg

SEQ ID NO: 890709 - RNA, 20 nt, Human
uuaaaaagagucacaggaga

SEQ ID NO: 890710 - RNA, 22 nt, Human
acacccaggaauaaggacuggg

SEQ ID NO: 890711 - RNA, 22 nt, Human
ccugccagcgcuuaucucucgg

SEQ ID NO: 890712 - RNA, 22 nt, Human
ggcagaagaaaggcuaagucuc

SEQ ID NO: 890713 - RNA, 22 nt, Human
uugucuacuaagaaagacaauu

SEQ ID NO: 890714 - RNA, 22 nt, Human
ucagugcuguguaaauguauua

SEQ ID NO: 890715 - RNA, 22 nt, Human
ccugggagugcacagguuucgu

SEQ ID NO: 890716 - RNA, 17 nt, Human
uagaaguuagaacacuu

SEQ ID NO: 890717 - RNA, 22 nt, Human
uuagaaaaaggcuguggucuua

SEQ ID NO: 890718 - RNA, 22 nt, Human
cugggacagcugagacaggaga

SEQ ID NO: 890719 - RNA, 22 nt, Human
aauaaucucccuuuuuguaugu

SEQ ID NO: 890720 - RNA, 22 nt, Human
agccagguuaaaccacagucaa

SEQ ID NO: 890721 - RNA, 22 nt, Human
aaaagugaugggauggcacuuc

SEQ ID NO: 890722 - RNA, 22 nt, Human
ugccaaaugccaccacagcugc

SEQ ID NO: 890723 - RNA, 22 nt, Human
agacagugauaccuugggaugu

SEQ ID NO: 890724 - RNA, 22 nt, Human
gggggcggagcacgugaccacg

SEQ ID NO: 890725 - RNA, 22 nt, Human
uuguaagaauaugaauacaaau

SEQ ID NO: 890726 - RNA, 22 nt, Human
aguauucuggaauucuauguga

SEQ ID NO: 890727 - RNA, 22 nt, Human
ugaggcucugcuucuguggcuc

SEQ ID NO: 890728 - RNA, 22 nt, Human
ugcaaggguagaagugauggca

SEQ ID NO: 890729 - RNA, 22 nt, Human
gucucagugcccaaugccauaa

SEQ ID NO: 890730 - RNA, 23 nt, Human
ggguccagccaauuccaaggaaa

SEQ ID NO: 890731 - RNA, 22 nt, Human
gccacaggcacuuaagggcugg

SEQ ID NO: 890732 - RNA, 22 nt, Human
aguacaagugaugugguaaaaa

SEQ ID NO: 890733 - RNA, 22 nt, Human
ccccacagccgccagcagggag

SEQ ID NO: 890734 - RNA, 22 nt, Human
gacaggcuagguugcuguccuc

SEQ ID NO: 890735 - RNA, 22 nt, Human
ucagaauggcccauaaauaguc

SEQ ID NO: 890736 - RNA, 22 nt, Human
ugucuaggucuagguuggcaau

SEQ ID NO: 890737 - RNA, 22 nt, Human
auggucaguugcagcuaauguu

SEQ ID NO: 890738 - RNA, 22 nt, Human
uggccagcuuuuuguagugcuc

SEQ ID NO: 890739 - RNA, 22 nt, Human
uguaccaaaaaugugucagacu

SEQ ID NO: 890740 - RNA, 22 nt, Human
aggaacugggcucagcaaacau

SEQ ID NO: 890741 - RNA, 22 nt, Human
cucuccaggacuuuggcccaau

SEQ ID NO: 890742 - RNA, 22 nt, Human
cgccuggcugcagccggcgagg

SEQ ID NO: 890743 - RNA, 22 nt, Human
cggggcaggagucccuguagag

SEQ ID NO: 890744 - RNA, 22 nt, Human
cuccagccucagaugacgguac

SEQ ID NO: 890745 - RNA, 22 nt, Human
cagggcacagaucggggcgcac

SEQ ID NO: 890746 - RNA, 22 nt, Human
gaauucuucugucuuuaacuga

SEQ ID NO: 890747 - RNA, 22 nt, Human
uauucauauuguaaaagaagug

SEQ ID NO: 890748 - RNA, 21 nt, Human
caaguucugcugaaucuucuu

SEQ ID NO: 890749 - RNA, 22 nt, Human
uucauaugugaacucagugaug

SEQ ID NO: 890750 - RNA, 22 nt, Human
acacaucuauauugcaucugca

SEQ ID NO: 890751 - RNA, 22 nt, Human
ccugaguucuuauuuccaguca

SEQ ID NO: 890752 - RNA, 22 nt, Human
aagaaaugugaauauugaauag

SEQ ID NO: 890753 - RNA, 22 nt, Human
gcgacgcucgggcuccgaugcc

SEQ ID NO: 890754 - RNA, 17 nt, Human
ugggugcugggaugagg

SEQ ID NO: 890755 - RNA, 22 nt, Human
gagcccagcucuaccucagacu

SEQ ID NO: 890756 - RNA, 21 nt, Human
uucucaugggauaaguacaug

SEQ ID NO: 890757 - RNA, 16 nt, Human
aggcucagaggcugga

SEQ ID NO: 890758 - RNA, 22 nt, Human
ucaggaaggcacuugguguguu

SEQ ID NO: 890759 - RNA, 22 nt, Human
cuccuccagacuuacugaaucc

SEQ ID NO: 890760 - RNA, 22 nt, Human
guucacaaaauucuggccagug

SEQ ID NO: 890761 - RNA, 22 nt, Human
cuggcucccuggacauggggcc

SEQ ID NO: 890762 - RNA, 22 nt, Human
cugccuuaaaaguacuuuuacu

SEQ ID NO: 890763 - RNA, 19 nt, Human
ucguggggaggugggcagc

SEQ ID NO: 890764 - RNA, 22 nt, Human
cccauuuauuuaaguaggucuu

SEQ ID NO: 890765 - RNA, 22 nt, Human
aauucacauauacauuauuccu

SEQ ID NO: 890766 - RNA, 20 nt, Human
uucuaauuugauggaguagc

SEQ ID NO: 890767 - RNA, 22 nt, Human
uccauagugaauggguaaugca

SEQ ID NO: 890768 - RNA, 22 nt, Human
ggauggccuucuugcucaggaa

SEQ ID NO: 890769 - RNA, 22 nt, Human
uugcaaaagcaauugcaguuuu

SEQ ID NO: 890770 - RNA, 22 nt, Human
uuccugguccuauuauauacac

SEQ ID NO: 890771 - RNA, 22 nt, Human
augcauguauucaugugugaca

SEQ ID NO: 890772 - RNA, 22 nt, Human
gcacaugugagaguagaggccu

SEQ ID NO: 890773 - RNA, 17 nt, Human
gaccaggagaaaccagg

SEQ ID NO: 890774 - RNA, 19 nt, Human
cagaaauagcgaaguguaa

SEQ ID NO: 890775 - RNA, 17 nt, Human
cagcugugagagccuua

SEQ ID NO: 890776 - RNA, 22 nt, Human
auaacaauagugguagugcugg

SEQ ID NO: 890777 - RNA, 22 nt, Human
ugcccagcacugugccagucac

SEQ ID NO: 890778 - RNA, 19 nt, Human
ugaggccaaggucacagau

SEQ ID NO: 890779 - RNA, 22 nt, Human
uuaccaaaucccgugcacauuc

SEQ ID NO: 890780 - RNA, 22 nt, Human
ucugaggucauuccaaggacau

SEQ ID NO: 890781 - RNA, 22 nt, Human
uagaacuuucagaaauuccaaa

SEQ ID NO: 890782 - RNA, 22 nt, Human
ugccucaguuucaucugcagaa

SEQ ID NO: 890783 - RNA, 22 nt, Human
cuugggccagcccagggggcau

SEQ ID NO: 890784 - RNA, 22 nt, Human
auauuauagacagagucuucug

SEQ ID NO: 890785 - RNA, 19 nt, Human
auacaagagagcaguugag

SEQ ID NO: 890786 - RNA, 22 nt, Human
aaugggaagucacuacuguuac

SEQ ID NO: 890787 - RNA, 22 nt, Human
ugggacagagugagcuuuggcc

SEQ ID NO: 890788 - RNA, 22 nt, Human
gcagcugcagguggucccaugc

SEQ ID NO: 890789 - RNA, 22 nt, Human
uguuuccaaaugguauaaagac

SEQ ID NO: 890790 - RNA, 22 nt, Human
ugcccugccaagacugaguggu

SEQ ID NO: 890791 - RNA, 22 nt, Human
ugucuucaguaaaauacacuau

SEQ ID NO: 890792 - RNA, 22 nt, Human
aggcccaguuauccuacuuguu

SEQ ID NO: 890793 - RNA, 22 nt, Human
ucuggaggcucugagggugagu

SEQ ID NO: 890794 - RNA, 22 nt, Human
uagaaacaaugacaugcuugua

SEQ ID NO: 890795 - RNA, 22 nt, Human
aagagcuggcccaaucugagca

SEQ ID NO: 890796 - RNA, 22 nt, Human
uacagacagacuucccacccuc

SEQ ID NO: 890797 - RNA, 22 nt, Human
aauucuugguccuaguguauaa

SEQ ID NO: 890798 - RNA, 22 nt, Human
uuacccagugaagccgaggcag

SEQ ID NO: 890799 - RNA, 22 nt, Human
ucauggcacuuagcacaguccu

SEQ ID NO: 890800 - RNA, 22 nt, Human
auauaauucucagguuugacua

SEQ ID NO: 890801 - RNA, 17 nt, Human
ugcagcugcucccaggc

SEQ ID NO: 890802 - RNA, 22 nt, Human
ucacuggggccaugugagggac

SEQ ID NO: 890803 - RNA, 22 nt, Human
cauguguaccagcuguucuuug

SEQ ID NO: 890804 - RNA, 20 nt, Human
ucaaaggcaaaggugggugu

SEQ ID NO: 890805 - RNA, 22 nt, Human
cagaggugacccauaguaccuc

SEQ ID NO: 890806 - RNA, 23 nt, Human
uguagcugucugagcagacacug

SEQ ID NO: 890807 - RNA, 22 nt, Human
acagugugguuugagcacuggg

SEQ ID NO: 890808 - RNA, 22 nt, Human
ucccagcccagauuugugugac

SEQ ID NO: 890809 - RNA, 22 nt, Human
agaagcugccuacaugaccagc

SEQ ID NO: 890810 - RNA, 22 nt, Human
gcuucaugcuugcuccaaagcu

SEQ ID NO: 890811 - RNA, 22 nt, Human
caaaaacugcaauuacuuuuac

SEQ ID NO: 890812 - RNA, 22 nt, Human
cugggccucauccucagaguuu

SEQ ID NO: 890813 - RNA, 22 nt, Human
aagccagggauggaaugauagg

SEQ ID NO: 890814 - RNA, 22 nt, Human
ugaaguuuuuccagacaagucc

SEQ ID NO: 890815 - RNA, 22 nt, Human
ccauucugccaugcuucaucua

SEQ ID NO: 890816 - RNA, 19 nt, Human
aggcagaggcuuggcuagc

SEQ ID NO: 890817 - RNA, 22 nt, Human
uaaguuuaacccucugggacua

SEQ ID NO: 890818 - RNA, 22 nt, Human
gggaaaggauuuacaguuugau

SEQ ID NO: 890819 - RNA, 22 nt, Human
uggcagcauguuauguaaggaa

SEQ ID NO: 890820 - RNA, 22 nt, Human
uggagcaggacugcugcccuca

SEQ ID NO: 890821 - RNA, 22 nt, Human
uggugaauaguagcuucagacu

SEQ ID NO: 890822 - RNA, 22 nt, Human
ucuacauuccuuuuauaauauc

SEQ ID NO: 890823 - RNA, 22 nt, Human
ggcaggugguaaggauuucaua

SEQ ID NO: 890824 - RNA, 22 nt, Human
ccuuagaaauguaccaaaggaa

SEQ ID NO: 890825 - RNA, 22 nt, Human
uuguuauuauuacuaagucuuc

SEQ ID NO: 890826 - RNA, 22 nt, Human
ccucagggucugaggagaccgu

SEQ ID NO: 890827 - RNA, 22 nt, Human
uugggaaagccacaaauuggag

SEQ ID NO: 890828 - RNA, 22 nt, Human
gcauggcauuugaagguagaag

SEQ ID NO: 890829 - RNA, 22 nt, Human
uaugucaaaguuaagaaauagg

SEQ ID NO: 890830 - RNA, 22 nt, Human
aaggcaggaugggaaaagauuu

SEQ ID NO: 890831 - RNA, 22 nt, Human
cuucaaacccagauuaaaugca

SEQ ID NO: 890832 - RNA, 22 nt, Human
acucucagggacagggucuggg

SEQ ID NO: 890833 - RNA, 22 nt, Human
cucuggaauugaccugggaggg

SEQ ID NO: 890834 - RNA, 22 nt, Human
uggcuccacuacuggguguguu

SEQ ID NO: 890835 - RNA, 22 nt, Human
cagcagcacucugcgggucccc

SEQ ID NO: 890836 - RNA, 22 nt, Human
ggccuggagcagagacuaggga

SEQ ID NO: 890837 - RNA, 22 nt, Human
gagcccagcugcggcccucagc

SEQ ID NO: 890838 - RNA, 22 nt, Human
agccuggguggggguucggaga

SEQ ID NO: 890839 - RNA, 22 nt, Human
guauggaugugugaacugguua

SEQ ID NO: 890840 - RNA, 22 nt, Human
cugucuguuucugauucaaccu

SEQ ID NO: 890841 - RNA, 22 nt, Human
aauguacaaggguuccaguuuu

SEQ ID NO: 890842 - RNA, 22 nt, Human
aggcuaggggaacacuagaauc

SEQ ID NO: 890843 - RNA, 22 nt, Human
ggagcagccgcgucucagggca

SEQ ID NO: 890844 - RNA, 22 nt, Human
aucuuaggguucuguuuuuaag

SEQ ID NO: 890845 - RNA, 22 nt, Human
uacacccagguaccgugauuuc

SEQ ID NO: 890846 - RNA, 20 nt, Human
ccuccuggucaggugugcag

SEQ ID NO: 890847 - RNA, 22 nt, Human
guuauaggucaugcuaugucaa

SEQ ID NO: 890848 - RNA, 20 nt, Human
uggcuccugcgguggaacca

SEQ ID NO: 890849 - RNA, 22 nt, Human
aacaguaaagacagaauuuauc

SEQ ID NO: 890850 - RNA, 22 nt, Human
agcugcccucgcuggggccaga

SEQ ID NO: 890851 - RNA, 22 nt, Human
ucuuguauguguauuuugcugu

SEQ ID NO: 890852 - RNA, 22 nt, Human
cugugccuggggggcagagcug

SEQ ID NO: 890853 - RNA, 22 nt, Human
ucccagcuguguggaggagaug

SEQ ID NO: 890854 - RNA, 22 nt, Human
uuccaugcuaagacacgcaggg

SEQ ID NO: 890855 - RNA, 22 nt, Human
uuguuaucugcgugaagaaaau

SEQ ID NO: 890856 - RNA, 22 nt, Human
uaggaaugcagaugcauaauaa

SEQ ID NO: 890857 - RNA, 22 nt, Human
cucagcagugacaagagaguau

SEQ ID NO: 890858 - RNA, 20 nt, Human
aagaaguugguaagcagugc

SEQ ID NO: 890859 - RNA, 20 nt, Human
cuggggaggaggauguguuc

SEQ ID NO: 890860 - RNA, 20 nt, Human
gugggcagcaggcauacugg

SEQ ID NO: 890861 - RNA, 22 nt, Human
augugcagcuuuucuagagaag

SEQ ID NO: 890862 - RNA, 22 nt, Human
aggcccagcccguccucgugcu

SEQ ID NO: 890863 - RNA, 22 nt, Human
gagcuuuugugggggccaaggu

SEQ ID NO: 890864 - RNA, 22 nt, Human
caguucuaucauuuuagagaug

SEQ ID NO: 890865 - RNA, 22 nt, Human
cuauauacuuuucacagauguu

SEQ ID NO: 890866 - RNA, 22 nt, Human
ucuggcccuauggcauguaccu

SEQ ID NO: 890867 - RNA, 22 nt, Human
ugcauguauuuaaaguugcaau

SEQ ID NO: 890868 - RNA, 22 nt, Human
ugaacuuagugggaauaucucu

SEQ ID NO: 890869 - RNA, 22 nt, Human
uuugcucacuuguguauuuuca

SEQ ID NO: 890870 - RNA, 22 nt, Human
agcuccuccugagugucuggga

SEQ ID NO: 890871 - RNA, 22 nt, Human
cagcucuggcgucagggagcga

SEQ ID NO: 890872 - RNA, 22 nt, Human
ccauugaaggcacuugagcaga

SEQ ID NO: 890873 - RNA, 22 nt, Human
cagcaggaaacuuaaagguaau

SEQ ID NO: 890874 - RNA, 22 nt, Human
cuuguacagaucuugcaaggac

SEQ ID NO: 890875 - RNA, 18 nt, Human
aagaaucucugacucuuu

SEQ ID NO: 890876 - RNA, 22 nt, Human
agaaacuucagcuauucuuuug

SEQ ID NO: 890877 - RNA, 22 nt, Human
auagauuauuugcucauuacuu

SEQ ID NO: 890878 - RNA, 22 nt, Human
uuauuugacuucuugcuaugcu

SEQ ID NO: 890879 - RNA, 22 nt, Human
uucagcagagaaauuacauaau

SEQ ID NO: 890880 - RNA, 22 nt, Human
cccaggucuccuucuuuagcug

SEQ ID NO: 890881 - RNA, 22 nt, Human
gaagcagggagcagucuuugca

SEQ ID NO: 890882 - RNA, 22 nt, Human
agacuguauucaaaaugugguu

SEQ ID NO: 890883 - RNA, 22 nt, Human
caguguuugcuuaaguuauaug

SEQ ID NO: 890884 - RNA, 22 nt, Human
auuucagugagaaagcaaucaa

SEQ ID NO: 890885 - RNA, 22 nt, Human
cuacuucugugaugaaacuaca

SEQ ID NO: 890886 - RNA, 19 nt, Human
ugagacagaagaugagccu

SEQ ID NO: 890887 - RNA, 17 nt, Human
guccugggaggagagag

SEQ ID NO: 890888 - RNA, 23 nt, Human
gugcugugagccccuuggccucc

SEQ ID NO: 890889 - RNA, 22 nt, Human
ccagucugaggccuggugaggg

SEQ ID NO: 890890 - RNA, 22 nt, Human
aaucuucacucuuaacugugca

SEQ ID NO: 890891 - RNA, 22 nt, Human
agcaguaagugaagacuaguuu

SEQ ID NO: 890892 - RNA, 22 nt, Human
caugcuuccuccaaacuacccu

SEQ ID NO: 890893 - RNA, 22 nt, Human
gccucuuguuuccuuacaugga

SEQ ID NO: 890894 - RNA, 22 nt, Human
ugugugccccagaugaguagcu

SEQ ID NO: 890895 - RNA, 22 nt, Human
augugggagauuucaggaggug

SEQ ID NO: 890896 - RNA, 22 nt, Human
aguggagacaggacagucgaua

SEQ ID NO: 890897 - RNA, 17 nt, Human
agcugccuugcuugagc

SEQ ID NO: 890898 - RNA, 22 nt, Human
ucagagaguccuggucauuugc

SEQ ID NO: 890899 - RNA, 22 nt, Human
cgcaggcucgguucacagagca

SEQ ID NO: 890900 - RNA, 22 nt, Human
agacuguaauugacaugucagc

SEQ ID NO: 890901 - RNA, 22 nt, Human
auguguauugagcaccuacugc

SEQ ID NO: 890902 - RNA, 22 nt, Human
agcagcuggugagcaagcucag

SEQ ID NO: 890903 - RNA, 22 nt, Human
auuauuaaagcuuaggucuuau

SEQ ID NO: 890904 - RNA, 22 nt, Human
ccuguucaaguugcagggcugg

SEQ ID NO: 890905 - RNA, 22 nt, Human
ggaagcuaagauaauuuaagua

SEQ ID NO: 890906 - RNA, 22 nt, Human
uucuucagcccauaucuuccag

SEQ ID NO: 890907 - RNA, 22 nt, Human
gagcagcuggcuguauugguuu

SEQ ID NO: 890908 - RNA, 22 nt, Human
acaagucuuuuucaugucuucu

SEQ ID NO: 890909 - RNA, 22 nt, Human
agugaaagguugagaauauucu

SEQ ID NO: 890910 - RNA, 22 nt, Human
ucaggaagcuacugccagcagc

SEQ ID NO: 890911 - RNA, 22 nt, Human
caaggccacguucugcaugcgg

SEQ ID NO: 890912 - RNA, 22 nt, Human
agaaagcacagcggguccauuu

SEQ ID NO: 890913 - RNA, 19 nt, Human
gccacauucuuccaggugu

SEQ ID NO: 890914 - RNA, 22 nt, Human
guacaaaguggaccugauagua

SEQ ID NO: 890915 - RNA, 22 nt, Human
augucuuuauaaauguauaaug

SEQ ID NO: 890916 - RNA, 22 nt, Human
ucaggcugugucuuuaaacaau

SEQ ID NO: 890917 - RNA, 22 nt, Human
aaucaagaggcgauggauggaa

SEQ ID NO: 890918 - RNA, 22 nt, Human
guuacacagcuaagcuucuccu

SEQ ID NO: 890919 - RNA, 22 nt, Human
cauuucauuccuuugaaagugg

SEQ ID NO: 890920 - RNA, 22 nt, Human
uucuuauuaugugcucugugaa

SEQ ID NO: 890921 - RNA, 22 nt, Human
ccaggccuuucuucuuggucug

SEQ ID NO: 890922 - RNA, 22 nt, Human
aaguauuucagcgguucuuugu

SEQ ID NO: 890923 - RNA, 22 nt, Human
ccuggggccccgagccagaagc

SEQ ID NO: 890924 - RNA, 22 nt, Human
ugaauaguguucuauaauaugg

SEQ ID NO: 890925 - RNA, 22 nt, Human
aagcagugauaagagcuaccau

SEQ ID NO: 890926 - RNA, 22 nt, Human
gugauucuguguguaaauuuua

SEQ ID NO: 890927 - RNA, 22 nt, Human
ugaggccugggcacauaaccuc

SEQ ID NO: 890928 - RNA, 17 nt, Human
aggagucucagaugagc

SEQ ID NO: 890929 - RNA, 22 nt, Human
cagccagccucucaaccaugca

SEQ ID NO: 890930 - RNA, 22 nt, Human
aaaauacuacugucuucuuccc

SEQ ID NO: 890931 - RNA, 22 nt, Human
uuauuuuaccuuccucugagcu

SEQ ID NO: 890932 - RNA, 22 nt, Human
gauuucuguaacacuucagaua

SEQ ID NO: 890933 - RNA, 19 nt, Human
uagguuggacaguaucccc

SEQ ID NO: 890934 - RNA, 22 nt, Human
uuugucaugcuuuccuuaugga

SEQ ID NO: 890935 - RNA, 22 nt, Human
gcaggcagagucaauuugaucc

SEQ ID NO: 890936 - RNA, 20 nt, Human
ucagaaguuuccuggagcau

SEQ ID NO: 890937 - RNA, 22 nt, Human
ugacuagaauuguauuuagugu

SEQ ID NO: 890938 - RNA, 22 nt, Human
gagaaguuuuucuuauuacaug

SEQ ID NO: 890939 - RNA, 22 nt, Human
agguucccaggaucugucuggg

SEQ ID NO: 890940 - RNA, 22 nt, Human
gcaaacagccaggcgcagaagu

SEQ ID NO: 890941 - RNA, 22 nt, Human
acauguuagcuacuauuguuau

SEQ ID NO: 890942 - RNA, 22 nt, Human
uuguaagauggauaggaacagc

SEQ ID NO: 890943 - RNA, 23 nt, Human
uccaggcacgcauuucuucuagc

SEQ ID NO: 890944 - RNA, 23 nt, Human
uuugaagcauuuuguaucuuagu

SEQ ID NO: 890945 - RNA, 17 nt, Human
acucaggaucugggagu

SEQ ID NO: 890946 - RNA, 22 nt, Human
uggugugggcguggcaggcaag

SEQ ID NO: 890947 - RNA, 19 nt, Human
aguuauuucuaaauuuacc

SEQ ID NO: 890948 - RNA, 22 nt, Human
gcccucagcaggaaagaucaac

SEQ ID NO: 890949 - RNA, 22 nt, Human
gcugagaauguuccuacuggua

SEQ ID NO: 890950 - RNA, 22 nt, Human
ggaggccaaggugggcggauca

SEQ ID NO: 890951 - RNA, 22 nt, Human
aaaucucaggccucuauuuacu

SEQ ID NO: 890952 - RNA, 22 nt, Human
agcucugggucacggcugccga

SEQ ID NO: 890953 - RNA, 22 nt, Human
uuuccucuuuguaccuugacua

SEQ ID NO: 890954 - RNA, 20 nt, Human
ucuccuggugacaguaccca

SEQ ID NO: 890955 - RNA, 22 nt, Human
uguuacaagucuugagguacuu

SEQ ID NO: 890956 - RNA, 22 nt, Human
auagaaaacagauguccuuaaa

SEQ ID NO: 890957 - RNA, 22 nt, Human
gugugcaucucacccuuccccg

SEQ ID NO: 890958 - RNA, 23 nt, Human
ggaggcucaaguaucacgggcag

SEQ ID NO: 890959 - RNA, 22 nt, Human
cauuuacacuucuaaccacaag

SEQ ID NO: 890960 - RNA, 22 nt, Human
cauucguggcccucuggauaag

SEQ ID NO: 890961 - RNA, 22 nt, Human
uggcaguggcuuugcuggugga

SEQ ID NO: 890962 - RNA, 22 nt, Human
agagccuggagguucugcugaa

SEQ ID NO: 890963 - RNA, 22 nt, Human
ggguguugauuuuacacuaaaa

SEQ ID NO: 890964 - RNA, 21 nt, Human
cuguccuggucuagaggcaca

SEQ ID NO: 890965 - RNA, 22 nt, Human
gcagugugaccgagcuugcuuc

SEQ ID NO: 890966 - RNA, 22 nt, Human
guuaacauucaauuaaacaguc

SEQ ID NO: 890967 - RNA, 22 nt, Human
uucuauguagauaaggcugcuc

SEQ ID NO: 890968 - RNA, 22 nt, Human
uuucaguuguccuguuaauagc

SEQ ID NO: 890969 - RNA, 22 nt, Human
uggagcagaggaagaaggcuuu

SEQ ID NO: 890970 - RNA, 22 nt, Human
uauuuggaaauagggcuuugua

SEQ ID NO: 890971 - RNA, 19 nt, Human
aaugugcuugggagacugc

SEQ ID NO: 890972 - RNA, 22 nt, Human
ucugcacacuuuuauugaccuc

SEQ ID NO: 890973 - RNA, 22 nt, Human
ugcagggcaucuuugaagugug

SEQ ID NO: 890974 - RNA, 22 nt, Human
aacaaaguguacuuccauacug

SEQ ID NO: 890975 - RNA, 22 nt, Human
agcaguggaccucagugcuauu

SEQ ID NO: 890976 - RNA, 22 nt, Human
ccugcuguuuucuucacuucag

SEQ ID NO: 890977 - RNA, 22 nt, Human
uucuagaagcugaaaaggggga

SEQ ID NO: 890978 - RNA, 21 nt, Human
caaaaggauaggaaauuaggg

SEQ ID NO: 890979 - RNA, 22 nt, Human
cucugccacucgaagucaagga

SEQ ID NO: 890980 - RNA, 22 nt, Human
uagugccaccuuccaaguauca

SEQ ID NO: 890981 - RNA, 22 nt, Human
uacaagcucacaaauuuuuaag

SEQ ID NO: 890982 - RNA, 22 nt, Human
cagaaguggccucagagggagu

SEQ ID NO: 890983 - RNA, 22 nt, Human
acauucacaagccuacaagguu

SEQ ID NO: 890984 - RNA, 22 nt, Human
ggggacgggacuuagcaugagu

SEQ ID NO: 890985 - RNA, 22 nt, Human
gcuccuggcuccaggcagccaa

SEQ ID NO: 890986 - RNA, 22 nt, Human
gaguauuccucagucauuuugu

SEQ ID NO: 890987 - RNA, 22 nt, Human
accaggcaguauggugcugcaa

SEQ ID NO: 890988 - RNA, 22 nt, Human
aacugagauuacaagagacauu

SEQ ID NO: 890989 - RNA, 21 nt, Human
ugugagcuuugugaaagcagg

SEQ ID NO: 890990 - RNA, 22 nt, Human
caaggcagugggcuaggaaccu

SEQ ID NO: 890991 - RNA, 22 nt, Human
uggcccugaggggcugugcccc

SEQ ID NO: 890992 - RNA, 23 nt, Human
ugucaucuccagacucccagugc

SEQ ID NO: 890993 - RNA, 22 nt, Human
uccugccuguuuaccuguacuu

SEQ ID NO: 890994 - RNA, 22 nt, Human
aagcugugaagagcaagugagg

SEQ ID NO: 890995 - RNA, 22 nt, Human
gaggccuggcucugcccuccug

SEQ ID NO: 890996 - RNA, 22 nt, Human
aggaccagccuccaggucucuu

SEQ ID NO: 890997 - RNA, 22 nt, Human
ucauuuuuuuccgguaggaaua

SEQ ID NO: 890998 - RNA, 22 nt, Human
uggaaugaaggagauggccuuu

SEQ ID NO: 890999 - RNA, 22 nt, Human
uauggaaacuaauucauuuuuc

SEQ ID NO: 891000 - RNA, 22 nt, Human
aauguuuuguaugccucugagc

SEQ ID NO: 891001 - RNA, 22 nt, Human
gaaucuuaaaucggaaucuuaa

SEQ ID NO: 891002 - RNA, 22 nt, Human
ucuguuucuuccuagccaugcu

SEQ ID NO: 891003 - RNA, 22 nt, Human
ucauuuacaggugaagcaacua

SEQ ID NO: 891004 - RNA, 21 nt, Human
agcagaacagucgagcacugc

SEQ ID NO: 891005 - RNA, 22 nt, Human
guuuaacaucugugaagcugcu

SEQ ID NO: 891006 - RNA, 22 nt, Human
gugaagcacgcugccgcacugg

SEQ ID NO: 891007 - RNA, 22 nt, Human
ugcagcaauguaguuugggaca

SEQ ID NO: 891008 - RNA, 22 nt, Human
acaggugucuaaggcagacagc

SEQ ID NO: 891009 - RNA, 22 nt, Human
uuucacauaaauggaguaaaga

SEQ ID NO: 891010 - RNA, 22 nt, Human
cuggcacaucacuccuaguuua

SEQ ID NO: 891011 - RNA, 22 nt, Human
ucccuguguguauauaaacggu

SEQ ID NO: 891012 - RNA, 22 nt, Human
accagagaaugugcaucucuaa

SEQ ID NO: 891013 - RNA, 20 nt, Human
augugaaguaggaagggugu

SEQ ID NO: 891014 - RNA, 22 nt, Human
ugacaggaguggcuagugggag

SEQ ID NO: 891015 - RNA, 22 nt, Human
cagcugcauuaauuuuagugaa

SEQ ID NO: 891016 - RNA, 22 nt, Human
caggcacugugcaagggucucg

SEQ ID NO: 891017 - RNA, 22 nt, Human
ggugggcagcucuuggcaggca

SEQ ID NO: 891018 - RNA, 22 nt, Human
ugggacagggaaucugaucccc

SEQ ID NO: 891019 - RNA, 22 nt, Human
aguguguccagaaaucuguauu

SEQ ID NO: 891020 - RNA, 22 nt, Human
uggaggucuccugguauugacc

SEQ ID NO: 891021 - RNA, 22 nt, Human
uauuuucauucugugugacugu

SEQ ID NO: 891022 - RNA, 22 nt, Human
aauguucaguaucugguccacc

SEQ ID NO: 891023 - RNA, 22 nt, Human
aaaacuaaauacgcuuugccuc

SEQ ID NO: 891024 - RNA, 22 nt, Human
ucaggagaguguucaguggagg

SEQ ID NO: 891025 - RNA, 22 nt, Human
gaaauauuguacuggagauguu

SEQ ID NO: 891026 - RNA, 22 nt, Human
aguuucuugaagacugauguuu

SEQ ID NO: 891027 - RNA, 22 nt, Human
uuuuaauccaucugguaaaccu

SEQ ID NO: 891028 - RNA, 22 nt, Human
uugaaccaggaacaauuagcuc

SEQ ID NO: 891029 - RNA, 22 nt, Human
uagacacaucuucauccacaau

SEQ ID NO: 891030 - RNA, 22 nt, Human
aggccagaaaugucagggagug

SEQ ID NO: 891031 - RNA, 22 nt, Human
auguggcaaugguuagcacugu

SEQ ID NO: 891032 - RNA, 22 nt, Human
agcugugaccuucaagagcuac

SEQ ID NO: 891033 - RNA, 22 nt, Human
acucaggaaaugaagacugguu

SEQ ID NO: 891034 - RNA, 22 nt, Human
cugccagggcauccuguggugg

SEQ ID NO: 891035 - RNA, 22 nt, Human
cauguauacaguagaauacuau

SEQ ID NO: 891036 - RNA, 22 nt, Human
guacaguaaauguaaauggauu

SEQ ID NO: 891037 - RNA, 22 nt, Human
uaaauguuuuguggguugaguu

SEQ ID NO: 891038 - RNA, 22 nt, Human
uuaggaauuuaucacagacugg

SEQ ID NO: 891039 - RNA, 22 nt, Human
uggccucaaccguccuaagcac

SEQ ID NO: 891040 - RNA, 22 nt, Human
auaauauuuggauaggacagua

SEQ ID NO: 891041 - RNA, 22 nt, Human
cugcagggcagggccuccuggc

SEQ ID NO: 891042 - RNA, 22 nt, Human
gaaggagagaaaggcaauucug

SEQ ID NO: 891043 - RNA, 22 nt, Human
ugcccugaugauccuccucgca

SEQ ID NO: 891044 - RNA, 22 nt, Human
aggcucagggacggggccccuu

SEQ ID NO: 891045 - RNA, 22 nt, Human
gagaggugaaaggauaguuuga

SEQ ID NO: 891046 - RNA, 22 nt, Human
aggcagugagcagggugucaug

SEQ ID NO: 891047 - RNA, 22 nt, Human
aggcagccaucugcaggaagga

SEQ ID NO: 891048 - RNA, 22 nt, Human
auuuagaguguucacucugagc

SEQ ID NO: 891049 - RNA, 22 nt, Human
aagauauacuauuaaguaccau

SEQ ID NO: 891050 - RNA, 22 nt, Human
auauuaaugagcaaguaaguga

SEQ ID NO: 891051 - RNA, 18 nt, Human
cuccuccacagccccugc

SEQ ID NO: 891052 - RNA, 22 nt, Human
uacacugaagugucuugguaua

SEQ ID NO: 891053 - RNA, 22 nt, Human
aaaaucuugugacuuaggaagg

SEQ ID NO: 891054 - RNA, 22 nt, Human
cuucaguguucccaucuguaaa

SEQ ID NO: 891055 - RNA, 22 nt, Human
agcagcauuccuggcuucuauc

SEQ ID NO: 891056 - RNA, 22 nt, Human
uaggccacaaauaagauccugu

SEQ ID NO: 891057 - RNA, 22 nt, Human
aacauguagcagaaacgacuaa

SEQ ID NO: 891058 - RNA, 22 nt, Human
gggucucucaugcaguugcugu

SEQ ID NO: 891059 - RNA, 22 nt, Human
gaauauuaguaucaguuauacc

SEQ ID NO: 891060 - RNA, 22 nt, Human
acauggaagauaaaaauacuca

SEQ ID NO: 891061 - RNA, 22 nt, Human
gggcuucaauagcagaggcgug

SEQ ID NO: 891062 - RNA, 22 nt, Human
ugcagcaaguaaccaucuuccu

SEQ ID NO: 891063 - RNA, 22 nt, Human
aggccacaggcacccuguguuc

SEQ ID NO: 891064 - RNA, 22 nt, Human
uuccuucuuccuuuaguaacca

SEQ ID NO: 891065 - RNA, 22 nt, Human
agagugacagccacugcaguaa

SEQ ID NO: 891066 - RNA, 22 nt, Human
guuucuuuuaaaauauguagac

SEQ ID NO: 891067 - RNA, 22 nt, Human
ucacuuuagaucuucaucucuu

SEQ ID NO: 891068 - RNA, 22 nt, Human
ccugagccuggcucaugcacuc

SEQ ID NO: 891069 - RNA, 22 nt, Human
gagcuaagcuauguuaugcagc

SEQ ID NO: 891070 - RNA, 22 nt, Human
ucuugcuguacggcuacuugca

SEQ ID NO: 891071 - RNA, 22 nt, Human
cugugagggucacagccaugcc

SEQ ID NO: 891072 - RNA, 21 nt, Human
aaaauguagacuuuucccuga

SEQ ID NO: 891073 - RNA, 22 nt, Human
cccaggugggcaccucgaggaa

SEQ ID NO: 891074 - RNA, 22 nt, Human
ucuuuggaagcuuucagagaag

SEQ ID NO: 891075 - RNA, 22 nt, Human
cuguuauuugcuggaagaguuu

SEQ ID NO: 891076 - RNA, 22 nt, Human
cagagggaccagaacauacugu

SEQ ID NO: 891077 - RNA, 22 nt, Human
ugcccaaguccuccaccgaggu

SEQ ID NO: 891078 - RNA, 23 nt, Human
ugaaauauucuuuugcaugagcu

SEQ ID NO: 891079 - RNA, 22 nt, Human
gcccugcaccccaauggcauga

SEQ ID NO: 891080 - RNA, 22 nt, Human
ccaggccaaauucagucagcag

SEQ ID NO: 891081 - RNA, 22 nt, Human
ccagcugguuaaaauagagaaa

SEQ ID NO: 891082 - RNA, 22 nt, Human
agccacagcauguguguaugua

SEQ ID NO: 891083 - RNA, 17 nt, Human
ugaggccugcaucagug

SEQ ID NO: 891084 - RNA, 22 nt, Human
ucagggaguaguuugugcuaug

SEQ ID NO: 891085 - RNA, 21 nt, Human
gccaagaacaagacagacaug

SEQ ID NO: 891086 - RNA, 22 nt, Human
caauuucaucuugugcuucaau

SEQ ID NO: 891087 - RNA, 22 nt, Human
gagcugugacacgcagcccagg

SEQ ID NO: 891088 - RNA, 22 nt, Human
auaguguuacccuucuuaaagu

SEQ ID NO: 891089 - RNA, 22 nt, Human
aagacaauguuucugauagaua

SEQ ID NO: 891090 - RNA, 22 nt, Human
cagggcugagaauuuagagaca

SEQ ID NO: 891091 - RNA, 22 nt, Human
agaucaaaaacuuaauggcuuu

SEQ ID NO: 891092 - RNA, 22 nt, Human
ucucugggccuguuuucucauc

SEQ ID NO: 891093 - RNA, 22 nt, Human
aggcaggcacuccggaaguguc

SEQ ID NO: 891094 - RNA, 23 nt, Human
cacagggagggaaacucuuucag

SEQ ID NO: 891095 - RNA, 20 nt, Human
aagagaagaagucuuugaaa

SEQ ID NO: 891096 - RNA, 22 nt, Human
cugugugcaacuugcaguuuug

SEQ ID NO: 891097 - RNA, 22 nt, Human
uugaagaguagaaaaugcaaau

SEQ ID NO: 891098 - RNA, 22 nt, Human
ugcucugguaacucacuuccau

SEQ ID NO: 891099 - RNA, 22 nt, Human
aacugagacacgaacuaugauu

SEQ ID NO: 891100 - RNA, 22 nt, Human
gaaagugcagucagacaaggca

SEQ ID NO: 891101 - RNA, 22 nt, Human
cuucucccuggcuucugcacac

SEQ ID NO: 891102 - RNA, 22 nt, Human
agagaucaguuaaaaucuuuuu

SEQ ID NO: 891103 - RNA, 22 nt, Human
uuacagaguagggaauugaagu

SEQ ID NO: 891104 - RNA, 22 nt, Human
guguguucagcaagagguaagg

SEQ ID NO: 891105 - RNA, 22 nt, Human
gcugagcugcuguucauccugc

SEQ ID NO: 891106 - RNA, 22 nt, Human
gcugaccuuugccaggaaggca

SEQ ID NO: 891107 - RNA, 22 nt, Human
accagggcagccgagguguguc

SEQ ID NO: 891108 - RNA, 22 nt, Human
agcuagggcaaauaugagauac

SEQ ID NO: 891109 - RNA, 22 nt, Human
augcuucuuguauuuggcugac

SEQ ID NO: 891110 - RNA, 22 nt, Human
aaacucuuuugcauauuagagg

SEQ ID NO: 891111 - RNA, 19 nt, Human
uagcugccuguuaccucca

SEQ ID NO: 891112 - RNA, 22 nt, Human
ggcugcaguuugucuuuugcuu

SEQ ID NO: 891113 - RNA, 22 nt, Human
agcuugccucuuaaucaccuca

SEQ ID NO: 891114 - RNA, 22 nt, Human
augggaggguggaaaggcucug

SEQ ID NO: 891115 - RNA, 22 nt, Human
ggcaggugaggcaugugccugg

SEQ ID NO: 891116 - RNA, 22 nt, Human
ccauguguugauucucugcaga

SEQ ID NO: 891117 - RNA, 22 nt, Human
uggcccaggccaaagcccugga

SEQ ID NO: 891118 - RNA, 22 nt, Human
ccugugggccaaggaccugcca

SEQ ID NO: 891119 - RNA, 22 nt, Human
uugcuauaaaugguuucauauu

SEQ ID NO: 891120 - RNA, 22 nt, Human
auguaccucugcauuccugccu

SEQ ID NO: 891121 - RNA, 22 nt, Human
cuuuggaaagugguucagguga

SEQ ID NO: 891122 - RNA, 22 nt, Human
ggaccugauguuuagucuuguu

SEQ ID NO: 891123 - RNA, 22 nt, Human
gccugcagaggugcugcuagcu

SEQ ID NO: 891124 - RNA, 22 nt, Human
gcagagacuaguagugcagacu

SEQ ID NO: 891125 - RNA, 22 nt, Human
cuccugggcuucgaaggcuccc

SEQ ID NO: 891126 - RNA, 22 nt, Human
gugacucugcauuuuauggauc

SEQ ID NO: 891127 - RNA, 22 nt, Human
uccaggccccagaccguacugc

SEQ ID NO: 891128 - RNA, 22 nt, Human
gcuggccaggaagagucucaga

SEQ ID NO: 891129 - RNA, 22 nt, Human
ugcuggcuguucuagggaggcc

SEQ ID NO: 891130 - RNA, 22 nt, Human
guuucucuuugaagccuggcug

SEQ ID NO: 891131 - RNA, 22 nt, Human
gaugcugagagguggagggaac

SEQ ID NO: 891132 - RNA, 22 nt, Human
ugucauuaguuucagccauucu

SEQ ID NO: 891133 - RNA, 22 nt, Human
aucagcccaccaucuucauaac

SEQ ID NO: 891134 - RNA, 22 nt, Human
aaagaagagcaaauuuguugua

SEQ ID NO: 891135 - RNA, 22 nt, Human
cuauuuggauguuagccucagu

SEQ ID NO: 891136 - RNA, 18 nt, Human
aguguuaaguaaguagca

SEQ ID NO: 891137 - RNA, 22 nt, Human
agcugcccuguggggaggguug

SEQ ID NO: 891138 - RNA, 22 nt, Human
cagccagguaugggcgugcggg

SEQ ID NO: 891139 - RNA, 22 nt, Human
uuuaucuggacugugauauaaa

SEQ ID NO: 891140 - RNA, 22 nt, Human
ugagauaacucugauuuauguu

SEQ ID NO: 891141 - RNA, 18 nt, Human
gaaagccaugcagcagug

SEQ ID NO: 891142 - RNA, 22 nt, Human
gcccaggccggagagcagugcu

SEQ ID NO: 891143 - RNA, 22 nt, Human
augaaaguggcuugauuaaaug

SEQ ID NO: 891144 - RNA, 22 nt, Human
gccuuaggggucagacagagcu

SEQ ID NO: 891145 - RNA, 22 nt, Human
gaagguguccaucaccaacugu

SEQ ID NO: 891146 - RNA, 22 nt, Human
gacuggauguuuaaucaacaga

SEQ ID NO: 891147 - RNA, 22 nt, Human
uaguggggccugggaggguucc

SEQ ID NO: 891148 - RNA, 22 nt, Human
ccaggcagaaugaaaccccugu

SEQ ID NO: 891149 - RNA, 23 nt, Human
agucugugcuuggugggagggcc

SEQ ID NO: 891150 - RNA, 22 nt, Human
agccuggagguaaugaggaaac

SEQ ID NO: 891151 - RNA, 22 nt, Human
gugcaugugcguugacugucca

SEQ ID NO: 891152 - RNA, 22 nt, Human
uucacauaaugauacaaagcuu

SEQ ID NO: 891153 - RNA, 22 nt, Human
gcacacaugugaguguccuuuc

SEQ ID NO: 891154 - RNA, 22 nt, Human
ugaggcaggagaaucacaugaa

SEQ ID NO: 891155 - RNA, 22 nt, Human
agaguaugcaucuauuguaccu

SEQ ID NO: 891156 - RNA, 21 nt, Human
uaacagcagggaaauacgugc

SEQ ID NO: 891157 - RNA, 22 nt, Human
aguauggggcugugugugcaca

SEQ ID NO: 891158 - RNA, 22 nt, Human
acuguacaaccucugccccugu

SEQ ID NO: 891159 - RNA, 22 nt, Human
uacaggucuucugccuucacuc

SEQ ID NO: 891160 - RNA, 22 nt, Human
auagcagugacauuuuaaugug

SEQ ID NO: 891161 - RNA, 22 nt, Human
cagugcaaacucccugaggugg

SEQ ID NO: 891162 - RNA, 19 nt, Human
gcugcucugggucucaucu

SEQ ID NO: 891163 - RNA, 22 nt, Human
aauauuaguuucucaagagaga

SEQ ID NO: 891164 - RNA, 20 nt, Human
ugugucaggcccugauuaaa

SEQ ID NO: 891165 - RNA, 22 nt, Human
uuacugaaaguauacauuucug

SEQ ID NO: 891166 - RNA, 22 nt, Human
caucaaauaaagaaauuccuug

SEQ ID NO: 891167 - RNA, 22 nt, Human
gcccaggaugguguguaguggu

SEQ ID NO: 891168 - RNA, 22 nt, Human
caggaaauugcaacagucugag

SEQ ID NO: 891169 - RNA, 22 nt, Human
gcaugauaccauagguuuugcc

SEQ ID NO: 891170 - RNA, 22 nt, Human
aacccaggagacggaguuugug

SEQ ID NO: 891171 - RNA, 22 nt, Human
gcuuuacagagaaaguuugccu

SEQ ID NO: 891172 - RNA, 21 nt, Human
agcugcagccauguacauggc

SEQ ID NO: 891173 - RNA, 19 nt, Human
acaaugaauguguucucuu

SEQ ID NO: 891174 - RNA, 22 nt, Human
cacugcuuuaaggcugaguaac

SEQ ID NO: 891175 - RNA, 22 nt, Human
aucuuuuugacauggugauggu

SEQ ID NO: 891176 - RNA, 22 nt, Human
auaaaugauucagcaggaaaua

SEQ ID NO: 891177 - RNA, 22 nt, Human
cacccagcuuuugcauccuccg

SEQ ID NO: 891178 - RNA, 22 nt, Human
uaaguuuaccacuuucagaauu

SEQ ID NO: 891179 - RNA, 22 nt, Human
aaaccuuaaaccaagcucuuga

SEQ ID NO: 891180 - RNA, 22 nt, Human
cagcccugcggagguguauacu

SEQ ID NO: 891181 - RNA, 22 nt, Human
cugguucugauuuugcugcauu

SEQ ID NO: 891182 - RNA, 22 nt, Human
ugaugagggcaguucuuguugc

SEQ ID NO: 891183 - RNA, 22 nt, Human
agagaguuguaccacacucaua

SEQ ID NO: 891184 - RNA, 22 nt, Human
cuguccuaugaguacucacuag

SEQ ID NO: 891185 - RNA, 22 nt, Human
cugccucuggccucaggcccag

SEQ ID NO: 891186 - RNA, 22 nt, Human
aaaaccuucuagacuuuauauu

SEQ ID NO: 891187 - RNA, 22 nt, Human
aggucugguguugggccugaaa

SEQ ID NO: 891188 - RNA, 22 nt, Human
auuugcuuuaagguauaaaagg

SEQ ID NO: 891189 - RNA, 22 nt, Human
agugcagaggcugggaaaugcu

SEQ ID NO: 891190 - RNA, 22 nt, Human
aaggcuuccacuuuguuggguc

SEQ ID NO: 891191 - RNA, 22 nt, Human
cuggguucuauuuuuggcuuca

SEQ ID NO: 891192 - RNA, 23 nt, Human
aacugcaagguugcugggaagua

SEQ ID NO: 891193 - RNA, 22 nt, Human
gacuguacgucauugaaggcca

SEQ ID NO: 891194 - RNA, 19 nt, Human
auguaugaggucuucugcu

SEQ ID NO: 891195 - RNA, 22 nt, Human
ccuucuagccugcgccagggca

SEQ ID NO: 891196 - RNA, 22 nt, Human
uagggcagccuuauagcuccca

SEQ ID NO: 891197 - RNA, 22 nt, Human
cucuccagggaagcaguguacu

SEQ ID NO: 891198 - RNA, 18 nt, Human
gggcacuggggacuggag

SEQ ID NO: 891199 - RNA, 22 nt, Human
ucccauucugccaaggacauug

SEQ ID NO: 891200 - RNA, 22 nt, Human
ggggcagcucccgagggcagga

SEQ ID NO: 891201 - RNA, 22 nt, Human
uauguauauaggugugugucuc

SEQ ID NO: 891202 - RNA, 22 nt, Human
agaguguggaaauguucagagu

SEQ ID NO: 891203 - RNA, 19 nt, Human
gcauuucaggcauguuugc

SEQ ID NO: 891204 - RNA, 22 nt, Human
gugguccucauaauucagugag

SEQ ID NO: 891205 - RNA, 19 nt, Human
gcuccuggaugaccugugg

SEQ ID NO: 891206 - RNA, 22 nt, Human
uccagcagggaauuaguagucu

SEQ ID NO: 891207 - RNA, 22 nt, Human
uccugggcuguggccccgggca

SEQ ID NO: 891208 - RNA, 23 nt, Human
uggggccaagugaggaagggucu

SEQ ID NO: 891209 - RNA, 22 nt, Human
aggaagcugccugggaugggaa

SEQ ID NO: 891210 - RNA, 22 nt, Human
cugacccuuuaggguauguuua

SEQ ID NO: 891211 - RNA, 22 nt, Human
acuguucuuguaacacuuaaau

SEQ ID NO: 891212 - RNA, 22 nt, Human
aaggacauuucugacuaaugca

SEQ ID NO: 891213 - RNA, 22 nt, Human
ucugaggaaucuugacacauuu

SEQ ID NO: 891214 - RNA, 22 nt, Human
ugguugaaaaacauuggcuuuu

SEQ ID NO: 891215 - RNA, 22 nt, Human
ugguuuguuuguucauguaaaa

SEQ ID NO: 891216 - RNA, 22 nt, Human
uuucaaacugcccagcacaccu

SEQ ID NO: 891217 - RNA, 22 nt, Human
uguuuacuugagguggaaacaa

SEQ ID NO: 891218 - RNA, 21 nt, Human
augucaaaugcuuuauuuuau

SEQ ID NO: 891219 - RNA, 22 nt, Human
ugggaggcagaaguugacugga

SEQ ID NO: 891220 - RNA, 22 nt, Human
aguucuagaagacuuuuccauu

SEQ ID NO: 891221 - RNA, 22 nt, Human
guacauauuauaaaauacagcu

SEQ ID NO: 891222 - RNA, 20 nt, Human
ccuggagccuggaaggaguc

SEQ ID NO: 891223 - RNA, 22 nt, Human
ccagguguaggacaccaaggga

SEQ ID NO: 891224 - RNA, 22 nt, Human
gaagaauauauaaugauuuugu

SEQ ID NO: 891225 - RNA, 22 nt, Human
cuggggccacaacggcgcacgc

SEQ ID NO: 891226 - RNA, 22 nt, Human
cuuuauucugcaaauugccuug

SEQ ID NO: 891227 - RNA, 22 nt, Human
gagguaagggcaggagagugaa

SEQ ID NO: 891228 - RNA, 22 nt, Human
uggcaguggcgggacucagggc

SEQ ID NO: 891229 - RNA, 22 nt, Human
acacaauaaauuuauccuuuga

SEQ ID NO: 891230 - RNA, 22 nt, Human
cuucccuuggugaacagagcau

SEQ ID NO: 891231 - RNA, 22 nt, Human
cucuuaguaaugccaugaagca

SEQ ID NO: 891232 - RNA, 22 nt, Human
acagacagauuuugucugaugu

SEQ ID NO: 891233 - RNA, 22 nt, Human
uuucauguuacaguguaaaagu

SEQ ID NO: 891234 - RNA, 22 nt, Human
gcaaacaugugcucauuuugug

SEQ ID NO: 891235 - RNA, 22 nt, Human
cugcuagcccgccggccagcga

SEQ ID NO: 891236 - RNA, 22 nt, Human
uacuguaugaauuauguuauuu

SEQ ID NO: 891237 - RNA, 22 nt, Human
cuuuaucagaaaacacauuagg

SEQ ID NO: 891238 - RNA, 22 nt, Human
uguccauugcuuauuucuacuu

SEQ ID NO: 891239 - RNA, 22 nt, Human
uauguguauguucauucaugca

SEQ ID NO: 891240 - RNA, 22 nt, Human
ugcuggcccaguacuaaugucu

SEQ ID NO: 891241 - RNA, 22 nt, Human
ugaaguuauauauguugaaaau

SEQ ID NO: 891242 - RNA, 20 nt, Human
uggggaguugagcacgagca

SEQ ID NO: 891243 - RNA, 22 nt, Human
guuccagacuugccaguggaag

SEQ ID NO: 891244 - RNA, 22 nt, Human
guccucuguuuccaucugacuu

SEQ ID NO: 891245 - RNA, 22 nt, Human
cuggaaguuuccuuccugguca

SEQ ID NO: 891246 - RNA, 22 nt, Human
cucaggaguuggaggcuacagu

SEQ ID NO: 891247 - RNA, 22 nt, Human
uccuucuucaugaagauauaug

SEQ ID NO: 891248 - RNA, 22 nt, Human
agcagguguuuguaucauaagg

SEQ ID NO: 891249 - RNA, 22 nt, Human
uacagaaauacugggggguucu

SEQ ID NO: 891250 - RNA, 22 nt, Human
cauuagcacaugacggaaagca

SEQ ID NO: 891251 - RNA, 21 nt, Human
auacauucuauuaagcauuua

SEQ ID NO: 891252 - RNA, 22 nt, Human
cucagagccaguuagcaggugc

SEQ ID NO: 891253 - RNA, 22 nt, Human
aaagucuucacggcacuagugu

SEQ ID NO: 891254 - RNA, 22 nt, Human
ucuuaugugcugugagauuuuu

SEQ ID NO: 891255 - RNA, 22 nt, Human
ucauuucucccggccaaaaacu

SEQ ID NO: 891256 - RNA, 22 nt, Human
ucugggcagccaugugccuggc

SEQ ID NO: 891257 - RNA, 22 nt, Human
guagcugucucggucaggaguu

SEQ ID NO: 891258 - RNA, 22 nt, Human
uguguucauguauguauacaua

SEQ ID NO: 891259 - RNA, 22 nt, Human
acagaguuguguuuguacaacg

SEQ ID NO: 891260 - RNA, 19 nt, Human
gcucugccagugguaacau

SEQ ID NO: 891261 - RNA, 22 nt, Human
agaaguuucuuugaacguguag

SEQ ID NO: 891262 - RNA, 22 nt, Human
uuuaauagggcccaaugagacu

SEQ ID NO: 891263 - RNA, 22 nt, Human
auuucaugaguuauuauagugg

SEQ ID NO: 891264 - RNA, 22 nt, Human
guuuccuuuuucugcccucaau

SEQ ID NO: 891265 - RNA, 22 nt, Human
cuucagugacagccacccaggc

SEQ ID NO: 891266 - RNA, 22 nt, Human
auauggaacuauucuguguaga

SEQ ID NO: 891267 - RNA, 22 nt, Human
auccugggccucagaggugugu

SEQ ID NO: 891268 - RNA, 22 nt, Human
guucagggagggacagaugaag

SEQ ID NO: 891269 - RNA, 22 nt, Human
uugaacauuaacuucagucuau

SEQ ID NO: 891270 - RNA, 22 nt, Human
aaggagacauuugcagagcacc

SEQ ID NO: 891271 - RNA, 21 nt, Human
gccuguguaaauugaguuucc

SEQ ID NO: 891272 - RNA, 21 nt, Human
acacugugucauaaugcuuaa

SEQ ID NO: 891273 - RNA, 22 nt, Human
cagaccugaggagcacugagcc

SEQ ID NO: 891274 - RNA, 22 nt, Human
agggcccuggggugcacugaca

SEQ ID NO: 891275 - RNA, 23 nt, Human
uuuuccuuuggacaggcuguauu

SEQ ID NO: 891276 - RNA, 22 nt, Human
uuggaaagauuauuauuaugaa

SEQ ID NO: 891277 - RNA, 22 nt, Human
gcccugagugguaccugugggu

SEQ ID NO: 891278 - RNA, 20 nt, Human
agccaccucauuucccuacc

SEQ ID NO: 891279 - RNA, 21 nt, Human
agcugaaaaguuguuuacaag

SEQ ID NO: 891280 - RNA, 22 nt, Human
cagguucccuugcagcuaagug

SEQ ID NO: 891281 - RNA, 22 nt, Human
aaaaugagauacaguuugaaag

SEQ ID NO: 891282 - RNA, 22 nt, Human
ugucuucagcaaaugccuuucu

SEQ ID NO: 891283 - RNA, 22 nt, Human
ugucuuuuggagcaucuuucuu

SEQ ID NO: 891284 - RNA, 22 nt, Human
uuucaugaggggcaaaaucuca

SEQ ID NO: 891285 - RNA, 22 nt, Human
aagcagccagccaucaugcccg

SEQ ID NO: 891286 - RNA, 22 nt, Human
ugugugucagagucuccauggu

SEQ ID NO: 891287 - RNA, 22 nt, Human
cacuuguugguggugaaaucac

SEQ ID NO: 891288 - RNA, 22 nt, Human
agucuagaggauggguccagau

SEQ ID NO: 891289 - RNA, 22 nt, Human
cugcugagaaaagacugaggga

SEQ ID NO: 891290 - RNA, 23 nt, Human
ggcuccugcuucaugucccaccu

SEQ ID NO: 891291 - RNA, 22 nt, Human
ugaggauggucccgaggacacu

SEQ ID NO: 891292 - RNA, 21 nt, Human
ucugagacuggguuagaaugu

SEQ ID NO: 891293 - RNA, 23 nt, Human
ugcguacggcugccagugugacu

SEQ ID NO: 891294 - RNA, 22 nt, Human
ccagggaaguaguugugagagc

SEQ ID NO: 891295 - RNA, 22 nt, Human
gauggucuuugucucugauaag

SEQ ID NO: 891296 - RNA, 22 nt, Human
uuguccuuggcucuagagguga

SEQ ID NO: 891297 - RNA, 22 nt, Human
ucucugggcucaggagcccggc

SEQ ID NO: 891298 - RNA, 22 nt, Human
acucugugaagucuuauuaugc

SEQ ID NO: 891299 - RNA, 22 nt, Human
ccuugggacagccagcuucaga

SEQ ID NO: 891300 - RNA, 19 nt, Human
ugcugacugggccucaccg

SEQ ID NO: 891301 - RNA, 22 nt, Human
ucucauaauuagguaagucaga

SEQ ID NO: 891302 - RNA, 19 nt, Human
cuguuauugucagagcucc

SEQ ID NO: 891303 - RNA, 22 nt, Human
ucauuacaguguuuauaugucu

SEQ ID NO: 891304 - RNA, 22 nt, Human
ugagcagcuuguuccgaguguu

SEQ ID NO: 891305 - RNA, 22 nt, Human
uguggcugcagacacuggagcc

SEQ ID NO: 891306 - RNA, 20 nt, Human
acagaaagagagaaugucag

SEQ ID NO: 891307 - RNA, 22 nt, Human
gcuggcuggcugugcaaaggca

SEQ ID NO: 891308 - RNA, 22 nt, Human
gaaacagauuaacagcauauuu

SEQ ID NO: 891309 - RNA, 22 nt, Human
caagaauaaccagacaauagca

SEQ ID NO: 891310 - RNA, 18 nt, Human
ugcucacacugaccucug

SEQ ID NO: 891311 - RNA, 22 nt, Human
gaggggcacaguaaaggguccc

SEQ ID NO: 891312 - RNA, 22 nt, Human
ucuuccaaggugcagaucuucu

SEQ ID NO: 891313 - RNA, 22 nt, Human
gaggccagaagugccucgggcu

SEQ ID NO: 891314 - RNA, 22 nt, Human
aagcacagugggcagagcagcc

SEQ ID NO: 891315 - RNA, 22 nt, Human
gccuuggacuaccacucccaca

SEQ ID NO: 891316 - RNA, 22 nt, Human
agcaggcacuaugccaggaucu

SEQ ID NO: 891317 - RNA, 22 nt, Human
aguggcaguuugggagcuacag

SEQ ID NO: 891318 - RNA, 22 nt, Human
gaaauacuguaaaguuauuauu

SEQ ID NO: 891319 - RNA, 22 nt, Human
uucaagaaagaguggcuauucc

SEQ ID NO: 891320 - RNA, 19 nt, Human
ggccaggcugacugugguc

SEQ ID NO: 891321 - RNA, 22 nt, Human
gcaggcaccucguggaguggaa

SEQ ID NO: 891322 - RNA, 19 nt, Human
agagucugugcucuuccua

SEQ ID NO: 891323 - RNA, 23 nt, Human
gcaagcaaggcaggguaaagaga

SEQ ID NO: 891324 - RNA, 22 nt, Human
augcuuuuccaggagaaauaua

SEQ ID NO: 891325 - RNA, 22 nt, Human
acuguaaaauacauaaguauug

SEQ ID NO: 891326 - RNA, 22 nt, Human
uuuaaacuaacaguacacguug

SEQ ID NO: 891327 - RNA, 22 nt, Human
uggaauguuguguauaggucag

SEQ ID NO: 891328 - RNA, 22 nt, Human
aacauauaaacucuuaaguuca

SEQ ID NO: 891329 - RNA, 22 nt, Human
gagaguggaaagcaagcugagu

SEQ ID NO: 891330 - RNA, 22 nt, Human
augagauuuuaaaacuucacuu

SEQ ID NO: 891331 - RNA, 22 nt, Human
ucuccaggacugagcuccagcc

SEQ ID NO: 891332 - RNA, 22 nt, Human
gagaaggacuacggaaaacaga

SEQ ID NO: 891333 - RNA, 19 nt, Human
uccaauuucuauucauguu

SEQ ID NO: 891334 - RNA, 22 nt, Human
ccugagaaaccuggugcaauua

SEQ ID NO: 891335 - RNA, 22 nt, Human
guguuucuggggcauucauagu

SEQ ID NO: 891336 - RNA, 22 nt, Human
auucaaaguacuagcuauuuuu

SEQ ID NO: 891337 - RNA, 22 nt, Human
cacagagaauacugcucuugcu

SEQ ID NO: 891338 - RNA, 22 nt, Human
cugugaggccuuuggccagaua

SEQ ID NO: 891339 - RNA, 22 nt, Human
ccugugcauugcaggguguuca

SEQ ID NO: 891340 - RNA, 22 nt, Human
uuaaauuuuagaaacagacucu

SEQ ID NO: 891341 - RNA, 22 nt, Human
aauagauggguuaaacagcaaa

SEQ ID NO: 891342 - RNA, 22 nt, Human
uagcagcauuaauuccauuugc

SEQ ID NO: 891343 - RNA, 22 nt, Human
cagcaggaggugagaugugacc

SEQ ID NO: 891344 - RNA, 22 nt, Human
auugcugaaaguauuuuaugac

SEQ ID NO: 891345 - RNA, 22 nt, Human
aaccugaauuuaauugaaauga

SEQ ID NO: 891346 - RNA, 22 nt, Human
acagaaaaugccagaagggugg

SEQ ID NO: 891347 - RNA, 22 nt, Human
uugacaagaaucguugccuugg

SEQ ID NO: 891348 - RNA, 22 nt, Human
ucaugacaacuauauuauucca

SEQ ID NO: 891349 - RNA, 22 nt, Human
ugagauaaucaugugauuucau

SEQ ID NO: 891350 - RNA, 22 nt, Human
ucuggcaaaggcaaccacaguu

SEQ ID NO: 891351 - RNA, 22 nt, Human
guacacauugucuguuuacuuc

SEQ ID NO: 891352 - RNA, 21 nt, Human
ggcugcucaccuaggucccaa

SEQ ID NO: 891353 - RNA, 22 nt, Human
aggcuuuaauuaucuacaggag

SEQ ID NO: 891354 - RNA, 22 nt, Human
gccagguguaguggccacaccu

SEQ ID NO: 891355 - RNA, 22 nt, Human
ccacagcugaaagcagaggcuc

SEQ ID NO: 891356 - RNA, 22 nt, Human
uggcagaggaaaaagucacugg

SEQ ID NO: 891357 - RNA, 22 nt, Human
agucacaugagcacuaauuagg

SEQ ID NO: 891358 - RNA, 22 nt, Human
augcuacaggauucuccuuauc

SEQ ID NO: 891359 - RNA, 22 nt, Human
auccacucucccauucaugcau

SEQ ID NO: 891360 - RNA, 22 nt, Human
ggagaagcagcuucuugaugaa

SEQ ID NO: 891361 - RNA, 22 nt, Human
ugguccuggaagguccugaggg

SEQ ID NO: 891362 - RNA, 22 nt, Human
ccuuuccugccucaggaaguag

SEQ ID NO: 891363 - RNA, 22 nt, Human
ccuggguggcagagguugcagu

SEQ ID NO: 891364 - RNA, 21 nt, Human
uuagaacaucaacagcaccua

SEQ ID NO: 891365 - RNA, 22 nt, Human
ugagcagaguuguuucuccuga

SEQ ID NO: 891366 - RNA, 22 nt, Human
uaagaaacccaggaauuucuua

SEQ ID NO: 891367 - RNA, 22 nt, Human
cauguccacaguucugagaggc

SEQ ID NO: 891368 - RNA, 23 nt, Human
aucaaaguggaaaucaauuaucu

SEQ ID NO: 891369 - RNA, 22 nt, Human
uccugcuguuuaccuacaaugg

SEQ ID NO: 891370 - RNA, 22 nt, Human
uccaggcugccacagugcaacg

SEQ ID NO: 891371 - RNA, 22 nt, Human
caguggcagagaacagagaccu

SEQ ID NO: 891372 - RNA, 22 nt, Human
ugagauucuguucagaaaaaug

SEQ ID NO: 891373 - RNA, 22 nt, Human
uggaagacaauguacaugcagu

SEQ ID NO: 891374 - RNA, 22 nt, Human
aaagaaugcagugccuuccagc

SEQ ID NO: 891375 - RNA, 23 nt, Human
cuugcaggaagcagauggcacac

SEQ ID NO: 891376 - RNA, 22 nt, Human
ugcagggcccuugggguugaac

SEQ ID NO: 891377 - RNA, 19 nt, Human
ggcugcagagccccggcgc

SEQ ID NO: 891378 - RNA, 18 nt, Human
auguauguacauauuuau

SEQ ID NO: 891379 - RNA, 19 nt, Human
uaaagagaauaccgguggc

SEQ ID NO: 891380 - RNA, 22 nt, Human
uccugggaacucggaaagcucu

SEQ ID NO: 891381 - RNA, 22 nt, Human
ccacaaaacugugugucaaaga

SEQ ID NO: 891382 - RNA, 22 nt, Human
acacugacgcuugacagucacc

SEQ ID NO: 891383 - RNA, 22 nt, Human
caagccagcaguuuaaugacuc

SEQ ID NO: 891384 - RNA, 22 nt, Human
ccugugucugaccaugcacaug

SEQ ID NO: 891385 - RNA, 22 nt, Human
ucuccaggcuuuuugugaauug

SEQ ID NO: 891386 - RNA, 22 nt, Human
agcuggcccacuguguggucca

SEQ ID NO: 891387 - RNA, 22 nt, Human
agccagggucucucgcucuguu

SEQ ID NO: 891388 - RNA, 22 nt, Human
gcauuacagcaguucaacuugg

SEQ ID NO: 891389 - RNA, 22 nt, Human
uucaaaaagguauguucaaguc

SEQ ID NO: 891390 - RNA, 22 nt, Human
ccagaugucugagccacacucc

SEQ ID NO: 891391 - RNA, 22 nt, Human
gauacacauuuuagcuuugucu

SEQ ID NO: 891392 - RNA, 22 nt, Human
ggccagagcucaaacagucgca

SEQ ID NO: 891393 - RNA, 22 nt, Human
aaacugagaccgaaagggguag

SEQ ID NO: 891394 - RNA, 22 nt, Human
aggcagcagagguugaggaaag

SEQ ID NO: 891395 - RNA, 22 nt, Human
agagaacagccuccuagagaaa

SEQ ID NO: 891396 - RNA, 22 nt, Human
aguuaaaugucaguagcuuaac

SEQ ID NO: 891397 - RNA, 19 nt, Human
ugcugcuuccagcucacuc

SEQ ID NO: 891398 - RNA, 22 nt, Human
aggguauguuuuaggcugaguu

SEQ ID NO: 891399 - RNA, 22 nt, Human
acagaaguguguguguaggaau

SEQ ID NO: 891400 - RNA, 21 nt, Human
gcuggcugucccagggaagca

SEQ ID NO: 891401 - RNA, 22 nt, Human
uugguuaugcaauuucuuugcu

SEQ ID NO: 891402 - RNA, 22 nt, Human
ccaugcccuugucaucuccagg

SEQ ID NO: 891403 - RNA, 22 nt, Human
ugaaacaagggccaugggaaac

SEQ ID NO: 891404 - RNA, 22 nt, Human
ccaccagcuucagcagccgcgg

SEQ ID NO: 891405 - RNA, 22 nt, Human
gacccaggggcagggagaaagu

SEQ ID NO: 891406 - RNA, 22 nt, Human
gagcucugggaaacaaagugua

SEQ ID NO: 891407 - RNA, 22 nt, Human
ugccaauuagagacauccaucu

SEQ ID NO: 891408 - RNA, 22 nt, Human
acuuccaaguuuauucauguga

SEQ ID NO: 891409 - RNA, 22 nt, Human
agcagaaucuguccuuggaaga

SEQ ID NO: 891410 - RNA, 22 nt, Human
auauuacucugauuuaguaaau

SEQ ID NO: 891411 - RNA, 22 nt, Human
uauauguaagcuauguaagagu

SEQ ID NO: 891412 - RNA, 22 nt, Human
gaaggccauugcguccugggau

SEQ ID NO: 891413 - RNA, 22 nt, Human
ugguuuuaaaaacaugcugcau

SEQ ID NO: 891414 - RNA, 22 nt, Human
ggagacaggguugaaccacgca

SEQ ID NO: 891415 - RNA, 22 nt, Human
gcuggcaggguucucacugaaa

SEQ ID NO: 891416 - RNA, 21 nt, Human
ucaucuuacaguccuuucuuu

SEQ ID NO: 891417 - RNA, 20 nt, Human
aaagucuuaugguuaauuuu

SEQ ID NO: 891418 - RNA, 19 nt, Human
ccagcagaagccacuccug

SEQ ID NO: 891419 - RNA, 22 nt, Human
gagacaggcagcuaguggguca

SEQ ID NO: 891420 - RNA, 22 nt, Human
auguucuuucagccagugcauc

SEQ ID NO: 891421 - RNA, 22 nt, Human
uggaagaaugcuccacagggaa

SEQ ID NO: 891422 - RNA, 22 nt, Human
auggccaggcaccucuggcuga

SEQ ID NO: 891423 - RNA, 22 nt, Human
uuuuaaaggcagauuauggcuu

SEQ ID NO: 891424 - RNA, 22 nt, Human
auuauuaugguugcucuuuucc

SEQ ID NO: 891425 - RNA, 22 nt, Human
agauacaacucagaaguguggu

SEQ ID NO: 891426 - RNA, 22 nt, Human
uacaaacuccgaaguuuguacc

SEQ ID NO: 891427 - RNA, 22 nt, Human
uagggcagaguccaggaugggc

SEQ ID NO: 891428 - RNA, 22 nt, Human
auauaucugcaguacugaagaa

SEQ ID NO: 891429 - RNA, 22 nt, Human
ugcccagcugucaaaguagaua

SEQ ID NO: 891430 - RNA, 22 nt, Human
uuuagaggaauugggagaacgu

SEQ ID NO: 891431 - RNA, 22 nt, Human
gcuagaaacuguuuaaucucuu

SEQ ID NO: 891432 - RNA, 21 nt, Human
gaauggcaccauuagcauaua

SEQ ID NO: 891433 - RNA, 22 nt, Human
agcuuuauggugccucacuuga

SEQ ID NO: 891434 - RNA, 22 nt, Human
cuacagaaaccuuuuucauaca

SEQ ID NO: 891435 - RNA, 22 nt, Human
uuugcuaaaaggccauugauuu

SEQ ID NO: 891436 - RNA, 22 nt, Human
agcaaugcaaucuuaaccuuga

SEQ ID NO: 891437 - RNA, 22 nt, Human
gcuguggaugcuauggaucauc

SEQ ID NO: 891438 - RNA, 22 nt, Human
cugaugagucggcugccaccag

SEQ ID NO: 891439 - RNA, 22 nt, Human
uggacccuggacugcccuggcc

SEQ ID NO: 891440 - RNA, 21 nt, Human
uauuaauuuuucuucccacua

SEQ ID NO: 891441 - RNA, 22 nt, Human
cucaaggacuuauucaugccug

SEQ ID NO: 891442 - RNA, 22 nt, Human
ugaggcucagaaauguaaguuu

SEQ ID NO: 891443 - RNA, 22 nt, Human
auauuuuggggugaugugcauc

SEQ ID NO: 891444 - RNA, 22 nt, Human
uaggaaaagucuagauugauga

SEQ ID NO: 891445 - RNA, 22 nt, Human
uggaauuuuguauuagcuuuga

SEQ ID NO: 891446 - RNA, 22 nt, Human
caggcccucguggugagcuggg

SEQ ID NO: 891447 - RNA, 22 nt, Human
ugaaggcacaguuuaaccagua

SEQ ID NO: 891448 - RNA, 22 nt, Human
ugucaugguauuugugagcugc

SEQ ID NO: 891449 - RNA, 22 nt, Human
gcauucuugguggagugcuaaa

SEQ ID NO: 891450 - RNA, 22 nt, Human
gagcccugaacaacagcaggaa

SEQ ID NO: 891451 - RNA, 22 nt, Human
aggugcaguggcucaugccugu

SEQ ID NO: 891452 - RNA, 22 nt, Human
uaguacaguggagagcaaagaa

SEQ ID NO: 891453 - RNA, 22 nt, Human
cuggggcucucuggaaugcuug

SEQ ID NO: 891454 - RNA, 22 nt, Human
ugucauuaugaggauuacaaua

SEQ ID NO: 891455 - RNA, 22 nt, Human
auuuuaccuuaaagucuauauu

SEQ ID NO: 891456 - RNA, 22 nt, Human
aggguggcaccuggaagggaug

SEQ ID NO: 891457 - RNA, 22 nt, Human
uuagagauugucuaguauugug

SEQ ID NO: 891458 - RNA, 22 nt, Human
uacugaaagacugaauauuuag

SEQ ID NO: 891459 - RNA, 22 nt, Human
agauaacugguuuacauuauug

SEQ ID NO: 891460 - RNA, 20 nt, Human
acagaacugagaacagucuc

SEQ ID NO: 891461 - RNA, 19 nt, Human
aagagcagggaaagaauug

SEQ ID NO: 891462 - RNA, 22 nt, Human
gcuuuagaaauaucacugugga

SEQ ID NO: 891463 - RNA, 22 nt, Human
uuucuacaguacugauuucaua

SEQ ID NO: 891464 - RNA, 22 nt, Human
acagcuuuugaaaaauuacugg

SEQ ID NO: 891465 - RNA, 22 nt, Human
caauaguaaauuacggaggaga

SEQ ID NO: 891466 - RNA, 22 nt, Human
uauguguguaugacagacagag

SEQ ID NO: 891467 - RNA, 22 nt, Human
uaaaaugcacagcaguugaaag

SEQ ID NO: 891468 - RNA, 22 nt, Human
guucacaaaguacuguaugcau

SEQ ID NO: 891469 - RNA, 23 nt, Human
ccuggaguacuaaggggauggaa

SEQ ID NO: 891470 - RNA, 22 nt, Human
ggggcuguuuuuggaauggcug

SEQ ID NO: 891471 - RNA, 22 nt, Human
cauaaugugugucauacagacu

SEQ ID NO: 891472 - RNA, 20 nt, Human
uccaugcaaauacagaguuu

SEQ ID NO: 891473 - RNA, 22 nt, Human
ucaugcugaggaugcugugaag

SEQ ID NO: 891474 - RNA, 22 nt, Human
gccacagggcagaugcgcagag

SEQ ID NO: 891475 - RNA, 20 nt, Human
cuguaaacugcgucuguaau

SEQ ID NO: 891476 - RNA, 22 nt, Human
aaauggcaacagaagggaguuc

SEQ ID NO: 891477 - RNA, 22 nt, Human
uuuauucuagcucagaauaguu

SEQ ID NO: 891478 - RNA, 22 nt, Human
cuucuguuacuguuagcugaag

SEQ ID NO: 891479 - RNA, 22 nt, Human
aaacagcuaaguacauucaagg

SEQ ID NO: 891480 - RNA, 22 nt, Human
cuguagccaguuuggccucacc

SEQ ID NO: 891481 - RNA, 18 nt, Human
ugagcagaguaaggcuuu

SEQ ID NO: 891482 - RNA, 22 nt, Human
uuucucuugcgauaugcuacac

SEQ ID NO: 891483 - RNA, 21 nt, Human
gcaggaacaggucaugaucug

SEQ ID NO: 891484 - RNA, 22 nt, Human
aaguguauuaagcaacguuauu

SEQ ID NO: 891485 - RNA, 22 nt, Human
acuucaugcuuuagagagauga

SEQ ID NO: 891486 - RNA, 22 nt, Human
auuuguaaagugcuuaaaagua

SEQ ID NO: 891487 - RNA, 22 nt, Human
ggucuggccuccgggcaggugg

SEQ ID NO: 891488 - RNA, 22 nt, Human
ugccuggaugugcuggccucac

SEQ ID NO: 891489 - RNA, 19 nt, Human
ucucagagcccuagaggcc

SEQ ID NO: 891490 - RNA, 22 nt, Human
ggacugaggacaugugaggcau

SEQ ID NO: 891491 - RNA, 22 nt, Human
aucuauuaugcugagaaacugu

SEQ ID NO: 891492 - RNA, 22 nt, Human
uucugccuuacgauauuuucaa

SEQ ID NO: 891493 - RNA, 22 nt, Human
gagcuggcugugguugagugca

SEQ ID NO: 891494 - RNA, 22 nt, Human
aacaauaggaccuuuauguucu

SEQ ID NO: 891495 - RNA, 22 nt, Human
ugauucucauuaucuuggggug

SEQ ID NO: 891496 - RNA, 22 nt, Human
uagcuguguguccuugggcaaa

SEQ ID NO: 891497 - RNA, 22 nt, Human
ucaacaaugggucuguaaugga

SEQ ID NO: 891498 - RNA, 20 nt, Human
cauauggaaagauauuguuc

SEQ ID NO: 891499 - RNA, 22 nt, Human
cuggagcugcuguccuugggug

SEQ ID NO: 891500 - RNA, 22 nt, Human
ucugugugguaguuucagugaa

SEQ ID NO: 891501 - RNA, 22 nt, Human
ugccuucaccaggccuucagcc

SEQ ID NO: 891502 - RNA, 22 nt, Human
cccagcaguacccaagcccuug

SEQ ID NO: 891503 - RNA, 22 nt, Human
guugcaggaggauggcugcaua

SEQ ID NO: 891504 - RNA, 22 nt, Human
ugugaggaacccggaauguggg

SEQ ID NO: 891505 - RNA, 22 nt, Human
uaaacagaaugcguaagaagug

SEQ ID NO: 891506 - RNA, 22 nt, Human
agcagaacugaugagacuugag

SEQ ID NO: 891507 - RNA, 22 nt, Human
auuucauguuaacugaacagaa

SEQ ID NO: 891508 - RNA, 22 nt, Human
gcuguuuccagacaaugucuuu

SEQ ID NO: 891509 - RNA, 22 nt, Human
ggcuggcuugccaagcucaggg

SEQ ID NO: 891510 - RNA, 22 nt, Human
gaggccaggggucagcaauugg

SEQ ID NO: 891511 - RNA, 22 nt, Human
ucaaauauuggcuauuucacau

SEQ ID NO: 891512 - RNA, 22 nt, Human
uucucagguagugcugaugcug

SEQ ID NO: 891513 - RNA, 22 nt, Human
ucagcuggauguggaagugcua

SEQ ID NO: 891514 - RNA, 22 nt, Human
agccuuagggauugagguugcu

SEQ ID NO: 891515 - RNA, 22 nt, Human
ucagugucugugggcaggaugg

SEQ ID NO: 891516 - RNA, 22 nt, Human
caugccaagcauguucagaagu

SEQ ID NO: 891517 - RNA, 22 nt, Human
aucauacacucacauaaacaga

SEQ ID NO: 891518 - RNA, 22 nt, Human
ucaauucaauugaacaguuacu

SEQ ID NO: 891519 - RNA, 22 nt, Human
ggagcccaagucugcacucggc

SEQ ID NO: 891520 - RNA, 22 nt, Human
agagaaaacucauugagguguc

SEQ ID NO: 891521 - RNA, 22 nt, Human
aggagacaucuaacuguagguu

SEQ ID NO: 891522 - RNA, 22 nt, Human
uuaucuuggcaauucuaaggua

SEQ ID NO: 891523 - RNA, 22 nt, Human
auggcuggcauccaggugggcu

SEQ ID NO: 891524 - RNA, 22 nt, Human
gacagggacucccugguuagaa

SEQ ID NO: 891525 - RNA, 22 nt, Human
uacacauguauuuauguguaca

SEQ ID NO: 891526 - RNA, 22 nt, Human
ggguggcagcuguugccaaggu

SEQ ID NO: 891527 - RNA, 22 nt, Human
cuucuguggauauguucucucu

SEQ ID NO: 891528 - RNA, 22 nt, Human
ugagaaugaggggguagaaggu

SEQ ID NO: 891529 - RNA, 22 nt, Human
cacagaggugauaguggucaag

SEQ ID NO: 891530 - RNA, 22 nt, Human
agggccugaggcugacggggag

SEQ ID NO: 891531 - RNA, 22 nt, Human
uauaaaguuggggcugaaguaa

SEQ ID NO: 891532 - RNA, 22 nt, Human
gagggccaauggauuucaacug

SEQ ID NO: 891533 - RNA, 22 nt, Human
ugcucuggaguggcuugugcac

SEQ ID NO: 891534 - RNA, 22 nt, Human
uuauuccagugggugguuucuc

SEQ ID NO: 891535 - RNA, 22 nt, Human
ucccauuucaugcuggcugugg

SEQ ID NO: 891536 - RNA, 22 nt, Human
ccugucuggugaggggguugca

SEQ ID NO: 891537 - RNA, 19 nt, Human
cuggaaugauagagaccuc

SEQ ID NO: 891538 - RNA, 22 nt, Human
aaacaucuuucuauugcaaguu

SEQ ID NO: 891539 - RNA, 22 nt, Human
uauucagaaaauaaauuggauu

SEQ ID NO: 891540 - RNA, 22 nt, Human
gcaaggcugaccucucuagacu

SEQ ID NO: 891541 - RNA, 22 nt, Human
uugaagaauuaggacgugagua

SEQ ID NO: 891542 - RNA, 22 nt, Human
gggcuaggucugaucagagaag

SEQ ID NO: 891543 - RNA, 22 nt, Human
cuggagauacugcucuccauau

SEQ ID NO: 891544 - RNA, 21 nt, Human
uagcauuuuuguauugcugaa

SEQ ID NO: 891545 - RNA, 22 nt, Human
aaggaagaugaggugcugcuua

SEQ ID NO: 891546 - RNA, 21 nt, Human
agguaccaaaagccugcauga

SEQ ID NO: 891547 - RNA, 22 nt, Human
aaguguuacagaaacaaaugaa

SEQ ID NO: 891548 - RNA, 21 nt, Human
gcccagaguccucccacucca

SEQ ID NO: 891549 - RNA, 22 nt, Human
cugagugauagcgauggggaac

SEQ ID NO: 891550 - RNA, 19 nt, Human
cuuuucaucaacagccaau

SEQ ID NO: 891551 - RNA, 22 nt, Human
uguuuugugcauuuacaacaug

SEQ ID NO: 891552 - RNA, 22 nt, Human
cagggaugcugcuuaggcaguu

SEQ ID NO: 891553 - RNA, 22 nt, Human
aguucucauugcaugagacaga

SEQ ID NO: 891554 - RNA, 18 nt, Human
gagaggagccagaauuuu

SEQ ID NO: 891555 - RNA, 22 nt, Human
aaggccaacuaggaugagcuag

SEQ ID NO: 891556 - RNA, 19 nt, Human
gcagagucaagagcugcug

SEQ ID NO: 891557 - RNA, 22 nt, Human
gugaggagucugaagcacauaa

SEQ ID NO: 891558 - RNA, 22 nt, Human
ucuugcugcuguccacacagua

SEQ ID NO: 891559 - RNA, 22 nt, Human
cuuauguaaacuacagauaaua

SEQ ID NO: 891560 - RNA, 22 nt, Human
cuagggagcacuagcugccuug

SEQ ID NO: 891561 - RNA, 18 nt, Human
gugugggcuccuccgagu

SEQ ID NO: 891562 - RNA, 22 nt, Human
ugaagcaauagagacaagacca

SEQ ID NO: 891563 - RNA, 22 nt, Human
agcaggaggguuuuguagaguc

SEQ ID NO: 891564 - RNA, 22 nt, Human
agugggcaaaacagcucagagc

SEQ ID NO: 891565 - RNA, 18 nt, Human
cucaguguuugcugaaaa

SEQ ID NO: 891566 - RNA, 22 nt, Human
cuucaucaacucuaacaaaugu

SEQ ID NO: 891567 - RNA, 21 nt, Human
ucagggaagugugcagaaggg

SEQ ID NO: 891568 - RNA, 21 nt, Human
uucaggugagaucauguugac

SEQ ID NO: 891569 - RNA, 22 nt, Human
cuuucucuguguuucacaugcu

SEQ ID NO: 891570 - RNA, 22 nt, Human
auucagacucuugagcaguccc

SEQ ID NO: 891571 - RNA, 22 nt, Human
uuaaauauuauguugucugcaa

SEQ ID NO: 891572 - RNA, 22 nt, Human
ucaggcagguuggcugcagguc

SEQ ID NO: 891573 - RNA, 22 nt, Human
uccccacucaccacuggccaaa

SEQ ID NO: 891574 - RNA, 22 nt, Human
uuagauacccaaguggaucugu

SEQ ID NO: 891575 - RNA, 22 nt, Human
caggccaagucccaagugcggg

SEQ ID NO: 891576 - RNA, 22 nt, Human
ggauucugccuuguugcuucaa

SEQ ID NO: 891577 - RNA, 22 nt, Human
aaguaaacuuacacauaguaaa

SEQ ID NO: 891578 - RNA, 22 nt, Human
gacagcauccaagagggaggga

SEQ ID NO: 891579 - RNA, 22 nt, Human
uaacacagacagccacuaguaa

SEQ ID NO: 891580 - RNA, 22 nt, Human
uccaggccccccacgcuaaugg

SEQ ID NO: 891581 - RNA, 22 nt, Human
gugggggcaggcagugcuagga

SEQ ID NO: 891582 - RNA, 22 nt, Human
uccagggcagugacuacagcgg

SEQ ID NO: 891583 - RNA, 22 nt, Human
ucuucuguauuguuaacucagg

SEQ ID NO: 891584 - RNA, 22 nt, Human
gaaaucuacuuuggguuagaca

SEQ ID NO: 891585 - RNA, 20 nt, Human
ucucaggcccccuccuugcu

SEQ ID NO: 891586 - RNA, 22 nt, Human
cccacuccuggagcuagggcuc

SEQ ID NO: 891587 - RNA, 21 nt, Human
cagcaaggaagucgaguaggu

SEQ ID NO: 891588 - RNA, 22 nt, Human
uuuuagaagugccuauccuaug

SEQ ID NO: 891589 - RNA, 22 nt, Human
auccauuugacauaauuucagc

SEQ ID NO: 891590 - RNA, 22 nt, Human
uucauuugucugcuauagaucc

SEQ ID NO: 891591 - RNA, 22 nt, Human
ggaagcacagcauaaaguuacu

SEQ ID NO: 891592 - RNA, 22 nt, Human
gccagcaaggaggggaaaaaug

SEQ ID NO: 891593 - RNA, 22 nt, Human
aggccagguggucaugcuugcu

SEQ ID NO: 891594 - RNA, 22 nt, Human
agaaaguuuugugcuauauaug

SEQ ID NO: 891595 - RNA, 22 nt, Human
auucuagcagauauuggaaauu

SEQ ID NO: 891596 - RNA, 22 nt, Human
aaagcaauagaggguaagacug

SEQ ID NO: 891597 - RNA, 22 nt, Human
cuuuauguccaccagacugcaa

SEQ ID NO: 891598 - RNA, 17 nt, Human
gacaagacagaauucau

SEQ ID NO: 891599 - RNA, 19 nt, Human
uuuucacauacuggauccu

SEQ ID NO: 891600 - RNA, 22 nt, Human
uggggccugcacaggcugaaug

SEQ ID NO: 891601 - RNA, 22 nt, Human
cauauuugguauaacuuaagca

SEQ ID NO: 891602 - RNA, 22 nt, Human
ugaugcuguuccaguuauauug

SEQ ID NO: 891603 - RNA, 22 nt, Human
cacugccuggaaggagagacau

SEQ ID NO: 891604 - RNA, 20 nt, Human
ccugucuggagacaaagaga

SEQ ID NO: 891605 - RNA, 18 nt, Human
ugcaucauuuauggguca

SEQ ID NO: 891606 - RNA, 22 nt, Human
uggcuggcauagccauugcucc

SEQ ID NO: 891607 - RNA, 22 nt, Human
aagaaagggcuauuguucucca

SEQ ID NO: 891608 - RNA, 22 nt, Human
aaggaaagauucucucucuaga

SEQ ID NO: 891609 - RNA, 22 nt, Human
aguuugucugucuucaaagccu

SEQ ID NO: 891610 - RNA, 22 nt, Human
cccaggagauggagguugcagu

SEQ ID NO: 891611 - RNA, 22 nt, Human
cuuagcaaggcugccuggagaa

SEQ ID NO: 891612 - RNA, 22 nt, Human
agucugaggcacccugaauauu

SEQ ID NO: 891613 - RNA, 22 nt, Human
aguucaggcauaaggcaugaac

SEQ ID NO: 891614 - RNA, 22 nt, Human
aauugcaacagguagacuuuuc

SEQ ID NO: 891615 - RNA, 23 nt, Human
uguggcugagaaauugacaacuu

SEQ ID NO: 891616 - RNA, 22 nt, Human
uggacaggugagugacucaggg

SEQ ID NO: 891617 - RNA, 22 nt, Human
gcaggggcugagcaccagcggg

SEQ ID NO: 891618 - RNA, 22 nt, Human
gcuuuggaacuuaaauccuugg

SEQ ID NO: 891619 - RNA, 20 nt, Human
cugaagagacuggaggggca

SEQ ID NO: 891620 - RNA, 22 nt, Human
acaaauuuguguaguuauggca

SEQ ID NO: 891621 - RNA, 22 nt, Human
agcugcccaaggucacagagcu

SEQ ID NO: 891622 - RNA, 22 nt, Human
agggauggaagacuugaagacc

SEQ ID NO: 891623 - RNA, 21 nt, Human
acacaggaguuucuucuuucu

SEQ ID NO: 891624 - RNA, 22 nt, Human
auccuuccagaguuauucucaa

SEQ ID NO: 891625 - RNA, 22 nt, Human
ucauaaaaguacucauguucau

SEQ ID NO: 891626 - RNA, 22 nt, Human
gcaccuggacagugacccuagc

SEQ ID NO: 891627 - RNA, 18 nt, Human
auuucuacuacuauaaag

SEQ ID NO: 891628 - RNA, 22 nt, Human
auuuccaccggcucaggaaguu

SEQ ID NO: 891629 - RNA, 21 nt, Human
auggacaauugagugucuguc

SEQ ID NO: 891630 - RNA, 22 nt, Human
gcagugggagcuuaggcagugc

SEQ ID NO: 891631 - RNA, 22 nt, Human
aguuuauuuuugauaagucuug

SEQ ID NO: 891632 - RNA, 22 nt, Human
gaggaagagagcucugccuugu

SEQ ID NO: 891633 - RNA, 22 nt, Human
ugccccugaccucaggcgaagg

SEQ ID NO: 891634 - RNA, 22 nt, Human
gacacaguucccuaugagguaa

SEQ ID NO: 891635 - RNA, 22 nt, Human
aaauauguaaccaaggugaagu

SEQ ID NO: 891636 - RNA, 22 nt, Human
cuuccaaauguaaauaaguuuc

SEQ ID NO: 891637 - RNA, 22 nt, Human
acauuucuuagccuaguuccag

SEQ ID NO: 891638 - RNA, 23 nt, Human
acaugauacacaauuagcaaacc

SEQ ID NO: 891639 - RNA, 22 nt, Human
cuuauuuuaagucaguuugggu

SEQ ID NO: 891640 - RNA, 22 nt, Human
agaguacugccucaguuaugaa

SEQ ID NO: 891641 - RNA, 22 nt, Human
uuccagaaaucuuucagcucaa

SEQ ID NO: 891642 - RNA, 22 nt, Human
ggcaggcauggccacucccuag

SEQ ID NO: 891643 - RNA, 17 nt, Human
uuacaacaauucaugag

SEQ ID NO: 891644 - RNA, 22 nt, Human
acccagccacagcauugaggga

SEQ ID NO: 891645 - RNA, 22 nt, Human
ucuuaaacuuugcuguaauucu

SEQ ID NO: 891646 - RNA, 22 nt, Human
ugccaggcagugucagauugag

SEQ ID NO: 891647 - RNA, 22 nt, Human
gugggaugcaguggugaguggc

SEQ ID NO: 891648 - RNA, 22 nt, Human
aguguuuaacuucguccugaag

SEQ ID NO: 891649 - RNA, 19 nt, Human
ggacagacgcagagaucug

SEQ ID NO: 891650 - RNA, 22 nt, Human
uaaucuguauuccuacuuugca

SEQ ID NO: 891651 - RNA, 22 nt, Human
guaacaaaguuucuaggugcug

SEQ ID NO: 891652 - RNA, 22 nt, Human
ggccugcuguguacugauguca

SEQ ID NO: 891653 - RNA, 22 nt, Human
uagcauaacagguaagagugag

SEQ ID NO: 891654 - RNA, 22 nt, Human
acugcaaggaggugggguauca

SEQ ID NO: 891655 - RNA, 22 nt, Human
auccugggcugcacccucagcc

SEQ ID NO: 891656 - RNA, 22 nt, Human
ccaaggagcugcaggcacuugu

SEQ ID NO: 891657 - RNA, 22 nt, Human
augcgugcagggguccuccugg

SEQ ID NO: 891658 - RNA, 22 nt, Human
agauacagaccucuuauuaagg

SEQ ID NO: 891659 - RNA, 22 nt, Human
cuagaauacucguauuauuccc

SEQ ID NO: 891660 - RNA, 20 nt, Human
auuugcaucugaauaacuua

SEQ ID NO: 891661 - RNA, 22 nt, Human
guuucuuuugugaucaccaacc

SEQ ID NO: 891662 - RNA, 22 nt, Human
acugcaggccuuggugccagca

SEQ ID NO: 891663 - RNA, 22 nt, Human
agggcugcccagugugagagcu

SEQ ID NO: 891664 - RNA, 22 nt, Human
agagggaucacccuguuucugg

SEQ ID NO: 891665 - RNA, 22 nt, Human
accuagaaacugacagaauauu

SEQ ID NO: 891666 - RNA, 22 nt, Human
guuugaaacaugcaccuggagg

SEQ ID NO: 891667 - RNA, 22 nt, Human
ugaaauacacaaauuuaguaag

SEQ ID NO: 891668 - RNA, 22 nt, Human
agggaguuccgaucugugcacc

SEQ ID NO: 891669 - RNA, 22 nt, Human
ugugacaguaacuugggaugga

SEQ ID NO: 891670 - RNA, 20 nt, Human
acaggcuuuggagucugaau

SEQ ID NO: 891671 - RNA, 22 nt, Human
augugucuucuguggguuugaa

SEQ ID NO: 891672 - RNA, 22 nt, Human
gagaaucucaggcacccagaag

SEQ ID NO: 891673 - RNA, 22 nt, Human
aguccaugguucugacucaucu

SEQ ID NO: 891674 - RNA, 22 nt, Human
cugugagggcagggaccagagg

SEQ ID NO: 891675 - RNA, 22 nt, Human
uaggaaaugcugucuuauugua

SEQ ID NO: 891676 - RNA, 22 nt, Human
uucuuucccuuccagcagcucc

SEQ ID NO: 891677 - RNA, 22 nt, Human
uuuugcaauauguuccugaaua

SEQ ID NO: 891678 - RNA, 22 nt, Human
ucuccaggaaagacacuggacu

SEQ ID NO: 891679 - RNA, 22 nt, Human
agacaaauuuguuuuccugucu

SEQ ID NO: 891680 - RNA, 23 nt, Human
ugggccuggccucccaguccagc

SEQ ID NO: 891681 - RNA, 22 nt, Human
cuuaggcagacugcugaugcag

SEQ ID NO: 891682 - RNA, 22 nt, Human
acagguguacaaugcaugacag

SEQ ID NO: 891683 - RNA, 22 nt, Human
uuucuaaacaaagggaguuugg

SEQ ID NO: 891684 - RNA, 22 nt, Human
ucuauuacuuaccacuaauuca

SEQ ID NO: 891685 - RNA, 22 nt, Human
agcagggcuggggcacgagcca

SEQ ID NO: 891686 - RNA, 22 nt, Human
uagcauuuauggucaugugucc

SEQ ID NO: 891687 - RNA, 22 nt, Human
guucaaaggccuguggaaaggg

SEQ ID NO: 891688 - RNA, 22 nt, Human
acaguguucugcuuuuuaaucc

SEQ ID NO: 891689 - RNA, 22 nt, Human
gcagggguagugucuuccugag

SEQ ID NO: 891690 - RNA, 22 nt, Human
ccucuucucaacuccagccaga

SEQ ID NO: 891691 - RNA, 19 nt, Human
uuacucacauuuagauucc

SEQ ID NO: 891692 - RNA, 22 nt, Human
cuucaaagggucacuauuuauc

SEQ ID NO: 891693 - RNA, 19 nt, Human
ucaguggaugaacauguuu

SEQ ID NO: 891694 - RNA, 22 nt, Human
uagagcaguguuguccaucaga

SEQ ID NO: 891695 - RNA, 22 nt, Human
aacauuucagcaaauaagaaca

SEQ ID NO: 891696 - RNA, 22 nt, Human
ccuggagcacagcccaguccca

SEQ ID NO: 891697 - RNA, 22 nt, Human
ggcagccuugacuagugacuua

SEQ ID NO: 891698 - RNA, 22 nt, Human
aggcucugcagaccccagcugu

SEQ ID NO: 891699 - RNA, 22 nt, Human
aaacacaagaggcaggguacag

SEQ ID NO: 891700 - RNA, 21 nt, Human
aagugccacccacagaugcau

SEQ ID NO: 891701 - RNA, 22 nt, Human
agugcacuggcaccaucucagc

SEQ ID NO: 891702 - RNA, 22 nt, Human
cuggaaguauaggggagaugau

SEQ ID NO: 891703 - RNA, 21 nt, Human
agcagcagaucuggugagggc

SEQ ID NO: 891704 - RNA, 22 nt, Human
ccauccugcauugcuauucaga

SEQ ID NO: 891705 - RNA, 22 nt, Human
uuggcugaaagccaugagaccg

SEQ ID NO: 891706 - RNA, 22 nt, Human
acuguacacacuucucugucuu

SEQ ID NO: 891707 - RNA, 22 nt, Human
ugugaaagcagccaugggcauu

SEQ ID NO: 891708 - RNA, 23 nt, Human
uggggcugauggagacggaccag

SEQ ID NO: 891709 - RNA, 22 nt, Human
aguugacucucaagauccuguu

SEQ ID NO: 891710 - RNA, 22 nt, Human
agaaguuucacaauggguuuua

SEQ ID NO: 891711 - RNA, 22 nt, Human
cuguccugugucagccugaaau

SEQ ID NO: 891712 - RNA, 22 nt, Human
ucugaauauguuuaucaucucu

SEQ ID NO: 891713 - RNA, 22 nt, Human
ugugcaggugcaggaagggggc

SEQ ID NO: 891714 - RNA, 22 nt, Human
aggaaagaaguacauucucaug

SEQ ID NO: 891715 - RNA, 22 nt, Human
cccagggguucugagcagcagc

SEQ ID NO: 891716 - RNA, 22 nt, Human
ugcccacugugucaaagaaaua

SEQ ID NO: 891717 - RNA, 22 nt, Human
uucaguuccuuaucauaggguu

SEQ ID NO: 891718 - RNA, 22 nt, Human
ugggaccucucuugagagagca

SEQ ID NO: 891719 - RNA, 22 nt, Human
gcuuggaguagaaugcauucuu

SEQ ID NO: 891720 - RNA, 22 nt, Human
acagggcuugugacaacuuuaa

SEQ ID NO: 891721 - RNA, 22 nt, Human
uuuggagaaguugcuaaagugu

SEQ ID NO: 891722 - RNA, 22 nt, Human
gaaguuauaaacuuuuccuccc

SEQ ID NO: 891723 - RNA, 20 nt, Human
auucucacauggcuccgggc

SEQ ID NO: 891724 - RNA, 22 nt, Human
cagcagccauguaccacacuca

SEQ ID NO: 891725 - RNA, 22 nt, Human
ccucuuuaaucccauccaugug

SEQ ID NO: 891726 - RNA, 22 nt, Human
augcagaaggagccaugcuugc

SEQ ID NO: 891727 - RNA, 22 nt, Human
auccauuuuaacuguuagugca

SEQ ID NO: 891728 - RNA, 22 nt, Human
cuguugcaugacugugcaugcu

SEQ ID NO: 891729 - RNA, 22 nt, Human
caggcagagacccucuccuaaa

SEQ ID NO: 891730 - RNA, 22 nt, Human
cagugcugggcagaggagagcg

SEQ ID NO: 891731 - RNA, 22 nt, Human
aaugcuaucggcucuaagcaug

SEQ ID NO: 891732 - RNA, 22 nt, Human
ucaauuuccccuauugauagac

SEQ ID NO: 891733 - RNA, 22 nt, Human
auugucuucugucuuauaguuc

SEQ ID NO: 891734 - RNA, 22 nt, Human
ggcagcugcacguugucccguc

SEQ ID NO: 891735 - RNA, 18 nt, Human
gcagugccagccucuccu

SEQ ID NO: 891736 - RNA, 22 nt, Human
aaguauucuggcagucauucag

SEQ ID NO: 891737 - RNA, 21 nt, Human
acuuuaauauacaugaggagg

SEQ ID NO: 891738 - RNA, 22 nt, Human
uaaagguagcaugaaacugcaa

SEQ ID NO: 891739 - RNA, 22 nt, Human
uccagcucaaauucagcuucca

SEQ ID NO: 891740 - RNA, 22 nt, Human
cugauuccagagucuguguucu

SEQ ID NO: 891741 - RNA, 18 nt, Human
uggcaggaaaugcacuuu

SEQ ID NO: 891742 - RNA, 22 nt, Human
uuggucuguaguuuucuuaugu

SEQ ID NO: 891743 - RNA, 22 nt, Human
ucugggagccugaaagugaaug

SEQ ID NO: 891744 - RNA, 22 nt, Human
ucuguccauucagaauggcccu

SEQ ID NO: 891745 - RNA, 22 nt, Human
ggcaagaaccacaauuacuuuu

SEQ ID NO: 891746 - RNA, 22 nt, Human
uugaaacauaaaauauuuccug

SEQ ID NO: 891747 - RNA, 21 nt, Human
cacaauguuggccagguuggu

SEQ ID NO: 891748 - RNA, 22 nt, Human
uaaagcuagaaggugcuguaca

SEQ ID NO: 891749 - RNA, 22 nt, Human
uuccaggacuggguguuugaag

SEQ ID NO: 891750 - RNA, 22 nt, Human
uaaagugcaggcuacucagaag

SEQ ID NO: 891751 - RNA, 22 nt, Human
ugagcagaauguucagauaaau

SEQ ID NO: 891752 - RNA, 22 nt, Human
gggagugugcagaagcuggggg

SEQ ID NO: 891753 - RNA, 22 nt, Human
ucuggcagagugauaggauaag

SEQ ID NO: 891754 - RNA, 22 nt, Human
cagguugguauucaucuccaca

SEQ ID NO: 891755 - RNA, 22 nt, Human
acuuauucugagauuaugauca

SEQ ID NO: 891756 - RNA, 22 nt, Human
uggcucaguuucaguccugguu

SEQ ID NO: 891757 - RNA, 21 nt, Human
agcaggaggcagucacagcuc

SEQ ID NO: 891758 - RNA, 22 nt, Human
aacagcuuugagcaguucugua

SEQ ID NO: 891759 - RNA, 22 nt, Human
gacagcuucuagaggaauuggu

SEQ ID NO: 891760 - RNA, 22 nt, Human
uuugcugacuggaugcaguugg

SEQ ID NO: 891761 - RNA, 22 nt, Human
aacacauauuuuugcugagcau

SEQ ID NO: 891762 - RNA, 22 nt, Human
aggaagggugucaugagcccuu

SEQ ID NO: 891763 - RNA, 22 nt, Human
uauuuggaggccacuguugagu

SEQ ID NO: 891764 - RNA, 22 nt, Human
ggccugaaauagcucugagguu

SEQ ID NO: 891765 - RNA, 22 nt, Human
uuauuccaaaucaugguugcau

SEQ ID NO: 891766 - RNA, 19 nt, Human
caggaaggggcgaaucugg

SEQ ID NO: 891767 - RNA, 22 nt, Human
uuguuauuuaggucuggguuag

SEQ ID NO: 891768 - RNA, 18 nt, Human
gcaaacauucuuccaguc

SEQ ID NO: 891769 - RNA, 22 nt, Human
gacagcagccacagggagaggg

SEQ ID NO: 891770 - RNA, 22 nt, Human
gggcauguaggaauccauggag

SEQ ID NO: 891771 - RNA, 20 nt, Human
ggcauccuucugacccagag

SEQ ID NO: 891772 - RNA, 22 nt, Human
gcacuugagccaaugcuaguag

SEQ ID NO: 891773 - RNA, 22 nt, Human
aaauacauacacuguacguggc

SEQ ID NO: 891774 - RNA, 22 nt, Human
uguuaaacuguauugcauaagg

SEQ ID NO: 891775 - RNA, 20 nt, Human
uccuccagaagggcagggug

SEQ ID NO: 891776 - RNA, 22 nt, Human
ccagaagaccccguccaccucc

SEQ ID NO: 891777 - RNA, 19 nt, Human
cuuccccuguuaccucacu

SEQ ID NO: 891778 - RNA, 22 nt, Human
uuccuccagaagcuguagggga

SEQ ID NO: 891779 - RNA, 22 nt, Human
gcagggcuggguccugucucau

SEQ ID NO: 891780 - RNA, 18 nt, Human
gcauucuguuaaugugga

SEQ ID NO: 891781 - RNA, 18 nt, Human
gggaagaggaucuggccc

SEQ ID NO: 891782 - RNA, 22 nt, Human
ugacacugcaaauauaaauauu

SEQ ID NO: 891783 - RNA, 22 nt, Human
uggcugagaaaaugguuuuagg

SEQ ID NO: 891784 - RNA, 22 nt, Human
cuuuauuagauguagacuuucu

SEQ ID NO: 891785 - RNA, 22 nt, Human
aggcugcuggcaggcguggacg

SEQ ID NO: 891786 - RNA, 22 nt, Human
gugauucugaaauauuagaaaa

SEQ ID NO: 891787 - RNA, 22 nt, Human
cugggcacaggggagcagaguc

SEQ ID NO: 891788 - RNA, 20 nt, Human
aggaggggauagaaucaaag

SEQ ID NO: 891789 - RNA, 22 nt, Human
cucuggagugcagccugguggc

SEQ ID NO: 891790 - RNA, 22 nt, Human
caggcacaagaucggcuagaua

SEQ ID NO: 891791 - RNA, 22 nt, Human
agcugcucuugggugacuucaa

SEQ ID NO: 891792 - RNA, 22 nt, Human
ucuucaugaaugaaucuuugac

SEQ ID NO: 891793 - RNA, 20 nt, Human
gaggcccagagaggugaagc

SEQ ID NO: 891794 - RNA, 22 nt, Human
agccagaaaggggcauuaucug

SEQ ID NO: 891795 - RNA, 22 nt, Human
gacagcagcauguuuacaggcc

SEQ ID NO: 891796 - RNA, 22 nt, Human
cagcccugcucuuagugucucc

SEQ ID NO: 891797 - RNA, 22 nt, Human
uggcccugaaucaaggccagca

SEQ ID NO: 891798 - RNA, 22 nt, Human
cacaaugcagcauguaaaugca

SEQ ID NO: 891799 - RNA, 22 nt, Human
ucucuaaacuuauaugaacuau

SEQ ID NO: 891800 - RNA, 22 nt, Human
gguuuuauuaacuuuaacauca

SEQ ID NO: 891801 - RNA, 22 nt, Human
gggaggcgccgaggguagcuaa

SEQ ID NO: 891802 - RNA, 22 nt, Human
gaggggcugggcagucccugga

SEQ ID NO: 891803 - RNA, 22 nt, Human
gccuucugaucgcuggacugac

SEQ ID NO: 891804 - RNA, 22 nt, Human
uuccaggaacaaacucaccuua

SEQ ID NO: 891805 - RNA, 22 nt, Human
gauuuuaucuuugugugcagua

SEQ ID NO: 891806 - RNA, 22 nt, Human
ccucagggaaugggaggcuggg

SEQ ID NO: 891807 - RNA, 22 nt, Human
ucuaugugcccuuugugugaug

SEQ ID NO: 891808 - RNA, 22 nt, Human
caggcuccacuguaggcagcuc

SEQ ID NO: 891809 - RNA, 22 nt, Human
cuguaaauggaacuauguagua

SEQ ID NO: 891810 - RNA, 22 nt, Human
uagugucugaaugcaccuguuu

SEQ ID NO: 891811 - RNA, 22 nt, Human
gaggcucccucaacucugggug

SEQ ID NO: 891812 - RNA, 22 nt, Human
cagaagaauggugucugagcuc

SEQ ID NO: 891813 - RNA, 22 nt, Human
uuuauccagcagcuauucaaaa

SEQ ID NO: 891814 - RNA, 22 nt, Human
gaugaggaaaccaaggcucagg

SEQ ID NO: 891815 - RNA, 22 nt, Human
cuggccuuuagccccagugucu

SEQ ID NO: 891816 - RNA, 22 nt, Human
uuacagcacagugcuuuuacug

SEQ ID NO: 891817 - RNA, 22 nt, Human
caccaggcugaaccagagggga

SEQ ID NO: 891818 - RNA, 22 nt, Human
gaguccaguuagugaggcuggg

SEQ ID NO: 891819 - RNA, 22 nt, Human
ugcauguggaucauauguccua

SEQ ID NO: 891820 - RNA, 22 nt, Human
gcccugagccaccaaugccauu

SEQ ID NO: 891821 - RNA, 23 nt, Human
gagaaagccggcuaugauccugg

SEQ ID NO: 891822 - RNA, 22 nt, Human
ccacuguaaguuugaaaauaac

SEQ ID NO: 891823 - RNA, 22 nt, Human
ccuucacacagguagaagcaga

SEQ ID NO: 891824 - RNA, 22 nt, Human
acaaguaauuuaugcaaacgga

SEQ ID NO: 891825 - RNA, 22 nt, Human
uccucugacuucugguugaguu

SEQ ID NO: 891826 - RNA, 22 nt, Human
uuucaacaccagagaccaugcg

SEQ ID NO: 891827 - RNA, 22 nt, Human
uguccaugcguauccagggagc

SEQ ID NO: 891828 - RNA, 20 nt, Human
ucuuagcaucacuugcuuaa

SEQ ID NO: 891829 - RNA, 22 nt, Human
gugcaugugucuuuauaguagc

SEQ ID NO: 891830 - RNA, 22 nt, Human
ucugagcacaucacacagcuca

SEQ ID NO: 891831 - RNA, 22 nt, Human
uaaagcuaaccuuagugaacac

SEQ ID NO: 891832 - RNA, 22 nt, Human
augggccuguuccuaugcuggu

SEQ ID NO: 891833 - RNA, 22 nt, Human
acuuuaaagcagaauggcuaug

SEQ ID NO: 891834 - RNA, 22 nt, Human
gacaaagcuuuggcauccuuac

SEQ ID NO: 891835 - RNA, 22 nt, Human
uuuccucugggcccugccaccc

SEQ ID NO: 891836 - RNA, 22 nt, Human
gcagcagcucccuauccaggcu

SEQ ID NO: 891837 - RNA, 22 nt, Human
ugcacacacaugaaguagcaug

SEQ ID NO: 891838 - RNA, 22 nt, Human
cccucucugacuucugaacuug

SEQ ID NO: 891839 - RNA, 22 nt, Human
uagauucuguaaauaaucaagg

SEQ ID NO: 891840 - RNA, 22 nt, Human
ggccaggcugguuccuugaccu

SEQ ID NO: 891841 - RNA, 22 nt, Human
ucuuuagaguuaacaauaauga

SEQ ID NO: 891842 - RNA, 23 nt, Human
ugucuugguuucuucacccuagu

SEQ ID NO: 891843 - RNA, 22 nt, Human
ucaggcagaugcagggauggau

SEQ ID NO: 891844 - RNA, 17 nt, Human
uaucaagaagucuggcc

SEQ ID NO: 891845 - RNA, 22 nt, Human
gccugggauucccagaggggca

SEQ ID NO: 891846 - RNA, 22 nt, Human
ucaaaauuuuauuucucaagga

SEQ ID NO: 891847 - RNA, 22 nt, Human
cacaaugauuugguucaaaaau

SEQ ID NO: 891848 - RNA, 19 nt, Human
acuguucuaacuugcagcu

SEQ ID NO: 891849 - RNA, 22 nt, Human
ggcaccagcacuugggauggcu

SEQ ID NO: 891850 - RNA, 22 nt, Human
aggaaaggccuuugcauuuggu

SEQ ID NO: 891851 - RNA, 22 nt, Human
ucucuuuguggccaggagagga

SEQ ID NO: 891852 - RNA, 22 nt, Human
uccugggacucaacuuagaagg

SEQ ID NO: 891853 - RNA, 22 nt, Human
uccagcagaccaucaaggcuca

SEQ ID NO: 891854 - RNA, 22 nt, Human
ugcuggcugggcugcuggagac

SEQ ID NO: 891855 - RNA, 22 nt, Human
gcauucuugagguguggacuca

SEQ ID NO: 891856 - RNA, 22 nt, Human
aggcccugaccugggagaucua

SEQ ID NO: 891857 - RNA, 22 nt, Human
gggcugcugcccaggaggcacc

SEQ ID NO: 891858 - RNA, 22 nt, Human
uugggcugaacccugcagcuga

SEQ ID NO: 891859 - RNA, 22 nt, Human
aguccagccuucaaucuuagug

SEQ ID NO: 891860 - RNA, 22 nt, Human
cucagaagaacaaaggcucuac

SEQ ID NO: 891861 - RNA, 22 nt, Human
ggagcagagcauuucacagccu

SEQ ID NO: 891862 - RNA, 22 nt, Human
aggaaagauggaaggaggauaa

SEQ ID NO: 891863 - RNA, 22 nt, Human
auuugcuuucagguauaaaagg

SEQ ID NO: 891864 - RNA, 22 nt, Human
augcuucucagcucaaggcaaa

SEQ ID NO: 891865 - RNA, 22 nt, Human
auagauuagcccuauaguuuua

SEQ ID NO: 891866 - RNA, 22 nt, Human
gaaacuuuuaaaccucaugagu

SEQ ID NO: 891867 - RNA, 22 nt, Human
cccaaagaaaacaguaccucag

SEQ ID NO: 891868 - RNA, 22 nt, Human
caaaccugcugcuauuuuaucc

SEQ ID NO: 891869 - RNA, 22 nt, Human
aggcacuuuuugcauuuuagaa

SEQ ID NO: 891870 - RNA, 22 nt, Human
gagcuaguagaacaagugagga

SEQ ID NO: 891871 - RNA, 22 nt, Human
ucccuccuuuaucaaaaagaga

SEQ ID NO: 891872 - RNA, 22 nt, Human
augaccacauuccagcugucca

SEQ ID NO: 891873 - RNA, 22 nt, Human
uccaaggagcagauccagagga

SEQ ID NO: 891874 - RNA, 22 nt, Human
ggguaggaugguagaagggacc

SEQ ID NO: 891875 - RNA, 22 nt, Human
gaugucugggucuuccuggcuu

SEQ ID NO: 891876 - RNA, 22 nt, Human
aagaugcuaauuguggaaguug

SEQ ID NO: 891877 - RNA, 22 nt, Human
augugcucuuauuacccugucg

SEQ ID NO: 891878 - RNA, 19 nt, Human
ucucagaauuggcaaucau

SEQ ID NO: 891879 - RNA, 22 nt, Human
gcaguggcaccgcuggcucugg

SEQ ID NO: 891880 - RNA, 22 nt, Human
ccaggcuggucugaauuucuag

SEQ ID NO: 891881 - RNA, 22 nt, Human
acagcucucccucagagaaaug

SEQ ID NO: 891882 - RNA, 22 nt, Human
uugcuuuagggcaaauauuuca

SEQ ID NO: 891883 - RNA, 22 nt, Human
auacaucaaggaugauggugua

SEQ ID NO: 891884 - RNA, 23 nt, Human
aguggcuggacagacuuuccugg

SEQ ID NO: 891885 - RNA, 21 nt, Human
agaagccuggguggagguggg

SEQ ID NO: 891886 - RNA, 22 nt, Human
acacacacaagcagguugugga

SEQ ID NO: 891887 - RNA, 23 nt, Human
ugcuggagacaagugugagaagg

SEQ ID NO: 891888 - RNA, 22 nt, Human
uggggugggcaugcgcuguccu

SEQ ID NO: 891889 - RNA, 22 nt, Human
cagggucugaaacugaucacag

SEQ ID NO: 891890 - RNA, 22 nt, Human
aacaguggucuggggaguggag

SEQ ID NO: 891891 - RNA, 22 nt, Human
aauaucaggaugcaaagcugug

SEQ ID NO: 891892 - RNA, 22 nt, Human
cuucaggaguaguuaccuagca

SEQ ID NO: 891893 - RNA, 22 nt, Human
acacaaacagucuauagcacca

SEQ ID NO: 891894 - RNA, 22 nt, Human
agaaauggaaauccaagcaacu

SEQ ID NO: 891895 - RNA, 22 nt, Human
ucagcacugaaucuggauuugc

SEQ ID NO: 891896 - RNA, 22 nt, Human
uggagcuggcuuguggaaguug

SEQ ID NO: 891897 - RNA, 22 nt, Human
ccugagcaaaggcccagaggga

SEQ ID NO: 891898 - RNA, 22 nt, Human
gagcagcaguuguuacaaugau

SEQ ID NO: 891899 - RNA, 22 nt, Human
agggaaaucuuucaacacuuca

SEQ ID NO: 891900 - RNA, 22 nt, Human
augccauuuuauacucauucaa

SEQ ID NO: 891901 - RNA, 21 nt, Human
agaggccaagucaucauuucc

SEQ ID NO: 891902 - RNA, 22 nt, Human
uugcaggguuaaaguaagguag

SEQ ID NO: 891903 - RNA, 22 nt, Human
ucagccaguauuugagugcuca

SEQ ID NO: 891904 - RNA, 22 nt, Human
acaguuguuuuccagauauguu

SEQ ID NO: 891905 - RNA, 19 nt, Human
ccugcugaagugaugcagc

SEQ ID NO: 891906 - RNA, 22 nt, Human
acuguccagaagauagaaauau

SEQ ID NO: 891907 - RNA, 22 nt, Human
agaggucagcugcaugccacau

SEQ ID NO: 891908 - RNA, 22 nt, Human
gcuggcauggagacucuggguc

SEQ ID NO: 891909 - RNA, 22 nt, Human
uuaauuaguagaggcauuuagu

SEQ ID NO: 891910 - RNA, 18 nt, Human
ucugaaggaaugauucca

SEQ ID NO: 891911 - RNA, 20 nt, Human
aacaguaccccccuuguucu

SEQ ID NO: 891912 - RNA, 22 nt, Human
gcaggcagaucaccugucagga

SEQ ID NO: 891913 - RNA, 22 nt, Human
uucaaaaguaaucaguauuaga

SEQ ID NO: 891914 - RNA, 22 nt, Human
acugcagguggauggcacuuua

SEQ ID NO: 891915 - RNA, 18 nt, Human
uguccauguuguuccuga

SEQ ID NO: 891916 - RNA, 22 nt, Human
aaucaaaaccuacagagguaau

SEQ ID NO: 891917 - RNA, 22 nt, Human
gccauucaauucuacaaguaua

SEQ ID NO: 891918 - RNA, 22 nt, Human
uaggcagggauuaggguugauu

SEQ ID NO: 891919 - RNA, 17 nt, Human
caggccuugagccuuua

SEQ ID NO: 891920 - RNA, 22 nt, Human
aauaaauguuuguuggauguuu

SEQ ID NO: 891921 - RNA, 23 nt, Human
ccaggccucucagagggugugcc

SEQ ID NO: 891922 - RNA, 22 nt, Human
cagcuucuggcguggagccuga

SEQ ID NO: 891923 - RNA, 22 nt, Human
uuucuugagugaugcuuagugu

SEQ ID NO: 891924 - RNA, 22 nt, Human
cucuuacauucuuuuacuagca

SEQ ID NO: 891925 - RNA, 22 nt, Human
aagcuagaugacguuauuuuuu

SEQ ID NO: 891926 - RNA, 19 nt, Human
gguccagacuucagacuag

SEQ ID NO: 891927 - RNA, 22 nt, Human
aucuuuuuacuaacacugcuua

SEQ ID NO: 891928 - RNA, 22 nt, Human
ugggccaguuucucauugaaau

SEQ ID NO: 891929 - RNA, 22 nt, Human
uuuggaauagcauagaagcuca

SEQ ID NO: 891930 - RNA, 22 nt, Human
ucacagagcucacaguuuagca

SEQ ID NO: 891931 - RNA, 22 nt, Human
gggcuucuugccauggggacgg

SEQ ID NO: 891932 - RNA, 22 nt, Human
uucacauuucucugcuguuuga

SEQ ID NO: 891933 - RNA, 22 nt, Human
gaccaaaugaaaggauggaugg

SEQ ID NO: 891934 - RNA, 22 nt, Human
gaugggaggaaccugggucccu

SEQ ID NO: 891935 - RNA, 22 nt, Human
cagaaggcuggcagauugagau

SEQ ID NO: 891936 - RNA, 22 nt, Human
ccucaggcugggcugccccugg

SEQ ID NO: 891937 - RNA, 22 nt, Human
cuuggagucaauaagaucuaga

SEQ ID NO: 891938 - RNA, 22 nt, Human
ucauauacugccuuguagauua

SEQ ID NO: 891939 - RNA, 22 nt, Human
uuucacaucaugggauggaagc

SEQ ID NO: 891940 - RNA, 22 nt, Human
uugcagcaugcauagacacugc

SEQ ID NO: 891941 - RNA, 22 nt, Human
aacacuaaaggucaguuagaag

SEQ ID NO: 891942 - RNA, 22 nt, Human
cugggcuuugguacugugauua

SEQ ID NO: 891943 - RNA, 22 nt, Human
ugcgcggcucagucaucuccag

SEQ ID NO: 891944 - RNA, 22 nt, Human
aauuaacagagggcuuauuacu

SEQ ID NO: 891945 - RNA, 22 nt, Human
gcaaauguucacggggagcaua

SEQ ID NO: 891946 - RNA, 22 nt, Human
ucaaaugcugccuuugugugcc

SEQ ID NO: 891947 - RNA, 22 nt, Human
uuugcugugcuuacauauguau

SEQ ID NO: 891948 - RNA, 22 nt, Human
caguucccuaauguguagaaga

SEQ ID NO: 891949 - RNA, 22 nt, Human
uuaacugagaggaucugaguag

SEQ ID NO: 891950 - RNA, 22 nt, Human
aagcagaaaaacugagcuccaa

SEQ ID NO: 891951 - RNA, 21 nt, Human
uugcuuauggcacugcuuugc

SEQ ID NO: 891952 - RNA, 18 nt, Human
ugauggaggagggcuggu

SEQ ID NO: 891953 - RNA, 22 nt, Human
ugaaguuuucugguugauuaag

SEQ ID NO: 891954 - RNA, 22 nt, Human
uaggagcuuuuggaguccugug

SEQ ID NO: 891955 - RNA, 22 nt, Human
ccucuguguccuggucauugaa

SEQ ID NO: 891956 - RNA, 22 nt, Human
ucuugucacuacuguuaugcau

SEQ ID NO: 891957 - RNA, 22 nt, Human
ccuuuagaaagucaguaguugc

SEQ ID NO: 891958 - RNA, 20 nt, Human
cugcuuaaguaagugacaca

SEQ ID NO: 891959 - RNA, 23 nt, Human
uccuugggccugcccagaguggu

SEQ ID NO: 891960 - RNA, 22 nt, Human
uggcugcuuguuuuagugaggc

SEQ ID NO: 891961 - RNA, 19 nt, Human
uuucaggagcuaugcaggg

SEQ ID NO: 891962 - RNA, 22 nt, Human
aaguuuagugaaacucuagggg

SEQ ID NO: 891963 - RNA, 22 nt, Human
uugaaacagacaaguaaauguc

SEQ ID NO: 891964 - RNA, 22 nt, Human
ggcugccugguuuagugcugac

SEQ ID NO: 891965 - RNA, 22 nt, Human
acuguuuucuguaaagggccag

SEQ ID NO: 891966 - RNA, 22 nt, Human
aaauuagucgguuuaggaauuu

SEQ ID NO: 891967 - RNA, 22 nt, Human
uuagaacaauauucucccuaca

SEQ ID NO: 891968 - RNA, 22 nt, Human
acaguucugaagacuagagccu

SEQ ID NO: 891969 - RNA, 22 nt, Human
uuuacacauaaauguguagaca

SEQ ID NO: 891970 - RNA, 22 nt, Human
uuuggaaaugaccccgucuaag

SEQ ID NO: 891971 - RNA, 22 nt, Human
uugugugcauaaauucugaugu

SEQ ID NO: 891972 - RNA, 22 nt, Human
uuucaguggguuuauuucaugu

SEQ ID NO: 891973 - RNA, 22 nt, Human
acaugcucuccaaggacagagc

SEQ ID NO: 891974 - RNA, 22 nt, Human
gccaggcacugcucuaagcccu

SEQ ID NO: 891975 - RNA, 22 nt, Human
uauuuucuggggagagugaacc

SEQ ID NO: 891976 - RNA, 22 nt, Human
ugcagauucaaaugaaaugcaa

SEQ ID NO: 891977 - RNA, 22 nt, Human
gaaguucaggugggaauugagc

SEQ ID NO: 891978 - RNA, 22 nt, Human
agucaggaagcuggagcugggg

SEQ ID NO: 891979 - RNA, 23 nt, Human
aacacuugcaugaacagcuacac

SEQ ID NO: 891980 - RNA, 22 nt, Human
uauguuaacauguuaggaacug

SEQ ID NO: 891981 - RNA, 22 nt, Human
gccugagcccaggugugcagag

SEQ ID NO: 891982 - RNA, 22 nt, Human
uccauacauacagauaugcauu

SEQ ID NO: 891983 - RNA, 22 nt, Human
acauuuacuuaucaaaagucag

SEQ ID NO: 891984 - RNA, 22 nt, Human
ucaguuucacagucugugcaga

SEQ ID NO: 891985 - RNA, 22 nt, Human
ugccugggcucgguagccaucg

SEQ ID NO: 891986 - RNA, 22 nt, Human
ggcagucacuuuugcuugugcc

SEQ ID NO: 891987 - RNA, 22 nt, Human
uauaauccugcuucacauugaa

SEQ ID NO: 891988 - RNA, 22 nt, Human
cuuucaguuaguaccuaguggc

SEQ ID NO: 891989 - RNA, 22 nt, Human
acaggggauugauuggaagucu

SEQ ID NO: 891990 - RNA, 22 nt, Human
uuuggaauuccauuucugcauu

SEQ ID NO: 891991 - RNA, 22 nt, Human
ugcucuggacgcugagugguuu

SEQ ID NO: 891992 - RNA, 22 nt, Human
uuucaaauggagucgugaaaug

SEQ ID NO: 891993 - RNA, 22 nt, Human
ucuuuggacuuuccaauuuguu

SEQ ID NO: 891994 - RNA, 22 nt, Human
cagucucuggcagcugcuggcc

SEQ ID NO: 891995 - RNA, 22 nt, Human
uaaaugcaaugugcuuuaccag

SEQ ID NO: 891996 - RNA, 22 nt, Human
aggcucaguuugguuuccauug

SEQ ID NO: 891997 - RNA, 22 nt, Human
gagagcuggauucuggauaggu

SEQ ID NO: 891998 - RNA, 18 nt, Human
gagcugagaagaggaugc

SEQ ID NO: 891999 - RNA, 19 nt, Human
gcagcaaacaaaacaggua

SEQ ID NO: 892000 - RNA, 22 nt, Human
ggucucgagccaggcagcugca

SEQ ID NO: 892001 - RNA, 22 nt, Human
ccugugggagggagcggcugga

SEQ ID NO: 892002 - RNA, 22 nt, Human
ugggccacagcucacacaucca

SEQ ID NO: 892003 - RNA, 22 nt, Human
gccggccagcaagcuucaggug

SEQ ID NO: 892004 - RNA, 22 nt, Human
agcugcaaagaugauuuguugu

SEQ ID NO: 892005 - RNA, 22 nt, Human
auuugcuuggucuucucuccgu

SEQ ID NO: 892006 - RNA, 22 nt, Human
acuucauguaguccaucagguu

SEQ ID NO: 892007 - RNA, 22 nt, Human
gugugccuaugaguggugaaca

SEQ ID NO: 892008 - RNA, 20 nt, Human
cucuggcaaaggaugccuau

SEQ ID NO: 892009 - RNA, 22 nt, Human
uuguauuucgaugcacguguag

SEQ ID NO: 892010 - RNA, 22 nt, Human
auuuucaucgcuagguuggccu

SEQ ID NO: 892011 - RNA, 17 nt, Human
agacagugagugccuug

SEQ ID NO: 892012 - RNA, 22 nt, Human
uacagaaagaccucucgggaaa

SEQ ID NO: 892013 - RNA, 22 nt, Human
auuugucaaaacacagagaaca

SEQ ID NO: 892014 - RNA, 22 nt, Human
auccacuucacuggaauguagg

SEQ ID NO: 892015 - RNA, 22 nt, Human
ggcugccucuauuuaggaucaa

SEQ ID NO: 892016 - RNA, 22 nt, Human
uacauugaauuuuuuagcaugu

SEQ ID NO: 892017 - RNA, 22 nt, Human
cugggcccuauggaagaaaggg

SEQ ID NO: 892018 - RNA, 22 nt, Human
caucccugguuccuguguuuaa

SEQ ID NO: 892019 - RNA, 22 nt, Human
gaauacaaagcagaacucauac

SEQ ID NO: 892020 - RNA, 22 nt, Human
agguggaguuggcuguaguuca

SEQ ID NO: 892021 - RNA, 22 nt, Human
cagggccuuguucaggagugaa

SEQ ID NO: 892022 - RNA, 23 nt, Human
cucccugaacaugacacaccaga

SEQ ID NO: 892023 - RNA, 22 nt, Human
ggcacauggagacuuggcauca

SEQ ID NO: 892024 - RNA, 22 nt, Human
uggcaguuauauugccuuaggg

SEQ ID NO: 892025 - RNA, 20 nt, Human
auuuauguauagcuuguugu

SEQ ID NO: 892026 - RNA, 22 nt, Human
acagguguagcaggagcaucaa

SEQ ID NO: 892027 - RNA, 22 nt, Human
gcuuaagauguuuguggcaauu

SEQ ID NO: 892028 - RNA, 17 nt, Human
aacaguaagcccuguuu

SEQ ID NO: 892029 - RNA, 22 nt, Human
cagaagugcaauuuaaauuagg

SEQ ID NO: 892030 - RNA, 22 nt, Human
auuuaauuugugucuuuagcug

SEQ ID NO: 892031 - RNA, 22 nt, Human
agggaacauuugcacuguuggu

SEQ ID NO: 892032 - RNA, 22 nt, Human
gaagaggacuguggcauccuag

SEQ ID NO: 892033 - RNA, 22 nt, Human
agcucugcaggcacagcugagg

SEQ ID NO: 892034 - RNA, 22 nt, Human
ucaguguggaaaauccuuuggc

SEQ ID NO: 892035 - RNA, 22 nt, Human
aacacuagucuagaccagacca

SEQ ID NO: 892036 - RNA, 22 nt, Human
auggaucagaaucccgggaggg

SEQ ID NO: 892037 - RNA, 22 nt, Human
uaauuacaaagcaagcacaggg

SEQ ID NO: 892038 - RNA, 22 nt, Human
gcaguucacccaagugcagaga

SEQ ID NO: 892039 - RNA, 22 nt, Human
ggcaauauggugaaaccccauc

SEQ ID NO: 892040 - RNA, 22 nt, Human
ggcagugcaaggcuggcacagu

SEQ ID NO: 892041 - RNA, 22 nt, Human
aaaugcauugguuucuacuugu

SEQ ID NO: 892042 - RNA, 18 nt, Human
uacagauuauagauacau

SEQ ID NO: 892043 - RNA, 22 nt, Human
uccagaggggcagcccugugcu

SEQ ID NO: 892044 - RNA, 20 nt, Human
agaaacagcacaauucuguu

SEQ ID NO: 892045 - RNA, 22 nt, Human
ugucagugucuaugaagaauuu

SEQ ID NO: 892046 - RNA, 22 nt, Human
uuuccuuugggcacccgagcuc

SEQ ID NO: 892047 - RNA, 21 nt, Human
ggccuaggggcagauggugcu

SEQ ID NO: 892048 - RNA, 22 nt, Human
ggcuguguuccaagugucagga

SEQ ID NO: 892049 - RNA, 22 nt, Human
agaacaguuuguuggagacugu

SEQ ID NO: 892050 - RNA, 22 nt, Human
ccacuggagacuggucucugug

SEQ ID NO: 892051 - RNA, 22 nt, Human
aagaggaguagaugugguuggu

SEQ ID NO: 892052 - RNA, 22 nt, Human
cugcaucucaggagacgggucu

SEQ ID NO: 892053 - RNA, 22 nt, Human
auuugccuuucgaaucaacagg

SEQ ID NO: 892054 - RNA, 22 nt, Human
gcaggaagaggcucgaagcccc

SEQ ID NO: 892055 - RNA, 20 nt, Human
cagcccugugaccuggcccu

SEQ ID NO: 892056 - RNA, 22 nt, Human
aaagcaggguccaaggagaugu

SEQ ID NO: 892057 - RNA, 22 nt, Human
cauaacaguggcuucagcaagu

SEQ ID NO: 892058 - RNA, 22 nt, Human
guuugcugccaccaccgccaca

SEQ ID NO: 892059 - RNA, 22 nt, Human
cagauuugccacuuacucguug

SEQ ID NO: 892060 - RNA, 22 nt, Human
uagcagcacuauuuguuguagu

SEQ ID NO: 892061 - RNA, 22 nt, Human
ucccaggaauccguccucuaga

SEQ ID NO: 892062 - RNA, 22 nt, Human
agcacagugcugggcacacagu

SEQ ID NO: 892063 - RNA, 22 nt, Human
caggaugguggcaugaucagaa

SEQ ID NO: 892064 - RNA, 22 nt, Human
uguuuugcuucucuguuuccca

SEQ ID NO: 892065 - RNA, 22 nt, Human
uaagcaaugcuguaguucaguc

SEQ ID NO: 892066 - RNA, 23 nt, Human
uuuauagcagcaugauuuauaau

SEQ ID NO: 892067 - RNA, 22 nt, Human
gggugagagucaggcagagauu

SEQ ID NO: 892068 - RNA, 22 nt, Human
gcucacaguacagugcuggcuc

SEQ ID NO: 892069 - RNA, 19 nt, Human
ugcagaggguaggaaggcc

SEQ ID NO: 892070 - RNA, 21 nt, Human
aauacagugaagaauuucuuu

SEQ ID NO: 892071 - RNA, 22 nt, Human
gcaaugcaaucuuuauuauauu

SEQ ID NO: 892072 - RNA, 22 nt, Human
uguggccagcagguggcugugu

SEQ ID NO: 892073 - RNA, 22 nt, Human
cuggugcuggagccuagucccu

SEQ ID NO: 892074 - RNA, 22 nt, Human
aaaagagucuuaggcagucaua

SEQ ID NO: 892075 - RNA, 22 nt, Human
agcuacuacuaccaaacuaaag

SEQ ID NO: 892076 - RNA, 22 nt, Human
aaaggcucuauuguuuucauau

SEQ ID NO: 892077 - RNA, 19 nt, Human
uggucccauacugcuggcc

SEQ ID NO: 892078 - RNA, 22 nt, Human
ucacagugggacuuuuaucgcu

SEQ ID NO: 892079 - RNA, 22 nt, Human
cacacaugguagcagguacaag

SEQ ID NO: 892080 - RNA, 22 nt, Human
augcaauaguaauucuagucug

SEQ ID NO: 892081 - RNA, 22 nt, Human
cggcccuggcggaggcgggaga

SEQ ID NO: 892082 - RNA, 22 nt, Human
aaagcuuuguaaauaaacaggu

SEQ ID NO: 892083 - RNA, 22 nt, Human
cuucuagcuauaguguuuucuu

SEQ ID NO: 892084 - RNA, 17 nt, Human
ugacccuguuggguguu

SEQ ID NO: 892085 - RNA, 22 nt, Human
ccagggugggaggcugaaggcg

SEQ ID NO: 892086 - RNA, 22 nt, Human
uaacacugaaaaugaugcaugu

SEQ ID NO: 892087 - RNA, 22 nt, Human
gcccuguguauccccugugcuu

SEQ ID NO: 892088 - RNA, 22 nt, Human
uuuuccucuguauuugaaaugc

SEQ ID NO: 892089 - RNA, 22 nt, Human
cagaaccugaacgugaggugga

SEQ ID NO: 892090 - RNA, 22 nt, Human
acaugagaagcugcaacaugac

SEQ ID NO: 892091 - RNA, 22 nt, Human
cauugaaacagauguacccaug

SEQ ID NO: 892092 - RNA, 17 nt, Human
ggagccaggagcccacc

SEQ ID NO: 892093 - RNA, 22 nt, Human
ugugcuuacuuugaauuauaua

SEQ ID NO: 892094 - RNA, 22 nt, Human
cauuaacaaugacugcuugacu

SEQ ID NO: 892095 - RNA, 22 nt, Human
uugcaaguuccuuaugagaauc

SEQ ID NO: 892096 - RNA, 22 nt, Human
cagauacauuaaaaugaugauu

SEQ ID NO: 892097 - RNA, 22 nt, Human
cucagccaugucaugccuaccu

SEQ ID NO: 892098 - RNA, 22 nt, Human
cagaaauguacugacaugcagu

SEQ ID NO: 892099 - RNA, 20 nt, Human
auacaaucaugaggaaaaag

SEQ ID NO: 892100 - RNA, 22 nt, Human
gcugggcucaccaggccacuag

SEQ ID NO: 892101 - RNA, 22 nt, Human
ccaggccuucugaggacacucu

SEQ ID NO: 892102 - RNA, 22 nt, Human
augggaguuggguaaggaucau

SEQ ID NO: 892103 - RNA, 23 nt, Human
gcccaugcuguugggcccgagca

SEQ ID NO: 892104 - RNA, 22 nt, Human
agaguggcaccuuaccugagac

SEQ ID NO: 892105 - RNA, 22 nt, Human
ucucucugaguugagcaggagu

SEQ ID NO: 892106 - RNA, 22 nt, Human
caggccugacccugagcuucac

SEQ ID NO: 892107 - RNA, 21 nt, Human
agaggaagugauuggucuggc

SEQ ID NO: 892108 - RNA, 22 nt, Human
ugaguccuaaagcugugcccuu

SEQ ID NO: 892109 - RNA, 20 nt, Human
aggucugaaugucagggcug

SEQ ID NO: 892110 - RNA, 22 nt, Human
aaaaaaucagaucuuugguuaa

SEQ ID NO: 892111 - RNA, 22 nt, Human
uucagagguagagaggaucuug

SEQ ID NO: 892112 - RNA, 22 nt, Human
ggagggagucagcugauuagaa

SEQ ID NO: 892113 - RNA, 22 nt, Human
ucuggcuccacucugugcaugc

SEQ ID NO: 892114 - RNA, 20 nt, Human
uuuugauagcaaagacggua

SEQ ID NO: 892115 - RNA, 22 nt, Human
aaggaggaauaaagagguggug

SEQ ID NO: 892116 - RNA, 22 nt, Human
uggcauggcaacccugcaggga

SEQ ID NO: 892117 - RNA, 22 nt, Human
cccacaggcccugcugccuuga

SEQ ID NO: 892118 - RNA, 20 nt, Human
uaacagggcccuagaaagag

SEQ ID NO: 892119 - RNA, 22 nt, Human
ugacaagcuuuacagaauugaa

SEQ ID NO: 892120 - RNA, 22 nt, Human
auacuacaaucauaauuguaca

SEQ ID NO: 892121 - RNA, 22 nt, Human
caggguaguaauuuaauacaag

SEQ ID NO: 892122 - RNA, 21 nt, Human
acuggaagugggucaggaagu

SEQ ID NO: 892123 - RNA, 22 nt, Human
uauuuucuggacagucuugcuu

SEQ ID NO: 892124 - RNA, 22 nt, Human
gcccaggaguugaagggcugac

SEQ ID NO: 892125 - RNA, 22 nt, Human
augagguaguauuagaaggaga

SEQ ID NO: 892126 - RNA, 22 nt, Human
guuuuccuucucagccauugcc

SEQ ID NO: 892127 - RNA, 22 nt, Human
ccagucuguacuuugcucuguu

SEQ ID NO: 892128 - RNA, 22 nt, Human
uugagaacucuguauguccagc

SEQ ID NO: 892129 - RNA, 22 nt, Human
acauugaagcugugaaaucaaa

SEQ ID NO: 892130 - RNA, 22 nt, Human
auucauuccaggucagucagac

SEQ ID NO: 892131 - RNA, 22 nt, Human
uaaagcagugugguuguguccc

SEQ ID NO: 892132 - RNA, 22 nt, Human
aggucacuuccugucuggauaa

SEQ ID NO: 892133 - RNA, 22 nt, Human
uuuguuuacaaaaauaagcagu

SEQ ID NO: 892134 - RNA, 22 nt, Human
gaauacaugauuaaaguuugau

SEQ ID NO: 892135 - RNA, 22 nt, Human
gcaggaguaugcagcuaugguu

SEQ ID NO: 892136 - RNA, 22 nt, Human
cccagccucuguuugcuccucu

SEQ ID NO: 892137 - RNA, 23 nt, Human
agcagugaguaaacagauaggau

SEQ ID NO: 892138 - RNA, 19 nt, Human
cagugcccgacgcaggucu

SEQ ID NO: 892139 - RNA, 22 nt, Human
gcucugaguaaaugaaagcauu

SEQ ID NO: 892140 - RNA, 22 nt, Human
agcccugggcuguagauaagca

SEQ ID NO: 892141 - RNA, 22 nt, Human
augcaaauaaagcaacuauaca

SEQ ID NO: 892142 - RNA, 22 nt, Human
ucugugcagaaucaaggagcuu

SEQ ID NO: 892143 - RNA, 22 nt, Human
ccugucuaucaagacaucuuca

SEQ ID NO: 892144 - RNA, 22 nt, Human
acagaugaugugcacagauaga

SEQ ID NO: 892145 - RNA, 22 nt, Human
gugggcagcaccagggaagugu

SEQ ID NO: 892146 - RNA, 22 nt, Human
ucaggcugcuggccagcaggcu

SEQ ID NO: 892147 - RNA, 22 nt, Human
aaaaagacuuccaacucaggag

SEQ ID NO: 892148 - RNA, 23 nt, Human
gccucagagaaacagcugcacac

SEQ ID NO: 892149 - RNA, 22 nt, Human
gagcuccucccaggguagcacu

SEQ ID NO: 892150 - RNA, 22 nt, Human
ugggcugaguggcagccagagu

SEQ ID NO: 892151 - RNA, 22 nt, Human
ggcuuggaaacuagagugugca

SEQ ID NO: 892152 - RNA, 22 nt, Human
ggcagcaugugugguccgcugg

SEQ ID NO: 892153 - RNA, 22 nt, Human
aaaucucuggucacagaacuua

SEQ ID NO: 892154 - RNA, 22 nt, Human
acagaagauaaugcugccuugg

SEQ ID NO: 892155 - RNA, 22 nt, Human
uuugaugaugaugauaaaguuu

SEQ ID NO: 892156 - RNA, 22 nt, Human
uucuucuuuccuauaauuaauu

SEQ ID NO: 892157 - RNA, 22 nt, Human
aggacagcagugcuggcacuug

SEQ ID NO: 892158 - RNA, 22 nt, Human
uccagccugguugcgggcaucc

SEQ ID NO: 892159 - RNA, 22 nt, Human
acauggagcucaaacaugagug

SEQ ID NO: 892160 - RNA, 22 nt, Human
agucuuacaugagaaagaaccu

SEQ ID NO: 892161 - RNA, 22 nt, Human
caguuuauaugucagagcugua

SEQ ID NO: 892162 - RNA, 22 nt, Human
ugugugaauucugagcaguuua

SEQ ID NO: 892163 - RNA, 22 nt, Human
uugucugacuucuuuaguuacu

SEQ ID NO: 892164 - RNA, 22 nt, Human
gacagccagugcgauggauuca

SEQ ID NO: 892165 - RNA, 22 nt, Human
cuggcagcagagcucaacauag

SEQ ID NO: 892166 - RNA, 22 nt, Human
cccaccagccaucugagagugu

SEQ ID NO: 892167 - RNA, 22 nt, Human
aagcaggcucacgccaggcagu

SEQ ID NO: 892168 - RNA, 22 nt, Human
gggcaggugaccucuuguccug

SEQ ID NO: 892169 - RNA, 22 nt, Human
aggcaggcccugggccaucccg

SEQ ID NO: 892170 - RNA, 22 nt, Human
agccuaggagguuggggcugca

SEQ ID NO: 892171 - RNA, 22 nt, Human
auggccagccacuccugauggc

SEQ ID NO: 892172 - RNA, 22 nt, Human
aaggaucuuucuuuuuaccauu

SEQ ID NO: 892173 - RNA, 22 nt, Human
auauacaguuuuacaggguuuc

SEQ ID NO: 892174 - RNA, 19 nt, Human
ucauaaggagagaggaaau

SEQ ID NO: 892175 - RNA, 22 nt, Human
gagggguccugccuuggcugga

SEQ ID NO: 892176 - RNA, 23 nt, Human
acaagauagggauaaaaagauaa

SEQ ID NO: 892177 - RNA, 22 nt, Human
agguauauguucauguaugugu

SEQ ID NO: 892178 - RNA, 22 nt, Human
auuuacauuccauggugguuac

SEQ ID NO: 892179 - RNA, 22 nt, Human
caggauggagggagggcuguua

SEQ ID NO: 892180 - RNA, 22 nt, Human
uuagugguacucagggagggaa

SEQ ID NO: 892181 - RNA, 22 nt, Human
uugcuacaugguuucaaagcug

SEQ ID NO: 892182 - RNA, 22 nt, Human
ugcuguguggaugugaagaauc

SEQ ID NO: 892183 - RNA, 22 nt, Human
uccauguugagaaugcuauaau

SEQ ID NO: 892184 - RNA, 22 nt, Human
ucugggcuggugcucaugaauu

SEQ ID NO: 892185 - RNA, 22 nt, Human
ggaaugaauuuccagcuggguc

SEQ ID NO: 892186 - RNA, 22 nt, Human
aggaagaaaacuaauuagaugg

SEQ ID NO: 892187 - RNA, 22 nt, Human
uuuauuucuuaguuugccacag

SEQ ID NO: 892188 - RNA, 22 nt, Human
gacuuuauccugccugaccacg

SEQ ID NO: 892189 - RNA, 22 nt, Human
uagaaagcccuguguucacugc

SEQ ID NO: 892190 - RNA, 22 nt, Human
uuacacagaugguuaguagagg

SEQ ID NO: 892191 - RNA, 22 nt, Human
ccaggagcaggagcugcagcug

SEQ ID NO: 892192 - RNA, 22 nt, Human
cagaacugggcagggagcagag

SEQ ID NO: 892193 - RNA, 22 nt, Human
cauauuuauucuucugccagug

SEQ ID NO: 892194 - RNA, 22 nt, Human
agacagggagggagcgcggcug

SEQ ID NO: 892195 - RNA, 22 nt, Human
gaaaaguacacagcccaaacau

SEQ ID NO: 892196 - RNA, 22 nt, Human
ucugaggccccagcccugcaca

SEQ ID NO: 892197 - RNA, 22 nt, Human
uggcccugacacgugguacugg

SEQ ID NO: 892198 - RNA, 22 nt, Human
ugugacaggaacuauguggaug

SEQ ID NO: 892199 - RNA, 22 nt, Human
cagauagaaugcaagaccucuc

SEQ ID NO: 892200 - RNA, 22 nt, Human
cagauaaauagacuuggucaga

SEQ ID NO: 892201 - RNA, 22 nt, Human
uuccuguggcugucacuccugg

SEQ ID NO: 892202 - RNA, 22 nt, Human
ugaaauuuaggugcagauaaau

SEQ ID NO: 892203 - RNA, 20 nt, Human
acucuggggcucauuagggg

SEQ ID NO: 892204 - RNA, 22 nt, Human
cagugggguuucugugggugcu

SEQ ID NO: 892205 - RNA, 22 nt, Human
ccaggagcgcgugaacaggcug

SEQ ID NO: 892206 - RNA, 22 nt, Human
uagaacaugugaaaauauagcc

SEQ ID NO: 892207 - RNA, 22 nt, Human
augugugccugagugauggacu

SEQ ID NO: 892208 - RNA, 22 nt, Human
aaacacuucuuaggucuuaagu

SEQ ID NO: 892209 - RNA, 22 nt, Human
cuccccacauuucucccugucu

SEQ ID NO: 892210 - RNA, 22 nt, Human
uggcucagcgguggcagcagac

SEQ ID NO: 892211 - RNA, 22 nt, Human
cucuggaguggguggccgggag

SEQ ID NO: 892212 - RNA, 18 nt, Human
ugguccaguucagauaua

SEQ ID NO: 892213 - RNA, 23 nt, Human
cagcccugaaaucgaggugacac

SEQ ID NO: 892214 - RNA, 22 nt, Human
uuagcauuguacauuugugcuu

SEQ ID NO: 892215 - RNA, 22 nt, Human
acuuggcaggucaggggauauu

SEQ ID NO: 892216 - RNA, 22 nt, Human
aaggagaaggguaaucaacaca

SEQ ID NO: 892217 - RNA, 22 nt, Human
agugggguccucaguaugguuc

SEQ ID NO: 892218 - RNA, 22 nt, Human
ccccagccuuccaugggaauug

SEQ ID NO: 892219 - RNA, 22 nt, Human
ucugauaauggacuucucaucu

SEQ ID NO: 892220 - RNA, 22 nt, Human
uaagaacauaaauucauacggg

SEQ ID NO: 892221 - RNA, 22 nt, Human
ugagaaauucgacauauauuua

SEQ ID NO: 892222 - RNA, 22 nt, Human
uagcaaagagaaaaauuaugcu

SEQ ID NO: 892223 - RNA, 20 nt, Human
agucacaugcauacacaagu

SEQ ID NO: 892224 - RNA, 22 nt, Human
uauuuggauagacagggagaug

SEQ ID NO: 892225 - RNA, 22 nt, Human
caggagcaaggagcagugggau

SEQ ID NO: 892226 - RNA, 22 nt, Human
aagagggguggucugugaggau

SEQ ID NO: 892227 - RNA, 22 nt, Human
acagaagaccagagagcuaacu

SEQ ID NO: 892228 - RNA, 20 nt, Human
uggcuccucuuggcuguggc

SEQ ID NO: 892229 - RNA, 20 nt, Human
ggggggcuucagggccugug

SEQ ID NO: 892230 - RNA, 22 nt, Human
agaaauacugugagagcagccu

SEQ ID NO: 892231 - RNA, 22 nt, Human
uacaguaaugugucccugcagg

SEQ ID NO: 892232 - RNA, 22 nt, Human
gucuucuuuaaccuacuaaagc

SEQ ID NO: 892233 - RNA, 22 nt, Human
ugauuuacaauuguaaaaguuu

SEQ ID NO: 892234 - RNA, 22 nt, Human
ucccaggccacacuuggggaac

SEQ ID NO: 892235 - RNA, 22 nt, Human
aauguauaaaguguuaauaacu

SEQ ID NO: 892236 - RNA, 22 nt, Human
gcuccagggacccaagagaaaa

SEQ ID NO: 892237 - RNA, 22 nt, Human
cacagguucaaauucaggucgc

SEQ ID NO: 892238 - RNA, 22 nt, Human
uacauucauaugugugcauaca

SEQ ID NO: 892239 - RNA, 22 nt, Human
guacacaggcagcccagugcug

SEQ ID NO: 892240 - RNA, 22 nt, Human
uuacaacacuacuuauccuuga

SEQ ID NO: 892241 - RNA, 22 nt, Human
acuuuggacaauuuauuacugu

SEQ ID NO: 892242 - RNA, 22 nt, Human
ggcagcugagcauggcuaccuu

SEQ ID NO: 892243 - RNA, 22 nt, Human
caguuuuaugaaugcuuauuag

SEQ ID NO: 892244 - RNA, 22 nt, Human
aucauuuuuaagagacucuucu

SEQ ID NO: 892245 - RNA, 22 nt, Human
caaggcaggucugaggagguug

SEQ ID NO: 892246 - RNA, 22 nt, Human
uggccuggcccugaggcccugu

SEQ ID NO: 892247 - RNA, 22 nt, Human
uaaagguuuauucaacaaaaua

SEQ ID NO: 892248 - RNA, 22 nt, Human
aaggaggaauucugaguucaug

SEQ ID NO: 892249 - RNA, 17 nt, Human
aagacaagacaaaugca

SEQ ID NO: 892250 - RNA, 22 nt, Human
cugagcagcucccugagugguc

SEQ ID NO: 892251 - RNA, 22 nt, Human
uggucagacaaaggagaauguu

SEQ ID NO: 892252 - RNA, 22 nt, Human
uucuggagggcaugcugcugcc

SEQ ID NO: 892253 - RNA, 20 nt, Human
uccagcugucuuucagagac

SEQ ID NO: 892254 - RNA, 22 nt, Human
uuuacagugagagcuuagugag

SEQ ID NO: 892255 - RNA, 22 nt, Human
aguguguacauaauuguacgcc

SEQ ID NO: 892256 - RNA, 22 nt, Human
uuguacuaugucuaagucacug

SEQ ID NO: 892257 - RNA, 22 nt, Human
ugcuuuauaucucucuucuuag

SEQ ID NO: 892258 - RNA, 22 nt, Human
auguuacagggagagaaggcca

SEQ ID NO: 892259 - RNA, 22 nt, Human
gcugcuggaagcaugcgaugaa

SEQ ID NO: 892260 - RNA, 22 nt, Human
cagacacacacccuggccuagc

SEQ ID NO: 892261 - RNA, 22 nt, Human
auacugauacggaagaaaaaag

SEQ ID NO: 892262 - RNA, 22 nt, Human
auuagcaaucugaaaauugcgg

SEQ ID NO: 892263 - RNA, 22 nt, Human
aaaguuuacagugcacaugggu

SEQ ID NO: 892264 - RNA, 22 nt, Human
agaggccaggcugcagagggau

SEQ ID NO: 892265 - RNA, 22 nt, Human
aagauacauaaagguagagucu

SEQ ID NO: 892266 - RNA, 22 nt, Human
agagcacaaauuuuaaggaggc

SEQ ID NO: 892267 - RNA, 22 nt, Human
gaugcacagugacccugccagu

SEQ ID NO: 892268 - RNA, 22 nt, Human
uuaauaaaguaugaauuggaaa

SEQ ID NO: 892269 - RNA, 22 nt, Human
agugcacuuuugggggauguua

SEQ ID NO: 892270 - RNA, 22 nt, Human
ggcugggcugcugggucagagc

SEQ ID NO: 892271 - RNA, 22 nt, Human
agcaaggcuucagagcugucug

SEQ ID NO: 892272 - RNA, 22 nt, Human
ugagccagugugguaaagcuga

SEQ ID NO: 892273 - RNA, 22 nt, Human
cugcucuggggaagccagaugu

SEQ ID NO: 892274 - RNA, 22 nt, Human
ucuccagguggggucaccuuuu

SEQ ID NO: 892275 - RNA, 22 nt, Human
gcaugugucccucagucugugc

SEQ ID NO: 892276 - RNA, 22 nt, Human
uuggucagcuaauaaggacagg

SEQ ID NO: 892277 - RNA, 22 nt, Human
cacaggcagccuuguagaagaa

SEQ ID NO: 892278 - RNA, 22 nt, Human
auucacaacaaaaggauaugag

SEQ ID NO: 892279 - RNA, 22 nt, Human
acagaaauucugggacagaaaa

SEQ ID NO: 892280 - RNA, 19 nt, Human
gugucugccuuugugccac

SEQ ID NO: 892281 - RNA, 22 nt, Human
ucagacauguuuuaagacuuau

SEQ ID NO: 892282 - RNA, 22 nt, Human
accacuuugguauuucaauuuu

SEQ ID NO: 892283 - RNA, 22 nt, Human
uuuguauuacaaagucacagua

SEQ ID NO: 892284 - RNA, 22 nt, Human
cagccugcucucagauguugag

SEQ ID NO: 892285 - RNA, 22 nt, Human
cacaguuuaugaucucagugaa

SEQ ID NO: 892286 - RNA, 18 nt, Human
ucugggcuucccgaggcu

SEQ ID NO: 892287 - RNA, 22 nt, Human
gggcagcagcaggaggucucug

SEQ ID NO: 892288 - RNA, 22 nt, Human
ggccuagggcuuggucauggca

SEQ ID NO: 892289 - RNA, 22 nt, Human
ucuguuauacagucuguggcac

SEQ ID NO: 892290 - RNA, 21 nt, Human
gacaggugauucagagcaggg

SEQ ID NO: 892291 - RNA, 22 nt, Human
auagcaaucaguguauuugaaa

SEQ ID NO: 892292 - RNA, 22 nt, Human
gggcugcuguagagaacauguu

SEQ ID NO: 892293 - RNA, 22 nt, Human
agagcaacgaggugauacuaga

SEQ ID NO: 892294 - RNA, 22 nt, Human
aaggcauaggacaaaucaguga

SEQ ID NO: 892295 - RNA, 22 nt, Human
agcugaaacuucccauuaauug

SEQ ID NO: 892296 - RNA, 22 nt, Human
ggccaauuccaggagccggcgg

SEQ ID NO: 892297 - RNA, 22 nt, Human
acuaaagucaucaaagaacuuu

SEQ ID NO: 892298 - RNA, 22 nt, Human
agaguuuagggcugagagcuug

SEQ ID NO: 892299 - RNA, 22 nt, Human
acucacucuuucaauugaaaga

SEQ ID NO: 892300 - RNA, 22 nt, Human
aaggacaggcuaaccugacauu

SEQ ID NO: 892301 - RNA, 22 nt, Human
agggacagaugaaugacugagu

SEQ ID NO: 892302 - RNA, 22 nt, Human
gggacugggagauccuccuggc

SEQ ID NO: 892303 - RNA, 23 nt, Human
aaugaacugagaaucuguacagu

SEQ ID NO: 892304 - RNA, 20 nt, Human
acaauauguagaugaauagc

SEQ ID NO: 892305 - RNA, 22 nt, Human
aacaguaauggcauugccauga

SEQ ID NO: 892306 - RNA, 22 nt, Human
aucaacauuccaaugugguaga

SEQ ID NO: 892307 - RNA, 22 nt, Human
ggcacagcuacuugcucacucu

SEQ ID NO: 892308 - RNA, 18 nt, Human
uggcugcuggaguagggu

SEQ ID NO: 892309 - RNA, 22 nt, Human
caucacagguccugaugacauu

SEQ ID NO: 892310 - RNA, 22 nt, Human
agucuguguauauucacugccc

SEQ ID NO: 892311 - RNA, 22 nt, Human
gcucacagcccaggccagcgug

SEQ ID NO: 892312 - RNA, 22 nt, Human
agccgagcucugagcagggccu

SEQ ID NO: 892313 - RNA, 22 nt, Human
uucuucuucaagugcugcauuc

SEQ ID NO: 892314 - RNA, 22 nt, Human
cuaugacacaggccauuauaua

SEQ ID NO: 892315 - RNA, 18 nt, Human
gcaggugccacugcuguu

SEQ ID NO: 892316 - RNA, 22 nt, Human
cuuauuuguacuaauaaaucug

SEQ ID NO: 892317 - RNA, 22 nt, Human
aaucuucuuucuuaacaguaca

SEQ ID NO: 892318 - RNA, 22 nt, Human
cuggaagguggauggcgaggcc

SEQ ID NO: 892319 - RNA, 22 nt, Human
aggcuggucccagggagggaau

SEQ ID NO: 892320 - RNA, 22 nt, Human
aaugucuuaaagucguguuaca

SEQ ID NO: 892321 - RNA, 22 nt, Human
uuucaacauaccucaguguaug

SEQ ID NO: 892322 - RNA, 21 nt, Human
agcucacaguucuguccuguc

SEQ ID NO: 892323 - RNA, 22 nt, Human
uaacaguauccccauuugcaag

SEQ ID NO: 892324 - RNA, 22 nt, Human
ggcuucauggaguucuacacca

SEQ ID NO: 892325 - RNA, 18 nt, Human
agggagagaccgcggguc

SEQ ID NO: 892326 - RNA, 22 nt, Human
aaacaucugacuugcuuuuuca

SEQ ID NO: 892327 - RNA, 20 nt, Human
uucuucucuaguuaucuuca

SEQ ID NO: 892328 - RNA, 22 nt, Human
auacugaugaugugaagaaaca

SEQ ID NO: 892329 - RNA, 20 nt, Human
aacauugcuucaauguaacc

SEQ ID NO: 892330 - RNA, 22 nt, Human
gcugcagccuuugggaaggaca

SEQ ID NO: 892331 - RNA, 22 nt, Human
aucagugcuaaagcaaaugccc

SEQ ID NO: 892332 - RNA, 22 nt, Human
aacauucagcugaugggucaua

SEQ ID NO: 892333 - RNA, 22 nt, Human
uugcuaaaaauggaauuauagg

SEQ ID NO: 892334 - RNA, 22 nt, Human
uguccucuguuaggggauagcg

SEQ ID NO: 892335 - RNA, 22 nt, Human
cuucucagaggccagaagcuau

SEQ ID NO: 892336 - RNA, 22 nt, Human
cagagcugggcauggugaaagg

SEQ ID NO: 892337 - RNA, 22 nt, Human
aacauguaaccagcauucaucu

SEQ ID NO: 892338 - RNA, 22 nt, Human
uaacacugguuaucccugugca

SEQ ID NO: 892339 - RNA, 22 nt, Human
aaaacuguaggaauugggugcc

SEQ ID NO: 892340 - RNA, 22 nt, Human
caucacauguaggcagcaucac

SEQ ID NO: 892341 - RNA, 22 nt, Human
aguugcauguccaaggggguag

SEQ ID NO: 892342 - RNA, 21 nt, Human
gugcacaguccugcacacagg

SEQ ID NO: 892343 - RNA, 19 nt, Human
agccuggcuuugcucugcu

SEQ ID NO: 892344 - RNA, 22 nt, Human
aaugcuuuagcagugauuagug

SEQ ID NO: 892345 - RNA, 17 nt, Human
uagcagcaguaauugug

SEQ ID NO: 892346 - RNA, 22 nt, Human
gacuuugguucagggcucagag

SEQ ID NO: 892347 - RNA, 17 nt, Human
ucaggcugugccuggua

SEQ ID NO: 892348 - RNA, 20 nt, Human
agcaugcagccagagccaac

SEQ ID NO: 892349 - RNA, 22 nt, Human
aguagaaaguugcaggaggaau

SEQ ID NO: 892350 - RNA, 22 nt, Human
ugcacgugugagcauucacaug

SEQ ID NO: 892351 - RNA, 22 nt, Human
auaacaugagccagauugaaag

SEQ ID NO: 892352 - RNA, 22 nt, Human
uuauucuucuucucuugccagg

SEQ ID NO: 892353 - RNA, 22 nt, Human
ucagaagaaagauguuauuacu

SEQ ID NO: 892354 - RNA, 22 nt, Human
cauguaucuuaauugcuuugga

SEQ ID NO: 892355 - RNA, 22 nt, Human
uaauggcagagucaugcuuucu

SEQ ID NO: 892356 - RNA, 22 nt, Human
cagcuacaguuccacugagcau

SEQ ID NO: 892357 - RNA, 22 nt, Human
ucacauuugcaauugcauuguu

SEQ ID NO: 892358 - RNA, 19 nt, Human
ucagugugacuuggucagu

SEQ ID NO: 892359 - RNA, 22 nt, Human
uucaaagauuagcauacgcaau

SEQ ID NO: 892360 - RNA, 22 nt, Human
ggucucugacuuagagauggau

SEQ ID NO: 892361 - RNA, 22 nt, Human
uuucaggacucaaaacgauaau

SEQ ID NO: 892362 - RNA, 22 nt, Human
ucugugucagcagcacucagcc

SEQ ID NO: 892363 - RNA, 22 nt, Human
gggaaaggaucagugggaggcu

SEQ ID NO: 892364 - RNA, 22 nt, Human
caugacagaugcaaaggauugg

SEQ ID NO: 892365 - RNA, 22 nt, Human
ccuggucaccccucucucugca

SEQ ID NO: 892366 - RNA, 22 nt, Human
agcuccugcuugacagaagagg

SEQ ID NO: 892367 - RNA, 21 nt, Human
uuccaggauugcuuauuuuua

SEQ ID NO: 892368 - RNA, 23 nt, Human
cuacaagagcaagcauggacaag

SEQ ID NO: 892369 - RNA, 22 nt, Human
cacaguauucacugggcagauu

SEQ ID NO: 892370 - RNA, 22 nt, Human
acacauaugccauuacagcaaa

SEQ ID NO: 892371 - RNA, 22 nt, Human
ucucugagacaguagccucugc

SEQ ID NO: 892372 - RNA, 22 nt, Human
acauuguagacuuuucauaugu

SEQ ID NO: 892373 - RNA, 22 nt, Human
auuuucuauucugcugguuuag

SEQ ID NO: 892374 - RNA, 22 nt, Human
ggcucaggcuggagugcagugg

SEQ ID NO: 892375 - RNA, 22 nt, Human
aaugguuuucuagaacaugaaa

SEQ ID NO: 892376 - RNA, 22 nt, Human
ucaugucucuaugugccuauua

SEQ ID NO: 892377 - RNA, 22 nt, Human
cacgguuagccacaggcuggaa

SEQ ID NO: 892378 - RNA, 22 nt, Human
uguguacaaacuaacaacauau

SEQ ID NO: 892379 - RNA, 22 nt, Human
uguuuguaaagcagagccagua

SEQ ID NO: 892380 - RNA, 22 nt, Human
agcuuucagucucugaaggaac

SEQ ID NO: 892381 - RNA, 22 nt, Human
auggggaagagccagugagcug

SEQ ID NO: 892382 - RNA, 22 nt, Human
uucuaccauugggaaaacagcc

SEQ ID NO: 892383 - RNA, 22 nt, Human
agcaacagcaacgacauuucuc

SEQ ID NO: 892384 - RNA, 17 nt, Human
ccaggugggaggugggg

SEQ ID NO: 892385 - RNA, 22 nt, Human
agugaauuuaaaacacugagga

SEQ ID NO: 892386 - RNA, 22 nt, Human
aguugacauccauaacaggaag

SEQ ID NO: 892387 - RNA, 22 nt, Human
auguuacaaauccuacagguag

SEQ ID NO: 892388 - RNA, 22 nt, Human
uugugucccccuuugagagcca

SEQ ID NO: 892389 - RNA, 21 nt, Human
agucuuaggcacagcuguguc

SEQ ID NO: 892390 - RNA, 22 nt, Human
uacuguuuucuuuauaguacag

SEQ ID NO: 892391 - RNA, 22 nt, Human
gagggcuggggcuuaggcuuag

SEQ ID NO: 892392 - RNA, 22 nt, Human
aggagcugggagaaggacuaaa

SEQ ID NO: 892393 - RNA, 22 nt, Human
ucaguccuccucucauagagag

SEQ ID NO: 892394 - RNA, 22 nt, Human
uuuuccuuucaucaggacaaag

SEQ ID NO: 892395 - RNA, 22 nt, Human
auguucuuuggaauuuaugaaa

SEQ ID NO: 892396 - RNA, 22 nt, Human
auguagaguagaauaguacaac

SEQ ID NO: 892397 - RNA, 22 nt, Human
ucuuuuccuugaugguuaaaua

SEQ ID NO: 892398 - RNA, 22 nt, Human
agcaucuugaaauauaaaguca

SEQ ID NO: 892399 - RNA, 22 nt, Human
acacaucucaggggacacucuc

SEQ ID NO: 892400 - RNA, 23 nt, Human
uucauuuaggaguucauaagagc

SEQ ID NO: 892401 - RNA, 22 nt, Human
ucugagcacaauuacuuacauc

SEQ ID NO: 892402 - RNA, 22 nt, Human
ggcaagggacggccgugagaca

SEQ ID NO: 892403 - RNA, 22 nt, Human
gcucugugagccacuugaugua

SEQ ID NO: 892404 - RNA, 22 nt, Human
uacaguuacgcugagaaacgaa

SEQ ID NO: 892405 - RNA, 22 nt, Human
caaaagaagcucuuggggcuag

SEQ ID NO: 892406 - RNA, 22 nt, Human
agcagagcuuuuuggacucaga

SEQ ID NO: 892407 - RNA, 22 nt, Human
uuagcagcaucccuggccugua

SEQ ID NO: 892408 - RNA, 22 nt, Human
gugucuuagaaagacugaaugc

SEQ ID NO: 892409 - RNA, 22 nt, Human
cagauuuggggucuccuguuag

SEQ ID NO: 892410 - RNA, 22 nt, Human
cuugugaaaugccagauaaucu

SEQ ID NO: 892411 - RNA, 22 nt, Human
ugacucacaguggagaaagagg

SEQ ID NO: 892412 - RNA, 22 nt, Human
ccaggagcuggcauguggagag

SEQ ID NO: 892413 - RNA, 22 nt, Human
cuguggcugcguaggucuggca

SEQ ID NO: 892414 - RNA, 23 nt, Human
ucuagaaaaugaaagaaugcagu

SEQ ID NO: 892415 - RNA, 22 nt, Human
uuggaggaggcauuggaggauu

SEQ ID NO: 892416 - RNA, 22 nt, Human
ucuugaaagcaugagauggaca

SEQ ID NO: 892417 - RNA, 22 nt, Human
uuucaguuagcugagacccagg

SEQ ID NO: 892418 - RNA, 22 nt, Human
uugcagggaaauagaaauaaac

SEQ ID NO: 892419 - RNA, 22 nt, Human
ucacaacucacagccaccggug

SEQ ID NO: 892420 - RNA, 22 nt, Human
uggcuucuuugugacagcucuu

SEQ ID NO: 892421 - RNA, 22 nt, Human
uuguuuaaaauguagcaagaaa

SEQ ID NO: 892422 - RNA, 22 nt, Human
ucuagaaacaugacauugaucu

SEQ ID NO: 892423 - RNA, 22 nt, Human
uucuagaagugucuaugucugu

SEQ ID NO: 892424 - RNA, 22 nt, Human
gagauggaaaacugcugguagu

SEQ ID NO: 892425 - RNA, 22 nt, Human
uuguuacacauaauaacauuuu

SEQ ID NO: 892426 - RNA, 22 nt, Human
gaugugugcuuuucgcaguguc

SEQ ID NO: 892427 - RNA, 22 nt, Human
acaguuaagcaguaugaucaca

SEQ ID NO: 892428 - RNA, 20 nt, Human
cuuaacaauggcucugauga

SEQ ID NO: 892429 - RNA, 20 nt, Human
gaacauuuggccauacugag

SEQ ID NO: 892430 - RNA, 22 nt, Human
ucacaaagugaagugugucaug

SEQ ID NO: 892431 - RNA, 22 nt, Human
ugagaaaauccagaggcuaguu

SEQ ID NO: 892432 - RNA, 22 nt, Human
uugcuaaaggauuuuguauuua

SEQ ID NO: 892433 - RNA, 22 nt, Human
ugaaggccagcagagugaaggc

SEQ ID NO: 892434 - RNA, 22 nt, Human
cugacucccaaagaggacgcgu

SEQ ID NO: 892435 - RNA, 22 nt, Human
uuccaggauggcaauaaugaau

SEQ ID NO: 892436 - RNA, 22 nt, Human
uggcaguuggaaaaacgguuug

SEQ ID NO: 892437 - RNA, 22 nt, Human
gcagaagcugggagaagggauu

SEQ ID NO: 892438 - RNA, 22 nt, Human
acagauggugagccgcugaugu

SEQ ID NO: 892439 - RNA, 22 nt, Human
augaguuaggggccugagugga

SEQ ID NO: 892440 - RNA, 22 nt, Human
cacagaggaaaugacuuucuua

SEQ ID NO: 892441 - RNA, 22 nt, Human
uuauuuaaugugaucugaagag

SEQ ID NO: 892442 - RNA, 22 nt, Human
ugccacaggcaaucccugcacg

SEQ ID NO: 892443 - RNA, 22 nt, Human
uuucagaguugucuucuugacc

SEQ ID NO: 892444 - RNA, 22 nt, Human
agcagcauagaugcuauccgag

SEQ ID NO: 892445 - RNA, 22 nt, Human
gcccauggcuucccuaggcaca

SEQ ID NO: 892446 - RNA, 22 nt, Human
guggugcauccuugaguaagcu

SEQ ID NO: 892447 - RNA, 19 nt, Human
auucuucagcagugagacc

SEQ ID NO: 892448 - RNA, 22 nt, Human
agcuccugggccaucacaacca

SEQ ID NO: 892449 - RNA, 22 nt, Human
ugccugggacucuguuaucuug

SEQ ID NO: 892450 - RNA, 22 nt, Human
auguuauugaugccugaggcuu

SEQ ID NO: 892451 - RNA, 22 nt, Human
ucuguuuuggucaccuuuauau

SEQ ID NO: 892452 - RNA, 18 nt, Human
agcuggggccucuggucc

SEQ ID NO: 892453 - RNA, 22 nt, Human
cuggagagaauguucauugcag

SEQ ID NO: 892454 - RNA, 22 nt, Human
uguuuguagagacagcugaugc

SEQ ID NO: 892455 - RNA, 18 nt, Human
uuccauaauguauguaac

SEQ ID NO: 892456 - RNA, 21 nt, Human
gccacugcacuccagccuggg

SEQ ID NO: 892457 - RNA, 21 nt, Human
cacauuugaaccucacagcaa

SEQ ID NO: 892458 - RNA, 19 nt, Human
cucuggcuuccaaagcauc

SEQ ID NO: 892459 - RNA, 22 nt, Human
gugcuucucugcucuacccggc

SEQ ID NO: 892460 - RNA, 22 nt, Human
acuccagggcuccaucccuugu

SEQ ID NO: 892461 - RNA, 22 nt, Human
ggaaucuagaaagggagcaagg

SEQ ID NO: 892462 - RNA, 22 nt, Human
uucugcugccuacuccugggga

SEQ ID NO: 892463 - RNA, 22 nt, Human
cuggcuuuaccucacuggggcu

SEQ ID NO: 892464 - RNA, 22 nt, Human
uaaaugcucagaccuuauucca

SEQ ID NO: 892465 - RNA, 22 nt, Human
guuuauuauucaacuucauguu

SEQ ID NO: 892466 - RNA, 20 nt, Human
agguccugguucucugggau

SEQ ID NO: 892467 - RNA, 23 nt, Human
agacagaggcugaggcuggccgc

SEQ ID NO: 892468 - RNA, 22 nt, Human
agaggccuccgaaaggugggcu

SEQ ID NO: 892469 - RNA, 22 nt, Human
ccugaggaccagcacccaucug

SEQ ID NO: 892470 - RNA, 22 nt, Human
caagaaaugggauuugacugcc

SEQ ID NO: 892471 - RNA, 18 nt, Human
uccugcagcuucuaugua

SEQ ID NO: 892472 - RNA, 22 nt, Human
gucccagggagguucagggcuu

SEQ ID NO: 892473 - RNA, 22 nt, Human
agaggccaaagaaucuacaaga

SEQ ID NO: 892474 - RNA, 20 nt, Human
uaguugccaaaaugcccugc

SEQ ID NO: 892475 - RNA, 22 nt, Human
ccugggcagccugcucaaggac

SEQ ID NO: 892476 - RNA, 22 nt, Human
cagauuccaguuuguggcuccc

SEQ ID NO: 892477 - RNA, 22 nt, Human
uucuagaaggcaggcugggcca

SEQ ID NO: 892478 - RNA, 21 nt, Human
uguguuuuaaugauauucugu

SEQ ID NO: 892479 - RNA, 22 nt, Human
caaaauuagggagugagcugga

SEQ ID NO: 892480 - RNA, 22 nt, Human
guggcagcagaggggugguaug

SEQ ID NO: 892481 - RNA, 22 nt, Human
agauuugucuuggucucaucug

SEQ ID NO: 892482 - RNA, 22 nt, Human
aggcccagacucagcggggcgg

SEQ ID NO: 892483 - RNA, 19 nt, Human
gcacacauacacccuuugg

SEQ ID NO: 892484 - RNA, 22 nt, Human
acaggcagugauuuccucuggu

SEQ ID NO: 892485 - RNA, 22 nt, Human
uuguuuccagcaaauaguccau

SEQ ID NO: 892486 - RNA, 22 nt, Human
uccaggccgcaggggcagcccc

SEQ ID NO: 892487 - RNA, 22 nt, Human
augccuccgcaugugccuuuga

SEQ ID NO: 892488 - RNA, 22 nt, Human
gacagacaugggacuucauacu

SEQ ID NO: 892489 - RNA, 22 nt, Human
auacagaacucucaguuguaua

SEQ ID NO: 892490 - RNA, 22 nt, Human
uuacagaguucgcaccuggugg

SEQ ID NO: 892491 - RNA, 22 nt, Human
uucuuuuccuacacagcgauuu

SEQ ID NO: 892492 - RNA, 22 nt, Human
caccugccccagucuuggagcu

SEQ ID NO: 892493 - RNA, 22 nt, Human
uguuagaaauuauuaguaauau

SEQ ID NO: 892494 - RNA, 22 nt, Human
uuaucuuguagagauauuuucg

SEQ ID NO: 892495 - RNA, 22 nt, Human
ugaagccaucaggaagccagca

SEQ ID NO: 892496 - RNA, 22 nt, Human
gaaaugaaacaggcuuuuaagg

SEQ ID NO: 892497 - RNA, 22 nt, Human
agcauguucaucuucuguuggu

SEQ ID NO: 892498 - RNA, 22 nt, Human
auguauguuucauaucuucauu

SEQ ID NO: 892499 - RNA, 23 nt, Human
agaaaaacaggauuguguuccua

SEQ ID NO: 892500 - RNA, 22 nt, Human
cagggcccaagacacaaugagg

SEQ ID NO: 892501 - RNA, 22 nt, Human
agaguuuguguccuuuaucagg

SEQ ID NO: 892502 - RNA, 22 nt, Human
ucucagggagggcgagucagcg

SEQ ID NO: 892503 - RNA, 22 nt, Human
aauuaccaggauuuuucaguau

SEQ ID NO: 892504 - RNA, 22 nt, Human
agucacaggguacacaaggauu

SEQ ID NO: 892505 - RNA, 22 nt, Human
aggggcugccuggcuuggcacu

SEQ ID NO: 892506 - RNA, 22 nt, Human
uuuuauugucuguauugccuau

SEQ ID NO: 892507 - RNA, 22 nt, Human
acaaugugggcaugagaaacca

SEQ ID NO: 892508 - RNA, 22 nt, Human
uguacaaaguuaaaccuauaua

SEQ ID NO: 892509 - RNA, 22 nt, Human
ggaggcuugaugaucuuggaua

SEQ ID NO: 892510 - RNA, 21 nt, Human
ucuuuucucagcuuugugguu

SEQ ID NO: 892511 - RNA, 22 nt, Human
gcugucucauacaaggcccugc

SEQ ID NO: 892512 - RNA, 18 nt, Human
auacagagaccucaagga

SEQ ID NO: 892513 - RNA, 23 nt, Human
cgcccagccucagugaccugggc

SEQ ID NO: 892514 - RNA, 22 nt, Human
ucagggccgccggggaucucgc

SEQ ID NO: 892515 - RNA, 22 nt, Human
agcugcaguaugaggcuggugg

SEQ ID NO: 892516 - RNA, 23 nt, Human
ggagcugcuguugggggagcugc

SEQ ID NO: 892517 - RNA, 22 nt, Human
gcagguggucacucauccccag

SEQ ID NO: 892518 - RNA, 22 nt, Human
uuuucagugggcaaugauguga

SEQ ID NO: 892519 - RNA, 22 nt, Human
acaacauucuuaaauacacuga

SEQ ID NO: 892520 - RNA, 22 nt, Human
acacugagcuuccaagaugggg

SEQ ID NO: 892521 - RNA, 22 nt, Human
ugagcuguguccugggggcagu

SEQ ID NO: 892522 - RNA, 22 nt, Human
ccuuuggcauuuugaggaugcg

SEQ ID NO: 892523 - RNA, 22 nt, Human
ggcaggugcuugucgaaggccu

SEQ ID NO: 892524 - RNA, 22 nt, Human
uggaagaggccagaaaguggga

SEQ ID NO: 892525 - RNA, 22 nt, Human
gaaacauaguugagacacugcu

SEQ ID NO: 892526 - RNA, 22 nt, Human
gcugccuucuggaggaagugaa

SEQ ID NO: 892527 - RNA, 23 nt, Human
cguuuuuuccucagauguucugg

SEQ ID NO: 892528 - RNA, 20 nt, Human
augucaggaagggagucagg

SEQ ID NO: 892529 - RNA, 22 nt, Human
acagcuggagcccuauggcugg

SEQ ID NO: 892530 - RNA, 20 nt, Human
cugauguucgugcuuccugg

SEQ ID NO: 892531 - RNA, 22 nt, Human
guguuuauacagcaaagagcau

SEQ ID NO: 892532 - RNA, 22 nt, Human
aggcugaggcaagaggaucacu

SEQ ID NO: 892533 - RNA, 22 nt, Human
augaacaaugacuacauauuga

SEQ ID NO: 892534 - RNA, 22 nt, Human
acauuucuauagugcaucuguu

SEQ ID NO: 892535 - RNA, 22 nt, Human
gcagcauugcacuuuuguucuu

SEQ ID NO: 892536 - RNA, 22 nt, Human
cauuaaauuccuuguucucaaa

SEQ ID NO: 892537 - RNA, 22 nt, Human
acagaacauauugcuucucuca

SEQ ID NO: 892538 - RNA, 22 nt, Human
cuguaaacuucuggaggucaag

SEQ ID NO: 892539 - RNA, 22 nt, Human
ggaggagacccugugucaguuu

SEQ ID NO: 892540 - RNA, 22 nt, Human
cucuggcuuguuaaugcauauu

SEQ ID NO: 892541 - RNA, 22 nt, Human
uacaucaaggaacaccugguau

SEQ ID NO: 892542 - RNA, 22 nt, Human
aauuucacagugaacuuugagg

SEQ ID NO: 892543 - RNA, 22 nt, Human
aaagguuuuucagcagggagau

SEQ ID NO: 892544 - RNA, 22 nt, Human
ugaguuauugcagcuuccuccu

SEQ ID NO: 892545 - RNA, 22 nt, Human
aaaagaugaaauggugucuugg

SEQ ID NO: 892546 - RNA, 22 nt, Human
augugucuuggaguuuuaaugu

SEQ ID NO: 892547 - RNA, 22 nt, Human
auaagauauaaauccacagagu

SEQ ID NO: 892548 - RNA, 22 nt, Human
gugcauaugguuacagcaccgc

SEQ ID NO: 892549 - RNA, 22 nt, Human
ugcagcugcucauucucucagu

SEQ ID NO: 892550 - RNA, 22 nt, Human
acagauuuugguauuugcaaug

SEQ ID NO: 892551 - RNA, 22 nt, Human
gcuccuggcauccugcuuuuaa

SEQ ID NO: 892552 - RNA, 22 nt, Human
aggccaggccuuucuccauucc

SEQ ID NO: 892553 - RNA, 22 nt, Human
aaacaguacucgauuuuuguag

SEQ ID NO: 892554 - RNA, 22 nt, Human
uggacuuuuuaacugauaggag

SEQ ID NO: 892555 - RNA, 22 nt, Human
aguggcugcuaugaucaggaca

SEQ ID NO: 892556 - RNA, 22 nt, Human
cauuuacagugagaguuuuuac

SEQ ID NO: 892557 - RNA, 22 nt, Human
agcaggugguaggcagucagca

SEQ ID NO: 892558 - RNA, 20 nt, Human
agccucugcccuucccacug

SEQ ID NO: 892559 - RNA, 22 nt, Human
gaggugggagggcagucccuaa

SEQ ID NO: 892560 - RNA, 22 nt, Human
accuugaaagcugguuguuagg

SEQ ID NO: 892561 - RNA, 22 nt, Human
uaacaugucccugauucuuugu

SEQ ID NO: 892562 - RNA, 22 nt, Human
acaugucuaaguacucaacaaa

SEQ ID NO: 892563 - RNA, 22 nt, Human
ugcauuucuuuugaguauaugc

SEQ ID NO: 892564 - RNA, 21 nt, Human
ugauuuccagaaaauuggccc

SEQ ID NO: 892565 - RNA, 22 nt, Human
ucacacauucuagguauguuga

SEQ ID NO: 892566 - RNA, 22 nt, Human
aguuuucuucauuuuguggcca

SEQ ID NO: 892567 - RNA, 22 nt, Human
uuccauauuggaaggcacaggc

SEQ ID NO: 892568 - RNA, 22 nt, Human
ggacagaggguugacagaguau

SEQ ID NO: 892569 - RNA, 22 nt, Human
cuggaguuagaguagacacuga

SEQ ID NO: 892570 - RNA, 22 nt, Human
gcuccagcuccggcuccgaagc

SEQ ID NO: 892571 - RNA, 22 nt, Human
aaaaaucacuuuuauaggcagc

SEQ ID NO: 892572 - RNA, 22 nt, Human
gugggagcugcggaggccuggg

SEQ ID NO: 892573 - RNA, 22 nt, Human
aucuggcuuacgaagcacuggu

SEQ ID NO: 892574 - RNA, 22 nt, Human
cagguuagcaacaugguuagag

SEQ ID NO: 892575 - RNA, 22 nt, Human
augucuguuuauccuucaagau

SEQ ID NO: 892576 - RNA, 22 nt, Human
aacuccucacugccucuggcac

SEQ ID NO: 892577 - RNA, 22 nt, Human
uuagcuauaguaugucugcuuu

SEQ ID NO: 892578 - RNA, 22 nt, Human
cuuugaagauggcaaauuuaga

SEQ ID NO: 892579 - RNA, 22 nt, Human
cuguggcuucugcuugggccuc

SEQ ID NO: 892580 - RNA, 22 nt, Human
auguucauagcaucgguauuca

SEQ ID NO: 892581 - RNA, 22 nt, Human
cugcaucauuuucagacaaugg

SEQ ID NO: 892582 - RNA, 22 nt, Human
gggagguagcaagccugcagcu

SEQ ID NO: 892583 - RNA, 22 nt, Human
cagcagccuggagggggccacg

SEQ ID NO: 892584 - RNA, 23 nt, Human
uggacgccgacuuuggaggcgcu

SEQ ID NO: 892585 - RNA, 22 nt, Human
caguaauaaagcuaaguauuuc

SEQ ID NO: 892586 - RNA, 23 nt, Human
uggcuccaugaaaauuacgagga

SEQ ID NO: 892587 - RNA, 22 nt, Human
cuggucaccuccuucccagcua

SEQ ID NO: 892588 - RNA, 22 nt, Human
gucacacagggccuccaaauca

SEQ ID NO: 892589 - RNA, 22 nt, Human
auguuugcuuaauuggagaaau

SEQ ID NO: 892590 - RNA, 22 nt, Human
agaauuucaaauggaaguuuua

SEQ ID NO: 892591 - RNA, 22 nt, Human
aaagagaaaaagaucccggcuc

SEQ ID NO: 892592 - RNA, 22 nt, Human
uucaccagagguuagaauauuu

SEQ ID NO: 892593 - RNA, 22 nt, Human
augcauauguacuugcauaugu

SEQ ID NO: 892594 - RNA, 21 nt, Human
aguucuauagucuucacagcc

SEQ ID NO: 892595 - RNA, 22 nt, Human
augggagugugcuugaggaguu

SEQ ID NO: 892596 - RNA, 22 nt, Human
agaggcccucucucuccugaug

SEQ ID NO: 892597 - RNA, 22 nt, Human
aaaaugacauuccagugauauu

SEQ ID NO: 892598 - RNA, 22 nt, Human
uagcauggggagcagaaaguca

SEQ ID NO: 892599 - RNA, 22 nt, Human
gcugccugaaauguugccuagc

SEQ ID NO: 892600 - RNA, 22 nt, Human
gagguggcagaggccuggaccu

SEQ ID NO: 892601 - RNA, 22 nt, Human
aagaacaugaacacaauguuua

SEQ ID NO: 892602 - RNA, 22 nt, Human
auucuauuuuuuaagaaguagu

SEQ ID NO: 892603 - RNA, 19 nt, Human
ugacagcaugaauuaggac

SEQ ID NO: 892604 - RNA, 22 nt, Human
uggcagcuguguccagguagaa

SEQ ID NO: 892605 - RNA, 22 nt, Human
aggaaucugugguuuuaacagg

SEQ ID NO: 892606 - RNA, 22 nt, Human
agcccugcacaggucuguggcu

SEQ ID NO: 892607 - RNA, 22 nt, Human
cagcucugcugggaggaugcag

SEQ ID NO: 892608 - RNA, 22 nt, Human
acauuuugcccuuauuugcuga

SEQ ID NO: 892609 - RNA, 22 nt, Human
uacagcacggugcauuuacuac

SEQ ID NO: 892610 - RNA, 22 nt, Human
ugguugcauuaacugagagggg

SEQ ID NO: 892611 - RNA, 22 nt, Human
aucuuucaguuucauaccaauu

SEQ ID NO: 892612 - RNA, 22 nt, Human
gaugauaagauggaguugaauu

SEQ ID NO: 892613 - RNA, 22 nt, Human
cugccaggcagcagagggagaa

SEQ ID NO: 892614 - RNA, 22 nt, Human
gagacaggauuuaaccaaagcu

SEQ ID NO: 892615 - RNA, 23 nt, Human
auuugguguugguucugccaccc

SEQ ID NO: 892616 - RNA, 22 nt, Human
agagcuguuaauuuugcacugg

SEQ ID NO: 892617 - RNA, 22 nt, Human
agccuggcuaaauucucccaug

SEQ ID NO: 892618 - RNA, 22 nt, Human
agcagggacuacgugaaaguga

SEQ ID NO: 892619 - RNA, 17 nt, Human
cagcucugcagacuucc

SEQ ID NO: 892620 - RNA, 22 nt, Human
cagagaaagacuugcccuuagu

SEQ ID NO: 892621 - RNA, 22 nt, Human
auaucaguaucuauguauuugu

SEQ ID NO: 892622 - RNA, 19 nt, Human
agcaggccacagggccagc

SEQ ID NO: 892623 - RNA, 22 nt, Human
ugcaggcugaggcuggcucaac

SEQ ID NO: 892624 - RNA, 22 nt, Human
ccucugccugcacaucauccug

SEQ ID NO: 892625 - RNA, 22 nt, Human
aguauacaguaaugacauaucu

SEQ ID NO: 892626 - RNA, 22 nt, Human
cugcccuguccuucccgccggc

SEQ ID NO: 892627 - RNA, 22 nt, Human
ccugcuguagggccccuggggc

SEQ ID NO: 892628 - RNA, 22 nt, Human
augagauagacuaugucauaca

SEQ ID NO: 892629 - RNA, 22 nt, Human
gaagaagucauucugucuuuca

SEQ ID NO: 892630 - RNA, 22 nt, Human
agagcugaaaaagcugacccgg

SEQ ID NO: 892631 - RNA, 22 nt, Human
gcccugugccagucacgcugug

SEQ ID NO: 892632 - RNA, 22 nt, Human
auuugcaaagucguaucuguga

SEQ ID NO: 892633 - RNA, 22 nt, Human
aagagcauauauguauguuugu

SEQ ID NO: 892634 - RNA, 22 nt, Human
acuggcaguagagggagcgcau

SEQ ID NO: 892635 - RNA, 22 nt, Human
ccugcugggacgugugguugcc

SEQ ID NO: 892636 - RNA, 22 nt, Human
uggaacaaggguucauuuaaau

SEQ ID NO: 892637 - RNA, 22 nt, Human
uggcucagcauucacuggucuu

SEQ ID NO: 892638 - RNA, 22 nt, Human
acaaucauuggcuucauuacaa

SEQ ID NO: 892639 - RNA, 22 nt, Human
ugggaggucucuugcggccuag

SEQ ID NO: 892640 - RNA, 22 nt, Human
auuucauagauuguaaaucccu

SEQ ID NO: 892641 - RNA, 19 nt, Human
ugggccugcaucugggucu

SEQ ID NO: 892642 - RNA, 18 nt, Human
uccagcagcauaguuucc

SEQ ID NO: 892643 - RNA, 22 nt, Human
ucuuuguaacugucuauugaga

SEQ ID NO: 892644 - RNA, 22 nt, Human
aaaugcuagaacauuuuaaagg

SEQ ID NO: 892645 - RNA, 22 nt, Human
gcagaggagcaagcuggacacc

SEQ ID NO: 892646 - RNA, 22 nt, Human
acauaauggacaauaaugcauc

SEQ ID NO: 892647 - RNA, 22 nt, Human
uaguuuuagcagcaaugggaug

SEQ ID NO: 892648 - RNA, 22 nt, Human
uggaauguuuccccagccugca

SEQ ID NO: 892649 - RNA, 22 nt, Human
ugaguuauugagaaauaacugc

SEQ ID NO: 892650 - RNA, 22 nt, Human
auuccuugcucucaucaaccuu

SEQ ID NO: 892651 - RNA, 22 nt, Human
cugaggcucugagaaagccaaa

SEQ ID NO: 892652 - RNA, 23 nt, Human
uguaggcuaagucccauaaauca

SEQ ID NO: 892653 - RNA, 22 nt, Human
uuccuucuagcccaaguauugg

SEQ ID NO: 892654 - RNA, 22 nt, Human
caaaaguaauggcgguuuuuac

SEQ ID NO: 892655 - RNA, 22 nt, Human
agcuuuggggguagguauagag

SEQ ID NO: 892656 - RNA, 22 nt, Human
aagucuaggacaggaagucuau

SEQ ID NO: 892657 - RNA, 22 nt, Human
agcagggcuuugcagacuuggg

SEQ ID NO: 892658 - RNA, 22 nt, Human
cuauccaaggaguuuuugaaau

SEQ ID NO: 892659 - RNA, 22 nt, Human
gcugucuguggugucagcugac

SEQ ID NO: 892660 - RNA, 22 nt, Human
agccaggcucaaggccugcucc

SEQ ID NO: 892661 - RNA, 22 nt, Human
auggaacaggcucagagaugcu

SEQ ID NO: 892662 - RNA, 22 nt, Human
ugacucugauugccuuagcuug

SEQ ID NO: 892663 - RNA, 22 nt, Human
ugagcaguaacagcucacaggg

SEQ ID NO: 892664 - RNA, 22 nt, Human
agauacuacaugaaugggaauu

SEQ ID NO: 892665 - RNA, 22 nt, Human
gcagaacaacguaggaguggag

SEQ ID NO: 892666 - RNA, 22 nt, Human
uagauuucuaacagugugcuug

SEQ ID NO: 892667 - RNA, 22 nt, Human
augacauugaauauguuaacua

SEQ ID NO: 892668 - RNA, 22 nt, Human
uggcauccagccaugugauuuu

SEQ ID NO: 892669 - RNA, 22 nt, Human
gagguuccccauuguacuggcu

SEQ ID NO: 892670 - RNA, 22 nt, Human
cuuggauuugggcccuuaaauu

SEQ ID NO: 892671 - RNA, 22 nt, Human
cucagcucccuccacccagacc

SEQ ID NO: 892672 - RNA, 22 nt, Human
uuagaaacaaaauaguuauuug

SEQ ID NO: 892673 - RNA, 22 nt, Human
aaaucuuucccuuuacuaucca

SEQ ID NO: 892674 - RNA, 16 nt, Human
aggaggggaauuagga

SEQ ID NO: 892675 - RNA, 22 nt, Human
agaagccauagucugggaggca

SEQ ID NO: 892676 - RNA, 22 nt, Human
caucuuuguaacuuccacauaa

SEQ ID NO: 892677 - RNA, 22 nt, Human
uggagaagauuggucaccauuc

SEQ ID NO: 892678 - RNA, 22 nt, Human
cagugauuuuaaacuauggaug

SEQ ID NO: 892679 - RNA, 22 nt, Human
uggcuaagcuggggaggccugg

SEQ ID NO: 892680 - RNA, 21 nt, Human
uuuagcaagaguauagugcau

SEQ ID NO: 892681 - RNA, 22 nt, Human
gucagaggaauggaugagugau

SEQ ID NO: 892682 - RNA, 22 nt, Human
aggaggaggcuggaguacaccc

SEQ ID NO: 892683 - RNA, 22 nt, Human
uuauuccacagcucagaauuuu

SEQ ID NO: 892684 - RNA, 22 nt, Human
ucaacaguugcacuggagaggu

SEQ ID NO: 892685 - RNA, 22 nt, Human
gacccagugacucgucucugug

SEQ ID NO: 892686 - RNA, 23 nt, Human
caucuagcauccagugaguagug

SEQ ID NO: 892687 - RNA, 22 nt, Human
cacugcagccacauagaugacg

SEQ ID NO: 892688 - RNA, 22 nt, Human
cucucugugguggcugucccau

SEQ ID NO: 892689 - RNA, 18 nt, Human
ucuguccuuccauucuuc

SEQ ID NO: 892690 - RNA, 20 nt, Human
cauuuagaaauuggcaugga

SEQ ID NO: 892691 - RNA, 22 nt, Human
cacaguuucuauaggucagaau

SEQ ID NO: 892692 - RNA, 22 nt, Human
aaggcugccucugccagaggag

SEQ ID NO: 892693 - RNA, 22 nt, Human
ucaguggauuggaugagaucug

SEQ ID NO: 892694 - RNA, 22 nt, Human
gaaauauugggacucagagcuu

SEQ ID NO: 892695 - RNA, 22 nt, Human
agaaacuacuuggaggaaagau

SEQ ID NO: 892696 - RNA, 22 nt, Human
guuccacaaaauguacccaguu

SEQ ID NO: 892697 - RNA, 22 nt, Human
uccuaggguuggagacagugac

SEQ ID NO: 892698 - RNA, 22 nt, Human
gucaaauaauuuucucaauagu

SEQ ID NO: 892699 - RNA, 22 nt, Human
cuggacagaaagggcugcugug

SEQ ID NO: 892700 - RNA, 22 nt, Human
cugggcuagaaggaccaggaug

SEQ ID NO: 892701 - RNA, 22 nt, Human
uugcaggggaaggagcagagcu

SEQ ID NO: 892702 - RNA, 22 nt, Human
agggcuccgggcaggcgaugga

SEQ ID NO: 892703 - RNA, 22 nt, Human
uagcugugcccgccacccaacg

SEQ ID NO: 892704 - RNA, 22 nt, Human
cacccagugaaggagcaagagg

SEQ ID NO: 892705 - RNA, 22 nt, Human
gucaauauagguuucaaacaug

SEQ ID NO: 892706 - RNA, 22 nt, Human
gacaagacagcuugcagacaac

SEQ ID NO: 892707 - RNA, 22 nt, Human
cagaaauagacaauggcagugg

SEQ ID NO: 892708 - RNA, 22 nt, Human
accucuggccuucaggcaucau

SEQ ID NO: 892709 - RNA, 22 nt, Human
uuucaugauuaacuuagugaau

SEQ ID NO: 892710 - RNA, 22 nt, Human
aggcaggcucuggguaugugca

SEQ ID NO: 892711 - RNA, 22 nt, Human
cagcucuuuuucacacaacaug

SEQ ID NO: 892712 - RNA, 22 nt, Human
aagguacaggguauuagauuau

SEQ ID NO: 892713 - RNA, 20 nt, Human
aauguucaaaggugauggca

SEQ ID NO: 892714 - RNA, 22 nt, Human
acuguuucugccacaauagccc

SEQ ID NO: 892715 - RNA, 22 nt, Human
cuggcagcgcagcaugaagucg

SEQ ID NO: 892716 - RNA, 22 nt, Human
agagcugagcaccaagcauggu

SEQ ID NO: 892717 - RNA, 22 nt, Human
ucugucuccucagaugacucca

SEQ ID NO: 892718 - RNA, 22 nt, Human
ucuuccuuguaagggcuuuaga

SEQ ID NO: 892719 - RNA, 22 nt, Human
uaagguuuggcugucucuuggu

SEQ ID NO: 892720 - RNA, 22 nt, Human
auuggccauuugcauguauuau

SEQ ID NO: 892721 - RNA, 21 nt, Human
guguuuccuguuuauggcuug

SEQ ID NO: 892722 - RNA, 22 nt, Human
aacugcaaagccaaucucagga

SEQ ID NO: 892723 - RNA, 20 nt, Human
aucaggaagagagacugacc

SEQ ID NO: 892724 - RNA, 22 nt, Human
aagcuguggcuuggaggaaaca

SEQ ID NO: 892725 - RNA, 23 nt, Human
uccaggagcaugcuggcuggcga

SEQ ID NO: 892726 - RNA, 22 nt, Human
cauggcaggaggcugcuggcag

SEQ ID NO: 892727 - RNA, 22 nt, Human
cuuugaaaccugcucugcagaa

SEQ ID NO: 892728 - RNA, 22 nt, Human
uaagugagaaagacauuaacug

SEQ ID NO: 892729 - RNA, 22 nt, Human
uucagugccgugcugggucgcu

SEQ ID NO: 892730 - RNA, 20 nt, Human
cuggcccaggaugauggcgc

SEQ ID NO: 892731 - RNA, 22 nt, Human
auuaaagaaacccagcauguga

SEQ ID NO: 892732 - RNA, 22 nt, Human
ucugggccugucucagagcugg

SEQ ID NO: 892733 - RNA, 22 nt, Human
aagcagccaccucaucuccacu

SEQ ID NO: 892734 - RNA, 23 nt, Human
agcuccagggaacaggcaguagg

SEQ ID NO: 892735 - RNA, 22 nt, Human
ucugaggcauuuaauuaugacc

SEQ ID NO: 892736 - RNA, 22 nt, Human
cacagauaaggauguuaauuuu

SEQ ID NO: 892737 - RNA, 22 nt, Human
gcugagagaucaaggcaggauu

SEQ ID NO: 892738 - RNA, 22 nt, Human
uguggugugucucacaaaugca

SEQ ID NO: 892739 - RNA, 22 nt, Human
uggagccuccucacacuguggc

SEQ ID NO: 892740 - RNA, 20 nt, Human
agggcugagaagggacuagc

SEQ ID NO: 892741 - RNA, 22 nt, Human
cugcucuggcuguguacuucag

SEQ ID NO: 892742 - RNA, 22 nt, Human
acucauuuuauaacacuguagu

SEQ ID NO: 892743 - RNA, 22 nt, Human
gcaagcaaauuauuuauaggca

SEQ ID NO: 892744 - RNA, 22 nt, Human
ccuuuacaucugacuucuuuca

SEQ ID NO: 892745 - RNA, 23 nt, Human
uuguauuuuuaguagagacaggg

SEQ ID NO: 892746 - RNA, 22 nt, Human
guggggguuucauuaagacaau

SEQ ID NO: 892747 - RNA, 22 nt, Human
ugguuuuagaguauauucaggg

SEQ ID NO: 892748 - RNA, 22 nt, Human
gcauuucagaagcaugcccucu

SEQ ID NO: 892749 - RNA, 22 nt, Human
ccaggagcaccaggccugugcc

SEQ ID NO: 892750 - RNA, 22 nt, Human
ugugcacauaaaacaguacuag

SEQ ID NO: 892751 - RNA, 22 nt, Human
cagcugccccgcuggcugacca

SEQ ID NO: 892752 - RNA, 22 nt, Human
uggccccauuuuacagaugaaa

SEQ ID NO: 892753 - RNA, 22 nt, Human
uagaggguuauuaggacagaag

SEQ ID NO: 892754 - RNA, 17 nt, Human
cugaaauauuaugauaa

SEQ ID NO: 892755 - RNA, 22 nt, Human
uauuccuggucccuaccacaga

SEQ ID NO: 892756 - RNA, 23 nt, Human
uuucagaagugguccuaggaagc

SEQ ID NO: 892757 - RNA, 22 nt, Human
uguuuucagucauauagcaggu

SEQ ID NO: 892758 - RNA, 16 nt, Human
gccuggaguggcaggg

SEQ ID NO: 892759 - RNA, 22 nt, Human
uggcagugccccuugaccagug

SEQ ID NO: 892760 - RNA, 22 nt, Human
auugagaaucugagagccuagg

SEQ ID NO: 892761 - RNA, 22 nt, Human
gacauugaaaauaauguguaga

SEQ ID NO: 892762 - RNA, 17 nt, Human
cauuuguugaucaguug

SEQ ID NO: 892763 - RNA, 22 nt, Human
auucuaucaagcugucuucuuu

SEQ ID NO: 892764 - RNA, 22 nt, Human
gcuggagccuucugcucuguug

SEQ ID NO: 892765 - RNA, 22 nt, Human
cuguccauguuaagccccuugc

SEQ ID NO: 892766 - RNA, 22 nt, Human
uucacauucucacaagaggaaa

SEQ ID NO: 892767 - RNA, 22 nt, Human
auguauuucuauguagugaaga

SEQ ID NO: 892768 - RNA, 22 nt, Human
ugucugaacgaaguagguccac

SEQ ID NO: 892769 - RNA, 22 nt, Human
cagcacaggcaggggaacuaua

SEQ ID NO: 892770 - RNA, 22 nt, Human
gcugugcagucuuuggugugcc

SEQ ID NO: 892771 - RNA, 22 nt, Human
gaagccccaaacccucgccauc

SEQ ID NO: 892772 - RNA, 17 nt, Human
uugaacugcugagucag

SEQ ID NO: 892773 - RNA, 22 nt, Human
ucuaaguaaaauuugucauuuc

SEQ ID NO: 892774 - RNA, 22 nt, Human
gaaaaguaaacacuagggguca

SEQ ID NO: 892775 - RNA, 22 nt, Human
uggcagguggagacagcagagc

SEQ ID NO: 892776 - RNA, 22 nt, Human
gcccuagcgccagcucagcacc

SEQ ID NO: 892777 - RNA, 22 nt, Human
cugggcuguucugccccugggu

SEQ ID NO: 892778 - RNA, 23 nt, Human
ggagcuggacccuuacaccuuuc

SEQ ID NO: 892779 - RNA, 22 nt, Human
cugcucucuuucagagacaggu

SEQ ID NO: 892780 - RNA, 22 nt, Human
agggcuccaggggaccaucagu

SEQ ID NO: 892781 - RNA, 22 nt, Human
aacaacagugagugcugggagg

SEQ ID NO: 892782 - RNA, 22 nt, Human
uaucacuacaccuggcuaauua

SEQ ID NO: 892783 - RNA, 22 nt, Human
caggaggcaggugcauuuugag

SEQ ID NO: 892784 - RNA, 22 nt, Human
aaaguuacacaucuaguaagug

SEQ ID NO: 892785 - RNA, 21 nt, Human
gucuuuuuaauugcgauuucc

SEQ ID NO: 892786 - RNA, 22 nt, Human
aauuggcaagcaaguuauccag

SEQ ID NO: 892787 - RNA, 22 nt, Human
ugggcacagagucccaucugcc

SEQ ID NO: 892788 - RNA, 22 nt, Human
ccaggcugggcuacaaguugag

SEQ ID NO: 892789 - RNA, 22 nt, Human
cagcuggggcagccacgugcgg

SEQ ID NO: 892790 - RNA, 22 nt, Human
aggugagguuugggagguguca

SEQ ID NO: 892791 - RNA, 22 nt, Human
ugcccagccccuaucccuggga

SEQ ID NO: 892792 - RNA, 22 nt, Human
cauucaucuaucaaaugguacc

SEQ ID NO: 892793 - RNA, 22 nt, Human
auguuucaccaguuuuauaaga

SEQ ID NO: 892794 - RNA, 22 nt, Human
cugugucuguggaauagcgaau

SEQ ID NO: 892795 - RNA, 22 nt, Human
ugauuuccaauaaggagaaugu

SEQ ID NO: 892796 - RNA, 22 nt, Human
ugaccugacaugaauuaaaaac

SEQ ID NO: 892797 - RNA, 22 nt, Human
gauagaaagaauauagauucca

SEQ ID NO: 892798 - RNA, 18 nt, Human
acauuucuaugcuucugg

SEQ ID NO: 892799 - RNA, 22 nt, Human
ucucaaugacuccuauuuacau

SEQ ID NO: 892800 - RNA, 22 nt, Human
cugcucugaagccaggauucug

SEQ ID NO: 892801 - RNA, 22 nt, Human
uggcacaguccugggugccugc

SEQ ID NO: 892802 - RNA, 22 nt, Human
acugcaggagacacagcugcug

SEQ ID NO: 892803 - RNA, 22 nt, Human
caggaagcacagugaggagacc

SEQ ID NO: 892804 - RNA, 22 nt, Human
uuuauucagcagcagcaguggu

SEQ ID NO: 892805 - RNA, 22 nt, Human
ucucucacuggugccucuguug

SEQ ID NO: 892806 - RNA, 23 nt, Human
uucaaaacuggaaaaucagaugc

SEQ ID NO: 892807 - RNA, 22 nt, Human
gcuggaguuaggugggcuugaa

SEQ ID NO: 892808 - RNA, 22 nt, Human
ugaggcccuagggcaugggaga

SEQ ID NO: 892809 - RNA, 22 nt, Human
ugcauuauaacugaauguuguu

SEQ ID NO: 892810 - RNA, 22 nt, Human
aacuagaaccugcauuuuaaca

SEQ ID NO: 892811 - RNA, 22 nt, Human
aaauaaguuagcagauuccagu

SEQ ID NO: 892812 - RNA, 23 nt, Human
aggcuccacaugggcacuuugca

SEQ ID NO: 892813 - RNA, 22 nt, Human
auuugccuugugaauuggauau

SEQ ID NO: 892814 - RNA, 22 nt, Human
augucuguccccuagcccugau

SEQ ID NO: 892815 - RNA, 22 nt, Human
caggaggacauacuggcucaca

SEQ ID NO: 892816 - RNA, 19 nt, Human
ccaggaccuuuccaggguc

SEQ ID NO: 892817 - RNA, 22 nt, Human
aaagauggcccaugaucucuug

SEQ ID NO: 892818 - RNA, 22 nt, Human
cugcccuggucccauggcugau

SEQ ID NO: 892819 - RNA, 22 nt, Human
gccgagcacagugcagcugccu

SEQ ID NO: 892820 - RNA, 22 nt, Human
gucugggaguuuggugcugccg

SEQ ID NO: 892821 - RNA, 22 nt, Human
gaguuuccaaaucccugaaggg

SEQ ID NO: 892822 - RNA, 22 nt, Human
aauuuauggccuucgucuugau

SEQ ID NO: 892823 - RNA, 22 nt, Human
cuggcucuaagugucagcuccc

SEQ ID NO: 892824 - RNA, 22 nt, Human
ugggagcagccaacauggccuu

SEQ ID NO: 892825 - RNA, 22 nt, Human
acugcacacacagaauuuaggg

SEQ ID NO: 892826 - RNA, 21 nt, Human
gauuuuaaagagacugccaca

SEQ ID NO: 892827 - RNA, 22 nt, Human
auacagcuuucuuucacaugag

SEQ ID NO: 892828 - RNA, 20 nt, Human
aaguuuucuccaaauacagu

SEQ ID NO: 892829 - RNA, 22 nt, Human
cagauacagcuagcuccguggc

SEQ ID NO: 892830 - RNA, 19 nt, Human
ggcauccagaacuaccagu

SEQ ID NO: 892831 - RNA, 22 nt, Human
auguacaucuuuauaacaagcu

SEQ ID NO: 892832 - RNA, 22 nt, Human
cagcagcuuugccaagucagcc

SEQ ID NO: 892833 - RNA, 21 nt, Human
ugggggagaauugguugcuuu

SEQ ID NO: 892834 - RNA, 22 nt, Human
agagugguacuucuuuuucuuc

SEQ ID NO: 892835 - RNA, 22 nt, Human
ugagaaccaccuggaggugacu

SEQ ID NO: 892836 - RNA, 22 nt, Human
agcagcuucagaggcgggcgca

SEQ ID NO: 892837 - RNA, 22 nt, Human
ucacagugcaggaucaguuaau

SEQ ID NO: 892838 - RNA, 22 nt, Human
aacacauaggcagagcaugaca

SEQ ID NO: 892839 - RNA, 22 nt, Human
ugacagcagccaccucucaccc

SEQ ID NO: 892840 - RNA, 22 nt, Human
agcuguggcagcagccguggca

SEQ ID NO: 892841 - RNA, 22 nt, Human
ucauucaauguaagcauauaua

SEQ ID NO: 892842 - RNA, 22 nt, Human
caugggcaccuuaaaaugaggc

SEQ ID NO: 892843 - RNA, 22 nt, Human
cagaauguauucucauaaagcc

SEQ ID NO: 892844 - RNA, 20 nt, Human
cacauuaaggaaaacaacug

SEQ ID NO: 892845 - RNA, 22 nt, Human
uuucuguuguauggcuucugca

SEQ ID NO: 892846 - RNA, 22 nt, Human
uggcuucauuauuguuuuuccu

SEQ ID NO: 892847 - RNA, 22 nt, Human
ugucuugauuagaaugaugggc

SEQ ID NO: 892848 - RNA, 22 nt, Human
cccuggagggauuucucaauca

SEQ ID NO: 892849 - RNA, 22 nt, Human
aaggguuaguuggauuauuuau

SEQ ID NO: 892850 - RNA, 22 nt, Human
caggcaugggccaugggaagug

SEQ ID NO: 892851 - RNA, 20 nt, Human
ugccuuagagauaaaggcuu

SEQ ID NO: 892852 - RNA, 22 nt, Human
ugggaagcauuaaugauagggg

SEQ ID NO: 892853 - RNA, 23 nt, Human
acaaaugcccauacaucuaguuc

SEQ ID NO: 892854 - RNA, 22 nt, Human
cugccuguauugucugcuuggg

SEQ ID NO: 892855 - RNA, 22 nt, Human
agggccucgggcucaguggguc

SEQ ID NO: 892856 - RNA, 22 nt, Human
ucuuggaaucuccauagaguga

SEQ ID NO: 892857 - RNA, 17 nt, Human
gaaaguuucucucucuu

SEQ ID NO: 892858 - RNA, 22 nt, Human
ugcugcacucaccaacagauaa

SEQ ID NO: 892859 - RNA, 22 nt, Human
gcauuuauauucuguucggaua

SEQ ID NO: 892860 - RNA, 22 nt, Human
cugcuuuagugugguguuagag

SEQ ID NO: 892861 - RNA, 22 nt, Human
agauuuuauagauaauuuccca

SEQ ID NO: 892862 - RNA, 22 nt, Human
uaacuugauaaguauucucugc

SEQ ID NO: 892863 - RNA, 22 nt, Human
uugcagggccuuggcuucuucc

SEQ ID NO: 892864 - RNA, 22 nt, Human
ugugugugcacgugcgcgcgag

SEQ ID NO: 892865 - RNA, 21 nt, Human
ugcaggaaagugcugcgaccc

SEQ ID NO: 892866 - RNA, 22 nt, Human
gcagaaccauaaauucagguaa

SEQ ID NO: 892867 - RNA, 22 nt, Human
agcagacagguaggaggauaaa

SEQ ID NO: 892868 - RNA, 18 nt, Human
cauuagcaccacguagag

SEQ ID NO: 892869 - RNA, 23 nt, Human
guuuuacaggugagaaaauggag

SEQ ID NO: 892870 - RNA, 22 nt, Human
ugugugaggauuccugguucuu

SEQ ID NO: 892871 - RNA, 21 nt, Human
cacuggaauuuucugugacau

SEQ ID NO: 892872 - RNA, 22 nt, Human
ccagcuggaagagugcagaacu

SEQ ID NO: 892873 - RNA, 22 nt, Human
gaaauauacauugcaggaagag

SEQ ID NO: 892874 - RNA, 22 nt, Human
gaaucauagaacauuaauagaa

SEQ ID NO: 892875 - RNA, 20 nt, Human
agcaucuugcaucuucaagu

SEQ ID NO: 892876 - RNA, 22 nt, Human
caaugucaaggagaccaaaacg

SEQ ID NO: 892877 - RNA, 22 nt, Human
agggccagagucuguguagaua

SEQ ID NO: 892878 - RNA, 22 nt, Human
cagggugagccucuggagcccu

SEQ ID NO: 892879 - RNA, 22 nt, Human
augcugugauuguagaaauauu

SEQ ID NO: 892880 - RNA, 22 nt, Human
caucaucuggcuuuuagaaaaa

SEQ ID NO: 892881 - RNA, 22 nt, Human
uggcaugggcaaaccagggaaa

SEQ ID NO: 892882 - RNA, 22 nt, Human
ucauugaagcccuugacaagcc

SEQ ID NO: 892883 - RNA, 22 nt, Human
gcucuggcuacuccacccuguu

SEQ ID NO: 892884 - RNA, 22 nt, Human
uauuuauuggacaguguugcug

SEQ ID NO: 892885 - RNA, 22 nt, Human
cagcugccacuugcucucggcu

SEQ ID NO: 892886 - RNA, 22 nt, Human
uuugcacacacaauaacaaaug

SEQ ID NO: 892887 - RNA, 22 nt, Human
cacgugagaccuugcagaggug

SEQ ID NO: 892888 - RNA, 17 nt, Human
gacagcugggcgcacgc

SEQ ID NO: 892889 - RNA, 22 nt, Human
uguguacaggccuugcuagacu

SEQ ID NO: 892890 - RNA, 22 nt, Human
gaggcagcugggcuggugguuu

SEQ ID NO: 892891 - RNA, 22 nt, Human
agaggcugggaaggguccccgg

SEQ ID NO: 892892 - RNA, 21 nt, Human
acagcagggcuggcaugacag

SEQ ID NO: 892893 - RNA, 22 nt, Human
uuauauauauguagaggucacg

SEQ ID NO: 892894 - RNA, 22 nt, Human
cugccuuccaaccccagacucc

SEQ ID NO: 892895 - RNA, 22 nt, Human
gcuggcugaggucuagcucuuu

SEQ ID NO: 892896 - RNA, 22 nt, Human
auuuuuuauauaccaagguggg

SEQ ID NO: 892897 - RNA, 20 nt, Human
auucacaaagccaguguugc

SEQ ID NO: 892898 - RNA, 19 nt, Human
uccaguguagcuggucauu

SEQ ID NO: 892899 - RNA, 22 nt, Human
aaaacacugccugcuugacuga

SEQ ID NO: 892900 - RNA, 22 nt, Human
uugacacaggaaaguuguaacu

SEQ ID NO: 892901 - RNA, 22 nt, Human
ucauaaaguucuaagaauugua

SEQ ID NO: 892902 - RNA, 22 nt, Human
uagaaauucaaugcucugagua

SEQ ID NO: 892903 - RNA, 22 nt, Human
cacagugacagcuauacagaga

SEQ ID NO: 892904 - RNA, 22 nt, Human
cucuggcuucuaccuugcaguu

SEQ ID NO: 892905 - RNA, 22 nt, Human
uggaaugccgggccaggcuccg

SEQ ID NO: 892906 - RNA, 20 nt, Human
caagccaggcccugcugcug

SEQ ID NO: 892907 - RNA, 22 nt, Human
aaauggaauguguuuauaauuc

SEQ ID NO: 892908 - RNA, 22 nt, Human
uuuucauugagcaccugaguaa

SEQ ID NO: 892909 - RNA, 22 nt, Human
agggcuugcagaaaugagaaau

SEQ ID NO: 892910 - RNA, 22 nt, Human
auuguauacaagcuuaauuguu

SEQ ID NO: 892911 - RNA, 21 nt, Human
uagaucaugguauucuuuggc

SEQ ID NO: 892912 - RNA, 22 nt, Human
ucugaggguuguagagagggac

SEQ ID NO: 892913 - RNA, 22 nt, Human
uugaaauauggauugaccuuga

SEQ ID NO: 892914 - RNA, 22 nt, Human
uaauuuuaugacaguguauuuu

SEQ ID NO: 892915 - RNA, 22 nt, Human
aaaccuauauagucuuagaagc

SEQ ID NO: 892916 - RNA, 22 nt, Human
gagguauuggccauugucuguu

SEQ ID NO: 892917 - RNA, 22 nt, Human
cugaggccuguguuggggcagu

SEQ ID NO: 892918 - RNA, 22 nt, Human
uccagccuccuauuuacccuaa

SEQ ID NO: 892919 - RNA, 22 nt, Human
ugggggagccuucacaguagcu

SEQ ID NO: 892920 - RNA, 21 nt, Human
aagccagcccacagugguuug

SEQ ID NO: 892921 - RNA, 22 nt, Human
cagcagccugccuugggagcuu

SEQ ID NO: 892922 - RNA, 22 nt, Human
cuggcucucugagauauugagu

SEQ ID NO: 892923 - RNA, 22 nt, Human
cuugaagaaauggagacaggau

SEQ ID NO: 892924 - RNA, 22 nt, Human
uguucauucaacaugucaucua

SEQ ID NO: 892925 - RNA, 22 nt, Human
uauaggaaauaggucuucugug

SEQ ID NO: 892926 - RNA, 22 nt, Human
aaacaugcauucaagaaaaucu

SEQ ID NO: 892927 - RNA, 22 nt, Human
uacagaggggacauggaagaca

SEQ ID NO: 892928 - RNA, 22 nt, Human
aguccacagagucucuccugaa

SEQ ID NO: 892929 - RNA, 22 nt, Human
ugcuuuauucagucucugccau

SEQ ID NO: 892930 - RNA, 22 nt, Human
augcuuaaugaggguauauaug

SEQ ID NO: 892931 - RNA, 22 nt, Human
agcagggccucuggcacugguc

SEQ ID NO: 892932 - RNA, 22 nt, Human
ugugucugcacugaguccucac

SEQ ID NO: 892933 - RNA, 22 nt, Human
uucaacauuuaucaguuuauca

SEQ ID NO: 892934 - RNA, 22 nt, Human
auucugugauaguugauccuua

SEQ ID NO: 892935 - RNA, 18 nt, Human
uagcaaagauguggauug

SEQ ID NO: 892936 - RNA, 22 nt, Human
ugauuugauucuucuuggagua

SEQ ID NO: 892937 - RNA, 22 nt, Human
gaucuagaaggcaaauauagug

SEQ ID NO: 892938 - RNA, 22 nt, Human
gcaugcuacagcccaacuguga

SEQ ID NO: 892939 - RNA, 22 nt, Human
ugaacaguuucaagaaaacuuu

SEQ ID NO: 892940 - RNA, 22 nt, Human
cagcagcuaaggcauguuccug

SEQ ID NO: 892941 - RNA, 22 nt, Human
uguuuucauuugauguaacaaa

SEQ ID NO: 892942 - RNA, 19 nt, Human
uccucaggggcucacagac

SEQ ID NO: 892943 - RNA, 22 nt, Human
agacacagaaguugcuguuggg

SEQ ID NO: 892944 - RNA, 22 nt, Human
uuaguguuagggccuguuaccu

SEQ ID NO: 892945 - RNA, 23 nt, Human
aggcagugucucuuauccugucc

SEQ ID NO: 892946 - RNA, 22 nt, Human
agucuucacucuucacuacuau

SEQ ID NO: 892947 - RNA, 22 nt, Human
cauuugucaucacugagcugcc

SEQ ID NO: 892948 - RNA, 22 nt, Human
ugcuuagacgucaaguacagcc

SEQ ID NO: 892949 - RNA, 22 nt, Human
uggaauguuaaaccucaaugau

SEQ ID NO: 892950 - RNA, 22 nt, Human
ggccucagaccggagcuggcca

SEQ ID NO: 892951 - RNA, 22 nt, Human
uuccaccaggagauauuucaaa

SEQ ID NO: 892952 - RNA, 22 nt, Human
ccauucuguauaaaugcuagaa

SEQ ID NO: 892953 - RNA, 22 nt, Human
ucccaagauuauugagggaggg

SEQ ID NO: 892954 - RNA, 22 nt, Human
uaguaaguagcuaauauuuacu

SEQ ID NO: 892955 - RNA, 22 nt, Human
augaaagaugauuuaaaguacu

SEQ ID NO: 892956 - RNA, 22 nt, Human
uuaaaacagcgugaaucuggca

SEQ ID NO: 892957 - RNA, 22 nt, Human
aagggcugcaauccaaaacacu

SEQ ID NO: 892958 - RNA, 22 nt, Human
caaaucauggcucuagcuuaca

SEQ ID NO: 892959 - RNA, 22 nt, Human
auucuuuagccagcagguauau

SEQ ID NO: 892960 - RNA, 22 nt, Human
uugcuguuuaaugaugucuuau

SEQ ID NO: 892961 - RNA, 22 nt, Human
gugggcaggguugcuuucuccg

SEQ ID NO: 892962 - RNA, 22 nt, Human
ucaggaaggcuucacacgagug

SEQ ID NO: 892963 - RNA, 22 nt, Human
gcccugugauggagacuagagg

SEQ ID NO: 892964 - RNA, 22 nt, Human
ucagcucugcacuccacugugg

SEQ ID NO: 892965 - RNA, 22 nt, Human
auggauaagucaaagaguaucc

SEQ ID NO: 892966 - RNA, 22 nt, Human
agacagcaugagccugcugaug

SEQ ID NO: 892967 - RNA, 22 nt, Human
ccagcccuguaaggaugaggca

SEQ ID NO: 892968 - RNA, 22 nt, Human
aaguccaguuuuuccagguggu

SEQ ID NO: 892969 - RNA, 22 nt, Human
acagggcucgucgggcccucgg

SEQ ID NO: 892970 - RNA, 22 nt, Human
acaguguguuggaggagacugu

SEQ ID NO: 892971 - RNA, 22 nt, Human
uccuggggcugcaaggccuguc

SEQ ID NO: 892972 - RNA, 22 nt, Human
agcagggguggaagguagcuuu

SEQ ID NO: 892973 - RNA, 22 nt, Human
gacccuggcuggagcuggccug

SEQ ID NO: 892974 - RNA, 22 nt, Human
aacaaauguaaaaugcagaugc

SEQ ID NO: 892975 - RNA, 22 nt, Human
gccaggcugaggcucuggaaga

SEQ ID NO: 892976 - RNA, 22 nt, Human
aauaucuuggcccaacuccaga

SEQ ID NO: 892977 - RNA, 22 nt, Human
caaauagugaaacagauggggg

SEQ ID NO: 892978 - RNA, 22 nt, Human
gucuaugauauuuuguuauagc

SEQ ID NO: 892979 - RNA, 22 nt, Human
ucugcaggauggaugcucagaa

SEQ ID NO: 892980 - RNA, 22 nt, Human
auguuccucacuauuuuggccc

SEQ ID NO: 892981 - RNA, 18 nt, Human
ucuguguucugucauugc

SEQ ID NO: 892982 - RNA, 22 nt, Human
cuggggaacaauuugccacacu

SEQ ID NO: 892983 - RNA, 22 nt, Human
aggaguuauggcagaaucaaau

SEQ ID NO: 892984 - RNA, 22 nt, Human
guucauguggaaauuuaaaaca

SEQ ID NO: 892985 - RNA, 22 nt, Human
agggaggugguuccccagugga

SEQ ID NO: 892986 - RNA, 22 nt, Human
auaucaaacgaaguuauuuuaa

SEQ ID NO: 892987 - RNA, 22 nt, Human
uuucaguuuaugucuugaauua

SEQ ID NO: 892988 - RNA, 22 nt, Human
ucagggaagaaaugggacuuua

SEQ ID NO: 892989 - RNA, 22 nt, Human
aguguuuuucaggagcagaaca

SEQ ID NO: 892990 - RNA, 22 nt, Human
gcacauaacugaccacaucuaa

SEQ ID NO: 892991 - RNA, 22 nt, Human
uaauccuuuaugguuuuccucc

SEQ ID NO: 892992 - RNA, 22 nt, Human
aacaugcugccuuucuacgagu

SEQ ID NO: 892993 - RNA, 20 nt, Human
ucugcagcacuugacaaugu

SEQ ID NO: 892994 - RNA, 22 nt, Human
cugcaagguauauguuaucaua

SEQ ID NO: 892995 - RNA, 22 nt, Human
aauccacgagcaguagguaauu

SEQ ID NO: 892996 - RNA, 22 nt, Human
uuugacagagcucuuagucucu

SEQ ID NO: 892997 - RNA, 22 nt, Human
ccauuaaagcaccacuguaaua

SEQ ID NO: 892998 - RNA, 22 nt, Human
gaggaauguuauuaaaggagcu

SEQ ID NO: 892999 - RNA, 22 nt, Human
gaggaggggacaguacuugugc

SEQ ID NO: 893000 - RNA, 20 nt, Human
agagaugggguaucaccgua

SEQ ID NO: 893001 - RNA, 22 nt, Human
guuuacuuagaugcucaugcag

SEQ ID NO: 893002 - RNA, 22 nt, Human
gaggccacagcuaucagggaca

SEQ ID NO: 893003 - RNA, 22 nt, Human
aaaaugagacacaugugacucc

SEQ ID NO: 893004 - RNA, 19 nt, Human
agucuuucccacucgucuu

SEQ ID NO: 893005 - RNA, 22 nt, Human
acuagaaauuacucagaauaaa

SEQ ID NO: 893006 - RNA, 18 nt, Human
ccugucugggguccccac

SEQ ID NO: 893007 - RNA, 22 nt, Human
uagaaacuagauugauagcgga

SEQ ID NO: 893008 - RNA, 22 nt, Human
agaagggcuacacgggcucucc

SEQ ID NO: 893009 - RNA, 22 nt, Human
ccuggcugcuauagcagcaugu

SEQ ID NO: 893010 - RNA, 22 nt, Human
gaguuauauccugagucauauu

SEQ ID NO: 893011 - RNA, 22 nt, Human
uaucuagaaauuucuuuuguug

SEQ ID NO: 893012 - RNA, 22 nt, Human
cauacagagaaggauaauaaag

SEQ ID NO: 893013 - RNA, 22 nt, Human
agcugugguucugggcagcgac

SEQ ID NO: 893014 - RNA, 22 nt, Human
gauaaacaugggagaaaggaau

SEQ ID NO: 893015 - RNA, 22 nt, Human
aagcaauaaauaauuuuuagua

SEQ ID NO: 893016 - RNA, 19 nt, Human
cuguggacucuagaucaug

SEQ ID NO: 893017 - RNA, 22 nt, Human
gagcucuguguagccugagggu

SEQ ID NO: 893018 - RNA, 22 nt, Human
ggacacaguggaagacagcuug

SEQ ID NO: 893019 - RNA, 22 nt, Human
agugcugaagacuggcuaggga

SEQ ID NO: 893020 - RNA, 22 nt, Human
auguccuuuuauuuaaagcagg

SEQ ID NO: 893021 - RNA, 21 nt, Human
acugcacaaguugcuuugcuu

SEQ ID NO: 893022 - RNA, 22 nt, Human
gaggcucaccuagggagcacug

SEQ ID NO: 893023 - RNA, 22 nt, Human
acacugugacaaaggcuguucu

SEQ ID NO: 893024 - RNA, 19 nt, Human
acagaagcauagaaaagga

SEQ ID NO: 893025 - RNA, 22 nt, Human
ggucaacagagguaaugguaac

SEQ ID NO: 893026 - RNA, 22 nt, Human
uuugaaaauuuaagugcuacac

SEQ ID NO: 893027 - RNA, 22 nt, Human
cagagugaacagugggaugugc

SEQ ID NO: 893028 - RNA, 22 nt, Human
uuggaagacaaugcugauucuc

SEQ ID NO: 893029 - RNA, 22 nt, Human
aaguuugacagaaguuucuaau

SEQ ID NO: 893030 - RNA, 23 nt, Human
uugucugugcuuuuccaguugcu

SEQ ID NO: 893031 - RNA, 22 nt, Human
agagacaggguuuugucguguu

SEQ ID NO: 893032 - RNA, 22 nt, Human
ugugggcaggagcacaagucag

SEQ ID NO: 893033 - RNA, 22 nt, Human
acccaguuccuaagcauccaug

SEQ ID NO: 893034 - RNA, 19 nt, Human
uucuggagguuacccugag

SEQ ID NO: 893035 - RNA, 21 nt, Human
gcaggaugcaucuuggugucu

SEQ ID NO: 893036 - RNA, 22 nt, Human
cugcugggccuggucucugagg

SEQ ID NO: 893037 - RNA, 22 nt, Human
aaagucugaaagaugcuaacau

SEQ ID NO: 893038 - RNA, 22 nt, Human
uauguguaaucauaucugauac

SEQ ID NO: 893039 - RNA, 22 nt, Human
caauauauaaugaguacuuucc

SEQ ID NO: 893040 - RNA, 22 nt, Human
aagugucuaacugguuacuucu

SEQ ID NO: 893041 - RNA, 22 nt, Human
aagagguggguuggacagauac

SEQ ID NO: 893042 - RNA, 22 nt, Human
cugcaucaggccaauuaagaau

SEQ ID NO: 893043 - RNA, 18 nt, Human
ucuggaacaacuucaugu

SEQ ID NO: 893044 - RNA, 22 nt, Human
ucaggcuguauaucuugcacuc

SEQ ID NO: 893045 - RNA, 22 nt, Human
aguagcaauguuugagaagcac

SEQ ID NO: 893046 - RNA, 22 nt, Human
cucugugccucaguuuucuucu

SEQ ID NO: 893047 - RNA, 18 nt, Human
cuucuuguuugauuuggg

SEQ ID NO: 893048 - RNA, 22 nt, Human
gaaaugcauggaucuuggcaga

SEQ ID NO: 893049 - RNA, 19 nt, Human
ugugucagauuugcuccuu

SEQ ID NO: 893050 - RNA, 22 nt, Human
ucaaguuaggugguuguuagga

SEQ ID NO: 893051 - RNA, 22 nt, Human
cggcuucaguaauuccaugucc

SEQ ID NO: 893052 - RNA, 22 nt, Human
auggccaguguuucccucaguu

SEQ ID NO: 893053 - RNA, 22 nt, Human
ugaacaaacugcauucuucacu

SEQ ID NO: 893054 - RNA, 22 nt, Human
acagcagcauccuauuucacuc

SEQ ID NO: 893055 - RNA, 22 nt, Human
agcccucugcaaacaccugaua

SEQ ID NO: 893056 - RNA, 22 nt, Human
gccuggguaggagacaaaaggu

SEQ ID NO: 893057 - RNA, 22 nt, Human
uuuggaauguuaggugucucau

SEQ ID NO: 893058 - RNA, 22 nt, Human
aggcuggcgacaucuggcgggc

SEQ ID NO: 893059 - RNA, 22 nt, Human
uguuccuguacugcuguggcuu

SEQ ID NO: 893060 - RNA, 22 nt, Human
auuucucaguaggugcacagug

SEQ ID NO: 893061 - RNA, 22 nt, Human
uaucagugcucccagcuuagca

SEQ ID NO: 893062 - RNA, 22 nt, Human
acccauuuguccagcaaagaua

SEQ ID NO: 893063 - RNA, 22 nt, Human
gcuccucugucaaaugagagug

SEQ ID NO: 893064 - RNA, 23 nt, Human
uuuuccuguggagacaugacugg

SEQ ID NO: 893065 - RNA, 22 nt, Human
cuguggcuucuagguccccgau

SEQ ID NO: 893066 - RNA, 22 nt, Human
gcaagaguuuuuucucucuuga

SEQ ID NO: 893067 - RNA, 22 nt, Human
gaaggaagucauuagugcagac

SEQ ID NO: 893068 - RNA, 22 nt, Human
ugaaagaaacagguauauuggg

SEQ ID NO: 893069 - RNA, 23 nt, Human
uugggcucaguggcaggaagagu

SEQ ID NO: 893070 - RNA, 22 nt, Human
ucugcguggcgugguucugugc

SEQ ID NO: 893071 - RNA, 22 nt, Human
ucucaggaauagaguggcagca

SEQ ID NO: 893072 - RNA, 22 nt, Human
cccagcucccauguucuccaau

SEQ ID NO: 893073 - RNA, 22 nt, Human
aaguguuaggguaaaguuggua

SEQ ID NO: 893074 - RNA, 22 nt, Human
uuacuuuaagggugucuuauua

SEQ ID NO: 893075 - RNA, 22 nt, Human
cuccucuggguccugguggcca

SEQ ID NO: 893076 - RNA, 22 nt, Human
acagguuugucugauguaauga

SEQ ID NO: 893077 - RNA, 22 nt, Human
ugucuagggcgagaauguguag

SEQ ID NO: 893078 - RNA, 23 nt, Human
augcucuauuugggauaugacag

SEQ ID NO: 893079 - RNA, 22 nt, Human
aaguggagucccuacaaccagc

SEQ ID NO: 893080 - RNA, 19 nt, Human
ccacuuugcuucucugggu

SEQ ID NO: 893081 - RNA, 22 nt, Human
ggaggaaaugaaaggaggguuu

SEQ ID NO: 893082 - RNA, 20 nt, Human
ggaagccagcauccuugagg

SEQ ID NO: 893083 - RNA, 22 nt, Human
uccccaaaauacauggacgugu

SEQ ID NO: 893084 - RNA, 22 nt, Human
gcacacauucuagccuuuugug

SEQ ID NO: 893085 - RNA, 22 nt, Human
gucauccagacuuugccucugc

SEQ ID NO: 893086 - RNA, 23 nt, Human
auaagccuuuucuuucugcccca

SEQ ID NO: 893087 - RNA, 22 nt, Human
auguauuuuaagauuugccuca

SEQ ID NO: 893088 - RNA, 22 nt, Human
uuuaugcucauccaaggaaggu

SEQ ID NO: 893089 - RNA, 22 nt, Human
ucaagcaaacucugagaaauaa

SEQ ID NO: 893090 - RNA, 22 nt, Human
aauguacaaaagucagccaacu

SEQ ID NO: 893091 - RNA, 22 nt, Human
gagaaucucuuugacaagcaga

SEQ ID NO: 893092 - RNA, 22 nt, Human
aauccuuacugaaugagaaaaa

SEQ ID NO: 893093 - RNA, 22 nt, Human
aaugguaucaccucacagaauu

SEQ ID NO: 893094 - RNA, 22 nt, Human
uaagugaugucuugguuaauga

SEQ ID NO: 893095 - RNA, 22 nt, Human
uagagguguuguugauauagaa

SEQ ID NO: 893096 - RNA, 22 nt, Human
auucuuuauugcugaugguuau

SEQ ID NO: 893097 - RNA, 22 nt, Human
aguuuuaaaugauggugguggu

SEQ ID NO: 893098 - RNA, 22 nt, Human
caaagugcugggauuagugcug

SEQ ID NO: 893099 - RNA, 22 nt, Human
gccagggggucagcaggcacuu

SEQ ID NO: 893100 - RNA, 22 nt, Human
cuccucuuuacccgcauggucu

SEQ ID NO: 893101 - RNA, 22 nt, Human
acaggcauugggauggagguug

SEQ ID NO: 893102 - RNA, 22 nt, Human
cuuucauaaaggaaaugaugag

SEQ ID NO: 893103 - RNA, 22 nt, Human
aacuuucuagagaugaguucgg

SEQ ID NO: 893104 - RNA, 19 nt, Human
uucuggaaacccagguaau

SEQ ID NO: 893105 - RNA, 22 nt, Human
cugaggcuggggaagggaagug

SEQ ID NO: 893106 - RNA, 22 nt, Human
aaugucauauuaguuugugccu

SEQ ID NO: 893107 - RNA, 22 nt, Human
aguuuagaauucauuuugccca

SEQ ID NO: 893108 - RNA, 22 nt, Human
auugucacuuaaaagugcaugu

SEQ ID NO: 893109 - RNA, 22 nt, Human
acagccugcugccugcuucuug

SEQ ID NO: 893110 - RNA, 22 nt, Human
agugucaaaugugugccaagcu

SEQ ID NO: 893111 - RNA, 22 nt, Human
uauaaaauucucaguuuggggu

SEQ ID NO: 893112 - RNA, 22 nt, Human
gccuggcaggggccugggagug

SEQ ID NO: 893113 - RNA, 22 nt, Human
acaacuguuagacacuucuaag

SEQ ID NO: 893114 - RNA, 22 nt, Human
gaaacuuucaugaauauaagau

SEQ ID NO: 893115 - RNA, 22 nt, Human
agucagugaaugguguaugcua

SEQ ID NO: 893116 - RNA, 22 nt, Human
gggcuaaguggaucagucagga

SEQ ID NO: 893117 - RNA, 22 nt, Human
ucuggcccugcugcugugagca

SEQ ID NO: 893118 - RNA, 22 nt, Human
uggguggaauaaaucaguucug

SEQ ID NO: 893119 - RNA, 22 nt, Human
ugggccuggagcccuggagagu

SEQ ID NO: 893120 - RNA, 22 nt, Human
agcuaaugauacaugcuccaca

SEQ ID NO: 893121 - RNA, 22 nt, Human
uggcuggagcauuccuugucuu

SEQ ID NO: 893122 - RNA, 22 nt, Human
caucagugguaacugaaugguu

SEQ ID NO: 893123 - RNA, 22 nt, Human
gugaggacuaguggguuugugc

SEQ ID NO: 893124 - RNA, 22 nt, Human
uuuaucugaccucacuucuuaa

SEQ ID NO: 893125 - RNA, 22 nt, Human
aagugauucuagucaugauucu

SEQ ID NO: 893126 - RNA, 22 nt, Human
ggcuagggagacagagggcaug

SEQ ID NO: 893127 - RNA, 19 nt, Human
uaacaaagucugaagucag

SEQ ID NO: 893128 - RNA, 22 nt, Human
gucacuuugaagcuguuuuuag

SEQ ID NO: 893129 - RNA, 22 nt, Human
acaguuuauaaaaauaaugagg

SEQ ID NO: 893130 - RNA, 22 nt, Human
uguugauuaguguuuagacuua

SEQ ID NO: 893131 - RNA, 22 nt, Human
gaagaagguggcccagggguag

SEQ ID NO: 893132 - RNA, 22 nt, Human
ggacaggccgccucgguggggg

SEQ ID NO: 893133 - RNA, 22 nt, Human
uuucucucuggcccugauuguc

SEQ ID NO: 893134 - RNA, 22 nt, Human
cugagaggugcugguggcugca

SEQ ID NO: 893135 - RNA, 22 nt, Human
uaaauguguguagccaucugug

SEQ ID NO: 893136 - RNA, 22 nt, Human
gaggcuggucagcccuaagauc

SEQ ID NO: 893137 - RNA, 22 nt, Human
uagcaacaauggaaguaacuuc

SEQ ID NO: 893138 - RNA, 22 nt, Human
aggaagaguguuaccuaugggu

SEQ ID NO: 893139 - RNA, 22 nt, Human
uuaacauuugugaagcauuuag

SEQ ID NO: 893140 - RNA, 22 nt, Human
uaguuuaauggucaacuaauga

SEQ ID NO: 893141 - RNA, 19 nt, Human
ugcagggcugcgccugggg

SEQ ID NO: 893142 - RNA, 22 nt, Human
agggcugaagggaggugcucau

SEQ ID NO: 893143 - RNA, 22 nt, Human
acaauuccugagaauacuuguu

SEQ ID NO: 893144 - RNA, 22 nt, Human
cucuuuguaaagaagugguagg

SEQ ID NO: 893145 - RNA, 22 nt, Human
uuaacaaucauaggaccauuua

SEQ ID NO: 893146 - RNA, 22 nt, Human
ucuguauaaggacaaacauuua

SEQ ID NO: 893147 - RNA, 22 nt, Human
ggagugaaguggcgcgaucucg

SEQ ID NO: 893148 - RNA, 22 nt, Human
uccaggagucuagccucaggcc

SEQ ID NO: 893149 - RNA, 22 nt, Human
agacuacauaugccacaugaag

SEQ ID NO: 893150 - RNA, 22 nt, Human
uacacauguuuggcaaguaugu

SEQ ID NO: 893151 - RNA, 22 nt, Human
ucuuauaccccuaaacugcagc

SEQ ID NO: 893152 - RNA, 22 nt, Human
ccuccugggagagcacggaggg

SEQ ID NO: 893153 - RNA, 22 nt, Human
aagggcagcugacagaugcuua

SEQ ID NO: 893154 - RNA, 19 nt, Human
ggccaccucucuucccagg

SEQ ID NO: 893155 - RNA, 22 nt, Human
uuagagaauuccaaaugacuac

SEQ ID NO: 893156 - RNA, 22 nt, Human
uggcucagagagggagugugga

SEQ ID NO: 893157 - RNA, 23 nt, Human
uggagaauguguuuacuucgugu

SEQ ID NO: 893158 - RNA, 22 nt, Human
cagcaguggaacuacccaggga

SEQ ID NO: 893159 - RNA, 22 nt, Human
ugaaacugaaagguauuuauag

SEQ ID NO: 893160 - RNA, 22 nt, Human
acaguggggucuuaauagaaca

SEQ ID NO: 893161 - RNA, 22 nt, Human
aaaccuauuggcaagaauaaua

SEQ ID NO: 893162 - RNA, 22 nt, Human
aguuucuucauccaaaaaaugg

SEQ ID NO: 893163 - RNA, 22 nt, Human
ugagcagggacuuuggagucug

SEQ ID NO: 893164 - RNA, 17 nt, Human
gcacugagccacaguuu

SEQ ID NO: 893165 - RNA, 22 nt, Human
cucugugugcuggugggguccu

SEQ ID NO: 893166 - RNA, 22 nt, Human
ugggacuugccucgagggcugc

SEQ ID NO: 893167 - RNA, 22 nt, Human
aaagugcagcugaaaacauccu

SEQ ID NO: 893168 - RNA, 22 nt, Human
uagcucugugcucuggaucugu

SEQ ID NO: 893169 - RNA, 22 nt, Human
ccugaucaaagaggucagcauu

SEQ ID NO: 893170 - RNA, 22 nt, Human
aauguuucauuuaguugucucc

SEQ ID NO: 893171 - RNA, 22 nt, Human
ccagugcugaaugaggaggucu

SEQ ID NO: 893172 - RNA, 22 nt, Human
ggccugcucuguuuagaggggg

SEQ ID NO: 893173 - RNA, 22 nt, Human
auuccacagaggacuccgauug

SEQ ID NO: 893174 - RNA, 22 nt, Human
agcguggauguggggcgcggcu

SEQ ID NO: 893175 - RNA, 22 nt, Human
cuccucucaaaaguagguugac

SEQ ID NO: 893176 - RNA, 22 nt, Human
uagaauacaguuuaagaacuac

SEQ ID NO: 893177 - RNA, 22 nt, Human
ucaguguguacacugagcauuu

SEQ ID NO: 893178 - RNA, 22 nt, Human
cuugccagcacuuggccagcug

SEQ ID NO: 893179 - RNA, 22 nt, Human
ucaucuugcugccauugcuuua

SEQ ID NO: 893180 - RNA, 22 nt, Human
uauaggaaugacgucauuuccu

SEQ ID NO: 893181 - RNA, 22 nt, Human
auaguucuagaccuauaguucu

SEQ ID NO: 893182 - RNA, 22 nt, Human
caggcuccucacucaugcuccc

SEQ ID NO: 893183 - RNA, 21 nt, Human
guucugaguuagaguuggcca

SEQ ID NO: 893184 - RNA, 22 nt, Human
ugcaggcucucugcugccagau

SEQ ID NO: 893185 - RNA, 23 nt, Human
agagcuuuccaguuucuugguga

SEQ ID NO: 893186 - RNA, 22 nt, Human
acugccugagcuauuggaaaag

SEQ ID NO: 893187 - RNA, 22 nt, Human
auguuucuaguuguaugucacu

SEQ ID NO: 893188 - RNA, 22 nt, Human
aggagcuggccacuaggaugca

SEQ ID NO: 893189 - RNA, 22 nt, Human
uccugagaaggcacagcuugca

SEQ ID NO: 893190 - RNA, 19 nt, Human
agggaaggauucugucauu

SEQ ID NO: 893191 - RNA, 19 nt, Human
uuucuguuugcuucugguu

SEQ ID NO: 893192 - RNA, 19 nt, Human
cccaggagucuggcugguu

SEQ ID NO: 893193 - RNA, 23 nt, Human
gagcuuagucuacucagacaucc

SEQ ID NO: 893194 - RNA, 22 nt, Human
ucuuuuaagccucuggcauagg

SEQ ID NO: 893195 - RNA, 22 nt, Human
agaauuuguaaaagauaagaca

SEQ ID NO: 893196 - RNA, 22 nt, Human
acaucuuugcucuuauagagcu

SEQ ID NO: 893197 - RNA, 18 nt, Human
ucauuauuguuucuggag

SEQ ID NO: 893198 - RNA, 22 nt, Human
aguggcugacaacuggguuaac

SEQ ID NO: 893199 - RNA, 22 nt, Human
ugcugcaguguuugcugaaguu

SEQ ID NO: 893200 - RNA, 18 nt, Human
cagaagcaggcagugcag

SEQ ID NO: 893201 - RNA, 22 nt, Human
uccccaggacuaaguugcaauc

SEQ ID NO: 893202 - RNA, 22 nt, Human
ggcuggaggagaauggguguga

SEQ ID NO: 893203 - RNA, 18 nt, Human
cugagugaugauggggug

SEQ ID NO: 893204 - RNA, 22 nt, Human
guauacauagaugaugaacaag

SEQ ID NO: 893205 - RNA, 22 nt, Human
uuagaaccaccuggagagcuuu

SEQ ID NO: 893206 - RNA, 22 nt, Human
cucucugguacauagaguuugg

SEQ ID NO: 893207 - RNA, 22 nt, Human
uuguauuucuuccggucucauu

SEQ ID NO: 893208 - RNA, 23 nt, Human
uuguccugccgaucucugagaau

SEQ ID NO: 893209 - RNA, 22 nt, Human
acuugucuggcagaucaugcaa

SEQ ID NO: 893210 - RNA, 22 nt, Human
ggcaggcucagcagccaaggag

SEQ ID NO: 893211 - RNA, 22 nt, Human
acauagcauguuuggacacaug

SEQ ID NO: 893212 - RNA, 22 nt, Human
ccuguguggccgcacugcuccc

SEQ ID NO: 893213 - RNA, 22 nt, Human
uacaacagaaguguuuauuuag

SEQ ID NO: 893214 - RNA, 22 nt, Human
ggcagccuugagggaggccugg

SEQ ID NO: 893215 - RNA, 22 nt, Human
cagcccagccuugucucuuuau

SEQ ID NO: 893216 - RNA, 22 nt, Human
uccaaauauagaugaguuguaa

SEQ ID NO: 893217 - RNA, 22 nt, Human
aauggcuuugacauuuucaaau

SEQ ID NO: 893218 - RNA, 22 nt, Human
guacacagagugguggaagaaa

SEQ ID NO: 893219 - RNA, 22 nt, Human
uucugugguugaaaggagagau

SEQ ID NO: 893220 - RNA, 22 nt, Human
uuuccaagcugucuuggcccac

SEQ ID NO: 893221 - RNA, 22 nt, Human
uucucaggaacucagugucagc

SEQ ID NO: 893222 - RNA, 22 nt, Human
uugcacagaguggauauucagu

SEQ ID NO: 893223 - RNA, 22 nt, Human
acauauaagggaucagugacag

SEQ ID NO: 893224 - RNA, 22 nt, Human
guguuuccucacuucucugacu

SEQ ID NO: 893225 - RNA, 22 nt, Human
aaggcauggcaggguuuacaca

SEQ ID NO: 893226 - RNA, 22 nt, Human
cacauugaaccauauauuagug

SEQ ID NO: 893227 - RNA, 22 nt, Human
cagucccagacauaguaaggga

SEQ ID NO: 893228 - RNA, 22 nt, Human
cagggcaguaacgggaacaucu

SEQ ID NO: 893229 - RNA, 22 nt, Human
gacaauaaaaugaucuuacagu

SEQ ID NO: 893230 - RNA, 22 nt, Human
agucugaguuaguggaaaugua

SEQ ID NO: 893231 - RNA, 22 nt, Human
uuuucugacucuauugagguau

SEQ ID NO: 893232 - RNA, 20 nt, Human
agggucugcuggguaggaca

SEQ ID NO: 893233 - RNA, 22 nt, Human
aucaucaugcccacuugagacu

SEQ ID NO: 893234 - RNA, 22 nt, Human
ucucauuugugugcaauucaga

SEQ ID NO: 893235 - RNA, 22 nt, Human
uggaauaacucaccaaggucau

SEQ ID NO: 893236 - RNA, 22 nt, Human
gcggagggcgagcccgcggagc

SEQ ID NO: 893237 - RNA, 22 nt, Human
ggaaucuuuuucauaagccuca

SEQ ID NO: 893238 - RNA, 22 nt, Human
cugugguggcacagcgggcugg

SEQ ID NO: 893239 - RNA, 22 nt, Human
cagcaagaggguaagguugaag

SEQ ID NO: 893240 - RNA, 22 nt, Human
ucuuaugcauauucauaacaca

SEQ ID NO: 893241 - RNA, 22 nt, Human
guuuggugguagcauuggcuau

SEQ ID NO: 893242 - RNA, 22 nt, Human
ggcgggugcacagacccuuccc

SEQ ID NO: 893243 - RNA, 22 nt, Human
aaugcaaagcaagcagagauuu

SEQ ID NO: 893244 - RNA, 17 nt, Human
uggcccuagacuccagc

SEQ ID NO: 893245 - RNA, 22 nt, Human
ucagcacugucuuuuauuugaa

SEQ ID NO: 893246 - RNA, 22 nt, Human
gaggccacauuacuuggugggu

SEQ ID NO: 893247 - RNA, 22 nt, Human
ucacauaaauuauacaauuuca

SEQ ID NO: 893248 - RNA, 22 nt, Human
uucacaguauagguuuccagcg

SEQ ID NO: 893249 - RNA, 22 nt, Human
cuuguaauagauaggaucaaau

SEQ ID NO: 893250 - RNA, 22 nt, Human
cugcccugcccaggccuugggc

SEQ ID NO: 893251 - RNA, 22 nt, Human
caguggaaacuaugcugcugga

SEQ ID NO: 893252 - RNA, 22 nt, Human
cugaaucauggucauuaguuua

SEQ ID NO: 893253 - RNA, 22 nt, Human
cagcucauuccucaaucuagga

SEQ ID NO: 893254 - RNA, 22 nt, Human
cugggcuggcgcauccgacacg

SEQ ID NO: 893255 - RNA, 22 nt, Human
aguauaugugcacauaugcaug

SEQ ID NO: 893256 - RNA, 22 nt, Human
cugagccagcgggcucacuuuu

SEQ ID NO: 893257 - RNA, 22 nt, Human
cagggauggccuggcgggccac

SEQ ID NO: 893258 - RNA, 22 nt, Human
cugagguagcugugaauguucu

SEQ ID NO: 893259 - RNA, 22 nt, Human
cucuuccuacagucugcuaugc

SEQ ID NO: 893260 - RNA, 22 nt, Human
uggaaugaucugauguauuuua

SEQ ID NO: 893261 - RNA, 22 nt, Human
ugcauuuguucagugaaauguu

SEQ ID NO: 893262 - RNA, 22 nt, Human
cucccugggcagauguggcucu

SEQ ID NO: 893263 - RNA, 22 nt, Human
caaauagacucuagaauuuauu

SEQ ID NO: 893264 - RNA, 22 nt, Human
uacaguaaccuuauuugucauu

SEQ ID NO: 893265 - RNA, 22 nt, Human
guaguggagucuccuguccugg

SEQ ID NO: 893266 - RNA, 22 nt, Human
caaaaaacacagaugucugugu

SEQ ID NO: 893267 - RNA, 18 nt, Human
cagcugcaggcucaggac

SEQ ID NO: 893268 - RNA, 22 nt, Human
gagggugucugcguaacuggca

SEQ ID NO: 893269 - RNA, 22 nt, Human
aaugcuuucucagaguccuuca

SEQ ID NO: 893270 - RNA, 22 nt, Human
ugucaaacugugacuucuaaug

SEQ ID NO: 893271 - RNA, 22 nt, Human
agagccacuccaggacucaggg

SEQ ID NO: 893272 - RNA, 22 nt, Human
auacagauugcuauacuuacaa

SEQ ID NO: 893273 - RNA, 22 nt, Human
cacaugcauaaggauaauuacu

SEQ ID NO: 893274 - RNA, 22 nt, Human
acagggggucccauggccugga

SEQ ID NO: 893275 - RNA, 22 nt, Human
gguggacuguguuggaguugac

SEQ ID NO: 893276 - RNA, 22 nt, Human
ucuguggcugugcugggccaga

SEQ ID NO: 893277 - RNA, 22 nt, Human
uuuaaaugcagacguugauuca

SEQ ID NO: 893278 - RNA, 22 nt, Human
ucucaugcuguagugcacuaac

SEQ ID NO: 893279 - RNA, 22 nt, Human
cuaccuucaaguuccucccucu

SEQ ID NO: 893280 - RNA, 18 nt, Human
agcaugagagaggcugug

SEQ ID NO: 893281 - RNA, 19 nt, Human
gcuugcugcuagguaggga

SEQ ID NO: 893282 - RNA, 22 nt, Human
cuuuccuuaauaagcagguaua

SEQ ID NO: 893283 - RNA, 22 nt, Human
ucuacauuuucuuuauguacau

SEQ ID NO: 893284 - RNA, 22 nt, Human
cugcauguuuucuuaauuguga

SEQ ID NO: 893285 - RNA, 22 nt, Human
auggcagcagcuuuagcugugg

SEQ ID NO: 893286 - RNA, 22 nt, Human
aagaccauuuaauggagaaaga

SEQ ID NO: 893287 - RNA, 22 nt, Human
gucuucaauugcauuugauggg

SEQ ID NO: 893288 - RNA, 22 nt, Human
ugguccagucguuccuuuccuu

SEQ ID NO: 893289 - RNA, 22 nt, Human
gugaagcauaacugaaggauuu

SEQ ID NO: 893290 - RNA, 22 nt, Human
acaguucagacaaguguuccau

SEQ ID NO: 893291 - RNA, 22 nt, Human
ugccacagcagugcuuugacag

SEQ ID NO: 893292 - RNA, 22 nt, Human
aaauguucauuucucacucaca

SEQ ID NO: 893293 - RNA, 18 nt, Human
uugugaaauauuggaguc

SEQ ID NO: 893294 - RNA, 22 nt, Human
aagaaucugacauaauuuccug

SEQ ID NO: 893295 - RNA, 22 nt, Human
uauuguacauuucaaaauugcu

SEQ ID NO: 893296 - RNA, 22 nt, Human
cucuggaguucuucaagcuacu

SEQ ID NO: 893297 - RNA, 22 nt, Human
ccuggcagguagcauugaggag

SEQ ID NO: 893298 - RNA, 22 nt, Human
ggaggccaucagggagggcauu

SEQ ID NO: 893299 - RNA, 23 nt, Human
cccaggcuacaaauuaugcucug

SEQ ID NO: 893300 - RNA, 22 nt, Human
ggcagguggauuuucuacucua

SEQ ID NO: 893301 - RNA, 22 nt, Human
ccugguggcuucuggguggacg

SEQ ID NO: 893302 - RNA, 19 nt, Human
gccugggaugggcagaacu

SEQ ID NO: 893303 - RNA, 22 nt, Human
aguguggaccuucacacagaga

SEQ ID NO: 893304 - RNA, 22 nt, Human
acaaagaucuugcuuuccuacu

SEQ ID NO: 893305 - RNA, 22 nt, Human
caguguuucugugcccaguggg

SEQ ID NO: 893306 - RNA, 22 nt, Human
aaaagggacuacucucagcucc

SEQ ID NO: 893307 - RNA, 22 nt, Human
guguccagagaacugugggagc

SEQ ID NO: 893308 - RNA, 21 nt, Human
acaggagaccgccuggcaguc

SEQ ID NO: 893309 - RNA, 19 nt, Human
uucauaacuuuuauauccu

SEQ ID NO: 893310 - RNA, 22 nt, Human
ucuaguuuugguaugagaugca

SEQ ID NO: 893311 - RNA, 22 nt, Human
gucuuccuaauuugcuauuagg

SEQ ID NO: 893312 - RNA, 22 nt, Human
auugugaauugagaguacuucu

SEQ ID NO: 893313 - RNA, 22 nt, Human
acagguguugacucacaggccc

SEQ ID NO: 893314 - RNA, 23 nt, Human
ucuuuacagcagcaggauuugga

SEQ ID NO: 893315 - RNA, 22 nt, Human
ccugucaguugcugucagggau

SEQ ID NO: 893316 - RNA, 22 nt, Human
ucucacacuucuguguugcaca

SEQ ID NO: 893317 - RNA, 22 nt, Human
ucuaguucuagaucccugagga

SEQ ID NO: 893318 - RNA, 22 nt, Human
gcaucuuuagccucuccguggc

SEQ ID NO: 893319 - RNA, 22 nt, Human
caggcugggcugguguuagagu

SEQ ID NO: 893320 - RNA, 22 nt, Human
caguauuuuuaagcugcuuugu

SEQ ID NO: 893321 - RNA, 22 nt, Human
acaauguaggcugaaaaagcuu

SEQ ID NO: 893322 - RNA, 22 nt, Human
aaucagaggaagucaacggauc

SEQ ID NO: 893323 - RNA, 22 nt, Human
aacugaaaucaaucagugauuc

SEQ ID NO: 893324 - RNA, 22 nt, Human
uuugaaaggaaguuaauacuuu

SEQ ID NO: 893325 - RNA, 22 nt, Human
gccagagccacuuuugggugau

SEQ ID NO: 893326 - RNA, 22 nt, Human
guaggcagaccaguggaugggu

SEQ ID NO: 893327 - RNA, 22 nt, Human
uagugucuucaggagauaugag

SEQ ID NO: 893328 - RNA, 22 nt, Human
aucuucaauugaaaacuagccu

SEQ ID NO: 893329 - RNA, 22 nt, Human
aacauaucauaggaugucauug

SEQ ID NO: 893330 - RNA, 22 nt, Human
cacuccagccauuuguccccag

SEQ ID NO: 893331 - RNA, 22 nt, Human
uuugcacacauucuuagaaaug

SEQ ID NO: 893332 - RNA, 22 nt, Human
gcuccaggccacggcuucuugg

SEQ ID NO: 893333 - RNA, 23 nt, Human
aggaagcuaaguguggcugcgga

SEQ ID NO: 893334 - RNA, 22 nt, Human
auuaaauuagcaaacugugaaa

SEQ ID NO: 893335 - RNA, 22 nt, Human
agcagcaggauuuucguuggga

SEQ ID NO: 893336 - RNA, 22 nt, Human
uucuccucagcaaggcagcuuu

SEQ ID NO: 893337 - RNA, 22 nt, Human
aaggcagccgugugacugcaug

SEQ ID NO: 893338 - RNA, 22 nt, Human
gauaaugugccgauaauuucua

SEQ ID NO: 893339 - RNA, 22 nt, Human
cugcaggcauuuauucaugcaa

SEQ ID NO: 893340 - RNA, 22 nt, Human
guggccagugggaaugggcuca

SEQ ID NO: 893341 - RNA, 22 nt, Human
aauauguuuauaagauaucuuc

SEQ ID NO: 893342 - RNA, 23 nt, Human
ggggaaguggcagugagugaggc

SEQ ID NO: 893343 - RNA, 22 nt, Human
ccgggccucgggacaccgggua

SEQ ID NO: 893344 - RNA, 22 nt, Human
aucauucaucuuauugccaguc

SEQ ID NO: 893345 - RNA, 18 nt, Human
ugagcaggggcugaccuu

SEQ ID NO: 893346 - RNA, 22 nt, Human
aauaccuugcuguagccacgca

SEQ ID NO: 893347 - RNA, 22 nt, Human
acguagauuccuccaugcgcag

SEQ ID NO: 893348 - RNA, 22 nt, Human
caauccaucaauuacacaggcu

SEQ ID NO: 893349 - RNA, 21 nt, Human
ugcagcugacacugguaugcc

SEQ ID NO: 893350 - RNA, 22 nt, Human
uaguaacaacaacuagcauuuu

SEQ ID NO: 893351 - RNA, 22 nt, Human
gaaggggacuggcagcugcaga

SEQ ID NO: 893352 - RNA, 22 nt, Human
ucacaaagagaauugugggugu

SEQ ID NO: 893353 - RNA, 22 nt, Human
agacucugugcuccuugcuuuc

SEQ ID NO: 893354 - RNA, 22 nt, Human
uuacacaaguucuuuaaccuau

SEQ ID NO: 893355 - RNA, 21 nt, Human
uguaacaaguucccuagguga

SEQ ID NO: 893356 - RNA, 22 nt, Human
aaucauaauucaaauaagcuua

SEQ ID NO: 893357 - RNA, 21 nt, Human
aggggaaguagaguuuugauu

SEQ ID NO: 893358 - RNA, 21 nt, Human
aggcucccagaaaugggcauc

SEQ ID NO: 893359 - RNA, 22 nt, Human
agaccaggucuuuauggcucca

SEQ ID NO: 893360 - RNA, 22 nt, Human
ggcuggaagguagaagaugagg

SEQ ID NO: 893361 - RNA, 19 nt, Human
aggugugggggcugcagac

SEQ ID NO: 893362 - RNA, 22 nt, Human
cguauacaugaagacauugcug

SEQ ID NO: 893363 - RNA, 20 nt, Human
auguaugcaaaugucuucca

SEQ ID NO: 893364 - RNA, 22 nt, Human
uaggaauguuuuuaucaacuua

SEQ ID NO: 893365 - RNA, 23 nt, Human
gaaauguuucuugauuaauccua

SEQ ID NO: 893366 - RNA, 22 nt, Human
gcacagagacaguccugagauc

SEQ ID NO: 893367 - RNA, 17 nt, Human
auacaaagccauaaacc

SEQ ID NO: 893368 - RNA, 22 nt, Human
gaagugugaaggugauguggag

SEQ ID NO: 893369 - RNA, 22 nt, Human
gccuggcugccggccuuggcaa

SEQ ID NO: 893370 - RNA, 22 nt, Human
cugggccacuuccucaggggaa

SEQ ID NO: 893371 - RNA, 22 nt, Human
uaugucuuacuacagcaauuaa

SEQ ID NO: 893372 - RNA, 22 nt, Human
ugcagcugugccugaaaaguac

SEQ ID NO: 893373 - RNA, 22 nt, Human
agugccuuggcugugaugggga

SEQ ID NO: 893374 - RNA, 22 nt, Human
acacagguuaaaauaauuggga

SEQ ID NO: 893375 - RNA, 22 nt, Human
acaaaugccauauauaaauucu

SEQ ID NO: 893376 - RNA, 22 nt, Human
cauguacaugccuacuaucaau

SEQ ID NO: 893377 - RNA, 22 nt, Human
uuccaaaguuaguuauuagaaa

SEQ ID NO: 893378 - RNA, 22 nt, Human
gacaacaauaauguggagcuga

SEQ ID NO: 893379 - RNA, 22 nt, Human
cucucagcaggaaagcaugcaa

SEQ ID NO: 893380 - RNA, 22 nt, Human
gggcuccaaggaggccagccug

SEQ ID NO: 893381 - RNA, 22 nt, Human
uccaggcucagcacuugcuacu

SEQ ID NO: 893382 - RNA, 22 nt, Human
aggaagugacuagguaacccaa

SEQ ID NO: 893383 - RNA, 22 nt, Human
ggagaggguagggguccugccc

SEQ ID NO: 893384 - RNA, 22 nt, Human
cucaggauccaucuccugcccu

SEQ ID NO: 893385 - RNA, 22 nt, Human
agguugggaugagugggugagc

SEQ ID NO: 893386 - RNA, 22 nt, Human
aguuuucuuucaucuaucagca

SEQ ID NO: 893387 - RNA, 21 nt, Human
uucugggaaaugagcuggggc

SEQ ID NO: 893388 - RNA, 22 nt, Human
uaucauuuuacugugacauuuu

SEQ ID NO: 893389 - RNA, 22 nt, Human
gggcagaggcucuggcccaucc

SEQ ID NO: 893390 - RNA, 22 nt, Human
ugcaguguucagugaucucucc

SEQ ID NO: 893391 - RNA, 22 nt, Human
cccugcuagaaccuccaacaug

SEQ ID NO: 893392 - RNA, 22 nt, Human
caaagugcuaggauuacaggcc

SEQ ID NO: 893393 - RNA, 22 nt, Human
ggagugacucacagcugggaca

SEQ ID NO: 893394 - RNA, 22 nt, Human
aggcuguguuuaagugguaaug

SEQ ID NO: 893395 - RNA, 22 nt, Human
gggcccuggacguggcggcaga

SEQ ID NO: 893396 - RNA, 22 nt, Human
aaacaggcacauaguaacauuu

SEQ ID NO: 893397 - RNA, 22 nt, Human
gaggcuggugguuaguuccauu

SEQ ID NO: 893398 - RNA, 22 nt, Human
aacugcaaaaaugguagucuua

SEQ ID NO: 893399 - RNA, 22 nt, Human
agagggaaauccaggagugcuu

SEQ ID NO: 893400 - RNA, 22 nt, Human
ugcuggcaggcaccuccugggg

SEQ ID NO: 893401 - RNA, 17 nt, Human
uccagccuccucugcug

SEQ ID NO: 893402 - RNA, 22 nt, Human
uggugguuaugcgcuuuguggg

SEQ ID NO: 893403 - RNA, 22 nt, Human
ggccagcuuauuagcucagagg

SEQ ID NO: 893404 - RNA, 22 nt, Human
uaaaguucagugcaugaaugug

SEQ ID NO: 893405 - RNA, 22 nt, Human
uaacuuugaagggaauuuuacu

SEQ ID NO: 893406 - RNA, 22 nt, Human
agggcagagacaugcuuccuga

SEQ ID NO: 893407 - RNA, 22 nt, Human
ugucaugaguuauuucauagga

SEQ ID NO: 893408 - RNA, 18 nt, Human
gggcucuggcaucugggu

SEQ ID NO: 893409 - RNA, 22 nt, Human
ucuucacacacaguccucuuuc

SEQ ID NO: 893410 - RNA, 22 nt, Human
ucagcuggcaguucagaggcug

SEQ ID NO: 893411 - RNA, 22 nt, Human
gcagcccaauggacugagacag

SEQ ID NO: 893412 - RNA, 22 nt, Human
auggcuggugauacuggaguga

SEQ ID NO: 893413 - RNA, 22 nt, Human
gaaagugcuaggaaguguuaga

SEQ ID NO: 893414 - RNA, 21 nt, Human
agcaggcaaaggugaagucuu

SEQ ID NO: 893415 - RNA, 22 nt, Human
ucccaggaaugucugaaaguga

SEQ ID NO: 893416 - RNA, 22 nt, Human
gagcugcaugcaacuguuuaaa

SEQ ID NO: 893417 - RNA, 22 nt, Human
ugcauggauauauacccuaggc

SEQ ID NO: 893418 - RNA, 22 nt, Human
acuccugggugcugaccagcgu

SEQ ID NO: 893419 - RNA, 22 nt, Human
aaucuagauucggaucaaaggg

SEQ ID NO: 893420 - RNA, 22 nt, Human
ggcacagcucaggucccagcuc

SEQ ID NO: 893421 - RNA, 22 nt, Human
aacuacaauauguauguaugua

SEQ ID NO: 893422 - RNA, 22 nt, Human
cuuuaugaaccuguucagcuug

SEQ ID NO: 893423 - RNA, 23 nt, Human
ucagaagugggauacaaagcuga

SEQ ID NO: 893424 - RNA, 22 nt, Human
aagcauuuuguuuuaagaauga

SEQ ID NO: 893425 - RNA, 22 nt, Human
aaagugucuuacccagggagaa

SEQ ID NO: 893426 - RNA, 22 nt, Human
caguccuguguuaaacaagagc

SEQ ID NO: 893427 - RNA, 22 nt, Human
uuggaaaugcauuuguuauuau

SEQ ID NO: 893428 - RNA, 22 nt, Human
cauuuguuuagaagucuuuaua

SEQ ID NO: 893429 - RNA, 22 nt, Human
gcugcccugugguccagcaggu

SEQ ID NO: 893430 - RNA, 21 nt, Human
uuaauuuauucaugauagcua

SEQ ID NO: 893431 - RNA, 22 nt, Human
cuggaaagcugcaggacccaga

SEQ ID NO: 893432 - RNA, 20 nt, Human
ucuguuauugcauguacaua

SEQ ID NO: 893433 - RNA, 22 nt, Human
gaggagcaugggaaggcucugg

SEQ ID NO: 893434 - RNA, 22 nt, Human
ggaagggaaaauucauucggcu

SEQ ID NO: 893435 - RNA, 22 nt, Human
cuggguggaaagugcugagaau

SEQ ID NO: 893436 - RNA, 23 nt, Human
ucucugagccauagcagucccaa

SEQ ID NO: 893437 - RNA, 20 nt, Human
auacaaagagauugauguau

SEQ ID NO: 893438 - RNA, 22 nt, Human
aaauauuagggagaacagggac

SEQ ID NO: 893439 - RNA, 22 nt, Human
ugcaucaugcggaacuggcuuu

SEQ ID NO: 893440 - RNA, 22 nt, Human
uuauuaauaaaguggcauagcc

SEQ ID NO: 893441 - RNA, 22 nt, Human
augcuguguauuuuacucuuuc

SEQ ID NO: 893442 - RNA, 22 nt, Human
agaagccagauuguagugggac

SEQ ID NO: 893443 - RNA, 22 nt, Human
gacccuuucacagcugcugggg

SEQ ID NO: 893444 - RNA, 22 nt, Human
ugcaggccaggguagggacuag

SEQ ID NO: 893445 - RNA, 22 nt, Human
uucccagugaggaagcaaugca

SEQ ID NO: 893446 - RNA, 22 nt, Human
gcucacugccugggcaacaaga

SEQ ID NO: 893447 - RNA, 22 nt, Human
agcagcucaaagccugcaagga

SEQ ID NO: 893448 - RNA, 22 nt, Human
ccagaugguauaguagggagag

SEQ ID NO: 893449 - RNA, 22 nt, Human
guggggagcagccuuagccccu

SEQ ID NO: 893450 - RNA, 22 nt, Human
uuggcuucuuauaaugcaauag

SEQ ID NO: 893451 - RNA, 22 nt, Human
uuaguucucaugaauuuuaagu

SEQ ID NO: 893452 - RNA, 22 nt, Human
cagagccccccuucugaucaca

SEQ ID NO: 893453 - RNA, 22 nt, Human
augugcaggauccaggcuccua

SEQ ID NO: 893454 - RNA, 22 nt, Human
aacuacuaccaguaguaguagu

SEQ ID NO: 893455 - RNA, 22 nt, Human
ugucucccaggugugcccagug

SEQ ID NO: 893456 - RNA, 22 nt, Human
gggcuccaaaaucuaugucuuc

SEQ ID NO: 893457 - RNA, 22 nt, Human
uagacuuugauauuguacaccc

SEQ ID NO: 893458 - RNA, 22 nt, Human
ugagaagcaguuucaguaagaa

SEQ ID NO: 893459 - RNA, 22 nt, Human
aagcagggugucuugacccaug

SEQ ID NO: 893460 - RNA, 17 nt, Human
uuuuggugaguuguuuc

SEQ ID NO: 893461 - RNA, 22 nt, Human
uaucagauaaucuuuuacaagc

SEQ ID NO: 893462 - RNA, 20 nt, Human
agcacauuaaacauacuccu

SEQ ID NO: 893463 - RNA, 22 nt, Human
cugggacccccacugcguagcu

SEQ ID NO: 893464 - RNA, 22 nt, Human
ggcaggcacugugcuaggcgcu

SEQ ID NO: 893465 - RNA, 22 nt, Human
ggagaaagucagcuccaagcag

SEQ ID NO: 893466 - RNA, 22 nt, Human
ugcuucaugagguaguggcagu

SEQ ID NO: 893467 - RNA, 22 nt, Human
gcugucagcgcccaaggagcuc

SEQ ID NO: 893468 - RNA, 22 nt, Human
uggguacuccuauuaguucagu

SEQ ID NO: 893469 - RNA, 22 nt, Human
agagggccauaggugcauaguu

SEQ ID NO: 893470 - RNA, 22 nt, Human
gcaaagaaaugucagugagagg

SEQ ID NO: 893471 - RNA, 22 nt, Human
acagaaguggcuucaaagagca

SEQ ID NO: 893472 - RNA, 22 nt, Human
cagaggccccauuggcugugcg

SEQ ID NO: 893473 - RNA, 22 nt, Human
guucucucucuugccugggugg

SEQ ID NO: 893474 - RNA, 22 nt, Human
aguguacaucagaacauaucaa

SEQ ID NO: 893475 - RNA, 22 nt, Human
uggaauaaagcagcuuuaguuc

SEQ ID NO: 893476 - RNA, 22 nt, Human
agagaaggguagcccauucucc

SEQ ID NO: 893477 - RNA, 22 nt, Human
caagaauuaagaauuuugaugu

SEQ ID NO: 893478 - RNA, 20 nt, Human
cagugcuuccuccuuucuuu

SEQ ID NO: 893479 - RNA, 22 nt, Human
ucagggcaagauugguuaauaa

SEQ ID NO: 893480 - RNA, 22 nt, Human
agaaauuauuagugaauagucu

SEQ ID NO: 893481 - RNA, 22 nt, Human
auaacugagagcaaucuuucuu

SEQ ID NO: 893482 - RNA, 22 nt, Human
augaacaauaaaauagaucaca

SEQ ID NO: 893483 - RNA, 22 nt, Human
gcuguuuccccuucacaguggc

SEQ ID NO: 893484 - RNA, 22 nt, Human
ccagcuccgggaguugcugcug

SEQ ID NO: 893485 - RNA, 22 nt, Human
uuuacuaaguacuuguaucccu

SEQ ID NO: 893486 - RNA, 22 nt, Human
gcugucuugcucacucuugcag

SEQ ID NO: 893487 - RNA, 22 nt, Human
cugcugauucuuaaaugugguu

SEQ ID NO: 893488 - RNA, 22 nt, Human
ggagcugucuguagggcacagg

SEQ ID NO: 893489 - RNA, 22 nt, Human
ggaggcugcugccucacguggg

SEQ ID NO: 893490 - RNA, 22 nt, Human
cccugcagcuuuugcauaguca

SEQ ID NO: 893491 - RNA, 21 nt, Human
gagcauggcuuacaucagcag

SEQ ID NO: 893492 - RNA, 21 nt, Human
cacaccaggcaugucuugagc

SEQ ID NO: 893493 - RNA, 22 nt, Human
ggcagcugugaagugccucaca

SEQ ID NO: 893494 - RNA, 18 nt, Human
uggagcugagugcugugc

SEQ ID NO: 893495 - RNA, 17 nt, Human
acuccuggucugaaggg

SEQ ID NO: 893496 - RNA, 22 nt, Human
agccagagauugagaugcaggc

SEQ ID NO: 893497 - RNA, 20 nt, Human
ucacagaaacaaauagagaa

SEQ ID NO: 893498 - RNA, 23 nt, Human
uggaucaauaagccugacugugu

SEQ ID NO: 893499 - RNA, 22 nt, Human
gaguggcuauugauccgugaug

SEQ ID NO: 893500 - RNA, 22 nt, Human
agaacauggauugucaaaggua

SEQ ID NO: 893501 - RNA, 18 nt, Human
acuauugagguauucuug

SEQ ID NO: 893502 - RNA, 22 nt, Human
uggcuucucccuccccaucuag

SEQ ID NO: 893503 - RNA, 22 nt, Human
augugucuuauuugauuccaca

SEQ ID NO: 893504 - RNA, 22 nt, Human
gcuguucugcgucccaggcugg

SEQ ID NO: 893505 - RNA, 22 nt, Human
agugcgugggcaggcauggaag

SEQ ID NO: 893506 - RNA, 17 nt, Human
caggaaaauaugaguga

SEQ ID NO: 893507 - RNA, 22 nt, Human
augcuguuaagaaucucuuccu

SEQ ID NO: 893508 - RNA, 22 nt, Human
aggccagcuuccagaggggcag

SEQ ID NO: 893509 - RNA, 22 nt, Human
cagaaagaccugggcucaagag

SEQ ID NO: 893510 - RNA, 22 nt, Human
uguggucuccugucuuggccuu

SEQ ID NO: 893511 - RNA, 22 nt, Human
uucauauauaugcacuacguac

SEQ ID NO: 893512 - RNA, 22 nt, Human
cuggagcaggcuugucccagcu

SEQ ID NO: 893513 - RNA, 22 nt, Human
uaucacauaguguuuaguaaau

SEQ ID NO: 893514 - RNA, 22 nt, Human
cucugacagguggcauuaucuc

SEQ ID NO: 893515 - RNA, 22 nt, Human
gagccccaggacagcucuaguu

SEQ ID NO: 893516 - RNA, 19 nt, Human
agcagccaucgaccaugga

SEQ ID NO: 893517 - RNA, 22 nt, Human
agcagcauauugugucuucaua

SEQ ID NO: 893518 - RNA, 22 nt, Human
agagaaaugggguaaucuuuca

SEQ ID NO: 893519 - RNA, 22 nt, Human
uggcaagcucguuugggucaga

SEQ ID NO: 893520 - RNA, 22 nt, Human
ugcuggcugucccuaccuggcu

SEQ ID NO: 893521 - RNA, 22 nt, Human
caaaaugaugugauuuuauugu

SEQ ID NO: 893522 - RNA, 22 nt, Human
gugugcugcccaacucgcagau

SEQ ID NO: 893523 - RNA, 22 nt, Human
cuucuagggcaucaugacaaau

SEQ ID NO: 893524 - RNA, 22 nt, Human
cucugggugucuuaggagcuca

SEQ ID NO: 893525 - RNA, 22 nt, Human
uucuaggaugcugaugagaccc

SEQ ID NO: 893526 - RNA, 22 nt, Human
cucugggcaggacgccaggccu

SEQ ID NO: 893527 - RNA, 22 nt, Human
agguucuccuuaucaaugaaga

SEQ ID NO: 893528 - RNA, 22 nt, Human
gagcuuuaagggauaaaaugau

SEQ ID NO: 893529 - RNA, 21 nt, Human
ugguuaaaguugugucauccc

SEQ ID NO: 893530 - RNA, 22 nt, Human
uggagaagucaaagugaacagg

SEQ ID NO: 893531 - RNA, 21 nt, Human
ucccacagcgccagcuccugu

SEQ ID NO: 893532 - RNA, 21 nt, Human
ugcaauuuagacuugaacauu

SEQ ID NO: 893533 - RNA, 22 nt, Human
gggcugacucaaccuugcaaag

SEQ ID NO: 893534 - RNA, 20 nt, Human
aagagaggaaguuauacuag

SEQ ID NO: 893535 - RNA, 22 nt, Human
cuuucccugcuuagaaggauuu

SEQ ID NO: 893536 - RNA, 22 nt, Human
uuaugugagguucagcuuuauc

SEQ ID NO: 893537 - RNA, 22 nt, Human
uugcaggguacauucuuagaau

SEQ ID NO: 893538 - RNA, 22 nt, Human
gcagaggaggacccaggaauua

SEQ ID NO: 893539 - RNA, 22 nt, Human
agcgugaaggcgggcagucggc

SEQ ID NO: 893540 - RNA, 22 nt, Human
auuuugauaaucauguuagaga

SEQ ID NO: 893541 - RNA, 22 nt, Human
ggccagcuguaagcugcugaau

SEQ ID NO: 893542 - RNA, 22 nt, Human
caggacaguauaggcuuuagga

SEQ ID NO: 893543 - RNA, 22 nt, Human
uccaaauacauuuacuguauuu

SEQ ID NO: 893544 - RNA, 22 nt, Human
uuucuugagcuaggaaccuggg

SEQ ID NO: 893545 - RNA, 22 nt, Human
agggcugcuuugcuaaauaugg

SEQ ID NO: 893546 - RNA, 22 nt, Human
uagaaaagaagucuggccggga

SEQ ID NO: 893547 - RNA, 22 nt, Human
auucauguuagcccacauguag

SEQ ID NO: 893548 - RNA, 22 nt, Human
gcauccagguagagcuugcggg

SEQ ID NO: 893549 - RNA, 22 nt, Human
cuggcccaggagagcaggcauu

SEQ ID NO: 893550 - RNA, 22 nt, Human
ucugugccucaucugguucagg

SEQ ID NO: 893551 - RNA, 22 nt, Human
uucuagaaugauaugagguacu

SEQ ID NO: 893552 - RNA, 22 nt, Human
cugagagaugauauagcuuaau

SEQ ID NO: 893553 - RNA, 22 nt, Human
ugugucuuacauaauuacaugu

SEQ ID NO: 893554 - RNA, 22 nt, Human
gaugcugccagucaaucccaag

SEQ ID NO: 893555 - RNA, 22 nt, Human
acugaaauacugcucuuggauu

SEQ ID NO: 893556 - RNA, 22 nt, Human
ugcagaauuauggugcuggcuu

SEQ ID NO: 893557 - RNA, 22 nt, Human
aagguuuaaggucuauaaaugu

SEQ ID NO: 893558 - RNA, 22 nt, Human
gguggcauucagaagagcuggc

SEQ ID NO: 893559 - RNA, 22 nt, Human
ccaucccuucaccacagcagua

SEQ ID NO: 893560 - RNA, 22 nt, Human
gaggaggcuaagugggcucugg

SEQ ID NO: 893561 - RNA, 22 nt, Human
ucagaacaguucuuaauauugc

SEQ ID NO: 893562 - RNA, 22 nt, Human
acauugaauguaugugaugaaa

SEQ ID NO: 893563 - RNA, 22 nt, Human
auuaauauugguucauuagcug

SEQ ID NO: 893564 - RNA, 22 nt, Human
aaguuguaacagaaauuuaaug

SEQ ID NO: 893565 - RNA, 22 nt, Human
uaagaauagucccuagaugugu

SEQ ID NO: 893566 - RNA, 22 nt, Human
agggcugacagugaggagucaa

SEQ ID NO: 893567 - RNA, 16 nt, Human
guaacauucuguagcc

SEQ ID NO: 893568 - RNA, 22 nt, Human
ugcauggaguaauugaugcuug

SEQ ID NO: 893569 - RNA, 22 nt, Human
aacucaguucuuuccacaaugc

SEQ ID NO: 893570 - RNA, 22 nt, Human
cucucuggucccagauuccaga

SEQ ID NO: 893571 - RNA, 22 nt, Human
aacacuuaaggagagaucaaau

SEQ ID NO: 893572 - RNA, 22 nt, Human
aaugugugaacacuaaugcaac

SEQ ID NO: 893573 - RNA, 22 nt, Human
guuuuacaagguuaaucagcag

SEQ ID NO: 893574 - RNA, 22 nt, Human
uuaauucuuccggacugugaaa

SEQ ID NO: 893575 - RNA, 19 nt, Human
uucuaaguuuugcuugcug

SEQ ID NO: 893576 - RNA, 23 nt, Human
cuuguuauaagaagacugucugg

SEQ ID NO: 893577 - RNA, 20 nt, Human
uaguauuugcauaaggauag

SEQ ID NO: 893578 - RNA, 22 nt, Human
aagcaaaggcaggagcuuguga

SEQ ID NO: 893579 - RNA, 17 nt, Human
uauguguguuugcagca

SEQ ID NO: 893580 - RNA, 22 nt, Human
gaacaacucuucuugagagaug

SEQ ID NO: 893581 - RNA, 20 nt, Human
uuaucugucaaucugucuca

SEQ ID NO: 893582 - RNA, 22 nt, Human
guguccaucagcagccacugug

SEQ ID NO: 893583 - RNA, 22 nt, Human
aucuaagaggaugguuggaaau

SEQ ID NO: 893584 - RNA, 22 nt, Human
cugccuggaugaauggcgccuu

SEQ ID NO: 893585 - RNA, 22 nt, Human
cacagguuugacaaggauaaaa

SEQ ID NO: 893586 - RNA, 22 nt, Human
aguguauucagaauguagcaaa

SEQ ID NO: 893587 - RNA, 22 nt, Human
cagaggcauuacugaaaaggug

SEQ ID NO: 893588 - RNA, 20 nt, Human
agcaggaaaagugccagucu

SEQ ID NO: 893589 - RNA, 22 nt, Human
agacucugaagucauugcauga

SEQ ID NO: 893590 - RNA, 22 nt, Human
agcucuggcuaagcugauaaau

SEQ ID NO: 893591 - RNA, 22 nt, Human
augcuacaggagccccacuuag

SEQ ID NO: 893592 - RNA, 22 nt, Human
aggaggaaaaaggccacagcaa

SEQ ID NO: 893593 - RNA, 22 nt, Human
ggaaucuucagccaugccaaga

SEQ ID NO: 893594 - RNA, 22 nt, Human
augcuuuaaacuauaaauccac

SEQ ID NO: 893595 - RNA, 19 nt, Human
aaucuagaaauauguguuc

SEQ ID NO: 893596 - RNA, 22 nt, Human
aggcaggcucaaugcccagucu

SEQ ID NO: 893597 - RNA, 22 nt, Human
uccugcuuaacauauggucaag

SEQ ID NO: 893598 - RNA, 22 nt, Human
cuugaaaaauaugccuugcuuc

SEQ ID NO: 893599 - RNA, 22 nt, Human
ucuguguuuugugccuacugcu

SEQ ID NO: 893600 - RNA, 15 nt, Human
agcugccugggugcu

SEQ ID NO: 893601 - RNA, 22 nt, Human
cugggaugugaggagcgccucu

SEQ ID NO: 893602 - RNA, 22 nt, Human
uggagcagagaugggagcccaa

SEQ ID NO: 893603 - RNA, 22 nt, Human
gccaccuuccaaaauaaucaca

SEQ ID NO: 893604 - RNA, 22 nt, Human
uugugucuggauuucagcuuuc

SEQ ID NO: 893605 - RNA, 22 nt, Human
uuuucuuauagagcuuaaaguu

SEQ ID NO: 893606 - RNA, 22 nt, Human
guguaacuugcuggaaaaacua

SEQ ID NO: 893607 - RNA, 22 nt, Human
caggccucccggugcacacuga

SEQ ID NO: 893608 - RNA, 22 nt, Human
cugguguccagcauguguggaa

SEQ ID NO: 893609 - RNA, 22 nt, Human
ucccaggacccaggcauucaca

SEQ ID NO: 893610 - RNA, 20 nt, Human
caguuuaacuuugagcaguu

SEQ ID NO: 893611 - RNA, 22 nt, Human
gcacauguugcuaguuacuugc

SEQ ID NO: 893612 - RNA, 22 nt, Human
ccucugggugggaggccgggcg

SEQ ID NO: 893613 - RNA, 22 nt, Human
gugcaugugcauccauguguac

SEQ ID NO: 893614 - RNA, 22 nt, Human
aauugcauaaauuucauagcau

SEQ ID NO: 893615 - RNA, 22 nt, Human
gaggaggcuaucagcaaucagg

SEQ ID NO: 893616 - RNA, 22 nt, Human
ucagcugcaguuucacaagcac

SEQ ID NO: 893617 - RNA, 22 nt, Human
auugucauuccagucauuguua

SEQ ID NO: 893618 - RNA, 22 nt, Human
cuucugggcauggcagagccug

SEQ ID NO: 893619 - RNA, 22 nt, Human
cugagagaguaaaguagaauua

SEQ ID NO: 893620 - RNA, 22 nt, Human
ugagccaguucuucagauccau

SEQ ID NO: 893621 - RNA, 21 nt, Human
ucugugccucaacccucaucu

SEQ ID NO: 893622 - RNA, 22 nt, Human
agggccagcuagagcccucgcc

SEQ ID NO: 893623 - RNA, 22 nt, Human
uugggcagugauuaguucauga

SEQ ID NO: 893624 - RNA, 22 nt, Human
caggccacaaguuggguucaag

SEQ ID NO: 893625 - RNA, 22 nt, Human
cuauuuggccaagcugcccaca

SEQ ID NO: 893626 - RNA, 22 nt, Human
agguuucugcacugucacuggu

SEQ ID NO: 893627 - RNA, 22 nt, Human
ucuagaauucccuuuugacaau

SEQ ID NO: 893628 - RNA, 22 nt, Human
aaagccagaauucguccagccu

SEQ ID NO: 893629 - RNA, 22 nt, Human
ugccuucucuucccugggagcu

SEQ ID NO: 893630 - RNA, 22 nt, Human
uaaugugugucaucaguagagu

SEQ ID NO: 893631 - RNA, 23 nt, Human
ucucccucaugccuaggccuggg

SEQ ID NO: 893632 - RNA, 22 nt, Human
ggccagaggaccucucauagcc

SEQ ID NO: 893633 - RNA, 22 nt, Human
uagcaaggcuuccaaugaacag

SEQ ID NO: 893634 - RNA, 22 nt, Human
ugugaggccucugcaggagcag

SEQ ID NO: 893635 - RNA, 22 nt, Human
cuccuuggguucuuucgguucc

SEQ ID NO: 893636 - RNA, 22 nt, Human
uuucaaagacagccauauuugu

SEQ ID NO: 893637 - RNA, 22 nt, Human
uacagaguguuauuacagaauc

SEQ ID NO: 893638 - RNA, 22 nt, Human
uucucuagugcaaauuguuuga

SEQ ID NO: 893639 - RNA, 22 nt, Human
ucucugugaguggaaggcaccc

SEQ ID NO: 893640 - RNA, 22 nt, Human
gcucucucccuaggcaagugag

SEQ ID NO: 893641 - RNA, 20 nt, Human
caagcccucuuuagccugcc

SEQ ID NO: 893642 - RNA, 22 nt, Human
gagaggaguaggcugauggugc

SEQ ID NO: 893643 - RNA, 18 nt, Human
uaggcugggggcuguagu

SEQ ID NO: 893644 - RNA, 22 nt, Human
acaagcgagcggcuucuggccg

SEQ ID NO: 893645 - RNA, 22 nt, Human
ucucuguaagcugccuucucgu

SEQ ID NO: 893646 - RNA, 22 nt, Human
gggaguccaaauugguacaaua

SEQ ID NO: 893647 - RNA, 22 nt, Human
agggcagaaaucgauuacaccu

SEQ ID NO: 893648 - RNA, 22 nt, Human
uagcaggguccaaugugaggca

SEQ ID NO: 893649 - RNA, 22 nt, Human
aagcuucuuagaaugcaugugc

SEQ ID NO: 893650 - RNA, 22 nt, Human
cucuuagaaagaaacacacugg

SEQ ID NO: 893651 - RNA, 22 nt, Human
uucagugugccuaagucaguug

SEQ ID NO: 893652 - RNA, 19 nt, Human
ccaggccuggcgucuccgc

SEQ ID NO: 893653 - RNA, 22 nt, Human
acacagccccacggugagcaaa

SEQ ID NO: 893654 - RNA, 17 nt, Human
auuuacauugucaccga

SEQ ID NO: 893655 - RNA, 21 nt, Human
uccuugcuauuuuccucagcu

SEQ ID NO: 893656 - RNA, 22 nt, Human
uagggcaguuucauguuaucuu

SEQ ID NO: 893657 - RNA, 20 nt, Human
agaaauacaugcaugcauga

SEQ ID NO: 893658 - RNA, 22 nt, Human
uugaaaggguuaaagugguaaa

SEQ ID NO: 893659 - RNA, 22 nt, Human
ccaggaguuugaggcugcagug

SEQ ID NO: 893660 - RNA, 22 nt, Human
acugugccuucuuauugggucc

SEQ ID NO: 893661 - RNA, 22 nt, Human
caagauuuggcauucugaggag

SEQ ID NO: 893662 - RNA, 22 nt, Human
gcuuuaaauggcuugcccaagu

SEQ ID NO: 893663 - RNA, 22 nt, Human
agagccugcaucuagccucaga

SEQ ID NO: 893664 - RNA, 22 nt, Human
ugugcucuaccucagugucauu

SEQ ID NO: 893665 - RNA, 22 nt, Human
ugcugggcuucacccccacagu

SEQ ID NO: 893666 - RNA, 22 nt, Human
ccaugccccaccaggacgcugc

SEQ ID NO: 893667 - RNA, 22 nt, Human
uucagcacaguucaagauggua

SEQ ID NO: 893668 - RNA, 22 nt, Human
gcccagacauuuggccaaacau

SEQ ID NO: 893669 - RNA, 22 nt, Human
uuauuccagguacuugguuucu

SEQ ID NO: 893670 - RNA, 22 nt, Human
acuugggaggcugaaggacauu

SEQ ID NO: 893671 - RNA, 22 nt, Human
gagcagggagacaacucuggug

SEQ ID NO: 893672 - RNA, 22 nt, Human
uaauuuacagagauacagucag

SEQ ID NO: 893673 - RNA, 22 nt, Human
uucuagcacaagauaugaaagu

SEQ ID NO: 893674 - RNA, 22 nt, Human
uugcuuuaagguaucuggagaa

SEQ ID NO: 893675 - RNA, 22 nt, Human
agcauugaaccagauguuacau

SEQ ID NO: 893676 - RNA, 22 nt, Human
cuuucucuucacugucaugauc

SEQ ID NO: 893677 - RNA, 22 nt, Human
uuguuuaaugccucauacaucu

SEQ ID NO: 893678 - RNA, 22 nt, Human
uccaguuguuuguauuaacucu

SEQ ID NO: 893679 - RNA, 22 nt, Human
aguucucuuccacagccuccuc

SEQ ID NO: 893680 - RNA, 22 nt, Human
aaugcucuuugaauuugucaga

SEQ ID NO: 893681 - RNA, 22 nt, Human
gcagagugccgagauggaagcg

SEQ ID NO: 893682 - RNA, 22 nt, Human
ugcugcauuuaucuucucaaac

SEQ ID NO: 893683 - RNA, 22 nt, Human
uuucuagcugacaaaaauguuu

SEQ ID NO: 893684 - RNA, 22 nt, Human
aauaucuagccuuuagcagcuu

SEQ ID NO: 893685 - RNA, 19 nt, Human
auggaugccucaugccuca

SEQ ID NO: 893686 - RNA, 22 nt, Human
auacuguagaggcauagcuagu

SEQ ID NO: 893687 - RNA, 22 nt, Human
guaaauauucccucgguuccua

SEQ ID NO: 893688 - RNA, 19 nt, Human
acuugaaagcagagaguuu

SEQ ID NO: 893689 - RNA, 22 nt, Human
gugaaggcuacaagagaucaag

SEQ ID NO: 893690 - RNA, 22 nt, Human
augcuuuauuguuaggucaugu

SEQ ID NO: 893691 - RNA, 22 nt, Human
agacacccagugauugagacuu

SEQ ID NO: 893692 - RNA, 22 nt, Human
cugugcucugagcgugggguug

SEQ ID NO: 893693 - RNA, 22 nt, Human
gcuuccugaguacacccucauc

SEQ ID NO: 893694 - RNA, 22 nt, Human
uaacauuguuaugaaucagguc

SEQ ID NO: 893695 - RNA, 22 nt, Human
ugcuucuggggacaggcugccu

SEQ ID NO: 893696 - RNA, 22 nt, Human
caaaguuuuaguaaacauauau

SEQ ID NO: 893697 - RNA, 20 nt, Human
cagcucugggcaggucgagg

SEQ ID NO: 893698 - RNA, 22 nt, Human
aagcacauuguacauuugugcu

SEQ ID NO: 893699 - RNA, 22 nt, Human
gggcuucaggguacuuccuccu

SEQ ID NO: 893700 - RNA, 21 nt, Human
cacacagcugcccuuagguag

SEQ ID NO: 893701 - RNA, 22 nt, Human
cucuggagcauuucaccuacau

SEQ ID NO: 893702 - RNA, 22 nt, Human
ccaccuccaccuauugccagcc

SEQ ID NO: 893703 - RNA, 22 nt, Human
agcccaggagccuuuggagggu

SEQ ID NO: 893704 - RNA, 22 nt, Human
auacagcagugaauaagauaaa

SEQ ID NO: 893705 - RNA, 22 nt, Human
cacagauuuccuaagcaucaau

SEQ ID NO: 893706 - RNA, 22 nt, Human
uucuuucucacucuuuaggaag

SEQ ID NO: 893707 - RNA, 22 nt, Human
gagucugagaacugggcucagu

SEQ ID NO: 893708 - RNA, 22 nt, Human
aaugucaaagugcuuugcaaac

SEQ ID NO: 893709 - RNA, 22 nt, Human
ugccuaacuccaccaggcaggu

SEQ ID NO: 893710 - RNA, 22 nt, Human
ucauuccauuuccagcucugaa

SEQ ID NO: 893711 - RNA, 22 nt, Human
aaauuagugcaccagguugaag

SEQ ID NO: 893712 - RNA, 22 nt, Human
gcaguccauugacagaggucuu

SEQ ID NO: 893713 - RNA, 21 nt, Human
guauguauggauaaugagagg

SEQ ID NO: 893714 - RNA, 22 nt, Human
ccagcuggggaaguggggcaua

SEQ ID NO: 893715 - RNA, 22 nt, Human
aaaggaagugccacucuucuuc

SEQ ID NO: 893716 - RNA, 22 nt, Human
cucccuggaggugagcuggcac

SEQ ID NO: 893717 - RNA, 22 nt, Human
cccaggaguaagugacauuguu

SEQ ID NO: 893718 - RNA, 22 nt, Human
ugcagccacaugaccugggucu

SEQ ID NO: 893719 - RNA, 22 nt, Human
uuugcauuauauuuauagaaga

SEQ ID NO: 893720 - RNA, 22 nt, Human
ucucuccucuagucaggguggu

SEQ ID NO: 893721 - RNA, 22 nt, Human
ucagggcccagucugugcaucu

SEQ ID NO: 893722 - RNA, 22 nt, Human
cuuggucuagugagugagcaua

SEQ ID NO: 893723 - RNA, 22 nt, Human
uacaaaugaccauagccacuua

SEQ ID NO: 893724 - RNA, 22 nt, Human
gcugccuccugaaagcgcucug

SEQ ID NO: 893725 - RNA, 19 nt, Human
cugggagguguucagagaa

SEQ ID NO: 893726 - RNA, 22 nt, Human
ccacagggccuuuccugcuggc

SEQ ID NO: 893727 - RNA, 22 nt, Human
aggccaggggugagcacuucug

SEQ ID NO: 893728 - RNA, 19 nt, Human
gucuagaacauuguaggug

SEQ ID NO: 893729 - RNA, 22 nt, Human
uguacuugaacuugacuguaga

SEQ ID NO: 893730 - RNA, 22 nt, Human
cugucaguaggcucccaucauu

SEQ ID NO: 893731 - RNA, 22 nt, Human
gccuguuccuuaguggcuucac

SEQ ID NO: 893732 - RNA, 22 nt, Human
accaaaaagauauguugaagcc

SEQ ID NO: 893733 - RNA, 22 nt, Human
gcuccagcaccuagagcagguc

SEQ ID NO: 893734 - RNA, 22 nt, Human
agccgcaagaaguacagcagca

SEQ ID NO: 893735 - RNA, 22 nt, Human
acagauuuuugguaaauaauuu

SEQ ID NO: 893736 - RNA, 22 nt, Human
uauacacauuacaguuucagga

SEQ ID NO: 893737 - RNA, 22 nt, Human
uaauauguguuacugacuuuuu

SEQ ID NO: 893738 - RNA, 22 nt, Human
ucuuuuguagcuaacacauuca

SEQ ID NO: 893739 - RNA, 22 nt, Human
gagcagggcuuguccuccucau

SEQ ID NO: 893740 - RNA, 22 nt, Human
ggcugggaggaugacuugcuac

SEQ ID NO: 893741 - RNA, 22 nt, Human
cugggccuggacgggcagaucu

SEQ ID NO: 893742 - RNA, 22 nt, Human
uaaggaaacaacuuguauuuuu

SEQ ID NO: 893743 - RNA, 18 nt, Human
ugcaaauggcuguuugau

SEQ ID NO: 893744 - RNA, 22 nt, Human
gaacaaacagaagaggcggaac

SEQ ID NO: 893745 - RNA, 22 nt, Human
gccaggaggcugcuguguaggc

SEQ ID NO: 893746 - RNA, 22 nt, Human
agcuguggcaaccuugucagac

SEQ ID NO: 893747 - RNA, 20 nt, Human
uuaggaagucacaauuucag

SEQ ID NO: 893748 - RNA, 22 nt, Human
cagggccugucacgacgcucau

SEQ ID NO: 893749 - RNA, 22 nt, Human
uaacugaagcuggaagcgcugg

SEQ ID NO: 893750 - RNA, 22 nt, Human
aacaaaguacuuuucagugcuu

SEQ ID NO: 893751 - RNA, 22 nt, Human
gagagaagaaagccaugguccu

SEQ ID NO: 893752 - RNA, 22 nt, Human
gcugccugauuuacauagugaa

SEQ ID NO: 893753 - RNA, 22 nt, Human
ggaagccagagugcugggcagg

SEQ ID NO: 893754 - RNA, 22 nt, Human
uaucacaucaauguuuuaaaau

SEQ ID NO: 893755 - RNA, 22 nt, Human
aagcaauaggguaaucuacuca

SEQ ID NO: 893756 - RNA, 22 nt, Human
acuuggauauguucacuagacc

SEQ ID NO: 893757 - RNA, 22 nt, Human
gagccucguggcggccacugcg

SEQ ID NO: 893758 - RNA, 22 nt, Human
aauuuacacuucauuuggaggg

SEQ ID NO: 893759 - RNA, 22 nt, Human
augauauagagaguagauuaaa

SEQ ID NO: 893760 - RNA, 22 nt, Human
aggccucagcucagugugacag

SEQ ID NO: 893761 - RNA, 18 nt, Human
uuuauauggauagagacc

SEQ ID NO: 893762 - RNA, 22 nt, Human
gggcacaggagaaggaucuggc

SEQ ID NO: 893763 - RNA, 22 nt, Human
uuaauaaacaggugcagcugaa

SEQ ID NO: 893764 - RNA, 22 nt, Human
gucuagaaaaugccgagggaug

SEQ ID NO: 893765 - RNA, 22 nt, Human
acagaguaggugcugucgacug

SEQ ID NO: 893766 - RNA, 22 nt, Human
acagacaaguaguucagacaag

SEQ ID NO: 893767 - RNA, 22 nt, Human
gcuaggaggcccugcacgcuua

SEQ ID NO: 893768 - RNA, 22 nt, Human
cugggcagaguccggaagaugg

SEQ ID NO: 893769 - RNA, 22 nt, Human
cagcuccagccaccggggggug

SEQ ID NO: 893770 - RNA, 20 nt, Human
cccaggagugagcagcuuua

SEQ ID NO: 893771 - RNA, 22 nt, Human
ccugggccuggcgggucggcuc

SEQ ID NO: 893772 - RNA, 22 nt, Human
cuguccaugguccuuauuacca

SEQ ID NO: 893773 - RNA, 22 nt, Human
uuaauaauaaugagcccauuuu

SEQ ID NO: 893774 - RNA, 22 nt, Human
gcugcccuagaaguacagagag

SEQ ID NO: 893775 - RNA, 22 nt, Human
cuguggugggcccugggcuuca

SEQ ID NO: 893776 - RNA, 22 nt, Human
uggcccaguauguauaaucuua

SEQ ID NO: 893777 - RNA, 18 nt, Human
ggaugcugugugcuccuu

SEQ ID NO: 893778 - RNA, 22 nt, Human
agaacuuaauucagugacuuaa

SEQ ID NO: 893779 - RNA, 17 nt, Human
cagacaggcugucaccc

SEQ ID NO: 893780 - RNA, 22 nt, Human
cugguauugaguuguugcuucc

SEQ ID NO: 893781 - RNA, 22 nt, Human
cagcaauaaugucuacaaaucu

SEQ ID NO: 893782 - RNA, 23 nt, Human
uagaaucuguauuucugcaguuc

SEQ ID NO: 893783 - RNA, 22 nt, Human
cuacagagaacucagcugcccu

SEQ ID NO: 893784 - RNA, 22 nt, Human
gaccacagacuggaaagagggc

SEQ ID NO: 893785 - RNA, 22 nt, Human
cuugccaaugguacaaacgauu

SEQ ID NO: 893786 - RNA, 23 nt, Human
aggaggaaaaguuaucugcugag

SEQ ID NO: 893787 - RNA, 22 nt, Human
agagcugguuuacucaggaauu

SEQ ID NO: 893788 - RNA, 22 nt, Human
augcaagaaacagagacgcuga

SEQ ID NO: 893789 - RNA, 22 nt, Human
ugaaacaaguuuaagggaucua

SEQ ID NO: 893790 - RNA, 22 nt, Human
gaggccuguagucauggaugua

SEQ ID NO: 893791 - RNA, 22 nt, Human
uucuuuuagucauucagggaag

SEQ ID NO: 893792 - RNA, 22 nt, Human
cugggcacauuuugacuagugu

SEQ ID NO: 893793 - RNA, 22 nt, Human
acauuugacucuguucauauua

SEQ ID NO: 893794 - RNA, 22 nt, Human
ccagagucaggagcucauguga

SEQ ID NO: 893795 - RNA, 22 nt, Human
ugcaaugaauuacuucccaaac

SEQ ID NO: 893796 - RNA, 22 nt, Human
agggccaccagagcagggcagu

SEQ ID NO: 893797 - RNA, 22 nt, Human
gcgagggcacgcgguugaaggc

SEQ ID NO: 893798 - RNA, 22 nt, Human
acucucucugauggaacuuuag

SEQ ID NO: 893799 - RNA, 22 nt, Human
caggagauaaaagagaugcuuu

SEQ ID NO: 893800 - RNA, 22 nt, Human
cuguauauggcuuacuuuauau

SEQ ID NO: 893801 - RNA, 22 nt, Human
ucuggcucccagccugcucuca

SEQ ID NO: 893802 - RNA, 22 nt, Human
gguuuccaaagauagaguagua

SEQ ID NO: 893803 - RNA, 22 nt, Human
caugaaauugcuccuuuggugc

SEQ ID NO: 893804 - RNA, 22 nt, Human
uccuggaggcaaaugagcacau

SEQ ID NO: 893805 - RNA, 22 nt, Human
ccauuaaaauugugacauagga

SEQ ID NO: 893806 - RNA, 22 nt, Human
uagaggcacagucuauguagag

SEQ ID NO: 893807 - RNA, 22 nt, Human
uguccauggggaaggggaagug

SEQ ID NO: 893808 - RNA, 17 nt, Human
ugagacagggcaggccc

SEQ ID NO: 893809 - RNA, 22 nt, Human
agaacaauguuaaauuauuaag

SEQ ID NO: 893810 - RNA, 22 nt, Human
ccaaaggccaagcucagguaaa

SEQ ID NO: 893811 - RNA, 22 nt, Human
uauaagaagugaagaagaguua

SEQ ID NO: 893812 - RNA, 22 nt, Human
ugagggaguuggguguauagga

SEQ ID NO: 893813 - RNA, 22 nt, Human
uuccugugugaccgagacagug

SEQ ID NO: 893814 - RNA, 22 nt, Human
cccacagguggaagccucggaa

SEQ ID NO: 893815 - RNA, 22 nt, Human
aacaaugugauugaagcuagaa

SEQ ID NO: 893816 - RNA, 22 nt, Human
auguggcuuggcagggaauaug

SEQ ID NO: 893817 - RNA, 22 nt, Human
uccugcagccuugggcuggagc

SEQ ID NO: 893818 - RNA, 22 nt, Human
gaccauuugcuaguaaauugca

SEQ ID NO: 893819 - RNA, 22 nt, Human
acauguaaaaauuaagguaaga

SEQ ID NO: 893820 - RNA, 22 nt, Human
aauauguuccacuuaaagcugg

SEQ ID NO: 893821 - RNA, 21 nt, Human
caaaacuuaggugacuuagga

SEQ ID NO: 893822 - RNA, 22 nt, Human
augcacagaaaaauugcuuacu

SEQ ID NO: 893823 - RNA, 22 nt, Human
aauaucuucuaaggauagaacu

SEQ ID NO: 893824 - RNA, 22 nt, Human
cagaggacaauagaauggaaag

SEQ ID NO: 893825 - RNA, 22 nt, Human
agaagagccuggggaccauggc

SEQ ID NO: 893826 - RNA, 22 nt, Human
gaaagguuuaaguaggauuugu

SEQ ID NO: 893827 - RNA, 22 nt, Human
cagcuggcuccaccucugggcu

SEQ ID NO: 893828 - RNA, 19 nt, Human
uugucuuagcugcauaaga

SEQ ID NO: 893829 - RNA, 22 nt, Human
cacagcuuguuuagugacucac

SEQ ID NO: 893830 - RNA, 22 nt, Human
uauuuccacccucaguaaggaa

SEQ ID NO: 893831 - RNA, 22 nt, Human
ugucaacaacagcauuuucuau

SEQ ID NO: 893832 - RNA, 22 nt, Human
ucacaguacugugugacuugag

SEQ ID NO: 893833 - RNA, 22 nt, Human
cccaggagagaggggauaaagc

SEQ ID NO: 893834 - RNA, 22 nt, Human
ccucucccagggagagccugag

SEQ ID NO: 893835 - RNA, 22 nt, Human
ucuccucuauuucuguauguau

SEQ ID NO: 893836 - RNA, 22 nt, Human
ggugcugauuuguugcugagau

SEQ ID NO: 893837 - RNA, 22 nt, Human
cagacuguagaguuugagaagu

SEQ ID NO: 893838 - RNA, 22 nt, Human
caggggacacuccugcuugggc

SEQ ID NO: 893839 - RNA, 22 nt, Human
caggcucacuguaaggucagcu

SEQ ID NO: 893840 - RNA, 22 nt, Human
acccucugcaucagcuucuuua

SEQ ID NO: 893841 - RNA, 22 nt, Human
aggcucaggaggagcugccgga

SEQ ID NO: 893842 - RNA, 22 nt, Human
gcauuucauguaagucagacca

SEQ ID NO: 893843 - RNA, 22 nt, Human
ucaguccaggauugggagugac

SEQ ID NO: 893844 - RNA, 22 nt, Human
gagcugggacuuggaauccaca

SEQ ID NO: 893845 - RNA, 22 nt, Human
acacaucaugccaaguuucacc

SEQ ID NO: 893846 - RNA, 21 nt, Human
agacccugcauauguucagua

SEQ ID NO: 893847 - RNA, 22 nt, Human
auucauuuagguauucacuuac

SEQ ID NO: 893848 - RNA, 22 nt, Human
uuggaaauggcuguaguuauga

SEQ ID NO: 893849 - RNA, 22 nt, Human
aucucucugcccaggggcugug

SEQ ID NO: 893850 - RNA, 22 nt, Human
uaaaggcaugcaggugaaugua

SEQ ID NO: 893851 - RNA, 19 nt, Human
uggaccugugcccauggcu

SEQ ID NO: 893852 - RNA, 22 nt, Human
agucucuuucuaaauaagguca

SEQ ID NO: 893853 - RNA, 22 nt, Human
gcaggcuucaagcacagcuuuu

SEQ ID NO: 893854 - RNA, 23 nt, Human
ucagcuguucuuuucccugggac

SEQ ID NO: 893855 - RNA, 22 nt, Human
agauacauagcugugagcacac

SEQ ID NO: 893856 - RNA, 22 nt, Human
ggagguggcagagggacauucu

SEQ ID NO: 893857 - RNA, 22 nt, Human
aaguuuguguaguuuagcaucc

SEQ ID NO: 893858 - RNA, 23 nt, Human
cacauugaacacucucuuuccug

SEQ ID NO: 893859 - RNA, 22 nt, Human
gaacaaacagucaggacagucu

SEQ ID NO: 893860 - RNA, 22 nt, Human
agggcugaaacauaauccuucu

SEQ ID NO: 893861 - RNA, 22 nt, Human
agugccauguaguccagcagaa

SEQ ID NO: 893862 - RNA, 22 nt, Human
gcuaagaaaaauucauguauau

SEQ ID NO: 893863 - RNA, 22 nt, Human
uggggugggguuacucauucug

SEQ ID NO: 893864 - RNA, 22 nt, Human
acagaccaaaaaaggauauugg

SEQ ID NO: 893865 - RNA, 22 nt, Human
aaacacuagcaggaagcacuga

SEQ ID NO: 893866 - RNA, 22 nt, Human
aagagcuguaugccauaugauu

SEQ ID NO: 893867 - RNA, 22 nt, Human
ugagaggaacaggcaguagguu

SEQ ID NO: 893868 - RNA, 22 nt, Human
uugagguaucugucuuuaauug

SEQ ID NO: 893869 - RNA, 22 nt, Human
acauaugcucaucugcauuccc

SEQ ID NO: 893870 - RNA, 22 nt, Human
aacaauguccugugagaugaua

SEQ ID NO: 893871 - RNA, 22 nt, Human
cugggcugucccagggcggcag

SEQ ID NO: 893872 - RNA, 22 nt, Human
gcacuggugugaaacaguagau

SEQ ID NO: 893873 - RNA, 20 nt, Human
uaaugucaaagucacaaggu

SEQ ID NO: 893874 - RNA, 22 nt, Human
ugcuggcuuagauaucacugcc

SEQ ID NO: 893875 - RNA, 22 nt, Human
uguuaugagaaagacauuaggu

SEQ ID NO: 893876 - RNA, 22 nt, Human
uuugacagcauaauccuacacc

SEQ ID NO: 893877 - RNA, 22 nt, Human
accuaagaaauccagagauuuc

SEQ ID NO: 893878 - RNA, 22 nt, Human
uuaaaccauaguuuaacauaag

SEQ ID NO: 893879 - RNA, 22 nt, Human
ucacaggagggagagacaccca

SEQ ID NO: 893880 - RNA, 22 nt, Human
aaugaagauuauggugauuaag

SEQ ID NO: 893881 - RNA, 22 nt, Human
augugugugugcgcgcgcagga

SEQ ID NO: 893882 - RNA, 22 nt, Human
cucauuuacucaucugcaaaac

SEQ ID NO: 893883 - RNA, 22 nt, Human
agugugucgagggaggguccag

SEQ ID NO: 893884 - RNA, 19 nt, Human
ggaccagcuuucaggaggc

SEQ ID NO: 893885 - RNA, 22 nt, Human
agagcuggauggucaagauggc

SEQ ID NO: 893886 - RNA, 22 nt, Human
gcuuacaaacaacagaaauuaa

SEQ ID NO: 893887 - RNA, 22 nt, Human
acagggcagaaauguugcaucu

SEQ ID NO: 893888 - RNA, 21 nt, Human
ucagauucucucauuuugaug

SEQ ID NO: 893889 - RNA, 22 nt, Human
gcuacuaguacagcaaggacua

SEQ ID NO: 893890 - RNA, 22 nt, Human
caauuacauuuauugagcauuc

SEQ ID NO: 893891 - RNA, 22 nt, Human
uagacauuuaucuccaugugga

SEQ ID NO: 893892 - RNA, 22 nt, Human
agucuuagauuuuauuuugguc

SEQ ID NO: 893893 - RNA, 22 nt, Human
ugcacacaaguuggagaaugaa

SEQ ID NO: 893894 - RNA, 22 nt, Human
cagauucaaccuaagacaaucu

SEQ ID NO: 893895 - RNA, 22 nt, Human
ucuuucuacauuuuauaugcuu

SEQ ID NO: 893896 - RNA, 22 nt, Human
gccucugggggcucagaccugu

SEQ ID NO: 893897 - RNA, 22 nt, Human
ucccaaggauaagagagucuga

SEQ ID NO: 893898 - RNA, 22 nt, Human
augagaaaauucauuccaucca

SEQ ID NO: 893899 - RNA, 22 nt, Human
auguguuaaugucaaccagaaa

SEQ ID NO: 893900 - RNA, 22 nt, Human
gcaccugggacccagaggcacc

SEQ ID NO: 893901 - RNA, 22 nt, Human
cuuaauuacuguccaauaugca

SEQ ID NO: 893902 - RNA, 22 nt, Human
auauuaaauggauuuugggagc

SEQ ID NO: 893903 - RNA, 22 nt, Human
aaggaagguacucagugauucu

SEQ ID NO: 893904 - RNA, 22 nt, Human
ccugggcucgcgcacuucaccc

SEQ ID NO: 893905 - RNA, 22 nt, Human
guucaauuaaguuacaaauuua

SEQ ID NO: 893906 - RNA, 22 nt, Human
cuuuccaggaauccucacagcc

SEQ ID NO: 893907 - RNA, 22 nt, Human
ucucaaggacuuugggcacuaa

SEQ ID NO: 893908 - RNA, 22 nt, Human
cauaguuccuaccuaagcauaa

SEQ ID NO: 893909 - RNA, 22 nt, Human
ugccagagauuucacacugcua

SEQ ID NO: 893910 - RNA, 22 nt, Human
uagucacaugaucacaggaucg

SEQ ID NO: 893911 - RNA, 22 nt, Human
ccucugggcugccugcacgggu

SEQ ID NO: 893912 - RNA, 22 nt, Human
caauucuuucagcugcauuugu

SEQ ID NO: 893913 - RNA, 22 nt, Human
ggaggcugaggccccucacagg

SEQ ID NO: 893914 - RNA, 22 nt, Human
uggauaaaugugcagaugacau

SEQ ID NO: 893915 - RNA, 19 nt, Human
aggaaggcggcggcugccc

SEQ ID NO: 893916 - RNA, 20 nt, Human
gcugccagugccugaugcuu

SEQ ID NO: 893917 - RNA, 22 nt, Human
ugcauggagcugucugcauggu

SEQ ID NO: 893918 - RNA, 22 nt, Human
ggggauggaggcgugugguccu

SEQ ID NO: 893919 - RNA, 22 nt, Human
ucagaaucucuggaggcuuggc

SEQ ID NO: 893920 - RNA, 22 nt, Human
ucacugcuuaacucaagaucuc

SEQ ID NO: 893921 - RNA, 22 nt, Human
cucccauagcauuuuaaauagu

SEQ ID NO: 893922 - RNA, 22 nt, Human
uaaacagcuacugugucaaagg

SEQ ID NO: 893923 - RNA, 22 nt, Human
agcugaagcacugggauggaag

SEQ ID NO: 893924 - RNA, 22 nt, Human
aaaauuggacguagcuacucca

SEQ ID NO: 893925 - RNA, 21 nt, Human
gccugggaaaucugggaagcc

SEQ ID NO: 893926 - RNA, 18 nt, Human
gggcagcacagcagccuc

SEQ ID NO: 893927 - RNA, 22 nt, Human
acccagagcccuuagcacagac

SEQ ID NO: 893928 - RNA, 22 nt, Human
ugugagcugaagugacaggcug

SEQ ID NO: 893929 - RNA, 22 nt, Human
agggagcagcagccacaggaug

SEQ ID NO: 893930 - RNA, 22 nt, Human
ugaagggcaaccccaggcccag

SEQ ID NO: 893931 - RNA, 22 nt, Human
ucacaguacaugauucaguggu

SEQ ID NO: 893932 - RNA, 22 nt, Human
uccacagcacaaagccagugug

SEQ ID NO: 893933 - RNA, 22 nt, Human
agcagcagggcaugucuuacuc

SEQ ID NO: 893934 - RNA, 22 nt, Human
gaggcaggcacuguuaucagca

SEQ ID NO: 893935 - RNA, 22 nt, Human
ccuccuggagcauuggugagga

SEQ ID NO: 893936 - RNA, 22 nt, Human
guuauguaugagggaaugauua

SEQ ID NO: 893937 - RNA, 22 nt, Human
gucuagaaaucauguacuguga

SEQ ID NO: 893938 - RNA, 22 nt, Human
ggcagcuguggacgucgucauu

SEQ ID NO: 893939 - RNA, 22 nt, Human
uucaggaaucaaccaagucauu

SEQ ID NO: 893940 - RNA, 16 nt, Human
ugcagagagcauggug

SEQ ID NO: 893941 - RNA, 22 nt, Human
ggaaauauuuugucuaauuugu

SEQ ID NO: 893942 - RNA, 22 nt, Human
acaguggaagcaugaugcuauc

SEQ ID NO: 893943 - RNA, 21 nt, Human
uacauugaagaaugggaauga

SEQ ID NO: 893944 - RNA, 22 nt, Human
ugagcagaagauuggaacuuac

SEQ ID NO: 893945 - RNA, 22 nt, Human
uuagguaaggauggugacagua

SEQ ID NO: 893946 - RNA, 22 nt, Human
ggagugugggauggagcucagg

SEQ ID NO: 893947 - RNA, 22 nt, Human
aagcccagcugaaagcauuuuu

SEQ ID NO: 893948 - RNA, 22 nt, Human
guggggcuuccuggggcaaguu

SEQ ID NO: 893949 - RNA, 22 nt, Human
agacacagcaauaacuacuguu

SEQ ID NO: 893950 - RNA, 22 nt, Human
uugcacagggcuggaauguccu

SEQ ID NO: 893951 - RNA, 22 nt, Human
uggaacaacaugcuggaaaauu

SEQ ID NO: 893952 - RNA, 22 nt, Human
ggcagagcuuguuccuucuguu

SEQ ID NO: 893953 - RNA, 22 nt, Human
agaaagagcucgggauuaacag

SEQ ID NO: 893954 - RNA, 22 nt, Human
augggcucggcgcugcugggau

SEQ ID NO: 893955 - RNA, 22 nt, Human
gaucaguguuuugugcauucuu

SEQ ID NO: 893956 - RNA, 22 nt, Human
agauacaaguuaagagaaagga

SEQ ID NO: 893957 - RNA, 22 nt, Human
aggacaugugccuccagggcag

SEQ ID NO: 893958 - RNA, 23 nt, Human
agucuucauuguauuuccagacc

SEQ ID NO: 893959 - RNA, 22 nt, Human
agaggaggcagcuuaacucagu

SEQ ID NO: 893960 - RNA, 22 nt, Human
ucuugggaaauguuugcgagcu

SEQ ID NO: 893961 - RNA, 22 nt, Human
gcugucuugaugauuggaugcu

SEQ ID NO: 893962 - RNA, 22 nt, Human
gcuuuugugagcucucacuuug

SEQ ID NO: 893963 - RNA, 22 nt, Human
ugagcagaggccagcaccuggg

SEQ ID NO: 893964 - RNA, 22 nt, Human
uguggcgagaacauuggaccau

SEQ ID NO: 893965 - RNA, 22 nt, Human
ucugaaggaaaaggguagauau

SEQ ID NO: 893966 - RNA, 22 nt, Human
agugggaccggugcuauuccag

SEQ ID NO: 893967 - RNA, 22 nt, Human
cucagaaaggguugcugagggc

SEQ ID NO: 893968 - RNA, 22 nt, Human
guggcagagugcgguucugacc

SEQ ID NO: 893969 - RNA, 22 nt, Human
ggcuggcucagggcuugagaga

SEQ ID NO: 893970 - RNA, 22 nt, Human
aggcagcauucaggggugauga

SEQ ID NO: 893971 - RNA, 22 nt, Human
gaugaggcucaugcacccugcg

SEQ ID NO: 893972 - RNA, 22 nt, Human
aauaauuuuagcucagaguugu

SEQ ID NO: 893973 - RNA, 22 nt, Human
agugacuggugugaaguuaaau

SEQ ID NO: 893974 - RNA, 22 nt, Human
auucuucaguauguguggauug

SEQ ID NO: 893975 - RNA, 22 nt, Human
agguauaugaagaugaaauaac

SEQ ID NO: 893976 - RNA, 22 nt, Human
cauuugguguuaggcauguuaa

SEQ ID NO: 893977 - RNA, 21 nt, Human
aagagacauuucucaucagca

SEQ ID NO: 893978 - RNA, 22 nt, Human
gcacacauucggauucuuaacc

SEQ ID NO: 893979 - RNA, 22 nt, Human
gcuacuaggaagauuccaggau

SEQ ID NO: 893980 - RNA, 20 nt, Human
cagaggcaaggagacuugga

SEQ ID NO: 893981 - RNA, 22 nt, Human
gggcagugucggggcccaggga

SEQ ID NO: 893982 - RNA, 22 nt, Human
cucauacucccagccagcuguc

SEQ ID NO: 893983 - RNA, 22 nt, Human
agcauuuaugacuaauguaaaa

SEQ ID NO: 893984 - RNA, 22 nt, Human
ugguggggccagacuucagcuc

SEQ ID NO: 893985 - RNA, 22 nt, Human
uaggauuuuuuggauucuggau

SEQ ID NO: 893986 - RNA, 22 nt, Human
cuuaacaugggggguaagucug

SEQ ID NO: 893987 - RNA, 22 nt, Human
cccuggagggcagacagaugcc

SEQ ID NO: 893988 - RNA, 22 nt, Human
uguauguaugcaucuuuuaugu

SEQ ID NO: 893989 - RNA, 22 nt, Human
acacaugcucauaaauaaauag

SEQ ID NO: 893990 - RNA, 22 nt, Human
cugcugucccagccuccucaca

SEQ ID NO: 893991 - RNA, 21 nt, Human
ugagucucucagcuucaggua

SEQ ID NO: 893992 - RNA, 22 nt, Human
uuucuuccccacugcaggcucu

SEQ ID NO: 893993 - RNA, 22 nt, Human
uggauaugcccagggcacccua

SEQ ID NO: 893994 - RNA, 22 nt, Human
aggaagagcccgggugacauaa

SEQ ID NO: 893995 - RNA, 22 nt, Human
uacacauacauugcuuacaagg

SEQ ID NO: 893996 - RNA, 22 nt, Human
cuacauuucccagcugccuucc

SEQ ID NO: 893997 - RNA, 22 nt, Human
aauaacagagaaggguggcuuc

SEQ ID NO: 893998 - RNA, 22 nt, Human
ggggcccuuguggcugcaggcc

SEQ ID NO: 893999 - RNA, 22 nt, Human
uugaaauauuugggaguguuug

SEQ ID NO: 894000 - RNA, 22 nt, Human
aggaucuuauguaauaauuaug

SEQ ID NO: 894001 - RNA, 22 nt, Human
uccaucaccacagaggacagag

SEQ ID NO: 894002 - RNA, 22 nt, Human
aaacauguuuucugaauauuuu

SEQ ID NO: 894003 - RNA, 22 nt, Human
gagcugcaugcggaaaccuguu

SEQ ID NO: 894004 - RNA, 22 nt, Human
uuucauguuaguugguucuugg

SEQ ID NO: 894005 - RNA, 22 nt, Human
ucuguuccauguuuuguuccau

SEQ ID NO: 894006 - RNA, 22 nt, Human
ugcagagguuuccaggcaaguu

SEQ ID NO: 894007 - RNA, 22 nt, Human
acacuuaagcaugaaguauaaa

SEQ ID NO: 894008 - RNA, 22 nt, Human
cuucaguuaugugccaaggaca

SEQ ID NO: 894009 - RNA, 20 nt, Human
gaaucuuuccccaugcaaug

SEQ ID NO: 894010 - RNA, 22 nt, Human
aggccucauaguagaccugccc

SEQ ID NO: 894011 - RNA, 22 nt, Human
uaggaaaagcacaggauguucu

SEQ ID NO: 894012 - RNA, 22 nt, Human
uguucugggguugagagacaau

SEQ ID NO: 894013 - RNA, 22 nt, Human
uaaacagagugcuaguucacgg

SEQ ID NO: 894014 - RNA, 22 nt, Human
aagugaauguuugguagcagug

SEQ ID NO: 894015 - RNA, 22 nt, Human
aggggagaauuucaacucaggu

SEQ ID NO: 894016 - RNA, 22 nt, Human
augcaagaucacaccaaacacg

SEQ ID NO: 894017 - RNA, 22 nt, Human
uuuuaagugcaaucugaaugcg

SEQ ID NO: 894018 - RNA, 22 nt, Human
aaagcaguauaguggaagggcu

SEQ ID NO: 894019 - RNA, 22 nt, Human
gaaaaaugagcugaugucaggg

SEQ ID NO: 894020 - RNA, 22 nt, Human
ccugguguugugaaguagccgu

SEQ ID NO: 894021 - RNA, 22 nt, Human
ugcaagcaauccaggaaggcua

SEQ ID NO: 894022 - RNA, 22 nt, Human
uuguaaaguacuuagcacagca

SEQ ID NO: 894023 - RNA, 20 nt, Human
gcccacucuaauccacuguc

SEQ ID NO: 894024 - RNA, 22 nt, Human
ggaggccaggugggagucaucu

SEQ ID NO: 894025 - RNA, 22 nt, Human
uucagguguggccagaggagaa

SEQ ID NO: 894026 - RNA, 21 nt, Human
aaggucuguaaagugacagga

SEQ ID NO: 894027 - RNA, 18 nt, Human
gaagggagcuggaaugca

SEQ ID NO: 894028 - RNA, 23 nt, Human
acaaaugucuagagaggguguga

SEQ ID NO: 894029 - RNA, 22 nt, Human
gugacacugguuuagguaugua

SEQ ID NO: 894030 - RNA, 22 nt, Human
uugaagaguguccuuguaaaaa

SEQ ID NO: 894031 - RNA, 22 nt, Human
gcaagcaguuacccaggauucg

SEQ ID NO: 894032 - RNA, 22 nt, Human
auuggaacccuaggcaggcaga

SEQ ID NO: 894033 - RNA, 22 nt, Human
ccuguguccaguuccagguugu

SEQ ID NO: 894034 - RNA, 20 nt, Human
aggaagugauguuuuaucug

SEQ ID NO: 894035 - RNA, 22 nt, Human
ccuggacagggccaggccaugc

SEQ ID NO: 894036 - RNA, 19 nt, Human
ggcccaaguacugagugcc

SEQ ID NO: 894037 - RNA, 22 nt, Human
uucagcuagcaucucacuuggu

SEQ ID NO: 894038 - RNA, 22 nt, Human
ugccagcaguagcaguaggcca

SEQ ID NO: 894039 - RNA, 22 nt, Human
augcaguggcuucagugucagu

SEQ ID NO: 894040 - RNA, 22 nt, Human
gaaaccagcuagaggcagaggg

SEQ ID NO: 894041 - RNA, 22 nt, Human
uucuucaaggguaaaggcaacg

SEQ ID NO: 894042 - RNA, 22 nt, Human
uugggagauucauugagccaag

SEQ ID NO: 894043 - RNA, 22 nt, Human
cuugagcuaggaaggcugaggc

SEQ ID NO: 894044 - RNA, 22 nt, Human
uuuggcucugugucuucaccca

SEQ ID NO: 894045 - RNA, 21 nt, Human
uguguaaaguugaaauccugu

SEQ ID NO: 894046 - RNA, 22 nt, Human
accauacuugaaauggauagga

SEQ ID NO: 894047 - RNA, 22 nt, Human
uuuaaaaguuaucaucugucca

SEQ ID NO: 894048 - RNA, 22 nt, Human
ccuuagaucaggcugucuaggg

SEQ ID NO: 894049 - RNA, 23 nt, Human
gcagaggagcaagcuggacacca

SEQ ID NO: 894050 - RNA, 22 nt, Human
uucagaaaaagaccauugcaau

SEQ ID NO: 894051 - RNA, 23 nt, Human
agcugggaauuuucugaagcuuu

SEQ ID NO: 894052 - RNA, 22 nt, Human
uuuauucacuggggucugcccg

SEQ ID NO: 894053 - RNA, 22 nt, Human
agauguaccagguauuacagga

SEQ ID NO: 894054 - RNA, 22 nt, Human
ugaaagcagauagcucuguugu

SEQ ID NO: 894055 - RNA, 23 nt, Human
aaauaugucugagggcaaagaau

SEQ ID NO: 894056 - RNA, 22 nt, Human
uauuaacacguauaaaguguuu

SEQ ID NO: 894057 - RNA, 22 nt, Human
ugaguucuccaagagaagguau

SEQ ID NO: 894058 - RNA, 22 nt, Human
caggcccaugagggcagccaca

SEQ ID NO: 894059 - RNA, 22 nt, Human
guucauuuaggaaaggaagagu

SEQ ID NO: 894060 - RNA, 22 nt, Human
uagcaagauccuucccuggcgu

SEQ ID NO: 894061 - RNA, 22 nt, Human
gugugucuuucauuucaugagg

SEQ ID NO: 894062 - RNA, 22 nt, Human
cugggcuggagugcaauggcgc

SEQ ID NO: 894063 - RNA, 22 nt, Human
uuccaggaggcauucuuaguuu

SEQ ID NO: 894064 - RNA, 22 nt, Human
uauauucuuaccaguguaugua

SEQ ID NO: 894065 - RNA, 22 nt, Human
gugacagaguuuuagaucucau

SEQ ID NO: 894066 - RNA, 22 nt, Human
ucugcacacaauuuaucuuucu

SEQ ID NO: 894067 - RNA, 22 nt, Human
acagauauaaacuauaguagug

SEQ ID NO: 894068 - RNA, 22 nt, Human
aauucuaaauguaauuuagaau

SEQ ID NO: 894069 - RNA, 22 nt, Human
aaaucagaucuuacacaauugu

SEQ ID NO: 894070 - RNA, 22 nt, Human
uuuuccuuagcuucucugcgag

SEQ ID NO: 894071 - RNA, 22 nt, Human
agguggggccaaaugcuacagu

SEQ ID NO: 894072 - RNA, 22 nt, Human
cagagagggcggcccuggcuuc

SEQ ID NO: 894073 - RNA, 22 nt, Human
uacuuacauuagcaaacaaggu

SEQ ID NO: 894074 - RNA, 22 nt, Human
uuucugaacaaagccauuauca

SEQ ID NO: 894075 - RNA, 22 nt, Human
cacaguacuuaauucucuaaau

SEQ ID NO: 894076 - RNA, 22 nt, Human
acuaaauauuugagagguguag

SEQ ID NO: 894077 - RNA, 22 nt, Human
uuuauauguuuguacaauuaag

SEQ ID NO: 894078 - RNA, 22 nt, Human
cuucaaaugugauuuuaauaac

SEQ ID NO: 894079 - RNA, 22 nt, Human
cugcagccuccugggguacaug

SEQ ID NO: 894080 - RNA, 22 nt, Human
ccucaggauacaggagccacag

SEQ ID NO: 894081 - RNA, 22 nt, Human
uuaucuuagaggugauuguauu

SEQ ID NO: 894082 - RNA, 22 nt, Human
caaauggauacaggcaaacauu

SEQ ID NO: 894083 - RNA, 22 nt, Human
cauuugaauggcauuucacuuu

SEQ ID NO: 894084 - RNA, 22 nt, Human
cccuggauuuacaucauucuga

SEQ ID NO: 894085 - RNA, 22 nt, Human
ugcaggcuccaugaggacaggc

SEQ ID NO: 894086 - RNA, 22 nt, Human
aucucagaaacauaucuaaucc

SEQ ID NO: 894087 - RNA, 22 nt, Human
gaugucaucaggcuaagacacu

SEQ ID NO: 894088 - RNA, 22 nt, Human
auguaucagauaaagcaugugg

SEQ ID NO: 894089 - RNA, 22 nt, Human
auguucauguggcugcuggcag

SEQ ID NO: 894090 - RNA, 22 nt, Human
ccuuggcauguggcauguggcu

SEQ ID NO: 894091 - RNA, 22 nt, Human
guaaguuacucuugggcuauuu

SEQ ID NO: 894092 - RNA, 22 nt, Human
uuguauauauucuuaaagaugu

SEQ ID NO: 894093 - RNA, 22 nt, Human
aagaaaccaacccugccagcac

SEQ ID NO: 894094 - RNA, 22 nt, Human
gaguaacaaauacuucaguagu

SEQ ID NO: 894095 - RNA, 22 nt, Human
acaauuucugaucagugaauuu

SEQ ID NO: 894096 - RNA, 22 nt, Human
aguucucaucaugaagcauaag

SEQ ID NO: 894097 - RNA, 22 nt, Human
cacagaauuuucucuuuacaau

SEQ ID NO: 894098 - RNA, 22 nt, Human
uuuaaauuuagaagaaacacug

SEQ ID NO: 894099 - RNA, 22 nt, Human
ugaguccagaugggccagcagg

SEQ ID NO: 894100 - RNA, 22 nt, Human
uuguagaaaauuagaugcaugg

SEQ ID NO: 894101 - RNA, 22 nt, Human
gaaauguuggacacuugaaauu

SEQ ID NO: 894102 - RNA, 22 nt, Human
gggcggugccugucuccgaagc

SEQ ID NO: 894103 - RNA, 22 nt, Human
cagcagcucacucagguggcuc

SEQ ID NO: 894104 - RNA, 22 nt, Human
agagacccuggaguucuucacu

SEQ ID NO: 894105 - RNA, 22 nt, Human
acuucagaaaauguugaauguu

SEQ ID NO: 894106 - RNA, 19 nt, Human
ggucagcaguuuagggucu

SEQ ID NO: 894107 - RNA, 22 nt, Human
auucagaagcaaucacagugag

SEQ ID NO: 894108 - RNA, 22 nt, Human
gggcccugugauuucuugagga

SEQ ID NO: 894109 - RNA, 22 nt, Human
ggcagcucugaugaugcucugg

SEQ ID NO: 894110 - RNA, 22 nt, Human
cugggaaggggaagguccucuc

SEQ ID NO: 894111 - RNA, 22 nt, Human
uaguuuacucaucuauaaaaug

SEQ ID NO: 894112 - RNA, 22 nt, Human
cugagaaaggaccucaaacagg

SEQ ID NO: 894113 - RNA, 22 nt, Human
accaggagacaugaccaaugag

SEQ ID NO: 894114 - RNA, 22 nt, Human
agacaaggcaaggcggccagau

SEQ ID NO: 894115 - RNA, 22 nt, Human
ccuccugggacucauuagcacc

SEQ ID NO: 894116 - RNA, 22 nt, Human
acagggccacauguaaacagau

SEQ ID NO: 894117 - RNA, 22 nt, Human
aaagcugucaaggcaggaggcu

SEQ ID NO: 894118 - RNA, 22 nt, Human
caaauuuagguaacagucugua

SEQ ID NO: 894119 - RNA, 22 nt, Human
cccaggagguuggggcuacagu

SEQ ID NO: 894120 - RNA, 19 nt, Human
uguucagauaugucagcuu

SEQ ID NO: 894121 - RNA, 22 nt, Human
caaacauuugacuucucucagg

SEQ ID NO: 894122 - RNA, 22 nt, Human
aauguaacagcaacaacaaugg

SEQ ID NO: 894123 - RNA, 20 nt, Human
aaaugcuuuugacacauauu

SEQ ID NO: 894124 - RNA, 21 nt, Human
ugggaccuagcuuugcacagg

SEQ ID NO: 894125 - RNA, 22 nt, Human
guuuccagcuugggcccgggga

SEQ ID NO: 894126 - RNA, 22 nt, Human
gugagcagccucaccugagggu

SEQ ID NO: 894127 - RNA, 22 nt, Human
ucauacauguuguguucaaaug

SEQ ID NO: 894128 - RNA, 22 nt, Human
caguuacagagccaguuagaga

SEQ ID NO: 894129 - RNA, 22 nt, Human
acuuucuuggucccauguuuga

SEQ ID NO: 894130 - RNA, 22 nt, Human
gaaauguaggcauaauuauuuu

SEQ ID NO: 894131 - RNA, 22 nt, Human
uuucauaaucugucaagugggg

SEQ ID NO: 894132 - RNA, 21 nt, Human
uagagaugacgagcucuagca

SEQ ID NO: 894133 - RNA, 22 nt, Human
guaaacauuuucaucugugccc

SEQ ID NO: 894134 - RNA, 22 nt, Human
agggagaguagauaucaggugu

SEQ ID NO: 894135 - RNA, 22 nt, Human
cugucagaggcucucuguugcc

SEQ ID NO: 894136 - RNA, 22 nt, Human
cauaugaaauaugaguugaaca

SEQ ID NO: 894137 - RNA, 22 nt, Human
agggcugaugcaccauguagcc

SEQ ID NO: 894138 - RNA, 22 nt, Human
auguuuaaaggagucagagacu

SEQ ID NO: 894139 - RNA, 22 nt, Human
agaaaguuguuggaggaaauga

SEQ ID NO: 894140 - RNA, 22 nt, Human
aagguauuuagugugaaagcua

SEQ ID NO: 894141 - RNA, 22 nt, Human
gcagcugcagacccucagugcu

SEQ ID NO: 894142 - RNA, 22 nt, Human
uccugaauuguugagaagcagc

SEQ ID NO: 894143 - RNA, 19 nt, Human
accaggaguaucagagcug

SEQ ID NO: 894144 - RNA, 22 nt, Human
aggucagaugggagaugggaug

SEQ ID NO: 894145 - RNA, 22 nt, Human
gagcagcuguucugacuugucu

SEQ ID NO: 894146 - RNA, 22 nt, Human
augacagauagucuucauuugc

SEQ ID NO: 894147 - RNA, 22 nt, Human
ccucugggggcuuccuuacccu

SEQ ID NO: 894148 - RNA, 22 nt, Human
ucacaguguuggaaucagagcu

SEQ ID NO: 894149 - RNA, 22 nt, Human
cugagcagcaacccagagccuc

SEQ ID NO: 894150 - RNA, 22 nt, Human
caggagugagaugcgaucacuu

SEQ ID NO: 894151 - RNA, 22 nt, Human
caaauagauuguucaauccuga

SEQ ID NO: 894152 - RNA, 22 nt, Human
acccaggcuagaagugaauuau

SEQ ID NO: 894153 - RNA, 22 nt, Human
ucccucuguguugggcaugccu

SEQ ID NO: 894154 - RNA, 22 nt, Human
accuccuggcugcucauggaac

SEQ ID NO: 894155 - RNA, 22 nt, Human
ugugaucacaucugggcugaag

SEQ ID NO: 894156 - RNA, 22 nt, Human
cugucuguuucaaaagugguua

SEQ ID NO: 894157 - RNA, 22 nt, Human
aagucucuggcaaaugaucuug

SEQ ID NO: 894158 - RNA, 22 nt, Human
ugaaugcaagaaggaacaugaa

SEQ ID NO: 894159 - RNA, 22 nt, Human
ccugccuguacuagagacccag

SEQ ID NO: 894160 - RNA, 22 nt, Human
aaaaauaggucaaccguguaug

SEQ ID NO: 894161 - RNA, 22 nt, Human
aggcuccagcagccagaggaag

SEQ ID NO: 894162 - RNA, 22 nt, Human
cucccagggccaucgagucacu

SEQ ID NO: 894163 - RNA, 22 nt, Human
cagcucccuauggugaggcgac

SEQ ID NO: 894164 - RNA, 22 nt, Human
ccucugugacaaacaguccugg

SEQ ID NO: 894165 - RNA, 18 nt, Human
cugaggcccagagagggc

SEQ ID NO: 894166 - RNA, 21 nt, Human
ugacagcacaugcaaucggag

SEQ ID NO: 894167 - RNA, 22 nt, Human
uuuccuuugcccaauacauguc

SEQ ID NO: 894168 - RNA, 22 nt, Human
uagcaggcaucucagagauaau

SEQ ID NO: 894169 - RNA, 22 nt, Human
guuuuuaucuaauagcaguuau

SEQ ID NO: 894170 - RNA, 22 nt, Human
uccaggcuggacaugaggcggg

SEQ ID NO: 894171 - RNA, 22 nt, Human
acacaauuucauaaacaccaug

SEQ ID NO: 894172 - RNA, 20 nt, Human
aaccaguacccaaguaggaa

SEQ ID NO: 894173 - RNA, 22 nt, Human
caagguuuuggaagauuuucgu

SEQ ID NO: 894174 - RNA, 22 nt, Human
guucaguggggccuugggggac

SEQ ID NO: 894175 - RNA, 22 nt, Human
gccuggcaaggcccuguugacu

SEQ ID NO: 894176 - RNA, 22 nt, Human
gcccugagggguggugucugua

SEQ ID NO: 894177 - RNA, 22 nt, Human
auucaguguaguuauuaucuuu

SEQ ID NO: 894178 - RNA, 22 nt, Human
gcugaagguguguggagagagg

SEQ ID NO: 894179 - RNA, 22 nt, Human
ucucucuucaacccuuaacuag

SEQ ID NO: 894180 - RNA, 22 nt, Human
ggccuggccuccagaugugggc

SEQ ID NO: 894181 - RNA, 22 nt, Human
aaggccuugccgaaggaugcca

SEQ ID NO: 894182 - RNA, 22 nt, Human
gaucuuuagccaagacacacca

SEQ ID NO: 894183 - RNA, 19 nt, Human
gcaggguguugacuguccc

SEQ ID NO: 894184 - RNA, 22 nt, Human
ggcccugugguuuugcaaaguc

SEQ ID NO: 894185 - RNA, 22 nt, Human
uccauguuagguaaaggcacug

SEQ ID NO: 894186 - RNA, 22 nt, Human
guuauguacuuuuuaaaucuug

SEQ ID NO: 894187 - RNA, 22 nt, Human
uuuauacuucauaaugucuauu

SEQ ID NO: 894188 - RNA, 22 nt, Human
agggcccauagaucgucagcuu

SEQ ID NO: 894189 - RNA, 22 nt, Human
aaugcuuuaauugcauguagug

SEQ ID NO: 894190 - RNA, 22 nt, Human
cguaucaaagcaaaacauauuu

SEQ ID NO: 894191 - RNA, 21 nt, Human
agcagacagaugcacgcacac

SEQ ID NO: 894192 - RNA, 22 nt, Human
uagaaaauggccaagcaggacu

SEQ ID NO: 894193 - RNA, 23 nt, Human
acuugauuauuguugauagauuc

SEQ ID NO: 894194 - RNA, 22 nt, Human
accaguggaauuauucuguggu

SEQ ID NO: 894195 - RNA, 22 nt, Human
uguccuuuuggcugucuauggu

SEQ ID NO: 894196 - RNA, 22 nt, Human
auaaacaguagagaaagguggu

SEQ ID NO: 894197 - RNA, 22 nt, Human
cuccacagccccuccaguggca

SEQ ID NO: 894198 - RNA, 22 nt, Human
gcuuuccuggcccugucccugc

SEQ ID NO: 894199 - RNA, 22 nt, Human
ccuugcagacaucaguaguggc

SEQ ID NO: 894200 - RNA, 22 nt, Human
ggccauggaccccgagcugacc

SEQ ID NO: 894201 - RNA, 22 nt, Human
cccugagagcagggucuuucuc

SEQ ID NO: 894202 - RNA, 22 nt, Human
uuucuuuccaugagccuaugua

SEQ ID NO: 894203 - RNA, 22 nt, Human
cucauauauuucugcauucaau

SEQ ID NO: 894204 - RNA, 22 nt, Human
ucagagguuccggccauaacca

SEQ ID NO: 894205 - RNA, 22 nt, Human
ugagcugaguuuaaaagcugcu

SEQ ID NO: 894206 - RNA, 18 nt, Human
aacaguuuccagauucuc

SEQ ID NO: 894207 - RNA, 23 nt, Human
acagcuuccuacuuugcugcugc

SEQ ID NO: 894208 - RNA, 22 nt, Human
ugaacaguguaucuagaucaug

SEQ ID NO: 894209 - RNA, 22 nt, Human
acauucaaaaagcaucugucac

SEQ ID NO: 894210 - RNA, 22 nt, Human
uucuaguuaaaguauguauuag

SEQ ID NO: 894211 - RNA, 22 nt, Human
cuccaggauguuagacguccag

SEQ ID NO: 894212 - RNA, 22 nt, Human
gugcacuugaucuagacagauu

SEQ ID NO: 894213 - RNA, 22 nt, Human
aucagaaaaaugagaagagcug

SEQ ID NO: 894214 - RNA, 22 nt, Human
caaauccuggagccaugguaac

SEQ ID NO: 894215 - RNA, 22 nt, Human
acccucaggcagaauguauucu

SEQ ID NO: 894216 - RNA, 22 nt, Human
guacaggaccgcggcccccugg

SEQ ID NO: 894217 - RNA, 23 nt, Human
ucaucuguaaguaucuguggagu

SEQ ID NO: 894218 - RNA, 22 nt, Human
uauugcuuugugucauaagcaa

SEQ ID NO: 894219 - RNA, 22 nt, Human
auuggaaauacaguagaaaaau

SEQ ID NO: 894220 - RNA, 22 nt, Human
uagcuacacaucuaaacagcaa

SEQ ID NO: 894221 - RNA, 22 nt, Human
ccuugaaauguucucacugggg

SEQ ID NO: 894222 - RNA, 17 nt, Human
aguguggcccugguuaa

SEQ ID NO: 894223 - RNA, 22 nt, Human
agcaggcaggaggcuacuaagg

SEQ ID NO: 894224 - RNA, 22 nt, Human
agccagagggaaucuuugggga

SEQ ID NO: 894225 - RNA, 23 nt, Human
gucucuagaguguggagcaaaga

SEQ ID NO: 894226 - RNA, 22 nt, Human
guuaugaagucauucacaaaua

SEQ ID NO: 894227 - RNA, 22 nt, Human
gaaguucuagaacugugcccuu

SEQ ID NO: 894228 - RNA, 22 nt, Human
auccagagacuggggcugggau

SEQ ID NO: 894229 - RNA, 22 nt, Human
uucuaaaaccaauucugcuucu

SEQ ID NO: 894230 - RNA, 22 nt, Human
cccuugaaggcagggaguccug

SEQ ID NO: 894231 - RNA, 22 nt, Human
accaggaguagaauaucuguga

SEQ ID NO: 894232 - RNA, 23 nt, Human
uaggggcuggcguggagccugcg

SEQ ID NO: 894233 - RNA, 22 nt, Human
caaacuauuguucacaagacaa

SEQ ID NO: 894234 - RNA, 22 nt, Human
agcagcuuccugcucuucgccu

SEQ ID NO: 894235 - RNA, 22 nt, Human
cuaaagaagcuagcaaucuaua

SEQ ID NO: 894236 - RNA, 22 nt, Human
gaauaauauugacuuugcaggc

SEQ ID NO: 894237 - RNA, 22 nt, Human
ugagcugacacccaaucauacu

SEQ ID NO: 894238 - RNA, 22 nt, Human
aguuagaauagucagauuguag

SEQ ID NO: 894239 - RNA, 22 nt, Human
auacacauuugcuagagauggg

SEQ ID NO: 894240 - RNA, 22 nt, Human
uaacagaauccuguuauugcca

SEQ ID NO: 894241 - RNA, 22 nt, Human
ggccagcugugggauuuucugc

SEQ ID NO: 894242 - RNA, 22 nt, Human
gguggcacucauuaucaggugc

SEQ ID NO: 894243 - RNA, 22 nt, Human
gaggcugcggggaggagccugc

SEQ ID NO: 894244 - RNA, 22 nt, Human
cccaggaggcagagcuugcagu

SEQ ID NO: 894245 - RNA, 22 nt, Human
auugagaauugugaguuuggag

SEQ ID NO: 894246 - RNA, 22 nt, Human
aauaaaauggucaguuuucuca

SEQ ID NO: 894247 - RNA, 22 nt, Human
uggcccugccgcacuauccuca

SEQ ID NO: 894248 - RNA, 22 nt, Human
augugcaaggaguggcuguugu

SEQ ID NO: 894249 - RNA, 22 nt, Human
uguucccauggauaucugcaua

SEQ ID NO: 894250 - RNA, 22 nt, Human
aaagguucucuuguucauuauu

SEQ ID NO: 894251 - RNA, 22 nt, Human
gaacuguguuuguuucuagguc

SEQ ID NO: 894252 - RNA, 22 nt, Human
ugccacauggugcauuuccuag

SEQ ID NO: 894253 - RNA, 22 nt, Human
cccugagucaucauugcggaag

SEQ ID NO: 894254 - RNA, 22 nt, Human
auuugacagugaguuguggaug

SEQ ID NO: 894255 - RNA, 17 nt, Human
ugagagcagggcugggc

SEQ ID NO: 894256 - RNA, 22 nt, Human
gcagaggugaguuucucagcug

SEQ ID NO: 894257 - RNA, 22 nt, Human
cauucacagcaggucagcugaa

SEQ ID NO: 894258 - RNA, 22 nt, Human
cuugaugguggcagaagaguga

SEQ ID NO: 894259 - RNA, 22 nt, Human
cagaacaggucaugcuugcugu

SEQ ID NO: 894260 - RNA, 22 nt, Human
ggacagggcucuuggcacuccu

SEQ ID NO: 894261 - RNA, 22 nt, Human
aggucucccaagggccagggag

SEQ ID NO: 894262 - RNA, 22 nt, Human
cugcuguucagaggaccucacu

SEQ ID NO: 894263 - RNA, 22 nt, Human
auuccaaagcacaucagaacua

SEQ ID NO: 894264 - RNA, 22 nt, Human
uagaagcucaggaauaggcaua

SEQ ID NO: 894265 - RNA, 22 nt, Human
gggcugagaauucagcuuuccu

SEQ ID NO: 894266 - RNA, 20 nt, Human
gcuucaaagccauccuuuua

SEQ ID NO: 894267 - RNA, 22 nt, Human
gcugcagggaauguauggauuu

SEQ ID NO: 894268 - RNA, 22 nt, Human
gcagauggauguggacggcgcc

SEQ ID NO: 894269 - RNA, 22 nt, Human
uuacaaagugcugcaccauuuu

SEQ ID NO: 894270 - RNA, 22 nt, Human
uccaggcucccucaggaugcac

SEQ ID NO: 894271 - RNA, 22 nt, Human
aucaucuuaucugacucauuuu

SEQ ID NO: 894272 - RNA, 22 nt, Human
ggcuccuuaucucuccuaugcc

SEQ ID NO: 894273 - RNA, 22 nt, Human
auaaagcauuuccccugugugg

SEQ ID NO: 894274 - RNA, 22 nt, Human
ugaaccuuguuccugcccuccu

SEQ ID NO: 894275 - RNA, 22 nt, Human
augaaaugauugaaaucuuuac

SEQ ID NO: 894276 - RNA, 22 nt, Human
aaaggaggccacauggcuagga

SEQ ID NO: 894277 - RNA, 22 nt, Human
cugcccuggccacugugcccag

SEQ ID NO: 894278 - RNA, 22 nt, Human
agaggcggagcuugcagugagc

SEQ ID NO: 894279 - RNA, 22 nt, Human
ccugaaaugacuccagcugagu

SEQ ID NO: 894280 - RNA, 22 nt, Human
guggcccacacagacagcaucu

SEQ ID NO: 894281 - RNA, 18 nt, Human
acaguaaagaaaggaauu

SEQ ID NO: 894282 - RNA, 22 nt, Human
cugucugcuaugcuuguuguca

SEQ ID NO: 894283 - RNA, 22 nt, Human
aggcuaauauggcacaugaaca

SEQ ID NO: 894284 - RNA, 22 nt, Human
gccugccucaaaaucccaguuc

SEQ ID NO: 894285 - RNA, 22 nt, Human
cucugcugcuugccagucauug

SEQ ID NO: 894286 - RNA, 22 nt, Human
agcaagcuaccuagauagucua

SEQ ID NO: 894287 - RNA, 20 nt, Human
gggguugacccucuuggacu

SEQ ID NO: 894288 - RNA, 22 nt, Human
agaaucuucgguaacuggaaga

SEQ ID NO: 894289 - RNA, 22 nt, Human
uuucauugagacuauagacauc

SEQ ID NO: 894290 - RNA, 22 nt, Human
agugauuuggcggcagaguuag

SEQ ID NO: 894291 - RNA, 22 nt, Human
ggugugugguccucucacuuag

SEQ ID NO: 894292 - RNA, 19 nt, Human
cagggauggguagggacuc

SEQ ID NO: 894293 - RNA, 22 nt, Human
aaauuauucaaaaagcuguguu

SEQ ID NO: 894294 - RNA, 22 nt, Human
ucugacuuggcgcucuugucuu

SEQ ID NO: 894295 - RNA, 22 nt, Human
aucauucaaaugauuuggaggu

SEQ ID NO: 894296 - RNA, 22 nt, Human
acaugcauauacuuaaauaugu

SEQ ID NO: 894297 - RNA, 22 nt, Human
ucuuuccuagaggcugaugagu

SEQ ID NO: 894298 - RNA, 22 nt, Human
acauacauauguuuaaaugcau

SEQ ID NO: 894299 - RNA, 22 nt, Human
ggcagcaucacuugucuccagc

SEQ ID NO: 894300 - RNA, 22 nt, Human
aagcugcaaggaagugugccag

SEQ ID NO: 894301 - RNA, 20 nt, Human
aggccaggaaauguaguucu

SEQ ID NO: 894302 - RNA, 19 nt, Human
cuggccuguguccugugcu

SEQ ID NO: 894303 - RNA, 22 nt, Human
uaaucuguaauuuuugcaauag

SEQ ID NO: 894304 - RNA, 22 nt, Human
acaggcagugggccagauuugu

SEQ ID NO: 894305 - RNA, 22 nt, Human
gcucccaggcauggagguaauu

SEQ ID NO: 894306 - RNA, 22 nt, Human
gagcaagaguguuggacuuuga

SEQ ID NO: 894307 - RNA, 22 nt, Human
accagagggcaaaccccagugu

SEQ ID NO: 894308 - RNA, 22 nt, Human
gcugcagcagaaguucucagag

SEQ ID NO: 894309 - RNA, 22 nt, Human
cugagaaggaagccuccacucu

SEQ ID NO: 894310 - RNA, 22 nt, Human
agcaacaggaccauggagccca

SEQ ID NO: 894311 - RNA, 22 nt, Human
aggaagaggguggcagauaauc

SEQ ID NO: 894312 - RNA, 19 nt, Human
ucucuacacuacauuucua

SEQ ID NO: 894313 - RNA, 22 nt, Human
uccauuuuucaugacuccucaa

SEQ ID NO: 894314 - RNA, 22 nt, Human
agcacagagguggaaguguaua

SEQ ID NO: 894315 - RNA, 22 nt, Human
augauacauugcaaaauuuuaa

SEQ ID NO: 894316 - RNA, 22 nt, Human
acacaagggccuauaguguauu

SEQ ID NO: 894317 - RNA, 22 nt, Human
cugucugucccgucaccgcccc

SEQ ID NO: 894318 - RNA, 23 nt, Human
agcagucagggugguaagccauc

SEQ ID NO: 894319 - RNA, 19 nt, Human
cccagccaggucuugcauc

SEQ ID NO: 894320 - RNA, 22 nt, Human
uacacugagcaggaagaagugg

SEQ ID NO: 894321 - RNA, 18 nt, Human
agaacacuugguuagauc

SEQ ID NO: 894322 - RNA, 20 nt, Human
uaauuugauaucuauaaguu

SEQ ID NO: 894323 - RNA, 20 nt, Human
uucuaagguuuuggugcaca

SEQ ID NO: 894324 - RNA, 22 nt, Human
ucugugccuuuaagaagcucau

SEQ ID NO: 894325 - RNA, 22 nt, Human
ucccagccacagguguagcccu

SEQ ID NO: 894326 - RNA, 22 nt, Human
aaacugucauuggaugcauuug

SEQ ID NO: 894327 - RNA, 22 nt, Human
guacacaaauaauaaaguuaca

SEQ ID NO: 894328 - RNA, 22 nt, Human
ucauuucuaucuaugcagcuuc

SEQ ID NO: 894329 - RNA, 22 nt, Human
ucugccugcgcucacggggccg

SEQ ID NO: 894330 - RNA, 22 nt, Human
uuuuucaucugauugauaacuc

SEQ ID NO: 894331 - RNA, 22 nt, Human
auugagaaugaagggacauuuu

SEQ ID NO: 894332 - RNA, 22 nt, Human
acaaauuucauaggcaaauuuu

SEQ ID NO: 894333 - RNA, 22 nt, Human
gccagauuuacagauuugcccu

SEQ ID NO: 894334 - RNA, 19 nt, Human
uucagacagacuagguaua

SEQ ID NO: 894335 - RNA, 22 nt, Human
aagcagcauucagugaaaugug

SEQ ID NO: 894336 - RNA, 22 nt, Human
gauguucuagaagugugguguu

SEQ ID NO: 894337 - RNA, 21 nt, Human
agcaagaaucaggaaggcucu

SEQ ID NO: 894338 - RNA, 22 nt, Human
ccagaucacucaaccagagcuc

SEQ ID NO: 894339 - RNA, 22 nt, Human
ucucuuauuuugccuuugacaa

SEQ ID NO: 894340 - RNA, 22 nt, Human
uuggcucaugcuguuuugugca

SEQ ID NO: 894341 - RNA, 22 nt, Human
ccugccaggcuuugggcuucug

SEQ ID NO: 894342 - RNA, 22 nt, Human
agaaucuucagucuaauuccua

SEQ ID NO: 894343 - RNA, 22 nt, Human
aaugucaacacuugguauguca

SEQ ID NO: 894344 - RNA, 22 nt, Human
uuucucaaauugcaugaguagc

SEQ ID NO: 894345 - RNA, 22 nt, Human
ucucagaaaaacuuugagggua

SEQ ID NO: 894346 - RNA, 22 nt, Human
aauagaauuuguacuguguuuu

SEQ ID NO: 894347 - RNA, 22 nt, Human
acagaauuaaugaaaauuacaa

SEQ ID NO: 894348 - RNA, 15 nt, Human
agacagacaguggga

SEQ ID NO: 894349 - RNA, 22 nt, Human
uccuuggcucuuugauaaauac

SEQ ID NO: 894350 - RNA, 22 nt, Human
uaagacaauucuucagucacaa

SEQ ID NO: 894351 - RNA, 22 nt, Human
uaaugcaauuuagcaaaguuuu

SEQ ID NO: 894352 - RNA, 23 nt, Human
gaagccacacaaaggucgccaag

SEQ ID NO: 894353 - RNA, 22 nt, Human
ucagcuccucagagccucaguu

SEQ ID NO: 894354 - RNA, 22 nt, Human
gccacaggcuuaggagggaggu

SEQ ID NO: 894355 - RNA, 22 nt, Human
agagccagagaccuggguucac

SEQ ID NO: 894356 - RNA, 22 nt, Human
agugucaaugccaacaguauau

SEQ ID NO: 894357 - RNA, 22 nt, Human
gacaguacagguagaagucacu

SEQ ID NO: 894358 - RNA, 22 nt, Human
ugaggccagugacauauauuaa

SEQ ID NO: 894359 - RNA, 22 nt, Human
gaauauauuauucagcuuuuca

SEQ ID NO: 894360 - RNA, 22 nt, Human
ucccaauuaacagguaucaggc

SEQ ID NO: 894361 - RNA, 22 nt, Human
gcagcaugagcuauacaaagua

SEQ ID NO: 894362 - RNA, 22 nt, Human
gcaaacauguugugagauacca

SEQ ID NO: 894363 - RNA, 22 nt, Human
ucuguaggacagagaaaugggg

SEQ ID NO: 894364 - RNA, 22 nt, Human
ggcagcccuuucuggccagcuc

SEQ ID NO: 894365 - RNA, 22 nt, Human
caggaaaugaaagcuagcuaau

SEQ ID NO: 894366 - RNA, 22 nt, Human
uuaacauacaucaugaacaaug

SEQ ID NO: 894367 - RNA, 22 nt, Human
uguuggaugaccuuguaauuau

SEQ ID NO: 894368 - RNA, 22 nt, Human
cagagugaaaacugagcucaaa

SEQ ID NO: 894369 - RNA, 22 nt, Human
ucccaggcuggggccaggugac

SEQ ID NO: 894370 - RNA, 22 nt, Human
ugaggcccagccgcccugagag

SEQ ID NO: 894371 - RNA, 20 nt, Human
ggugcgaggccagagcagac

SEQ ID NO: 894372 - RNA, 21 nt, Human
gccugcaguuuugaagcccuu

SEQ ID NO: 894373 - RNA, 22 nt, Human
acuuuggggaacuuuucuccuc

SEQ ID NO: 894374 - RNA, 22 nt, Human
ccuuagaagaaaguuacuuuuu

SEQ ID NO: 894375 - RNA, 22 nt, Human
uuuguaaggcuaaauaauauuc

SEQ ID NO: 894376 - RNA, 22 nt, Human
gagguugggaugagggauacag

SEQ ID NO: 894377 - RNA, 22 nt, Human
gcugaaaugggcacugaaggcc

SEQ ID NO: 894378 - RNA, 22 nt, Human
ucacaugcuacugagccagacc

SEQ ID NO: 894379 - RNA, 22 nt, Human
gcugucuucacuuccugguuuc

SEQ ID NO: 894380 - RNA, 22 nt, Human
acugccuugaaagauuguugag

SEQ ID NO: 894381 - RNA, 22 nt, Human
cuggcucccgaagcccucagug

SEQ ID NO: 894382 - RNA, 22 nt, Human
ccuggccaguuuccaggcccug

SEQ ID NO: 894383 - RNA, 22 nt, Human
cagauggaacacagaaaggaga

SEQ ID NO: 894384 - RNA, 22 nt, Human
uuagagccccagaaaacagugg

SEQ ID NO: 894385 - RNA, 22 nt, Human
aaggggaguuagugauaaaacc

SEQ ID NO: 894386 - RNA, 22 nt, Human
ccagguggaaggucugugcucu

SEQ ID NO: 894387 - RNA, 22 nt, Human
gagacaggccaggugguacuua

SEQ ID NO: 894388 - RNA, 22 nt, Human
agcugcaauuaaagacugugaa

SEQ ID NO: 894389 - RNA, 22 nt, Human
gcccugcucauuucacguguuu

SEQ ID NO: 894390 - RNA, 21 nt, Human
cagcugcguguccucccaccc

SEQ ID NO: 894391 - RNA, 23 nt, Human
caauuucauaugauucuaccuaa

SEQ ID NO: 894392 - RNA, 22 nt, Human
agcagaugaaucccagauaaag

SEQ ID NO: 894393 - RNA, 22 nt, Human
ucagaggcaucauucauaguua

SEQ ID NO: 894394 - RNA, 22 nt, Human
ugcauaaagugccauaguauua

SEQ ID NO: 894395 - RNA, 22 nt, Human
gcaguccuggaggaagguguga

SEQ ID NO: 894396 - RNA, 19 nt, Human
cccaggggacccagcccua

SEQ ID NO: 894397 - RNA, 18 nt, Human
augucacagagggcugaa

SEQ ID NO: 894398 - RNA, 18 nt, Human
aggcuucuuggcucaguc

SEQ ID NO: 894399 - RNA, 22 nt, Human
uaguggagaggauguggagaaa

SEQ ID NO: 894400 - RNA, 22 nt, Human
gagggcugauguugccaccuca

SEQ ID NO: 894401 - RNA, 22 nt, Human
ucucucagaaagcccaugucug

SEQ ID NO: 894402 - RNA, 20 nt, Human
ggccagcugaugcacgaugc

SEQ ID NO: 894403 - RNA, 21 nt, Human
gcugucuccuccuugcaccag

SEQ ID NO: 894404 - RNA, 23 nt, Human
ccuggcugaccugaagguguagu

SEQ ID NO: 894405 - RNA, 22 nt, Human
gacuuuggcuuuuauucuaggu

SEQ ID NO: 894406 - RNA, 22 nt, Human
auggcccugaccuugaugaccu

SEQ ID NO: 894407 - RNA, 22 nt, Human
gcuggcagugugaaugacaagc

SEQ ID NO: 894408 - RNA, 22 nt, Human
gucuguaucagaggagugaaug

SEQ ID NO: 894409 - RNA, 22 nt, Human
ucuuaacuaucauuugaacacc

SEQ ID NO: 894410 - RNA, 22 nt, Human
uauuucucuucaaaauugaugu

SEQ ID NO: 894411 - RNA, 22 nt, Human
cagggccacugcaugagguuca

SEQ ID NO: 894412 - RNA, 23 nt, Human
cccuguagcccaggacaggcuuu

SEQ ID NO: 894413 - RNA, 22 nt, Human
uucuuagaagaaacaucuaaaa

SEQ ID NO: 894414 - RNA, 22 nt, Human
accaaaggcagagcugaacacu

SEQ ID NO: 894415 - RNA, 22 nt, Human
aaauaugagggugaugcccaga

SEQ ID NO: 894416 - RNA, 22 nt, Human
ccacaugguccucauuuacucu

SEQ ID NO: 894417 - RNA, 22 nt, Human
uuacaaaguuuaagguggcacu

SEQ ID NO: 894418 - RNA, 22 nt, Human
aagaaugugcuaaugaaaacuu

SEQ ID NO: 894419 - RNA, 22 nt, Human
uggagggauacaaagaugaaaa

SEQ ID NO: 894420 - RNA, 22 nt, Human
uccucaggcggugaggaggggc

SEQ ID NO: 894421 - RNA, 22 nt, Human
agagccuguacuuuucugugaa

SEQ ID NO: 894422 - RNA, 22 nt, Human
uggaauguaaaccucagguggg

SEQ ID NO: 894423 - RNA, 19 nt, Human
ugcuucagaaauagaaagc

SEQ ID NO: 894424 - RNA, 22 nt, Human
aggaggguuucaaugggaugag

SEQ ID NO: 894425 - RNA, 22 nt, Human
gucauagaggccuauauaauuu

SEQ ID NO: 894426 - RNA, 22 nt, Human
cacauugaacuugucugguggg

SEQ ID NO: 894427 - RNA, 22 nt, Human
ggcuacagcgggguggagacgg

SEQ ID NO: 894428 - RNA, 22 nt, Human
ucuuuggaugcguuacuuuuac

SEQ ID NO: 894429 - RNA, 20 nt, Human
ugucuucauuauggugcccu

SEQ ID NO: 894430 - RNA, 20 nt, Human
gcuugcuuugucugaugggc

SEQ ID NO: 894431 - RNA, 22 nt, Human
cccugcugaugccuugauuuug

SEQ ID NO: 894432 - RNA, 22 nt, Human
ccugaccagagugagggcuuag

SEQ ID NO: 894433 - RNA, 22 nt, Human
cgaaacaucuaugaucauuaau

SEQ ID NO: 894434 - RNA, 22 nt, Human
auucugagaaaugcauugucag

SEQ ID NO: 894435 - RNA, 22 nt, Human
cgcuggccauagccuccugugu

SEQ ID NO: 894436 - RNA, 22 nt, Human
acugucugcuggccccugguua

SEQ ID NO: 894437 - RNA, 22 nt, Human
gcagaugggagccccaggggag

SEQ ID NO: 894438 - RNA, 22 nt, Human
aaagcagggaugaggcuagagg

SEQ ID NO: 894439 - RNA, 22 nt, Human
gugcaggguccuaauuguuaag

SEQ ID NO: 894440 - RNA, 19 nt, Human
acagaaauguaagugagac

SEQ ID NO: 894441 - RNA, 20 nt, Human
ugccaggcugcacgccugcc

SEQ ID NO: 894442 - RNA, 21 nt, Human
cucuguguugaggguguugag

SEQ ID NO: 894443 - RNA, 22 nt, Human
cagguacacaggacaaaguacu

SEQ ID NO: 894444 - RNA, 22 nt, Human
ccagagguccccugccaggagg

SEQ ID NO: 894445 - RNA, 22 nt, Human
ccugaccauuugccacaugggu

SEQ ID NO: 894446 - RNA, 22 nt, Human
ggccugcuaaccugaaacggag

SEQ ID NO: 894447 - RNA, 22 nt, Human
ucaucaaagucaaagaaugacu

SEQ ID NO: 894448 - RNA, 22 nt, Human
cuugggcaggguauuguagaag

SEQ ID NO: 894449 - RNA, 22 nt, Human
aaagcaauggaugagaaucugu

SEQ ID NO: 894450 - RNA, 22 nt, Human
ucugaggcuucagacuguacug

SEQ ID NO: 894451 - RNA, 22 nt, Human
cuccagagguucucaucuggga

SEQ ID NO: 894452 - RNA, 22 nt, Human
aaguaaacagauaagaaaucug

SEQ ID NO: 894453 - RNA, 22 nt, Human
uccagaggcagcugcggucagg

SEQ ID NO: 894454 - RNA, 22 nt, Human
uccagaguacggaagagucauc

SEQ ID NO: 894455 - RNA, 22 nt, Human
ggcacagcgacuaccaucgaaa

SEQ ID NO: 894456 - RNA, 22 nt, Human
acccugauggccagauugugga

SEQ ID NO: 894457 - RNA, 22 nt, Human
uucaacauguucuacauaaggg

SEQ ID NO: 894458 - RNA, 22 nt, Human
cugcuggcaccgaugaaagaca

SEQ ID NO: 894459 - RNA, 18 nt, Human
uaucacugcugaacaaga

SEQ ID NO: 894460 - RNA, 22 nt, Human
ggaaggggagcuggaaagggua

SEQ ID NO: 894461 - RNA, 22 nt, Human
ugcuggcucaguuugcagacuc

SEQ ID NO: 894462 - RNA, 22 nt, Human
ggagagcugacaucaugauguu

SEQ ID NO: 894463 - RNA, 22 nt, Human
auuuuaauaagauccauuuggu

SEQ ID NO: 894464 - RNA, 22 nt, Human
gccacccugagcugggccaggg

SEQ ID NO: 894465 - RNA, 17 nt, Human
ggaagaaaaggaucauc

SEQ ID NO: 894466 - RNA, 22 nt, Human
ggcugccuccucgagacaggau

SEQ ID NO: 894467 - RNA, 22 nt, Human
aagcaacucccuccucauuuuu

SEQ ID NO: 894468 - RNA, 22 nt, Human
acagagccaaaaggacauagua

SEQ ID NO: 894469 - RNA, 22 nt, Human
guacaggccaccacugaauuuu

SEQ ID NO: 894470 - RNA, 22 nt, Human
cugggagcuuguuaggaaugca

SEQ ID NO: 894471 - RNA, 22 nt, Human
ucuguucuuaaagcauucuugc

SEQ ID NO: 894472 - RNA, 20 nt, Human
ugacaacaaaaugguaauuu

SEQ ID NO: 894473 - RNA, 22 nt, Human
uaaguucaaugaacucaguucu

SEQ ID NO: 894474 - RNA, 22 nt, Human
aagcugucaggagguuaccuuu

SEQ ID NO: 894475 - RNA, 22 nt, Human
ugcuucugcaggagcuccugau

SEQ ID NO: 894476 - RNA, 22 nt, Human
aauauccacuucaauacaggca

SEQ ID NO: 894477 - RNA, 22 nt, Human
ucuuugcagaacgaugaagaug

SEQ ID NO: 894478 - RNA, 14 nt, Human
gguuuccauuuuua

SEQ ID NO: 894479 - RNA, 23 nt, Human
aaugugcuguauucauuucugga

SEQ ID NO: 894480 - RNA, 23 nt, Human
ucccucaggccuuaucuccaucu

SEQ ID NO: 894481 - RNA, 22 nt, Human
aagugcaaaucuguggcugaaa

SEQ ID NO: 894482 - RNA, 22 nt, Human
ucuuuaaaguuggagcuugcaa

SEQ ID NO: 894483 - RNA, 22 nt, Human
guagggcucaguaaauacuuug

SEQ ID NO: 894484 - RNA, 22 nt, Human
gggaaccugccccaggccucug

SEQ ID NO: 894485 - RNA, 22 nt, Human
aagaggcagaaauaucgcugaa

SEQ ID NO: 894486 - RNA, 22 nt, Human
ucucccucuguaagaucagggg

SEQ ID NO: 894487 - RNA, 22 nt, Human
ccugcccuguguuuggggacua

SEQ ID NO: 894488 - RNA, 22 nt, Human
uuaguuaaaauucugcugacau

SEQ ID NO: 894489 - RNA, 22 nt, Human
uagcaagaugucacuccaaguu

SEQ ID NO: 894490 - RNA, 22 nt, Human
uggaauaaugaccacagaaaca

SEQ ID NO: 894491 - RNA, 22 nt, Human
uucacugcugggugauuggguu

SEQ ID NO: 894492 - RNA, 19 nt, Human
uucuccagccugaccugag

SEQ ID NO: 894493 - RNA, 22 nt, Human
ugugcaguuucuauguugucca

SEQ ID NO: 894494 - RNA, 22 nt, Human
uauuauaaaauuacuggcaggg

SEQ ID NO: 894495 - RNA, 22 nt, Human
gguggugggagagcuuucugga

SEQ ID NO: 894496 - RNA, 17 nt, Human
uggcaagaauggaaaug

SEQ ID NO: 894497 - RNA, 23 nt, Human
uccugaggguuucccagccuugg

SEQ ID NO: 894498 - RNA, 23 nt, Human
ucuauuacuuauuguacucugga

SEQ ID NO: 894499 - RNA, 22 nt, Human
gggaacuguguggugcucugau

SEQ ID NO: 894500 - RNA, 22 nt, Human
cccagcacuuugaauaugucac

SEQ ID NO: 894501 - RNA, 22 nt, Human
augcauaucuccuaucuccuca

SEQ ID NO: 894502 - RNA, 22 nt, Human
uccucugguuauacuugcaccc

SEQ ID NO: 894503 - RNA, 22 nt, Human
cugggacuuguagucucggcgc

SEQ ID NO: 894504 - RNA, 22 nt, Human
acuguccuggagcucacacucu

SEQ ID NO: 894505 - RNA, 22 nt, Human
gcuagggagacuugugucauca

SEQ ID NO: 894506 - RNA, 22 nt, Human
auguuggagucguaaggcaugg

SEQ ID NO: 894507 - RNA, 22 nt, Human
auaaaugugaaaugagcaguua

SEQ ID NO: 894508 - RNA, 21 nt, Human
agguggcugcauccucagaag

SEQ ID NO: 894509 - RNA, 22 nt, Human
gcauuuguacaaaaugcaguag

SEQ ID NO: 894510 - RNA, 22 nt, Human
agcagcaggugcuucuggaucu

SEQ ID NO: 894511 - RNA, 22 nt, Human
cuguggaaagagccuuuggagg

SEQ ID NO: 894512 - RNA, 22 nt, Human
acuccaggcaucugcuucugcu

SEQ ID NO: 894513 - RNA, 22 nt, Human
ucacucaguuuuuggccucugc

SEQ ID NO: 894514 - RNA, 22 nt, Human
aauucagauggaagauucuggc

SEQ ID NO: 894515 - RNA, 22 nt, Human
uuuucauuuuuguagaugcaag

SEQ ID NO: 894516 - RNA, 22 nt, Human
aggauuuguugaguuuuagugg

SEQ ID NO: 894517 - RNA, 20 nt, Human
ccagagcagccacugaaguu

SEQ ID NO: 894518 - RNA, 22 nt, Human
cagcauuuaaugcagugcuucc

SEQ ID NO: 894519 - RNA, 22 nt, Human
accugccuucucaaggacauga

SEQ ID NO: 894520 - RNA, 22 nt, Human
uacagcauugugucuucacuca

SEQ ID NO: 894521 - RNA, 22 nt, Human
cuagggcucgcaagggcuggag

SEQ ID NO: 894522 - RNA, 19 nt, Human
acagugcuucugagugagg

SEQ ID NO: 894523 - RNA, 22 nt, Human
guggccugucagaagccguggg

SEQ ID NO: 894524 - RNA, 18 nt, Human
agucauuuacuuuuguga

SEQ ID NO: 894525 - RNA, 22 nt, Human
uuuguucaccucaaggauggga

SEQ ID NO: 894526 - RNA, 22 nt, Human
gcagccagaagacucagaacaa

SEQ ID NO: 894527 - RNA, 20 nt, Human
gcucccugguagaaauguuu

SEQ ID NO: 894528 - RNA, 22 nt, Human
aaagucauccaaauuuuuaugu

SEQ ID NO: 894529 - RNA, 22 nt, Human
ggacagcauuccuaguuccaaa

SEQ ID NO: 894530 - RNA, 22 nt, Human
cccagaggguggagguugcagu

SEQ ID NO: 894531 - RNA, 22 nt, Human
cagagaaaaaauccugcucuca

SEQ ID NO: 894532 - RNA, 22 nt, Human
uguggcaguauaagagcuagaa

SEQ ID NO: 894533 - RNA, 19 nt, Human
agcuccuguucagcagcuc

SEQ ID NO: 894534 - RNA, 22 nt, Human
gagccugaugaaacaggcagac

SEQ ID NO: 894535 - RNA, 22 nt, Human
aggccagaacagcucugcacca

SEQ ID NO: 894536 - RNA, 22 nt, Human
uuuguacacaggucauucaggg

SEQ ID NO: 894537 - RNA, 22 nt, Human
uggcuuaucacauuguccaugg

SEQ ID NO: 894538 - RNA, 22 nt, Human
agggccuggaacuggagaccac

SEQ ID NO: 894539 - RNA, 19 nt, Human
uugaaagauuagcuuucua

SEQ ID NO: 894540 - RNA, 22 nt, Human
aaagccagguugugugcaggaa

SEQ ID NO: 894541 - RNA, 22 nt, Human
ggcucuccacuauggaugagaa

SEQ ID NO: 894542 - RNA, 22 nt, Human
ucacacagcuccuuuccuuagu

SEQ ID NO: 894543 - RNA, 22 nt, Human
cagagucaugggccgucaggca

SEQ ID NO: 894544 - RNA, 22 nt, Human
ugaauugcugccaucauauuuc

SEQ ID NO: 894545 - RNA, 22 nt, Human
cucugcugcccaggccugcuag

SEQ ID NO: 894546 - RNA, 22 nt, Human
aaagguuuauugauucugcucu

SEQ ID NO: 894547 - RNA, 18 nt, Human
ggacaggagacaugggug

SEQ ID NO: 894548 - RNA, 22 nt, Human
cagucacacaaguggacuuggg

SEQ ID NO: 894549 - RNA, 22 nt, Human
gucucuuuuauggugaguugau

SEQ ID NO: 894550 - RNA, 22 nt, Human
uccuuggaacauugauccaaac

SEQ ID NO: 894551 - RNA, 22 nt, Human
cagcucuacugggcaccauucg

SEQ ID NO: 894552 - RNA, 22 nt, Human
aagggaaauggccaggcagaga

SEQ ID NO: 894553 - RNA, 22 nt, Human
aaugcaaauguaagggugggau

SEQ ID NO: 894554 - RNA, 22 nt, Human
ucagcuucagaucagcuagaga

SEQ ID NO: 894555 - RNA, 22 nt, Human
aguuuucacacucaccaaaagg

SEQ ID NO: 894556 - RNA, 22 nt, Human
ugggacugagaauaugaugggg

SEQ ID NO: 894557 - RNA, 22 nt, Human
ucucuucuauuugagacuauuu

SEQ ID NO: 894558 - RNA, 22 nt, Human
ggagcugggguuggcaucuucc

SEQ ID NO: 894559 - RNA, 22 nt, Human
ugggccagaggcauggagcuau

SEQ ID NO: 894560 - RNA, 22 nt, Human
uauagcacacaguuuauaaaag

SEQ ID NO: 894561 - RNA, 22 nt, Human
uggcauggguggagagagcaca

SEQ ID NO: 894562 - RNA, 22 nt, Human
ccuucacacuuucacuuggaua

SEQ ID NO: 894563 - RNA, 22 nt, Human
aaagaacucagagaggauuuua

SEQ ID NO: 894564 - RNA, 22 nt, Human
aucuaaacccuacuuucuuucu

SEQ ID NO: 894565 - RNA, 22 nt, Human
guuauguaucuugauugggugg

SEQ ID NO: 894566 - RNA, 22 nt, Human
uacugaauuguaagaugaugcc

SEQ ID NO: 894567 - RNA, 22 nt, Human
aagcacauuuggaaaacaugga

SEQ ID NO: 894568 - RNA, 22 nt, Human
gugaaggccaguaggguccugg

SEQ ID NO: 894569 - RNA, 22 nt, Human
cccaggagaccugugaaaggac

SEQ ID NO: 894570 - RNA, 22 nt, Human
uuacagaaucuacucgugguga

SEQ ID NO: 894571 - RNA, 22 nt, Human
gacaguuuugcuaaaagguuga

SEQ ID NO: 894572 - RNA, 22 nt, Human
cuguccugagauaaagaugagg

SEQ ID NO: 894573 - RNA, 22 nt, Human
caggcugggaacgccacccgcu

SEQ ID NO: 894574 - RNA, 22 nt, Human
caucaucuugaaugacugugau

SEQ ID NO: 894575 - RNA, 17 nt, Human
aggugcagaggcagagc

SEQ ID NO: 894576 - RNA, 22 nt, Human
ggagguagucugagucauaggc

SEQ ID NO: 894577 - RNA, 22 nt, Human
gggagcugaauggcaauggaga

SEQ ID NO: 894578 - RNA, 22 nt, Human
uacaaaggaaacuucuuuuccc

SEQ ID NO: 894579 - RNA, 22 nt, Human
uaggccaaguugaucagacauc

SEQ ID NO: 894580 - RNA, 22 nt, Human
aguguuugcaucucauugauuu

SEQ ID NO: 894581 - RNA, 22 nt, Human
aaguuuguagcuggaugucugu

SEQ ID NO: 894582 - RNA, 22 nt, Human
acagaugaggaagagucagcca

SEQ ID NO: 894583 - RNA, 22 nt, Human
gcaggccagcugugcagauggg

SEQ ID NO: 894584 - RNA, 22 nt, Human
augcuuaaaaggcugcguuaga

SEQ ID NO: 894585 - RNA, 22 nt, Human
aagaaugaaggauuuagcuguu

SEQ ID NO: 894586 - RNA, 22 nt, Human
aaaaagauguccugaaguuuag

SEQ ID NO: 894587 - RNA, 22 nt, Human
ugagccuggcggaagcagcgug

SEQ ID NO: 894588 - RNA, 22 nt, Human
guccagcugaucuugacccagc

SEQ ID NO: 894589 - RNA, 22 nt, Human
uuuuuaucuuguaugugucucu

SEQ ID NO: 894590 - RNA, 22 nt, Human
acccagcuaacccuacccugga

SEQ ID NO: 894591 - RNA, 21 nt, Human
gugcucugggcagcagagggc

SEQ ID NO: 894592 - RNA, 22 nt, Human
gcauguggauauguuaggguga

SEQ ID NO: 894593 - RNA, 22 nt, Human
uugugguuaaccgcacauuuuu

SEQ ID NO: 894594 - RNA, 22 nt, Human
cuggcagcauggagccugugcu

SEQ ID NO: 894595 - RNA, 22 nt, Human
cuuuugauaguugcugagcagg

SEQ ID NO: 894596 - RNA, 20 nt, Human
ccagguggugccuggagagg

SEQ ID NO: 894597 - RNA, 22 nt, Human
uucuucuucauuucugacgaug

SEQ ID NO: 894598 - RNA, 22 nt, Human
ucugaaauggcgauggccguug

SEQ ID NO: 894599 - RNA, 22 nt, Human
cagugcuguugggcccagagag

SEQ ID NO: 894600 - RNA, 22 nt, Human
caacuacaggaaaagucauuca

SEQ ID NO: 894601 - RNA, 22 nt, Human
gcucaaagaccagacagaggag

SEQ ID NO: 894602 - RNA, 22 nt, Human
aagcuuagguacagaaguuaag

SEQ ID NO: 894603 - RNA, 22 nt, Human
ucuacagccauuuugagcagug

SEQ ID NO: 894604 - RNA, 22 nt, Human
ccugggcagugcuggaguugaa

SEQ ID NO: 894605 - RNA, 22 nt, Human
ugccaggguccugagggccuug

SEQ ID NO: 894606 - RNA, 22 nt, Human
agcagcugcuccacuugcuuaa

SEQ ID NO: 894607 - RNA, 22 nt, Human
aaugaguuauuuaauagaaagg

SEQ ID NO: 894608 - RNA, 22 nt, Human
aaguggacuaauacaaggacua

SEQ ID NO: 894609 - RNA, 22 nt, Human
uuugaacuaccucuccuuagca

SEQ ID NO: 894610 - RNA, 22 nt, Human
ugcuuuauuggaaccucauccu

SEQ ID NO: 894611 - RNA, 22 nt, Human
auccaaaggugacacagaauac

SEQ ID NO: 894612 - RNA, 22 nt, Human
auuaacaugaguuggagauagg

SEQ ID NO: 894613 - RNA, 22 nt, Human
aaguggagagcccuggaggucu

SEQ ID NO: 894614 - RNA, 22 nt, Human
ggagcuggagagcuagccuagg

SEQ ID NO: 894615 - RNA, 22 nt, Human
uuacauguucucauacacagag

SEQ ID NO: 894616 - RNA, 22 nt, Human
aacagucuuacagaaguagcca

SEQ ID NO: 894617 - RNA, 22 nt, Human
caagcuggaguuccucagagug

SEQ ID NO: 894618 - RNA, 22 nt, Human
uagcuuuaaaaaucaucaaagc

SEQ ID NO: 894619 - RNA, 22 nt, Human
ccaucucacucauguuucuaga

SEQ ID NO: 894620 - RNA, 22 nt, Human
gccuggcccagggcuccgcagg

SEQ ID NO: 894621 - RNA, 22 nt, Human
ccuuccuuucagggcuaugccu

SEQ ID NO: 894622 - RNA, 22 nt, Human
ucaauagcucaguguggaagcu

SEQ ID NO: 894623 - RNA, 22 nt, Human
auagaaucuuuguaaaacacuu

SEQ ID NO: 894624 - RNA, 16 nt, Human
ucauugaagacaguac

SEQ ID NO: 894625 - RNA, 22 nt, Human
ucugggucggaagccccaggga

SEQ ID NO: 894626 - RNA, 22 nt, Human
ggccuuccauugcucuuuucua

SEQ ID NO: 894627 - RNA, 22 nt, Human
uugacaaauacccauuagacca

SEQ ID NO: 894628 - RNA, 22 nt, Human
ggagaagggaacugaguuuuug

SEQ ID NO: 894629 - RNA, 22 nt, Human
auuucucacaaaguugcuuauc

SEQ ID NO: 894630 - RNA, 22 nt, Human
aguggcuggaauugcaggugcg

SEQ ID NO: 894631 - RNA, 23 nt, Human
agcuaacagaucgacaaaguaua

SEQ ID NO: 894632 - RNA, 22 nt, Human
uuuguucaaggaauaguaaaug

SEQ ID NO: 894633 - RNA, 19 nt, Human
cugggcugaggucugccuu

SEQ ID NO: 894634 - RNA, 22 nt, Human
cugggcaggauacuucauggga

SEQ ID NO: 894635 - RNA, 22 nt, Human
auacaacugcucucagauaagu

SEQ ID NO: 894636 - RNA, 22 nt, Human
cuggcuggaacgccgaggcggc

SEQ ID NO: 894637 - RNA, 22 nt, Human
cuguacagcaaguucaccuugg

SEQ ID NO: 894638 - RNA, 22 nt, Human
ucacagaaaucuguuuuuucua

SEQ ID NO: 894639 - RNA, 22 nt, Human
ugccagcuccgaggagcugcag

SEQ ID NO: 894640 - RNA, 22 nt, Human
gagccagagauccaggauggcu

SEQ ID NO: 894641 - RNA, 22 nt, Human
ucccacaggaaaguagacauug

SEQ ID NO: 894642 - RNA, 22 nt, Human
ccuguucuaaucuuggggcaga

SEQ ID NO: 894643 - RNA, 22 nt, Human
cuugggaaaccaaugggcuccu

SEQ ID NO: 894644 - RNA, 22 nt, Human
uggcagcauaaagcauuuagcu

SEQ ID NO: 894645 - RNA, 22 nt, Human
auuuccuucaguguuuaauacu

SEQ ID NO: 894646 - RNA, 22 nt, Human
cuguuauuuuccucugaacucu

SEQ ID NO: 894647 - RNA, 22 nt, Human
gacauuaauuucuuugguaauu

SEQ ID NO: 894648 - RNA, 22 nt, Human
gggauucaucaacuguuuuaca

SEQ ID NO: 894649 - RNA, 22 nt, Human
cagcuuccauaagagauggaga

SEQ ID NO: 894650 - RNA, 22 nt, Human
gacauucacaguuuccgauggu

SEQ ID NO: 894651 - RNA, 22 nt, Human
aggcucagucccggcccgcgcc

SEQ ID NO: 894652 - RNA, 22 nt, Human
gcugggaacacagccaugagag

SEQ ID NO: 894653 - RNA, 22 nt, Human
cagcucuuccucccaccggaca

SEQ ID NO: 894654 - RNA, 22 nt, Human
uagcuccuggugagccuacucu

SEQ ID NO: 894655 - RNA, 22 nt, Human
uggcucaguggcagccgcagcu

SEQ ID NO: 894656 - RNA, 22 nt, Human
gggcuuggcuggggccaccaga

SEQ ID NO: 894657 - RNA, 22 nt, Human
aacauuugcaugcuuuauuaga

SEQ ID NO: 894658 - RNA, 22 nt, Human
cccaggcucacuguccgcuucc

SEQ ID NO: 894659 - RNA, 22 nt, Human
ugcugaaguuacuagagacuau

SEQ ID NO: 894660 - RNA, 22 nt, Human
ucaaauuuuaacaugcauuaga

SEQ ID NO: 894661 - RNA, 22 nt, Human
acuuaaugguuccuaaaaugug

SEQ ID NO: 894662 - RNA, 22 nt, Human
acagccugcagccccaggucgc

SEQ ID NO: 894663 - RNA, 22 nt, Human
gcaggcuguagacaccaaacua

SEQ ID NO: 894664 - RNA, 22 nt, Human
accacagaggaauuugaagagg

SEQ ID NO: 894665 - RNA, 22 nt, Human
uguaaacugcuucucaccaagg

SEQ ID NO: 894666 - RNA, 22 nt, Human
uccaaauaguucuggaagacug

SEQ ID NO: 894667 - RNA, 22 nt, Human
gaaguuuagaguuuggaguccu

SEQ ID NO: 894668 - RNA, 22 nt, Human
cagugcaugcacacacauggua

SEQ ID NO: 894669 - RNA, 22 nt, Human
ccaggucuggaaccaccagggc

SEQ ID NO: 894670 - RNA, 22 nt, Human
aguggcaguagaugagcugguu

SEQ ID NO: 894671 - RNA, 22 nt, Human
uaguuuaugcugcugcagugag

SEQ ID NO: 894672 - RNA, 22 nt, Human
ggucugcccacuacucuccauu

SEQ ID NO: 894673 - RNA, 18 nt, Human
aggcuugggcccagcagc

SEQ ID NO: 894674 - RNA, 22 nt, Human
uccagaaacugcugagauaaga

SEQ ID NO: 894675 - RNA, 22 nt, Human
gcagcuuucuugcccuaaucuu

SEQ ID NO: 894676 - RNA, 19 nt, Human
ucacauucagccuugcuga

SEQ ID NO: 894677 - RNA, 22 nt, Human
ucuuuucuccagaccugggauc

SEQ ID NO: 894678 - RNA, 22 nt, Human
aaauguucuaaauuacauguga

SEQ ID NO: 894679 - RNA, 22 nt, Human
ugggacagguuggagagaagca

SEQ ID NO: 894680 - RNA, 18 nt, Human
gcugugugcaccugauaa

SEQ ID NO: 894681 - RNA, 22 nt, Human
ggggagaccaucugaaggugau

SEQ ID NO: 894682 - RNA, 22 nt, Human
gcuacaggagauaaaggccucu

SEQ ID NO: 894683 - RNA, 22 nt, Human
acugcagcaaagcccgugucuu

SEQ ID NO: 894684 - RNA, 22 nt, Human
aaacugaaguucuggaggggua

SEQ ID NO: 894685 - RNA, 22 nt, Human
auucuggguuuuugucuucugu

SEQ ID NO: 894686 - RNA, 22 nt, Human
uuuaacaugugaauuuuggaag

SEQ ID NO: 894687 - RNA, 22 nt, Human
uaaaaccauaaggcuggaagga

SEQ ID NO: 894688 - RNA, 23 nt, Human
ucucaugucuuuccuacaagcau

SEQ ID NO: 894689 - RNA, 22 nt, Human
uguguuaauuuucccuuucucu

SEQ ID NO: 894690 - RNA, 22 nt, Human
aaggcaaaagaggugucaucac

SEQ ID NO: 894691 - RNA, 22 nt, Human
uuagaaacucaacucugggaau

SEQ ID NO: 894692 - RNA, 22 nt, Human
uuaauuagagcugauguucaua

SEQ ID NO: 894693 - RNA, 22 nt, Human
cuuccuguuguauuugugagcc

SEQ ID NO: 894694 - RNA, 20 nt, Human
ccucuguguccugugucaua

SEQ ID NO: 894695 - RNA, 22 nt, Human
guccugugaugaguaccaggug

SEQ ID NO: 894696 - RNA, 22 nt, Human
cagagacaggaaucagcugcag

SEQ ID NO: 894697 - RNA, 22 nt, Human
uuccucuccucccaccagguga

SEQ ID NO: 894698 - RNA, 22 nt, Human
gcuuccugagaaacaaucugau

SEQ ID NO: 894699 - RNA, 21 nt, Human
uucuucaggccaaugcucauu

SEQ ID NO: 894700 - RNA, 22 nt, Human
gcaacuuaggaguuagagcaug

SEQ ID NO: 894701 - RNA, 22 nt, Human
ggaagcugguaauuguugggac

SEQ ID NO: 894702 - RNA, 22 nt, Human
ugggcuggcugaacuucaaccu

SEQ ID NO: 894703 - RNA, 22 nt, Human
aacacugaaaugucuuaagauu

SEQ ID NO: 894704 - RNA, 22 nt, Human
aaguaacaggugcuuaguuuau

SEQ ID NO: 894705 - RNA, 22 nt, Human
aucagcaggugcugguggagac

SEQ ID NO: 894706 - RNA, 20 nt, Human
acaggagaucugaggaaagg

SEQ ID NO: 894707 - RNA, 22 nt, Human
ccaggaggaugaggggcauaga

SEQ ID NO: 894708 - RNA, 22 nt, Human
cugcugccugauugcagaccuc

SEQ ID NO: 894709 - RNA, 22 nt, Human
cuguaaacuaggucauuuuuaa

SEQ ID NO: 894710 - RNA, 22 nt, Human
ggucacaccccaaguacauucg

SEQ ID NO: 894711 - RNA, 22 nt, Human
aaaugugucaguuucauucucu

SEQ ID NO: 894712 - RNA, 22 nt, Human
uuacaaagguaguuuugucuau

SEQ ID NO: 894713 - RNA, 21 nt, Human
cucugcagcccugcuuccagg

SEQ ID NO: 894714 - RNA, 19 nt, Human
uucaguuuccucaucugga

SEQ ID NO: 894715 - RNA, 22 nt, Human
caggaagcugagcugcacugca

SEQ ID NO: 894716 - RNA, 22 nt, Human
gugggagaaauuagcucuaguu

SEQ ID NO: 894717 - RNA, 22 nt, Human
ugccauauugcaaagugucugc

SEQ ID NO: 894718 - RNA, 22 nt, Human
agccccuguuuuuccagucaga

SEQ ID NO: 894719 - RNA, 22 nt, Human
uucuuaacuggaaaaugucaga

SEQ ID NO: 894720 - RNA, 22 nt, Human
uagucucuggagacucuagggg

SEQ ID NO: 894721 - RNA, 22 nt, Human
aucugccuccaaguccaugugu

SEQ ID NO: 894722 - RNA, 22 nt, Human
cuucaauaggaacugcauggca

SEQ ID NO: 894723 - RNA, 20 nt, Human
uggccaaguauccaacugga

SEQ ID NO: 894724 - RNA, 22 nt, Human
augugcuuuagguuuguuuaca

SEQ ID NO: 894725 - RNA, 22 nt, Human
uauguguauuuaguucuauaca

SEQ ID NO: 894726 - RNA, 22 nt, Human
ggcagcgagucgccaagucucg

SEQ ID NO: 894727 - RNA, 22 nt, Human
ugugcgugggcacacacauaug

SEQ ID NO: 894728 - RNA, 22 nt, Human
uguuguaaucauuuuaugaaaa

SEQ ID NO: 894729 - RNA, 22 nt, Human
ggcaguucucagccaaggcaau

SEQ ID NO: 894730 - RNA, 22 nt, Human
gucacagaucucuugagucaag

SEQ ID NO: 894731 - RNA, 22 nt, Human
uuuuauuggagugauaccaagc

SEQ ID NO: 894732 - RNA, 22 nt, Human
auaaaaguaggaccaacuuaca

SEQ ID NO: 894733 - RNA, 22 nt, Human
guggucuuuaaauuugugccug

SEQ ID NO: 894734 - RNA, 22 nt, Human
cagaggcuuggcauuaucaugc

SEQ ID NO: 894735 - RNA, 22 nt, Human
uccagcucuuguugcccacugc

SEQ ID NO: 894736 - RNA, 22 nt, Human
uuuggaauggaauagagauugc

SEQ ID NO: 894737 - RNA, 22 nt, Human
auuuuguuaaugucaccgugcu

SEQ ID NO: 894738 - RNA, 22 nt, Human
uuugauagggaaguaagaauga

SEQ ID NO: 894739 - RNA, 22 nt, Human
aagaugauaggacuugcuuaag

SEQ ID NO: 894740 - RNA, 22 nt, Human
gugcccaguccugccuugacag

SEQ ID NO: 894741 - RNA, 22 nt, Human
uuuagcauauccuauaaaacua

SEQ ID NO: 894742 - RNA, 23 nt, Human
uuuggcauguuaacuucacuuac

SEQ ID NO: 894743 - RNA, 22 nt, Human
caacauaugauuuuguauauaa

SEQ ID NO: 894744 - RNA, 22 nt, Human
uuccauugaguaccuggagaca

SEQ ID NO: 894745 - RNA, 22 nt, Human
caugcaauuuuugguucucuau

SEQ ID NO: 894746 - RNA, 22 nt, Human
auucuagccauuguauucuucc

SEQ ID NO: 894747 - RNA, 22 nt, Human
uggccagcugagauuuagcaca

SEQ ID NO: 894748 - RNA, 22 nt, Human
uuucugaagauacagcuuugcu

SEQ ID NO: 894749 - RNA, 22 nt, Human
uccaggaggacugagggggcug

SEQ ID NO: 894750 - RNA, 22 nt, Human
auucucaaacaagugguuugau

SEQ ID NO: 894751 - RNA, 22 nt, Human
uaccauuugagagagaacauaa

SEQ ID NO: 894752 - RNA, 20 nt, Human
ucaaagcaaagggagaugau

SEQ ID NO: 894753 - RNA, 22 nt, Human
aaucagaaucaguugacacagc

SEQ ID NO: 894754 - RNA, 22 nt, Human
gcugucuguucgagcguguguu

SEQ ID NO: 894755 - RNA, 22 nt, Human
ggccagcaguauauagcuaauu

SEQ ID NO: 894756 - RNA, 22 nt, Human
cacaauaaauguuugcugauga

SEQ ID NO: 894757 - RNA, 22 nt, Human
ugugcuucugcagagacuauuu

SEQ ID NO: 894758 - RNA, 22 nt, Human
aggcaaagagccagcaaaucug

SEQ ID NO: 894759 - RNA, 22 nt, Human
cauggcagcuuugggaggagga

SEQ ID NO: 894760 - RNA, 21 nt, Human
cagagagcuagaacuucauga

SEQ ID NO: 894761 - RNA, 22 nt, Human
cuugucagcacuuugccgaaaa

SEQ ID NO: 894762 - RNA, 22 nt, Human
ccagggaaggcucugccugcuu

SEQ ID NO: 894763 - RNA, 22 nt, Human
uguguuugaguccucacagugc

SEQ ID NO: 894764 - RNA, 23 nt, Human
agccuggcaccugcagaucggag

SEQ ID NO: 894765 - RNA, 22 nt, Human
acagcauucaauaaauaauaac

SEQ ID NO: 894766 - RNA, 22 nt, Human
agcacagaauggcuuggaagcc

SEQ ID NO: 894767 - RNA, 22 nt, Human
uuggaagaggaaaaugagccua

SEQ ID NO: 894768 - RNA, 22 nt, Human
uggaaacuaacaacagagcaga

SEQ ID NO: 894769 - RNA, 22 nt, Human
gaccacagguaugggcuuggca

SEQ ID NO: 894770 - RNA, 22 nt, Human
uccaggcauguggccaguacuc

SEQ ID NO: 894771 - RNA, 22 nt, Human
uuuucauuguuccucgagcauu

SEQ ID NO: 894772 - RNA, 22 nt, Human
cacaccagauggcagcguggga

SEQ ID NO: 894773 - RNA, 22 nt, Human
uggagcaggaaacaucuagagg

SEQ ID NO: 894774 - RNA, 22 nt, Human
gaacucuugcagugaaagcuua

SEQ ID NO: 894775 - RNA, 22 nt, Human
gcagaugaaguuuacaggaaac

SEQ ID NO: 894776 - RNA, 22 nt, Human
cagacagggaccucgcuccaga

SEQ ID NO: 894777 - RNA, 22 nt, Human
uuggagauguaaaauucagaga

SEQ ID NO: 894778 - RNA, 17 nt, Human
uggagcugcguguguuc

SEQ ID NO: 894779 - RNA, 22 nt, Human
gagugauuuaagcuauuuuuaa

SEQ ID NO: 894780 - RNA, 22 nt, Human
ucuauggggccucacaggcacu

SEQ ID NO: 894781 - RNA, 22 nt, Human
ccugccugcuuucugcuuugca

SEQ ID NO: 894782 - RNA, 22 nt, Human
cagcacugcugcuguacacaca

SEQ ID NO: 894783 - RNA, 22 nt, Human
uaaagauaagacaucaacugag

SEQ ID NO: 894784 - RNA, 22 nt, Human
cacaucuggguucucuucuuca

SEQ ID NO: 894785 - RNA, 22 nt, Human
accugggcauuuuggaugauua

SEQ ID NO: 894786 - RNA, 22 nt, Human
uccagcagguuggucaggugca

SEQ ID NO: 894787 - RNA, 22 nt, Human
uuacaagaucuuugaaggcaag

SEQ ID NO: 894788 - RNA, 22 nt, Human
cagcugagcaucacuagucugg

SEQ ID NO: 894789 - RNA, 22 nt, Human
gcagccacacuguuacagaaug

SEQ ID NO: 894790 - RNA, 22 nt, Human
ccugucuguauugguuugcuau

SEQ ID NO: 894791 - RNA, 22 nt, Human
ugccaccaggagaaccagugca

SEQ ID NO: 894792 - RNA, 22 nt, Human
gauagaaagagugguucuuuuu

SEQ ID NO: 894793 - RNA, 22 nt, Human
ucuuccagaaugcauucucuuu

SEQ ID NO: 894794 - RNA, 22 nt, Human
aaguucugggguaaugagaauu

SEQ ID NO: 894795 - RNA, 23 nt, Human
gcagagucaaguagucaugagug

SEQ ID NO: 894796 - RNA, 19 nt, Human
auggcuguguuccaguaaa

SEQ ID NO: 894797 - RNA, 22 nt, Human
gaucuguuauaaucucuuuuau

SEQ ID NO: 894798 - RNA, 22 nt, Human
augagguauucguaauauuucc

SEQ ID NO: 894799 - RNA, 22 nt, Human
agguuggccaagcugcuggccc

SEQ ID NO: 894800 - RNA, 22 nt, Human
cagggcagagccaggauuucaa

SEQ ID NO: 894801 - RNA, 22 nt, Human
uagaugaauuagcaauuaucuu

SEQ ID NO: 894802 - RNA, 22 nt, Human
agcagacauggcuuggaugugg

SEQ ID NO: 894803 - RNA, 22 nt, Human
aaguguuucuuggaauguugcg

SEQ ID NO: 894804 - RNA, 22 nt, Human
gacauucagguguucaaugcca

SEQ ID NO: 894805 - RNA, 19 nt, Human
ugcccaggccagguugggc

SEQ ID NO: 894806 - RNA, 22 nt, Human
uagcuguggagcagaggucucc

SEQ ID NO: 894807 - RNA, 22 nt, Human
cuguggcagggaagaggccaug

SEQ ID NO: 894808 - RNA, 22 nt, Human
cacagcuggugcacuagcucug

SEQ ID NO: 894809 - RNA, 22 nt, Human
augucagaaucuacauucuacu

SEQ ID NO: 894810 - RNA, 19 nt, Human
ugaaacaaacuuaaaagga

SEQ ID NO: 894811 - RNA, 22 nt, Human
agcucuaaauggaauuuugccu

SEQ ID NO: 894812 - RNA, 22 nt, Human
cagcuguucggggcuggcaugu

SEQ ID NO: 894813 - RNA, 22 nt, Human
ugagauaauacuucuuagcugg

SEQ ID NO: 894814 - RNA, 22 nt, Human
gcaggcguguuucacgugccag

SEQ ID NO: 894815 - RNA, 22 nt, Human
aaagucauugcuguuaucaaug

SEQ ID NO: 894816 - RNA, 22 nt, Human
cagugggcugugauggauucac

SEQ ID NO: 894817 - RNA, 21 nt, Human
ccauugagaccauggaggagu

SEQ ID NO: 894818 - RNA, 22 nt, Human
cuuugcaauagaggcacacaug

SEQ ID NO: 894819 - RNA, 22 nt, Human
uucagagguuagagcaguggga

SEQ ID NO: 894820 - RNA, 22 nt, Human
cuuuacaaauagggagggagug

SEQ ID NO: 894821 - RNA, 22 nt, Human
acccaggcuagggugcaguggc

SEQ ID NO: 894822 - RNA, 22 nt, Human
cagagacaaccugguagagaaa

SEQ ID NO: 894823 - RNA, 22 nt, Human
ucaggaagggugguccacaggg

SEQ ID NO: 894824 - RNA, 19 nt, Human
guuguaaauggagguuucu

SEQ ID NO: 894825 - RNA, 22 nt, Human
augucacaaaagucccauuaug

SEQ ID NO: 894826 - RNA, 22 nt, Human
auggcagggacuguggcccuug

SEQ ID NO: 894827 - RNA, 22 nt, Human
aggcucccaagcacugacccca

SEQ ID NO: 894828 - RNA, 22 nt, Human
caugucuuauauccugucuuca

SEQ ID NO: 894829 - RNA, 22 nt, Human
ucugcaggacugaggccuguuu

SEQ ID NO: 894830 - RNA, 22 nt, Human
uggaaauauacaaugugucucu

SEQ ID NO: 894831 - RNA, 22 nt, Human
uaccugcagcgggaauccauua

SEQ ID NO: 894832 - RNA, 22 nt, Human
cugggcacaaguggcccuggau

SEQ ID NO: 894833 - RNA, 22 nt, Human
augguugacccaugugaguuag

SEQ ID NO: 894834 - RNA, 22 nt, Human
uagccccagcuacucggaagcu

SEQ ID NO: 894835 - RNA, 22 nt, Human
uguguguguuccuccucagcua

SEQ ID NO: 894836 - RNA, 22 nt, Human
augcauauuuucuacuauaucg

SEQ ID NO: 894837 - RNA, 22 nt, Human
cacagggcagagaccugggugc

SEQ ID NO: 894838 - RNA, 19 nt, Human
ugucuuuggucugaguuuc

SEQ ID NO: 894839 - RNA, 22 nt, Human
accaggagucuagccuagucaa

SEQ ID NO: 894840 - RNA, 22 nt, Human
caauacaauuaccaguuaauca

SEQ ID NO: 894841 - RNA, 22 nt, Human
ugggugagccacaggaguuguc

SEQ ID NO: 894842 - RNA, 22 nt, Human
gcugcuccgucugagcucuggu

SEQ ID NO: 894843 - RNA, 22 nt, Human
auuuaaagugguagauuggcag

SEQ ID NO: 894844 - RNA, 22 nt, Human
auucuuuuguccuagcuugaua

SEQ ID NO: 894845 - RNA, 22 nt, Human
ugugcgcguguauauauguaua

SEQ ID NO: 894846 - RNA, 22 nt, Human
uugacaaaggaccuugcuauuu

SEQ ID NO: 894847 - RNA, 22 nt, Human
ucuuggcaguucuugugcuuuu

SEQ ID NO: 894848 - RNA, 22 nt, Human
guuaucuagaccaaaagccuaa

SEQ ID NO: 894849 - RNA, 22 nt, Human
uauguaaaaauucaucaggcug

SEQ ID NO: 894850 - RNA, 22 nt, Human
agagcuccgugccuggcugcca

SEQ ID NO: 894851 - RNA, 21 nt, Human
gugcugaggauacaguaguaa

SEQ ID NO: 894852 - RNA, 22 nt, Human
acagaugguacuaaacccauau

SEQ ID NO: 894853 - RNA, 22 nt, Human
augagauaauucauguggaaug

SEQ ID NO: 894854 - RNA, 19 nt, Human
cgcagagggcuucugagag

SEQ ID NO: 894855 - RNA, 22 nt, Human
uauguacacuuaaguuugagaa

SEQ ID NO: 894856 - RNA, 22 nt, Human
auuagcuucugugcauggacuu

SEQ ID NO: 894857 - RNA, 22 nt, Human
auacugaacauguuugcaguca

SEQ ID NO: 894858 - RNA, 22 nt, Human
ugcucccaggacucuugagcca

SEQ ID NO: 894859 - RNA, 22 nt, Human
aacaaucuccaagaccaaugug

SEQ ID NO: 894860 - RNA, 21 nt, Human
uuucccagcugaaaauaaaug

SEQ ID NO: 894861 - RNA, 22 nt, Human
cucugcaucagcuucauucugu

SEQ ID NO: 894862 - RNA, 22 nt, Human
uguaaaucacugaacuaaauga

SEQ ID NO: 894863 - RNA, 22 nt, Human
cugcugucaucuggcgcugugc

SEQ ID NO: 894864 - RNA, 22 nt, Human
ugacacuuugugacucugagaa

SEQ ID NO: 894865 - RNA, 22 nt, Human
uugcagggcaucgcguacuucu

SEQ ID NO: 894866 - RNA, 22 nt, Human
cuccagaaauuuggaugcagca

SEQ ID NO: 894867 - RNA, 22 nt, Human
acauauauuuucacacaugguu

SEQ ID NO: 894868 - RNA, 22 nt, Human
aucugucuauguggcuauguau

SEQ ID NO: 894869 - RNA, 22 nt, Human
ucacaaaggaugaugaauucug

SEQ ID NO: 894870 - RNA, 22 nt, Human
uggaggaaguggcuggccagaa

SEQ ID NO: 894871 - RNA, 22 nt, Human
aaaguagaggcauugaucaggu

SEQ ID NO: 894872 - RNA, 22 nt, Human
ccacagugagugucauacuugg

SEQ ID NO: 894873 - RNA, 22 nt, Human
uucuuagagaugguuaaaaaua

SEQ ID NO: 894874 - RNA, 22 nt, Human
auaagcuugauguaacuaacca

SEQ ID NO: 894875 - RNA, 22 nt, Human
augucuucuaagcucuaagcug

SEQ ID NO: 894876 - RNA, 18 nt, Human
ccauuucaugauuauuac

SEQ ID NO: 894877 - RNA, 22 nt, Human
aacagcaugcuggguaacauug

SEQ ID NO: 894878 - RNA, 20 nt, Human
gcuguucugaagcagaaggc

SEQ ID NO: 894879 - RNA, 22 nt, Human
ucugggaguuucugugggagcu

SEQ ID NO: 894880 - RNA, 22 nt, Human
agaaauggugagugagagcccc

SEQ ID NO: 894881 - RNA, 22 nt, Human
guucaugugguuuuuaaaggau

SEQ ID NO: 894882 - RNA, 23 nt, Human
ucucugggugggcugugucuaua

SEQ ID NO: 894883 - RNA, 22 nt, Human
cggucaggugcagcguuggcac

SEQ ID NO: 894884 - RNA, 22 nt, Human
ggugacacagggaccagagucu

SEQ ID NO: 894885 - RNA, 22 nt, Human
ccagaauuugaacucaggcaau

SEQ ID NO: 894886 - RNA, 22 nt, Human
cgccggcuugaggcaggcggca

SEQ ID NO: 894887 - RNA, 22 nt, Human
cugugcguugugaaauguuuag

SEQ ID NO: 894888 - RNA, 22 nt, Human
acauacuuagaguaaacaagua

SEQ ID NO: 894889 - RNA, 15 nt, Human
ggugucugcagugug

SEQ ID NO: 894890 - RNA, 22 nt, Human
uauuauuuuuauucgagggaaa

SEQ ID NO: 894891 - RNA, 22 nt, Human
uacagcaaugcuacaagaugac

SEQ ID NO: 894892 - RNA, 22 nt, Human
cccugcugcagagagcuuucca

SEQ ID NO: 894893 - RNA, 22 nt, Human
acacagugucuuagguaguguc

SEQ ID NO: 894894 - RNA, 22 nt, Human
ucuuggagauagggucuuaaug

SEQ ID NO: 894895 - RNA, 22 nt, Human
cauaagaaauaaugaugaugac

SEQ ID NO: 894896 - RNA, 21 nt, Human
cugagggccgcagcugggcuc

SEQ ID NO: 894897 - RNA, 22 nt, Human
guucuagaugacugagcagcug

SEQ ID NO: 894898 - RNA, 22 nt, Human
cagcugaguuuccaagucugcc

SEQ ID NO: 894899 - RNA, 22 nt, Human
ucugcugguuccgaauuaggcc

SEQ ID NO: 894900 - RNA, 22 nt, Human
guacaguaaucccguucuucug

SEQ ID NO: 894901 - RNA, 22 nt, Human
ucugggcugucuacagguuggc

SEQ ID NO: 894902 - RNA, 22 nt, Human
augaaugagaaagcugaaaucu

SEQ ID NO: 894903 - RNA, 22 nt, Human
ucucugucucccguguguccgg

SEQ ID NO: 894904 - RNA, 22 nt, Human
gcuguggcuuucuguuucuguu

SEQ ID NO: 894905 - RNA, 22 nt, Human
aacauguaccuacaaucagaau

SEQ ID NO: 894906 - RNA, 22 nt, Human
ggcucccaggagggccuggagg

SEQ ID NO: 894907 - RNA, 22 nt, Human
cacuucaaauaagcucuucuca

SEQ ID NO: 894908 - RNA, 22 nt, Human
ucacauaguggggcauuggaau

SEQ ID NO: 894909 - RNA, 22 nt, Human
ucacaaaucauuuuaucugugu

SEQ ID NO: 894910 - RNA, 22 nt, Human
agauugcuaaugaaguucuuga

SEQ ID NO: 894911 - RNA, 22 nt, Human
acacuagcuaaaugcugauuaa

SEQ ID NO: 894912 - RNA, 22 nt, Human
cacugaaauauuaauaucuuau

SEQ ID NO: 894913 - RNA, 22 nt, Human
gcacucuguuucuccugucagc

SEQ ID NO: 894914 - RNA, 22 nt, Human
ucuccaggugacucugauguau

SEQ ID NO: 894915 - RNA, 22 nt, Human
cuuccucaugugcaaugcaagc

SEQ ID NO: 894916 - RNA, 22 nt, Human
cuuuucaggcuacauuauggga

SEQ ID NO: 894917 - RNA, 22 nt, Human
uggcuucauucuccugugaaua

SEQ ID NO: 894918 - RNA, 20 nt, Human
guucacaggcuuccuuucag

SEQ ID NO: 894919 - RNA, 22 nt, Human
gcagaaagcuuagaggguuugc

SEQ ID NO: 894920 - RNA, 22 nt, Human
uacuagaaugccacuguuagug

SEQ ID NO: 894921 - RNA, 19 nt, Human
cuugugcaguucacgcuca

SEQ ID NO: 894922 - RNA, 22 nt, Human
gcagucuuuuucuucuagcuaa

SEQ ID NO: 894923 - RNA, 16 nt, Human
agcagccagcacugga

SEQ ID NO: 894924 - RNA, 22 nt, Human
cagaggcuaagaguguccaaag

SEQ ID NO: 894925 - RNA, 22 nt, Human
aggcagugcugugcccugaacc

SEQ ID NO: 894926 - RNA, 22 nt, Human
acagguagguuaaaauguguca

SEQ ID NO: 894927 - RNA, 22 nt, Human
cagcacugcuucgcagccaggg

SEQ ID NO: 894928 - RNA, 22 nt, Human
gaggcucugugaugugccaggc

SEQ ID NO: 894929 - RNA, 22 nt, Human
agcagaggaggauuuaguuagg

SEQ ID NO: 894930 - RNA, 22 nt, Human
ggucccaggaaucuguguucua

SEQ ID NO: 894931 - RNA, 17 nt, Human
uucaaugauuaaugcau

SEQ ID NO: 894932 - RNA, 22 nt, Human
cuagcagcucugauauuuacaa

SEQ ID NO: 894933 - RNA, 22 nt, Human
cccaggagaccuagaucuguuu

SEQ ID NO: 894934 - RNA, 22 nt, Human
uggcuucuagcaguguugauuu

SEQ ID NO: 894935 - RNA, 22 nt, Human
gucuccagaagccuagacagcc

SEQ ID NO: 894936 - RNA, 22 nt, Human
uaacugcaaccuccaucuugug

SEQ ID NO: 894937 - RNA, 22 nt, Human
uuuggcaaauucuugguaguau

SEQ ID NO: 894938 - RNA, 22 nt, Human
caaagaaugagugaguacauaa

SEQ ID NO: 894939 - RNA, 22 nt, Human
ggcuuuaugcacagcagauggu

SEQ ID NO: 894940 - RNA, 22 nt, Human
ucccuuugaucacuaacagaac

SEQ ID NO: 894941 - RNA, 22 nt, Human
ugagauggaaggugaggcagua

SEQ ID NO: 894942 - RNA, 22 nt, Human
cagaggccccagaacuagcucu

SEQ ID NO: 894943 - RNA, 22 nt, Human
auguuuuauuaccaacuuguac

SEQ ID NO: 894944 - RNA, 22 nt, Human
ggcuggcugcaugcccccuccu

SEQ ID NO: 894945 - RNA, 22 nt, Human
uuccucucucuugccagaaugu

SEQ ID NO: 894946 - RNA, 22 nt, Human
cuccagucuaguagagccugcu

SEQ ID NO: 894947 - RNA, 22 nt, Human
cucaaauauguggucagaaagc

SEQ ID NO: 894948 - RNA, 22 nt, Human
augucucuuuacucuuagaacc

SEQ ID NO: 894949 - RNA, 22 nt, Human
aacuuucagaauccuaugcauu

SEQ ID NO: 894950 - RNA, 22 nt, Human
ugggcaggggcccugcuuccgu

SEQ ID NO: 894951 - RNA, 22 nt, Human
uaccauuuacuugaaaauaaaa

SEQ ID NO: 894952 - RNA, 18 nt, Human
uguggcaggggugggaga

SEQ ID NO: 894953 - RNA, 22 nt, Human
uggaggaaaauuacuggggucu

SEQ ID NO: 894954 - RNA, 22 nt, Human
caggccuggggcuggcuuccag

SEQ ID NO: 894955 - RNA, 22 nt, Human
acaugcaggaaaaugcacagau

SEQ ID NO: 894956 - RNA, 22 nt, Human
uuagccagugaaauggagaaau

SEQ ID NO: 894957 - RNA, 22 nt, Human
uggcugcaagggcacggacccu

SEQ ID NO: 894958 - RNA, 22 nt, Human
gaggcuaugaggagugagguuu

SEQ ID NO: 894959 - RNA, 22 nt, Human
aggagccauggaggugaggcgg

SEQ ID NO: 894960 - RNA, 22 nt, Human
ugcaauuuggggaagaaagaga

SEQ ID NO: 894961 - RNA, 22 nt, Human
aacugaugcuagaagagacguu

SEQ ID NO: 894962 - RNA, 19 nt, Human
uagucuuuauucuuaauuu

SEQ ID NO: 894963 - RNA, 22 nt, Human
uacaaaguaauguauaauaucg

SEQ ID NO: 894964 - RNA, 22 nt, Human
aagaacuuccuaauauauuuuc

SEQ ID NO: 894965 - RNA, 22 nt, Human
caggacagcucaacaccuccuc

SEQ ID NO: 894966 - RNA, 22 nt, Human
gaguuuaaucauuguucuaucc

SEQ ID NO: 894967 - RNA, 22 nt, Human
ugcacacagcugggccuggcug

SEQ ID NO: 894968 - RNA, 21 nt, Human
gacaggggccauggguuucua

SEQ ID NO: 894969 - RNA, 21 nt, Human
auuuucucuggaugaugguca

SEQ ID NO: 894970 - RNA, 22 nt, Human
cacauauaugaaaugaggaauu

SEQ ID NO: 894971 - RNA, 22 nt, Human
gcauugaauccuaucaggcaaa

SEQ ID NO: 894972 - RNA, 22 nt, Human
ugucacaacagaggaacugaau

SEQ ID NO: 894973 - RNA, 22 nt, Human
gguaggaagauagagcaaaguu

SEQ ID NO: 894974 - RNA, 22 nt, Human
ugcagcuggaacuuagaggaga

SEQ ID NO: 894975 - RNA, 22 nt, Human
agugaagguuuacagggccccu

SEQ ID NO: 894976 - RNA, 21 nt, Human
aaagcaucacgaacauuuggg

SEQ ID NO: 894977 - RNA, 22 nt, Human
gcccaggggcagcgcauagugg

SEQ ID NO: 894978 - RNA, 22 nt, Human
guaaaguucuacuagaaucaac

SEQ ID NO: 894979 - RNA, 22 nt, Human
aacacuuuccguagguuuagua

SEQ ID NO: 894980 - RNA, 22 nt, Human
gauuuuucaguauaaaauauau

SEQ ID NO: 894981 - RNA, 22 nt, Human
caggccugggcuucggggcuga

SEQ ID NO: 894982 - RNA, 22 nt, Human
aaagguaacaguuauaaccagg

SEQ ID NO: 894983 - RNA, 22 nt, Human
ggugucccaggccagcugugug

SEQ ID NO: 894984 - RNA, 22 nt, Human
uggcuuuaggguuccuucuacc

SEQ ID NO: 894985 - RNA, 22 nt, Human
ggagucuggaguggggcccaag

SEQ ID NO: 894986 - RNA, 22 nt, Human
ucaacacaacagagaaaugcug

SEQ ID NO: 894987 - RNA, 19 nt, Human
auucuucucuuccugcugu

SEQ ID NO: 894988 - RNA, 22 nt, Human
ggggaaaggccauggcaagaac

SEQ ID NO: 894989 - RNA, 22 nt, Human
aagaauaacacuuagguuuugc

SEQ ID NO: 894990 - RNA, 22 nt, Human
acagagaugagucaacacagcu

SEQ ID NO: 894991 - RNA, 22 nt, Human
augcucugggcaggagcccugg

SEQ ID NO: 894992 - RNA, 22 nt, Human
caaguuaaauuugcauuucaga

SEQ ID NO: 894993 - RNA, 22 nt, Human
ucuuauuuuuuaaugacagaga

SEQ ID NO: 894994 - RNA, 18 nt, Human
acagggagggcgcugggg

SEQ ID NO: 894995 - RNA, 22 nt, Human
gaggccuggguuggaggugcau

SEQ ID NO: 894996 - RNA, 22 nt, Human
uaaggaaagugccaugauuucu

SEQ ID NO: 894997 - RNA, 22 nt, Human
agacuagagagauauaauaugg

SEQ ID NO: 894998 - RNA, 22 nt, Human
gaagagaagguguaggccaucc

SEQ ID NO: 894999 - RNA, 22 nt, Human
cugcccuguagcuguucuagca

SEQ ID NO: 895000 - RNA, 21 nt, Human
ggccagcugcauaugucacug

SEQ ID NO: 895001 - RNA, 22 nt, Human
uggcagcuuccugcucauagga

SEQ ID NO: 895002 - RNA, 20 nt, Human
cuguggugagcaggagagua

SEQ ID NO: 895003 - RNA, 20 nt, Human
aaacaagguugcucugagga

SEQ ID NO: 895004 - RNA, 23 nt, Human
gcaccccagaugugauuaguuag

SEQ ID NO: 895005 - RNA, 22 nt, Human
caagcucugggauagcagagag

SEQ ID NO: 895006 - RNA, 21 nt, Human
agugaagagugaaacacaugg

SEQ ID NO: 895007 - RNA, 22 nt, Human
aacauugaguucuacuuccauu

SEQ ID NO: 895008 - RNA, 22 nt, Human
aaaaguauccacagcucaggag

SEQ ID NO: 895009 - RNA, 22 nt, Human
aggcuucaccugcaccugagcu

SEQ ID NO: 895010 - RNA, 22 nt, Human
cauuagcaggcacuaagaaggu

SEQ ID NO: 895011 - RNA, 22 nt, Human
uugagucugugcccuaugcugu

SEQ ID NO: 895012 - RNA, 22 nt, Human
ucagggcugacugcuacucucc

SEQ ID NO: 895013 - RNA, 22 nt, Human
ugauuuccugugcgcccuuagg

SEQ ID NO: 895014 - RNA, 22 nt, Human
ucacagaaauaagauaguuauu

SEQ ID NO: 895015 - RNA, 22 nt, Human
ucagcagcagcucagcauguuu

SEQ ID NO: 895016 - RNA, 22 nt, Human
ugucugaauucaagaaauucaa

SEQ ID NO: 895017 - RNA, 22 nt, Human
aagaaucuguugauuccccacu

SEQ ID NO: 895018 - RNA, 19 nt, Human
augucuguugaauuucaua

SEQ ID NO: 895019 - RNA, 22 nt, Human
ucugucacaauuugcuuacucu

SEQ ID NO: 895020 - RNA, 22 nt, Human
aauucccacuauaugccaagca

SEQ ID NO: 895021 - RNA, 22 nt, Human
aaguaagugccuuuuauucuua

SEQ ID NO: 895022 - RNA, 22 nt, Human
ugccaggauauaagagugcgau

SEQ ID NO: 895023 - RNA, 22 nt, Human
gcugagagcggccagcugggaa

SEQ ID NO: 895024 - RNA, 22 nt, Human
agagccugcuguguaagucaca

SEQ ID NO: 895025 - RNA, 22 nt, Human
cacaggcuuuucugacauaggc

SEQ ID NO: 895026 - RNA, 22 nt, Human
agagagacgggggcugcugcuu

SEQ ID NO: 895027 - RNA, 22 nt, Human
caggcagagaacucauccguga

SEQ ID NO: 895028 - RNA, 22 nt, Human
aggaaacaugaaucugccuuga

SEQ ID NO: 895029 - RNA, 22 nt, Human
ugggaguagaugaggagugggc

SEQ ID NO: 895030 - RNA, 19 nt, Human
aucaggaacaaggcugauc

SEQ ID NO: 895031 - RNA, 22 nt, Human
cuggaaauuggagaugauguuu

SEQ ID NO: 895032 - RNA, 22 nt, Human
ucuggggaccauggcaucuaaa

SEQ ID NO: 895033 - RNA, 22 nt, Human
uggugcaguccaaagggagcag

SEQ ID NO: 895034 - RNA, 22 nt, Human
caagaucacacagguaacaagu

SEQ ID NO: 895035 - RNA, 22 nt, Human
aacaucuacagugagauguuag

SEQ ID NO: 895036 - RNA, 18 nt, Human
ccaauguuggccccaagg

SEQ ID NO: 895037 - RNA, 22 nt, Human
uaugaagaagacaaaugacacu

SEQ ID NO: 895038 - RNA, 22 nt, Human
uuaaauauuuucagcaggguca

SEQ ID NO: 895039 - RNA, 22 nt, Human
cagaaagcgggaugcagcaugu

SEQ ID NO: 895040 - RNA, 21 nt, Human
ucaguugccaaagugauguca

SEQ ID NO: 895041 - RNA, 22 nt, Human
auuuucagucuggcuggaccca

SEQ ID NO: 895042 - RNA, 22 nt, Human
uccuguguugauagagaugguu

SEQ ID NO: 895043 - RNA, 22 nt, Human
caguuccuaugggcaaaacaca

SEQ ID NO: 895044 - RNA, 22 nt, Human
cauuuugugcacacguggaguu

SEQ ID NO: 895045 - RNA, 22 nt, Human
aauggucacuauguaaggugau

SEQ ID NO: 895046 - RNA, 22 nt, Human
ucuaaucuacaaaaggaaauuc

SEQ ID NO: 895047 - RNA, 22 nt, Human
cauuaaaucuuccagaccucac

SEQ ID NO: 895048 - RNA, 22 nt, Human
uccaggggagugcuacgcacag

SEQ ID NO: 895049 - RNA, 22 nt, Human
uuugcacuuaacuuauuugaaa

SEQ ID NO: 895050 - RNA, 22 nt, Human
accaggcuuaauccuuugcuau

SEQ ID NO: 895051 - RNA, 22 nt, Human
ugagcagggagcugggcugagc

SEQ ID NO: 895052 - RNA, 22 nt, Human
uggcaccagggaacaagcauuu

SEQ ID NO: 895053 - RNA, 22 nt, Human
gggugguggccagcagugggca

SEQ ID NO: 895054 - RNA, 22 nt, Human
ucacugaaccagggaucucuag

SEQ ID NO: 895055 - RNA, 22 nt, Human
aaagcagaggugauaugacuua

SEQ ID NO: 895056 - RNA, 22 nt, Human
cuguauguuucuaugaauguga

SEQ ID NO: 895057 - RNA, 22 nt, Human
acauauuggcuuagcucuguga

SEQ ID NO: 895058 - RNA, 22 nt, Human
aagucaggacuuaugcuaccug

SEQ ID NO: 895059 - RNA, 22 nt, Human
aguggcaguaacauuccacaau

SEQ ID NO: 895060 - RNA, 22 nt, Human
gauauuuucauucggaugcuca

SEQ ID NO: 895061 - RNA, 22 nt, Human
cucugggcuucaagucagauuu

SEQ ID NO: 895062 - RNA, 22 nt, Human
aggcauggacauuucggcagcu

SEQ ID NO: 895063 - RNA, 22 nt, Human
uagacauuugucaagaaugacu

SEQ ID NO: 895064 - RNA, 22 nt, Human
aaaagagaauccuguacagaga

SEQ ID NO: 895065 - RNA, 22 nt, Human
uccagcaaagugauaggauuuc

SEQ ID NO: 895066 - RNA, 22 nt, Human
uuuuauguuccucuuuaugcga

SEQ ID NO: 895067 - RNA, 22 nt, Human
acagccagaucugagagaucuu

SEQ ID NO: 895068 - RNA, 19 nt, Human
aaccaggacaaggggcugg

SEQ ID NO: 895069 - RNA, 22 nt, Human
ucucugugcccaguaguucucu

SEQ ID NO: 895070 - RNA, 22 nt, Human
aagagggcucgauuuggcaaaa

SEQ ID NO: 895071 - RNA, 22 nt, Human
uucucuaauggugaugauuaga

SEQ ID NO: 895072 - RNA, 22 nt, Human
uccuggcacccuuggguuggag

SEQ ID NO: 895073 - RNA, 22 nt, Human
cagacaugauguaagcagaggc

SEQ ID NO: 895074 - RNA, 22 nt, Human
aaacauucaaagcaggaugugu

SEQ ID NO: 895075 - RNA, 22 nt, Human
uuccugggcugcagagagcacc

SEQ ID NO: 895076 - RNA, 22 nt, Human
aggcacaggaacaggaaaagag

SEQ ID NO: 895077 - RNA, 22 nt, Human
acacaguaguuugucauugcua

SEQ ID NO: 895078 - RNA, 22 nt, Human
ggccugagucccaccuggcugu

SEQ ID NO: 895079 - RNA, 22 nt, Human
aucagaagaaauggaugugacu

SEQ ID NO: 895080 - RNA, 22 nt, Human
aguggcuggacgacaaggguga

SEQ ID NO: 895081 - RNA, 22 nt, Human
uuuucuucuaccugcuguccaa

SEQ ID NO: 895082 - RNA, 22 nt, Human
acccuggacaucuugucauagc

SEQ ID NO: 895083 - RNA, 22 nt, Human
uacagaaagggaugauugaucu

SEQ ID NO: 895084 - RNA, 22 nt, Human
auucaaaguaauaaccagaacu

SEQ ID NO: 895085 - RNA, 22 nt, Human
caggugggagcggagacugauu

SEQ ID NO: 895086 - RNA, 22 nt, Human
ugaugacaauguugcugcaaua

SEQ ID NO: 895087 - RNA, 21 nt, Human
ugcacagggcccaggagagcc

SEQ ID NO: 895088 - RNA, 22 nt, Human
aguacaaguagaaugcuacaag

SEQ ID NO: 895089 - RNA, 18 nt, Human
ggugccaagucugggauc

SEQ ID NO: 895090 - RNA, 22 nt, Human
ucugaagaacugucuagagaac

SEQ ID NO: 895091 - RNA, 22 nt, Human
agagaugaaaaguggagacugg

SEQ ID NO: 895092 - RNA, 22 nt, Human
aagacauugucauuuuauaauu

SEQ ID NO: 895093 - RNA, 22 nt, Human
caguucuaauuaauaggaguaa

SEQ ID NO: 895094 - RNA, 22 nt, Human
ugggacugcucuugcugggguc

SEQ ID NO: 895095 - RNA, 22 nt, Human
guggcagaaacuggcagaggag

SEQ ID NO: 895096 - RNA, 22 nt, Human
gucuacaaagcauauaaaagag

SEQ ID NO: 895097 - RNA, 22 nt, Human
ugccaggcuuuggucaaaggcu

SEQ ID NO: 895098 - RNA, 22 nt, Human
caacuucacugugccucuaguu

SEQ ID NO: 895099 - RNA, 22 nt, Human
aagucuuacagacaagcugaag

SEQ ID NO: 895100 - RNA, 22 nt, Human
gccugggagauuaauuaggaag

SEQ ID NO: 895101 - RNA, 22 nt, Human
cacagcugaaguagccaugugg

SEQ ID NO: 895102 - RNA, 22 nt, Human
caucauuuuauuaaccaagaaa

SEQ ID NO: 895103 - RNA, 22 nt, Human
aagcuuuucucuguauuaccug

SEQ ID NO: 895104 - RNA, 22 nt, Human
gcagagaaggauugaaaccaga

SEQ ID NO: 895105 - RNA, 22 nt, Human
uucagugccuguccacagcuuc

SEQ ID NO: 895106 - RNA, 22 nt, Human
aaaguucuuucucuuauuuggu

SEQ ID NO: 895107 - RNA, 19 nt, Human
uugagcagugcuuagcacc

SEQ ID NO: 895108 - RNA, 22 nt, Human
uugaaagaggcaaaguuugauc

SEQ ID NO: 895109 - RNA, 22 nt, Human
gguguccucaugauuuucuaga

SEQ ID NO: 895110 - RNA, 22 nt, Human
cccugccucugaagcugcucag

SEQ ID NO: 895111 - RNA, 22 nt, Human
uaagaugucauccacauagagu

SEQ ID NO: 895112 - RNA, 22 nt, Human
uggcugcagugcuugagauguc

SEQ ID NO: 895113 - RNA, 22 nt, Human
ggccaccugggaucucauccug

SEQ ID NO: 895114 - RNA, 19 nt, Human
gcucaacagcucggguccu

SEQ ID NO: 895115 - RNA, 22 nt, Human
aucgaugcugacuucuuguuau

SEQ ID NO: 895116 - RNA, 22 nt, Human
uagcccagagucccaauuccag

SEQ ID NO: 895117 - RNA, 22 nt, Human
uccuggguagagaccugaugaa

SEQ ID NO: 895118 - RNA, 22 nt, Human
agacagacagagaauuuaaaua

SEQ ID NO: 895119 - RNA, 22 nt, Human
caggcacuguguuaggcacugu

SEQ ID NO: 895120 - RNA, 22 nt, Human
aauagaauuuaaaugcaguggc

SEQ ID NO: 895121 - RNA, 22 nt, Human
uggacaggggcugcuguuguca

SEQ ID NO: 895122 - RNA, 22 nt, Human
aucauucaagugcucuaaaaug

SEQ ID NO: 895123 - RNA, 22 nt, Human
cuggcucugagcccaccuccag

SEQ ID NO: 895124 - RNA, 22 nt, Human
uuuguuuaucaaggucuagcau

SEQ ID NO: 895125 - RNA, 22 nt, Human
ucuacaguagaaagaucccagu

SEQ ID NO: 895126 - RNA, 22 nt, Human
gccuguucugcccugagagccu

SEQ ID NO: 895127 - RNA, 22 nt, Human
aguugaaauuaagagagaguuu

SEQ ID NO: 895128 - RNA, 22 nt, Human
aggccuggcuuugguuugcuga

SEQ ID NO: 895129 - RNA, 22 nt, Human
ggugaccucaccuggucccacc

SEQ ID NO: 895130 - RNA, 22 nt, Human
aagaaguuaaauaaauggacca

SEQ ID NO: 895131 - RNA, 22 nt, Human
guuucacaugaaacuuggggaa

SEQ ID NO: 895132 - RNA, 22 nt, Human
uaggcauuauuuuaccacgguc

SEQ ID NO: 895133 - RNA, 22 nt, Human
ggccugggcccacugucaagag

SEQ ID NO: 895134 - RNA, 22 nt, Human
ucuguucuuccuacauucacau

SEQ ID NO: 895135 - RNA, 22 nt, Human
uuauagaacgguucugugcaaa

SEQ ID NO: 895136 - RNA, 22 nt, Human
acccagagugucugucucaguc

SEQ ID NO: 895137 - RNA, 22 nt, Human
ggcuucuggugggagcaugacu

SEQ ID NO: 895138 - RNA, 22 nt, Human
uuauuaauacaugcaccugcau

SEQ ID NO: 895139 - RNA, 22 nt, Human
cuuccuugcggccccugccuag

SEQ ID NO: 895140 - RNA, 22 nt, Human
cagagggacaguaugaugaaag

SEQ ID NO: 895141 - RNA, 22 nt, Human
agguuucugcaauguguguaca

SEQ ID NO: 895142 - RNA, 22 nt, Human
acaguauauauagucuaaaagc

SEQ ID NO: 895143 - RNA, 22 nt, Human
ucuucagagauguaacauaugg

SEQ ID NO: 895144 - RNA, 22 nt, Human
acaguaccugcucucaagcaaa

SEQ ID NO: 895145 - RNA, 22 nt, Human
uccaccaugauuuagcacuggc

SEQ ID NO: 895146 - RNA, 22 nt, Human
gcagaggucucuucaaaauaau

SEQ ID NO: 895147 - RNA, 22 nt, Human
auccauuuccuccacuauaaag

SEQ ID NO: 895148 - RNA, 22 nt, Human
gaauaaucauaucgucucacau

SEQ ID NO: 895149 - RNA, 22 nt, Human
gggagagaauuauugccagacc

SEQ ID NO: 895150 - RNA, 22 nt, Human
cauugaaaauguugcaggcugu

SEQ ID NO: 895151 - RNA, 21 nt, Human
cacauugaauacagagaugga

SEQ ID NO: 895152 - RNA, 22 nt, Human
ugagcuccggcauauggaauua

SEQ ID NO: 895153 - RNA, 22 nt, Human
ugaugugauagaaagguagugg

SEQ ID NO: 895154 - RNA, 20 nt, Human
auccaucagagaaaauaaag

SEQ ID NO: 895155 - RNA, 22 nt, Human
uuagacaucagugcuucucagc

SEQ ID NO: 895156 - RNA, 22 nt, Human
acaggaaccaggcaggucgauu

SEQ ID NO: 895157 - RNA, 22 nt, Human
uucuuguuuauuaagauauaaa

SEQ ID NO: 895158 - RNA, 19 nt, Human
uggcagggagaguuugaag

SEQ ID NO: 895159 - RNA, 22 nt, Human
uaggcucagggcugggugacgg

SEQ ID NO: 895160 - RNA, 22 nt, Human
aagaggcuuucagugaacuugu

SEQ ID NO: 895161 - RNA, 21 nt, Human
acagagccgggcacaaagcug

SEQ ID NO: 895162 - RNA, 22 nt, Human
agcaggcaguguagagccuuca

SEQ ID NO: 895163 - RNA, 22 nt, Human
uuuuggaugagcccagauuucu

SEQ ID NO: 895164 - RNA, 22 nt, Human
uuuaccaaaguacucugaggca

SEQ ID NO: 895165 - RNA, 22 nt, Human
uucuucugaaacauaaucaaua

SEQ ID NO: 895166 - RNA, 22 nt, Human
acagggcaaccucugggagacu

SEQ ID NO: 895167 - RNA, 22 nt, Human
caguuucuguuuuaaauagcag

SEQ ID NO: 895168 - RNA, 22 nt, Human
acaaacugaauggguuuucugu

SEQ ID NO: 895169 - RNA, 19 nt, Human
ccaggccugcgggcguugg

SEQ ID NO: 895170 - RNA, 22 nt, Human
gggccacggaaggaccaguggg

SEQ ID NO: 895171 - RNA, 22 nt, Human
caguggaugucucauaguguga

SEQ ID NO: 895172 - RNA, 22 nt, Human
gugcuggcuggggcaucaggca

SEQ ID NO: 895173 - RNA, 18 nt, Human
agauuuugagaaauacaa

SEQ ID NO: 895174 - RNA, 22 nt, Human
aaugaaugaaccacauauaaca

SEQ ID NO: 895175 - RNA, 22 nt, Human
gcaccacaucaaugaggggagc

SEQ ID NO: 895176 - RNA, 22 nt, Human
uuuccucuaaacgcauuugcuu

SEQ ID NO: 895177 - RNA, 22 nt, Human
ggccugagcagacagcaugaug

SEQ ID NO: 895178 - RNA, 22 nt, Human
ugcugcagaucagcugaguccu

SEQ ID NO: 895179 - RNA, 22 nt, Human
cugcuguguugccagugucacc

SEQ ID NO: 895180 - RNA, 22 nt, Human
aauauguucaaaauagaucacu

SEQ ID NO: 895181 - RNA, 22 nt, Human
ugaaaucuccucuuuauauauc

SEQ ID NO: 895182 - RNA, 22 nt, Human
auguauguuuucaguuguauua

SEQ ID NO: 895183 - RNA, 22 nt, Human
uccgaggccaaagcugugaaua

SEQ ID NO: 895184 - RNA, 22 nt, Human
uccauaggaucugcuucauacu

SEQ ID NO: 895185 - RNA, 22 nt, Human
cagcuacagaggccacauggcu

SEQ ID NO: 895186 - RNA, 22 nt, Human
aacaugcaugaagaaguuauau

SEQ ID NO: 895187 - RNA, 22 nt, Human
caauagauguuuuugcuuacca

SEQ ID NO: 895188 - RNA, 20 nt, Human
caccuggauaugacccagcu

SEQ ID NO: 895189 - RNA, 19 nt, Human
gccucugcuggggacaggc

SEQ ID NO: 895190 - RNA, 23 nt, Human
ccagccucugggucuucauccag

SEQ ID NO: 895191 - RNA, 22 nt, Human
ggaggagagagguugcaaacac

SEQ ID NO: 895192 - RNA, 22 nt, Human
agacaauuucaaaguaauauua

SEQ ID NO: 895193 - RNA, 22 nt, Human
uacagauaaaaaugcuguucuu

SEQ ID NO: 895194 - RNA, 22 nt, Human
acagguggacacagcagcaguc

SEQ ID NO: 895195 - RNA, 22 nt, Human
ccagaacagaccugccugaccu

SEQ ID NO: 895196 - RNA, 22 nt, Human
uguacacaauucuuaacauaca

SEQ ID NO: 895197 - RNA, 22 nt, Human
ucaugcugaguccuggcuuugu

SEQ ID NO: 895198 - RNA, 22 nt, Human
gacaggaaacaagaaggcagga

SEQ ID NO: 895199 - RNA, 22 nt, Human
uaugcauauguguucauuggag

SEQ ID NO: 895200 - RNA, 22 nt, Human
ugggagcagcagggagaugcgg

SEQ ID NO: 895201 - RNA, 22 nt, Human
gagacacacccaagguuaugag

SEQ ID NO: 895202 - RNA, 22 nt, Human
agacagacuguguuugaauccu

SEQ ID NO: 895203 - RNA, 22 nt, Human
gcaggggaguccacucuaugca

SEQ ID NO: 895204 - RNA, 22 nt, Human
cccuugggugccagccacaagu

SEQ ID NO: 895205 - RNA, 22 nt, Human
acauguuuugugccuugacuag

SEQ ID NO: 895206 - RNA, 19 nt, Human
ugucuuaauuaacucagag

SEQ ID NO: 895207 - RNA, 22 nt, Human
uuuccugagccagaguuucauu

SEQ ID NO: 895208 - RNA, 20 nt, Human
aggcagcugggaaaugaggg

SEQ ID NO: 895209 - RNA, 22 nt, Human
ugggagagagaauucccagugg

SEQ ID NO: 895210 - RNA, 22 nt, Human
acccuggguucccgcagcacca

SEQ ID NO: 895211 - RNA, 22 nt, Human
cacacagacagcucucugaaga

SEQ ID NO: 895212 - RNA, 19 nt, Human
cugaggugaggggcaucau

SEQ ID NO: 895213 - RNA, 22 nt, Human
uauuugguggcugauuaucuuu

SEQ ID NO: 895214 - RNA, 23 nt, Human
auagaccauugucucacacuuca

SEQ ID NO: 895215 - RNA, 22 nt, Human
gagcuccagggaacagcagcua

SEQ ID NO: 895216 - RNA, 22 nt, Human
aaauagcacagcagcugaggcu

SEQ ID NO: 895217 - RNA, 22 nt, Human
aauucugaggagggaagaggaa

SEQ ID NO: 895218 - RNA, 22 nt, Human
uacuuguuaaaauauuagcuau

SEQ ID NO: 895219 - RNA, 22 nt, Human
gagcagcugguaggugaaccca

SEQ ID NO: 895220 - RNA, 22 nt, Human
aaaguacugaugccaucagcac

SEQ ID NO: 895221 - RNA, 19 nt, Human
ccacagagcaugcugaggc

SEQ ID NO: 895222 - RNA, 22 nt, Human
cccagagcucagugugcaaggu

SEQ ID NO: 895223 - RNA, 22 nt, Human
cuucuucuuuugugggugguaa

SEQ ID NO: 895224 - RNA, 22 nt, Human
cgucuucacauccuucccaugg

SEQ ID NO: 895225 - RNA, 19 nt, Human
cucuuacagaauagacaca

SEQ ID NO: 895226 - RNA, 22 nt, Human
gcaugucuguaauuacagagcc

SEQ ID NO: 895227 - RNA, 22 nt, Human
uggcuccuuuccagccugguuu

SEQ ID NO: 895228 - RNA, 22 nt, Human
ggccuuaggcucaacaggcaga

SEQ ID NO: 895229 - RNA, 22 nt, Human
ucagggcacugucaccugauau

SEQ ID NO: 895230 - RNA, 22 nt, Human
cacugccuucaccugcccuauc

SEQ ID NO: 895231 - RNA, 22 nt, Human
cuugucugcuauaaaaauccag

SEQ ID NO: 895232 - RNA, 22 nt, Human
aagacagagacucugcaacagg

SEQ ID NO: 895233 - RNA, 22 nt, Human
acagcagacagucggcuuccug

SEQ ID NO: 895234 - RNA, 22 nt, Human
gaggacucugcaggcugcuccu

SEQ ID NO: 895235 - RNA, 22 nt, Human
ugucuccauagaagagacugca

SEQ ID NO: 895236 - RNA, 22 nt, Human
aaaggagacuucagaucuccuu

SEQ ID NO: 895237 - RNA, 22 nt, Human
uaaacuguggaauguucucuuu

SEQ ID NO: 895238 - RNA, 22 nt, Human
guggcaggagagacacagccau

SEQ ID NO: 895239 - RNA, 22 nt, Human
gauuuguuucaaguuagcaucu

SEQ ID NO: 895240 - RNA, 22 nt, Human
ccaggagcuggagggugcagug

SEQ ID NO: 895241 - RNA, 22 nt, Human
augcuuuacccacaccaggaug

SEQ ID NO: 895242 - RNA, 22 nt, Human
aauccacacaucuggcauguga

SEQ ID NO: 895243 - RNA, 22 nt, Human
gggggcugaggcuguucugagg

SEQ ID NO: 895244 - RNA, 22 nt, Human
agagcuuuuacuuacauucuau

SEQ ID NO: 895245 - RNA, 22 nt, Human
ggcaaggggucaggcugagaca

SEQ ID NO: 895246 - RNA, 22 nt, Human
ccaggcaacggagcccacugcc

SEQ ID NO: 895247 - RNA, 22 nt, Human
cccaagaucuuucgugcacuaa

SEQ ID NO: 895248 - RNA, 22 nt, Human
aagcaauacaaguggucauuga

SEQ ID NO: 895249 - RNA, 22 nt, Human
agguauuugucucagauugggu

SEQ ID NO: 895250 - RNA, 22 nt, Human
ucacaguauuggggguggagga

SEQ ID NO: 895251 - RNA, 22 nt, Human
gugcuucuccguucugcagcac

SEQ ID NO: 895252 - RNA, 22 nt, Human
cccaggagagaggccaguuggc

SEQ ID NO: 895253 - RNA, 22 nt, Human
gggccaagggugcguggcagga

SEQ ID NO: 895254 - RNA, 20 nt, Human
ugcagggcucugcuucucuc

SEQ ID NO: 895255 - RNA, 22 nt, Human
cccagacauaacagcagagagg

SEQ ID NO: 895256 - RNA, 22 nt, Human
ggugagacuuuagaagagccag

SEQ ID NO: 895257 - RNA, 22 nt, Human
agaaguuugguccuuuucaagg

SEQ ID NO: 895258 - RNA, 22 nt, Human
auguuuuuaaauagacuuacag

SEQ ID NO: 895259 - RNA, 22 nt, Human
cauaauuucuguaucagcacca

SEQ ID NO: 895260 - RNA, 22 nt, Human
ugaggccauggucuucccaguc

SEQ ID NO: 895261 - RNA, 22 nt, Human
ucauguguguuucauguaugga

SEQ ID NO: 895262 - RNA, 22 nt, Human
uugauuugauuguaauggcucu

SEQ ID NO: 895263 - RNA, 22 nt, Human
aucgaggagaguugguuuguuu

SEQ ID NO: 895264 - RNA, 22 nt, Human
cgucaucacggcaagcaucucc

SEQ ID NO: 895265 - RNA, 22 nt, Human
agcaagauuuaaacccagguca

SEQ ID NO: 895266 - RNA, 23 nt, Human
accaggagaaaagcuuugcggga

SEQ ID NO: 895267 - RNA, 22 nt, Human
uucagugugaagcuucugaaag

SEQ ID NO: 895268 - RNA, 22 nt, Human
agaacaaugcguauuuuacucc

SEQ ID NO: 895269 - RNA, 22 nt, Human
aaaucagaugcuuccuaguugg

SEQ ID NO: 895270 - RNA, 22 nt, Human
gugucauggaaaauugcaaugg

SEQ ID NO: 895271 - RNA, 22 nt, Human
aucuaagaguuaacaucaagaa

SEQ ID NO: 895272 - RNA, 22 nt, Human
acaguguacuccuuuaccggag

SEQ ID NO: 895273 - RNA, 22 nt, Human
ucaggugaccugagccacuaug

SEQ ID NO: 895274 - RNA, 22 nt, Human
cagagaggauggauuccauagc

SEQ ID NO: 895275 - RNA, 22 nt, Human
aaacaggcuuuuaagucaauag

SEQ ID NO: 895276 - RNA, 22 nt, Human
cccugccuugggguccacaccg

SEQ ID NO: 895277 - RNA, 22 nt, Human
cugaagggucuggggcugugcc

SEQ ID NO: 895278 - RNA, 22 nt, Human
ggagcugcucagagccaguccc

SEQ ID NO: 895279 - RNA, 22 nt, Human
uaaucuguuaauauuuguaucc

SEQ ID NO: 895280 - RNA, 22 nt, Human
accacugcccauggugaaaacu

SEQ ID NO: 895281 - RNA, 22 nt, Human
gccccuucuucuggagauucaa

SEQ ID NO: 895282 - RNA, 22 nt, Human
aaucuuaaagaauauucuacca

SEQ ID NO: 895283 - RNA, 22 nt, Human
gauucaaaaguuugagcuccaa

SEQ ID NO: 895284 - RNA, 21 nt, Human
gacucuggggucagcucaacc

SEQ ID NO: 895285 - RNA, 22 nt, Human
caggccucuauggucagcugag

SEQ ID NO: 895286 - RNA, 22 nt, Human
caguuuuauacacugcagcucc

SEQ ID NO: 895287 - RNA, 22 nt, Human
auuagcuaggaaauuuuguguc

SEQ ID NO: 895288 - RNA, 22 nt, Human
agaauucuuggugguuagaaua

SEQ ID NO: 895289 - RNA, 22 nt, Human
ugccacagaggugaagcccacu

SEQ ID NO: 895290 - RNA, 22 nt, Human
aguguauuugccuauaaaaaug

SEQ ID NO: 895291 - RNA, 21 nt, Human
agaggucauugggcugguucu

SEQ ID NO: 895292 - RNA, 22 nt, Human
gucugaggcgaggccugagaac

SEQ ID NO: 895293 - RNA, 21 nt, Human
agacagcagauagucgaaagg

SEQ ID NO: 895294 - RNA, 22 nt, Human
ugguaagggguggaaccagagc

SEQ ID NO: 895295 - RNA, 22 nt, Human
aggcaggagugacccugacagg

SEQ ID NO: 895296 - RNA, 22 nt, Human
aggaaaaaccuguuaaugguag

SEQ ID NO: 895297 - RNA, 22 nt, Human
caggaagagaacauggaggcug

SEQ ID NO: 895298 - RNA, 22 nt, Human
aucuauuuuaaauggcaguaaa

SEQ ID NO: 895299 - RNA, 19 nt, Human
gccaggagggcucuggcug

SEQ ID NO: 895300 - RNA, 22 nt, Human
ccugccuguaagauggguacaa

SEQ ID NO: 895301 - RNA, 22 nt, Human
agcagggcugcagugugucuuu

SEQ ID NO: 895302 - RNA, 22 nt, Human
ugacacccucuccuggagagag

SEQ ID NO: 895303 - RNA, 22 nt, Human
ucugccugaaauucacauguaa

SEQ ID NO: 895304 - RNA, 22 nt, Human
guauacaauacacaaugcucug

SEQ ID NO: 895305 - RNA, 22 nt, Human
agggccagcugcagaauuagca

SEQ ID NO: 895306 - RNA, 22 nt, Human
ccugaggacagugugaccaugg

SEQ ID NO: 895307 - RNA, 22 nt, Human
cuucuucagaggccagccucug

SEQ ID NO: 895308 - RNA, 22 nt, Human
ugcaccuuuuagaagucauuuu

SEQ ID NO: 895309 - RNA, 22 nt, Human
ugcagaaauaacucauauugca

SEQ ID NO: 895310 - RNA, 22 nt, Human
aagaacaacugcuuuaaaagca

SEQ ID NO: 895311 - RNA, 22 nt, Human
ucuaagaucuacuauacaugug

SEQ ID NO: 895312 - RNA, 22 nt, Human
aguuguaaauucauagcuuaua

SEQ ID NO: 895313 - RNA, 22 nt, Human
ugcacaggugguccaucugcac

SEQ ID NO: 895314 - RNA, 22 nt, Human
aaauguuccauuauuguguaau

SEQ ID NO: 895315 - RNA, 22 nt, Human
agagacagacacaucgggcugc

SEQ ID NO: 895316 - RNA, 22 nt, Human
cuucuaggucuugauugaaugu

SEQ ID NO: 895317 - RNA, 22 nt, Human
acagcucugagauauuacuauu

SEQ ID NO: 895318 - RNA, 22 nt, Human
ugucuucagaauuaagaguaug

SEQ ID NO: 895319 - RNA, 22 nt, Human
uaaaugaaaggguuuaauuuau

SEQ ID NO: 895320 - RNA, 22 nt, Human
uucugcucugacuugcaaggaa

SEQ ID NO: 895321 - RNA, 22 nt, Human
cgcaggcaagagaguacaguua

SEQ ID NO: 895322 - RNA, 22 nt, Human
guuaacaagaauuacucuggaa

SEQ ID NO: 895323 - RNA, 23 nt, Human
uggcagcagaucuuaaagugacc

SEQ ID NO: 895324 - RNA, 22 nt, Human
augcaccccagaagcugcagug

SEQ ID NO: 895325 - RNA, 22 nt, Human
aucuauacccaucaugauuuaa

SEQ ID NO: 895326 - RNA, 22 nt, Human
ugccagcucccuuuucuccucc

SEQ ID NO: 895327 - RNA, 22 nt, Human
cagacauccagguacgagcuuu

SEQ ID NO: 895328 - RNA, 22 nt, Human
gguggcagggagugucccuggg

SEQ ID NO: 895329 - RNA, 23 nt, Human
cucugggcgggcaggucagccuc

SEQ ID NO: 895330 - RNA, 22 nt, Human
gaugacacuugugagaaaucaa

SEQ ID NO: 895331 - RNA, 22 nt, Human
acaagaauguagauuaguuaag

SEQ ID NO: 895332 - RNA, 23 nt, Human
auggggcucaacacuuaguagcu

SEQ ID NO: 895333 - RNA, 22 nt, Human
ugcuguguaaaaggugauugaa

SEQ ID NO: 895334 - RNA, 22 nt, Human
gcauggcuuccaaaagugcuaa

SEQ ID NO: 895335 - RNA, 22 nt, Human
cagggcuggauccuccagacuc

SEQ ID NO: 895336 - RNA, 22 nt, Human
cucaggauggaagccuacagga

SEQ ID NO: 895337 - RNA, 22 nt, Human
aguuggcagucugcaaccugga

SEQ ID NO: 895338 - RNA, 22 nt, Human
agcagugaugcaugacagccua

SEQ ID NO: 895339 - RNA, 22 nt, Human
agaaauacuaggaauauucaua

SEQ ID NO: 895340 - RNA, 20 nt, Human
agcuacaaugcgaagcuggc

SEQ ID NO: 895341 - RNA, 22 nt, Human
ccugggucuguauugguaggua

SEQ ID NO: 895342 - RNA, 22 nt, Human
acaggcugggcgcuuccugcgg

SEQ ID NO: 895343 - RNA, 18 nt, Human
uugauaaacaauuucauu

SEQ ID NO: 895344 - RNA, 22 nt, Human
acucagaaccauuuacucugag

SEQ ID NO: 895345 - RNA, 22 nt, Human
cugaggagugggugggcaguga

SEQ ID NO: 895346 - RNA, 22 nt, Human
ugacaaauucauauuucagagg

SEQ ID NO: 895347 - RNA, 22 nt, Human
ucacauacugaaaguccaguga

SEQ ID NO: 895348 - RNA, 22 nt, Human
auaacagacuuagaguuacaag

SEQ ID NO: 895349 - RNA, 22 nt, Human
uuagaagcacuaauuacucaca

SEQ ID NO: 895350 - RNA, 22 nt, Human
ggucacacaccaggaccugcag

SEQ ID NO: 895351 - RNA, 22 nt, Human
uagguacuuaagaucucagcua

SEQ ID NO: 895352 - RNA, 22 nt, Human
cagagcacugcuuggaggauuu

SEQ ID NO: 895353 - RNA, 22 nt, Human
uggcccagcacuccaaguaggg

SEQ ID NO: 895354 - RNA, 22 nt, Human
ucucuguguucccuguuuucuc

SEQ ID NO: 895355 - RNA, 22 nt, Human
auuguacaugcagugagucauc

SEQ ID NO: 895356 - RNA, 22 nt, Human
agucuucuuucauuuacucagu

SEQ ID NO: 895357 - RNA, 23 nt, Human
cugauuugagcagaauaaaauag

SEQ ID NO: 895358 - RNA, 20 nt, Human
ucuccagaugcagaugacau

SEQ ID NO: 895359 - RNA, 22 nt, Human
cacauuucauuggcuuacguaa

SEQ ID NO: 895360 - RNA, 22 nt, Human
cagaaugaguagcaucuucacc

SEQ ID NO: 895361 - RNA, 22 nt, Human
ucagggccugagcuuuuaauua

SEQ ID NO: 895362 - RNA, 22 nt, Human
ugcaagaaagguggggccaggc

SEQ ID NO: 895363 - RNA, 22 nt, Human
uagaacaugggauagaguuuuu

SEQ ID NO: 895364 - RNA, 22 nt, Human
uuaucguaucucuuggucuuca

SEQ ID NO: 895365 - RNA, 22 nt, Human
ccuccaggcugguuaucagcug

SEQ ID NO: 895366 - RNA, 22 nt, Human
uuucugaaaucucuuuugagga

SEQ ID NO: 895367 - RNA, 22 nt, Human
ucuguccaguggcucucaggga

SEQ ID NO: 895368 - RNA, 22 nt, Human
aagccuugauucacucugugga

SEQ ID NO: 895369 - RNA, 22 nt, Human
auauuaagaugcuauugguuuu

SEQ ID NO: 895370 - RNA, 22 nt, Human
aauuccucuaucuuucuucaag

SEQ ID NO: 895371 - RNA, 22 nt, Human
caggaaauuggcuauuugggau

SEQ ID NO: 895372 - RNA, 22 nt, Human
uaguacagagacacuggaggaa

SEQ ID NO: 895373 - RNA, 22 nt, Human
gcucugagauugagccuuuggu

SEQ ID NO: 895374 - RNA, 22 nt, Human
acaucauuguccguugucauga

SEQ ID NO: 895375 - RNA, 20 nt, Human
agaggcuuucuuguagucag

SEQ ID NO: 895376 - RNA, 23 nt, Human
aggagaagagauuuccacaugca

SEQ ID NO: 895377 - RNA, 22 nt, Human
augcacagauccuggcacuuag

SEQ ID NO: 895378 - RNA, 22 nt, Human
gcugcugucucaugcgaugcgg

SEQ ID NO: 895379 - RNA, 21 nt, Human
gucacacaggccuggagcuga

SEQ ID NO: 895380 - RNA, 22 nt, Human
ucugagagcaaggcauuagcag

SEQ ID NO: 895381 - RNA, 22 nt, Human
uuuacagcuagacauaccugag

SEQ ID NO: 895382 - RNA, 17 nt, Human
ugcuggaggcgggguau

SEQ ID NO: 895383 - RNA, 22 nt, Human
cuggagggagauucaaaggagg

SEQ ID NO: 895384 - RNA, 22 nt, Human
gcuccaggguggaugacaauuc

SEQ ID NO: 895385 - RNA, 22 nt, Human
acugggcaccaucaugagaugg

SEQ ID NO: 895386 - RNA, 22 nt, Human
aagauucuuugaggauuuuacu

SEQ ID NO: 895387 - RNA, 22 nt, Human
gucuuauuaaauugaacccuca

SEQ ID NO: 895388 - RNA, 22 nt, Human
cagaaaggcacccacugggucu

SEQ ID NO: 895389 - RNA, 22 nt, Human
ucugugugcccaccugacaccu

SEQ ID NO: 895390 - RNA, 22 nt, Human
uggugagaccuuguuccuuaug

SEQ ID NO: 895391 - RNA, 22 nt, Human
gccugucugcagggcugucauu

SEQ ID NO: 895392 - RNA, 22 nt, Human
agaggcuuggccucaguucugu

SEQ ID NO: 895393 - RNA, 22 nt, Human
ggaagacaagcaguggcugagc

SEQ ID NO: 895394 - RNA, 22 nt, Human
acacauguuuccaaaagcaccc

SEQ ID NO: 895395 - RNA, 20 nt, Human
gcaaaauaggcucuguuggu

SEQ ID NO: 895396 - RNA, 22 nt, Human
uaucuacaggugucagguaaga

SEQ ID NO: 895397 - RNA, 20 nt, Human
aguccaaagccuguuuacuu

SEQ ID NO: 895398 - RNA, 22 nt, Human
cugugugugcuacaggcuucca

SEQ ID NO: 895399 - RNA, 22 nt, Human
caaacucucccacucacucuga

SEQ ID NO: 895400 - RNA, 22 nt, Human
agaggaagccauugcuuacuga

SEQ ID NO: 895401 - RNA, 22 nt, Human
auguuuuacccuuugcacaaac

SEQ ID NO: 895402 - RNA, 22 nt, Human
ugaggccucugugccauccagg

SEQ ID NO: 895403 - RNA, 22 nt, Human
gucugcccucacgccagcuggg

SEQ ID NO: 895404 - RNA, 22 nt, Human
cauaaucagauguguacauaag

SEQ ID NO: 895405 - RNA, 22 nt, Human
cuccugcaugcucacauaugcc

SEQ ID NO: 895406 - RNA, 22 nt, Human
ucuuccugcuuggugugucugg

SEQ ID NO: 895407 - RNA, 22 nt, Human
ucuagaaaaccaauauuacaug

SEQ ID NO: 895408 - RNA, 22 nt, Human
aaccaacauaggaaugcagaga

SEQ ID NO: 895409 - RNA, 22 nt, Human
gagugaggcuggaaucauggcu

SEQ ID NO: 895410 - RNA, 22 nt, Human
agaaagacaaaaugcaguggcu

SEQ ID NO: 895411 - RNA, 22 nt, Human
caggaaaaugucaauggaaagc

SEQ ID NO: 895412 - RNA, 22 nt, Human
cagcucucacacuuagcuucua

SEQ ID NO: 895413 - RNA, 22 nt, Human
ugcaucuggccuuugcuggcua

SEQ ID NO: 895414 - RNA, 22 nt, Human
gcaggccugucuugcucgcccu

SEQ ID NO: 895415 - RNA, 20 nt, Human
gccucagucacauggccuac

SEQ ID NO: 895416 - RNA, 22 nt, Human
aaaggucuugucuugacagagu

SEQ ID NO: 895417 - RNA, 22 nt, Human
ugcuucucagccugucuggaaa

SEQ ID NO: 895418 - RNA, 18 nt, Human
gaaaggagagacaguagg

SEQ ID NO: 895419 - RNA, 22 nt, Human
uagaaccaccuucuccuuuacc

SEQ ID NO: 895420 - RNA, 22 nt, Human
ugccacagagacuuucauugua

SEQ ID NO: 895421 - RNA, 19 nt, Human
uuggaaggagccagagugg

SEQ ID NO: 895422 - RNA, 20 nt, Human
ugcacacacccuguccucca

SEQ ID NO: 895423 - RNA, 22 nt, Human
aaauaacuugguuucaucagag

SEQ ID NO: 895424 - RNA, 22 nt, Human
aacaguggggaaaagaguuggu

SEQ ID NO: 895425 - RNA, 22 nt, Human
agucagagaaaacagcccugug

SEQ ID NO: 895426 - RNA, 22 nt, Human
cagcauaggauguggagccagg

SEQ ID NO: 895427 - RNA, 22 nt, Human
augcuguccacucuugguguuu

SEQ ID NO: 895428 - RNA, 22 nt, Human
acaugcaucuccaggcucauuu

SEQ ID NO: 895429 - RNA, 19 nt, Human
ccugaguguuucagagaca

SEQ ID NO: 895430 - RNA, 22 nt, Human
auguaguauuuggaaauguaaa

SEQ ID NO: 895431 - RNA, 22 nt, Human
uuauuuccacaaugugguaggg

SEQ ID NO: 895432 - RNA, 22 nt, Human
ugcacaguuggcuacaucgugg

SEQ ID NO: 895433 - RNA, 22 nt, Human
cucagcuacgcuuucaccagcu

SEQ ID NO: 895434 - RNA, 22 nt, Human
ucugggaacauuuugagggcaa

SEQ ID NO: 895435 - RNA, 22 nt, Human
gcgggccaccuuggagagcgcu

SEQ ID NO: 895436 - RNA, 22 nt, Human
gaagccuugaacugcaaacccc

SEQ ID NO: 895437 - RNA, 22 nt, Human
ggagggggaagaagcuaaagac

SEQ ID NO: 895438 - RNA, 22 nt, Human
cuauuuaagaauaaaaggggca

SEQ ID NO: 895439 - RNA, 22 nt, Human
uucuuacaaguauuccaggucc

SEQ ID NO: 895440 - RNA, 22 nt, Human
cucuuuggucgcaucauccauu

SEQ ID NO: 895441 - RNA, 22 nt, Human
gccaccuccuuauuccaccugu

SEQ ID NO: 895442 - RNA, 20 nt, Human
ccucugccuuucuagucuga

SEQ ID NO: 895443 - RNA, 22 nt, Human
acagggccaauguuagcauuga

SEQ ID NO: 895444 - RNA, 22 nt, Human
acucucccacguucgacucuaa

SEQ ID NO: 895445 - RNA, 22 nt, Human
cagggcucccuugcaaggaggg

SEQ ID NO: 895446 - RNA, 19 nt, Human
ggagaagcccaggaauccu

SEQ ID NO: 895447 - RNA, 22 nt, Human
ugcccauguuucucuguauccc

SEQ ID NO: 895448 - RNA, 22 nt, Human
cugugucuuccucugcccaggc

SEQ ID NO: 895449 - RNA, 23 nt, Human
uugaaagauugcuaaguaaaaau

SEQ ID NO: 895450 - RNA, 22 nt, Human
ucaggaaauuaaacacuugaaa

SEQ ID NO: 895451 - RNA, 22 nt, Human
cuguccagugcagagaacagag

SEQ ID NO: 895452 - RNA, 22 nt, Human
ugcucacaauuaucagaaguau

SEQ ID NO: 895453 - RNA, 18 nt, Human
aagaaguuggccaaagag

SEQ ID NO: 895454 - RNA, 22 nt, Human
uucucauaaauccugagaccua

SEQ ID NO: 895455 - RNA, 22 nt, Human
cagaggaugaucuggccucucu

SEQ ID NO: 895456 - RNA, 22 nt, Human
uuagcauuucaguacacauguu

SEQ ID NO: 895457 - RNA, 22 nt, Human
guauucuugaguggcaacuagg

SEQ ID NO: 895458 - RNA, 22 nt, Human
gcuggcagacugggggcagaac

SEQ ID NO: 895459 - RNA, 22 nt, Human
uagcagcgacuaaugaauaagu

SEQ ID NO: 895460 - RNA, 22 nt, Human
agagaccaagggaauagucuca

SEQ ID NO: 895461 - RNA, 22 nt, Human
gcagcagaguuugggagauggu

SEQ ID NO: 895462 - RNA, 22 nt, Human
agucagcagugaaagcacagcc

SEQ ID NO: 895463 - RNA, 22 nt, Human
uuccugggcucuggcuggccua

SEQ ID NO: 895464 - RNA, 22 nt, Human
ucuggaagcuggaguccaggaa

SEQ ID NO: 895465 - RNA, 22 nt, Human
aaggccaggacaccaggggacu

SEQ ID NO: 895466 - RNA, 22 nt, Human
aguguucauuuauucauucacu

SEQ ID NO: 895467 - RNA, 21 nt, Human
ucuugaaaaguuagauucucu

SEQ ID NO: 895468 - RNA, 22 nt, Human
aacaaauguguuuuguaauuaa

SEQ ID NO: 895469 - RNA, 21 nt, Human
aguaucauaaugaauaguucu

SEQ ID NO: 895470 - RNA, 22 nt, Human
gucuccuggaaauaugcccaua

SEQ ID NO: 895471 - RNA, 22 nt, Human
augcacaauuaggauauagcuu

SEQ ID NO: 895472 - RNA, 22 nt, Human
uuuugcugcauugaagucagau

SEQ ID NO: 895473 - RNA, 22 nt, Human
acucacugcacuuugaaaugug

SEQ ID NO: 895474 - RNA, 22 nt, Human
ucucccagugucuggcagucag

SEQ ID NO: 895475 - RNA, 22 nt, Human
uguuuaaauagaacauacugca

SEQ ID NO: 895476 - RNA, 22 nt, Human
ugacauuucuuguugauauaaa

SEQ ID NO: 895477 - RNA, 22 nt, Human
uccauucaauucuaaagcccuu

SEQ ID NO: 895478 - RNA, 22 nt, Human
uuuucaguugugcucucuaguu

SEQ ID NO: 895479 - RNA, 22 nt, Human
aaguuuauguucuuugaaggca

SEQ ID NO: 895480 - RNA, 22 nt, Human
ggugcugguucaggguggcugu

SEQ ID NO: 895481 - RNA, 22 nt, Human
uggggagaagcaauagacucua

SEQ ID NO: 895482 - RNA, 22 nt, Human
ugggugugccauauuccauuuc

SEQ ID NO: 895483 - RNA, 22 nt, Human
cucuucuuuaguccagaccauc

SEQ ID NO: 895484 - RNA, 22 nt, Human
uagcaacagcaauagugguauu

SEQ ID NO: 895485 - RNA, 22 nt, Human
cugcugacucuuccuggaguga

SEQ ID NO: 895486 - RNA, 22 nt, Human
gaaagcuuccauuuuguacauu

SEQ ID NO: 895487 - RNA, 22 nt, Human
ucugcagagauucugggcugag

SEQ ID NO: 895488 - RNA, 18 nt, Human
ggcagccuggacaugcuc

SEQ ID NO: 895489 - RNA, 22 nt, Human
ggcuagaacuuuacacuuugca

SEQ ID NO: 895490 - RNA, 22 nt, Human
aauguuuuacagaucccauuag

SEQ ID NO: 895491 - RNA, 22 nt, Human
aaaugcucugcaucugauagac

SEQ ID NO: 895492 - RNA, 22 nt, Human
cacagagauggucuggcaggug

SEQ ID NO: 895493 - RNA, 22 nt, Human
ugggugcaggucuugugccagg

SEQ ID NO: 895494 - RNA, 22 nt, Human
gagaaagacguaggcugggagg

SEQ ID NO: 895495 - RNA, 22 nt, Human
aauucuguuacuaaugugaugu

SEQ ID NO: 895496 - RNA, 22 nt, Human
aauucacaauguguagucaugc

SEQ ID NO: 895497 - RNA, 20 nt, Human
gcaaggcuccaaggggugug

SEQ ID NO: 895498 - RNA, 22 nt, Human
acucaucuuugaauuuucagua

SEQ ID NO: 895499 - RNA, 22 nt, Human
aggcuggcuucccaagcguccu

SEQ ID NO: 895500 - RNA, 20 nt, Human
ggccugagcauggcuggcag

SEQ ID NO: 895501 - RNA, 22 nt, Human
gucuuguuggaguucuugcagc

SEQ ID NO: 895502 - RNA, 22 nt, Human
gggcaguguggucgugccuuug

SEQ ID NO: 895503 - RNA, 22 nt, Human
cagaucuguuugccagaucagc

SEQ ID NO: 895504 - RNA, 22 nt, Human
auccugggcaagucaauguccc

SEQ ID NO: 895505 - RNA, 22 nt, Human
ucagggagccuggacuucaagg

SEQ ID NO: 895506 - RNA, 22 nt, Human
guacaguagagccagguucagu

SEQ ID NO: 895507 - RNA, 23 nt, Human
accaacaagccucuggagagugg

SEQ ID NO: 895508 - RNA, 22 nt, Human
ugagcugucugaauggugagga

SEQ ID NO: 895509 - RNA, 22 nt, Human
ugccuuggugcuucuucaugug

SEQ ID NO: 895510 - RNA, 22 nt, Human
uuucuguuuagcauaaaguggc

SEQ ID NO: 895511 - RNA, 22 nt, Human
agaagucugguugcaaagcgcu

SEQ ID NO: 895512 - RNA, 22 nt, Human
ggcccagagcucccuggcaccu

SEQ ID NO: 895513 - RNA, 22 nt, Human
ucucagaaaagagcuucagaaa

SEQ ID NO: 895514 - RNA, 20 nt, Human
ugcuugucaugcacucaggc

SEQ ID NO: 895515 - RNA, 22 nt, Human
aagcagagagcagaauuaaguu

SEQ ID NO: 895516 - RNA, 22 nt, Human
uguagcaguuuuucauuaucca

SEQ ID NO: 895517 - RNA, 22 nt, Human
aaggcugagguagggccuaaaa

SEQ ID NO: 895518 - RNA, 18 nt, Human
ccucugccauagccagca

SEQ ID NO: 895519 - RNA, 22 nt, Human
uggacaguaggaagaguguggg

SEQ ID NO: 895520 - RNA, 22 nt, Human
ccuuuaugucacucuggagagc

SEQ ID NO: 895521 - RNA, 22 nt, Human
uucuuucccaguagaugugaaa

SEQ ID NO: 895522 - RNA, 22 nt, Human
ccuagcagggaagcagugagga

SEQ ID NO: 895523 - RNA, 22 nt, Human
agcuggcagucggccuugaugc

SEQ ID NO: 895524 - RNA, 22 nt, Human
aacauuagauuuguuuuucuag

SEQ ID NO: 895525 - RNA, 22 nt, Human
gaccaucuguuuaaagcagugu

SEQ ID NO: 895526 - RNA, 22 nt, Human
guacagagaagguuacauauga

SEQ ID NO: 895527 - RNA, 22 nt, Human
ggaggaagcccucggugcccca

SEQ ID NO: 895528 - RNA, 22 nt, Human
uguuaaacucguagguuaggcu

SEQ ID NO: 895529 - RNA, 19 nt, Human
agcugggcugucacaguga

SEQ ID NO: 895530 - RNA, 22 nt, Human
acagggcuuagaacuuggccuc

SEQ ID NO: 895531 - RNA, 22 nt, Human
gaggcuguguuucagugaggcc

SEQ ID NO: 895532 - RNA, 22 nt, Human
uuauucagcagggacuuccuuu

SEQ ID NO: 895533 - RNA, 22 nt, Human
caagcccuuccgggaacaguug

SEQ ID NO: 895534 - RNA, 22 nt, Human
ucaaacauaucugauuuuccau

SEQ ID NO: 895535 - RNA, 22 nt, Human
ucugugcucuucucaguaucac

SEQ ID NO: 895536 - RNA, 22 nt, Human
aauucugagaacaaaagguacu

SEQ ID NO: 895537 - RNA, 22 nt, Human
uugccauuccaggguauuaggg

SEQ ID NO: 895538 - RNA, 22 nt, Human
cagaacagggcccaaggggucg

SEQ ID NO: 895539 - RNA, 22 nt, Human
auugaucaugcagaugcuucac

SEQ ID NO: 895540 - RNA, 22 nt, Human
uucagaaaggcugugccagcca

SEQ ID NO: 895541 - RNA, 22 nt, Human
gccucagcucccagcccaggcu

SEQ ID NO: 895542 - RNA, 22 nt, Human
gauauuuacauuaagcacauug

SEQ ID NO: 895543 - RNA, 22 nt, Human
aaagacuaaacaaccaauaucu

SEQ ID NO: 895544 - RNA, 22 nt, Human
aacuuaaacccacucauguaga

SEQ ID NO: 895545 - RNA, 23 nt, Human
ugcauccucauuuuucacacgag

SEQ ID NO: 895546 - RNA, 22 nt, Human
gcugcagacugggaggcaggug

SEQ ID NO: 895547 - RNA, 22 nt, Human
aggucucacuuuguggaaguga

SEQ ID NO: 895548 - RNA, 22 nt, Human
gcugcagagugaugaagugggg

SEQ ID NO: 895549 - RNA, 23 nt, Human
cuaggcaggauuguaggcgggua

SEQ ID NO: 895550 - RNA, 22 nt, Human
ggcuuggagucauacugagaau

SEQ ID NO: 895551 - RNA, 22 nt, Human
gacagcaacacaugcuuagugc

SEQ ID NO: 895552 - RNA, 22 nt, Human
uuggcagcauuccagccaagca

SEQ ID NO: 895553 - RNA, 22 nt, Human
cucaggaggaugacugccuugg

SEQ ID NO: 895554 - RNA, 22 nt, Human
cucuucuugccugaugaggcag

SEQ ID NO: 895555 - RNA, 20 nt, Human
aguuugugugucuaugcgcu

SEQ ID NO: 895556 - RNA, 22 nt, Human
cuggcuggucaugucaugagcc

SEQ ID NO: 895557 - RNA, 22 nt, Human
cugagcagccccaccagccauu

SEQ ID NO: 895558 - RNA, 22 nt, Human
acagagaaaguuccucucaggc

SEQ ID NO: 895559 - RNA, 22 nt, Human
agggugacuuugggcaaguuac

SEQ ID NO: 895560 - RNA, 22 nt, Human
cccagcucuggaagguggggga

SEQ ID NO: 895561 - RNA, 22 nt, Human
uguggucagcuacuggucaucu

SEQ ID NO: 895562 - RNA, 22 nt, Human
aagauucugucaguuaggagga

SEQ ID NO: 895563 - RNA, 21 nt, Human
gaaaauacaaugagcuugacc

SEQ ID NO: 895564 - RNA, 22 nt, Human
ugcagaaaccaauucaaguaag

SEQ ID NO: 895565 - RNA, 22 nt, Human
ggguggccuucauagcucaggg

SEQ ID NO: 895566 - RNA, 22 nt, Human
aagagcuggauugugcugcaga

SEQ ID NO: 895567 - RNA, 22 nt, Human
cugucuguuaucucaccagucc

SEQ ID NO: 895568 - RNA, 19 nt, Human
ugcugcuguccuugcaggg

SEQ ID NO: 895569 - RNA, 22 nt, Human
agcaucagccucuguccuggag

SEQ ID NO: 895570 - RNA, 22 nt, Human
cucucugggguuccagacgugg

SEQ ID NO: 895571 - RNA, 22 nt, Human
uuugcaaagugcuugcagagua

SEQ ID NO: 895572 - RNA, 22 nt, Human
agaagugagugugacucagcag

SEQ ID NO: 895573 - RNA, 22 nt, Human
accucccucgccguccacucug

SEQ ID NO: 895574 - RNA, 22 nt, Human
cagcagcauugcucuggauucc

SEQ ID NO: 895575 - RNA, 22 nt, Human
aaggcugcuuuuaacaugcaua

SEQ ID NO: 895576 - RNA, 22 nt, Human
ggugaaauauuuuugauauguu

SEQ ID NO: 895577 - RNA, 22 nt, Human
aaauaucauuuauaacuuuuaa

SEQ ID NO: 895578 - RNA, 22 nt, Human
uggcacugucaccaaugcuguc

SEQ ID NO: 895579 - RNA, 22 nt, Human
auacagaagccuguauuucugg

SEQ ID NO: 895580 - RNA, 21 nt, Human
ucacaugcuuauuccuggaau

SEQ ID NO: 895581 - RNA, 22 nt, Human
auagauguuuuaguaauacugu

SEQ ID NO: 895582 - RNA, 22 nt, Human
acugugcuggcaaugacucagg

SEQ ID NO: 895583 - RNA, 22 nt, Human
gcaggcaggagcccaacugccu

SEQ ID NO: 895584 - RNA, 22 nt, Human
agaugcugucacacacacuguu

SEQ ID NO: 895585 - RNA, 22 nt, Human
agccuccacagaugcaaagggc

SEQ ID NO: 895586 - RNA, 19 nt, Human
uagauaaggcauuuaaucu

SEQ ID NO: 895587 - RNA, 22 nt, Human
ggccaguccccuaauccagggc

SEQ ID NO: 895588 - RNA, 22 nt, Human
guccauccagggucaccaugac

SEQ ID NO: 895589 - RNA, 22 nt, Human
uuuguacauccuaauucugagu

SEQ ID NO: 895590 - RNA, 22 nt, Human
aguuuugacuaagauggcuugg

SEQ ID NO: 895591 - RNA, 22 nt, Human
acacacaugguauuguucagaa

SEQ ID NO: 895592 - RNA, 22 nt, Human
aguaaguaccuccacuugauug

SEQ ID NO: 895593 - RNA, 22 nt, Human
agaauccuggagaagcuguacc

SEQ ID NO: 895594 - RNA, 22 nt, Human
ucuugcaugauauucuguauuu

SEQ ID NO: 895595 - RNA, 22 nt, Human
ggcugcccucgucuacugccca

SEQ ID NO: 895596 - RNA, 22 nt, Human
ucacaguauucaugaacaugga

SEQ ID NO: 895597 - RNA, 22 nt, Human
aaaguucuuagauuaaucacug

SEQ ID NO: 895598 - RNA, 22 nt, Human
ucucaguguuguucugcagaug

SEQ ID NO: 895599 - RNA, 22 nt, Human
uggucuaagagccuaacugcug

SEQ ID NO: 895600 - RNA, 22 nt, Human
ccauggcuuucuuucauuguaa

SEQ ID NO: 895601 - RNA, 23 nt, Human
auuuacagcugugugagcaaguu

SEQ ID NO: 895602 - RNA, 22 nt, Human
uacagaauagaauagggacagg

SEQ ID NO: 895603 - RNA, 22 nt, Human
uccuuggugcuggagcucagac

SEQ ID NO: 895604 - RNA, 22 nt, Human
gugagaaauggaacuucauacg

SEQ ID NO: 895605 - RNA, 22 nt, Human
uggcacagaaaaaugcuccauu

SEQ ID NO: 895606 - RNA, 22 nt, Human
ccuguguccuuggcagauaucc

SEQ ID NO: 895607 - RNA, 22 nt, Human
ugccuuuaaaaaggaagucauu

SEQ ID NO: 895608 - RNA, 22 nt, Human
ucucaugaugccuaugcagggu

SEQ ID NO: 895609 - RNA, 22 nt, Human
aaaugauguuauaagaccagga

SEQ ID NO: 895610 - RNA, 21 nt, Human
uccugugaggaccugucagug

SEQ ID NO: 895611 - RNA, 22 nt, Human
aagcaauguguuaaugaaugag

SEQ ID NO: 895612 - RNA, 22 nt, Human
cacauacuuguguguacauaug

SEQ ID NO: 895613 - RNA, 22 nt, Human
gaaaaucugcuuauauuauuuu

SEQ ID NO: 895614 - RNA, 21 nt, Human
auuuccaaggguaccuaagau

SEQ ID NO: 895615 - RNA, 22 nt, Human
aguuggcgggacauguggaaag

SEQ ID NO: 895616 - RNA, 22 nt, Human
ggugcugaucuaaauuuaggac

SEQ ID NO: 895617 - RNA, 22 nt, Human
aggaaguggauaaaauagcuuu

SEQ ID NO: 895618 - RNA, 22 nt, Human
aggcagcuuaagcccuggccca

SEQ ID NO: 895619 - RNA, 20 nt, Human
cuguuccugucccaugaagc

SEQ ID NO: 895620 - RNA, 22 nt, Human
gcucccaccaggcagaccuacc

SEQ ID NO: 895621 - RNA, 22 nt, Human
cucuguaccuuaaaagggcuuu

SEQ ID NO: 895622 - RNA, 22 nt, Human
ucuggaaggaagagcugagucc

SEQ ID NO: 895623 - RNA, 22 nt, Human
auguuucccuucugauuuggga

SEQ ID NO: 895624 - RNA, 22 nt, Human
ggucacccaugaucacaucacc

SEQ ID NO: 895625 - RNA, 22 nt, Human
uucucuaagccuuaguuucuuc

SEQ ID NO: 895626 - RNA, 22 nt, Human
cucugggcuuaccugcuuccug

SEQ ID NO: 895627 - RNA, 22 nt, Human
aguuuccagcacagggcaagcu

SEQ ID NO: 895628 - RNA, 22 nt, Human
gagcaguaggagaacccugagc

SEQ ID NO: 895629 - RNA, 22 nt, Human
caaacucuguaggacaguucaa

SEQ ID NO: 895630 - RNA, 22 nt, Human
gacauugacaguccuccuuaua

SEQ ID NO: 895631 - RNA, 22 nt, Human
gcucuguguucccuccaggcuc

SEQ ID NO: 895632 - RNA, 22 nt, Human
ucugaaucacagucauucagcu

SEQ ID NO: 895633 - RNA, 22 nt, Human
ggaggaaauccuuaguaaggca

SEQ ID NO: 895634 - RNA, 22 nt, Human
guguaugugccuuacauuuuau

SEQ ID NO: 895635 - RNA, 20 nt, Human
cuaagaggaggacuagguuu

SEQ ID NO: 895636 - RNA, 22 nt, Human
aaucuuuuucacaagaaagcac

SEQ ID NO: 895637 - RNA, 22 nt, Human
aaucagugguucccagcccagg

SEQ ID NO: 895638 - RNA, 22 nt, Human
aagaauuaucugaaagcugugu

SEQ ID NO: 895639 - RNA, 22 nt, Human
agagugauccuaauugauuugg

SEQ ID NO: 895640 - RNA, 22 nt, Human
auggcagggcacagcucuaguu

SEQ ID NO: 895641 - RNA, 22 nt, Human
ccugagggcgccgagcucccag

SEQ ID NO: 895642 - RNA, 17 nt, Human
ccagagcuacugagacu

SEQ ID NO: 895643 - RNA, 22 nt, Human
ucuuuggcugccugaagcccaa

SEQ ID NO: 895644 - RNA, 18 nt, Human
ggccugaggauuucagca

SEQ ID NO: 895645 - RNA, 22 nt, Human
gaaguucugaaauaaaauccug

SEQ ID NO: 895646 - RNA, 22 nt, Human
gcucucuugguggcuguccugg

SEQ ID NO: 895647 - RNA, 22 nt, Human
ucuucagauaaagggagaguau

SEQ ID NO: 895648 - RNA, 22 nt, Human
uucugccaaagaaguaaaugga

SEQ ID NO: 895649 - RNA, 22 nt, Human
gcaggugggagccgcugccuga

SEQ ID NO: 895650 - RNA, 22 nt, Human
cagacaaagcggaaacuguuua

SEQ ID NO: 895651 - RNA, 22 nt, Human
cuuucagguucuauaggaagcc

SEQ ID NO: 895652 - RNA, 22 nt, Human
ucaggcaggacaauuauuuagg

SEQ ID NO: 895653 - RNA, 22 nt, Human
uuugguuuagggucauuuaaca

SEQ ID NO: 895654 - RNA, 22 nt, Human
uugacacaaacagugauguagu

SEQ ID NO: 895655 - RNA, 22 nt, Human
uugugugucuucuucacugccc

SEQ ID NO: 895656 - RNA, 22 nt, Human
cacagugaauuucaaguguugu

SEQ ID NO: 895657 - RNA, 17 nt, Human
agcuccuggggucuuua

SEQ ID NO: 895658 - RNA, 22 nt, Human
uaaaugucuguuaacaugaaug

SEQ ID NO: 895659 - RNA, 22 nt, Human
uggcuuccagaacugagcaaca

SEQ ID NO: 895660 - RNA, 22 nt, Human
ucucaacagugaaauguguuug

SEQ ID NO: 895661 - RNA, 21 nt, Human
gaaggagaaagcaagugcugc

SEQ ID NO: 895662 - RNA, 22 nt, Human
gacaugaaccuaccauaaugau

SEQ ID NO: 895663 - RNA, 22 nt, Human
ccuuuuauacucagugauauca

SEQ ID NO: 895664 - RNA, 22 nt, Human
auggcccagaaguuuggaaagg

SEQ ID NO: 895665 - RNA, 22 nt, Human
gacaaggugauaauagcuucug

SEQ ID NO: 895666 - RNA, 22 nt, Human
uaucuguagucucaugguuccu

SEQ ID NO: 895667 - RNA, 22 nt, Human
cugcugagccuggugcgggaug

SEQ ID NO: 895668 - RNA, 22 nt, Human
gugggagaagcccuguucguag

SEQ ID NO: 895669 - RNA, 22 nt, Human
ugagcagcuucugucugaaggc

SEQ ID NO: 895670 - RNA, 20 nt, Human
auucuacaagaauaagcaug

SEQ ID NO: 895671 - RNA, 22 nt, Human
gaagucagucaucuccugucuc

SEQ ID NO: 895672 - RNA, 22 nt, Human
ugucaaaaccagcaauuuuguu

SEQ ID NO: 895673 - RNA, 22 nt, Human
aggcaggcuagucgcuugagcc

SEQ ID NO: 895674 - RNA, 22 nt, Human
uucuuacaucuauaaaguuggg

SEQ ID NO: 895675 - RNA, 18 nt, Human
cacagugacuucugauac

SEQ ID NO: 895676 - RNA, 19 nt, Human
ccugccugagcugucccuc

SEQ ID NO: 895677 - RNA, 22 nt, Human
ggaggggagauguuugggcuca

SEQ ID NO: 895678 - RNA, 22 nt, Human
agacacagucugucuggaggag

SEQ ID NO: 895679 - RNA, 22 nt, Human
guggcagcugugggacacuggu

SEQ ID NO: 895680 - RNA, 22 nt, Human
gaaauauuacaguggaggggau

SEQ ID NO: 895681 - RNA, 22 nt, Human
agaaggccaauagggugcacug

SEQ ID NO: 895682 - RNA, 22 nt, Human
uucacagugcucacaguucagu

SEQ ID NO: 895683 - RNA, 22 nt, Human
gaaaauuucugccacaugugug

SEQ ID NO: 895684 - RNA, 22 nt, Human
ucagccuccuaauuuccuguga

SEQ ID NO: 895685 - RNA, 22 nt, Human
cagaggccauauuucuucacuc

SEQ ID NO: 895686 - RNA, 22 nt, Human
augggagugugguuagagaccu

SEQ ID NO: 895687 - RNA, 22 nt, Human
ucaaguuucucucagauuaugg

SEQ ID NO: 895688 - RNA, 22 nt, Human
uuggcccagggucagcggcgcu

SEQ ID NO: 895689 - RNA, 22 nt, Human
aaaugugcuugugaucagcugu

SEQ ID NO: 895690 - RNA, 22 nt, Human
gaaugucuucaaaacuagacug

SEQ ID NO: 895691 - RNA, 22 nt, Human
acagauguaaucuauucacauu

SEQ ID NO: 895692 - RNA, 22 nt, Human
uugggcagguguggcucuccuu

SEQ ID NO: 895693 - RNA, 22 nt, Human
uacauauagacaguuacucuag

SEQ ID NO: 895694 - RNA, 22 nt, Human
agccaggccuuagggagaggca

SEQ ID NO: 895695 - RNA, 22 nt, Human
gcuuccuccagggaggggccug

SEQ ID NO: 895696 - RNA, 22 nt, Human
guggcuugaccaucccugcuac

SEQ ID NO: 895697 - RNA, 22 nt, Human
gggcugagugucccaggccgaa

SEQ ID NO: 895698 - RNA, 22 nt, Human
gcagucagacaggaggagcucc

SEQ ID NO: 895699 - RNA, 22 nt, Human
uuucuaagugugauuuuagauu

SEQ ID NO: 895700 - RNA, 22 nt, Human
acauagcauaaagaaugacucu

SEQ ID NO: 895701 - RNA, 22 nt, Human
aaaauagccucacauaauugcu

SEQ ID NO: 895702 - RNA, 22 nt, Human
ggagcagccuguguagacgggg

SEQ ID NO: 895703 - RNA, 22 nt, Human
uggcucuuggugcuaguuucug

SEQ ID NO: 895704 - RNA, 22 nt, Human
uacaguauggaaaauguauagu

SEQ ID NO: 895705 - RNA, 22 nt, Human
uugcucugucagggccucaguc

SEQ ID NO: 895706 - RNA, 20 nt, Human
aaagucccuuagugggagca

SEQ ID NO: 895707 - RNA, 19 nt, Human
gcucugagaggggcauggg

SEQ ID NO: 895708 - RNA, 23 nt, Human
cauaugaaaguagacacuuucca

SEQ ID NO: 895709 - RNA, 22 nt, Human
uccuggaacauggauaaagaau

SEQ ID NO: 895710 - RNA, 19 nt, Human
uuugcugguucaggaaaga

SEQ ID NO: 895711 - RNA, 22 nt, Human
uggcgaggccaggccagggccu

SEQ ID NO: 895712 - RNA, 22 nt, Human
ccacagaauucugucuccagga

SEQ ID NO: 895713 - RNA, 22 nt, Human
uaaguaauuugugcagagauac

SEQ ID NO: 895714 - RNA, 22 nt, Human
gaaguuacucucguuaaauaug

SEQ ID NO: 895715 - RNA, 21 nt, Human
gagaaucuguuuucuugucuu

SEQ ID NO: 895716 - RNA, 22 nt, Human
agagaauacaaagaagauaugu

SEQ ID NO: 895717 - RNA, 22 nt, Human
cccagaggaggaucucggcccg

SEQ ID NO: 895718 - RNA, 22 nt, Human
aacaaugccugaugaccuccug

SEQ ID NO: 895719 - RNA, 23 nt, Human
uaaagacagccuucaggauucug

SEQ ID NO: 895720 - RNA, 22 nt, Human
aaaaugaacagaacaaugggga

SEQ ID NO: 895721 - RNA, 19 nt, Human
ucagugugugggagguggu

SEQ ID NO: 895722 - RNA, 22 nt, Human
uuuaauacuauggggaugaaca

SEQ ID NO: 895723 - RNA, 22 nt, Human
uguuuuguagcuaauagcuauu

SEQ ID NO: 895724 - RNA, 22 nt, Human
cacacugauaggcuugacaggc

SEQ ID NO: 895725 - RNA, 22 nt, Human
agcuccugucucaagggagccu

SEQ ID NO: 895726 - RNA, 22 nt, Human
ugccaccccucugcacccucag

SEQ ID NO: 895727 - RNA, 22 nt, Human
gccuggggccagcuugggcuga

SEQ ID NO: 895728 - RNA, 22 nt, Human
auggaguucugccagcgcugcu

SEQ ID NO: 895729 - RNA, 20 nt, Human
gcuucucagggcuucucuga

SEQ ID NO: 895730 - RNA, 22 nt, Human
cagaucuguaguaaaagaucuc

SEQ ID NO: 895731 - RNA, 22 nt, Human
aaggucuguucuaggugagggu

SEQ ID NO: 895732 - RNA, 22 nt, Human
uuuucucuacaaaauaaccagc

SEQ ID NO: 895733 - RNA, 23 nt, Human
cugcccugaucuugaucuauugu

SEQ ID NO: 895734 - RNA, 22 nt, Human
ugaggcagcaauugauuauuca

SEQ ID NO: 895735 - RNA, 22 nt, Human
gugauaaaauagaaacaguggu

SEQ ID NO: 895736 - RNA, 21 nt, Human
agagaagggacucuuccaguc

SEQ ID NO: 895737 - RNA, 22 nt, Human
cuugcugcucuggagucaugcc

SEQ ID NO: 895738 - RNA, 22 nt, Human
cuugcucauuaaguagcucaca

SEQ ID NO: 895739 - RNA, 23 nt, Human
ugaaggcccuggagccacgaggc

SEQ ID NO: 895740 - RNA, 22 nt, Human
aggaacaacugauucagucaac

SEQ ID NO: 895741 - RNA, 20 nt, Human
agcuggccuguccuaggccu

SEQ ID NO: 895742 - RNA, 22 nt, Human
uacagaaguugguuuuaguuua

SEQ ID NO: 895743 - RNA, 22 nt, Human
ccccaggacacauggaccaagu

SEQ ID NO: 895744 - RNA, 23 nt, Human
agcuguuucauuauuacaacacc

SEQ ID NO: 895745 - RNA, 21 nt, Human
cuuaacauuuuaaaugaaagg

SEQ ID NO: 895746 - RNA, 22 nt, Human
aguuacacauaaacauuaaagg

SEQ ID NO: 895747 - RNA, 22 nt, Human
auuugcuucuagucaguuccau

SEQ ID NO: 895748 - RNA, 22 nt, Human
uauacacaggaaucugugaaaa

SEQ ID NO: 895749 - RNA, 22 nt, Human
uuauuuccuaaaucucuuuguu

SEQ ID NO: 895750 - RNA, 22 nt, Human
cauuugcaagagauaaauguuu

SEQ ID NO: 895751 - RNA, 22 nt, Human
acuagaaugcaagcuccacaag

SEQ ID NO: 895752 - RNA, 21 nt, Human
aucuuuagccauccaaucaga

SEQ ID NO: 895753 - RNA, 22 nt, Human
caggucugcaggcuggagucca

SEQ ID NO: 895754 - RNA, 22 nt, Human
cugcagcuccccugagaucaag

SEQ ID NO: 895755 - RNA, 22 nt, Human
ggucucagcuggaguccuuggu

SEQ ID NO: 895756 - RNA, 22 nt, Human
cugggucuccggcagccucggg

SEQ ID NO: 895757 - RNA, 23 nt, Human
agcaauaagaagggauacaugug

SEQ ID NO: 895758 - RNA, 19 nt, Human
gaaugggaaugggaaagcu

SEQ ID NO: 895759 - RNA, 22 nt, Human
ugacaaagcaugauggugacag

SEQ ID NO: 895760 - RNA, 22 nt, Human
ugcagggcuaagucagagccug

SEQ ID NO: 895761 - RNA, 22 nt, Human
gacagcugaaaaauguaaggua

SEQ ID NO: 895762 - RNA, 23 nt, Human
ucaaacagguuucagagcaucuu

SEQ ID NO: 895763 - RNA, 22 nt, Human
uagcuguguagacacucagagc

SEQ ID NO: 895764 - RNA, 21 nt, Human
agcuggugucagagcucuggg

SEQ ID NO: 895765 - RNA, 22 nt, Human
auaugaaguuacagguaagaaa

SEQ ID NO: 895766 - RNA, 22 nt, Human
ggagcagcacugauuagcgguu

SEQ ID NO: 895767 - RNA, 22 nt, Human
cagagcccagggccuacguccc

SEQ ID NO: 895768 - RNA, 22 nt, Human
cugggccuugaucacacaggug

SEQ ID NO: 895769 - RNA, 22 nt, Human
ugcugcagcggcauggucuuug

SEQ ID NO: 895770 - RNA, 21 nt, Human
cugaggcagcacagcuaguca

SEQ ID NO: 895771 - RNA, 22 nt, Human
gccaggaggcuuaacuggacag

SEQ ID NO: 895772 - RNA, 22 nt, Human
cucaguguuaaauauaagguau

SEQ ID NO: 895773 - RNA, 22 nt, Human
uucauuugccaucaguguaaug

SEQ ID NO: 895774 - RNA, 22 nt, Human
guaaaauugcaauuacuuuugc

SEQ ID NO: 895775 - RNA, 22 nt, Human
caagagcauuuaguuagcuggu

SEQ ID NO: 895776 - RNA, 22 nt, Human
gucuccagcccacucuagauau

SEQ ID NO: 895777 - RNA, 22 nt, Human
ugccugcucugugccacaguug

SEQ ID NO: 895778 - RNA, 22 nt, Human
ugugguccucucaacugaaggu

SEQ ID NO: 895779 - RNA, 19 nt, Human
cuuauuucugguuuugggu

SEQ ID NO: 895780 - RNA, 22 nt, Human
gaaaaggaaauuuauagagauc

SEQ ID NO: 895781 - RNA, 22 nt, Human
ccccaccagcacccucucuauc

SEQ ID NO: 895782 - RNA, 22 nt, Human
agaaaggaggaagaaugaccuc

SEQ ID NO: 895783 - RNA, 18 nt, Human
ucaugucacugugcuccc

SEQ ID NO: 895784 - RNA, 21 nt, Human
aagggagauaggaaucaggcc

SEQ ID NO: 895785 - RNA, 22 nt, Human
uagaacaggaauaagggaaaua

SEQ ID NO: 895786 - RNA, 22 nt, Human
gacauuuacugaauacugauua

SEQ ID NO: 895787 - RNA, 22 nt, Human
acccagaggugucuagcaagcu

SEQ ID NO: 895788 - RNA, 22 nt, Human
caggugaaucacuugaguccag

SEQ ID NO: 895789 - RNA, 22 nt, Human
acaggcuucagauguauuaacu

SEQ ID NO: 895790 - RNA, 22 nt, Human
cagcauuuucuuaauguaggug

SEQ ID NO: 895791 - RNA, 22 nt, Human
gaccuucuguuggaggcauuua

SEQ ID NO: 895792 - RNA, 22 nt, Human
cuccuguugcacuaguuccuga

SEQ ID NO: 895793 - RNA, 22 nt, Human
gcuggccaguguggugaccacc

SEQ ID NO: 895794 - RNA, 22 nt, Human
aaacuucauggauaauauaaag

SEQ ID NO: 895795 - RNA, 22 nt, Human
auuuguucauggguuguuaugc

SEQ ID NO: 895796 - RNA, 20 nt, Human
cauugcauauuucauugagg

SEQ ID NO: 895797 - RNA, 22 nt, Human
cuccagcucuuaacugcggaag

SEQ ID NO: 895798 - RNA, 22 nt, Human
cuaaucugugaaauagguauga

SEQ ID NO: 895799 - RNA, 22 nt, Human
ggcaggcuugauauggggggac

SEQ ID NO: 895800 - RNA, 22 nt, Human
gcuuggcuccuggcucacaggu

SEQ ID NO: 895801 - RNA, 22 nt, Human
cugaaagggagaacaccaagag

SEQ ID NO: 895802 - RNA, 22 nt, Human
cauacauuuugcauauuuacca

SEQ ID NO: 895803 - RNA, 22 nt, Human
gccuuagccugcacuuccuguu

SEQ ID NO: 895804 - RNA, 22 nt, Human
gauucacaacugcccugaaggg

SEQ ID NO: 895805 - RNA, 22 nt, Human
agauguaaacucucaugucauu

SEQ ID NO: 895806 - RNA, 22 nt, Human
uuuguguuuaugaaguuauucu

SEQ ID NO: 895807 - RNA, 22 nt, Human
cagaaacuguuuguuaauauuu

SEQ ID NO: 895808 - RNA, 22 nt, Human
caaauguuugcaucacagggca

SEQ ID NO: 895809 - RNA, 22 nt, Human
guggccaggcguccgcgcggcu

SEQ ID NO: 895810 - RNA, 22 nt, Human
ggcugcugggaauaugccagcu

SEQ ID NO: 895811 - RNA, 22 nt, Human
agcagggcaaagucaggcuaac

SEQ ID NO: 895812 - RNA, 20 nt, Human
gaaauguaucucuugauucu

SEQ ID NO: 895813 - RNA, 22 nt, Human
aguggaaggucaggggacagug

SEQ ID NO: 895814 - RNA, 22 nt, Human
aaauugcacaauauagacauga

SEQ ID NO: 895815 - RNA, 22 nt, Human
cuaggcuggagugcauuggcgu

SEQ ID NO: 895816 - RNA, 22 nt, Human
agccucugcacgggcacgggug

SEQ ID NO: 895817 - RNA, 23 nt, Human
ucugucaccuauggcugcucuuc

SEQ ID NO: 895818 - RNA, 23 nt, Human
ugggaaugacaucuagagcagag

SEQ ID NO: 895819 - RNA, 22 nt, Human
cugggaggauacacaagaucag

SEQ ID NO: 895820 - RNA, 22 nt, Human
ucaggccuuucuucagagcuuc

SEQ ID NO: 895821 - RNA, 22 nt, Human
uauuugaaaguguacaaaaacu

SEQ ID NO: 895822 - RNA, 22 nt, Human
cugugcccaccuggcucugagg

SEQ ID NO: 895823 - RNA, 22 nt, Human
uuacaagauaaccugaugcugu

SEQ ID NO: 895824 - RNA, 22 nt, Human
acuaggaggcauauaaaacauu

SEQ ID NO: 895825 - RNA, 22 nt, Human
acagacagggcaccugccuccu

SEQ ID NO: 895826 - RNA, 22 nt, Human
cuucaaauacaaguagauuaug

SEQ ID NO: 895827 - RNA, 22 nt, Human
uacacuaaaucuucaucuuuua

SEQ ID NO: 895828 - RNA, 22 nt, Human
ucaagacagauggguaacuugg

SEQ ID NO: 895829 - RNA, 22 nt, Human
guaugucuauaguuuuuaaaua

SEQ ID NO: 895830 - RNA, 22 nt, Human
gggcuucucugggaguccuggu

SEQ ID NO: 895831 - RNA, 22 nt, Human
uuaaaauuauggcccauuugga

SEQ ID NO: 895832 - RNA, 22 nt, Human
gccuggccgcuccgagcuccgc

SEQ ID NO: 895833 - RNA, 22 nt, Human
uuuagacacacuuuguauauuu

SEQ ID NO: 895834 - RNA, 20 nt, Human
aaugaaguuauuaaugaugu

SEQ ID NO: 895835 - RNA, 22 nt, Human
uuuuuuaucuaugguaguacca

SEQ ID NO: 895836 - RNA, 22 nt, Human
cacucagcccacccauguuugu

SEQ ID NO: 895837 - RNA, 20 nt, Human
acacaugucaagcuaaaggc

SEQ ID NO: 895838 - RNA, 22 nt, Human
ugcaaaaacugcaauugcuuuu

SEQ ID NO: 895839 - RNA, 22 nt, Human
caucuuuauuuauauagacagg

SEQ ID NO: 895840 - RNA, 22 nt, Human
aagggagcuuaggagaucaggc

SEQ ID NO: 895841 - RNA, 22 nt, Human
gggcuggcaucaguugccgaga

SEQ ID NO: 895842 - RNA, 22 nt, Human
cuuucaugcaguugacaaggug

SEQ ID NO: 895843 - RNA, 22 nt, Human
cuggcuggccauguagagauga

SEQ ID NO: 895844 - RNA, 22 nt, Human
caugcagcaggaucucauuccc

SEQ ID NO: 895845 - RNA, 22 nt, Human
cagguauuaauaaauggagagu

SEQ ID NO: 895846 - RNA, 19 nt, Human
cccaggaggcggagguugc

SEQ ID NO: 895847 - RNA, 22 nt, Human
uuugugucgucacugucuucuc

SEQ ID NO: 895848 - RNA, 22 nt, Human
agaaauguggaggaacagggcu

SEQ ID NO: 895849 - RNA, 22 nt, Human
aaauaacagucagggacaacau

SEQ ID NO: 895850 - RNA, 19 nt, Human
aggcagcauucuggggcuu

SEQ ID NO: 895851 - RNA, 22 nt, Human
ggguagggugacuuaggcuggc

SEQ ID NO: 895852 - RNA, 22 nt, Human
aagcugccaaugguaagcugcu

SEQ ID NO: 895853 - RNA, 22 nt, Human
aagcacagggacuuuaggaaua

SEQ ID NO: 895854 - RNA, 22 nt, Human
ugccaggcaacugcccagccau

SEQ ID NO: 895855 - RNA, 22 nt, Human
acuguucuucccauuuauauug

SEQ ID NO: 895856 - RNA, 21 nt, Human
gcuuucuguggacucugcacc

SEQ ID NO: 895857 - RNA, 22 nt, Human
cuguacauaugucuccagagug

SEQ ID NO: 895858 - RNA, 22 nt, Human
cuggaaugaagcuauguacauu

SEQ ID NO: 895859 - RNA, 23 nt, Human
acucagugaagcaaacagauagu

SEQ ID NO: 895860 - RNA, 22 nt, Human
cugccugcugacauucuuuaua

SEQ ID NO: 895861 - RNA, 22 nt, Human
gggcaagcacagcgagcgugcg

SEQ ID NO: 895862 - RNA, 22 nt, Human
acacaguaggccaccaugucau

SEQ ID NO: 895863 - RNA, 22 nt, Human
aaauacuguagauaauagaguu

SEQ ID NO: 895864 - RNA, 22 nt, Human
uauugcauauuguacuugaaug

SEQ ID NO: 895865 - RNA, 22 nt, Human
uggcauccucucuucugagugc

SEQ ID NO: 895866 - RNA, 22 nt, Human
aucuagacaucugaaacauuua

SEQ ID NO: 895867 - RNA, 22 nt, Human
aggaggugcuagagaagauguu

SEQ ID NO: 895868 - RNA, 22 nt, Human
aaguuuggaaugauagagaccu

SEQ ID NO: 895869 - RNA, 22 nt, Human
gucucagagagcuacucucuua

SEQ ID NO: 895870 - RNA, 20 nt, Human
uuuggagagaaagaaguagu

SEQ ID NO: 895871 - RNA, 22 nt, Human
ucacaagagcuggacugucuuu

SEQ ID NO: 895872 - RNA, 23 nt, Human
cccugcaucugucccucaccagu

SEQ ID NO: 895873 - RNA, 22 nt, Human
aucucaacaucccuauggagug

SEQ ID NO: 895874 - RNA, 22 nt, Human
ugcaguuuccuuucuagucuuu

SEQ ID NO: 895875 - RNA, 22 nt, Human
agcuggcaauguaagucccugg

SEQ ID NO: 895876 - RNA, 22 nt, Human
ggcuccagguacguaugggagg

SEQ ID NO: 895877 - RNA, 22 nt, Human
agauguuucaguaauuuaucuu

SEQ ID NO: 895878 - RNA, 22 nt, Human
aggccggcgcuucccaggaggc

SEQ ID NO: 895879 - RNA, 22 nt, Human
gcagcagcaagaagguuggacu

SEQ ID NO: 895880 - RNA, 22 nt, Human
ccagcacugcucucagacugag

SEQ ID NO: 895881 - RNA, 22 nt, Human
ugugaaauguggauguuaauag

SEQ ID NO: 895882 - RNA, 22 nt, Human
ugaggccaacuagggagaugga

SEQ ID NO: 895883 - RNA, 22 nt, Human
ucuuuguggcgggcuuaaauac

SEQ ID NO: 895884 - RNA, 22 nt, Human
ucaguuagauugccuccuuaga

SEQ ID NO: 895885 - RNA, 22 nt, Human
aggcaauacacagcauuucaca

SEQ ID NO: 895886 - RNA, 22 nt, Human
auuugcuucuugcuuccagcac

SEQ ID NO: 895887 - RNA, 22 nt, Human
cacaaguuugggucacucagcu

SEQ ID NO: 895888 - RNA, 22 nt, Human
auuauaugugggauagaauuua

SEQ ID NO: 895889 - RNA, 22 nt, Human
cuauacacuuuuugaaaauaga

SEQ ID NO: 895890 - RNA, 22 nt, Human
gcaccaugacagugaggagaac

SEQ ID NO: 895891 - RNA, 22 nt, Human
aagccgaggccacacagcagga

SEQ ID NO: 895892 - RNA, 22 nt, Human
cuucucugacagucuguuucac

SEQ ID NO: 895893 - RNA, 22 nt, Human
uugggcuggauaagucuuuguu

SEQ ID NO: 895894 - RNA, 22 nt, Human
acucuugaacugauuaagaaug

SEQ ID NO: 895895 - RNA, 23 nt, Human
ugagcugggccugcaggggucuc

SEQ ID NO: 895896 - RNA, 22 nt, Human
uauguuaagugggauaaucaaa

SEQ ID NO: 895897 - RNA, 22 nt, Human
cuccacagcucaggcucagagu

SEQ ID NO: 895898 - RNA, 23 nt, Human
cugugcccggggcuccaccugau

SEQ ID NO: 895899 - RNA, 23 nt, Human
uggaccugaaccagugccucugu

SEQ ID NO: 895900 - RNA, 22 nt, Human
aaguccagugcuuuagauucca

SEQ ID NO: 895901 - RNA, 22 nt, Human
ggguggugggcacagaaucugg

SEQ ID NO: 895902 - RNA, 22 nt, Human
cagaggaaguuccuugaugaga

SEQ ID NO: 895903 - RNA, 22 nt, Human
cuguggcuuuggggcggaggac

SEQ ID NO: 895904 - RNA, 22 nt, Human
gccuggagggauagaaugcaag

SEQ ID NO: 895905 - RNA, 22 nt, Human
uaggcugagguugaugccaggg

SEQ ID NO: 895906 - RNA, 22 nt, Human
caagugucuauaucagugcuug

SEQ ID NO: 895907 - RNA, 22 nt, Human
uacaggaagucucaguacagua

SEQ ID NO: 895908 - RNA, 22 nt, Human
agggcuuuaaugauuauuuucu

SEQ ID NO: 895909 - RNA, 22 nt, Human
cacagaacauuuuuagaugcag

SEQ ID NO: 895910 - RNA, 22 nt, Human
uuuauuaauguagcauccaugg

SEQ ID NO: 895911 - RNA, 19 nt, Human
ccugugagaggacaggugu

SEQ ID NO: 895912 - RNA, 22 nt, Human
cuggcacaugugagccacauca

SEQ ID NO: 895913 - RNA, 22 nt, Human
gaggcagaaguugcagugagca

SEQ ID NO: 895914 - RNA, 22 nt, Human
uugaaacauucuccuauugauu

SEQ ID NO: 895915 - RNA, 22 nt, Human
ucagaagcuaaauuugauauuu

SEQ ID NO: 895916 - RNA, 22 nt, Human
gccuagggaugacaaauauucu

SEQ ID NO: 895917 - RNA, 22 nt, Human
cucuuuuaauugucauaacaac

SEQ ID NO: 895918 - RNA, 22 nt, Human
auugcaggcaaagugcuguguc

SEQ ID NO: 895919 - RNA, 20 nt, Human
uggaaccuaggcagagcugg

SEQ ID NO: 895920 - RNA, 22 nt, Human
gggcagugucgaggucuggucc

SEQ ID NO: 895921 - RNA, 22 nt, Human
agcucugacugaagagaugcaa

SEQ ID NO: 895922 - RNA, 22 nt, Human
agagaauacaggguaacaggaa

SEQ ID NO: 895923 - RNA, 22 nt, Human
ggugcugagugagcuagaggcu

SEQ ID NO: 895924 - RNA, 22 nt, Human
gcucccaccuccagccugaguu

SEQ ID NO: 895925 - RNA, 22 nt, Human
gugaggagcucuuugacucacg

SEQ ID NO: 895926 - RNA, 22 nt, Human
acagauguggaguuugcaugau

SEQ ID NO: 895927 - RNA, 22 nt, Human
ggggcacacuuuugguagauau

SEQ ID NO: 895928 - RNA, 22 nt, Human
aaagugcacuagaauccagauu

SEQ ID NO: 895929 - RNA, 22 nt, Human
uuacagaggcuuccagggccca

SEQ ID NO: 895930 - RNA, 22 nt, Human
auaaaaugucuccacugggcuc

SEQ ID NO: 895931 - RNA, 21 nt, Human
gggugcuguggucaugcagga

SEQ ID NO: 895932 - RNA, 22 nt, Human
auguaucagaaauagcauuggc

SEQ ID NO: 895933 - RNA, 22 nt, Human
ggaggcucuugagaggggagua

SEQ ID NO: 895934 - RNA, 22 nt, Human
cacuccagccucagugacagag

SEQ ID NO: 895935 - RNA, 22 nt, Human
cuggcagcucugagucccuucu

SEQ ID NO: 895936 - RNA, 22 nt, Human
uggcaauauaaucaucugcucu

SEQ ID NO: 895937 - RNA, 22 nt, Human
uggcagcagcaaauggcauauc

SEQ ID NO: 895938 - RNA, 22 nt, Human
uggcucagauaauucaaggggc

SEQ ID NO: 895939 - RNA, 22 nt, Human
auggacagugugaagcagauag

SEQ ID NO: 895940 - RNA, 22 nt, Human
uaguucuacagaugguuuguaa

SEQ ID NO: 895941 - RNA, 22 nt, Human
ggcuagggacuccuccucaggg

SEQ ID NO: 895942 - RNA, 22 nt, Human
uuccuauggccagagucaaaga

SEQ ID NO: 895943 - RNA, 22 nt, Human
gcaguccucauccuuuagcagu

SEQ ID NO: 895944 - RNA, 22 nt, Human
auauacaaagggcaaccucgcu

SEQ ID NO: 895945 - RNA, 22 nt, Human
uuaacaugucuugacuucaucu

SEQ ID NO: 895946 - RNA, 22 nt, Human
ucugcuuuuucauugacugaaa

SEQ ID NO: 895947 - RNA, 22 nt, Human
auuacagaaagcaauauugagu

SEQ ID NO: 895948 - RNA, 22 nt, Human
agaccaugggcucugaagagca

SEQ ID NO: 895949 - RNA, 22 nt, Human
ugucagugaguuaguugcaagu

SEQ ID NO: 895950 - RNA, 22 nt, Human
ugauuuccaaaaggcuucuaag

SEQ ID NO: 895951 - RNA, 22 nt, Human
gcugcaggagauuuugagaguc

SEQ ID NO: 895952 - RNA, 22 nt, Human
cagaggcccagugagagggcug

SEQ ID NO: 895953 - RNA, 19 nt, Human
uuaacagucaccaaggaga

SEQ ID NO: 895954 - RNA, 22 nt, Human
aaggcagcagugcacgacugau

SEQ ID NO: 895955 - RNA, 22 nt, Human
gagaagggcuugggagucaaca

SEQ ID NO: 895956 - RNA, 22 nt, Human
ugagauggaguucugcucuugu

SEQ ID NO: 895957 - RNA, 22 nt, Human
ggcugagccuggagcaucuggu

SEQ ID NO: 895958 - RNA, 22 nt, Human
aguccuguugguuccagaggug

SEQ ID NO: 895959 - RNA, 22 nt, Human
agaggaugguugaggaagaccu

SEQ ID NO: 895960 - RNA, 22 nt, Human
gcuuauuuucaccuucucucag

SEQ ID NO: 895961 - RNA, 22 nt, Human
cauuucuaccaaaugugacugg

SEQ ID NO: 895962 - RNA, 22 nt, Human
agucacaucgauuauaaaauuu

SEQ ID NO: 895963 - RNA, 22 nt, Human
agaggggguguuccagaagcau

SEQ ID NO: 895964 - RNA, 22 nt, Human
acaaagugaaaagcaucgaauu

SEQ ID NO: 895965 - RNA, 22 nt, Human
cuuuacuguuuggugcucuauu

SEQ ID NO: 895966 - RNA, 22 nt, Human
acuccagaggcagcugugcuga

SEQ ID NO: 895967 - RNA, 22 nt, Human
cacauuuaucucucuccgguga

SEQ ID NO: 895968 - RNA, 22 nt, Human
uggaguccccgagaggccugca

SEQ ID NO: 895969 - RNA, 22 nt, Human
ucuauucugauaaaugcaugga

SEQ ID NO: 895970 - RNA, 22 nt, Human
cuggagugaagucuggcagcuu

SEQ ID NO: 895971 - RNA, 22 nt, Human
auccaugauuaguaggauaaag

SEQ ID NO: 895972 - RNA, 22 nt, Human
ugacauuucgguguaugugaug

SEQ ID NO: 895973 - RNA, 22 nt, Human
uuucagagguaugcugcuuauc

SEQ ID NO: 895974 - RNA, 22 nt, Human
cugggcuacguguugacagcau

SEQ ID NO: 895975 - RNA, 22 nt, Human
cuguggcuggccugucugacau

SEQ ID NO: 895976 - RNA, 22 nt, Human
cugaggccguuggugggccuua

SEQ ID NO: 895977 - RNA, 22 nt, Human
aggauguggucuguuuucugag

SEQ ID NO: 895978 - RNA, 22 nt, Human
acaaauugccuagucuagcauc

SEQ ID NO: 895979 - RNA, 23 nt, Human
ucauaagugcucaguuacuguua

SEQ ID NO: 895980 - RNA, 22 nt, Human
acauguguggacaugaaucuac

SEQ ID NO: 895981 - RNA, 22 nt, Human
cccugaggaaaggguggagggc

SEQ ID NO: 895982 - RNA, 22 nt, Human
cuccucccucuuugccacacau

SEQ ID NO: 895983 - RNA, 22 nt, Human
cucccaggacuggcucuaacug

SEQ ID NO: 895984 - RNA, 22 nt, Human
aagaaucucucaagugugacaa

SEQ ID NO: 895985 - RNA, 22 nt, Human
uccuuucccuuuccauccuggc

SEQ ID NO: 895986 - RNA, 22 nt, Human
ucuucagagacucugagccccu

SEQ ID NO: 895987 - RNA, 22 nt, Human
gugcagggcuggcaccggaggc

SEQ ID NO: 895988 - RNA, 22 nt, Human
acagguuuagcucuuaguaguc

SEQ ID NO: 895989 - RNA, 22 nt, Human
cugucuguacugagaguucugu

SEQ ID NO: 895990 - RNA, 22 nt, Human
uacaguagaaugcggugccagu

SEQ ID NO: 895991 - RNA, 22 nt, Human
ucaggagaaagccaauuagagu

SEQ ID NO: 895992 - RNA, 22 nt, Human
agaguggcaguaaaauagagca

SEQ ID NO: 895993 - RNA, 20 nt, Human
agacccuguguccuguggcc

SEQ ID NO: 895994 - RNA, 22 nt, Human
agcccauguggcugaggcuucu

SEQ ID NO: 895995 - RNA, 22 nt, Human
ucaggagauguaaccuuagcug

SEQ ID NO: 895996 - RNA, 22 nt, Human
cucugccagccaaagucaucac

SEQ ID NO: 895997 - RNA, 22 nt, Human
caagaagccgagcuacaggcuc

SEQ ID NO: 895998 - RNA, 18 nt, Human
agguauaugaaucucuuu

SEQ ID NO: 895999 - RNA, 22 nt, Human
ccuuuuuucuaugccaacucug

SEQ ID NO: 896000 - RNA, 22 nt, Human
uugagguaguucuauugugagu

SEQ ID NO: 896001 - RNA, 22 nt, Human
uuuauaauuaucucuacucuua

SEQ ID NO: 896002 - RNA, 22 nt, Human
cagcccaguaccaagcaguugg

SEQ ID NO: 896003 - RNA, 22 nt, Human
caguuuuaugucgaauguauac

SEQ ID NO: 896004 - RNA, 22 nt, Human
ggaggggccggcugccugccac

SEQ ID NO: 896005 - RNA, 22 nt, Human
aauuaagucacacaccuaaacc

SEQ ID NO: 896006 - RNA, 22 nt, Human
agucaucaccaguacagugugc

SEQ ID NO: 896007 - RNA, 22 nt, Human
uccuuggugcaaaugauuuaau

SEQ ID NO: 896008 - RNA, 22 nt, Human
cauuccaaguauauacaugaua

SEQ ID NO: 896009 - RNA, 22 nt, Human
ccaggcuccucaugaucuuguu

SEQ ID NO: 896010 - RNA, 22 nt, Human
gagaauaaaucuaaaguuucuu

SEQ ID NO: 896011 - RNA, 22 nt, Human
ugaagguggggcuuaggaaucu

SEQ ID NO: 896012 - RNA, 22 nt, Human
caggcagccugagggaucuggg

SEQ ID NO: 896013 - RNA, 22 nt, Human
ugggagagaauucuggugacug

SEQ ID NO: 896014 - RNA, 22 nt, Human
uuuauugcccuguaguacagga

SEQ ID NO: 896015 - RNA, 22 nt, Human
ugugagcacuauggcuaggcuc

SEQ ID NO: 896016 - RNA, 18 nt, Human
uggcagugagguaggcau

SEQ ID NO: 896017 - RNA, 22 nt, Human
cagugucaggaucaguauauuu

SEQ ID NO: 896018 - RNA, 22 nt, Human
ugcccagccuaaacuuggcaag

SEQ ID NO: 896019 - RNA, 22 nt, Human
uuggcagaaauguggcugggag

SEQ ID NO: 896020 - RNA, 22 nt, Human
uuuauugucuaugaacugcuug

SEQ ID NO: 896021 - RNA, 22 nt, Human
gcagaugccagaucaugcaggg

SEQ ID NO: 896022 - RNA, 22 nt, Human
guuauccauagaauaagucauc

SEQ ID NO: 896023 - RNA, 22 nt, Human
guggccagagauuaaauagagu

SEQ ID NO: 896024 - RNA, 22 nt, Human
agccaagaagugaguaauagua

SEQ ID NO: 896025 - RNA, 22 nt, Human
cagauuaagugcucaacagugu

SEQ ID NO: 896026 - RNA, 22 nt, Human
gauaauaagcacagcaggaugu

SEQ ID NO: 896027 - RNA, 22 nt, Human
guccauggcauuuccgucacau

SEQ ID NO: 896028 - RNA, 18 nt, Human
auucaggggcugaaugug

SEQ ID NO: 896029 - RNA, 22 nt, Human
cuuccaaaauuuauauguugaa

SEQ ID NO: 896030 - RNA, 22 nt, Human
uucuuuuccuguggcucaucca

SEQ ID NO: 896031 - RNA, 22 nt, Human
ugaauuuaucaaagauucuuaa

SEQ ID NO: 896032 - RNA, 22 nt, Human
acacauucuuuaaaugucuguu

SEQ ID NO: 896033 - RNA, 22 nt, Human
uaauauauaccuuuguuaggaa

SEQ ID NO: 896034 - RNA, 22 nt, Human
agagguugggucugaggugaga

SEQ ID NO: 896035 - RNA, 22 nt, Human
uuacaaaguucugaguucaaac

SEQ ID NO: 896036 - RNA, 22 nt, Human
aauuugauucccugcaccuguu

SEQ ID NO: 896037 - RNA, 22 nt, Human
agccaguguuaagugacugguu

SEQ ID NO: 896038 - RNA, 22 nt, Human
ggcucagguuaccagucccucc

SEQ ID NO: 896039 - RNA, 22 nt, Human
agaauuuuugauuaucuacucg

SEQ ID NO: 896040 - RNA, 22 nt, Human
aggagaccuuuugagugugaga

SEQ ID NO: 896041 - RNA, 23 nt, Human
auguuaagaagguaguuaggaua

SEQ ID NO: 896042 - RNA, 22 nt, Human
cccuaggaauucuauggccaag

SEQ ID NO: 896043 - RNA, 22 nt, Human
gggcacugaaugccaagcuagg

SEQ ID NO: 896044 - RNA, 22 nt, Human
aagcccagaugugagaacugag

SEQ ID NO: 896045 - RNA, 21 nt, Human
guauugcagaguuaugugcuc

SEQ ID NO: 896046 - RNA, 22 nt, Human
caucaguguuggcuucucagag

SEQ ID NO: 896047 - RNA, 22 nt, Human
ugcuucugacugggucaguuga

SEQ ID NO: 896048 - RNA, 22 nt, Human
gggaacagagugccagacugac

SEQ ID NO: 896049 - RNA, 22 nt, Human
gccuggcuucccuuggagcauu

SEQ ID NO: 896050 - RNA, 15 nt, Human
cagguuaguuuccag

SEQ ID NO: 896051 - RNA, 22 nt, Human
ugaggugguucaagagccuugu

SEQ ID NO: 896052 - RNA, 22 nt, Human
gaaggaagugcucauacuaguu

SEQ ID NO: 896053 - RNA, 22 nt, Human
ucgugaggcucugcaucgcaca

SEQ ID NO: 896054 - RNA, 22 nt, Human
gguuuauugaaggccaccccac

SEQ ID NO: 896055 - RNA, 22 nt, Human
ccagggaaauuaaugaguuaau

SEQ ID NO: 896056 - RNA, 20 nt, Human
gaugaaaucacugggcagcc

SEQ ID NO: 896057 - RNA, 22 nt, Human
ucccugaggaagggguguggug

SEQ ID NO: 896058 - RNA, 22 nt, Human
ucuuugcucuuacacaguuagu

SEQ ID NO: 896059 - RNA, 22 nt, Human
acaguucuuaaaacuugaauua

SEQ ID NO: 896060 - RNA, 22 nt, Human
ugagccaggcacugcuccugga

SEQ ID NO: 896061 - RNA, 22 nt, Human
ggcugccuugacccuggcuccg

SEQ ID NO: 896062 - RNA, 22 nt, Human
aaggauacuuuuagagccugag

SEQ ID NO: 896063 - RNA, 22 nt, Human
gguuuauuguuaauaaguuuga

SEQ ID NO: 896064 - RNA, 22 nt, Human
gcagaggcucuuuaaugcuuag

SEQ ID NO: 896065 - RNA, 22 nt, Human
uacaucuaucuagaugcucaga

SEQ ID NO: 896066 - RNA, 20 nt, Human
ugagguaucaauucaaggca

SEQ ID NO: 896067 - RNA, 22 nt, Human
gcccugaguugagccuuccaaa

SEQ ID NO: 896068 - RNA, 22 nt, Human
agugugagcuaauagcagagcc

SEQ ID NO: 896069 - RNA, 22 nt, Human
uuuacuuugugucaagucaaga

SEQ ID NO: 896070 - RNA, 22 nt, Human
aaagcaaugggucuaagguaaa

SEQ ID NO: 896071 - RNA, 19 nt, Human
aguguuucaugugcuuuua

SEQ ID NO: 896072 - RNA, 20 nt, Human
augaguuuaaacauucagag

SEQ ID NO: 896073 - RNA, 22 nt, Human
uaggaauccagaucuagacugu

SEQ ID NO: 896074 - RNA, 22 nt, Human
cugcuggggucagagcacuggg

SEQ ID NO: 896075 - RNA, 22 nt, Human
aguuuccucauguuaauaugga

SEQ ID NO: 896076 - RNA, 22 nt, Human
cugugcauguguucucugguaa

SEQ ID NO: 896077 - RNA, 22 nt, Human
aaguguuuggggaucauuuuaa

SEQ ID NO: 896078 - RNA, 22 nt, Human
ugucuuuagccacuugccucuu

SEQ ID NO: 896079 - RNA, 22 nt, Human
agggccaggcucccaugucagg

SEQ ID NO: 896080 - RNA, 22 nt, Human
gccacugcacuccagcccaggc

SEQ ID NO: 896081 - RNA, 22 nt, Human
uggagcugguaaacagugacau

SEQ ID NO: 896082 - RNA, 22 nt, Human
cagagggcucggcggccgcucc

SEQ ID NO: 896083 - RNA, 22 nt, Human
cagcuggccugaucccuguggc

SEQ ID NO: 896084 - RNA, 22 nt, Human
augcaacagcugggaauaugua

SEQ ID NO: 896085 - RNA, 22 nt, Human
cccagugucugggccugcaggg

SEQ ID NO: 896086 - RNA, 22 nt, Human
uucuuuuaauuucugucugcag

SEQ ID NO: 896087 - RNA, 22 nt, Human
ucaauacagaaaggauauuuug

SEQ ID NO: 896088 - RNA, 22 nt, Human
ggagcagcacugccacacagag

SEQ ID NO: 896089 - RNA, 19 nt, Human
ucuccagcuuugggcuuuu

SEQ ID NO: 896090 - RNA, 22 nt, Human
aggagcugaaacuucucauaug

SEQ ID NO: 896091 - RNA, 22 nt, Human
ucaacauugagucccugggucu

SEQ ID NO: 896092 - RNA, 22 nt, Human
guggggguggaaaggcaaguug

SEQ ID NO: 896093 - RNA, 22 nt, Human
aaagugcugagacagacuggga

SEQ ID NO: 896094 - RNA, 22 nt, Human
ugccaaauuuucucagagaugc

SEQ ID NO: 896095 - RNA, 22 nt, Human
auuauuguuuuaauaguagaga

SEQ ID NO: 896096 - RNA, 22 nt, Human
cagcaugguggagcugcucuuu

SEQ ID NO: 896097 - RNA, 22 nt, Human
ucugggaaggcucugcagauau

SEQ ID NO: 896098 - RNA, 22 nt, Human
ugcaauuuuuuagcacaaggag

SEQ ID NO: 896099 - RNA, 22 nt, Human
agucugggcugucugcaggagu

SEQ ID NO: 896100 - RNA, 22 nt, Human
cugugggagggaaggcgcggcc

SEQ ID NO: 896101 - RNA, 18 nt, Human
cucauguguggucccagc

SEQ ID NO: 896102 - RNA, 22 nt, Human
agacaagacuaggcaguuguug

SEQ ID NO: 896103 - RNA, 22 nt, Human
ugucucugggugauucaguccu

SEQ ID NO: 896104 - RNA, 20 nt, Human
cccagggguuguggugagga

SEQ ID NO: 896105 - RNA, 22 nt, Human
ugucugucaucagggauauccu

SEQ ID NO: 896106 - RNA, 22 nt, Human
gccugggagugcacagugaggu

SEQ ID NO: 896107 - RNA, 22 nt, Human
aagcagcugaaggauucagggu

SEQ ID NO: 896108 - RNA, 22 nt, Human
uuuguagcagcaugauuuauaa

SEQ ID NO: 896109 - RNA, 22 nt, Human
aagccaggcugcacuugcuggg

SEQ ID NO: 896110 - RNA, 22 nt, Human
ugaaagcugcccaguggaauua

SEQ ID NO: 896111 - RNA, 22 nt, Human
cuuguauacaguguacacauug

SEQ ID NO: 896112 - RNA, 22 nt, Human
cagcacauaguagguauucacu

SEQ ID NO: 896113 - RNA, 22 nt, Human
uccaggccuuugcacauguugu

SEQ ID NO: 896114 - RNA, 22 nt, Human
ccaacacagauguguuaguguu

SEQ ID NO: 896115 - RNA, 22 nt, Human
uugauaaaaugauaucuucuuu

SEQ ID NO: 896116 - RNA, 22 nt, Human
cguauuuagaaggcugcugaaa

SEQ ID NO: 896117 - RNA, 22 nt, Human
acauuucuuuucaucucuauau

SEQ ID NO: 896118 - RNA, 22 nt, Human
ugucccaggccucauguugcca

SEQ ID NO: 896119 - RNA, 22 nt, Human
cagguguugggagaagagauaa

SEQ ID NO: 896120 - RNA, 21 nt, Human
ucuaagccuugcagauggguu

SEQ ID NO: 896121 - RNA, 21 nt, Human
uuuauucucagauacagggag

SEQ ID NO: 896122 - RNA, 19 nt, Human
aguuuuuggaaauccugcu

SEQ ID NO: 896123 - RNA, 22 nt, Human
uaacuagaauggcuauuuugag

SEQ ID NO: 896124 - RNA, 22 nt, Human
guuagcaaugaaaucuggaugc

SEQ ID NO: 896125 - RNA, 22 nt, Human
cacccaggcuagagugcagugg

SEQ ID NO: 896126 - RNA, 18 nt, Human
aguaaauguuaaauauug

SEQ ID NO: 896127 - RNA, 22 nt, Human
aaguuugucgaaauuaucagca

SEQ ID NO: 896128 - RNA, 22 nt, Human
acagacaucaucaacaucuucc

SEQ ID NO: 896129 - RNA, 22 nt, Human
cacauguacagaagcaggcugg

SEQ ID NO: 896130 - RNA, 22 nt, Human
gagaaguucuaauuggcucuuu

SEQ ID NO: 896131 - RNA, 22 nt, Human
auacacaucuauuuaagagaca

SEQ ID NO: 896132 - RNA, 22 nt, Human
cugucaccuguucacugcagca

SEQ ID NO: 896133 - RNA, 22 nt, Human
uuuucacaaggguccaacuagu

SEQ ID NO: 896134 - RNA, 22 nt, Human
aacacaugccuuaagaauaagu

SEQ ID NO: 896135 - RNA, 22 nt, Human
uguuucugucuguuuucuacau

SEQ ID NO: 896136 - RNA, 22 nt, Human
aaaaaccauugucuucagucuc

SEQ ID NO: 896137 - RNA, 22 nt, Human
ccucuguggcccugacucucuu

SEQ ID NO: 896138 - RNA, 22 nt, Human
ugucaguucagugauuacaaaa

SEQ ID NO: 896139 - RNA, 22 nt, Human
gcacaggucaggagaugagauu

SEQ ID NO: 896140 - RNA, 22 nt, Human
aaucaagaguuguguaauauuu

SEQ ID NO: 896141 - RNA, 22 nt, Human
auuuugaaaagcauuugaguaa

SEQ ID NO: 896142 - RNA, 22 nt, Human
cacugaaaucgaaaaauguagg

SEQ ID NO: 896143 - RNA, 22 nt, Human
caggaagaaagaggugaggugu

SEQ ID NO: 896144 - RNA, 23 nt, Human
gcucaucaggcuuagagucaagg

SEQ ID NO: 896145 - RNA, 22 nt, Human
guccugagcauuaagcaauugu

SEQ ID NO: 896146 - RNA, 22 nt, Human
aaauggcuacaagaugugcucu

SEQ ID NO: 896147 - RNA, 22 nt, Human
uaugcaaaugacugguauguuu

SEQ ID NO: 896148 - RNA, 22 nt, Human
agaaaaacacaaucgggccucc

SEQ ID NO: 896149 - RNA, 22 nt, Human
aaaggagacagucuuaccugga

SEQ ID NO: 896150 - RNA, 22 nt, Human
cagacuggcugaaggccgagug

SEQ ID NO: 896151 - RNA, 22 nt, Human
ucaggcuuccaacaaugauguu

SEQ ID NO: 896152 - RNA, 22 nt, Human
auggcagauggcuggagcaggu

SEQ ID NO: 896153 - RNA, 22 nt, Human
cuggggcugcagcgaucuucau

SEQ ID NO: 896154 - RNA, 22 nt, Human
gcauuacuucuuucauagguca

SEQ ID NO: 896155 - RNA, 22 nt, Human
uacacauauguccauuaaucag

SEQ ID NO: 896156 - RNA, 22 nt, Human
ugagaauuuuuugucaugcauu

SEQ ID NO: 896157 - RNA, 22 nt, Human
ucacacuuuccauggcuguuaa

SEQ ID NO: 896158 - RNA, 19 nt, Human
auucuuguuaagugucauc

SEQ ID NO: 896159 - RNA, 22 nt, Human
agcugccucccugugcuugucc

SEQ ID NO: 896160 - RNA, 22 nt, Human
caguuauaagacuaagcuauuc

SEQ ID NO: 896161 - RNA, 23 nt, Human
uucuucucaauuaguugauucag

SEQ ID NO: 896162 - RNA, 17 nt, Human
uggucuggaagaacuga

SEQ ID NO: 896163 - RNA, 22 nt, Human
guauuucccugaguucugugag

SEQ ID NO: 896164 - RNA, 22 nt, Human
agcuggaacuggguuuguugga

SEQ ID NO: 896165 - RNA, 22 nt, Human
uggcccugcuggacacgccugc

SEQ ID NO: 896166 - RNA, 19 nt, Human
aggacccuuauccuggcuu

SEQ ID NO: 896167 - RNA, 22 nt, Human
gguagcaucuuuggauguuauu

SEQ ID NO: 896168 - RNA, 22 nt, Human
ugagggucauuuggaaguggaa

SEQ ID NO: 896169 - RNA, 22 nt, Human
uaacaaggcaauuugugauccu

SEQ ID NO: 896170 - RNA, 20 nt, Human
ccugccuguguuugugauga

SEQ ID NO: 896171 - RNA, 22 nt, Human
agguauggcauaaaucacaggg

SEQ ID NO: 896172 - RNA, 22 nt, Human
auacauguuugcuggauaaaca

SEQ ID NO: 896173 - RNA, 22 nt, Human
uggagcugagaaguggagcucu

SEQ ID NO: 896174 - RNA, 22 nt, Human
ugcugaagggaaggucuugaau

SEQ ID NO: 896175 - RNA, 22 nt, Human
cuugucagccaauuguggauuu

SEQ ID NO: 896176 - RNA, 16 nt, Human
gggagggaguuggugg

SEQ ID NO: 896177 - RNA, 22 nt, Human
agaggcucuugcccuucccaca

SEQ ID NO: 896178 - RNA, 22 nt, Human
cagaaucuucuuaauuggcaca

SEQ ID NO: 896179 - RNA, 22 nt, Human
aucacugagcuucagugcuggc

SEQ ID NO: 896180 - RNA, 22 nt, Human
aggugagaaaacgaggguugca

SEQ ID NO: 896181 - RNA, 22 nt, Human
acagggugaaugugacauuauc

SEQ ID NO: 896182 - RNA, 22 nt, Human
cagggccucgaagccucugggc

SEQ ID NO: 896183 - RNA, 22 nt, Human
ggagggcucccugggaguggau

SEQ ID NO: 896184 - RNA, 22 nt, Human
aaagacuuggcuuaugauuugc

SEQ ID NO: 896185 - RNA, 22 nt, Human
uauuuaguuaucuuucauaaaa

SEQ ID NO: 896186 - RNA, 22 nt, Human
ggucuccuugggaaagcaggaa

SEQ ID NO: 896187 - RNA, 20 nt, Human
uaaagacauaagcuacuauc

SEQ ID NO: 896188 - RNA, 22 nt, Human
aucuuuggugcaugauacuuug

SEQ ID NO: 896189 - RNA, 22 nt, Human
cuaaggaaaaggauauauaugu

SEQ ID NO: 896190 - RNA, 22 nt, Human
gagggugucucacgugaaagua

SEQ ID NO: 896191 - RNA, 22 nt, Human
gucacaggguccccauauggag

SEQ ID NO: 896192 - RNA, 17 nt, Human
agacucugucccaugua

SEQ ID NO: 896193 - RNA, 22 nt, Human
agggaccuugauggguuuggga

SEQ ID NO: 896194 - RNA, 22 nt, Human
auugaauagaugcauuauacua

SEQ ID NO: 896195 - RNA, 22 nt, Human
ggccuuggggaggauggugucc

SEQ ID NO: 896196 - RNA, 22 nt, Human
aaaguucucuaugguguaaaaa

SEQ ID NO: 896197 - RNA, 22 nt, Human
uguucuaggcaaaagcugauuu

SEQ ID NO: 896198 - RNA, 22 nt, Human
guuccacaaagauugucucucu

SEQ ID NO: 896199 - RNA, 22 nt, Human
cuagaagcaacuagaucuguuu

SEQ ID NO: 896200 - RNA, 22 nt, Human
cuggcuuuuuucccauuaugca

SEQ ID NO: 896201 - RNA, 22 nt, Human
uugcagggauuaccuuauuuuu

SEQ ID NO: 896202 - RNA, 22 nt, Human
uguaucuucaguuugucuuucc

SEQ ID NO: 896203 - RNA, 22 nt, Human
uggcuacagaauuggcccuguu

SEQ ID NO: 896204 - RNA, 22 nt, Human
augcaucacuugaggucaggag

SEQ ID NO: 896205 - RNA, 22 nt, Human
uucagcuugcuuagucuccuuc

SEQ ID NO: 896206 - RNA, 22 nt, Human
acacccagauuaugcacacaaa

SEQ ID NO: 896207 - RNA, 22 nt, Human
acagagguggaccucagcaggc

SEQ ID NO: 896208 - RNA, 22 nt, Human
ccccacccucgcuccauuucgg

SEQ ID NO: 896209 - RNA, 22 nt, Human
uagcgagguguuucuaggacug

SEQ ID NO: 896210 - RNA, 22 nt, Human
guguccagggccguguugucuu

SEQ ID NO: 896211 - RNA, 22 nt, Human
uaaacagaaagcagauguacuu

SEQ ID NO: 896212 - RNA, 20 nt, Human
uccuuuggccuuagagcugu

SEQ ID NO: 896213 - RNA, 22 nt, Human
auuccuuguauaucuacaugca

SEQ ID NO: 896214 - RNA, 22 nt, Human
uuguauuuggguaguauagaga

SEQ ID NO: 896215 - RNA, 19 nt, Human
aagcauuagccaaagcauu

SEQ ID NO: 896216 - RNA, 23 nt, Human
ucuacccacacugcucuagaagg

SEQ ID NO: 896217 - RNA, 22 nt, Human
gcacaauaauucuuguuuugcu

SEQ ID NO: 896218 - RNA, 22 nt, Human
auggaaauggagugugcuugcu

SEQ ID NO: 896219 - RNA, 22 nt, Human
uauuagcaaccaagagccucua

SEQ ID NO: 896220 - RNA, 22 nt, Human
aaggaaaugugccugacacugc

SEQ ID NO: 896221 - RNA, 21 nt, Human
auguggccauuguaguccacg

SEQ ID NO: 896222 - RNA, 22 nt, Human
uguguacaucucuucucacauu

SEQ ID NO: 896223 - RNA, 22 nt, Human
guucauguuugagaacaaggag

SEQ ID NO: 896224 - RNA, 22 nt, Human
aaauagcauuguauuuagcuga

SEQ ID NO: 896225 - RNA, 22 nt, Human
cuccugggaggaugcggacccg

SEQ ID NO: 896226 - RNA, 22 nt, Human
cuuauuaauggaauccuaauga

SEQ ID NO: 896227 - RNA, 22 nt, Human
cagggcaguuugugccuaugag

SEQ ID NO: 896228 - RNA, 22 nt, Human
caauucaaguugaguacagcuu

SEQ ID NO: 896229 - RNA, 22 nt, Human
uacaacagaccuagaugaauga

SEQ ID NO: 896230 - RNA, 22 nt, Human
ggcccaguguaccccaggcagu

SEQ ID NO: 896231 - RNA, 22 nt, Human
aaucauaauuuugugaauguag

SEQ ID NO: 896232 - RNA, 22 nt, Human
ccaucccuccuccaccagcuag

SEQ ID NO: 896233 - RNA, 22 nt, Human
aaaagagcuugguugauuuugc

SEQ ID NO: 896234 - RNA, 22 nt, Human
uggcuucuaaaguuucuuuuag

SEQ ID NO: 896235 - RNA, 22 nt, Human
cagcaggcccaggugcugguga

SEQ ID NO: 896236 - RNA, 22 nt, Human
cacaugcaccagaaaucaacau

SEQ ID NO: 896237 - RNA, 22 nt, Human
cugccuucuuucaaggguaagc

SEQ ID NO: 896238 - RNA, 22 nt, Human
uccagccaggauggcccaggga

SEQ ID NO: 896239 - RNA, 22 nt, Human
acaggcagcacuaaucucuggu

SEQ ID NO: 896240 - RNA, 22 nt, Human
ugccagggcugcuacuggcuga

SEQ ID NO: 896241 - RNA, 22 nt, Human
agccaggcagggcucucgcucu

SEQ ID NO: 896242 - RNA, 22 nt, Human
uaaguaauugcagcaauuugcc

SEQ ID NO: 896243 - RNA, 22 nt, Human
agaaagcaucuccauuguaggu

SEQ ID NO: 896244 - RNA, 22 nt, Human
uuggcagcagaguguggugcuc

SEQ ID NO: 896245 - RNA, 22 nt, Human
uuggaagagagccacaguuaau

SEQ ID NO: 896246 - RNA, 23 nt, Human
gcuucugccauuugcuagcugug

SEQ ID NO: 896247 - RNA, 22 nt, Human
agggcagcuagcuguagaaaga

SEQ ID NO: 896248 - RNA, 22 nt, Human
agggacuggcucucugagcagg

SEQ ID NO: 896249 - RNA, 22 nt, Human
gcaggcugccaccuucugaguu

SEQ ID NO: 896250 - RNA, 22 nt, Human
caauuugcccuguuaaauuuuc

SEQ ID NO: 896251 - RNA, 21 nt, Human
uccaagccuucaacacauuca

SEQ ID NO: 896252 - RNA, 22 nt, Human
caugacaccuaccauauuaagu

SEQ ID NO: 896253 - RNA, 22 nt, Human
aggugaaugcucacauucuaau

SEQ ID NO: 896254 - RNA, 22 nt, Human
ucagccagggcucuggccucag

SEQ ID NO: 896255 - RNA, 22 nt, Human
gaggccaggguaccaucaacau

SEQ ID NO: 896256 - RNA, 22 nt, Human
acaugacagugacuuuauaaga

SEQ ID NO: 896257 - RNA, 22 nt, Human
ggaugggcugaaagguagcccc

SEQ ID NO: 896258 - RNA, 22 nt, Human
aaaacauaaacugacagcccau

SEQ ID NO: 896259 - RNA, 22 nt, Human
guaauaauacuagucagccuug

SEQ ID NO: 896260 - RNA, 23 nt, Human
gggagccauggguggucauggag

SEQ ID NO: 896261 - RNA, 22 nt, Human
ugucugagcgagaaaguagugu

SEQ ID NO: 896262 - RNA, 22 nt, Human
ccccaggcagggccuaacagag

SEQ ID NO: 896263 - RNA, 22 nt, Human
ucauuuguaccauuuuuuaaga

SEQ ID NO: 896264 - RNA, 22 nt, Human
cucugggcugaauggcugaacc

SEQ ID NO: 896265 - RNA, 22 nt, Human
agcugccuccauggucaaagau

SEQ ID NO: 896266 - RNA, 22 nt, Human
ugaaaucaugaacaagguaggu

SEQ ID NO: 896267 - RNA, 22 nt, Human
cauuagcagucauuacugugcu

SEQ ID NO: 896268 - RNA, 22 nt, Human
agucccaguucgguucuuccuc

SEQ ID NO: 896269 - RNA, 22 nt, Human
cacaggagagcugggaggugcc

SEQ ID NO: 896270 - RNA, 22 nt, Human
ggugaagggccuuaggagacag

SEQ ID NO: 896271 - RNA, 22 nt, Human
gagcugccggcccacaguacua

SEQ ID NO: 896272 - RNA, 22 nt, Human
cagggagaaaucuccaggaggu

SEQ ID NO: 896273 - RNA, 22 nt, Human
gaaguuuagaagugacagguuu

SEQ ID NO: 896274 - RNA, 22 nt, Human
ggaggccucaucuugccccgug

SEQ ID NO: 896275 - RNA, 22 nt, Human
agaccugguuuaucaccagcau

SEQ ID NO: 896276 - RNA, 22 nt, Human
aucagaaugcagccagcaguua

SEQ ID NO: 896277 - RNA, 22 nt, Human
uaaggcaagagcagggucuuug

SEQ ID NO: 896278 - RNA, 22 nt, Human
agugucugaucaguugacuaga

SEQ ID NO: 896279 - RNA, 22 nt, Human
uguuuacagggugauuuuaccu

SEQ ID NO: 896280 - RNA, 22 nt, Human
cagucaggcugcgcuucucuga

SEQ ID NO: 896281 - RNA, 22 nt, Human
agcccugggcagccaaggaagc

SEQ ID NO: 896282 - RNA, 22 nt, Human
uuguuuccauaauuaaguguga

SEQ ID NO: 896283 - RNA, 21 nt, Human
acagugugcuucucucccucc

SEQ ID NO: 896284 - RNA, 22 nt, Human
uuaacauuguccuuagcagauu

SEQ ID NO: 896285 - RNA, 22 nt, Human
cucugcugaucucagcugggcu

SEQ ID NO: 896286 - RNA, 17 nt, Human
cagcucugcaucuuccu

SEQ ID NO: 896287 - RNA, 22 nt, Human
ugcacuacugugauacacagcc

SEQ ID NO: 896288 - RNA, 22 nt, Human
uaacaaugguuuugcugauaau

SEQ ID NO: 896289 - RNA, 22 nt, Human
ggaaggaaauuggggcaguugu

SEQ ID NO: 896290 - RNA, 19 nt, Human
gaguauuuuccaacuuggu

SEQ ID NO: 896291 - RNA, 21 nt, Human
aggcaguugagcauguuauga

SEQ ID NO: 896292 - RNA, 22 nt, Human
cuuuccccaagcaccacagugc

SEQ ID NO: 896293 - RNA, 22 nt, Human
ugcauacauaaagugcuaucau

SEQ ID NO: 896294 - RNA, 22 nt, Human
cuccuggaggauagugacuggg

SEQ ID NO: 896295 - RNA, 19 nt, Human
ggcagcaagcucugaaggc

SEQ ID NO: 896296 - RNA, 20 nt, Human
gccagcugcccuuccacccu

SEQ ID NO: 896297 - RNA, 22 nt, Human
cugcagggaacugaggcccaga

SEQ ID NO: 896298 - RNA, 23 nt, Human
agcagcagcaauuaaguggauau

SEQ ID NO: 896299 - RNA, 22 nt, Human
agucaggauaugccuugugggc

SEQ ID NO: 896300 - RNA, 22 nt, Human
cuccagugcugucaucccuucc

SEQ ID NO: 896301 - RNA, 20 nt, Human
agcaaaaugcaagauuuuca

SEQ ID NO: 896302 - RNA, 22 nt, Human
guuauauaagacaaaucagagu

SEQ ID NO: 896303 - RNA, 22 nt, Human
ccugcugagacccugagguggg

SEQ ID NO: 896304 - RNA, 22 nt, Human
gcugcuguuccggcuacagccc

SEQ ID NO: 896305 - RNA, 22 nt, Human
gcugugauguggagggugcuga

SEQ ID NO: 896306 - RNA, 22 nt, Human
accugagacuugggaugggaau

SEQ ID NO: 896307 - RNA, 22 nt, Human
aggggcucaagcaguguggucu

SEQ ID NO: 896308 - RNA, 22 nt, Human
gggccuggggacaccaccauga

SEQ ID NO: 896309 - RNA, 18 nt, Human
uagaaucuguuauugccu

SEQ ID NO: 896310 - RNA, 22 nt, Human
cuuagaugaagucacagaaccc

SEQ ID NO: 896311 - RNA, 22 nt, Human
uuugucuuguguccuuaggacc

SEQ ID NO: 896312 - RNA, 22 nt, Human
acauacaugggauuaaaaaauu

SEQ ID NO: 896313 - RNA, 22 nt, Human
acaguacauaauccugagucug

SEQ ID NO: 896314 - RNA, 22 nt, Human
aggcaaaucucaguuggccucu

SEQ ID NO: 896315 - RNA, 22 nt, Human
ugaacuuacaaauuaaaagacu

SEQ ID NO: 896316 - RNA, 22 nt, Human
ugcucagggacaauggagaggg

SEQ ID NO: 896317 - RNA, 22 nt, Human
ccugugucuuccccacuggugu

SEQ ID NO: 896318 - RNA, 22 nt, Human
aacaaugucucauccuaugugg

SEQ ID NO: 896319 - RNA, 22 nt, Human
uguaaauucuauacacuuaaaa

SEQ ID NO: 896320 - RNA, 22 nt, Human
ccaagggcgccuccguuccccc

SEQ ID NO: 896321 - RNA, 22 nt, Human
aggcuggcggugacugcucuga

SEQ ID NO: 896322 - RNA, 20 nt, Human
aggcugccuaaggcucugca

SEQ ID NO: 896323 - RNA, 22 nt, Human
ugacucaguacaucuggaguug

SEQ ID NO: 896324 - RNA, 22 nt, Human
aggagacauggaauagugaggc

SEQ ID NO: 896325 - RNA, 22 nt, Human
aaggcagccuuuugaguugauu

SEQ ID NO: 896326 - RNA, 22 nt, Human
agugugcuguuuccagaagggc

SEQ ID NO: 896327 - RNA, 22 nt, Human
uucagaaaaaacuucaauaagu

SEQ ID NO: 896328 - RNA, 22 nt, Human
uuuuggaaucugggaaaacagu

SEQ ID NO: 896329 - RNA, 22 nt, Human
ccagcugucuugagaggaggca

SEQ ID NO: 896330 - RNA, 22 nt, Human
aaaugugaguuauagcaauaga

SEQ ID NO: 896331 - RNA, 22 nt, Human
uccaaaacagaacucugugaau

SEQ ID NO: 896332 - RNA, 22 nt, Human
ccauugaaccccucuaggccac

SEQ ID NO: 896333 - RNA, 22 nt, Human
aaagagacugguggcauuuugc

SEQ ID NO: 896334 - RNA, 22 nt, Human
acagugaaugcccaagaaaagu

SEQ ID NO: 896335 - RNA, 22 nt, Human
aauagauucaugguuaagagca

SEQ ID NO: 896336 - RNA, 22 nt, Human
gcagggcagcugaagcuaggug

SEQ ID NO: 896337 - RNA, 22 nt, Human
ugccucugugggcagagcugcc

SEQ ID NO: 896338 - RNA, 22 nt, Human
gagagaagggacuucuacacuu

SEQ ID NO: 896339 - RNA, 22 nt, Human
uuuaauuuuccugguaggccug

SEQ ID NO: 896340 - RNA, 22 nt, Human
ggaagcggcccugagcgcaggg

SEQ ID NO: 896341 - RNA, 22 nt, Human
gucuucuggaagagagccagcu

SEQ ID NO: 896342 - RNA, 22 nt, Human
gguggggagucaggcauucuug

SEQ ID NO: 896343 - RNA, 22 nt, Human
cuugagaaaggaacaggaagcu

SEQ ID NO: 896344 - RNA, 22 nt, Human
uguuaaaccaguuuugcaucau

SEQ ID NO: 896345 - RNA, 22 nt, Human
guauucuugguuaucaaaauac

SEQ ID NO: 896346 - RNA, 22 nt, Human
uaaaguucuuagaacaaggccu

SEQ ID NO: 896347 - RNA, 22 nt, Human
gagcuguuuuuuaaaguuagga

SEQ ID NO: 896348 - RNA, 22 nt, Human
caacucagacuggauuaaauaa

SEQ ID NO: 896349 - RNA, 22 nt, Human
gccauauauauuuugcacuagg

SEQ ID NO: 896350 - RNA, 22 nt, Human
auggaaauacacaagagguuuc

SEQ ID NO: 896351 - RNA, 22 nt, Human
ucagcaaggcugcauucucauc

SEQ ID NO: 896352 - RNA, 22 nt, Human
cuuuucaaacgcugaugucagu

SEQ ID NO: 896353 - RNA, 22 nt, Human
ccccuuccuuccucagacagcc

SEQ ID NO: 896354 - RNA, 22 nt, Human
gguccuuugaaagggguguguc

SEQ ID NO: 896355 - RNA, 22 nt, Human
gcagccacagaggagggaugca

SEQ ID NO: 896356 - RNA, 22 nt, Human
ggcaggcuuucagcaucaaguc

SEQ ID NO: 896357 - RNA, 22 nt, Human
agagaagcauucuucucagggc

SEQ ID NO: 896358 - RNA, 23 nt, Human
auguauguuucugcaucuucaac

SEQ ID NO: 896359 - RNA, 22 nt, Human
acguguguuggucagggggccc

SEQ ID NO: 896360 - RNA, 22 nt, Human
uauugaaauucuucauguccuc

SEQ ID NO: 896361 - RNA, 22 nt, Human
uuuaacagauaguuucuucugu

SEQ ID NO: 896362 - RNA, 21 nt, Human
uuggccuuugucucagacacu

SEQ ID NO: 896363 - RNA, 22 nt, Human
ggaggugggaguuuaguucuug

SEQ ID NO: 896364 - RNA, 22 nt, Human
uuguggggaggauuugaugaga

SEQ ID NO: 896365 - RNA, 22 nt, Human
gggcaguggguggcugcagccu

SEQ ID NO: 896366 - RNA, 18 nt, Human
gguggcggggauggaggu

SEQ ID NO: 896367 - RNA, 22 nt, Human
auuucuuccucugucaguaacu

SEQ ID NO: 896368 - RNA, 22 nt, Human
gcccugcuguuuagagagcuac

SEQ ID NO: 896369 - RNA, 18 nt, Human
auugcacaccagccuggg

SEQ ID NO: 896370 - RNA, 22 nt, Human
gaagagcuauguccagggagca

SEQ ID NO: 896371 - RNA, 22 nt, Human
uaaauguuuagucuuauuuggg

SEQ ID NO: 896372 - RNA, 22 nt, Human
cuggagccggaccagggacggu

SEQ ID NO: 896373 - RNA, 22 nt, Human
ucugagcugggggccuggcaug

SEQ ID NO: 896374 - RNA, 22 nt, Human
cucuucucugcagccuuugaag

SEQ ID NO: 896375 - RNA, 21 nt, Human
ugagguaguguuugucaaguu

SEQ ID NO: 896376 - RNA, 22 nt, Human
aucauccuagaaggaagcuagg

SEQ ID NO: 896377 - RNA, 22 nt, Human
agacuauuuugugauaacuaau

SEQ ID NO: 896378 - RNA, 22 nt, Human
ucuucauggucugguucuccag

SEQ ID NO: 896379 - RNA, 22 nt, Human
uauauucaaugauuaguaucag

SEQ ID NO: 896380 - RNA, 23 nt, Human
auuugacagagcauagcauuucu

SEQ ID NO: 896381 - RNA, 22 nt, Human
ccaaacugggccagucagcugu

SEQ ID NO: 896382 - RNA, 22 nt, Human
uccugggcuuaagugauccucc

SEQ ID NO: 896383 - RNA, 22 nt, Human
gaggacaggagacucacuguuu

SEQ ID NO: 896384 - RNA, 22 nt, Human
uaugcagagcaugacuguacca

SEQ ID NO: 896385 - RNA, 22 nt, Human
cagaguggcgacccccucagcu

SEQ ID NO: 896386 - RNA, 19 nt, Human
ccuggccagacuucugccc

SEQ ID NO: 896387 - RNA, 22 nt, Human
ccaguguuuacaguugaacaaa

SEQ ID NO: 896388 - RNA, 22 nt, Human
uuugauuuacuggauauucuca

SEQ ID NO: 896389 - RNA, 22 nt, Human
gaggccuggugcuguguccaca

SEQ ID NO: 896390 - RNA, 22 nt, Human
cucuuuggagaagcacguauua

SEQ ID NO: 896391 - RNA, 22 nt, Human
gagagacagcagaacgugcagc

SEQ ID NO: 896392 - RNA, 22 nt, Human
acuuuguaauaacuccugaguu

SEQ ID NO: 896393 - RNA, 23 nt, Human
acagcacccaugucaucuggcuc

SEQ ID NO: 896394 - RNA, 21 nt, Human
ggugacacguggccccgcucu

SEQ ID NO: 896395 - RNA, 22 nt, Human
agguggcagaugggggugcucg

SEQ ID NO: 896396 - RNA, 19 nt, Human
aggcuucaggccacaugcu

SEQ ID NO: 896397 - RNA, 23 nt, Human
ugggaagauauguauguucaagg

SEQ ID NO: 896398 - RNA, 22 nt, Human
aagcagcuuccccaaagugccu

SEQ ID NO: 896399 - RNA, 22 nt, Human
uuuuaauucaaagugaauagug

SEQ ID NO: 896400 - RNA, 22 nt, Human
uuucauuggcucccugaugaau

SEQ ID NO: 896401 - RNA, 22 nt, Human
ugagaggcgcucacucucaggu

SEQ ID NO: 896402 - RNA, 22 nt, Human
aaguaacuaaagauauccauuu

SEQ ID NO: 896403 - RNA, 22 nt, Human
agucuauuuugcuuauucuaug

SEQ ID NO: 896404 - RNA, 22 nt, Human
caguguuucugaguuccagcuc

SEQ ID NO: 896405 - RNA, 22 nt, Human
aauaauaagauacuaagggagu

SEQ ID NO: 896406 - RNA, 22 nt, Human
uuacacagugguuaagucuggg

SEQ ID NO: 896407 - RNA, 22 nt, Human
gggaaggagccugcuugcuaga

SEQ ID NO: 896408 - RNA, 22 nt, Human
ccacaggggucucuguagcuga

SEQ ID NO: 896409 - RNA, 22 nt, Human
ugacauugugugcauuuaaagu

SEQ ID NO: 896410 - RNA, 22 nt, Human
ggcgguggcgugaagguggcug

SEQ ID NO: 896411 - RNA, 22 nt, Human
ucauagaaugaguuaaugaacu

SEQ ID NO: 896412 - RNA, 21 nt, Human
uacagaaugcgcuucagucug

SEQ ID NO: 896413 - RNA, 20 nt, Human
accaggccccgggcccugca

SEQ ID NO: 896414 - RNA, 22 nt, Human
gcccugcugcuggcagaggcgc

SEQ ID NO: 896415 - RNA, 23 nt, Human
uguagcaucucuuauuucucagc

SEQ ID NO: 896416 - RNA, 22 nt, Human
acaauagacccaugacacauac

SEQ ID NO: 896417 - RNA, 22 nt, Human
agaggccagcagugccuaucug

SEQ ID NO: 896418 - RNA, 22 nt, Human
gggcuaagcucgcccagggcca

SEQ ID NO: 896419 - RNA, 22 nt, Human
guccuggggaauacagaagccg

SEQ ID NO: 896420 - RNA, 22 nt, Human
gggauuacagaugugagccauu

SEQ ID NO: 896421 - RNA, 22 nt, Human
gccaggucucauaaaugcagcu

SEQ ID NO: 896422 - RNA, 22 nt, Human
ggcagaagguugaaguaauuug

SEQ ID NO: 896423 - RNA, 22 nt, Human
uggccugcuuucuuagguguuc

SEQ ID NO: 896424 - RNA, 22 nt, Human
agaaauaugcugauuagaugaa

SEQ ID NO: 896425 - RNA, 23 nt, Human
aggauguaggauguauggcagag

SEQ ID NO: 896426 - RNA, 22 nt, Human
gcucuguguccacagcuggaaa

SEQ ID NO: 896427 - RNA, 22 nt, Human
gcacagggagcaggucucuggu

SEQ ID NO: 896428 - RNA, 22 nt, Human
aggggccauuguucugcccgcu

SEQ ID NO: 896429 - RNA, 21 nt, Human
cuaagcaaggagcagggguag

SEQ ID NO: 896430 - RNA, 22 nt, Human
cacagcaaagacacucucaacu

SEQ ID NO: 896431 - RNA, 22 nt, Human
gguggggccagggcuccaaccu

SEQ ID NO: 896432 - RNA, 22 nt, Human
aacgcccgugguugccaaggua

SEQ ID NO: 896433 - RNA, 22 nt, Human
uuugaaguccaucuggcccagu

SEQ ID NO: 896434 - RNA, 22 nt, Human
ccaggacccugcaaacccuguu

SEQ ID NO: 896435 - RNA, 22 nt, Human
guguagcuuuggagugggaggc

SEQ ID NO: 896436 - RNA, 22 nt, Human
cacauuguagagauuagaaaga

SEQ ID NO: 896437 - RNA, 22 nt, Human
uuucacaaugcaauccuacuuc

SEQ ID NO: 896438 - RNA, 22 nt, Human
ccuuugggugaauuccucucuu

SEQ ID NO: 896439 - RNA, 22 nt, Human
gccaggagggaaaggacaauuu

SEQ ID NO: 896440 - RNA, 22 nt, Human
aacuuuucauuccaaaggugcu

SEQ ID NO: 896441 - RNA, 22 nt, Human
accagggcacaggagucugaag

SEQ ID NO: 896442 - RNA, 22 nt, Human
aaauuaguacauugcaaagucc

SEQ ID NO: 896443 - RNA, 23 nt, Human
ucucugaguuguacuuucccuug

SEQ ID NO: 896444 - RNA, 22 nt, Human
aaugucaaguagccaaugcuuc

SEQ ID NO: 896445 - RNA, 17 nt, Human
uguacaacaguaccuuc

SEQ ID NO: 896446 - RNA, 22 nt, Human
uucuucaggauacgucauccag

SEQ ID NO: 896447 - RNA, 19 nt, Human
agcgguucucaaagucagg

SEQ ID NO: 896448 - RNA, 22 nt, Human
ugucccauggacacaacuucuu

SEQ ID NO: 896449 - RNA, 22 nt, Human
aaugcacauauauuuccuuauu

SEQ ID NO: 896450 - RNA, 22 nt, Human
aaacccauggcugauaucacua

SEQ ID NO: 896451 - RNA, 22 nt, Human
gggcuccagaguccauguucuu

SEQ ID NO: 896452 - RNA, 22 nt, Human
aggccagcgcugcuagcucccg

SEQ ID NO: 896453 - RNA, 22 nt, Human
agagucagaaccaagaugaggc

SEQ ID NO: 896454 - RNA, 22 nt, Human
cauuagaacuaagauguccagg

SEQ ID NO: 896455 - RNA, 21 nt, Human
agggucaggaaccaggguacc

SEQ ID NO: 896456 - RNA, 22 nt, Human
ggcucuggcggcucuuucaaua

SEQ ID NO: 896457 - RNA, 23 nt, Human
agcuagcauaaugucuggcuccu

SEQ ID NO: 896458 - RNA, 17 nt, Human
agcaccuguccaguccc

SEQ ID NO: 896459 - RNA, 22 nt, Human
gccaggcuccccggaucccugg

SEQ ID NO: 896460 - RNA, 22 nt, Human
cuucacuuuaagccaaucauga

SEQ ID NO: 896461 - RNA, 22 nt, Human
uaaguuuauagauaaaugccua

SEQ ID NO: 896462 - RNA, 22 nt, Human
uaaguucaccaguuguaauaag

SEQ ID NO: 896463 - RNA, 22 nt, Human
agcagcagaagggagacccagg

SEQ ID NO: 896464 - RNA, 22 nt, Human
gucaggcccuggcagccgugac

SEQ ID NO: 896465 - RNA, 22 nt, Human
uucacagauguauuggaacucc

SEQ ID NO: 896466 - RNA, 22 nt, Human
uacaaaggcgguuuuucugggc

SEQ ID NO: 896467 - RNA, 22 nt, Human
aggcuucagaugaccuuagcau

SEQ ID NO: 896468 - RNA, 22 nt, Human
ccacacagggggaugaguuauu

SEQ ID NO: 896469 - RNA, 21 nt, Human
uucuacaggaugaaugaaaac

SEQ ID NO: 896470 - RNA, 22 nt, Human
uggaauguaaacucugugaggg

SEQ ID NO: 896471 - RNA, 22 nt, Human
guggcacagagauggggcauga

SEQ ID NO: 896472 - RNA, 20 nt, Human
agaagcauucaaagaaaacu

SEQ ID NO: 896473 - RNA, 20 nt, Human
aagcuggaagaccagcauug

SEQ ID NO: 896474 - RNA, 22 nt, Human
cucaaggaaagucuggagaaga

SEQ ID NO: 896475 - RNA, 22 nt, Human
ugagacaguaauuguauaguuu

SEQ ID NO: 896476 - RNA, 22 nt, Human
cuucccuucugcagaucuuugg

SEQ ID NO: 896477 - RNA, 22 nt, Human
ugcuuaaacauccagacaguau

SEQ ID NO: 896478 - RNA, 23 nt, Human
uguaccaggaguuucagcagacu

SEQ ID NO: 896479 - RNA, 22 nt, Human
agggcuggagccacagcuggga

SEQ ID NO: 896480 - RNA, 22 nt, Human
aggcugagucgggaggaucacu

SEQ ID NO: 896481 - RNA, 22 nt, Human
ugaggcaggagaauggcgggaa

SEQ ID NO: 896482 - RNA, 22 nt, Human
cuuuuuacucuguugucucagc

SEQ ID NO: 896483 - RNA, 22 nt, Human
uguauacauacauaugugugug

SEQ ID NO: 896484 - RNA, 19 nt, Human
uuucuaauguguuuuucuu

SEQ ID NO: 896485 - RNA, 22 nt, Human
gaaugaaucuguaagugacaag

SEQ ID NO: 896486 - RNA, 22 nt, Human
augaauauugaaugucuuauga

SEQ ID NO: 896487 - RNA, 22 nt, Human
aggcuccauaccaucuccggag

SEQ ID NO: 896488 - RNA, 22 nt, Human
uaggggugaggccaggcaucag

SEQ ID NO: 896489 - RNA, 22 nt, Human
agcuuuggaugaucuuugauac

SEQ ID NO: 896490 - RNA, 22 nt, Human
uuaugguaauuaaaacauguau

SEQ ID NO: 896491 - RNA, 22 nt, Human
uauguggccuuuuaugucugac

SEQ ID NO: 896492 - RNA, 20 nt, Human
cagguccagcacgugcacgg

SEQ ID NO: 896493 - RNA, 22 nt, Human
gggcucagcugggcgugcuggu

SEQ ID NO: 896494 - RNA, 22 nt, Human
auauguuucaguauucaaguca

SEQ ID NO: 896495 - RNA, 23 nt, Human
uucuggaagauuuacuugagaca

SEQ ID NO: 896496 - RNA, 22 nt, Human
agggcugacaguaaaaguauga

SEQ ID NO: 896497 - RNA, 22 nt, Human
cuucaugaggccggcuuuaucc

SEQ ID NO: 896498 - RNA, 22 nt, Human
uguuaauauacuaaaauccacu

SEQ ID NO: 896499 - RNA, 22 nt, Human
uuauucuuuucuccagaauccc

SEQ ID NO: 896500 - RNA, 22 nt, Human
caggccagcuuccugacauccu

SEQ ID NO: 896501 - RNA, 22 nt, Human
acugggccggugcagaguaguu

SEQ ID NO: 896502 - RNA, 22 nt, Human
uucagaaaugucagccaucaga

SEQ ID NO: 896503 - RNA, 22 nt, Human
uucugggagagaaagggccuug

SEQ ID NO: 896504 - RNA, 22 nt, Human
uauuggauuucugaaagaugag

SEQ ID NO: 896505 - RNA, 22 nt, Human
ucaucacauguguagucauccc

SEQ ID NO: 896506 - RNA, 22 nt, Human
ucuguggcaaacacagugacca

SEQ ID NO: 896507 - RNA, 22 nt, Human
cugugccaggcccagcugacuu

SEQ ID NO: 896508 - RNA, 22 nt, Human
cugagcugggaguagagacucu

SEQ ID NO: 896509 - RNA, 22 nt, Human
auuuagaacuuuguuugccaau

SEQ ID NO: 896510 - RNA, 23 nt, Human
agccucuuuucuccugcccugca

SEQ ID NO: 896511 - RNA, 22 nt, Human
guacaaguucuacucuauaaau

SEQ ID NO: 896512 - RNA, 22 nt, Human
ugggagcaggaagcaggaagua

SEQ ID NO: 896513 - RNA, 22 nt, Human
caggcagcucuaauggaaagug

SEQ ID NO: 896514 - RNA, 22 nt, Human
ccugagaaauagcaucauuuuu

SEQ ID NO: 896515 - RNA, 22 nt, Human
uggagccugagucagcggaggc

SEQ ID NO: 896516 - RNA, 22 nt, Human
gcaugggaggacagucugggcu

SEQ ID NO: 896517 - RNA, 22 nt, Human
aagauucuagaggaacuucuua

SEQ ID NO: 896518 - RNA, 22 nt, Human
auuccacagugccuuccgugaa

SEQ ID NO: 896519 - RNA, 20 nt, Human
gaaaauaggccagccaggua

SEQ ID NO: 896520 - RNA, 21 nt, Human
aacauuaguaauuugacuuuu

SEQ ID NO: 896521 - RNA, 22 nt, Human
uagcagggucucaggagucagg

SEQ ID NO: 896522 - RNA, 22 nt, Human
aacaaugauauagggauuggca

SEQ ID NO: 896523 - RNA, 22 nt, Human
uagcagaaccagcagucaauuu

SEQ ID NO: 896524 - RNA, 22 nt, Human
caggaguggugugagggacucc

SEQ ID NO: 896525 - RNA, 22 nt, Human
agggcugccugacuccagagcc

SEQ ID NO: 896526 - RNA, 22 nt, Human
aaaguuuguuauaugauaagga

SEQ ID NO: 896527 - RNA, 22 nt, Human
agauuacagaagaauaaguaga

SEQ ID NO: 896528 - RNA, 22 nt, Human
uccucugcuccaucuuuacugu

SEQ ID NO: 896529 - RNA, 22 nt, Human
uagauacucagaaaugcuuuca

SEQ ID NO: 896530 - RNA, 21 nt, Human
uacuacagucucuuuaucagu

SEQ ID NO: 896531 - RNA, 22 nt, Human
gaugaaaaauugcugugucaua

SEQ ID NO: 896532 - RNA, 20 nt, Human
acagagaucagcugaugggc

SEQ ID NO: 896533 - RNA, 22 nt, Human
aguccauacauugagaauaaca

SEQ ID NO: 896534 - RNA, 22 nt, Human
ugauuugaaaccuuuggcaaga

SEQ ID NO: 896535 - RNA, 22 nt, Human
uucagagaaacugagguuuaga

SEQ ID NO: 896536 - RNA, 22 nt, Human
ugucucuuggauugcuugcucu

SEQ ID NO: 896537 - RNA, 22 nt, Human
aguuuucuguucuacaauuuga

SEQ ID NO: 896538 - RNA, 22 nt, Human
ccuggcugcauuuugcuggaug

SEQ ID NO: 896539 - RNA, 22 nt, Human
ucucugagaaguuccuuuguga

SEQ ID NO: 896540 - RNA, 22 nt, Human
ucuguugcaaugugcaugguga

SEQ ID NO: 896541 - RNA, 22 nt, Human
gaacaaacugggucccaaugau

SEQ ID NO: 896542 - RNA, 22 nt, Human
cuggggacucauucagagcaua

SEQ ID NO: 896543 - RNA, 22 nt, Human
uauaauuuuaagugguaaauua

SEQ ID NO: 896544 - RNA, 22 nt, Human
gcagaggguccugugccagcag

SEQ ID NO: 896545 - RNA, 22 nt, Human
acaguggaauggugggccugca

SEQ ID NO: 896546 - RNA, 22 nt, Human
ggaauguugucauuuacauuau

SEQ ID NO: 896547 - RNA, 22 nt, Human
ucuuuggcaucagggccagcua

SEQ ID NO: 896548 - RNA, 22 nt, Human
aacaugcauguuauuuaucagu

SEQ ID NO: 896549 - RNA, 22 nt, Human
agcuuacaguucaaugacaaag

SEQ ID NO: 896550 - RNA, 22 nt, Human
uccuuggagguguucaucugcc

SEQ ID NO: 896551 - RNA, 22 nt, Human
aggccagcucuacccuuggacu

SEQ ID NO: 896552 - RNA, 22 nt, Human
uuugugcaauuuauguacuaua

SEQ ID NO: 896553 - RNA, 22 nt, Human
acagaaguuucaaguaagaagu

SEQ ID NO: 896554 - RNA, 22 nt, Human
ugagcagcccuuccuccggcca

SEQ ID NO: 896555 - RNA, 22 nt, Human
ggcaagguacucuagagcacau

SEQ ID NO: 896556 - RNA, 22 nt, Human
gaggcagcugggauacaaggga

SEQ ID NO: 896557 - RNA, 22 nt, Human
aauauuugaacagucacugagu

SEQ ID NO: 896558 - RNA, 22 nt, Human
gaaauguauaagcuggucuuuu

SEQ ID NO: 896559 - RNA, 22 nt, Human
acaggccuagggucaauuuccu

SEQ ID NO: 896560 - RNA, 22 nt, Human
uuuaauacagaacuugucaggg

SEQ ID NO: 896561 - RNA, 22 nt, Human
gguucuagugacacugaauuga

SEQ ID NO: 896562 - RNA, 22 nt, Human
aaagacauuagcuuagauguca

SEQ ID NO: 896563 - RNA, 22 nt, Human
caggcacaaauuucuagauaag

SEQ ID NO: 896564 - RNA, 22 nt, Human
uacaaugacucucaguuuggcu

SEQ ID NO: 896565 - RNA, 21 nt, Human
ugggccucaaguggguggcag

SEQ ID NO: 896566 - RNA, 22 nt, Human
aagacucaaggaacaacacagu

SEQ ID NO: 896567 - RNA, 22 nt, Human
acagggcuuuuaaucaguaguu

SEQ ID NO: 896568 - RNA, 22 nt, Human
auaugaauuuggcuggaaaggu

SEQ ID NO: 896569 - RNA, 22 nt, Human
gccucuccucuuaauaccauua

SEQ ID NO: 896570 - RNA, 22 nt, Human
auucuacaaaagaacuggaucu

SEQ ID NO: 896571 - RNA, 18 nt, Human
ucugagguggacgaggag

SEQ ID NO: 896572 - RNA, 22 nt, Human
ugggccccagcacgucugggga

SEQ ID NO: 896573 - RNA, 22 nt, Human
uccuggagaagaggggcuugga

SEQ ID NO: 896574 - RNA, 22 nt, Human
uccugcagagacagaggccuca

SEQ ID NO: 896575 - RNA, 22 nt, Human
cagagccacuuggagaugagaa

SEQ ID NO: 896576 - RNA, 22 nt, Human
uaaaagacccucuagaguccca

SEQ ID NO: 896577 - RNA, 22 nt, Human
uggcugaggucuggggcuucug

SEQ ID NO: 896578 - RNA, 22 nt, Human
ugucauauagaauguucuauga

SEQ ID NO: 896579 - RNA, 22 nt, Human
ggacaaaggguggagccucuga

SEQ ID NO: 896580 - RNA, 22 nt, Human
ccagggaagucacauugucuag

SEQ ID NO: 896581 - RNA, 19 nt, Human
aucuuuagggauguggcuu

SEQ ID NO: 896582 - RNA, 22 nt, Human
gcaauauaaccaguugucaugc

SEQ ID NO: 896583 - RNA, 22 nt, Human
gccaggcucuuccauuuggguc

SEQ ID NO: 896584 - RNA, 22 nt, Human
gaggcuucuggaaagccuggca

SEQ ID NO: 896585 - RNA, 22 nt, Human
gccaccagguuagauccagccu

SEQ ID NO: 896586 - RNA, 22 nt, Human
caggaagcuggguuuccauaca

SEQ ID NO: 896587 - RNA, 22 nt, Human
cuggggucucaauucuagcggg

SEQ ID NO: 896588 - RNA, 22 nt, Human
aucugguucuucuuaggcauca

SEQ ID NO: 896589 - RNA, 22 nt, Human
ugaaacuuauaagaauaugaau

SEQ ID NO: 896590 - RNA, 22 nt, Human
gccucucucuacccaguaugau

SEQ ID NO: 896591 - RNA, 18 nt, Human
uuaguauaacugccugug

SEQ ID NO: 896592 - RNA, 22 nt, Human
cacaugcaguuuuccagcaguc

SEQ ID NO: 896593 - RNA, 22 nt, Human
ucgaacucauagucguagcugu

SEQ ID NO: 896594 - RNA, 22 nt, Human
gaggcuggagauauuccaaucu

SEQ ID NO: 896595 - RNA, 22 nt, Human
gagaccuuaagagaugucagcu

SEQ ID NO: 896596 - RNA, 22 nt, Human
ugcugcagggauuucagagaca

SEQ ID NO: 896597 - RNA, 22 nt, Human
gcccagcccugaggucacagcu

SEQ ID NO: 896598 - RNA, 22 nt, Human
ggcagcaguggcugcuauuguc

SEQ ID NO: 896599 - RNA, 22 nt, Human
cucuggcaauugcugcugacuc

SEQ ID NO: 896600 - RNA, 22 nt, Human
cagaaacaggcaacgugugcac

SEQ ID NO: 896601 - RNA, 21 nt, Human
gcagcaaaugacaacagugag

SEQ ID NO: 896602 - RNA, 22 nt, Human
ugaugguaaacaaagacauuua

SEQ ID NO: 896603 - RNA, 22 nt, Human
cuguuuccccaugcccugacuc

SEQ ID NO: 896604 - RNA, 22 nt, Human
gcagagcagugcuugcccagcg

SEQ ID NO: 896605 - RNA, 22 nt, Human
cuggcagcuuagcacucugguu

SEQ ID NO: 896606 - RNA, 22 nt, Human
augacagaaggccucccugaca

SEQ ID NO: 896607 - RNA, 22 nt, Human
ccagcucugcauguuucccuug

SEQ ID NO: 896608 - RNA, 22 nt, Human
uacaguuacugcauuucuaaua

SEQ ID NO: 896609 - RNA, 22 nt, Human
uccaggagaaggccauccagcg

SEQ ID NO: 896610 - RNA, 22 nt, Human
aauuaucagauauaaaacugca

SEQ ID NO: 896611 - RNA, 22 nt, Human
gcccugucggaacugcgaccuc

SEQ ID NO: 896612 - RNA, 22 nt, Human
auccaaaccuggacaugagugg

SEQ ID NO: 896613 - RNA, 22 nt, Human
gcuggagccauuggcuuggccu

SEQ ID NO: 896614 - RNA, 17 nt, Human
gauggggcugacaucag

SEQ ID NO: 896615 - RNA, 22 nt, Human
ugaaacggaauguucuuuaucg

SEQ ID NO: 896616 - RNA, 22 nt, Human
ugcagggaugcuagagguaaga

SEQ ID NO: 896617 - RNA, 22 nt, Human
ugcuuuuugcacccuuugccgu

SEQ ID NO: 896618 - RNA, 22 nt, Human
uauucacauuaauaagucuuca

SEQ ID NO: 896619 - RNA, 22 nt, Human
ccagguguagcacugcucacag

SEQ ID NO: 896620 - RNA, 22 nt, Human
cagagguuugaucgaguagguc

SEQ ID NO: 896621 - RNA, 22 nt, Human
ccccagcugcauacuugccaag

SEQ ID NO: 896622 - RNA, 22 nt, Human
cagggugccucugcucccacca

SEQ ID NO: 896623 - RNA, 22 nt, Human
aauuuaguguaaagcuacugga

SEQ ID NO: 896624 - RNA, 22 nt, Human
guagaaaugguguguuucuucu

SEQ ID NO: 896625 - RNA, 23 nt, Human
agcuucauuauuuuccaugaucu

SEQ ID NO: 896626 - RNA, 22 nt, Human
ccaggaagggcucuuuaaagac

SEQ ID NO: 896627 - RNA, 22 nt, Human
aaugcaagucaaugcuauaccc

SEQ ID NO: 896628 - RNA, 22 nt, Human
aacaguuacccuuaagaucuuu

SEQ ID NO: 896629 - RNA, 22 nt, Human
gaaggcuggcuuucugagagca

SEQ ID NO: 896630 - RNA, 22 nt, Human
cagugcuguuaauaaacacaaa

SEQ ID NO: 896631 - RNA, 22 nt, Human
ugggagagugcucaaugugcaa

SEQ ID NO: 896632 - RNA, 22 nt, Human
uggcucuguuguaaagaaauuu

SEQ ID NO: 896633 - RNA, 22 nt, Human
uuacccagggaccaagagaaac

SEQ ID NO: 896634 - RNA, 22 nt, Human
acuucuuuucaaaucaugcaaa

SEQ ID NO: 896635 - RNA, 22 nt, Human
ccuggcaguggugaagaagagg

SEQ ID NO: 896636 - RNA, 22 nt, Human
acaguguuuggcaaugcaugca

SEQ ID NO: 896637 - RNA, 22 nt, Human
cuuaggaguucacuugaauagu

SEQ ID NO: 896638 - RNA, 22 nt, Human
gaagcgcggcgucggcgugggu

SEQ ID NO: 896639 - RNA, 22 nt, Human
ugcucacagcccagaacauaau

SEQ ID NO: 896640 - RNA, 22 nt, Human
ucuaggccguaggauacagagc

SEQ ID NO: 896641 - RNA, 22 nt, Human
auucuacagaugaaagcggcug

SEQ ID NO: 896642 - RNA, 22 nt, Human
uccaggccuugacaggucaguu

SEQ ID NO: 896643 - RNA, 22 nt, Human
cugcccucuagaggaggacuga

SEQ ID NO: 896644 - RNA, 22 nt, Human
ccagaaaacucuacaugcuugu

SEQ ID NO: 896645 - RNA, 22 nt, Human
uucuuuguuugauaaguaugcu

SEQ ID NO: 896646 - RNA, 22 nt, Human
agacaucucccaugcauuuuua

SEQ ID NO: 896647 - RNA, 22 nt, Human
uagcagugguuccuacguguug

SEQ ID NO: 896648 - RNA, 22 nt, Human
cuggcuccaucuuugcuuccug

SEQ ID NO: 896649 - RNA, 22 nt, Human
uucuaagaaugcuuugcaaaau

SEQ ID NO: 896650 - RNA, 22 nt, Human
ccuggagcacucucccuggcug

SEQ ID NO: 896651 - RNA, 22 nt, Human
gagaggcucagggacuugcuga

SEQ ID NO: 896652 - RNA, 22 nt, Human
caguacaauuuuacaaaggacg

SEQ ID NO: 896653 - RNA, 22 nt, Human
ggcugcagauagccagccacca

SEQ ID NO: 896654 - RNA, 22 nt, Human
gacaggcagaccugugcccugg

SEQ ID NO: 896655 - RNA, 22 nt, Human
ccucuggcaacuucacagccca

SEQ ID NO: 896656 - RNA, 22 nt, Human
cagguauucauagaauucagag

SEQ ID NO: 896657 - RNA, 22 nt, Human
aggucagcugugugugcaugag

SEQ ID NO: 896658 - RNA, 22 nt, Human
caggccuuucuggggaagugag

SEQ ID NO: 896659 - RNA, 22 nt, Human
cucuggagucaggcagcccugg

SEQ ID NO: 896660 - RNA, 16 nt, Human
uucuagaaaagaaggu

SEQ ID NO: 896661 - RNA, 22 nt, Human
auguauucaagccacauacauu

SEQ ID NO: 896662 - RNA, 22 nt, Human
uguuuucuggguggaagguacu

SEQ ID NO: 896663 - RNA, 22 nt, Human
ucugguccugaagucaacuuca

SEQ ID NO: 896664 - RNA, 22 nt, Human
agcaggccucaugcaccagcua

SEQ ID NO: 896665 - RNA, 22 nt, Human
agggcucaagaaaguguaccuc

SEQ ID NO: 896666 - RNA, 22 nt, Human
aauaugaugccaaauugcuaca

SEQ ID NO: 896667 - RNA, 22 nt, Human
aaacacauuuuaggaaaaucua

SEQ ID NO: 896668 - RNA, 22 nt, Human
ucagagaaguaagguggggugc

SEQ ID NO: 896669 - RNA, 22 nt, Human
gcuguggcaauguuuauaauua

SEQ ID NO: 896670 - RNA, 22 nt, Human
cacauguuuggcaugucaccaa

SEQ ID NO: 896671 - RNA, 22 nt, Human
caucaucucucccccaggccug

SEQ ID NO: 896672 - RNA, 22 nt, Human
gggaaggcagugucugguugaa

SEQ ID NO: 896673 - RNA, 20 nt, Human
ucauaugugguuguauacaa

SEQ ID NO: 896674 - RNA, 22 nt, Human
aacucaaagaugcaugacgcuu

SEQ ID NO: 896675 - RNA, 22 nt, Human
guuccacauuuguaaaaugagg

SEQ ID NO: 896676 - RNA, 22 nt, Human
uuggccagacacuaccccccuu

SEQ ID NO: 896677 - RNA, 22 nt, Human
caggaggcagaggaugcccagu

SEQ ID NO: 896678 - RNA, 22 nt, Human
uaugcgugccucugucugucug

SEQ ID NO: 896679 - RNA, 22 nt, Human
aguggacccggaacagaggccc

SEQ ID NO: 896680 - RNA, 22 nt, Human
uagaggcuccuguguguagguu

SEQ ID NO: 896681 - RNA, 22 nt, Human
agcagcagggucauugcucuuu

SEQ ID NO: 896682 - RNA, 22 nt, Human
gguacauuuuucugucacuuug

SEQ ID NO: 896683 - RNA, 22 nt, Human
uguuuacacaauagucucucuc

SEQ ID NO: 896684 - RNA, 22 nt, Human
cagguucuuaaguaacagcaca

SEQ ID NO: 896685 - RNA, 22 nt, Human
ucagccagggcagagcagguga

SEQ ID NO: 896686 - RNA, 22 nt, Human
aggcagccuuuagacagucugc

SEQ ID NO: 896687 - RNA, 22 nt, Human
uuaacugugacaguuucucaga

SEQ ID NO: 896688 - RNA, 22 nt, Human
uuaaagcaaccaucaauuugga

SEQ ID NO: 896689 - RNA, 22 nt, Human
ucuuuuguggaugaagaaaugg

SEQ ID NO: 896690 - RNA, 22 nt, Human
agccccccaagggccuucucuu

SEQ ID NO: 896691 - RNA, 20 nt, Human
agaaaaaguguggaaauuuc

SEQ ID NO: 896692 - RNA, 22 nt, Human
auggcagcaguuuggagucuuu

SEQ ID NO: 896693 - RNA, 22 nt, Human
uucuuugggcucagagagggag

SEQ ID NO: 896694 - RNA, 22 nt, Human
ucauggcuaaccaaggccugau

SEQ ID NO: 896695 - RNA, 22 nt, Human
gacacuguuauggugagguaag

SEQ ID NO: 896696 - RNA, 23 nt, Human
cccaggucaaaauucacaggccu

SEQ ID NO: 896697 - RNA, 22 nt, Human
uuuggaauguaguuuaaucauc

SEQ ID NO: 896698 - RNA, 21 nt, Human
cucagagcaguucagagggau

SEQ ID NO: 896699 - RNA, 22 nt, Human
gaguggggaaagccaggacaga

SEQ ID NO: 896700 - RNA, 22 nt, Human
gcagaggagugauuaugccgug

SEQ ID NO: 896701 - RNA, 22 nt, Human
uuccuucuuguaaugaucugcc

SEQ ID NO: 896702 - RNA, 22 nt, Human
cugcccuguggcucugagucau

SEQ ID NO: 896703 - RNA, 22 nt, Human
augugcuuucuuuguuucauaa

SEQ ID NO: 896704 - RNA, 22 nt, Human
cuuuacaaacuauaaagugcgg

SEQ ID NO: 896705 - RNA, 22 nt, Human
agaggacagcccccuugucugg

SEQ ID NO: 896706 - RNA, 22 nt, Human
cagguucuauacugaauaauuu

SEQ ID NO: 896707 - RNA, 22 nt, Human
cagcucccagaacugaccaugu

SEQ ID NO: 896708 - RNA, 22 nt, Human
uccagaccauggauggcugcaa

SEQ ID NO: 896709 - RNA, 22 nt, Human
ggaacacagugccuuacaaacu

SEQ ID NO: 896710 - RNA, 22 nt, Human
uccugagcaacacagcuaagug

SEQ ID NO: 896711 - RNA, 22 nt, Human
aagaaagccaaaguucauaccu

SEQ ID NO: 896712 - RNA, 22 nt, Human
gagggccaaagagcaagagccu

SEQ ID NO: 896713 - RNA, 22 nt, Human
uguuggcagugcuacagucagu

SEQ ID NO: 896714 - RNA, 22 nt, Human
ccugccuggaucagccauccug

SEQ ID NO: 896715 - RNA, 22 nt, Human
auaaagcuauuuuuaauucugu

SEQ ID NO: 896716 - RNA, 22 nt, Human
acagaauuuacacaucucuaaa

SEQ ID NO: 896717 - RNA, 22 nt, Human
uagucagagucuucucuguugu

SEQ ID NO: 896718 - RNA, 22 nt, Human
agcugcugcgccucacccuggc

SEQ ID NO: 896719 - RNA, 22 nt, Human
augcaucuaugacuuagacauu

SEQ ID NO: 896720 - RNA, 21 nt, Human
ugggaccuauuucaacuggau

SEQ ID NO: 896721 - RNA, 22 nt, Human
agguuucuccuuuaaagcaugg

SEQ ID NO: 896722 - RNA, 22 nt, Human
ugcagaaauucagaaagcauaa

SEQ ID NO: 896723 - RNA, 22 nt, Human
acaguguuacuugauaguguau

SEQ ID NO: 896724 - RNA, 22 nt, Human
aggagggauagaaaaauacuug

SEQ ID NO: 896725 - RNA, 22 nt, Human
uggccuuggagaggcacggccc

SEQ ID NO: 896726 - RNA, 22 nt, Human
aauuuggggagguucagacucu

SEQ ID NO: 896727 - RNA, 22 nt, Human
agagauguucauucagcauguu

SEQ ID NO: 896728 - RNA, 22 nt, Human
cccguguggaugcgcuggugcu

SEQ ID NO: 896729 - RNA, 22 nt, Human
ugggaaaguaauugucauccuu

SEQ ID NO: 896730 - RNA, 22 nt, Human
ugcugugacccaaaaaagaccu

SEQ ID NO: 896731 - RNA, 16 nt, Human
ggcaccagugaacaca

SEQ ID NO: 896732 - RNA, 22 nt, Human
acaguuugagaaccacuagccu

SEQ ID NO: 896733 - RNA, 22 nt, Human
aagauacaucaaagcaaauugg

SEQ ID NO: 896734 - RNA, 22 nt, Human
gcugcccucugugacccggccc

SEQ ID NO: 896735 - RNA, 19 nt, Human
gccuuuguuccuuuugucu

SEQ ID NO: 896736 - RNA, 22 nt, Human
ucuugcuguguauugcaucucc

SEQ ID NO: 896737 - RNA, 22 nt, Human
cgugucugggauagcagaagua

SEQ ID NO: 896738 - RNA, 22 nt, Human
ugcccugggaacacagaugcca

SEQ ID NO: 896739 - RNA, 22 nt, Human
gcagagcagaggugcagguugg

SEQ ID NO: 896740 - RNA, 22 nt, Human
cugagaggugacagcgugcugg

SEQ ID NO: 896741 - RNA, 21 nt, Human
uugcuguuuucccaaugcagu

SEQ ID NO: 896742 - RNA, 22 nt, Human
agggggugggaagucuagaauc

SEQ ID NO: 896743 - RNA, 22 nt, Human
gaucuccaucugcagugucugg

SEQ ID NO: 896744 - RNA, 22 nt, Human
aaggugaaacuggaagcuggcc

SEQ ID NO: 896745 - RNA, 22 nt, Human
ccaagguuagaaaagguacuuu

SEQ ID NO: 896746 - RNA, 22 nt, Human
gaggcuggaauauuagaaaugu

SEQ ID NO: 896747 - RNA, 22 nt, Human
uacuuuaauauaugugaaguuc

SEQ ID NO: 896748 - RNA, 22 nt, Human
uggucucuucuuccaagauggc

SEQ ID NO: 896749 - RNA, 22 nt, Human
ucauuuauagcuaaccuugaau

SEQ ID NO: 896750 - RNA, 18 nt, Human
uggccuggagacaacucu

SEQ ID NO: 896751 - RNA, 22 nt, Human
cuucuaggcuucucagggggca

SEQ ID NO: 896752 - RNA, 22 nt, Human
uuuacagauguggaaagugagc

SEQ ID NO: 896753 - RNA, 22 nt, Human
auaguguugauagcaguggagu

SEQ ID NO: 896754 - RNA, 22 nt, Human
aaaguacucgaggaggaggagc

SEQ ID NO: 896755 - RNA, 22 nt, Human
ggauguucugggguucucuugu

SEQ ID NO: 896756 - RNA, 22 nt, Human
aaagguuuuauguuuuccacuu

SEQ ID NO: 896757 - RNA, 22 nt, Human
gagcuguuaagagggagugaca

SEQ ID NO: 896758 - RNA, 22 nt, Human
ugguauuuaauauaugagaguu

SEQ ID NO: 896759 - RNA, 20 nt, Human
uuggcagcaguuccaaguga

SEQ ID NO: 896760 - RNA, 22 nt, Human
aggcuucagggcuuuugagggu

SEQ ID NO: 896761 - RNA, 22 nt, Human
acagaagugucuuuuucauuca

SEQ ID NO: 896762 - RNA, 22 nt, Human
gggaugaggaucaaucagggag

SEQ ID NO: 896763 - RNA, 22 nt, Human
agccagcaucccuucagucucc

SEQ ID NO: 896764 - RNA, 22 nt, Human
auguaucaauuaucugucugca

SEQ ID NO: 896765 - RNA, 22 nt, Human
ccucacugucacuuauaguggu

SEQ ID NO: 896766 - RNA, 22 nt, Human
guucuagguauaguaagaaauu

SEQ ID NO: 896767 - RNA, 22 nt, Human
aaugagaacugggaguuggugg

SEQ ID NO: 896768 - RNA, 22 nt, Human
uaucuagaguccugcugagaac

SEQ ID NO: 896769 - RNA, 22 nt, Human
uuuuacaccucagaugagcaga

SEQ ID NO: 896770 - RNA, 23 nt, Human
uccagacucuaaagcccuccaca

SEQ ID NO: 896771 - RNA, 22 nt, Human
auagaagauagcuuuuguuucu

SEQ ID NO: 896772 - RNA, 22 nt, Human
agcucagaaccuccucauccca

SEQ ID NO: 896773 - RNA, 19 nt, Human
agggucaggacaaggacuu

SEQ ID NO: 896774 - RNA, 22 nt, Human
uucuuaagaggaacauuuuugu

SEQ ID NO: 896775 - RNA, 19 nt, Human
gcaggcaguggcauucgga

SEQ ID NO: 896776 - RNA, 22 nt, Human
gccagcagguggagagaucaag

SEQ ID NO: 896777 - RNA, 22 nt, Human
aaucucacucaaagaauucucu

SEQ ID NO: 896778 - RNA, 22 nt, Human
aaaugcaaggcacauuccuuuu

SEQ ID NO: 896779 - RNA, 16 nt, Human
ugcuccagaggaccca

SEQ ID NO: 896780 - RNA, 22 nt, Human
uucuuucccagaagauauguuu

SEQ ID NO: 896781 - RNA, 22 nt, Human
ucacccagauuacauccuguca

SEQ ID NO: 896782 - RNA, 22 nt, Human
uaguccaucuugaauucaguga

SEQ ID NO: 896783 - RNA, 22 nt, Human
ggcaggguccacaccugggaaa

SEQ ID NO: 896784 - RNA, 23 nt, Human
gagcugaguguagggagacuagg

SEQ ID NO: 896785 - RNA, 22 nt, Human
uuacagaaaagggcuuuaagag

SEQ ID NO: 896786 - RNA, 22 nt, Human
ugacacuugagagggacacgga

SEQ ID NO: 896787 - RNA, 22 nt, Human
gcuggccuuugaggaagcugcg

SEQ ID NO: 896788 - RNA, 22 nt, Human
acuagcagaaacugaucauggc

SEQ ID NO: 896789 - RNA, 22 nt, Human
gcagcagcccagggcucucaga

SEQ ID NO: 896790 - RNA, 22 nt, Human
acaaaugaaucauacauaaugu

SEQ ID NO: 896791 - RNA, 23 nt, Human
cugugucuaugcagccauaucca

SEQ ID NO: 896792 - RNA, 22 nt, Human
gcuuuggaaauaagaggcuaaa

SEQ ID NO: 896793 - RNA, 22 nt, Human
cagccuggagccacagcccagg

SEQ ID NO: 896794 - RNA, 22 nt, Human
aggugccagugcuguggucccc

SEQ ID NO: 896795 - RNA, 19 nt, Human
gggcuuggggcugaagccu

SEQ ID NO: 896796 - RNA, 22 nt, Human
gaaugaguagaguauaaacaaa

SEQ ID NO: 896797 - RNA, 22 nt, Human
ucuaauaaauaaaugcucuagg

SEQ ID NO: 896798 - RNA, 22 nt, Human
cagcuccccaugguuccugaag

SEQ ID NO: 896799 - RNA, 22 nt, Human
gaaaaggccacuccuaggagcu

SEQ ID NO: 896800 - RNA, 22 nt, Human
aaaugccaaggagagacuguua

SEQ ID NO: 896801 - RNA, 22 nt, Human
aggaaaggauuggcuucucugu

SEQ ID NO: 896802 - RNA, 22 nt, Human
uagaaagagcauaguauuauaa

SEQ ID NO: 896803 - RNA, 22 nt, Human
aguucaagcaaugcuggaagaa

SEQ ID NO: 896804 - RNA, 22 nt, Human
acugaacaccauuuauaacauu

SEQ ID NO: 896805 - RNA, 22 nt, Human
caaaggcaggucauggccacuu

SEQ ID NO: 896806 - RNA, 22 nt, Human
ucauguuugagacuaauuuuuc

SEQ ID NO: 896807 - RNA, 22 nt, Human
cagcacaauuuucaggagucca

SEQ ID NO: 896808 - RNA, 22 nt, Human
caaacuuuuccuggaaaagauu

SEQ ID NO: 896809 - RNA, 22 nt, Human
uuccaauugcagaucagauaca

SEQ ID NO: 896810 - RNA, 22 nt, Human
caucaugaagaugagaaagcau

SEQ ID NO: 896811 - RNA, 22 nt, Human
cuuggaauugaugauuuucaua

SEQ ID NO: 896812 - RNA, 22 nt, Human
uaggcagaaaggaaggcaaguu

SEQ ID NO: 896813 - RNA, 22 nt, Human
aaaugcagaucccugaaucuca

SEQ ID NO: 896814 - RNA, 22 nt, Human
cugccuggaaugccagcuucuc

SEQ ID NO: 896815 - RNA, 22 nt, Human
aacaaugaccacacaauguacu

SEQ ID NO: 896816 - RNA, 22 nt, Human
aggaagugcuaagagaacauca

SEQ ID NO: 896817 - RNA, 22 nt, Human
acauuauaguugcuacagagua

SEQ ID NO: 896818 - RNA, 22 nt, Human
gugggcagaacauuuguaggcu

SEQ ID NO: 896819 - RNA, 22 nt, Human
ucaaaucuuugaccacuuaugu

SEQ ID NO: 896820 - RNA, 22 nt, Human
aaacuguugugguuuaucauua

SEQ ID NO: 896821 - RNA, 22 nt, Human
gcccagaguggccacuuggcuc

SEQ ID NO: 896822 - RNA, 22 nt, Human
acucugcuugggccauaucugg

SEQ ID NO: 896823 - RNA, 22 nt, Human
cugcccugccuggccagugugg

SEQ ID NO: 896824 - RNA, 22 nt, Human
uuuccagagcugagaaggcuug

SEQ ID NO: 896825 - RNA, 22 nt, Human
agcagaagugccuuagcaauca

SEQ ID NO: 896826 - RNA, 22 nt, Human
gaggccagugaaauguuauaaa

SEQ ID NO: 896827 - RNA, 22 nt, Human
uggcugaggcuuuucuuaaaga

SEQ ID NO: 896828 - RNA, 22 nt, Human
acagaaaaguuuacuuuugcuc

SEQ ID NO: 896829 - RNA, 22 nt, Human
gaggcagcaucuauggugggaa

SEQ ID NO: 896830 - RNA, 22 nt, Human
ugggcuccggcggccucaggcu

SEQ ID NO: 896831 - RNA, 20 nt, Human
ugccaugguaacagagugug

SEQ ID NO: 896832 - RNA, 18 nt, Human
ugcagcaagugcuaaaua

SEQ ID NO: 896833 - RNA, 22 nt, Human
cugcccugugaggguccuuggg

SEQ ID NO: 896834 - RNA, 22 nt, Human
acugggcagggaaggagaccga

SEQ ID NO: 896835 - RNA, 22 nt, Human
uguucccacaccagccucagcc

SEQ ID NO: 896836 - RNA, 20 nt, Human
uacuuaggcuuguuuuggcc

SEQ ID NO: 896837 - RNA, 22 nt, Human
agguggcuguauucagcuguaa

SEQ ID NO: 896838 - RNA, 22 nt, Human
agagagggcauagaaaaaggga

SEQ ID NO: 896839 - RNA, 22 nt, Human
agaaauguuuauggcugccuau

SEQ ID NO: 896840 - RNA, 22 nt, Human
aggcuaucagauagaaugaagg

SEQ ID NO: 896841 - RNA, 22 nt, Human
ugugugcacaaagaguacaugg

SEQ ID NO: 896842 - RNA, 21 nt, Human
agccagcuaucacacagcauu

SEQ ID NO: 896843 - RNA, 22 nt, Human
cccagcagccagaaugaggagc

SEQ ID NO: 896844 - RNA, 22 nt, Human
gcugaaguuuugcagagaguaa

SEQ ID NO: 896845 - RNA, 22 nt, Human
agcugcccuuaauaggcauuca

SEQ ID NO: 896846 - RNA, 22 nt, Human
uacaaagccugguagauaucug

SEQ ID NO: 896847 - RNA, 22 nt, Human
ccagggccaagagaccucgagg

SEQ ID NO: 896848 - RNA, 22 nt, Human
auguucuuggauguuguguaua

SEQ ID NO: 896849 - RNA, 22 nt, Human
uauuuaugucucugcagagaau

SEQ ID NO: 896850 - RNA, 22 nt, Human
uccauaagcagguucuuccuga

SEQ ID NO: 896851 - RNA, 22 nt, Human
uggugucaagcagaacugugaa

SEQ ID NO: 896852 - RNA, 22 nt, Human
agcagagcuauucuugugcaau

SEQ ID NO: 896853 - RNA, 22 nt, Human
cagagagcuugcccuuguauau

SEQ ID NO: 896854 - RNA, 22 nt, Human
guuuacaacaucuuguccuuca

SEQ ID NO: 896855 - RNA, 22 nt, Human
uacauacagccaaguaugaagu

SEQ ID NO: 896856 - RNA, 22 nt, Human
ccagggcugccuggccgugugu

SEQ ID NO: 896857 - RNA, 22 nt, Human
aagagauugguuauaagagauu

SEQ ID NO: 896858 - RNA, 22 nt, Human
guauuuccauuagugugugcac

SEQ ID NO: 896859 - RNA, 22 nt, Human
ugaguucuccaagagaagguaa

SEQ ID NO: 896860 - RNA, 22 nt, Human
cugccucaugcugccugcagcc

SEQ ID NO: 896861 - RNA, 22 nt, Human
ucccaggaugugcgugccgccg

SEQ ID NO: 896862 - RNA, 22 nt, Human
cuuucagucuuuacaagguugc

SEQ ID NO: 896863 - RNA, 22 nt, Human
agggggcccuugcaggugagcg

SEQ ID NO: 896864 - RNA, 22 nt, Human
acauaugauauugaggaucuca

SEQ ID NO: 896865 - RNA, 22 nt, Human
aauaggcaguuggauaugcaag

SEQ ID NO: 896866 - RNA, 22 nt, Human
ugguggagggaacuauuuccag

SEQ ID NO: 896867 - RNA, 22 nt, Human
gcagaggcauuucugacgcugc

SEQ ID NO: 896868 - RNA, 22 nt, Human
aggggaagauuauacuuuugaa

SEQ ID NO: 896869 - RNA, 22 nt, Human
ucagggccaucuuuugccucaa

SEQ ID NO: 896870 - RNA, 22 nt, Human
caagugagccuccucuuuuuaa

SEQ ID NO: 896871 - RNA, 22 nt, Human
gcugcuuucuguuaggaauugg

SEQ ID NO: 896872 - RNA, 22 nt, Human
uugagaaccacugaguuagaua

SEQ ID NO: 896873 - RNA, 22 nt, Human
cccuggcuuggcacucuccacu

SEQ ID NO: 896874 - RNA, 19 nt, Human
aggccugggguuuugcacu

SEQ ID NO: 896875 - RNA, 22 nt, Human
aggagggagcuuaagccaggca

SEQ ID NO: 896876 - RNA, 22 nt, Human
ugcaggcugggaagagggacaa

SEQ ID NO: 896877 - RNA, 22 nt, Human
cucugccaccaugcuuccugac

SEQ ID NO: 896878 - RNA, 22 nt, Human
caagaagaggugauugguaagu

SEQ ID NO: 896879 - RNA, 22 nt, Human
cugggagcgcagcaggcacaac

SEQ ID NO: 896880 - RNA, 22 nt, Human
gucugugugcacagcgagugcc

SEQ ID NO: 896881 - RNA, 22 nt, Human
uuccucuccucacaugagucac

SEQ ID NO: 896882 - RNA, 22 nt, Human
gagcuuaaaacauagccagacu

SEQ ID NO: 896883 - RNA, 22 nt, Human
gaaaggagggcucacaaaagug

SEQ ID NO: 896884 - RNA, 22 nt, Human
uuuaguuauuguuacaguauga

SEQ ID NO: 896885 - RNA, 22 nt, Human
uuucuccuugugucuccuuuga

SEQ ID NO: 896886 - RNA, 22 nt, Human
uucugggacauugcagguauuc

SEQ ID NO: 896887 - RNA, 22 nt, Human
uuggcagcaagaggcucuucug

SEQ ID NO: 896888 - RNA, 22 nt, Human
cuccuggaucuuagccagauuc

SEQ ID NO: 896889 - RNA, 22 nt, Human
uggguaagguacuguagaucug

SEQ ID NO: 896890 - RNA, 22 nt, Human
uggcagaauuucuagcagauuc

SEQ ID NO: 896891 - RNA, 22 nt, Human
aaguacauuuuuaacuuacagc

SEQ ID NO: 896892 - RNA, 22 nt, Human
uaguuuaugauuuuuuggaagg

SEQ ID NO: 896893 - RNA, 22 nt, Human
gugugcgccgacacagccaggu

SEQ ID NO: 896894 - RNA, 22 nt, Human
uuuucuguaagaggacuuuaau

SEQ ID NO: 896895 - RNA, 22 nt, Human
cuucuucuucccccuucagggg

SEQ ID NO: 896896 - RNA, 22 nt, Human
gcuuuauguaaguccaaaggca

SEQ ID NO: 896897 - RNA, 22 nt, Human
guuuugugaggcacccacaggu

SEQ ID NO: 896898 - RNA, 22 nt, Human
gccuggugugcgccgcgcagcu

SEQ ID NO: 896899 - RNA, 22 nt, Human
uuauauuucugguagccuucag

SEQ ID NO: 896900 - RNA, 22 nt, Human
uucugucacuuaggaggucaua

SEQ ID NO: 896901 - RNA, 22 nt, Human
auuugacauugacacaccuaug

SEQ ID NO: 896902 - RNA, 22 nt, Human
ccuggagcuuuuccaguugaca

SEQ ID NO: 896903 - RNA, 22 nt, Human
uuguuuauguguugucuauggc

SEQ ID NO: 896904 - RNA, 22 nt, Human
caucuuaauaaaucuccucccu

SEQ ID NO: 896905 - RNA, 22 nt, Human
gccaggcaggccacgcuguguu

SEQ ID NO: 896906 - RNA, 22 nt, Human
cuggcuguuucaggcagugucc

SEQ ID NO: 896907 - RNA, 22 nt, Human
ccagagucccuguucucggccu

SEQ ID NO: 896908 - RNA, 22 nt, Human
ugaagcaggcauugacugauga

SEQ ID NO: 896909 - RNA, 22 nt, Human
agcaaagaaggguucuucauua

SEQ ID NO: 896910 - RNA, 22 nt, Human
ucagugcaaucaagguauguuu

SEQ ID NO: 896911 - RNA, 22 nt, Human
gagccuccuccuggugugccga

SEQ ID NO: 896912 - RNA, 22 nt, Human
aaggaaggaauugaucaugcgc

SEQ ID NO: 896913 - RNA, 19 nt, Human
uaugugugcauuugugcau

SEQ ID NO: 896914 - RNA, 22 nt, Human
ucuuuugugaggacaagguacg

SEQ ID NO: 896915 - RNA, 22 nt, Human
aaggcuccacccucauggaugc

SEQ ID NO: 896916 - RNA, 22 nt, Human
ugcagaggagcuggaaggcugg

SEQ ID NO: 896917 - RNA, 22 nt, Human
augcaaaaguaguugcaguuuu

SEQ ID NO: 896918 - RNA, 22 nt, Human
caggaacaauguaagucucauu

SEQ ID NO: 896919 - RNA, 21 nt, Human
acuagcaaaagccuauuaucc

SEQ ID NO: 896920 - RNA, 22 nt, Human
ggugaggggcaccucugcccgg

SEQ ID NO: 896921 - RNA, 22 nt, Human
aaacugcaugaagcugauuuua

SEQ ID NO: 896922 - RNA, 22 nt, Human
acuaaaaacuacugccaauagc

SEQ ID NO: 896923 - RNA, 22 nt, Human
aacaggcuaguuuuaaagcaua

SEQ ID NO: 896924 - RNA, 22 nt, Human
agccacaaaggcuugccucgga

SEQ ID NO: 896925 - RNA, 22 nt, Human
ccaggagaugggagcaucuaaa

SEQ ID NO: 896926 - RNA, 22 nt, Human
gacaugaauguuauacuuuauu

SEQ ID NO: 896927 - RNA, 22 nt, Human
acagaacaacaagguggaccag

SEQ ID NO: 896928 - RNA, 22 nt, Human
gggagcaggagccugccugcca

SEQ ID NO: 896929 - RNA, 22 nt, Human
augagcagguuuaagagaggcc

SEQ ID NO: 896930 - RNA, 22 nt, Human
uggcugagccacuuguucagau

SEQ ID NO: 896931 - RNA, 22 nt, Human
ugccuacuaguacuauuuugug

SEQ ID NO: 896932 - RNA, 22 nt, Human
uuccuucuggagcccggggagc

SEQ ID NO: 896933 - RNA, 22 nt, Human
caaauguuuuuauucuacaaca

SEQ ID NO: 896934 - RNA, 22 nt, Human
ccagagggaagaggaagcgcug

SEQ ID NO: 896935 - RNA, 22 nt, Human
acugugauguuugugaucaucu

SEQ ID NO: 896936 - RNA, 22 nt, Human
guauuccuaagucaugacaaau

SEQ ID NO: 896937 - RNA, 23 nt, Human
ucucucuggcaaauuucacauau

SEQ ID NO: 896938 - RNA, 20 nt, Human
auucagaauaggcauguaaa

SEQ ID NO: 896939 - RNA, 22 nt, Human
gugaggcagggaaagaggauaa

SEQ ID NO: 896940 - RNA, 22 nt, Human
uguguuuguuagacuaauguua

SEQ ID NO: 896941 - RNA, 22 nt, Human
aggguggaagauggcacuaucu

SEQ ID NO: 896942 - RNA, 22 nt, Human
aaaccugauagauuuucagaau

SEQ ID NO: 896943 - RNA, 22 nt, Human
auauauuugagaauauucauga

SEQ ID NO: 896944 - RNA, 21 nt, Human
acauggauauaggacugaauu

SEQ ID NO: 896945 - RNA, 22 nt, Human
acacuaaaugagucuacaguac

SEQ ID NO: 896946 - RNA, 22 nt, Human
ucagugcuccuaaagugaaugc

SEQ ID NO: 896947 - RNA, 22 nt, Human
uaagcauuaugguaaagaagua

SEQ ID NO: 896948 - RNA, 22 nt, Human
ugaauaaauugagagcgaaugu

SEQ ID NO: 896949 - RNA, 22 nt, Human
aaugcuuaauucaauacugugu

SEQ ID NO: 896950 - RNA, 22 nt, Human
ucuuuccagaggaauuuuuaga

SEQ ID NO: 896951 - RNA, 22 nt, Human
acagguuugcagcuuguuaccu

SEQ ID NO: 896952 - RNA, 22 nt, Human
ugggugguugcugaggcuccuu

SEQ ID NO: 896953 - RNA, 22 nt, Human
cucuaaauccaaauaagugucc

SEQ ID NO: 896954 - RNA, 22 nt, Human
cagggggugguccaggcugcgc

SEQ ID NO: 896955 - RNA, 22 nt, Human
uuuguacuggaagaacaugcaa

SEQ ID NO: 896956 - RNA, 22 nt, Human
acucuguagaguauaccaaugu

SEQ ID NO: 896957 - RNA, 22 nt, Human
aaggaugcagggacccaaggcu

SEQ ID NO: 896958 - RNA, 22 nt, Human
aucagagugggucuggcaugag

SEQ ID NO: 896959 - RNA, 22 nt, Human
guguaaacacccuuacuguggc

SEQ ID NO: 896960 - RNA, 22 nt, Human
auguuacauaguccuuauuugu

SEQ ID NO: 896961 - RNA, 21 nt, Human
cuguccaaauuucauaacuuu

SEQ ID NO: 896962 - RNA, 22 nt, Human
aucuucuucaaggaucuggagc

SEQ ID NO: 896963 - RNA, 22 nt, Human
cugcagcuaaggaaugugguug

SEQ ID NO: 896964 - RNA, 22 nt, Human
gcagugaacauaacacagaagg

SEQ ID NO: 896965 - RNA, 22 nt, Human
cagcaauccaagcuuucuuuaa

SEQ ID NO: 896966 - RNA, 22 nt, Human
uaaguuuagagagaauggggac

SEQ ID NO: 896967 - RNA, 22 nt, Human
acagugauuucauccuucuggg

SEQ ID NO: 896968 - RNA, 22 nt, Human
guucucauaguggaaaauaggu

SEQ ID NO: 896969 - RNA, 23 nt, Human
acuuaaaugguucuuuaucucag

SEQ ID NO: 896970 - RNA, 17 nt, Human
acagagguuauacagac

SEQ ID NO: 896971 - RNA, 22 nt, Human
cuugagggacucuaugacuuag

SEQ ID NO: 896972 - RNA, 22 nt, Human
uaaaggcaaauguguguuugug

SEQ ID NO: 896973 - RNA, 22 nt, Human
ugguauuugucauucgaguucu

SEQ ID NO: 896974 - RNA, 22 nt, Human
gugugcagcagagacaggacuc

SEQ ID NO: 896975 - RNA, 19 nt, Human
cagaguccuugaccagucc

SEQ ID NO: 896976 - RNA, 22 nt, Human
aagcagaggaccgacggaggga

SEQ ID NO: 896977 - RNA, 22 nt, Human
ggugaggggagagugaaagaaa

SEQ ID NO: 896978 - RNA, 22 nt, Human
gacacaguuuuucucacggugg

SEQ ID NO: 896979 - RNA, 22 nt, Human
guucacaauggcuuuaccuaag

SEQ ID NO: 896980 - RNA, 19 nt, Human
acacauuugcacaauccac

SEQ ID NO: 896981 - RNA, 22 nt, Human
aggccacaguugaggccagcaa

SEQ ID NO: 896982 - RNA, 22 nt, Human
aggccucaguucuugccaggug

SEQ ID NO: 896983 - RNA, 22 nt, Human
aguaacaggauccaaagaaugu

SEQ ID NO: 896984 - RNA, 22 nt, Human
ugaggugguuacuguggugcuc

SEQ ID NO: 896985 - RNA, 22 nt, Human
ugcagggaaucuguggcuggac

SEQ ID NO: 896986 - RNA, 22 nt, Human
guuuauuauacaacaaaagcua

SEQ ID NO: 896987 - RNA, 22 nt, Human
aggcuggagugugcaguggcgc

SEQ ID NO: 896988 - RNA, 22 nt, Human
ggcagcagcaagguuggagcug

SEQ ID NO: 896989 - RNA, 22 nt, Human
uuauuccaccuccauuuuccua

SEQ ID NO: 896990 - RNA, 22 nt, Human
guacauuuuacuuuguuugaau

SEQ ID NO: 896991 - RNA, 22 nt, Human
agugggugggugucugacaguu

SEQ ID NO: 896992 - RNA, 23 nt, Human
uucaaagcuuaagcucuuuccac

SEQ ID NO: 896993 - RNA, 22 nt, Human
gagcuccaccaccuucaggcag

SEQ ID NO: 896994 - RNA, 22 nt, Human
ucucuggguucucacucagcac

SEQ ID NO: 896995 - RNA, 22 nt, Human
ucuaugucucgacccaagacaa

SEQ ID NO: 896996 - RNA, 22 nt, Human
caguuucucucauacauauuug

SEQ ID NO: 896997 - RNA, 22 nt, Human
ucaggccccaucccagacuuau

SEQ ID NO: 896998 - RNA, 22 nt, Human
ucuggggaugagugaugucgua

SEQ ID NO: 896999 - RNA, 22 nt, Human
aggcuuauuuuaggucucucuu

SEQ ID NO: 897000 - RNA, 22 nt, Human
auauacacauuugcuuaugugu

SEQ ID NO: 897001 - RNA, 22 nt, Human
guaacaaaggauaacuugguuu

SEQ ID NO: 897002 - RNA, 22 nt, Human
cagaggagugggccguuauggu

SEQ ID NO: 897003 - RNA, 22 nt, Human
gcaggcagagaaggaacauuua

SEQ ID NO: 897004 - RNA, 22 nt, Human
gcugggaggaauuuggggaaua

SEQ ID NO: 897005 - RNA, 22 nt, Human
caagugaagauauacagaaaau

SEQ ID NO: 897006 - RNA, 22 nt, Human
gagcugggagcugggauuugga

SEQ ID NO: 897007 - RNA, 22 nt, Human
uuuuaauugcaauuaugguccc

SEQ ID NO: 897008 - RNA, 22 nt, Human
agagcuguuuggacaucugagu

SEQ ID NO: 897009 - RNA, 22 nt, Human
gggacaauggaggccucucucc

SEQ ID NO: 897010 - RNA, 22 nt, Human
cugagcagcguggggagcuggc

SEQ ID NO: 897011 - RNA, 22 nt, Human
ucaccacugaacagaccuuugg

SEQ ID NO: 897012 - RNA, 22 nt, Human
ggcagcaaggccucgggugagc

SEQ ID NO: 897013 - RNA, 22 nt, Human
aguuccuauacugggucagucc

SEQ ID NO: 897014 - RNA, 23 nt, Human
aacauacuguuuaauauucacag

SEQ ID NO: 897015 - RNA, 22 nt, Human
ucuccaggugaaacuugcaggg

SEQ ID NO: 897016 - RNA, 22 nt, Human
uuugugugggggaaacaaggua

SEQ ID NO: 897017 - RNA, 22 nt, Human
uucuggaaccagccugccuggg

SEQ ID NO: 897018 - RNA, 22 nt, Human
augcucuugaggcuaaagacau

SEQ ID NO: 897019 - RNA, 22 nt, Human
ucauuuugggguuugucaucuu

SEQ ID NO: 897020 - RNA, 22 nt, Human
cauuucugauuacagaauacua

SEQ ID NO: 897021 - RNA, 22 nt, Human
cuggcccugccuaauguacuug

SEQ ID NO: 897022 - RNA, 22 nt, Human
aggagaguucacacuggucaga

SEQ ID NO: 897023 - RNA, 22 nt, Human
gucuagaauaucuagaaagauc

SEQ ID NO: 897024 - RNA, 22 nt, Human
uugcuguuuuacaucugguggg

SEQ ID NO: 897025 - RNA, 22 nt, Human
ucaaacauguuagcagucugug

SEQ ID NO: 897026 - RNA, 22 nt, Human
uuucucauggaacaucguuuag

SEQ ID NO: 897027 - RNA, 22 nt, Human
aggcugugggaguugagagucu

SEQ ID NO: 897028 - RNA, 22 nt, Human
ccugugugaagguuaggcaggu

SEQ ID NO: 897029 - RNA, 22 nt, Human
ucuucagaaaauuaucacuugu

SEQ ID NO: 897030 - RNA, 16 nt, Human
uuuuggugacccugga

SEQ ID NO: 897031 - RNA, 22 nt, Human
cuggggugugcucagagcaggg

SEQ ID NO: 897032 - RNA, 22 nt, Human
aaugaacauauaaagagaucuu

SEQ ID NO: 897033 - RNA, 22 nt, Human
agaaacugaauuauuucugagg

SEQ ID NO: 897034 - RNA, 22 nt, Human
gugggcuggacccuccugcucc

SEQ ID NO: 897035 - RNA, 22 nt, Human
gucaucuuaaggacugcuauag

SEQ ID NO: 897036 - RNA, 22 nt, Human
ggcugccuaacccuuaaguguc

SEQ ID NO: 897037 - RNA, 22 nt, Human
acaguacagcuaaugucauuag

SEQ ID NO: 897038 - RNA, 22 nt, Human
ccagcugguuuauauuccccac

SEQ ID NO: 897039 - RNA, 22 nt, Human
cuguggucaccaggcuggggcc

SEQ ID NO: 897040 - RNA, 22 nt, Human
cugauuucucaguucuaggaag

SEQ ID NO: 897041 - RNA, 18 nt, Human
cauuccccaucucugagc

SEQ ID NO: 897042 - RNA, 22 nt, Human
aguuuuaugcaguguucugaua

SEQ ID NO: 897043 - RNA, 19 nt, Human
uggcagacacaccuucuuc

SEQ ID NO: 897044 - RNA, 22 nt, Human
acuacagaagucuuauuagaga

SEQ ID NO: 897045 - RNA, 22 nt, Human
gggcucaggucagggcaucagc

SEQ ID NO: 897046 - RNA, 22 nt, Human
gccccaggugguaaaccuaaga

SEQ ID NO: 897047 - RNA, 22 nt, Human
ccagcccuccuccaucagagga

SEQ ID NO: 897048 - RNA, 22 nt, Human
uuggcagcugcacagacuccau

SEQ ID NO: 897049 - RNA, 22 nt, Human
gagcuccuggauugcuccuagg

SEQ ID NO: 897050 - RNA, 18 nt, Human
ccucugccuuuguagagc

SEQ ID NO: 897051 - RNA, 19 nt, Human
ucugguucauuucugcugu

SEQ ID NO: 897052 - RNA, 22 nt, Human
gaaagcugaaccaggaaccaug

SEQ ID NO: 897053 - RNA, 18 nt, Human
ccacagcagaguucuuac

SEQ ID NO: 897054 - RNA, 22 nt, Human
uuuacacugacagcacauaagg

SEQ ID NO: 897055 - RNA, 22 nt, Human
ugugugugacucauacuagaac

SEQ ID NO: 897056 - RNA, 22 nt, Human
caucuguagcuccaugacaauu

SEQ ID NO: 897057 - RNA, 22 nt, Human
aagaggcuagccggcucacuaa

SEQ ID NO: 897058 - RNA, 22 nt, Human
gguugguaacucccugugcagu

SEQ ID NO: 897059 - RNA, 22 nt, Human
ccccagaaggggacagagggua

SEQ ID NO: 897060 - RNA, 22 nt, Human
gacauuaauggcaaauuaauua

SEQ ID NO: 897061 - RNA, 22 nt, Human
ugucaguucucacuuacauaaa

SEQ ID NO: 897062 - RNA, 22 nt, Human
acaguauaaacuccuaaaagcc

SEQ ID NO: 897063 - RNA, 22 nt, Human
uuuacagaucuguugauuuguu

SEQ ID NO: 897064 - RNA, 22 nt, Human
cauaacauccuugcuacuuuga

SEQ ID NO: 897065 - RNA, 22 nt, Human
ucugccacuuuugcuuacuggg

SEQ ID NO: 897066 - RNA, 22 nt, Human
ggacacaaaagugaauaaaaua

SEQ ID NO: 897067 - RNA, 22 nt, Human
cugggaggcggagguuguagug

SEQ ID NO: 897068 - RNA, 21 nt, Human
cugugcuuuuuaagugugaug

SEQ ID NO: 897069 - RNA, 22 nt, Human
ugacaaagugaggucuucagua

SEQ ID NO: 897070 - RNA, 22 nt, Human
gaggaaagaaccccagucaaua

SEQ ID NO: 897071 - RNA, 22 nt, Human
gaaacucucgcauccugggaac

SEQ ID NO: 897072 - RNA, 22 nt, Human
aaauggaagaagugcaauacug

SEQ ID NO: 897073 - RNA, 22 nt, Human
cacaggagauugaucuauuggu

SEQ ID NO: 897074 - RNA, 22 nt, Human
caucaacagugucagaugaugc

SEQ ID NO: 897075 - RNA, 22 nt, Human
aaacaugagcauuucuguuuaa

SEQ ID NO: 897076 - RNA, 22 nt, Human
uguuuuuaucucuguguacaac

SEQ ID NO: 897077 - RNA, 22 nt, Human
acaggaagugggaagaaacagg

SEQ ID NO: 897078 - RNA, 22 nt, Human
uaacaucuaagggagagaaagu

SEQ ID NO: 897079 - RNA, 22 nt, Human
uuugacaggaauucucucuagg

SEQ ID NO: 897080 - RNA, 22 nt, Human
uuaccacaaaacaguuagaagu

SEQ ID NO: 897081 - RNA, 22 nt, Human
cccagcccaucucaaaggucua

SEQ ID NO: 897082 - RNA, 23 nt, Human
agcugaggcugugggugucagag

SEQ ID NO: 897083 - RNA, 22 nt, Human
cugggccucauccccagaguuu

SEQ ID NO: 897084 - RNA, 21 nt, Human
uucuugguuacgcuguagugc

SEQ ID NO: 897085 - RNA, 22 nt, Human
aggccaggacacuuaaguaaga

SEQ ID NO: 897086 - RNA, 22 nt, Human
ccaggcauccauugcuuccucu

SEQ ID NO: 897087 - RNA, 22 nt, Human
agggucaccugcuugccagggc

SEQ ID NO: 897088 - RNA, 22 nt, Human
aaauauuugucugaggcgguug

SEQ ID NO: 897089 - RNA, 22 nt, Human
aagcaguuacuauuuacuauua

SEQ ID NO: 897090 - RNA, 22 nt, Human
uucccagaggcaaagucuggau

SEQ ID NO: 897091 - RNA, 23 nt, Human
uucauacagaaacaucacuucau

SEQ ID NO: 897092 - RNA, 22 nt, Human
gaagcagcuggugagauggagc

SEQ ID NO: 897093 - RNA, 22 nt, Human
uugcuucuaaguauaaauauga

SEQ ID NO: 897094 - RNA, 22 nt, Human
caucuagaaaaaagaccuguug

SEQ ID NO: 897095 - RNA, 22 nt, Human
gucuagggcuccucagugacaa

SEQ ID NO: 897096 - RNA, 22 nt, Human
ccaugcugacccugugcaggca

SEQ ID NO: 897097 - RNA, 22 nt, Human
gccgaagacgcugggcgugggc

SEQ ID NO: 897098 - RNA, 22 nt, Human
cagggagccccaauuccaugcc

SEQ ID NO: 897099 - RNA, 22 nt, Human
ucuucagugaauggcaagaucu

SEQ ID NO: 897100 - RNA, 22 nt, Human
ugaagguggcauaggagagaug

SEQ ID NO: 897101 - RNA, 22 nt, Human
gcucccugcauuucccacccuu

SEQ ID NO: 897102 - RNA, 22 nt, Human
uggcuccuaaucggcuucuuuc

SEQ ID NO: 897103 - RNA, 22 nt, Human
gaaaguucguccuguggcuucu

SEQ ID NO: 897104 - RNA, 22 nt, Human
aagccagcauuuucccauuccu

SEQ ID NO: 897105 - RNA, 22 nt, Human
uagcaaauguaaaaugccuaca

SEQ ID NO: 897106 - RNA, 22 nt, Human
gcaagcaguuguggcuucugag

SEQ ID NO: 897107 - RNA, 22 nt, Human
uggccugcagcucucagggaag

SEQ ID NO: 897108 - RNA, 22 nt, Human
aguugugagaaacagaaugagc

SEQ ID NO: 897109 - RNA, 22 nt, Human
gccaggcuccaggcccuccuga

SEQ ID NO: 897110 - RNA, 22 nt, Human
aagggccauugcugagagcagu

SEQ ID NO: 897111 - RNA, 22 nt, Human
gagccacaguggauugauucca

SEQ ID NO: 897112 - RNA, 17 nt, Human
acugucuuuuacacccu

SEQ ID NO: 897113 - RNA, 22 nt, Human
uggaggccgaauuagagcguug

SEQ ID NO: 897114 - RNA, 22 nt, Human
ucuucauguauuugacaaccau

SEQ ID NO: 897115 - RNA, 22 nt, Human
ugccaaauugcccuauaaauga

SEQ ID NO: 897116 - RNA, 22 nt, Human
agaggccagcacugcagggaag

SEQ ID NO: 897117 - RNA, 22 nt, Human
ccauggcuucuuucucugccag

SEQ ID NO: 897118 - RNA, 22 nt, Human
cggaagagggacagcgccagcc

SEQ ID NO: 897119 - RNA, 22 nt, Human
caggggccuguccuggcuucug

SEQ ID NO: 897120 - RNA, 22 nt, Human
ugcauaaacagauacuucaugu

SEQ ID NO: 897121 - RNA, 22 nt, Human
gaaggcucuggggauugagaua

SEQ ID NO: 897122 - RNA, 22 nt, Human
gcccacauuuuuggcuuagagg

SEQ ID NO: 897123 - RNA, 22 nt, Human
cugaagagacuggagggggcau

SEQ ID NO: 897124 - RNA, 22 nt, Human
caggacacagaauaaggcaguu

SEQ ID NO: 897125 - RNA, 17 nt, Human
cgugugcuugugugcac

SEQ ID NO: 897126 - RNA, 19 nt, Human
aagcagcccuggcaagagc

SEQ ID NO: 897127 - RNA, 22 nt, Human
agcucuggggccugucccacau

SEQ ID NO: 897128 - RNA, 22 nt, Human
uauuuugagguauuuuugagcu

SEQ ID NO: 897129 - RNA, 22 nt, Human
acaacacauguguauaugugug

SEQ ID NO: 897130 - RNA, 22 nt, Human
uccugccacugcacauauacuu

SEQ ID NO: 897131 - RNA, 22 nt, Human
uggucagugugacauuuuuuaa

SEQ ID NO: 897132 - RNA, 22 nt, Human
auuccauuguguaaggauaucg

SEQ ID NO: 897133 - RNA, 22 nt, Human
ugcagugccucggcagugcagc

SEQ ID NO: 897134 - RNA, 22 nt, Human
agggugugcuguugggucuuuc

SEQ ID NO: 897135 - RNA, 22 nt, Human
ucacugcaaucucugccuucca

SEQ ID NO: 897136 - RNA, 22 nt, Human
gggcauggggcggaccugguuc

SEQ ID NO: 897137 - RNA, 22 nt, Human
aagcuauacaaugcacaaauga

SEQ ID NO: 897138 - RNA, 22 nt, Human
caaaugauccuugcaagcugug

SEQ ID NO: 897139 - RNA, 22 nt, Human
cuuggcugggaacugugauuca

SEQ ID NO: 897140 - RNA, 22 nt, Human
uagacaaaagggggcagauaug

SEQ ID NO: 897141 - RNA, 22 nt, Human
auauauacuuugacacauucug

SEQ ID NO: 897142 - RNA, 22 nt, Human
ggggccagcuucgcgugcucuu

SEQ ID NO: 897143 - RNA, 22 nt, Human
gguggcugcuuccucaagagga

SEQ ID NO: 897144 - RNA, 22 nt, Human
gcuggccagugucccagggauc

SEQ ID NO: 897145 - RNA, 21 nt, Human
acacaaaccuccucagccugg

SEQ ID NO: 897146 - RNA, 22 nt, Human
ggcagcaacucggagagaagag

SEQ ID NO: 897147 - RNA, 22 nt, Human
augagagcucuaugaucuguuu

SEQ ID NO: 897148 - RNA, 22 nt, Human
aauguguauaagggagagcuaa

SEQ ID NO: 897149 - RNA, 18 nt, Human
guguccuuugcaagaaac

SEQ ID NO: 897150 - RNA, 22 nt, Human
cauguauauuucuguaugugca

SEQ ID NO: 897151 - RNA, 22 nt, Human
augcuggauugagagcaagggg

SEQ ID NO: 897152 - RNA, 22 nt, Human
accuccccgggagcagccuccu

SEQ ID NO: 897153 - RNA, 20 nt, Human
ccacccugcuaagaauacac

SEQ ID NO: 897154 - RNA, 22 nt, Human
aaauauaauuucugccucaaua

SEQ ID NO: 897155 - RNA, 22 nt, Human
uggguucagaucccagcucugu

SEQ ID NO: 897156 - RNA, 22 nt, Human
auuuaucaacauguaccauugg

SEQ ID NO: 897157 - RNA, 22 nt, Human
aucaagaguauugacaagacca

SEQ ID NO: 897158 - RNA, 22 nt, Human
auucugggaacuuugucucuca

SEQ ID NO: 897159 - RNA, 22 nt, Human
gugugcgcuggugcuuggucaa

SEQ ID NO: 897160 - RNA, 22 nt, Human
gugcccagugcaggcccgcagg

SEQ ID NO: 897161 - RNA, 22 nt, Human
acagcuguguuuuauaaucagc

SEQ ID NO: 897162 - RNA, 22 nt, Human
auuuggaauagcuguagaaaua

SEQ ID NO: 897163 - RNA, 22 nt, Human
uccuagaauaaucuuugacugc

SEQ ID NO: 897164 - RNA, 22 nt, Human
uuaccaagcucugcauguuaag

SEQ ID NO: 897165 - RNA, 22 nt, Human
ggcaccaggggauguaaugucc

SEQ ID NO: 897166 - RNA, 22 nt, Human
aucaucuuaaaucuagaaugug

SEQ ID NO: 897167 - RNA, 22 nt, Human
ccugugucaucagcuguggcua

SEQ ID NO: 897168 - RNA, 22 nt, Human
gggagagaugcugauugccaau

SEQ ID NO: 897169 - RNA, 22 nt, Human
ccugugcugggugugagggaca

SEQ ID NO: 897170 - RNA, 22 nt, Human
augcauaugugugcacacgugu

SEQ ID NO: 897171 - RNA, 22 nt, Human
ccugaaacaguccuugcccuca

SEQ ID NO: 897172 - RNA, 22 nt, Human
ugcagcugcuggcccaggugcu

SEQ ID NO: 897173 - RNA, 22 nt, Human
auucaugaccccaugguugauu

SEQ ID NO: 897174 - RNA, 19 nt, Human
cuuauuagagugagagcuu

SEQ ID NO: 897175 - RNA, 22 nt, Human
cagccuuucuguuuccuaaggu

SEQ ID NO: 897176 - RNA, 22 nt, Human
uguugcuacucucccugggagg

SEQ ID NO: 897177 - RNA, 22 nt, Human
gagaacuugaacuuuuccucug

SEQ ID NO: 897178 - RNA, 22 nt, Human
aaauuauuacaagcuaguuggc

SEQ ID NO: 897179 - RNA, 22 nt, Human
agguuuaugaguuuggaagggg

SEQ ID NO: 897180 - RNA, 22 nt, Human
uagcucuuaagucugugauaga

SEQ ID NO: 897181 - RNA, 22 nt, Human
agcugcagcccuccugcauggc

SEQ ID NO: 897182 - RNA, 22 nt, Human
uuucaaauggaucccucagccu

SEQ ID NO: 897183 - RNA, 22 nt, Human
cauucaaacauuaauuuauuca

SEQ ID NO: 897184 - RNA, 22 nt, Human
caugcucuagauucucucuaau

SEQ ID NO: 897185 - RNA, 22 nt, Human
aggcccugcaggaguggggaca

SEQ ID NO: 897186 - RNA, 23 nt, Human
uuuaacuuuccaauaauucauug

SEQ ID NO: 897187 - RNA, 22 nt, Human
aagaauguggcauuuauuuaua

SEQ ID NO: 897188 - RNA, 22 nt, Human
auuggcuccuucuaacaugucu

SEQ ID NO: 897189 - RNA, 22 nt, Human
uguaaguaguaauggaaggaca

SEQ ID NO: 897190 - RNA, 22 nt, Human
gucuggccauuugcccauugug

SEQ ID NO: 897191 - RNA, 22 nt, Human
gaacagaguugaaacaaggcug

SEQ ID NO: 897192 - RNA, 22 nt, Human
agagauaauuagguuaaaugag

SEQ ID NO: 897193 - RNA, 22 nt, Human
gcccaggcuagcguagagugca

SEQ ID NO: 897194 - RNA, 22 nt, Human
cugcccaccgugugcacgugcg

SEQ ID NO: 897195 - RNA, 22 nt, Human
cugcacaggggaugagggcagu

SEQ ID NO: 897196 - RNA, 22 nt, Human
ggaaagaggauaguggguaggu

SEQ ID NO: 897197 - RNA, 22 nt, Human
ugggaagggucaacagcuggaa

SEQ ID NO: 897198 - RNA, 19 nt, Human
ggccuggauuuagggcucc

SEQ ID NO: 897199 - RNA, 22 nt, Human
uaaagacaauuucgagcuguag

SEQ ID NO: 897200 - RNA, 22 nt, Human
agagcagauggagcuggaagag

SEQ ID NO: 897201 - RNA, 22 nt, Human
aggucugaguauggccugagaa

SEQ ID NO: 897202 - RNA, 22 nt, Human
cagcaggucccacugagggccc

SEQ ID NO: 897203 - RNA, 22 nt, Human
uguacaggagaacaaugagaaa

SEQ ID NO: 897204 - RNA, 22 nt, Human
cagagccucaucauccacucca

SEQ ID NO: 897205 - RNA, 22 nt, Human
aaggcuggaguacagugcagug

SEQ ID NO: 897206 - RNA, 22 nt, Human
ccugagugaauucccucacugu

SEQ ID NO: 897207 - RNA, 22 nt, Human
uccaucuacggcuauaccaccc

SEQ ID NO: 897208 - RNA, 22 nt, Human
ugaaaugccuaugaagucagga

SEQ ID NO: 897209 - RNA, 22 nt, Human
ggaggcggagcuugcagugagc

SEQ ID NO: 897210 - RNA, 20 nt, Human
uucagaggugaaguuguggu

SEQ ID NO: 897211 - RNA, 23 nt, Human
aaguuaguuucaauaaagcaauu

SEQ ID NO: 897212 - RNA, 22 nt, Human
gcucuaggaggugugcuuagaa

SEQ ID NO: 897213 - RNA, 21 nt, Human
ugggugggcagagucucuuca

SEQ ID NO: 897214 - RNA, 22 nt, Human
caggcccugcacagugguccug

SEQ ID NO: 897215 - RNA, 22 nt, Human
uguagaggaggaaacugaggcu

SEQ ID NO: 897216 - RNA, 20 nt, Human
aacacacugguggcaucagg

SEQ ID NO: 897217 - RNA, 22 nt, Human
gggcccaguacccucugccaag

SEQ ID NO: 897218 - RNA, 22 nt, Human
cuuuuugucucuguccugauga

SEQ ID NO: 897219 - RNA, 19 nt, Human
acugccugcagguguuggg

SEQ ID NO: 897220 - RNA, 22 nt, Human
augacaguucuacacuuaaucu

SEQ ID NO: 897221 - RNA, 22 nt, Human
uaaagcagcguggguggggcag

SEQ ID NO: 897222 - RNA, 22 nt, Human
uggggaaaagcguuaggaguuc

SEQ ID NO: 897223 - RNA, 22 nt, Human
aguguuguaugggaugacugcu

SEQ ID NO: 897224 - RNA, 23 nt, Human
uagagcaguagaucaccauggga

SEQ ID NO: 897225 - RNA, 22 nt, Human
ggugcugacucugucgugagca

SEQ ID NO: 897226 - RNA, 22 nt, Human
cuggugcacauucgcucucaua

SEQ ID NO: 897227 - RNA, 22 nt, Human
acaguacaggacgaguuuuccu

SEQ ID NO: 897228 - RNA, 18 nt, Human
gcagggacacagggucac

SEQ ID NO: 897229 - RNA, 19 nt, Human
ugcugcaggaugcugcugg

SEQ ID NO: 897230 - RNA, 22 nt, Human
uaaugcaacgugagauaauuaa

SEQ ID NO: 897231 - RNA, 22 nt, Human
cuccugggaugacucuuucuuu

SEQ ID NO: 897232 - RNA, 22 nt, Human
aggcaauaagccucaacugucu

SEQ ID NO: 897233 - RNA, 22 nt, Human
aacuguuacauaguuauagauc

SEQ ID NO: 897234 - RNA, 22 nt, Human
auaauuuacuaagcucuaccuu

SEQ ID NO: 897235 - RNA, 22 nt, Human
ggcugcaugccucaguguaaga

SEQ ID NO: 897236 - RNA, 22 nt, Human
ucuugcccucaacaagagcaug

SEQ ID NO: 897237 - RNA, 17 nt, Human
uggggaagcucagauuu

SEQ ID NO: 897238 - RNA, 22 nt, Human
ugugcagcucuagagccaagcc

SEQ ID NO: 897239 - RNA, 22 nt, Human
uuauuauaaugagggauaaaaa

SEQ ID NO: 897240 - RNA, 22 nt, Human
cagcuucuguuucuagccccug

SEQ ID NO: 897241 - RNA, 23 nt, Human
cuggcucuguagguggcauccuu

SEQ ID NO: 897242 - RNA, 20 nt, Human
ucacauccucucccaacaug

SEQ ID NO: 897243 - RNA, 22 nt, Human
cagaaacuuucuuuacugagca

SEQ ID NO: 897244 - RNA, 22 nt, Human
uggccagugccugccagugcag

SEQ ID NO: 897245 - RNA, 22 nt, Human
ugucuauuaauuccacauaaaa

SEQ ID NO: 897246 - RNA, 22 nt, Human
aaagaacaauguggaaucuccu

SEQ ID NO: 897247 - RNA, 22 nt, Human
cuugcaguuuagguccucugug

SEQ ID NO: 897248 - RNA, 22 nt, Human
ucagagcccugcuccuccccaa

SEQ ID NO: 897249 - RNA, 22 nt, Human
aaaaggaggcaaacagccuaga

SEQ ID NO: 897250 - RNA, 22 nt, Human
auguucagcauucuauaaauau

SEQ ID NO: 897251 - RNA, 22 nt, Human
uuuguacuaugguuuuucacua

SEQ ID NO: 897252 - RNA, 18 nt, Human
ccugaagccugugucuuu

SEQ ID NO: 897253 - RNA, 22 nt, Human
cagggccagcccacuagcgagg

SEQ ID NO: 897254 - RNA, 22 nt, Human
ccucaggccugccagagcccca

SEQ ID NO: 897255 - RNA, 22 nt, Human
aaugcuaaaacacagauuuuug

SEQ ID NO: 897256 - RNA, 20 nt, Human
ggccacagggugcuggugga

SEQ ID NO: 897257 - RNA, 22 nt, Human
gaggagucuaguuuauggcuuc

SEQ ID NO: 897258 - RNA, 22 nt, Human
augaguaagaccauaauuuuug

SEQ ID NO: 897259 - RNA, 22 nt, Human
gcagacacuuuuauucugcaua

SEQ ID NO: 897260 - RNA, 22 nt, Human
ucagcugccccgggcacugccc

SEQ ID NO: 897261 - RNA, 23 nt, Human
auccucucuccaucccacugugc

SEQ ID NO: 897262 - RNA, 18 nt, Human
gcaguaggcgcgcaggac

SEQ ID NO: 897263 - RNA, 22 nt, Human
ggcuucaguggccagagaugau

SEQ ID NO: 897264 - RNA, 22 nt, Human
agcuggcuuuaugguuggcuaa

SEQ ID NO: 897265 - RNA, 22 nt, Human
acagggcucccagcaggucugu

SEQ ID NO: 897266 - RNA, 22 nt, Human
aaacaaguuuguagacuagcca

SEQ ID NO: 897267 - RNA, 22 nt, Human
aauguucagaggacaauauaaa

SEQ ID NO: 897268 - RNA, 19 nt, Human
guuuuuaguuucugaacug

SEQ ID NO: 897269 - RNA, 20 nt, Human
gucagugucuucaguaguga

SEQ ID NO: 897270 - RNA, 22 nt, Human
uagaaagacuguccagauuuca

SEQ ID NO: 897271 - RNA, 22 nt, Human
accaugcacagcuguucuauua

SEQ ID NO: 897272 - RNA, 22 nt, Human
caggcugggcagccuccccggc

SEQ ID NO: 897273 - RNA, 22 nt, Human
caccaggugcuggaggacauca

SEQ ID NO: 897274 - RNA, 22 nt, Human
agcagguuguuuuguggccagg

SEQ ID NO: 897275 - RNA, 22 nt, Human
augaccagacucucaguggggu

SEQ ID NO: 897276 - RNA, 22 nt, Human
aucacaguggcuaccucuggau

SEQ ID NO: 897277 - RNA, 18 nt, Human
ggucugagaucguuuuuc

SEQ ID NO: 897278 - RNA, 22 nt, Human
ccagaggugguggugucuagaa

SEQ ID NO: 897279 - RNA, 22 nt, Human
aauaacuucauguaacauuuaa

SEQ ID NO: 897280 - RNA, 22 nt, Human
ggcagcagggucuagauugaug

SEQ ID NO: 897281 - RNA, 23 nt, Human
ugagacacucauucauggaguau

SEQ ID NO: 897282 - RNA, 22 nt, Human
uggcaggcauccggcaccuucu

SEQ ID NO: 897283 - RNA, 22 nt, Human
uugccacacaaguaaagaaaca

SEQ ID NO: 897284 - RNA, 22 nt, Human
cugagggcccugaagcuuggca

SEQ ID NO: 897285 - RNA, 23 nt, Human
agcuccagaacauagcacaggaa

SEQ ID NO: 897286 - RNA, 22 nt, Human
aggccugggacgggagccguga

SEQ ID NO: 897287 - RNA, 22 nt, Human
auguauacgugcaggucacagg

SEQ ID NO: 897288 - RNA, 22 nt, Human
gcugaagcugacacauagugcu

SEQ ID NO: 897289 - RNA, 22 nt, Human
acaaaucuguuuuauagacuuu

SEQ ID NO: 897290 - RNA, 23 nt, Human
agaggcaggaguggcuugcccgg

SEQ ID NO: 897291 - RNA, 22 nt, Human
gagagcugugguuugaccaggc

SEQ ID NO: 897292 - RNA, 22 nt, Human
ugagguaggagggugaucagca

SEQ ID NO: 897293 - RNA, 22 nt, Human
aaaggcaugcugcugaaugaug

SEQ ID NO: 897294 - RNA, 20 nt, Human
gagggcaggcacccauuuca

SEQ ID NO: 897295 - RNA, 22 nt, Human
auuucucaguuccuacuguuua

SEQ ID NO: 897296 - RNA, 22 nt, Human
aagaguuuccaugcucugugcu

SEQ ID NO: 897297 - RNA, 21 nt, Human
acacugcaggugaagugcacu

SEQ ID NO: 897298 - RNA, 22 nt, Human
gcugguaggaagugcuccugcc

SEQ ID NO: 897299 - RNA, 22 nt, Human
caggagacaaguuagcagcuga

SEQ ID NO: 897300 - RNA, 22 nt, Human
gaggcacaguguuuggucagug

SEQ ID NO: 897301 - RNA, 22 nt, Human
cuagggcacuaggacucaugug

SEQ ID NO: 897302 - RNA, 22 nt, Human
ccagcccugaacccugcugcau

SEQ ID NO: 897303 - RNA, 22 nt, Human
ugcacuggggucccagcgcacg

SEQ ID NO: 897304 - RNA, 21 nt, Human
ccccugggagcccugucagua

SEQ ID NO: 897305 - RNA, 22 nt, Human
ugugggaaaugggaguggaaga

SEQ ID NO: 897306 - RNA, 22 nt, Human
ugcagcugggucugcccuggcu

SEQ ID NO: 897307 - RNA, 22 nt, Human
uggcaggaucuuugagagugaa

SEQ ID NO: 897308 - RNA, 22 nt, Human
auggcagacgaggcagcagggg

SEQ ID NO: 897309 - RNA, 22 nt, Human
aacagggcuuuggaagucuccg

SEQ ID NO: 897310 - RNA, 22 nt, Human
aguacaauuuaaugaagauagc

SEQ ID NO: 897311 - RNA, 22 nt, Human
ccuggugucuguuuacagcagc

SEQ ID NO: 897312 - RNA, 22 nt, Human
aagcuggaacaucuugaggaag

SEQ ID NO: 897313 - RNA, 22 nt, Human
cugcagcuggagcaucuucuca

SEQ ID NO: 897314 - RNA, 22 nt, Human
gggagcagccugccucccaccu

SEQ ID NO: 897315 - RNA, 22 nt, Human
gugcccaguugaggccaggacu

SEQ ID NO: 897316 - RNA, 22 nt, Human
guguuccauguuugagguaguu

SEQ ID NO: 897317 - RNA, 22 nt, Human
gcccaggagccuggagaugugu

SEQ ID NO: 897318 - RNA, 22 nt, Human
acuuguaaacaaaucuaaugua

SEQ ID NO: 897319 - RNA, 22 nt, Human
ucaagacauauuaaaugugcga

SEQ ID NO: 897320 - RNA, 22 nt, Human
ccucagaggugaacaucagugc

SEQ ID NO: 897321 - RNA, 21 nt, Human
caccaacaccugggauagguc

SEQ ID NO: 897322 - RNA, 22 nt, Human
gaagcccauuuguacagcacau

SEQ ID NO: 897323 - RNA, 22 nt, Human
uauaugcaaugaggugggagua

SEQ ID NO: 897324 - RNA, 22 nt, Human
aggaguggaauuacuggguucu

SEQ ID NO: 897325 - RNA, 22 nt, Human
gcccagguuggagagcaguggc

SEQ ID NO: 897326 - RNA, 22 nt, Human
ucauugaauuucacagcuuuau

SEQ ID NO: 897327 - RNA, 22 nt, Human
aagcaguguucccagcuggccc

SEQ ID NO: 897328 - RNA, 22 nt, Human
augacuucguuuucucucugca

SEQ ID NO: 897329 - RNA, 22 nt, Human
ugggaugauagguaaguaauua

SEQ ID NO: 897330 - RNA, 22 nt, Human
agcucugggaguaguuccaccu

SEQ ID NO: 897331 - RNA, 22 nt, Human
augcauauuucuugggcuuacc

SEQ ID NO: 897332 - RNA, 22 nt, Human
cuuacacacuagaugguaggug

SEQ ID NO: 897333 - RNA, 22 nt, Human
gccuggcucgggcacucgccag

SEQ ID NO: 897334 - RNA, 18 nt, Human
gucaccuggaucagauua

SEQ ID NO: 897335 - RNA, 22 nt, Human
cacugaaacagguauugcuggu

SEQ ID NO: 897336 - RNA, 22 nt, Human
guuauuguuuauccugcacccc

SEQ ID NO: 897337 - RNA, 22 nt, Human
gggcuccaggcaggcaggaaau

SEQ ID NO: 897338 - RNA, 22 nt, Human
cccagagggcugaggauaugaa

SEQ ID NO: 897339 - RNA, 22 nt, Human
agggaaguggucugggaacuug

SEQ ID NO: 897340 - RNA, 22 nt, Human
auauuauucuagcucuugugug

SEQ ID NO: 897341 - RNA, 22 nt, Human
uggcucaguuugggggauugaa

SEQ ID NO: 897342 - RNA, 22 nt, Human
ugaaauaggaaacagauguuuc

SEQ ID NO: 897343 - RNA, 22 nt, Human
ugacauuuuuauaagagucaaa

SEQ ID NO: 897344 - RNA, 22 nt, Human
ucacaguuaugggccuugguca

SEQ ID NO: 897345 - RNA, 22 nt, Human
ucugucuguaguuuuacaugau

SEQ ID NO: 897346 - RNA, 19 nt, Human
cagcugcaccgugaccauc

SEQ ID NO: 897347 - RNA, 23 nt, Human
gaagucagcccuacagagagcag

SEQ ID NO: 897348 - RNA, 21 nt, Human
ggccuuggcgggggccgaauu

SEQ ID NO: 897349 - RNA, 22 nt, Human
cuggaaagacagagggcauggg

SEQ ID NO: 897350 - RNA, 22 nt, Human
aauguaaacagcaagagaaggg

SEQ ID NO: 897351 - RNA, 22 nt, Human
auauaauaguuucauaaaggcu

SEQ ID NO: 897352 - RNA, 22 nt, Human
gauguguguuuauacauauauu

SEQ ID NO: 897353 - RNA, 22 nt, Human
auacaagaucacuccagaaaau

SEQ ID NO: 897354 - RNA, 22 nt, Human
ccuggcuucucugcauuguucu

SEQ ID NO: 897355 - RNA, 22 nt, Human
uacuauaaagucuuaaugaguc

SEQ ID NO: 897356 - RNA, 22 nt, Human
ggcuuuaugcagggauagaaau

SEQ ID NO: 897357 - RNA, 22 nt, Human
ugauuuccaguugcugggugcu

SEQ ID NO: 897358 - RNA, 19 nt, Human
ugaaguccuaaccuccagu

SEQ ID NO: 897359 - RNA, 23 nt, Human
agacaaacuuccuucacugcacc

SEQ ID NO: 897360 - RNA, 22 nt, Human
cuggaaugcggagaguuggaga

SEQ ID NO: 897361 - RNA, 22 nt, Human
ugcuuuaucugugagaaccuga

SEQ ID NO: 897362 - RNA, 22 nt, Human
ugggcugcacuccauuuucugc

SEQ ID NO: 897363 - RNA, 22 nt, Human
gaacacaucacauuuuacagug

SEQ ID NO: 897364 - RNA, 22 nt, Human
auggcucugagaaccugagcua

SEQ ID NO: 897365 - RNA, 22 nt, Human
cagguguuucaaaugugaaacu

SEQ ID NO: 897366 - RNA, 21 nt, Human
ugucugcugaaggcuggucac

SEQ ID NO: 897367 - RNA, 22 nt, Human
guauucaaggauuuuguucuac

SEQ ID NO: 897368 - RNA, 22 nt, Human
cccagagaauuccacauagagg

SEQ ID NO: 897369 - RNA, 22 nt, Human
auccugaguucucagagucucc

SEQ ID NO: 897370 - RNA, 22 nt, Human
auacacaggugcuaggucaaua

SEQ ID NO: 897371 - RNA, 22 nt, Human
uguccuggaucaugccucugaa

SEQ ID NO: 897372 - RNA, 22 nt, Human
ccuuccccagugauucucucag

SEQ ID NO: 897373 - RNA, 22 nt, Human
accacaggggaggaaugaugcc

SEQ ID NO: 897374 - RNA, 22 nt, Human
ugcagcugaaaggacugaauga

SEQ ID NO: 897375 - RNA, 22 nt, Human
cacccaguaagcaugaggcccu

SEQ ID NO: 897376 - RNA, 22 nt, Human
aaguaacuuauuugcaaacagg

SEQ ID NO: 897377 - RNA, 22 nt, Human
uguucugccagcacuucucagc

SEQ ID NO: 897378 - RNA, 22 nt, Human
aguaucaaagggcaugugguua

SEQ ID NO: 897379 - RNA, 23 nt, Human
aguucagcucaguucagugagca

SEQ ID NO: 897380 - RNA, 23 nt, Human
uucauucaaaaggaaaagucaug

SEQ ID NO: 897381 - RNA, 22 nt, Human
ucaaacugcuaccuuuuaugug

SEQ ID NO: 897382 - RNA, 22 nt, Human
aagauuuauuagaugcuuaccu

SEQ ID NO: 897383 - RNA, 22 nt, Human
aagaggacuugugaagauguac

SEQ ID NO: 897384 - RNA, 22 nt, Human
guggcagagcaggagacaggac

SEQ ID NO: 897385 - RNA, 22 nt, Human
gaggcuccuugaaagggggacu

SEQ ID NO: 897386 - RNA, 22 nt, Human
caagggcagcagccucaagcgg

SEQ ID NO: 897387 - RNA, 22 nt, Human
ggcugcacgccucucagcuugc

SEQ ID NO: 897388 - RNA, 22 nt, Human
ugccaaauuagaguucccaggc

SEQ ID NO: 897389 - RNA, 22 nt, Human
auuuucaguguaaauguuuuau

SEQ ID NO: 897390 - RNA, 22 nt, Human
caggccuuaaggacucggagaa

SEQ ID NO: 897391 - RNA, 22 nt, Human
guugcugauuaacacuuugagu

SEQ ID NO: 897392 - RNA, 22 nt, Human
aaagauugaaagagaauuuguc

SEQ ID NO: 897393 - RNA, 22 nt, Human
auacacuggccuuugcagagcc

SEQ ID NO: 897394 - RNA, 22 nt, Human
ucaucugucccaggcuuuuuuc

SEQ ID NO: 897395 - RNA, 22 nt, Human
cagcaacugugccugacacaca

SEQ ID NO: 897396 - RNA, 22 nt, Human
gugcugagcacaaggcccagag

SEQ ID NO: 897397 - RNA, 22 nt, Human
ggcacagauagaucaagugucu

SEQ ID NO: 897398 - RNA, 22 nt, Human
aucauuaacccuugaugcuggg

SEQ ID NO: 897399 - RNA, 22 nt, Human
augcaggggcagcagagccugg

SEQ ID NO: 897400 - RNA, 22 nt, Human
guucugaggcaaaggcagcagc

SEQ ID NO: 897401 - RNA, 22 nt, Human
agggguggccugccuuacuccc

SEQ ID NO: 897402 - RNA, 22 nt, Human
ucugcuuugcugccuccugauc

SEQ ID NO: 897403 - RNA, 22 nt, Human
caagauuuguauugggccucug

SEQ ID NO: 897404 - RNA, 22 nt, Human
gccagagagagucccugggccu

SEQ ID NO: 897405 - RNA, 22 nt, Human
uuaaguagauucaguguuaagg

SEQ ID NO: 897406 - RNA, 22 nt, Human
guggccaggacauugccaggca

SEQ ID NO: 897407 - RNA, 22 nt, Human
uucuggaggagaaagggugggc

SEQ ID NO: 897408 - RNA, 20 nt, Human
ggccaccugcuucagacccc

SEQ ID NO: 897409 - RNA, 22 nt, Human
cugcugugcaggugccuaugau

SEQ ID NO: 897410 - RNA, 18 nt, Human
gugggguguugugaggau

SEQ ID NO: 897411 - RNA, 22 nt, Human
uguccagugauucucaugagcc

SEQ ID NO: 897412 - RNA, 22 nt, Human
uaaauguauaggcacuaaaccu

SEQ ID NO: 897413 - RNA, 22 nt, Human
uguaaaauaauucuccauguuu

SEQ ID NO: 897414 - RNA, 22 nt, Human
ugacagugacagccaaaggcuu

SEQ ID NO: 897415 - RNA, 22 nt, Human
uacaacaugugguccuuuauga

SEQ ID NO: 897416 - RNA, 22 nt, Human
guagaaccuucuuuacuagagu

SEQ ID NO: 897417 - RNA, 22 nt, Human
agaaacuaaagccaagggcucu

SEQ ID NO: 897418 - RNA, 22 nt, Human
uuuauucacuucagugccaaag

SEQ ID NO: 897419 - RNA, 22 nt, Human
cuagagaauugucuugagaguu

SEQ ID NO: 897420 - RNA, 22 nt, Human
auuuaguaaguacuuguugaau

SEQ ID NO: 897421 - RNA, 22 nt, Human
gaauccuugguuuuaagcaaua

SEQ ID NO: 897422 - RNA, 22 nt, Human
aagcaauaaucccaaagugcug

SEQ ID NO: 897423 - RNA, 22 nt, Human
caaguuaguauugguuuuggga

SEQ ID NO: 897424 - RNA, 22 nt, Human
ccaggugcaaacucccagcagg

SEQ ID NO: 897425 - RNA, 22 nt, Human
cacagcuguauccaggagaucc

SEQ ID NO: 897426 - RNA, 22 nt, Human
agagcugggugguggugacuca

SEQ ID NO: 897427 - RNA, 22 nt, Human
uggcauguggcagcugguucag

SEQ ID NO: 897428 - RNA, 22 nt, Human
agaaagggcuauuuugagguag

SEQ ID NO: 897429 - RNA, 22 nt, Human
augguauucucuaacucagcuu

SEQ ID NO: 897430 - RNA, 22 nt, Human
ucuagagauuggacuuccuaga

SEQ ID NO: 897431 - RNA, 20 nt, Human
ccaguccaccugagacaugu

SEQ ID NO: 897432 - RNA, 20 nt, Human
ccugggcucaaagcauccuc

SEQ ID NO: 897433 - RNA, 22 nt, Human
cccagggagagcgcggaggcgg

SEQ ID NO: 897434 - RNA, 23 nt, Human
uggcucucucagugcugcagagg

SEQ ID NO: 897435 - RNA, 21 nt, Human
ggaaagaaggcaaggcucagg

SEQ ID NO: 897436 - RNA, 22 nt, Human
uuuacagacaacuuaauagggg

SEQ ID NO: 897437 - RNA, 21 nt, Human
agcagaggcugccuggugacu

SEQ ID NO: 897438 - RNA, 22 nt, Human
cuuacuugaaauuccaagcagg

SEQ ID NO: 897439 - RNA, 22 nt, Human
agcugccauccuguucagcacc

SEQ ID NO: 897440 - RNA, 22 nt, Human
gagcugggcgagccggggaagu

SEQ ID NO: 897441 - RNA, 22 nt, Human
acagugcaggucucaacaauua

SEQ ID NO: 897442 - RNA, 22 nt, Human
ucgcuuuaauggucuucacagc

SEQ ID NO: 897443 - RNA, 22 nt, Human
gaaaaugugucaucccuacugu

SEQ ID NO: 897444 - RNA, 22 nt, Human
cugcgugguaggacucaguucu

SEQ ID NO: 897445 - RNA, 22 nt, Human
ugguccagaugccuuggcuuua

SEQ ID NO: 897446 - RNA, 22 nt, Human
gaggacauaguggacuaggguu

SEQ ID NO: 897447 - RNA, 22 nt, Human
gaacuugggagaagggagugug

SEQ ID NO: 897448 - RNA, 22 nt, Human
ggcucugguggcaauugacugg

SEQ ID NO: 897449 - RNA, 22 nt, Human
ugcuggcuccucgaggcuucgu

SEQ ID NO: 897450 - RNA, 22 nt, Human
cuucuggaggacacuggcccca

SEQ ID NO: 897451 - RNA, 22 nt, Human
uuuccuuugaggguccuacacu

SEQ ID NO: 897452 - RNA, 22 nt, Human
uaucuguuuauuguuacuguca

SEQ ID NO: 897453 - RNA, 22 nt, Human
acacuagaugccaauagcaccc

SEQ ID NO: 897454 - RNA, 22 nt, Human
auuacaaaagaagggagaaggu

SEQ ID NO: 897455 - RNA, 22 nt, Human
cuuuagaaaucuggauguauuu

SEQ ID NO: 897456 - RNA, 22 nt, Human
guccugguagcuggcuugguca

SEQ ID NO: 897457 - RNA, 22 nt, Human
uggcuggcgccgggcuagccac

SEQ ID NO: 897458 - RNA, 22 nt, Human
gaaaugguaaacauuuuaaugg

SEQ ID NO: 897459 - RNA, 22 nt, Human
cucucuggacuugaguaucagc

SEQ ID NO: 897460 - RNA, 22 nt, Human
cccaggagcuucucucugccuc

SEQ ID NO: 897461 - RNA, 22 nt, Human
caggcugcagcagcaguggccc

SEQ ID NO: 897462 - RNA, 22 nt, Human
ccagggagcggggcugggucuc

SEQ ID NO: 897463 - RNA, 21 nt, Human
gucugugaucuuacugcugug

SEQ ID NO: 897464 - RNA, 23 nt, Human
uguauacacccugugcaucuggg

SEQ ID NO: 897465 - RNA, 22 nt, Human
uaucuagauauuuggauaaaug

SEQ ID NO: 897466 - RNA, 22 nt, Human
uccugugugggcaggaugagaa

SEQ ID NO: 897467 - RNA, 22 nt, Human
agcauccacucacugggagagg

SEQ ID NO: 897468 - RNA, 22 nt, Human
caucacaguuugucagaaauca

SEQ ID NO: 897469 - RNA, 22 nt, Human
gcagugaauuuaacacucagau

SEQ ID NO: 897470 - RNA, 22 nt, Human
aaacgguugcucauaguuacau

SEQ ID NO: 897471 - RNA, 22 nt, Human
uaacaguagccuuauguggucu

SEQ ID NO: 897472 - RNA, 22 nt, Human
aagacugaauuugcauaguugg

SEQ ID NO: 897473 - RNA, 22 nt, Human
uuaaauaguaggucuauuuugg

SEQ ID NO: 897474 - RNA, 23 nt, Human
aguacauuugacccaaauaagcu

SEQ ID NO: 897475 - RNA, 22 nt, Human
aggggaggcagcgauaaaccug

SEQ ID NO: 897476 - RNA, 22 nt, Human
acaucucaugaaugauaaauca

SEQ ID NO: 897477 - RNA, 22 nt, Human
uuuucugugcccugcuagcugg

SEQ ID NO: 897478 - RNA, 23 nt, Human
uuggaagggaagagcauuugaga

SEQ ID NO: 897479 - RNA, 22 nt, Human
cacugaaggcuaggauuagaug

SEQ ID NO: 897480 - RNA, 22 nt, Human
auguuucauuuagauaucaggc

SEQ ID NO: 897481 - RNA, 22 nt, Human
guggcagaggcugugaggaugc

SEQ ID NO: 897482 - RNA, 22 nt, Human
gacagggcgcccagccuguuuc

SEQ ID NO: 897483 - RNA, 22 nt, Human
gcccacucuggagccuguuccc

SEQ ID NO: 897484 - RNA, 22 nt, Human
ccagggcauguaacuaauggug

SEQ ID NO: 897485 - RNA, 22 nt, Human
ggucucagcaguugcuuugacu

SEQ ID NO: 897486 - RNA, 19 nt, Human
ggugugugcuggggccugu

SEQ ID NO: 897487 - RNA, 22 nt, Human
auuauuuguguccacagaauac

SEQ ID NO: 897488 - RNA, 22 nt, Human
ggucagagaugaggucuaaagu

SEQ ID NO: 897489 - RNA, 17 nt, Human
ugagcuucaaucaggug

SEQ ID NO: 897490 - RNA, 22 nt, Human
auuucaaguguugagcucauaa

SEQ ID NO: 897491 - RNA, 22 nt, Human
cccucucucaggcugacagccu

SEQ ID NO: 897492 - RNA, 22 nt, Human
ccccuuccaggaagcagaaucg

SEQ ID NO: 897493 - RNA, 22 nt, Human
augggcagacagggagcucacg

SEQ ID NO: 897494 - RNA, 22 nt, Human
aguaaaaauaugcuuguggcua

SEQ ID NO: 897495 - RNA, 22 nt, Human
augguuuaaagaguaugacuuu

SEQ ID NO: 897496 - RNA, 22 nt, Human
ugaaaucaauugcaauguuuau

SEQ ID NO: 897497 - RNA, 22 nt, Human
aaguaaauguuggagcucaaau

SEQ ID NO: 897498 - RNA, 22 nt, Human
ucagggaaauucaagggagauu

SEQ ID NO: 897499 - RNA, 22 nt, Human
ccuucuugagguagcacauucu

SEQ ID NO: 897500 - RNA, 22 nt, Human
uaucacaggugugauuuacauu

SEQ ID NO: 897501 - RNA, 22 nt, Human
uauguugcaccaaccuaauaau

SEQ ID NO: 897502 - RNA, 22 nt, Human
aaggaagauauaucaagcuuaa

SEQ ID NO: 897503 - RNA, 22 nt, Human
guauccacaauaaagcccuuug

SEQ ID NO: 897504 - RNA, 18 nt, Human
auuucucuggggugauuc

SEQ ID NO: 897505 - RNA, 22 nt, Human
agauaauuaugucaauuucuug

SEQ ID NO: 897506 - RNA, 22 nt, Human
uggccagguugggcuuugcagc

SEQ ID NO: 897507 - RNA, 22 nt, Human
cuaaaauguuuggggcagaacc

SEQ ID NO: 897508 - RNA, 22 nt, Human
gcagaagcacaggugacgggcc

SEQ ID NO: 897509 - RNA, 22 nt, Human
ggcauuuagauugaauuucugu

SEQ ID NO: 897510 - RNA, 22 nt, Human
ggcuauggcaaagaacucagau

SEQ ID NO: 897511 - RNA, 22 nt, Human
aggauaauaauaaucucguuua

SEQ ID NO: 897512 - RNA, 22 nt, Human
auuauuaaaauguguuucucuu

SEQ ID NO: 897513 - RNA, 21 nt, Human
uuccuggggacuuccguggga

SEQ ID NO: 897514 - RNA, 22 nt, Human
cuacauguagguuuccuuaauu

SEQ ID NO: 897515 - RNA, 22 nt, Human
aaugccuuauaggcugaaaauu

SEQ ID NO: 897516 - RNA, 22 nt, Human
gcacaguugauuuaugcuggug

SEQ ID NO: 897517 - RNA, 22 nt, Human
gcagggccagugcagagaggaa

SEQ ID NO: 897518 - RNA, 22 nt, Human
aaaucuaggccgggugcggugg

SEQ ID NO: 897519 - RNA, 22 nt, Human
cugucaccugccagcauaccca

SEQ ID NO: 897520 - RNA, 21 nt, Human
gacaaacauuucauagcuuua

SEQ ID NO: 897521 - RNA, 22 nt, Human
ucuuuucuucuuaaugguuaau

SEQ ID NO: 897522 - RNA, 22 nt, Human
ucaaaacacuauuaccuuuaau

SEQ ID NO: 897523 - RNA, 23 nt, Human
aagccuuguggaggcucucauuu

SEQ ID NO: 897524 - RNA, 22 nt, Human
agucuccacacuggcagaugcc

SEQ ID NO: 897525 - RNA, 22 nt, Human
agugucugcagugaugucucuu

SEQ ID NO: 897526 - RNA, 22 nt, Human
agaagccauugaagcagaccuc

SEQ ID NO: 897527 - RNA, 22 nt, Human
gcuucugucuuagcuaccuccc

SEQ ID NO: 897528 - RNA, 22 nt, Human
uguguacacaaguauauauaca

SEQ ID NO: 897529 - RNA, 20 nt, Human
uccuaagaggauggccacgu

SEQ ID NO: 897530 - RNA, 22 nt, Human
uauaguuucaugagcuuuuuaa

SEQ ID NO: 897531 - RNA, 22 nt, Human
ucaaagacagacaucagucaaa

SEQ ID NO: 897532 - RNA, 22 nt, Human
gacauucagccaauuacuuucu

SEQ ID NO: 897533 - RNA, 23 nt, Human
cauuucaacgaauuuuccuucug

SEQ ID NO: 897534 - RNA, 22 nt, Human
caggguggugaauagcuauagu

SEQ ID NO: 897535 - RNA, 21 nt, Human
uguguguaugcacacacaugc

SEQ ID NO: 897536 - RNA, 22 nt, Human
aggcccagggcugcucucugaa

SEQ ID NO: 897537 - RNA, 22 nt, Human
aucucagaucuacagaucuaca

SEQ ID NO: 897538 - RNA, 22 nt, Human
uuucuucccaagcaguuucaga

SEQ ID NO: 897539 - RNA, 22 nt, Human
auacagugagaauaauucuuag

SEQ ID NO: 897540 - RNA, 22 nt, Human
gcugaggaagucagguggccca

SEQ ID NO: 897541 - RNA, 23 nt, Human
uuuggcugggcugugggcacacc

SEQ ID NO: 897542 - RNA, 22 nt, Human
uccugcuuccuugucuuuagac

SEQ ID NO: 897543 - RNA, 22 nt, Human
ucacauucauggugcuaauaaa

SEQ ID NO: 897544 - RNA, 22 nt, Human
cuggggccagugaggaggcuuu

SEQ ID NO: 897545 - RNA, 22 nt, Human
gaccugggguaagcuuggcaac

SEQ ID NO: 897546 - RNA, 20 nt, Human
ucuuaaauccccagggccau

SEQ ID NO: 897547 - RNA, 22 nt, Human
ugggguggauagaaagugaugu

SEQ ID NO: 897548 - RNA, 22 nt, Human
gucauaaaauuuguggauuaga

SEQ ID NO: 897549 - RNA, 22 nt, Human
uacaaaggagacucuguauuua

SEQ ID NO: 897550 - RNA, 22 nt, Human
aucacuguguauguauaugcag

SEQ ID NO: 897551 - RNA, 22 nt, Human
uguguauacgaguaugaauaug

SEQ ID NO: 897552 - RNA, 22 nt, Human
auggccaguguugagaucaggc

SEQ ID NO: 897553 - RNA, 22 nt, Human
caaugaaaauuuaaguugcagc

SEQ ID NO: 897554 - RNA, 22 nt, Human
cacaagagagugcgcguugcaa

SEQ ID NO: 897555 - RNA, 22 nt, Human
cuguacagaagcuagagcaaau

SEQ ID NO: 897556 - RNA, 19 nt, Human
agcauuaggcaaauuuuga

SEQ ID NO: 897557 - RNA, 22 nt, Human
aaugucacucuguuuccucugc

SEQ ID NO: 897558 - RNA, 22 nt, Human
ugcguugcgcuccugcagcagg

SEQ ID NO: 897559 - RNA, 22 nt, Human
ucagggcaggcgagcagcugcu

SEQ ID NO: 897560 - RNA, 22 nt, Human
ccuggagcucacugggagccgg

SEQ ID NO: 897561 - RNA, 22 nt, Human
auauuaguguagguagcuaaua

SEQ ID NO: 897562 - RNA, 22 nt, Human
cccugugcacacacuucacucu

SEQ ID NO: 897563 - RNA, 22 nt, Human
uugugugcugagggccugcugu

SEQ ID NO: 897564 - RNA, 22 nt, Human
ccuuuuguacacuuacuauaua

SEQ ID NO: 897565 - RNA, 21 nt, Human
auuucauggugcuuuuaagaa

SEQ ID NO: 897566 - RNA, 22 nt, Human
aauacagagaauguuauuugga

SEQ ID NO: 897567 - RNA, 22 nt, Human
auguccaggaagucuuaacuca

SEQ ID NO: 897568 - RNA, 18 nt, Human
ugucucugaauuccagug

SEQ ID NO: 897569 - RNA, 22 nt, Human
ccaggcugcuuagccuuaucuu

SEQ ID NO: 897570 - RNA, 17 nt, Human
accaccucucaccagca

SEQ ID NO: 897571 - RNA, 22 nt, Human
gaggguggcuccucccugggcc

SEQ ID NO: 897572 - RNA, 22 nt, Human
agggccuggacuaauuggaucc

SEQ ID NO: 897573 - RNA, 22 nt, Human
acacagauuucacuggaauaga

SEQ ID NO: 897574 - RNA, 20 nt, Human
uguauuucaugcauuccugg

SEQ ID NO: 897575 - RNA, 22 nt, Human
uuuuccuauaugcaaagaaugc

SEQ ID NO: 897576 - RNA, 22 nt, Human
agagcccuugcccucagucacc

SEQ ID NO: 897577 - RNA, 22 nt, Human
gugagcuguuuuggacccaucu

SEQ ID NO: 897578 - RNA, 22 nt, Human
guggggaguguucugugauugg

SEQ ID NO: 897579 - RNA, 22 nt, Human
gcuaaucaauguuaaggcugug

SEQ ID NO: 897580 - RNA, 23 nt, Human
uagcuguggcguaaggcucagcu

SEQ ID NO: 897581 - RNA, 22 nt, Human
uuacaugaugauuucauaaaca

SEQ ID NO: 897582 - RNA, 22 nt, Human
aggccaggcaacauucugaagu

SEQ ID NO: 897583 - RNA, 22 nt, Human
agcuuguucaaaugcagaauac

SEQ ID NO: 897584 - RNA, 22 nt, Human
uggcuggcuggaccacaccugc

SEQ ID NO: 897585 - RNA, 22 nt, Human
gggcuggagagucccacguggg

SEQ ID NO: 897586 - RNA, 22 nt, Human
ggcaggugcccagagagcacga

SEQ ID NO: 897587 - RNA, 22 nt, Human
gacacagauaucucugagauua

SEQ ID NO: 897588 - RNA, 22 nt, Human
cugaagagaaagggagcucuuc

SEQ ID NO: 897589 - RNA, 22 nt, Human
cucuggaguaagagcuaugaaa

SEQ ID NO: 897590 - RNA, 22 nt, Human
gaaggcacugaacuccuucugg

SEQ ID NO: 897591 - RNA, 22 nt, Human
aaaggacaugucaauaucaggc

SEQ ID NO: 897592 - RNA, 22 nt, Human
aggcuccuucacagcacucgcc

SEQ ID NO: 897593 - RNA, 22 nt, Human
caggcuuggagggcaguggcau

SEQ ID NO: 897594 - RNA, 22 nt, Human
cagaaaaggaagagcuauguaa

SEQ ID NO: 897595 - RNA, 22 nt, Human
ugaaacacuuucaauuacauau

SEQ ID NO: 897596 - RNA, 22 nt, Human
uauucacaguugauuuacaguu

SEQ ID NO: 897597 - RNA, 22 nt, Human
aggcacuguacuagguacaggg

SEQ ID NO: 897598 - RNA, 22 nt, Human
ugcaaacagaaaguuuauugug

SEQ ID NO: 897599 - RNA, 21 nt, Human
ugaggccugccagucucagaa

SEQ ID NO: 897600 - RNA, 22 nt, Human
ccagaagaacuuaauucaaaac

SEQ ID NO: 897601 - RNA, 22 nt, Human
gcaccugggcaaggauucagag

SEQ ID NO: 897602 - RNA, 22 nt, Human
acaauauaguccaugagcaugc

SEQ ID NO: 897603 - RNA, 22 nt, Human
guucaauuuagaaagcacaguu

SEQ ID NO: 897604 - RNA, 22 nt, Human
gcuucugugagugcagaugcug

SEQ ID NO: 897605 - RNA, 22 nt, Human
aguucuuauuuuggaacugagg

SEQ ID NO: 897606 - RNA, 21 nt, Human
ucacaguuggccaggcauuua

SEQ ID NO: 897607 - RNA, 23 nt, Human
ccugucaacaaggccccacugua

SEQ ID NO: 897608 - RNA, 22 nt, Human
uuacaauugagucuauuguaug

SEQ ID NO: 897609 - RNA, 22 nt, Human
ugcagaagaccuuccagggcug

SEQ ID NO: 897610 - RNA, 22 nt, Human
auguuucuaaaacuugcauggc

SEQ ID NO: 897611 - RNA, 22 nt, Human
acaggcaggagcuccccauucc

SEQ ID NO: 897612 - RNA, 22 nt, Human
cauuucuacagcuucuucagaa

SEQ ID NO: 897613 - RNA, 22 nt, Human
ggcugugcugagggggaagccc

SEQ ID NO: 897614 - RNA, 22 nt, Human
uuacgaucauuucuaaaauaaa

SEQ ID NO: 897615 - RNA, 22 nt, Human
cagcaggccaugcugcuuuuca

SEQ ID NO: 897616 - RNA, 22 nt, Human
guuuccauggcucuguuaaugg

SEQ ID NO: 897617 - RNA, 22 nt, Human
aacaugcucuggauugcuguga

SEQ ID NO: 897618 - RNA, 22 nt, Human
ugaggaagaacaagaauuuaga

SEQ ID NO: 897619 - RNA, 22 nt, Human
aauguucagucucaagagugau

SEQ ID NO: 897620 - RNA, 22 nt, Human
uugcauagugcugagguucggg

SEQ ID NO: 897621 - RNA, 22 nt, Human
ggggaguguuuucaugggcuug

SEQ ID NO: 897622 - RNA, 22 nt, Human
ugauggagcaugugugcuuccu

SEQ ID NO: 897623 - RNA, 22 nt, Human
uaggcagagaggccauaagaau

SEQ ID NO: 897624 - RNA, 22 nt, Human
acagaguauuggaaaggcagug

SEQ ID NO: 897625 - RNA, 22 nt, Human
acauuuaaugauccuacuguga

SEQ ID NO: 897626 - RNA, 22 nt, Human
cuguugugaauuuaguuaccaa

SEQ ID NO: 897627 - RNA, 22 nt, Human
acagcaggcaugaagaaauguu

SEQ ID NO: 897628 - RNA, 22 nt, Human
acaagauagcuuagaagauuca

SEQ ID NO: 897629 - RNA, 22 nt, Human
agcagaacauuuucagggcugu

SEQ ID NO: 897630 - RNA, 22 nt, Human
agcagcauggagaaaccguuca

SEQ ID NO: 897631 - RNA, 22 nt, Human
ugugccuucucaguccugcuca

SEQ ID NO: 897632 - RNA, 22 nt, Human
cuucugggcauucagcugcaca

SEQ ID NO: 897633 - RNA, 22 nt, Human
auuaauaaaauaccacuuuguu

SEQ ID NO: 897634 - RNA, 22 nt, Human
gggcagcucugcccaucagagg

SEQ ID NO: 897635 - RNA, 22 nt, Human
uuccaaaggaauggggagcuau

SEQ ID NO: 897636 - RNA, 22 nt, Human
aagugucugauggagcgaaaug

SEQ ID NO: 897637 - RNA, 22 nt, Human
ugagcagagcaguaacaggagc

SEQ ID NO: 897638 - RNA, 21 nt, Human
gacaggcaaggagucacuuag

SEQ ID NO: 897639 - RNA, 22 nt, Human
uuccggaagguucucuagaauu

SEQ ID NO: 897640 - RNA, 22 nt, Human
cuauugaauuaacuauuaaagu

SEQ ID NO: 897641 - RNA, 22 nt, Human
aaaugguaaugucuuucuguuu

SEQ ID NO: 897642 - RNA, 22 nt, Human
ugcugcagucacacggcuaucu

SEQ ID NO: 897643 - RNA, 22 nt, Human
uuucaaguggggacauuugaga

SEQ ID NO: 897644 - RNA, 22 nt, Human
gcauuuuugaucccacuaggau

SEQ ID NO: 897645 - RNA, 22 nt, Human
ggagggccaucuugggugugau

SEQ ID NO: 897646 - RNA, 22 nt, Human
uccaggguguguuuacuggggu

SEQ ID NO: 897647 - RNA, 22 nt, Human
ucccacagaugcuguccagagu

SEQ ID NO: 897648 - RNA, 20 nt, Human
cugccuggaggccucuaccu

SEQ ID NO: 897649 - RNA, 22 nt, Human
aguuuggggcaagaggacagau

SEQ ID NO: 897650 - RNA, 22 nt, Human
agccaggcgcaguggcuuaugc

SEQ ID NO: 897651 - RNA, 22 nt, Human
gguccaggaucaaggcaucacc

SEQ ID NO: 897652 - RNA, 22 nt, Human
ccuuuguucuguguaucuuugu

SEQ ID NO: 897653 - RNA, 22 nt, Human
gcuuuuguggcugucuucauug

SEQ ID NO: 897654 - RNA, 22 nt, Human
uaagaaugacuaccaaacugga

SEQ ID NO: 897655 - RNA, 22 nt, Human
uaaaucaagaauaucagcuugu

SEQ ID NO: 897656 - RNA, 19 nt, Human
cuccacagggauugugauu

SEQ ID NO: 897657 - RNA, 20 nt, Human
uauuucugggcaaccauuua

SEQ ID NO: 897658 - RNA, 18 nt, Human
uggagcaggaagccuggc

SEQ ID NO: 897659 - RNA, 22 nt, Human
ugaaugaguggauucugaguag

SEQ ID NO: 897660 - RNA, 22 nt, Human
uccagcagagguugauaauacc

SEQ ID NO: 897661 - RNA, 22 nt, Human
aaggccaaagacaccuacacag

SEQ ID NO: 897662 - RNA, 22 nt, Human
gcuucugcgccuagccucaggu

SEQ ID NO: 897663 - RNA, 22 nt, Human
gccuuucacagagauuuaaaaa

SEQ ID NO: 897664 - RNA, 22 nt, Human
ucuuaacaagcuccucagugcu

SEQ ID NO: 897665 - RNA, 18 nt, Human
auaucugugggauggaga

SEQ ID NO: 897666 - RNA, 22 nt, Human
guggaagcaacccuggcaggag

SEQ ID NO: 897667 - RNA, 22 nt, Human
gaaacaugucugacaauuuacc

SEQ ID NO: 897668 - RNA, 22 nt, Human
ccagugugccaauuuacagcug

SEQ ID NO: 897669 - RNA, 22 nt, Human
ccuuaccugauugcuggcaucc

SEQ ID NO: 897670 - RNA, 22 nt, Human
cagccagcugaauguaccauga

SEQ ID NO: 897671 - RNA, 22 nt, Human
caacaguucaguugagcucaac

SEQ ID NO: 897672 - RNA, 22 nt, Human
caggcagcuagauuuauaacaa

SEQ ID NO: 897673 - RNA, 22 nt, Human
uggcagauuuucucuggaggag

SEQ ID NO: 897674 - RNA, 21 nt, Human
ugaggccaauagccccuggac

SEQ ID NO: 897675 - RNA, 22 nt, Human
agcugcucgaagccgguggccc

SEQ ID NO: 897676 - RNA, 22 nt, Human
uguaaacauaccagagccaagu

SEQ ID NO: 897677 - RNA, 22 nt, Human
acuuccccgaagcuggaaauag

SEQ ID NO: 897678 - RNA, 20 nt, Human
ucauacacaugagcaugcag

SEQ ID NO: 897679 - RNA, 22 nt, Human
ucugcccuggggucagccucca

SEQ ID NO: 897680 - RNA, 22 nt, Human
aaaauugugaagguuucugaaa

SEQ ID NO: 897681 - RNA, 21 nt, Human
aggcagcuggaaggccuggcu

SEQ ID NO: 897682 - RNA, 22 nt, Human
ggcuucuccagguacugagcau

SEQ ID NO: 897683 - RNA, 22 nt, Human
ucugaagcacugcaaugcuuua

SEQ ID NO: 897684 - RNA, 22 nt, Human
gucagcaauucaagagcucuua

SEQ ID NO: 897685 - RNA, 22 nt, Human
aaugggcuuucuuggacaggag

SEQ ID NO: 897686 - RNA, 20 nt, Human
cacaggccuugugagcagac

SEQ ID NO: 897687 - RNA, 22 nt, Human
agauguuuaaaaagaugacucu

SEQ ID NO: 897688 - RNA, 22 nt, Human
ccuuccaagugcuugccgcuuu

SEQ ID NO: 897689 - RNA, 22 nt, Human
cacuuacacuucugaaagccua

SEQ ID NO: 897690 - RNA, 22 nt, Human
ugcagggcuccuggcuccaauc

SEQ ID NO: 897691 - RNA, 22 nt, Human
aacauaucuacggauacgauua

SEQ ID NO: 897692 - RNA, 18 nt, Human
uggcucugcagccagaug

SEQ ID NO: 897693 - RNA, 22 nt, Human
gggguaggcaggugaucugauc

SEQ ID NO: 897694 - RNA, 22 nt, Human
acauuucuuccuaauuaucccu

SEQ ID NO: 897695 - RNA, 22 nt, Human
uaacauuucggugacaguggga

SEQ ID NO: 897696 - RNA, 22 nt, Human
aacaaggcaagucugugagcau

SEQ ID NO: 897697 - RNA, 22 nt, Human
ucuagaacuccaguuaggcaau

SEQ ID NO: 897698 - RNA, 20 nt, Human
augaggccagcagggcucag

SEQ ID NO: 897699 - RNA, 18 nt, Human
uguagcuggaggccaggc

SEQ ID NO: 897700 - RNA, 22 nt, Human
ccucugcgcccuugaucagcca

SEQ ID NO: 897701 - RNA, 22 nt, Human
gaccagggucacucacagggcu

SEQ ID NO: 897702 - RNA, 22 nt, Human
agugggcugguggcagggagaa

SEQ ID NO: 897703 - RNA, 22 nt, Human
uguaacuguggucuagggacug

SEQ ID NO: 897704 - RNA, 22 nt, Human
ucccagccaggcucuaccacuu

SEQ ID NO: 897705 - RNA, 22 nt, Human
ccagggugugagaaggaaguag

SEQ ID NO: 897706 - RNA, 22 nt, Human
ugcaggguagacaggugagguc

SEQ ID NO: 897707 - RNA, 22 nt, Human
ugcugccaugcagagcaacaga

SEQ ID NO: 897708 - RNA, 19 nt, Human
agcaacaccguuuauuucc

SEQ ID NO: 897709 - RNA, 22 nt, Human
guaugugucuuagaacuuggga

SEQ ID NO: 897710 - RNA, 21 nt, Human
uucuagaaaaguaugggacug

SEQ ID NO: 897711 - RNA, 22 nt, Human
gagaaacacuguuaguuuauua

SEQ ID NO: 897712 - RNA, 22 nt, Human
uuacauguacugguuugacuua

SEQ ID NO: 897713 - RNA, 22 nt, Human
ccagaggugaacaggaggcugu

SEQ ID NO: 897714 - RNA, 17 nt, Human
ucuuuccugccaugcuc

SEQ ID NO: 897715 - RNA, 19 nt, Human
ugucagugauacaugcuuu

SEQ ID NO: 897716 - RNA, 17 nt, Human
gauuuccugaaguucuu

SEQ ID NO: 897717 - RNA, 22 nt, Human
gcugccuccaaucugugccccg

SEQ ID NO: 897718 - RNA, 22 nt, Human
aguguauuugucuggcuucucc

SEQ ID NO: 897719 - RNA, 22 nt, Human
aagacagugugucaggcaggug

SEQ ID NO: 897720 - RNA, 22 nt, Human
acagcaaucugagagacauagu

SEQ ID NO: 897721 - RNA, 23 nt, Human
cagaggguuccauggagcauggu

SEQ ID NO: 897722 - RNA, 22 nt, Human
ugcuacauaccacgaugcagua

SEQ ID NO: 897723 - RNA, 22 nt, Human
gcuuuuauugucuuuacgacga

SEQ ID NO: 897724 - RNA, 19 nt, Human
augagguagcagcuggugc

SEQ ID NO: 897725 - RNA, 22 nt, Human
ucucuggcagacaccucccuga

SEQ ID NO: 897726 - RNA, 22 nt, Human
cacacaucaaccuagacauugu

SEQ ID NO: 897727 - RNA, 22 nt, Human
ucauuucccuccuacaaagagg

SEQ ID NO: 897728 - RNA, 22 nt, Human
gccaggagaaugcuagcagagg

SEQ ID NO: 897729 - RNA, 22 nt, Human
gcuccucucccagagcugcagg

SEQ ID NO: 897730 - RNA, 22 nt, Human
uaaucauauggguaauccaaug

SEQ ID NO: 897731 - RNA, 22 nt, Human
acagugcagggcgggaagaagg

SEQ ID NO: 897732 - RNA, 22 nt, Human
cacagagaacugugggagugug

SEQ ID NO: 897733 - RNA, 22 nt, Human
aggcuacauguugggguggaag

SEQ ID NO: 897734 - RNA, 22 nt, Human
ugaaaggaaaguacagugaugc

SEQ ID NO: 897735 - RNA, 22 nt, Human
ucaagaaacuguagcaaugggu

SEQ ID NO: 897736 - RNA, 22 nt, Human
uauguccugcuacucucucaug

SEQ ID NO: 897737 - RNA, 22 nt, Human
gugagcaggauaggggcucccu

SEQ ID NO: 897738 - RNA, 22 nt, Human
gcucaugggcccagagcagccc

SEQ ID NO: 897739 - RNA, 22 nt, Human
uugcucuaguggccccugaaug

SEQ ID NO: 897740 - RNA, 22 nt, Human
augcagaauugcuaaguaucug

SEQ ID NO: 897741 - RNA, 22 nt, Human
uucacagugcugcaccuggcuu

SEQ ID NO: 897742 - RNA, 22 nt, Human
ucccaggaugaagacaguguug

SEQ ID NO: 897743 - RNA, 22 nt, Human
agguauauauucugguccuuau

SEQ ID NO: 897744 - RNA, 22 nt, Human
caggaggaaacuggauucacuu

SEQ ID NO: 897745 - RNA, 22 nt, Human
uggaauguugauaaacauaggc

SEQ ID NO: 897746 - RNA, 22 nt, Human
aggguggcugugaagugcuugg

SEQ ID NO: 897747 - RNA, 22 nt, Human
ugcagcagaauauggcugcagg

SEQ ID NO: 897748 - RNA, 22 nt, Human
cagccucuugcacuuugaaggc

SEQ ID NO: 897749 - RNA, 19 nt, Human
cugucugcggggccuguuc

SEQ ID NO: 897750 - RNA, 22 nt, Human
cagaaugggaaggacugcaguu

SEQ ID NO: 897751 - RNA, 23 nt, Human
ucagaugaggaaugcauacuaau

SEQ ID NO: 897752 - RNA, 22 nt, Human
cuuuuuacaaagccugucuucu

SEQ ID NO: 897753 - RNA, 22 nt, Human
gaagcugugcugggggaucugu

SEQ ID NO: 897754 - RNA, 22 nt, Human
ugcuggcugcagugcugucaaa

SEQ ID NO: 897755 - RNA, 22 nt, Human
cacucugaugguuucuguucaa

SEQ ID NO: 897756 - RNA, 22 nt, Human
ggcagcagggcugucucccuac

SEQ ID NO: 897757 - RNA, 22 nt, Human
ggguuggcagcaccagaggagg

SEQ ID NO: 897758 - RNA, 22 nt, Human
auacauguaacugcauuguaau

SEQ ID NO: 897759 - RNA, 22 nt, Human
ccaggcccccgagcagaagaca

SEQ ID NO: 897760 - RNA, 22 nt, Human
agugugugcaugcauucgugca

SEQ ID NO: 897761 - RNA, 22 nt, Human
uggcagaguucgcuccuauuca

SEQ ID NO: 897762 - RNA, 22 nt, Human
cugugucuuuccuacuuugugg

SEQ ID NO: 897763 - RNA, 22 nt, Human
cugcugagagcugaaggcugua

SEQ ID NO: 897764 - RNA, 22 nt, Human
auguucuacagauggaaagggg

SEQ ID NO: 897765 - RNA, 22 nt, Human
aaauacucucaauaaagaaagu

SEQ ID NO: 897766 - RNA, 22 nt, Human
gugcacacucuuggggcacuuu

SEQ ID NO: 897767 - RNA, 22 nt, Human
gcagggcagagggagaaucucu

SEQ ID NO: 897768 - RNA, 22 nt, Human
agguggcuucuggccaggugug

SEQ ID NO: 897769 - RNA, 22 nt, Human
cucugggaagggcugagcacug

SEQ ID NO: 897770 - RNA, 19 nt, Human
gcuuuggagggagguucua

SEQ ID NO: 897771 - RNA, 22 nt, Human
ucagaagcagauauuucaaaau

SEQ ID NO: 897772 - RNA, 22 nt, Human
uuuguacucucagaauucagaa

SEQ ID NO: 897773 - RNA, 22 nt, Human
aaaguucuuuuucuauaaaucc

SEQ ID NO: 897774 - RNA, 22 nt, Human
gaauauauuggugaaaauaguu

SEQ ID NO: 897775 - RNA, 22 nt, Human
ccauucauguuuuugaacuaug

SEQ ID NO: 897776 - RNA, 22 nt, Human
gagugcuguaucugagaaagca

SEQ ID NO: 897777 - RNA, 21 nt, Human
agaugcaguuugcaggugggu

SEQ ID NO: 897778 - RNA, 22 nt, Human
aggcaaauagauaguccauaca

SEQ ID NO: 897779 - RNA, 22 nt, Human
gugacuguuguuugcuacgugc

SEQ ID NO: 897780 - RNA, 22 nt, Human
ugggcaagucacuucugucuuu

SEQ ID NO: 897781 - RNA, 22 nt, Human
aacugcaaguggggcuugucau

SEQ ID NO: 897782 - RNA, 22 nt, Human
ugagaggagugauuguaaaauu

SEQ ID NO: 897783 - RNA, 22 nt, Human
aaggcuucuuaugcaauuguuu

SEQ ID NO: 897784 - RNA, 22 nt, Human
acaggccuauguuccauugcag

SEQ ID NO: 897785 - RNA, 17 nt, Human
uuucuggaaugggcaaa

SEQ ID NO: 897786 - RNA, 22 nt, Human
acugaggcuagauugcuguucu

SEQ ID NO: 897787 - RNA, 22 nt, Human
ggccccagcagacccuccucug

SEQ ID NO: 897788 - RNA, 22 nt, Human
ggugugggcccugaugucagca

SEQ ID NO: 897789 - RNA, 22 nt, Human
ggagauggcuggcagguagaug

SEQ ID NO: 897790 - RNA, 22 nt, Human
gcggcgccuaagccccgaccuc

SEQ ID NO: 897791 - RNA, 22 nt, Human
auggcauuugaaucugucuuuu

SEQ ID NO: 897792 - RNA, 22 nt, Human
aauaaacuuccacuguguuuuu

SEQ ID NO: 897793 - RNA, 22 nt, Human
gauaugaaguggcauugugaag

SEQ ID NO: 897794 - RNA, 23 nt, Human
agcuucaucuugcugugucucag

SEQ ID NO: 897795 - RNA, 22 nt, Human
uggagccagcaggacucagagg

SEQ ID NO: 897796 - RNA, 22 nt, Human
uguggccaccagagcugcuauu

SEQ ID NO: 897797 - RNA, 21 nt, Human
guucaugucagcauuaaggga

SEQ ID NO: 897798 - RNA, 22 nt, Human
cuagaaauucugauucaguagg

SEQ ID NO: 897799 - RNA, 18 nt, Human
auguacauguacucacac

SEQ ID NO: 897800 - RNA, 22 nt, Human
acaucuguugauugauguuaca

SEQ ID NO: 897801 - RNA, 22 nt, Human
aaagguuuucugacccuuagua

SEQ ID NO: 897802 - RNA, 22 nt, Human
uggcugagaccuucccaaauuc

SEQ ID NO: 897803 - RNA, 22 nt, Human
ucacuucuucagcuuuccuuga

SEQ ID NO: 897804 - RNA, 22 nt, Human
uucacagggccacuggcaggag

SEQ ID NO: 897805 - RNA, 22 nt, Human
ucagaaaagguagcugugacaa

SEQ ID NO: 897806 - RNA, 22 nt, Human
gaaaaugagccucagcuacauu

SEQ ID NO: 897807 - RNA, 22 nt, Human
aauaauacuucguaaaguuguu

SEQ ID NO: 897808 - RNA, 22 nt, Human
gcauucuuguuuuuccuacccu

SEQ ID NO: 897809 - RNA, 22 nt, Human
ugcucauuggcgaucugaggga

SEQ ID NO: 897810 - RNA, 22 nt, Human
agcugcagguggacccguaccg

SEQ ID NO: 897811 - RNA, 22 nt, Human
cuacaguagaguaggccucuga

SEQ ID NO: 897812 - RNA, 22 nt, Human
gcguggguccaagaaucuguga

SEQ ID NO: 897813 - RNA, 22 nt, Human
aaugucagccugaaagcuauuc

SEQ ID NO: 897814 - RNA, 22 nt, Human
gcccuguuauccagaugaggau

SEQ ID NO: 897815 - RNA, 22 nt, Human
uuguacaaguauuaugugaaca

SEQ ID NO: 897816 - RNA, 22 nt, Human
aauaaaucaauccuauugguag

SEQ ID NO: 897817 - RNA, 22 nt, Human
uuaguauuaggaucauauuuga

SEQ ID NO: 897818 - RNA, 22 nt, Human
uccucacaagcaagcacaggua

SEQ ID NO: 897819 - RNA, 22 nt, Human
gccagaggggcucgaaggcgcg

SEQ ID NO: 897820 - RNA, 22 nt, Human
augggcaggcaagguggcgagu

SEQ ID NO: 897821 - RNA, 23 nt, Human
uggagguuuuacugaguugagga

SEQ ID NO: 897822 - RNA, 22 nt, Human
agggcucccgugaggugacugc

SEQ ID NO: 897823 - RNA, 22 nt, Human
uaacacauaagcugagaccaug

SEQ ID NO: 897824 - RNA, 21 nt, Human
gcagccacagccaccaagcua

SEQ ID NO: 897825 - RNA, 19 nt, Human
uuuugaaguaugagacagg

SEQ ID NO: 897826 - RNA, 22 nt, Human
uuucucucagccuguagaaacu

SEQ ID NO: 897827 - RNA, 22 nt, Human
ccugcuggcggggacccaguga

SEQ ID NO: 897828 - RNA, 22 nt, Human
agcugaggcucugagagggaag

SEQ ID NO: 897829 - RNA, 20 nt, Human
uggaauaaguuaaguuguuu

SEQ ID NO: 897830 - RNA, 22 nt, Human
uucuucuguuggcagagcauac

SEQ ID NO: 897831 - RNA, 22 nt, Human
aucauuuugugacaaugccugu

SEQ ID NO: 897832 - RNA, 22 nt, Human
acccugcccucuccagcucagg

SEQ ID NO: 897833 - RNA, 21 nt, Human
gcaaaugaguuaacuaacuca

SEQ ID NO: 897834 - RNA, 22 nt, Human
acuccagguaggcacauugaca

SEQ ID NO: 897835 - RNA, 22 nt, Human
gaggcucccuuuagguccagau

SEQ ID NO: 897836 - RNA, 21 nt, Human
aguuuuauauuauaagcuaaa

SEQ ID NO: 897837 - RNA, 22 nt, Human
agcaggcauagaguagcacuca

SEQ ID NO: 897838 - RNA, 22 nt, Human
aucucagagaaauuugaaugca

SEQ ID NO: 897839 - RNA, 22 nt, Human
aaaucagacacagugaaaguua

SEQ ID NO: 897840 - RNA, 22 nt, Human
agcuggcaaggcuuuagauuca

SEQ ID NO: 897841 - RNA, 22 nt, Human
ucucccaggucauacacagaga

SEQ ID NO: 897842 - RNA, 22 nt, Human
uuccucuuucucugugcuaugu

SEQ ID NO: 897843 - RNA, 22 nt, Human
ucuggagcuuguuucagauggu

SEQ ID NO: 897844 - RNA, 22 nt, Human
cagcccuggaacagcugacuca

SEQ ID NO: 897845 - RNA, 22 nt, Human
cacaaauguaguagcuuaaaac

SEQ ID NO: 897846 - RNA, 22 nt, Human
ugcagcaaauggggcccguccu

SEQ ID NO: 897847 - RNA, 22 nt, Human
caaaguaauuacgguuuuggcc

SEQ ID NO: 897848 - RNA, 22 nt, Human
ugggaaagccagcagugucacc

SEQ ID NO: 897849 - RNA, 22 nt, Human
gcccaggaggucaaguagcuau

SEQ ID NO: 897850 - RNA, 22 nt, Human
cuguaccucagcuuugcuccca

SEQ ID NO: 897851 - RNA, 22 nt, Human
aaacaaacauagguuugaaagu

SEQ ID NO: 897852 - RNA, 22 nt, Human
uauaccaaaauaucagaaaggg

SEQ ID NO: 897853 - RNA, 22 nt, Human
uagaaacucucacgagugaaac

SEQ ID NO: 897854 - RNA, 22 nt, Human
agcuuugguugaggggagugug

SEQ ID NO: 897855 - RNA, 22 nt, Human
gugugucagguacugugcuagg

SEQ ID NO: 897856 - RNA, 22 nt, Human
caauuucauggauaaaagaugu

SEQ ID NO: 897857 - RNA, 23 nt, Human
agcuuuggugaugugacagauaa

SEQ ID NO: 897858 - RNA, 22 nt, Human
ucuucacauggaacaugaagcu

SEQ ID NO: 897859 - RNA, 22 nt, Human
ccaaggcuguggggcugugcag

SEQ ID NO: 897860 - RNA, 21 nt, Human
cagaggcagguccugggacgg

SEQ ID NO: 897861 - RNA, 21 nt, Human
guggcccugguguggcugcac

SEQ ID NO: 897862 - RNA, 22 nt, Human
aagcauuuuagauaaagcauca

SEQ ID NO: 897863 - RNA, 22 nt, Human
aagacauugcaugauaaugcug

SEQ ID NO: 897864 - RNA, 22 nt, Human
cuaguucuagaucccugaggaa

SEQ ID NO: 897865 - RNA, 22 nt, Human
aucuggugacacgaggagcugg

SEQ ID NO: 897866 - RNA, 22 nt, Human
agaggccagcccaggccaccga

SEQ ID NO: 897867 - RNA, 22 nt, Human
aagccuugcucuugaaaaaguu

SEQ ID NO: 897868 - RNA, 22 nt, Human
uuuucugaaguuuaagacauuu

SEQ ID NO: 897869 - RNA, 22 nt, Human
uggugcugccaggcuccugcca

SEQ ID NO: 897870 - RNA, 22 nt, Human
gagugugggucucagcuuuaag

SEQ ID NO: 897871 - RNA, 18 nt, Human
gcugaaauucuaaacaaa

SEQ ID NO: 897872 - RNA, 22 nt, Human
cuguauguuuucuccuuugguu

SEQ ID NO: 897873 - RNA, 22 nt, Human
cacagagaauucccauauguga

SEQ ID NO: 897874 - RNA, 21 nt, Human
ucugagagcaacugcccuuua

SEQ ID NO: 897875 - RNA, 22 nt, Human
uuauguaaguggagucauauag

SEQ ID NO: 897876 - RNA, 22 nt, Human
gggcagagagcuggaacuccuu

SEQ ID NO: 897877 - RNA, 23 nt, Human
caaaaugguuuaaaaguggcaua

SEQ ID NO: 897878 - RNA, 22 nt, Human
aaaaguacuauuuuaacaaagu

SEQ ID NO: 897879 - RNA, 22 nt, Human
acagacagacagagaacuauuc

SEQ ID NO: 897880 - RNA, 22 nt, Human
gccagcuggcugcaggucccag

SEQ ID NO: 897881 - RNA, 22 nt, Human
agaaaauuagauuuuacugugu

SEQ ID NO: 897882 - RNA, 22 nt, Human
uagcacaggucuuguugccauu

SEQ ID NO: 897883 - RNA, 22 nt, Human
ccaggacacugcuucacagcag

SEQ ID NO: 897884 - RNA, 22 nt, Human
uauaacacucagaaagaaucau

SEQ ID NO: 897885 - RNA, 22 nt, Human
auguacauucuaaguaugugua

SEQ ID NO: 897886 - RNA, 22 nt, Human
gggcccuggccgaaucccucug

SEQ ID NO: 897887 - RNA, 22 nt, Human
aagaauaaauuaagauacuuag

SEQ ID NO: 897888 - RNA, 22 nt, Human
agugucuuucauauccuccauc

SEQ ID NO: 897889 - RNA, 22 nt, Human
ugugucuggauagguaauggau

SEQ ID NO: 897890 - RNA, 22 nt, Human
uucccagaaugaauggauggag

SEQ ID NO: 897891 - RNA, 22 nt, Human
uuuccauauuuaaucaaaauaa

SEQ ID NO: 897892 - RNA, 22 nt, Human
augcauuuuugaguaugaauga

SEQ ID NO: 897893 - RNA, 20 nt, Human
aaacauucauguacaaguga

SEQ ID NO: 897894 - RNA, 22 nt, Human
agcugcaggaaguagaagcgga

SEQ ID NO: 897895 - RNA, 22 nt, Human
ugcuuccagcucucuguaaggu

SEQ ID NO: 897896 - RNA, 23 nt, Human
agcccugcugagacccagcuccc

SEQ ID NO: 897897 - RNA, 22 nt, Human
gaguuuauucaggaaauagcca

SEQ ID NO: 897898 - RNA, 22 nt, Human
gaaguuguaagccugggaaggu

SEQ ID NO: 897899 - RNA, 22 nt, Human
cgugggaguggugggugcucag

SEQ ID NO: 897900 - RNA, 22 nt, Human
uccuucuuucccccuagucauu

SEQ ID NO: 897901 - RNA, 22 nt, Human
cucuggucagugaauuccuagu

SEQ ID NO: 897902 - RNA, 22 nt, Human
caggcccugcacuaggcccugg

SEQ ID NO: 897903 - RNA, 22 nt, Human
ugucaccuugaugauggccuag

SEQ ID NO: 897904 - RNA, 22 nt, Human
gacaaaugaagucacugaccuu

SEQ ID NO: 897905 - RNA, 22 nt, Human
gggcaggucugggucagccuga

SEQ ID NO: 897906 - RNA, 22 nt, Human
ugggcagaucuuugguggcuag

SEQ ID NO: 897907 - RNA, 22 nt, Human
uauuugucacugcacuugaaau

SEQ ID NO: 897908 - RNA, 22 nt, Human
cagauaacugaaauaucauacc

SEQ ID NO: 897909 - RNA, 22 nt, Human
uuguauauaaagcccccacugu

SEQ ID NO: 897910 - RNA, 21 nt, Human
cuggaggcagguggugccagg

SEQ ID NO: 897911 - RNA, 22 nt, Human
caggucuguuuccaucagugcu

SEQ ID NO: 897912 - RNA, 23 nt, Human
guccuauuuuuugaaauacugag

SEQ ID NO: 897913 - RNA, 22 nt, Human
gggcuucuggcuacuguaugag

SEQ ID NO: 897914 - RNA, 21 nt, Human
guaucacauuugcaugcuuau

SEQ ID NO: 897915 - RNA, 22 nt, Human
gcccaggaguucaaggcugcag

SEQ ID NO: 897916 - RNA, 22 nt, Human
ucuggagagaucuuccacaaca

SEQ ID NO: 897917 - RNA, 22 nt, Human
uaguaaauuaaaauauugacuu

SEQ ID NO: 897918 - RNA, 22 nt, Human
ucccagcuuagauuugcucauu

SEQ ID NO: 897919 - RNA, 22 nt, Human
uccaggagacacaagguacaua

SEQ ID NO: 897920 - RNA, 22 nt, Human
uaauaccuugaucucucuuguc

SEQ ID NO: 897921 - RNA, 22 nt, Human
uggcccgaccucugcucaugca

SEQ ID NO: 897922 - RNA, 22 nt, Human
acauguuugccugcaggcuuag

SEQ ID NO: 897923 - RNA, 22 nt, Human
guguguggcaaacugggccugc

SEQ ID NO: 897924 - RNA, 22 nt, Human
uccuggccucacaguccugggu

SEQ ID NO: 897925 - RNA, 22 nt, Human
auuagcaaguuguuauccuuug

SEQ ID NO: 897926 - RNA, 22 nt, Human
ccagugugaccaucuguuagcu

SEQ ID NO: 897927 - RNA, 22 nt, Human
guaacaaacgguuccaagaugc

SEQ ID NO: 897928 - RNA, 22 nt, Human
uaguugaagagaugaaugacca

SEQ ID NO: 897929 - RNA, 22 nt, Human
ucugcacagauucucugagaau

SEQ ID NO: 897930 - RNA, 22 nt, Human
uuucuauuuuaaaggcauaugg

SEQ ID NO: 897931 - RNA, 21 nt, Human
uguccaagguaugcacugggg

SEQ ID NO: 897932 - RNA, 22 nt, Human
ugagcagauggaggcuucugca

SEQ ID NO: 897933 - RNA, 22 nt, Human
ccuagggucaguguggcaggag

SEQ ID NO: 897934 - RNA, 22 nt, Human
uugguuuauuucuuccuaugag

SEQ ID NO: 897935 - RNA, 22 nt, Human
acauguaaaaggaacaugcaug

SEQ ID NO: 897936 - RNA, 22 nt, Human
aguuacauauaagaagacagac

SEQ ID NO: 897937 - RNA, 22 nt, Human
acagauaauacauugugcuaca

SEQ ID NO: 897938 - RNA, 21 nt, Human
uccaguugagacugaagaucu

SEQ ID NO: 897939 - RNA, 22 nt, Human
ccagagguccugugaugcugca

SEQ ID NO: 897940 - RNA, 21 nt, Human
aggucccagguuugggcagca

SEQ ID NO: 897941 - RNA, 18 nt, Human
uuucuuucugccuggggc

SEQ ID NO: 897942 - RNA, 17 nt, Human
cugcuggcuggggcuug

SEQ ID NO: 897943 - RNA, 22 nt, Human
cacauucaucaguguuguacug

SEQ ID NO: 897944 - RNA, 22 nt, Human
uaauauacuucccauaguuuga

SEQ ID NO: 897945 - RNA, 22 nt, Human
uugagaacuagcauggucuauc

SEQ ID NO: 897946 - RNA, 23 nt, Human
ucggugggcguggaggccgaggc

SEQ ID NO: 897947 - RNA, 22 nt, Human
uggaaucuguauguauguauaa

SEQ ID NO: 897948 - RNA, 22 nt, Human
uuauuagagugcuuugagaaag

SEQ ID NO: 897949 - RNA, 22 nt, Human
cagcagcagauucagcgucugg

SEQ ID NO: 897950 - RNA, 22 nt, Human
uucaacaaggcugucaaaaguu

SEQ ID NO: 897951 - RNA, 22 nt, Human
uuuuaaaggcuguaugaccaag

SEQ ID NO: 897952 - RNA, 22 nt, Human
acagcagagacacucaggaggc

SEQ ID NO: 897953 - RNA, 19 nt, Human
uggggaugcugaugaccaa

SEQ ID NO: 897954 - RNA, 22 nt, Human
ggagguggcagggaacauaauu

SEQ ID NO: 897955 - RNA, 22 nt, Human
uguauuaugauuguuguucaug

SEQ ID NO: 897956 - RNA, 22 nt, Human
ugacccuucugguuccuaccaa

SEQ ID NO: 897957 - RNA, 23 nt, Human
acaucagaguuaguucaaucagg

SEQ ID NO: 897958 - RNA, 22 nt, Human
ggcucagggaaugaggaagaau

SEQ ID NO: 897959 - RNA, 22 nt, Human
caggccaagccuccccagcucc

SEQ ID NO: 897960 - RNA, 22 nt, Human
cauuucuaagaaggcugcacau

SEQ ID NO: 897961 - RNA, 22 nt, Human
agcuucugcccguguuugcucu

SEQ ID NO: 897962 - RNA, 22 nt, Human
uuucuguauuuugucauaaccu

SEQ ID NO: 897963 - RNA, 22 nt, Human
uagaaucaagcaguagagcaga

SEQ ID NO: 897964 - RNA, 22 nt, Human
aaaguucuagaguugcaagaga

SEQ ID NO: 897965 - RNA, 22 nt, Human
cauggcuggccagugggagugg

SEQ ID NO: 897966 - RNA, 22 nt, Human
cccaggcacucuuggucauuuu

SEQ ID NO: 897967 - RNA, 18 nt, Human
aaggcacaggagaacauu

SEQ ID NO: 897968 - RNA, 22 nt, Human
ucuccaggcccacugauuuaua

SEQ ID NO: 897969 - RNA, 22 nt, Human
gccaguggucacugaggaagaa

SEQ ID NO: 897970 - RNA, 21 nt, Human
aguuuccucaucugcauagga

SEQ ID NO: 897971 - RNA, 22 nt, Human
ugcugaggcagaugucugugac

SEQ ID NO: 897972 - RNA, 22 nt, Human
ggcuucccuuuccgagaggaga

SEQ ID NO: 897973 - RNA, 22 nt, Human
ggagccagagcacuggggagcc

SEQ ID NO: 897974 - RNA, 22 nt, Human
ugcagcagcagggaggaggcuc

SEQ ID NO: 897975 - RNA, 18 nt, Human
uggagcugagggcaaugc

SEQ ID NO: 897976 - RNA, 23 nt, Human
gcccugcuccuggcugggaggga

SEQ ID NO: 897977 - RNA, 21 nt, Human
ucuagaagagguugagaauau

SEQ ID NO: 897978 - RNA, 22 nt, Human
uggagcugagagccaggcuggc

SEQ ID NO: 897979 - RNA, 22 nt, Human
ggcagcauuuagagcacagugu

SEQ ID NO: 897980 - RNA, 22 nt, Human
ccaagggaaaccgagaggcugg

SEQ ID NO: 897981 - RNA, 22 nt, Human
agggcagccaugagccuucagg

SEQ ID NO: 897982 - RNA, 22 nt, Human
acuaaaugcugcauaaaugcuu

SEQ ID NO: 897983 - RNA, 22 nt, Human
auguuguguuugacuguuaccc

SEQ ID NO: 897984 - RNA, 22 nt, Human
ugcugcaggcaauagaaaaccu

SEQ ID NO: 897985 - RNA, 22 nt, Human
ugggucagauugagccccuggu

SEQ ID NO: 897986 - RNA, 22 nt, Human
ugcaggaggauuuuguggagcu

SEQ ID NO: 897987 - RNA, 22 nt, Human
agccuggagcuugaguuaugag

SEQ ID NO: 897988 - RNA, 22 nt, Human
aaauguacgggaguagaauuag

SEQ ID NO: 897989 - RNA, 22 nt, Human
ucccagauucuucugugugggc

SEQ ID NO: 897990 - RNA, 18 nt, Human
ccaggccaugaaccucug

SEQ ID NO: 897991 - RNA, 22 nt, Human
aaaguuuuauucaagcauuagu

SEQ ID NO: 897992 - RNA, 22 nt, Human
ucaggaagucucaauuagcuac

SEQ ID NO: 897993 - RNA, 22 nt, Human
ucauugaacgaagagcuccauu

SEQ ID NO: 897994 - RNA, 22 nt, Human
agggcagcagcuccuccuagcu

SEQ ID NO: 897995 - RNA, 22 nt, Human
uauacaguaucuuuugaaggca

SEQ ID NO: 897996 - RNA, 22 nt, Human
cuguggcugaguuccuuauguu

SEQ ID NO: 897997 - RNA, 22 nt, Human
gccuggcuccuaaggacuggcu

SEQ ID NO: 897998 - RNA, 22 nt, Human
agcagggguaacagaaggaaag

SEQ ID NO: 897999 - RNA, 22 nt, Human
agucugucugucacuucugcag

SEQ ID NO: 898000 - RNA, 22 nt, Human
cauggaggccaggaaacagccu

SEQ ID NO: 898001 - RNA, 22 nt, Human
uggcagcaauagaaauauaauc

SEQ ID NO: 898002 - RNA, 22 nt, Human
caggcccauucuaggcuugcua

SEQ ID NO: 898003 - RNA, 22 nt, Human
gacccaggguuucugcacaggg

SEQ ID NO: 898004 - RNA, 22 nt, Human
uaaagugaaguucagaauggcu

SEQ ID NO: 898005 - RNA, 22 nt, Human
uaggaaguaaacuuucuucagc

SEQ ID NO: 898006 - RNA, 22 nt, Human
ucugucugguccaggaagaugu

SEQ ID NO: 898007 - RNA, 22 nt, Human
aucuaacugggcuauuuuauug

SEQ ID NO: 898008 - RNA, 22 nt, Human
uccaggcuugagaccaggcucu

SEQ ID NO: 898009 - RNA, 22 nt, Human
auaaagcuauuccucucuuuuu

SEQ ID NO: 898010 - RNA, 21 nt, Human
acagccaggaacaugaggggc

SEQ ID NO: 898011 - RNA, 22 nt, Human
gggccuggggugacguaccccu

SEQ ID NO: 898012 - RNA, 22 nt, Human
uuagcaaaccuggacuacagau

SEQ ID NO: 898013 - RNA, 22 nt, Human
agacaaauggaguaugagcaac

SEQ ID NO: 898014 - RNA, 22 nt, Human
acagaaauucaaacuggaauuu

SEQ ID NO: 898015 - RNA, 22 nt, Human
ucucucugcagcccgggacacu

SEQ ID NO: 898016 - RNA, 22 nt, Human
ucacaggcuggucuccgaggac

SEQ ID NO: 898017 - RNA, 22 nt, Human
acauuuaccuaguuaagucaau

SEQ ID NO: 898018 - RNA, 22 nt, Human
cacuacagaaucaaauacgggc

SEQ ID NO: 898019 - RNA, 22 nt, Human
acaaccaugucaguucaaacca

SEQ ID NO: 898020 - RNA, 22 nt, Human
uaagacacaaauaucuuuuaca

SEQ ID NO: 898021 - RNA, 22 nt, Human
augccuuauuguaaucuuucca

SEQ ID NO: 898022 - RNA, 22 nt, Human
caggucuccagcucagggucca

SEQ ID NO: 898023 - RNA, 22 nt, Human
ugugcacauucuaggacuagua

SEQ ID NO: 898024 - RNA, 22 nt, Human
uaauguuuagaagcagacagcu

SEQ ID NO: 898025 - RNA, 22 nt, Human
cuucagaaauaacaacaauuac

SEQ ID NO: 898026 - RNA, 22 nt, Human
uuaggaauuuauuccauuguug

SEQ ID NO: 898027 - RNA, 22 nt, Human
uuucauguuuauggaaaaugag

SEQ ID NO: 898028 - RNA, 18 nt, Human
ccacccagggggagagga

SEQ ID NO: 898029 - RNA, 21 nt, Human
ugcuggccaugugcugggcau

SEQ ID NO: 898030 - RNA, 22 nt, Human
gcaccuuauuuaaaugauguuu

SEQ ID NO: 898031 - RNA, 22 nt, Human
gaacaacuuugaaacaugaaga

SEQ ID NO: 898032 - RNA, 22 nt, Human
auaguaacuggcauguuuauga

SEQ ID NO: 898033 - RNA, 22 nt, Human
uguccugggaaugggaugcagu

SEQ ID NO: 898034 - RNA, 23 nt, Human
gucagugcuuuaguucaggaugg

SEQ ID NO: 898035 - RNA, 22 nt, Human
aucuagaaagccaggggccugc

SEQ ID NO: 898036 - RNA, 22 nt, Human
ucagcaggguuugacuucuaau

SEQ ID NO: 898037 - RNA, 22 nt, Human
acagggaaggcauccgcgaaug

SEQ ID NO: 898038 - RNA, 22 nt, Human
ggguggaggagaacaggcccca

SEQ ID NO: 898039 - RNA, 22 nt, Human
ugacuaauuauguuacuaauca

SEQ ID NO: 898040 - RNA, 20 nt, Human
ugugaggagcauggccgcug

SEQ ID NO: 898041 - RNA, 22 nt, Human
ggaaggggccuugagcaaacug

SEQ ID NO: 898042 - RNA, 22 nt, Human
auuggaaaugcuacaaguuaga

SEQ ID NO: 898043 - RNA, 22 nt, Human
gcagaggugugggaggggccac

SEQ ID NO: 898044 - RNA, 22 nt, Human
guguacaggaugacuguacuua

SEQ ID NO: 898045 - RNA, 22 nt, Human
ugggaguugggugggagacuuc

SEQ ID NO: 898046 - RNA, 22 nt, Human
aaaaguaauugugguuuuugcu

SEQ ID NO: 898047 - RNA, 22 nt, Human
gcccuguggacccaggaacucu

SEQ ID NO: 898048 - RNA, 22 nt, Human
aguuuucucacaucaaaaauga

SEQ ID NO: 898049 - RNA, 18 nt, Human
ggcuccgacgggccgugc

SEQ ID NO: 898050 - RNA, 22 nt, Human
uucaacaaacuguucacgaaug

SEQ ID NO: 898051 - RNA, 22 nt, Human
cuuuguucugcacacacagaca

SEQ ID NO: 898052 - RNA, 22 nt, Human
aaguuuuccuguguccaagaug

SEQ ID NO: 898053 - RNA, 23 nt, Human
ggccuggcccagggcccugauga

SEQ ID NO: 898054 - RNA, 22 nt, Human
ggcagccuccagggcacuggug

SEQ ID NO: 898055 - RNA, 18 nt, Human
ugaacuuuggugucucuc

SEQ ID NO: 898056 - RNA, 22 nt, Human
auucucaaagccagagucaacg

SEQ ID NO: 898057 - RNA, 21 nt, Human
cggagcugggcagggcauccc

SEQ ID NO: 898058 - RNA, 22 nt, Human
uuuaaaaggcagcuucuuuugu

SEQ ID NO: 898059 - RNA, 22 nt, Human
ucccugggguaucgcugaggca

SEQ ID NO: 898060 - RNA, 23 nt, Human
gggggcgugucauggagggccac

SEQ ID NO: 898061 - RNA, 22 nt, Human
uauugucugcaaagguuuauaa

SEQ ID NO: 898062 - RNA, 22 nt, Human
uaaaaucaccaaaagcaggugg

SEQ ID NO: 898063 - RNA, 20 nt, Human
ugugccuggcuuuguccuga

SEQ ID NO: 898064 - RNA, 22 nt, Human
ugauuucuuccuugucauuaga

SEQ ID NO: 898065 - RNA, 22 nt, Human
ccagagggcccuggucucagcu

SEQ ID NO: 898066 - RNA, 22 nt, Human
ccuuuauacuaaggcauacaau

SEQ ID NO: 898067 - RNA, 22 nt, Human
uggcugagugauauuugcaaag

SEQ ID NO: 898068 - RNA, 20 nt, Human
cugugcuccggguuccugga

SEQ ID NO: 898069 - RNA, 22 nt, Human
gagaauuacuguuuuuauaaca

SEQ ID NO: 898070 - RNA, 22 nt, Human
gcuucugcaggguccucgcugu

SEQ ID NO: 898071 - RNA, 22 nt, Human
caggcagaggaggccuucuccu

SEQ ID NO: 898072 - RNA, 18 nt, Human
auauguuaauuagguagg

SEQ ID NO: 898073 - RNA, 22 nt, Human
gagucuaaguagaaugugaaaa

SEQ ID NO: 898074 - RNA, 19 nt, Human
agcuaagacaagggacauc

SEQ ID NO: 898075 - RNA, 20 nt, Human
gggagaagggcugaugagag

SEQ ID NO: 898076 - RNA, 23 nt, Human
ugcaggguguuccugccuuugcu

SEQ ID NO: 898077 - RNA, 22 nt, Human
gucuugucaguguuggcagcuu

SEQ ID NO: 898078 - RNA, 22 nt, Human
uuuuaugagugucccucugugg

SEQ ID NO: 898079 - RNA, 22 nt, Human
uuggaaggcccugccuagcagg

SEQ ID NO: 898080 - RNA, 22 nt, Human
ucugaagagucuugcaagaaag

SEQ ID NO: 898081 - RNA, 22 nt, Human
gaaguucugggauuuccacagu

SEQ ID NO: 898082 - RNA, 20 nt, Human
guauaagauuucacacauua

SEQ ID NO: 898083 - RNA, 22 nt, Human
uuuguaacuuuagaauugaucc

SEQ ID NO: 898084 - RNA, 22 nt, Human
ggcuggcuuggugagcugucac

SEQ ID NO: 898085 - RNA, 22 nt, Human
agcuggugauggccuaagaagg

SEQ ID NO: 898086 - RNA, 22 nt, Human
cuggggcaucugacagauaaau

SEQ ID NO: 898087 - RNA, 21 nt, Human
cugcucuggggaccggcugug

SEQ ID NO: 898088 - RNA, 22 nt, Human
aaggcaaauguguucuuuuagu

SEQ ID NO: 898089 - RNA, 22 nt, Human
uguuuaaguucugcuccuuauu

SEQ ID NO: 898090 - RNA, 22 nt, Human
uggccagugucggaggccagga

SEQ ID NO: 898091 - RNA, 22 nt, Human
agguauucagaugaagugcuga

SEQ ID NO: 898092 - RNA, 22 nt, Human
ucucuguguccugaaaugaagg

SEQ ID NO: 898093 - RNA, 22 nt, Human
ccugaguggcaggguuugggcu

SEQ ID NO: 898094 - RNA, 22 nt, Human
gaaguucuuagucucauuugca

SEQ ID NO: 898095 - RNA, 22 nt, Human
uauuagcacaaagcaagguauu

SEQ ID NO: 898096 - RNA, 22 nt, Human
auucugucuaagcuggcuacgu

SEQ ID NO: 898097 - RNA, 23 nt, Human
cuucacaaucaaaaucaguucug

SEQ ID NO: 898098 - RNA, 22 nt, Human
uccugggcugcagggaagagca

SEQ ID NO: 898099 - RNA, 22 nt, Human
ugaaauguauauugccagugua

SEQ ID NO: 898100 - RNA, 22 nt, Human
agcccucugcuguucuagucuc

SEQ ID NO: 898101 - RNA, 22 nt, Human
ggacuggccggcgcugaggccc

SEQ ID NO: 898102 - RNA, 22 nt, Human
aguuuacacuuuugauucuuau

SEQ ID NO: 898103 - RNA, 19 nt, Human
cuuccuggaggagagccuc

SEQ ID NO: 898104 - RNA, 22 nt, Human
uaaggcuuuggucaccauggag

SEQ ID NO: 898105 - RNA, 22 nt, Human
ggcagaggaagcuggaaguggg

SEQ ID NO: 898106 - RNA, 22 nt, Human
augacagacagaagggauuuuu

SEQ ID NO: 898107 - RNA, 22 nt, Human
cuccagauuccguuuauucagg

SEQ ID NO: 898108 - RNA, 19 nt, Human
aaaaggagagaucagaguu

SEQ ID NO: 898109 - RNA, 22 nt, Human
ggcucuagagcugugcacacau

SEQ ID NO: 898110 - RNA, 22 nt, Human
uaaacuacccaugacaguuuca

SEQ ID NO: 898111 - RNA, 22 nt, Human
uagaagcagcaggaguaaaggc

SEQ ID NO: 898112 - RNA, 22 nt, Human
ccagggcugcugugggacucca

SEQ ID NO: 898113 - RNA, 22 nt, Human
agugucuggugagggcucucuc

SEQ ID NO: 898114 - RNA, 22 nt, Human
auggcagcuuugaauuucuuga

SEQ ID NO: 898115 - RNA, 22 nt, Human
cccuucuaguccauucuucaca

SEQ ID NO: 898116 - RNA, 22 nt, Human
cuuggggcagcccaggcugagc

SEQ ID NO: 898117 - RNA, 19 nt, Human
ugaagagcugucaaaagug

SEQ ID NO: 898118 - RNA, 20 nt, Human
aaauccaguguguauuuuac

SEQ ID NO: 898119 - RNA, 22 nt, Human
ugacaauugugggcaguuugug

SEQ ID NO: 898120 - RNA, 22 nt, Human
cuucacuugcucaucaugcuau

SEQ ID NO: 898121 - RNA, 22 nt, Human
uccuuuuugguccaaggugacc

SEQ ID NO: 898122 - RNA, 22 nt, Human
cccagaggcugaguugggagca

SEQ ID NO: 898123 - RNA, 22 nt, Human
uagaaaugucgucuccacauuu

SEQ ID NO: 898124 - RNA, 22 nt, Human
gcaccaggaggcccuucucauc

SEQ ID NO: 898125 - RNA, 22 nt, Human
ggcaagaaccucaauuaccuuu

SEQ ID NO: 898126 - RNA, 22 nt, Human
ucucacaguaugaauuguucac

SEQ ID NO: 898127 - RNA, 22 nt, Human
gagggcaggggucuugcacggu

SEQ ID NO: 898128 - RNA, 22 nt, Human
uccaggaguuugaccugugggc

SEQ ID NO: 898129 - RNA, 22 nt, Human
uuaaagagaacucaaugaauga

SEQ ID NO: 898130 - RNA, 22 nt, Human
ugugucuguguauacacggcau

SEQ ID NO: 898131 - RNA, 22 nt, Human
ugucucugcugcaccuucuggg

SEQ ID NO: 898132 - RNA, 22 nt, Human
gaaggcaacaccaggaugcacu

SEQ ID NO: 898133 - RNA, 22 nt, Human
auuaauugggaacuuguugaaa

SEQ ID NO: 898134 - RNA, 22 nt, Human
gugucagauguccagggcagca

SEQ ID NO: 898135 - RNA, 22 nt, Human
cuucuuaaauauuuggcugacu

SEQ ID NO: 898136 - RNA, 22 nt, Human
gaggccacaguccugaggcauc

SEQ ID NO: 898137 - RNA, 22 nt, Human
ucauuuacuucuaugacaacau

SEQ ID NO: 898138 - RNA, 22 nt, Human
ggaagcagccugaagccaaggg

SEQ ID NO: 898139 - RNA, 22 nt, Human
caggcuggaguacaauugugug

SEQ ID NO: 898140 - RNA, 22 nt, Human
uuggcagauuugucaguaagcu

SEQ ID NO: 898141 - RNA, 22 nt, Human
aaugaacuguguuaacugaaua

SEQ ID NO: 898142 - RNA, 22 nt, Human
aaagaugugccuguuucauagu

SEQ ID NO: 898143 - RNA, 22 nt, Human
ggaaucagaugaggggcagagc

SEQ ID NO: 898144 - RNA, 22 nt, Human
aagugcuuuacaaaugucuguu

SEQ ID NO: 898145 - RNA, 22 nt, Human
auauucuuauccuuuucucugu

SEQ ID NO: 898146 - RNA, 22 nt, Human
ccaguaauggaaauagcaguuc

SEQ ID NO: 898147 - RNA, 22 nt, Human
gccucagguaaaacuugaguuu

SEQ ID NO: 898148 - RNA, 22 nt, Human
gggcgcaucaccugaggucagg

SEQ ID NO: 898149 - RNA, 22 nt, Human
acuggcuuggcaggaggaagau

SEQ ID NO: 898150 - RNA, 22 nt, Human
uuucagaaacgauuaugaacac

SEQ ID NO: 898151 - RNA, 22 nt, Human
caaauguuaagacaggaucaag

SEQ ID NO: 898152 - RNA, 22 nt, Human
agaaaauuuaaagagacacaca

SEQ ID NO: 898153 - RNA, 22 nt, Human
cugagcuguggaauaaacacug

SEQ ID NO: 898154 - RNA, 22 nt, Human
agggcuggcaucucuaaugcug

SEQ ID NO: 898155 - RNA, 22 nt, Human
uuagcauuucauuucaagagga

SEQ ID NO: 898156 - RNA, 22 nt, Human
ucuauagaucaguaaauaucuc

SEQ ID NO: 898157 - RNA, 22 nt, Human
cacauuuccuuggccuuuaauu

SEQ ID NO: 898158 - RNA, 22 nt, Human
uuacacauugcagaucaaaaug

SEQ ID NO: 898159 - RNA, 22 nt, Human
uuuucuucggugcuggguugau

SEQ ID NO: 898160 - RNA, 22 nt, Human
ccuuuagaugaucucuuggaca

SEQ ID NO: 898161 - RNA, 22 nt, Human
uuggaaggagucaaccagcuga

SEQ ID NO: 898162 - RNA, 22 nt, Human
aggcauggguagaagagaagcc

SEQ ID NO: 898163 - RNA, 22 nt, Human
aguaaacaggcaugauaguguu

SEQ ID NO: 898164 - RNA, 22 nt, Human
gagcagcaucuccggcuuaaag

SEQ ID NO: 898165 - RNA, 22 nt, Human
uccuggguggcucugcccggcu

SEQ ID NO: 898166 - RNA, 22 nt, Human
cugugugccuccugugaucagg

SEQ ID NO: 898167 - RNA, 22 nt, Human
uuguuucaaauauuucagaaua

SEQ ID NO: 898168 - RNA, 22 nt, Human
aaaaccagacacuguuucuggg

SEQ ID NO: 898169 - RNA, 22 nt, Human
uaaugagucauuccugaaugcu

SEQ ID NO: 898170 - RNA, 22 nt, Human
agucuccacaacagcccugaua

SEQ ID NO: 898171 - RNA, 22 nt, Human
acuccugccacacagaugcugu

SEQ ID NO: 898172 - RNA, 23 nt, Human
acuuuucaauuagcuaugcuuaa

SEQ ID NO: 898173 - RNA, 22 nt, Human
uuacagauacauuucuuuuguu

SEQ ID NO: 898174 - RNA, 19 nt, Human
uaggcccuagcucugcagu

SEQ ID NO: 898175 - RNA, 22 nt, Human
ugggaaugcaaggaaagcuguu

SEQ ID NO: 898176 - RNA, 22 nt, Human
aaagaguuccaagucauuuuau

SEQ ID NO: 898177 - RNA, 22 nt, Human
uuuccuuuccaaaauucugccu

SEQ ID NO: 898178 - RNA, 22 nt, Human
cagacagacagccguggccacc

SEQ ID NO: 898179 - RNA, 22 nt, Human
aacacuguggucuuuucaguaa

SEQ ID NO: 898180 - RNA, 22 nt, Human
auucagugugagguuuucaagu

SEQ ID NO: 898181 - RNA, 22 nt, Human
uauguacaauuuguuguauguc

SEQ ID NO: 898182 - RNA, 22 nt, Human
cugggcagccucacacaauguu

SEQ ID NO: 898183 - RNA, 22 nt, Human
aaacucuaggacgaugggauag

SEQ ID NO: 898184 - RNA, 22 nt, Human
ucaguguguucaauuggauagg

SEQ ID NO: 898185 - RNA, 23 nt, Human
cccagcagagaugaggagggguc

SEQ ID NO: 898186 - RNA, 22 nt, Human
uggaaugucuugauauagaggu

SEQ ID NO: 898187 - RNA, 22 nt, Human
caagggaagaggacagggaccu

SEQ ID NO: 898188 - RNA, 22 nt, Human
aauguauuauacauaauuugug

SEQ ID NO: 898189 - RNA, 23 nt, Human
ccugcucaggcgugugcccugcu

SEQ ID NO: 898190 - RNA, 22 nt, Human
ccauaaucguguguuaaauaau

SEQ ID NO: 898191 - RNA, 22 nt, Human
auucagggaggaaaggggccuc

SEQ ID NO: 898192 - RNA, 22 nt, Human
ggcccugggaugcucagcagug

SEQ ID NO: 898193 - RNA, 22 nt, Human
uuauuuaaaagugguaagauuc

SEQ ID NO: 898194 - RNA, 22 nt, Human
auaauguaaggcucccuacagu

SEQ ID NO: 898195 - RNA, 22 nt, Human
aagauguaaaggcaauauaaag

SEQ ID NO: 898196 - RNA, 22 nt, Human
caugcucugcagcagaccugug

SEQ ID NO: 898197 - RNA, 22 nt, Human
uggaggaugagugugggcucug

SEQ ID NO: 898198 - RNA, 22 nt, Human
ccucuggcauagcaaguggccu

SEQ ID NO: 898199 - RNA, 22 nt, Human
ucucccacagccgugcuucaag

SEQ ID NO: 898200 - RNA, 22 nt, Human
agauguuuuguguauuucauca

SEQ ID NO: 898201 - RNA, 22 nt, Human
cuucucucugcauaggcauggg

SEQ ID NO: 898202 - RNA, 22 nt, Human
ggucagucucucccgaguguug

SEQ ID NO: 898203 - RNA, 22 nt, Human
guagaauauaugguuaguauug

SEQ ID NO: 898204 - RNA, 19 nt, Human
ugcacuugagauguuugua

SEQ ID NO: 898205 - RNA, 22 nt, Human
aaagcuggccucucaggcuuua

SEQ ID NO: 898206 - RNA, 19 nt, Human
uagcccagagccuggcuac

SEQ ID NO: 898207 - RNA, 22 nt, Human
cauguguugucucauuuaaucc

SEQ ID NO: 898208 - RNA, 22 nt, Human
cagggaugggauggagucaguu

SEQ ID NO: 898209 - RNA, 21 nt, Human
ugcauucuagcagcucugagg

SEQ ID NO: 898210 - RNA, 23 nt, Human
aaauggccaagguuaaaaauaca

SEQ ID NO: 898211 - RNA, 22 nt, Human
cccagccuuccacccuggacua

SEQ ID NO: 898212 - RNA, 22 nt, Human
ucuggcagagucagugcacaca

SEQ ID NO: 898213 - RNA, 22 nt, Human
caaauagacuucaaucucuuga

SEQ ID NO: 898214 - RNA, 22 nt, Human
gucucauaugauauaaaugcag

SEQ ID NO: 898215 - RNA, 22 nt, Human
gucaacuuuaagaugaucuuuu

SEQ ID NO: 898216 - RNA, 22 nt, Human
aaacaguuacgagcgcagaccu

SEQ ID NO: 898217 - RNA, 23 nt, Human
uguaaaagcauuugucagccugg

SEQ ID NO: 898218 - RNA, 22 nt, Human
ggcagcaacacgagugagcuaa

SEQ ID NO: 898219 - RNA, 22 nt, Human
ccagagccuaagaucugauccu

SEQ ID NO: 898220 - RNA, 22 nt, Human
gugugcagugagcaaaagaucu

SEQ ID NO: 898221 - RNA, 22 nt, Human
gcuuccaguccucagaggcugg

SEQ ID NO: 898222 - RNA, 22 nt, Human
gggaagugugguuucuuuacag

SEQ ID NO: 898223 - RNA, 22 nt, Human
agucacagaaacccaggugugg

SEQ ID NO: 898224 - RNA, 22 nt, Human
gacagugauuaguuacuauaaa

SEQ ID NO: 898225 - RNA, 22 nt, Human
gugucaaugagguuuauuuuug

SEQ ID NO: 898226 - RNA, 22 nt, Human
aagggaggggauguaagccugg

SEQ ID NO: 898227 - RNA, 22 nt, Human
agaagccuguugagagggccgu

SEQ ID NO: 898228 - RNA, 22 nt, Human
uggacaggcuccuagggguucc

SEQ ID NO: 898229 - RNA, 22 nt, Human
uaucuugccuuuaacugcucau

SEQ ID NO: 898230 - RNA, 18 nt, Human
aggcaggugcuaauauuu

SEQ ID NO: 898231 - RNA, 22 nt, Human
gucuucugcaacugcaccugcc

SEQ ID NO: 898232 - RNA, 22 nt, Human
caaacugaacacgaaagucuuu

SEQ ID NO: 898233 - RNA, 22 nt, Human
uauccaaaggaacaaucacagc

SEQ ID NO: 898234 - RNA, 22 nt, Human
ugggaagaggcgggaggcuguu

SEQ ID NO: 898235 - RNA, 21 nt, Human
auguaggguuugccuucucua

SEQ ID NO: 898236 - RNA, 22 nt, Human
ucaaagaucagaugguuguagg

SEQ ID NO: 898237 - RNA, 22 nt, Human
uugguguacaucuccccuucau

SEQ ID NO: 898238 - RNA, 22 nt, Human
uugguccugcagaggggucugg

SEQ ID NO: 898239 - RNA, 22 nt, Human
augcuacacuauuugcugagca

SEQ ID NO: 898240 - RNA, 22 nt, Human
augaaacugggauaacuauagc

SEQ ID NO: 898241 - RNA, 22 nt, Human
cagugaaguguggacgucacca

SEQ ID NO: 898242 - RNA, 22 nt, Human
ucagccucucugaguccagacc

SEQ ID NO: 898243 - RNA, 22 nt, Human
guguccaggggguaucccagcu

SEQ ID NO: 898244 - RNA, 22 nt, Human
ggguccagcgacagcaggcuca

SEQ ID NO: 898245 - RNA, 22 nt, Human
ucuauauuccagauacagauua

SEQ ID NO: 898246 - RNA, 22 nt, Human
cacacauauugucccuagugug

SEQ ID NO: 898247 - RNA, 22 nt, Human
aaauaaacugaagcacagagag

SEQ ID NO: 898248 - RNA, 17 nt, Human
ggcagcugugugcaugc

SEQ ID NO: 898249 - RNA, 22 nt, Human
agucaguggauuuaccaugcgu

SEQ ID NO: 898250 - RNA, 22 nt, Human
agucuguguaccuuuggccuuc

SEQ ID NO: 898251 - RNA, 22 nt, Human
aagcagcuucccuggcuccugg

SEQ ID NO: 898252 - RNA, 22 nt, Human
cuacugaguccuucagcugcca

SEQ ID NO: 898253 - RNA, 22 nt, Human
auacaucauuuaugaugugugu

SEQ ID NO: 898254 - RNA, 22 nt, Human
uagcagcaaaaugaccuucuaa

SEQ ID NO: 898255 - RNA, 22 nt, Human
guauuuuucauuccaagugaga

SEQ ID NO: 898256 - RNA, 22 nt, Human
agaaacagaagggaaagcuuuu

SEQ ID NO: 898257 - RNA, 22 nt, Human
auugacacaaugggauguaagg

SEQ ID NO: 898258 - RNA, 22 nt, Human
gcaggcucccuugcagagcagg

SEQ ID NO: 898259 - RNA, 22 nt, Human
gugugcauguggaagcauguau

SEQ ID NO: 898260 - RNA, 22 nt, Human
auaaaccuaugcuaagcugugg

SEQ ID NO: 898261 - RNA, 22 nt, Human
guuugccugccgacgcucucau

SEQ ID NO: 898262 - RNA, 22 nt, Human
gagacacaagaagacaugcaca

SEQ ID NO: 898263 - RNA, 22 nt, Human
gagccagguuggaggcugcagu

SEQ ID NO: 898264 - RNA, 22 nt, Human
ucaggcuguuccuguccaaaau

SEQ ID NO: 898265 - RNA, 22 nt, Human
ccaggcaggcgauggugcagug

SEQ ID NO: 898266 - RNA, 22 nt, Human
uuuuaccacugggugacaugga

SEQ ID NO: 898267 - RNA, 22 nt, Human
uaucucuuucauuuuagaguca

SEQ ID NO: 898268 - RNA, 22 nt, Human
uacaaguaaauuguagauacca

SEQ ID NO: 898269 - RNA, 22 nt, Human
aggcugcuucagcugcagggag

SEQ ID NO: 898270 - RNA, 18 nt, Human
gguggcaggucagaugcc

SEQ ID NO: 898271 - RNA, 22 nt, Human
aaggaguggggcauaucacaga

SEQ ID NO: 898272 - RNA, 22 nt, Human
cacagggaaccaaggcugggcc

SEQ ID NO: 898273 - RNA, 22 nt, Human
acuuucucaaaucagacuuuaa

SEQ ID NO: 898274 - RNA, 22 nt, Human
cucacugucuguacuagcugau

SEQ ID NO: 898275 - RNA, 22 nt, Human
uagacacaucaaguauaguuaa

SEQ ID NO: 898276 - RNA, 21 nt, Human
cucuucaguggugagcucuuc

SEQ ID NO: 898277 - RNA, 22 nt, Human
ucccuguggcuaagacaugaca

SEQ ID NO: 898278 - RNA, 22 nt, Human
aacauuugugaaguacuuagau

SEQ ID NO: 898279 - RNA, 22 nt, Human
ugacccugagagcugaauggcu

SEQ ID NO: 898280 - RNA, 22 nt, Human
ugucccaguuuugcagguuaga

SEQ ID NO: 898281 - RNA, 19 nt, Human
uacaagcuuaaaguaaugu

SEQ ID NO: 898282 - RNA, 22 nt, Human
ccuaccaguaggaggccagaga

SEQ ID NO: 898283 - RNA, 22 nt, Human
ucaaacuguuuacagugagaua

SEQ ID NO: 898284 - RNA, 22 nt, Human
ucugucacccaggcuggagugc

SEQ ID NO: 898285 - RNA, 22 nt, Human
ugcagggccagacuggguugga

SEQ ID NO: 898286 - RNA, 22 nt, Human
gaaaggaacuugugagugggag

SEQ ID NO: 898287 - RNA, 22 nt, Human
agaaucaauuagauucuaugag

SEQ ID NO: 898288 - RNA, 22 nt, Human
ugagagccuguguucaaaugcc

SEQ ID NO: 898289 - RNA, 22 nt, Human
uuauauaucuugauuuguucca

SEQ ID NO: 898290 - RNA, 22 nt, Human
aagcagccuggcaugaugcuuu

SEQ ID NO: 898291 - RNA, 19 nt, Human
agccacagaacuugcagga

SEQ ID NO: 898292 - RNA, 22 nt, Human
guuuaaauaauuaggggccugu

SEQ ID NO: 898293 - RNA, 22 nt, Human
aagaacauuuuguagaaugaca

SEQ ID NO: 898294 - RNA, 22 nt, Human
cugugucuucaauguacuggga

SEQ ID NO: 898295 - RNA, 22 nt, Human
agcaggcagccauuuggaaggc

SEQ ID NO: 898296 - RNA, 22 nt, Human
ucucaggagccacagcgggagu

SEQ ID NO: 898297 - RNA, 22 nt, Human
cccuuucuuccgugacuucugc

SEQ ID NO: 898298 - RNA, 22 nt, Human
cugaaggcuaaaauggacugaa

SEQ ID NO: 898299 - RNA, 21 nt, Human
acagaguaguugaaacagaga

SEQ ID NO: 898300 - RNA, 22 nt, Human
aaguuugaugaguuucuggagg

SEQ ID NO: 898301 - RNA, 22 nt, Human
ugacccuuggaguaggauguau

SEQ ID NO: 898302 - RNA, 22 nt, Human
auuuggucuguaauuacaugga

SEQ ID NO: 898303 - RNA, 22 nt, Human
ccagaggaguugaggcuuuggg

SEQ ID NO: 898304 - RNA, 22 nt, Human
ucucacacuauuuauucugcuu

SEQ ID NO: 898305 - RNA, 22 nt, Human
gcucugaggcugugaggugcug

SEQ ID NO: 898306 - RNA, 16 nt, Human
gaaggagauucagaaa

SEQ ID NO: 898307 - RNA, 22 nt, Human
gcccagcaaggaccaagggccg

SEQ ID NO: 898308 - RNA, 22 nt, Human
uuccagaggcuucagggaagaa

SEQ ID NO: 898309 - RNA, 22 nt, Human
acaguggaagaagcacugaacu

SEQ ID NO: 898310 - RNA, 22 nt, Human
aggggcuggaguucgagguuac

SEQ ID NO: 898311 - RNA, 22 nt, Human
aacuuugagucauugccucuuu

SEQ ID NO: 898312 - RNA, 22 nt, Human
acacauguacagauuaguauuu

SEQ ID NO: 898313 - RNA, 22 nt, Human
uucuaguugagggagacaaaua

SEQ ID NO: 898314 - RNA, 22 nt, Human
ccucuggguuaguuuagggagc

SEQ ID NO: 898315 - RNA, 22 nt, Human
gcuguucuguccccauggguaa

SEQ ID NO: 898316 - RNA, 22 nt, Human
uaaaguucuggugagagguaag

SEQ ID NO: 898317 - RNA, 22 nt, Human
gacagcaucuguguggcaggag

SEQ ID NO: 898318 - RNA, 22 nt, Human
ccggaaacuccuuugagagccu

SEQ ID NO: 898319 - RNA, 22 nt, Human
ccugcuucagggaugauggcac

SEQ ID NO: 898320 - RNA, 22 nt, Human
aggcucaggugccucauucaca

SEQ ID NO: 898321 - RNA, 22 nt, Human
aaaugugacagaugcaguacag

SEQ ID NO: 898322 - RNA, 22 nt, Human
agacacagguguaauuucugcu

SEQ ID NO: 898323 - RNA, 22 nt, Human
uucacagacauugcagacugaa

SEQ ID NO: 898324 - RNA, 17 nt, Human
cacuuuguugcuguggg

SEQ ID NO: 898325 - RNA, 22 nt, Human
aaaagcagagacucuggagcua

SEQ ID NO: 898326 - RNA, 22 nt, Human
gccagccugugcuuggccaggc

SEQ ID NO: 898327 - RNA, 22 nt, Human
uagagaaacagaaccaacaggg

SEQ ID NO: 898328 - RNA, 22 nt, Human
ggcauuuaauccaucugauuga

SEQ ID NO: 898329 - RNA, 22 nt, Human
uuuccuuuaugacaucaccacu

SEQ ID NO: 898330 - RNA, 22 nt, Human
ggaaaaggccacagggacacau

SEQ ID NO: 898331 - RNA, 22 nt, Human
agcuucuguucaucuuccaggc

SEQ ID NO: 898332 - RNA, 21 nt, Human
cccuucuuacucaagcucauu

SEQ ID NO: 898333 - RNA, 19 nt, Human
cugugcccuaugacuugua

SEQ ID NO: 898334 - RNA, 22 nt, Human
agucucuaggaucagacaccca

SEQ ID NO: 898335 - RNA, 22 nt, Human
agugcauaaaggaaaaacugaa

SEQ ID NO: 898336 - RNA, 22 nt, Human
agugcuuugagcguuugaaaag

SEQ ID NO: 898337 - RNA, 22 nt, Human
ucuguugcauaugcugcugggu

SEQ ID NO: 898338 - RNA, 22 nt, Human
agacuguagcuucugucuugag

SEQ ID NO: 898339 - RNA, 22 nt, Human
gugcucuaggaccuuagaagug

SEQ ID NO: 898340 - RNA, 22 nt, Human
guauauguaugcguauacacac

SEQ ID NO: 898341 - RNA, 22 nt, Human
uuucaggaucaaaugaaaucgu

SEQ ID NO: 898342 - RNA, 22 nt, Human
ucaaucaaagcacugggcuuug

SEQ ID NO: 898343 - RNA, 22 nt, Human
gaaauguuugggaggagucaac

SEQ ID NO: 898344 - RNA, 22 nt, Human
cagcuauuuguaggaaaacugu

SEQ ID NO: 898345 - RNA, 22 nt, Human
auacugaaggcauucagauaac

SEQ ID NO: 898346 - RNA, 22 nt, Human
uuuuguuguaauauaccuaucc

SEQ ID NO: 898347 - RNA, 22 nt, Human
cacaggaagagguauacaauuc

SEQ ID NO: 898348 - RNA, 22 nt, Human
uuggucuguguuacaucauuua

SEQ ID NO: 898349 - RNA, 22 nt, Human
agggacuauuuacccaucucac

SEQ ID NO: 898350 - RNA, 17 nt, Human
uguaacaacuccuauua

SEQ ID NO: 898351 - RNA, 22 nt, Human
ucauucuuuaccaaguugucac

SEQ ID NO: 898352 - RNA, 22 nt, Human
ucacaguucaacuaguucagau

SEQ ID NO: 898353 - RNA, 23 nt, Human
cucuccaccuucccacccaggga

SEQ ID NO: 898354 - RNA, 22 nt, Human
gaggcauuaaagggaaucuucu

SEQ ID NO: 898355 - RNA, 22 nt, Human
uuugaauaaucacugggcauua

SEQ ID NO: 898356 - RNA, 22 nt, Human
gaugcaaaccuuacauggaccu

SEQ ID NO: 898357 - RNA, 22 nt, Human
ucccagaacccugccagguccu

SEQ ID NO: 898358 - RNA, 22 nt, Human
agaaaguuuguuuuuauccaua

SEQ ID NO: 898359 - RNA, 22 nt, Human
ugcuagguaagaagggggcucc

SEQ ID NO: 898360 - RNA, 22 nt, Human
caaauacuuuuagccuauugag

SEQ ID NO: 898361 - RNA, 22 nt, Human
acagauggcacuuuuuaggacu

SEQ ID NO: 898362 - RNA, 17 nt, Human
ggcuucagggagcuggg

SEQ ID NO: 898363 - RNA, 22 nt, Human
agugcuuuccuucuugugacau

SEQ ID NO: 898364 - RNA, 22 nt, Human
uuacuuuggguccugcuuauaa

SEQ ID NO: 898365 - RNA, 22 nt, Human
cugugagggccagagucagggc

SEQ ID NO: 898366 - RNA, 18 nt, Human
aaacuguauuucuuucua

SEQ ID NO: 898367 - RNA, 22 nt, Human
acaggguggggauggugagcuu

SEQ ID NO: 898368 - RNA, 22 nt, Human
ucagucuccuuuccucuagaca

SEQ ID NO: 898369 - RNA, 22 nt, Human
gaggcccucuugccacaaugaa

SEQ ID NO: 898370 - RNA, 22 nt, Human
guuagcaaaauguuuuugaggc

SEQ ID NO: 898371 - RNA, 22 nt, Human
uucucucuguuauggauuuuac

SEQ ID NO: 898372 - RNA, 22 nt, Human
auuuggucuccauacugguuag

SEQ ID NO: 898373 - RNA, 22 nt, Human
agaugauauacuacauggcuuc

SEQ ID NO: 898374 - RNA, 22 nt, Human
ugaaacuuauucaguuucuacc

SEQ ID NO: 898375 - RNA, 22 nt, Human
cuguggcaggaagggacuagca

SEQ ID NO: 898376 - RNA, 22 nt, Human
uagcugccuaugugauaagaga

SEQ ID NO: 898377 - RNA, 23 nt, Human
uguaacuuugggcauguugcuuc

SEQ ID NO: 898378 - RNA, 22 nt, Human
uuacugaagguggauagugagu

SEQ ID NO: 898379 - RNA, 22 nt, Human
ugggaggagcccucugggaagg

SEQ ID NO: 898380 - RNA, 22 nt, Human
aacaggggugggugcuacugga

SEQ ID NO: 898381 - RNA, 22 nt, Human
aguuucacaugcauggaugugu

SEQ ID NO: 898382 - RNA, 22 nt, Human
cacaucauucaauggugauauu

SEQ ID NO: 898383 - RNA, 22 nt, Human
cugggaagauggugacagaauu

SEQ ID NO: 898384 - RNA, 22 nt, Human
acaggaaguuuggaaagccuca

SEQ ID NO: 898385 - RNA, 22 nt, Human
aggaagcucggagagggcaaau

SEQ ID NO: 898386 - RNA, 20 nt, Human
agcagauagcgggagaguuu

SEQ ID NO: 898387 - RNA, 22 nt, Human
uggcagucgaucauauucagca

SEQ ID NO: 898388 - RNA, 22 nt, Human
ugcaggcucacccuggagcuga

SEQ ID NO: 898389 - RNA, 22 nt, Human
ggcuuuauguuuuucauguggu

SEQ ID NO: 898390 - RNA, 22 nt, Human
gagacacaaacacauuuagagg

SEQ ID NO: 898391 - RNA, 17 nt, Human
aaacuggggucaggagc

SEQ ID NO: 898392 - RNA, 22 nt, Human
accucucugggccugcuuccug

SEQ ID NO: 898393 - RNA, 22 nt, Human
cacuuugauuugugaugugaga

SEQ ID NO: 898394 - RNA, 22 nt, Human
auuucucaucaagugccaacuc

SEQ ID NO: 898395 - RNA, 22 nt, Human
gcucagagggaacaaggggcug

SEQ ID NO: 898396 - RNA, 21 nt, Human
aaguagaagggagaaggguua

SEQ ID NO: 898397 - RNA, 22 nt, Human
ggcauuuaggaucuuuaguuga

SEQ ID NO: 898398 - RNA, 22 nt, Human
ucaagcagcagaucaagagcua

SEQ ID NO: 898399 - RNA, 22 nt, Human
uuggaauagauuuguuagaaaa

SEQ ID NO: 898400 - RNA, 22 nt, Human
cugcacagcuggccagggagag

SEQ ID NO: 898401 - RNA, 18 nt, Human
ccucaggggaccuggcag

SEQ ID NO: 898402 - RNA, 22 nt, Human
uuaaaaaccaucuuccuuuccu

SEQ ID NO: 898403 - RNA, 22 nt, Human
uacaaagcuacucgagggcagg

SEQ ID NO: 898404 - RNA, 19 nt, Human
gggaaauucacuugcuucc

SEQ ID NO: 898405 - RNA, 22 nt, Human
ugaaaaggaguccuuguuuuca

SEQ ID NO: 898406 - RNA, 22 nt, Human
ugagaaaacaguuuguaauaau

SEQ ID NO: 898407 - RNA, 22 nt, Human
ucagaaagguucuauguuuuac

SEQ ID NO: 898408 - RNA, 22 nt, Human
accaguggaugaaugcuggacc

SEQ ID NO: 898409 - RNA, 22 nt, Human
aacagugucugugguuaaaggu

SEQ ID NO: 898410 - RNA, 18 nt, Human
cagagcaguaugaauguu

SEQ ID NO: 898411 - RNA, 22 nt, Human
ugcuuauucuuuccacaauuca

SEQ ID NO: 898412 - RNA, 22 nt, Human
uuugcauaggauggacauuuua

SEQ ID NO: 898413 - RNA, 22 nt, Human
cucuuuaaaguaaaauuugucu

SEQ ID NO: 898414 - RNA, 21 nt, Human
agacacagggguugcuggggu

SEQ ID NO: 898415 - RNA, 22 nt, Human
acaaaggcauagugaauguuuu

SEQ ID NO: 898416 - RNA, 22 nt, Human
agccuggacagcuacggagaac

SEQ ID NO: 898417 - RNA, 22 nt, Human
cucaggaguaguucagcagcug

SEQ ID NO: 898418 - RNA, 22 nt, Human
aagacauuggcauugacuguaa

SEQ ID NO: 898419 - RNA, 22 nt, Human
ucugucacugagcucaggauuc

SEQ ID NO: 898420 - RNA, 22 nt, Human
uuguuggaaaugagaggcuagg

SEQ ID NO: 898421 - RNA, 22 nt, Human
guggcagcaaaugccuggacua

SEQ ID NO: 898422 - RNA, 22 nt, Human
uuucuggacagcaagaucaguu

SEQ ID NO: 898423 - RNA, 21 nt, Human
uucaaaguuugccuaaagauu

SEQ ID NO: 898424 - RNA, 22 nt, Human
cugcagcuuuggaaaccuguuu

SEQ ID NO: 898425 - RNA, 22 nt, Human
cucagagcacuuuugaaagcuc

SEQ ID NO: 898426 - RNA, 22 nt, Human
gggaggacgguccagggcaaag

SEQ ID NO: 898427 - RNA, 22 nt, Human
uaccugaaguaacaaugaauau

SEQ ID NO: 898428 - RNA, 22 nt, Human
cuguugauuagaauuucacauc

SEQ ID NO: 898429 - RNA, 17 nt, Human
ccucacagggaccagac

SEQ ID NO: 898430 - RNA, 22 nt, Human
uugcugauucaugauuugagaa

SEQ ID NO: 898431 - RNA, 19 nt, Human
acagggcagcaauaggaua

SEQ ID NO: 898432 - RNA, 22 nt, Human
aacuuuacacugcuuuacauga

SEQ ID NO: 898433 - RNA, 22 nt, Human
uuccugggggcagcagucuuga

SEQ ID NO: 898434 - RNA, 22 nt, Human
aucuagaaaaggugacuaaaau

SEQ ID NO: 898435 - RNA, 22 nt, Human
acauaacaugucaaucacccga

SEQ ID NO: 898436 - RNA, 22 nt, Human
ccaggcuggaaucaauauucug

SEQ ID NO: 898437 - RNA, 22 nt, Human
uuuuuccuagcgauuugucagc

SEQ ID NO: 898438 - RNA, 21 nt, Human
ugagcaggagucaugggaaug

SEQ ID NO: 898439 - RNA, 22 nt, Human
ccccaggagaaaucuuaaacua

SEQ ID NO: 898440 - RNA, 22 nt, Human
auacaaguuaaugagaaugaca

SEQ ID NO: 898441 - RNA, 22 nt, Human
gaggcugggaaguccaauauca

SEQ ID NO: 898442 - RNA, 22 nt, Human
uggcagaguaggauggcccugu

SEQ ID NO: 898443 - RNA, 21 nt, Human
acagauuuuauaucucugcug

SEQ ID NO: 898444 - RNA, 22 nt, Human
ugauuuccaugaagcugaaggc

SEQ ID NO: 898445 - RNA, 22 nt, Human
auaaagucaaggcauuuuauga

SEQ ID NO: 898446 - RNA, 22 nt, Human
guggauggcuaguugagaaggg

SEQ ID NO: 898447 - RNA, 22 nt, Human
gucugucuguuguugagaagca

SEQ ID NO: 898448 - RNA, 21 nt, Human
gauugaaaccauggcagugag

SEQ ID NO: 898449 - RNA, 22 nt, Human
cagccaggccuggugaccaaag

SEQ ID NO: 898450 - RNA, 22 nt, Human
ccagagccuggcaucugcauaa

SEQ ID NO: 898451 - RNA, 22 nt, Human
cagcugugagagugcauugaag

SEQ ID NO: 898452 - RNA, 22 nt, Human
uaucaacauuaauauuuucugg

SEQ ID NO: 898453 - RNA, 22 nt, Human
aggcugagugcuccccuagaug

SEQ ID NO: 898454 - RNA, 22 nt, Human
aguccagagaggaggcugugug

SEQ ID NO: 898455 - RNA, 22 nt, Human
uuaugaaguuccuguuacagug

SEQ ID NO: 898456 - RNA, 22 nt, Human
ugcauguaugugcucacaugug

SEQ ID NO: 898457 - RNA, 22 nt, Human
aaggcugaauucaaggguaggc

SEQ ID NO: 898458 - RNA, 22 nt, Human
aggccagcccucaccuguguuc

SEQ ID NO: 898459 - RNA, 22 nt, Human
ugcucuaucuuugcuugaggga

SEQ ID NO: 898460 - RNA, 22 nt, Human
uguuuuuccaugugcagaacaa

SEQ ID NO: 898461 - RNA, 22 nt, Human
ugcccugcagacccugcagugu

SEQ ID NO: 898462 - RNA, 22 nt, Human
uauaaagagucuaucugguggc

SEQ ID NO: 898463 - RNA, 22 nt, Human
uuagaacaucugugucuuuaug

SEQ ID NO: 898464 - RNA, 22 nt, Human
aaagaaucguguguaguuugaa

SEQ ID NO: 898465 - RNA, 22 nt, Human
uauacucuggaauuuuauucuu

SEQ ID NO: 898466 - RNA, 22 nt, Human
ggaaggaagugaccaggauauc

SEQ ID NO: 898467 - RNA, 22 nt, Human
guagacaaauuucuucucucaa

SEQ ID NO: 898468 - RNA, 22 nt, Human
caaagaugucauugguaagaca

SEQ ID NO: 898469 - RNA, 22 nt, Human
cgcuggcuuccuccuggggcca

SEQ ID NO: 898470 - RNA, 22 nt, Human
gaagcaucagcaauggcuggaa

SEQ ID NO: 898471 - RNA, 22 nt, Human
gcccucuggcacagagaugcag

SEQ ID NO: 898472 - RNA, 22 nt, Human
gaggccagaugucaugucuuau

SEQ ID NO: 898473 - RNA, 22 nt, Human
ugcccugucuaagcugucagua

SEQ ID NO: 898474 - RNA, 22 nt, Human
cagggcucgcugccagcuucag

SEQ ID NO: 898475 - RNA, 22 nt, Human
guccccagaaaggugaggcagg

SEQ ID NO: 898476 - RNA, 22 nt, Human
acgcccggucuccauaguuuuu

SEQ ID NO: 898477 - RNA, 22 nt, Human
ggugaggguaaauauaggcaaa

SEQ ID NO: 898478 - RNA, 22 nt, Human
auguagaggaguuucuggucug

SEQ ID NO: 898479 - RNA, 22 nt, Human
cuuuaugacugaguugucaauu

SEQ ID NO: 898480 - RNA, 22 nt, Human
uucaguguacagugaagggauu

SEQ ID NO: 898481 - RNA, 22 nt, Human
gauucuuaugagugaacuuuac

SEQ ID NO: 898482 - RNA, 22 nt, Human
gcugugucuguuuuacgucaag

SEQ ID NO: 898483 - RNA, 22 nt, Human
cuggcuuuaaaaugcuccugga

SEQ ID NO: 898484 - RNA, 18 nt, Human
agcccaggcaucgucugc

SEQ ID NO: 898485 - RNA, 22 nt, Human
cagggguggcugcagcagaggu

SEQ ID NO: 898486 - RNA, 22 nt, Human
cugcagagcuugucuggaugug

SEQ ID NO: 898487 - RNA, 22 nt, Human
ggcacugggcaccggcugaggg

SEQ ID NO: 898488 - RNA, 22 nt, Human
aggucucuaaaauagucaaacu

SEQ ID NO: 898489 - RNA, 22 nt, Human
cauuuagagaagauuacaagga

SEQ ID NO: 898490 - RNA, 22 nt, Human
cuauuuucugucucuauagagu

SEQ ID NO: 898491 - RNA, 22 nt, Human
gccuggguggagaggggugaca

SEQ ID NO: 898492 - RNA, 22 nt, Human
aaugucuugagaagagaaaucu

SEQ ID NO: 898493 - RNA, 22 nt, Human
cagcagcuucuguugaucagaa

SEQ ID NO: 898494 - RNA, 17 nt, Human
uugaaaaguaagcuccc

SEQ ID NO: 898495 - RNA, 22 nt, Human
auguccaguacuucuaaauggu

SEQ ID NO: 898496 - RNA, 22 nt, Human
augugucuugcggcaguuggua

SEQ ID NO: 898497 - RNA, 21 nt, Human
uuauggagaaggaaaguaagg

SEQ ID NO: 898498 - RNA, 20 nt, Human
gggaugagaguccuagcucu

SEQ ID NO: 898499 - RNA, 22 nt, Human
gcacaguuaaagggucauguga

SEQ ID NO: 898500 - RNA, 22 nt, Human
acaaagucucuaauaaucuucu

SEQ ID NO: 898501 - RNA, 22 nt, Human
ucauugacuugaagaaaacaau

SEQ ID NO: 898502 - RNA, 22 nt, Human
aagccagguguugugguaagag

SEQ ID NO: 898503 - RNA, 22 nt, Human
uggccugcucugacuuuggggg

SEQ ID NO: 898504 - RNA, 22 nt, Human
augugucucuaaaauuuaguaa

SEQ ID NO: 898505 - RNA, 22 nt, Human
uuucaaacuuaaauaccuuucc

SEQ ID NO: 898506 - RNA, 22 nt, Human
ucaaagcuuagauaauuucuuu

SEQ ID NO: 898507 - RNA, 22 nt, Human
agcugcagauucuaucuagaag

SEQ ID NO: 898508 - RNA, 16 nt, Human
agggagagaggaacau

SEQ ID NO: 898509 - RNA, 22 nt, Human
cuugggaggagaacaaagcucc

SEQ ID NO: 898510 - RNA, 19 nt, Human
ccugaccacacaggccuug

SEQ ID NO: 898511 - RNA, 22 nt, Human
aacucuuuguggacauuaaauu

SEQ ID NO: 898512 - RNA, 22 nt, Human
uuacauguuuacggauacacuu

SEQ ID NO: 898513 - RNA, 23 nt, Human
accuggcugcucaaccugcaggg

SEQ ID NO: 898514 - RNA, 22 nt, Human
gcugaaaugucuuuagcagugu

SEQ ID NO: 898515 - RNA, 22 nt, Human
uaaaaguuagcuaggacaaagu

SEQ ID NO: 898516 - RNA, 22 nt, Human
agacuguaauuuguggccuccu

SEQ ID NO: 898517 - RNA, 22 nt, Human
aucuuggacuacagaagagagg

SEQ ID NO: 898518 - RNA, 22 nt, Human
cuacagguaugugcaugacauc

SEQ ID NO: 898519 - RNA, 20 nt, Human
cagauaaacgggaaagaagc

SEQ ID NO: 898520 - RNA, 22 nt, Human
gaaaucuacuuagugucuggau

SEQ ID NO: 898521 - RNA, 22 nt, Human
cucugacauucugugacucuga

SEQ ID NO: 898522 - RNA, 22 nt, Human
cuuaggaacgcucugccuagug

SEQ ID NO: 898523 - RNA, 22 nt, Human
gguggcaggcccugagcauccc

SEQ ID NO: 898524 - RNA, 22 nt, Human
ucuagaauagauucugcugauc

SEQ ID NO: 898525 - RNA, 23 nt, Human
aaaggcaggccuaggacauauug

SEQ ID NO: 898526 - RNA, 22 nt, Human
uuucaucuuauuugucuacauc

SEQ ID NO: 898527 - RNA, 22 nt, Human
aagugcagagagcugacgaacu

SEQ ID NO: 898528 - RNA, 22 nt, Human
agaacucuauauucaugaacaa

SEQ ID NO: 898529 - RNA, 22 nt, Human
ugcauaaaauaugagaaaugua

SEQ ID NO: 898530 - RNA, 22 nt, Human
uguaaagaaauagcauuuguag

SEQ ID NO: 898531 - RNA, 22 nt, Human
guuauguaaucuaacacucagu

SEQ ID NO: 898532 - RNA, 22 nt, Human
ucugggcuugguuagggcuguu

SEQ ID NO: 898533 - RNA, 22 nt, Human
aagaggcuucagauccuucaga

SEQ ID NO: 898534 - RNA, 22 nt, Human
auucacacuuuacuucuuucca

SEQ ID NO: 898535 - RNA, 22 nt, Human
aggcucagagagcuguguccau

SEQ ID NO: 898536 - RNA, 22 nt, Human
cagagagagcaggaaaccuccg

SEQ ID NO: 898537 - RNA, 16 nt, Human
aggcagagauuuaccc

SEQ ID NO: 898538 - RNA, 22 nt, Human
gucuucuuugucaucuuagguu

SEQ ID NO: 898539 - RNA, 22 nt, Human
uagcccagcuuggccuauuucu

SEQ ID NO: 898540 - RNA, 22 nt, Human
cugcagaaaccuuuccugauuu

SEQ ID NO: 898541 - RNA, 22 nt, Human
ucugagagucuuucuucaagug

SEQ ID NO: 898542 - RNA, 22 nt, Human
gagcuuuucccgucuuucucgu

SEQ ID NO: 898543 - RNA, 20 nt, Human
caguaucugaagccacacaa

SEQ ID NO: 898544 - RNA, 22 nt, Human
ccaccccugggugcagggagcg

SEQ ID NO: 898545 - RNA, 22 nt, Human
uuucaguggcaucgauuacccu

SEQ ID NO: 898546 - RNA, 22 nt, Human
uccucaaaguuguauaaauauu

SEQ ID NO: 898547 - RNA, 22 nt, Human
acagaugaggaaacagggucag

SEQ ID NO: 898548 - RNA, 22 nt, Human
uuccaaacugccaauucagaag

SEQ ID NO: 898549 - RNA, 22 nt, Human
cucuggcaauggauuuuugagg

SEQ ID NO: 898550 - RNA, 22 nt, Human
aagauacagugaaagggcauug

SEQ ID NO: 898551 - RNA, 22 nt, Human
acucugggaauccucaccuucc

SEQ ID NO: 898552 - RNA, 22 nt, Human
acuccagggaggugagugugcg

SEQ ID NO: 898553 - RNA, 22 nt, Human
aaggacuggcauuaucuuaugu

SEQ ID NO: 898554 - RNA, 22 nt, Human
agguacauguuccagauacgua

SEQ ID NO: 898555 - RNA, 22 nt, Human
uaauuuuaacugugcuguuugg

SEQ ID NO: 898556 - RNA, 22 nt, Human
gaaagaaugcuauagugacuuc

SEQ ID NO: 898557 - RNA, 22 nt, Human
uggauauccuuguuaacuuucu

SEQ ID NO: 898558 - RNA, 22 nt, Human
uguccuuuaugaaaugguguuu

SEQ ID NO: 898559 - RNA, 22 nt, Human
gaagggggagcucuuccuaauu

SEQ ID NO: 898560 - RNA, 22 nt, Human
agccucugauggcucccaagga

SEQ ID NO: 898561 - RNA, 22 nt, Human
auccaucuugauguaauagcca

SEQ ID NO: 898562 - RNA, 22 nt, Human
ucugggcuugccugguugugca

SEQ ID NO: 898563 - RNA, 22 nt, Human
ggccccuggcaccaggcugauu

SEQ ID NO: 898564 - RNA, 18 nt, Human
acagaaauagcugugccu

SEQ ID NO: 898565 - RNA, 22 nt, Human
uuuccuuugggagcaugaauuu

SEQ ID NO: 898566 - RNA, 20 nt, Human
gugucaguaaauauuaugug

SEQ ID NO: 898567 - RNA, 22 nt, Human
acagaauugggguucuugggga

SEQ ID NO: 898568 - RNA, 22 nt, Human
auucacacauacucauguguga

SEQ ID NO: 898569 - RNA, 22 nt, Human
aucuacauguugauuuaaagaa

SEQ ID NO: 898570 - RNA, 22 nt, Human
ugcuaauguuucauuuuuagau

SEQ ID NO: 898571 - RNA, 22 nt, Human
ccaguggaaauguggucaggau

SEQ ID NO: 898572 - RNA, 22 nt, Human
cucuuuucaaaccuguuuaugg

SEQ ID NO: 898573 - RNA, 22 nt, Human
auggagcugugugaauauucau

SEQ ID NO: 898574 - RNA, 22 nt, Human
caaauguuuuuuaguauaagua

SEQ ID NO: 898575 - RNA, 22 nt, Human
gcucugagcucagcgucagagu

SEQ ID NO: 898576 - RNA, 22 nt, Human
agcaggcaagcgugaguucucu

SEQ ID NO: 898577 - RNA, 22 nt, Human
cugcauguuuacauuuuugaga

SEQ ID NO: 898578 - RNA, 22 nt, Human
ugcugugcaucauaguguuugg

SEQ ID NO: 898579 - RNA, 16 nt, Human
uaugugugugggagug

SEQ ID NO: 898580 - RNA, 22 nt, Human
ucucugcuaagauugugucuag

SEQ ID NO: 898581 - RNA, 18 nt, Human
cugucuuuuuucucucca

SEQ ID NO: 898582 - RNA, 19 nt, Human
uccagaagucccugagcgg

SEQ ID NO: 898583 - RNA, 22 nt, Human
uaugaaaauuuagcugaagcau

SEQ ID NO: 898584 - RNA, 22 nt, Human
agucacaugggauuagaaccca

SEQ ID NO: 898585 - RNA, 22 nt, Human
aaacugauaaaauaaguacauu

SEQ ID NO: 898586 - RNA, 22 nt, Human
aagcauuuuaguaaugaacuug

SEQ ID NO: 898587 - RNA, 22 nt, Human
augagguaaaguuuaagcuaag

SEQ ID NO: 898588 - RNA, 22 nt, Human
ggagaagggacagacucagcuu

SEQ ID NO: 898589 - RNA, 19 nt, Human
agggagguagcauuggaaa

SEQ ID NO: 898590 - RNA, 22 nt, Human
guggagggaaugaaucuucucu

SEQ ID NO: 898591 - RNA, 22 nt, Human
gguaucaaagaagggggugcca

SEQ ID NO: 898592 - RNA, 22 nt, Human
aauauuaauagaagggguucua

SEQ ID NO: 898593 - RNA, 22 nt, Human
auccuugguaagagaguuggau

SEQ ID NO: 898594 - RNA, 22 nt, Human
cacacaaauauucuggaggcaa

SEQ ID NO: 898595 - RNA, 21 nt, Human
cugcuuccucucuucauggca

SEQ ID NO: 898596 - RNA, 20 nt, Human
cagaccugcacccacuucga

SEQ ID NO: 898597 - RNA, 22 nt, Human
caagcucugcgggcuccaagau

SEQ ID NO: 898598 - RNA, 22 nt, Human
uuuauguuugcauuuucaaaga

SEQ ID NO: 898599 - RNA, 22 nt, Human
aguguguccaggaagcagaugg

SEQ ID NO: 898600 - RNA, 22 nt, Human
uuagaaaucugcugccaugcaa

SEQ ID NO: 898601 - RNA, 22 nt, Human
ucagaaagacgaaacagauggg

SEQ ID NO: 898602 - RNA, 22 nt, Human
aaguuuacauaagugaugauga

SEQ ID NO: 898603 - RNA, 22 nt, Human
gcugagcugaggcagggcuggg

SEQ ID NO: 898604 - RNA, 22 nt, Human
ggcugcaggcaggguauccacu

SEQ ID NO: 898605 - RNA, 22 nt, Human
ccugggcucacagccaaggcuc

SEQ ID NO: 898606 - RNA, 17 nt, Human
acacaucuuggcuuugc

SEQ ID NO: 898607 - RNA, 22 nt, Human
caaauuuaaguuagaaagcaau

SEQ ID NO: 898608 - RNA, 22 nt, Human
acagagguaggacaugagauau

SEQ ID NO: 898609 - RNA, 22 nt, Human
gaggggcugcccuggugucagg

SEQ ID NO: 898610 - RNA, 21 nt, Human
cagaggcugagagggcaaucu

SEQ ID NO: 898611 - RNA, 21 nt, Human
uuguuucccagagcucgcucc

SEQ ID NO: 898612 - RNA, 22 nt, Human
ugucauuuggugccaggaaaga

SEQ ID NO: 898613 - RNA, 22 nt, Human
cacagaggaaaggcaguuggua

SEQ ID NO: 898614 - RNA, 22 nt, Human
ugcuggcugccagguucccugu

SEQ ID NO: 898615 - RNA, 22 nt, Human
ccacuggaagaugcugagguca

SEQ ID NO: 898616 - RNA, 22 nt, Human
cagcaucucugggagaagcauc

SEQ ID NO: 898617 - RNA, 22 nt, Human
agagcucaagacgcucacagua

SEQ ID NO: 898618 - RNA, 22 nt, Human
acauucaaaauugugguuuaga

SEQ ID NO: 898619 - RNA, 22 nt, Human
acaugguauguauuuuaagaga

SEQ ID NO: 898620 - RNA, 22 nt, Human
gccaggcagauaugugagcuua

SEQ ID NO: 898621 - RNA, 21 nt, Human
aaaugcagucucugagaucug

SEQ ID NO: 898622 - RNA, 22 nt, Human
cuucagucgccuuggcaggggc

SEQ ID NO: 898623 - RNA, 22 nt, Human
aagaacauugacuaagaggggc

SEQ ID NO: 898624 - RNA, 22 nt, Human
acuguaaaaugagauauguaua

SEQ ID NO: 898625 - RNA, 22 nt, Human
agucccagcuacucaagaggcu

SEQ ID NO: 898626 - RNA, 22 nt, Human
cuaaacuucauauguugcuuua

SEQ ID NO: 898627 - RNA, 22 nt, Human
aaaugcugggaaccauuggauc

SEQ ID NO: 898628 - RNA, 22 nt, Human
caggagaggcuguacguuucuc

SEQ ID NO: 898629 - RNA, 22 nt, Human
acacauguuuacagucuucagu

SEQ ID NO: 898630 - RNA, 22 nt, Human
ggaggugaggccguagggugug

SEQ ID NO: 898631 - RNA, 22 nt, Human
ucccaggacaugggcucugcuc

SEQ ID NO: 898632 - RNA, 22 nt, Human
gcagcucacacagcaaguuuug

SEQ ID NO: 898633 - RNA, 22 nt, Human
ugaaaaaacaaguuggcccauu

SEQ ID NO: 898634 - RNA, 22 nt, Human
ugugucuuaaguuccaagacau

SEQ ID NO: 898635 - RNA, 22 nt, Human
cagugcugcucucuguaagaga

SEQ ID NO: 898636 - RNA, 22 nt, Human
ggcagggacaggauaggguuuu

SEQ ID NO: 898637 - RNA, 22 nt, Human
gccugaagaacagcugugagga

SEQ ID NO: 898638 - RNA, 22 nt, Human
uuacaaugaugaauaaauggca

SEQ ID NO: 898639 - RNA, 22 nt, Human
uggcagagaacacacaugauuc

SEQ ID NO: 898640 - RNA, 22 nt, Human
ccucccagugccuccagagcag

SEQ ID NO: 898641 - RNA, 22 nt, Human
cuguccaugcauguugucugcu

SEQ ID NO: 898642 - RNA, 22 nt, Human
gccuggagaaaggaagguggga

SEQ ID NO: 898643 - RNA, 22 nt, Human
gucuggggaagucagggcauca

SEQ ID NO: 898644 - RNA, 22 nt, Human
ugaggcaggacauggacaacug

SEQ ID NO: 898645 - RNA, 23 nt, Human
ggcugagaagucccaugauaggu

SEQ ID NO: 898646 - RNA, 22 nt, Human
gaggcccuccagcugucagcug

SEQ ID NO: 898647 - RNA, 22 nt, Human
agauacaucauuuauaccuuca

SEQ ID NO: 898648 - RNA, 22 nt, Human
caguguuuguugagaaaggcaa

SEQ ID NO: 898649 - RNA, 22 nt, Human
cuggccagguuuugaacaguug

SEQ ID NO: 898650 - RNA, 22 nt, Human
agaaaucuuugaaguguaaugu

SEQ ID NO: 898651 - RNA, 22 nt, Human
aaguucaaucagaugaaaaagc

SEQ ID NO: 898652 - RNA, 22 nt, Human
ggcggguggcgaggcuucucgg

SEQ ID NO: 898653 - RNA, 22 nt, Human
uauuggaauaguuaaggaagau

SEQ ID NO: 898654 - RNA, 22 nt, Human
agccugagugcuuaggacuguu

SEQ ID NO: 898655 - RNA, 22 nt, Human
aguggcuuccuucauaagcuuu

SEQ ID NO: 898656 - RNA, 18 nt, Human
uuuguccuguggcagcug

SEQ ID NO: 898657 - RNA, 22 nt, Human
ccagcucucuuugaagcauaaa

SEQ ID NO: 898658 - RNA, 22 nt, Human
uagcccagcucaaaugaccggu

SEQ ID NO: 898659 - RNA, 22 nt, Human
uggcuaugaggagcgcaggugu

SEQ ID NO: 898660 - RNA, 22 nt, Human
ugcuggagcccaggcggccuuu

SEQ ID NO: 898661 - RNA, 22 nt, Human
uagugccaccacugucuuuggc

SEQ ID NO: 898662 - RNA, 22 nt, Human
auauuuaacuggucccaauaua

SEQ ID NO: 898663 - RNA, 22 nt, Human
ucuuggacucaaaauugccuua

SEQ ID NO: 898664 - RNA, 22 nt, Human
gcuaaaguuuccgucuuucauu

SEQ ID NO: 898665 - RNA, 22 nt, Human
uggccagaguccagugagccuu

SEQ ID NO: 898666 - RNA, 22 nt, Human
acaacuguuggaggaacacagg

SEQ ID NO: 898667 - RNA, 22 nt, Human
ucaaagaagugcaaaccucauc

SEQ ID NO: 898668 - RNA, 22 nt, Human
accagagggagacuuccucuuc

SEQ ID NO: 898669 - RNA, 22 nt, Human
augaaaauucuaugcaggccag

SEQ ID NO: 898670 - RNA, 22 nt, Human
acccagagcugggcuuggcaaa

SEQ ID NO: 898671 - RNA, 20 nt, Human
cagcuuggaugagaggcuga

SEQ ID NO: 898672 - RNA, 22 nt, Human
aggugguguuugguuacaugag

SEQ ID NO: 898673 - RNA, 21 nt, Human
uccaggccaugguggggaggc

SEQ ID NO: 898674 - RNA, 22 nt, Human
uaagacugugagcucagagacu

SEQ ID NO: 898675 - RNA, 22 nt, Human
ugccugggguuggcaaacugcu

SEQ ID NO: 898676 - RNA, 21 nt, Human
guuuagaaguagucuggcuca

SEQ ID NO: 898677 - RNA, 22 nt, Human
agauugaauaaccaccuuuuuc

SEQ ID NO: 898678 - RNA, 22 nt, Human
ggcucugaacauggggaggagu

SEQ ID NO: 898679 - RNA, 22 nt, Human
gaagugcaaaaccacaugguaa

SEQ ID NO: 898680 - RNA, 22 nt, Human
uugaagagugcauuagcauauu

SEQ ID NO: 898681 - RNA, 22 nt, Human
aacuucugcagaaaagugcaug

SEQ ID NO: 898682 - RNA, 22 nt, Human
acugaaguccacacauguagga

SEQ ID NO: 898683 - RNA, 22 nt, Human
gaauguaauagucaguagaaca

SEQ ID NO: 898684 - RNA, 22 nt, Human
uccagcucaucugucuccauua

SEQ ID NO: 898685 - RNA, 22 nt, Human
uggugggagugagggcaugcca

SEQ ID NO: 898686 - RNA, 19 nt, Human
cauggcugccccauauagc

SEQ ID NO: 898687 - RNA, 21 nt, Human
agcuggcagugccuggaccuc

SEQ ID NO: 898688 - RNA, 22 nt, Human
gggcuggggcucaauaauuugu

SEQ ID NO: 898689 - RNA, 22 nt, Human
cuuucauaguuaaaauaguuug

SEQ ID NO: 898690 - RNA, 22 nt, Human
ugguacacauguccaaggucag

SEQ ID NO: 898691 - RNA, 22 nt, Human
gccacuguugcuccucaggaaa

SEQ ID NO: 898692 - RNA, 22 nt, Human
ggguggagccaguugacucugu

SEQ ID NO: 898693 - RNA, 22 nt, Human
acauuugacauuuaguaucagc

SEQ ID NO: 898694 - RNA, 20 nt, Human
auaauuauuuacuuuugugc

SEQ ID NO: 898695 - RNA, 21 nt, Human
ccugggagaucagcugccuuc

SEQ ID NO: 898696 - RNA, 22 nt, Human
uacaaauguauuuuauuuuggu

SEQ ID NO: 898697 - RNA, 22 nt, Human
aguccgccugcugccguggcag

SEQ ID NO: 898698 - RNA, 22 nt, Human
aucugaagggaaguggaaggca

SEQ ID NO: 898699 - RNA, 22 nt, Human
uugcagggcaucuaugucuggu

SEQ ID NO: 898700 - RNA, 20 nt, Human
ggugucagggccaugccugg

SEQ ID NO: 898701 - RNA, 22 nt, Human
aagcuuuaugacuuggagacag

SEQ ID NO: 898702 - RNA, 22 nt, Human
cagggaagaauaguuagcaaag

SEQ ID NO: 898703 - RNA, 22 nt, Human
agaacaaaauuagaggagugca

SEQ ID NO: 898704 - RNA, 22 nt, Human
uuggaacuuaacccugauaggu

SEQ ID NO: 898705 - RNA, 22 nt, Human
uuccaggcacaucccaacucca

SEQ ID NO: 898706 - RNA, 22 nt, Human
caggguggaacaggcaauacuu

SEQ ID NO: 898707 - RNA, 22 nt, Human
uugauguugcucuuaacaguau

SEQ ID NO: 898708 - RNA, 22 nt, Human
uucaaugcauauagauauagaa

SEQ ID NO: 898709 - RNA, 22 nt, Human
uuucacauucuucugaaucuac

SEQ ID NO: 898710 - RNA, 22 nt, Human
uucuggagcuaaaguccacucu

SEQ ID NO: 898711 - RNA, 22 nt, Human
acuugguugcaaaugaauuauu

SEQ ID NO: 898712 - RNA, 22 nt, Human
uauuguccauggcugcuuuggu

SEQ ID NO: 898713 - RNA, 21 nt, Human
acaguuuuaaggagcacaugg

SEQ ID NO: 898714 - RNA, 22 nt, Human
uuuguucaugccuauauucuca

SEQ ID NO: 898715 - RNA, 20 nt, Human
cugcaucugugacuugcaaa

SEQ ID NO: 898716 - RNA, 22 nt, Human
ccugccugggcucacuugccag

SEQ ID NO: 898717 - RNA, 22 nt, Human
caugucuuaggaaagcagagga

SEQ ID NO: 898718 - RNA, 22 nt, Human
guaggucagacauaagaggaca

SEQ ID NO: 898719 - RNA, 23 nt, Human
ugcaagaguuccaaacuguucaa

SEQ ID NO: 898720 - RNA, 22 nt, Human
ggcagcaaccaaccaggcauuu

SEQ ID NO: 898721 - RNA, 22 nt, Human
gugguuuugcuuuaugagugaa

SEQ ID NO: 898722 - RNA, 22 nt, Human
uagauuuugcauuucuaacaag

SEQ ID NO: 898723 - RNA, 22 nt, Human
gagcaauagaaagaauacugcu

SEQ ID NO: 898724 - RNA, 22 nt, Human
ucugggagaguagauaaaggaa

SEQ ID NO: 898725 - RNA, 23 nt, Human
ugagugugaaaauccuggagaug

SEQ ID NO: 898726 - RNA, 22 nt, Human
agagccugcagcugugaagaaa

SEQ ID NO: 898727 - RNA, 22 nt, Human
agaggccacaccagccucccgu

SEQ ID NO: 898728 - RNA, 22 nt, Human
uguuaaguugccaguguaugac

SEQ ID NO: 898729 - RNA, 22 nt, Human
uucuccccugacccugaugagg

SEQ ID NO: 898730 - RNA, 22 nt, Human
uaucacugaccuguaucaguug

SEQ ID NO: 898731 - RNA, 19 nt, Human
cauuuagaaguacauauua

SEQ ID NO: 898732 - RNA, 22 nt, Human
uaauacaaggcaggaagcagua

SEQ ID NO: 898733 - RNA, 22 nt, Human
ccugggaguggcacucacagca

SEQ ID NO: 898734 - RNA, 22 nt, Human
gcugaaggcccggaggacaggg

SEQ ID NO: 898735 - RNA, 22 nt, Human
gaagcuuugagagcagaagccc

SEQ ID NO: 898736 - RNA, 17 nt, Human
cagucgaggaggaccug

SEQ ID NO: 898737 - RNA, 22 nt, Human
uauggaauggcuauuuucuagg

SEQ ID NO: 898738 - RNA, 22 nt, Human
ugggcuggcugaggcauucacu

SEQ ID NO: 898739 - RNA, 22 nt, Human
cagugcccuuccaggacugcag

SEQ ID NO: 898740 - RNA, 22 nt, Human
gccacagcuuagaucacagccu

SEQ ID NO: 898741 - RNA, 22 nt, Human
acaugcaucucugggacacaug

SEQ ID NO: 898742 - RNA, 22 nt, Human
gauuaauagacacaaccaagcu

SEQ ID NO: 898743 - RNA, 22 nt, Human
aggccagguuccucaaucuuga

SEQ ID NO: 898744 - RNA, 23 nt, Human
agcagcuggggugcucuuuuguc

SEQ ID NO: 898745 - RNA, 19 nt, Human
gguuggagaagagcggccc

SEQ ID NO: 898746 - RNA, 22 nt, Human
cauuugauccucacaacaaucu

SEQ ID NO: 898747 - RNA, 22 nt, Human
uggagcauacuaacccacucug

SEQ ID NO: 898748 - RNA, 22 nt, Human
ugcugcaggccuuggcugggaa

SEQ ID NO: 898749 - RNA, 23 nt, Human
aagcugccuucgcaguuggucug

SEQ ID NO: 898750 - RNA, 22 nt, Human
ccucacccacuacacucaaggg

SEQ ID NO: 898751 - RNA, 22 nt, Human
uauucucagugcuauaaguaga

SEQ ID NO: 898752 - RNA, 22 nt, Human
cuauaacuggguauuagacuac

SEQ ID NO: 898753 - RNA, 22 nt, Human
gggcgggguggcucaugccugu

SEQ ID NO: 898754 - RNA, 22 nt, Human
acacaggacggcccuguggcuu

SEQ ID NO: 898755 - RNA, 22 nt, Human
uagaaagaacuucauguaaaac

SEQ ID NO: 898756 - RNA, 22 nt, Human
aggaggggcauagaaauguaau

SEQ ID NO: 898757 - RNA, 22 nt, Human
acugucuccucaucaugccugg

SEQ ID NO: 898758 - RNA, 22 nt, Human
acccaggaaaacauggugcaga

SEQ ID NO: 898759 - RNA, 22 nt, Human
auaugcauuaacauuguaggag

SEQ ID NO: 898760 - RNA, 22 nt, Human
ccucugagaccagcucugcacc

SEQ ID NO: 898761 - RNA, 22 nt, Human
acugaucugccuguauguagcu

SEQ ID NO: 898762 - RNA, 23 nt, Human
ucuggcucuaugugacagcucuc

SEQ ID NO: 898763 - RNA, 22 nt, Human
ccagagggcaaaaugaagcuua

SEQ ID NO: 898764 - RNA, 22 nt, Human
uccuuaacaagauggcauuugu

SEQ ID NO: 898765 - RNA, 22 nt, Human
aucuuacacuguuggguuucuc

SEQ ID NO: 898766 - RNA, 22 nt, Human
acagcucuuaggcagaaccaac

SEQ ID NO: 898767 - RNA, 22 nt, Human
gccccagccaaggugacacgaa

SEQ ID NO: 898768 - RNA, 22 nt, Human
cucugaaagcaaaacuagagaa

SEQ ID NO: 898769 - RNA, 22 nt, Human
aucuguggauaugaccuuccug

SEQ ID NO: 898770 - RNA, 21 nt, Human
ugcugcugaucgggguuggcu

SEQ ID NO: 898771 - RNA, 22 nt, Human
aggccagggucccacacucgca

SEQ ID NO: 898772 - RNA, 22 nt, Human
cugugugcugaaaugcagugag

SEQ ID NO: 898773 - RNA, 19 nt, Human
uauauauuuugggguugug

SEQ ID NO: 898774 - RNA, 22 nt, Human
gggaagagggagcuggaaugau

SEQ ID NO: 898775 - RNA, 20 nt, Human
aauugaagcagaggagaggc

SEQ ID NO: 898776 - RNA, 22 nt, Human
aaucuacauuucaguuuugccc

SEQ ID NO: 898777 - RNA, 22 nt, Human
ucuaaauucuuuccuggguuga

SEQ ID NO: 898778 - RNA, 22 nt, Human
uauaaagaaaugauuuccagaa

SEQ ID NO: 898779 - RNA, 22 nt, Human
auagaaaggucuuuggcagaca

SEQ ID NO: 898780 - RNA, 22 nt, Human
ugagacaggcuuccuucuuggg

SEQ ID NO: 898781 - RNA, 22 nt, Human
agccauuuugguaaugauaaca

SEQ ID NO: 898782 - RNA, 20 nt, Human
agguccacugaggcugccuc

SEQ ID NO: 898783 - RNA, 22 nt, Human
ugaucuuuucuauuuaugguag

SEQ ID NO: 898784 - RNA, 22 nt, Human
acuuucucaggaauucacagac

SEQ ID NO: 898785 - RNA, 22 nt, Human
gggaagaguaacuagcccaugu

SEQ ID NO: 898786 - RNA, 22 nt, Human
acacagggcaaugcuuugaccu

SEQ ID NO: 898787 - RNA, 22 nt, Human
uucucuugugccaaguuguugc

SEQ ID NO: 898788 - RNA, 22 nt, Human
gaaaguuucucacacaugcaga

SEQ ID NO: 898789 - RNA, 22 nt, Human
gaggcucagagagguccacaua

SEQ ID NO: 898790 - RNA, 22 nt, Human
gauuucaaaaguagauccauca

SEQ ID NO: 898791 - RNA, 22 nt, Human
gccagccacaagggaggcuugu

SEQ ID NO: 898792 - RNA, 22 nt, Human
ugacucugggguugaccagaug

SEQ ID NO: 898793 - RNA, 22 nt, Human
cauguauaguuggaacuacauc

SEQ ID NO: 898794 - RNA, 22 nt, Human
ggcucugguugaccaugauggc

SEQ ID NO: 898795 - RNA, 22 nt, Human
agaggaaacauagguuuuuaaa

SEQ ID NO: 898796 - RNA, 22 nt, Human
aaguacauguuguucaaaagcc

SEQ ID NO: 898797 - RNA, 22 nt, Human
uagcuguugcaauaaacaguuc

SEQ ID NO: 898798 - RNA, 22 nt, Human
gaggccacgugcuuauguuucu

SEQ ID NO: 898799 - RNA, 22 nt, Human
uuuguacauucaaaugucccau

SEQ ID NO: 898800 - RNA, 22 nt, Human
augggaugcauggcuguggcca

SEQ ID NO: 898801 - RNA, 22 nt, Human
agcagggccuggcacuccuggg

SEQ ID NO: 898802 - RNA, 22 nt, Human
cauuuuacgacauagggcaggc

SEQ ID NO: 898803 - RNA, 22 nt, Human
cagucacagugacaggaugugg

SEQ ID NO: 898804 - RNA, 22 nt, Human
ccacucugauuucaagggagau

SEQ ID NO: 898805 - RNA, 22 nt, Human
ucccagcagagccagcaagccg

SEQ ID NO: 898806 - RNA, 22 nt, Human
ugcuccagugagcuggccaucc

SEQ ID NO: 898807 - RNA, 23 nt, Human
agaaguggaauggccgugggguc

SEQ ID NO: 898808 - RNA, 22 nt, Human
uaguagcaacaagaaacaaaua

SEQ ID NO: 898809 - RNA, 20 nt, Human
ucugccacuaauuaggugau

SEQ ID NO: 898810 - RNA, 17 nt, Human
gcuuuggaaggguagac

SEQ ID NO: 898811 - RNA, 22 nt, Human
gguucuuuguauauaucacuuu

SEQ ID NO: 898812 - RNA, 22 nt, Human
ucacugauuaugaaaaugaagg

SEQ ID NO: 898813 - RNA, 22 nt, Human
acugggcuguaaagagaggcaa

SEQ ID NO: 898814 - RNA, 21 nt, Human
uucaguuucuuccucaucuau

SEQ ID NO: 898815 - RNA, 22 nt, Human
uuauuuguggcauccauguugg

SEQ ID NO: 898816 - RNA, 22 nt, Human
cacagccuccuucagagagcau

SEQ ID NO: 898817 - RNA, 22 nt, Human
cccaggcagccugcagggaagg

SEQ ID NO: 898818 - RNA, 22 nt, Human
cuggcucccucucccugaguca

SEQ ID NO: 898819 - RNA, 22 nt, Human
ugucauuuaaagcuuuccagau

SEQ ID NO: 898820 - RNA, 22 nt, Human
ugguggcagagcaagagcugga

SEQ ID NO: 898821 - RNA, 22 nt, Human
acauucacuauguccaaacucu

SEQ ID NO: 898822 - RNA, 22 nt, Human
uggcuccagauuuccugcugca

SEQ ID NO: 898823 - RNA, 22 nt, Human
ucuauucauucaauuuagcucu

SEQ ID NO: 898824 - RNA, 18 nt, Human
ugaggcugaauauggggc

SEQ ID NO: 898825 - RNA, 22 nt, Human
augugcaauuauuaagaagaga

SEQ ID NO: 898826 - RNA, 22 nt, Human
uugagaacaggaguguucuuuu

SEQ ID NO: 898827 - RNA, 22 nt, Human
ccaaagugcugagauuacaggu

SEQ ID NO: 898828 - RNA, 23 nt, Human
cugugggaagucggggagcgcgc

SEQ ID NO: 898829 - RNA, 22 nt, Human
accaaagcgagugauaugucau

SEQ ID NO: 898830 - RNA, 22 nt, Human
acagagaccaguuacagcgucc

SEQ ID NO: 898831 - RNA, 22 nt, Human
acaacuuucuggguuaucugau

SEQ ID NO: 898832 - RNA, 20 nt, Human
ugcaauguccauguuccagg

SEQ ID NO: 898833 - RNA, 22 nt, Human
aggccucacauugggcuucaag

SEQ ID NO: 898834 - RNA, 21 nt, Human
aaguaacaccacuccuggagu

SEQ ID NO: 898835 - RNA, 22 nt, Human
gacaugggaugagaugaagcau

SEQ ID NO: 898836 - RNA, 22 nt, Human
ugcuccauucucuagccagugc

SEQ ID NO: 898837 - RNA, 22 nt, Human
acuauauacacauuaucuuguu

SEQ ID NO: 898838 - RNA, 22 nt, Human
uccagccaaucagagcugaggc

SEQ ID NO: 898839 - RNA, 22 nt, Human
gaauuuacaaguugaauaacaa

SEQ ID NO: 898840 - RNA, 22 nt, Human
uggccugcucacagucagaugg

SEQ ID NO: 898841 - RNA, 22 nt, Human
ugccuuaauuuucuaagcugug

SEQ ID NO: 898842 - RNA, 22 nt, Human
uucugauacagucccaacacaa

SEQ ID NO: 898843 - RNA, 22 nt, Human
aaaugacaguucucucugagua

SEQ ID NO: 898844 - RNA, 22 nt, Human
agcccgcaucucgcuaaagaua

SEQ ID NO: 898845 - RNA, 22 nt, Human
acagagcaguucuggagcuggc

SEQ ID NO: 898846 - RNA, 22 nt, Human
cucacaggagaaagucaugguc

SEQ ID NO: 898847 - RNA, 22 nt, Human
ucuuugauuugacaauaucuug

SEQ ID NO: 898848 - RNA, 22 nt, Human
auauuacauaaacaugagugaa

SEQ ID NO: 898849 - RNA, 22 nt, Human
agacucugagacaugaaccauc

SEQ ID NO: 898850 - RNA, 22 nt, Human
agcacagacuggucccaggucu

SEQ ID NO: 898851 - RNA, 22 nt, Human
auguagaacagguuaaugacag

SEQ ID NO: 898852 - RNA, 22 nt, Human
gacugggaggguucagcugggu

SEQ ID NO: 898853 - RNA, 22 nt, Human
cuaaacaagggauuauaauuga

SEQ ID NO: 898854 - RNA, 22 nt, Human
uacaaacuaacaugucucaucc

SEQ ID NO: 898855 - RNA, 22 nt, Human
uacaaagucuuggguucuaggc

SEQ ID NO: 898856 - RNA, 20 nt, Human
caaagacaugcuaggggugg

SEQ ID NO: 898857 - RNA, 22 nt, Human
ucucugggugauggcagggcac

SEQ ID NO: 898858 - RNA, 22 nt, Human
uauacuguguuuucaccacugu

SEQ ID NO: 898859 - RNA, 22 nt, Human
uuguguuaaggugcaucuagug

SEQ ID NO: 898860 - RNA, 22 nt, Human
ugcauccuccuuuguccucuug

SEQ ID NO: 898861 - RNA, 22 nt, Human
aaauaguucagccacggugacu

SEQ ID NO: 898862 - RNA, 22 nt, Human
cacagaacugguuaauagcaga

SEQ ID NO: 898863 - RNA, 22 nt, Human
ucucacaccgucccuaaaccau

SEQ ID NO: 898864 - RNA, 22 nt, Human
ggugggaugccucuggagaagu

SEQ ID NO: 898865 - RNA, 22 nt, Human
ccacccagcagaggaggcaaga

SEQ ID NO: 898866 - RNA, 20 nt, Human
gggcccugggauucagagca

SEQ ID NO: 898867 - RNA, 22 nt, Human
ucuguacauuuggggaccccag

SEQ ID NO: 898868 - RNA, 22 nt, Human
auuguauaagucuauuuacaau

SEQ ID NO: 898869 - RNA, 22 nt, Human
gcagaaggucuggcacuucagg

SEQ ID NO: 898870 - RNA, 22 nt, Human
auggaaugcgguaguaugugca

SEQ ID NO: 898871 - RNA, 22 nt, Human
ucugaaagucugaaacaguguc

SEQ ID NO: 898872 - RNA, 22 nt, Human
ucaaacuggggaacuuauuuau

SEQ ID NO: 898873 - RNA, 22 nt, Human
acauggggcccaaagagagguc

SEQ ID NO: 898874 - RNA, 22 nt, Human
ugucauguagcauuuuaugucu

SEQ ID NO: 898875 - RNA, 22 nt, Human
uguuuuaagcucuagaagggga

SEQ ID NO: 898876 - RNA, 22 nt, Human
ggcagcugucucauucacaccu

SEQ ID NO: 898877 - RNA, 21 nt, Human
ucuuuaugacuugcccauuug

SEQ ID NO: 898878 - RNA, 22 nt, Human
uuuaggauaacuccaguuuucc

SEQ ID NO: 898879 - RNA, 22 nt, Human
ccaagaguucaagagugaacca

SEQ ID NO: 898880 - RNA, 22 nt, Human
agauaucuggaaaaaauguaug

SEQ ID NO: 898881 - RNA, 22 nt, Human
aucuuucaucucuauuauuuga

SEQ ID NO: 898882 - RNA, 22 nt, Human
agugucugcuuaucaguucuug

SEQ ID NO: 898883 - RNA, 22 nt, Human
ucauuuugugccuuaugaccgc

SEQ ID NO: 898884 - RNA, 22 nt, Human
uauguuuauacuuugauguacu

SEQ ID NO: 898885 - RNA, 22 nt, Human
aucacauucuuucaaagcaguc

SEQ ID NO: 898886 - RNA, 22 nt, Human
gacccuuuucagacucagguac

SEQ ID NO: 898887 - RNA, 18 nt, Human
uaaguguaauugacaauu

SEQ ID NO: 898888 - RNA, 22 nt, Human
gccccuguuguggcuuugucua

SEQ ID NO: 898889 - RNA, 22 nt, Human
aggcaagcccaggcacuuggag

SEQ ID NO: 898890 - RNA, 22 nt, Human
aacuuucucuggauggcuuccu

SEQ ID NO: 898891 - RNA, 22 nt, Human
ggcuggugaguucagagaaccc

SEQ ID NO: 898892 - RNA, 22 nt, Human
guuugaaaguucaacaggaaaa

SEQ ID NO: 898893 - RNA, 22 nt, Human
gauuuuauauggcauacugugg

SEQ ID NO: 898894 - RNA, 22 nt, Human
ggcagcaacucauuauuccugu

SEQ ID NO: 898895 - RNA, 22 nt, Human
uaacaauaguguuugcuaguca

SEQ ID NO: 898896 - RNA, 20 nt, Human
ucacaacuccaucauuuccc

SEQ ID NO: 898897 - RNA, 22 nt, Human
aagcugccuugcugaggagaaa

SEQ ID NO: 898898 - RNA, 17 nt, Human
gcagacugcgggucccc

SEQ ID NO: 898899 - RNA, 22 nt, Human
ucaggccuccagguuaccauuu

SEQ ID NO: 898900 - RNA, 22 nt, Human
ugggguagggaaaagaagucga

SEQ ID NO: 898901 - RNA, 23 nt, Human
uagagaaagccaccgagucucuc

SEQ ID NO: 898902 - RNA, 22 nt, Human
acagcagcuaaccccugggcca

SEQ ID NO: 898903 - RNA, 23 nt, Human
uuggaagccagacagcugugcag

SEQ ID NO: 898904 - RNA, 22 nt, Human
aacaauuaucauauacauugca

SEQ ID NO: 898905 - RNA, 22 nt, Human
ccaggucuaucaaguugggcuc

SEQ ID NO: 898906 - RNA, 22 nt, Human
agagcuguauccccuuaccagu

SEQ ID NO: 898907 - RNA, 22 nt, Human
ucccagagugugggcaucaagg

SEQ ID NO: 898908 - RNA, 22 nt, Human
ucacagaaguguguuucaggag

SEQ ID NO: 898909 - RNA, 22 nt, Human
gcaguaaguuaauagugcuggu

SEQ ID NO: 898910 - RNA, 22 nt, Human
uguaaagcuuugaguguuuauc

SEQ ID NO: 898911 - RNA, 22 nt, Human
cuggaaugggagucagacagag

SEQ ID NO: 898912 - RNA, 22 nt, Human
aggcucagucuguucaugcacu

SEQ ID NO: 898913 - RNA, 22 nt, Human
aggagagagguuuuaaaugggg

SEQ ID NO: 898914 - RNA, 22 nt, Human
agcuguguucugguugauucac

SEQ ID NO: 898915 - RNA, 22 nt, Human
ugugugaauagcaguggcuggu

SEQ ID NO: 898916 - RNA, 22 nt, Human
uaagcaaucuguaguuggaauc

SEQ ID NO: 898917 - RNA, 22 nt, Human
aaggaaucacuucuuuaaauga

SEQ ID NO: 898918 - RNA, 22 nt, Human
aggcagguguuaccucugguuu

SEQ ID NO: 898919 - RNA, 22 nt, Human
gauggacagccuggaaggaaag

SEQ ID NO: 898920 - RNA, 22 nt, Human
auacaaguucucauguguaucu

SEQ ID NO: 898921 - RNA, 22 nt, Human
agagggugaaugagauagaaaa

SEQ ID NO: 898922 - RNA, 22 nt, Human
aauuagaagggaguuauugaua

SEQ ID NO: 898923 - RNA, 22 nt, Human
ucccucucuugggcguggcuca

SEQ ID NO: 898924 - RNA, 22 nt, Human
ucagggccggggcuguggcgag

SEQ ID NO: 898925 - RNA, 22 nt, Human
agggaaguccaugggggcggug

SEQ ID NO: 898926 - RNA, 22 nt, Human
ggcacugcuuccugagccugag

SEQ ID NO: 898927 - RNA, 22 nt, Human
uugauggcuuuuuggcagagcu

SEQ ID NO: 898928 - RNA, 22 nt, Human
gaaggccaagaggcuccaagau

SEQ ID NO: 898929 - RNA, 22 nt, Human
caauagaaggcacagauaggua

SEQ ID NO: 898930 - RNA, 22 nt, Human
gagaagucauuugaccaccuag

SEQ ID NO: 898931 - RNA, 22 nt, Human
cauaauuauaaacgcaaguuca

SEQ ID NO: 898932 - RNA, 22 nt, Human
uaaaggaacagaggacucauuu

SEQ ID NO: 898933 - RNA, 22 nt, Human
ucucauucauccaaggauuuau

SEQ ID NO: 898934 - RNA, 22 nt, Human
caugcagggacuagagaacagg

SEQ ID NO: 898935 - RNA, 22 nt, Human
gacccagucacacuugugcuuu

SEQ ID NO: 898936 - RNA, 22 nt, Human
acccaggagagagcuauaaaau

SEQ ID NO: 898937 - RNA, 22 nt, Human
uugugcaagaauuggaaagcaa

SEQ ID NO: 898938 - RNA, 18 nt, Human
agggauguaugcuggugg

SEQ ID NO: 898939 - RNA, 22 nt, Human
ucugaaauaacugaugccagau

SEQ ID NO: 898940 - RNA, 22 nt, Human
uggaggcugugugcaugagacc

SEQ ID NO: 898941 - RNA, 19 nt, Human
cagaguuugcaggcagagg

SEQ ID NO: 898942 - RNA, 22 nt, Human
uaaagugcuuaugauaaccaag

SEQ ID NO: 898943 - RNA, 22 nt, Human
aaggcaguacuuuauguccaua

SEQ ID NO: 898944 - RNA, 22 nt, Human
cuaagaaggaggaaaagugcca

SEQ ID NO: 898945 - RNA, 22 nt, Human
uccaggcccauagacacuucuc

SEQ ID NO: 898946 - RNA, 22 nt, Human
cauuggaaaaugcaugcuuuuu

SEQ ID NO: 898947 - RNA, 22 nt, Human
ugagcaggacugaccggccuua

SEQ ID NO: 898948 - RNA, 22 nt, Human
ucccucugguccucgguggaga

SEQ ID NO: 898949 - RNA, 23 nt, Human
uuucauguuggcaugacugacuu

SEQ ID NO: 898950 - RNA, 22 nt, Human
uuaaaauagccagugccccucu

SEQ ID NO: 898951 - RNA, 22 nt, Human
ucucuugagcucaguucugaug

SEQ ID NO: 898952 - RNA, 22 nt, Human
ggagcacccugcucagccaagc

SEQ ID NO: 898953 - RNA, 22 nt, Human
cuuaaauuggaugaguuaaguu

SEQ ID NO: 898954 - RNA, 20 nt, Human
aggcugucauuucuggcagg

SEQ ID NO: 898955 - RNA, 22 nt, Human
ggguucagagucaggugugaua

SEQ ID NO: 898956 - RNA, 22 nt, Human
uugaaacauauacaaaguggug

SEQ ID NO: 898957 - RNA, 19 nt, Human
cccuaggggcuccugaggg

SEQ ID NO: 898958 - RNA, 22 nt, Human
auuuggucccuuguuguguccc

SEQ ID NO: 898959 - RNA, 22 nt, Human
cugcauaugagaauaggagaaa

SEQ ID NO: 898960 - RNA, 22 nt, Human
ugcuggagaagcuccugggacu

SEQ ID NO: 898961 - RNA, 22 nt, Human
augcagaaucuugagaaaaauu

SEQ ID NO: 898962 - RNA, 22 nt, Human
uucuaugccugagaagaagccg

SEQ ID NO: 898963 - RNA, 22 nt, Human
aggcuuuacugccucaggacuc

SEQ ID NO: 898964 - RNA, 22 nt, Human
uuagaaaggagcuuauuucuuu

SEQ ID NO: 898965 - RNA, 22 nt, Human
guaacauuuacaguuccuagag

SEQ ID NO: 898966 - RNA, 22 nt, Human
gaggaguggaguugcuggguug

SEQ ID NO: 898967 - RNA, 22 nt, Human
ccuggaggcucugggagggcag

SEQ ID NO: 898968 - RNA, 22 nt, Human
ugcuggcuuccugugcacagca

SEQ ID NO: 898969 - RNA, 22 nt, Human
acagagucauucacugaugaag

SEQ ID NO: 898970 - RNA, 22 nt, Human
cacccaggacaaaauauggaau

SEQ ID NO: 898971 - RNA, 22 nt, Human
gacagugugaacaucuaauagu

SEQ ID NO: 898972 - RNA, 22 nt, Human
uauacuacgcaccaaacaaagg

SEQ ID NO: 898973 - RNA, 22 nt, Human
gugcaaucuguugacuggacuu

SEQ ID NO: 898974 - RNA, 22 nt, Human
gcuggaccaggugugcacaggc

SEQ ID NO: 898975 - RNA, 23 nt, Human
ccacagcuauaggguagugcagu

SEQ ID NO: 898976 - RNA, 22 nt, Human
gauuuaguggcccuugguacac

SEQ ID NO: 898977 - RNA, 22 nt, Human
aauguacacugaaagccuauca

SEQ ID NO: 898978 - RNA, 22 nt, Human
cauuuguaagcauggcguugga

SEQ ID NO: 898979 - RNA, 22 nt, Human
guuuuacaaaugacggcauuca

SEQ ID NO: 898980 - RNA, 22 nt, Human
gccagcuguaucuuuggccagc

SEQ ID NO: 898981 - RNA, 18 nt, Human
caaagcaggugacagugu

SEQ ID NO: 898982 - RNA, 22 nt, Human
ccucucuguagcagcccccagu

SEQ ID NO: 898983 - RNA, 22 nt, Human
cccuguguaguuaacuuuccac

SEQ ID NO: 898984 - RNA, 22 nt, Human
aauguuguaaauauucuuugag

SEQ ID NO: 898985 - RNA, 22 nt, Human
acagaggccucguagguacaac

SEQ ID NO: 898986 - RNA, 22 nt, Human
acuuuuaaaugaguuucaguug

SEQ ID NO: 898987 - RNA, 22 nt, Human
cgcagcugcaaaggaaacauuu

SEQ ID NO: 898988 - RNA, 22 nt, Human
ucugggauuuuauagacaugcu

SEQ ID NO: 898989 - RNA, 22 nt, Human
agagcagccugugaugaugcac

SEQ ID NO: 898990 - RNA, 22 nt, Human
cacuuaaaucuguugagaaaaa

SEQ ID NO: 898991 - RNA, 22 nt, Human
ucauuucaguggcacagaagau

SEQ ID NO: 898992 - RNA, 22 nt, Human
ugucccagaucacaggagggga

SEQ ID NO: 898993 - RNA, 22 nt, Human
gcuggcucugaugggcuccagg

SEQ ID NO: 898994 - RNA, 22 nt, Human
gccaggaaguugggccagucua

SEQ ID NO: 898995 - RNA, 21 nt, Human
uguguucuucuaggucagcua

SEQ ID NO: 898996 - RNA, 22 nt, Human
auggcaguauuucaguacagag

SEQ ID NO: 898997 - RNA, 22 nt, Human
gcuucuacccacgagaugcaaa

SEQ ID NO: 898998 - RNA, 22 nt, Human
aaugaaacucgaaauaaucaca

SEQ ID NO: 898999 - RNA, 22 nt, Human
uguauuuaguccagucucucau

SEQ ID NO: 899000 - RNA, 22 nt, Human
uaagacaugguugaucuagugu

SEQ ID NO: 899001 - RNA, 22 nt, Human
aaguccuugaagaaacaguucu

SEQ ID NO: 899002 - RNA, 22 nt, Human
ucagaggucccuagcaggagug

SEQ ID NO: 899003 - RNA, 22 nt, Human
acagcagcaauagcagugacau

SEQ ID NO: 899004 - RNA, 22 nt, Human
agcuguuuuacugguuguauaa

SEQ ID NO: 899005 - RNA, 23 nt, Human
ggucccaguggagaggccucacc

SEQ ID NO: 899006 - RNA, 22 nt, Human
agacaucuugcacacauauacu

SEQ ID NO: 899007 - RNA, 22 nt, Human
acaaauggaacaaugaagacug

SEQ ID NO: 899008 - RNA, 22 nt, Human
ucuaaugaguuagauaauuuug

SEQ ID NO: 899009 - RNA, 22 nt, Human
agggucugacuccucuggcaag

SEQ ID NO: 899010 - RNA, 23 nt, Human
aggcuccacucccugggaugugg

SEQ ID NO: 899011 - RNA, 22 nt, Human
gucuuuggaggcacuguugagu

SEQ ID NO: 899012 - RNA, 22 nt, Human
ucccccucauuaccucauucaa

SEQ ID NO: 899013 - RNA, 22 nt, Human
caaguuuggauuaugaaaaagu

SEQ ID NO: 899014 - RNA, 21 nt, Human
uaucacaguagaauaggaucu

SEQ ID NO: 899015 - RNA, 22 nt, Human
uucuucucagggucccacaugg

SEQ ID NO: 899016 - RNA, 22 nt, Human
gcuucacagaaucaauaguugg

SEQ ID NO: 899017 - RNA, 22 nt, Human
uucugggggaauacagcuauga

SEQ ID NO: 899018 - RNA, 22 nt, Human
guucugaguccuccuuugaagg

SEQ ID NO: 899019 - RNA, 22 nt, Human
auuuccauguccaaaaauuagu

SEQ ID NO: 899020 - RNA, 22 nt, Human
aaacacugauggauauuuuucc

SEQ ID NO: 899021 - RNA, 22 nt, Human
caugggcucucugagcuccagg

SEQ ID NO: 899022 - RNA, 22 nt, Human
gguuaaggcuuuacagucaaac

SEQ ID NO: 899023 - RNA, 19 nt, Human
uucucuauuaugucuucuc

SEQ ID NO: 899024 - RNA, 22 nt, Human
aggagcugcauggauaccuggu

SEQ ID NO: 899025 - RNA, 22 nt, Human
uccaggccaauguagcaggccc

SEQ ID NO: 899026 - RNA, 22 nt, Human
cuggugcaggaaggagcuggca

SEQ ID NO: 899027 - RNA, 22 nt, Human
uggcucucagcucccagcagcc

SEQ ID NO: 899028 - RNA, 22 nt, Human
auucaaacaggccaauugaccu

SEQ ID NO: 899029 - RNA, 22 nt, Human
caggcuguggaucaggagccuu

SEQ ID NO: 899030 - RNA, 22 nt, Human
uguuucuuacguuuuuagaggc

SEQ ID NO: 899031 - RNA, 22 nt, Human
ccagaaggcggagauugcagug

SEQ ID NO: 899032 - RNA, 22 nt, Human
gaauauuuucaguacagauggu

SEQ ID NO: 899033 - RNA, 22 nt, Human
ugguccuggucaucugggcugg

SEQ ID NO: 899034 - RNA, 22 nt, Human
uuucuacaacacuucugaaucu

SEQ ID NO: 899035 - RNA, 22 nt, Human
cuggcccuggagggcugugcga

SEQ ID NO: 899036 - RNA, 22 nt, Human
uuugaaaccuaguuauaugacu

SEQ ID NO: 899037 - RNA, 22 nt, Human
uaaaggcucacuggcuuggggu

SEQ ID NO: 899038 - RNA, 22 nt, Human
gccucagggggagaggccagcu

SEQ ID NO: 899039 - RNA, 22 nt, Human
gcugccucccagagcccugcag

SEQ ID NO: 899040 - RNA, 22 nt, Human
ugcugcagcuaaggugaggugc

SEQ ID NO: 899041 - RNA, 22 nt, Human
uauauucaacaggcuaauguca

SEQ ID NO: 899042 - RNA, 22 nt, Human
gggacuggcacagggcugggag

SEQ ID NO: 899043 - RNA, 22 nt, Human
caggcagagcaacugguccaga

SEQ ID NO: 899044 - RNA, 22 nt, Human
cuucuaacauccuacaaugcaa

SEQ ID NO: 899045 - RNA, 17 nt, Human
accagccucuccugggg

SEQ ID NO: 899046 - RNA, 22 nt, Human
uauaggaaaggaguggucacaa

SEQ ID NO: 899047 - RNA, 22 nt, Human
gagggguccaggaggcacuuac

SEQ ID NO: 899048 - RNA, 22 nt, Human
cuucacaaaauauuucauuaua

SEQ ID NO: 899049 - RNA, 22 nt, Human
auuucaucucuggaacauaacu

SEQ ID NO: 899050 - RNA, 22 nt, Human
ucaggcccagagucacggaucc

SEQ ID NO: 899051 - RNA, 22 nt, Human
uuuauauauggcuggucuggau

SEQ ID NO: 899052 - RNA, 22 nt, Human
uucccauagugaccgaugcuga

SEQ ID NO: 899053 - RNA, 22 nt, Human
gcuggcugaaucuucugcaaua

SEQ ID NO: 899054 - RNA, 22 nt, Human
ucuaaaaaagucuguucacuug

SEQ ID NO: 899055 - RNA, 22 nt, Human
cuaacuuuuugauucuugggga

SEQ ID NO: 899056 - RNA, 22 nt, Human
aggccagcacgacagccgcagg

SEQ ID NO: 899057 - RNA, 22 nt, Human
ccugagucuguguuuuccuaag

SEQ ID NO: 899058 - RNA, 21 nt, Human
ccaggcagagcugugaguucu

SEQ ID NO: 899059 - RNA, 22 nt, Human
cucuggauugcugugagaugcu

SEQ ID NO: 899060 - RNA, 22 nt, Human
ggguacaguucuuccaguguca

SEQ ID NO: 899061 - RNA, 22 nt, Human
uauaagccauccagccuguggu

SEQ ID NO: 899062 - RNA, 22 nt, Human
gucuucuuuucagucugcuugu

SEQ ID NO: 899063 - RNA, 22 nt, Human
aaggcccucaugcgucagagcc

SEQ ID NO: 899064 - RNA, 23 nt, Human
uaugugugggucuacuagaaguc

SEQ ID NO: 899065 - RNA, 20 nt, Human
ucagugauuaucucugagug

SEQ ID NO: 899066 - RNA, 21 nt, Human
cauuugaucccucaucaggau

SEQ ID NO: 899067 - RNA, 22 nt, Human
uggcuccuuuccgggucuccag

SEQ ID NO: 899068 - RNA, 22 nt, Human
aggcuucagccuagagcuggag

SEQ ID NO: 899069 - RNA, 22 nt, Human
cuggccccuguggcuaaaauca

SEQ ID NO: 899070 - RNA, 22 nt, Human
ugacauuuaagccucugauuuc

SEQ ID NO: 899071 - RNA, 17 nt, Human
gagauggguggaucacc

SEQ ID NO: 899072 - RNA, 22 nt, Human
guguugaugacauuuuagaaac

SEQ ID NO: 899073 - RNA, 21 nt, Human
uggcacugcuuagcagguucc

SEQ ID NO: 899074 - RNA, 22 nt, Human
aggcugguaguauuuagucaca

SEQ ID NO: 899075 - RNA, 22 nt, Human
ccuccuguuguccugcuggggc

SEQ ID NO: 899076 - RNA, 22 nt, Human
gcagcuggcucagagagguggg

SEQ ID NO: 899077 - RNA, 22 nt, Human
uccuggaggcacucgcuggggc

SEQ ID NO: 899078 - RNA, 22 nt, Human
aagauguuuagauuuauacaau

SEQ ID NO: 899079 - RNA, 23 nt, Human
acacaaggguaacugccagccau

SEQ ID NO: 899080 - RNA, 22 nt, Human
cagggagaggccucuguugccc

SEQ ID NO: 899081 - RNA, 23 nt, Human
cccuggagcuagucugagcgggg

SEQ ID NO: 899082 - RNA, 22 nt, Human
acaggccauaaaggcaggcccu

SEQ ID NO: 899083 - RNA, 22 nt, Human
uccucagacuucccuuugugua

SEQ ID NO: 899084 - RNA, 22 nt, Human
caguugcagcugugacauugcg

SEQ ID NO: 899085 - RNA, 22 nt, Human
acagacauuuuaauuauuaaau

SEQ ID NO: 899086 - RNA, 22 nt, Human
aaggaagaugaaaguacugcua

SEQ ID NO: 899087 - RNA, 22 nt, Human
ggcagcuguuuguccuccuguu

SEQ ID NO: 899088 - RNA, 22 nt, Human
uggaaugugagaauaccguuuu

SEQ ID NO: 899089 - RNA, 22 nt, Human
cuuuggcagccucagcugcagg

SEQ ID NO: 899090 - RNA, 22 nt, Human
ccuggcaguuuugcccaggauu

SEQ ID NO: 899091 - RNA, 22 nt, Human
aaauaaguuaaacuagaaugau

SEQ ID NO: 899092 - RNA, 22 nt, Human
uaggcugggcauucuggccagg

SEQ ID NO: 899093 - RNA, 22 nt, Human
uaaucacugggcguuugguacu

SEQ ID NO: 899094 - RNA, 22 nt, Human
uccaauguguuuguggcaugga

SEQ ID NO: 899095 - RNA, 18 nt, Human
gugucuuauuacaguggg

SEQ ID NO: 899096 - RNA, 22 nt, Human
ugaauugccucuuauaugacca

SEQ ID NO: 899097 - RNA, 22 nt, Human
ugcagccaggaaauauuugcug

SEQ ID NO: 899098 - RNA, 22 nt, Human
aaagugcugugggcuguaagug

SEQ ID NO: 899099 - RNA, 22 nt, Human
ccuggcuuuagcugccuucccu

SEQ ID NO: 899100 - RNA, 22 nt, Human
agaacagguucaggguauaaaa

SEQ ID NO: 899101 - RNA, 22 nt, Human
ugcuuuauugcaucaguguggg

SEQ ID NO: 899102 - RNA, 20 nt, Human
ggccuuggguuucgccuguu

SEQ ID NO: 899103 - RNA, 22 nt, Human
uguccuggaguuauaaugccug

SEQ ID NO: 899104 - RNA, 22 nt, Human
uaaaauguguuucuguaugguu

SEQ ID NO: 899105 - RNA, 22 nt, Human
agagagaagcaaucaguggcca

SEQ ID NO: 899106 - RNA, 22 nt, Human
acacacaugcaugcuugccauu

SEQ ID NO: 899107 - RNA, 23 nt, Human
ucugaaagggaugcugggcagga

SEQ ID NO: 899108 - RNA, 22 nt, Human
agagguaugugucagugcuuau

SEQ ID NO: 899109 - RNA, 22 nt, Human
auucagugggugcucagcacaa

SEQ ID NO: 899110 - RNA, 22 nt, Human
acaguaacaaauggccugagga

SEQ ID NO: 899111 - RNA, 20 nt, Human
aggaaguauugucaugaagg

SEQ ID NO: 899112 - RNA, 22 nt, Human
cuguggcacauguggcaaggcc

SEQ ID NO: 899113 - RNA, 19 nt, Human
cguaccugacacagaacag

SEQ ID NO: 899114 - RNA, 22 nt, Human
augagcuagaaaaccaugugga

SEQ ID NO: 899115 - RNA, 22 nt, Human
cggggaggcuucggauuaaagc

SEQ ID NO: 899116 - RNA, 19 nt, Human
caaguucuggagauuaggg

SEQ ID NO: 899117 - RNA, 22 nt, Human
uccagaggugaacacccaggca

SEQ ID NO: 899118 - RNA, 22 nt, Human
guugaaaaugacuuuauaccau

SEQ ID NO: 899119 - RNA, 22 nt, Human
aaggcacauuccugaaaacaau

SEQ ID NO: 899120 - RNA, 22 nt, Human
uaggaagauaaacauuuguaug

SEQ ID NO: 899121 - RNA, 22 nt, Human
cuggagaguuggaagauggacu

SEQ ID NO: 899122 - RNA, 22 nt, Human
uuaggcaaauaaaauguuucca

SEQ ID NO: 899123 - RNA, 22 nt, Human
aauuucaaacuaauaggaacca

SEQ ID NO: 899124 - RNA, 22 nt, Human
ucuugaaacauaugaguaagug

SEQ ID NO: 899125 - RNA, 22 nt, Human
augggaggaaggaggcccuuga

SEQ ID NO: 899126 - RNA, 22 nt, Human
cacagggaggacaucaacagug

SEQ ID NO: 899127 - RNA, 22 nt, Human
cuccuucuccucgggaggccag

SEQ ID NO: 899128 - RNA, 22 nt, Human
uugcagaaaacaguuuucuugu

SEQ ID NO: 899129 - RNA, 22 nt, Human
aaaaugcugggaaaguuggaau

SEQ ID NO: 899130 - RNA, 22 nt, Human
cugggcacuugcucacagcucu

SEQ ID NO: 899131 - RNA, 22 nt, Human
ggcugcagagcugggugggccu

SEQ ID NO: 899132 - RNA, 22 nt, Human
gcagaagcuguucgaaggccgc

SEQ ID NO: 899133 - RNA, 22 nt, Human
uuugcugaauaaaugugugacu

SEQ ID NO: 899134 - RNA, 22 nt, Human
cuggagcucagcccagguucca

SEQ ID NO: 899135 - RNA, 22 nt, Human
uacauagagaaguuacagugga

SEQ ID NO: 899136 - RNA, 22 nt, Human
ugcccauuauucagccauuaaa

SEQ ID NO: 899137 - RNA, 22 nt, Human
cuguggaguccuggggaaugga

SEQ ID NO: 899138 - RNA, 22 nt, Human
uggcuacaagguggcuauucua

SEQ ID NO: 899139 - RNA, 19 nt, Human
caauuuggcagauucuccc

SEQ ID NO: 899140 - RNA, 21 nt, Human
cucugggccauuuucuuccac

SEQ ID NO: 899141 - RNA, 22 nt, Human
uguguauauaugugcacaugua

SEQ ID NO: 899142 - RNA, 22 nt, Human
ucuuucaaagcaaaaugaggcu

SEQ ID NO: 899143 - RNA, 22 nt, Human
uggcuccaugauaguucuuaca

SEQ ID NO: 899144 - RNA, 18 nt, Human
ugggaaugcucaaggccc

SEQ ID NO: 899145 - RNA, 20 nt, Human
cugagccaacucucuucuug

SEQ ID NO: 899146 - RNA, 22 nt, Human
ggcaggagcucagguugguucc

SEQ ID NO: 899147 - RNA, 21 nt, Human
uugauuuagcagaucuagcug

SEQ ID NO: 899148 - RNA, 22 nt, Human
guggaaugaauagauuugcauu

SEQ ID NO: 899149 - RNA, 22 nt, Human
ucccagccuccugacaguuuug

SEQ ID NO: 899150 - RNA, 22 nt, Human
ggcuuucagccaaaggacaacc

SEQ ID NO: 899151 - RNA, 22 nt, Human
caagucaagcaugcccuuauuu

SEQ ID NO: 899152 - RNA, 22 nt, Human
uggcagacuuuagggucuacau

SEQ ID NO: 899153 - RNA, 22 nt, Human
aggaaauaagggacaagacaaa

SEQ ID NO: 899154 - RNA, 22 nt, Human
aaguaaacucaguggucauuca

SEQ ID NO: 899155 - RNA, 22 nt, Human
uagccgggugugguggaacucc

SEQ ID NO: 899156 - RNA, 22 nt, Human
aacugaggaauaacugaguugc

SEQ ID NO: 899157 - RNA, 22 nt, Human
uauuacauccacuuuuauugca

SEQ ID NO: 899158 - RNA, 22 nt, Human
aaaagcuagucaaugauguauu

SEQ ID NO: 899159 - RNA, 22 nt, Human
gcugcagcucgccuuccggccu

SEQ ID NO: 899160 - RNA, 22 nt, Human
ugagccugguugcagugucugg

SEQ ID NO: 899161 - RNA, 21 nt, Human
ucucugugucuuuaagcugga

SEQ ID NO: 899162 - RNA, 22 nt, Human
augauaagccaugucgugguca

SEQ ID NO: 899163 - RNA, 22 nt, Human
cucuuauuccuacaguaacagg

SEQ ID NO: 899164 - RNA, 22 nt, Human
caagauauguguuguuagcucu

SEQ ID NO: 899165 - RNA, 21 nt, Human
uauuucuuugacucucucccu

SEQ ID NO: 899166 - RNA, 22 nt, Human
ugaaaauuguuguacuugauaa

SEQ ID NO: 899167 - RNA, 22 nt, Human
ucguucuugucaguuuauaaag

SEQ ID NO: 899168 - RNA, 22 nt, Human
agugauguugauuuuaccacuu

SEQ ID NO: 899169 - RNA, 21 nt, Human
guacacacagguggaugggcu

SEQ ID NO: 899170 - RNA, 22 nt, Human
ugucugagugauccaguuucuc

SEQ ID NO: 899171 - RNA, 22 nt, Human
aaagcuucuaggccuauugcuu

SEQ ID NO: 899172 - RNA, 22 nt, Human
cagggcagccaggccccguggg

SEQ ID NO: 899173 - RNA, 22 nt, Human
uggcuggagagggucccaugag

SEQ ID NO: 899174 - RNA, 22 nt, Human
ggcacagggggcugaggacuag

SEQ ID NO: 899175 - RNA, 22 nt, Human
agaagggaacucagagaugauu

SEQ ID NO: 899176 - RNA, 22 nt, Human
cuuucccuuagccccauucuau

SEQ ID NO: 899177 - RNA, 22 nt, Human
ccagcagacacacaggcguggg

SEQ ID NO: 899178 - RNA, 22 nt, Human
ccagcagagcauggggaggaag

SEQ ID NO: 899179 - RNA, 22 nt, Human
uuuaauauucugcauucuccuu

SEQ ID NO: 899180 - RNA, 22 nt, Human
uggcagaugugguuugagacag

SEQ ID NO: 899181 - RNA, 22 nt, Human
cccugacuugaucuuugacuug

SEQ ID NO: 899182 - RNA, 22 nt, Human
acaucuagaagaucugggagau

SEQ ID NO: 899183 - RNA, 23 nt, Human
gaggugugaauucugggugcugc

SEQ ID NO: 899184 - RNA, 22 nt, Human
aggagccaugagcaggaggcaa

SEQ ID NO: 899185 - RNA, 22 nt, Human
cuuaguuucuguugcguucugu

SEQ ID NO: 899186 - RNA, 22 nt, Human
gccuggagcuacuggacacuga

SEQ ID NO: 899187 - RNA, 23 nt, Human
agugcaugcuugacuuagcaagc

SEQ ID NO: 899188 - RNA, 22 nt, Human
aggcaguguucuucuaagggca

SEQ ID NO: 899189 - RNA, 22 nt, Human
uuguuaaaaugcauauucuggu

SEQ ID NO: 899190 - RNA, 22 nt, Human
uggcaaggaagagccuggugca

SEQ ID NO: 899191 - RNA, 22 nt, Human
agacagacacaugguaacagau

SEQ ID NO: 899192 - RNA, 22 nt, Human
aagagggagggcaaaggcacug

SEQ ID NO: 899193 - RNA, 22 nt, Human
gauuuacagaucuaagggucac

SEQ ID NO: 899194 - RNA, 22 nt, Human
uuuuaagaugcuaguauuucag

SEQ ID NO: 899195 - RNA, 22 nt, Human
uuugcauuuuagauuuaggccu

SEQ ID NO: 899196 - RNA, 22 nt, Human
uaugacaccauuuuggucagug

SEQ ID NO: 899197 - RNA, 22 nt, Human
ccuguuguuuacugcagugagu

SEQ ID NO: 899198 - RNA, 22 nt, Human
agaaaauaauuucuuggcuggu

SEQ ID NO: 899199 - RNA, 22 nt, Human
ggcuucaggggcccagucagca

SEQ ID NO: 899200 - RNA, 22 nt, Human
uagaaauaaaucugcagcuggg

SEQ ID NO: 899201 - RNA, 22 nt, Human
aaagguuuucaucacagcaaga

SEQ ID NO: 899202 - RNA, 22 nt, Human
cccugugcauuggaggguguuu

SEQ ID NO: 899203 - RNA, 22 nt, Human
cuggaacucaggaugguuagga

SEQ ID NO: 899204 - RNA, 22 nt, Human
cacucucucaggcuuuccuugu

SEQ ID NO: 899205 - RNA, 22 nt, Human
uugcacagaugcacaugguugc

SEQ ID NO: 899206 - RNA, 22 nt, Human
agagcagaggcauggccguggg

SEQ ID NO: 899207 - RNA, 20 nt, Human
ggaggucaaaugaugagaag

SEQ ID NO: 899208 - RNA, 22 nt, Human
cuaacauuuauugagcacuuag

SEQ ID NO: 899209 - RNA, 22 nt, Human
uggaaauuuauucaucauucau

SEQ ID NO: 899210 - RNA, 22 nt, Human
uucaguguggcccaugaagagg

SEQ ID NO: 899211 - RNA, 22 nt, Human
gccugagaaggauaggaagcga

SEQ ID NO: 899212 - RNA, 22 nt, Human
ggcucugggugugaccuugggu

SEQ ID NO: 899213 - RNA, 22 nt, Human
agaauauaguuaccaaauucug

SEQ ID NO: 899214 - RNA, 22 nt, Human
gagccagaaaagcugccugacu

SEQ ID NO: 899215 - RNA, 22 nt, Human
ugcacccucaucagucaaaugg

SEQ ID NO: 899216 - RNA, 22 nt, Human
uuuaucuucugcaguucuggcu

SEQ ID NO: 899217 - RNA, 22 nt, Human
ucagcccugaggacagaggcag

SEQ ID NO: 899218 - RNA, 22 nt, Human
cugcccugagggccuguguguu

SEQ ID NO: 899219 - RNA, 17 nt, Human
cagaaggaagcauggca

SEQ ID NO: 899220 - RNA, 22 nt, Human
cugaggcuucucuaguucagcu

SEQ ID NO: 899221 - RNA, 22 nt, Human
auguguuugguuauaugguauu

SEQ ID NO: 899222 - RNA, 22 nt, Human
uccaucauggcagcagcaguga

SEQ ID NO: 899223 - RNA, 22 nt, Human
ucaguccuccacacaggcaccc

SEQ ID NO: 899224 - RNA, 22 nt, Human
cagcugagaccagaaugcaggu

SEQ ID NO: 899225 - RNA, 22 nt, Human
uucuguuuuagaaauaaguagu

SEQ ID NO: 899226 - RNA, 22 nt, Human
auaaacaucuguuucucuucug

SEQ ID NO: 899227 - RNA, 22 nt, Human
augcguguuuguauacacacaa

SEQ ID NO: 899228 - RNA, 22 nt, Human
aagagcaggcugucaauggggc

SEQ ID NO: 899229 - RNA, 22 nt, Human
agucuucauuuguguucaagac

SEQ ID NO: 899230 - RNA, 21 nt, Human
agggaaagaaaaugagcuaau

SEQ ID NO: 899231 - RNA, 22 nt, Human
gagaggcugauccugcagagaa

SEQ ID NO: 899232 - RNA, 22 nt, Human
auuucuauaggaggacaguauu

SEQ ID NO: 899233 - RNA, 17 nt, Human
uuugauagaaucagagu

SEQ ID NO: 899234 - RNA, 22 nt, Human
uagaaguuaggaaauaggaaua

SEQ ID NO: 899235 - RNA, 22 nt, Human
cuuuacaauucaagggaacucu

SEQ ID NO: 899236 - RNA, 23 nt, Human
uggcuccaggagaagccagaagc

SEQ ID NO: 899237 - RNA, 22 nt, Human
augucugugugaucuuggauaa

SEQ ID NO: 899238 - RNA, 22 nt, Human
acugccuugauucaugcugaug

SEQ ID NO: 899239 - RNA, 22 nt, Human
uaggaaugauaauaguaaagag

SEQ ID NO: 899240 - RNA, 22 nt, Human
aaaguccaauuuuguucaggcu

SEQ ID NO: 899241 - RNA, 18 nt, Human
cucuguguuggugugaag

SEQ ID NO: 899242 - RNA, 22 nt, Human
uuucacagcuggguggcagagu

SEQ ID NO: 899243 - RNA, 22 nt, Human
gcuggcuccaaaagcaggggcu

SEQ ID NO: 899244 - RNA, 22 nt, Human
agcaacuguuacaagaacaaca

SEQ ID NO: 899245 - RNA, 22 nt, Human
ccuugcucaagcuagugacggg

SEQ ID NO: 899246 - RNA, 22 nt, Human
caauguuugugaucuacugacu

SEQ ID NO: 899247 - RNA, 22 nt, Human
uuuacaguuccaugugauaggc

SEQ ID NO: 899248 - RNA, 22 nt, Human
ccucacagggccaggccccuca

SEQ ID NO: 899249 - RNA, 22 nt, Human
uggccugguaccacauagauuu

SEQ ID NO: 899250 - RNA, 22 nt, Human
aaaucuguuucagguauauuug

SEQ ID NO: 899251 - RNA, 22 nt, Human
aggacagcccuugagagcacau

SEQ ID NO: 899252 - RNA, 23 nt, Human
aauucaaauucagugugacuagg

SEQ ID NO: 899253 - RNA, 23 nt, Human
acacauauauucagauacagaug

SEQ ID NO: 899254 - RNA, 22 nt, Human
aggaaagcucccaguagggcuc

SEQ ID NO: 899255 - RNA, 22 nt, Human
gucacacaauaguaaguggucc

SEQ ID NO: 899256 - RNA, 22 nt, Human
auuauuucagucagacacuggc

SEQ ID NO: 899257 - RNA, 22 nt, Human
gaggcugguucugaaguacugu

SEQ ID NO: 899258 - RNA, 22 nt, Human
cccaaggcugcagugagcauga

SEQ ID NO: 899259 - RNA, 21 nt, Human
ggagaaggacaauguugagua

SEQ ID NO: 899260 - RNA, 22 nt, Human
gacaaaacugagaucacacugu

SEQ ID NO: 899261 - RNA, 22 nt, Human
gaccuuuuuacuguguacgcug

SEQ ID NO: 899262 - RNA, 22 nt, Human
agugacuugacacuugugaggg

SEQ ID NO: 899263 - RNA, 20 nt, Human
aguggcugauggaaagaagc

SEQ ID NO: 899264 - RNA, 22 nt, Human
cagcauaggacaggguuucauc

SEQ ID NO: 899265 - RNA, 22 nt, Human
uuugaaaguucuucugacacua

SEQ ID NO: 899266 - RNA, 22 nt, Human
uccauuuucuaaguaucacuua

SEQ ID NO: 899267 - RNA, 22 nt, Human
ccacagcaccgcugccaguccc

SEQ ID NO: 899268 - RNA, 22 nt, Human
cagaguccccagcggcgcgggc

SEQ ID NO: 899269 - RNA, 22 nt, Human
agaaucaggaccuguggcuguc

SEQ ID NO: 899270 - RNA, 22 nt, Human
ugcaaaagaauauagauauugu

SEQ ID NO: 899271 - RNA, 22 nt, Human
aggcuuuaaguggccuacagcu

SEQ ID NO: 899272 - RNA, 22 nt, Human
ucugugugugccuguuaauauu

SEQ ID NO: 899273 - RNA, 22 nt, Human
cugcugugaguuuggaggucua

SEQ ID NO: 899274 - RNA, 22 nt, Human
gcagcauacagggagaguacuc

SEQ ID NO: 899275 - RNA, 22 nt, Human
aucaacagguauggaugagauu

SEQ ID NO: 899276 - RNA, 22 nt, Human
ugagccagccuugcagcugugc

SEQ ID NO: 899277 - RNA, 22 nt, Human
gggcucaggccuggccucucac

SEQ ID NO: 899278 - RNA, 22 nt, Human
ccaggaaagaggaagaacgcau

SEQ ID NO: 899279 - RNA, 22 nt, Human
acccaggcuggagugcaguguc

SEQ ID NO: 899280 - RNA, 22 nt, Human
ggccucugguucacagggagga

SEQ ID NO: 899281 - RNA, 22 nt, Human
aggcagggugaugauaaugauu

SEQ ID NO: 899282 - RNA, 22 nt, Human
aucugaagaaugaauggaauua

SEQ ID NO: 899283 - RNA, 21 nt, Human
uguuccuguucucuaggaucc

SEQ ID NO: 899284 - RNA, 20 nt, Human
ugcugcagacagggccauug

SEQ ID NO: 899285 - RNA, 22 nt, Human
agaaucauuagagagaaaacuu

SEQ ID NO: 899286 - RNA, 22 nt, Human
cauuuacacacagaggugugcu

SEQ ID NO: 899287 - RNA, 22 nt, Human
uuuagaagggcuggucagaaau

SEQ ID NO: 899288 - RNA, 22 nt, Human
acacuuggcucugagucacuac

SEQ ID NO: 899289 - RNA, 22 nt, Human
acccagggaccccgcugacgcc

SEQ ID NO: 899290 - RNA, 22 nt, Human
cacccaggcuggaaugcaaugg

SEQ ID NO: 899291 - RNA, 22 nt, Human
gguauuuacugagagccacucu

SEQ ID NO: 899292 - RNA, 22 nt, Human
ugacagguuguguagguggcca

SEQ ID NO: 899293 - RNA, 22 nt, Human
ucauugaagugacugaaagauu

SEQ ID NO: 899294 - RNA, 18 nt, Human
guucaagccaacaucaag

SEQ ID NO: 899295 - RNA, 22 nt, Human
uuuacagucuauguugaauuaa

SEQ ID NO: 899296 - RNA, 22 nt, Human
auaaauuaggaucugggguucc

SEQ ID NO: 899297 - RNA, 22 nt, Human
gcugggacaacaggugagcacc

SEQ ID NO: 899298 - RNA, 17 nt, Human
auguauauuaacucuga

SEQ ID NO: 899299 - RNA, 22 nt, Human
cagcagcugguugaauccuucu

SEQ ID NO: 899300 - RNA, 22 nt, Human
cugcucugacccuuucaccuuc

SEQ ID NO: 899301 - RNA, 22 nt, Human
gcucuguccagcgugcacagaa

SEQ ID NO: 899302 - RNA, 22 nt, Human
uggcugagagaagacggggaag

SEQ ID NO: 899303 - RNA, 22 nt, Human
uuauauaacucaggugggcuca

SEQ ID NO: 899304 - RNA, 22 nt, Human
ucaggcaggaucccagggaagg

SEQ ID NO: 899305 - RNA, 22 nt, Human
gaauuuuucuggaagcaauuau

SEQ ID NO: 899306 - RNA, 22 nt, Human
uuuaugacccaagaagauacca

SEQ ID NO: 899307 - RNA, 20 nt, Human
ccugucuccucuuaccuggc

SEQ ID NO: 899308 - RNA, 22 nt, Human
acagaaauauagaagguaggaa

SEQ ID NO: 899309 - RNA, 22 nt, Human
aauguccuaggcaugauuuugu

SEQ ID NO: 899310 - RNA, 22 nt, Human
caugcuggucagccaguggaug

SEQ ID NO: 899311 - RNA, 22 nt, Human
ccaggaagguguuuaacuagag

SEQ ID NO: 899312 - RNA, 22 nt, Human
ggcuccucucuggccgcucccg

SEQ ID NO: 899313 - RNA, 22 nt, Human
uuauuugaaaagaagguuacgu

SEQ ID NO: 899314 - RNA, 22 nt, Human
ggagaguggauuccagcuguau

SEQ ID NO: 899315 - RNA, 22 nt, Human
cagauggaggauaaaacaugca

SEQ ID NO: 899316 - RNA, 22 nt, Human
uucucugcucucacauacagaa

SEQ ID NO: 899317 - RNA, 22 nt, Human
cuuccugguuugaagcucgccg

SEQ ID NO: 899318 - RNA, 22 nt, Human
ccagugcucauucaaguccuua

SEQ ID NO: 899319 - RNA, 22 nt, Human
gagagcugggaaagccguggag

SEQ ID NO: 899320 - RNA, 22 nt, Human
guuauguauugggaaauccaag

SEQ ID NO: 899321 - RNA, 22 nt, Human
ugccaggcugucaauucaccca

SEQ ID NO: 899322 - RNA, 21 nt, Human
aucugaaagguuaguguugag

SEQ ID NO: 899323 - RNA, 23 nt, Human
uggagcugacagucagagggagg

SEQ ID NO: 899324 - RNA, 18 nt, Human
aggagaaagggaccaggg

SEQ ID NO: 899325 - RNA, 22 nt, Human
aaauauacggucccuaacaguc

SEQ ID NO: 899326 - RNA, 22 nt, Human
uggcagguuucguuaaaaaugg

SEQ ID NO: 899327 - RNA, 22 nt, Human
cuggagccccaggcugugcaga

SEQ ID NO: 899328 - RNA, 22 nt, Human
acucuuauucccucagaaauau

SEQ ID NO: 899329 - RNA, 22 nt, Human
cggcagggcuccaugcauuucu

SEQ ID NO: 899330 - RNA, 22 nt, Human
gagcaucuggcuagaggaguga

SEQ ID NO: 899331 - RNA, 22 nt, Human
acauagaguucaauuuucaguc

SEQ ID NO: 899332 - RNA, 22 nt, Human
gccaagaguuuccagcugcaag

SEQ ID NO: 899333 - RNA, 22 nt, Human
ugcagggucucugcaaaugagg

SEQ ID NO: 899334 - RNA, 22 nt, Human
agcagcugguucccgagggcgu

SEQ ID NO: 899335 - RNA, 21 nt, Human
cuguggaagggaacuagaggg

SEQ ID NO: 899336 - RNA, 22 nt, Human
agaaccuugaucuuggacuucu

SEQ ID NO: 899337 - RNA, 22 nt, Human
ccagucugugugccagccugcg

SEQ ID NO: 899338 - RNA, 21 nt, Human
aacugcaaaucuuagacugca

SEQ ID NO: 899339 - RNA, 19 nt, Human
gaagaaguuggaggaucuc

SEQ ID NO: 899340 - RNA, 22 nt, Human
uacagccaugguuaauuuaccu

SEQ ID NO: 899341 - RNA, 22 nt, Human
aggcccagugccauuaguuuug

SEQ ID NO: 899342 - RNA, 22 nt, Human
ccugugaaugcauuaaugagug

SEQ ID NO: 899343 - RNA, 22 nt, Human
agaguggcagcaagucagguag

SEQ ID NO: 899344 - RNA, 22 nt, Human
agccccugcuggguguagcuca

SEQ ID NO: 899345 - RNA, 22 nt, Human
gucucagaguccuacuuauucc

SEQ ID NO: 899346 - RNA, 22 nt, Human
ccagaggacuugggggcugaau

SEQ ID NO: 899347 - RNA, 22 nt, Human
acagagauguggaugagggauu

SEQ ID NO: 899348 - RNA, 22 nt, Human
uacaagaaacuacaugaaugca

SEQ ID NO: 899349 - RNA, 22 nt, Human
uccagggcagccgcgggugcgc

SEQ ID NO: 899350 - RNA, 22 nt, Human
aguuuucugauguguagugaga

SEQ ID NO: 899351 - RNA, 22 nt, Human
agcugugcugccaaguugcuga

SEQ ID NO: 899352 - RNA, 22 nt, Human
caaugaaauugagauccagaga

SEQ ID NO: 899353 - RNA, 21 nt, Human
uuucuaagugcuugguuuggg

SEQ ID NO: 899354 - RNA, 20 nt, Human
ucauggcagccacccacagg

SEQ ID NO: 899355 - RNA, 22 nt, Human
caugcacacugcaacaaggacu

SEQ ID NO: 899356 - RNA, 22 nt, Human
ucucugugagccagguccuagu

SEQ ID NO: 899357 - RNA, 22 nt, Human
uggucucuacggaggaaagcug

SEQ ID NO: 899358 - RNA, 22 nt, Human
aucuuagagagucguguuuugu

SEQ ID NO: 899359 - RNA, 22 nt, Human
ggcaggcauugcaacauguaca

SEQ ID NO: 899360 - RNA, 22 nt, Human
aaauaugacuagaaugccaggu

SEQ ID NO: 899361 - RNA, 22 nt, Human
gagcccaggaaguggaggcuga

SEQ ID NO: 899362 - RNA, 22 nt, Human
ugaggggauacgguacacauug

SEQ ID NO: 899363 - RNA, 22 nt, Human
aaacugaggcucccgagggugu

SEQ ID NO: 899364 - RNA, 22 nt, Human
gcuuuauggauuguaaacugca

SEQ ID NO: 899365 - RNA, 22 nt, Human
uaauuuugucacagugacaugc

SEQ ID NO: 899366 - RNA, 22 nt, Human
acgcaugguaaauccacugacu

SEQ ID NO: 899367 - RNA, 22 nt, Human
aacauacuuguacuaugcauau

SEQ ID NO: 899368 - RNA, 22 nt, Human
uacaggaagcacucaagaaaug

SEQ ID NO: 899369 - RNA, 22 nt, Human
ucacacagugagaaagugcgga

SEQ ID NO: 899370 - RNA, 17 nt, Human
aggagcuggggguggug

SEQ ID NO: 899371 - RNA, 22 nt, Human
uuguauuuuguuaugcuacugc

SEQ ID NO: 899372 - RNA, 22 nt, Human
acuuuacaagcuuauagccuag

SEQ ID NO: 899373 - RNA, 22 nt, Human
ggcauuuacauaaucuuauuua

SEQ ID NO: 899374 - RNA, 22 nt, Human
cagggagggacaauugucaccu

SEQ ID NO: 899375 - RNA, 22 nt, Human
gcggggggcagcagucgcucag

SEQ ID NO: 899376 - RNA, 22 nt, Human
gcuucucucaggagcaucagcc

SEQ ID NO: 899377 - RNA, 19 nt, Human
cccuggggguuucugguac

SEQ ID NO: 899378 - RNA, 20 nt, Human
ucuucagaugcuuuuggagu

SEQ ID NO: 899379 - RNA, 22 nt, Human
agaggccucuagggccccucag

SEQ ID NO: 899380 - RNA, 22 nt, Human
gacauugaacaaguuuccugac

SEQ ID NO: 899381 - RNA, 21 nt, Human
agcagaggcagaauguaugca

SEQ ID NO: 899382 - RNA, 22 nt, Human
auucacacuguauacacaggau

SEQ ID NO: 899383 - RNA, 22 nt, Human
aaugccucuuggaagaagacuu

SEQ ID NO: 899384 - RNA, 22 nt, Human
cucacacacgaagcccuuggcc

SEQ ID NO: 899385 - RNA, 22 nt, Human
ugugauuauauuguaguacauu

SEQ ID NO: 899386 - RNA, 22 nt, Human
cuggaaugcugguaaaauagca

SEQ ID NO: 899387 - RNA, 22 nt, Human
augguugaagaccaguggaaaa

SEQ ID NO: 899388 - RNA, 23 nt, Human
uaucagugugaugaggcugcugc

SEQ ID NO: 899389 - RNA, 22 nt, Human
gccagcaacuaggagcugaauu

SEQ ID NO: 899390 - RNA, 22 nt, Human
uacaaguauauucuagugauau

SEQ ID NO: 899391 - RNA, 22 nt, Human
auacauaggagaauaacuucag

SEQ ID NO: 899392 - RNA, 22 nt, Human
ggaccaggagcucagagcccuc

SEQ ID NO: 899393 - RNA, 22 nt, Human
uuaacagcuuugggucugauau

SEQ ID NO: 899394 - RNA, 22 nt, Human
ugcagcagagugggccugggug

SEQ ID NO: 899395 - RNA, 22 nt, Human
agccuggcuguaaccucauggu

SEQ ID NO: 899396 - RNA, 22 nt, Human
aguuacaaccaugacacaagca

SEQ ID NO: 899397 - RNA, 22 nt, Human
agaauucuccacgcucaggguc

SEQ ID NO: 899398 - RNA, 22 nt, Human
ugguaaggcccagcuggagucc

SEQ ID NO: 899399 - RNA, 22 nt, Human
auagcaaaggacaauagucagu

SEQ ID NO: 899400 - RNA, 22 nt, Human
ugggcugcacugcucuuuaucg

SEQ ID NO: 899401 - RNA, 22 nt, Human
aucagcaucuuuaacaauuacc

SEQ ID NO: 899402 - RNA, 22 nt, Human
aggcugaggaucccuguguucu

SEQ ID NO: 899403 - RNA, 22 nt, Human
aggcaagcugcagagaguccuu

SEQ ID NO: 899404 - RNA, 22 nt, Human
agcagccacagcagaucugagu

SEQ ID NO: 899405 - RNA, 20 nt, Human
cagguguacagugagcugag

SEQ ID NO: 899406 - RNA, 22 nt, Human
ucaggcagugguaaaugaguua

SEQ ID NO: 899407 - RNA, 22 nt, Human
uugcagcuguugcaaagucucu

SEQ ID NO: 899408 - RNA, 22 nt, Human
gcaagugauugucacgucccuu

SEQ ID NO: 899409 - RNA, 22 nt, Human
uucuugauuucaugcaguuaag

SEQ ID NO: 899410 - RNA, 22 nt, Human
agcugaggccugauuucgccgu

SEQ ID NO: 899411 - RNA, 22 nt, Human
gugauccuauaaagugagcaca

SEQ ID NO: 899412 - RNA, 21 nt, Human
acccuggguucuccauacccu

SEQ ID NO: 899413 - RNA, 22 nt, Human
ugcuuugaaagauaauacuguc

SEQ ID NO: 899414 - RNA, 22 nt, Human
uaaacaagcugucugauauucu

SEQ ID NO: 899415 - RNA, 22 nt, Human
ucuggccccggucuucacagcu

SEQ ID NO: 899416 - RNA, 22 nt, Human
ucucugcccaaguuucucaagu

SEQ ID NO: 899417 - RNA, 22 nt, Human
gagacugcugguaaagauggga

SEQ ID NO: 899418 - RNA, 22 nt, Human
uggggugccgacagggagggca

SEQ ID NO: 899419 - RNA, 22 nt, Human
agccucugguccucccucagcu

SEQ ID NO: 899420 - RNA, 22 nt, Human
cacagcugcccuacuccaugug

SEQ ID NO: 899421 - RNA, 22 nt, Human
ggcaugggguguauguggcacg

SEQ ID NO: 899422 - RNA, 22 nt, Human
agcugugggauuugggugugcc

SEQ ID NO: 899423 - RNA, 22 nt, Human
caaacugagcaucagaaaguuu

SEQ ID NO: 899424 - RNA, 22 nt, Human
cagggcuucgauggauggaugg

SEQ ID NO: 899425 - RNA, 22 nt, Human
acugugccacaauucaccaggg

SEQ ID NO: 899426 - RNA, 22 nt, Human
cugggagauaugaggaucugga

SEQ ID NO: 899427 - RNA, 22 nt, Human
acuccagggugacucugucuga

SEQ ID NO: 899428 - RNA, 21 nt, Human
aguggggucucuguggaggcc

SEQ ID NO: 899429 - RNA, 22 nt, Human
uaccugcacagccagccaugug

SEQ ID NO: 899430 - RNA, 22 nt, Human
uggcagagcaaaaagauagaau

SEQ ID NO: 899431 - RNA, 17 nt, Human
aagauuucauuagcuga

SEQ ID NO: 899432 - RNA, 22 nt, Human
agauacaaaggccuacagagca

SEQ ID NO: 899433 - RNA, 22 nt, Human
ggaagcaggaggcugggguaaa

SEQ ID NO: 899434 - RNA, 20 nt, Human
cacagaacaaauugcaggac

SEQ ID NO: 899435 - RNA, 20 nt, Human
agcuccagugcugacgcuuc

SEQ ID NO: 899436 - RNA, 21 nt, Human
aggaggagagcuuggccuacc

SEQ ID NO: 899437 - RNA, 22 nt, Human
uccugcagguggaugauucucu

SEQ ID NO: 899438 - RNA, 20 nt, Human
agguaaugggagaaaauguu

SEQ ID NO: 899439 - RNA, 22 nt, Human
aauaacuugaagaucucuucca

SEQ ID NO: 899440 - RNA, 22 nt, Human
uugcaguugcuguauuuaagga

SEQ ID NO: 899441 - RNA, 22 nt, Human
ucaccaguuaaaauaacaguaa

SEQ ID NO: 899442 - RNA, 22 nt, Human
gugcagauccugauugcaguuc

SEQ ID NO: 899443 - RNA, 22 nt, Human
auuggucugugagcuguugaca

SEQ ID NO: 899444 - RNA, 22 nt, Human
ugucuccucuguccugucagga

SEQ ID NO: 899445 - RNA, 19 nt, Human
ucaggcaguuauucacaaa

SEQ ID NO: 899446 - RNA, 22 nt, Human
gucacuuuuaagggccuuuucu

SEQ ID NO: 899447 - RNA, 22 nt, Human
agugucuguugaguuucaaaag

SEQ ID NO: 899448 - RNA, 22 nt, Human
gaggccuggcugggaggaggug

SEQ ID NO: 899449 - RNA, 22 nt, Human
uguauuuguuguuaaauggaga

SEQ ID NO: 899450 - RNA, 22 nt, Human
uucugggcucccacauauuuca

SEQ ID NO: 899451 - RNA, 22 nt, Human
caguugcacuagccacauuuca

SEQ ID NO: 899452 - RNA, 22 nt, Human
aaggaagaaucaucacguuggg

SEQ ID NO: 899453 - RNA, 22 nt, Human
caggaacagcaccaggagcuag

SEQ ID NO: 899454 - RNA, 22 nt, Human
uggcucagauuuuuguaggcuu

SEQ ID NO: 899455 - RNA, 22 nt, Human
ggaagaggcugagccagguccc

SEQ ID NO: 899456 - RNA, 22 nt, Human
agcagcagcucauucuuccugu

SEQ ID NO: 899457 - RNA, 22 nt, Human
agagacugcaaaucauaagaau

SEQ ID NO: 899458 - RNA, 21 nt, Human
gcucagcugcuugguuccugu

SEQ ID NO: 899459 - RNA, 22 nt, Human
cugccuguggucugugaucuaa

SEQ ID NO: 899460 - RNA, 22 nt, Human
gaggccaggagugcuguaaguu

SEQ ID NO: 899461 - RNA, 22 nt, Human
gcuggggugugguggauaagcu

SEQ ID NO: 899462 - RNA, 22 nt, Human
gcucaggccucggacacacaau

SEQ ID NO: 899463 - RNA, 22 nt, Human
gaggagcuugaggcuaggagcc

SEQ ID NO: 899464 - RNA, 22 nt, Human
ccuuggugcucugcugggaugg

SEQ ID NO: 899465 - RNA, 22 nt, Human
aucagcaaguccuguuaauucu

SEQ ID NO: 899466 - RNA, 22 nt, Human
agcugccuucccucucauuagg

SEQ ID NO: 899467 - RNA, 23 nt, Human
auguaucucauccaaggaagcuc

SEQ ID NO: 899468 - RNA, 21 nt, Human
gagauuuagaaggaucaauuu

SEQ ID NO: 899469 - RNA, 22 nt, Human
uuuucauggccaccgcaaguga

SEQ ID NO: 899470 - RNA, 22 nt, Human
ucauuucagaugcauuuagaau

SEQ ID NO: 899471 - RNA, 20 nt, Human
cccaaagcuucauaugagcc

SEQ ID NO: 899472 - RNA, 20 nt, Human
gcacaucugcuuuggauuuc

SEQ ID NO: 899473 - RNA, 20 nt, Human
aacugagaguucaggaggag

SEQ ID NO: 899474 - RNA, 22 nt, Human
ccuagaggcugcaaggagaggc

SEQ ID NO: 899475 - RNA, 22 nt, Human
uugcagggaaacaguuuaggaa

SEQ ID NO: 899476 - RNA, 22 nt, Human
agaauccuugacucaggcugag

SEQ ID NO: 899477 - RNA, 22 nt, Human
ugucagaugugucuccaagugc

SEQ ID NO: 899478 - RNA, 23 nt, Human
uucaaagaucuucugaaaucugu

SEQ ID NO: 899479 - RNA, 22 nt, Human
uuaucauaaguaauugaaauaa

SEQ ID NO: 899480 - RNA, 22 nt, Human
caacugaggucucagccaauua

SEQ ID NO: 899481 - RNA, 22 nt, Human
gggcuccaacuacaucagccuu

SEQ ID NO: 899482 - RNA, 22 nt, Human
gcagccuccgcacugcgagucc

SEQ ID NO: 899483 - RNA, 22 nt, Human
ugaggggaaggcaugauaaaua

SEQ ID NO: 899484 - RNA, 17 nt, Human
aagacagaagccaugag

SEQ ID NO: 899485 - RNA, 22 nt, Human
auugcuuaucuaucuuuaaguc

SEQ ID NO: 899486 - RNA, 22 nt, Human
uggcaggagacacauggcauag

SEQ ID NO: 899487 - RNA, 22 nt, Human
uaugcuuugaaaaugugcugaa

SEQ ID NO: 899488 - RNA, 21 nt, Human
ucaugugcugaggaugaugcc

SEQ ID NO: 899489 - RNA, 22 nt, Human
gaaagcugggaaauaaauauua

SEQ ID NO: 899490 - RNA, 22 nt, Human
uggcccugcuuaugucucucuu

SEQ ID NO: 899491 - RNA, 22 nt, Human
acauguguaagaugugauauau

SEQ ID NO: 899492 - RNA, 22 nt, Human
gcagggggauggaguugaaaug

SEQ ID NO: 899493 - RNA, 22 nt, Human
gaauacauguguguauagaggu

SEQ ID NO: 899494 - RNA, 22 nt, Human
aaugucuagacauguuaaugca

SEQ ID NO: 899495 - RNA, 22 nt, Human
cuggaagggagcacuguagaga

SEQ ID NO: 899496 - RNA, 22 nt, Human
agcuccuguggcagcucuucug

SEQ ID NO: 899497 - RNA, 22 nt, Human
aggcugcagugcagguaggauu

SEQ ID NO: 899498 - RNA, 22 nt, Human
ugauucaagccaccacauacug

SEQ ID NO: 899499 - RNA, 22 nt, Human
cugaaaaacgggauuuggcugg

SEQ ID NO: 899500 - RNA, 22 nt, Human
aauguguagauguugcauuccu

SEQ ID NO: 899501 - RNA, 22 nt, Human
ucuggcucuauaacuccuagcu

SEQ ID NO: 899502 - RNA, 22 nt, Human
uuuguucagcucucauugauua

SEQ ID NO: 899503 - RNA, 22 nt, Human
cuguacucaagguaaaccagga

SEQ ID NO: 899504 - RNA, 22 nt, Human
ugcacacauucuauggggcuga

SEQ ID NO: 899505 - RNA, 22 nt, Human
ugauucucaaagguagacuggg

SEQ ID NO: 899506 - RNA, 22 nt, Human
ccagaggcuggcaagggcuccu

SEQ ID NO: 899507 - RNA, 22 nt, Human
ucacacagguuugcaaugauuu

SEQ ID NO: 899508 - RNA, 22 nt, Human
cucugugcucccaugcuaguaa

SEQ ID NO: 899509 - RNA, 19 nt, Human
cccaggcuacauggagagg

SEQ ID NO: 899510 - RNA, 22 nt, Human
gucuggcuagagacacccuccc

SEQ ID NO: 899511 - RNA, 21 nt, Human
auacaagaagauggcagucug

SEQ ID NO: 899512 - RNA, 22 nt, Human
auggcccaggccuccuguggcu

SEQ ID NO: 899513 - RNA, 22 nt, Human
uggguccacuucugcacugugg

SEQ ID NO: 899514 - RNA, 21 nt, Human
accaggcuugugggagggagc

SEQ ID NO: 899515 - RNA, 22 nt, Human
auacaugugugagcgaagaugu

SEQ ID NO: 899516 - RNA, 22 nt, Human
uucugaggaggagcaaaaacuc

SEQ ID NO: 899517 - RNA, 22 nt, Human
ggcaccucugggcucuguuagg

SEQ ID NO: 899518 - RNA, 19 nt, Human
uguucuagcggcaccaggc

SEQ ID NO: 899519 - RNA, 22 nt, Human
gacuccagguguccaggccucc

SEQ ID NO: 899520 - RNA, 23 nt, Human
ugucuggggcgccagaagagaga

SEQ ID NO: 899521 - RNA, 22 nt, Human
auguccagaguaaagcacauuc

SEQ ID NO: 899522 - RNA, 22 nt, Human
caauguuugaguaggagcauaa

SEQ ID NO: 899523 - RNA, 17 nt, Human
aggcuggcucacaggga

SEQ ID NO: 899524 - RNA, 16 nt, Human
auucacaaggcaucgg

SEQ ID NO: 899525 - RNA, 21 nt, Human
augcauauuuuaaguuguguc

SEQ ID NO: 899526 - RNA, 22 nt, Human
guguuuccccuccuggagaagg

SEQ ID NO: 899527 - RNA, 22 nt, Human
augaaguucuagugagaaaugc

SEQ ID NO: 899528 - RNA, 22 nt, Human
guauuguagcuacaauagacgu

SEQ ID NO: 899529 - RNA, 22 nt, Human
ucaaaaauggucuuugagcugc

SEQ ID NO: 899530 - RNA, 23 nt, Human
ugggaccuguuugcccacagaug

SEQ ID NO: 899531 - RNA, 23 nt, Human
uggucucacuugguaagaugaag

SEQ ID NO: 899532 - RNA, 22 nt, Human
ggaagaggcugaggccaugcug

SEQ ID NO: 899533 - RNA, 22 nt, Human
ucuuugcugaguacaucuccaa

SEQ ID NO: 899534 - RNA, 22 nt, Human
ugucauauccuccuuaaaggug

SEQ ID NO: 899535 - RNA, 20 nt, Human
ggacagugagacauaucuca

SEQ ID NO: 899536 - RNA, 22 nt, Human
gcggcaggaagagcgcagcccc

SEQ ID NO: 899537 - RNA, 22 nt, Human
uguauauguguauuuuaugaca

SEQ ID NO: 899538 - RNA, 22 nt, Human
uuaauaacauuguguaucaccc

SEQ ID NO: 899539 - RNA, 23 nt, Human
cccagcagauuguaaagugucca

SEQ ID NO: 899540 - RNA, 23 nt, Human
gcaguguuugcuucaucuuaucc

SEQ ID NO: 899541 - RNA, 22 nt, Human
ugaugacaugugggcuguggcu

SEQ ID NO: 899542 - RNA, 22 nt, Human
auguccagggcuuuagcggggc

SEQ ID NO: 899543 - RNA, 22 nt, Human
ucaggaaggcaaauugcaugau

SEQ ID NO: 899544 - RNA, 22 nt, Human
ccuggcucgcugaccucagggg

SEQ ID NO: 899545 - RNA, 22 nt, Human
ggccccugcggacugccuagag

SEQ ID NO: 899546 - RNA, 22 nt, Human
uucugcagcccaacaguaguuu

SEQ ID NO: 899547 - RNA, 22 nt, Human
gugaggaugcagaugagggccu

SEQ ID NO: 899548 - RNA, 22 nt, Human
uggggaagacagcagacacugu

SEQ ID NO: 899549 - RNA, 22 nt, Human
uccaggagaaaacugacggugg

SEQ ID NO: 899550 - RNA, 22 nt, Human
uuucagugcuucuguuuaccgg

SEQ ID NO: 899551 - RNA, 22 nt, Human
ugacaacaucauuuuugugugg

SEQ ID NO: 899552 - RNA, 22 nt, Human
gccuggaggggccaggguggua

SEQ ID NO: 899553 - RNA, 23 nt, Human
gacagagugagaccuugucuuac

SEQ ID NO: 899554 - RNA, 22 nt, Human
ugcaaaaugacuucugaaaaga

SEQ ID NO: 899555 - RNA, 22 nt, Human
ugucauuuucauccuaaggagc

SEQ ID NO: 899556 - RNA, 22 nt, Human
agacagggucuugaucagagcu

SEQ ID NO: 899557 - RNA, 22 nt, Human
ccaaggugggcagaucacgagg

SEQ ID NO: 899558 - RNA, 22 nt, Human
cugagccaugggucuaagcacu

SEQ ID NO: 899559 - RNA, 22 nt, Human
cucugaaaguuagagaaaauag

SEQ ID NO: 899560 - RNA, 22 nt, Human
uuaaagcugagcccucagaagc

SEQ ID NO: 899561 - RNA, 22 nt, Human
cagcagaaaaugugggugauuu

SEQ ID NO: 899562 - RNA, 22 nt, Human
cugucccaggagcuguaagaca

SEQ ID NO: 899563 - RNA, 22 nt, Human
cagugccucuuaagugucaccc

SEQ ID NO: 899564 - RNA, 22 nt, Human
aaggcacaacacaagaggguga

SEQ ID NO: 899565 - RNA, 22 nt, Human
acauucuuucgaugucugauuu

SEQ ID NO: 899566 - RNA, 22 nt, Human
gauauaaauuaaucaagugcaa

SEQ ID NO: 899567 - RNA, 22 nt, Human
cagaggcauauaauugcugggg

SEQ ID NO: 899568 - RNA, 22 nt, Human
cugggaggcagucucucuagaa

SEQ ID NO: 899569 - RNA, 22 nt, Human
gggcugccugagcaucuccucc

SEQ ID NO: 899570 - RNA, 22 nt, Human
uuggaaaaacacgauagugguu

SEQ ID NO: 899571 - RNA, 22 nt, Human
cugugcaguaggucagggcugg

SEQ ID NO: 899572 - RNA, 22 nt, Human
acagugcuaucaauagcuagaa

SEQ ID NO: 899573 - RNA, 22 nt, Human
uuuacaccauuagaagcuacuu

SEQ ID NO: 899574 - RNA, 22 nt, Human
aaauguuuaaguguaggagcaa

SEQ ID NO: 899575 - RNA, 22 nt, Human
ugauucuagguccauuauuugc

SEQ ID NO: 899576 - RNA, 22 nt, Human
uagcugaugaauaauuauucuu

SEQ ID NO: 899577 - RNA, 22 nt, Human
uagcauuuuagcuguuuucucu

SEQ ID NO: 899578 - RNA, 23 nt, Human
ggcuggugcccuuggccagucgg

SEQ ID NO: 899579 - RNA, 22 nt, Human
ucugagccaauuucugugucca

SEQ ID NO: 899580 - RNA, 23 nt, Human
ucacacagcuggucagguacaga

SEQ ID NO: 899581 - RNA, 22 nt, Human
auuggucauaaauugagugauu

SEQ ID NO: 899582 - RNA, 22 nt, Human
uuuuaugugugaaaugcugucu

SEQ ID NO: 899583 - RNA, 22 nt, Human
gaggucaggggagaggcugaug

SEQ ID NO: 899584 - RNA, 22 nt, Human
ccuguccagggacugagggaga

SEQ ID NO: 899585 - RNA, 20 nt, Human
aguguacagacacuagaaau

SEQ ID NO: 899586 - RNA, 22 nt, Human
gcuggacuuagagguggaaaag

SEQ ID NO: 899587 - RNA, 22 nt, Human
ugugaggccuagacagccuggg

SEQ ID NO: 899588 - RNA, 23 nt, Human
aaauccugccucuuguauuuauc

SEQ ID NO: 899589 - RNA, 22 nt, Human
cuauuagcugaauaaugcauug

SEQ ID NO: 899590 - RNA, 23 nt, Human
uggcaucuuggcaucuugcugcu

SEQ ID NO: 899591 - RNA, 22 nt, Human
aggcugaggaucguacuuucca

SEQ ID NO: 899592 - RNA, 22 nt, Human
agccugggaauuuagaguucgg

SEQ ID NO: 899593 - RNA, 22 nt, Human
ugcagggccgcuggaggucaug

SEQ ID NO: 899594 - RNA, 22 nt, Human
agccaggauggucucgaucggc

SEQ ID NO: 899595 - RNA, 22 nt, Human
acagagaccuggccuugcuuug

SEQ ID NO: 899596 - RNA, 22 nt, Human
acugucaucuuguaagcaaugu

SEQ ID NO: 899597 - RNA, 23 nt, Human
aggcugcagaagaauagggucau

SEQ ID NO: 899598 - RNA, 21 nt, Human
gaacccagcagcagugcucug

SEQ ID NO: 899599 - RNA, 22 nt, Human
gggcgccgugggaaacagccgg

SEQ ID NO: 899600 - RNA, 22 nt, Human
uguguucaagauuaguucuagu

SEQ ID NO: 899601 - RNA, 22 nt, Human
ucagaggagcaaaagaggggau

SEQ ID NO: 899602 - RNA, 22 nt, Human
aauaggaagucacaucaaggga

SEQ ID NO: 899603 - RNA, 22 nt, Human
agaggcugagaaacccucuucu

SEQ ID NO: 899604 - RNA, 22 nt, Human
caccugcucccucaguuccagc

SEQ ID NO: 899605 - RNA, 22 nt, Human
acauauguuguaaacauuccaa

SEQ ID NO: 899606 - RNA, 22 nt, Human
cuagaaacgccuuuagcacaac

SEQ ID NO: 899607 - RNA, 22 nt, Human
guucucuggagucccugggccc

SEQ ID NO: 899608 - RNA, 22 nt, Human
cuaucuuucgauucuagcuuaa

SEQ ID NO: 899609 - RNA, 22 nt, Human
aggagggugggaagcaguuuua

SEQ ID NO: 899610 - RNA, 22 nt, Human
aaacucaaagucagaucagaga

SEQ ID NO: 899611 - RNA, 22 nt, Human
ugguaaaguugauuggugcucu

SEQ ID NO: 899612 - RNA, 22 nt, Human
ccaaggaguagagcaggaagcu

SEQ ID NO: 899613 - RNA, 22 nt, Human
aggagacagccaggggccugag

SEQ ID NO: 899614 - RNA, 22 nt, Human
ugcgauguaugcaguauuuguu

SEQ ID NO: 899615 - RNA, 22 nt, Human
agagcuggcugguagcccugau

SEQ ID NO: 899616 - RNA, 22 nt, Human
uagcaccacaaucaagauacag

SEQ ID NO: 899617 - RNA, 22 nt, Human
agugucugcuuugagucaggug

SEQ ID NO: 899618 - RNA, 21 nt, Human
uccagcucucauaguguucca

SEQ ID NO: 899619 - RNA, 22 nt, Human
gagcugaguguccuaggcaugg

SEQ ID NO: 899620 - RNA, 22 nt, Human
ggugguggucccgacuugggag

SEQ ID NO: 899621 - RNA, 22 nt, Human
uggaaauuaacuugguacauau

SEQ ID NO: 899622 - RNA, 22 nt, Human
agaagcagggcagggaaaagca

SEQ ID NO: 899623 - RNA, 22 nt, Human
gaggagaaugcgcaccacauau

SEQ ID NO: 899624 - RNA, 22 nt, Human
uugugucugggggagugacauc

SEQ ID NO: 899625 - RNA, 22 nt, Human
ucagaaccagcccagcagauga

SEQ ID NO: 899626 - RNA, 22 nt, Human
ugcuuuauggauuuguguccug

SEQ ID NO: 899627 - RNA, 22 nt, Human
aucugaaacucugacauugucu

SEQ ID NO: 899628 - RNA, 22 nt, Human
cauguacacacaaagggacaau

SEQ ID NO: 899629 - RNA, 22 nt, Human
gguggcacacuggggagcucgg

SEQ ID NO: 899630 - RNA, 22 nt, Human
aaucugcacccacugaaaaugc

SEQ ID NO: 899631 - RNA, 22 nt, Human
aguaauaauaguagccggcauu

SEQ ID NO: 899632 - RNA, 22 nt, Human
uuuguagagaauguuaagcacu

SEQ ID NO: 899633 - RNA, 22 nt, Human
agagcacaugguuccugugucc

SEQ ID NO: 899634 - RNA, 22 nt, Human
cugagcgcaugguugcugggga

SEQ ID NO: 899635 - RNA, 22 nt, Human
cagcccugagagaaccaucuau

SEQ ID NO: 899636 - RNA, 22 nt, Human
uugaaacauuaccuguauuucc

SEQ ID NO: 899637 - RNA, 22 nt, Human
uccuuuguucgggugugcuguc

SEQ ID NO: 899638 - RNA, 22 nt, Human
aguguauuaaguuaugaaguua

SEQ ID NO: 899639 - RNA, 22 nt, Human
aucaaugcucuguacccagaau

SEQ ID NO: 899640 - RNA, 22 nt, Human
cugccugugccaccgccucauu

SEQ ID NO: 899641 - RNA, 22 nt, Human
gcuuggcaggucugggauuguu

SEQ ID NO: 899642 - RNA, 23 nt, Human
cuucucagaagucugugccagga

SEQ ID NO: 899643 - RNA, 22 nt, Human
auauguuuuucacagguuuaag

SEQ ID NO: 899644 - RNA, 22 nt, Human
aucuugcugcuacaaagugccc

SEQ ID NO: 899645 - RNA, 22 nt, Human
uacguguguucguguaagcacu

SEQ ID NO: 899646 - RNA, 22 nt, Human
agcagagcccuuccauggccuu

SEQ ID NO: 899647 - RNA, 22 nt, Human
cccaggcagugugugcaugcgu

SEQ ID NO: 899648 - RNA, 22 nt, Human
acaugacuauaauuacuuaaau

SEQ ID NO: 899649 - RNA, 20 nt, Human
aaugggcuuugaugagugug

SEQ ID NO: 899650 - RNA, 21 nt, Human
gucaggcccauagcagugccu

SEQ ID NO: 899651 - RNA, 22 nt, Human
ugcugccuccuuccugccagga

SEQ ID NO: 899652 - RNA, 19 nt, Human
gcagguagagacagcagcc

SEQ ID NO: 899653 - RNA, 22 nt, Human
uccuggccgcuggccccugaga

SEQ ID NO: 899654 - RNA, 22 nt, Human
ucauuugugcaauguagaugaa

SEQ ID NO: 899655 - RNA, 22 nt, Human
cucugggaaagauugugcaggc

SEQ ID NO: 899656 - RNA, 22 nt, Human
gcccuugacaguggcagaagca

SEQ ID NO: 899657 - RNA, 22 nt, Human
uacucccaccauggcugauuuc

SEQ ID NO: 899658 - RNA, 22 nt, Human
ccaggagggugguuacucaauc

SEQ ID NO: 899659 - RNA, 22 nt, Human
ugucaggugacacacuaggagc

SEQ ID NO: 899660 - RNA, 22 nt, Human
cagggcucaucugugugaccag

SEQ ID NO: 899661 - RNA, 22 nt, Human
ugucucugguauuaggugaaaa

SEQ ID NO: 899662 - RNA, 22 nt, Human
ugcaaacuauugguagagaugg

SEQ ID NO: 899663 - RNA, 22 nt, Human
gugaauaacuuucuauguuaau

SEQ ID NO: 899664 - RNA, 19 nt, Human
acaaauuguccucaucaag

SEQ ID NO: 899665 - RNA, 22 nt, Human
agucagcauauauggaguaagg

SEQ ID NO: 899666 - RNA, 22 nt, Human
uuuacaauucucuaccaguguu

SEQ ID NO: 899667 - RNA, 22 nt, Human
aucacaguuuacaaaccugcug

SEQ ID NO: 899668 - RNA, 22 nt, Human
caucuuauaggcagaguucagu

SEQ ID NO: 899669 - RNA, 22 nt, Human
aagaaauuaaggaaugcaacga

SEQ ID NO: 899670 - RNA, 22 nt, Human
gggcagguuauuggaguaggga

SEQ ID NO: 899671 - RNA, 22 nt, Human
gcugaagugcuuuugaauuugg

SEQ ID NO: 899672 - RNA, 22 nt, Human
aucuuuggucuugagugcaucu

SEQ ID NO: 899673 - RNA, 22 nt, Human
gccccagguugccugucccagg

SEQ ID NO: 899674 - RNA, 22 nt, Human
uaguaugggaagaacuuuguag

SEQ ID NO: 899675 - RNA, 22 nt, Human
aggcugaggcagguggaucauu

SEQ ID NO: 899676 - RNA, 22 nt, Human
ucuucaugucaugguauauuga

SEQ ID NO: 899677 - RNA, 22 nt, Human
gggcucagcuccuuccuuccua

SEQ ID NO: 899678 - RNA, 22 nt, Human
ccagugcgcaggcgccaccugu

SEQ ID NO: 899679 - RNA, 22 nt, Human
ggucgucucagucugacugaag

SEQ ID NO: 899680 - RNA, 22 nt, Human
guccuuugaaggcaaaaggaga

SEQ ID NO: 899681 - RNA, 22 nt, Human
cacaggcaccccugacugcuca

SEQ ID NO: 899682 - RNA, 22 nt, Human
aauguguauacuggcaauuaag

SEQ ID NO: 899683 - RNA, 22 nt, Human
ccuggcagcgugccgagcugcg

SEQ ID NO: 899684 - RNA, 22 nt, Human
uguggggaggcugcagugcugc

SEQ ID NO: 899685 - RNA, 19 nt, Human
gagaaaccccgucuuuagg

SEQ ID NO: 899686 - RNA, 17 nt, Human
ucuucucuuccagucuu

SEQ ID NO: 899687 - RNA, 22 nt, Human
uccccagcucugugcuuccacu

SEQ ID NO: 899688 - RNA, 22 nt, Human
cuguccuccggccaccuacagu

SEQ ID NO: 899689 - RNA, 22 nt, Human
auacauuagcucauaugauuaa

SEQ ID NO: 899690 - RNA, 22 nt, Human
ucuaaauucaguuuauuuugau

SEQ ID NO: 899691 - RNA, 22 nt, Human
caggggaagaugccaagggaga

SEQ ID NO: 899692 - RNA, 22 nt, Human
gcaggggcugcugggaacucgg

SEQ ID NO: 899693 - RNA, 21 nt, Human
gggcucaguggaaaagagugu

SEQ ID NO: 899694 - RNA, 22 nt, Human
cacacagaugguaagggaggga

SEQ ID NO: 899695 - RNA, 22 nt, Human
ccagcuccccucagcagguaau

SEQ ID NO: 899696 - RNA, 22 nt, Human
caaagguuaugaaccacuugua

SEQ ID NO: 899697 - RNA, 22 nt, Human
caugcaagacaaucuuuaaaau

SEQ ID NO: 899698 - RNA, 21 nt, Human
uuucucauaaaauacucauua

SEQ ID NO: 899699 - RNA, 22 nt, Human
aggagaaggaggccccucacac

SEQ ID NO: 899700 - RNA, 22 nt, Human
ccaggagguggagauugcagug

SEQ ID NO: 899701 - RNA, 17 nt, Human
agggggaaccugggagg

SEQ ID NO: 899702 - RNA, 22 nt, Human
uuucacaaaugucuuuaacuug

SEQ ID NO: 899703 - RNA, 22 nt, Human
cccaggaggcagaaguugcagu

SEQ ID NO: 899704 - RNA, 22 nt, Human
gcuuucugggcuauagaacggg

SEQ ID NO: 899705 - RNA, 22 nt, Human
gcagcugccuaaagugcuaaga

SEQ ID NO: 899706 - RNA, 22 nt, Human
auuccuucuaaaacgcugcccu

SEQ ID NO: 899707 - RNA, 22 nt, Human
gcgguagcucaagcuuguaauc

SEQ ID NO: 899708 - RNA, 23 nt, Human
ucuuuuuaagagaucuagugacg

SEQ ID NO: 899709 - RNA, 22 nt, Human
gugugggacgggugaguggcca

SEQ ID NO: 899710 - RNA, 18 nt, Human
gaggcagcuagcaauuuu

SEQ ID NO: 899711 - RNA, 22 nt, Human
aauaguuuuauaggugggauua

SEQ ID NO: 899712 - RNA, 22 nt, Human
ggcuucauggacaaaagccuca

SEQ ID NO: 899713 - RNA, 23 nt, Human
ccugcagcugcuggggcuccacc

SEQ ID NO: 899714 - RNA, 22 nt, Human
agagaaggaaagcugacauggg

SEQ ID NO: 899715 - RNA, 22 nt, Human
ugcugagaggaaggugcacugg

SEQ ID NO: 899716 - RNA, 22 nt, Human
cugugcccaggcuggagugcag

SEQ ID NO: 899717 - RNA, 22 nt, Human
uuuacacauuauuuucagugug

SEQ ID NO: 899718 - RNA, 22 nt, Human
aaaugcagaaugauuucaucua

SEQ ID NO: 899719 - RNA, 23 nt, Human
uagcagcauuuuuagccucuguc

SEQ ID NO: 899720 - RNA, 22 nt, Human
cuauuauuagcaaaagguggau

SEQ ID NO: 899721 - RNA, 22 nt, Human
uguccagggauggggucaggga

SEQ ID NO: 899722 - RNA, 22 nt, Human
aacuggaaugaaauuuacgaug

SEQ ID NO: 899723 - RNA, 22 nt, Human
uucucagggcaucucaugaccc

SEQ ID NO: 899724 - RNA, 22 nt, Human
gcugcccaguucugcugcugcc

SEQ ID NO: 899725 - RNA, 22 nt, Human
ugcaccugagaggucucugagg

SEQ ID NO: 899726 - RNA, 22 nt, Human
uuugaaauguaucaguauaggu

SEQ ID NO: 899727 - RNA, 22 nt, Human
uuuauccauaucauuaaaaucu

SEQ ID NO: 899728 - RNA, 22 nt, Human
aagaggcaucucagcuuccucu

SEQ ID NO: 899729 - RNA, 22 nt, Human
agucauguaaucacaaugaccu

SEQ ID NO: 899730 - RNA, 22 nt, Human
uguguccauucaggcacugacc

SEQ ID NO: 899731 - RNA, 22 nt, Human
uagcaaccuauggauagagaag

SEQ ID NO: 899732 - RNA, 20 nt, Human
gggcuagguagccauuuggc

SEQ ID NO: 899733 - RNA, 21 nt, Human
acacaacaggcagucauuuuc

SEQ ID NO: 899734 - RNA, 22 nt, Human
auccugggaaguggccuccucc

SEQ ID NO: 899735 - RNA, 22 nt, Human
agcuaauguauguugaaagcac

SEQ ID NO: 899736 - RNA, 22 nt, Human
uucagcuucauuugucuuuaug

SEQ ID NO: 899737 - RNA, 22 nt, Human
cauucauuuaugaaauaucuau

SEQ ID NO: 899738 - RNA, 23 nt, Human
acugcugucuuugaagugcuuga

SEQ ID NO: 899739 - RNA, 22 nt, Human
cuggaaguggagaguggcccuc

SEQ ID NO: 899740 - RNA, 22 nt, Human
guuucccaggcuguggggcccu

SEQ ID NO: 899741 - RNA, 22 nt, Human
uucuuauucuugaaauguggga

SEQ ID NO: 899742 - RNA, 22 nt, Human
cuggcccuguaggaugugaguu

SEQ ID NO: 899743 - RNA, 22 nt, Human
aaaacauugaauugcacacuau

SEQ ID NO: 899744 - RNA, 22 nt, Human
acauaguuagcuuagagauacu

SEQ ID NO: 899745 - RNA, 22 nt, Human
gccagagguaucaaagauagua

SEQ ID NO: 899746 - RNA, 22 nt, Human
gagcuccacuuagcaaggccac

SEQ ID NO: 899747 - RNA, 22 nt, Human
auguaaccaccacacaaagcaa

SEQ ID NO: 899748 - RNA, 22 nt, Human
ucaggcugguccccacagugga

SEQ ID NO: 899749 - RNA, 22 nt, Human
uaggaaauauuugaacauagga

SEQ ID NO: 899750 - RNA, 22 nt, Human
aguguuagauucuuacucaguu

SEQ ID NO: 899751 - RNA, 22 nt, Human
ucacagacaccuuggccacagu

SEQ ID NO: 899752 - RNA, 22 nt, Human
aauguuucuggauauugugggu

SEQ ID NO: 899753 - RNA, 22 nt, Human
ccuaaguugagaagccaguagc

SEQ ID NO: 899754 - RNA, 22 nt, Human
gcaaacauucaggaguacagga

SEQ ID NO: 899755 - RNA, 22 nt, Human
uuucaaaguaaggauuuucauc

SEQ ID NO: 899756 - RNA, 22 nt, Human
guugucagguaaaacaguaugg

SEQ ID NO: 899757 - RNA, 23 nt, Human
uuguggaagggagauggcaacag

SEQ ID NO: 899758 - RNA, 22 nt, Human
ccaggacaaguguggccauggc

SEQ ID NO: 899759 - RNA, 23 nt, Human
agcagcaaaaauuuaucuuucug

SEQ ID NO: 899760 - RNA, 22 nt, Human
gcugugugcucuggucuuucuu

SEQ ID NO: 899761 - RNA, 22 nt, Human
gcccuuacaggguggucagcca

SEQ ID NO: 899762 - RNA, 22 nt, Human
aucgaggaaaggacaguuccuu

SEQ ID NO: 899763 - RNA, 19 nt, Human
caggagagcaugcacuuug

SEQ ID NO: 899764 - RNA, 22 nt, Human
aaauucaaugaucacuggcuca

SEQ ID NO: 899765 - RNA, 22 nt, Human
aacccuggcccuggaauaggca

SEQ ID NO: 899766 - RNA, 22 nt, Human
acauugaacauggcaggacauu

SEQ ID NO: 899767 - RNA, 22 nt, Human
gaauacauuggaaaucagaaua

SEQ ID NO: 899768 - RNA, 22 nt, Human
ggcagcugcugcauuacguugu

SEQ ID NO: 899769 - RNA, 22 nt, Human
ugaggucauggcugauauuucc

SEQ ID NO: 899770 - RNA, 21 nt, Human
aggguggcucugggucagaac

SEQ ID NO: 899771 - RNA, 22 nt, Human
ugcugccaccugugguagucug

SEQ ID NO: 899772 - RNA, 22 nt, Human
ugagccagauaagggcucacgc

SEQ ID NO: 899773 - RNA, 22 nt, Human
ggcugggaggccgugcugaccu

SEQ ID NO: 899774 - RNA, 22 nt, Human
uagcugcuuagaaaucacugag

SEQ ID NO: 899775 - RNA, 22 nt, Human
uuuguuauaacaauaaaaaguc

SEQ ID NO: 899776 - RNA, 22 nt, Human
uccucacaagcauccugucuca

SEQ ID NO: 899777 - RNA, 22 nt, Human
guagcuuauuagggauaauagu

SEQ ID NO: 899778 - RNA, 22 nt, Human
cugucacccacccagccuguca

SEQ ID NO: 899779 - RNA, 22 nt, Human
uggaaaaacugagacuuagaca

SEQ ID NO: 899780 - RNA, 22 nt, Human
guuucuguaagacugaauugac

SEQ ID NO: 899781 - RNA, 22 nt, Human
uucucugcagcuccuggcuggg

SEQ ID NO: 899782 - RNA, 22 nt, Human
ugggaagaugauaauucacagu

SEQ ID NO: 899783 - RNA, 22 nt, Human
ccuggaccaaacacuggccugg

SEQ ID NO: 899784 - RNA, 22 nt, Human
guccagggcuaaaucagguucc

SEQ ID NO: 899785 - RNA, 22 nt, Human
ugcauggaacggucuccugguc

SEQ ID NO: 899786 - RNA, 22 nt, Human
acaguuccugacuuuaacucca

SEQ ID NO: 899787 - RNA, 19 nt, Human
aaucagaaauaucgaggcc

SEQ ID NO: 899788 - RNA, 22 nt, Human
uucuaggggacauaauaugaaa

SEQ ID NO: 899789 - RNA, 23 nt, Human
ucagaacaaugccuuaggggcau

SEQ ID NO: 899790 - RNA, 22 nt, Human
uuccucagccaaggcugggauc

SEQ ID NO: 899791 - RNA, 22 nt, Human
guggcagcggcccaggccgucu

SEQ ID NO: 899792 - RNA, 22 nt, Human
agugcagcuauuacaacagugu

SEQ ID NO: 899793 - RNA, 22 nt, Human
uuucacaaacucagggugugug

SEQ ID NO: 899794 - RNA, 22 nt, Human
uggcuggaccugggcuggaauu

SEQ ID NO: 899795 - RNA, 22 nt, Human
cacucauauuggaacaagcuug

SEQ ID NO: 899796 - RNA, 22 nt, Human
uacuacaguauguguguuauac

SEQ ID NO: 899797 - RNA, 22 nt, Human
uaggacuuugagaauuguuauu

SEQ ID NO: 899798 - RNA, 22 nt, Human
uuacaguuuacauaagaauugu

SEQ ID NO: 899799 - RNA, 22 nt, Human
ugggucccaaacuccuagaggu

SEQ ID NO: 899800 - RNA, 22 nt, Human
ugaggaaguuguuucucuucua

SEQ ID NO: 899801 - RNA, 22 nt, Human
gcagcugugggccucggagagc

SEQ ID NO: 899802 - RNA, 22 nt, Human
gauaacauuuugaagugcuagu

SEQ ID NO: 899803 - RNA, 22 nt, Human
acuggcagcuguaggaugcaug

SEQ ID NO: 899804 - RNA, 22 nt, Human
ugggcacagaauagauggccca

SEQ ID NO: 899805 - RNA, 22 nt, Human
uaaauaugcauguauccuuauc

SEQ ID NO: 899806 - RNA, 22 nt, Human
uuacaucauguaacuggauaua

SEQ ID NO: 899807 - RNA, 22 nt, Human
uggcaggaagcaucuauagguc

SEQ ID NO: 899808 - RNA, 22 nt, Human
ugucuccaaaacaaucucagau

SEQ ID NO: 899809 - RNA, 22 nt, Human
agggcugacacaccuuauccuc

SEQ ID NO: 899810 - RNA, 22 nt, Human
uaaaguauccaguuauucuucu

SEQ ID NO: 899811 - RNA, 22 nt, Human
ucauagaaauguggccagaaac

SEQ ID NO: 899812 - RNA, 22 nt, Human
aaguucuuggaggaugaagagu

SEQ ID NO: 899813 - RNA, 22 nt, Human
ggcacugggugagggucacugg

SEQ ID NO: 899814 - RNA, 22 nt, Human
aggcagcaaugaaugaaaugga

SEQ ID NO: 899815 - RNA, 23 nt, Human
agggucugcucagugucguucaa

SEQ ID NO: 899816 - RNA, 22 nt, Human
ucauguuuguuggaaauguggc

SEQ ID NO: 899817 - RNA, 19 nt, Human
ggagaggcuggagggaugc

SEQ ID NO: 899818 - RNA, 22 nt, Human
agcauuagauuaaaaauuuaga

SEQ ID NO: 899819 - RNA, 22 nt, Human
cgugucugggcucccauggcag

SEQ ID NO: 899820 - RNA, 22 nt, Human
uccaggcuagguuuacaggaca

SEQ ID NO: 899821 - RNA, 22 nt, Human
auacacauaucagguguauaca

SEQ ID NO: 899822 - RNA, 22 nt, Human
ggaggcagaauagagugugggu

SEQ ID NO: 899823 - RNA, 22 nt, Human
uuucaguuucauggcacagcua

SEQ ID NO: 899824 - RNA, 22 nt, Human
cauuaacaaauggaagcaugaa

SEQ ID NO: 899825 - RNA, 22 nt, Human
aggcuaaggugggaggaucgcu

SEQ ID NO: 899826 - RNA, 20 nt, Human
ugccaagcucuuuagaucga

SEQ ID NO: 899827 - RNA, 22 nt, Human
cuguuuucuagggcugagguga

SEQ ID NO: 899828 - RNA, 18 nt, Human
ggcagugcagucucaggg

SEQ ID NO: 899829 - RNA, 21 nt, Human
cuuggaacggguagaacucac

SEQ ID NO: 899830 - RNA, 22 nt, Human
auucuucauguugaagcuguca

SEQ ID NO: 899831 - RNA, 22 nt, Human
aagcuauugaauuuauagcaua

SEQ ID NO: 899832 - RNA, 22 nt, Human
gauuuuauagucaggaaaaaga

SEQ ID NO: 899833 - RNA, 22 nt, Human
aacacagaagugccaagagcca

SEQ ID NO: 899834 - RNA, 21 nt, Human
uuggccugauaucuuggagca

SEQ ID NO: 899835 - RNA, 22 nt, Human
uacacaguagaguauaaugcgu

SEQ ID NO: 899836 - RNA, 22 nt, Human
ccugcucaugggucccuggcag

SEQ ID NO: 899837 - RNA, 22 nt, Human
ggcugcugaguuggccaggaga

SEQ ID NO: 899838 - RNA, 19 nt, Human
ccagcccauaguccaucac

SEQ ID NO: 899839 - RNA, 22 nt, Human
aaagccacguggccuggggagc

SEQ ID NO: 899840 - RNA, 22 nt, Human
agggcucagaaaugucuacggg

SEQ ID NO: 899841 - RNA, 22 nt, Human
augaagacuauuugaaggugcc

SEQ ID NO: 899842 - RNA, 22 nt, Human
aaagcaauagguuaggucaaga

SEQ ID NO: 899843 - RNA, 22 nt, Human
aagcaauguguuugaaaggcca

SEQ ID NO: 899844 - RNA, 22 nt, Human
gacccuuucugcaugcuuaucu

SEQ ID NO: 899845 - RNA, 22 nt, Human
uguuaguauuggcaaauuuguu

SEQ ID NO: 899846 - RNA, 22 nt, Human
agaaauacuuaaucuuugcagg

SEQ ID NO: 899847 - RNA, 22 nt, Human
ccaguaauuagacuuucaggca

SEQ ID NO: 899848 - RNA, 22 nt, Human
acuaaaacaguggcuaguagac

SEQ ID NO: 899849 - RNA, 22 nt, Human
uaguccagccuuggguguagcc

SEQ ID NO: 899850 - RNA, 22 nt, Human
aaaucaaaagacauguguuuua

SEQ ID NO: 899851 - RNA, 22 nt, Human
cugguccuugacgcgugggagg

SEQ ID NO: 899852 - RNA, 22 nt, Human
cucugugccagucugcacucgg

SEQ ID NO: 899853 - RNA, 22 nt, Human
uucaaagauggagggauagauu

SEQ ID NO: 899854 - RNA, 22 nt, Human
ugggccugacucaccugccucc

SEQ ID NO: 899855 - RNA, 22 nt, Human
aggacaggauuccuugccuugc

SEQ ID NO: 899856 - RNA, 18 nt, Human
caggccucuugaucuucc

SEQ ID NO: 899857 - RNA, 22 nt, Human
aacugaaacuuaggaaguaauc

SEQ ID NO: 899858 - RNA, 21 nt, Human
auuuauguuugggguggaaug

SEQ ID NO: 899859 - RNA, 22 nt, Human
uuacaucaugcuuaucccuuuc

SEQ ID NO: 899860 - RNA, 22 nt, Human
aaaggcauaggauguggaaucg

SEQ ID NO: 899861 - RNA, 22 nt, Human
auuuuacuacuccaauuaauga

SEQ ID NO: 899862 - RNA, 22 nt, Human
cucuuccauauuacucagggua

SEQ ID NO: 899863 - RNA, 22 nt, Human
aaagcagcacauggauaucagu

SEQ ID NO: 899864 - RNA, 20 nt, Human
uaaugcuuaacacauccccu

SEQ ID NO: 899865 - RNA, 20 nt, Human
cugggcucaagugagccucc

SEQ ID NO: 899866 - RNA, 22 nt, Human
ggcaggugaucuagagucaaua

SEQ ID NO: 899867 - RNA, 22 nt, Human
auuauguauuugguauaguuug

SEQ ID NO: 899868 - RNA, 22 nt, Human
aaguguuuauugauuggucuag

SEQ ID NO: 899869 - RNA, 22 nt, Human
gugucucuuccuuucaaguggg

SEQ ID NO: 899870 - RNA, 22 nt, Human
gaggaggaaguucucuguaggc

SEQ ID NO: 899871 - RNA, 22 nt, Human
gacaguaacuacaguucugugg

SEQ ID NO: 899872 - RNA, 22 nt, Human
aaguuucugggcaagacaaggc

SEQ ID NO: 899873 - RNA, 22 nt, Human
ggcaggguggcagaggcucaga

SEQ ID NO: 899874 - RNA, 22 nt, Human
acagaauugauggaaaucucag

SEQ ID NO: 899875 - RNA, 22 nt, Human
acagauacaaauauacaaauac

SEQ ID NO: 899876 - RNA, 22 nt, Human
acauuuagcuguacaaucuaug

SEQ ID NO: 899877 - RNA, 22 nt, Human
ugcccugaagcacccucacccu

SEQ ID NO: 899878 - RNA, 22 nt, Human
ggcucaguguuuguggaacaua

SEQ ID NO: 899879 - RNA, 22 nt, Human
uaaguucugaugucuguugcca

SEQ ID NO: 899880 - RNA, 21 nt, Human
uccaggccucaggaagggaug

SEQ ID NO: 899881 - RNA, 22 nt, Human
agccacagcccacaggacucuu

SEQ ID NO: 899882 - RNA, 18 nt, Human
acagaggcagacauguau

SEQ ID NO: 899883 - RNA, 22 nt, Human
agaggcagaaguguucaaaccc

SEQ ID NO: 899884 - RNA, 22 nt, Human
agaaaaugugaacuugugaauu

SEQ ID NO: 899885 - RNA, 22 nt, Human
gccugggucuccuccgcuuccc

SEQ ID NO: 899886 - RNA, 22 nt, Human
uacauguauugauuucucuucu

SEQ ID NO: 899887 - RNA, 22 nt, Human
ggaggaagcacacggcuuguau

SEQ ID NO: 899888 - RNA, 22 nt, Human
aagaaaagauguuugguuuuca

SEQ ID NO: 899889 - RNA, 22 nt, Human
cuuuguucugccaauggcccau

SEQ ID NO: 899890 - RNA, 21 nt, Human
uccacaauagggaaauucacc

SEQ ID NO: 899891 - RNA, 22 nt, Human
ucugcguugcucacgcugggag

SEQ ID NO: 899892 - RNA, 18 nt, Human
cccaggcuuugugggucu

SEQ ID NO: 899893 - RNA, 22 nt, Human
agaagacagagucuacauucua

SEQ ID NO: 899894 - RNA, 22 nt, Human
cagauacagguuuuuguuagau

SEQ ID NO: 899895 - RNA, 22 nt, Human
uccugagggcgauucagcaggu

SEQ ID NO: 899896 - RNA, 22 nt, Human
ugacccuggccugguggcggaa

SEQ ID NO: 899897 - RNA, 22 nt, Human
aguggcagagccaggguuggga

SEQ ID NO: 899898 - RNA, 22 nt, Human
ccugagagugagugccaccuua

SEQ ID NO: 899899 - RNA, 22 nt, Human
uuauuuauucauucugucuguc

SEQ ID NO: 899900 - RNA, 22 nt, Human
auauuuguaguggguaagaagu

SEQ ID NO: 899901 - RNA, 20 nt, Human
cagguauuacaucugcaccu

SEQ ID NO: 899902 - RNA, 22 nt, Human
ggaccugcccuggcucagaugc

SEQ ID NO: 899903 - RNA, 22 nt, Human
uuaggcaauaucauuggaguug

SEQ ID NO: 899904 - RNA, 22 nt, Human
ggcucuggugcccuggcuccca

SEQ ID NO: 899905 - RNA, 20 nt, Human
gacaggugcuaaagaggggc

SEQ ID NO: 899906 - RNA, 22 nt, Human
cccaugcacccucuaagaagga

SEQ ID NO: 899907 - RNA, 22 nt, Human
acaaagagaccaugagccaaac

SEQ ID NO: 899908 - RNA, 22 nt, Human
ugacagagagguaaguuaugaa

SEQ ID NO: 899909 - RNA, 21 nt, Human
uucaucauugguaaaaagugg

SEQ ID NO: 899910 - RNA, 22 nt, Human
auuuuuccaugauacuuaucug

SEQ ID NO: 899911 - RNA, 22 nt, Human
ggggcagauggaacagagcaca

SEQ ID NO: 899912 - RNA, 22 nt, Human
uucugcauguguuucaaauacu

SEQ ID NO: 899913 - RNA, 22 nt, Human
ccagcugucagugugaaaauaa

SEQ ID NO: 899914 - RNA, 22 nt, Human
ggccuuggugcucuguguugca

SEQ ID NO: 899915 - RNA, 22 nt, Human
uuccaggaggagguacuagagg

SEQ ID NO: 899916 - RNA, 22 nt, Human
uucuuguucuccucauuuagag

SEQ ID NO: 899917 - RNA, 22 nt, Human
gggcugggauggcuugaagauu

SEQ ID NO: 899918 - RNA, 21 nt, Human
ugccagggauuuacagagccu

SEQ ID NO: 899919 - RNA, 22 nt, Human
auucugggagguagaacugaaa

SEQ ID NO: 899920 - RNA, 22 nt, Human
cucucccccacagcagccuucu

SEQ ID NO: 899921 - RNA, 23 nt, Human
ucuggaaugguacucacuggagu

SEQ ID NO: 899922 - RNA, 22 nt, Human
aacacagguucauucugugagg

SEQ ID NO: 899923 - RNA, 22 nt, Human
gagcaggacgugggaaugggaa

SEQ ID NO: 899924 - RNA, 22 nt, Human
cugcaagguccaccugcuacau

SEQ ID NO: 899925 - RNA, 22 nt, Human
uauuagcaacguaaccucugaa

SEQ ID NO: 899926 - RNA, 22 nt, Human
ggucugagcuugagcccaugcu

SEQ ID NO: 899927 - RNA, 22 nt, Human
cugggagagccuuuccugaguc

SEQ ID NO: 899928 - RNA, 21 nt, Human
acugcaucugaagucccagga

SEQ ID NO: 899929 - RNA, 20 nt, Human
ucccaagggcugagaggauc

SEQ ID NO: 899930 - RNA, 22 nt, Human
uuuuuagaauuggcugagaauu

SEQ ID NO: 899931 - RNA, 22 nt, Human
aggcaagggggcgccaccuucc

SEQ ID NO: 899932 - RNA, 22 nt, Human
caaauucaaauuucaucagugu

SEQ ID NO: 899933 - RNA, 22 nt, Human
uagacaggaaacauuaggaugg

SEQ ID NO: 899934 - RNA, 22 nt, Human
guacuaaacagagaaccaauau

SEQ ID NO: 899935 - RNA, 22 nt, Human
ggacagugaauguggggaugca

SEQ ID NO: 899936 - RNA, 22 nt, Human
gagggagggaaaguuuaacacu

SEQ ID NO: 899937 - RNA, 22 nt, Human
ggcuggccagggcccucgcugg

SEQ ID NO: 899938 - RNA, 22 nt, Human
uggcucucaggccugcugcguu

SEQ ID NO: 899939 - RNA, 22 nt, Human
aauuacagucggagcagcacug

SEQ ID NO: 899940 - RNA, 22 nt, Human
guucucuagggcuguagacugg

SEQ ID NO: 899941 - RNA, 22 nt, Human
cagagagaggggcugccuggcc

SEQ ID NO: 899942 - RNA, 22 nt, Human
ucuuccaauaccuagauuuugg

SEQ ID NO: 899943 - RNA, 22 nt, Human
gccaggcuggcaaaaggaaacc

SEQ ID NO: 899944 - RNA, 22 nt, Human
gugagggguggcugagcaguuu

SEQ ID NO: 899945 - RNA, 22 nt, Human
uguuaaauguauuauguguucu

SEQ ID NO: 899946 - RNA, 22 nt, Human
cagggugcgccacucagaugua

SEQ ID NO: 899947 - RNA, 22 nt, Human
ucaggcugaaucauccuagcuu

SEQ ID NO: 899948 - RNA, 22 nt, Human
ugacugugccgugccccuagga

SEQ ID NO: 899949 - RNA, 22 nt, Human
ggcagaagacaggcaaaucaug

SEQ ID NO: 899950 - RNA, 22 nt, Human
ggaggcaggaaagacagguuca

SEQ ID NO: 899951 - RNA, 22 nt, Human
acuccugugggcauggcacccc

SEQ ID NO: 899952 - RNA, 22 nt, Human
agcccaagcuaugaggugaccu

SEQ ID NO: 899953 - RNA, 22 nt, Human
cauggcuugcaagcauaggaga

SEQ ID NO: 899954 - RNA, 22 nt, Human
uugaacauuggcaauuucauau

SEQ ID NO: 899955 - RNA, 22 nt, Human
uccucuccauauuuucugauuu

SEQ ID NO: 899956 - RNA, 22 nt, Human
ugugaauguuaauauuggauua

SEQ ID NO: 899957 - RNA, 18 nt, Human
uucagcagcagacacacu

SEQ ID NO: 899958 - RNA, 21 nt, Human
agcugagcccagaagacuggu

SEQ ID NO: 899959 - RNA, 22 nt, Human
aggcuggcagccaccucagcag

SEQ ID NO: 899960 - RNA, 22 nt, Human
acauucaagaugcauucacuua

SEQ ID NO: 899961 - RNA, 20 nt, Human
cugugccuaaaccuccgggu

SEQ ID NO: 899962 - RNA, 22 nt, Human
ugcuuuauucgacaucugguag

SEQ ID NO: 899963 - RNA, 22 nt, Human
uugauucugauccuuugcuagc

SEQ ID NO: 899964 - RNA, 22 nt, Human
aacagcaauagcacuauucauu

SEQ ID NO: 899965 - RNA, 22 nt, Human
uugcugugucauuuguuuaauc

SEQ ID NO: 899966 - RNA, 19 nt, Human
cuguggcugaccucuggcc

SEQ ID NO: 899967 - RNA, 22 nt, Human
guuuccuauguccauugaggga

SEQ ID NO: 899968 - RNA, 22 nt, Human
acacagauauuguacuugaucc

SEQ ID NO: 899969 - RNA, 22 nt, Human
agagaaauucucaguggaagau

SEQ ID NO: 899970 - RNA, 22 nt, Human
uaacacauuaguucuccuagau

SEQ ID NO: 899971 - RNA, 22 nt, Human
cuucuuaaagauuacacaauga

SEQ ID NO: 899972 - RNA, 22 nt, Human
ugucacaauuuauuucucuuga

SEQ ID NO: 899973 - RNA, 22 nt, Human
gacaaugugaggcgaguuuguu

SEQ ID NO: 899974 - RNA, 22 nt, Human
aucguaaagcccuauggcuuca

SEQ ID NO: 899975 - RNA, 21 nt, Human
agcuauuucagauuugagagc

SEQ ID NO: 899976 - RNA, 22 nt, Human
auagucuuagucuauaguuuug

SEQ ID NO: 899977 - RNA, 22 nt, Human
ccccaaagcugaguucccgccu

SEQ ID NO: 899978 - RNA, 21 nt, Human
agcacagcuuuaagccaugug

SEQ ID NO: 899979 - RNA, 22 nt, Human
gcuacaagucuugucauucauu

SEQ ID NO: 899980 - RNA, 18 nt, Human
ucagacaaguuagacagg

SEQ ID NO: 899981 - RNA, 22 nt, Human
gucagugccaccagccacugcc

SEQ ID NO: 899982 - RNA, 22 nt, Human
cuucuggcguuggaggucugag

SEQ ID NO: 899983 - RNA, 22 nt, Human
ugagaaccucgaagauuuugcc

SEQ ID NO: 899984 - RNA, 22 nt, Human
acugugagcagcgaccugagga

SEQ ID NO: 899985 - RNA, 22 nt, Human
accgggaaguccugcacugggc

SEQ ID NO: 899986 - RNA, 22 nt, Human
gagggcugaagauuguggcccc

SEQ ID NO: 899987 - RNA, 22 nt, Human
acuggccuaucagcaugagucu

SEQ ID NO: 899988 - RNA, 22 nt, Human
uagcauuccaucacucagcacc

SEQ ID NO: 899989 - RNA, 23 nt, Human
ucccagccucuucucuugcauac

SEQ ID NO: 899990 - RNA, 22 nt, Human
gcuccuggauguucaagucggc

SEQ ID NO: 899991 - RNA, 22 nt, Human
ggcuucacucauaauuagguuc

SEQ ID NO: 899992 - RNA, 22 nt, Human
augcugagacuggagcagcugg

SEQ ID NO: 899993 - RNA, 22 nt, Human
agggaugugggaacugcagguu

SEQ ID NO: 899994 - RNA, 22 nt, Human
guauaaaggcacagguuuucug

SEQ ID NO: 899995 - RNA, 22 nt, Human
ugcaaaaacagccuugaggccu

SEQ ID NO: 899996 - RNA, 22 nt, Human
ugucuuauggucuugggcuucc

SEQ ID NO: 899997 - RNA, 22 nt, Human
gguuuuaaccauucacaaguga

SEQ ID NO: 899998 - RNA, 22 nt, Human
ucagaaguuaauacgaggagaa

SEQ ID NO: 899999 - RNA, 22 nt, Human
uuuaaauguguucuuaguagcu

SEQ ID NO: 900000 - RNA, 22 nt, Human
agaggccagguccagaguuugu

SEQ ID NO: 900001 - RNA, 22 nt, Human
uuccaacuuugucauauauuau

SEQ ID NO: 900002 - RNA, 22 nt, Human
aacacuuuggaauagagauagg

SEQ ID NO: 900003 - RNA, 22 nt, Human
gacagggcugugggaggagcag

SEQ ID NO: 900004 - RNA, 22 nt, Human
guuguacaggcagggaaacuga

SEQ ID NO: 900005 - RNA, 22 nt, Human
cuggccagaguuggagggugug

SEQ ID NO: 900006 - RNA, 22 nt, Human
ugucuccucaacucaugcucga

SEQ ID NO: 900007 - RNA, 22 nt, Human
aggcucuggaguguggugcugg

SEQ ID NO: 900008 - RNA, 22 nt, Human
aaauacauuuacagucguggcu

SEQ ID NO: 900009 - RNA, 22 nt, Human
aauaaagacaaacaggggagcc

SEQ ID NO: 900010 - RNA, 22 nt, Human
gaggaagcauugacauaaucuc

SEQ ID NO: 900011 - RNA, 22 nt, Human
cauacauuaccuaacuuaaugc

SEQ ID NO: 900012 - RNA, 22 nt, Human
auagauguuuucuccuaauugg

SEQ ID NO: 900013 - RNA, 22 nt, Human
caggccucuccuuagucuggca

SEQ ID NO: 900014 - RNA, 22 nt, Human
aaaguugcacaacuuuguauac

SEQ ID NO: 900015 - RNA, 22 nt, Human
uguuuuaagggucaacugucac

SEQ ID NO: 900016 - RNA, 22 nt, Human
uggcuggcugucaaggaaagcc

SEQ ID NO: 900017 - RNA, 22 nt, Human
ucuggggagcagcccuggugag

SEQ ID NO: 900018 - RNA, 23 nt, Human
ccaaagucgaagucuaguccaga

SEQ ID NO: 900019 - RNA, 22 nt, Human
aagaggaagucuccauggagag

SEQ ID NO: 900020 - RNA, 22 nt, Human
ucccucacugguucugcauccc

SEQ ID NO: 900021 - RNA, 22 nt, Human
uggugacagcauggaagaagug

SEQ ID NO: 900022 - RNA, 22 nt, Human
uccuugcagacaucucucuuca

SEQ ID NO: 900023 - RNA, 22 nt, Human
gugccucccgggaccaugcacu

SEQ ID NO: 900024 - RNA, 21 nt, Human
aaacugaccuugccugagaca

SEQ ID NO: 900025 - RNA, 22 nt, Human
ucugugccuccguaacacacca

SEQ ID NO: 900026 - RNA, 22 nt, Human
gcaggccugacuguagggggca

SEQ ID NO: 900027 - RNA, 22 nt, Human
uauuaauaaauauguaggggcc

SEQ ID NO: 900028 - RNA, 22 nt, Human
uucaaaaugcacaaagggcuag

SEQ ID NO: 900029 - RNA, 22 nt, Human
acaguaacagucuauuucucag

SEQ ID NO: 900030 - RNA, 22 nt, Human
auuguacaaugcugagguuugg

SEQ ID NO: 900031 - RNA, 20 nt, Human
aggcucagauacccagggaa

SEQ ID NO: 900032 - RNA, 22 nt, Human
acauacuaugaauacauguguc

SEQ ID NO: 900033 - RNA, 20 nt, Human
uuagcaguagagugugcuuc

SEQ ID NO: 900034 - RNA, 22 nt, Human
cagaguuugcaagggcagaagc

SEQ ID NO: 900035 - RNA, 22 nt, Human
caaguuacauuagaaaucaugc

SEQ ID NO: 900036 - RNA, 22 nt, Human
ucucucagaggaagaggcagug

SEQ ID NO: 900037 - RNA, 20 nt, Human
cagggccuaagagcugaaaa

SEQ ID NO: 900038 - RNA, 22 nt, Human
uuucugcucgcucucaaucagg

SEQ ID NO: 900039 - RNA, 22 nt, Human
gcuggccauggccugcgccauc

SEQ ID NO: 900040 - RNA, 22 nt, Human
gcagaugguggaggcaagaggc

SEQ ID NO: 900041 - RNA, 22 nt, Human
aucagauauuuaaguuaucaac

SEQ ID NO: 900042 - RNA, 22 nt, Human
gucugagggguuucccaggaca

SEQ ID NO: 900043 - RNA, 22 nt, Human
accuuagaaagugacaaacgaa

SEQ ID NO: 900044 - RNA, 22 nt, Human
uauuauaauuuagggcuuggau

SEQ ID NO: 900045 - RNA, 22 nt, Human
uaccucaugcuguacagcacgu

SEQ ID NO: 900046 - RNA, 22 nt, Human
gugagggcaaauuagaaucaaa

SEQ ID NO: 900047 - RNA, 20 nt, Human
acauuuguggaucugagaga

SEQ ID NO: 900048 - RNA, 22 nt, Human
cucuucagauauacaguacucu

SEQ ID NO: 900049 - RNA, 22 nt, Human
gugagucuguggaccgggcacu

SEQ ID NO: 900050 - RNA, 22 nt, Human
gcagggacaacugugcaccuga

SEQ ID NO: 900051 - RNA, 22 nt, Human
aggcaacugagaggcccguguu

SEQ ID NO: 900052 - RNA, 22 nt, Human
agcacuguuaugggaugacuua

SEQ ID NO: 900053 - RNA, 22 nt, Human
uaucagcaagauggcaguauag

SEQ ID NO: 900054 - RNA, 22 nt, Human
agacaauauguauauuaagaau

SEQ ID NO: 900055 - RNA, 22 nt, Human
auauuuagcucauuuccagugc

SEQ ID NO: 900056 - RNA, 22 nt, Human
auuugguguucaucuuuuagug

SEQ ID NO: 900057 - RNA, 22 nt, Human
uguccuguucuugcuguguccu

SEQ ID NO: 900058 - RNA, 22 nt, Human
agcucugagaaaguuagaaagu

SEQ ID NO: 900059 - RNA, 22 nt, Human
uacaagauguacuaaaaauuau

SEQ ID NO: 900060 - RNA, 22 nt, Human
cuugcuuguuuugaagaaagau

SEQ ID NO: 900061 - RNA, 22 nt, Human
ucuguaaauccugcucagcaac

SEQ ID NO: 900062 - RNA, 22 nt, Human
aacacuuauccacauuugaaag

SEQ ID NO: 900063 - RNA, 22 nt, Human
cuggccccgguuccuaaaaacc

SEQ ID NO: 900064 - RNA, 22 nt, Human
ggcccaaggcccaggucgagcu

SEQ ID NO: 900065 - RNA, 22 nt, Human
auagcaagguaugacuggagcc

SEQ ID NO: 900066 - RNA, 23 nt, Human
uggagccugggauacaauagaug

SEQ ID NO: 900067 - RNA, 22 nt, Human
aaacagauaaugcuauaaaugg

SEQ ID NO: 900068 - RNA, 22 nt, Human
aauguacaggcuggcuaugggg

SEQ ID NO: 900069 - RNA, 22 nt, Human
uaaacaucaguacaaagacuaa

SEQ ID NO: 900070 - RNA, 22 nt, Human
acuuaaauagaacuccucaaua

SEQ ID NO: 900071 - RNA, 22 nt, Human
gacagucacuuccaggagagga

SEQ ID NO: 900072 - RNA, 22 nt, Human
agagcagcacguuguccccaca

SEQ ID NO: 900073 - RNA, 22 nt, Human
cuuucaaugucaucugugaaug

SEQ ID NO: 900074 - RNA, 22 nt, Human
ucagaagguggagguugcagug

SEQ ID NO: 900075 - RNA, 22 nt, Human
gaaugaauagguguccagaugg

SEQ ID NO: 900076 - RNA, 22 nt, Human
aagcugugugcagaugaucuca

SEQ ID NO: 900077 - RNA, 22 nt, Human
ggacaaagguagacagucucug

SEQ ID NO: 900078 - RNA, 22 nt, Human
aggcaguguauugcuagcggcu

SEQ ID NO: 900079 - RNA, 22 nt, Human
cucuguccuugcacaguuccua

SEQ ID NO: 900080 - RNA, 22 nt, Human
uugauucuucugaauuugcaga

SEQ ID NO: 900081 - RNA, 22 nt, Human
aaauagcagcuuugacagcaca

SEQ ID NO: 900082 - RNA, 23 nt, Human
uccaggcugggacuucaacuggc

SEQ ID NO: 900083 - RNA, 22 nt, Human
acaaugaauaucaugaaguacu

SEQ ID NO: 900084 - RNA, 22 nt, Human
aauugagugcagccagcccagu

SEQ ID NO: 900085 - RNA, 22 nt, Human
uagauaccugcuggaccucauu

SEQ ID NO: 900086 - RNA, 21 nt, Human
ccagccucagaucagggagcu

SEQ ID NO: 900087 - RNA, 22 nt, Human
gcugucacacauggccccagcu

SEQ ID NO: 900088 - RNA, 22 nt, Human
aucaucuucgaaaaaagucaga

SEQ ID NO: 900089 - RNA, 22 nt, Human
gcacagagggcagugagccucu

SEQ ID NO: 900090 - RNA, 22 nt, Human
uagggugguuagaaggaguaug

SEQ ID NO: 900091 - RNA, 22 nt, Human
agccuggauccuaggcucagcu

SEQ ID NO: 900092 - RNA, 22 nt, Human
ugcuuuaacgcugagggucuca

SEQ ID NO: 900093 - RNA, 17 nt, Human
cccagcuggcagugccg

SEQ ID NO: 900094 - RNA, 22 nt, Human
ucagcuccagaguugcacagug

SEQ ID NO: 900095 - RNA, 23 nt, Human
aagaacugcgaauggagaaagua

SEQ ID NO: 900096 - RNA, 22 nt, Human
cagcugauuugagaaagaauga

SEQ ID NO: 900097 - RNA, 22 nt, Human
gaggccuccucugagacaucug

SEQ ID NO: 900098 - RNA, 22 nt, Human
ccagaggucucucuauacuggg

SEQ ID NO: 900099 - RNA, 22 nt, Human
cuaacauuuggaaggcuuauga

SEQ ID NO: 900100 - RNA, 22 nt, Human
ucauaagcuagcugcaccauau

SEQ ID NO: 900101 - RNA, 22 nt, Human
cauaaauucaguucugccucuu

SEQ ID NO: 900102 - RNA, 22 nt, Human
augucuguuugcugagcccggc

SEQ ID NO: 900103 - RNA, 22 nt, Human
ugagugagacaccaaaggcugu

SEQ ID NO: 900104 - RNA, 22 nt, Human
gggugggagucuggcccucaaa

SEQ ID NO: 900105 - RNA, 19 nt, Human
uggaauguuccaaggaggc

SEQ ID NO: 900106 - RNA, 17 nt, Human
aagcauuuaauuugcua

SEQ ID NO: 900107 - RNA, 22 nt, Human
ccugggccuugaccucgugggc

SEQ ID NO: 900108 - RNA, 22 nt, Human
uuacaacagcgauuuaccuguc

SEQ ID NO: 900109 - RNA, 22 nt, Human
guuucaugguuguuugauggca

SEQ ID NO: 900110 - RNA, 21 nt, Human
ccucugugcuaaagggcuccc

SEQ ID NO: 900111 - RNA, 23 nt, Human
aguggcugagaguguuucauaug

SEQ ID NO: 900112 - RNA, 18 nt, Human
ugaggcugaggguagagg

SEQ ID NO: 900113 - RNA, 22 nt, Human
ccugucuggccaccagggcgau

SEQ ID NO: 900114 - RNA, 22 nt, Human
cacacauuucagaugcuacaau

SEQ ID NO: 900115 - RNA, 22 nt, Human
uacagaaaaacuuggaggcuuu

SEQ ID NO: 900116 - RNA, 22 nt, Human
cugccuccugccgugcagcuuc

SEQ ID NO: 900117 - RNA, 21 nt, Human
agaugcugugcuccaggagca

SEQ ID NO: 900118 - RNA, 22 nt, Human
uaaaaggagguugaagcuguca

SEQ ID NO: 900119 - RNA, 23 nt, Human
ccacagagcugccaauuccugug

SEQ ID NO: 900120 - RNA, 22 nt, Human
cagucccaggguugguucagcu

SEQ ID NO: 900121 - RNA, 22 nt, Human
aucagcuuaauucucaacaggu

SEQ ID NO: 900122 - RNA, 22 nt, Human
acaguuugaauaauuuagauag

SEQ ID NO: 900123 - RNA, 22 nt, Human
ugcaagcacucaaugcaaacag

SEQ ID NO: 900124 - RNA, 22 nt, Human
caggagacuauggcccaaggcc

SEQ ID NO: 900125 - RNA, 22 nt, Human
cccaggcuggauuucgguggca

SEQ ID NO: 900126 - RNA, 22 nt, Human
cagcuuuuggcaggaugaccag

SEQ ID NO: 900127 - RNA, 22 nt, Human
ugcagcagggcccaggcacaga

SEQ ID NO: 900128 - RNA, 22 nt, Human
auuguucagaguagggcucugu

SEQ ID NO: 900129 - RNA, 22 nt, Human
augaagcagauuuauuacucac

SEQ ID NO: 900130 - RNA, 22 nt, Human
aagcuccccgaaacccaccucu

SEQ ID NO: 900131 - RNA, 22 nt, Human
gcacauggacaauggaggugca

SEQ ID NO: 900132 - RNA, 22 nt, Human
aacaaauggaacacaaaucuuu

SEQ ID NO: 900133 - RNA, 22 nt, Human
uucagugugcuucaggacguua

SEQ ID NO: 900134 - RNA, 22 nt, Human
cagcugcuguuacugcuuauua

SEQ ID NO: 900135 - RNA, 22 nt, Human
cuguuuaaugagguguaacaac

SEQ ID NO: 900136 - RNA, 22 nt, Human
ucacauuuuaucugagauugac

SEQ ID NO: 900137 - RNA, 22 nt, Human
cuguuauucaagacaaaggcag

SEQ ID NO: 900138 - RNA, 22 nt, Human
gucugcauacaggacaugcaca

SEQ ID NO: 900139 - RNA, 22 nt, Human
cgucuaggccgugcccugaggu

SEQ ID NO: 900140 - RNA, 22 nt, Human
agaagaaacugucggggauauu

SEQ ID NO: 900141 - RNA, 22 nt, Human
aaacaaguguaaacuagucugu

SEQ ID NO: 900142 - RNA, 22 nt, Human
uaauccacggaccggcagcauu

SEQ ID NO: 900143 - RNA, 22 nt, Human
agacuucuaaauagcagcuucu

SEQ ID NO: 900144 - RNA, 22 nt, Human
uuccacuuugggucugugcagg

SEQ ID NO: 900145 - RNA, 22 nt, Human
caagccagucagcucaguagau

SEQ ID NO: 900146 - RNA, 22 nt, Human
uaagagaacuggauagauagga

SEQ ID NO: 900147 - RNA, 22 nt, Human
cauguaaagcacuucauaacag

SEQ ID NO: 900148 - RNA, 22 nt, Human
uuagaaaugucacagaucugau

SEQ ID NO: 900149 - RNA, 22 nt, Human
auaaauuaugaauggcccuuuu

SEQ ID NO: 900150 - RNA, 22 nt, Human
acagguguagaaaacagauuau

SEQ ID NO: 900151 - RNA, 23 nt, Human
agccagggcacugguggagauug

SEQ ID NO: 900152 - RNA, 21 nt, Human
cuugucugcaguguuuauagc

SEQ ID NO: 900153 - RNA, 22 nt, Human
ccagaggugagggggauucuug

SEQ ID NO: 900154 - RNA, 22 nt, Human
uaaggcauaaggaagauuugga

SEQ ID NO: 900155 - RNA, 22 nt, Human
cugcuuuguaaaauagacauaa

SEQ ID NO: 900156 - RNA, 21 nt, Human
gugguucuagagaaacagaau

SEQ ID NO: 900157 - RNA, 22 nt, Human
ugugcuuucaaaguuaaguaaa

SEQ ID NO: 900158 - RNA, 22 nt, Human
uacaaaugaguuguaugaacca

SEQ ID NO: 900159 - RNA, 19 nt, Human
gcgagaacagagcuuacug

SEQ ID NO: 900160 - RNA, 22 nt, Human
gccagaggaacgcugcgcgccc

SEQ ID NO: 900161 - RNA, 22 nt, Human
acauugaauucaaaauuacuga

SEQ ID NO: 900162 - RNA, 22 nt, Human
uuugucuugaggcuggggaagu

SEQ ID NO: 900163 - RNA, 22 nt, Human
acagccagggcauugucgccga

SEQ ID NO: 900164 - RNA, 22 nt, Human
ugaccuguguuugcuguugcuc

SEQ ID NO: 900165 - RNA, 22 nt, Human
gaggcauaaaucacaguguuca

SEQ ID NO: 900166 - RNA, 22 nt, Human
uuccaaacucauaguauggugu

SEQ ID NO: 900167 - RNA, 22 nt, Human
uccagcuccacagccucccugu

SEQ ID NO: 900168 - RNA, 22 nt, Human
auccaaaucuucacacauaaca

SEQ ID NO: 900169 - RNA, 22 nt, Human
auugucuuuaaaaauauacaac

SEQ ID NO: 900170 - RNA, 22 nt, Human
uugaaucucaucccaauguugu

SEQ ID NO: 900171 - RNA, 22 nt, Human
acaggagcccaggaugggcgga

SEQ ID NO: 900172 - RNA, 22 nt, Human
cugcacaaugcaccaucaaguu

SEQ ID NO: 900173 - RNA, 22 nt, Human
uuucuuuaucauagcaucuuug

SEQ ID NO: 900174 - RNA, 22 nt, Human
auguacaaccugcaugacaguc

SEQ ID NO: 900175 - RNA, 22 nt, Human
auucagacuaugaacacgucag

SEQ ID NO: 900176 - RNA, 22 nt, Human
gcuggccugcaaagcccggcug

SEQ ID NO: 900177 - RNA, 22 nt, Human
ucaagauaccaccauuauaugu

SEQ ID NO: 900178 - RNA, 20 nt, Human
cauuuguuagcuuucuacug

SEQ ID NO: 900179 - RNA, 22 nt, Human
aaaaucuggcaacacuaaguuu

SEQ ID NO: 900180 - RNA, 22 nt, Human
caggcccauuuguagccacuuu

SEQ ID NO: 900181 - RNA, 22 nt, Human
cuuaauuuaaaauaguucaggc

SEQ ID NO: 900182 - RNA, 22 nt, Human
ucccacagcuucgugcuucccc

SEQ ID NO: 900183 - RNA, 22 nt, Human
agaaaguuugagaacuguagau

SEQ ID NO: 900184 - RNA, 22 nt, Human
uuaagagguggucgugucugug

SEQ ID NO: 900185 - RNA, 22 nt, Human
uccuucuguagucccugucccu

SEQ ID NO: 900186 - RNA, 22 nt, Human
gcucuggcuuggggcacucguc

SEQ ID NO: 900187 - RNA, 22 nt, Human
ggcuggaaacucagguaggguu

SEQ ID NO: 900188 - RNA, 22 nt, Human
uuagaacaguagaagaaagggu

SEQ ID NO: 900189 - RNA, 22 nt, Human
aagcuguucuccagugacucag

SEQ ID NO: 900190 - RNA, 22 nt, Human
cucaaaauccauaaaaucaggu

SEQ ID NO: 900191 - RNA, 23 nt, Human
gcacugccaugugcucugcaggc

SEQ ID NO: 900192 - RNA, 22 nt, Human
caaagacacgggaaacaacguu

SEQ ID NO: 900193 - RNA, 22 nt, Human
gguggcaguuacaggggcaaau

SEQ ID NO: 900194 - RNA, 22 nt, Human
gccagcuggagacuggcagggg

SEQ ID NO: 900195 - RNA, 22 nt, Human
gucaggccaauacucuccagca

SEQ ID NO: 900196 - RNA, 22 nt, Human
ucauuuaugcaggaauggcaua

SEQ ID NO: 900197 - RNA, 22 nt, Human
ugaauacacuaaaaaucacuuu

SEQ ID NO: 900198 - RNA, 22 nt, Human
ucagcugcacuguucugaccca

SEQ ID NO: 900199 - RNA, 22 nt, Human
guccaggccaugguggacacag

SEQ ID NO: 900200 - RNA, 22 nt, Human
cuuuuacaguggaccugccauu

SEQ ID NO: 900201 - RNA, 22 nt, Human
auguacauuuguaguaauauca

SEQ ID NO: 900202 - RNA, 22 nt, Human
caugaguucaucugcuucucuu

SEQ ID NO: 900203 - RNA, 22 nt, Human
aguucuuuugugaacauaugcu

SEQ ID NO: 900204 - RNA, 22 nt, Human
ucagagaauccguaagucacaa

SEQ ID NO: 900205 - RNA, 22 nt, Human
ucuuagaaugucaacugauguu

SEQ ID NO: 900206 - RNA, 20 nt, Human
acuuuacagagaagacugac

SEQ ID NO: 900207 - RNA, 22 nt, Human
uaucacuacacuaagauacaga

SEQ ID NO: 900208 - RNA, 22 nt, Human
ugccagugggugugcagagacu

SEQ ID NO: 900209 - RNA, 22 nt, Human
gagaacagagauaauuuuacuu

SEQ ID NO: 900210 - RNA, 22 nt, Human
uauaaagaauccagaagagaca

SEQ ID NO: 900211 - RNA, 22 nt, Human
ugugcuucuugcagcuccugua

SEQ ID NO: 900212 - RNA, 22 nt, Human
cgcagaagagguugucuagucc

SEQ ID NO: 900213 - RNA, 22 nt, Human
acaaauguuacauaaguuugga

SEQ ID NO: 900214 - RNA, 22 nt, Human
aaagugcauagaguagugccua

SEQ ID NO: 900215 - RNA, 22 nt, Human
ucucccaggcugcccuguggac

SEQ ID NO: 900216 - RNA, 22 nt, Human
uguaggaaaaacaaugaucugc

SEQ ID NO: 900217 - RNA, 22 nt, Human
uaacuucuuugguuuaaagaga

SEQ ID NO: 900218 - RNA, 22 nt, Human
ccuccaggaacuugagagacac

SEQ ID NO: 900219 - RNA, 22 nt, Human
acauuuuucacauuuguagggu

SEQ ID NO: 900220 - RNA, 20 nt, Human
gccuguccugagugucaugg

SEQ ID NO: 900221 - RNA, 22 nt, Human
caugagauaauuuuucuccagu

SEQ ID NO: 900222 - RNA, 22 nt, Human
ugggcucucuuuaccucauaac

SEQ ID NO: 900223 - RNA, 22 nt, Human
uaagaggcagcauuccucgccu

SEQ ID NO: 900224 - RNA, 22 nt, Human
acuuuacaggcacuucaaguau

SEQ ID NO: 900225 - RNA, 22 nt, Human
ugaauuuaagcacugauguuaa

SEQ ID NO: 900226 - RNA, 22 nt, Human
uucaacuagauuuauacaauuc

SEQ ID NO: 900227 - RNA, 22 nt, Human
aaauaguuuagcucucauuuca

SEQ ID NO: 900228 - RNA, 22 nt, Human
uuuuaacacucagcacuaucuc

SEQ ID NO: 900229 - RNA, 19 nt, Human
uuugaaaggauuguuauuu

SEQ ID NO: 900230 - RNA, 22 nt, Human
agacauuuccuagacaucaaug

SEQ ID NO: 900231 - RNA, 22 nt, Human
ucagugcugcuuuaugacaguu

SEQ ID NO: 900232 - RNA, 22 nt, Human
aguggcugucuuccaaaaucug

SEQ ID NO: 900233 - RNA, 22 nt, Human
auguuugcauucuuauuaucgu

SEQ ID NO: 900234 - RNA, 21 nt, Human
uguuguuuuauggcuaugaau

SEQ ID NO: 900235 - RNA, 22 nt, Human
aaaaggaggucacuuuauuccu

SEQ ID NO: 900236 - RNA, 22 nt, Human
acugugugggccgcucacuggg

SEQ ID NO: 900237 - RNA, 22 nt, Human
gcagggcuaggucuucuagggc

SEQ ID NO: 900238 - RNA, 22 nt, Human
accaggaggccuggagcacaaa

SEQ ID NO: 900239 - RNA, 22 nt, Human
uaaauaucaccuggaauuguua

SEQ ID NO: 900240 - RNA, 22 nt, Human
gcugaggguaacacuucgggau

SEQ ID NO: 900241 - RNA, 22 nt, Human
uugcuuuauuggguuuacugcc

SEQ ID NO: 900242 - RNA, 23 nt, Human
agggguggucaguacccgcagug

SEQ ID NO: 900243 - RNA, 22 nt, Human
agaaggcaucagaaguguguag

SEQ ID NO: 900244 - RNA, 22 nt, Human
gggcuccaucacaggcuccauc

SEQ ID NO: 900245 - RNA, 22 nt, Human
agcucagaacugcagacaugug

SEQ ID NO: 900246 - RNA, 22 nt, Human
cccucagcuucucccugcagcu

SEQ ID NO: 900247 - RNA, 22 nt, Human
gcucuugacagcuacaucuggc

SEQ ID NO: 900248 - RNA, 22 nt, Human
ugucugguggguugacaggcag

SEQ ID NO: 900249 - RNA, 22 nt, Human
caagauggagaagcagcaaggg

SEQ ID NO: 900250 - RNA, 22 nt, Human
ccucacugucaucaguaguuau

SEQ ID NO: 900251 - RNA, 22 nt, Human
ugauucaacuuucauaacaaaa

SEQ ID NO: 900252 - RNA, 22 nt, Human
aggaagcaaaaggcagggucua

SEQ ID NO: 900253 - RNA, 22 nt, Human
uugagaaugaugagauucuucc

SEQ ID NO: 900254 - RNA, 22 nt, Human
guccugguccugccuccccaug

SEQ ID NO: 900255 - RNA, 22 nt, Human
agggaagcaggaauagcucuga

SEQ ID NO: 900256 - RNA, 22 nt, Human
ggcaguguucugguugucagga

SEQ ID NO: 900257 - RNA, 21 nt, Human
ggagauggguaucgccugggc

SEQ ID NO: 900258 - RNA, 22 nt, Human
ugucucagguacaugcguccug

SEQ ID NO: 900259 - RNA, 20 nt, Human
ugcuauauugaagugcaguu

SEQ ID NO: 900260 - RNA, 22 nt, Human
uagaaacacagagagacccaug

SEQ ID NO: 900261 - RNA, 22 nt, Human
gugucaacagccgaagauaaau

SEQ ID NO: 900262 - RNA, 22 nt, Human
acagaacuucaguaguauuccc

SEQ ID NO: 900263 - RNA, 22 nt, Human
cggccaagccggggccccgaag

SEQ ID NO: 900264 - RNA, 22 nt, Human
guacaaaggcagaauuggguag

SEQ ID NO: 900265 - RNA, 22 nt, Human
uuuaaauaggacuccugggggu

SEQ ID NO: 900266 - RNA, 22 nt, Human
uugagaaaacacagaguuuauu

SEQ ID NO: 900267 - RNA, 22 nt, Human
uguauacaggauuacucauagc

SEQ ID NO: 900268 - RNA, 22 nt, Human
ugcuuuaagagauuguuaguac

SEQ ID NO: 900269 - RNA, 22 nt, Human
ucuuucaaaugcuugaauugga

SEQ ID NO: 900270 - RNA, 22 nt, Human
acucacagcaugagcuuggcag

SEQ ID NO: 900271 - RNA, 22 nt, Human
uggguagggacuuagcuggcug

SEQ ID NO: 900272 - RNA, 22 nt, Human
agcccugagccagccuggucag

SEQ ID NO: 900273 - RNA, 22 nt, Human
gggugaggccuugcugccauca

SEQ ID NO: 900274 - RNA, 22 nt, Human
uaaagguuaguagcagggaaac

SEQ ID NO: 900275 - RNA, 17 nt, Human
ggcagcugccacuuuuu

SEQ ID NO: 900276 - RNA, 18 nt, Human
ugcagcauguucccauaa

SEQ ID NO: 900277 - RNA, 22 nt, Human
gugucaggggcagccaggaaau

SEQ ID NO: 900278 - RNA, 19 nt, Human
aacuguaauuaauacccua

SEQ ID NO: 900279 - RNA, 22 nt, Human
uaacaaggagauggugggucau

SEQ ID NO: 900280 - RNA, 22 nt, Human
aagaacaugaguuaugaugauu

SEQ ID NO: 900281 - RNA, 21 nt, Human
cggcuucauuuucuucugguu

SEQ ID NO: 900282 - RNA, 22 nt, Human
uggcagcaauuugugauguuga

SEQ ID NO: 900283 - RNA, 22 nt, Human
ccagggucacaaauaacugcag

SEQ ID NO: 900284 - RNA, 22 nt, Human
aucuguuccccuaugcucucua

SEQ ID NO: 900285 - RNA, 22 nt, Human
ucagagacuguaggagcagccu

SEQ ID NO: 900286 - RNA, 22 nt, Human
guaaagaaggcaaccugguuau

SEQ ID NO: 900287 - RNA, 22 nt, Human
cccggaaacaggugacaaucuc

SEQ ID NO: 900288 - RNA, 22 nt, Human
acaagauuuuaugacucuuuuu

SEQ ID NO: 900289 - RNA, 22 nt, Human
uggcucuguucgccaucaggag

SEQ ID NO: 900290 - RNA, 22 nt, Human
gaggaggcuggcgccgccugcc

SEQ ID NO: 900291 - RNA, 21 nt, Human
guuuucaugauagagucugua

SEQ ID NO: 900292 - RNA, 22 nt, Human
cucaggauuuacuaauuucaag

SEQ ID NO: 900293 - RNA, 22 nt, Human
ucuuggcuccuguugucaucag

SEQ ID NO: 900294 - RNA, 22 nt, Human
cacacaguaggcacucauuaau

SEQ ID NO: 900295 - RNA, 22 nt, Human
cagcagagcuuauguuggguca

SEQ ID NO: 900296 - RNA, 22 nt, Human
gcaggagagccagcaggcuucc

SEQ ID NO: 900297 - RNA, 22 nt, Human
uacuuacaugaauucaagagca

SEQ ID NO: 900298 - RNA, 18 nt, Human
uuuguacccuuuuccuag

SEQ ID NO: 900299 - RNA, 22 nt, Human
aggcagcagugauaagauagga

SEQ ID NO: 900300 - RNA, 22 nt, Human
ugccuuaaguaagacugaacag

SEQ ID NO: 900301 - RNA, 22 nt, Human
aaagcagguugcaauuacagug

SEQ ID NO: 900302 - RNA, 22 nt, Human
ugaggacaaucccuaacucaga

SEQ ID NO: 900303 - RNA, 22 nt, Human
agcagcauguugggaugugaaa

SEQ ID NO: 900304 - RNA, 22 nt, Human
ugaggccaugcccgugccggcc

SEQ ID NO: 900305 - RNA, 22 nt, Human
caggccugucugcacaugaggc

SEQ ID NO: 900306 - RNA, 22 nt, Human
cauuguauugaggauacuuaag

SEQ ID NO: 900307 - RNA, 22 nt, Human
cauuuucagcacccaucugaaa

SEQ ID NO: 900308 - RNA, 22 nt, Human
cagcaggaccauugaggcauca

SEQ ID NO: 900309 - RNA, 22 nt, Human
cagugggugaugaguccugggg

SEQ ID NO: 900310 - RNA, 22 nt, Human
gugcucauguccuuucacugca

SEQ ID NO: 900311 - RNA, 22 nt, Human
uaaugaggggaaccaucuguag

SEQ ID NO: 900312 - RNA, 22 nt, Human
gaacaguaucaguagugccagu

SEQ ID NO: 900313 - RNA, 22 nt, Human
uacagauauagggcgagcuuag

SEQ ID NO: 900314 - RNA, 22 nt, Human
agaguuuacagaaauaagcugu

SEQ ID NO: 900315 - RNA, 22 nt, Human
agaaguucuggagacggaagug

SEQ ID NO: 900316 - RNA, 22 nt, Human
augaaagcucagugcacugaca

SEQ ID NO: 900317 - RNA, 22 nt, Human
ugaaaaaccucaguccgcuuua

SEQ ID NO: 900318 - RNA, 19 nt, Human
aggguuacccgcugccacc

SEQ ID NO: 900319 - RNA, 22 nt, Human
caaggcugcuucagacuaguga

SEQ ID NO: 900320 - RNA, 22 nt, Human
uccagcuugccuggucuuuugg

SEQ ID NO: 900321 - RNA, 20 nt, Human
uagaaucuggugauguaucg

SEQ ID NO: 900322 - RNA, 22 nt, Human
gcauuuuucuaaucauuggcau

SEQ ID NO: 900323 - RNA, 22 nt, Human
agugucugagcuaucauuaggg

SEQ ID NO: 900324 - RNA, 19 nt, Human
ugugauaagcagaauucca

SEQ ID NO: 900325 - RNA, 22 nt, Human
uuuuucuagcucaaagauucua

SEQ ID NO: 900326 - RNA, 22 nt, Human
aauauaguucugguauuguuaa

SEQ ID NO: 900327 - RNA, 22 nt, Human
gugggucccuaaacacauccca

SEQ ID NO: 900328 - RNA, 22 nt, Human
ucuugggauugcccugcaguuc

SEQ ID NO: 900329 - RNA, 22 nt, Human
ucaguaauauucuuuaaaauac

SEQ ID NO: 900330 - RNA, 22 nt, Human
augaggcaucuaacauugcaaa

SEQ ID NO: 900331 - RNA, 23 nt, Human
gcagugugaauccaguguuucag

SEQ ID NO: 900332 - RNA, 22 nt, Human
uuccuuugggaaaucacuaagg

SEQ ID NO: 900333 - RNA, 21 nt, Human
auucaguuugacaucuagcag

SEQ ID NO: 900334 - RNA, 22 nt, Human
gcauggcaaauaucgagggcag

SEQ ID NO: 900335 - RNA, 22 nt, Human
uccaggcuggagugcaguggcg

SEQ ID NO: 900336 - RNA, 22 nt, Human
cuguggcuuuuccggggagccu

SEQ ID NO: 900337 - RNA, 22 nt, Human
gcuagcagguugcaucugucuu

SEQ ID NO: 900338 - RNA, 23 nt, Human
ggcacagaugcugagcaugugca

SEQ ID NO: 900339 - RNA, 22 nt, Human
uggcuucauucagcaugacagu

SEQ ID NO: 900340 - RNA, 22 nt, Human
gaaacauucagucaacaguguu

SEQ ID NO: 900341 - RNA, 22 nt, Human
uccaggcaagggaggagcaugg

SEQ ID NO: 900342 - RNA, 20 nt, Human
agccuggcaaacacccccag

SEQ ID NO: 900343 - RNA, 22 nt, Human
uuucaugucauuccauuucaga

SEQ ID NO: 900344 - RNA, 22 nt, Human
agaaggaagccaggagggugca

SEQ ID NO: 900345 - RNA, 19 nt, Human
ugccccugcagucuaccca

SEQ ID NO: 900346 - RNA, 22 nt, Human
gggcuagaauccgcgucucuug

SEQ ID NO: 900347 - RNA, 22 nt, Human
uacuacaaggccgaagcucuca

SEQ ID NO: 900348 - RNA, 22 nt, Human
gcauucaucuaguaucacucug

SEQ ID NO: 900349 - RNA, 22 nt, Human
gaaauagaagcugccaauuucu

SEQ ID NO: 900350 - RNA, 22 nt, Human
auucaagguuuauucaguuuag

SEQ ID NO: 900351 - RNA, 22 nt, Human
ucagaggacagcagcuaaauaa

SEQ ID NO: 900352 - RNA, 23 nt, Human
aagcuucuaucucugcagaagga

SEQ ID NO: 900353 - RNA, 21 nt, Human
aucugauguauaaauaccucu

SEQ ID NO: 900354 - RNA, 22 nt, Human
ugccaagcacagaggggccacu

SEQ ID NO: 900355 - RNA, 22 nt, Human
ugugaagaguagacauguggug

SEQ ID NO: 900356 - RNA, 22 nt, Human
ugugaggaguaggcugagggug

SEQ ID NO: 900357 - RNA, 22 nt, Human
gauuuaaaguagaccuuuguuu

SEQ ID NO: 900358 - RNA, 22 nt, Human
ucugagccguauggcuuggcua

SEQ ID NO: 900359 - RNA, 22 nt, Human
gggcuccaaaauccuguagccu

SEQ ID NO: 900360 - RNA, 19 nt, Human
acuucuuuucaacacagga

SEQ ID NO: 900361 - RNA, 23 nt, Human
cugagggcuggucugaagucugc

SEQ ID NO: 900362 - RNA, 22 nt, Human
agggccuggcgcguggccgccg

SEQ ID NO: 900363 - RNA, 22 nt, Human
ggcuucucucuucacauggcuu

SEQ ID NO: 900364 - RNA, 22 nt, Human
gaggguccccaugcagagcuca

SEQ ID NO: 900365 - RNA, 18 nt, Human
ggccagccccaggccagc

SEQ ID NO: 900366 - RNA, 21 nt, Human
gauaaagcagcuugccuaagg

SEQ ID NO: 900367 - RNA, 22 nt, Human
ccuggcagaaagaguuacaccu

SEQ ID NO: 900368 - RNA, 22 nt, Human
aggggagcaacauagucacucu

SEQ ID NO: 900369 - RNA, 22 nt, Human
ccuccugcacuugcuuuccuuc

SEQ ID NO: 900370 - RNA, 22 nt, Human
caacugaacugauaucaacuau

SEQ ID NO: 900371 - RNA, 22 nt, Human
ggugucuguugccuccugguua

SEQ ID NO: 900372 - RNA, 22 nt, Human
cuugggaaugcuaacagaugac

SEQ ID NO: 900373 - RNA, 22 nt, Human
gugcagcagggggaagacagug

SEQ ID NO: 900374 - RNA, 22 nt, Human
aaaguuguaauggaagaaaugc

SEQ ID NO: 900375 - RNA, 22 nt, Human
cugcaugguucaaaugagcuaa

SEQ ID NO: 900376 - RNA, 22 nt, Human
ccucugugugugcaugcaugcg

SEQ ID NO: 900377 - RNA, 22 nt, Human
aaacaggcaucacucagcaaag

SEQ ID NO: 900378 - RNA, 22 nt, Human
augugucugaccacuguauugg

SEQ ID NO: 900379 - RNA, 22 nt, Human
cccagagaaccuucugugccac

SEQ ID NO: 900380 - RNA, 22 nt, Human
gccuccggaguugcagugucuu

SEQ ID NO: 900381 - RNA, 22 nt, Human
aauucuguaacuuuacugaauu

SEQ ID NO: 900382 - RNA, 22 nt, Human
ucaagcagcuuuuacagaagag

SEQ ID NO: 900383 - RNA, 22 nt, Human
uuaggaaacaguagccuuugcu

SEQ ID NO: 900384 - RNA, 22 nt, Human
ucaaagacauggggaagcugag

SEQ ID NO: 900385 - RNA, 19 nt, Human
uggcugggcgugccuccgu

SEQ ID NO: 900386 - RNA, 22 nt, Human
gaagagcugcucagaacaugau

SEQ ID NO: 900387 - RNA, 22 nt, Human
cuguacaucccgagagccagua

SEQ ID NO: 900388 - RNA, 22 nt, Human
agcaucaacaaugaacauaaau

SEQ ID NO: 900389 - RNA, 22 nt, Human
auguacuaugcagucaacuguu

SEQ ID NO: 900390 - RNA, 20 nt, Human
ugccccaggccugcaccugc

SEQ ID NO: 900391 - RNA, 22 nt, Human
ugcuuuauucaggguuuacccc

SEQ ID NO: 900392 - RNA, 22 nt, Human
cuggcugacaccuugauagcag

SEQ ID NO: 900393 - RNA, 22 nt, Human
ugaauucuggcucuucuguuua

SEQ ID NO: 900394 - RNA, 22 nt, Human
cacauuguauuguggaaaguua

SEQ ID NO: 900395 - RNA, 22 nt, Human
caguaauaucuguugaagcuau

SEQ ID NO: 900396 - RNA, 22 nt, Human
ggcagcaacagguguguuguga

SEQ ID NO: 900397 - RNA, 23 nt, Human
ucaucuguaacagccuaugaaau

SEQ ID NO: 900398 - RNA, 22 nt, Human
gcuagccugcaguggcuauggu

SEQ ID NO: 900399 - RNA, 22 nt, Human
agcugcuguggccacaucuggc

SEQ ID NO: 900400 - RNA, 22 nt, Human
uuaaaucuguucucaugucugu

SEQ ID NO: 900401 - RNA, 22 nt, Human
ugucaaugaagucauccuugug

SEQ ID NO: 900402 - RNA, 22 nt, Human
uugguagaaugaacauucauug

SEQ ID NO: 900403 - RNA, 17 nt, Human
ucuccuggcucuaucag

SEQ ID NO: 900404 - RNA, 22 nt, Human
gucccagggaugcagacaugag

SEQ ID NO: 900405 - RNA, 22 nt, Human
gagugcaguuggggugagggga

SEQ ID NO: 900406 - RNA, 22 nt, Human
uuucuuccuuaccuuacuagag

SEQ ID NO: 900407 - RNA, 22 nt, Human
gcccagaguucaaggcugcagu

SEQ ID NO: 900408 - RNA, 22 nt, Human
gggcuggaggugagcaggacag

SEQ ID NO: 900409 - RNA, 16 nt, Human
ugacccuugaccagcc

SEQ ID NO: 900410 - RNA, 22 nt, Human
acccuaauaaucacagacuagu

SEQ ID NO: 900411 - RNA, 22 nt, Human
gccugcuuccuagccuuccaag

SEQ ID NO: 900412 - RNA, 22 nt, Human
guauugcaauuacucuucuucu

SEQ ID NO: 900413 - RNA, 22 nt, Human
ugucaggucuaaaaugggucuc

SEQ ID NO: 900414 - RNA, 23 nt, Human
aauuacaaccaagaacuggaagg

SEQ ID NO: 900415 - RNA, 22 nt, Human
uauaggaaguaauuguugccug

SEQ ID NO: 900416 - RNA, 22 nt, Human
ugagguagaagccuggguugag

SEQ ID NO: 900417 - RNA, 22 nt, Human
acuaauagagacaaacauagau

SEQ ID NO: 900418 - RNA, 22 nt, Human
gaggcagcaaaauauaucauaa

SEQ ID NO: 900419 - RNA, 22 nt, Human
uguuugaaaaguggagauuuau

SEQ ID NO: 900420 - RNA, 22 nt, Human
aaggcaaugguuucugugccuu

SEQ ID NO: 900421 - RNA, 22 nt, Human
uaaaucagggagucaucugcga

SEQ ID NO: 900422 - RNA, 22 nt, Human
ugggcuccuugggagcaaguga

SEQ ID NO: 900423 - RNA, 22 nt, Human
gaggcaagagaagccagcuuuc

SEQ ID NO: 900424 - RNA, 22 nt, Human
acagaauuaacauuugaugaau

SEQ ID NO: 900425 - RNA, 22 nt, Human
uuaguaucuggaaaucacauua

SEQ ID NO: 900426 - RNA, 22 nt, Human
gaaucaauugugaagacuauga

SEQ ID NO: 900427 - RNA, 22 nt, Human
aucuaacacuguaaacugucuu

SEQ ID NO: 900428 - RNA, 22 nt, Human
uagaaccaguccacagaauuug

SEQ ID NO: 900429 - RNA, 22 nt, Human
ucaacaauaggauauagcaggu

SEQ ID NO: 900430 - RNA, 22 nt, Human
gcaagcugugauuuaugugaau

SEQ ID NO: 900431 - RNA, 22 nt, Human
aacuugauccugcuggguacua

SEQ ID NO: 900432 - RNA, 22 nt, Human
agggcugcaucugccuggugaa

SEQ ID NO: 900433 - RNA, 22 nt, Human
aauugcauuacagaaacuuuca

SEQ ID NO: 900434 - RNA, 22 nt, Human
cuggggcuguaggaggacuuau

SEQ ID NO: 900435 - RNA, 22 nt, Human
ggagucuguuuuacaugcagga

SEQ ID NO: 900436 - RNA, 22 nt, Human
uaaagcuagccaaccacugucu

SEQ ID NO: 900437 - RNA, 23 nt, Human
ccagaaucuacucauuggaauga

SEQ ID NO: 900438 - RNA, 22 nt, Human
cugcagcuuucgcuccaucagc

SEQ ID NO: 900439 - RNA, 22 nt, Human
uggcccugcuguaucaucugcu

SEQ ID NO: 900440 - RNA, 22 nt, Human
gaggaggcuguuucucugcauu

SEQ ID NO: 900441 - RNA, 22 nt, Human
ugagacaauauccuuuguaacc

SEQ ID NO: 900442 - RNA, 22 nt, Human
acauuucucauaggagagccac

SEQ ID NO: 900443 - RNA, 22 nt, Human
uucauguguuugauagcccaga

SEQ ID NO: 900444 - RNA, 22 nt, Human
cucugccagccaaaauuuauga

SEQ ID NO: 900445 - RNA, 22 nt, Human
ucacagacuugucuccagggau

SEQ ID NO: 900446 - RNA, 22 nt, Human
agaggcugugcccaccaggcaa

SEQ ID NO: 900447 - RNA, 22 nt, Human
cagcagcaggcgcacggccguc

SEQ ID NO: 900448 - RNA, 22 nt, Human
gcauuaaaugcuagggaccuaa

SEQ ID NO: 900449 - RNA, 22 nt, Human
agggcagagcacugaauuggga

SEQ ID NO: 900450 - RNA, 22 nt, Human
auaugaaaauguuuuagcugua

SEQ ID NO: 900451 - RNA, 22 nt, Human
uacaguauuaugagugauugaa

SEQ ID NO: 900452 - RNA, 22 nt, Human
gcauggcaagaucaggagacca

SEQ ID NO: 900453 - RNA, 22 nt, Human
cuggccgccuggggccggguga

SEQ ID NO: 900454 - RNA, 22 nt, Human
aaaugccucuggguuauucuag

SEQ ID NO: 900455 - RNA, 22 nt, Human
aaagcaguaguuuucaaauagu

SEQ ID NO: 900456 - RNA, 22 nt, Human
gagcucuggguguguugucagu

SEQ ID NO: 900457 - RNA, 22 nt, Human
agcugauuccacuuuuucccca

SEQ ID NO: 900458 - RNA, 22 nt, Human
aaggaagccuugccugaauaca

SEQ ID NO: 900459 - RNA, 22 nt, Human
agcuaaacuagguaaacagcag

SEQ ID NO: 900460 - RNA, 22 nt, Human
ucagcagacuaggcagauuacu

SEQ ID NO: 900461 - RNA, 22 nt, Human
auuuucucuuuguauaugcuag

SEQ ID NO: 900462 - RNA, 22 nt, Human
cccuaagacccucaagaucucc

SEQ ID NO: 900463 - RNA, 22 nt, Human
gaagaacaccugcugcccagug

SEQ ID NO: 900464 - RNA, 22 nt, Human
uuuaggaauauuuucuuucagg

SEQ ID NO: 900465 - RNA, 22 nt, Human
aggcgcugcgcuggggccagaa

SEQ ID NO: 900466 - RNA, 22 nt, Human
acaucuucacugguuucuggaa

SEQ ID NO: 900467 - RNA, 22 nt, Human
uucauugauuuccuuggaauaa

SEQ ID NO: 900468 - RNA, 22 nt, Human
cagguccaagagauccuccuac

SEQ ID NO: 900469 - RNA, 22 nt, Human
caguguggagggagagagccug

SEQ ID NO: 900470 - RNA, 22 nt, Human
cauugagagaaucacauagaag

SEQ ID NO: 900471 - RNA, 22 nt, Human
ugcauuggguugacauacuaaa

SEQ ID NO: 900472 - RNA, 22 nt, Human
ugcugaaguccaucuguuugac

SEQ ID NO: 900473 - RNA, 22 nt, Human
ucagaaaccccaacaauggaga

SEQ ID NO: 900474 - RNA, 22 nt, Human
aucugucccugguccaagauuu

SEQ ID NO: 900475 - RNA, 22 nt, Human
guguauguguuuauagggaggu

SEQ ID NO: 900476 - RNA, 20 nt, Human
augucugaaguaauccauuu

SEQ ID NO: 900477 - RNA, 22 nt, Human
ugggugggagcgcccugucugg

SEQ ID NO: 900478 - RNA, 22 nt, Human
cuuauuucuccauccagaguca

SEQ ID NO: 900479 - RNA, 22 nt, Human
uacauuguacuuacaaauagug

SEQ ID NO: 900480 - RNA, 22 nt, Human
aguauauuuguuaagauuauuc

SEQ ID NO: 900481 - RNA, 22 nt, Human
ucuaagaauugaaguggcucuu

SEQ ID NO: 900482 - RNA, 22 nt, Human
cagcugaagagaggugcugagu

SEQ ID NO: 900483 - RNA, 22 nt, Human
uuuucaauuuugaggcaguggu

SEQ ID NO: 900484 - RNA, 22 nt, Human
uuccuaacuggccuuuauggau

SEQ ID NO: 900485 - RNA, 18 nt, Human
gcuguucuucgcacuggc

SEQ ID NO: 900486 - RNA, 22 nt, Human
ugccuguaauaaugcuaagcac

SEQ ID NO: 900487 - RNA, 20 nt, Human
augcaugcaugcacaugcac

SEQ ID NO: 900488 - RNA, 22 nt, Human
uacacaugcucagauuccugug

SEQ ID NO: 900489 - RNA, 22 nt, Human
uccuuggcagcagggagcauga

SEQ ID NO: 900490 - RNA, 22 nt, Human
agccagcugccuuucacaucug

SEQ ID NO: 900491 - RNA, 22 nt, Human
augggcucuaugucuaggagau

SEQ ID NO: 900492 - RNA, 21 nt, Human
ggcaagaaacacaaucaagua

SEQ ID NO: 900493 - RNA, 22 nt, Human
caaacauuuugagugguuucug

SEQ ID NO: 900494 - RNA, 20 nt, Human
aggcagagcgcacuuuuaga

SEQ ID NO: 900495 - RNA, 22 nt, Human
ugcugggccuuuaccuccaggg

SEQ ID NO: 900496 - RNA, 22 nt, Human
ucucuggaauuggcugaggcaa

SEQ ID NO: 900497 - RNA, 22 nt, Human
cugagggagaagucacgggcag

SEQ ID NO: 900498 - RNA, 22 nt, Human
acuuuagucuguuucauuaucu

SEQ ID NO: 900499 - RNA, 22 nt, Human
ccugccaucagaaacacucaaa

SEQ ID NO: 900500 - RNA, 22 nt, Human
ucuaaacuacgucaaaacuagu

SEQ ID NO: 900501 - RNA, 22 nt, Human
aacacaguuaguaagggaaaua

SEQ ID NO: 900502 - RNA, 22 nt, Human
ccuuaaacucugauaugauauu

SEQ ID NO: 900503 - RNA, 22 nt, Human
cuacaacauuaugcuuucuguc

SEQ ID NO: 900504 - RNA, 22 nt, Human
cuuggauaucacucagaaagau

SEQ ID NO: 900505 - RNA, 22 nt, Human
gcucuccaaacccuguggcuuu

SEQ ID NO: 900506 - RNA, 21 nt, Human
uucccagcaccuagcacaggu

SEQ ID NO: 900507 - RNA, 22 nt, Human
cugggcaggagaggugguugga

SEQ ID NO: 900508 - RNA, 22 nt, Human
uacauucaacaugucacuaugu

SEQ ID NO: 900509 - RNA, 22 nt, Human
aaagcucuuauguaaacagaaa

SEQ ID NO: 900510 - RNA, 22 nt, Human
ggucagccuuggauuugguagc

SEQ ID NO: 900511 - RNA, 22 nt, Human
agagaugagaacaugcuuggau

SEQ ID NO: 900512 - RNA, 22 nt, Human
uuucuauaacuggacuggauug

SEQ ID NO: 900513 - RNA, 23 nt, Human
ugugccauugaggcugaggcuca

SEQ ID NO: 900514 - RNA, 22 nt, Human
uauguuucugggcuugauauuu

SEQ ID NO: 900515 - RNA, 22 nt, Human
ggacugaaaucuuuccauguca

SEQ ID NO: 900516 - RNA, 22 nt, Human
ggcggggucugagcgccgcgcc

SEQ ID NO: 900517 - RNA, 22 nt, Human
ucacccagcgggcgcacacucg

SEQ ID NO: 900518 - RNA, 22 nt, Human
cuggaccagccuccgccuucac

SEQ ID NO: 900519 - RNA, 22 nt, Human
gccugggacccuuagcucuugg

SEQ ID NO: 900520 - RNA, 22 nt, Human
uguuggaaggcaagcagcaauu

SEQ ID NO: 900521 - RNA, 22 nt, Human
aggcaaaucugagacauuuaaa

SEQ ID NO: 900522 - RNA, 22 nt, Human
auguccuuccugagaucccugu

SEQ ID NO: 900523 - RNA, 22 nt, Human
agaacauaucuguuuucuaacu

SEQ ID NO: 900524 - RNA, 22 nt, Human
ugcaggguagaugcaggcugug

SEQ ID NO: 900525 - RNA, 22 nt, Human
uaacuucaaaauugccacaugu

SEQ ID NO: 900526 - RNA, 17 nt, Human
uguauguggauacacua

SEQ ID NO: 900527 - RNA, 22 nt, Human
ucuagaauuuugccauauagcu

SEQ ID NO: 900528 - RNA, 22 nt, Human
uguacacaaugauaaauuauua

SEQ ID NO: 900529 - RNA, 22 nt, Human
agaugguuaucuuuucuuugua

SEQ ID NO: 900530 - RNA, 22 nt, Human
ugcaguccaagagucuccuggu

SEQ ID NO: 900531 - RNA, 22 nt, Human
acccaggcuggaaugcaguggc

SEQ ID NO: 900532 - RNA, 22 nt, Human
uucuggagaggaacagaaaggu

SEQ ID NO: 900533 - RNA, 22 nt, Human
gccuauuuuauuaugcauguaa

SEQ ID NO: 900534 - RNA, 22 nt, Human
acccaggcuggagugcagugac

SEQ ID NO: 900535 - RNA, 22 nt, Human
ucuuuuccuucccuacagaucu

SEQ ID NO: 900536 - RNA, 22 nt, Human
ugugcaguuuuaaguggucuaa

SEQ ID NO: 900537 - RNA, 22 nt, Human
aaguuugguccuucuaagaaga

SEQ ID NO: 900538 - RNA, 22 nt, Human
acagggcuggggcacuuggcug

SEQ ID NO: 900539 - RNA, 22 nt, Human
aggcuccuuguucaucauccau

SEQ ID NO: 900540 - RNA, 22 nt, Human
ucaaaguacuacucaguucagc

SEQ ID NO: 900541 - RNA, 22 nt, Human
aggauaaaugaucuagauuuuc

SEQ ID NO: 900542 - RNA, 22 nt, Human
cagaaagccgacuuacaaugga

SEQ ID NO: 900543 - RNA, 22 nt, Human
uacagguuccaggaauuaggac

SEQ ID NO: 900544 - RNA, 22 nt, Human
aggcgcaggguuuggacccagg

SEQ ID NO: 900545 - RNA, 22 nt, Human
ugggaauguggcaaggcauaga

SEQ ID NO: 900546 - RNA, 22 nt, Human
cagcaggggaacugugggccag

SEQ ID NO: 900547 - RNA, 22 nt, Human
augucccagcugagagacaacu

SEQ ID NO: 900548 - RNA, 22 nt, Human
ccugggagccaagccucugugu

SEQ ID NO: 900549 - RNA, 22 nt, Human
aggccagauauugugcuaccca

SEQ ID NO: 900550 - RNA, 22 nt, Human
uucuuuugcaagacuauugauu

SEQ ID NO: 900551 - RNA, 22 nt, Human
uccugagcuuuacaguaaggac

SEQ ID NO: 900552 - RNA, 22 nt, Human
uugucucugggacaugguauua

SEQ ID NO: 900553 - RNA, 22 nt, Human
cuggauaaucacagaggagcau

SEQ ID NO: 900554 - RNA, 22 nt, Human
cauuacaucuuugaugcaguau

SEQ ID NO: 900555 - RNA, 22 nt, Human
agggagcugagcugugagcagc

SEQ ID NO: 900556 - RNA, 22 nt, Human
uuucucucugacugggagcuga

SEQ ID NO: 900557 - RNA, 22 nt, Human
ucccucuguucuguuccaagug

SEQ ID NO: 900558 - RNA, 22 nt, Human
uucaaagcagagggucaauaca

SEQ ID NO: 900559 - RNA, 22 nt, Human
uaauacuuuugccuuguauuca

SEQ ID NO: 900560 - RNA, 22 nt, Human
acuucuaagcucaaauugguau

SEQ ID NO: 900561 - RNA, 21 nt, Human
uccaggaguggcugggcaggg

SEQ ID NO: 900562 - RNA, 22 nt, Human
aaagacuaagaagaguauuauu

SEQ ID NO: 900563 - RNA, 22 nt, Human
ugaaauguugguaauuuuauau

SEQ ID NO: 900564 - RNA, 20 nt, Human
agaggccaguuaggagucua

SEQ ID NO: 900565 - RNA, 22 nt, Human
cagcuguggggagcuugggcca

SEQ ID NO: 900566 - RNA, 22 nt, Human
cucagggaggagcuucugggcc

SEQ ID NO: 900567 - RNA, 22 nt, Human
aaggucacacucccagagcuga

SEQ ID NO: 900568 - RNA, 22 nt, Human
agggcucaccacugugcacucc

SEQ ID NO: 900569 - RNA, 22 nt, Human
aggcccuggccugacucaaugu

SEQ ID NO: 900570 - RNA, 22 nt, Human
gaugagguaagaauguaacacc

SEQ ID NO: 900571 - RNA, 22 nt, Human
ucugccugagggagcugaggaa

SEQ ID NO: 900572 - RNA, 22 nt, Human
ggcucccuguucuauucccugg

SEQ ID NO: 900573 - RNA, 22 nt, Human
uggcagcaccagcaguguccuu

SEQ ID NO: 900574 - RNA, 22 nt, Human
cuguguguccucggacgaguuu

SEQ ID NO: 900575 - RNA, 22 nt, Human
ugacccuuggucuugcuuuucc

SEQ ID NO: 900576 - RNA, 18 nt, Human
agcuccugaacucugugg

SEQ ID NO: 900577 - RNA, 23 nt, Human
gggaccaggcccuuccugguuug

SEQ ID NO: 900578 - RNA, 22 nt, Human
ggucagcagugcagggcagagc

SEQ ID NO: 900579 - RNA, 22 nt, Human
caguggguccuaaguacaguuc

SEQ ID NO: 900580 - RNA, 22 nt, Human
agaauacaucaaucuauuuucu

SEQ ID NO: 900581 - RNA, 22 nt, Human
ccugggcagggagaccaggcuc

SEQ ID NO: 900582 - RNA, 22 nt, Human
auucuaaagcuuguggagcuua

SEQ ID NO: 900583 - RNA, 22 nt, Human
ugaggggguuaauuaggagagu

SEQ ID NO: 900584 - RNA, 22 nt, Human
ggacccagcucugagacccugc

SEQ ID NO: 900585 - RNA, 22 nt, Human
acaggcuuuuuugcucucgaau

SEQ ID NO: 900586 - RNA, 20 nt, Human
ucccucaggucauugggcug

SEQ ID NO: 900587 - RNA, 22 nt, Human
ccccagcagacucagggcaggu

SEQ ID NO: 900588 - RNA, 22 nt, Human
auagauauuagcaaaauuuuau

SEQ ID NO: 900589 - RNA, 22 nt, Human
uggcagaugcguuuucauuuuc

SEQ ID NO: 900590 - RNA, 22 nt, Human
ucagugcaucacagaacuuugu

SEQ ID NO: 900591 - RNA, 22 nt, Human
ccacaggacggaggucuggccg

SEQ ID NO: 900592 - RNA, 22 nt, Human
ucauuaauaagucuaacucucc

SEQ ID NO: 900593 - RNA, 22 nt, Human
gugguuguuuaggucguggauc

SEQ ID NO: 900594 - RNA, 21 nt, Human
aagcuguguuccacugauagc

SEQ ID NO: 900595 - RNA, 22 nt, Human
ucacaucugccuccauagcacc

SEQ ID NO: 900596 - RNA, 22 nt, Human
agcaccugcuaugugucaggga

SEQ ID NO: 900597 - RNA, 22 nt, Human
uugacaaaguuuaguaauaauc

SEQ ID NO: 900598 - RNA, 22 nt, Human
ggcaguguccagcuuccuggag

SEQ ID NO: 900599 - RNA, 22 nt, Human
gaggacauaguccagauggcaa

SEQ ID NO: 900600 - RNA, 22 nt, Human
uaacagaaauauuuccagguga

SEQ ID NO: 900601 - RNA, 23 nt, Human
uuuguacugcauuaugagacaca

SEQ ID NO: 900602 - RNA, 21 nt, Human
aaguuuguucuuguauagucu

SEQ ID NO: 900603 - RNA, 17 nt, Human
aagaaucauuagagaag

SEQ ID NO: 900604 - RNA, 22 nt, Human
acaauuugaggcuacucaauug

SEQ ID NO: 900605 - RNA, 22 nt, Human
ugcuguagucaaagcaaagcug

SEQ ID NO: 900606 - RNA, 22 nt, Human
auuugccuuggugauuuguaaa

SEQ ID NO: 900607 - RNA, 22 nt, Human
aggcacagagagguuaaaugca

SEQ ID NO: 900608 - RNA, 22 nt, Human
aagcaauauacugauaugauua

SEQ ID NO: 900609 - RNA, 22 nt, Human
cagcagcucaggcuccuuccca

SEQ ID NO: 900610 - RNA, 22 nt, Human
guagugcuuucaucuggagugu

SEQ ID NO: 900611 - RNA, 22 nt, Human
uccagagagguuucuccaugcu

SEQ ID NO: 900612 - RNA, 22 nt, Human
uugcaucaguccucaauaaaau

SEQ ID NO: 900613 - RNA, 20 nt, Human
caguccaggcugcagcaucu

SEQ ID NO: 900614 - RNA, 22 nt, Human
agagucaguuagcgaauacuua

SEQ ID NO: 900615 - RNA, 20 nt, Human
aaaaacaguaaugcugaaga

SEQ ID NO: 900616 - RNA, 22 nt, Human
aagacauguuuuaagaauauuu

SEQ ID NO: 900617 - RNA, 22 nt, Human
caggcagacuuugagaaugaug

SEQ ID NO: 900618 - RNA, 22 nt, Human
gggugcugaggaagacagcagg

SEQ ID NO: 900619 - RNA, 22 nt, Human
gcacccagaauaaggacaggac

SEQ ID NO: 900620 - RNA, 20 nt, Human
ugcaguguggaagacugaga

SEQ ID NO: 900621 - RNA, 22 nt, Human
aggauaauaauagugcucacuc

SEQ ID NO: 900622 - RNA, 22 nt, Human
ccagucuguucucaccucugag

SEQ ID NO: 900623 - RNA, 22 nt, Human
acacugaaggcuacaagguuga

SEQ ID NO: 900624 - RNA, 22 nt, Human
aaagugcuaagucacccagcua

SEQ ID NO: 900625 - RNA, 22 nt, Human
acuuugaucuaaguuucuuuga

SEQ ID NO: 900626 - RNA, 22 nt, Human
cuuccuucaauauaauuuuuac

SEQ ID NO: 900627 - RNA, 22 nt, Human
agcagguggauuuagacgggag

SEQ ID NO: 900628 - RNA, 22 nt, Human
acuuuggguaagccaggugcua

SEQ ID NO: 900629 - RNA, 22 nt, Human
aauaggaaaauauuuaacaaga

SEQ ID NO: 900630 - RNA, 22 nt, Human
aaaggcagaguuguuggaggca

SEQ ID NO: 900631 - RNA, 21 nt, Human
uuccuggggaaggagcugccu

SEQ ID NO: 900632 - RNA, 22 nt, Human
aacuaacagucauuaaaagaac

SEQ ID NO: 900633 - RNA, 22 nt, Human
ucuuggccccaacccucuauuu

SEQ ID NO: 900634 - RNA, 22 nt, Human
ugagauaagcaaggauaaaggu

SEQ ID NO: 900635 - RNA, 22 nt, Human
uuccccaguagugacaaucaaa

SEQ ID NO: 900636 - RNA, 22 nt, Human
ugcuucugaacucagcaugugg

SEQ ID NO: 900637 - RNA, 22 nt, Human
guggcaacaaaagagccuagug

SEQ ID NO: 900638 - RNA, 22 nt, Human
uuucuuuguaguagcauaauca

SEQ ID NO: 900639 - RNA, 18 nt, Human
ggcugcuccucucccuac

SEQ ID NO: 900640 - RNA, 22 nt, Human
gccaccagggggcuccagugag

SEQ ID NO: 900641 - RNA, 22 nt, Human
acccugggugagaggcaaacag

SEQ ID NO: 900642 - RNA, 22 nt, Human
ggcccagcacagugcuuggggg

SEQ ID NO: 900643 - RNA, 22 nt, Human
ucugcuuugaccuucuugaugc

SEQ ID NO: 900644 - RNA, 22 nt, Human
aacaucuuguccuuagauuaaa

SEQ ID NO: 900645 - RNA, 22 nt, Human
ugcagcagccucaucugguuuc

SEQ ID NO: 900646 - RNA, 23 nt, Human
gggaaguggggauuugaagucau

SEQ ID NO: 900647 - RNA, 22 nt, Human
uuggaaauacagcaguuacuuu

SEQ ID NO: 900648 - RNA, 22 nt, Human
ugagugaggaagcgguggagga

SEQ ID NO: 900649 - RNA, 22 nt, Human
ugagcugucaagguacagugaa

SEQ ID NO: 900650 - RNA, 22 nt, Human
uugacacaguuuucucauuaag

SEQ ID NO: 900651 - RNA, 22 nt, Human
aaucccauuguggaauuaagga

SEQ ID NO: 900652 - RNA, 22 nt, Human
agggggcucagcauggauggag

SEQ ID NO: 900653 - RNA, 22 nt, Human
cagagggcuucagguucaggau

SEQ ID NO: 900654 - RNA, 22 nt, Human
cuggcugucuuggaggaaggag

SEQ ID NO: 900655 - RNA, 22 nt, Human
cagcagcugaggcgcuggcgug

SEQ ID NO: 900656 - RNA, 22 nt, Human
gcaggugggggagaaguuguga

SEQ ID NO: 900657 - RNA, 22 nt, Human
uugauuuucaauucauugacaa

SEQ ID NO: 900658 - RNA, 22 nt, Human
cugagguauugaaguaucuucu

SEQ ID NO: 900659 - RNA, 22 nt, Human
uugcagagaucagcagguuuga

SEQ ID NO: 900660 - RNA, 22 nt, Human
aagagaaggauucugagccugg

SEQ ID NO: 900661 - RNA, 22 nt, Human
aauuacuguaauuuucuacagc

SEQ ID NO: 900662 - RNA, 22 nt, Human
uagcugccuagacagcuauagc

SEQ ID NO: 900663 - RNA, 22 nt, Human
ucagacagggcuucucaaacuu

SEQ ID NO: 900664 - RNA, 22 nt, Human
cagcucaauagccuaccuuaau

SEQ ID NO: 900665 - RNA, 22 nt, Human
acaauguucugucugacuuguc

SEQ ID NO: 900666 - RNA, 22 nt, Human
aguccuuuuguuuugagaugag

SEQ ID NO: 900667 - RNA, 22 nt, Human
guggcgaggggagguccuggcg

SEQ ID NO: 900668 - RNA, 22 nt, Human
gagaacacaugcagacugggua

SEQ ID NO: 900669 - RNA, 22 nt, Human
uugagguacaaugggucaguua

SEQ ID NO: 900670 - RNA, 22 nt, Human
ccuggaaucuggaguuggaauc

SEQ ID NO: 900671 - RNA, 22 nt, Human
augaaaugcuauuuuggcuaga

SEQ ID NO: 900672 - RNA, 22 nt, Human
aguuagaaaguaaaucauuuga

SEQ ID NO: 900673 - RNA, 22 nt, Human
ccagaauucagaaagggcauaa

SEQ ID NO: 900674 - RNA, 19 nt, Human
cccagucuagguccuagga

SEQ ID NO: 900675 - RNA, 22 nt, Human
auugaaauugaugaaauucuug

SEQ ID NO: 900676 - RNA, 22 nt, Human
auuugguguuguuuggagccua

SEQ ID NO: 900677 - RNA, 23 nt, Human
uaaguucuaugagaagagaaauc

SEQ ID NO: 900678 - RNA, 22 nt, Human
gaaugcuguagacagacucuau

SEQ ID NO: 900679 - RNA, 22 nt, Human
ugugugugggcggaacggcccc

SEQ ID NO: 900680 - RNA, 23 nt, Human
aagugcuaaguacuguaaucauc

SEQ ID NO: 900681 - RNA, 22 nt, Human
aucuuuuuaucuguuuggaaca

SEQ ID NO: 900682 - RNA, 22 nt, Human
uuuuuggaaggagauccacacu

SEQ ID NO: 900683 - RNA, 22 nt, Human
ucucuaugacaagguuugguug

SEQ ID NO: 900684 - RNA, 22 nt, Human
ggcucaguaagucagguucauu

SEQ ID NO: 900685 - RNA, 22 nt, Human
uguuccagggcgcgaagguggu

SEQ ID NO: 900686 - RNA, 18 nt, Human
aaguuccacaagagaucu

SEQ ID NO: 900687 - RNA, 22 nt, Human
gcauuuguuccgcuuugucauc

SEQ ID NO: 900688 - RNA, 23 nt, Human
auguauuuaaauuucagugauga

SEQ ID NO: 900689 - RNA, 22 nt, Human
caaggcuucagugugacaaaac

SEQ ID NO: 900690 - RNA, 22 nt, Human
agcuucuuguagaacucaaaag

SEQ ID NO: 900691 - RNA, 23 nt, Human
acuagaaaaugacuuucucccug

SEQ ID NO: 900692 - RNA, 22 nt, Human
cccuuagauaauuuccuuuucu

SEQ ID NO: 900693 - RNA, 22 nt, Human
aaauaggagcuuaagcacuucu

SEQ ID NO: 900694 - RNA, 22 nt, Human
uggcaguggcacugcccccaua

SEQ ID NO: 900695 - RNA, 22 nt, Human
gccaggaguguguggcuauguu

SEQ ID NO: 900696 - RNA, 19 nt, Human
uuacaucugcaacacuggu

SEQ ID NO: 900697 - RNA, 22 nt, Human
uugaaacugcuuauugaauuug

SEQ ID NO: 900698 - RNA, 22 nt, Human
ggcccagcuguauauuacaguu

SEQ ID NO: 900699 - RNA, 22 nt, Human
cugcaggagcaagccugggaga

SEQ ID NO: 900700 - RNA, 22 nt, Human
agaacugucacgagugacaaag

SEQ ID NO: 900701 - RNA, 21 nt, Human
ugcuccagggcagcuuccagc

SEQ ID NO: 900702 - RNA, 22 nt, Human
auguucaaguaccuuugugucu

SEQ ID NO: 900703 - RNA, 22 nt, Human
uguuuacuagccaacauggaga

SEQ ID NO: 900704 - RNA, 22 nt, Human
ggcugcagcccucgccuagcca

SEQ ID NO: 900705 - RNA, 22 nt, Human
cuggcaggcagacuucugcaag

SEQ ID NO: 900706 - RNA, 22 nt, Human
ugaggcagguggauuacaaggu

SEQ ID NO: 900707 - RNA, 22 nt, Human
agacaguugauauacuauaaaa

SEQ ID NO: 900708 - RNA, 22 nt, Human
ucuggcuguguaagguagcacc

SEQ ID NO: 900709 - RNA, 22 nt, Human
aggcuauuuccacucuucucau

SEQ ID NO: 900710 - RNA, 23 nt, Human
ugagcccaggaggucaaggcugc

SEQ ID NO: 900711 - RNA, 22 nt, Human
uacugaauggggcaguaagaaa

SEQ ID NO: 900712 - RNA, 22 nt, Human
gucagauuaauagcaauaauaa

SEQ ID NO: 900713 - RNA, 22 nt, Human
ugugaaaugaagauaauucuug

SEQ ID NO: 900714 - RNA, 22 nt, Human
augcaaauucuuugcuucuucu

SEQ ID NO: 900715 - RNA, 22 nt, Human
ccugccugcagaaaguaucucc

SEQ ID NO: 900716 - RNA, 22 nt, Human
auacaacagaaaaugauuauuc

SEQ ID NO: 900717 - RNA, 22 nt, Human
uaauauauuucugcuaagcuca

SEQ ID NO: 900718 - RNA, 22 nt, Human
aaugauuuccccuacacagaag

SEQ ID NO: 900719 - RNA, 22 nt, Human
gcagggaccaaaagaggcagua

SEQ ID NO: 900720 - RNA, 22 nt, Human
aagagacagagccauguuucua

SEQ ID NO: 900721 - RNA, 22 nt, Human
uucaauucaauucuaaauauau

SEQ ID NO: 900722 - RNA, 22 nt, Human
ucucaucuucauugucucccau

SEQ ID NO: 900723 - RNA, 22 nt, Human
agcaccagcaacuaugggcugc

SEQ ID NO: 900724 - RNA, 22 nt, Human
aaaguauuuuugacaggcauua

SEQ ID NO: 900725 - RNA, 22 nt, Human
gagcaggugccuguagcucucu

SEQ ID NO: 900726 - RNA, 22 nt, Human
gagcagcagauugucuccaugg

SEQ ID NO: 900727 - RNA, 17 nt, Human
ggacacagcucauggcu

SEQ ID NO: 900728 - RNA, 22 nt, Human
cagagcucagagcugccaggca

SEQ ID NO: 900729 - RNA, 22 nt, Human
ggcuguggcauuaggugaggcc

SEQ ID NO: 900730 - RNA, 22 nt, Human
ggaguggccucuccugugcagg

SEQ ID NO: 900731 - RNA, 22 nt, Human
auaaacugaagggaacacugag

SEQ ID NO: 900732 - RNA, 22 nt, Human
agcugccacauggugucacugu

SEQ ID NO: 900733 - RNA, 22 nt, Human
aguguuucuaaguagaugugaa

SEQ ID NO: 900734 - RNA, 22 nt, Human
caggcacaauuauuucccuuuc

SEQ ID NO: 900735 - RNA, 22 nt, Human
gagcugaguagaggcugcuccc

SEQ ID NO: 900736 - RNA, 22 nt, Human
acacaguucuuucacuguuggu

SEQ ID NO: 900737 - RNA, 22 nt, Human
uacaaucuuuauguugaguggu

SEQ ID NO: 900738 - RNA, 22 nt, Human
uuugacucuugucucuuguuag

SEQ ID NO: 900739 - RNA, 22 nt, Human
uggcucugaucagauguccagu

SEQ ID NO: 900740 - RNA, 22 nt, Human
gcugucugaguaagagaauccu

SEQ ID NO: 900741 - RNA, 22 nt, Human
ugcugggcuugaaagcugcuaa

SEQ ID NO: 900742 - RNA, 22 nt, Human
ucugugcuagaggaguuggcca

SEQ ID NO: 900743 - RNA, 21 nt, Human
uggcagggguaguaguacagc

SEQ ID NO: 900744 - RNA, 19 nt, Human
aauggacaggcaauagucu

SEQ ID NO: 900745 - RNA, 22 nt, Human
gaggccugcagcguggucccug

SEQ ID NO: 900746 - RNA, 22 nt, Human
uuauuuaaaauguagguuggga

SEQ ID NO: 900747 - RNA, 22 nt, Human
auucaaaccccauagacaacuu

SEQ ID NO: 900748 - RNA, 22 nt, Human
gagcaauacauggcaugaaauu

SEQ ID NO: 900749 - RNA, 22 nt, Human
uucagaaaugaauauugguauu

SEQ ID NO: 900750 - RNA, 22 nt, Human
auuaucagccgucccacuacau

SEQ ID NO: 900751 - RNA, 18 nt, Human
gcagagcaucaaggguua

SEQ ID NO: 900752 - RNA, 22 nt, Human
aguauauugcucuuaaucauag

SEQ ID NO: 900753 - RNA, 22 nt, Human
cagggcagggagcuuagaauga

SEQ ID NO: 900754 - RNA, 22 nt, Human
guucucucagcgauagugaugg

SEQ ID NO: 900755 - RNA, 22 nt, Human
agaaguuuguuauguaaacaaa

SEQ ID NO: 900756 - RNA, 22 nt, Human
cagugguacucucagauguuua

SEQ ID NO: 900757 - RNA, 22 nt, Human
gugugagcaucaaagccuguca

SEQ ID NO: 900758 - RNA, 22 nt, Human
aagaaacuggaauauagagagc

SEQ ID NO: 900759 - RNA, 22 nt, Human
cuccagugcgcaggacagcccc

SEQ ID NO: 900760 - RNA, 21 nt, Human
uugagcagaaauguguaugcc

SEQ ID NO: 900761 - RNA, 22 nt, Human
aggaggugagcggucauguggu

SEQ ID NO: 900762 - RNA, 22 nt, Human
guuagaaacacauucuuauuga

SEQ ID NO: 900763 - RNA, 22 nt, Human
acacuguugcuggcacagacag

SEQ ID NO: 900764 - RNA, 22 nt, Human
agcugccuuugcaucacuuuaa

SEQ ID NO: 900765 - RNA, 21 nt, Human
cauuucuaagccuggcuauag

SEQ ID NO: 900766 - RNA, 22 nt, Human
aaacauucacucucaauuuuag

SEQ ID NO: 900767 - RNA, 22 nt, Human
aggggcagccucacaauccucu

SEQ ID NO: 900768 - RNA, 22 nt, Human
uuccuaugugggcagagacaca

SEQ ID NO: 900769 - RNA, 19 nt, Human
ugacacagcuagguuugcu

SEQ ID NO: 900770 - RNA, 18 nt, Human
agagaugggaguuggaaa

SEQ ID NO: 900771 - RNA, 21 nt, Human
acaugcauagagagauuucug

SEQ ID NO: 900772 - RNA, 22 nt, Human
ucagaaguagcuccccuucauu

SEQ ID NO: 900773 - RNA, 22 nt, Human
uaacauuauacagagaggacag

SEQ ID NO: 900774 - RNA, 22 nt, Human
gcauugaaauggcaaaaagaga

SEQ ID NO: 900775 - RNA, 22 nt, Human
gaucuagaccagaagcuguugu

SEQ ID NO: 900776 - RNA, 22 nt, Human
gacccuguuucuacaaauaauu

SEQ ID NO: 900777 - RNA, 19 nt, Human
uucauucucuuauuguugu

SEQ ID NO: 900778 - RNA, 20 nt, Human
augugucuguaaacaacucu

SEQ ID NO: 900779 - RNA, 22 nt, Human
ugggcugagcacugaggaagga

SEQ ID NO: 900780 - RNA, 22 nt, Human
cacuguuuggcuccuguacuua

SEQ ID NO: 900781 - RNA, 22 nt, Human
uguggaggauucugaugccagc

SEQ ID NO: 900782 - RNA, 22 nt, Human
uacacccacauugagcauggga

SEQ ID NO: 900783 - RNA, 22 nt, Human
auauucuugaagggagauuaua

SEQ ID NO: 900784 - RNA, 22 nt, Human
cuggcucaguucuugguuuuca

SEQ ID NO: 900785 - RNA, 18 nt, Human
uccugggaacuugcuagc

SEQ ID NO: 900786 - RNA, 22 nt, Human
ggcagccucagguuuucuuuga

SEQ ID NO: 900787 - RNA, 22 nt, Human
gaagugucuccguuuuuaaagg

SEQ ID NO: 900788 - RNA, 22 nt, Human
cuguccagucuuuagcaagcug

SEQ ID NO: 900789 - RNA, 22 nt, Human
uucaacaugcuuuauuucuaaa

SEQ ID NO: 900790 - RNA, 23 nt, Human
ugucugguucaugcuuauuuugg

SEQ ID NO: 900791 - RNA, 22 nt, Human
caaggagaaaacggcuucugaa

SEQ ID NO: 900792 - RNA, 22 nt, Human
ucuccuggcucaccaggcugga

SEQ ID NO: 900793 - RNA, 22 nt, Human
cauuagaaccuauaaaaagcau

SEQ ID NO: 900794 - RNA, 22 nt, Human
cagagcuguuacuauucaugaa

SEQ ID NO: 900795 - RNA, 22 nt, Human
agugcccuggcccagcuggacc

SEQ ID NO: 900796 - RNA, 22 nt, Human
acuuuacuccccaacauaaaug

SEQ ID NO: 900797 - RNA, 22 nt, Human
auauacacuguuucaguugaag

SEQ ID NO: 900798 - RNA, 22 nt, Human
acuggggcagugggcagugguu

SEQ ID NO: 900799 - RNA, 22 nt, Human
ucacauuuuguucaaggcuagu

SEQ ID NO: 900800 - RNA, 22 nt, Human
gaaaauacuucaguguucuggc

SEQ ID NO: 900801 - RNA, 22 nt, Human
uggcugggcccccaccugccuc

SEQ ID NO: 900802 - RNA, 22 nt, Human
cugcaaggaguugacauugucu

SEQ ID NO: 900803 - RNA, 22 nt, Human
uagagaaaaccacuggugagcu

SEQ ID NO: 900804 - RNA, 22 nt, Human
acauggcagcugaugauuggaa

SEQ ID NO: 900805 - RNA, 22 nt, Human
aaagcaagucucuacaaaguac

SEQ ID NO: 900806 - RNA, 22 nt, Human
gaggccagcgcgcagcacuuuu

SEQ ID NO: 900807 - RNA, 22 nt, Human
gaggggagacagggaaaucagu

SEQ ID NO: 900808 - RNA, 22 nt, Human
ggaacuugaaaaucaagguggu

SEQ ID NO: 900809 - RNA, 22 nt, Human
gagcugccagacaugggaauga

SEQ ID NO: 900810 - RNA, 22 nt, Human
gcaguguguggugagggcugcc

SEQ ID NO: 900811 - RNA, 22 nt, Human
aagccuuggggcuccucuguau

SEQ ID NO: 900812 - RNA, 22 nt, Human
uggcugcagaucugugggacac

SEQ ID NO: 900813 - RNA, 22 nt, Human
guucauuuuuacuuugaucuac

SEQ ID NO: 900814 - RNA, 22 nt, Human
acagacaucuauccauuuaauu

SEQ ID NO: 900815 - RNA, 22 nt, Human
cagggagggaggaaaauuugcu

SEQ ID NO: 900816 - RNA, 22 nt, Human
uggcugugauuugcacgagaug

SEQ ID NO: 900817 - RNA, 22 nt, Human
cugucagguuggucucagagcu

SEQ ID NO: 900818 - RNA, 22 nt, Human
auggacaaugccaauacaguuu

SEQ ID NO: 900819 - RNA, 19 nt, Human
uacauccucuuccucuuug

SEQ ID NO: 900820 - RNA, 22 nt, Human
gucaauuaguggcaauuucaua

SEQ ID NO: 900821 - RNA, 19 nt, Human
cccaggguuuccucucucc

SEQ ID NO: 900822 - RNA, 22 nt, Human
aaugucaaacagagcagagcua

SEQ ID NO: 900823 - RNA, 22 nt, Human
uaucucuugucuguuuugcaaa

SEQ ID NO: 900824 - RNA, 22 nt, Human
ucacuuaggugcaaagggaacu

SEQ ID NO: 900825 - RNA, 22 nt, Human
ucagcucuuaacccucuggccu

SEQ ID NO: 900826 - RNA, 22 nt, Human
aaauugugcucacacugauauu

SEQ ID NO: 900827 - RNA, 22 nt, Human
gcuuuuaugcacauaaggguca

SEQ ID NO: 900828 - RNA, 22 nt, Human
cuggagaacuaguuaaacacgu

SEQ ID NO: 900829 - RNA, 22 nt, Human
cuauaauuaugcucaaaaugua

SEQ ID NO: 900830 - RNA, 22 nt, Human
gcauuucugugcauacacauga

SEQ ID NO: 900831 - RNA, 22 nt, Human
cagggagcuuucccaggacccu

SEQ ID NO: 900832 - RNA, 22 nt, Human
cuggccagcauggcugaaguac

SEQ ID NO: 900833 - RNA, 22 nt, Human
acuuuacaaacuccucacuguu

SEQ ID NO: 900834 - RNA, 22 nt, Human
uugagcuuuacaacagcuguua

SEQ ID NO: 900835 - RNA, 20 nt, Human
aggcuccuccaggaugugug

SEQ ID NO: 900836 - RNA, 22 nt, Human
aauagcugggaggcacauucau

SEQ ID NO: 900837 - RNA, 21 nt, Human
auguacauucggcaacagaua

SEQ ID NO: 900838 - RNA, 22 nt, Human
auuuggaagcuugaagauuauu

SEQ ID NO: 900839 - RNA, 22 nt, Human
uuugaaagacagaauauuuuug

SEQ ID NO: 900840 - RNA, 19 nt, Human
ccauucugucucugccaca

SEQ ID NO: 900841 - RNA, 22 nt, Human
aggcugagcugaccugguuugg

SEQ ID NO: 900842 - RNA, 22 nt, Human
gugcaggcaaaagggccaggcc

SEQ ID NO: 900843 - RNA, 22 nt, Human
ggcaggucagguccaugaccaa

SEQ ID NO: 900844 - RNA, 22 nt, Human
auauuuucacagaacuugcaaa

SEQ ID NO: 900845 - RNA, 22 nt, Human
cagggccauuggcguggcuguc

SEQ ID NO: 900846 - RNA, 19 nt, Human
ugcuauuugaagaagugua

SEQ ID NO: 900847 - RNA, 22 nt, Human
gugaggacugguaaggacugca

SEQ ID NO: 900848 - RNA, 22 nt, Human
caguaauaccccuggcucaggu

SEQ ID NO: 900849 - RNA, 22 nt, Human
cuguggcugaacucugaagagg

SEQ ID NO: 900850 - RNA, 22 nt, Human
gaagccacaacuuuuucuuagc

SEQ ID NO: 900851 - RNA, 22 nt, Human
cugcagggauugcuucuguaua

SEQ ID NO: 900852 - RNA, 22 nt, Human
agguccugaugaucucugagag

SEQ ID NO: 900853 - RNA, 22 nt, Human
gucuccugcccccggugcuugg

SEQ ID NO: 900854 - RNA, 22 nt, Human
ucauuucuccuaagugaaauau

SEQ ID NO: 900855 - RNA, 22 nt, Human
ucugggaggggcugccauugcu

SEQ ID NO: 900856 - RNA, 22 nt, Human
acuguacaacugcugagcagaa

SEQ ID NO: 900857 - RNA, 22 nt, Human
uauauaacuacuauuuugcuca

SEQ ID NO: 900858 - RNA, 22 nt, Human
ucuuuacuuguguauuguauau

SEQ ID NO: 900859 - RNA, 22 nt, Human
cauggacagugggacagugugu

SEQ ID NO: 900860 - RNA, 22 nt, Human
gcagagcaccaaagugaaagau

SEQ ID NO: 900861 - RNA, 22 nt, Human
gcucuggggaugcuucugccgu

SEQ ID NO: 900862 - RNA, 22 nt, Human
cagggccuuuuagcaucuucuc

SEQ ID NO: 900863 - RNA, 19 nt, Human
uggucuaaaugugugcccc

SEQ ID NO: 900864 - RNA, 22 nt, Human
aacaugaaacccaaacagaaua

SEQ ID NO: 900865 - RNA, 22 nt, Human
acccagccauguucaguucucu

SEQ ID NO: 900866 - RNA, 22 nt, Human
cucucagacacccauuuggaaa

SEQ ID NO: 900867 - RNA, 22 nt, Human
agaaguuuaaccaggugcuacu

SEQ ID NO: 900868 - RNA, 22 nt, Human
ugacacuugggcuuugagaggu

SEQ ID NO: 900869 - RNA, 22 nt, Human
uucuacagacuauaacugugau

SEQ ID NO: 900870 - RNA, 22 nt, Human
gaaagugcuuagagugugguau

SEQ ID NO: 900871 - RNA, 22 nt, Human
uccucuuucucaacauuaguua

SEQ ID NO: 900872 - RNA, 22 nt, Human
aaggcaggagcuguaucuuauu

SEQ ID NO: 900873 - RNA, 22 nt, Human
ugucugugauuuaggccagggc

SEQ ID NO: 900874 - RNA, 22 nt, Human
uucaaagagaaauuguauuuuc

SEQ ID NO: 900875 - RNA, 19 nt, Human
agggccugcagcucaagcu

SEQ ID NO: 900876 - RNA, 19 nt, Human
uauguuauguuguuuacuc

SEQ ID NO: 900877 - RNA, 22 nt, Human
aggcuucaauuccuuacccagu

SEQ ID NO: 900878 - RNA, 22 nt, Human
cuaucucaugcaucaacucuuc

SEQ ID NO: 900879 - RNA, 22 nt, Human
cgagcaugaugacggcuguggc

SEQ ID NO: 900880 - RNA, 22 nt, Human
accagagaaaacacagcaggcu

SEQ ID NO: 900881 - RNA, 22 nt, Human
ucagaagucaugcucagucugu

SEQ ID NO: 900882 - RNA, 22 nt, Human
gauuuacaaagcucucuagugu

SEQ ID NO: 900883 - RNA, 22 nt, Human
ggcucccucaccaccaucacau

SEQ ID NO: 900884 - RNA, 22 nt, Human
ccuuccuugucuacaaaagcuc

SEQ ID NO: 900885 - RNA, 22 nt, Human
ucugggcaauggaugcacucac

SEQ ID NO: 900886 - RNA, 22 nt, Human
gaagucucauuuggugucaguu

SEQ ID NO: 900887 - RNA, 22 nt, Human
ugucucuccugaugaucuggug

SEQ ID NO: 900888 - RNA, 22 nt, Human
augugaaaccugugaguagagu

SEQ ID NO: 900889 - RNA, 23 nt, Human
aaaguacuuaaucugcaaaccac

SEQ ID NO: 900890 - RNA, 22 nt, Human
uccacauucucuguuacagaua

SEQ ID NO: 900891 - RNA, 22 nt, Human
gccuguccacuaaacagccaag

SEQ ID NO: 900892 - RNA, 22 nt, Human
ucaggaaauacaagugacauca

SEQ ID NO: 900893 - RNA, 22 nt, Human
auccuucagcugcccuguuacc

SEQ ID NO: 900894 - RNA, 22 nt, Human
gaaacguuggcauaaguuuaug

SEQ ID NO: 900895 - RNA, 21 nt, Human
aggugcaggccucaagcccca

SEQ ID NO: 900896 - RNA, 18 nt, Human
gcugccugcauuccucac

SEQ ID NO: 900897 - RNA, 22 nt, Human
agggcucccgcgguguccggga

SEQ ID NO: 900898 - RNA, 22 nt, Human
auugacagcaggggcugucacu

SEQ ID NO: 900899 - RNA, 22 nt, Human
ugggucagaggaccucguggcc

SEQ ID NO: 900900 - RNA, 17 nt, Human
agugaggagauuggaag

SEQ ID NO: 900901 - RNA, 22 nt, Human
uaacagugugaggucucaggcg

SEQ ID NO: 900902 - RNA, 22 nt, Human
aauaauguuaugucauucuucu

SEQ ID NO: 900903 - RNA, 22 nt, Human
aaaugcaugugcuauagaugug

SEQ ID NO: 900904 - RNA, 22 nt, Human
aacaugauuuaguauaaugcag

SEQ ID NO: 900905 - RNA, 22 nt, Human
cuucaguggucauuugugauaa

SEQ ID NO: 900906 - RNA, 22 nt, Human
agaaaccucacagcaauucuga

SEQ ID NO: 900907 - RNA, 22 nt, Human
gugguccuggcaaccaugguga

SEQ ID NO: 900908 - RNA, 22 nt, Human
aucaccuggccauuggguuaac

SEQ ID NO: 900909 - RNA, 22 nt, Human
gcuccccauugaucugcaggcu

SEQ ID NO: 900910 - RNA, 22 nt, Human
aauucacaggagguauuugucc

SEQ ID NO: 900911 - RNA, 22 nt, Human
guggcagcuguguugcaguuuu

SEQ ID NO: 900912 - RNA, 22 nt, Human
guggaaaacugagaaaauugcu

SEQ ID NO: 900913 - RNA, 21 nt, Human
uggcaauggccaacagucauc

SEQ ID NO: 900914 - RNA, 22 nt, Human
aagaaagugcuuuguaaauuau

SEQ ID NO: 900915 - RNA, 21 nt, Human
gcugagacgcaaccucaguga

SEQ ID NO: 900916 - RNA, 22 nt, Human
gagagugucuggaggaagcuaa

SEQ ID NO: 900917 - RNA, 22 nt, Human
gcucugggaauucagaaagccu

SEQ ID NO: 900918 - RNA, 22 nt, Human
gagagguguguuucagauaaga

SEQ ID NO: 900919 - RNA, 22 nt, Human
ucaggcugcaucuguaagggug

SEQ ID NO: 900920 - RNA, 22 nt, Human
uccagcuuuuauuggaugagga

SEQ ID NO: 900921 - RNA, 22 nt, Human
gaaaagagacagggugggugau

SEQ ID NO: 900922 - RNA, 22 nt, Human
guucauguuuguguauugcuca

SEQ ID NO: 900923 - RNA, 22 nt, Human
aaggcugacguuuguguuuauu

SEQ ID NO: 900924 - RNA, 22 nt, Human
cuaaagauguacauuuuucucc

SEQ ID NO: 900925 - RNA, 22 nt, Human
uacagaaauacagucaggccua

SEQ ID NO: 900926 - RNA, 22 nt, Human
acaacaguagccuuuacaaggc

SEQ ID NO: 900927 - RNA, 22 nt, Human
uguauuugugauaacgaccuga

SEQ ID NO: 900928 - RNA, 22 nt, Human
acaaauugccccauuuugaacu

SEQ ID NO: 900929 - RNA, 22 nt, Human
aaguaugacauuuaagacaauu

SEQ ID NO: 900930 - RNA, 22 nt, Human
cuaaggaagugacagugggauu

SEQ ID NO: 900931 - RNA, 22 nt, Human
augagggaggcaaggagaugcu

SEQ ID NO: 900932 - RNA, 22 nt, Human
guccccagcugugacgagagcc

SEQ ID NO: 900933 - RNA, 20 nt, Human
ucacaauaugagcucauaca

SEQ ID NO: 900934 - RNA, 22 nt, Human
uuccucagaaaauacuguccaa

SEQ ID NO: 900935 - RNA, 22 nt, Human
gugccugccccacuccucagca

SEQ ID NO: 900936 - RNA, 22 nt, Human
ugcucuggaauaguccuaggca

SEQ ID NO: 900937 - RNA, 22 nt, Human
ugaagaaugugaauugguagcu

SEQ ID NO: 900938 - RNA, 22 nt, Human
ugccugucuucaggagugucac

SEQ ID NO: 900939 - RNA, 21 nt, Human
ugacauuuccaauauaaagcc

SEQ ID NO: 900940 - RNA, 22 nt, Human
cugcgugcaugucugcgugcau

SEQ ID NO: 900941 - RNA, 22 nt, Human
ucugucacuuaagaauugccua

SEQ ID NO: 900942 - RNA, 22 nt, Human
aaagguuugccgaccucugcuu

SEQ ID NO: 900943 - RNA, 22 nt, Human
aaacagcaauuacuuuugcacc

SEQ ID NO: 900944 - RNA, 22 nt, Human
cugaguccagggacagaggcgu

SEQ ID NO: 900945 - RNA, 22 nt, Human
gcuggaaguaaaaacuuacuag

SEQ ID NO: 900946 - RNA, 22 nt, Human
cacccuggaauagccccgggag

SEQ ID NO: 900947 - RNA, 22 nt, Human
uuaggcuguucuuguguuguua

SEQ ID NO: 900948 - RNA, 19 nt, Human
cagaggccagaagcacagg

SEQ ID NO: 900949 - RNA, 20 nt, Human
cuaagagguccuuccacauc

SEQ ID NO: 900950 - RNA, 22 nt, Human
uagcagggccaggcugggaacc

SEQ ID NO: 900951 - RNA, 22 nt, Human
agcaggcagccuaggaagugaa

SEQ ID NO: 900952 - RNA, 22 nt, Human
cagagcagacguugagauuaag

SEQ ID NO: 900953 - RNA, 22 nt, Human
agggaugagugaguaaacaaua

SEQ ID NO: 900954 - RNA, 22 nt, Human
uggagcugacucacaccagcua

SEQ ID NO: 900955 - RNA, 22 nt, Human
cuaggaaauuuaaaauaugauu

SEQ ID NO: 900956 - RNA, 22 nt, Human
cuggcagcauuuuuuucagaag

SEQ ID NO: 900957 - RNA, 22 nt, Human
gagagggguuugccauccuaug

SEQ ID NO: 900958 - RNA, 22 nt, Human
caaaggcugccacuguggcugu

SEQ ID NO: 900959 - RNA, 22 nt, Human
aaucacauuacagcauaucugu

SEQ ID NO: 900960 - RNA, 20 nt, Human
cacugcaaguauuuaaccca

SEQ ID NO: 900961 - RNA, 22 nt, Human
caggagcaugcugaugccagaa

SEQ ID NO: 900962 - RNA, 22 nt, Human
ggugaacauugaugugguuaca

SEQ ID NO: 900963 - RNA, 22 nt, Human
agcuccuguaguacauauuauu

SEQ ID NO: 900964 - RNA, 22 nt, Human
caaggcuaagcuuuggcuuucu

SEQ ID NO: 900965 - RNA, 22 nt, Human
ucaggggacuuaggagagaagu

SEQ ID NO: 900966 - RNA, 22 nt, Human
ugcugccacaaauucagcugcc

SEQ ID NO: 900967 - RNA, 19 nt, Human
gaaggcugaaaugaagcac

SEQ ID NO: 900968 - RNA, 22 nt, Human
uuucuagaguucaucaugguaa

SEQ ID NO: 900969 - RNA, 22 nt, Human
guaaaugugaaugucauuuagc

SEQ ID NO: 900970 - RNA, 22 nt, Human
aaucagaaagaucuugaugaga

SEQ ID NO: 900971 - RNA, 22 nt, Human
uucugaagggcuaagugucuau

SEQ ID NO: 900972 - RNA, 22 nt, Human
cagugcuguuguaagcucauug

SEQ ID NO: 900973 - RNA, 22 nt, Human
aaacagugacugguacauaaua

SEQ ID NO: 900974 - RNA, 22 nt, Human
cuucugggcagaaguuuugaga

SEQ ID NO: 900975 - RNA, 22 nt, Human
gggccccaagaaccuccuccug

SEQ ID NO: 900976 - RNA, 23 nt, Human
ucuccuccuagauacagucaugg

SEQ ID NO: 900977 - RNA, 22 nt, Human
ccccuguguuguucaaggguca

SEQ ID NO: 900978 - RNA, 22 nt, Human
aggaaugacuuguagcucugag

SEQ ID NO: 900979 - RNA, 22 nt, Human
uugcucugacuggagugcagug

SEQ ID NO: 900980 - RNA, 22 nt, Human
cagguggcagaggucucuggaa

SEQ ID NO: 900981 - RNA, 22 nt, Human
ucuacaaagguugaggugcccu

SEQ ID NO: 900982 - RNA, 22 nt, Human
cauguacagccaggguugagaa

SEQ ID NO: 900983 - RNA, 22 nt, Human
accauuuaaggaaaauguauca

SEQ ID NO: 900984 - RNA, 22 nt, Human
augucaguaguuucuuugaguu

SEQ ID NO: 900985 - RNA, 22 nt, Human
acaacuagcagguauuaauuuu

SEQ ID NO: 900986 - RNA, 22 nt, Human
uaaguguugguaauuacaauga

SEQ ID NO: 900987 - RNA, 22 nt, Human
ucaggagucugugcaguuccac

SEQ ID NO: 900988 - RNA, 22 nt, Human
gggcugagacgauggggucuuc

SEQ ID NO: 900989 - RNA, 21 nt, Human
ugucuucauaugagauggugu

SEQ ID NO: 900990 - RNA, 20 nt, Human
cauauauaccuagaagugga

SEQ ID NO: 900991 - RNA, 22 nt, Human
gcugccugaucauacaccaggg

SEQ ID NO: 900992 - RNA, 22 nt, Human
uuaucuugaguauugagauucu

SEQ ID NO: 900993 - RNA, 22 nt, Human
gugcccugacacaccuggugug

SEQ ID NO: 900994 - RNA, 22 nt, Human
ugcagggaaaguguuggcagca

SEQ ID NO: 900995 - RNA, 22 nt, Human
auacauaguucugugaaaagua

SEQ ID NO: 900996 - RNA, 22 nt, Human
caugcacagugauaucugaaga

SEQ ID NO: 900997 - RNA, 21 nt, Human
uccugcugcuccugucguguu

SEQ ID NO: 900998 - RNA, 22 nt, Human
agaacagaagggaggaaggccu

SEQ ID NO: 900999 - RNA, 22 nt, Human
uggauuucagcauauggauuuu

SEQ ID NO: 901000 - RNA, 22 nt, Human
aggcccugagcauccgagggca

SEQ ID NO: 901001 - RNA, 22 nt, Human
cauauuguaaaagguugaaucc

SEQ ID NO: 901002 - RNA, 22 nt, Human
uaugaaaagguggccaauguag

SEQ ID NO: 901003 - RNA, 22 nt, Human
ugugucuguuuugcucaccauu

SEQ ID NO: 901004 - RNA, 22 nt, Human
uucuacauucauguauuaccuc

SEQ ID NO: 901005 - RNA, 22 nt, Human
caggcacagugggguccucucu

SEQ ID NO: 901006 - RNA, 22 nt, Human
ugcaggcagcugaaaggugccu

SEQ ID NO: 901007 - RNA, 22 nt, Human
uuccuucuucauuguguuacag

SEQ ID NO: 901008 - RNA, 22 nt, Human
uggcaggcugaguuggccuggu

SEQ ID NO: 901009 - RNA, 22 nt, Human
uuucaaacuccagcucaccaau

SEQ ID NO: 901010 - RNA, 22 nt, Human
cuucuggguaauucuucuucau

SEQ ID NO: 901011 - RNA, 22 nt, Human
acauuucugagcagggagcugu

SEQ ID NO: 901012 - RNA, 22 nt, Human
aagggcugcauuugauguguca

SEQ ID NO: 901013 - RNA, 22 nt, Human
uuuccaguaaguggcaaggagc

SEQ ID NO: 901014 - RNA, 18 nt, Human
uuacuuuguauagccuag

SEQ ID NO: 901015 - RNA, 22 nt, Human
ccagaagaaaaagcugguauua

SEQ ID NO: 901016 - RNA, 22 nt, Human
uggucucugcugcagcuucuca

SEQ ID NO: 901017 - RNA, 22 nt, Human
ggaagcuguuaucaucuguauc

SEQ ID NO: 901018 - RNA, 22 nt, Human
cugacaguuuuugcuguauugu

SEQ ID NO: 901019 - RNA, 22 nt, Human
gcugccaauccagcugugggag

SEQ ID NO: 901020 - RNA, 22 nt, Human
cuuugugcuugacccauggguc

SEQ ID NO: 901021 - RNA, 21 nt, Human
ucagcagcaucugccuagagu

SEQ ID NO: 901022 - RNA, 18 nt, Human
uuucacagauucaugacu

SEQ ID NO: 901023 - RNA, 22 nt, Human
acauaauaggugccugaauauu

SEQ ID NO: 901024 - RNA, 22 nt, Human
caaaacugucuagagagagaag

SEQ ID NO: 901025 - RNA, 22 nt, Human
cagcugugcuguauuaagcucu

SEQ ID NO: 901026 - RNA, 22 nt, Human
aggauuuacaaugauucuaggu

SEQ ID NO: 901027 - RNA, 22 nt, Human
acaagauaaggugucagugugu

SEQ ID NO: 901028 - RNA, 22 nt, Human
cugcagaggguuugagcauccu

SEQ ID NO: 901029 - RNA, 22 nt, Human
aacaugcuugcuuagaaucagc

SEQ ID NO: 901030 - RNA, 22 nt, Human
cagcccaggccgacaguuccuc

SEQ ID NO: 901031 - RNA, 22 nt, Human
aggcugagguaggaggaucgcu

SEQ ID NO: 901032 - RNA, 22 nt, Human
guuuuggcucuggcauguggaa

SEQ ID NO: 901033 - RNA, 22 nt, Human
auguuuacugguuuauagaaua

SEQ ID NO: 901034 - RNA, 22 nt, Human
ggccagagggagggcacaaauc

SEQ ID NO: 901035 - RNA, 22 nt, Human
aaugcucuuuaaccuauucuga

SEQ ID NO: 901036 - RNA, 22 nt, Human
ucauucauacucuuuucuauua

SEQ ID NO: 901037 - RNA, 22 nt, Human
ucccaggcaaaggcagcucauu

SEQ ID NO: 901038 - RNA, 22 nt, Human
auauucaucguguagaaauacu

SEQ ID NO: 901039 - RNA, 22 nt, Human
gggcugagauuggugcccuguc

SEQ ID NO: 901040 - RNA, 18 nt, Human
agcaaauauuaagugcau

SEQ ID NO: 901041 - RNA, 22 nt, Human
ugggugcuucgucagcucugag

SEQ ID NO: 901042 - RNA, 22 nt, Human
ucauugagcgguucuuaaccca

SEQ ID NO: 901043 - RNA, 22 nt, Human
caagccagugauguuugcugcc

SEQ ID NO: 901044 - RNA, 22 nt, Human
ggcccagccucagacaugcccu

SEQ ID NO: 901045 - RNA, 22 nt, Human
guugaauauaccugcauuugug

SEQ ID NO: 901046 - RNA, 22 nt, Human
uuuugcugguuuaucucuauua

SEQ ID NO: 901047 - RNA, 22 nt, Human
uagcaacauaagaaacauuuug

SEQ ID NO: 901048 - RNA, 17 nt, Human
gaacagcagaggggaca

SEQ ID NO: 901049 - RNA, 22 nt, Human
cugccuugucuuguuuucaggg

SEQ ID NO: 901050 - RNA, 22 nt, Human
cccaggcuccuacuguauucug

SEQ ID NO: 901051 - RNA, 22 nt, Human
aguggagaauaugcagaaagcc

SEQ ID NO: 901052 - RNA, 22 nt, Human
ugaagccacagagcaucugccu

SEQ ID NO: 901053 - RNA, 21 nt, Human
gcagccagacgggauucaguu

SEQ ID NO: 901054 - RNA, 22 nt, Human
uugaagacuaauuuagauaaug

SEQ ID NO: 901055 - RNA, 22 nt, Human
uuucaguggaccacaguuugau

SEQ ID NO: 901056 - RNA, 22 nt, Human
uagaggcuacuagaggcaccug

SEQ ID NO: 901057 - RNA, 23 nt, Human
uccagcagagccuuccaggaggg

SEQ ID NO: 901058 - RNA, 22 nt, Human
gcaacaaguguaaacaugcauu

SEQ ID NO: 901059 - RNA, 22 nt, Human
uucuuuucuuuaggcauugugu

SEQ ID NO: 901060 - RNA, 22 nt, Human
gcauucuucgaaguaaguagug

SEQ ID NO: 901061 - RNA, 22 nt, Human
auauauaugcugauggcugcca

SEQ ID NO: 901062 - RNA, 22 nt, Human
guggcccucugauagggucagg

SEQ ID NO: 901063 - RNA, 22 nt, Human
auagcaaaaggcaccagaguga

SEQ ID NO: 901064 - RNA, 22 nt, Human
uucaaguuuuauauugaagcaa

SEQ ID NO: 901065 - RNA, 22 nt, Human
gugagguaaaaucgguaagaug

SEQ ID NO: 901066 - RNA, 22 nt, Human
accagcuggucaccugggcacu

SEQ ID NO: 901067 - RNA, 22 nt, Human
ggaagccaagguggccucuauu

SEQ ID NO: 901068 - RNA, 22 nt, Human
auuccuuuggacuccuccuugc

SEQ ID NO: 901069 - RNA, 22 nt, Human
gacccaggguauccagagcugc

SEQ ID NO: 901070 - RNA, 17 nt, Human
uggaagugaggacacug

SEQ ID NO: 901071 - RNA, 22 nt, Human
aggaagugcagggggaaguacu

SEQ ID NO: 901072 - RNA, 22 nt, Human
agaaguuuugggaaauacugau

SEQ ID NO: 901073 - RNA, 22 nt, Human
ccuggcucugguucccucagcu

SEQ ID NO: 901074 - RNA, 21 nt, Human
gcucucugcaugguggcucag

SEQ ID NO: 901075 - RNA, 18 nt, Human
cucucuggucuggauccc

SEQ ID NO: 901076 - RNA, 22 nt, Human
ggagcagcuugcaugcucaggg

SEQ ID NO: 901077 - RNA, 22 nt, Human
agaaguauuuggcuaaaagaca

SEQ ID NO: 901078 - RNA, 22 nt, Human
uaggccacgaaggagaugauag

SEQ ID NO: 901079 - RNA, 23 nt, Human
ccagcccuccaccagcucuaggc

SEQ ID NO: 901080 - RNA, 22 nt, Human
uugacaaggagccauugcaucu

SEQ ID NO: 901081 - RNA, 22 nt, Human
cauauauucugguuuucacugg

SEQ ID NO: 901082 - RNA, 22 nt, Human
ggcuuuauuaagcaggguaagu

SEQ ID NO: 901083 - RNA, 22 nt, Human
ccaggagcaggagcuggacaga

SEQ ID NO: 901084 - RNA, 22 nt, Human
uacaguuauaugugauaaguaa

SEQ ID NO: 901085 - RNA, 20 nt, Human
uugcaaagugaauagcaauu

SEQ ID NO: 901086 - RNA, 19 nt, Human
acagauggaggaaucuggg

SEQ ID NO: 901087 - RNA, 19 nt, Human
agagaaggauccuaugguu

SEQ ID NO: 901088 - RNA, 22 nt, Human
gucugccugggacgcugggagu

SEQ ID NO: 901089 - RNA, 23 nt, Human
ucugucacuuucugcuguggagu

SEQ ID NO: 901090 - RNA, 23 nt, Human
uguuccugucaaauuuucuuccc

SEQ ID NO: 901091 - RNA, 22 nt, Human
agggaagaggaccagagucucu

SEQ ID NO: 901092 - RNA, 22 nt, Human
gaacauuuaugaugcaauaccu

SEQ ID NO: 901093 - RNA, 22 nt, Human
aaguuagguugcauuggucauc

SEQ ID NO: 901094 - RNA, 22 nt, Human
uccuggguuaauuaugauucac

SEQ ID NO: 901095 - RNA, 22 nt, Human
gugugugcaagagguuuauuga

SEQ ID NO: 901096 - RNA, 22 nt, Human
auauugcauuggcuggucuuga

SEQ ID NO: 901097 - RNA, 22 nt, Human
cugagcugcggcaggcaccugg

SEQ ID NO: 901098 - RNA, 20 nt, Human
uauacuaacauauaucuguu

SEQ ID NO: 901099 - RNA, 22 nt, Human
ucucagagauuuauggaaaacu

SEQ ID NO: 901100 - RNA, 22 nt, Human
uugggcaggcacauagaguuua

SEQ ID NO: 901101 - RNA, 22 nt, Human
uaauguaaacacagagacagaa

SEQ ID NO: 901102 - RNA, 22 nt, Human
ccagggaagaccacuuccugga

SEQ ID NO: 901103 - RNA, 22 nt, Human
ucuuugcaaacuauggagugug

SEQ ID NO: 901104 - RNA, 22 nt, Human
ccacccagccagaugcaggaag

SEQ ID NO: 901105 - RNA, 20 nt, Human
aagagcugacucacaguggu

SEQ ID NO: 901106 - RNA, 22 nt, Human
aggcaguguggagggcuguugc

SEQ ID NO: 901107 - RNA, 22 nt, Human
gucugagggacagaguccuggc

SEQ ID NO: 901108 - RNA, 22 nt, Human
uucaggcccaacgcacagcuuc

SEQ ID NO: 901109 - RNA, 22 nt, Human
uuccuuggagcgcuaaagcucu

SEQ ID NO: 901110 - RNA, 22 nt, Human
ugugugcacguacauacuguau

SEQ ID NO: 901111 - RNA, 22 nt, Human
ccccaaaacuuggugacuucca

SEQ ID NO: 901112 - RNA, 22 nt, Human
uuagauaccuuuguguuguaga

SEQ ID NO: 901113 - RNA, 22 nt, Human
aggagccaggccccauggggcu

SEQ ID NO: 901114 - RNA, 22 nt, Human
ccagggaaugugggaugacucu

SEQ ID NO: 901115 - RNA, 22 nt, Human
gcacaaaagguacuucauguag

SEQ ID NO: 901116 - RNA, 22 nt, Human
agaauuugagugcuuucugugu

SEQ ID NO: 901117 - RNA, 22 nt, Human
augauauacuuccuagaacagu

SEQ ID NO: 901118 - RNA, 22 nt, Human
auagucaaccuuguaauuagcc

SEQ ID NO: 901119 - RNA, 22 nt, Human
uggacaacauagugagaccuca

SEQ ID NO: 901120 - RNA, 22 nt, Human
uuagaaaugcacccaagaccua

SEQ ID NO: 901121 - RNA, 22 nt, Human
aaggccaggucccugcagugca

SEQ ID NO: 901122 - RNA, 22 nt, Human
gccagcagggcccaaaugcugg

SEQ ID NO: 901123 - RNA, 19 nt, Human
ccuugccugucccugcagc

SEQ ID NO: 901124 - RNA, 22 nt, Human
cagagucccagaugccccuccu

SEQ ID NO: 901125 - RNA, 22 nt, Human
cuguauuucccacauucucuau

SEQ ID NO: 901126 - RNA, 22 nt, Human
ugugucagcacaguaucaauua

SEQ ID NO: 901127 - RNA, 22 nt, Human
ugaaagaugcucaaugaauggu

SEQ ID NO: 901128 - RNA, 22 nt, Human
uuauuccauuauuucacuuagg

SEQ ID NO: 901129 - RNA, 22 nt, Human
cccuuuaaaguuuuaccagcag

SEQ ID NO: 901130 - RNA, 22 nt, Human
agaaccuuggugagucuaaccu

SEQ ID NO: 901131 - RNA, 22 nt, Human
cacacuaauuuuucaagaguuu

SEQ ID NO: 901132 - RNA, 19 nt, Human
accaggccucagaggcccu

SEQ ID NO: 901133 - RNA, 18 nt, Human
agcugcagaccaggaggu

SEQ ID NO: 901134 - RNA, 22 nt, Human
cucacagaugaugucuaugugg

SEQ ID NO: 901135 - RNA, 22 nt, Human
ugggccagggcacccaguccag

SEQ ID NO: 901136 - RNA, 22 nt, Human
agucaucugaccucuucucaga

SEQ ID NO: 901137 - RNA, 22 nt, Human
ucacaagacugagcuugcuuga

SEQ ID NO: 901138 - RNA, 22 nt, Human
ggcagcaaagucacauggaaaa

SEQ ID NO: 901139 - RNA, 21 nt, Human
ccagaggccucucuuggccac

SEQ ID NO: 901140 - RNA, 23 nt, Human
agagaaaaauaucugggcacauu

SEQ ID NO: 901141 - RNA, 22 nt, Human
ugcugaggagguggcugugcuu

SEQ ID NO: 901142 - RNA, 22 nt, Human
caguugccuacuacauggcagg

SEQ ID NO: 901143 - RNA, 22 nt, Human
agcaucagagagaaguuaacua

SEQ ID NO: 901144 - RNA, 17 nt, Human
ggccacagagcuugggg

SEQ ID NO: 901145 - RNA, 22 nt, Human
uuccuaaccucuagcugcauau

SEQ ID NO: 901146 - RNA, 22 nt, Human
cccugugggaacuccugaguug

SEQ ID NO: 901147 - RNA, 22 nt, Human
ugugugccagauacaagcacug

SEQ ID NO: 901148 - RNA, 22 nt, Human
aguggggacaaugagagcaggu

SEQ ID NO: 901149 - RNA, 22 nt, Human
ucuucagguuaacuugucuuuu

SEQ ID NO: 901150 - RNA, 22 nt, Human
cugacuguaauucuguucuuaa

SEQ ID NO: 901151 - RNA, 22 nt, Human
ugugucaucuguguuacauaau

SEQ ID NO: 901152 - RNA, 22 nt, Human
ugagaaucauccagaggcuucu

SEQ ID NO: 901153 - RNA, 22 nt, Human
agcccugccauucucuggagcu

SEQ ID NO: 901154 - RNA, 22 nt, Human
uucaacauuugaaaugaaugaa

SEQ ID NO: 901155 - RNA, 22 nt, Human
ccuguauuagguagacaacuau

SEQ ID NO: 901156 - RNA, 22 nt, Human
gaguguguucuuuaugcuguga

SEQ ID NO: 901157 - RNA, 17 nt, Human
cugaggcccagggccca

SEQ ID NO: 901158 - RNA, 22 nt, Human
uacuuguagcagguggcauuua

SEQ ID NO: 901159 - RNA, 22 nt, Human
gccugguguccagaggcgagug

SEQ ID NO: 901160 - RNA, 22 nt, Human
uagcuguguaagcuugguaaga

SEQ ID NO: 901161 - RNA, 22 nt, Human
agacugaagcaauucaaccagu

SEQ ID NO: 901162 - RNA, 22 nt, Human
accagagcucuucagcacagga

SEQ ID NO: 901163 - RNA, 19 nt, Human
ugaauuaaagauuaaaguc

SEQ ID NO: 901164 - RNA, 22 nt, Human
aaagacuugggugaaguaauuu

SEQ ID NO: 901165 - RNA, 22 nt, Human
gcaucaagacgaugugaaaucg

SEQ ID NO: 901166 - RNA, 22 nt, Human
uggagaagcuguagguggacuc

SEQ ID NO: 901167 - RNA, 20 nt, Human
aggccccaggaaacucucag

SEQ ID NO: 901168 - RNA, 22 nt, Human
cauacaagcguucaauagaugu

SEQ ID NO: 901169 - RNA, 22 nt, Human
ucaggccaggagaucagauuga

SEQ ID NO: 901170 - RNA, 22 nt, Human
gcacagugauaggcaguugugc

SEQ ID NO: 901171 - RNA, 22 nt, Human
ucacaccuguaaucccaggccu

SEQ ID NO: 901172 - RNA, 22 nt, Human
uucaaagcaagacacaauuccu

SEQ ID NO: 901173 - RNA, 22 nt, Human
caggaaggcccaccuguccugu

SEQ ID NO: 901174 - RNA, 22 nt, Human
caaagagguuuugagggcagcu

SEQ ID NO: 901175 - RNA, 22 nt, Human
cauaagaauauuuaguggcagc

SEQ ID NO: 901176 - RNA, 22 nt, Human
cuagcuguaagagggauguggc

SEQ ID NO: 901177 - RNA, 23 nt, Human
aaaggucucugagccuugguuuc

SEQ ID NO: 901178 - RNA, 22 nt, Human
auguucaugauugguuuuggcg

SEQ ID NO: 901179 - RNA, 22 nt, Human
cgucuuccucuuacgaugcgcu

SEQ ID NO: 901180 - RNA, 22 nt, Human
uaaguaguagggccagaauuug

SEQ ID NO: 901181 - RNA, 22 nt, Human
auguuacaauucaaaaugcugc

SEQ ID NO: 901182 - RNA, 22 nt, Human
cuaaggaaauaugucacuugcu

SEQ ID NO: 901183 - RNA, 22 nt, Human
aguugaaaauuaagugaauuuc

SEQ ID NO: 901184 - RNA, 22 nt, Human
gugagguacaauuuuauacccu

SEQ ID NO: 901185 - RNA, 22 nt, Human
auuuguaccaucugguauacag

SEQ ID NO: 901186 - RNA, 22 nt, Human
gggugguguauuagagcugcag

SEQ ID NO: 901187 - RNA, 23 nt, Human
gcugaagagcaaaccaggcaaaa

SEQ ID NO: 901188 - RNA, 22 nt, Human
gccuccuggccuuugcuccuca

SEQ ID NO: 901189 - RNA, 22 nt, Human
caggugagcucuaucuagggag

SEQ ID NO: 901190 - RNA, 22 nt, Human
ucccaggcuaggccucugcguu

SEQ ID NO: 901191 - RNA, 22 nt, Human
ugggcuccguugccuggggcag

SEQ ID NO: 901192 - RNA, 20 nt, Human
agcagcagauguuggaggug

SEQ ID NO: 901193 - RNA, 22 nt, Human
cagcaggauagguuucuuugga

SEQ ID NO: 901194 - RNA, 22 nt, Human
auuugucucugcacuuuacuca

SEQ ID NO: 901195 - RNA, 22 nt, Human
ggcagguggaaguuggcagagc

SEQ ID NO: 901196 - RNA, 22 nt, Human
gggaggagggugcuggcuaaac

SEQ ID NO: 901197 - RNA, 23 nt, Human
ucccugggcccgugccagcggug

SEQ ID NO: 901198 - RNA, 22 nt, Human
augucuguucauuauuaacugc

SEQ ID NO: 901199 - RNA, 22 nt, Human
caauuaaagaagaccugccuca

SEQ ID NO: 901200 - RNA, 22 nt, Human
cuuauagauggcgaucuucuug

SEQ ID NO: 901201 - RNA, 22 nt, Human
acauuucucagguaagucauuu

SEQ ID NO: 901202 - RNA, 22 nt, Human
agcaaggcucggucagggugau

SEQ ID NO: 901203 - RNA, 22 nt, Human
cuggccaguguggcucugaucu

SEQ ID NO: 901204 - RNA, 22 nt, Human
ugugucagauuuaggcucaaac

SEQ ID NO: 901205 - RNA, 22 nt, Human
augcaaagcaccacacuaagau

SEQ ID NO: 901206 - RNA, 22 nt, Human
gaagaaggugccagaggcuuac

SEQ ID NO: 901207 - RNA, 22 nt, Human
aagccagguguuuaggccagcg

SEQ ID NO: 901208 - RNA, 22 nt, Human
ggguccagacacuccagaggaa

SEQ ID NO: 901209 - RNA, 22 nt, Human
gccugcucuggaauccauguaa

SEQ ID NO: 901210 - RNA, 22 nt, Human
ucccugggccacagcugugagc

SEQ ID NO: 901211 - RNA, 22 nt, Human
uugugucuaaauaaggagaccu

SEQ ID NO: 901212 - RNA, 22 nt, Human
uuuguauuuuucccagcuagcu

SEQ ID NO: 901213 - RNA, 22 nt, Human
acagugcgggcugcgguggguc

SEQ ID NO: 901214 - RNA, 22 nt, Human
uuucucaucuggaaacagugcu

SEQ ID NO: 901215 - RNA, 22 nt, Human
ugagcuagguccugugucagcu

SEQ ID NO: 901216 - RNA, 22 nt, Human
caagggaccugagauggucucu

SEQ ID NO: 901217 - RNA, 22 nt, Human
uccucuggcccagcugccucug

SEQ ID NO: 901218 - RNA, 22 nt, Human
aggcaaggugcucuugcucuau

SEQ ID NO: 901219 - RNA, 22 nt, Human
ucaggaagggcucagucugugc

SEQ ID NO: 901220 - RNA, 22 nt, Human
acuuuagaaaaggaacagagga

SEQ ID NO: 901221 - RNA, 22 nt, Human
guccugguauaauuguuuaaaa

SEQ ID NO: 901222 - RNA, 22 nt, Human
uggagagguuuaaacaaaaguu

SEQ ID NO: 901223 - RNA, 22 nt, Human
ucaguggauauuucuguggcug

SEQ ID NO: 901224 - RNA, 22 nt, Human
cugguccuugcuacccagcaag

SEQ ID NO: 901225 - RNA, 22 nt, Human
cauuugaaauaguucauucuug

SEQ ID NO: 901226 - RNA, 22 nt, Human
ucaggggcccuucccucagcag

SEQ ID NO: 901227 - RNA, 22 nt, Human
ugagacagucccaugaucugca

SEQ ID NO: 901228 - RNA, 22 nt, Human
acacagagugguuuguagaaua

SEQ ID NO: 901229 - RNA, 20 nt, Human
uuuaccaacucaccaguauc

SEQ ID NO: 901230 - RNA, 22 nt, Human
aaucacaauuacuuuugcacca

SEQ ID NO: 901231 - RNA, 22 nt, Human
cagcucugccacuuccuagcua

SEQ ID NO: 901232 - RNA, 22 nt, Human
ugggaaugcugagcccauguau

SEQ ID NO: 901233 - RNA, 22 nt, Human
aggagaaagacuggacagccaa

SEQ ID NO: 901234 - RNA, 18 nt, Human
ucucucugaagaguuccc

SEQ ID NO: 901235 - RNA, 19 nt, Human
aaacucauagacucauauu

SEQ ID NO: 901236 - RNA, 22 nt, Human
gaggaagucucucuacaagaaa

SEQ ID NO: 901237 - RNA, 22 nt, Human
aaagucaucuaggagcagauuu

SEQ ID NO: 901238 - RNA, 22 nt, Human
uuuauucauuguuucgucgcag

SEQ ID NO: 901239 - RNA, 20 nt, Human
uccucagaagacauuugggg

SEQ ID NO: 901240 - RNA, 22 nt, Human
gaagguuuucaggagccuaguc

SEQ ID NO: 901241 - RNA, 22 nt, Human
uuuaacauguaauugcugcuuu

SEQ ID NO: 901242 - RNA, 22 nt, Human
auuuuguuaucagggcuuugca

SEQ ID NO: 901243 - RNA, 22 nt, Human
ugucauacaacaauaaguaccg

SEQ ID NO: 901244 - RNA, 22 nt, Human
uguguguguuuacaguuucuca

SEQ ID NO: 901245 - RNA, 22 nt, Human
uguggacuuuauuuuagggagg

SEQ ID NO: 901246 - RNA, 22 nt, Human
ugaaauuaugcauuguuguacc

SEQ ID NO: 901247 - RNA, 22 nt, Human
gcuuugccuguagcauuggccu

SEQ ID NO: 901248 - RNA, 22 nt, Human
ucucacagugcaggucugucuc

SEQ ID NO: 901249 - RNA, 22 nt, Human
augaagcagaauuucccacucu

SEQ ID NO: 901250 - RNA, 22 nt, Human
cccuggccagcucaugucugag

SEQ ID NO: 901251 - RNA, 22 nt, Human
gggcaugagaggcaggcaagug

SEQ ID NO: 901252 - RNA, 22 nt, Human
ucacagggauggaauagaaaua

SEQ ID NO: 901253 - RNA, 21 nt, Human
agaucccugaggagagcaucc

SEQ ID NO: 901254 - RNA, 22 nt, Human
agagcauccauuuuugucacau

SEQ ID NO: 901255 - RNA, 22 nt, Human
gugcaaaaguaauugcaguuuu

SEQ ID NO: 901256 - RNA, 22 nt, Human
aaggcaauuggcuuguauaaga

SEQ ID NO: 901257 - RNA, 22 nt, Human
augaggcuuaaacugcugcaac

SEQ ID NO: 901258 - RNA, 22 nt, Human
gagcacaguaaagcagugucac

SEQ ID NO: 901259 - RNA, 22 nt, Human
aggcaccucagcugagccuggg

SEQ ID NO: 901260 - RNA, 22 nt, Human
agucagagcuauguuguuauau

SEQ ID NO: 901261 - RNA, 22 nt, Human
augacaucaacaguggugcugu

SEQ ID NO: 901262 - RNA, 22 nt, Human
augucacaguugcaacaugaau

SEQ ID NO: 901263 - RNA, 22 nt, Human
gccuggaguuguggugaagcca

SEQ ID NO: 901264 - RNA, 22 nt, Human
acccaggccauuggcaagaguc

SEQ ID NO: 901265 - RNA, 23 nt, Human
cacugcagcguggucuggcagga

SEQ ID NO: 901266 - RNA, 22 nt, Human
agaacauagauaccuaagacag

SEQ ID NO: 901267 - RNA, 22 nt, Human
uugaagauuauucuauuaaaag

SEQ ID NO: 901268 - RNA, 22 nt, Human
uguguagcuuucuucugugggg

SEQ ID NO: 901269 - RNA, 22 nt, Human
gcccagccagagcugugugaug

SEQ ID NO: 901270 - RNA, 22 nt, Human
aaauggcagugucauaaggcuc

SEQ ID NO: 901271 - RNA, 22 nt, Human
ccaggcagggcucaaggaaccu

SEQ ID NO: 901272 - RNA, 17 nt, Human
ugcugcagacccacccc

SEQ ID NO: 901273 - RNA, 22 nt, Human
uucuuuuaaaagagagcagaaa

SEQ ID NO: 901274 - RNA, 22 nt, Human
uccugaggcuaaagugcagugg

SEQ ID NO: 901275 - RNA, 22 nt, Human
uccaauauuucucauauaugga

SEQ ID NO: 901276 - RNA, 22 nt, Human
augaaauuaaucaacacauaca

SEQ ID NO: 901277 - RNA, 22 nt, Human
gacuucaaaagcugacauucau

SEQ ID NO: 901278 - RNA, 22 nt, Human
gaauauuuguaauuacuguuga

SEQ ID NO: 901279 - RNA, 22 nt, Human
acacauuuucaacacugucaag

SEQ ID NO: 901280 - RNA, 22 nt, Human
cuggaagacucaauggccugcc

SEQ ID NO: 901281 - RNA, 22 nt, Human
uuggcacucucccugcacuggu

SEQ ID NO: 901282 - RNA, 22 nt, Human
aagcagggcuuuaagcgguuuu

SEQ ID NO: 901283 - RNA, 22 nt, Human
ccagccagucccgcaugaccgc

SEQ ID NO: 901284 - RNA, 22 nt, Human
cuggcuccccuacuucuuauug

SEQ ID NO: 901285 - RNA, 22 nt, Human
ugcuugggaauguggagucaga

SEQ ID NO: 901286 - RNA, 22 nt, Human
ccguggaguugugcugaguaug

SEQ ID NO: 901287 - RNA, 23 nt, Human
aaacaaugucaucaggacuuggu

SEQ ID NO: 901288 - RNA, 22 nt, Human
caaaacauucagagagcucacu

SEQ ID NO: 901289 - RNA, 22 nt, Human
aagcauuuggcaugaaacucuu

SEQ ID NO: 901290 - RNA, 22 nt, Human
gagucucuagucugguccuggc

SEQ ID NO: 901291 - RNA, 22 nt, Human
uuaucugugauccuaaaugucu

SEQ ID NO: 901292 - RNA, 22 nt, Human
uuagaaagggugucugaaucug

SEQ ID NO: 901293 - RNA, 22 nt, Human
uccccuuggcuuggucaagagg

SEQ ID NO: 901294 - RNA, 22 nt, Human
ugcuuuuuaguacugucuuauu

SEQ ID NO: 901295 - RNA, 22 nt, Human
uaggacuuggugacucucaaug

SEQ ID NO: 901296 - RNA, 20 nt, Human
ccucucugcccugcaaggcc

SEQ ID NO: 901297 - RNA, 22 nt, Human
auaauauuugcauuacugugau

SEQ ID NO: 901298 - RNA, 22 nt, Human
uacauguaauuuucauaguaag

SEQ ID NO: 901299 - RNA, 22 nt, Human
uucuauaaaugaauguguauau

SEQ ID NO: 901300 - RNA, 19 nt, Human
guccaugcuuagaggggcc

SEQ ID NO: 901301 - RNA, 22 nt, Human
uaccugaauuaccaaaagcuuu

SEQ ID NO: 901302 - RNA, 22 nt, Human
ucucugaggaagaggcuguaau

SEQ ID NO: 901303 - RNA, 22 nt, Human
cagacagaggcuguaugagggc

SEQ ID NO: 901304 - RNA, 22 nt, Human
auuuuuuagaaccuggccugau

SEQ ID NO: 901305 - RNA, 22 nt, Human
uggcccugucugcacacaggau

SEQ ID NO: 901306 - RNA, 22 nt, Human
aagcagaaguugaucuaccaua

SEQ ID NO: 901307 - RNA, 22 nt, Human
cucaggccaauaagcuccagcc

SEQ ID NO: 901308 - RNA, 21 nt, Human
ugaaacaaucagacagagucu

SEQ ID NO: 901309 - RNA, 22 nt, Human
gcccugcugaguccggcucaga

SEQ ID NO: 901310 - RNA, 22 nt, Human
ugugaaggagaugaagggagug

SEQ ID NO: 901311 - RNA, 22 nt, Human
ugcagcagggaccucuauguga

SEQ ID NO: 901312 - RNA, 22 nt, Human
uguacaagcaaauagaccuuca

SEQ ID NO: 901313 - RNA, 22 nt, Human
ccagagguggaagauuguuuug

SEQ ID NO: 901314 - RNA, 22 nt, Human
agcugguauuuguuagggaguu

SEQ ID NO: 901315 - RNA, 22 nt, Human
gaacacagucaagggcugcugu

SEQ ID NO: 901316 - RNA, 22 nt, Human
aaaggcuucucagaaaggccuu

SEQ ID NO: 901317 - RNA, 22 nt, Human
caucaaaucugacuuuucuucc

SEQ ID NO: 901318 - RNA, 22 nt, Human
ugucuucauuccccaugaaguc

SEQ ID NO: 901319 - RNA, 22 nt, Human
aggccagcuaugacucugcucc

SEQ ID NO: 901320 - RNA, 22 nt, Human
cagugcagaacacauggaaaau

SEQ ID NO: 901321 - RNA, 22 nt, Human
auuuuguggcagaugcagaacc

SEQ ID NO: 901322 - RNA, 23 nt, Human
acugccugcuacuaugcccacgg

SEQ ID NO: 901323 - RNA, 22 nt, Human
uucuuuuaauugugggggagug

SEQ ID NO: 901324 - RNA, 22 nt, Human
ucccaggauuuuaggcucucag

SEQ ID NO: 901325 - RNA, 22 nt, Human
caccagguggaaaugucacagc

SEQ ID NO: 901326 - RNA, 22 nt, Human
ucacagugcaccagugugaagc

SEQ ID NO: 901327 - RNA, 22 nt, Human
cgccaggcuugguagcucaugc

SEQ ID NO: 901328 - RNA, 22 nt, Human
uaaagugcagacucccggaaac

SEQ ID NO: 901329 - RNA, 22 nt, Human
caggaagagguaucaccgagca

SEQ ID NO: 901330 - RNA, 21 nt, Human
ugagcccuugccucagagccc

SEQ ID NO: 901331 - RNA, 22 nt, Human
ugggcagggagcuggaaccaca

SEQ ID NO: 901332 - RNA, 22 nt, Human
gggcucagccuccucacuucga

SEQ ID NO: 901333 - RNA, 22 nt, Human
ucucuggcagaggcccuauccc

SEQ ID NO: 901334 - RNA, 21 nt, Human
acagcagacaggcuuaggacc

SEQ ID NO: 901335 - RNA, 22 nt, Human
uguaguaagugcgcaauaaaua

SEQ ID NO: 901336 - RNA, 22 nt, Human
guuauaggagcccgaacuaaga

SEQ ID NO: 901337 - RNA, 22 nt, Human
agaagccagcuucagcugcccg

SEQ ID NO: 901338 - RNA, 22 nt, Human
acacacagcgccuaccaugugc

SEQ ID NO: 901339 - RNA, 22 nt, Human
uggcucugugcuucuaguaucu

SEQ ID NO: 901340 - RNA, 22 nt, Human
ccaguguguucccugccucacu

SEQ ID NO: 901341 - RNA, 23 nt, Human
aaacuguugcuucaauguauccu

SEQ ID NO: 901342 - RNA, 22 nt, Human
ucacgugagggaccugugucug

SEQ ID NO: 901343 - RNA, 22 nt, Human
uugaggaguagaagcuuugaau

SEQ ID NO: 901344 - RNA, 22 nt, Human
agguggagaagagaugggcagu

SEQ ID NO: 901345 - RNA, 22 nt, Human
aaggcuuuugggaauuuucaac

SEQ ID NO: 901346 - RNA, 22 nt, Human
uuacagaaagguugugggauag

SEQ ID NO: 901347 - RNA, 21 nt, Human
gcagcaugagaaagccccaaa

SEQ ID NO: 901348 - RNA, 22 nt, Human
uaagaacagugacagccaacau

SEQ ID NO: 901349 - RNA, 22 nt, Human
auuuccuaggguagaugucaca

SEQ ID NO: 901350 - RNA, 22 nt, Human
uguccaguccuuggggugcugu

SEQ ID NO: 901351 - RNA, 22 nt, Human
ugagcgugcaguaguguuggua

SEQ ID NO: 901352 - RNA, 22 nt, Human
aguccaugaugaaaccagaucc

SEQ ID NO: 901353 - RNA, 22 nt, Human
auucauguggggagccuucugu

SEQ ID NO: 901354 - RNA, 22 nt, Human
uugaaauaucaaguuauuagug

SEQ ID NO: 901355 - RNA, 22 nt, Human
auuauuguuagugacaggguga

SEQ ID NO: 901356 - RNA, 22 nt, Human
uaguacuacguuuucuacuauc

SEQ ID NO: 901357 - RNA, 22 nt, Human
agcagaggacaguucuuaggaa

SEQ ID NO: 901358 - RNA, 17 nt, Human
auaagacagaagacaau

SEQ ID NO: 901359 - RNA, 22 nt, Human
ggcucccugggugcuccugcuc

SEQ ID NO: 901360 - RNA, 22 nt, Human
aucaggaaauacuuauuuauaa

SEQ ID NO: 901361 - RNA, 22 nt, Human
ucuguacuuccuuuaaacuuua

SEQ ID NO: 901362 - RNA, 22 nt, Human
acagcugggaaucagcugggga

SEQ ID NO: 901363 - RNA, 22 nt, Human
cucagccagacaugacccaguc

SEQ ID NO: 901364 - RNA, 20 nt, Human
ugauauauuacucaggggaa

SEQ ID NO: 901365 - RNA, 22 nt, Human
auguccagaggugagucagagc

SEQ ID NO: 901366 - RNA, 22 nt, Human
augcuucuccugaacaucccug

SEQ ID NO: 901367 - RNA, 19 nt, Human
gguagaagggaaguguuuu

SEQ ID NO: 901368 - RNA, 22 nt, Human
auggaaauguaacuucugauuc

SEQ ID NO: 901369 - RNA, 22 nt, Human
gaugucucucacauagaaggua

SEQ ID NO: 901370 - RNA, 22 nt, Human
ugagauaaggauguuauacucg

SEQ ID NO: 901371 - RNA, 22 nt, Human
ucacagaauaaauguacuggcc

SEQ ID NO: 901372 - RNA, 22 nt, Human
ugcugggcuucaacugccugag

SEQ ID NO: 901373 - RNA, 22 nt, Human
ucuggggaauguucauuucuga

SEQ ID NO: 901374 - RNA, 22 nt, Human
aaauaaaggaacuguuuuccca

SEQ ID NO: 901375 - RNA, 22 nt, Human
uggagguguggagucaaaggga

SEQ ID NO: 901376 - RNA, 22 nt, Human
ugcagcugaaccuagagucugu

SEQ ID NO: 901377 - RNA, 22 nt, Human
agcccugcacaguucgggagga

SEQ ID NO: 901378 - RNA, 22 nt, Human
uggcugaggagagggcggaagu

SEQ ID NO: 901379 - RNA, 22 nt, Human
cuuaucaaacuggagcaggcuu

SEQ ID NO: 901380 - RNA, 22 nt, Human
gcagaggggaagcugaggaauu

SEQ ID NO: 901381 - RNA, 22 nt, Human
guuacccagugcuguggaggga

SEQ ID NO: 901382 - RNA, 22 nt, Human
ugaggcaggaguucaggcugcg

SEQ ID NO: 901383 - RNA, 22 nt, Human
accaggaagaacaggcaaggca

SEQ ID NO: 901384 - RNA, 22 nt, Human
cacaauuuguuuuaucaguauu

SEQ ID NO: 901385 - RNA, 22 nt, Human
ugaaaugagauaauuuaagugc

SEQ ID NO: 901386 - RNA, 22 nt, Human
auaagaugagaucagcuuucug

SEQ ID NO: 901387 - RNA, 22 nt, Human
cuacagaaucuaccucaagcca

SEQ ID NO: 901388 - RNA, 22 nt, Human
guccagagguccaggaucaagg

SEQ ID NO: 901389 - RNA, 22 nt, Human
agucuauuuuugguucuucggg

SEQ ID NO: 901390 - RNA, 22 nt, Human
ucugccugccgagaacaccuac

SEQ ID NO: 901391 - RNA, 21 nt, Human
ugcagcugacacccuuuggga

SEQ ID NO: 901392 - RNA, 22 nt, Human
ugugcugucaguaucaagggau

SEQ ID NO: 901393 - RNA, 23 nt, Human
uggggagggaagucauuucugua

SEQ ID NO: 901394 - RNA, 20 nt, Human
uucaucagcaaagcacagca

SEQ ID NO: 901395 - RNA, 22 nt, Human
ucagcaagaagcugugggcuuc

SEQ ID NO: 901396 - RNA, 22 nt, Human
cugucuggauauaccuuggcca

SEQ ID NO: 901397 - RNA, 22 nt, Human
cugugggaaaggaugagauugc

SEQ ID NO: 901398 - RNA, 22 nt, Human
gcuccaggcagagccucuuucg

SEQ ID NO: 901399 - RNA, 22 nt, Human
cccaggguagcugagcuggcag

SEQ ID NO: 901400 - RNA, 22 nt, Human
ucauaacaggcugagaggauuu

SEQ ID NO: 901401 - RNA, 22 nt, Human
uugcaggguugaccaauaggcu

SEQ ID NO: 901402 - RNA, 22 nt, Human
uccuggccuagcucacccugga

SEQ ID NO: 901403 - RNA, 22 nt, Human
uuaugguaggagcugucaguuu

SEQ ID NO: 901404 - RNA, 22 nt, Human
agcugcugagccauguccugcu

SEQ ID NO: 901405 - RNA, 22 nt, Human
uaaggguucagaaugcaguggu

SEQ ID NO: 901406 - RNA, 22 nt, Human
acacagagguggccacucuuuu

SEQ ID NO: 901407 - RNA, 22 nt, Human
acugcccuguaacugccaggua

SEQ ID NO: 901408 - RNA, 22 nt, Human
guuuagaaugaaacuuuugagc

SEQ ID NO: 901409 - RNA, 22 nt, Human
acaugugaguaaauuuaauguu

SEQ ID NO: 901410 - RNA, 22 nt, Human
aaaguugauaagguaucguagu

SEQ ID NO: 901411 - RNA, 22 nt, Human
aaagacuacacgggaaagagcu

SEQ ID NO: 901412 - RNA, 22 nt, Human
ugggacagauuauaagucugca

SEQ ID NO: 901413 - RNA, 22 nt, Human
aaaaguaauugcgguuuuugcc

SEQ ID NO: 901414 - RNA, 22 nt, Human
agcccagcugcuauguaccugg

SEQ ID NO: 901415 - RNA, 22 nt, Human
ugaucaggucugaacagggagg

SEQ ID NO: 901416 - RNA, 22 nt, Human
aaguaaugguuaaauaauucua

SEQ ID NO: 901417 - RNA, 22 nt, Human
cugcuccaagccagcccugcag

SEQ ID NO: 901418 - RNA, 22 nt, Human
ccuuuaaauggauguucaacug

SEQ ID NO: 901419 - RNA, 22 nt, Human
aacaugcuuugauaaauaaaag

SEQ ID NO: 901420 - RNA, 19 nt, Human
uccugggcugcgucuugcc

SEQ ID NO: 901421 - RNA, 22 nt, Human
gucucugccuggggggaucaga

SEQ ID NO: 901422 - RNA, 22 nt, Human
cccugcaggggaccugcagccu

SEQ ID NO: 901423 - RNA, 22 nt, Human
ucuuucugaauauuugaccuca

SEQ ID NO: 901424 - RNA, 22 nt, Human
ggaauugcuaacauucugaagg

SEQ ID NO: 901425 - RNA, 17 nt, Human
acacagagauuaacaca

SEQ ID NO: 901426 - RNA, 22 nt, Human
uuggcagaggccgaggugaaga

SEQ ID NO: 901427 - RNA, 22 nt, Human
ucuguguuuaaaagauaugucc

SEQ ID NO: 901428 - RNA, 22 nt, Human
aagcaaguucucaucauuuaua

SEQ ID NO: 901429 - RNA, 22 nt, Human
acugugucuagcaccacguguc

SEQ ID NO: 901430 - RNA, 22 nt, Human
aaagcuaugaggcaugcauuuc

SEQ ID NO: 901431 - RNA, 22 nt, Human
uggcagagucucuccuuuccag

SEQ ID NO: 901432 - RNA, 22 nt, Human
aaaucucagcccuuauuuuaga

SEQ ID NO: 901433 - RNA, 22 nt, Human
ggcuccagaugucuccuggcaa

SEQ ID NO: 901434 - RNA, 22 nt, Human
uguaacaagugcuuacuuuggg

SEQ ID NO: 901435 - RNA, 22 nt, Human
uggcagagugcggcauccccug

SEQ ID NO: 901436 - RNA, 22 nt, Human
agcagauguuucagagcaggcu

SEQ ID NO: 901437 - RNA, 22 nt, Human
aaacaagguacacaguaauggu

SEQ ID NO: 901438 - RNA, 22 nt, Human
ggcuuuauuauguggccaugug

SEQ ID NO: 901439 - RNA, 20 nt, Human
auccuggaauccaaauggag

SEQ ID NO: 901440 - RNA, 22 nt, Human
gagugacaggaauauuuaucug

SEQ ID NO: 901441 - RNA, 22 nt, Human
aaauguucccaauaugaagcug

SEQ ID NO: 901442 - RNA, 22 nt, Human
guguccagaugaggagacgaug

SEQ ID NO: 901443 - RNA, 22 nt, Human
agaggagcuuuuggaaaaggcc

SEQ ID NO: 901444 - RNA, 22 nt, Human
ccuccagccuuccugaagagcc

SEQ ID NO: 901445 - RNA, 22 nt, Human
auuuucauggcuucugcucagu

SEQ ID NO: 901446 - RNA, 22 nt, Human
gcucagaggguuuuggccaagu

SEQ ID NO: 901447 - RNA, 22 nt, Human
cuaagaggaaguacucuguuau

SEQ ID NO: 901448 - RNA, 22 nt, Human
gaggcccagcauucagggcagg

SEQ ID NO: 901449 - RNA, 22 nt, Human
ugagaggucaaagggcauggag

SEQ ID NO: 901450 - RNA, 22 nt, Human
cagcugccagcuucucuccauc

SEQ ID NO: 901451 - RNA, 22 nt, Human
uuuuuguucugauuauacuggu

SEQ ID NO: 901452 - RNA, 22 nt, Human
uuccaaagugcuggaauuacau

SEQ ID NO: 901453 - RNA, 22 nt, Human
acaaagcuuagaccuaagagau

SEQ ID NO: 901454 - RNA, 22 nt, Human
ccaggaaggaucguuugggagu

SEQ ID NO: 901455 - RNA, 22 nt, Human
ccagggaagaaagaugaagugc

SEQ ID NO: 901456 - RNA, 22 nt, Human
agcacagaguugcucacugccg

SEQ ID NO: 901457 - RNA, 22 nt, Human
uuuaaggcagugaaacuauucu

SEQ ID NO: 901458 - RNA, 20 nt, Human
ugugugcaucuguauguauu

SEQ ID NO: 901459 - RNA, 22 nt, Human
ucuggcucauacaagccugcaa

SEQ ID NO: 901460 - RNA, 22 nt, Human
aguuagaauauaauuauguuaa

SEQ ID NO: 901461 - RNA, 22 nt, Human
cauaaagucucauaauucacuu

SEQ ID NO: 901462 - RNA, 20 nt, Human
acagauauuugauuuucagu

SEQ ID NO: 901463 - RNA, 22 nt, Human
uuagaagcaucaccuguucugg

SEQ ID NO: 901464 - RNA, 22 nt, Human
cuuuaguuugugauacgaagau

SEQ ID NO: 901465 - RNA, 22 nt, Human
uucugggaguuugggucggcug

SEQ ID NO: 901466 - RNA, 22 nt, Human
ccugcaagaccugagacacacc

SEQ ID NO: 901467 - RNA, 22 nt, Human
gccuccucuugagggucaggga

SEQ ID NO: 901468 - RNA, 22 nt, Human
uugagaaaggggucaauaucuc

SEQ ID NO: 901469 - RNA, 23 nt, Human
uucauguucccuccuucugguga

SEQ ID NO: 901470 - RNA, 19 nt, Human
auguuuacacucaggggcu

SEQ ID NO: 901471 - RNA, 22 nt, Human
auaucacaguaguuguuuaguu

SEQ ID NO: 901472 - RNA, 22 nt, Human
uuagcugcugauuaaauauguu

SEQ ID NO: 901473 - RNA, 22 nt, Human
gcuuccuugggaaaauuagaug

SEQ ID NO: 901474 - RNA, 22 nt, Human
ugucucuuuggguuccucuugg

SEQ ID NO: 901475 - RNA, 22 nt, Human
ugugaaauucuugaaaugcaca

SEQ ID NO: 901476 - RNA, 22 nt, Human
uccaggcucucaggugucagca

SEQ ID NO: 901477 - RNA, 22 nt, Human
cauauaaauacaacauguguua

SEQ ID NO: 901478 - RNA, 22 nt, Human
aaugcaaacagcccagaaucca

SEQ ID NO: 901479 - RNA, 22 nt, Human
auagcaaauauuuuaaugagca

SEQ ID NO: 901480 - RNA, 22 nt, Human
gcauuccugagaaugcagagug

SEQ ID NO: 901481 - RNA, 22 nt, Human
cacugaaggacaguaggaaggg

SEQ ID NO: 901482 - RNA, 22 nt, Human
cgccuucacaaggacaguauau

SEQ ID NO: 901483 - RNA, 18 nt, Human
gcacagcuaggagggucc

SEQ ID NO: 901484 - RNA, 22 nt, Human
gcaugcagggagggucuggcug

SEQ ID NO: 901485 - RNA, 22 nt, Human
ggggcugcugguauuuccaguu

SEQ ID NO: 901486 - RNA, 22 nt, Human
aucuucaagggaagaaagagua

SEQ ID NO: 901487 - RNA, 22 nt, Human
acuuacaaucaaccaccuugga

SEQ ID NO: 901488 - RNA, 22 nt, Human
uaaggaaaguacauguuuugac

SEQ ID NO: 901489 - RNA, 20 nt, Human
acagaaagcugccuuguccc

SEQ ID NO: 901490 - RNA, 22 nt, Human
uucacagauuucccugcacaug

SEQ ID NO: 901491 - RNA, 22 nt, Human
aauguguguucggggcccagag

SEQ ID NO: 901492 - RNA, 22 nt, Human
agguuuauguuuggugcaggag

SEQ ID NO: 901493 - RNA, 22 nt, Human
acagggcuccuugggcugacac

SEQ ID NO: 901494 - RNA, 22 nt, Human
agcccaugcaacaggccuagcg

SEQ ID NO: 901495 - RNA, 22 nt, Human
cauaauguaugcauuuuccagc

SEQ ID NO: 901496 - RNA, 22 nt, Human
cagagacauuaagugccaugau

SEQ ID NO: 901497 - RNA, 22 nt, Human
gcaggccacugucuccucuggg

SEQ ID NO: 901498 - RNA, 22 nt, Human
caaacauucaaguacaagucuu

SEQ ID NO: 901499 - RNA, 22 nt, Human
ccagcccuacaguaucaccugu

SEQ ID NO: 901500 - RNA, 23 nt, Human
uggcagcuguguaagagaaagca

SEQ ID NO: 901501 - RNA, 22 nt, Human
uuccaccaauucuccuccaagg

SEQ ID NO: 901502 - RNA, 22 nt, Human
caguuugugcuaggcacuauuu

SEQ ID NO: 901503 - RNA, 23 nt, Human
acugccagauugaagguuucuua

SEQ ID NO: 901504 - RNA, 22 nt, Human
ccucauguugcucgcaucugca

SEQ ID NO: 901505 - RNA, 22 nt, Human
caggggcugaaauguugggguu

SEQ ID NO: 901506 - RNA, 22 nt, Human
agugcuucuggugggcgugagg

SEQ ID NO: 901507 - RNA, 22 nt, Human
gagcugcuggccuccugcggga

SEQ ID NO: 901508 - RNA, 22 nt, Human
cuacagaguaucuaaagaggua

SEQ ID NO: 901509 - RNA, 22 nt, Human
ucucccucauuccugcuuccau

SEQ ID NO: 901510 - RNA, 22 nt, Human
aaaguauucaaaaauauuuggu

SEQ ID NO: 901511 - RNA, 22 nt, Human
agagcuggaagcugcucuuaga

SEQ ID NO: 901512 - RNA, 22 nt, Human
aauucauauggauaugcuagua

SEQ ID NO: 901513 - RNA, 22 nt, Human
aggguucagugagguguacucc

SEQ ID NO: 901514 - RNA, 22 nt, Human
uagaacuaagaguuaucauuua

SEQ ID NO: 901515 - RNA, 22 nt, Human
uauguuuuucagacguccuaca

SEQ ID NO: 901516 - RNA, 22 nt, Human
ugugaagguaaggaggggcaag

SEQ ID NO: 901517 - RNA, 22 nt, Human
acuuaggcuugguucagcuaga

SEQ ID NO: 901518 - RNA, 18 nt, Human
agcagcaauuugggauga

SEQ ID NO: 901519 - RNA, 22 nt, Human
gcagggcauagaggcacggagg

SEQ ID NO: 901520 - RNA, 22 nt, Human
uccagagggcgauggcuggggg

SEQ ID NO: 901521 - RNA, 22 nt, Human
ucaauauauuccauguuuucuc

SEQ ID NO: 901522 - RNA, 22 nt, Human
agcuccaguuuccugacugagc

SEQ ID NO: 901523 - RNA, 22 nt, Human
cuggucccugcagugugcuggg

SEQ ID NO: 901524 - RNA, 22 nt, Human
aguguaugucaaguauauacac

SEQ ID NO: 901525 - RNA, 21 nt, Human
uauuuaguuuuacaaaugugg

SEQ ID NO: 901526 - RNA, 22 nt, Human
cuaucucagauaaccugcacca

SEQ ID NO: 901527 - RNA, 22 nt, Human
ucacauuuuaguaccaugauuu

SEQ ID NO: 901528 - RNA, 22 nt, Human
aggcccuggcuggguuucuuua

SEQ ID NO: 901529 - RNA, 22 nt, Human
uuuagcaacgaagcacucgaca

SEQ ID NO: 901530 - RNA, 22 nt, Human
cucuccaaguuaucaagaugaa

SEQ ID NO: 901531 - RNA, 22 nt, Human
cacccuagcugucauuucaguu

SEQ ID NO: 901532 - RNA, 22 nt, Human
ccuggcuccgugucacgugccc

SEQ ID NO: 901533 - RNA, 17 nt, Human
agcauuuguguuaacag

SEQ ID NO: 901534 - RNA, 22 nt, Human
gaggucauuguugcauuaauug

SEQ ID NO: 901535 - RNA, 22 nt, Human
uuuaaugauagucuuacgaaaa

SEQ ID NO: 901536 - RNA, 22 nt, Human
uuaaaauuuccccaccauguau

SEQ ID NO: 901537 - RNA, 22 nt, Human
aaggacaggcacagugguggag

SEQ ID NO: 901538 - RNA, 22 nt, Human
ucuacauuuuaacaagaugccc

SEQ ID NO: 901539 - RNA, 22 nt, Human
ucauuucuguugugcaucacug

SEQ ID NO: 901540 - RNA, 22 nt, Human
augggcugugggacccuggacc

SEQ ID NO: 901541 - RNA, 22 nt, Human
ggcagguguggugaccagagau

SEQ ID NO: 901542 - RNA, 22 nt, Human
cucauguaagagagcauuaguu

SEQ ID NO: 901543 - RNA, 22 nt, Human
uuagcagcaauggcaucaacua

SEQ ID NO: 901544 - RNA, 22 nt, Human
aaggcauguguccucagagaga

SEQ ID NO: 901545 - RNA, 22 nt, Human
uggccacacugcccccacuggg

SEQ ID NO: 901546 - RNA, 22 nt, Human
uugagguacaaacaugagguuu

SEQ ID NO: 901547 - RNA, 21 nt, Human
gggcgaggccugauguggcuc

SEQ ID NO: 901548 - RNA, 22 nt, Human
guuuucaugucuauugggcaua

SEQ ID NO: 901549 - RNA, 22 nt, Human
aaggcuggucagauguggugaa

SEQ ID NO: 901550 - RNA, 22 nt, Human
agagccugugggagaugcagcu

SEQ ID NO: 901551 - RNA, 22 nt, Human
cagagagagugggguguggauu

SEQ ID NO: 901552 - RNA, 18 nt, Human
aaacauggcuuaaaggcu

SEQ ID NO: 901553 - RNA, 22 nt, Human
gcuaaauaaucuucuucugaca

SEQ ID NO: 901554 - RNA, 22 nt, Human
uacuuacagaaggaagcaauug

SEQ ID NO: 901555 - RNA, 22 nt, Human
ucuugggaccauuuacacauac

SEQ ID NO: 901556 - RNA, 22 nt, Human
cauuuacuuaaaucuuuacaag

SEQ ID NO: 901557 - RNA, 22 nt, Human
agguucuggcauugcucaguaa

SEQ ID NO: 901558 - RNA, 22 nt, Human
ugucccaguucccaggguugcu

SEQ ID NO: 901559 - RNA, 22 nt, Human
gccugugcuuaacugacgugag

SEQ ID NO: 901560 - RNA, 22 nt, Human
aauaaugagcuugucuaauugu

SEQ ID NO: 901561 - RNA, 22 nt, Human
cuucuucauaggcaguccuguu

SEQ ID NO: 901562 - RNA, 22 nt, Human
cacaugaauucacauguauuuu

SEQ ID NO: 901563 - RNA, 22 nt, Human
agcaggagcugugggaagaugg

SEQ ID NO: 901564 - RNA, 22 nt, Human
agcgcgcucuaggacaccgcgg

SEQ ID NO: 901565 - RNA, 22 nt, Human
gaggagaaauuuggggaccuga

SEQ ID NO: 901566 - RNA, 22 nt, Human
auccuuaaaggaauucugauuu

SEQ ID NO: 901567 - RNA, 22 nt, Human
gaaucaaugguagauuaaguaa

SEQ ID NO: 901568 - RNA, 22 nt, Human
uaaaguguaugccaucucucau

SEQ ID NO: 901569 - RNA, 18 nt, Human
acgugcugugccuuuugc

SEQ ID NO: 901570 - RNA, 22 nt, Human
agcugccccucauuuucaccac

SEQ ID NO: 901571 - RNA, 17 nt, Human
agcaggcacgucagcac

SEQ ID NO: 901572 - RNA, 22 nt, Human
gaagacaauucuggguggagga

SEQ ID NO: 901573 - RNA, 22 nt, Human
uggcagaccugaagguucggcg

SEQ ID NO: 901574 - RNA, 22 nt, Human
gauagcaacauagaacagaauu

SEQ ID NO: 901575 - RNA, 22 nt, Human
ccucaugauuuuuagcccauug

SEQ ID NO: 901576 - RNA, 22 nt, Human
aaaguaaagauugggaaugugu

SEQ ID NO: 901577 - RNA, 22 nt, Human
cauuuguuggucagauuguagu

SEQ ID NO: 901578 - RNA, 22 nt, Human
uauugcauuaugguaggaaagg

SEQ ID NO: 901579 - RNA, 22 nt, Human
auggaagaacgcucaggguuac

SEQ ID NO: 901580 - RNA, 22 nt, Human
cugccuccaggcucaccuugac

SEQ ID NO: 901581 - RNA, 22 nt, Human
cagugauucagacucaucauuu

SEQ ID NO: 901582 - RNA, 22 nt, Human
ugcuggcugaggccugagcggg

SEQ ID NO: 901583 - RNA, 21 nt, Human
ccagcuccaggaccuuggauc

SEQ ID NO: 901584 - RNA, 22 nt, Human
aauaaagccugucucuuuagag

SEQ ID NO: 901585 - RNA, 22 nt, Human
uguaacauauguaaaagcaccu

SEQ ID NO: 901586 - RNA, 22 nt, Human
uccauucauucauugaugaaca

SEQ ID NO: 901587 - RNA, 22 nt, Human
uaaagcacgucuauuuaaugau

SEQ ID NO: 901588 - RNA, 22 nt, Human
cuggguaccucaccgcugcugc

SEQ ID NO: 901589 - RNA, 22 nt, Human
gagggcagaaaauuaugcggug

SEQ ID NO: 901590 - RNA, 22 nt, Human
auggcucucuccuuacugcugc

SEQ ID NO: 901591 - RNA, 22 nt, Human
gucuguggcaggggagaaguuu

SEQ ID NO: 901592 - RNA, 22 nt, Human
uccacaggcaagucucuuggca

SEQ ID NO: 901593 - RNA, 22 nt, Human
aggagucacucagggcuucauc

SEQ ID NO: 901594 - RNA, 22 nt, Human
ggcagggagagcaugcugauaa

SEQ ID NO: 901595 - RNA, 22 nt, Human
auucaaauuaaguuaauucagc

SEQ ID NO: 901596 - RNA, 22 nt, Human
ggcaggagaaaggucucuucuu

SEQ ID NO: 901597 - RNA, 20 nt, Human
augauucaugaugaugucuc

SEQ ID NO: 901598 - RNA, 22 nt, Human
uagcagaguagugccuccagau

SEQ ID NO: 901599 - RNA, 19 nt, Human
cacuguccuagucgaggcc

SEQ ID NO: 901600 - RNA, 22 nt, Human
uguuaacauguguauuguauga

SEQ ID NO: 901601 - RNA, 22 nt, Human
uguuugugagaugugagguacg

SEQ ID NO: 901602 - RNA, 22 nt, Human
uacagagaugccgaagagugaa

SEQ ID NO: 901603 - RNA, 22 nt, Human
ucugugcugccauccuguggcc

SEQ ID NO: 901604 - RNA, 22 nt, Human
ggggaugagacuagagcuaaag

SEQ ID NO: 901605 - RNA, 22 nt, Human
agcucuggagccggaggauuuc

SEQ ID NO: 901606 - RNA, 22 nt, Human
augagacacaugugacuucuuu

SEQ ID NO: 901607 - RNA, 22 nt, Human
uucauguaggcugcaaugcaca

SEQ ID NO: 901608 - RNA, 22 nt, Human
cugcugggcuccucaugugacu

SEQ ID NO: 901609 - RNA, 22 nt, Human
gagggacagcuaaagagaaauu

SEQ ID NO: 901610 - RNA, 22 nt, Human
aucuagaaaguguugaagauca

SEQ ID NO: 901611 - RNA, 22 nt, Human
ugccaggcccagcuccagagcu

SEQ ID NO: 901612 - RNA, 22 nt, Human
agagcagauuucaaauauuggc

SEQ ID NO: 901613 - RNA, 22 nt, Human
acacagauuuuacauguuaugc

SEQ ID NO: 901614 - RNA, 23 nt, Human
uggacaguaggguagacagugcc

SEQ ID NO: 901615 - RNA, 22 nt, Human
uccaaaggaagaggcugucagu

SEQ ID NO: 901616 - RNA, 21 nt, Human
acuuugggaggugugaggggc

SEQ ID NO: 901617 - RNA, 23 nt, Human
agcaggaaaccgagggugauguu

SEQ ID NO: 901618 - RNA, 22 nt, Human
agaauaaaauagucugaagaug

SEQ ID NO: 901619 - RNA, 22 nt, Human
acaucagagggcucacaugauc

SEQ ID NO: 901620 - RNA, 22 nt, Human
agggaaaguaagcauuucauua

SEQ ID NO: 901621 - RNA, 22 nt, Human
guguccaguuuuuucucugcug

SEQ ID NO: 901622 - RNA, 22 nt, Human
cagggcuagggagcccuccugg

SEQ ID NO: 901623 - RNA, 22 nt, Human
uccugauggccucuggcuccag

SEQ ID NO: 901624 - RNA, 22 nt, Human
ggcugagcuuuucaugaugguu

SEQ ID NO: 901625 - RNA, 21 nt, Human
uccugggaagcacuggggugg

SEQ ID NO: 901626 - RNA, 22 nt, Human
ccagcuccucuucccaguguca

SEQ ID NO: 901627 - RNA, 22 nt, Human
uucaaugccuagaacuuagcau

SEQ ID NO: 901628 - RNA, 22 nt, Human
auccagcacuuguucaugugaa

SEQ ID NO: 901629 - RNA, 22 nt, Human
augauuuccaguuguugcuaag

SEQ ID NO: 901630 - RNA, 22 nt, Human
ucccugcuugcucucagcccuu

SEQ ID NO: 901631 - RNA, 22 nt, Human
guaaaacugcagaacuuggagg

SEQ ID NO: 901632 - RNA, 22 nt, Human
gauguguuuccaggauuuguuu

SEQ ID NO: 901633 - RNA, 22 nt, Human
ccuccuggggugaaggauggga

SEQ ID NO: 901634 - RNA, 22 nt, Human
auuguaucccccagguguuuaa

SEQ ID NO: 901635 - RNA, 22 nt, Human
agguacaggagguuggggcuac

SEQ ID NO: 901636 - RNA, 22 nt, Human
gugccagaggcagugaggaguu

SEQ ID NO: 901637 - RNA, 22 nt, Human
agcuggcauugaagaaugguua

SEQ ID NO: 901638 - RNA, 22 nt, Human
accuccagcuuuuuagagacau

SEQ ID NO: 901639 - RNA, 22 nt, Human
ggccccagggaagaaggugguc

SEQ ID NO: 901640 - RNA, 22 nt, Human
ugcuuuauaacuuaguuuaugg

SEQ ID NO: 901641 - RNA, 22 nt, Human
ucagugccaugggcagacaggc

SEQ ID NO: 901642 - RNA, 22 nt, Human
ggagucaccaaguaggagucuu

SEQ ID NO: 901643 - RNA, 22 nt, Human
gaagccagccuugucugccucu

SEQ ID NO: 901644 - RNA, 22 nt, Human
ggcagcaguccauggcccaagg

SEQ ID NO: 901645 - RNA, 22 nt, Human
ugccugucagggggagugggaa

SEQ ID NO: 901646 - RNA, 22 nt, Human
uauauuuuagacacccucacgc

SEQ ID NO: 901647 - RNA, 22 nt, Human
ugagccagcaggccuccagugg

SEQ ID NO: 901648 - RNA, 22 nt, Human
cccuggagcugcuugcauguug

SEQ ID NO: 901649 - RNA, 22 nt, Human
cugugacuagaccugcaggaga

SEQ ID NO: 901650 - RNA, 22 nt, Human
uuugaaacucugaacauguuuc

SEQ ID NO: 901651 - RNA, 22 nt, Human
acaaugaacgcuuuuuaacugu

SEQ ID NO: 901652 - RNA, 22 nt, Human
ccagagcugaugggcccagggu

SEQ ID NO: 901653 - RNA, 22 nt, Human
auguuuuauguuccacucaagg

SEQ ID NO: 901654 - RNA, 22 nt, Human
acagggccauuaucuguucuag

SEQ ID NO: 901655 - RNA, 22 nt, Human
caucacauuuaauuaaaauguc

SEQ ID NO: 901656 - RNA, 22 nt, Human
gcugugcccagcuccagcucug

SEQ ID NO: 901657 - RNA, 22 nt, Human
ucuucugaugccaguaaccaug

SEQ ID NO: 901658 - RNA, 22 nt, Human
ucacagaacaagccugguggag

SEQ ID NO: 901659 - RNA, 22 nt, Human
aaaaguuagcuauuaguaggug

SEQ ID NO: 901660 - RNA, 22 nt, Human
cccaggaguuagagguuguggu

SEQ ID NO: 901661 - RNA, 22 nt, Human
agcagcaaagccaggggauggg

SEQ ID NO: 901662 - RNA, 22 nt, Human
auucaguguaucaaugaaugcu

SEQ ID NO: 901663 - RNA, 22 nt, Human
agacgcgcagaaggaagcggcc

SEQ ID NO: 901664 - RNA, 22 nt, Human
uuugauauccuauacaaguaaa

SEQ ID NO: 901665 - RNA, 22 nt, Human
gagcagcagguggcugugaugg

SEQ ID NO: 901666 - RNA, 22 nt, Human
uccuuaaaugugaucuagauuu

SEQ ID NO: 901667 - RNA, 22 nt, Human
agaccagggucccacagagucu

SEQ ID NO: 901668 - RNA, 20 nt, Human
uacucacaaaugguuuagca

SEQ ID NO: 901669 - RNA, 22 nt, Human
uggagcagaguucagcggggag

SEQ ID NO: 901670 - RNA, 22 nt, Human
cugagagcagggacuugagcca

SEQ ID NO: 901671 - RNA, 22 nt, Human
gaguccaguucuuuccagcagu

SEQ ID NO: 901672 - RNA, 22 nt, Human
cucuccagggguagaugccuuc

SEQ ID NO: 901673 - RNA, 22 nt, Human
agucacagggggccccugcaac

SEQ ID NO: 901674 - RNA, 22 nt, Human
ggaggccaaggagggcggauca

SEQ ID NO: 901675 - RNA, 22 nt, Human
cucacagugaugucuuaugaca

SEQ ID NO: 901676 - RNA, 22 nt, Human
ugucuuacaugagucaccccaa

SEQ ID NO: 901677 - RNA, 22 nt, Human
gaacuuuaucaaaaguuguuua

SEQ ID NO: 901678 - RNA, 22 nt, Human
gagugcugcuugggauagugag

SEQ ID NO: 901679 - RNA, 22 nt, Human
uggcccugacuuggaggccuga

SEQ ID NO: 901680 - RNA, 22 nt, Human
cagcccagcagucuuagccugc

SEQ ID NO: 901681 - RNA, 22 nt, Human
augaaugcaauauuuuaugaca

SEQ ID NO: 901682 - RNA, 21 nt, Human
ggucuucaaagcuuuuacgau

SEQ ID NO: 901683 - RNA, 22 nt, Human
ugugccugacuaggugaaucaa

SEQ ID NO: 901684 - RNA, 20 nt, Human
cuccugugccucucugggcc

SEQ ID NO: 901685 - RNA, 22 nt, Human
auagcagaaaccaagcuucuuc

SEQ ID NO: 901686 - RNA, 22 nt, Human
aguguuauuuauuguuucauaa

SEQ ID NO: 901687 - RNA, 22 nt, Human
guaaucucagcuacuugggagg

SEQ ID NO: 901688 - RNA, 22 nt, Human
agcugccugcugcacucggugc

SEQ ID NO: 901689 - RNA, 22 nt, Human
cagacccugggccacagaggag

SEQ ID NO: 901690 - RNA, 22 nt, Human
uucaaaugauggcaguccuggc

SEQ ID NO: 901691 - RNA, 22 nt, Human
caggaacaggcugaugggcagg

SEQ ID NO: 901692 - RNA, 22 nt, Human
gcacacaguauaugcucauuaa

SEQ ID NO: 901693 - RNA, 22 nt, Human
agccagcuguacugccugcuca

SEQ ID NO: 901694 - RNA, 22 nt, Human
gcacugggcuccaggaaggagg

SEQ ID NO: 901695 - RNA, 22 nt, Human
uuuauugaguaucuacuaugug

SEQ ID NO: 901696 - RNA, 22 nt, Human
ccucacagccucaugcccagcc

SEQ ID NO: 901697 - RNA, 22 nt, Human
ccuucuggaagcucuaagggag

SEQ ID NO: 901698 - RNA, 23 nt, Human
gggugggccaaauuagguagccu

SEQ ID NO: 901699 - RNA, 22 nt, Human
uuuuuugcacacucugcuaaau

SEQ ID NO: 901700 - RNA, 22 nt, Human
auguguauccaucugucuauuu

SEQ ID NO: 901701 - RNA, 22 nt, Human
gucugggauugggguaaagaag

SEQ ID NO: 901702 - RNA, 22 nt, Human
ucuucagcucugaggcucuggc

SEQ ID NO: 901703 - RNA, 22 nt, Human
gacaguaagagugucuggguuc

SEQ ID NO: 901704 - RNA, 20 nt, Human
aggcuccuguaccugaggaa

SEQ ID NO: 901705 - RNA, 22 nt, Human
gaagauuucugaugaguuacuu

SEQ ID NO: 901706 - RNA, 22 nt, Human
aauucauacucuauauugcuuu

SEQ ID NO: 901707 - RNA, 22 nt, Human
aggcugugagaaguccuucagu

SEQ ID NO: 901708 - RNA, 22 nt, Human
ucugagaagcgugucucuguuu

SEQ ID NO: 901709 - RNA, 22 nt, Human
ggauacaagguguucuaucacu

SEQ ID NO: 901710 - RNA, 20 nt, Human
guggcaggcagugaaggagc

SEQ ID NO: 901711 - RNA, 22 nt, Human
cugagccaugagccugcgccca

SEQ ID NO: 901712 - RNA, 22 nt, Human
gcaaguaggaaguguccuccuu

SEQ ID NO: 901713 - RNA, 21 nt, Human
gcuggagagccaggcaggggc

SEQ ID NO: 901714 - RNA, 22 nt, Human
cuucuuuguucuguugucucac

SEQ ID NO: 901715 - RNA, 22 nt, Human
uuacacuuuggcaagcuauuaa

SEQ ID NO: 901716 - RNA, 22 nt, Human
ggaagccaguugcuuggugugg

SEQ ID NO: 901717 - RNA, 22 nt, Human
uuucuagucucgaucucuuaau

SEQ ID NO: 901718 - RNA, 22 nt, Human
ucaggcugaccagguuuugcuc

SEQ ID NO: 901719 - RNA, 22 nt, Human
cacaugugcaguuacaugaauu

SEQ ID NO: 901720 - RNA, 22 nt, Human
uccucagggcggccuccgucuu

SEQ ID NO: 901721 - RNA, 22 nt, Human
uuguacacaauucuuaacauac

SEQ ID NO: 901722 - RNA, 22 nt, Human
aucuagaagccugagccaagau

SEQ ID NO: 901723 - RNA, 22 nt, Human
acagugcuaaugaugccaagau

SEQ ID NO: 901724 - RNA, 22 nt, Human
gcacugguuacccugaguggcu

SEQ ID NO: 901725 - RNA, 22 nt, Human
agcuucuugggcuuuacacaaa

SEQ ID NO: 901726 - RNA, 22 nt, Human
ggcagcaucucauaucuucagg

SEQ ID NO: 901727 - RNA, 22 nt, Human
uuuaauuuuccucuuccuggag

SEQ ID NO: 901728 - RNA, 23 nt, Human
agcaucuggcuuccccuggaugg

SEQ ID NO: 901729 - RNA, 22 nt, Human
uggugugaggcgggaguguagu

SEQ ID NO: 901730 - RNA, 22 nt, Human
gugcugagcugcagaugcgcuc

SEQ ID NO: 901731 - RNA, 22 nt, Human
uagcuguggccuugcuggucug

SEQ ID NO: 901732 - RNA, 22 nt, Human
cuggcagggcagggguuugugc

SEQ ID NO: 901733 - RNA, 22 nt, Human
ccucccacauugaggacaugcu

SEQ ID NO: 901734 - RNA, 22 nt, Human
uuugauaauacacaagagaaag

SEQ ID NO: 901735 - RNA, 22 nt, Human
cagaggguugaugugaggcuua

SEQ ID NO: 901736 - RNA, 22 nt, Human
aggcuucaggaaauauacauuu

SEQ ID NO: 901737 - RNA, 22 nt, Human
ugagugccuaccaagugcugga

SEQ ID NO: 901738 - RNA, 22 nt, Human
gcuauuuauuaaaauagugaag

SEQ ID NO: 901739 - RNA, 22 nt, Human
ugugggcagcuggagcuguuca

SEQ ID NO: 901740 - RNA, 22 nt, Human
cuuauguacacacauauauugu

SEQ ID NO: 901741 - RNA, 22 nt, Human
uguagguaaaagcaucuagugu

SEQ ID NO: 901742 - RNA, 22 nt, Human
aggggccucgcaggaccgcucc

SEQ ID NO: 901743 - RNA, 22 nt, Human
aggggaaaugccuuggugguac

SEQ ID NO: 901744 - RNA, 22 nt, Human
gacagggaggagcagagcuucu

SEQ ID NO: 901745 - RNA, 22 nt, Human
gacuaggcucucauagagguag

SEQ ID NO: 901746 - RNA, 22 nt, Human
guccaguguguuuaucuuggau

SEQ ID NO: 901747 - RNA, 22 nt, Human
uccugucugucuuuggucccuu

SEQ ID NO: 901748 - RNA, 17 nt, Human
uggcacagaggugcuau

SEQ ID NO: 901749 - RNA, 22 nt, Human
ccacugaggggucaugguggga

SEQ ID NO: 901750 - RNA, 22 nt, Human
uuccuguccgcaauggccuggg

SEQ ID NO: 901751 - RNA, 22 nt, Human
uguguccaucugacaggagagg

SEQ ID NO: 901752 - RNA, 22 nt, Human
ugaggcagaguaagauacauga

SEQ ID NO: 901753 - RNA, 22 nt, Human
agcagccagaaauccagaggug

SEQ ID NO: 901754 - RNA, 22 nt, Human
cagaaucugagucgugauugua

SEQ ID NO: 901755 - RNA, 22 nt, Human
aagauacauuaugucucucuga

SEQ ID NO: 901756 - RNA, 22 nt, Human
uagacauuugaaugugaaauga

SEQ ID NO: 901757 - RNA, 22 nt, Human
ccugggcuuacgaccucugacu

SEQ ID NO: 901758 - RNA, 22 nt, Human
caaagugcuggaauuauagggg

SEQ ID NO: 901759 - RNA, 22 nt, Human
agugaaauuccuggucuuuguu

SEQ ID NO: 901760 - RNA, 22 nt, Human
ccuggagcacauggcaggaggc

SEQ ID NO: 901761 - RNA, 22 nt, Human
ccuggccuuaagggcagggagc

SEQ ID NO: 901762 - RNA, 22 nt, Human
ucucauaaggucagauuucaca

SEQ ID NO: 901763 - RNA, 22 nt, Human
ucccucagauuggcaauuagau

SEQ ID NO: 901764 - RNA, 22 nt, Human
caaugcaaugcaaugcaaugca

SEQ ID NO: 901765 - RNA, 22 nt, Human
cuggucaggggauggggcucag

SEQ ID NO: 901766 - RNA, 22 nt, Human
ucucugggaauuuuuuggacau

SEQ ID NO: 901767 - RNA, 22 nt, Human
augccaggaacaaacaguggug

SEQ ID NO: 901768 - RNA, 22 nt, Human
cacaccauaugauuccauuuag

SEQ ID NO: 901769 - RNA, 22 nt, Human
cagugcuggaggcuggagggaa

SEQ ID NO: 901770 - RNA, 22 nt, Human
uauuauuaaauggcagaauuuu

SEQ ID NO: 901771 - RNA, 22 nt, Human
agcagcuagaauagugccuggu

SEQ ID NO: 901772 - RNA, 22 nt, Human
gaaaagggcaagagagagggca

SEQ ID NO: 901773 - RNA, 22 nt, Human
cagaggagaauugcgggaucau

SEQ ID NO: 901774 - RNA, 22 nt, Human
augaaacaguguguauagcaaa

SEQ ID NO: 901775 - RNA, 22 nt, Human
uagaacucuggucuucucaucc

SEQ ID NO: 901776 - RNA, 22 nt, Human
aggagccugagucacagugccu

SEQ ID NO: 901777 - RNA, 22 nt, Human
cuggcuuuccuugucugcaucc

SEQ ID NO: 901778 - RNA, 21 nt, Human
gcagggacaaagcuucaggag

SEQ ID NO: 901779 - RNA, 22 nt, Human
gaaaguaacauuucuugaauua

SEQ ID NO: 901780 - RNA, 22 nt, Human
ucaggaaggcgccccaucagga

SEQ ID NO: 901781 - RNA, 22 nt, Human
ugucugaugauagugucucucc

SEQ ID NO: 901782 - RNA, 22 nt, Human
uaaacagagaugccugggucug

SEQ ID NO: 901783 - RNA, 22 nt, Human
ccucccaccauuuagagagagc

SEQ ID NO: 901784 - RNA, 22 nt, Human
uugcaacacaaaguuugauucc

SEQ ID NO: 901785 - RNA, 22 nt, Human
gucucccaauccgggacagccu

SEQ ID NO: 901786 - RNA, 20 nt, Human
gagcagcuguuugcauugca

SEQ ID NO: 901787 - RNA, 22 nt, Human
accagccugucugagucguggg

SEQ ID NO: 901788 - RNA, 22 nt, Human
gagggcagagacagugauucac

SEQ ID NO: 901789 - RNA, 22 nt, Human
gacucugggcugagccagggcc

SEQ ID NO: 901790 - RNA, 22 nt, Human
uaguggggaaggaggacaagaa

SEQ ID NO: 901791 - RNA, 22 nt, Human
gcugcaggaugaggcucugcuc

SEQ ID NO: 901792 - RNA, 22 nt, Human
ucaggaaagcugcggucaccug

SEQ ID NO: 901793 - RNA, 22 nt, Human
uagauaggugauuaggaaaagc

SEQ ID NO: 901794 - RNA, 22 nt, Human
ccaggaaggcaggccuccccgc

SEQ ID NO: 901795 - RNA, 22 nt, Human
ugucuccugggucccuuccacc

SEQ ID NO: 901796 - RNA, 22 nt, Human
cauaauuucccaagagauugaa

SEQ ID NO: 901797 - RNA, 22 nt, Human
agcaaugaccagugaucuugua

SEQ ID NO: 901798 - RNA, 22 nt, Human
gguaaaaaucacaaauacuuua

SEQ ID NO: 901799 - RNA, 22 nt, Human
ucugacccugagucuauuuucu

SEQ ID NO: 901800 - RNA, 22 nt, Human
caggccucaggggcucaggcug

SEQ ID NO: 901801 - RNA, 22 nt, Human
ggcuggucaggaaacuaggcuc

SEQ ID NO: 901802 - RNA, 20 nt, Human
ggcugugcccuuccguggcc

SEQ ID NO: 901803 - RNA, 22 nt, Human
aaaggauuaaauaaaugugcug

SEQ ID NO: 901804 - RNA, 22 nt, Human
accauagacuggaggaucuccu

SEQ ID NO: 901805 - RNA, 22 nt, Human
acugggagaaacugacaccuua

SEQ ID NO: 901806 - RNA, 22 nt, Human
acaaggcugaacagugaagccg

SEQ ID NO: 901807 - RNA, 23 nt, Human
ggccucagcgcacagaaacugcu

SEQ ID NO: 901808 - RNA, 22 nt, Human
caugagugucaucucagcagcu

SEQ ID NO: 901809 - RNA, 22 nt, Human
agugaucagcuagaucuacuug

SEQ ID NO: 901810 - RNA, 22 nt, Human
uucauggcgcuguucucucccu

SEQ ID NO: 901811 - RNA, 22 nt, Human
auaaacaguaaaugugagcagu

SEQ ID NO: 901812 - RNA, 22 nt, Human
augcauaugcauggacacucag

SEQ ID NO: 901813 - RNA, 22 nt, Human
gagaaaaugucagacuuggucg

SEQ ID NO: 901814 - RNA, 22 nt, Human
agcuggugaaccugaggcacag

SEQ ID NO: 901815 - RNA, 22 nt, Human
caaauguuaaauguguuaagac

SEQ ID NO: 901816 - RNA, 22 nt, Human
acauugauauuucaaauacagg

SEQ ID NO: 901817 - RNA, 22 nt, Human
cacuggcccauuccugucuggc

SEQ ID NO: 901818 - RNA, 21 nt, Human
ugggccugauucccaggguca

SEQ ID NO: 901819 - RNA, 22 nt, Human
aucaaugcuugccaaauggaag

SEQ ID NO: 901820 - RNA, 22 nt, Human
aggcuccauucaugugaaggca

SEQ ID NO: 901821 - RNA, 22 nt, Human
acacauuauaggcaaucaaaag

SEQ ID NO: 901822 - RNA, 22 nt, Human
ccuggauagcuacuggccaggc

SEQ ID NO: 901823 - RNA, 22 nt, Human
cagcauuucaggaggcugaggu

SEQ ID NO: 901824 - RNA, 22 nt, Human
ucugagaagcaccuucuggaca

SEQ ID NO: 901825 - RNA, 22 nt, Human
uggcagugggaagcuggaaguc

SEQ ID NO: 901826 - RNA, 22 nt, Human
gcagugauuuugcucagauaaa

SEQ ID NO: 901827 - RNA, 22 nt, Human
uagcacaguauuucucaacugg

SEQ ID NO: 901828 - RNA, 23 nt, Human
aggagccaugaguuggauauguu

SEQ ID NO: 901829 - RNA, 22 nt, Human
agagguauuagguaauucagua

SEQ ID NO: 901830 - RNA, 22 nt, Human
augaggccuuucuucacccuuu

SEQ ID NO: 901831 - RNA, 22 nt, Human
aaaggcuuagacacagaacugu

SEQ ID NO: 901832 - RNA, 22 nt, Human
aauaggaagcaccaaauucucc

SEQ ID NO: 901833 - RNA, 22 nt, Human
ugaaacauuaggaaaucauuau

SEQ ID NO: 901834 - RNA, 20 nt, Human
guuuccuauuuaccuccuca

SEQ ID NO: 901835 - RNA, 22 nt, Human
ugcacacagaugguacaugcau

SEQ ID NO: 901836 - RNA, 22 nt, Human
uuucuuuugcugagaggggcac

SEQ ID NO: 901837 - RNA, 22 nt, Human
uugggcuccuguugauccuguc

SEQ ID NO: 901838 - RNA, 22 nt, Human
uccagcuuugagauuuuaugga

SEQ ID NO: 901839 - RNA, 22 nt, Human
uuuuguuggcuuaagaaauaca

SEQ ID NO: 901840 - RNA, 22 nt, Human
acccagagucagacagccaugg

SEQ ID NO: 901841 - RNA, 22 nt, Human
ugcuggcauggucuuggugaca

SEQ ID NO: 901842 - RNA, 22 nt, Human
gcugcaggcucugcaggaauug

SEQ ID NO: 901843 - RNA, 22 nt, Human
ucacagaagagauauugacaga

SEQ ID NO: 901844 - RNA, 22 nt, Human
gaugccugcauuucaggagagu

SEQ ID NO: 901845 - RNA, 22 nt, Human
caggcauggaaaagcccagagg

SEQ ID NO: 901846 - RNA, 22 nt, Human
ccucagcugcuucccuggagcc

SEQ ID NO: 901847 - RNA, 22 nt, Human
ggggauggauuccgggucccug

SEQ ID NO: 901848 - RNA, 22 nt, Human
ugggggugacuaucucgggaau

SEQ ID NO: 901849 - RNA, 22 nt, Human
uuuguguguauauguauauaga

SEQ ID NO: 901850 - RNA, 22 nt, Human
uuuccugugacuaaucuggaca

SEQ ID NO: 901851 - RNA, 22 nt, Human
aaagguaguacuucuagaaggg

SEQ ID NO: 901852 - RNA, 22 nt, Human
aaacaaacaauuaguugugugg

SEQ ID NO: 901853 - RNA, 22 nt, Human
ucugccaucuuaauucucuuuu

SEQ ID NO: 901854 - RNA, 22 nt, Human
gcacagggcugccaggcggcuu

SEQ ID NO: 901855 - RNA, 22 nt, Human
guucuucauuacaagggaacca

SEQ ID NO: 901856 - RNA, 22 nt, Human
caucaaaguugguauauuugca

SEQ ID NO: 901857 - RNA, 22 nt, Human
agagccuggaccugagcuacaa

SEQ ID NO: 901858 - RNA, 22 nt, Human
cuucacagucuuuauuuccucc

SEQ ID NO: 901859 - RNA, 22 nt, Human
auuuuucucuuuccacugagau

SEQ ID NO: 901860 - RNA, 22 nt, Human
uauguacauguuaaagggcaaa

SEQ ID NO: 901861 - RNA, 20 nt, Human
aggcucagagcaguaguaca

SEQ ID NO: 901862 - RNA, 22 nt, Human
aaugucuucucuuguugaauuu

SEQ ID NO: 901863 - RNA, 22 nt, Human
acugaagcuuggguggaacuua

SEQ ID NO: 901864 - RNA, 22 nt, Human
uguguuuuggaaggaacaugca

SEQ ID NO: 901865 - RNA, 22 nt, Human
acugguuugucuauugucauuc

SEQ ID NO: 901866 - RNA, 20 nt, Human
caguuuacaacauaaauugu

SEQ ID NO: 901867 - RNA, 22 nt, Human
agcaagaaaaucucuguccaau

SEQ ID NO: 901868 - RNA, 22 nt, Human
auccuucaaggggcugacagcu

SEQ ID NO: 901869 - RNA, 22 nt, Human
ucucagcagccagauccagagc

SEQ ID NO: 901870 - RNA, 22 nt, Human
agcaggguuccaggaguugcag

SEQ ID NO: 901871 - RNA, 22 nt, Human
aaagaccugaaauauaaucuag

SEQ ID NO: 901872 - RNA, 22 nt, Human
ucugugcugagcucugagaugu

SEQ ID NO: 901873 - RNA, 22 nt, Human
uguguucaaucaccaaagguau

SEQ ID NO: 901874 - RNA, 22 nt, Human
guggcucuggcuuuccaggcgg

SEQ ID NO: 901875 - RNA, 22 nt, Human
caaacauugcacuuucugcuau

SEQ ID NO: 901876 - RNA, 22 nt, Human
gguccaucucuugagcccacau

SEQ ID NO: 901877 - RNA, 19 nt, Human
gcugcuggcucuggcugga

SEQ ID NO: 901878 - RNA, 22 nt, Human
aaguacaaucuuucuguaaagg

SEQ ID NO: 901879 - RNA, 22 nt, Human
cagaggccaguggacaagggcc

SEQ ID NO: 901880 - RNA, 22 nt, Human
auuuggaagcauuuccaaagca

SEQ ID NO: 901881 - RNA, 22 nt, Human
uuuacagaagagaaggaugcuu

SEQ ID NO: 901882 - RNA, 22 nt, Human
ggcaacauucuccagauccuuu

SEQ ID NO: 901883 - RNA, 22 nt, Human
cagugggauaugggggcagcau

SEQ ID NO: 901884 - RNA, 22 nt, Human
uggaggugagugugguacagca

SEQ ID NO: 901885 - RNA, 22 nt, Human
uuucaaacuuuacucuugaauc

SEQ ID NO: 901886 - RNA, 22 nt, Human
uuccauaauuaaguggagagaa

SEQ ID NO: 901887 - RNA, 22 nt, Human
gaauacaugauacaugaacugc

SEQ ID NO: 901888 - RNA, 22 nt, Human
uugcagauauuuccgaugcuau

SEQ ID NO: 901889 - RNA, 22 nt, Human
caguuacuguaugucaaagacu

SEQ ID NO: 901890 - RNA, 22 nt, Human
cugaggacauugaugaggcaau

SEQ ID NO: 901891 - RNA, 22 nt, Human
cuuagaagaaugccuaggacag

SEQ ID NO: 901892 - RNA, 23 nt, Human
aggagccaggugcagcccuugug

SEQ ID NO: 901893 - RNA, 22 nt, Human
aacaggcacuaagcaugugggg

SEQ ID NO: 901894 - RNA, 22 nt, Human
uggcagagccuugccaaacucc

SEQ ID NO: 901895 - RNA, 22 nt, Human
gaaguauuacucugaauguauu

SEQ ID NO: 901896 - RNA, 22 nt, Human
auaacagaguugggaagugaaa

SEQ ID NO: 901897 - RNA, 22 nt, Human
aguccugggucuggagaaugga

SEQ ID NO: 901898 - RNA, 22 nt, Human
cugcccugucugcagccuggcu

SEQ ID NO: 901899 - RNA, 22 nt, Human
gcugggcaaugccagagaggag

SEQ ID NO: 901900 - RNA, 22 nt, Human
cugcagcuccuucuggcaugug

SEQ ID NO: 901901 - RNA, 22 nt, Human
uucaggccucuaaagggaaagc

SEQ ID NO: 901902 - RNA, 22 nt, Human
cacagcuaggaggaaagcagag

SEQ ID NO: 901903 - RNA, 22 nt, Human
augcagggagguaagaggugcc

SEQ ID NO: 901904 - RNA, 20 nt, Human
ccacagaggacagggcugug

SEQ ID NO: 901905 - RNA, 22 nt, Human
gcugagagcacauagaaggggc

SEQ ID NO: 901906 - RNA, 22 nt, Human
cagcagcagagauacugguuuc

SEQ ID NO: 901907 - RNA, 22 nt, Human
auacaguaauugcauaggcuuc

SEQ ID NO: 901908 - RNA, 22 nt, Human
augcaaaauuaccauucuguuc

SEQ ID NO: 901909 - RNA, 22 nt, Human
agauaaaguccaaacuguguag

SEQ ID NO: 901910 - RNA, 22 nt, Human
agaagaaagauugaagguuccu

SEQ ID NO: 901911 - RNA, 22 nt, Human
aacugcaagaguaaaugucuag

SEQ ID NO: 901912 - RNA, 19 nt, Human
ugcuggagguugacagggu

SEQ ID NO: 901913 - RNA, 22 nt, Human
uggcuaacaaacaagacauuag

SEQ ID NO: 901914 - RNA, 22 nt, Human
uuaauuaaauucaugagcauug

SEQ ID NO: 901915 - RNA, 22 nt, Human
ugcuucugacuaagcugcauga

SEQ ID NO: 901916 - RNA, 22 nt, Human
cugccaaggcuggggaggacaa

SEQ ID NO: 901917 - RNA, 22 nt, Human
cugccauguuaccugcacaggu

SEQ ID NO: 901918 - RNA, 17 nt, Human
uagagcugguucaggag

SEQ ID NO: 901919 - RNA, 22 nt, Human
auauauaaccuggauaaggcuu

SEQ ID NO: 901920 - RNA, 22 nt, Human
cacauuucuaggaaauuaaaug

SEQ ID NO: 901921 - RNA, 22 nt, Human
ugcagcgguaguucucguggaa

SEQ ID NO: 901922 - RNA, 22 nt, Human
uuucuuaguccuagagugauuu

SEQ ID NO: 901923 - RNA, 22 nt, Human
uuucauucauuauacaguagag

SEQ ID NO: 901924 - RNA, 22 nt, Human
aaagcucuuacuguacuaguga

SEQ ID NO: 901925 - RNA, 22 nt, Human
uacaggguauucaaggguaguu

SEQ ID NO: 901926 - RNA, 22 nt, Human
cuuggucuugggagcagggaca

SEQ ID NO: 901927 - RNA, 22 nt, Human
ggggccaguaggagugauguac

SEQ ID NO: 901928 - RNA, 22 nt, Human
aaagcuguagaaucaucuuaau

SEQ ID NO: 901929 - RNA, 22 nt, Human
gcucaggcccagcggcuggugu

SEQ ID NO: 901930 - RNA, 22 nt, Human
caagcagguccugaaucugguc

SEQ ID NO: 901931 - RNA, 22 nt, Human
guguacauauugagucugcuga

SEQ ID NO: 901932 - RNA, 22 nt, Human
uccuggaucagcgggggcaggc

SEQ ID NO: 901933 - RNA, 22 nt, Human
aaagucuuuauuuuguaucuuu

SEQ ID NO: 901934 - RNA, 22 nt, Human
ccugcugugugacgggauguua

SEQ ID NO: 901935 - RNA, 22 nt, Human
gcauuuuaauaagauucauagg

SEQ ID NO: 901936 - RNA, 23 nt, Human
uggcugagcccacuaucuuggcc

SEQ ID NO: 901937 - RNA, 22 nt, Human
auguggccagucauguaguaac

SEQ ID NO: 901938 - RNA, 22 nt, Human
cagcucuggguaggaggaaucu

SEQ ID NO: 901939 - RNA, 22 nt, Human
ugacauuuuuguacaaagucag

SEQ ID NO: 901940 - RNA, 22 nt, Human
auagaagcaagaacagaaugga

SEQ ID NO: 901941 - RNA, 18 nt, Human
acacagguuauucucucc

SEQ ID NO: 901942 - RNA, 22 nt, Human
agcuaggggaccaagguggccc

SEQ ID NO: 901943 - RNA, 22 nt, Human
uggccccacagggccuuuucag

SEQ ID NO: 901944 - RNA, 20 nt, Human
cagagacccaggcuucagcu

SEQ ID NO: 901945 - RNA, 21 nt, Human
aaucaguguucucaggggcaa

SEQ ID NO: 901946 - RNA, 22 nt, Human
uagcaagaugaugaauuauuca

SEQ ID NO: 901947 - RNA, 22 nt, Human
uucauguccagaggaaguugag

SEQ ID NO: 901948 - RNA, 22 nt, Human
ugguauuucagcuuuuguaucu

SEQ ID NO: 901949 - RNA, 22 nt, Human
gucugaggccugaggcccuggg

SEQ ID NO: 901950 - RNA, 22 nt, Human
gugccugugccaggggugugcu

SEQ ID NO: 901951 - RNA, 19 nt, Human
gccugccuggguuucugag

SEQ ID NO: 901952 - RNA, 22 nt, Human
uuuguauaagaacauucuagca

SEQ ID NO: 901953 - RNA, 22 nt, Human
agauuggguuugcuucugugcc

SEQ ID NO: 901954 - RNA, 22 nt, Human
gcagggaugcugaggcucagug

SEQ ID NO: 901955 - RNA, 22 nt, Human
gauuacacguuuuuaaucacau

SEQ ID NO: 901956 - RNA, 22 nt, Human
ccucacaguuuggcuaacugug

SEQ ID NO: 901957 - RNA, 21 nt, Human
uggccagcugcucgucuccuc

SEQ ID NO: 901958 - RNA, 22 nt, Human
uuucuacuucuccugaaugucu

SEQ ID NO: 901959 - RNA, 22 nt, Human
gaggagaaagcagugauuugug

SEQ ID NO: 901960 - RNA, 20 nt, Human
gcuaggaaggggaaaaagug

SEQ ID NO: 901961 - RNA, 22 nt, Human
uggagggcaucuguggucaggc

SEQ ID NO: 901962 - RNA, 22 nt, Human
gcagccaggcuacagcgggcuu

SEQ ID NO: 901963 - RNA, 22 nt, Human
uaguacaguuccaucaaagcag

SEQ ID NO: 901964 - RNA, 22 nt, Human
cugaaacuccaugagaaauugc

SEQ ID NO: 901965 - RNA, 22 nt, Human
uuucuagaugcggggcuugugc

SEQ ID NO: 901966 - RNA, 22 nt, Human
ucccaaagucaagcugugucuu

SEQ ID NO: 901967 - RNA, 22 nt, Human
auguaacauugaauuauauagu

SEQ ID NO: 901968 - RNA, 22 nt, Human
uaaguaguccugauuuaaccuu

SEQ ID NO: 901969 - RNA, 22 nt, Human
ucagcacuuugaagcagaagga

SEQ ID NO: 901970 - RNA, 22 nt, Human
uucucaggguuugugcaggcuu

SEQ ID NO: 901971 - RNA, 22 nt, Human
ucugcugcagagcugcgggugc

SEQ ID NO: 901972 - RNA, 22 nt, Human
ggaacaguugcgucaugggccu

SEQ ID NO: 901973 - RNA, 22 nt, Human
caacacagguucugcaaaggaa

SEQ ID NO: 901974 - RNA, 22 nt, Human
gcccacaguuaguuugcauggc

SEQ ID NO: 901975 - RNA, 19 nt, Human
cagugcuguucauucagug

SEQ ID NO: 901976 - RNA, 22 nt, Human
aguaaaauuaauggaucagaag

SEQ ID NO: 901977 - RNA, 22 nt, Human
ucagugcuucggcgagcaccua

SEQ ID NO: 901978 - RNA, 22 nt, Human
guucuacuuucugugucuuuga

SEQ ID NO: 901979 - RNA, 21 nt, Human
gaaauacugccuuaggagcug

SEQ ID NO: 901980 - RNA, 22 nt, Human
auacaaaaauuagccgggagua

SEQ ID NO: 901981 - RNA, 22 nt, Human
ucaucuguuaugggaguuuuug

SEQ ID NO: 901982 - RNA, 22 nt, Human
cagcagcuuuugcauucucauu

SEQ ID NO: 901983 - RNA, 22 nt, Human
auggcagaaaggcaugugggcc

SEQ ID NO: 901984 - RNA, 22 nt, Human
gcuucaaagauucacaguuuca

SEQ ID NO: 901985 - RNA, 22 nt, Human
ggcauucaaagaaugguaauua

SEQ ID NO: 901986 - RNA, 17 nt, Human
ggaggcaacagacaggg

SEQ ID NO: 901987 - RNA, 22 nt, Human
ucugcagguagagcucaggaau

SEQ ID NO: 901988 - RNA, 22 nt, Human
aaagcuguuguauggcccuugg

SEQ ID NO: 901989 - RNA, 22 nt, Human
uuugaagaagcugaccuauuuu

SEQ ID NO: 901990 - RNA, 22 nt, Human
uuauagaaggagcauucacuua

SEQ ID NO: 901991 - RNA, 23 nt, Human
cugcuguguuggucucgauggga

SEQ ID NO: 901992 - RNA, 22 nt, Human
ggccuggaagaggacagagaaa

SEQ ID NO: 901993 - RNA, 22 nt, Human
ugcaaacuagcaucaacuagua

SEQ ID NO: 901994 - RNA, 23 nt, Human
cacaacuaaucagaaucucuagg

SEQ ID NO: 901995 - RNA, 22 nt, Human
uaggccacggaaagcagguugc

SEQ ID NO: 901996 - RNA, 22 nt, Human
ggucccaggcugcgggcuggug

SEQ ID NO: 901997 - RNA, 22 nt, Human
ccaggacaagccagagggacag

SEQ ID NO: 901998 - RNA, 19 nt, Human
gucagcaccauggacaggg

SEQ ID NO: 901999 - RNA, 22 nt, Human
agaaauaagagcuuuccuuggg

SEQ ID NO: 902000 - RNA, 22 nt, Human
gacacagaauuuacucccgaua

SEQ ID NO: 902001 - RNA, 22 nt, Human
uccaugguagguuucuuaaaga

SEQ ID NO: 902002 - RNA, 22 nt, Human
cagcccagaacucacgucucca

SEQ ID NO: 902003 - RNA, 22 nt, Human
gcagccaguauccucugagauu

SEQ ID NO: 902004 - RNA, 23 nt, Human
uuugaacauuucuagauuacaua

SEQ ID NO: 902005 - RNA, 22 nt, Human
ucagaguaacuacaguauagac

SEQ ID NO: 902006 - RNA, 22 nt, Human
aagagcugcacauauuuauauc

SEQ ID NO: 902007 - RNA, 22 nt, Human
aagcacaaugaacaucuuagau

SEQ ID NO: 902008 - RNA, 22 nt, Human
uagcagcuuccagagagggcag

SEQ ID NO: 902009 - RNA, 22 nt, Human
cagguccucugagaugggaggu

SEQ ID NO: 902010 - RNA, 22 nt, Human
ugaggcaguauuuuagugacuu

SEQ ID NO: 902011 - RNA, 19 nt, Human
aaaguugagaaacaaugga

SEQ ID NO: 902012 - RNA, 22 nt, Human
uguucucucuggcugccaguac

SEQ ID NO: 902013 - RNA, 22 nt, Human
aguucaaagcugcaguaaugga

SEQ ID NO: 902014 - RNA, 22 nt, Human
ucagccuggugauuccucuguc

SEQ ID NO: 902015 - RNA, 16 nt, Human
agaggccacagacaga

SEQ ID NO: 902016 - RNA, 22 nt, Human
aauucaaauuugaguuugugau

SEQ ID NO: 902017 - RNA, 22 nt, Human
ucuggaaaagcgauaaaccauu

SEQ ID NO: 902018 - RNA, 22 nt, Human
agccccuguccucucugaugac

SEQ ID NO: 902019 - RNA, 22 nt, Human
gugaaaauaaggcugguucuug

SEQ ID NO: 902020 - RNA, 22 nt, Human
agcugcugagccaggcugaugu

SEQ ID NO: 902021 - RNA, 22 nt, Human
guuuuuccugcugacuuggguc

SEQ ID NO: 902022 - RNA, 19 nt, Human
ugugucucuguguagccug

SEQ ID NO: 902023 - RNA, 22 nt, Human
uuucaucuauuugcuuugugaa

SEQ ID NO: 902024 - RNA, 20 nt, Human
cuuccacacaagaagcacag

SEQ ID NO: 902025 - RNA, 20 nt, Human
cuguccauauuugaaaaugc

SEQ ID NO: 902026 - RNA, 22 nt, Human
aaguccuuuaauaucacauagu

SEQ ID NO: 902027 - RNA, 22 nt, Human
gucuauuugggaucaugauaug

SEQ ID NO: 902028 - RNA, 23 nt, Human
uugcaaaaugagucuugagugaa

SEQ ID NO: 902029 - RNA, 22 nt, Human
uggcaaguggcauagaauagcc

SEQ ID NO: 902030 - RNA, 22 nt, Human
augaggcacaucacagccaaug

SEQ ID NO: 902031 - RNA, 22 nt, Human
uuuuguuuguguccacugcagu

SEQ ID NO: 902032 - RNA, 22 nt, Human
agcauaaguugguacagccacu

SEQ ID NO: 902033 - RNA, 22 nt, Human
agacacagauuuuggaaaagau

SEQ ID NO: 902034 - RNA, 22 nt, Human
gcuaggaagcuggggagaaguc

SEQ ID NO: 902035 - RNA, 22 nt, Human
cacaucauagagacucaaucca

SEQ ID NO: 902036 - RNA, 22 nt, Human
agcagcuucuauuuucuugguu

SEQ ID NO: 902037 - RNA, 22 nt, Human
ugaaagcugaggacaggagggu

SEQ ID NO: 902038 - RNA, 22 nt, Human
aaagcucucugaacaccagacc

SEQ ID NO: 902039 - RNA, 22 nt, Human
augcaaagcacacacagaaucc

SEQ ID NO: 902040 - RNA, 22 nt, Human
cauuagauuggugcaaaaauaa

SEQ ID NO: 902041 - RNA, 22 nt, Human
aaguuaguggauaaacagcaaa

SEQ ID NO: 902042 - RNA, 19 nt, Human
aucugagauuauaaacaga

SEQ ID NO: 902043 - RNA, 22 nt, Human
ccagaugucccucucagguuug

SEQ ID NO: 902044 - RNA, 22 nt, Human
agcuucauuccagccacuguga

SEQ ID NO: 902045 - RNA, 22 nt, Human
ggcugggccagggccuguggac

SEQ ID NO: 902046 - RNA, 22 nt, Human
uuauggaagugcaaauugugug

SEQ ID NO: 902047 - RNA, 22 nt, Human
gugugcccgggggaagcaggug

SEQ ID NO: 902048 - RNA, 22 nt, Human
ccuguguggaaggcaggaggcc

SEQ ID NO: 902049 - RNA, 22 nt, Human
uuuguaugggcagaaauuagau

SEQ ID NO: 902050 - RNA, 22 nt, Human
gcaaacauccacugcccuugua

SEQ ID NO: 902051 - RNA, 22 nt, Human
uuacacaacaucuguauuauua

SEQ ID NO: 902052 - RNA, 22 nt, Human
uggaagagaaaggaguggaucu

SEQ ID NO: 902053 - RNA, 22 nt, Human
cagcagguuaacagaggcuggu

SEQ ID NO: 902054 - RNA, 22 nt, Human
cuuuuucugauguuccaugauu

SEQ ID NO: 902055 - RNA, 22 nt, Human
aguggcugcuggaguggagaug

SEQ ID NO: 902056 - RNA, 22 nt, Human
guuccuaaccagcagagaaaca

SEQ ID NO: 902057 - RNA, 19 nt, Human
acauugaauuuucuucuuu

SEQ ID NO: 902058 - RNA, 22 nt, Human
ugcuaugcuuucccccaauguu

SEQ ID NO: 902059 - RNA, 22 nt, Human
agaagcugacagaugcagcagg

SEQ ID NO: 902060 - RNA, 22 nt, Human
uuuucaugugaugugacauuuc

SEQ ID NO: 902061 - RNA, 22 nt, Human
gaaaucaaggcuacauucaggu

SEQ ID NO: 902062 - RNA, 22 nt, Human
ccaagggcugcugaggugucca

SEQ ID NO: 902063 - RNA, 20 nt, Human
auguccuguugcugccccag

SEQ ID NO: 902064 - RNA, 22 nt, Human
aauaacuucaguucuuacauua

SEQ ID NO: 902065 - RNA, 22 nt, Human
aagcacacuuggcucuguguac

SEQ ID NO: 902066 - RNA, 22 nt, Human
cugccugugccaaugcuccuuu

SEQ ID NO: 902067 - RNA, 22 nt, Human
aucaacaugucauaaagugaaa

SEQ ID NO: 902068 - RNA, 22 nt, Human
aguaauaauagcuguaaagugc

SEQ ID NO: 902069 - RNA, 22 nt, Human
ucuuuggcuugucuccucaguu

SEQ ID NO: 902070 - RNA, 22 nt, Human
ugggaggaucucuugaggccag

SEQ ID NO: 902071 - RNA, 22 nt, Human
acaaagaaggaauuggucuuua

SEQ ID NO: 902072 - RNA, 22 nt, Human
ucauggaaacagcaaugcuaau

SEQ ID NO: 902073 - RNA, 21 nt, Human
caaguucagaagguugggcug

SEQ ID NO: 902074 - RNA, 22 nt, Human
gggggaagaaagaacauggcau

SEQ ID NO: 902075 - RNA, 22 nt, Human
cagugggaaugaaguggaggcc

SEQ ID NO: 902076 - RNA, 22 nt, Human
uaagcaguuuuucuuguauuaa

SEQ ID NO: 902077 - RNA, 22 nt, Human
gcauguuuugcaacaagugacc

SEQ ID NO: 902078 - RNA, 22 nt, Human
auguccuuuguaucccuaggca

SEQ ID NO: 902079 - RNA, 20 nt, Human
ucagagaagggacugagauu

SEQ ID NO: 902080 - RNA, 22 nt, Human
ucauugagcuguauggacacaa

SEQ ID NO: 902081 - RNA, 22 nt, Human
cauguugauuagagagcuuaga

SEQ ID NO: 902082 - RNA, 22 nt, Human
gcugugagggcuucugaggcau

SEQ ID NO: 902083 - RNA, 22 nt, Human
agaggcucuggugcagcaugca

SEQ ID NO: 902084 - RNA, 22 nt, Human
gccaggcaaauuaaggaaugca

SEQ ID NO: 902085 - RNA, 22 nt, Human
gcagcacauauaaacaaagaga

SEQ ID NO: 902086 - RNA, 22 nt, Human
aaggcuccgugacuggggcuga

SEQ ID NO: 902087 - RNA, 22 nt, Human
ggaggccaaggcagguggauca

SEQ ID NO: 902088 - RNA, 22 nt, Human
ggcacagcacaguggacccagg

SEQ ID NO: 902089 - RNA, 22 nt, Human
ccugccuucccagcuuggcuuu

SEQ ID NO: 902090 - RNA, 22 nt, Human
ugagggaggcccuuugagcaga

SEQ ID NO: 902091 - RNA, 22 nt, Human
gcaaguuggagacucaugagaa

SEQ ID NO: 902092 - RNA, 22 nt, Human
cagcauggcuugaguguuuccu

SEQ ID NO: 902093 - RNA, 22 nt, Human
ggcagaguggagugcggccucc

SEQ ID NO: 902094 - RNA, 22 nt, Human
ggagucaggagcaggcugggcu

SEQ ID NO: 902095 - RNA, 22 nt, Human
cuggccaggagguaaccagaug

SEQ ID NO: 902096 - RNA, 22 nt, Human
ugccugucuuggaguccuggcc

SEQ ID NO: 902097 - RNA, 22 nt, Human
caugcacagagcuuggucauug

SEQ ID NO: 902098 - RNA, 22 nt, Human
gggaaggacauucugggcucag

SEQ ID NO: 902099 - RNA, 22 nt, Human
aagcauagagacacaaauuugg

SEQ ID NO: 902100 - RNA, 21 nt, Human
agcuggaaucuggcugugcuu

SEQ ID NO: 902101 - RNA, 22 nt, Human
cucagggacuuggauccuggcc

SEQ ID NO: 902102 - RNA, 22 nt, Human
augccuuuggagaauccaacau

SEQ ID NO: 902103 - RNA, 22 nt, Human
caucugcugcuacaaaaagcuu

SEQ ID NO: 902104 - RNA, 22 nt, Human
agagaugacugauggcugauua

SEQ ID NO: 902105 - RNA, 21 nt, Human
aggcugcaugcaugagugugg

SEQ ID NO: 902106 - RNA, 22 nt, Human
gggaggcucagugguguccucu

SEQ ID NO: 902107 - RNA, 22 nt, Human
auguacacacacaucuuugcgu

SEQ ID NO: 902108 - RNA, 22 nt, Human
augaaaacggaccagagcuauu

SEQ ID NO: 902109 - RNA, 22 nt, Human
cucagcccuccccggggaauaa

SEQ ID NO: 902110 - RNA, 22 nt, Human
cagagcuggagggaacccuggc

SEQ ID NO: 902111 - RNA, 22 nt, Human
ugcagcaggugacaacgagugg

SEQ ID NO: 902112 - RNA, 20 nt, Human
cuguggcaucugucauggug

SEQ ID NO: 902113 - RNA, 22 nt, Human
cauggguaagacucuuuugccc

SEQ ID NO: 902114 - RNA, 22 nt, Human
uucuuucuguccauaaugagac

SEQ ID NO: 902115 - RNA, 22 nt, Human
uucucacacuuuccacugaggu

SEQ ID NO: 902116 - RNA, 22 nt, Human
gcagguggaagcagcagacuca

SEQ ID NO: 902117 - RNA, 22 nt, Human
uuauuucuugucuauguagcca

SEQ ID NO: 902118 - RNA, 22 nt, Human
uaaaaggauuagcaggaugggc

SEQ ID NO: 902119 - RNA, 22 nt, Human
gaaugagacuaugcgaguguga

SEQ ID NO: 902120 - RNA, 22 nt, Human
ucucugggguagggcccaggac

SEQ ID NO: 902121 - RNA, 22 nt, Human
caagaaucuugcagcuuagacu

SEQ ID NO: 902122 - RNA, 22 nt, Human
uuugggaaauaaaccuagagga

SEQ ID NO: 902123 - RNA, 22 nt, Human
auguagaagugggcauuauaga

SEQ ID NO: 902124 - RNA, 22 nt, Human
guccugggcccaggggcugccu

SEQ ID NO: 902125 - RNA, 22 nt, Human
aaaugcucucuaauguaauaca

SEQ ID NO: 902126 - RNA, 22 nt, Human
uucucuuucugcugggcuggaa

SEQ ID NO: 902127 - RNA, 22 nt, Human
ugcccuguggggauuuccagcc

SEQ ID NO: 902128 - RNA, 22 nt, Human
aaggcuguuguuucacaacaaa

SEQ ID NO: 902129 - RNA, 22 nt, Human
uacacauuacauaauacuaucu

SEQ ID NO: 902130 - RNA, 23 nt, Human
ugggcagcuucugcaugcccacc

SEQ ID NO: 902131 - RNA, 22 nt, Human
uuccaggagccacacaggggcg

SEQ ID NO: 902132 - RNA, 22 nt, Human
aggaaggggagaaguuaaagcu

SEQ ID NO: 902133 - RNA, 22 nt, Human
ccaggugucaugcgugugaccc

SEQ ID NO: 902134 - RNA, 19 nt, Human
uuggcagcugagauccugc

SEQ ID NO: 902135 - RNA, 22 nt, Human
caggaaggaaaggguguggaga

SEQ ID NO: 902136 - RNA, 22 nt, Human
gaucaggacauagcuauaggcu

SEQ ID NO: 902137 - RNA, 22 nt, Human
ggccaggcugcccugggagcag

SEQ ID NO: 902138 - RNA, 22 nt, Human
uaaacauguugacaucuuaccu

SEQ ID NO: 902139 - RNA, 22 nt, Human
acauuguuugagaauacagaug

SEQ ID NO: 902140 - RNA, 22 nt, Human
gcagcagcugacagugggugcc

SEQ ID NO: 902141 - RNA, 22 nt, Human
acuuuaugauacagggaagggu

SEQ ID NO: 902142 - RNA, 22 nt, Human
uccacuuuucuuccaucaucau

SEQ ID NO: 902143 - RNA, 22 nt, Human
ucacauguguuuucucaccaac

SEQ ID NO: 902144 - RNA, 22 nt, Human
uggcugugaacaaagagaauaa

SEQ ID NO: 902145 - RNA, 22 nt, Human
ucagggcccuggcaggaaacag

SEQ ID NO: 902146 - RNA, 22 nt, Human
aaugcaagaucaaaucuaacac

SEQ ID NO: 902147 - RNA, 22 nt, Human
ccucuggccaucccccauuaag

SEQ ID NO: 902148 - RNA, 19 nt, Human
gcccucaugauauucagau

SEQ ID NO: 902149 - RNA, 22 nt, Human
guucuuuugguagagugugcau

SEQ ID NO: 902150 - RNA, 22 nt, Human
agaaauguggaucguuuuaaaa

SEQ ID NO: 902151 - RNA, 22 nt, Human
aaaugucuuucuucugcuacgu

SEQ ID NO: 902152 - RNA, 22 nt, Human
ugucucugugagaucugacgau

SEQ ID NO: 902153 - RNA, 22 nt, Human
cccaagggaugcuugaguaguu

SEQ ID NO: 902154 - RNA, 23 nt, Human
ccaggcaguagcuauugaaguga

SEQ ID NO: 902155 - RNA, 22 nt, Human
ugcugcauagcagcuccugaaa

SEQ ID NO: 902156 - RNA, 22 nt, Human
ugaagacacauacaagggaaug

SEQ ID NO: 902157 - RNA, 22 nt, Human
uuggaauugaggauuuacauag

SEQ ID NO: 902158 - RNA, 22 nt, Human
uuccugugcuuauucuucucug

SEQ ID NO: 902159 - RNA, 22 nt, Human
acagucuuaugcauacacuauu

SEQ ID NO: 902160 - RNA, 19 nt, Human
guauauuuauauggcugua

SEQ ID NO: 902161 - RNA, 22 nt, Human
caggacaucgucaucaugggga

SEQ ID NO: 902162 - RNA, 22 nt, Human
accuggagucauuugaggagua

SEQ ID NO: 902163 - RNA, 17 nt, Human
ugggugguagggagagg

SEQ ID NO: 902164 - RNA, 22 nt, Human
uugauguucauaaaugauacag

SEQ ID NO: 902165 - RNA, 22 nt, Human
gaggcagcucuucugaaugggg

SEQ ID NO: 902166 - RNA, 22 nt, Human
uuugguauugcacacugucuuc

SEQ ID NO: 902167 - RNA, 22 nt, Human
aguauuuguugaaugagugaau

SEQ ID NO: 902168 - RNA, 22 nt, Human
uggcccaggggcucuugguguu

SEQ ID NO: 902169 - RNA, 22 nt, Human
gcaaugucugugcuaaaaacug

SEQ ID NO: 902170 - RNA, 23 nt, Human
ccuggcuggauucucugcauuca

SEQ ID NO: 902171 - RNA, 22 nt, Human
agaaggccuaacuugggggcaa

SEQ ID NO: 902172 - RNA, 22 nt, Human
gagaaguuagcucuguuuaggu

SEQ ID NO: 902173 - RNA, 22 nt, Human
ugaaauagucaaguauuugaac

SEQ ID NO: 902174 - RNA, 22 nt, Human
cauggcugggagacggcugagg

SEQ ID NO: 902175 - RNA, 22 nt, Human
ugugucagaaggcaauggggau

SEQ ID NO: 902176 - RNA, 22 nt, Human
ugcugagguuucugacuaugga

SEQ ID NO: 902177 - RNA, 22 nt, Human
uuacaacagacacauauucuaa

SEQ ID NO: 902178 - RNA, 22 nt, Human
uauuauuauaguuauugggaag

SEQ ID NO: 902179 - RNA, 22 nt, Human
gaaacauuuguugaguacuugc

SEQ ID NO: 902180 - RNA, 22 nt, Human
uaaaguuuauuggcaccaccau

SEQ ID NO: 902181 - RNA, 18 nt, Human
cagcaucuucauuaggcc

SEQ ID NO: 902182 - RNA, 22 nt, Human
ugcuggaaccaggaauuugaag

SEQ ID NO: 902183 - RNA, 22 nt, Human
guuccuaaaucuggaggaccuc

SEQ ID NO: 902184 - RNA, 22 nt, Human
uuccucagcuguguccuggcga

SEQ ID NO: 902185 - RNA, 22 nt, Human
uuucucucuuaaggaguuuaaa

SEQ ID NO: 902186 - RNA, 21 nt, Human
ugugaaauagcuaugcuacau

SEQ ID NO: 902187 - RNA, 22 nt, Human
ucuuagcauuucauaacaacug

SEQ ID NO: 902188 - RNA, 22 nt, Human
uuccuuggccacacuggugcuu

SEQ ID NO: 902189 - RNA, 22 nt, Human
uggcucugugaacagacgacug

SEQ ID NO: 902190 - RNA, 19 nt, Human
guucuuuucaccucugugc

SEQ ID NO: 902191 - RNA, 22 nt, Human
uugcaaauauuguuuaccuuuc

SEQ ID NO: 902192 - RNA, 22 nt, Human
aaguuugagaagcuuauagaua

SEQ ID NO: 902193 - RNA, 22 nt, Human
aacaggaauugaugggaguccu

SEQ ID NO: 902194 - RNA, 22 nt, Human
uagcauuucuggccucuacuca

SEQ ID NO: 902195 - RNA, 22 nt, Human
gguggcauacaacauagaggcu

SEQ ID NO: 902196 - RNA, 22 nt, Human
ucucuaaccuaauguggaggga

SEQ ID NO: 902197 - RNA, 22 nt, Human
ugcaggugugguuccucagcca

SEQ ID NO: 902198 - RNA, 22 nt, Human
gcagcuggagcaucuucucauc

SEQ ID NO: 902199 - RNA, 22 nt, Human
cuguagaacgauccaggcauuu

SEQ ID NO: 902200 - RNA, 22 nt, Human
auauugcagggacagucuggau

SEQ ID NO: 902201 - RNA, 22 nt, Human
aagcugugaaaucucuagugca

SEQ ID NO: 902202 - RNA, 22 nt, Human
caaaggacccauaauuaaaacc

SEQ ID NO: 902203 - RNA, 15 nt, Human
gaguggcuggugaaa

SEQ ID NO: 902204 - RNA, 21 nt, Human
ccugugcuaucagcuuggguu

SEQ ID NO: 902205 - RNA, 22 nt, Human
agcacagaaugagguggaagug

SEQ ID NO: 902206 - RNA, 22 nt, Human
agcuguuccaggccucauugcu

SEQ ID NO: 902207 - RNA, 22 nt, Human
uuugcugugggauauccaugug

SEQ ID NO: 902208 - RNA, 22 nt, Human
uggcagcaugucccggccucag

SEQ ID NO: 902209 - RNA, 22 nt, Human
cagcugcaggcugugcaggaag

SEQ ID NO: 902210 - RNA, 22 nt, Human
agaggugggagccuggucacau

SEQ ID NO: 902211 - RNA, 22 nt, Human
uccuuccuggggucucugcugc

SEQ ID NO: 902212 - RNA, 22 nt, Human
acugugugccaggcgcuggucu

SEQ ID NO: 902213 - RNA, 22 nt, Human
aggcaagcauugggaacagggc

SEQ ID NO: 902214 - RNA, 20 nt, Human
acaugaaaggaaacaggaaa

SEQ ID NO: 902215 - RNA, 22 nt, Human
cuuagaaauaaugguuucaguu

SEQ ID NO: 902216 - RNA, 22 nt, Human
cugucaccucugcccuuugccc

SEQ ID NO: 902217 - RNA, 22 nt, Human
uacaaaguuugagaaugcuuuc

SEQ ID NO: 902218 - RNA, 22 nt, Human
uuucaaguucccaguuuugugg

SEQ ID NO: 902219 - RNA, 22 nt, Human
ugccauuuagugcaucauuagu

SEQ ID NO: 902220 - RNA, 22 nt, Human
ucugucauaagugcugaaguau

SEQ ID NO: 902221 - RNA, 22 nt, Human
agccuaggguucugaugucacu

SEQ ID NO: 902222 - RNA, 22 nt, Human
acaaguuuuggaagucuuaagg

SEQ ID NO: 902223 - RNA, 22 nt, Human
uuuuucaugagacuagaaguca

SEQ ID NO: 902224 - RNA, 22 nt, Human
ccagguggugaaagugggcccu

SEQ ID NO: 902225 - RNA, 22 nt, Human
gaaugacauugagccauaacau

SEQ ID NO: 902226 - RNA, 22 nt, Human
ugguauggcuaacgaggucaag

SEQ ID NO: 902227 - RNA, 22 nt, Human
cccauuuguccaaaguauaaaa

SEQ ID NO: 902228 - RNA, 22 nt, Human
agggcugcuauguugauucaga

SEQ ID NO: 902229 - RNA, 22 nt, Human
gggaagugaggagccccucugc

SEQ ID NO: 902230 - RNA, 22 nt, Human
augcauauuggauuagcagcca

SEQ ID NO: 902231 - RNA, 22 nt, Human
ugcuggggucucuccggugccc

SEQ ID NO: 902232 - RNA, 22 nt, Human
ccaggcucuguuccccgaggag

SEQ ID NO: 902233 - RNA, 22 nt, Human
uucuugaguaucugcacagugc

SEQ ID NO: 902234 - RNA, 21 nt, Human
ggcuuuaugcucacccagccu

SEQ ID NO: 902235 - RNA, 22 nt, Human
aaguuuuaugggaagaugugca

SEQ ID NO: 902236 - RNA, 20 nt, Human
ucagguagaucuuugagguc

SEQ ID NO: 902237 - RNA, 22 nt, Human
auugagaauaugauuuaguaua

SEQ ID NO: 902238 - RNA, 22 nt, Human
ugcuccagccuaugcucuccgg

SEQ ID NO: 902239 - RNA, 22 nt, Human
uaagugagcuagcagaagugac

SEQ ID NO: 902240 - RNA, 22 nt, Human
gcuggagaccucagagaaccca

SEQ ID NO: 902241 - RNA, 22 nt, Human
agugaaauccuggucaacaggu

SEQ ID NO: 902242 - RNA, 22 nt, Human
aggcauggauguagcagugacc

SEQ ID NO: 902243 - RNA, 22 nt, Human
acuuuaaaacugaucaucagag

SEQ ID NO: 902244 - RNA, 22 nt, Human
uaaauuagggacuuuaguuaau

SEQ ID NO: 902245 - RNA, 22 nt, Human
cuaaacaagauacuaaugaggu

SEQ ID NO: 902246 - RNA, 22 nt, Human
ucugggagagcugcugucagag

SEQ ID NO: 902247 - RNA, 19 nt, Human
gaggggaggaauugacaag

SEQ ID NO: 902248 - RNA, 22 nt, Human
uuuagaaugugacuguauuuga

SEQ ID NO: 902249 - RNA, 22 nt, Human
agcauggggcuccgcaaugaac

SEQ ID NO: 902250 - RNA, 23 nt, Human
augugcacaucuccuuguccacc

SEQ ID NO: 902251 - RNA, 22 nt, Human
uuauuauguggaugaaagaugu

SEQ ID NO: 902252 - RNA, 21 nt, Human
ugacagguauuuaucuggaaa

SEQ ID NO: 902253 - RNA, 21 nt, Human
uuugaaagcccuauguuuuca

SEQ ID NO: 902254 - RNA, 22 nt, Human
ugucugugugagcaaaugacuu

SEQ ID NO: 902255 - RNA, 22 nt, Human
aaguuugugguuauacuugauu

SEQ ID NO: 902256 - RNA, 22 nt, Human
acugggaagacaagaaagauag

SEQ ID NO: 902257 - RNA, 22 nt, Human
ccauuacugaaauaaagagaau

SEQ ID NO: 902258 - RNA, 22 nt, Human
agcacacaggccaccuccacuu

SEQ ID NO: 902259 - RNA, 22 nt, Human
aucucuuugauggcuccuguga

SEQ ID NO: 902260 - RNA, 22 nt, Human
accuugaacacaagaauuauug

SEQ ID NO: 902261 - RNA, 22 nt, Human
uagauuuuaggagauuuuacug

SEQ ID NO: 902262 - RNA, 22 nt, Human
uucuccaggcuugggccagguc

SEQ ID NO: 902263 - RNA, 22 nt, Human
cccaggcuggagugcaauggca

SEQ ID NO: 902264 - RNA, 22 nt, Human
ucagaagagcuggugcugccug

SEQ ID NO: 902265 - RNA, 22 nt, Human
caaagugcuggaauuacaggug

SEQ ID NO: 902266 - RNA, 22 nt, Human
cagccucugacaccacagucgu

SEQ ID NO: 902267 - RNA, 22 nt, Human
uauuucucucacgguugccugg

SEQ ID NO: 902268 - RNA, 22 nt, Human
aguggcagguguuucguggugc

SEQ ID NO: 902269 - RNA, 22 nt, Human
caaaggcuuccacugcauccuu

SEQ ID NO: 902270 - RNA, 22 nt, Human
ucucugugagaugccuuccuga

SEQ ID NO: 902271 - RNA, 22 nt, Human
ugguccuggggugcaggcugac

SEQ ID NO: 902272 - RNA, 22 nt, Human
cagccagagaggaaggaaugca

SEQ ID NO: 902273 - RNA, 22 nt, Human
ccagcagcgauagggugagugc

SEQ ID NO: 902274 - RNA, 22 nt, Human
aaagcuuuuguuuucguaacug

SEQ ID NO: 902275 - RNA, 22 nt, Human
guccuugaggaaacagauguga

SEQ ID NO: 902276 - RNA, 22 nt, Human
gagcuacugaaauauugauuuu

SEQ ID NO: 902277 - RNA, 22 nt, Human
uaaguaaaacauucaagaaguc

SEQ ID NO: 902278 - RNA, 22 nt, Human
uuucaucugugcugccaagacu

SEQ ID NO: 902279 - RNA, 22 nt, Human
cauuggcuccugugggacauga

SEQ ID NO: 902280 - RNA, 22 nt, Human
auuucucaguaaucucagcaau

SEQ ID NO: 902281 - RNA, 23 nt, Human
aaaguugauuugcaguuuaagag

SEQ ID NO: 902282 - RNA, 22 nt, Human
ugcaucuguucagagcugucga

SEQ ID NO: 902283 - RNA, 22 nt, Human
gagcugccaagauuacaaucag

SEQ ID NO: 902284 - RNA, 22 nt, Human
aagggacuuugucagcuuucca

SEQ ID NO: 902285 - RNA, 21 nt, Human
aacuacaguuguuccuucauu

SEQ ID NO: 902286 - RNA, 22 nt, Human
ggugugggggcaaguuugagau

SEQ ID NO: 902287 - RNA, 22 nt, Human
auguucauuuuauggcgaugcc

SEQ ID NO: 902288 - RNA, 22 nt, Human
agaaguuuuguugaauguguga

SEQ ID NO: 902289 - RNA, 22 nt, Human
aaacaucuucucuugauucuuu

SEQ ID NO: 902290 - RNA, 22 nt, Human
auuucauauguaucaccuagcc

SEQ ID NO: 902291 - RNA, 21 nt, Human
acauuacagggugaugugucu

SEQ ID NO: 902292 - RNA, 22 nt, Human
cagcuguguaaacacaugugua

SEQ ID NO: 902293 - RNA, 22 nt, Human
acaaaccagcuuaagcaagaug

SEQ ID NO: 902294 - RNA, 22 nt, Human
uuucauggcuaggacuagagug

SEQ ID NO: 902295 - RNA, 22 nt, Human
augguuuaagggagaauauuga

SEQ ID NO: 902296 - RNA, 22 nt, Human
ucauuauucucuuuaauguucu

SEQ ID NO: 902297 - RNA, 22 nt, Human
ucuguggcuugggccugccugu

SEQ ID NO: 902298 - RNA, 22 nt, Human
ucuguucuauuggucuaugugu

SEQ ID NO: 902299 - RNA, 22 nt, Human
uggaaugcagugggagcuuacc

SEQ ID NO: 902300 - RNA, 22 nt, Human
aggaaagggguagguguggacg

SEQ ID NO: 902301 - RNA, 22 nt, Human
ugagccugaguucaaggcugca

SEQ ID NO: 902302 - RNA, 22 nt, Human
gaauacaugaacccuccugugg

SEQ ID NO: 902303 - RNA, 22 nt, Human
ucagcugcuucauguucugaau

SEQ ID NO: 902304 - RNA, 22 nt, Human
gggggaugcucaggaggcugcu

SEQ ID NO: 902305 - RNA, 22 nt, Human
uauugcauauuauucuaguggc

SEQ ID NO: 902306 - RNA, 22 nt, Human
uagaggugacacugagaccaua

SEQ ID NO: 902307 - RNA, 22 nt, Human
uucaagaugucuucacaauagu

SEQ ID NO: 902308 - RNA, 22 nt, Human
cauagaacagcuccuagcacau

SEQ ID NO: 902309 - RNA, 22 nt, Human
uggcuggcuuguucacugacug

SEQ ID NO: 902310 - RNA, 22 nt, Human
uuccuuggauacaaguaacuuu

SEQ ID NO: 902311 - RNA, 22 nt, Human
agcaaacaguuucuggggaucu

SEQ ID NO: 902312 - RNA, 22 nt, Human
uugaauuagacuuugcuacagg

SEQ ID NO: 902313 - RNA, 22 nt, Human
aagaacuuugauuucauugcau

SEQ ID NO: 902314 - RNA, 22 nt, Human
ccagcagagggcgcuucacacc

SEQ ID NO: 902315 - RNA, 22 nt, Human
auaacagaugcuucagcauaaa

SEQ ID NO: 902316 - RNA, 22 nt, Human
augaaugauuaaagaguacagu

SEQ ID NO: 902317 - RNA, 21 nt, Human
ucagcagcuuuugcagucccu

SEQ ID NO: 902318 - RNA, 22 nt, Human
aggcaagugcauuagaagagca

SEQ ID NO: 902319 - RNA, 22 nt, Human
ccucugcaaagaauuugucucc

SEQ ID NO: 902320 - RNA, 22 nt, Human
aagcagcauuguaaccaaugcc

SEQ ID NO: 902321 - RNA, 19 nt, Human
ccucucccaugcuuaccuc

SEQ ID NO: 902322 - RNA, 22 nt, Human
gugggcagaggagagaacauua

SEQ ID NO: 902323 - RNA, 22 nt, Human
auguauguuagacaagccuaca

SEQ ID NO: 902324 - RNA, 22 nt, Human
agcccagcuuccuucugucucu

SEQ ID NO: 902325 - RNA, 23 nt, Human
aggaggccugaaacugaggcuga

SEQ ID NO: 902326 - RNA, 19 nt, Human
uucacauuggaagaaguag

SEQ ID NO: 902327 - RNA, 22 nt, Human
aauuuauauguaauuaggcaca

SEQ ID NO: 902328 - RNA, 22 nt, Human
aaagguuuauuuguugcucaca

SEQ ID NO: 902329 - RNA, 22 nt, Human
ggaugcaggacggcauggaugu

SEQ ID NO: 902330 - RNA, 22 nt, Human
aguccaaagcagaugagggcca

SEQ ID NO: 902331 - RNA, 23 nt, Human
ugacagaccuucccagacaguca

SEQ ID NO: 902332 - RNA, 22 nt, Human
ucugccaggccugcuuccgggg

SEQ ID NO: 902333 - RNA, 22 nt, Human
uguacuauuaagaggccuaaau

SEQ ID NO: 902334 - RNA, 22 nt, Human
uccagggccuuaccucuucaga

SEQ ID NO: 902335 - RNA, 22 nt, Human
aggcacugaagaacucuuuuug

SEQ ID NO: 902336 - RNA, 22 nt, Human
gugagagcucagcugcccuggg

SEQ ID NO: 902337 - RNA, 22 nt, Human
uacagcuguugguguuuccucu

SEQ ID NO: 902338 - RNA, 22 nt, Human
augaggcaaucaugguccaguu

SEQ ID NO: 902339 - RNA, 22 nt, Human
cugcucuagguauugaggcuaa

SEQ ID NO: 902340 - RNA, 20 nt, Human
uagcauuccagaaaacucag

SEQ ID NO: 902341 - RNA, 22 nt, Human
agagaucugucuacuauuuaag

SEQ ID NO: 902342 - RNA, 17 nt, Human
ucugucuugacugucac

SEQ ID NO: 902343 - RNA, 18 nt, Human
aagcugcccucaggcagg

SEQ ID NO: 902344 - RNA, 22 nt, Human
gcuucugugguugucacgacua

SEQ ID NO: 902345 - RNA, 22 nt, Human
acagaaagauaggcacaagguc

SEQ ID NO: 902346 - RNA, 22 nt, Human
uuuccuuucuagaagccuaaau

SEQ ID NO: 902347 - RNA, 22 nt, Human
aguagucagcagauaauauagg

SEQ ID NO: 902348 - RNA, 22 nt, Human
cugccuggggaaugugaggauu

SEQ ID NO: 902349 - RNA, 22 nt, Human
gccagccaagauugagaaggua

SEQ ID NO: 902350 - RNA, 22 nt, Human
gggcuccagaggcucacccugg

SEQ ID NO: 902351 - RNA, 18 nt, Human
gaggccugagaaccaggu

SEQ ID NO: 902352 - RNA, 22 nt, Human
ggcuuggcugucucccagccca

SEQ ID NO: 902353 - RNA, 22 nt, Human
aggcucuuugagacuaccugga

SEQ ID NO: 902354 - RNA, 22 nt, Human
ccagagagagaggucaauggca

SEQ ID NO: 902355 - RNA, 22 nt, Human
aacaaguuagauuuugugucuu

SEQ ID NO: 902356 - RNA, 22 nt, Human
augucaccaguuuccaaauuug

SEQ ID NO: 902357 - RNA, 22 nt, Human
cuccagccagagugccucuguu

SEQ ID NO: 902358 - RNA, 22 nt, Human
gggagacuagugcuauguuuuc

SEQ ID NO: 902359 - RNA, 22 nt, Human
aaaugcaauucaggaagacaag

SEQ ID NO: 902360 - RNA, 22 nt, Human
augugucuugagggggauggag

SEQ ID NO: 902361 - RNA, 22 nt, Human
ugggucacucuauccugcuuag

SEQ ID NO: 902362 - RNA, 22 nt, Human
uuccaauauuuacaaugcauua

SEQ ID NO: 902363 - RNA, 22 nt, Human
ggccucugguucguggugaccu

SEQ ID NO: 902364 - RNA, 22 nt, Human
uucagaaugugaccuuauuugg

SEQ ID NO: 902365 - RNA, 22 nt, Human
ucaggaagccgguuaaauagau

SEQ ID NO: 902366 - RNA, 22 nt, Human
acagaugguuauugucauuucu

SEQ ID NO: 902367 - RNA, 22 nt, Human
auucuuacaaagcagagucugu

SEQ ID NO: 902368 - RNA, 22 nt, Human
auauagucaaacauauaugugu

SEQ ID NO: 902369 - RNA, 22 nt, Human
cugcugagcauuugcagggaca

SEQ ID NO: 902370 - RNA, 22 nt, Human
ucagugcaaaaaaugggcuaga

SEQ ID NO: 902371 - RNA, 22 nt, Human
acucuucaugcuaugcucaacu

SEQ ID NO: 902372 - RNA, 22 nt, Human
uggcaauguaggcaagaacauu

SEQ ID NO: 902373 - RNA, 19 nt, Human
cucucuccaguggcuggcu

SEQ ID NO: 902374 - RNA, 22 nt, Human
agcuggguguguaucagauaaa

SEQ ID NO: 902375 - RNA, 22 nt, Human
cauugucacccaaagcucauag

SEQ ID NO: 902376 - RNA, 22 nt, Human
aaagacaucagaaccagcugag

SEQ ID NO: 902377 - RNA, 22 nt, Human
uuaggcaaugaauuauuccaag

SEQ ID NO: 902378 - RNA, 22 nt, Human
ggaggggauuuaguagaugcua

SEQ ID NO: 902379 - RNA, 22 nt, Human
ccuggaggcagaaauaggacuu

SEQ ID NO: 902380 - RNA, 22 nt, Human
uucuccucuguuggccuucccu

SEQ ID NO: 902381 - RNA, 22 nt, Human
gugaaggccguccuuggggacu

SEQ ID NO: 902382 - RNA, 22 nt, Human
ugucaacagaucucaaagcugg

SEQ ID NO: 902383 - RNA, 22 nt, Human
gugcacacaagcaaugcacuua

SEQ ID NO: 902384 - RNA, 22 nt, Human
agcucuuacauuuaggucuaug

SEQ ID NO: 902385 - RNA, 22 nt, Human
aaacucaaauuaaacuagcuua

SEQ ID NO: 902386 - RNA, 22 nt, Human
ucaacaaauacuuaaagcagag

SEQ ID NO: 902387 - RNA, 22 nt, Human
ggugggaaggccacugaagguu

SEQ ID NO: 902388 - RNA, 22 nt, Human
cuugagaaucuugaugucuacc

SEQ ID NO: 902389 - RNA, 22 nt, Human
uccaggagauucauuaggucau

SEQ ID NO: 902390 - RNA, 22 nt, Human
agacaaagacagcaucucaggu

SEQ ID NO: 902391 - RNA, 22 nt, Human
caggagccccaggcugacaaua

SEQ ID NO: 902392 - RNA, 22 nt, Human
uuggaaggggcagaguggcugc

SEQ ID NO: 902393 - RNA, 22 nt, Human
aguggcugccaagagcaaugcu

SEQ ID NO: 902394 - RNA, 23 nt, Human
agggagcuaaaaggcuggagcag

SEQ ID NO: 902395 - RNA, 22 nt, Human
gagcugcacgcagcauccaaga

SEQ ID NO: 902396 - RNA, 22 nt, Human
gagccaggaggcagagacugca

SEQ ID NO: 902397 - RNA, 22 nt, Human
ucaaggaagggauauucuugaa

SEQ ID NO: 902398 - RNA, 22 nt, Human
ugugucucuuuguccuagagcu

SEQ ID NO: 902399 - RNA, 22 nt, Human
cuuuacaaagcaauuuugucuc

SEQ ID NO: 902400 - RNA, 22 nt, Human
cagagauggggccagcugcucc

SEQ ID NO: 902401 - RNA, 22 nt, Human
ugagcugugauuaacucugaga

SEQ ID NO: 902402 - RNA, 22 nt, Human
agcuuauuaucuuaucaagcuu

SEQ ID NO: 902403 - RNA, 17 nt, Human
ggauagugcugggcugg

SEQ ID NO: 902404 - RNA, 22 nt, Human
augaaaaguucgaucuagaagg

SEQ ID NO: 902405 - RNA, 22 nt, Human
aagggcugaaagaccuugggca

SEQ ID NO: 902406 - RNA, 22 nt, Human
cacugcuucagucagagaaauu

SEQ ID NO: 902407 - RNA, 22 nt, Human
ggccagcugagcugcugcacag

SEQ ID NO: 902408 - RNA, 22 nt, Human
ccucucuccaagggaaauccua

SEQ ID NO: 902409 - RNA, 22 nt, Human
ccugugguuuacaugacaguua

SEQ ID NO: 902410 - RNA, 22 nt, Human
ucuguuuuguaccagauacagc

SEQ ID NO: 902411 - RNA, 22 nt, Human
aggcucugugcauccuccccaa

SEQ ID NO: 902412 - RNA, 22 nt, Human
uucugauaccuugcaggauccu

SEQ ID NO: 902413 - RNA, 22 nt, Human
gcagcugcaagcacuucuggca

SEQ ID NO: 902414 - RNA, 22 nt, Human
ucuguuauucugucuauugcca

SEQ ID NO: 902415 - RNA, 22 nt, Human
aagacauuagaaucagccuguu

SEQ ID NO: 902416 - RNA, 22 nt, Human
gacaaagcgccugcucgcgggc

SEQ ID NO: 902417 - RNA, 22 nt, Human
auuuacagaagcauguaauagc

SEQ ID NO: 902418 - RNA, 22 nt, Human
caguuucuuaagacugagaucu

SEQ ID NO: 902419 - RNA, 22 nt, Human
ugugcgugguucccggggccau

SEQ ID NO: 902420 - RNA, 22 nt, Human
ucugucccugagagcucaggag

SEQ ID NO: 902421 - RNA, 23 nt, Human
cagugccauuugucuugccuaug

SEQ ID NO: 902422 - RNA, 22 nt, Human
gcuuuggucuucuagcugugag

SEQ ID NO: 902423 - RNA, 22 nt, Human
cagcagaaaauaccuguaacuc

SEQ ID NO: 902424 - RNA, 22 nt, Human
gucuggagccacccuaagcauu

SEQ ID NO: 902425 - RNA, 22 nt, Human
auuucucaaguaaaugagucau

SEQ ID NO: 902426 - RNA, 20 nt, Human
cucacuuaccuuuuucuaua

SEQ ID NO: 902427 - RNA, 22 nt, Human
aggccacagguggaagccagag

SEQ ID NO: 902428 - RNA, 23 nt, Human
aaccugaacuagggucuugcaua

SEQ ID NO: 902429 - RNA, 22 nt, Human
augaaggcaagacugaggugug

SEQ ID NO: 902430 - RNA, 22 nt, Human
gggaacuugcuaaaauacagac

SEQ ID NO: 902431 - RNA, 19 nt, Human
auucagugucucugacuuc

SEQ ID NO: 902432 - RNA, 23 nt, Human
ucucucuuagcuaugcuuauggc

SEQ ID NO: 902433 - RNA, 21 nt, Human
ucaggagagcccaucuacaaa

SEQ ID NO: 902434 - RNA, 22 nt, Human
uggaucugcucuaugaacugcu

SEQ ID NO: 902435 - RNA, 22 nt, Human
gacacagcuuucugaagagcau

SEQ ID NO: 902436 - RNA, 22 nt, Human
cauuccagagcugccucugcua

SEQ ID NO: 902437 - RNA, 22 nt, Human
uucacuguacugacugucuuau

SEQ ID NO: 902438 - RNA, 22 nt, Human
cagaacagacuuaacagggcug

SEQ ID NO: 902439 - RNA, 22 nt, Human
uaaaaagcagcugagauuuucu

SEQ ID NO: 902440 - RNA, 22 nt, Human
uccuguggucauucuucugccc

SEQ ID NO: 902441 - RNA, 22 nt, Human
ucuguccuguuuccuccugaca

SEQ ID NO: 902442 - RNA, 22 nt, Human
uacuauuuuugcaacguauaca

SEQ ID NO: 902443 - RNA, 22 nt, Human
uuccuggucccguucuucacug

SEQ ID NO: 902444 - RNA, 22 nt, Human
uccagggccaugaaguugcaca

SEQ ID NO: 902445 - RNA, 22 nt, Human
ugcuaaauaacuuacauagugg

SEQ ID NO: 902446 - RNA, 22 nt, Human
auuuaucaccaguuagcugacu

SEQ ID NO: 902447 - RNA, 22 nt, Human
uggagggcauagcuguucuuuc

SEQ ID NO: 902448 - RNA, 22 nt, Human
cugucccuucauuauucacuac

SEQ ID NO: 902449 - RNA, 22 nt, Human
agauuccagaucccaaaaauga

SEQ ID NO: 902450 - RNA, 22 nt, Human
uuuguuaaaaugcagauucugu

SEQ ID NO: 902451 - RNA, 22 nt, Human
uauacagaaccgccugaagucu

SEQ ID NO: 902452 - RNA, 22 nt, Human
gggagaugacucagugaccucg

SEQ ID NO: 902453 - RNA, 22 nt, Human
uggcagugaagcugucuuuagg

SEQ ID NO: 902454 - RNA, 22 nt, Human
uaggauuuggcuuuagucaggu

SEQ ID NO: 902455 - RNA, 22 nt, Human
uuggaaauugcaagugauuugc

SEQ ID NO: 902456 - RNA, 22 nt, Human
aguggcuuauguuuagaaucau

SEQ ID NO: 902457 - RNA, 22 nt, Human
auggaaaaggcugauuucauua

SEQ ID NO: 902458 - RNA, 18 nt, Human
agcaacaggaucccaggg

SEQ ID NO: 902459 - RNA, 22 nt, Human
aguuuuauuccaaugugcagca

SEQ ID NO: 902460 - RNA, 22 nt, Human
acaugaggaaacaaggguauau

SEQ ID NO: 902461 - RNA, 22 nt, Human
ucuguuuaugugucuaaauaaa

SEQ ID NO: 902462 - RNA, 22 nt, Human
ucugucauuucaauaugguuaa

SEQ ID NO: 902463 - RNA, 23 nt, Human
gccaggcuccggucuguggccac

SEQ ID NO: 902464 - RNA, 22 nt, Human
acauuuguuucucuagaguagg

SEQ ID NO: 902465 - RNA, 22 nt, Human
ugaaugugaugcuaaacauaug

SEQ ID NO: 902466 - RNA, 22 nt, Human
acaaggaccaugaggcagaccc

SEQ ID NO: 902467 - RNA, 18 nt, Human
aaguaacagaagagcaca

SEQ ID NO: 902468 - RNA, 22 nt, Human
guggcacaugcugcugcuucug

SEQ ID NO: 902469 - RNA, 22 nt, Human
cgagcagaauggagggugccga

SEQ ID NO: 902470 - RNA, 22 nt, Human
agggcccuccccgcucagggca

SEQ ID NO: 902471 - RNA, 19 nt, Human
cccagcuugaccaccugcu

SEQ ID NO: 902472 - RNA, 22 nt, Human
agcagggaggucuagcacgugg

SEQ ID NO: 902473 - RNA, 22 nt, Human
guuggucauaucauugaagcuu

SEQ ID NO: 902474 - RNA, 22 nt, Human
auuuuaauaagauucccaagua

SEQ ID NO: 902475 - RNA, 22 nt, Human
gcccucugaugcucaccgagga

SEQ ID NO: 902476 - RNA, 22 nt, Human
aaaugcagugguucuacuucuc

SEQ ID NO: 902477 - RNA, 22 nt, Human
ucuucacauuuuagugguuugu

SEQ ID NO: 902478 - RNA, 20 nt, Human
ucugccacugcacucugccc

SEQ ID NO: 902479 - RNA, 22 nt, Human
guccaagagauguaacgaagaa

SEQ ID NO: 902480 - RNA, 22 nt, Human
ggccugaaauaaaguagcagaa

SEQ ID NO: 902481 - RNA, 22 nt, Human
aagucaaagcuuucagaggaaa

SEQ ID NO: 902482 - RNA, 22 nt, Human
aacaggaaacaaguuguuagga

SEQ ID NO: 902483 - RNA, 22 nt, Human
uccaggcaaaaggaacugcuug

SEQ ID NO: 902484 - RNA, 22 nt, Human
cugccaggauucugugaacccc

SEQ ID NO: 902485 - RNA, 22 nt, Human
uuuuaaguuuauuccaguacau

SEQ ID NO: 902486 - RNA, 22 nt, Human
uguguauaacucuuaauucauu

SEQ ID NO: 902487 - RNA, 22 nt, Human
ucuugcuguuacagaauuaaca

SEQ ID NO: 902488 - RNA, 22 nt, Human
gaguucucaguaaaguucuuug

SEQ ID NO: 902489 - RNA, 22 nt, Human
aaagugcuuucccacauuuguu

SEQ ID NO: 902490 - RNA, 22 nt, Human
agucuucagcauagcauauggc

SEQ ID NO: 902491 - RNA, 22 nt, Human
uuuaugcuacucaauagucagu

SEQ ID NO: 902492 - RNA, 22 nt, Human
accugcaguggccacuccuaau

SEQ ID NO: 902493 - RNA, 22 nt, Human
ggcuggcgcucucccagcgcug

SEQ ID NO: 902494 - RNA, 22 nt, Human
accaggcugugaagugagacua

SEQ ID NO: 902495 - RNA, 22 nt, Human
cagcuggcguggagugauugca

SEQ ID NO: 902496 - RNA, 21 nt, Human
ucugugcugccgucaacaucc

SEQ ID NO: 902497 - RNA, 22 nt, Human
gugacagagugagaccuugucu

SEQ ID NO: 902498 - RNA, 22 nt, Human
ccagugugggcccggccuccuc

SEQ ID NO: 902499 - RNA, 22 nt, Human
cuguuauuuuauaauucaagaa

SEQ ID NO: 902500 - RNA, 22 nt, Human
ugagagaguaauugagugguaa

SEQ ID NO: 902501 - RNA, 22 nt, Human
uuccuucuauucagcuccaaga

SEQ ID NO: 902502 - RNA, 22 nt, Human
cacagauuucuggucuucaccc

SEQ ID NO: 902503 - RNA, 22 nt, Human
cugcagggagcagauggcgugu

SEQ ID NO: 902504 - RNA, 22 nt, Human
guuauauauaguauuucucuga

SEQ ID NO: 902505 - RNA, 22 nt, Human
cugagcauccagcagguacugc

SEQ ID NO: 902506 - RNA, 22 nt, Human
uuuccauauucugcgucugcca

SEQ ID NO: 902507 - RNA, 23 nt, Human
accuagaaauacguuuuacaugg

SEQ ID NO: 902508 - RNA, 23 nt, Human
uugcacugaucaauuugauaagc

SEQ ID NO: 902509 - RNA, 22 nt, Human
cuuggaaggacgggcuguaucu

SEQ ID NO: 902510 - RNA, 22 nt, Human
agacagugcuaucccaucugug

SEQ ID NO: 902511 - RNA, 22 nt, Human
ccaaaucaccagcacgaucauu

SEQ ID NO: 902512 - RNA, 22 nt, Human
caucuugccugcuauucuguug

SEQ ID NO: 902513 - RNA, 19 nt, Human
acacauguguguuaugugc

SEQ ID NO: 902514 - RNA, 21 nt, Human
gggccuggcugcgcaggacgg

SEQ ID NO: 902515 - RNA, 22 nt, Human
ugcaagugccaugugcacagug

SEQ ID NO: 902516 - RNA, 23 nt, Human
cagcagcugccugguuuuuuggu

SEQ ID NO: 902517 - RNA, 22 nt, Human
auguuagaaggaauguuaaaag

SEQ ID NO: 902518 - RNA, 22 nt, Human
auuucuagccucugaaguagga

SEQ ID NO: 902519 - RNA, 21 nt, Human
auacacauacacauaaaugug

SEQ ID NO: 902520 - RNA, 22 nt, Human
gcaccugauugauuucacugcu

SEQ ID NO: 902521 - RNA, 22 nt, Human
aagcugaaaaugagacucuaca

SEQ ID NO: 902522 - RNA, 22 nt, Human
gagacacagcagauauucaauc

SEQ ID NO: 902523 - RNA, 22 nt, Human
cuucauuaaccaaaaugcaaua

SEQ ID NO: 902524 - RNA, 22 nt, Human
uucuccuugguuuaugggacau

SEQ ID NO: 902525 - RNA, 22 nt, Human
aucacagugccuucguaaauuu

SEQ ID NO: 902526 - RNA, 22 nt, Human
cugacagaugcugcuggcagua

SEQ ID NO: 902527 - RNA, 22 nt, Human
gggcccuggggauguggacgcg

SEQ ID NO: 902528 - RNA, 22 nt, Human
ugaggggcgcuggcagguuccu

SEQ ID NO: 902529 - RNA, 17 nt, Human
agccugccccaugcugc

SEQ ID NO: 902530 - RNA, 22 nt, Human
uaaaguguuguacaaauguaug

SEQ ID NO: 902531 - RNA, 22 nt, Human
ccccacaguccgugaggagcca

SEQ ID NO: 902532 - RNA, 22 nt, Human
aauacuugaauuucaugucagg

SEQ ID NO: 902533 - RNA, 22 nt, Human
uauaaaguuucgaaagauguau

SEQ ID NO: 902534 - RNA, 22 nt, Human
ccccaugaaguagggucucuga

SEQ ID NO: 902535 - RNA, 22 nt, Human
uuuugcuugagugcacaaaaug

SEQ ID NO: 902536 - RNA, 22 nt, Human
guggguggggagcucucuggag

SEQ ID NO: 902537 - RNA, 19 nt, Human
ugucuagcugcacagcuga

SEQ ID NO: 902538 - RNA, 20 nt, Human
uguaaaacaaggugaauccu

SEQ ID NO: 902539 - RNA, 22 nt, Human
cacaccucacaccucgcaugcu

SEQ ID NO: 902540 - RNA, 22 nt, Human
gacagacugcguaguccccaaa

SEQ ID NO: 902541 - RNA, 22 nt, Human
uccagaaaauucagaaauuguu

SEQ ID NO: 902542 - RNA, 22 nt, Human
gaccuagauuaacauucuguga

SEQ ID NO: 902543 - RNA, 22 nt, Human
uaauuuaauuucaugccagccu

SEQ ID NO: 902544 - RNA, 20 nt, Human
ucuugagaacaauuucuggc

SEQ ID NO: 902545 - RNA, 22 nt, Human
cacaguguaguuaaugugacau

SEQ ID NO: 902546 - RNA, 22 nt, Human
ggccugaggcaauagucagaca

SEQ ID NO: 902547 - RNA, 22 nt, Human
guucacaaauaugcacuuacga

SEQ ID NO: 902548 - RNA, 22 nt, Human
uuuuaaugugcucugcaaugau

SEQ ID NO: 902549 - RNA, 22 nt, Human
ucuacacauuuguaaaggcauu

SEQ ID NO: 902550 - RNA, 22 nt, Human
cauuuagagaguaaaaauuagc

SEQ ID NO: 902551 - RNA, 22 nt, Human
uggggcuguccuuagucugaga

SEQ ID NO: 902552 - RNA, 22 nt, Human
aaguguuuaugguuauuguuaa

SEQ ID NO: 902553 - RNA, 22 nt, Human
ucauacacaagagcauguaaca

SEQ ID NO: 902554 - RNA, 22 nt, Human
ccugggaagagcugacaggagg

SEQ ID NO: 902555 - RNA, 22 nt, Human
gugcagaaucaguacagaacga

SEQ ID NO: 902556 - RNA, 18 nt, Human
augcauauuuuaaguugu

SEQ ID NO: 902557 - RNA, 22 nt, Human
auccccagacuuuagauuucuc

SEQ ID NO: 902558 - RNA, 22 nt, Human
uggaaaaaaauuggcuagcuuc

SEQ ID NO: 902559 - RNA, 22 nt, Human
ugaagaauaaaugguugagacu

SEQ ID NO: 902560 - RNA, 22 nt, Human
ucauguuaucuuggcucuggga

SEQ ID NO: 902561 - RNA, 22 nt, Human
aaaaguauuuauggcuauguaa

SEQ ID NO: 902562 - RNA, 22 nt, Human
guauuuuauggcaugcaguggc

SEQ ID NO: 902563 - RNA, 22 nt, Human
ucugucugcucauuuaccucag

SEQ ID NO: 902564 - RNA, 22 nt, Human
aggcugaggcggguagaucacc

SEQ ID NO: 902565 - RNA, 22 nt, Human
aaggugucaccagauuggcagg

SEQ ID NO: 902566 - RNA, 22 nt, Human
uccuggcccuguggccugcagu

SEQ ID NO: 902567 - RNA, 22 nt, Human
cagggccccagggaugucugcu

SEQ ID NO: 902568 - RNA, 19 nt, Human
uggagaggaaaugcugcuc

SEQ ID NO: 902569 - RNA, 22 nt, Human
cucuuucugauucgcugggacc

SEQ ID NO: 902570 - RNA, 22 nt, Human
uuccuugggaaaugcucguuua

SEQ ID NO: 902571 - RNA, 22 nt, Human
ucagagguggcaggggugucca

SEQ ID NO: 902572 - RNA, 22 nt, Human
cauuuguauguuccuccuuagg

SEQ ID NO: 902573 - RNA, 22 nt, Human
agccuggaagaaccugaagucu

SEQ ID NO: 902574 - RNA, 22 nt, Human
aggaagccuggcauuaaaaagc

SEQ ID NO: 902575 - RNA, 22 nt, Human
auacagcuuaugcauauaucuc

SEQ ID NO: 902576 - RNA, 22 nt, Human
cugaggccucuuuccuuggcuu

SEQ ID NO: 902577 - RNA, 22 nt, Human
agcagcauguucauuacauuau

SEQ ID NO: 902578 - RNA, 22 nt, Human
uucugcauggagaaacugaguc

SEQ ID NO: 902579 - RNA, 22 nt, Human
uucacaauaggagcaugcaaau

SEQ ID NO: 902580 - RNA, 22 nt, Human
acagggaaggagcauagaaaaa

SEQ ID NO: 902581 - RNA, 22 nt, Human
aggcccagcuugaagugggaag

SEQ ID NO: 902582 - RNA, 22 nt, Human
uagcagcucugauucugggccc

SEQ ID NO: 902583 - RNA, 22 nt, Human
cccagcucuuuuagcggcaucu

SEQ ID NO: 902584 - RNA, 17 nt, Human
ggccccggagccugaca

SEQ ID NO: 902585 - RNA, 22 nt, Human
ucaguggagagcuuccaggauu

SEQ ID NO: 902586 - RNA, 22 nt, Human
auugucagaguuugagaaagua

SEQ ID NO: 902587 - RNA, 22 nt, Human
uguucucuuccacggcgcucgg

SEQ ID NO: 902588 - RNA, 22 nt, Human
agggcuccgggccaccggccug

SEQ ID NO: 902589 - RNA, 22 nt, Human
uuucuucauucaccuucacccc

SEQ ID NO: 902590 - RNA, 22 nt, Human
cagagcagaagcgguccucaca

SEQ ID NO: 902591 - RNA, 22 nt, Human
ccagaaaaugcagaacauagaa

SEQ ID NO: 902592 - RNA, 22 nt, Human
aacacugacgacgugaacuaaa

SEQ ID NO: 902593 - RNA, 22 nt, Human
gaagacauguggauucuaguuu

SEQ ID NO: 902594 - RNA, 22 nt, Human
guggcccugucccaggccuccu

SEQ ID NO: 902595 - RNA, 22 nt, Human
gagguggccaagcgaggaaggg

SEQ ID NO: 902596 - RNA, 22 nt, Human
gacaaggcgcccagccugccaa

SEQ ID NO: 902597 - RNA, 19 nt, Human
guaacagcucuggguucac

SEQ ID NO: 902598 - RNA, 22 nt, Human
agguuauugcucuccaaguuca

SEQ ID NO: 902599 - RNA, 21 nt, Human
uuaaugcuaugcagaaaaucu

SEQ ID NO: 902600 - RNA, 22 nt, Human
aggcuggcuuggcucuccugug

SEQ ID NO: 902601 - RNA, 22 nt, Human
auugaaaggcaaaguaggaagc

SEQ ID NO: 902602 - RNA, 22 nt, Human
aaagagggacaggcgcagacac

SEQ ID NO: 902603 - RNA, 22 nt, Human
ucaucagaggcaucuggcaagg

SEQ ID NO: 902604 - RNA, 22 nt, Human
ccuuuaugauagaugcuuucag

SEQ ID NO: 902605 - RNA, 22 nt, Human
auuguguggugaaugaucagcu

SEQ ID NO: 902606 - RNA, 22 nt, Human
aggccuccagccacaugccagu

SEQ ID NO: 902607 - RNA, 22 nt, Human
agugucugugaugaggucagga

SEQ ID NO: 902608 - RNA, 21 nt, Human
ucccagagugcuugggacugc

SEQ ID NO: 902609 - RNA, 22 nt, Human
gggagacaguucagauaguuuc

SEQ ID NO: 902610 - RNA, 21 nt, Human
ccaccaggucuucugcucggg

SEQ ID NO: 902611 - RNA, 22 nt, Human
agaguuccacguacagcuuuug

SEQ ID NO: 902612 - RNA, 20 nt, Human
ucauuacagugcuaagaugu

SEQ ID NO: 902613 - RNA, 20 nt, Human
ugcagggcugccucccagcu

SEQ ID NO: 902614 - RNA, 22 nt, Human
guuuggaaguuaagugcagcag

SEQ ID NO: 902615 - RNA, 22 nt, Human
ccucaggcuucgucuuccaccc

SEQ ID NO: 902616 - RNA, 22 nt, Human
ugcagccauuuucugccaaugc

SEQ ID NO: 902617 - RNA, 20 nt, Human
caucaacaccuugucagccu

SEQ ID NO: 902618 - RNA, 22 nt, Human
ucccugugggaugaggacucug

SEQ ID NO: 902619 - RNA, 22 nt, Human
augauguaaggguaauugucua

SEQ ID NO: 902620 - RNA, 22 nt, Human
gugacagaaacagggcuagaau

SEQ ID NO: 902621 - RNA, 18 nt, Human
uacaguauuuucucgccu

SEQ ID NO: 902622 - RNA, 22 nt, Human
cagguccucgggggaggccggc

SEQ ID NO: 902623 - RNA, 18 nt, Human
uggcuucagaguaaaaug

SEQ ID NO: 902624 - RNA, 22 nt, Human
uuugcuuuugugcucuaguggu

SEQ ID NO: 902625 - RNA, 22 nt, Human
uucuuguacuggagauacauga

SEQ ID NO: 902626 - RNA, 22 nt, Human
uggcaguggcaucaccccaaua

SEQ ID NO: 902627 - RNA, 18 nt, Human
aggcaggauccuggccuc

SEQ ID NO: 902628 - RNA, 22 nt, Human
gucaauuagcuaaaauuuggua

SEQ ID NO: 902629 - RNA, 22 nt, Human
aucuuucuauuucuaaaaacua

SEQ ID NO: 902630 - RNA, 22 nt, Human
cugagccaccggcagggacauc

SEQ ID NO: 902631 - RNA, 22 nt, Human
gcuuagaagauugacccugguu

SEQ ID NO: 902632 - RNA, 22 nt, Human
ucaaaacaacacucagguguaa

SEQ ID NO: 902633 - RNA, 22 nt, Human
gagcagcacuugaggcauguca

SEQ ID NO: 902634 - RNA, 22 nt, Human
uaggaagagcuauaggucccca

SEQ ID NO: 902635 - RNA, 22 nt, Human
cgcugcagaagcguguucagga

SEQ ID NO: 902636 - RNA, 22 nt, Human
gcuguucuaggagcugugagca

SEQ ID NO: 902637 - RNA, 22 nt, Human
ugaggccaggaucccaggcucu

SEQ ID NO: 902638 - RNA, 22 nt, Human
ggcccagacccaagaguggugg

SEQ ID NO: 902639 - RNA, 22 nt, Human
cagcccuggcgcccccagaucu

SEQ ID NO: 902640 - RNA, 22 nt, Human
ugcagggaagcaaggguggcuc

SEQ ID NO: 902641 - RNA, 22 nt, Human
uaaaguguggacaguaucuaua

SEQ ID NO: 902642 - RNA, 22 nt, Human
acuccagggcuucuaugauggu

SEQ ID NO: 902643 - RNA, 22 nt, Human
cagcagaggugguucacauugu

SEQ ID NO: 902644 - RNA, 22 nt, Human
acaauguuucucuuuagucauu

SEQ ID NO: 902645 - RNA, 22 nt, Human
uguuuauugcagugcugggcug

SEQ ID NO: 902646 - RNA, 22 nt, Human
gcccugggcucccugcuccaca

SEQ ID NO: 902647 - RNA, 20 nt, Human
agaagucagcucagaaguga

SEQ ID NO: 902648 - RNA, 20 nt, Human
augaaauuccuguuuucuga

SEQ ID NO: 902649 - RNA, 22 nt, Human
ugcaaggcagcaccagcucuug

SEQ ID NO: 902650 - RNA, 22 nt, Human
ugaaauuagugaaguuacaguu

SEQ ID NO: 902651 - RNA, 22 nt, Human
cuccuugguguaguacugagca

SEQ ID NO: 902652 - RNA, 17 nt, Human
gagagcugcugcuuccg

SEQ ID NO: 902653 - RNA, 22 nt, Human
accugggaguaugcagugguga

SEQ ID NO: 902654 - RNA, 22 nt, Human
ucaggccuucagaccuggcccg

SEQ ID NO: 902655 - RNA, 19 nt, Human
augacucuuauugucugaa

SEQ ID NO: 902656 - RNA, 22 nt, Human
cagcucaaguuucccaggucag

SEQ ID NO: 902657 - RNA, 22 nt, Human
uuuggauauguuucugucuucu

SEQ ID NO: 902658 - RNA, 22 nt, Human
ucuucagugcauguuaccuaua

SEQ ID NO: 902659 - RNA, 22 nt, Human
gcaugcaaggggugugaaguga

SEQ ID NO: 902660 - RNA, 22 nt, Human
gcucugucauuuugcagacacu

SEQ ID NO: 902661 - RNA, 22 nt, Human
auugucuucuggucuuaucuuu

SEQ ID NO: 902662 - RNA, 22 nt, Human
uagcuguucccagcucugugua

SEQ ID NO: 902663 - RNA, 22 nt, Human
uuuuuggguccaggcuguaucu

SEQ ID NO: 902664 - RNA, 22 nt, Human
aaaucuguaagcaauugcucag

SEQ ID NO: 902665 - RNA, 22 nt, Human
aacuuucuuucacagaaguauc

SEQ ID NO: 902666 - RNA, 22 nt, Human
uaggaccaaguggagugcaggu

SEQ ID NO: 902667 - RNA, 22 nt, Human
uagcaucuugauuucagaccag

SEQ ID NO: 902668 - RNA, 22 nt, Human
uucugagcacguucauuuaaau

SEQ ID NO: 902669 - RNA, 22 nt, Human
uugucuguaaagacggccacca

SEQ ID NO: 902670 - RNA, 22 nt, Human
guggcagugccguuugguucag

SEQ ID NO: 902671 - RNA, 22 nt, Human
aaugucuuuaaagugcaauaga

SEQ ID NO: 902672 - RNA, 22 nt, Human
uauugacaauuugugaaacuau

SEQ ID NO: 902673 - RNA, 22 nt, Human
uuucacagcagaauuucugagg

SEQ ID NO: 902674 - RNA, 22 nt, Human
ucauuucaguccucugugugag

SEQ ID NO: 902675 - RNA, 22 nt, Human
ucuggcacuuaaaugagaauuu

SEQ ID NO: 902676 - RNA, 20 nt, Human
agcauuugaaauaugacuau

SEQ ID NO: 902677 - RNA, 22 nt, Human
uaucaugaucagcaacuaauca

SEQ ID NO: 902678 - RNA, 22 nt, Human
gcuggccaaaguguaccuggag

SEQ ID NO: 902679 - RNA, 18 nt, Human
ggcugagguugacuagaa

SEQ ID NO: 902680 - RNA, 23 nt, Human
gccugccugaccugugcaaaguc

SEQ ID NO: 902681 - RNA, 22 nt, Human
ggcucugcucacagcccgcagc

SEQ ID NO: 902682 - RNA, 22 nt, Human
agcauaauuccugacacacaag

SEQ ID NO: 902683 - RNA, 22 nt, Human
acauucuacaguuaaccauuag

SEQ ID NO: 902684 - RNA, 22 nt, Human
cagcuggcagaaccugcaucca

SEQ ID NO: 902685 - RNA, 22 nt, Human
ccuggacuugauauucucuuuc

SEQ ID NO: 902686 - RNA, 22 nt, Human
acaguucuguccuagacuucgu

SEQ ID NO: 902687 - RNA, 22 nt, Human
auggcucucuugaccuaggcac

SEQ ID NO: 902688 - RNA, 22 nt, Human
auggaaugaaaaacacaugcaa

SEQ ID NO: 902689 - RNA, 22 nt, Human
gccugcagggccugggccuacc

SEQ ID NO: 902690 - RNA, 22 nt, Human
ccuuucucuuggauaccgauug

SEQ ID NO: 902691 - RNA, 22 nt, Human
ggccaagguggagaaggcacug

SEQ ID NO: 902692 - RNA, 22 nt, Human
ccagcagcuuuauuggcucucc

SEQ ID NO: 902693 - RNA, 22 nt, Human
uuuuggugaauuuaagugcugu

SEQ ID NO: 902694 - RNA, 22 nt, Human
cuggaaggcggagguuguagug

SEQ ID NO: 902695 - RNA, 22 nt, Human
ugucugggagacugaucacccg

SEQ ID NO: 902696 - RNA, 22 nt, Human
ccacagaaaguugucuagagua

SEQ ID NO: 902697 - RNA, 22 nt, Human
ggugcugauaguaacaauaaua

SEQ ID NO: 902698 - RNA, 22 nt, Human
cugagauacuguggcgaaugca

SEQ ID NO: 902699 - RNA, 20 nt, Human
uuccaacucacaucucuaca

SEQ ID NO: 902700 - RNA, 19 nt, Human
acuggcagggcugcggugg

SEQ ID NO: 902701 - RNA, 22 nt, Human
cagcuugugaaaugucaccacu

SEQ ID NO: 902702 - RNA, 19 nt, Human
aaggcugguaccauagguu

SEQ ID NO: 902703 - RNA, 22 nt, Human
aaugucaaaauggaaugagacu

SEQ ID NO: 902704 - RNA, 21 nt, Human
cucuggagucaagagcuucca

SEQ ID NO: 902705 - RNA, 22 nt, Human
ggccucaagcuacccucucacc

SEQ ID NO: 902706 - RNA, 22 nt, Human
uuaauacuauaauuugaaguac

SEQ ID NO: 902707 - RNA, 22 nt, Human
cuccaggaaagccugaggcccg

SEQ ID NO: 902708 - RNA, 19 nt, Human
uguagcaguuuaaaacaac

SEQ ID NO: 902709 - RNA, 22 nt, Human
uaaaaaguugaaaggacuuauc

SEQ ID NO: 902710 - RNA, 22 nt, Human
uuuacaguuaagaaauguuacc

SEQ ID NO: 902711 - RNA, 22 nt, Human
uagccaggucacacuguguguu

SEQ ID NO: 902712 - RNA, 22 nt, Human
ggggcaggagguguucucuuuu

SEQ ID NO: 902713 - RNA, 22 nt, Human
acucacagcagacuaugaggga

SEQ ID NO: 902714 - RNA, 22 nt, Human
guucuaauuuggggcuccuuag

SEQ ID NO: 902715 - RNA, 22 nt, Human
cuaagcaagaaugagugcaaca

SEQ ID NO: 902716 - RNA, 22 nt, Human
gcagcauuaccaagacauggca

SEQ ID NO: 902717 - RNA, 22 nt, Human
gaggaagcugcguggcauuuca

SEQ ID NO: 902718 - RNA, 22 nt, Human
aggcucaggucucaggucuggc

SEQ ID NO: 902719 - RNA, 22 nt, Human
caagcguggcugcucugaugga

SEQ ID NO: 902720 - RNA, 22 nt, Human
auggaauggcucccugccccag

SEQ ID NO: 902721 - RNA, 22 nt, Human
ggcaaggguugaagauaaggua

SEQ ID NO: 902722 - RNA, 22 nt, Human
aucucaaaugauuacaccaagc

SEQ ID NO: 902723 - RNA, 22 nt, Human
gcuuugugaauuauuacucaca

SEQ ID NO: 902724 - RNA, 22 nt, Human
uaaaugaagcucaugggccaca

SEQ ID NO: 902725 - RNA, 22 nt, Human
gugacagauuugcugcgcaugg

SEQ ID NO: 902726 - RNA, 22 nt, Human
ucuuauaauguugaaggguugg

SEQ ID NO: 902727 - RNA, 22 nt, Human
ucuggggguuaagugaggacaa

SEQ ID NO: 902728 - RNA, 23 nt, Human
uggcacagaggaccaugcuuugc

SEQ ID NO: 902729 - RNA, 22 nt, Human
auuggucuccacuuguuuuaga

SEQ ID NO: 902730 - RNA, 22 nt, Human
uccagcucaaagugcuccuguc

SEQ ID NO: 902731 - RNA, 22 nt, Human
agacaacaugaucagcaguccu

SEQ ID NO: 902732 - RNA, 22 nt, Human
gacucagagaucccuggagguc

SEQ ID NO: 902733 - RNA, 22 nt, Human
aauuucuccaagaaugcuuaga

SEQ ID NO: 902734 - RNA, 22 nt, Human
ugcacuguaugguaucuggaca

SEQ ID NO: 902735 - RNA, 22 nt, Human
cugagcuuccaguuccuccagg

SEQ ID NO: 902736 - RNA, 22 nt, Human
ggaguggccacgacugggagau

SEQ ID NO: 902737 - RNA, 22 nt, Human
agucagagagcucucagcauag

SEQ ID NO: 902738 - RNA, 22 nt, Human
ugaguaaaagugaaucuuaugu

SEQ ID NO: 902739 - RNA, 22 nt, Human
uuucugaagguuaaggaauuag

SEQ ID NO: 902740 - RNA, 22 nt, Human
agaagccagucgcucucccgca

SEQ ID NO: 902741 - RNA, 22 nt, Human
cuugcaggcccagccuuacaag

SEQ ID NO: 902742 - RNA, 22 nt, Human
cugggcuccacuacuugcuaac

SEQ ID NO: 902743 - RNA, 19 nt, Human
guggccagggcaggggcug

SEQ ID NO: 902744 - RNA, 22 nt, Human
ccauggcaauggucagucuauu

SEQ ID NO: 902745 - RNA, 22 nt, Human
ccaggcccugcuccucacacca

SEQ ID NO: 902746 - RNA, 22 nt, Human
uauugcauccccauugugcccc

SEQ ID NO: 902747 - RNA, 22 nt, Human
auugagaaaggcuuauguuugc

SEQ ID NO: 902748 - RNA, 21 nt, Human
ugccaucucugugggaccagg

SEQ ID NO: 902749 - RNA, 22 nt, Human
aggcaggucacaugcuuggcga

SEQ ID NO: 902750 - RNA, 22 nt, Human
gcauguguuagagugugcaugc

SEQ ID NO: 902751 - RNA, 22 nt, Human
cuucacagucacccugcugugu

SEQ ID NO: 902752 - RNA, 22 nt, Human
aggcucugucaggcggagcagc

SEQ ID NO: 902753 - RNA, 22 nt, Human
gcuguaggaaugacauguaccu

SEQ ID NO: 902754 - RNA, 22 nt, Human
cuccugcuccugcuugcaagga

SEQ ID NO: 902755 - RNA, 22 nt, Human
cuguggucaugaguccuuccau

SEQ ID NO: 902756 - RNA, 21 nt, Human
uccugcugagaaacagauggu

SEQ ID NO: 902757 - RNA, 23 nt, Human
aagcuucuagggugggcaagaug

SEQ ID NO: 902758 - RNA, 22 nt, Human
agaccuggugauagcuguccua

SEQ ID NO: 902759 - RNA, 22 nt, Human
aggaaauaggaccagacaaagc

SEQ ID NO: 902760 - RNA, 22 nt, Human
aaacaguuaauugcuuucaguu

SEQ ID NO: 902761 - RNA, 22 nt, Human
uaucagugugcaucucugaaug

SEQ ID NO: 902762 - RNA, 23 nt, Human
aggauccugguacaggagcagag

SEQ ID NO: 902763 - RNA, 22 nt, Human
cacauuucuuauggauguuggc

SEQ ID NO: 902764 - RNA, 22 nt, Human
cagugaguaaguagacagcuua

SEQ ID NO: 902765 - RNA, 22 nt, Human
ccuggggcucugcacagagcag

SEQ ID NO: 902766 - RNA, 22 nt, Human
uccugggagagugggacuguau

SEQ ID NO: 902767 - RNA, 22 nt, Human
gagcagcagguggggcuggcuu

SEQ ID NO: 902768 - RNA, 19 nt, Human
ucucagaggaaaaauugcu

SEQ ID NO: 902769 - RNA, 22 nt, Human
uucaguuuuauuguacugcuau

SEQ ID NO: 902770 - RNA, 22 nt, Human
uccagcaguaaggaaaguacau

SEQ ID NO: 902771 - RNA, 22 nt, Human
ucaggcagucugacuccggagg

SEQ ID NO: 902772 - RNA, 22 nt, Human
uguauugaggauucauuuuugu

SEQ ID NO: 902773 - RNA, 21 nt, Human
gauuuaguggcuguucuaccu

SEQ ID NO: 902774 - RNA, 22 nt, Human
uaggcuuccgagucuugguauc

SEQ ID NO: 902775 - RNA, 22 nt, Human
uuacaguaaucgaguguugugg

SEQ ID NO: 902776 - RNA, 19 nt, Human
ccugggccuccaucacccc

SEQ ID NO: 902777 - RNA, 22 nt, Human
cagcauagcugauuaaggcaaa

SEQ ID NO: 902778 - RNA, 22 nt, Human
uucuguuacauggggcacagug

SEQ ID NO: 902779 - RNA, 22 nt, Human
guucugucugagcaccacagga

SEQ ID NO: 902780 - RNA, 22 nt, Human
cucugggaugaggccuaggcac

SEQ ID NO: 902781 - RNA, 22 nt, Human
augcugucccugcccuucaccc

SEQ ID NO: 902782 - RNA, 22 nt, Human
aggaauuaauaaccaguaagcc

SEQ ID NO: 902783 - RNA, 22 nt, Human
ugacacaagagcccuguuugcu

SEQ ID NO: 902784 - RNA, 22 nt, Human
ugccagagaagacccagucacu

SEQ ID NO: 902785 - RNA, 22 nt, Human
ucuguucaguugauguaguuuu

SEQ ID NO: 902786 - RNA, 22 nt, Human
uugcuaaguuauagaguaucuu

SEQ ID NO: 902787 - RNA, 22 nt, Human
aaagagcucuuacucuagugua

SEQ ID NO: 902788 - RNA, 22 nt, Human
uaggauuuauucuacaauauug

SEQ ID NO: 902789 - RNA, 22 nt, Human
aggccagagaggggaccagccu

SEQ ID NO: 902790 - RNA, 22 nt, Human
agcaauaacagaaaacuuuccu

SEQ ID NO: 902791 - RNA, 19 nt, Human
agccagugagccucugggu

SEQ ID NO: 902792 - RNA, 22 nt, Human
uagaaauggggaaguaguuagg

SEQ ID NO: 902793 - RNA, 22 nt, Human
cauagaggcaaaauggcuguac

SEQ ID NO: 902794 - RNA, 22 nt, Human
cuuagaaagaguuuucuccccu

SEQ ID NO: 902795 - RNA, 22 nt, Human
uggagcagggcaucacugugcg

SEQ ID NO: 902796 - RNA, 22 nt, Human
gcaggacucaaaucugaaggca

SEQ ID NO: 902797 - RNA, 22 nt, Human
aucaucuugaaagucuauguuu

SEQ ID NO: 902798 - RNA, 22 nt, Human
aggccugaaguguggagugggg

SEQ ID NO: 902799 - RNA, 22 nt, Human
cuuuccugagaaaggagaagga

SEQ ID NO: 902800 - RNA, 22 nt, Human
auuuuuaugacaaaccauccuc

SEQ ID NO: 902801 - RNA, 22 nt, Human
augcaacagucaguacauccgg

SEQ ID NO: 902802 - RNA, 22 nt, Human
ucaacacuuuugucuuuguccc

SEQ ID NO: 902803 - RNA, 22 nt, Human
agugccuuggguauuuugagua

SEQ ID NO: 902804 - RNA, 22 nt, Human
agagccugugauugucaucacc

SEQ ID NO: 902805 - RNA, 22 nt, Human
ugaguuaaaugagaacaugaaa

SEQ ID NO: 902806 - RNA, 22 nt, Human
gggugacagcagcuaaugacag

SEQ ID NO: 902807 - RNA, 22 nt, Human
uuuauugacccaaagcgagagu

SEQ ID NO: 902808 - RNA, 22 nt, Human
cugagaaaagacauuucuagau

SEQ ID NO: 902809 - RNA, 22 nt, Human
agaaggcaccguggccaauauu

SEQ ID NO: 902810 - RNA, 22 nt, Human
aaucgcuugguaauuuuaaaag

SEQ ID NO: 902811 - RNA, 22 nt, Human
ggaggugacuggaucaugggca

SEQ ID NO: 902812 - RNA, 22 nt, Human
uagaaaucuacuuagacuuucu

SEQ ID NO: 902813 - RNA, 22 nt, Human
ggcuggaagagacugaggacac

SEQ ID NO: 902814 - RNA, 22 nt, Human
gaucagugaacuauacugccuc

SEQ ID NO: 902815 - RNA, 22 nt, Human
uccccaggggcaucucucugcu

SEQ ID NO: 902816 - RNA, 22 nt, Human
auauauaucgaguucaugucuc

SEQ ID NO: 902817 - RNA, 22 nt, Human
cugcagggcagaagggcauaga

SEQ ID NO: 902818 - RNA, 22 nt, Human
ccaggcagagggauccccaucc

SEQ ID NO: 902819 - RNA, 22 nt, Human
cccaggagguggagguugcagu

SEQ ID NO: 902820 - RNA, 22 nt, Human
agccuggccacucagggccuga

SEQ ID NO: 902821 - RNA, 21 nt, Human
aaaaggaaggucuguuugggg

SEQ ID NO: 902822 - RNA, 22 nt, Human
aucuguaacaucaguagcagaa

SEQ ID NO: 902823 - RNA, 22 nt, Human
gaagaaguguaagucuguuuca

SEQ ID NO: 902824 - RNA, 22 nt, Human
agaauuuagcuccuuggucaua

SEQ ID NO: 902825 - RNA, 22 nt, Human
cugcuggcaagcccaguuggag

SEQ ID NO: 902826 - RNA, 22 nt, Human
uguuuauaaauuuucuugccau

SEQ ID NO: 902827 - RNA, 23 nt, Human
ugaacaguaugugggacauugag

SEQ ID NO: 902828 - RNA, 22 nt, Human
gcucccugcacucugcagcccu

SEQ ID NO: 902829 - RNA, 22 nt, Human
caugggcaguuggcagggcuca

SEQ ID NO: 902830 - RNA, 22 nt, Human
uuacagagcuggguggagagag

SEQ ID NO: 902831 - RNA, 22 nt, Human
acauuucuucccuuuagcagaa

SEQ ID NO: 902832 - RNA, 22 nt, Human
gucguggagcucacagugugcc

SEQ ID NO: 902833 - RNA, 22 nt, Human
ugucugcuaaauuacuauuaca

SEQ ID NO: 902834 - RNA, 22 nt, Human
caauaguucgguccugaaggcc

SEQ ID NO: 902835 - RNA, 22 nt, Human
acagagcacugcccugugccgc

SEQ ID NO: 902836 - RNA, 22 nt, Human
ucauuucaguucagaggccuuu

SEQ ID NO: 902837 - RNA, 20 nt, Human
aguggcagggaaauggaaag

SEQ ID NO: 902838 - RNA, 22 nt, Human
ugcaauauguugcauuguaugg

SEQ ID NO: 902839 - RNA, 22 nt, Human
agacucaugacacuuccuauga

SEQ ID NO: 902840 - RNA, 22 nt, Human
gaaauucaaaaugucaguauag

SEQ ID NO: 902841 - RNA, 22 nt, Human
acagcagguuacaguggcacag

SEQ ID NO: 902842 - RNA, 22 nt, Human
uuacauagauucauuuaguuaa

SEQ ID NO: 902843 - RNA, 22 nt, Human
uuccuucuuugugguagaaagu

SEQ ID NO: 902844 - RNA, 22 nt, Human
uagaacuaaagaacaacuuuga

SEQ ID NO: 902845 - RNA, 22 nt, Human
uccugcuggcaaggaagggacu

SEQ ID NO: 902846 - RNA, 22 nt, Human
gcccucuggcagccuuggcugg

SEQ ID NO: 902847 - RNA, 22 nt, Human
acagagagaaacaaucagcagc

SEQ ID NO: 902848 - RNA, 20 nt, Human
cuccccucuacagagggcug

SEQ ID NO: 902849 - RNA, 22 nt, Human
caguggcaggauuucagcucag

SEQ ID NO: 902850 - RNA, 21 nt, Human
agcuggccugguuugagcucc

SEQ ID NO: 902851 - RNA, 22 nt, Human
uguauguguccuaauucaagca

SEQ ID NO: 902852 - RNA, 22 nt, Human
caugcaucuggucuuggaaaua

SEQ ID NO: 902853 - RNA, 22 nt, Human
acagaauaagguuuaucucucc

SEQ ID NO: 902854 - RNA, 22 nt, Human
cucccacuccuggcucaccaca

SEQ ID NO: 902855 - RNA, 22 nt, Human
ccugagcuuuaaaagccaugua

SEQ ID NO: 902856 - RNA, 20 nt, Human
auucugcuuugaaaauaagg

SEQ ID NO: 902857 - RNA, 22 nt, Human
gaaguauuucugaguugcccag

SEQ ID NO: 902858 - RNA, 22 nt, Human
uggggguguccuggugcacaca

SEQ ID NO: 902859 - RNA, 22 nt, Human
aggcaauccccugaggauacuu

SEQ ID NO: 902860 - RNA, 22 nt, Human
cagccuguggcagaggucuaau

SEQ ID NO: 902861 - RNA, 22 nt, Human
cugaggcacuaacaaggacaag

SEQ ID NO: 902862 - RNA, 22 nt, Human
gauugaaauauaaauauguguu

SEQ ID NO: 902863 - RNA, 22 nt, Human
cuccugccaccgcgguguccug

SEQ ID NO: 902864 - RNA, 22 nt, Human
uggaagcggugcuggcccaugg

SEQ ID NO: 902865 - RNA, 22 nt, Human
guucacaguuuuauaccugaga

SEQ ID NO: 902866 - RNA, 22 nt, Human
gaaaagaacugcaugggauuaa

SEQ ID NO: 902867 - RNA, 22 nt, Human
cucagcagcugcugcugguggg

SEQ ID NO: 902868 - RNA, 22 nt, Human
auuuguauauuuaagaggguag

SEQ ID NO: 902869 - RNA, 22 nt, Human
caggccacgccccggcguguga

SEQ ID NO: 902870 - RNA, 22 nt, Human
gccuggcaggccucaugagggg

SEQ ID NO: 902871 - RNA, 22 nt, Human
agcugccugccaugccgcuggu

SEQ ID NO: 902872 - RNA, 22 nt, Human
ccacauuuugcuuugccuaggu

SEQ ID NO: 902873 - RNA, 22 nt, Human
gaugucuuugaggcucacugcu

SEQ ID NO: 902874 - RNA, 22 nt, Human
uaagguaauuguugcugaaauu

SEQ ID NO: 902875 - RNA, 22 nt, Human
auguccaguuucuacacacaua

SEQ ID NO: 902876 - RNA, 22 nt, Human
ggcuggaaugcaacuguguguu

SEQ ID NO: 902877 - RNA, 22 nt, Human
uuuugugagcccauaaaugcca

SEQ ID NO: 902878 - RNA, 22 nt, Human
ugugugaagcacucugggugau

SEQ ID NO: 902879 - RNA, 22 nt, Human
aaucuuggcaaauguagcuucc

SEQ ID NO: 902880 - RNA, 22 nt, Human
caggaggggguggaguuucgcc

SEQ ID NO: 902881 - RNA, 22 nt, Human
agcugugauuauccacuggaau

SEQ ID NO: 902882 - RNA, 22 nt, Human
auggcugggcuuuuagucagau

SEQ ID NO: 902883 - RNA, 22 nt, Human
ugugcucuugucugugacuaac

SEQ ID NO: 902884 - RNA, 22 nt, Human
ugugcccuuuccugcuccucca

SEQ ID NO: 902885 - RNA, 22 nt, Human
gucuuaaaaucagaggauauag

SEQ ID NO: 902886 - RNA, 22 nt, Human
uacauucagcaaaagaaugguu

SEQ ID NO: 902887 - RNA, 22 nt, Human
aggucugagcucagggccuggc

SEQ ID NO: 902888 - RNA, 20 nt, Human
ugcagcugcaggaggguggg

SEQ ID NO: 902889 - RNA, 22 nt, Human
aguuucacuaaggucugugugu

SEQ ID NO: 902890 - RNA, 19 nt, Human
ugagaggcuuaaggcagcu

SEQ ID NO: 902891 - RNA, 21 nt, Human
aucuuaaaaggucuuaacuuu

SEQ ID NO: 902892 - RNA, 22 nt, Human
gagcccugauuugcagcauuug

SEQ ID NO: 902893 - RNA, 22 nt, Human
ggagcaagucccaggcacuagu

SEQ ID NO: 902894 - RNA, 22 nt, Human
ugcccuggcucuccacuaguuu

SEQ ID NO: 902895 - RNA, 22 nt, Human
gcccagcugcacccuggugggu

SEQ ID NO: 902896 - RNA, 22 nt, Human
agaaugauagcuaguauuuacu

SEQ ID NO: 902897 - RNA, 22 nt, Human
gaaacaaucaucaugugauuug

SEQ ID NO: 902898 - RNA, 22 nt, Human
ucaaaucucacucugcauuucu

SEQ ID NO: 902899 - RNA, 22 nt, Human
ggcuuauauauuuucacuugcc

SEQ ID NO: 902900 - RNA, 22 nt, Human
gaugaucaucuguaaaguuaga

SEQ ID NO: 902901 - RNA, 22 nt, Human
cugucuguacaaauguggggcc

SEQ ID NO: 902902 - RNA, 22 nt, Human
gcacugggagucuguggggguu

SEQ ID NO: 902903 - RNA, 22 nt, Human
aaacuguccucccgagguuucc

SEQ ID NO: 902904 - RNA, 17 nt, Human
uuucaagguuacguucc

SEQ ID NO: 902905 - RNA, 22 nt, Human
agggaucagcagaggguguggu

SEQ ID NO: 902906 - RNA, 22 nt, Human
aaucaggcacagcgacugcagc

SEQ ID NO: 902907 - RNA, 22 nt, Human
ugaguucauuugagugaacacu

SEQ ID NO: 902908 - RNA, 22 nt, Human
ggagcaggcagggccgugucug

SEQ ID NO: 902909 - RNA, 22 nt, Human
gaaauguuuuacaaggcauacu

SEQ ID NO: 902910 - RNA, 22 nt, Human
gcagguguggauuugcauccag

SEQ ID NO: 902911 - RNA, 22 nt, Human
aaaugagguuaauacagugcuu

SEQ ID NO: 902912 - RNA, 22 nt, Human
cuugcugcugcaucugagcaug

SEQ ID NO: 902913 - RNA, 21 nt, Human
uucagaaguugagggcagguu

SEQ ID NO: 902914 - RNA, 22 nt, Human
cucagccaugcaacaugcuggg

SEQ ID NO: 902915 - RNA, 22 nt, Human
aaugccuuggagagccuagagg

SEQ ID NO: 902916 - RNA, 23 nt, Human
aggcccugccugucccucuuuuu

SEQ ID NO: 902917 - RNA, 22 nt, Human
uaucauuuguuauuauuagugg

SEQ ID NO: 902918 - RNA, 22 nt, Human
cagugcuaccccggaaguuggu

SEQ ID NO: 902919 - RNA, 22 nt, Human
aggaggcccuagagcucuagag

SEQ ID NO: 902920 - RNA, 22 nt, Human
uuuauauugggagucguuuuga

SEQ ID NO: 902921 - RNA, 22 nt, Human
cucuuuggccagaaaauguuuu

SEQ ID NO: 902922 - RNA, 22 nt, Human
cagauuaacacggagcuuaaca

SEQ ID NO: 902923 - RNA, 22 nt, Human
agaagccaaaugccagugaccu

SEQ ID NO: 902924 - RNA, 22 nt, Human
uccugggguguguuuugcugcu

SEQ ID NO: 902925 - RNA, 22 nt, Human
ugugccuggcauucugggcuuc

SEQ ID NO: 902926 - RNA, 22 nt, Human
acugucacuugcaacugugagg

SEQ ID NO: 902927 - RNA, 22 nt, Human
ucuaagaaaucagaugaugagg

SEQ ID NO: 902928 - RNA, 22 nt, Human
ucccaggcuggcaggcagcagu

SEQ ID NO: 902929 - RNA, 22 nt, Human
agguccagagguugaacggugg

SEQ ID NO: 902930 - RNA, 22 nt, Human
uuuauuauucuguucucucuac

SEQ ID NO: 902931 - RNA, 22 nt, Human
cucauccacccucacuaggaaa

SEQ ID NO: 902932 - RNA, 22 nt, Human
acuucucucauucagacauagc

SEQ ID NO: 902933 - RNA, 22 nt, Human
cugauaauuugcugacuuucag

SEQ ID NO: 902934 - RNA, 22 nt, Human
accacagucucgaagcacugca

SEQ ID NO: 902935 - RNA, 21 nt, Human
ugcuggcugaaaggcacagag

SEQ ID NO: 902936 - RNA, 22 nt, Human
gauuuacagguuagguccugua

SEQ ID NO: 902937 - RNA, 22 nt, Human
uggagcuggcagcggaaaaggg

SEQ ID NO: 902938 - RNA, 22 nt, Human
ugguaaggguauuauuucaucc

SEQ ID NO: 902939 - RNA, 22 nt, Human
ucccagcacgucugcuguuucu

SEQ ID NO: 902940 - RNA, 22 nt, Human
ggacaggaugcugaagaugaag

SEQ ID NO: 902941 - RNA, 22 nt, Human
gcacagaacacuggugaguccc

SEQ ID NO: 902942 - RNA, 22 nt, Human
ggaaggggucaccuccugauga

SEQ ID NO: 902943 - RNA, 22 nt, Human
gaaaaagugaccuugguagcua

SEQ ID NO: 902944 - RNA, 22 nt, Human
agucuacaacgcaagcaacaug

SEQ ID NO: 902945 - RNA, 22 nt, Human
agacagcugcucgcagagcuau

SEQ ID NO: 902946 - RNA, 22 nt, Human
ccacagaagauggggagagugg

SEQ ID NO: 902947 - RNA, 22 nt, Human
agugucuuacaugaauugauuu

SEQ ID NO: 902948 - RNA, 22 nt, Human
ggcuggcugugcccuguacucu

SEQ ID NO: 902949 - RNA, 22 nt, Human
gugaagccucggaaccaagcuc

SEQ ID NO: 902950 - RNA, 22 nt, Human
accugagccuagggagguugag

SEQ ID NO: 902951 - RNA, 22 nt, Human
gcacugaacuuuaaucauuucu

SEQ ID NO: 902952 - RNA, 22 nt, Human
aucuguacaagauuuuaugcgu

SEQ ID NO: 902953 - RNA, 22 nt, Human
acucuguaauucugaagcaccu

SEQ ID NO: 902954 - RNA, 22 nt, Human
gugucaauaaauagcggugugg

SEQ ID NO: 902955 - RNA, 22 nt, Human
ugcucuccugcuccucagccca

SEQ ID NO: 902956 - RNA, 22 nt, Human
uggcuuccugcacagugucugc

SEQ ID NO: 902957 - RNA, 22 nt, Human
ugaggucugcagggcugugcau

SEQ ID NO: 902958 - RNA, 22 nt, Human
auguguauguguauacacacag

SEQ ID NO: 902959 - RNA, 22 nt, Human
ugcuggaggagaagguugcuca

SEQ ID NO: 902960 - RNA, 22 nt, Human
aaggaaaugaagcugauguugg

SEQ ID NO: 902961 - RNA, 22 nt, Human
gcuuccugucccucagccauga

SEQ ID NO: 902962 - RNA, 22 nt, Human
cugugucccaguaccuugggua

SEQ ID NO: 902963 - RNA, 22 nt, Human
ucucuguagcagcuuccuuccu

SEQ ID NO: 902964 - RNA, 22 nt, Human
cccagccaagugaucugaccgc

SEQ ID NO: 902965 - RNA, 22 nt, Human
uucucauucugacucaguguag

SEQ ID NO: 902966 - RNA, 22 nt, Human
ucaaaggaauuugauuuugaug

SEQ ID NO: 902967 - RNA, 22 nt, Human
gugaccauuugacauauccuug

SEQ ID NO: 902968 - RNA, 22 nt, Human
ugcccugcuguggcucugccca

SEQ ID NO: 902969 - RNA, 20 nt, Human
ugugucuuccuuucuuuaug

SEQ ID NO: 902970 - RNA, 22 nt, Human
auugaaacaaguugcuuucuau

SEQ ID NO: 902971 - RNA, 22 nt, Human
uaucuguauucugacagucacu

SEQ ID NO: 902972 - RNA, 22 nt, Human
uuuuuauaccaccucucacuua

SEQ ID NO: 902973 - RNA, 22 nt, Human
uauuccaaaauaguuaagcacu

SEQ ID NO: 902974 - RNA, 22 nt, Human
gacauuuauuggauuuuacgag

SEQ ID NO: 902975 - RNA, 22 nt, Human
uccugggaagagaccugagcau

SEQ ID NO: 902976 - RNA, 22 nt, Human
auauaugcauguguacuuaugu

SEQ ID NO: 902977 - RNA, 22 nt, Human
ugggccccuugguuuccugagc

SEQ ID NO: 902978 - RNA, 22 nt, Human
gugcaauaaauaaauagauugu

SEQ ID NO: 902979 - RNA, 22 nt, Human
uccacagguccucuuugcaaag

SEQ ID NO: 902980 - RNA, 22 nt, Human
uucucuccagacugcagugggu

SEQ ID NO: 902981 - RNA, 22 nt, Human
uccugcagcugaagcucaugug

SEQ ID NO: 902982 - RNA, 22 nt, Human
uuucacagugcucuguaaguau

SEQ ID NO: 902983 - RNA, 22 nt, Human
ucugagagauacaaggaggcaa

SEQ ID NO: 902984 - RNA, 22 nt, Human
ucuucagagcauuucugaggua

SEQ ID NO: 902985 - RNA, 19 nt, Human
gaggaggaaaacuagugua

SEQ ID NO: 902986 - RNA, 22 nt, Human
acucagagccucgagggacugc

SEQ ID NO: 902987 - RNA, 21 nt, Human
uguaacaaaauacugcagauu

SEQ ID NO: 902988 - RNA, 22 nt, Human
ugcaggagcagagauggcugga

SEQ ID NO: 902989 - RNA, 22 nt, Human
uguauucuuaguuuuaaucaga

SEQ ID NO: 902990 - RNA, 23 nt, Human
uaccugaaguaagcauucaucca

SEQ ID NO: 902991 - RNA, 22 nt, Human
acucugagccaccagaucccca

SEQ ID NO: 902992 - RNA, 22 nt, Human
agauuuccagaccaauuucuca

SEQ ID NO: 902993 - RNA, 22 nt, Human
agcaaggggcagugaaagugug

SEQ ID NO: 902994 - RNA, 19 nt, Human
aucuuuagcaacuuucaaa

SEQ ID NO: 902995 - RNA, 22 nt, Human
ucacacacauaaucuaagauua

SEQ ID NO: 902996 - RNA, 22 nt, Human
cugugccuuuguagcugugccu

SEQ ID NO: 902997 - RNA, 22 nt, Human
ugagcagaggagugacguaggu

SEQ ID NO: 902998 - RNA, 22 nt, Human
gaauaguucuauggcugcaggg

SEQ ID NO: 902999 - RNA, 23 nt, Human
ucagugcuugggggugacgcgcc

SEQ ID NO: 903000 - RNA, 22 nt, Human
acaauguuuugaaacaucuagg

SEQ ID NO: 903001 - RNA, 22 nt, Human
auuucccaacacauuagaaaau

SEQ ID NO: 903002 - RNA, 22 nt, Human
agcagauauuuguugagcacuu

SEQ ID NO: 903003 - RNA, 18 nt, Human
ggcagggaaaagauaggg

SEQ ID NO: 903004 - RNA, 22 nt, Human
auaaucauucacauaaggugcu

SEQ ID NO: 903005 - RNA, 22 nt, Human
caggguggaagcuguagagugg

SEQ ID NO: 903006 - RNA, 22 nt, Human
ccugucugcggaggaguggaag

SEQ ID NO: 903007 - RNA, 22 nt, Human
ccugagaauaauucuccauagc

SEQ ID NO: 903008 - RNA, 22 nt, Human
aauuauauuguggugugaaugu

SEQ ID NO: 903009 - RNA, 22 nt, Human
auaguuacaaagacuuuuuaaa

SEQ ID NO: 903010 - RNA, 22 nt, Human
gaaauuaaccaccuuuggcuuu

SEQ ID NO: 903011 - RNA, 22 nt, Human
agggcuggcuaggugcguuccc

SEQ ID NO: 903012 - RNA, 22 nt, Human
uagcugccagaccauucuuacu

SEQ ID NO: 903013 - RNA, 22 nt, Human
ugcagggugcacaguggggugc

SEQ ID NO: 903014 - RNA, 22 nt, Human
guucaauuucagcauccauuga

SEQ ID NO: 903015 - RNA, 22 nt, Human
cugcaaauaggggugugaauaa

SEQ ID NO: 903016 - RNA, 22 nt, Human
auucuaaugcccuggccccagc

SEQ ID NO: 903017 - RNA, 22 nt, Human
accgggcuaauuuuuguaucuu

SEQ ID NO: 903018 - RNA, 22 nt, Human
aaguggggccuggugguacagu

SEQ ID NO: 903019 - RNA, 22 nt, Human
uucucugaaggccaugcucacu

SEQ ID NO: 903020 - RNA, 22 nt, Human
ucagaaguccccagucaaggag

SEQ ID NO: 903021 - RNA, 22 nt, Human
caacaguauagcuuuugacugc

SEQ ID NO: 903022 - RNA, 22 nt, Human
gaaacaauacuuguccucacua

SEQ ID NO: 903023 - RNA, 22 nt, Human
ugccacaguuguuugugcucua

SEQ ID NO: 903024 - RNA, 22 nt, Human
acauucaugcaccuuccuaucc

SEQ ID NO: 903025 - RNA, 22 nt, Human
cgauuuccgcuugaucugaucu

SEQ ID NO: 903026 - RNA, 22 nt, Human
cugaaaggcaguggguagugug

SEQ ID NO: 903027 - RNA, 22 nt, Human
gcugucaguuuuacccacagac

SEQ ID NO: 903028 - RNA, 22 nt, Human
ccaguccuggccaguaacauga

SEQ ID NO: 903029 - RNA, 22 nt, Human
aaagucuaaauuauucaauaag

SEQ ID NO: 903030 - RNA, 22 nt, Human
aauguucagcgagggaugcuag

SEQ ID NO: 903031 - RNA, 20 nt, Human
aacuuguuuuguuuucuaau

SEQ ID NO: 903032 - RNA, 22 nt, Human
cccaggcugccacgauuacugc

SEQ ID NO: 903033 - RNA, 22 nt, Human
agugugugcuguuccccggagg

SEQ ID NO: 903034 - RNA, 22 nt, Human
aucaaagagugagauuuuuacu

SEQ ID NO: 903035 - RNA, 23 nt, Human
ccccacuaccgugaugugcgagg

SEQ ID NO: 903036 - RNA, 22 nt, Human
cugccucuauaggaguccacca

SEQ ID NO: 903037 - RNA, 17 nt, Human
uuccuugggugcugggu

SEQ ID NO: 903038 - RNA, 23 nt, Human
ucuuuacauacugaugaguucuc

SEQ ID NO: 903039 - RNA, 22 nt, Human
ccauguggugggaaggagaaug

SEQ ID NO: 903040 - RNA, 22 nt, Human
aggacuaauuucaggggauaua

SEQ ID NO: 903041 - RNA, 19 nt, Human
uucacaagugaugucucuc

SEQ ID NO: 903042 - RNA, 22 nt, Human
aaugaguucugacacuucacga

SEQ ID NO: 903043 - RNA, 22 nt, Human
acagugauuauuaguugguggu

SEQ ID NO: 903044 - RNA, 22 nt, Human
aguguuuauggaaucuuaguua

SEQ ID NO: 903045 - RNA, 20 nt, Human
ucuuacaaucguuacaucca

SEQ ID NO: 903046 - RNA, 22 nt, Human
caggccagugggaaauagggau

SEQ ID NO: 903047 - RNA, 22 nt, Human
uguuucuugggugcucacauca

SEQ ID NO: 903048 - RNA, 22 nt, Human
ugcccacuggauaaugcaaacu

SEQ ID NO: 903049 - RNA, 22 nt, Human
ggucauugaaaucagaaggguu

SEQ ID NO: 903050 - RNA, 22 nt, Human
aaaugccuauuuguuccuucag

SEQ ID NO: 903051 - RNA, 22 nt, Human
uauguacucaucaacuauugaa

SEQ ID NO: 903052 - RNA, 22 nt, Human
uuuuucuaauggcuuaggaugu

SEQ ID NO: 903053 - RNA, 22 nt, Human
gccuggauuacaaacagccaac

SEQ ID NO: 903054 - RNA, 22 nt, Human
agcuggcagagcauuuguggcc

SEQ ID NO: 903055 - RNA, 22 nt, Human
agaauuagcugggcagauuccu

SEQ ID NO: 903056 - RNA, 22 nt, Human
ucacccagggacugugauggaa

SEQ ID NO: 903057 - RNA, 22 nt, Human
ggcaugagagguccuggggauu

SEQ ID NO: 903058 - RNA, 22 nt, Human
aaggccagauucucucuagggg

SEQ ID NO: 903059 - RNA, 22 nt, Human
gagcagcuagauaaagcccuuc

SEQ ID NO: 903060 - RNA, 22 nt, Human
aacuacuauucuuuuccaaacu

SEQ ID NO: 903061 - RNA, 22 nt, Human
ggcuccagggaguggagagaag

SEQ ID NO: 903062 - RNA, 22 nt, Human
agggaggaaggauguuccaaag

SEQ ID NO: 903063 - RNA, 22 nt, Human
cuugugcauuucauuccucagg

SEQ ID NO: 903064 - RNA, 22 nt, Human
agcaccagagcuaugggccugc

SEQ ID NO: 903065 - RNA, 22 nt, Human
acaguaaugcauacaaguuagu

SEQ ID NO: 903066 - RNA, 22 nt, Human
caaggcucugcuucuaucacau

SEQ ID NO: 903067 - RNA, 22 nt, Human
agagccagguguagucucggag

SEQ ID NO: 903068 - RNA, 19 nt, Human
uuuagaaguugaaacucug

SEQ ID NO: 903069 - RNA, 22 nt, Human
uaagaaucugcauuuuaacaag

SEQ ID NO: 903070 - RNA, 22 nt, Human
agccagacauggcuccugcucc

SEQ ID NO: 903071 - RNA, 22 nt, Human
gcaggcugaguauuacccuagu

SEQ ID NO: 903072 - RNA, 22 nt, Human
uguuagccucaugcuuaauagg

SEQ ID NO: 903073 - RNA, 22 nt, Human
auaaugcaccuuugaguauggc

SEQ ID NO: 903074 - RNA, 22 nt, Human
ggaggugacgaaaagaaauugu

SEQ ID NO: 903075 - RNA, 22 nt, Human
agcuaagauuuauuaaaggccc

SEQ ID NO: 903076 - RNA, 22 nt, Human
uucauugugaacacauucugcc

SEQ ID NO: 903077 - RNA, 22 nt, Human
caaggccuucgucuccuagcuu

SEQ ID NO: 903078 - RNA, 22 nt, Human
cugucccagauguucucagcac

SEQ ID NO: 903079 - RNA, 22 nt, Human
uauugcugacuuguucaguguu

SEQ ID NO: 903080 - RNA, 22 nt, Human
cugagaggaacaucuuaugcuu

SEQ ID NO: 903081 - RNA, 21 nt, Human
agagaaagucauggcuguggc

SEQ ID NO: 903082 - RNA, 22 nt, Human
aaacuuuaggaaggaauuuaca

SEQ ID NO: 903083 - RNA, 22 nt, Human
cauguacaaaaggcaaaugccu

SEQ ID NO: 903084 - RNA, 22 nt, Human
gcauggcaagacccugucucua

SEQ ID NO: 903085 - RNA, 22 nt, Human
cacagcugccauggcugcacuu

SEQ ID NO: 903086 - RNA, 22 nt, Human
gcccuguggauuaaugagcagg

SEQ ID NO: 903087 - RNA, 22 nt, Human
ccaggcccguucccuucuccag

SEQ ID NO: 903088 - RNA, 22 nt, Human
uagagcuguaucaaagagccuu

SEQ ID NO: 903089 - RNA, 22 nt, Human
uuugccugauucuaagagcuca

SEQ ID NO: 903090 - RNA, 22 nt, Human
ucuguggguagagugaguacuu

SEQ ID NO: 903091 - RNA, 22 nt, Human
ucugucuuuagaggccugugcu

SEQ ID NO: 903092 - RNA, 22 nt, Human
cuggccaggcuugggacagaca

SEQ ID NO: 903093 - RNA, 22 nt, Human
aacaugcaaagcuaugauguau

SEQ ID NO: 903094 - RNA, 22 nt, Human
aauuugggcgaggagggaggca

SEQ ID NO: 903095 - RNA, 22 nt, Human
auguuucagggugauagaaggu

SEQ ID NO: 903096 - RNA, 22 nt, Human
agucuauuuucagaagcaguuu

SEQ ID NO: 903097 - RNA, 22 nt, Human
cuuuuacugugaaaagaaacug

SEQ ID NO: 903098 - RNA, 22 nt, Human
ccacugcucugccaggagcugg

SEQ ID NO: 903099 - RNA, 22 nt, Human
ugucacauauauaauguucaau

SEQ ID NO: 903100 - RNA, 22 nt, Human
gcaguuaugugaaucaugugac

SEQ ID NO: 903101 - RNA, 23 nt, Human
uccaggagaauuccagggcccgg

SEQ ID NO: 903102 - RNA, 17 nt, Human
gcuuccucaugcaguuc

SEQ ID NO: 903103 - RNA, 22 nt, Human
acagaauuaaaguguuugugga

SEQ ID NO: 903104 - RNA, 22 nt, Human
cauguguagguauacaaaauuc

SEQ ID NO: 903105 - RNA, 22 nt, Human
ccugcccuucuuuccccagcau

SEQ ID NO: 903106 - RNA, 21 nt, Human
aaggcuccuccucuaggccuc

SEQ ID NO: 903107 - RNA, 22 nt, Human
aucagagaccggucaagucaug

SEQ ID NO: 903108 - RNA, 22 nt, Human
gugcugaauugugcucuuuaca

SEQ ID NO: 903109 - RNA, 22 nt, Human
cagcaagagaggcagggcaaau

SEQ ID NO: 903110 - RNA, 22 nt, Human
ucagauuuugcacgagguuuug

SEQ ID NO: 903111 - RNA, 22 nt, Human
augcauauuuucuguuggugac

SEQ ID NO: 903112 - RNA, 22 nt, Human
ggggacugccuuccacagacac

SEQ ID NO: 903113 - RNA, 22 nt, Human
ucuaugucagcaucuuucuacc

SEQ ID NO: 903114 - RNA, 21 nt, Human
gaagacaaaugggaauagcug

SEQ ID NO: 903115 - RNA, 22 nt, Human
agugugcuauugcaccaucaua

SEQ ID NO: 903116 - RNA, 22 nt, Human
ugccaagugcuuacuuggcccu

SEQ ID NO: 903117 - RNA, 22 nt, Human
agccuaggucugggucuagcag

SEQ ID NO: 903118 - RNA, 22 nt, Human
uuugaaagccuggcuuuucucu

SEQ ID NO: 903119 - RNA, 22 nt, Human
agcagcuggguccggcggagca

SEQ ID NO: 903120 - RNA, 19 nt, Human
uaaaacgugcauggcagca

SEQ ID NO: 903121 - RNA, 22 nt, Human
auuugcaauuuuacuuugcagu

SEQ ID NO: 903122 - RNA, 22 nt, Human
acugguuuuggaaaucaguaca

SEQ ID NO: 903123 - RNA, 22 nt, Human
auuagcuauaugcuaugugcca

SEQ ID NO: 903124 - RNA, 22 nt, Human
guggagcaugugaggacugagu

SEQ ID NO: 903125 - RNA, 22 nt, Human
ugccuagggccuaaccagagcc

SEQ ID NO: 903126 - RNA, 22 nt, Human
auacugaauuagguaaagcaua

SEQ ID NO: 903127 - RNA, 22 nt, Human
cccuggaggaaaaucugaggcu

SEQ ID NO: 903128 - RNA, 22 nt, Human
ucugagaacuccggguuagauc

SEQ ID NO: 903129 - RNA, 22 nt, Human
uacccaguuauuuugucuuugu

SEQ ID NO: 903130 - RNA, 23 nt, Human
ccuucuguuaaccaucugggggg

SEQ ID NO: 903131 - RNA, 22 nt, Human
aagccuaggccuacucugguuu

SEQ ID NO: 903132 - RNA, 22 nt, Human
gcccuguugucggacgucaagg

SEQ ID NO: 903133 - RNA, 22 nt, Human
gugcaggggccuccccuugcug

SEQ ID NO: 903134 - RNA, 22 nt, Human
agacaguguguguauauauggu

SEQ ID NO: 903135 - RNA, 22 nt, Human
acaaugaaagcaagaagacggc

SEQ ID NO: 903136 - RNA, 22 nt, Human
aagaugaugcagacuuugaugu

SEQ ID NO: 903137 - RNA, 22 nt, Human
aggcuccaccccgccagaccuu

SEQ ID NO: 903138 - RNA, 19 nt, Human
gucuuggcucucaaccauc

SEQ ID NO: 903139 - RNA, 22 nt, Human
gaaucaauuauccaggcuguug

SEQ ID NO: 903140 - RNA, 22 nt, Human
ugacauguaguuagaaaauagg

SEQ ID NO: 903141 - RNA, 22 nt, Human
cucugggcuuguugaccugcac

SEQ ID NO: 903142 - RNA, 22 nt, Human
cacacacaguuuuguauucugu

SEQ ID NO: 903143 - RNA, 22 nt, Human
ccaggcaaguagaagcuguggu

SEQ ID NO: 903144 - RNA, 23 nt, Human
cagguggcuccacgagggguggg

SEQ ID NO: 903145 - RNA, 22 nt, Human
cugaaggagaaggccacuguuc

SEQ ID NO: 903146 - RNA, 21 nt, Human
aggaggccaguacugcugaac

SEQ ID NO: 903147 - RNA, 22 nt, Human
ggggacccucaggacugcgucu

SEQ ID NO: 903148 - RNA, 22 nt, Human
aggcuucuuuuagaggggaugg

SEQ ID NO: 903149 - RNA, 22 nt, Human
gaguccuucuggcuggcaggau

SEQ ID NO: 903150 - RNA, 22 nt, Human
gcagguggauauugcuacuuga

SEQ ID NO: 903151 - RNA, 22 nt, Human
cuagccagaugauucccaaaua

SEQ ID NO: 903152 - RNA, 22 nt, Human
ucuguccaacacucucuagaca

SEQ ID NO: 903153 - RNA, 22 nt, Human
cccagggguaaggcgcagcgug

SEQ ID NO: 903154 - RNA, 22 nt, Human
caugugucaaaugauguagcug

SEQ ID NO: 903155 - RNA, 22 nt, Human
ucaaaucagcaagcagcuuccc

SEQ ID NO: 903156 - RNA, 22 nt, Human
ugaggcucagugagcccugcag

SEQ ID NO: 903157 - RNA, 22 nt, Human
agcccagccugauucuacaccc

SEQ ID NO: 903158 - RNA, 22 nt, Human
acagcugugaagcaagcacucu

SEQ ID NO: 903159 - RNA, 22 nt, Human
uggagguggcaucugacagcug

SEQ ID NO: 903160 - RNA, 22 nt, Human
auauuuucacugaaccaaagua

SEQ ID NO: 903161 - RNA, 22 nt, Human
aacaugaaaagcccagagaggu

SEQ ID NO: 903162 - RNA, 22 nt, Human
ucauagaagcaccagaagauau

SEQ ID NO: 903163 - RNA, 22 nt, Human
ggcacaguuuucuacauaugcu

SEQ ID NO: 903164 - RNA, 22 nt, Human
aguacacacaguagaauagagu

SEQ ID NO: 903165 - RNA, 22 nt, Human
ucuggcucugacacuacuguua

SEQ ID NO: 903166 - RNA, 22 nt, Human
gcuguucugcaccagacuucag

SEQ ID NO: 903167 - RNA, 22 nt, Human
guacauaaaggaggcucuuugc

SEQ ID NO: 903168 - RNA, 22 nt, Human
uagcucuggagucuucucagaa

SEQ ID NO: 903169 - RNA, 22 nt, Human
gguggcagucuuaagagaucuu

SEQ ID NO: 903170 - RNA, 18 nt, Human
gcuuucuguagaaaaggg

SEQ ID NO: 903171 - RNA, 22 nt, Human
uucuaacuuaacacuccuguga

SEQ ID NO: 903172 - RNA, 22 nt, Human
gauuuagugcugaaaucccugg

SEQ ID NO: 903173 - RNA, 22 nt, Human
ccugagcucugcacuuuuuaga

SEQ ID NO: 903174 - RNA, 22 nt, Human
cugaagcauaucaugccaaguu

SEQ ID NO: 903175 - RNA, 22 nt, Human
cccauuuagaguauaagagaga

SEQ ID NO: 903176 - RNA, 22 nt, Human
uuuuaaguuggauugcuaagua

SEQ ID NO: 903177 - RNA, 22 nt, Human
cagagacaguuucacagggucu

SEQ ID NO: 903178 - RNA, 22 nt, Human
cagaagcaaaugccuugcugag

SEQ ID NO: 903179 - RNA, 20 nt, Human
aggcugccaggucucacauc

SEQ ID NO: 903180 - RNA, 22 nt, Human
auguguacaaccaagcacuaaa

SEQ ID NO: 903181 - RNA, 22 nt, Human
aagcaucaacacuauauugaug

SEQ ID NO: 903182 - RNA, 21 nt, Human
gccuagggagaugggacugcc

SEQ ID NO: 903183 - RNA, 18 nt, Human
auacaagcagcagagauu

SEQ ID NO: 903184 - RNA, 22 nt, Human
uucuaaguuacuguuauggucu

SEQ ID NO: 903185 - RNA, 22 nt, Human
uuacaguuuauccaggaagagc

SEQ ID NO: 903186 - RNA, 18 nt, Human
cucagggcaucagucugg

SEQ ID NO: 903187 - RNA, 22 nt, Human
uggcacuuuacacccauuuggc

SEQ ID NO: 903188 - RNA, 22 nt, Human
uggcccugacagguccugggca

SEQ ID NO: 903189 - RNA, 22 nt, Human
cugagccaaaaagcagagcuug

SEQ ID NO: 903190 - RNA, 22 nt, Human
aaagaguucuguuugagcugaa

SEQ ID NO: 903191 - RNA, 22 nt, Human
gcugugagccgcugcugagcau

SEQ ID NO: 903192 - RNA, 22 nt, Human
ugauaguaucugauuauuucac

SEQ ID NO: 903193 - RNA, 22 nt, Human
acugcagagguggggugcagag

SEQ ID NO: 903194 - RNA, 22 nt, Human
agggcccaggacagcaucaggg

SEQ ID NO: 903195 - RNA, 22 nt, Human
gugagcuuugugguaaugaagu

SEQ ID NO: 903196 - RNA, 22 nt, Human
ccuucuagcaaaucaacauaaa

SEQ ID NO: 903197 - RNA, 22 nt, Human
uucuguuuacucagaaauacaa

SEQ ID NO: 903198 - RNA, 22 nt, Human
aucaaauuaugugcuacaagaa

SEQ ID NO: 903199 - RNA, 22 nt, Human
gcacaguaccugucacagaggc

SEQ ID NO: 903200 - RNA, 22 nt, Human
ucauuuucaaguuugaacagga

SEQ ID NO: 903201 - RNA, 22 nt, Human
uggcagagaauaaaucuugacu

SEQ ID NO: 903202 - RNA, 22 nt, Human
acaugaauauaugaaguucaac

SEQ ID NO: 903203 - RNA, 22 nt, Human
ucugggugcuacaaacaguauu

SEQ ID NO: 903204 - RNA, 18 nt, Human
gcugcugguggagggagc

SEQ ID NO: 903205 - RNA, 21 nt, Human
aggcccagagucuugggggga

SEQ ID NO: 903206 - RNA, 22 nt, Human
cuagagcagauugcagaguagg

SEQ ID NO: 903207 - RNA, 20 nt, Human
uggaagaggagaugccucug

SEQ ID NO: 903208 - RNA, 22 nt, Human
gaggcucaguuaugucaucagg

SEQ ID NO: 903209 - RNA, 22 nt, Human
uaugucuuuaguaucuuuugga

SEQ ID NO: 903210 - RNA, 22 nt, Human
agcugggcuggagcuccaagcg

SEQ ID NO: 903211 - RNA, 22 nt, Human
uggcagagagacucuccuugau

SEQ ID NO: 903212 - RNA, 22 nt, Human
caggcacuggccagucagcaca

SEQ ID NO: 903213 - RNA, 22 nt, Human
cagaggaagcagacacaucuug

SEQ ID NO: 903214 - RNA, 22 nt, Human
gccauggggcucagcugcacua

SEQ ID NO: 903215 - RNA, 22 nt, Human
ggccuugggcuggcugcaguau

SEQ ID NO: 903216 - RNA, 22 nt, Human
caucaguguugauccaccagca

SEQ ID NO: 903217 - RNA, 22 nt, Human
ugaggaggucagagucuggcug

SEQ ID NO: 903218 - RNA, 22 nt, Human
cugcagaggucuugcugauggu

SEQ ID NO: 903219 - RNA, 22 nt, Human
uucaacacaggaacaugauaua

SEQ ID NO: 903220 - RNA, 22 nt, Human
ucugggagagaguugauaaagg

SEQ ID NO: 903221 - RNA, 22 nt, Human
uuaaagaguaaucauaggucaa

SEQ ID NO: 903222 - RNA, 22 nt, Human
uugauuuauagaauguucaagc

SEQ ID NO: 903223 - RNA, 22 nt, Human
aggaacuggugggaggugauug

SEQ ID NO: 903224 - RNA, 22 nt, Human
uucuguguucugugcaaugagc

SEQ ID NO: 903225 - RNA, 22 nt, Human
ucuuagaaaugaaguucuuucu

SEQ ID NO: 903226 - RNA, 22 nt, Human
gcuguggaguacagagcugguu

SEQ ID NO: 903227 - RNA, 22 nt, Human
aggaggagguaagaaaagcaua

SEQ ID NO: 903228 - RNA, 22 nt, Human
aagagaugaagguccugacugu

SEQ ID NO: 903229 - RNA, 20 nt, Human
gguccuugucacaaggagag

SEQ ID NO: 903230 - RNA, 22 nt, Human
ucaauuacagugucaccuuaag

SEQ ID NO: 903231 - RNA, 22 nt, Human
uaggcaaguggaccagagguuu

SEQ ID NO: 903232 - RNA, 22 nt, Human
ugagguauacguugguucaguc

SEQ ID NO: 903233 - RNA, 22 nt, Human
uggccacagccucugccaguuc

SEQ ID NO: 903234 - RNA, 22 nt, Human
gagaggaagccuucuguacuug

SEQ ID NO: 903235 - RNA, 22 nt, Human
gcauucaucuuccuccaugcag

SEQ ID NO: 903236 - RNA, 22 nt, Human
gaauucuagucacacacauuca

SEQ ID NO: 903237 - RNA, 22 nt, Human
ucaggguauguucuagaucuga

SEQ ID NO: 903238 - RNA, 22 nt, Human
cuuaaagaugucaaggcuguuu

SEQ ID NO: 903239 - RNA, 22 nt, Human
auagcauacauguuguuacuug

SEQ ID NO: 903240 - RNA, 20 nt, Human
uccagagaguggcaaagcuc

SEQ ID NO: 903241 - RNA, 20 nt, Human
ucugauaacugguugugauu

SEQ ID NO: 903242 - RNA, 20 nt, Human
uuuagaagaaugagcacuuu

SEQ ID NO: 903243 - RNA, 22 nt, Human
ccagcagcuguggcuuugccuc

SEQ ID NO: 903244 - RNA, 22 nt, Human
uucuguggagguuuggaacauu

SEQ ID NO: 903245 - RNA, 22 nt, Human
aggcaguuguagagagggcucu

SEQ ID NO: 903246 - RNA, 22 nt, Human
uaauccaggguauucuaguuuc

SEQ ID NO: 903247 - RNA, 22 nt, Human
gcuguuagagaauuagaguggg

SEQ ID NO: 903248 - RNA, 22 nt, Human
agaguucuugcccuagaaaaug

SEQ ID NO: 903249 - RNA, 21 nt, Human
ccagcugucuguccuuaggca

SEQ ID NO: 903250 - RNA, 22 nt, Human
aaggcacucauucaaggagaua

SEQ ID NO: 903251 - RNA, 22 nt, Human
ugagacagcccuucugcacagg

SEQ ID NO: 903252 - RNA, 22 nt, Human
uauucuugucuuuuccagaaau

SEQ ID NO: 903253 - RNA, 22 nt, Human
ucucuuucuuuguaugucuauu

SEQ ID NO: 903254 - RNA, 22 nt, Human
aacaugcuaugugucugaauca

SEQ ID NO: 903255 - RNA, 18 nt, Human
augugcaauuuuguauuu

SEQ ID NO: 903256 - RNA, 22 nt, Human
aaggaagcagcaaugcaugauu

SEQ ID NO: 903257 - RNA, 22 nt, Human
auuuguucacaaucagggcagg

SEQ ID NO: 903258 - RNA, 22 nt, Human
gcucuggagagccauaggcccu

SEQ ID NO: 903259 - RNA, 20 nt, Human
ugcaaggccagggucaggag

SEQ ID NO: 903260 - RNA, 22 nt, Human
agagucagaaagcagacagggg

SEQ ID NO: 903261 - RNA, 22 nt, Human
aggcuccguccagucucaggcc

SEQ ID NO: 903262 - RNA, 16 nt, Human
agccaggcugccucgg

SEQ ID NO: 903263 - RNA, 19 nt, Human
gggcaguggcacuagggag

SEQ ID NO: 903264 - RNA, 22 nt, Human
ugucacauaggcaaaauguuuu

SEQ ID NO: 903265 - RNA, 22 nt, Human
cuuccucuguguccugggcuuc

SEQ ID NO: 903266 - RNA, 22 nt, Human
ccugaagcacccggagcuggca

SEQ ID NO: 903267 - RNA, 22 nt, Human
auaggucugaaaguguauccug

SEQ ID NO: 903268 - RNA, 22 nt, Human
uccuguguucaagucauucauu

SEQ ID NO: 903269 - RNA, 22 nt, Human
auucucagggaguauuuucuau

SEQ ID NO: 903270 - RNA, 22 nt, Human
uuccaugaguagcaguauuucc

SEQ ID NO: 903271 - RNA, 22 nt, Human
agagcuggcugcugcggugcuu

SEQ ID NO: 903272 - RNA, 22 nt, Human
ccaguaguuggacaaauagauu

SEQ ID NO: 903273 - RNA, 22 nt, Human
auuucaguaguccuuacuugua

SEQ ID NO: 903274 - RNA, 22 nt, Human
ccagcuggcacuguggcugccc

SEQ ID NO: 903275 - RNA, 22 nt, Human
gggucucuccuccccagcugug

SEQ ID NO: 903276 - RNA, 22 nt, Human
ugcaauaaagugcuauaaaucc

SEQ ID NO: 903277 - RNA, 22 nt, Human
uaggaccagcagggucaggguc

SEQ ID NO: 903278 - RNA, 22 nt, Human
acuccagaauccuagggucagc

SEQ ID NO: 903279 - RNA, 22 nt, Human
ggaaaucucuuuugugguguuu

SEQ ID NO: 903280 - RNA, 22 nt, Human
uucccuuccucacucuacuugu

SEQ ID NO: 903281 - RNA, 22 nt, Human
aggagaaggaagugcaucacua

SEQ ID NO: 903282 - RNA, 22 nt, Human
cagacaggguggguuucugggc

SEQ ID NO: 903283 - RNA, 22 nt, Human
gcccacaguacgaggcucaggc

SEQ ID NO: 903284 - RNA, 22 nt, Human
ucacucugagaggucacuggaa

SEQ ID NO: 903285 - RNA, 22 nt, Human
cagggcugaagaaauucaaaag

SEQ ID NO: 903286 - RNA, 22 nt, Human
cugcucucuguuccccuggauc

SEQ ID NO: 903287 - RNA, 22 nt, Human
gggcugggaauggcuaaguaug

SEQ ID NO: 903288 - RNA, 22 nt, Human
guaauaccuuucuaacacuuga

SEQ ID NO: 903289 - RNA, 22 nt, Human
aagaauaaguagaugggagaag

SEQ ID NO: 903290 - RNA, 22 nt, Human
auucauuggcuugaacuccacc

SEQ ID NO: 903291 - RNA, 22 nt, Human
aagguagguuaaccugcaggag

SEQ ID NO: 903292 - RNA, 22 nt, Human
uugaaacuaugaagacaaccau

SEQ ID NO: 903293 - RNA, 22 nt, Human
uuuauagucgucucaguaauaa

SEQ ID NO: 903294 - RNA, 22 nt, Human
uccagcuggggcaguggcuggg

SEQ ID NO: 903295 - RNA, 22 nt, Human
ucucugugugccuucaucugcc

SEQ ID NO: 903296 - RNA, 20 nt, Human
cccaggcagagcuagcggca

SEQ ID NO: 903297 - RNA, 22 nt, Human
ccagggcuggugggagaugcug

SEQ ID NO: 903298 - RNA, 22 nt, Human
caguaugucuacuggacaaagu

SEQ ID NO: 903299 - RNA, 22 nt, Human
uggaaugagcuggcuaauaacc

SEQ ID NO: 903300 - RNA, 22 nt, Human
gggaaugaccuuaauaaguagg

SEQ ID NO: 903301 - RNA, 20 nt, Human
cgcagcaguggaaguggaau

SEQ ID NO: 903302 - RNA, 22 nt, Human
gucaaucagaaaucauguuaca

SEQ ID NO: 903303 - RNA, 18 nt, Human
uauguauaacauaguuca

SEQ ID NO: 903304 - RNA, 22 nt, Human
aucagcuggaacaagugucuga

SEQ ID NO: 903305 - RNA, 22 nt, Human
cccacagggcugcugauggcag

SEQ ID NO: 903306 - RNA, 22 nt, Human
cuuccaguaguaucauucucau

SEQ ID NO: 903307 - RNA, 22 nt, Human
agucuucucauuucacaugcuu

SEQ ID NO: 903308 - RNA, 22 nt, Human
cagggaugagagauggcacaga

SEQ ID NO: 903309 - RNA, 22 nt, Human
ggugcugggaacgaggaauuca

SEQ ID NO: 903310 - RNA, 22 nt, Human
cuguuuaucuaggaguugcagg

SEQ ID NO: 903311 - RNA, 22 nt, Human
aaguguuuuggcuucuguacac

SEQ ID NO: 903312 - RNA, 22 nt, Human
aauaauacaugagauuaauguu

SEQ ID NO: 903313 - RNA, 22 nt, Human
cagcagugugcaggugugcugg

SEQ ID NO: 903314 - RNA, 22 nt, Human
uuccuucuggaggcuccagggg

SEQ ID NO: 903315 - RNA, 22 nt, Human
ugaaucaauugucuuaagacau

SEQ ID NO: 903316 - RNA, 22 nt, Human
acuucaaaugugacaaugugaa

SEQ ID NO: 903317 - RNA, 22 nt, Human
ggccaugccugugggugcaggc

SEQ ID NO: 903318 - RNA, 22 nt, Human
uaguguuccagaagcaaacaag

SEQ ID NO: 903319 - RNA, 18 nt, Human
gagcucugccucccaguc

SEQ ID NO: 903320 - RNA, 22 nt, Human
gucacaggcaguaacuaggacc

SEQ ID NO: 903321 - RNA, 21 nt, Human
uuguuuccucccaaaaugcca

SEQ ID NO: 903322 - RNA, 22 nt, Human
caggucuucuucagcacuugga

SEQ ID NO: 903323 - RNA, 22 nt, Human
aggacugggugcagagggcauc

SEQ ID NO: 903324 - RNA, 20 nt, Human
ugucagauaacuagcuguua

SEQ ID NO: 903325 - RNA, 21 nt, Human
uugcaccaugauaaauucaga

SEQ ID NO: 903326 - RNA, 22 nt, Human
guaaacaacacaaaucauuuga

SEQ ID NO: 903327 - RNA, 22 nt, Human
gaaaagagaacaucugaggauc

SEQ ID NO: 903328 - RNA, 22 nt, Human
ugagcugggcugggcugagcug

SEQ ID NO: 903329 - RNA, 22 nt, Human
ucacacagggucggaaagagug

SEQ ID NO: 903330 - RNA, 22 nt, Human
ucuguuuugcauaauguucuuu

SEQ ID NO: 903331 - RNA, 22 nt, Human
gccuggguccacugaucaugcu

SEQ ID NO: 903332 - RNA, 22 nt, Human
gcucucuuugugccacuuaagg

SEQ ID NO: 903333 - RNA, 22 nt, Human
agcaguuuauccucauaaugga

SEQ ID NO: 903334 - RNA, 22 nt, Human
cacuuuaacucacauuucagcu

SEQ ID NO: 903335 - RNA, 22 nt, Human
uuagcauucucauuugcauaaa

SEQ ID NO: 903336 - RNA, 22 nt, Human
accaggagccacaggaggagcc

SEQ ID NO: 903337 - RNA, 22 nt, Human
gcccauggacacccaagugcca

SEQ ID NO: 903338 - RNA, 22 nt, Human
gcagagugagauaugaacccag

SEQ ID NO: 903339 - RNA, 22 nt, Human
gagcugcagcggcugacgcaac

SEQ ID NO: 903340 - RNA, 22 nt, Human
ucuccuugcuacccaguauguc

SEQ ID NO: 903341 - RNA, 22 nt, Human
cuagguggugguggguugacau

SEQ ID NO: 903342 - RNA, 22 nt, Human
gcccagucucuucuggcccugu

SEQ ID NO: 903343 - RNA, 22 nt, Human
aggaggcagucugucccuuagc

SEQ ID NO: 903344 - RNA, 22 nt, Human
caacccucucgccucaauucug

SEQ ID NO: 903345 - RNA, 22 nt, Human
gguggcucuguugucaacugau

SEQ ID NO: 903346 - RNA, 22 nt, Human
gcuuucuuuucaagaauguauu

SEQ ID NO: 903347 - RNA, 22 nt, Human
aaaugcuauuugggaacaacau

SEQ ID NO: 903348 - RNA, 23 nt, Human
uuucuguuggguauauauccaag

SEQ ID NO: 903349 - RNA, 22 nt, Human
guucucaguggggagcaggguu

SEQ ID NO: 903350 - RNA, 22 nt, Human
ccaggagagcaaaggucacucu

SEQ ID NO: 903351 - RNA, 23 nt, Human
uaaauuucuugauucuuauguga

SEQ ID NO: 903352 - RNA, 22 nt, Human
cuggggcagagcccagcaauuu

SEQ ID NO: 903353 - RNA, 22 nt, Human
cugcacagggauauggggagcu

SEQ ID NO: 903354 - RNA, 22 nt, Human
agauuucccaaauacuuguuau

SEQ ID NO: 903355 - RNA, 22 nt, Human
uuauauacugugguaguacugu

SEQ ID NO: 903356 - RNA, 22 nt, Human
cucaggauagcugcgcagccug

SEQ ID NO: 903357 - RNA, 22 nt, Human
gcuguagguaaggauggcaaag

SEQ ID NO: 903358 - RNA, 22 nt, Human
agaauagaauucucauagaauu

SEQ ID NO: 903359 - RNA, 22 nt, Human
cagaaagcccuauguacagugg

SEQ ID NO: 903360 - RNA, 17 nt, Human
uguuaauuccaaugaua

SEQ ID NO: 903361 - RNA, 22 nt, Human
aaagccuucuuguaucgagcca

SEQ ID NO: 903362 - RNA, 22 nt, Human
uagaagucucucaagaaacaua

SEQ ID NO: 903363 - RNA, 20 nt, Human
ugcagaagaacguucugguu

SEQ ID NO: 903364 - RNA, 20 nt, Human
auccuuaaagagaauuucua

SEQ ID NO: 903365 - RNA, 22 nt, Human
gccuuuguaacucuuuuauugu

SEQ ID NO: 903366 - RNA, 22 nt, Human
gacagauggucaguguugaagu

SEQ ID NO: 903367 - RNA, 22 nt, Human
uaauguauaacaaauacucauc

SEQ ID NO: 903368 - RNA, 22 nt, Human
ucuccagggcagagaauagcaa

SEQ ID NO: 903369 - RNA, 22 nt, Human
uauauuguagcugaugacaaau

SEQ ID NO: 903370 - RNA, 22 nt, Human
caaugcaagcaagauggucaca

SEQ ID NO: 903371 - RNA, 22 nt, Human
ugccaggcaggacccuagaacc

SEQ ID NO: 903372 - RNA, 22 nt, Human
ccucuguccccagugcaggccu

SEQ ID NO: 903373 - RNA, 22 nt, Human
uucugaggccauuaccaauaaa

SEQ ID NO: 903374 - RNA, 21 nt, Human
auguagcuuacaagauaaagg

SEQ ID NO: 903375 - RNA, 22 nt, Human
uauuaauaugugugugcaugua

SEQ ID NO: 903376 - RNA, 22 nt, Human
caagaaacuuuauucugccaua

SEQ ID NO: 903377 - RNA, 22 nt, Human
ucuggccccauacagagggucu

SEQ ID NO: 903378 - RNA, 22 nt, Human
gugugcaggcuugaggauuagg

SEQ ID NO: 903379 - RNA, 22 nt, Human
agugucugccagcugccaggug

SEQ ID NO: 903380 - RNA, 22 nt, Human
uggcucagucauggaugaguaa

SEQ ID NO: 903381 - RNA, 20 nt, Human
cccagagguugcggcaggag

SEQ ID NO: 903382 - RNA, 22 nt, Human
cugcaucuguuagauuaucacc

SEQ ID NO: 903383 - RNA, 22 nt, Human
aaauguggguaaugggacugga

SEQ ID NO: 903384 - RNA, 22 nt, Human
ugcacacaguucucaggaaaga

SEQ ID NO: 903385 - RNA, 16 nt, Human
gcccaggacgggaggc

SEQ ID NO: 903386 - RNA, 22 nt, Human
guauugcauagaccugggauga

SEQ ID NO: 903387 - RNA, 22 nt, Human
ccauugaauccucagcugcuag

SEQ ID NO: 903388 - RNA, 22 nt, Human
uggugaggucauagagaacugu

SEQ ID NO: 903389 - RNA, 22 nt, Human
guggccuggaaaggcuggucug

SEQ ID NO: 903390 - RNA, 22 nt, Human
ucugaggggcuggaagggcugc

SEQ ID NO: 903391 - RNA, 22 nt, Human
ccaggaggcaauaucaagucca

SEQ ID NO: 903392 - RNA, 22 nt, Human
ucagagucauugcaaguagaag

SEQ ID NO: 903393 - RNA, 22 nt, Human
ggcugcuuuugcuguaagccag

SEQ ID NO: 903394 - RNA, 22 nt, Human
ugacucuguaccugucugccuu

SEQ ID NO: 903395 - RNA, 22 nt, Human
gggcuccagccacuggcugagg

SEQ ID NO: 903396 - RNA, 20 nt, Human
gcagaugagacucacagagg

SEQ ID NO: 903397 - RNA, 22 nt, Human
uguauacaggcauaagagauac

SEQ ID NO: 903398 - RNA, 22 nt, Human
ccagccuuugcaucccccaucu

SEQ ID NO: 903399 - RNA, 22 nt, Human
uucacagggcagcagcugagcc

SEQ ID NO: 903400 - RNA, 22 nt, Human
gccccagauggaggaagcuggg

SEQ ID NO: 903401 - RNA, 19 nt, Human
ugucaccuucugucaguuu

SEQ ID NO: 903402 - RNA, 22 nt, Human
aaucagaaaggcuaaggaagca

SEQ ID NO: 903403 - RNA, 22 nt, Human
aguagaaauguaagaaggauua

SEQ ID NO: 903404 - RNA, 20 nt, Human
guuauaggagagggaauuau

SEQ ID NO: 903405 - RNA, 22 nt, Human
auacaaagcuuucugucuggua

SEQ ID NO: 903406 - RNA, 22 nt, Human
uuguaacacuuuucuauuaaua

SEQ ID NO: 903407 - RNA, 22 nt, Human
guguggggcucagugggaaugu

SEQ ID NO: 903408 - RNA, 22 nt, Human
gggccuucuaguuagccccaau

SEQ ID NO: 903409 - RNA, 22 nt, Human
uuuguaaggaauauucuuggug

SEQ ID NO: 903410 - RNA, 22 nt, Human
caccaggcugcccaggacaggg

SEQ ID NO: 903411 - RNA, 22 nt, Human
aagauucuguauuucuaacaau

SEQ ID NO: 903412 - RNA, 17 nt, Human
uguaugcauaaaauuua

SEQ ID NO: 903413 - RNA, 22 nt, Human
cugccucucagccugaccgcca

SEQ ID NO: 903414 - RNA, 22 nt, Human
ucaucuugcaguguguguucug

SEQ ID NO: 903415 - RNA, 22 nt, Human
cuucccuuccuggggcaauuua

SEQ ID NO: 903416 - RNA, 22 nt, Human
uagggcagagcuuguacacgau

SEQ ID NO: 903417 - RNA, 22 nt, Human
uccugcagaucaaagccuuuga

SEQ ID NO: 903418 - RNA, 22 nt, Human
guggaggguuugcaaugugcag

SEQ ID NO: 903419 - RNA, 22 nt, Human
acagaaugcguagugcauguug

SEQ ID NO: 903420 - RNA, 22 nt, Human
cagcagguggacacacucaccu

SEQ ID NO: 903421 - RNA, 22 nt, Human
uuagaagccaggauggagcagg

SEQ ID NO: 903422 - RNA, 22 nt, Human
agaggggaggcgaaccagaguc

SEQ ID NO: 903423 - RNA, 22 nt, Human
gucuguccuuuucaucucccaa

SEQ ID NO: 903424 - RNA, 22 nt, Human
ucaggaggagcucauaaguuug

SEQ ID NO: 903425 - RNA, 22 nt, Human
ucugcagcgugcaggcuggugc

SEQ ID NO: 903426 - RNA, 22 nt, Human
uauguguaagcuguuuaucuuu

SEQ ID NO: 903427 - RNA, 22 nt, Human
ugcauaaaaaccacauacaagg

SEQ ID NO: 903428 - RNA, 22 nt, Human
uguuuacagaaggcagacuucc

SEQ ID NO: 903429 - RNA, 22 nt, Human
guccuuccccagccagcucugg

SEQ ID NO: 903430 - RNA, 22 nt, Human
uugauguagccuaagacagaac

SEQ ID NO: 903431 - RNA, 22 nt, Human
accuagaaugaagcaaugcugu

SEQ ID NO: 903432 - RNA, 22 nt, Human
ugcuuaaacauacuauuuauau

SEQ ID NO: 903433 - RNA, 22 nt, Human
uacuuagucuuucugaugaaau

SEQ ID NO: 903434 - RNA, 22 nt, Human
ccugucacauauuugcuguuca

SEQ ID NO: 903435 - RNA, 22 nt, Human
ccaggccucuggcugcuuaguc

SEQ ID NO: 903436 - RNA, 19 nt, Human
uuccugggguuccauugug

SEQ ID NO: 903437 - RNA, 22 nt, Human
agguggcagcagaaucagggag

SEQ ID NO: 903438 - RNA, 22 nt, Human
cagcagacuuacuagaauguaa

SEQ ID NO: 903439 - RNA, 22 nt, Human
ucaguuuucauuucaugagcag

SEQ ID NO: 903440 - RNA, 22 nt, Human
ugagcaguggcuccugcuggac

SEQ ID NO: 903441 - RNA, 22 nt, Human
aaaacacacuggaccaauuuaa

SEQ ID NO: 903442 - RNA, 22 nt, Human
ugaugaauuaguaacaaaugag

SEQ ID NO: 903443 - RNA, 19 nt, Human
gcaggugagccguggcucc

SEQ ID NO: 903444 - RNA, 21 nt, Human
gacauugagcgugucgcagug

SEQ ID NO: 903445 - RNA, 22 nt, Human
ucucuggggguagaacucaggc

SEQ ID NO: 903446 - RNA, 22 nt, Human
ucaaauuaguggaauaauaaug

SEQ ID NO: 903447 - RNA, 22 nt, Human
uggccuggugucugcgaggccu

SEQ ID NO: 903448 - RNA, 22 nt, Human
ucucacagcauuauccagggca

SEQ ID NO: 903449 - RNA, 22 nt, Human
aggauauaaaaagacuauuugg

SEQ ID NO: 903450 - RNA, 22 nt, Human
uacaaaugaaccaacuuugaug

SEQ ID NO: 903451 - RNA, 22 nt, Human
cuggguguucacccgaggcgcu

SEQ ID NO: 903452 - RNA, 22 nt, Human
aagcaacugccuucaauauuua

SEQ ID NO: 903453 - RNA, 22 nt, Human
uguccaggaauugacccugcaa

SEQ ID NO: 903454 - RNA, 22 nt, Human
uuccuggugaccucacugguag

SEQ ID NO: 903455 - RNA, 22 nt, Human
ggaucugguuacguaagagucu

SEQ ID NO: 903456 - RNA, 22 nt, Human
aacacuuuuuccuccugucugg

SEQ ID NO: 903457 - RNA, 22 nt, Human
gcucugucaacagcuagcugug

SEQ ID NO: 903458 - RNA, 22 nt, Human
gucuggcacauaagaggagcuc

SEQ ID NO: 903459 - RNA, 22 nt, Human
gcucccucugcucaggcacuug

SEQ ID NO: 903460 - RNA, 23 nt, Human
ucauuucacagugagcuuccuag

SEQ ID NO: 903461 - RNA, 22 nt, Human
uauuuaucaagguaggagaaua

SEQ ID NO: 903462 - RNA, 22 nt, Human
cuucagccucguuacuccugcg

SEQ ID NO: 903463 - RNA, 22 nt, Human
uacaaagauaguguuagaguaa

SEQ ID NO: 903464 - RNA, 22 nt, Human
uccaggaggcucugguugacgu

SEQ ID NO: 903465 - RNA, 22 nt, Human
agcucugggcugacaugcuccc

SEQ ID NO: 903466 - RNA, 22 nt, Human
cugugauuguuaguuccuauac

SEQ ID NO: 903467 - RNA, 22 nt, Human
ccugugggagcccaggcagaua

SEQ ID NO: 903468 - RNA, 22 nt, Human
cuguggcucucugcaggguccc

SEQ ID NO: 903469 - RNA, 22 nt, Human
uguauuuuuaggaaugcgcuau

SEQ ID NO: 903470 - RNA, 22 nt, Human
uuugaaagaauuuauguacuuu

SEQ ID NO: 903471 - RNA, 22 nt, Human
gaaaaggcagaguuccggggaa

SEQ ID NO: 903472 - RNA, 22 nt, Human
ucauucacugcccagcagugua

SEQ ID NO: 903473 - RNA, 22 nt, Human
cgcagugagucuguaaaaggcu

SEQ ID NO: 903474 - RNA, 22 nt, Human
acaacuuugacccuuguucuua

SEQ ID NO: 903475 - RNA, 22 nt, Human
acaugcauggacauguauauau

SEQ ID NO: 903476 - RNA, 22 nt, Human
gcgggcggggguucccaggucu

SEQ ID NO: 903477 - RNA, 22 nt, Human
uuucuuguacacuggaauuuau

SEQ ID NO: 903478 - RNA, 22 nt, Human
ucucugaguuuuaaggaugaug

SEQ ID NO: 903479 - RNA, 20 nt, Human
cagaugggacguggaggagu

SEQ ID NO: 903480 - RNA, 22 nt, Human
gcagaggcugggugucccaguc

SEQ ID NO: 903481 - RNA, 22 nt, Human
acuugggaugguggccagagcg

SEQ ID NO: 903482 - RNA, 22 nt, Human
cuuugguggaggggugcaggca

SEQ ID NO: 903483 - RNA, 18 nt, Human
aggccacacuccagaaca

SEQ ID NO: 903484 - RNA, 22 nt, Human
gcuuauguuuugccauugaaga

SEQ ID NO: 903485 - RNA, 22 nt, Human
aaugcuguauaucuuagcuaau

SEQ ID NO: 903486 - RNA, 22 nt, Human
cugggcucaccuguggcuggca

SEQ ID NO: 903487 - RNA, 22 nt, Human
ggccuaggaaggggauguaacu

SEQ ID NO: 903488 - RNA, 22 nt, Human
cuggaagaacuccaguucugug

SEQ ID NO: 903489 - RNA, 22 nt, Human
guacacacuauuuaaaguguuu

SEQ ID NO: 903490 - RNA, 22 nt, Human
cuuaggcaguuuaggaaagaga

SEQ ID NO: 903491 - RNA, 22 nt, Human
gugugcugagugacugucauca

SEQ ID NO: 903492 - RNA, 22 nt, Human
ugcaaucagguaccauuugauu

SEQ ID NO: 903493 - RNA, 22 nt, Human
agggcagagagaugaaugggau

SEQ ID NO: 903494 - RNA, 22 nt, Human
uccucccacauaggacaauggg

SEQ ID NO: 903495 - RNA, 22 nt, Human
gccaaauacuggaaucauagaa

SEQ ID NO: 903496 - RNA, 20 nt, Human
augugagggguugaaguggg

SEQ ID NO: 903497 - RNA, 22 nt, Human
aaggcccuuggaaaaugcagua

SEQ ID NO: 903498 - RNA, 19 nt, Human
gcccugaccuuggcugcuc

SEQ ID NO: 903499 - RNA, 22 nt, Human
cuuuggaauaaucaagcucuga

SEQ ID NO: 903500 - RNA, 22 nt, Human
agcagcaacugcuagaguggca

SEQ ID NO: 903501 - RNA, 22 nt, Human
ccagagcugcauccagcagguu

SEQ ID NO: 903502 - RNA, 22 nt, Human
guacaaguguauuuggcuugau

SEQ ID NO: 903503 - RNA, 22 nt, Human
guguccaucucuguaugcugcu

SEQ ID NO: 903504 - RNA, 22 nt, Human
ugaaaaggagccuuagguaggu

SEQ ID NO: 903505 - RNA, 22 nt, Human
ucuuucaaagcuguaguagauu

SEQ ID NO: 903506 - RNA, 22 nt, Human
aaagcuuuggguaggaauggga

SEQ ID NO: 903507 - RNA, 22 nt, Human
guuucuaagcacaugugagugu

SEQ ID NO: 903508 - RNA, 22 nt, Human
ggccaggcgaugaccccuccac

SEQ ID NO: 903509 - RNA, 22 nt, Human
uuacccagagcacuugagcuuu

SEQ ID NO: 903510 - RNA, 22 nt, Human
aaguggagccagggaaacugaa

SEQ ID NO: 903511 - RNA, 22 nt, Human
aagcugaaucugaaauagaauu

SEQ ID NO: 903512 - RNA, 22 nt, Human
cuucuagccuugaugacuggga

SEQ ID NO: 903513 - RNA, 22 nt, Human
ugucugguuugaaguccaugau

SEQ ID NO: 903514 - RNA, 22 nt, Human
gauaacauuuguauagcgcuuu

SEQ ID NO: 903515 - RNA, 22 nt, Human
cagcugaguaugcauucaagca

SEQ ID NO: 903516 - RNA, 23 nt, Human
aucaaaggauguagagaagaagc

SEQ ID NO: 903517 - RNA, 22 nt, Human
auauacuugauuuaacugagca

SEQ ID NO: 903518 - RNA, 22 nt, Human
uucugugugucucagcaagcug

SEQ ID NO: 903519 - RNA, 22 nt, Human
ugcuuuauuuuaaauaugccau

SEQ ID NO: 903520 - RNA, 23 nt, Human
cucucucuaccaugugaggacac

SEQ ID NO: 903521 - RNA, 22 nt, Human
caggcacaagaagcaaauguua

SEQ ID NO: 903522 - RNA, 22 nt, Human
uuaccuugaagagcuugagggc

SEQ ID NO: 903523 - RNA, 22 nt, Human
uggauggcuggggaagagcagg

SEQ ID NO: 903524 - RNA, 22 nt, Human
augugucuucuaagccaagccu

SEQ ID NO: 903525 - RNA, 22 nt, Human
uggguaggccaggaagcagugu

SEQ ID NO: 903526 - RNA, 22 nt, Human
uucuuccucuguaaaaggugac

SEQ ID NO: 903527 - RNA, 23 nt, Human
auuugaaacuuucuuguuuccag

SEQ ID NO: 903528 - RNA, 22 nt, Human
guuauacauauguguuaacaaa

SEQ ID NO: 903529 - RNA, 22 nt, Human
cuggcacagcuugggccccauc

SEQ ID NO: 903530 - RNA, 18 nt, Human
aagugggaaaagcaagca

SEQ ID NO: 903531 - RNA, 22 nt, Human
uagugccauucaagagguaguu

SEQ ID NO: 903532 - RNA, 22 nt, Human
caucaguguguugccuugcuca

SEQ ID NO: 903533 - RNA, 22 nt, Human
aaaguucuggggguguuucugg

SEQ ID NO: 903534 - RNA, 22 nt, Human
aguuggagugaacaugagauug

SEQ ID NO: 903535 - RNA, 22 nt, Human
uuuccuaaucccaaugacauuu

SEQ ID NO: 903536 - RNA, 22 nt, Human
acacugcagauguaauuugagu

SEQ ID NO: 903537 - RNA, 22 nt, Human
ugcaaggauauuuagucuagug

SEQ ID NO: 903538 - RNA, 22 nt, Human
aggaggaaagaaggcccccagc

SEQ ID NO: 903539 - RNA, 22 nt, Human
ugcaucauauaaugucuaugga

SEQ ID NO: 903540 - RNA, 22 nt, Human
auggcaguuuuagaacuuuuca

SEQ ID NO: 903541 - RNA, 22 nt, Human
agcccagccggauucccaguuc

SEQ ID NO: 903542 - RNA, 22 nt, Human
uuccugccuacaugccuuaugc

SEQ ID NO: 903543 - RNA, 22 nt, Human
uggccagugggguugagcagga

SEQ ID NO: 903544 - RNA, 22 nt, Human
aggcaagcuugaaauuggcucu

SEQ ID NO: 903545 - RNA, 19 nt, Human
ucaaaggcuuuuaggagac

SEQ ID NO: 903546 - RNA, 17 nt, Human
ggccuguguggcugcag

SEQ ID NO: 903547 - RNA, 22 nt, Human
ucugaagccuuuguacaggccu

SEQ ID NO: 903548 - RNA, 22 nt, Human
uccagcccaucccuagccuggg

SEQ ID NO: 903549 - RNA, 22 nt, Human
acucuccuuuugaucuucagaa

SEQ ID NO: 903550 - RNA, 22 nt, Human
ugagugagcuggggagccggug

SEQ ID NO: 903551 - RNA, 22 nt, Human
cagcuccucacgagucuugaaa

SEQ ID NO: 903552 - RNA, 22 nt, Human
cagagcugcaaaugccccuccg

SEQ ID NO: 903553 - RNA, 22 nt, Human
auguacaguuucuagacucaaa

SEQ ID NO: 903554 - RNA, 20 nt, Human
aacacagauaccaaagguug

SEQ ID NO: 903555 - RNA, 22 nt, Human
aagauguuagaggucaugcaga

SEQ ID NO: 903556 - RNA, 22 nt, Human
uuaaauagucaaaucaguggca

SEQ ID NO: 903557 - RNA, 22 nt, Human
cuucuccagccacgcccacucc

SEQ ID NO: 903558 - RNA, 22 nt, Human
augcuuuauuggagacagucau

SEQ ID NO: 903559 - RNA, 22 nt, Human
cuuaggaagcuuuugaggacaa

SEQ ID NO: 903560 - RNA, 22 nt, Human
acaguggaugacauccuuuugc

SEQ ID NO: 903561 - RNA, 22 nt, Human
cugaggcucaagggcagguggg

SEQ ID NO: 903562 - RNA, 22 nt, Human
ucucaguuuccucauauguaaa

SEQ ID NO: 903563 - RNA, 22 nt, Human
acaugaaaagacuaucugauua

SEQ ID NO: 903564 - RNA, 22 nt, Human
aaagcauguugggucccucuuu

SEQ ID NO: 903565 - RNA, 22 nt, Human
agagacccauugccggaaucac

SEQ ID NO: 903566 - RNA, 22 nt, Human
ccugcucagagcgucuugugug

SEQ ID NO: 903567 - RNA, 22 nt, Human
caaaguaauauggucccaguga

SEQ ID NO: 903568 - RNA, 22 nt, Human
ucagaggccuugguuaugguau

SEQ ID NO: 903569 - RNA, 22 nt, Human
guuauaaauaccuaauaggauu

SEQ ID NO: 903570 - RNA, 22 nt, Human
uuucacaauuuuaaggagcaaa

SEQ ID NO: 903571 - RNA, 22 nt, Human
cccaggaauuggaggcugcagu

SEQ ID NO: 903572 - RNA, 22 nt, Human
cagugccauauugaaagacauu

SEQ ID NO: 903573 - RNA, 21 nt, Human
ugcauauauaagugcauacac

SEQ ID NO: 903574 - RNA, 22 nt, Human
caccugcccuuucuugcuccac

SEQ ID NO: 903575 - RNA, 22 nt, Human
gaguccuuuugugccacaggga

SEQ ID NO: 903576 - RNA, 22 nt, Human
cuacagaagaaacuaucacuau

SEQ ID NO: 903577 - RNA, 22 nt, Human
ugagccuguccugugcauguga

SEQ ID NO: 903578 - RNA, 22 nt, Human
ugagggcugcuuccagagcuag

SEQ ID NO: 903579 - RNA, 22 nt, Human
uuucaacaucaccuagcaguuc

SEQ ID NO: 903580 - RNA, 22 nt, Human
gcucccugucucugggguccau

SEQ ID NO: 903581 - RNA, 20 nt, Human
uacaauacacaugcauauga

SEQ ID NO: 903582 - RNA, 19 nt, Human
gccacaggaugaaguuugg

SEQ ID NO: 903583 - RNA, 22 nt, Human
uauuuaauuagugauuguagag

SEQ ID NO: 903584 - RNA, 22 nt, Human
gccugccuagaauugcagcuuu

SEQ ID NO: 903585 - RNA, 22 nt, Human
ucacaaauauuuuaacaguagg

SEQ ID NO: 903586 - RNA, 22 nt, Human
aaacucaaguuucuuaauguca

SEQ ID NO: 903587 - RNA, 22 nt, Human
ccaggcuggaguguagucgcau

SEQ ID NO: 903588 - RNA, 22 nt, Human
caucuguuuuugucaauuacau

SEQ ID NO: 903589 - RNA, 22 nt, Human
ucuggcucccuggagcuccaca

SEQ ID NO: 903590 - RNA, 22 nt, Human
cccaggcacauccacucuguga

SEQ ID NO: 903591 - RNA, 22 nt, Human
aagauguucuauuuucacuuuu

SEQ ID NO: 903592 - RNA, 22 nt, Human
cuugaagacaauggcagauucc

SEQ ID NO: 903593 - RNA, 22 nt, Human
ggucucccuugcugguuggcug

SEQ ID NO: 903594 - RNA, 22 nt, Human
uuugaaaggguuaugagacuga

SEQ ID NO: 903595 - RNA, 22 nt, Human
aaugcacaaaggugucuauugc

SEQ ID NO: 903596 - RNA, 22 nt, Human
uccaggaggccucauuuccugu

SEQ ID NO: 903597 - RNA, 22 nt, Human
ggggugagguuuauguucuggg

SEQ ID NO: 903598 - RNA, 22 nt, Human
uggcccuggcugaguuagauuu

SEQ ID NO: 903599 - RNA, 22 nt, Human
cuccccaaagauaacggcuucu

SEQ ID NO: 903600 - RNA, 22 nt, Human
cugaaguuaaucagagguacaa

SEQ ID NO: 903601 - RNA, 22 nt, Human
uacuauuuggaauuuuaaauug

SEQ ID NO: 903602 - RNA, 22 nt, Human
gacagcaacacucaauucugca

SEQ ID NO: 903603 - RNA, 22 nt, Human
auguuuguguuacacucugcag

SEQ ID NO: 903604 - RNA, 22 nt, Human
cugggcaguuuauucaguucug

SEQ ID NO: 903605 - RNA, 22 nt, Human
ggcagcuuucaauaggguuaug

SEQ ID NO: 903606 - RNA, 20 nt, Human
ggguggaguugcggucugug

SEQ ID NO: 903607 - RNA, 22 nt, Human
aaaguacaugcaauucuucuga

SEQ ID NO: 903608 - RNA, 19 nt, Human
cucugggcugcaucuuggu

SEQ ID NO: 903609 - RNA, 22 nt, Human
gaagacacucugcagaguuauc

SEQ ID NO: 903610 - RNA, 22 nt, Human
guuucuuagguaaauucuuuga

SEQ ID NO: 903611 - RNA, 22 nt, Human
aauaaacaaauccuuccuuccc

SEQ ID NO: 903612 - RNA, 22 nt, Human
ccugacucuggccaggccagcu

SEQ ID NO: 903613 - RNA, 22 nt, Human
ugcaauuucaggcauauauugu

SEQ ID NO: 903614 - RNA, 20 nt, Human
cucagcucuucagggcaagu

SEQ ID NO: 903615 - RNA, 22 nt, Human
accacagugggccacaagaagu

SEQ ID NO: 903616 - RNA, 22 nt, Human
aucuuuagcauuacuuuauuca

SEQ ID NO: 903617 - RNA, 22 nt, Human
guaaguuaguuccuguguuagu

SEQ ID NO: 903618 - RNA, 22 nt, Human
cagauggaaggcauagagguuu

SEQ ID NO: 903619 - RNA, 22 nt, Human
uggcaauauccacaauuacuuu

SEQ ID NO: 903620 - RNA, 22 nt, Human
gagggaggugauacugaacgua

SEQ ID NO: 903621 - RNA, 22 nt, Human
ucaggacaguucccugcaaauu

SEQ ID NO: 903622 - RNA, 22 nt, Human
cugcuggacuacaggaagaguu

SEQ ID NO: 903623 - RNA, 22 nt, Human
gccaggaaugcauaaaugaccu

SEQ ID NO: 903624 - RNA, 22 nt, Human
gcuguggcuugcagcuggggcu

SEQ ID NO: 903625 - RNA, 22 nt, Human
aacagaacccgagugugaaucu

SEQ ID NO: 903626 - RNA, 21 nt, Human
gcucuccagggccagcccagg

SEQ ID NO: 903627 - RNA, 22 nt, Human
agugcuucuuaaaccuuucuac

SEQ ID NO: 903628 - RNA, 22 nt, Human
cagaggcugauggcuguagcca

SEQ ID NO: 903629 - RNA, 22 nt, Human
ucuucaugauacccuaagccac

SEQ ID NO: 903630 - RNA, 22 nt, Human
aucauuagaccaaacuagagcu

SEQ ID NO: 903631 - RNA, 18 nt, Human
cauugacaguauaucuuu

SEQ ID NO: 903632 - RNA, 22 nt, Human
uccuggccaaguuacucucugc

SEQ ID NO: 903633 - RNA, 22 nt, Human
ucauuucaaguucugacagcua

SEQ ID NO: 903634 - RNA, 22 nt, Human
ucucuuaauuuuggaauagugu

SEQ ID NO: 903635 - RNA, 22 nt, Human
cagaucugcuccucuguccaug

SEQ ID NO: 903636 - RNA, 22 nt, Human
gggagggaaagcuugaucuguc

SEQ ID NO: 903637 - RNA, 22 nt, Human
uugaagaccuuuagugcuaugu

SEQ ID NO: 903638 - RNA, 22 nt, Human
ucuucacugaugucucucaaau

SEQ ID NO: 903639 - RNA, 22 nt, Human
auuuaagggauuuggagaccaa

SEQ ID NO: 903640 - RNA, 22 nt, Human
ggccagcugccugaccuucugu

SEQ ID NO: 903641 - RNA, 22 nt, Human
ucuuucugaugggaagggucaa

SEQ ID NO: 903642 - RNA, 22 nt, Human
gugggcagccuccuuuauuuuc

SEQ ID NO: 903643 - RNA, 22 nt, Human
gaagcugcaauaauuguuuuga

SEQ ID NO: 903644 - RNA, 22 nt, Human
uccugagguuuuaaaacuauuc

SEQ ID NO: 903645 - RNA, 22 nt, Human
aaacucucauuuuagugcacug

SEQ ID NO: 903646 - RNA, 22 nt, Human
cccugcacacucgugucuugac

SEQ ID NO: 903647 - RNA, 22 nt, Human
auggcuuccaaggcccuccgug

SEQ ID NO: 903648 - RNA, 22 nt, Human
gggaaggagguggcuugaagug

SEQ ID NO: 903649 - RNA, 22 nt, Human
gagggccagaucccaggaggaa

SEQ ID NO: 903650 - RNA, 22 nt, Human
ugaaauguuaaucacacaaagg

SEQ ID NO: 903651 - RNA, 22 nt, Human
uuuggcugagaaguugugcuuu

SEQ ID NO: 903652 - RNA, 22 nt, Human
gucccugggaaaggagagggca

SEQ ID NO: 903653 - RNA, 20 nt, Human
uggaggccugcagguuuggg

SEQ ID NO: 903654 - RNA, 22 nt, Human
cuucacaaagcucucuuuaugu

SEQ ID NO: 903655 - RNA, 18 nt, Human
uccuaagauuugugagaa

SEQ ID NO: 903656 - RNA, 22 nt, Human
aagucugggccuccuucccaga

SEQ ID NO: 903657 - RNA, 22 nt, Human
ggcagugaacagaaaugcagaa

SEQ ID NO: 903658 - RNA, 22 nt, Human
gagaaguuguaggagaauuuug

SEQ ID NO: 903659 - RNA, 22 nt, Human
uagauacaggcaagauuaugaa

SEQ ID NO: 903660 - RNA, 22 nt, Human
cccagccucagcuuuacuucca

SEQ ID NO: 903661 - RNA, 22 nt, Human
aaauaacuuucuguguauaguc

SEQ ID NO: 903662 - RNA, 22 nt, Human
auguaaaguaucugaaaugcug

SEQ ID NO: 903663 - RNA, 22 nt, Human
uacucucaggguuaguacagga

SEQ ID NO: 903664 - RNA, 22 nt, Human
gcaaagugaaauggggcagaga

SEQ ID NO: 903665 - RNA, 22 nt, Human
ggcaucaguauggccauagggu

SEQ ID NO: 903666 - RNA, 22 nt, Human
cccugcugucaggugcugggag

SEQ ID NO: 903667 - RNA, 22 nt, Human
cuacagcagagaccagccacau

SEQ ID NO: 903668 - RNA, 22 nt, Human
aagcauaaaacguuacaacaug

SEQ ID NO: 903669 - RNA, 22 nt, Human
ccucuacagggcauagcccaaa

SEQ ID NO: 903670 - RNA, 22 nt, Human
auuuauuaccucggaguuucug

SEQ ID NO: 903671 - RNA, 22 nt, Human
gcugaggcuccucgggaggaca

SEQ ID NO: 903672 - RNA, 22 nt, Human
agcacaguaauugauauuacug

SEQ ID NO: 903673 - RNA, 22 nt, Human
gaaauacaggaaugccacacag

SEQ ID NO: 903674 - RNA, 22 nt, Human
agaaaggagcaccgugggggau

SEQ ID NO: 903675 - RNA, 22 nt, Human
cugugauguuagcucuguguua

SEQ ID NO: 903676 - RNA, 22 nt, Human
gauauaguaggacacaucauga

SEQ ID NO: 903677 - RNA, 22 nt, Human
uagcuucugggaguguuuacua

SEQ ID NO: 903678 - RNA, 21 nt, Human
ugcaggcuguuuaagaggcaa

SEQ ID NO: 903679 - RNA, 22 nt, Human
uccagccuugccacuuuucugu

SEQ ID NO: 903680 - RNA, 22 nt, Human
aaugugaacuuugucauguaac

SEQ ID NO: 903681 - RNA, 22 nt, Human
ggcugcuguacugaugucaguu

SEQ ID NO: 903682 - RNA, 22 nt, Human
agaaggccaagaagaagccuau

SEQ ID NO: 903683 - RNA, 22 nt, Human
gcuugggagaggcuuccucuuu

SEQ ID NO: 903684 - RNA, 22 nt, Human
agcugcuuagagucucuucuua

SEQ ID NO: 903685 - RNA, 20 nt, Human
ggcgccuggccucauggcug

SEQ ID NO: 903686 - RNA, 22 nt, Human
gccaaauaccauuaaccagaaa

SEQ ID NO: 903687 - RNA, 22 nt, Human
agauaacauuuauugaauguaa

SEQ ID NO: 903688 - RNA, 22 nt, Human
ucacaggcuaaauuuaugcagg

SEQ ID NO: 903689 - RNA, 22 nt, Human
uacacauacaccaaugugguca

SEQ ID NO: 903690 - RNA, 19 nt, Human
agccagaacuaguguuucu

SEQ ID NO: 903691 - RNA, 22 nt, Human
ugggaugagaagugcgaggguu

SEQ ID NO: 903692 - RNA, 22 nt, Human
guaaccugggauguagcacaga

SEQ ID NO: 903693 - RNA, 22 nt, Human
gacagugacagcuuggaaagca

SEQ ID NO: 903694 - RNA, 22 nt, Human
agugugggcccccagguuagcc

SEQ ID NO: 903695 - RNA, 19 nt, Human
ggcccuguaggaugugagu

SEQ ID NO: 903696 - RNA, 22 nt, Human
gcauucuuagggccuggggugu

SEQ ID NO: 903697 - RNA, 22 nt, Human
uuaccuaaaauagcucaauuua

SEQ ID NO: 903698 - RNA, 22 nt, Human
uaaaaugccagaccaguucacg

SEQ ID NO: 903699 - RNA, 22 nt, Human
ugcagaauauucuggugacaau

SEQ ID NO: 903700 - RNA, 21 nt, Human
agaaacugacuccuagaggca

SEQ ID NO: 903701 - RNA, 22 nt, Human
caugucuuucucaucacaucua

SEQ ID NO: 903702 - RNA, 22 nt, Human
cagcuugggucaggugccugcu

SEQ ID NO: 903703 - RNA, 22 nt, Human
accagagaggcugcagugugug

SEQ ID NO: 903704 - RNA, 22 nt, Human
uccaaggacucuugucagcugu

SEQ ID NO: 903705 - RNA, 22 nt, Human
acagcaaaggacgaacacucug

SEQ ID NO: 903706 - RNA, 21 nt, Human
gccuggcucucacuggccugg

SEQ ID NO: 903707 - RNA, 22 nt, Human
aaggcaguuugggccaccaucu

SEQ ID NO: 903708 - RNA, 22 nt, Human
uacauguaagacaugagacucu

SEQ ID NO: 903709 - RNA, 19 nt, Human
gcacaggacaucugaugga

SEQ ID NO: 903710 - RNA, 22 nt, Human
uucucacaggauuucuuuuagu

SEQ ID NO: 903711 - RNA, 18 nt, Human
aggucaggaaagcagagu

SEQ ID NO: 903712 - RNA, 22 nt, Human
accugccucagugcagcuggau

SEQ ID NO: 903713 - RNA, 22 nt, Human
uccuagaaucuuuguaagauug

SEQ ID NO: 903714 - RNA, 22 nt, Human
aaugcacacauuugguacugaa

SEQ ID NO: 903715 - RNA, 22 nt, Human
cagggcaggacagauacauuac

SEQ ID NO: 903716 - RNA, 22 nt, Human
uggcuggacagugggcagugga

SEQ ID NO: 903717 - RNA, 22 nt, Human
ccugggaggcugugggucugcu

SEQ ID NO: 903718 - RNA, 22 nt, Human
uagaagaaagugaagcugggga

SEQ ID NO: 903719 - RNA, 22 nt, Human
aacauuugcagaggaaagcuau

SEQ ID NO: 903720 - RNA, 18 nt, Human
auccugggccagucuuuc

SEQ ID NO: 903721 - RNA, 19 nt, Human
gcaggguggcagagcucuu

SEQ ID NO: 903722 - RNA, 22 nt, Human
uccacgcugugugaccuugggc

SEQ ID NO: 903723 - RNA, 22 nt, Human
aauccuggccuagcugggcuca

SEQ ID NO: 903724 - RNA, 21 nt, Human
ucacaacuuugaauuucaaua

SEQ ID NO: 903725 - RNA, 19 nt, Human
guuggcacugaaaauggcu

SEQ ID NO: 903726 - RNA, 22 nt, Human
cagggcucagggacugcagaaa

SEQ ID NO: 903727 - RNA, 22 nt, Human
agcaggcuccaggcuggccauc

SEQ ID NO: 903728 - RNA, 22 nt, Human
ugacuccaaacagaaaacgaau

SEQ ID NO: 903729 - RNA, 22 nt, Human
agccugggcaugggacgggagg

SEQ ID NO: 903730 - RNA, 22 nt, Human
cuggaagagugacuuugcauuu

SEQ ID NO: 903731 - RNA, 22 nt, Human
aacagcagggacuugaauggaa

SEQ ID NO: 903732 - RNA, 22 nt, Human
agaaggcagaugggacggagca

SEQ ID NO: 903733 - RNA, 22 nt, Human
augugcguguguacauauauau

SEQ ID NO: 903734 - RNA, 22 nt, Human
cuggaaaggguccucauucugu

SEQ ID NO: 903735 - RNA, 22 nt, Human
gcagcuucaguaggugaagaca

SEQ ID NO: 903736 - RNA, 21 nt, Human
gggggaagaggaguugcuagu

SEQ ID NO: 903737 - RNA, 20 nt, Human
cuugccaguucccuggcaga

SEQ ID NO: 903738 - RNA, 22 nt, Human
guggcugcagagccagcaagcu

SEQ ID NO: 903739 - RNA, 22 nt, Human
aaugcaaagaguugcuuaucaa

SEQ ID NO: 903740 - RNA, 22 nt, Human
ccccuucuguguccugucagcc

SEQ ID NO: 903741 - RNA, 22 nt, Human
uuaagagggugaugcuagcauu

SEQ ID NO: 903742 - RNA, 22 nt, Human
gguaauaagaucuguuacaugg

SEQ ID NO: 903743 - RNA, 22 nt, Human
ucccagccuuaucuccccuggc

SEQ ID NO: 903744 - RNA, 22 nt, Human
uuuccuuuuauaaggcuugagg

SEQ ID NO: 903745 - RNA, 22 nt, Human
gugagguaaacuguaguucaga

SEQ ID NO: 903746 - RNA, 18 nt, Human
cucucuuuccacucuuug

SEQ ID NO: 903747 - RNA, 22 nt, Human
ggaucaagaaagucagaugaag

SEQ ID NO: 903748 - RNA, 22 nt, Human
cuccuccagcuuccaguggcuc

SEQ ID NO: 903749 - RNA, 22 nt, Human
aaucacuuguaaggaauucaau

SEQ ID NO: 903750 - RNA, 22 nt, Human
aaggccauuguaauguaaauau

SEQ ID NO: 903751 - RNA, 22 nt, Human
aauuuggcagugucuugaagua

SEQ ID NO: 903752 - RNA, 22 nt, Human
gggcagcaaaucugagucuggu

SEQ ID NO: 903753 - RNA, 22 nt, Human
agguuugggaguagaaaucaga

SEQ ID NO: 903754 - RNA, 22 nt, Human
cucuuuggcguuggcagagcca

SEQ ID NO: 903755 - RNA, 22 nt, Human
ccugcuggcagaggggguuacu

SEQ ID NO: 903756 - RNA, 22 nt, Human
cuagggcuccaaagcugagaag

SEQ ID NO: 903757 - RNA, 22 nt, Human
ggcgggaggcugaggaguuggu

SEQ ID NO: 903758 - RNA, 22 nt, Human
aguccguggccagacucaagag

SEQ ID NO: 903759 - RNA, 22 nt, Human
agacaaagaaaccguagaagca

SEQ ID NO: 903760 - RNA, 22 nt, Human
gcugucuuuccccugcuccaga

SEQ ID NO: 903761 - RNA, 22 nt, Human
uccagcuuuggcucuagcuaca

SEQ ID NO: 903762 - RNA, 22 nt, Human
uucucugacccccuuaaauauu

SEQ ID NO: 903763 - RNA, 22 nt, Human
auaaauaucacuguugucccuc

SEQ ID NO: 903764 - RNA, 22 nt, Human
uagcuguuucuaaguguuguuu

SEQ ID NO: 903765 - RNA, 22 nt, Human
ccugggaggcuguuuccagccu

SEQ ID NO: 903766 - RNA, 22 nt, Human
ucucacagaucagcagggggcu

SEQ ID NO: 903767 - RNA, 22 nt, Human
gcugugcagccaagugccucug

SEQ ID NO: 903768 - RNA, 17 nt, Human
agcaacuucucccacag

SEQ ID NO: 903769 - RNA, 21 nt, Human
acaggcuuuagaaaaugacuc

SEQ ID NO: 903770 - RNA, 22 nt, Human
ucagcuggagaugagaaccgaa

SEQ ID NO: 903771 - RNA, 22 nt, Human
auguacauuuuccuaauguuuu

SEQ ID NO: 903772 - RNA, 22 nt, Human
uugaaagauauguuaaucuuuc

SEQ ID NO: 903773 - RNA, 22 nt, Human
guuuccugcccugucuuaucca

SEQ ID NO: 903774 - RNA, 18 nt, Human
ggccucuggacuggcagc

SEQ ID NO: 903775 - RNA, 20 nt, Human
agguuccuuuguggagaauu

SEQ ID NO: 903776 - RNA, 22 nt, Human
ucaggagugauaccauuuguca

SEQ ID NO: 903777 - RNA, 22 nt, Human
agcgagugggucagcguugcag

SEQ ID NO: 903778 - RNA, 22 nt, Human
gccaaaguaccuagcccucugc

SEQ ID NO: 903779 - RNA, 22 nt, Human
guuguuuucagcaguuuaugac

SEQ ID NO: 903780 - RNA, 22 nt, Human
ggcagcauauauucagugggca

SEQ ID NO: 903781 - RNA, 22 nt, Human
auuucauugaaguuaauucuuc

SEQ ID NO: 903782 - RNA, 22 nt, Human
guucuauuacucccugcuucuu

SEQ ID NO: 903783 - RNA, 22 nt, Human
agagcuguucagcagccagguu

SEQ ID NO: 903784 - RNA, 22 nt, Human
ccagcuccagguagaugggcag

SEQ ID NO: 903785 - RNA, 20 nt, Human
ugagauuuguauuauaaguc

SEQ ID NO: 903786 - RNA, 22 nt, Human
uuucagaaccgcuaaaauaaau

SEQ ID NO: 903787 - RNA, 22 nt, Human
ucacagaaggcaucacagaaga

SEQ ID NO: 903788 - RNA, 22 nt, Human
caagcuuuauccgccauguagg

SEQ ID NO: 903789 - RNA, 22 nt, Human
uaaacaucugucauguguuuau

SEQ ID NO: 903790 - RNA, 22 nt, Human
gcaggagacuggcugugguagu

SEQ ID NO: 903791 - RNA, 22 nt, Human
agggguggagaguguugccagu

SEQ ID NO: 903792 - RNA, 22 nt, Human
gugcaaaagcaauugcaguuuu

SEQ ID NO: 903793 - RNA, 22 nt, Human
uaauuauaacaguuacaucuua

SEQ ID NO: 903794 - RNA, 22 nt, Human
aguuuuauaaaggcaccucagu

SEQ ID NO: 903795 - RNA, 21 nt, Human
agagaucugaagaaccauuag

SEQ ID NO: 903796 - RNA, 22 nt, Human
cugucugaauccuaagcuuccu

SEQ ID NO: 903797 - RNA, 22 nt, Human
ugcaguggcgccaucucagcuc

SEQ ID NO: 903798 - RNA, 22 nt, Human
agggagguaggagcuucuagcu

SEQ ID NO: 903799 - RNA, 22 nt, Human
aagaguuuaccagugcugcuuc

SEQ ID NO: 903800 - RNA, 22 nt, Human
uuucugaauuccuaggauguug

SEQ ID NO: 903801 - RNA, 22 nt, Human
cagccugcuagggcaaugccuu

SEQ ID NO: 903802 - RNA, 22 nt, Human
ugagcuuucauguaugaaaaga

SEQ ID NO: 903803 - RNA, 18 nt, Human
cccagcuggugggucagu

SEQ ID NO: 903804 - RNA, 22 nt, Human
caguuuauaguuguuaugugug

SEQ ID NO: 903805 - RNA, 22 nt, Human
gugaccauaauagauuaugagu

SEQ ID NO: 903806 - RNA, 22 nt, Human
aauguuuucucugugaacacau

SEQ ID NO: 903807 - RNA, 22 nt, Human
gugggugugagugacggcgucc

SEQ ID NO: 903808 - RNA, 22 nt, Human
ugcaccaagcccagcuggagaa

SEQ ID NO: 903809 - RNA, 22 nt, Human
ucuacagggucagaguuucaug

SEQ ID NO: 903810 - RNA, 22 nt, Human
agcuuuaugggagcuuagauaa

SEQ ID NO: 903811 - RNA, 22 nt, Human
agcagggcagguaaggaucaga

SEQ ID NO: 903812 - RNA, 22 nt, Human
gaggagacauauuuuugaagca

SEQ ID NO: 903813 - RNA, 22 nt, Human
acuucuaaucagaaggucuggu

SEQ ID NO: 903814 - RNA, 20 nt, Human
gcccaugaggacugcagcug

SEQ ID NO: 903815 - RNA, 22 nt, Human
aagaaagugaugagcuacagau

SEQ ID NO: 903816 - RNA, 17 nt, Human
gcccuggagccaggcua

SEQ ID NO: 903817 - RNA, 21 nt, Human
uagcaucucuacugucauaga

SEQ ID NO: 903818 - RNA, 22 nt, Human
cugaggucucuuuccauaguga

SEQ ID NO: 903819 - RNA, 22 nt, Human
gccucccuccaccacugcaggu

SEQ ID NO: 903820 - RNA, 22 nt, Human
accauguuggccaagcuggucu

SEQ ID NO: 903821 - RNA, 22 nt, Human
aagagaggacauggugaaccug

SEQ ID NO: 903822 - RNA, 22 nt, Human
cagaggccucacuuccagccag

SEQ ID NO: 903823 - RNA, 22 nt, Human
caggcacacugucuacacugag

SEQ ID NO: 903824 - RNA, 22 nt, Human
cagcacagcuggcucuggaagc

SEQ ID NO: 903825 - RNA, 19 nt, Human
ucucccagcugagaagggc

SEQ ID NO: 903826 - RNA, 22 nt, Human
gcagagcaguacucucuugacu

SEQ ID NO: 903827 - RNA, 22 nt, Human
uuguaaacauagagauuuaggu

SEQ ID NO: 903828 - RNA, 22 nt, Human
ugacaaugauuagguagcuucu

SEQ ID NO: 903829 - RNA, 22 nt, Human
ugucuguuauugguguauaaga

SEQ ID NO: 903830 - RNA, 23 nt, Human
cugacucaucccaccaccuccuc

SEQ ID NO: 903831 - RNA, 21 nt, Human
aggcaggauucaaacacagag

SEQ ID NO: 903832 - RNA, 22 nt, Human
ccagaggcuggguucaccucag

SEQ ID NO: 903833 - RNA, 22 nt, Human
aggcccuuggacucaugcucga

SEQ ID NO: 903834 - RNA, 22 nt, Human
ugaggcaguauucuccauucca

SEQ ID NO: 903835 - RNA, 22 nt, Human
gccuauggauuggagaaggagc

SEQ ID NO: 903836 - RNA, 22 nt, Human
acauacauugccucauugguaa

SEQ ID NO: 903837 - RNA, 21 nt, Human
uucuuuccccagaggacuaaa

SEQ ID NO: 903838 - RNA, 22 nt, Human
ucuugcugagacuggcaaguuu

SEQ ID NO: 903839 - RNA, 22 nt, Human
ucucacuggguauaaaugagua

SEQ ID NO: 903840 - RNA, 22 nt, Human
gaagcagugugaacccauguaa

SEQ ID NO: 903841 - RNA, 22 nt, Human
caggcuggagugcagugucgcc

SEQ ID NO: 903842 - RNA, 22 nt, Human
gagcaggaacugaaaaugagac

SEQ ID NO: 903843 - RNA, 22 nt, Human
auucugcacauccaagaacagg

SEQ ID NO: 903844 - RNA, 22 nt, Human
ugagguagagauugugacugua

SEQ ID NO: 903845 - RNA, 22 nt, Human
ucauuucucugagucugauaau

SEQ ID NO: 903846 - RNA, 22 nt, Human
ucagggauuaaggucaaaggug

SEQ ID NO: 903847 - RNA, 19 nt, Human
gcuucuguuugggcuuaga

SEQ ID NO: 903848 - RNA, 22 nt, Human
cuggccugaucucaugcugucc

SEQ ID NO: 903849 - RNA, 22 nt, Human
cagcucagucuggagagaugca

SEQ ID NO: 903850 - RNA, 22 nt, Human
agagcagcguuuguggaacacu

SEQ ID NO: 903851 - RNA, 22 nt, Human
aucucaaacaucuuugaccaua

SEQ ID NO: 903852 - RNA, 22 nt, Human
ugugaccucaucuuaacuggaa

SEQ ID NO: 903853 - RNA, 23 nt, Human
aaugacaccucauagguaacuuc

SEQ ID NO: 903854 - RNA, 22 nt, Human
auucauaaguaaaugauuaccu

SEQ ID NO: 903855 - RNA, 22 nt, Human
cagaaacugcuuguggucaucu

SEQ ID NO: 903856 - RNA, 22 nt, Human
cugaacuuauugagugcuugcu

SEQ ID NO: 903857 - RNA, 19 nt, Human
cuggaaugagaacaugccc

SEQ ID NO: 903858 - RNA, 22 nt, Human
aaaagacaggugucugcggccc

SEQ ID NO: 903859 - RNA, 22 nt, Human
uggagcuguagccaccacccug

SEQ ID NO: 903860 - RNA, 22 nt, Human
agaaacuaagucauaacucuuu

SEQ ID NO: 903861 - RNA, 22 nt, Human
uuacagaacugucuugaaauuu

SEQ ID NO: 903862 - RNA, 22 nt, Human
aguucugguugcccaugacauc

SEQ ID NO: 903863 - RNA, 22 nt, Human
ugcugggcuguuccuguccaug

SEQ ID NO: 903864 - RNA, 22 nt, Human
cucauauucagucacugaugca

SEQ ID NO: 903865 - RNA, 22 nt, Human
gagagugucgggggccccagga

SEQ ID NO: 903866 - RNA, 22 nt, Human
cugucagcacucuacuacagau

SEQ ID NO: 903867 - RNA, 22 nt, Human
gugauaaagacgugucauaauu

SEQ ID NO: 903868 - RNA, 22 nt, Human
gccucaguguccuccuccaugu

SEQ ID NO: 903869 - RNA, 22 nt, Human
aaguucuauugucacuuuauua

SEQ ID NO: 903870 - RNA, 22 nt, Human
agcccagguugaggcugcagug

SEQ ID NO: 903871 - RNA, 22 nt, Human
aucaacaugaauuucucugaag

SEQ ID NO: 903872 - RNA, 22 nt, Human
cggaggggauacauuuucugaa

SEQ ID NO: 903873 - RNA, 22 nt, Human
ggccagaggccacagcuguguc

SEQ ID NO: 903874 - RNA, 22 nt, Human
ugaggcagugauguuuaagcac

SEQ ID NO: 903875 - RNA, 21 nt, Human
cgcagagcgaacuugcggcgc

SEQ ID NO: 903876 - RNA, 22 nt, Human
gaaggcaucucuggacuuauuu

SEQ ID NO: 903877 - RNA, 22 nt, Human
ccuuucucuuugcugaucaugu

SEQ ID NO: 903878 - RNA, 22 nt, Human
ucugcuggucaaggcugggucc

SEQ ID NO: 903879 - RNA, 22 nt, Human
cgaggccacaccugcuucuggg

SEQ ID NO: 903880 - RNA, 22 nt, Human
gaggagagagggacugucugca

SEQ ID NO: 903881 - RNA, 22 nt, Human
gagaaagcuucuuucccacagg

SEQ ID NO: 903882 - RNA, 22 nt, Human
uuaguucauagaauguaacagg

SEQ ID NO: 903883 - RNA, 22 nt, Human
aaguuccuugaaugaagcuagg

SEQ ID NO: 903884 - RNA, 22 nt, Human
acauuguauacagacuuaguca

SEQ ID NO: 903885 - RNA, 22 nt, Human
auuucuguuugcuacuauaagu

SEQ ID NO: 903886 - RNA, 22 nt, Human
acugccuuccaccuauggauga

SEQ ID NO: 903887 - RNA, 17 nt, Human
ggcugugccaggugaga

SEQ ID NO: 903888 - RNA, 21 nt, Human
cucuccagugguuccugauuc

SEQ ID NO: 903889 - RNA, 22 nt, Human
uggcacguuggauugggaguuc

SEQ ID NO: 903890 - RNA, 22 nt, Human
uccugucuaaagaccugcaggc

SEQ ID NO: 903891 - RNA, 22 nt, Human
aaaaaugaauucuucaguggca

SEQ ID NO: 903892 - RNA, 22 nt, Human
cagacccuuuucugagaggacc

SEQ ID NO: 903893 - RNA, 22 nt, Human
gaaguuaucaggauuaaaguug

SEQ ID NO: 903894 - RNA, 22 nt, Human
ucuggggcaguuacuggggccu

SEQ ID NO: 903895 - RNA, 22 nt, Human
acacucuacagagcaaucuacc

SEQ ID NO: 903896 - RNA, 22 nt, Human
auuuuugagcugugaacauagc

SEQ ID NO: 903897 - RNA, 22 nt, Human
acagggaaggauuuagugggaa

SEQ ID NO: 903898 - RNA, 22 nt, Human
ccacuugaaacuuaguggcaua

SEQ ID NO: 903899 - RNA, 22 nt, Human
agagaguugaggaagcaacacu

SEQ ID NO: 903900 - RNA, 22 nt, Human
aguguauaugugcugagaaacg

SEQ ID NO: 903901 - RNA, 22 nt, Human
cuucagaauccagaaucagaau

SEQ ID NO: 903902 - RNA, 22 nt, Human
aggugccuaucuggucucugca

SEQ ID NO: 903903 - RNA, 22 nt, Human
aaaugcauguagaauaauagag

SEQ ID NO: 903904 - RNA, 22 nt, Human
agaaacagaaccaggugucauu

SEQ ID NO: 903905 - RNA, 22 nt, Human
cugggcugcaucaaagaggcau

SEQ ID NO: 903906 - RNA, 22 nt, Human
auccugaguuccugccucuaaa

SEQ ID NO: 903907 - RNA, 22 nt, Human
aagagcuguugucugcuuacug

SEQ ID NO: 903908 - RNA, 22 nt, Human
ugcagagggagugacgguucac

SEQ ID NO: 903909 - RNA, 20 nt, Human
uaaauuagccuugaagauua

SEQ ID NO: 903910 - RNA, 22 nt, Human
gaaggcagggaauguggugcua

SEQ ID NO: 903911 - RNA, 22 nt, Human
gggcaggagagggccaccugga

SEQ ID NO: 903912 - RNA, 21 nt, Human
uacaguaaguugggugguccu

SEQ ID NO: 903913 - RNA, 22 nt, Human
uccugcagccacugcaggcaga

SEQ ID NO: 903914 - RNA, 19 nt, Human
cucugggcaagucacuuaa

SEQ ID NO: 903915 - RNA, 22 nt, Human
gcaggcagucaucuuucauauu

SEQ ID NO: 903916 - RNA, 22 nt, Human
uucuuucugggaagaguucaga

SEQ ID NO: 903917 - RNA, 23 nt, Human
aagcacagaaugguuuaggaguu

SEQ ID NO: 903918 - RNA, 21 nt, Human
cucacaggaugcaguguuacu

SEQ ID NO: 903919 - RNA, 21 nt, Human
gcagugucaugguuucaaguu

SEQ ID NO: 903920 - RNA, 22 nt, Human
caucuucaggggcuacaucugu

SEQ ID NO: 903921 - RNA, 22 nt, Human
gaggcugggggcugccuuccuc

SEQ ID NO: 903922 - RNA, 23 nt, Human
cugcaagguacaagaugcuggau

SEQ ID NO: 903923 - RNA, 22 nt, Human
aucuggaguuucaguuuucugg

SEQ ID NO: 903924 - RNA, 22 nt, Human
ugacuaauugauaacucuguaa

SEQ ID NO: 903925 - RNA, 22 nt, Human
gcuguaugugaggccacaguga

SEQ ID NO: 903926 - RNA, 22 nt, Human
cauuauggcagccaggauauug

SEQ ID NO: 903927 - RNA, 22 nt, Human
ugggccucugccacgcuccccc

SEQ ID NO: 903928 - RNA, 22 nt, Human
uagaucugauacaauucaucug

SEQ ID NO: 903929 - RNA, 22 nt, Human
cagcuguccaaacacauuaacu

SEQ ID NO: 903930 - RNA, 22 nt, Human
ugcucuaagaacucuaggaauu

SEQ ID NO: 903931 - RNA, 21 nt, Human
ugaaagaggauguggucauuc

SEQ ID NO: 903932 - RNA, 22 nt, Human
cuccucuuuggggauuuacaca

SEQ ID NO: 903933 - RNA, 22 nt, Human
gcagauggcgcaguggaaguuc

SEQ ID NO: 903934 - RNA, 22 nt, Human
ugcccaagauucuuacaucaug

SEQ ID NO: 903935 - RNA, 22 nt, Human
cucugugcgggccauggucagg

SEQ ID NO: 903936 - RNA, 22 nt, Human
ucacugcucuccaauguggagu

SEQ ID NO: 903937 - RNA, 22 nt, Human
agguaaugcaacuacuuugcua

SEQ ID NO: 903938 - RNA, 22 nt, Human
aaagcuguuaaaugcauaaugc

SEQ ID NO: 903939 - RNA, 22 nt, Human
caggaguguuugcuacaguuuc

SEQ ID NO: 903940 - RNA, 22 nt, Human
aguucccaggugaugcugaugu

SEQ ID NO: 903941 - RNA, 22 nt, Human
gcuggaguaggaccaugcuuga

SEQ ID NO: 903942 - RNA, 22 nt, Human
ggcaggaacacagauggugccg

SEQ ID NO: 903943 - RNA, 22 nt, Human
cagguuggucggcaaguacaca

SEQ ID NO: 903944 - RNA, 22 nt, Human
caauguguguguuuuucucaac

SEQ ID NO: 903945 - RNA, 22 nt, Human
gugcaagacuuccuaagcaaua

SEQ ID NO: 903946 - RNA, 22 nt, Human
ccugaggucacaacuugcuuau

SEQ ID NO: 903947 - RNA, 22 nt, Human
gaagaaauguguucaagguagg

SEQ ID NO: 903948 - RNA, 22 nt, Human
gucauccaacaagaggcucuug

SEQ ID NO: 903949 - RNA, 22 nt, Human
gcacacaguacuauaugcuaca

SEQ ID NO: 903950 - RNA, 22 nt, Human
uuuacugagugaccuagaauaa

SEQ ID NO: 903951 - RNA, 22 nt, Human
ugagcauggugggugcagagca

SEQ ID NO: 903952 - RNA, 20 nt, Human
uagaacuuuucaguauggau

SEQ ID NO: 903953 - RNA, 22 nt, Human
gaggcucaacccacagggguug

SEQ ID NO: 903954 - RNA, 22 nt, Human
ugaaaugauuauaugguguuug

SEQ ID NO: 903955 - RNA, 22 nt, Human
ccacugagcaguagcugcgucg

SEQ ID NO: 903956 - RNA, 22 nt, Human
ggccuuggaguccuccacugga

SEQ ID NO: 903957 - RNA, 22 nt, Human
uggggcuaaacacgccuggccu

SEQ ID NO: 903958 - RNA, 22 nt, Human
ggcaugagcacgaagugguacc

SEQ ID NO: 903959 - RNA, 22 nt, Human
cgcauacauagaaacacacaga

SEQ ID NO: 903960 - RNA, 22 nt, Human
guuuccgcccugggccuguggg

SEQ ID NO: 903961 - RNA, 22 nt, Human
agugugugccuuuggauaccug

SEQ ID NO: 903962 - RNA, 22 nt, Human
cuguacagauugcacacgggga

SEQ ID NO: 903963 - RNA, 22 nt, Human
uagccggguguugugucaugca

SEQ ID NO: 903964 - RNA, 22 nt, Human
uccugagcucccaugaacaggc

SEQ ID NO: 903965 - RNA, 22 nt, Human
aagcugcccuguguuagaguuc

SEQ ID NO: 903966 - RNA, 22 nt, Human
uaggaccaggggcugccaggaa

SEQ ID NO: 903967 - RNA, 22 nt, Human
ggccacagugggaaauccuggg

SEQ ID NO: 903968 - RNA, 22 nt, Human
agacuuuaacaauggguaugaa

SEQ ID NO: 903969 - RNA, 22 nt, Human
gagcagcccuagggcauaagca

SEQ ID NO: 903970 - RNA, 23 nt, Human
agcagccauagggaagcaauaca

SEQ ID NO: 903971 - RNA, 19 nt, Human
ucaaaugccaaugucacag

SEQ ID NO: 903972 - RNA, 22 nt, Human
ugcaaagucgcaaaauucuucu

SEQ ID NO: 903973 - RNA, 22 nt, Human
uugaaagaagaagcugcgaugu

SEQ ID NO: 903974 - RNA, 22 nt, Human
auuuucagaacauucauucacu

SEQ ID NO: 903975 - RNA, 22 nt, Human
agaauaaucacugaaguucaaa

SEQ ID NO: 903976 - RNA, 22 nt, Human
ccugagccucuugcacgcucag

SEQ ID NO: 903977 - RNA, 22 nt, Human
cacugcccagcgucuuaggcac

SEQ ID NO: 903978 - RNA, 21 nt, Human
agcagacacuugugaccuucc

SEQ ID NO: 903979 - RNA, 22 nt, Human
cagcucugaagaaaggugucua

SEQ ID NO: 903980 - RNA, 22 nt, Human
gcuguccaccuccagagccuua

SEQ ID NO: 903981 - RNA, 22 nt, Human
uacuuguuaggaauuucuacua

SEQ ID NO: 903982 - RNA, 22 nt, Human
uaacagcacuggcaggcacugu

SEQ ID NO: 903983 - RNA, 22 nt, Human
gcauggccaggaaagguagaaa

SEQ ID NO: 903984 - RNA, 22 nt, Human
gcagccucagggcacucagaug

SEQ ID NO: 903985 - RNA, 22 nt, Human
aaagggcugucaaauaagcaac

SEQ ID NO: 903986 - RNA, 22 nt, Human
uuucuucaguaacacaaaccau

SEQ ID NO: 903987 - RNA, 22 nt, Human
caucugugccggguguuuguca

SEQ ID NO: 903988 - RNA, 22 nt, Human
gacacagugguucugugaguaa

SEQ ID NO: 903989 - RNA, 17 nt, Human
aggagggaaauagcuug

SEQ ID NO: 903990 - RNA, 23 nt, Human
cacuccuguuucuaagccagcau

SEQ ID NO: 903991 - RNA, 22 nt, Human
acucagagucuguuugguaccu

SEQ ID NO: 903992 - RNA, 21 nt, Human
cuggcccagggaucugcauuu

SEQ ID NO: 903993 - RNA, 22 nt, Human
agugacaaaacggaacauacag

SEQ ID NO: 903994 - RNA, 22 nt, Human
uuagggcaggcaugagagaacu

SEQ ID NO: 903995 - RNA, 22 nt, Human
ugaggccugaagccugaaguga

SEQ ID NO: 903996 - RNA, 22 nt, Human
agcugcaggauuauggaaugga

SEQ ID NO: 903997 - RNA, 22 nt, Human
auggcagucagagacaggcaga

SEQ ID NO: 903998 - RNA, 22 nt, Human
ugagacaguaucgccccaaggc

SEQ ID NO: 903999 - RNA, 22 nt, Human
cagagcugagaauguugaugcu

SEQ ID NO: 904000 - RNA, 22 nt, Human
gagcugaggauacaucagugaa

SEQ ID NO: 904001 - RNA, 22 nt, Human
cuuuagauggcuuaggaggccc

SEQ ID NO: 904002 - RNA, 22 nt, Human
aagagcauuuuguaaaauccuu

SEQ ID NO: 904003 - RNA, 22 nt, Human
augucuauauagucaauaauca

SEQ ID NO: 904004 - RNA, 22 nt, Human
aaguuuaucccucucacaguua

SEQ ID NO: 904005 - RNA, 22 nt, Human
cgcagcagccccgugguaggug

SEQ ID NO: 904006 - RNA, 22 nt, Human
ccuggcuuccuucaugaccugg

SEQ ID NO: 904007 - RNA, 17 nt, Human
cugaggggagugcugug

SEQ ID NO: 904008 - RNA, 22 nt, Human
cauaagaaauuuaacagaacuu

SEQ ID NO: 904009 - RNA, 23 nt, Human
ugggagacuuuucauuuuguucu

SEQ ID NO: 904010 - RNA, 22 nt, Human
agcagcaaguguaacugaauau

SEQ ID NO: 904011 - RNA, 22 nt, Human
gaagguggcgagcggauugcug

SEQ ID NO: 904012 - RNA, 22 nt, Human
agcuggguacacguugucacaa

SEQ ID NO: 904013 - RNA, 22 nt, Human
auuuguuucagggccuugguau

SEQ ID NO: 904014 - RNA, 22 nt, Human
aaauugcugaccaaguauauuc

SEQ ID NO: 904015 - RNA, 22 nt, Human
uccugagagcagaguccaggug

SEQ ID NO: 904016 - RNA, 20 nt, Human
cauuaugguugggcacagug

SEQ ID NO: 904017 - RNA, 22 nt, Human
uuucuucuaagauuucaaacua

SEQ ID NO: 904018 - RNA, 22 nt, Human
caccagccagagugacagcucc

SEQ ID NO: 904019 - RNA, 22 nt, Human
uggccugccccgagauccuggc

SEQ ID NO: 904020 - RNA, 22 nt, Human
cacacauuaauaucaaaggcuc

SEQ ID NO: 904021 - RNA, 22 nt, Human
uacaccaguaucuuaagcauga

SEQ ID NO: 904022 - RNA, 22 nt, Human
cucuuuggauguuuaugauaag

SEQ ID NO: 904023 - RNA, 19 nt, Human
acaguccagcuguuuguac

SEQ ID NO: 904024 - RNA, 19 nt, Human
ucccaggaagcaaauguca

SEQ ID NO: 904025 - RNA, 22 nt, Human
cucuggagguugagcccagcaa

SEQ ID NO: 904026 - RNA, 19 nt, Human
aucugaaguaggugcagcu

SEQ ID NO: 904027 - RNA, 22 nt, Human
uuauuuauuguguaccuacugu

SEQ ID NO: 904028 - RNA, 22 nt, Human
gccaggcacaguucuaggugcu

SEQ ID NO: 904029 - RNA, 18 nt, Human
acauacauucugucugca

SEQ ID NO: 904030 - RNA, 22 nt, Human
cccuuucugccuucuaaaauaa

SEQ ID NO: 904031 - RNA, 22 nt, Human
ugcugcaggcagccccucuacu

SEQ ID NO: 904032 - RNA, 22 nt, Human
cgagugucugcuaugggcugag

SEQ ID NO: 904033 - RNA, 22 nt, Human
cgcucuggagaauaguagcuuu

SEQ ID NO: 904034 - RNA, 22 nt, Human
ugcaggagcugugcggugaggg

SEQ ID NO: 904035 - RNA, 22 nt, Human
uggccuguggcuuaaggucugu

SEQ ID NO: 904036 - RNA, 19 nt, Human
agugggcaaggaagaugac

SEQ ID NO: 904037 - RNA, 22 nt, Human
ggaaagaaucaagugauccugu

SEQ ID NO: 904038 - RNA, 22 nt, Human
ccaguggaauuaaaaauaagug

SEQ ID NO: 904039 - RNA, 22 nt, Human
ugucuauagaaucaugcaguuu

SEQ ID NO: 904040 - RNA, 22 nt, Human
uccccccagccuuucacaugag

SEQ ID NO: 904041 - RNA, 22 nt, Human
gcucagggccuggcugcggacu

SEQ ID NO: 904042 - RNA, 22 nt, Human
ucucacagaggcuugggcucau

SEQ ID NO: 904043 - RNA, 22 nt, Human
acuuucuauucccacagagaua

SEQ ID NO: 904044 - RNA, 19 nt, Human
gagggcucauuugaacaau

SEQ ID NO: 904045 - RNA, 22 nt, Human
ccucuguggccuuggaccagcu

SEQ ID NO: 904046 - RNA, 22 nt, Human
ucacugcucagucuguacuaca

SEQ ID NO: 904047 - RNA, 22 nt, Human
uugcuuuagaaucugcuucugg

SEQ ID NO: 904048 - RNA, 22 nt, Human
uaauaaacugcuacgcuuaguu

SEQ ID NO: 904049 - RNA, 22 nt, Human
auugacaauucuaugcagagca

SEQ ID NO: 904050 - RNA, 22 nt, Human
ccagguucaaauagcuguguga

SEQ ID NO: 904051 - RNA, 22 nt, Human
caggucccgccccgggcugacc

SEQ ID NO: 904052 - RNA, 22 nt, Human
guggucaggggcugaggugccc

SEQ ID NO: 904053 - RNA, 22 nt, Human
uuauaagacuguagugaguauu

SEQ ID NO: 904054 - RNA, 22 nt, Human
uucuagaaacacaugcaaacag

SEQ ID NO: 904055 - RNA, 22 nt, Human
aggauguggcugagacuucugg

SEQ ID NO: 904056 - RNA, 22 nt, Human
uuugaagacauuugaauacuuu

SEQ ID NO: 904057 - RNA, 22 nt, Human
cagaagugguauuaauuagauu

SEQ ID NO: 904058 - RNA, 22 nt, Human
uguuucuaucuggaucaauaga

SEQ ID NO: 904059 - RNA, 22 nt, Human
uuuguaaaggccugaauuucag

SEQ ID NO: 904060 - RNA, 19 nt, Human
ugcauaaauuauauacuuu

SEQ ID NO: 904061 - RNA, 22 nt, Human
ccuggcaggcuggggacagugc

SEQ ID NO: 904062 - RNA, 17 nt, Human
aagagaggcugagcugg

SEQ ID NO: 904063 - RNA, 22 nt, Human
cggggagggcagaggcucccuc

SEQ ID NO: 904064 - RNA, 22 nt, Human
ggccaugguuggggaagacaug

SEQ ID NO: 904065 - RNA, 21 nt, Human
uucaacaaagggaauaaguuu

SEQ ID NO: 904066 - RNA, 22 nt, Human
cagcugaguggacccuagaggc

SEQ ID NO: 904067 - RNA, 22 nt, Human
gcggguggaucaugaggucagg

SEQ ID NO: 904068 - RNA, 22 nt, Human
ucacauucuagaauguuaucgu

SEQ ID NO: 904069 - RNA, 22 nt, Human
ggaggguccacugugaggcaga

SEQ ID NO: 904070 - RNA, 22 nt, Human
aaugugcugguaacugcuuugc

SEQ ID NO: 904071 - RNA, 22 nt, Human
ugcaaacagccuugaaagaggg

SEQ ID NO: 904072 - RNA, 18 nt, Human
ugcugugcacagcccuau

SEQ ID NO: 904073 - RNA, 22 nt, Human
ccugcccagcuucaccucaggc

SEQ ID NO: 904074 - RNA, 18 nt, Human
augcuucugauagaagca

SEQ ID NO: 904075 - RNA, 22 nt, Human
ccagcccuucccaacuggccag

SEQ ID NO: 904076 - RNA, 22 nt, Human
gagcugcagacuugauacagga

SEQ ID NO: 904077 - RNA, 22 nt, Human
agaggauguucuaggcacucau

SEQ ID NO: 904078 - RNA, 22 nt, Human
acaguacauagaucucuacccu

SEQ ID NO: 904079 - RNA, 22 nt, Human
acugcaaacauaguacuugagc

SEQ ID NO: 904080 - RNA, 17 nt, Human
caucaaagaaauuucca

SEQ ID NO: 904081 - RNA, 22 nt, Human
aaguuauugcagcaauccaagu

SEQ ID NO: 904082 - RNA, 22 nt, Human
gugagcaguuuguuccagaauc

SEQ ID NO: 904083 - RNA, 22 nt, Human
gcuguccaugucuggccucagu

SEQ ID NO: 904084 - RNA, 22 nt, Human
gauggccuuguuuucucccuuc

SEQ ID NO: 904085 - RNA, 22 nt, Human
ugcaaaugggaaacccagcagu

SEQ ID NO: 904086 - RNA, 22 nt, Human
ugacagagcuggagaauaauuu

SEQ ID NO: 904087 - RNA, 22 nt, Human
aggcagccuauggggagcucag

SEQ ID NO: 904088 - RNA, 22 nt, Human
cagcaauaguguguuuguuuca

SEQ ID NO: 904089 - RNA, 22 nt, Human
ccugagaguaggugucucuuua

SEQ ID NO: 904090 - RNA, 17 nt, Human
ggcucugggugucacau

SEQ ID NO: 904091 - RNA, 22 nt, Human
aacauaaauuugaaguggcaaa

SEQ ID NO: 904092 - RNA, 22 nt, Human
acauugaacaguacaaaugauc

SEQ ID NO: 904093 - RNA, 23 nt, Human
ggcuggcccggggcugcuccuga

SEQ ID NO: 904094 - RNA, 22 nt, Human
agacacaguguugaaggcuagu

SEQ ID NO: 904095 - RNA, 22 nt, Human
uucauauuuucugcuugcucac

SEQ ID NO: 904096 - RNA, 22 nt, Human
ggacugaggcccacuugaggga

SEQ ID NO: 904097 - RNA, 19 nt, Human
auucuucucaaauauccau

SEQ ID NO: 904098 - RNA, 22 nt, Human
cagcaggugcaggugcggccgc

SEQ ID NO: 904099 - RNA, 22 nt, Human
cugggcugugguguggcccaaa

SEQ ID NO: 904100 - RNA, 22 nt, Human
ucuuccaaugguuucuagauuu

SEQ ID NO: 904101 - RNA, 22 nt, Human
gccuuaauacagauggguggug

SEQ ID NO: 904102 - RNA, 22 nt, Human
acaguguuguauuuaguuugau

SEQ ID NO: 904103 - RNA, 22 nt, Human
uucaugaacgaacauauguaua

SEQ ID NO: 904104 - RNA, 22 nt, Human
ugaguuuuguaauauucaagau

SEQ ID NO: 904105 - RNA, 20 nt, Human
agauacaguuuaauuacucu

SEQ ID NO: 904106 - RNA, 22 nt, Human
auggccagucaagccucuggcu

SEQ ID NO: 904107 - RNA, 22 nt, Human
gggcuguguacuaugaggaggg

SEQ ID NO: 904108 - RNA, 22 nt, Human
ucuauuuuauacucaaaucuuc

SEQ ID NO: 904109 - RNA, 22 nt, Human
ccuucaaauuuagaacaaguga

SEQ ID NO: 904110 - RNA, 22 nt, Human
uucaaguuaaugauucugguuu

SEQ ID NO: 904111 - RNA, 22 nt, Human
aggacuucuagugguacuguga

SEQ ID NO: 904112 - RNA, 21 nt, Human
caaggacagguugcagggcaa

SEQ ID NO: 904113 - RNA, 22 nt, Human
gcuucuaauuuuuuacagaaua

SEQ ID NO: 904114 - RNA, 22 nt, Human
cagaggcagccgggggagaacg

SEQ ID NO: 904115 - RNA, 22 nt, Human
augcacaaacccacaauuaguc

SEQ ID NO: 904116 - RNA, 22 nt, Human
ugguggcacaagggagagaauc

SEQ ID NO: 904117 - RNA, 22 nt, Human
auuacaacuacauaaucucaga

SEQ ID NO: 904118 - RNA, 22 nt, Human
auuucucaggguccagguccca

SEQ ID NO: 904119 - RNA, 22 nt, Human
cuguggauuuaggcagagcuga

SEQ ID NO: 904120 - RNA, 22 nt, Human
cagggugccucccgcucgccgg

SEQ ID NO: 904121 - RNA, 22 nt, Human
ccagguguggggaggacucaca

SEQ ID NO: 904122 - RNA, 22 nt, Human
cagugagguagacagcuuuuuc

SEQ ID NO: 904123 - RNA, 22 nt, Human
gcacaugacuuugaggaaacca

SEQ ID NO: 904124 - RNA, 22 nt, Human
uuccuucuuccaaacccaucau

SEQ ID NO: 904125 - RNA, 22 nt, Human
cuugggcacaucccugguauuu

SEQ ID NO: 904126 - RNA, 22 nt, Human
uuauaacacugccuugucacca

SEQ ID NO: 904127 - RNA, 22 nt, Human
agccagaggaacuugaugacug

SEQ ID NO: 904128 - RNA, 22 nt, Human
agacccuguuaguuccagucuu

SEQ ID NO: 904129 - RNA, 22 nt, Human
cacugcagaucagaggcugaga

SEQ ID NO: 904130 - RNA, 22 nt, Human
cagcaauaacucaaagccauuu

SEQ ID NO: 904131 - RNA, 22 nt, Human
uuuauuguugggucuuaagcug

SEQ ID NO: 904132 - RNA, 22 nt, Human
cuaaaauuaucaagauaauucc

SEQ ID NO: 904133 - RNA, 20 nt, Human
cucagcuaaacaacacugac

SEQ ID NO: 904134 - RNA, 22 nt, Human
uggggagaaaugucuuuguucc

SEQ ID NO: 904135 - RNA, 22 nt, Human
uauugauaugcagaacugacuu

SEQ ID NO: 904136 - RNA, 22 nt, Human
cucauaaacauuauucauuauu

SEQ ID NO: 904137 - RNA, 22 nt, Human
guuuuguucaugaacauugggu

SEQ ID NO: 904138 - RNA, 22 nt, Human
gucaaacagccuccuguucuaa

SEQ ID NO: 904139 - RNA, 22 nt, Human
auguuccugguauaucaugacc

SEQ ID NO: 904140 - RNA, 22 nt, Human
uggcaugccuugucagacagug

SEQ ID NO: 904141 - RNA, 22 nt, Human
gcuguaggaagacagaaugcag

SEQ ID NO: 904142 - RNA, 22 nt, Human
cauuaauauuguucuucuuuag

SEQ ID NO: 904143 - RNA, 22 nt, Human
uugccauugcaaaguacuauga

SEQ ID NO: 904144 - RNA, 22 nt, Human
aaagacuggaaggugaggcugu

SEQ ID NO: 904145 - RNA, 22 nt, Human
ugagguagggaaggcugguauu

SEQ ID NO: 904146 - RNA, 22 nt, Human
uuugggcucuugcugaccuggg

SEQ ID NO: 904147 - RNA, 22 nt, Human
uuauuuacuggauggccuuggg

SEQ ID NO: 904148 - RNA, 22 nt, Human
gcuggagaaacugcagcugagg

SEQ ID NO: 904149 - RNA, 19 nt, Human
cugggacuccugauaccuu

SEQ ID NO: 904150 - RNA, 22 nt, Human
agcacagagcucggggaaugga

SEQ ID NO: 904151 - RNA, 22 nt, Human
uuauggaauggagaaagucugc

SEQ ID NO: 904152 - RNA, 22 nt, Human
augcagggaaaagagauauuau

SEQ ID NO: 904153 - RNA, 22 nt, Human
uggagagucucugagccagggc

SEQ ID NO: 904154 - RNA, 22 nt, Human
ucuacaguuuucuugggaguug

SEQ ID NO: 904155 - RNA, 22 nt, Human
ugcagggccuucuagaccaugg

SEQ ID NO: 904156 - RNA, 22 nt, Human
uucaaugccuuucucuaagcuc

SEQ ID NO: 904157 - RNA, 22 nt, Human
gcucugagacaguagagauggc

SEQ ID NO: 904158 - RNA, 22 nt, Human
aucagaacaaaagaacaguuua

SEQ ID NO: 904159 - RNA, 21 nt, Human
uuugccuucacgaagcauccu

SEQ ID NO: 904160 - RNA, 22 nt, Human
uaacacagaguaaguggucaau

SEQ ID NO: 904161 - RNA, 22 nt, Human
auaucauaaaucggugcaugaa

SEQ ID NO: 904162 - RNA, 22 nt, Human
aauggcaguaguugcaugagag

SEQ ID NO: 904163 - RNA, 22 nt, Human
cagcaaucgggugauaugcaau

SEQ ID NO: 904164 - RNA, 22 nt, Human
acacuucuauucccugcacaaa

SEQ ID NO: 904165 - RNA, 22 nt, Human
gcagcaggcacggucucgacau

SEQ ID NO: 904166 - RNA, 22 nt, Human
ucucuguguguuggcuguauau

SEQ ID NO: 904167 - RNA, 22 nt, Human
aguuuuauuaaauccacagaag

SEQ ID NO: 904168 - RNA, 22 nt, Human
uuggacagaauuuugugugugu

SEQ ID NO: 904169 - RNA, 22 nt, Human
ugcauauuuucugauucagaag

SEQ ID NO: 904170 - RNA, 19 nt, Human
caguuuaacuaauuuuauc

SEQ ID NO: 904171 - RNA, 22 nt, Human
uggcuacauuuguugaucacuu

SEQ ID NO: 904172 - RNA, 22 nt, Human
uaacacuguaaaccuagauguu

SEQ ID NO: 904173 - RNA, 17 nt, Human
gaauccuucucuguucu

SEQ ID NO: 904174 - RNA, 19 nt, Human
aggcccagcgcugggggcu

SEQ ID NO: 904175 - RNA, 22 nt, Human
gaugaaauuguuuugauacuuu

SEQ ID NO: 904176 - RNA, 22 nt, Human
auucaagguuggcucaggaauu

SEQ ID NO: 904177 - RNA, 19 nt, Human
caagugaagccugggaugg

SEQ ID NO: 904178 - RNA, 22 nt, Human
uuucagacuccaaauucauaag

SEQ ID NO: 904179 - RNA, 22 nt, Human
gugugagcagguuugaccuaag

SEQ ID NO: 904180 - RNA, 22 nt, Human
aaguccugccaccuauaagccu

SEQ ID NO: 904181 - RNA, 22 nt, Human
acauuguugugcaauuauaguu

SEQ ID NO: 904182 - RNA, 22 nt, Human
uggcagugaaccaaggcuccaa

SEQ ID NO: 904183 - RNA, 17 nt, Human
ggcuggagcagcucccc

SEQ ID NO: 904184 - RNA, 20 nt, Human
ucugccacgucuggugacug

SEQ ID NO: 904185 - RNA, 22 nt, Human
aaacaguuuauaacaugauacu

SEQ ID NO: 904186 - RNA, 22 nt, Human
cugagagucaguggaguggugu

SEQ ID NO: 904187 - RNA, 22 nt, Human
ucuauuuaccaaauguaguucc

SEQ ID NO: 904188 - RNA, 22 nt, Human
ucuguacaugaguugagaauca

SEQ ID NO: 904189 - RNA, 22 nt, Human
gucagcucagcaggugggagug

SEQ ID NO: 904190 - RNA, 22 nt, Human
uagacaaugccaucuugugguu

SEQ ID NO: 904191 - RNA, 22 nt, Human
uucugcaugguuggggagaagc

SEQ ID NO: 904192 - RNA, 22 nt, Human
gcuggcuggaaugggagaagaa

SEQ ID NO: 904193 - RNA, 22 nt, Human
uagagcuuggacugcauuuucg

SEQ ID NO: 904194 - RNA, 23 nt, Human
uggcccugugcaugcugcuuccc

SEQ ID NO: 904195 - RNA, 22 nt, Human
agcaugcaggaaccacauggca

SEQ ID NO: 904196 - RNA, 22 nt, Human
cuaccgguccacgguuuaaaug

SEQ ID NO: 904197 - RNA, 23 nt, Human
uuucacauuuacuguuagauggc

SEQ ID NO: 904198 - RNA, 22 nt, Human
acagcuggaguguuggugaggu

SEQ ID NO: 904199 - RNA, 20 nt, Human
augcauauauguggugucug

SEQ ID NO: 904200 - RNA, 22 nt, Human
uuccuggggcuuagcaauggag

SEQ ID NO: 904201 - RNA, 22 nt, Human
gccugccccuuccugggcaggg

SEQ ID NO: 904202 - RNA, 22 nt, Human
uggugcugucuacuuugugcag

SEQ ID NO: 904203 - RNA, 22 nt, Human
cucauaaaagcuuuguuuacac

SEQ ID NO: 904204 - RNA, 22 nt, Human
acagaauucuaguauguggcuu

SEQ ID NO: 904205 - RNA, 22 nt, Human
uguguaggauuuccuggagccu

SEQ ID NO: 904206 - RNA, 22 nt, Human
ucaguggaacugucugggugag

SEQ ID NO: 904207 - RNA, 21 nt, Human
aauucccagaaacagcacaag

SEQ ID NO: 904208 - RNA, 22 nt, Human
gcuacacaaaaggagagugagu

SEQ ID NO: 904209 - RNA, 22 nt, Human
uuggucuucagagaucuggugg

SEQ ID NO: 904210 - RNA, 22 nt, Human
uuucuuccaaaggcacguucuc

SEQ ID NO: 904211 - RNA, 22 nt, Human
aaugucaacacaagagaaaugc

SEQ ID NO: 904212 - RNA, 18 nt, Human
acagcagguuucauucuu

SEQ ID NO: 904213 - RNA, 22 nt, Human
auaauggcaugacaguuauaua

SEQ ID NO: 904214 - RNA, 19 nt, Human
gcacgcuggcuugauaggg

SEQ ID NO: 904215 - RNA, 22 nt, Human
cccacacaaaucauggggagaa

SEQ ID NO: 904216 - RNA, 19 nt, Human
cagagcagugguuccugaa

SEQ ID NO: 904217 - RNA, 23 nt, Human
cuggaagugcuuuuauagcuuug

SEQ ID NO: 904218 - RNA, 22 nt, Human
guaauagaugaaacaaugugga

SEQ ID NO: 904219 - RNA, 22 nt, Human
uagggagaaacaccaauuuauu

SEQ ID NO: 904220 - RNA, 20 nt, Human
ccccuucaucuacagccuga

SEQ ID NO: 904221 - RNA, 22 nt, Human
uuacuaguauaugucaagcaac

SEQ ID NO: 904222 - RNA, 22 nt, Human
aggaggccccuccuggguugcu

SEQ ID NO: 904223 - RNA, 22 nt, Human
auucuuauuaaauagccagaag

SEQ ID NO: 904224 - RNA, 21 nt, Human
ggccugagcaccuguccaccu

SEQ ID NO: 904225 - RNA, 22 nt, Human
uuucuaaggccagagacugcug

SEQ ID NO: 904226 - RNA, 21 nt, Human
ugucagcacgcaugaggccag

SEQ ID NO: 904227 - RNA, 22 nt, Human
gcucccagauuucagccuugug

SEQ ID NO: 904228 - RNA, 22 nt, Human
uucucuaaaugugaaccggcuu

SEQ ID NO: 904229 - RNA, 22 nt, Human
ccagagggacguuaccaguuca

SEQ ID NO: 904230 - RNA, 22 nt, Human
augcuacagcaucucucaucag

SEQ ID NO: 904231 - RNA, 22 nt, Human
gcccugcucuuuugcccaccca

SEQ ID NO: 904232 - RNA, 22 nt, Human
auuuucuauguuguaauuguua

SEQ ID NO: 904233 - RNA, 22 nt, Human
ugcaucuuuagucuuaugucug

SEQ ID NO: 904234 - RNA, 22 nt, Human
cugggacccacaccuggaaucu

SEQ ID NO: 904235 - RNA, 22 nt, Human
acagugaugagccggcugaggc

SEQ ID NO: 904236 - RNA, 22 nt, Human
gccugcucuccggaucccugau

SEQ ID NO: 904237 - RNA, 22 nt, Human
agcugccagggacugggcaugg

SEQ ID NO: 904238 - RNA, 22 nt, Human
cccaggcugucuguccuuugcu

SEQ ID NO: 904239 - RNA, 22 nt, Human
uaggacaggugaggggcugugg

SEQ ID NO: 904240 - RNA, 22 nt, Human
caaacauuuucuacuuccagga

SEQ ID NO: 904241 - RNA, 22 nt, Human
gcugggcugagaaguuaagcaa

SEQ ID NO: 904242 - RNA, 22 nt, Human
acauucuagaagucuuugcaau

SEQ ID NO: 904243 - RNA, 19 nt, Human
ucaagcagucugauuuagg

SEQ ID NO: 904244 - RNA, 22 nt, Human
gucaacaguauuaggacauuug

SEQ ID NO: 904245 - RNA, 22 nt, Human
uuucaugucugaauucuuuagu

SEQ ID NO: 904246 - RNA, 20 nt, Human
cuacacaggguucgcugggc

SEQ ID NO: 904247 - RNA, 22 nt, Human
gaaaucaggaugauguuccaga

SEQ ID NO: 904248 - RNA, 22 nt, Human
ucugaggcuauguucaggcuaa

SEQ ID NO: 904249 - RNA, 22 nt, Human
uguuuaauucaccaucauguuc

SEQ ID NO: 904250 - RNA, 22 nt, Human
acauuacauaagauuguaaccu

SEQ ID NO: 904251 - RNA, 22 nt, Human
caaaugcauagaaagaugaaac

SEQ ID NO: 904252 - RNA, 22 nt, Human
augaaccuugauuuguucaucu

SEQ ID NO: 904253 - RNA, 22 nt, Human
acagaaguccccaugaagaagc

SEQ ID NO: 904254 - RNA, 22 nt, Human
acaugucucuucugaaagacaa

SEQ ID NO: 904255 - RNA, 22 nt, Human
gccagguccccucauggcuccu

SEQ ID NO: 904256 - RNA, 22 nt, Human
gacuacaggccggcaucagaga

SEQ ID NO: 904257 - RNA, 22 nt, Human
aauaugaauuauuguuacaagu

SEQ ID NO: 904258 - RNA, 19 nt, Human
gaggucagcaagaaguauu

SEQ ID NO: 904259 - RNA, 22 nt, Human
caucauuucacuuagaugaagu

SEQ ID NO: 904260 - RNA, 22 nt, Human
guuucuuaauagcaggggccaa

SEQ ID NO: 904261 - RNA, 22 nt, Human
aucauuuaaaacaagucucuau

SEQ ID NO: 904262 - RNA, 22 nt, Human
aggaugugagccagccuggccu

SEQ ID NO: 904263 - RNA, 22 nt, Human
uagaggugagauuguggugcug

SEQ ID NO: 904264 - RNA, 22 nt, Human
aaugugaaucuuccuuuuugau

SEQ ID NO: 904265 - RNA, 22 nt, Human
uguuuacugcauucuauuugcu

SEQ ID NO: 904266 - RNA, 22 nt, Human
gcugucugucucugucccacca

SEQ ID NO: 904267 - RNA, 22 nt, Human
ucagaagccggaagugcuccuc

SEQ ID NO: 904268 - RNA, 22 nt, Human
cagcaggcugcgauugcucauu

SEQ ID NO: 904269 - RNA, 22 nt, Human
cauuauggaagugaagagcucu

SEQ ID NO: 904270 - RNA, 22 nt, Human
cugagggccugaggaccuagau

SEQ ID NO: 904271 - RNA, 22 nt, Human
cuuuggaaggaagaccuuucag

SEQ ID NO: 904272 - RNA, 22 nt, Human
uccaggcugauccaugaagaau

SEQ ID NO: 904273 - RNA, 22 nt, Human
uggcuuuaggccaaagccuaac

SEQ ID NO: 904274 - RNA, 22 nt, Human
cuccugucagaagcauccugag

SEQ ID NO: 904275 - RNA, 22 nt, Human
uuucuagaaugacucaucugag

SEQ ID NO: 904276 - RNA, 22 nt, Human
ucagaugcuaaagauggaauua

SEQ ID NO: 904277 - RNA, 22 nt, Human
caggcagaagaaguggaaggac

SEQ ID NO: 904278 - RNA, 17 nt, Human
caguaguggcacuggag

SEQ ID NO: 904279 - RNA, 22 nt, Human
ucacauuuuauaucucugguuu

SEQ ID NO: 904280 - RNA, 22 nt, Human
caggguguggucugcauucgga

SEQ ID NO: 904281 - RNA, 22 nt, Human
gucacuguauccagguuccagc

SEQ ID NO: 904282 - RNA, 22 nt, Human
cacagcugaccacccugcuccc

SEQ ID NO: 904283 - RNA, 22 nt, Human
cagcuguuguuaugucugcagg

SEQ ID NO: 904284 - RNA, 22 nt, Human
ucagggcaaagggcagaguuug

SEQ ID NO: 904285 - RNA, 22 nt, Human
aguagcagaaggucuugaaggg

SEQ ID NO: 904286 - RNA, 22 nt, Human
ugcugggauuacagucaugagc

SEQ ID NO: 904287 - RNA, 23 nt, Human
ugguggcagaaguagcagaugac

SEQ ID NO: 904288 - RNA, 22 nt, Human
cugggugaauuugaaggaaagg

SEQ ID NO: 904289 - RNA, 22 nt, Human
acacagaagaucucuuaaugcu

SEQ ID NO: 904290 - RNA, 22 nt, Human
ugaaagcauuagucuaagguag

SEQ ID NO: 904291 - RNA, 22 nt, Human
uagguuucagaggugccgggaa

SEQ ID NO: 904292 - RNA, 22 nt, Human
cacagggcagugauuguccaca

SEQ ID NO: 904293 - RNA, 22 nt, Human
uguuuacuuaaauguuuucaua

SEQ ID NO: 904294 - RNA, 22 nt, Human
ugugugcauguuaaugagaaaa

SEQ ID NO: 904295 - RNA, 22 nt, Human
aucuacaaccccucaaacugug

SEQ ID NO: 904296 - RNA, 22 nt, Human
acaauuagcugugugucuaucu

SEQ ID NO: 904297 - RNA, 17 nt, Human
gacagcugguuccuggc

SEQ ID NO: 904298 - RNA, 22 nt, Human
cuguccuggugcuggggauccc

SEQ ID NO: 904299 - RNA, 22 nt, Human
guucagcuaggaauggagaugc

SEQ ID NO: 904300 - RNA, 22 nt, Human
caaacauuuguuggaaccccug

SEQ ID NO: 904301 - RNA, 22 nt, Human
gcccugggauuggguggaggcu

SEQ ID NO: 904302 - RNA, 22 nt, Human
cugugaugauggaaacuuucuu

SEQ ID NO: 904303 - RNA, 22 nt, Human
augucuuuaaacuugaguuguu

SEQ ID NO: 904304 - RNA, 19 nt, Human
aaaaagaggcuauaauauu

SEQ ID NO: 904305 - RNA, 22 nt, Human
gaagagcuggaauccagucugg

SEQ ID NO: 904306 - RNA, 21 nt, Human
gcuggcucucugacgugcuuu

SEQ ID NO: 904307 - RNA, 22 nt, Human
acaguuucuccauuuacaccuu

SEQ ID NO: 904308 - RNA, 20 nt, Human
caggccagagguuugauggc

SEQ ID NO: 904309 - RNA, 22 nt, Human
gaacaaauucucaucaacuugu

SEQ ID NO: 904310 - RNA, 22 nt, Human
agcagaagaaagccacaugacu

SEQ ID NO: 904311 - RNA, 22 nt, Human
uuccaucugcuagguaaaugaa

SEQ ID NO: 904312 - RNA, 22 nt, Human
uccacagugguugaacuaguaa

SEQ ID NO: 904313 - RNA, 22 nt, Human
aguggggccggugaggccgagg

SEQ ID NO: 904314 - RNA, 20 nt, Human
cacaggccccaagaccugua

SEQ ID NO: 904315 - RNA, 22 nt, Human
gcagcaaucccaagucugagug

SEQ ID NO: 904316 - RNA, 22 nt, Human
aauguaaaguugggcacaaaug

SEQ ID NO: 904317 - RNA, 22 nt, Human
aucuaauuuucacucauuugcu

SEQ ID NO: 904318 - RNA, 22 nt, Human
uagaaucuggaaggggcuauuc

SEQ ID NO: 904319 - RNA, 22 nt, Human
gcugauagacugaauguuggga

SEQ ID NO: 904320 - RNA, 22 nt, Human
cggccaggcacaguggcccacg

SEQ ID NO: 904321 - RNA, 22 nt, Human
uuuguuuucuguaggccuuucc

SEQ ID NO: 904322 - RNA, 22 nt, Human
aggcuccagcccaaggcugcag

SEQ ID NO: 904323 - RNA, 22 nt, Human
cugugaggcggguggaguggag

SEQ ID NO: 904324 - RNA, 22 nt, Human
uauugcauaaaaucagguuaga

SEQ ID NO: 904325 - RNA, 22 nt, Human
agagacugugccagccccaugc

SEQ ID NO: 904326 - RNA, 22 nt, Human
gccuggccugaacuaggaggug

SEQ ID NO: 904327 - RNA, 22 nt, Human
accugaauuugaaauguuuauu

SEQ ID NO: 904328 - RNA, 22 nt, Human
cucauuaaaggaaaucaccugc

SEQ ID NO: 904329 - RNA, 22 nt, Human
caagguuucgaguucccaacca

SEQ ID NO: 904330 - RNA, 22 nt, Human
gcucugcccugggccguuguaa

SEQ ID NO: 904331 - RNA, 19 nt, Human
gggaaugauggaagacuuc

SEQ ID NO: 904332 - RNA, 22 nt, Human
gugccuguaaguuguaugggcu

SEQ ID NO: 904333 - RNA, 22 nt, Human
acuguccauucacucauauuca

SEQ ID NO: 904334 - RNA, 22 nt, Human
cugggcucaaauccuggcccug

SEQ ID NO: 904335 - RNA, 18 nt, Human
cuccagagcugugagaca

SEQ ID NO: 904336 - RNA, 22 nt, Human
ggacccagguagggaggaagau

SEQ ID NO: 904337 - RNA, 22 nt, Human
acagcaguggugcacugagcca

SEQ ID NO: 904338 - RNA, 21 nt, Human
ucaggcaggcgcagagggaag

SEQ ID NO: 904339 - RNA, 17 nt, Human
ggagaucuggcagaggg

SEQ ID NO: 904340 - RNA, 22 nt, Human
agagacuggaguuacgaguuca

SEQ ID NO: 904341 - RNA, 17 nt, Human
ggcugcaguccaggagg

SEQ ID NO: 904342 - RNA, 22 nt, Human
gaguguggugaacaggagcacc

SEQ ID NO: 904343 - RNA, 22 nt, Human
ucuuuuauagugaauuuucuug

SEQ ID NO: 904344 - RNA, 22 nt, Human
ugguauaauacaguaaguguug

SEQ ID NO: 904345 - RNA, 22 nt, Human
agagucaguuaugucaagugcu

SEQ ID NO: 904346 - RNA, 22 nt, Human
cuggcugaauccuagucucaua

SEQ ID NO: 904347 - RNA, 22 nt, Human
uuauaaagguuugugcauauuu

SEQ ID NO: 904348 - RNA, 22 nt, Human
acuaaaguaucuccuauuucau

SEQ ID NO: 904349 - RNA, 20 nt, Human
ugugcaggagagugaggcug

SEQ ID NO: 904350 - RNA, 22 nt, Human
caauguuuucaacugacaagua

SEQ ID NO: 904351 - RNA, 20 nt, Human
acaacaaacuugcuuaagga

SEQ ID NO: 904352 - RNA, 22 nt, Human
uggaauguagcaaguguuguca

SEQ ID NO: 904353 - RNA, 22 nt, Human
cagggucaggaggaucuggcuu

SEQ ID NO: 904354 - RNA, 22 nt, Human
cagagccaggucuaggagucuc

SEQ ID NO: 904355 - RNA, 22 nt, Human
gcaggcuuugacuuggggcaac

SEQ ID NO: 904356 - RNA, 20 nt, Human
gucuuauuuaacacaugacu

SEQ ID NO: 904357 - RNA, 20 nt, Human
aaaugcugugcuguugccau

SEQ ID NO: 904358 - RNA, 22 nt, Human
uuagcagcggucaguuuugaag

SEQ ID NO: 904359 - RNA, 22 nt, Human
agggaaggcuuuugacauuucc

SEQ ID NO: 904360 - RNA, 22 nt, Human
acuugaaaggaagcucuaaaac

SEQ ID NO: 904361 - RNA, 22 nt, Human
aauuucaaguggcaucuuugau

SEQ ID NO: 904362 - RNA, 22 nt, Human
uucccuucuaguuuugagagac

SEQ ID NO: 904363 - RNA, 22 nt, Human
ggauucuacugaucagcaccac

SEQ ID NO: 904364 - RNA, 22 nt, Human
acauugaaccaguagacacaaa

SEQ ID NO: 904365 - RNA, 22 nt, Human
auauagucacacuuugcaggca

SEQ ID NO: 904366 - RNA, 22 nt, Human
aggacccaagcacaguuccugg

SEQ ID NO: 904367 - RNA, 22 nt, Human
uauauccauuugucugcuaauu

SEQ ID NO: 904368 - RNA, 22 nt, Human
caguguuuguggaauucaggug

SEQ ID NO: 904369 - RNA, 22 nt, Human
uaucaaaguuguccugugaagu

SEQ ID NO: 904370 - RNA, 22 nt, Human
gagggaugcagaaacagaggcc

SEQ ID NO: 904371 - RNA, 22 nt, Human
cuacaggcucagggagcccucu

SEQ ID NO: 904372 - RNA, 22 nt, Human
uaagacuaguugaaugguuuuc

SEQ ID NO: 904373 - RNA, 22 nt, Human
auagaauccugcagcaagccuu

SEQ ID NO: 904374 - RNA, 22 nt, Human
caacuucaccaggguuccuaga

SEQ ID NO: 904375 - RNA, 18 nt, Human
ugaucuuucaugauucca

SEQ ID NO: 904376 - RNA, 22 nt, Human
ucugaaagcuagaaaaugcucu

SEQ ID NO: 904377 - RNA, 22 nt, Human
aagucucugacucacacaaugu

SEQ ID NO: 904378 - RNA, 21 nt, Human
auacagugguaugaauguagg

SEQ ID NO: 904379 - RNA, 22 nt, Human
ugucuccucauacugucauauu

SEQ ID NO: 904380 - RNA, 22 nt, Human
agaauauaaagauaauucuguu

SEQ ID NO: 904381 - RNA, 22 nt, Human
caggcuggucccagagcauugc

SEQ ID NO: 904382 - RNA, 22 nt, Human
gaggcaggguguugauuacaga

SEQ ID NO: 904383 - RNA, 22 nt, Human
ugcagcauuaguacaagucuca

SEQ ID NO: 904384 - RNA, 22 nt, Human
gucaggacaggcucuggacuga

SEQ ID NO: 904385 - RNA, 22 nt, Human
uggcccugcuggccaaaggcua

SEQ ID NO: 904386 - RNA, 22 nt, Human
aagaguuuucuauaaucuuggc

SEQ ID NO: 904387 - RNA, 22 nt, Human
cagcagcuccucugcggcuaug

SEQ ID NO: 904388 - RNA, 22 nt, Human
ucaagagagugcugcuuggggu

SEQ ID NO: 904389 - RNA, 22 nt, Human
acaugcaugaaauccauaaaca

SEQ ID NO: 904390 - RNA, 22 nt, Human
aagaagguguggaaagaugcuc

SEQ ID NO: 904391 - RNA, 22 nt, Human
ccuucugcuggucaucccagug

SEQ ID NO: 904392 - RNA, 22 nt, Human
gggcuuggaguaggcugaugaa

SEQ ID NO: 904393 - RNA, 22 nt, Human
cagaauguauaugaucuaaggu

SEQ ID NO: 904394 - RNA, 22 nt, Human
aaugcuuauggguuccauaaua

SEQ ID NO: 904395 - RNA, 22 nt, Human
uagacauuuucccuacccucau

SEQ ID NO: 904396 - RNA, 22 nt, Human
ggaugcugucuaagcugaggac

SEQ ID NO: 904397 - RNA, 22 nt, Human
uggagcaggugggaugucguga

SEQ ID NO: 904398 - RNA, 22 nt, Human
ucucagcaaggaaagaggcagg

SEQ ID NO: 904399 - RNA, 22 nt, Human
aaugucuacauucugaauucgu

SEQ ID NO: 904400 - RNA, 22 nt, Human
gcuccuggugcuguagagauuu

SEQ ID NO: 904401 - RNA, 22 nt, Human
ucuggccccuggucucuggugu

SEQ ID NO: 904402 - RNA, 21 nt, Human
acaaacugaaaugaguuuccu

SEQ ID NO: 904403 - RNA, 22 nt, Human
ugcucugggggaagccagcugu

SEQ ID NO: 904404 - RNA, 22 nt, Human
cauggcuucgcgcguccccgcu

SEQ ID NO: 904405 - RNA, 22 nt, Human
acaagagauuaucuacagauga

SEQ ID NO: 904406 - RNA, 22 nt, Human
cagcuuuuuagaaucuagggca

SEQ ID NO: 904407 - RNA, 22 nt, Human
ccagagguccugcucacuggug

SEQ ID NO: 904408 - RNA, 22 nt, Human
cuguaaaacugcuuaaguaugc

SEQ ID NO: 904409 - RNA, 20 nt, Human
ugagggaguauugauuuccc

SEQ ID NO: 904410 - RNA, 22 nt, Human
ucacugcugcugccaugaugga

SEQ ID NO: 904411 - RNA, 22 nt, Human
caggcucagcaggagccugacc

SEQ ID NO: 904412 - RNA, 22 nt, Human
gugggagagaccccgcuuaggg

SEQ ID NO: 904413 - RNA, 21 nt, Human
agggagcuuuagguagaaguu

SEQ ID NO: 904414 - RNA, 21 nt, Human
ugacauuuaguagcauuguca

SEQ ID NO: 904415 - RNA, 22 nt, Human
ggagagaggcuggccgugauga

SEQ ID NO: 904416 - RNA, 22 nt, Human
aaguguuuaacggugauugagc

SEQ ID NO: 904417 - RNA, 22 nt, Human
cagugggugccaucgugcccuu

SEQ ID NO: 904418 - RNA, 21 nt, Human
agacagcagucuccaaacccc

SEQ ID NO: 904419 - RNA, 21 nt, Human
ugacaacagaacugggcaagc

SEQ ID NO: 904420 - RNA, 22 nt, Human
cuucagugauugcagaaagccu

SEQ ID NO: 904421 - RNA, 22 nt, Human
cugggcugcuguccacuagggu

SEQ ID NO: 904422 - RNA, 22 nt, Human
gagagguggugaggacuugucu

SEQ ID NO: 904423 - RNA, 22 nt, Human
aggcuggaugugccucaccgag

SEQ ID NO: 904424 - RNA, 21 nt, Human
aguuacaaguuuauucagagg

SEQ ID NO: 904425 - RNA, 23 nt, Human
ggugguggugagucacgggcuca

SEQ ID NO: 904426 - RNA, 22 nt, Human
gugguaggcacagagaacaaga

SEQ ID NO: 904427 - RNA, 22 nt, Human
acauucauugagcaacaacaau

SEQ ID NO: 904428 - RNA, 20 nt, Human
cagucccaauccagggccag

SEQ ID NO: 904429 - RNA, 22 nt, Human
acaguucucuugucacuuccuc

SEQ ID NO: 904430 - RNA, 22 nt, Human
uccaggcaaaaaccaacuacag

SEQ ID NO: 904431 - RNA, 22 nt, Human
ugccugcugccuuucaucccaa

SEQ ID NO: 904432 - RNA, 22 nt, Human
acacccaggcuggcgugcagug

SEQ ID NO: 904433 - RNA, 22 nt, Human
cccaggguugccugccucugcu

SEQ ID NO: 904434 - RNA, 22 nt, Human
ucugaggcuaagagacagaggc

SEQ ID NO: 904435 - RNA, 22 nt, Human
aggcuucuucugccugucuuug

SEQ ID NO: 904436 - RNA, 22 nt, Human
cuucccuucugugcagggcaga

SEQ ID NO: 904437 - RNA, 21 nt, Human
ugcaguauguauuuguaucca

SEQ ID NO: 904438 - RNA, 22 nt, Human
gcccagcagaucucagugucuc

SEQ ID NO: 904439 - RNA, 22 nt, Human
auucagugccaaggagaacuug

SEQ ID NO: 904440 - RNA, 22 nt, Human
aaguuccucuucucugcaggga

SEQ ID NO: 904441 - RNA, 23 nt, Human
auggagcugguacuagcuaccuc

SEQ ID NO: 904442 - RNA, 22 nt, Human
uguagaugagucagggugcacc

SEQ ID NO: 904443 - RNA, 22 nt, Human
uuucacacuagucagaauacca

SEQ ID NO: 904444 - RNA, 18 nt, Human
ggcagcaagaagggaggg

SEQ ID NO: 904445 - RNA, 22 nt, Human
uggaaugaaaaguacuucagaa

SEQ ID NO: 904446 - RNA, 22 nt, Human
gagcuagaauuaggccaauuuc

SEQ ID NO: 904447 - RNA, 22 nt, Human
acagaauuuaaagcucuagacu

SEQ ID NO: 904448 - RNA, 22 nt, Human
gauaaagggggaccaaaugacu

SEQ ID NO: 904449 - RNA, 23 nt, Human
uugcuucugugcaauucaguacu

SEQ ID NO: 904450 - RNA, 22 nt, Human
uucauucauguauugucuaugg

SEQ ID NO: 904451 - RNA, 22 nt, Human
cuucugggauuaauuuuuccug

SEQ ID NO: 904452 - RNA, 22 nt, Human
aacucuuaauuuucaugaaaug

SEQ ID NO: 904453 - RNA, 22 nt, Human
agcauagagcaggaaguuaaga

SEQ ID NO: 904454 - RNA, 22 nt, Human
gguggccauggucagguagcgg

SEQ ID NO: 904455 - RNA, 22 nt, Human
aaguggaggccgaguucacgca

SEQ ID NO: 904456 - RNA, 22 nt, Human
cucuagaggcuugaaugggcga

SEQ ID NO: 904457 - RNA, 22 nt, Human
auauuuauaaggcaggcaagua

SEQ ID NO: 904458 - RNA, 22 nt, Human
ccaggaagcggugagggcugcc

SEQ ID NO: 904459 - RNA, 22 nt, Human
uucuguuacuugcaaccacagg

SEQ ID NO: 904460 - RNA, 22 nt, Human
gagcaacuucaauaguacuauu

SEQ ID NO: 904461 - RNA, 22 nt, Human
guagaaauauuuaucucugaga

SEQ ID NO: 904462 - RNA, 22 nt, Human
cugccgagugggucaugaggca

SEQ ID NO: 904463 - RNA, 17 nt, Human
gcacauguguucuuuua

SEQ ID NO: 904464 - RNA, 22 nt, Human
uccacagugguggaauuguuca

SEQ ID NO: 904465 - RNA, 22 nt, Human
aaauaagaggacagauguuugg

SEQ ID NO: 904466 - RNA, 22 nt, Human
gggcuggaccgcucgccucccu

SEQ ID NO: 904467 - RNA, 22 nt, Human
acaggcagauuaaggguaggca

SEQ ID NO: 904468 - RNA, 22 nt, Human
gcagggucugaggccacagagg

SEQ ID NO: 904469 - RNA, 22 nt, Human
augucacauuggagcugcugga

SEQ ID NO: 904470 - RNA, 22 nt, Human
ccaaaauaacagcccaauucac

SEQ ID NO: 904471 - RNA, 17 nt, Human
uucaaagcuuaucaagg

SEQ ID NO: 904472 - RNA, 22 nt, Human
augcugaggacaaagagaucaa

SEQ ID NO: 904473 - RNA, 22 nt, Human
ggcucaggggccaggccugucc

SEQ ID NO: 904474 - RNA, 22 nt, Human
ggauauaugcauguuaucauuu

SEQ ID NO: 904475 - RNA, 22 nt, Human
ggcuguggucauuaggagguug

SEQ ID NO: 904476 - RNA, 22 nt, Human
uucuccaaggauacaguccugu

SEQ ID NO: 904477 - RNA, 22 nt, Human
ccacuuaagagaacagcuauag

SEQ ID NO: 904478 - RNA, 22 nt, Human
aggcuccagccaaugggucugu

SEQ ID NO: 904479 - RNA, 22 nt, Human
cacaugaccacucuuuacuucu

SEQ ID NO: 904480 - RNA, 22 nt, Human
acagggccucagcugauucugg

SEQ ID NO: 904481 - RNA, 22 nt, Human
ucaccauccucaccuagaaaug

SEQ ID NO: 904482 - RNA, 22 nt, Human
uauguauccguguguguacaga

SEQ ID NO: 904483 - RNA, 22 nt, Human
uagguagcuuuggcguuucuug

SEQ ID NO: 904484 - RNA, 22 nt, Human
aucuuuagagucaucugagugu

SEQ ID NO: 904485 - RNA, 22 nt, Human
uagaaccuauuagaaauguauu

SEQ ID NO: 904486 - RNA, 22 nt, Human
agacucuuggagaagagcuaua

SEQ ID NO: 904487 - RNA, 22 nt, Human
auuuacagguagaauuuuaagu

SEQ ID NO: 904488 - RNA, 22 nt, Human
ucagcaguuuuauaugcagcuu

SEQ ID NO: 904489 - RNA, 22 nt, Human
uuuggaauuggaaagugcugug

SEQ ID NO: 904490 - RNA, 22 nt, Human
cacugugucuggagugagcugg

SEQ ID NO: 904491 - RNA, 22 nt, Human
gcucuugaaaaucaaaagggaa

SEQ ID NO: 904492 - RNA, 22 nt, Human
gcaaagcugggugugaaugcac

SEQ ID NO: 904493 - RNA, 22 nt, Human
acaaagauguuuaaagcauuua

SEQ ID NO: 904494 - RNA, 22 nt, Human
acuggaaaugagaugauaucag

SEQ ID NO: 904495 - RNA, 22 nt, Human
uucaagcagggauuggugaugg

SEQ ID NO: 904496 - RNA, 22 nt, Human
aguggacaaccaugcugagauu

SEQ ID NO: 904497 - RNA, 22 nt, Human
ucuaacauuguuuuucacagau

SEQ ID NO: 904498 - RNA, 22 nt, Human
augaaugcuuauuaaauugaaa

SEQ ID NO: 904499 - RNA, 22 nt, Human
ggccuugggaggagggucagaa

SEQ ID NO: 904500 - RNA, 22 nt, Human
gcugguccacauccugguacgu

SEQ ID NO: 904501 - RNA, 22 nt, Human
ggaagaaaugcucuucuaugcg

SEQ ID NO: 904502 - RNA, 22 nt, Human
aggccuuaccauagcuguagca

SEQ ID NO: 904503 - RNA, 22 nt, Human
ugcagcagaaguguucuucucu

SEQ ID NO: 904504 - RNA, 22 nt, Human
agugcaugcgcuugggaggggu

SEQ ID NO: 904505 - RNA, 22 nt, Human
auucugaugccuggguacugcc

SEQ ID NO: 904506 - RNA, 22 nt, Human
augaggcagcugcuggagaacg

SEQ ID NO: 904507 - RNA, 22 nt, Human
ggaaggcagugaaggggcugau

SEQ ID NO: 904508 - RNA, 22 nt, Human
gcaaacugguagcucgccugcc

SEQ ID NO: 904509 - RNA, 22 nt, Human
aguggcaucuaaguuuuagaaa

SEQ ID NO: 904510 - RNA, 22 nt, Human
gagugucagcagggcagagcac

SEQ ID NO: 904511 - RNA, 22 nt, Human
cuacaaaguaccacagacuggg

SEQ ID NO: 904512 - RNA, 22 nt, Human
ugcagggaacuuggacagcuag

SEQ ID NO: 904513 - RNA, 22 nt, Human
ugguuuguauauguuugugaga

SEQ ID NO: 904514 - RNA, 22 nt, Human
uccugggacucuuuaucagaga

SEQ ID NO: 904515 - RNA, 22 nt, Human
uauauucuuucaccuucuuccu

SEQ ID NO: 904516 - RNA, 22 nt, Human
uccuggguggugguaggagcag

SEQ ID NO: 904517 - RNA, 22 nt, Human
gcauuucagagaaaaucugcuu

SEQ ID NO: 904518 - RNA, 23 nt, Human
gcugagguacauuuacaggaaga

SEQ ID NO: 904519 - RNA, 22 nt, Human
augcuacagaguuugaauaugu

SEQ ID NO: 904520 - RNA, 22 nt, Human
agucaggcagcugagcuuuaug

SEQ ID NO: 904521 - RNA, 22 nt, Human
cuaaaugucucagagggagaca

SEQ ID NO: 904522 - RNA, 22 nt, Human
agccuggcacugccccauccau

SEQ ID NO: 904523 - RNA, 22 nt, Human
acuggccaggcagcaguagcuu

SEQ ID NO: 904524 - RNA, 22 nt, Human
uggcaguggauaggggagcggu

SEQ ID NO: 904525 - RNA, 22 nt, Human
ccacagugguuguggcaugugg

SEQ ID NO: 904526 - RNA, 22 nt, Human
cuccugggucauugccagcaaa

SEQ ID NO: 904527 - RNA, 22 nt, Human
uucaacagauauuuauugagca

SEQ ID NO: 904528 - RNA, 22 nt, Human
ccuguaggaacgccuucauuug

SEQ ID NO: 904529 - RNA, 22 nt, Human
gaaaucuacgauuagugaaaau

SEQ ID NO: 904530 - RNA, 22 nt, Human
ucuucuuuggaugaaagaauau

SEQ ID NO: 904531 - RNA, 22 nt, Human
uuagugucuucuucauccucug

SEQ ID NO: 904532 - RNA, 22 nt, Human
aguuauaggugguuuugagaau

SEQ ID NO: 904533 - RNA, 23 nt, Human
acagccaguucaccucuccuugg

SEQ ID NO: 904534 - RNA, 22 nt, Human
aaauugcuuauaaagaugaaug

SEQ ID NO: 904535 - RNA, 22 nt, Human
ugucaccaugccagcuucugcc

SEQ ID NO: 904536 - RNA, 22 nt, Human
gccuggcugggcaccaggggag

SEQ ID NO: 904537 - RNA, 22 nt, Human
ugugaaagcaagucuaguucuc

SEQ ID NO: 904538 - RNA, 22 nt, Human
aaaaacacaacugucuuucucu

SEQ ID NO: 904539 - RNA, 20 nt, Human
ucuuugugucagauggacag

SEQ ID NO: 904540 - RNA, 22 nt, Human
gcacuuuguggauuguauuucc

SEQ ID NO: 904541 - RNA, 22 nt, Human
gauggucaggucaucucaugga

SEQ ID NO: 904542 - RNA, 22 nt, Human
ggguggggcccaggaaaucuau

SEQ ID NO: 904543 - RNA, 22 nt, Human
uacauagauuuugaaacuggac

SEQ ID NO: 904544 - RNA, 22 nt, Human
aaugucuauuaaacugucauaa

SEQ ID NO: 904545 - RNA, 22 nt, Human
cugcuuccucccuguaaaggca

SEQ ID NO: 904546 - RNA, 22 nt, Human
uacaaagaguuuggucucuaga

SEQ ID NO: 904547 - RNA, 19 nt, Human
agggccugagcagauguug

SEQ ID NO: 904548 - RNA, 19 nt, Human
uuccaucuaucuucuuacu

SEQ ID NO: 904549 - RNA, 22 nt, Human
aggggagacuggaaucuaacau

SEQ ID NO: 904550 - RNA, 17 nt, Human
ugcagcaaaugggggac

SEQ ID NO: 904551 - RNA, 22 nt, Human
uucuaacuggcuugacaguuuc

SEQ ID NO: 904552 - RNA, 22 nt, Human
cuuacaaauacacuuaggagag

SEQ ID NO: 904553 - RNA, 22 nt, Human
cccagcauccucagggagcggg

SEQ ID NO: 904554 - RNA, 22 nt, Human
caguugaggacucaccuuugaa

SEQ ID NO: 904555 - RNA, 22 nt, Human
ggcagugagucccggagaggcc

SEQ ID NO: 904556 - RNA, 22 nt, Human
uuucagaaauggcacugaaauc

SEQ ID NO: 904557 - RNA, 22 nt, Human
auucacaauagcagcuugcaug

SEQ ID NO: 904558 - RNA, 22 nt, Human
aaacuucaaggauuugcaaauc

SEQ ID NO: 904559 - RNA, 22 nt, Human
uccacaggaaagcaccucccau

SEQ ID NO: 904560 - RNA, 22 nt, Human
cagaggcugaugugggaugggc

SEQ ID NO: 904561 - RNA, 22 nt, Human
caggccugguugagcccugaga

SEQ ID NO: 904562 - RNA, 22 nt, Human
uauuuugcaaaccugaguuuga

SEQ ID NO: 904563 - RNA, 22 nt, Human
uuuggucaaauauuauccugag

SEQ ID NO: 904564 - RNA, 22 nt, Human
gccaucuugagccaggaaguga

SEQ ID NO: 904565 - RNA, 22 nt, Human
cuggaagguaacaaggccauua

SEQ ID NO: 904566 - RNA, 22 nt, Human
uaucuuuaaugcuuggagguua

SEQ ID NO: 904567 - RNA, 22 nt, Human
aaguccauuaggccccugccug

SEQ ID NO: 904568 - RNA, 22 nt, Human
acuuguuuggagccagcuguaa

SEQ ID NO: 904569 - RNA, 22 nt, Human
cuaaacaaugaacaaagcacug

SEQ ID NO: 904570 - RNA, 20 nt, Human
ucugugcaccugcuacaagg

SEQ ID NO: 904571 - RNA, 22 nt, Human
accaaauaggcuuccuggguug

SEQ ID NO: 904572 - RNA, 22 nt, Human
aggcccaguguggcuuccugga

SEQ ID NO: 904573 - RNA, 22 nt, Human
uuugaaaucuaaucaaggaaca

SEQ ID NO: 904574 - RNA, 22 nt, Human
caggguguauaguguagaaguu

SEQ ID NO: 904575 - RNA, 22 nt, Human
ccaagaggggaagggccgcagc

SEQ ID NO: 904576 - RNA, 22 nt, Human
guccagagggcugcaggaugcu

SEQ ID NO: 904577 - RNA, 22 nt, Human
caggggacauuaaagcuccaua

SEQ ID NO: 904578 - RNA, 22 nt, Human
acauguguacauauauaugugc

SEQ ID NO: 904579 - RNA, 22 nt, Human
cuuccucugcggcgccgggcgc

SEQ ID NO: 904580 - RNA, 22 nt, Human
ucagcuggagacugcucaauga

SEQ ID NO: 904581 - RNA, 23 nt, Human
cagugugacgaggugaggcaggc

SEQ ID NO: 904582 - RNA, 22 nt, Human
agaaauguuacaguuguuauuu

SEQ ID NO: 904583 - RNA, 22 nt, Human
cagagucauugacuuccaggag

SEQ ID NO: 904584 - RNA, 22 nt, Human
guggugagauugcuggaucaaa

SEQ ID NO: 904585 - RNA, 22 nt, Human
auugaacagaaaccaucagagu

SEQ ID NO: 904586 - RNA, 22 nt, Human
ccucucccacguggcagaggcu

SEQ ID NO: 904587 - RNA, 22 nt, Human
uggcacaguuaaaguuguagaa

SEQ ID NO: 904588 - RNA, 22 nt, Human
caggugggaccaugauagggca

SEQ ID NO: 904589 - RNA, 18 nt, Human
uagaauauaggucauucu

SEQ ID NO: 904590 - RNA, 22 nt, Human
uaauggcuaaaauucagaagaa

SEQ ID NO: 904591 - RNA, 22 nt, Human
ggcagggcuugucucugugaug

SEQ ID NO: 904592 - RNA, 22 nt, Human
caccccuguggagcaugguggc

SEQ ID NO: 904593 - RNA, 22 nt, Human
ccugcucugguuuagucagucu

SEQ ID NO: 904594 - RNA, 22 nt, Human
agcuccuccugugccaggccag

SEQ ID NO: 904595 - RNA, 22 nt, Human
uuuauuuaccuuauguccucca

SEQ ID NO: 904596 - RNA, 22 nt, Human
ugagccaggucucacucaccuu

SEQ ID NO: 904597 - RNA, 19 nt, Human
aggaggccaugccacuaga

SEQ ID NO: 904598 - RNA, 22 nt, Human
aaucuggucuaagugaggauag

SEQ ID NO: 904599 - RNA, 21 nt, Human
agagcacagguggacaaugcu

SEQ ID NO: 904600 - RNA, 22 nt, Human
uugaucuucaucgaaauauugu

SEQ ID NO: 904601 - RNA, 22 nt, Human
caggugggcguggcgagaaggc

SEQ ID NO: 904602 - RNA, 22 nt, Human
agcagcagugugguuuggggaa

SEQ ID NO: 904603 - RNA, 22 nt, Human
caggaggccaacugugggacuu

SEQ ID NO: 904604 - RNA, 22 nt, Human
cugggucucaggaguucugagg

SEQ ID NO: 904605 - RNA, 22 nt, Human
acaugcaugugaauauggacac

SEQ ID NO: 904606 - RNA, 22 nt, Human
cuguucacagaauccuccccug

SEQ ID NO: 904607 - RNA, 22 nt, Human
gcuggguggaucggaggcucug

SEQ ID NO: 904608 - RNA, 23 nt, Human
aagugcuauguuuauaagagcug

SEQ ID NO: 904609 - RNA, 22 nt, Human
uuaaugaaugugugcuaacguu

SEQ ID NO: 904610 - RNA, 22 nt, Human
cagggaugguaaauauguaaag

SEQ ID NO: 904611 - RNA, 22 nt, Human
uguuaucacuuagacaugcuag

SEQ ID NO: 904612 - RNA, 22 nt, Human
uaacauguuaagaaauuagaua

SEQ ID NO: 904613 - RNA, 22 nt, Human
ucccacugugaauccaaggccu

SEQ ID NO: 904614 - RNA, 22 nt, Human
caugcauauuacuagcacagca

SEQ ID NO: 904615 - RNA, 20 nt, Human
aagauacuccagaaauuaaa

SEQ ID NO: 904616 - RNA, 22 nt, Human
agaagccauguuuaguaggaug

SEQ ID NO: 904617 - RNA, 22 nt, Human
ccuggggaauagagucaagggg

SEQ ID NO: 904618 - RNA, 22 nt, Human
uuugaucagcaagauaaauaga

SEQ ID NO: 904619 - RNA, 22 nt, Human
uucauguuggcauguuuuuagg

SEQ ID NO: 904620 - RNA, 22 nt, Human
ugauccccuucccaguaagccu

SEQ ID NO: 904621 - RNA, 22 nt, Human
guggagcaaucagagggucagu

SEQ ID NO: 904622 - RNA, 22 nt, Human
ucuuuucacaaaggagcuggag

SEQ ID NO: 904623 - RNA, 22 nt, Human
uucuggcagauugcguaauaaa

SEQ ID NO: 904624 - RNA, 22 nt, Human
aauugcauaaaauucaacucug

SEQ ID NO: 904625 - RNA, 22 nt, Human
cccaggcuccuagaggcccaga

SEQ ID NO: 904626 - RNA, 22 nt, Human
ccccuggguccaggcuucucug

SEQ ID NO: 904627 - RNA, 22 nt, Human
gucuuuaguugaaacauguggu

SEQ ID NO: 904628 - RNA, 22 nt, Human
aauaguuaagcaacuuuuucca

SEQ ID NO: 904629 - RNA, 22 nt, Human
augaaucaaaguucauuugauc

SEQ ID NO: 904630 - RNA, 22 nt, Human
guuccuuguaauuuguuaagga

SEQ ID NO: 904631 - RNA, 22 nt, Human
uacuucauuccuuuguaaaaug

SEQ ID NO: 904632 - RNA, 22 nt, Human
gucuggccugccagcucuggug

SEQ ID NO: 904633 - RNA, 20 nt, Human
cagagcuguuauggaugaug

SEQ ID NO: 904634 - RNA, 22 nt, Human
ggcucuggugugaagcagccuc

SEQ ID NO: 904635 - RNA, 22 nt, Human
uguauguaaaguuuguaauaga

SEQ ID NO: 904636 - RNA, 22 nt, Human
augcccaggcccauaccuagau

SEQ ID NO: 904637 - RNA, 22 nt, Human
acagugaaugagaauggagaaa

SEQ ID NO: 904638 - RNA, 22 nt, Human
gaggcagcugaagcuucaaaga

SEQ ID NO: 904639 - RNA, 22 nt, Human
caggugccucaggaugagacaa

SEQ ID NO: 904640 - RNA, 22 nt, Human
aggcagggucuugcuauguugc

SEQ ID NO: 904641 - RNA, 22 nt, Human
ggaaggagcauuugccaguuua

SEQ ID NO: 904642 - RNA, 22 nt, Human
gugucccacucuggaggugaag

SEQ ID NO: 904643 - RNA, 22 nt, Human
aaagguaacugggguuuugcca

SEQ ID NO: 904644 - RNA, 22 nt, Human
uuuuguauagucaaagacaaga

SEQ ID NO: 904645 - RNA, 22 nt, Human
uggaagagggagcuggguggcc

SEQ ID NO: 904646 - RNA, 22 nt, Human
ucuuugcacugugcaagcagaa

SEQ ID NO: 904647 - RNA, 22 nt, Human
ccccagccagcuuguaguagaa

SEQ ID NO: 904648 - RNA, 22 nt, Human
uuucaaacauuccugggagacu

SEQ ID NO: 904649 - RNA, 22 nt, Human
ugugccuggcccagugguguca

SEQ ID NO: 904650 - RNA, 19 nt, Human
gaaaacaugggugaggguc

SEQ ID NO: 904651 - RNA, 22 nt, Human
uucagaaaucgaguuucauguc

SEQ ID NO: 904652 - RNA, 22 nt, Human
cauggcacugagcagguaugca

SEQ ID NO: 904653 - RNA, 22 nt, Human
gcagggcaaugaucccgagagg

SEQ ID NO: 904654 - RNA, 22 nt, Human
aaaguaugauuggggauuauuu

SEQ ID NO: 904655 - RNA, 22 nt, Human
ugaaagaacuagcaucuucaag

SEQ ID NO: 904656 - RNA, 22 nt, Human
aguagcagugacagcugaggua

SEQ ID NO: 904657 - RNA, 22 nt, Human
ucaggagugcagcaguuuggag

SEQ ID NO: 904658 - RNA, 22 nt, Human
augaaggauagggcaaaauuuu

SEQ ID NO: 904659 - RNA, 22 nt, Human
caugcuuugggucagaaaugcc

SEQ ID NO: 904660 - RNA, 22 nt, Human
gaaaugauuuuaguuuaucaug

SEQ ID NO: 904661 - RNA, 22 nt, Human
uuuccacaucaccaugagguga

SEQ ID NO: 904662 - RNA, 22 nt, Human
ugagccagagagguugaggcua

SEQ ID NO: 904663 - RNA, 22 nt, Human
cauagacauucagcacucacua

SEQ ID NO: 904664 - RNA, 22 nt, Human
uacugauauuuucaacuagaag

SEQ ID NO: 904665 - RNA, 22 nt, Human
cugucuccgcccucuugguagg

SEQ ID NO: 904666 - RNA, 22 nt, Human
aaagagcaagcugagauuugaa

SEQ ID NO: 904667 - RNA, 22 nt, Human
ugaaguauccaucuuguucuag

SEQ ID NO: 904668 - RNA, 22 nt, Human
auggagugggccaauuuuagug

SEQ ID NO: 904669 - RNA, 22 nt, Human
agagccaguuacaacuguggag

SEQ ID NO: 904670 - RNA, 22 nt, Human
ccuguucuguggcucucaaagg

SEQ ID NO: 904671 - RNA, 22 nt, Human
cacuuuaaaacugacagcccuu

SEQ ID NO: 904672 - RNA, 22 nt, Human
agaugugggcaauggaauggag

SEQ ID NO: 904673 - RNA, 20 nt, Human
gcagcugugcauucuuagga

SEQ ID NO: 904674 - RNA, 22 nt, Human
cugggcucagcaggccaaggcc

SEQ ID NO: 904675 - RNA, 22 nt, Human
uagaugaccuuguguuaggcaa

SEQ ID NO: 904676 - RNA, 22 nt, Human
cuagggucuguuuuccaggugu

SEQ ID NO: 904677 - RNA, 22 nt, Human
auuuccuaacagaggcaacagu

SEQ ID NO: 904678 - RNA, 22 nt, Human
agcugccaucugaagaacugca

SEQ ID NO: 904679 - RNA, 22 nt, Human
auucugaguacaacaagauguu

SEQ ID NO: 904680 - RNA, 22 nt, Human
aggaacaagggagccuuuucuc

SEQ ID NO: 904681 - RNA, 22 nt, Human
gagggcugugaaggagcggguu

SEQ ID NO: 904682 - RNA, 22 nt, Human
uaugcuguauucuguauguuag

SEQ ID NO: 904683 - RNA, 22 nt, Human
gcugccucugcacagcucacuc

SEQ ID NO: 904684 - RNA, 22 nt, Human
aggaccaccgguccauccaccc

SEQ ID NO: 904685 - RNA, 21 nt, Human
ccuggcucuguguuuauuaug

SEQ ID NO: 904686 - RNA, 19 nt, Human
aauggcagaugccauaucu

SEQ ID NO: 904687 - RNA, 22 nt, Human
cagcucugggugacaggagggc

SEQ ID NO: 904688 - RNA, 22 nt, Human
uggaauguuugacuuauucagu

SEQ ID NO: 904689 - RNA, 22 nt, Human
ucugcaagugacccgggcccag

SEQ ID NO: 904690 - RNA, 22 nt, Human
uuacaguugcuacaaaggauaa

SEQ ID NO: 904691 - RNA, 22 nt, Human
ggaagcugcauaacuagcgugg

SEQ ID NO: 904692 - RNA, 22 nt, Human
aacaggagaggggaauguagag

SEQ ID NO: 904693 - RNA, 22 nt, Human
augcaauguuacagaauguacu

SEQ ID NO: 904694 - RNA, 20 nt, Human
uccaggcuccuccacuuagu

SEQ ID NO: 904695 - RNA, 22 nt, Human
caccagggcucugagcucugaa

SEQ ID NO: 904696 - RNA, 22 nt, Human
ucauaagugguuuauaugcuug

SEQ ID NO: 904697 - RNA, 22 nt, Human
agggcuccuaugccccauggac

SEQ ID NO: 904698 - RNA, 22 nt, Human
aauucuauaggcaagcuauuuu

SEQ ID NO: 904699 - RNA, 20 nt, Human
uucuggaggcuacaagucug

SEQ ID NO: 904700 - RNA, 23 nt, Human
uccaagaaguagggccuggacuu

SEQ ID NO: 904701 - RNA, 22 nt, Human
cuggcccucagacucaugggca

SEQ ID NO: 904702 - RNA, 22 nt, Human
ugcaguguuuuucagggcauau

SEQ ID NO: 904703 - RNA, 22 nt, Human
cagaugcuaaguuaucagcagg

SEQ ID NO: 904704 - RNA, 22 nt, Human
uauugcauacuuaaauuuccgg

SEQ ID NO: 904705 - RNA, 22 nt, Human
aagguauuauugucuauguacu

SEQ ID NO: 904706 - RNA, 22 nt, Human
cacugcauggaugauggcugua

SEQ ID NO: 904707 - RNA, 22 nt, Human
uuuggaaggugaggcaugaagg

SEQ ID NO: 904708 - RNA, 22 nt, Human
uggcagcugucuguggggucuc

SEQ ID NO: 904709 - RNA, 22 nt, Human
cugcagcaguacucagcagcca

SEQ ID NO: 904710 - RNA, 22 nt, Human
ucauuaaaaugcagauucugac

SEQ ID NO: 904711 - RNA, 19 nt, Human
acauuuaaauucagaucuc

SEQ ID NO: 904712 - RNA, 22 nt, Human
caguuacauaaaugauaaaaug

SEQ ID NO: 904713 - RNA, 22 nt, Human
ggcaaaaaccauaauuacuuuu

SEQ ID NO: 904714 - RNA, 22 nt, Human
uuccugugaaauauagguccau

SEQ ID NO: 904715 - RNA, 22 nt, Human
auggcagagggauugaacagcu

SEQ ID NO: 904716 - RNA, 22 nt, Human
gcacugcaucuacuggcaagua

SEQ ID NO: 904717 - RNA, 22 nt, Human
ugcagggccaugguggcggcug

SEQ ID NO: 904718 - RNA, 22 nt, Human
agcauaaacucagggacacaca

SEQ ID NO: 904719 - RNA, 22 nt, Human
uucauuacuuaggcaggcauuu

SEQ ID NO: 904720 - RNA, 22 nt, Human
cugggacauauugcuaguguug

SEQ ID NO: 904721 - RNA, 22 nt, Human
agcuggcuccagaaggagucgu

SEQ ID NO: 904722 - RNA, 22 nt, Human
agagugggugaucucuguuguc

SEQ ID NO: 904723 - RNA, 22 nt, Human
ugagaccuguaaugagaaauug

SEQ ID NO: 904724 - RNA, 22 nt, Human
aagcccagaugggagcauuuca

SEQ ID NO: 904725 - RNA, 19 nt, Human
acagagcucucugcuucug

SEQ ID NO: 904726 - RNA, 22 nt, Human
uagaaucugauggcccgucugg

SEQ ID NO: 904727 - RNA, 22 nt, Human
ugguucccuuaacagcuguaua

SEQ ID NO: 904728 - RNA, 22 nt, Human
ugcaaacacuucaacgugcauc

SEQ ID NO: 904729 - RNA, 22 nt, Human
aaguaacaaugcuguugaauug

SEQ ID NO: 904730 - RNA, 18 nt, Human
uccagcaggucugaggug

SEQ ID NO: 904731 - RNA, 22 nt, Human
aaacccaggguuuugucuuccc

SEQ ID NO: 904732 - RNA, 22 nt, Human
uagaaacaugagagaaacucuu

SEQ ID NO: 904733 - RNA, 22 nt, Human
uuuagagcugugcugccacaug

SEQ ID NO: 904734 - RNA, 22 nt, Human
uauuccaguucaccuuuucauc

SEQ ID NO: 904735 - RNA, 22 nt, Human
uggauaaauggugcuaucaccc

SEQ ID NO: 904736 - RNA, 22 nt, Human
aggaacugaugagcagccaggg

SEQ ID NO: 904737 - RNA, 22 nt, Human
agaacuuacauuauagagcugu

SEQ ID NO: 904738 - RNA, 22 nt, Human
gcaccugcaggaugagccaggg

SEQ ID NO: 904739 - RNA, 23 nt, Human
uuucaacaaugcuuagagaaaac

SEQ ID NO: 904740 - RNA, 22 nt, Human
ccaucaaugacuaauaaaauag

SEQ ID NO: 904741 - RNA, 22 nt, Human
cugggucuuuuucuuccauuga

SEQ ID NO: 904742 - RNA, 22 nt, Human
uagguuccaugagggaggcaaa

SEQ ID NO: 904743 - RNA, 22 nt, Human
ggaggggugagaauggcugccu

SEQ ID NO: 904744 - RNA, 22 nt, Human
ggagugaaucacuagaugcaga

SEQ ID NO: 904745 - RNA, 17 nt, Human
agcugccagggagugug

SEQ ID NO: 904746 - RNA, 22 nt, Human
cucaggagagucuuauaucucc

SEQ ID NO: 904747 - RNA, 22 nt, Human
aaagccagcucugagcugcacc

SEQ ID NO: 904748 - RNA, 22 nt, Human
uggaugcuguaggacacgcucu

SEQ ID NO: 904749 - RNA, 22 nt, Human
gaagcugaugaggaccagauug

SEQ ID NO: 904750 - RNA, 22 nt, Human
ucagccugcuccaagugcugcc

SEQ ID NO: 904751 - RNA, 22 nt, Human
gcuggagagugaggggagcaag

SEQ ID NO: 904752 - RNA, 22 nt, Human
ugcagcacuugccaaacuaacu

SEQ ID NO: 904753 - RNA, 22 nt, Human
gcccuggauggcaggagccauc

SEQ ID NO: 904754 - RNA, 22 nt, Human
ggaggccacgguuuagcaccga

SEQ ID NO: 904755 - RNA, 22 nt, Human
acauuuguaggacagaggaaga

SEQ ID NO: 904756 - RNA, 22 nt, Human
agauacaacuguuuaaacauua

SEQ ID NO: 904757 - RNA, 22 nt, Human
cuaguggaaacuaacuggaauu

SEQ ID NO: 904758 - RNA, 22 nt, Human
aagauacauuguuuuugguagu

SEQ ID NO: 904759 - RNA, 22 nt, Human
acagccagaggagccaggcugg

SEQ ID NO: 904760 - RNA, 22 nt, Human
gggugcaggcagcccaggcagg

SEQ ID NO: 904761 - RNA, 22 nt, Human
uucuguggucucccaugucugu

SEQ ID NO: 904762 - RNA, 22 nt, Human
cugaggccagaacccgacccug

SEQ ID NO: 904763 - RNA, 22 nt, Human
aaggauagucacauuuuuaugu

SEQ ID NO: 904764 - RNA, 22 nt, Human
agugacagucucagagaucagg

SEQ ID NO: 904765 - RNA, 22 nt, Human
aggcugagcaaagggccuuacc

SEQ ID NO: 904766 - RNA, 22 nt, Human
uuguauuuccuauaaccuuucu

SEQ ID NO: 904767 - RNA, 22 nt, Human
aagacauuacuggaaucugacu

SEQ ID NO: 904768 - RNA, 22 nt, Human
ugugcccauuacacagaggcau

SEQ ID NO: 904769 - RNA, 22 nt, Human
ggaaaaggccauuguuucucug

SEQ ID NO: 904770 - RNA, 22 nt, Human
auacacuaaucaugugcucagu

SEQ ID NO: 904771 - RNA, 22 nt, Human
aauagcuuucucaugacuucac

SEQ ID NO: 904772 - RNA, 22 nt, Human
uguacauugucacucaucaagu

SEQ ID NO: 904773 - RNA, 22 nt, Human
ucuuucauucuagucugagguu

SEQ ID NO: 904774 - RNA, 23 nt, Human
cagugggcuucuaacugcuccug

SEQ ID NO: 904775 - RNA, 22 nt, Human
aaugguuuuuagugagaucgau

SEQ ID NO: 904776 - RNA, 22 nt, Human
ucaaugcaugugacaaagagua

SEQ ID NO: 904777 - RNA, 22 nt, Human
auucugggaguguaggaugguu

SEQ ID NO: 904778 - RNA, 22 nt, Human
agccaagagacagaugcccacc

SEQ ID NO: 904779 - RNA, 22 nt, Human
gccuucccaagacgccugaguu

SEQ ID NO: 904780 - RNA, 22 nt, Human
agauguuuguaaacacacugcu

SEQ ID NO: 904781 - RNA, 22 nt, Human
aggaaaauuaucaugagagcca

SEQ ID NO: 904782 - RNA, 22 nt, Human
ggaggccaggaaggcucggaga

SEQ ID NO: 904783 - RNA, 22 nt, Human
gugauucucauguuccugaagu

SEQ ID NO: 904784 - RNA, 20 nt, Human
uuuuucugggcuuccauagc

SEQ ID NO: 904785 - RNA, 22 nt, Human
ugccuguguggucugcgcauua

SEQ ID NO: 904786 - RNA, 22 nt, Human
acugagaaauuuccagacuugc

SEQ ID NO: 904787 - RNA, 22 nt, Human
uacuucaugaguuaauaugcag

SEQ ID NO: 904788 - RNA, 22 nt, Human
cagcccacgucagggccacuca

SEQ ID NO: 904789 - RNA, 22 nt, Human
agucacuugauucuccugagcu

SEQ ID NO: 904790 - RNA, 18 nt, Human
caaauucucauugauuuc

SEQ ID NO: 904791 - RNA, 23 nt, Human
gggcugcuccaggccaaggcugg

SEQ ID NO: 904792 - RNA, 22 nt, Human
augggcaguuaggaggccagga

SEQ ID NO: 904793 - RNA, 19 nt, Human
aguuggggcagggaagaga

SEQ ID NO: 904794 - RNA, 22 nt, Human
uuccuguuguguuagagucaau

SEQ ID NO: 904795 - RNA, 22 nt, Human
uagagauggggucuugcuauga

SEQ ID NO: 904796 - RNA, 22 nt, Human
aagauuuagggccaguuuacau

SEQ ID NO: 904797 - RNA, 22 nt, Human
ucugagcagagcaucauuucag

SEQ ID NO: 904798 - RNA, 22 nt, Human
gagcuuaaauggcuaaauauaa

SEQ ID NO: 904799 - RNA, 22 nt, Human
auaaaacuuauuagaauugugu

SEQ ID NO: 904800 - RNA, 22 nt, Human
cggagaggugggggcagcaucu

SEQ ID NO: 904801 - RNA, 22 nt, Human
gacagaggcuggagcaccuccu

SEQ ID NO: 904802 - RNA, 22 nt, Human
ucaaaugagaggcagggcagcu

SEQ ID NO: 904803 - RNA, 22 nt, Human
augccaagaaucauaugccagg

SEQ ID NO: 904804 - RNA, 22 nt, Human
gccagccacuucagcuauggcu

SEQ ID NO: 904805 - RNA, 22 nt, Human
uuuacaaccucauauucugaug

SEQ ID NO: 904806 - RNA, 22 nt, Human
ccagggcagugggagaaggugc

SEQ ID NO: 904807 - RNA, 22 nt, Human
ggcuucaucucguugacaccuc

SEQ ID NO: 904808 - RNA, 22 nt, Human
auuagcaagguucaugagaaga

SEQ ID NO: 904809 - RNA, 22 nt, Human
cagcugugaauugucuuaucua

SEQ ID NO: 904810 - RNA, 22 nt, Human
agaauccugaugaaaaggagag

SEQ ID NO: 904811 - RNA, 22 nt, Human
ccaggcucugagccucacucuu

SEQ ID NO: 904812 - RNA, 22 nt, Human
agucuagcuuaggagccuagcu

SEQ ID NO: 904813 - RNA, 22 nt, Human
cuuccuugugguccuucucauu

SEQ ID NO: 904814 - RNA, 21 nt, Human
uucagcaguccucuagagaua

SEQ ID NO: 904815 - RNA, 22 nt, Human
agccaagguaucaugagaggca

SEQ ID NO: 904816 - RNA, 22 nt, Human
gccugcucugacauccauccca

SEQ ID NO: 904817 - RNA, 22 nt, Human
gcugaggccaggccccaccgga

SEQ ID NO: 904818 - RNA, 22 nt, Human
agacauuuuacauucuuccauu

SEQ ID NO: 904819 - RNA, 22 nt, Human
auuaagaguuacaaauagagua

SEQ ID NO: 904820 - RNA, 20 nt, Human
uccaagcccuccuuccauuc

SEQ ID NO: 904821 - RNA, 22 nt, Human
uuagaagucaucuagucuaaaa

SEQ ID NO: 904822 - RNA, 22 nt, Human
ggcaaccugagcuuguggagaa

SEQ ID NO: 904823 - RNA, 22 nt, Human
uuaagaagugauuuuccucauu

SEQ ID NO: 904824 - RNA, 23 nt, Human
aggcuggcuucaggagccucucc

SEQ ID NO: 904825 - RNA, 22 nt, Human
acuguagugaugauaauuaagu

SEQ ID NO: 904826 - RNA, 22 nt, Human
gucccagaggacagggucacau

SEQ ID NO: 904827 - RNA, 22 nt, Human
acauguuuaaguuuguuauaug

SEQ ID NO: 904828 - RNA, 22 nt, Human
gcugcccugacaagcuacuccc

SEQ ID NO: 904829 - RNA, 22 nt, Human
ugcaggaguccaaucaggagac

SEQ ID NO: 904830 - RNA, 22 nt, Human
cuaggcagcuuugggugugaag

SEQ ID NO: 904831 - RNA, 22 nt, Human
cucugccaagaugacagguaag

SEQ ID NO: 904832 - RNA, 22 nt, Human
uggugcaggccaagcugcgagc

SEQ ID NO: 904833 - RNA, 22 nt, Human
acucaugguagcacaggcugug

SEQ ID NO: 904834 - RNA, 22 nt, Human
uucguguggagauguuucugca

SEQ ID NO: 904835 - RNA, 23 nt, Human
aagccccaaggaacuuccuggga

SEQ ID NO: 904836 - RNA, 22 nt, Human
acuguggcuaauucauuugguc

SEQ ID NO: 904837 - RNA, 22 nt, Human
ggucccaagugcuuuuccugca

SEQ ID NO: 904838 - RNA, 22 nt, Human
uccugccuuagagcaaggaaaa

SEQ ID NO: 904839 - RNA, 22 nt, Human
agccuggcggucgucggucagg

SEQ ID NO: 904840 - RNA, 20 nt, Human
acauggaaggucaaacuauc

SEQ ID NO: 904841 - RNA, 22 nt, Human
uucaugaauauauugaauuagc

SEQ ID NO: 904842 - RNA, 22 nt, Human
uaggaaaugaaugcaggcuccc

SEQ ID NO: 904843 - RNA, 22 nt, Human
uguuucuugauaaagcagaaaa

SEQ ID NO: 904844 - RNA, 22 nt, Human
gaggaaggaaugcaguguaugc

SEQ ID NO: 904845 - RNA, 22 nt, Human
ggccaggagcugcacagggcuc

SEQ ID NO: 904846 - RNA, 22 nt, Human
auguaguugaagugcuauaaag

SEQ ID NO: 904847 - RNA, 22 nt, Human
gacagacagagaaugggcuuga

SEQ ID NO: 904848 - RNA, 22 nt, Human
ggccagguaagagugcagccgc

SEQ ID NO: 904849 - RNA, 22 nt, Human
aaagauguccaaguaaaguuaa

SEQ ID NO: 904850 - RNA, 22 nt, Human
ucacaggccuggggcagagggc

SEQ ID NO: 904851 - RNA, 22 nt, Human
gcagggcagccacaggcccccu

SEQ ID NO: 904852 - RNA, 22 nt, Human
ccagcucccgcaggcugcacag

SEQ ID NO: 904853 - RNA, 22 nt, Human
cccaggagguggaguucacagu

SEQ ID NO: 904854 - RNA, 19 nt, Human
ugccaaauccaugcccagg

SEQ ID NO: 904855 - RNA, 22 nt, Human
guguguggcauguccuauuuug

SEQ ID NO: 904856 - RNA, 20 nt, Human
uagaaucuacuauuuggccc

SEQ ID NO: 904857 - RNA, 21 nt, Human
cuggaggguagaguugggcug

SEQ ID NO: 904858 - RNA, 21 nt, Human
aaaggccauaaucacggagca

SEQ ID NO: 904859 - RNA, 22 nt, Human
cauuagaagaacaguuauauua

SEQ ID NO: 904860 - RNA, 23 nt, Human
agagggugcaacauggggaucua

SEQ ID NO: 904861 - RNA, 22 nt, Human
ggagcugagguaacagugagug

SEQ ID NO: 904862 - RNA, 22 nt, Human
ugccuggcacagagcagguggc

SEQ ID NO: 904863 - RNA, 23 nt, Human
agcaaauaaucugcuugcuuuuu

SEQ ID NO: 904864 - RNA, 22 nt, Human
guucauauuuaacuaagauagg

SEQ ID NO: 904865 - RNA, 22 nt, Human
ccagagccccugagcuucccug

SEQ ID NO: 904866 - RNA, 22 nt, Human
cugccaggcagggagauggcug

SEQ ID NO: 904867 - RNA, 22 nt, Human
ggcgggagauggggccguucag

SEQ ID NO: 904868 - RNA, 22 nt, Human
uuggaaaagugaaacuagaugc

SEQ ID NO: 904869 - RNA, 22 nt, Human
uacaguaauaaaaugagcuaca

SEQ ID NO: 904870 - RNA, 21 nt, Human
cauauuaaaucggugccuuua

SEQ ID NO: 904871 - RNA, 23 nt, Human
agcuggaggcugucuacucccaa

SEQ ID NO: 904872 - RNA, 22 nt, Human
cagaagcaagggccaaagucuu

SEQ ID NO: 904873 - RNA, 22 nt, Human
uucaaaagacucagauguagcg

SEQ ID NO: 904874 - RNA, 22 nt, Human
ggcuguagucagugacauggua

SEQ ID NO: 904875 - RNA, 22 nt, Human
guugaauaucguguucuuguuu

SEQ ID NO: 904876 - RNA, 22 nt, Human
uuuaguucauaaaaccagggug

SEQ ID NO: 904877 - RNA, 23 nt, Human
uuggaaauggggagaacagauuc

SEQ ID NO: 904878 - RNA, 22 nt, Human
gcugagcuagaaaaggaccaca

SEQ ID NO: 904879 - RNA, 22 nt, Human
ugaaacauaaaguuaucuucag

SEQ ID NO: 904880 - RNA, 22 nt, Human
agccacaaugccaaccucuacu

SEQ ID NO: 904881 - RNA, 22 nt, Human
cagggccuucguaaguguccgg

SEQ ID NO: 904882 - RNA, 22 nt, Human
uaugacuuauuucaucaguucu

SEQ ID NO: 904883 - RNA, 22 nt, Human
uguuucaagcaauagcauuuca

SEQ ID NO: 904884 - RNA, 22 nt, Human
guuucaaagcacagcucacauu

SEQ ID NO: 904885 - RNA, 22 nt, Human
ugggaggaaugucacugagcca

SEQ ID NO: 904886 - RNA, 22 nt, Human
uggcucugucacugugagcuau

SEQ ID NO: 904887 - RNA, 22 nt, Human
aggaggguucucuggacagagg

SEQ ID NO: 904888 - RNA, 22 nt, Human
cuuucacagccuucguucugaa

SEQ ID NO: 904889 - RNA, 22 nt, Human
cucugaagccccaaauaguccg

SEQ ID NO: 904890 - RNA, 22 nt, Human
uccaaaaaacguuugaauaguu

SEQ ID NO: 904891 - RNA, 22 nt, Human
ugagcccagagcccuuguaggg

SEQ ID NO: 904892 - RNA, 22 nt, Human
cauguguaaggcucacaggcag

SEQ ID NO: 904893 - RNA, 22 nt, Human
uuuccucacacagaagaucuug

SEQ ID NO: 904894 - RNA, 21 nt, Human
uuucacaaaaguaugugacaa

SEQ ID NO: 904895 - RNA, 22 nt, Human
uuuccugucuuuugugaaggau

SEQ ID NO: 904896 - RNA, 22 nt, Human
aaggcuguuuauuagaaaaagu

SEQ ID NO: 904897 - RNA, 22 nt, Human
aggccuagaggaauggccaggg

SEQ ID NO: 904898 - RNA, 22 nt, Human
aagugccugaccuagccuggag

SEQ ID NO: 904899 - RNA, 22 nt, Human
aggcccagcuggacaaacugcu

SEQ ID NO: 904900 - RNA, 22 nt, Human
aacaaagcaccacugagucagu

SEQ ID NO: 904901 - RNA, 22 nt, Human
cggagcuggcgucuguguggac

SEQ ID NO: 904902 - RNA, 22 nt, Human
acacagguuccaucuccaccuu

SEQ ID NO: 904903 - RNA, 22 nt, Human
aggagccaaggaaaacaguauu

SEQ ID NO: 904904 - RNA, 22 nt, Human
gugauuucuaaucaucugaaug

SEQ ID NO: 904905 - RNA, 23 nt, Human
uuuuuaguuacaccucugccacc

SEQ ID NO: 904906 - RNA, 22 nt, Human
guuagaaagugucugcuugggu

SEQ ID NO: 904907 - RNA, 22 nt, Human
gagggaaaauaaaauugcagua

SEQ ID NO: 904908 - RNA, 22 nt, Human
agcaaauauuuuguugaagugc

SEQ ID NO: 904909 - RNA, 22 nt, Human
augcuuuauugcuucugggcac

SEQ ID NO: 904910 - RNA, 22 nt, Human
auucaagagcccauguuuccug

SEQ ID NO: 904911 - RNA, 20 nt, Human
uccugugugucucaucaacc

SEQ ID NO: 904912 - RNA, 22 nt, Human
ugugugucagucuuguuuaggg

SEQ ID NO: 904913 - RNA, 22 nt, Human
ccagagggccuuuggaguuauc

SEQ ID NO: 904914 - RNA, 22 nt, Human
gcagccucaaacuccccagcuc

SEQ ID NO: 904915 - RNA, 22 nt, Human
aacuucaguugagaaaggcaug

SEQ ID NO: 904916 - RNA, 22 nt, Human
aggcucugaggcagauuuucgu

SEQ ID NO: 904917 - RNA, 22 nt, Human
caauuauucagugacuuaagag

SEQ ID NO: 904918 - RNA, 22 nt, Human
cugcuccaggaacagagcugcu

SEQ ID NO: 904919 - RNA, 22 nt, Human
uuguacaaauaggaaccucuga

SEQ ID NO: 904920 - RNA, 20 nt, Human
cugggucuccuucugcuuaa

SEQ ID NO: 904921 - RNA, 22 nt, Human
gaacacugaggacacugagaau

SEQ ID NO: 904922 - RNA, 22 nt, Human
ggagaaaggcauagcagaaccu

SEQ ID NO: 904923 - RNA, 22 nt, Human
ugggguccagugccaccccaag

SEQ ID NO: 904924 - RNA, 22 nt, Human
aagggggcggcagccaguggaa

SEQ ID NO: 904925 - RNA, 22 nt, Human
ugacacagaauuuggcuaucac

SEQ ID NO: 904926 - RNA, 22 nt, Human
ugugggcuguacugagggcagg

SEQ ID NO: 904927 - RNA, 19 nt, Human
agugagcauccagagaggu

SEQ ID NO: 904928 - RNA, 23 nt, Human
caggagauggcugcugugucagc

SEQ ID NO: 904929 - RNA, 22 nt, Human
uaggccaggaaucagcaagcuu

SEQ ID NO: 904930 - RNA, 22 nt, Human
ucccugugccuauaugugcuga

SEQ ID NO: 904931 - RNA, 21 nt, Human
ugagagacugguggauacagg

SEQ ID NO: 904932 - RNA, 22 nt, Human
caggagaugacagggaagaacc

SEQ ID NO: 904933 - RNA, 22 nt, Human
aaacuaaugaagugaagacgcu

SEQ ID NO: 904934 - RNA, 22 nt, Human
ucagagguaaaaacucacugua

SEQ ID NO: 904935 - RNA, 22 nt, Human
cuggaggaauaauggcaucuug

SEQ ID NO: 904936 - RNA, 22 nt, Human
uccuggagagugggcgagcaca

SEQ ID NO: 904937 - RNA, 22 nt, Human
agcuguuuguacuuagauagua

SEQ ID NO: 904938 - RNA, 22 nt, Human
cucugggccaugcuacugcucu

SEQ ID NO: 904939 - RNA, 22 nt, Human
cacccaggcaaggauucugcaa

SEQ ID NO: 904940 - RNA, 22 nt, Human
aagcacacaucucuggcugggu

SEQ ID NO: 904941 - RNA, 22 nt, Human
aauaacaggcucaucagaugcu

SEQ ID NO: 904942 - RNA, 22 nt, Human
aaugucuuucuugguucugguu

SEQ ID NO: 904943 - RNA, 22 nt, Human
ggagacaauggaggccaaaaga

SEQ ID NO: 904944 - RNA, 21 nt, Human
gggagggauggaaaugauguu

SEQ ID NO: 904945 - RNA, 22 nt, Human
gggaggagcuuggagauucacu

SEQ ID NO: 904946 - RNA, 22 nt, Human
acagcuuuguguuaaugggaag

SEQ ID NO: 904947 - RNA, 22 nt, Human
gaaagguuucaucuacuuuuca

SEQ ID NO: 904948 - RNA, 22 nt, Human
gccaaaggauucuauggagaua

SEQ ID NO: 904949 - RNA, 22 nt, Human
agcagggcagcuuuuuucagaa

SEQ ID NO: 904950 - RNA, 22 nt, Human
acaugagauuagcucacccacu

SEQ ID NO: 904951 - RNA, 22 nt, Human
agacccagaaagcagcugcauu

SEQ ID NO: 904952 - RNA, 22 nt, Human
gacagaacucaaacaugagaag

SEQ ID NO: 904953 - RNA, 22 nt, Human
gagcuucaaauggacgaccuuu

SEQ ID NO: 904954 - RNA, 18 nt, Human
uccaaaaucauguauuuu

SEQ ID NO: 904955 - RNA, 22 nt, Human
ccugaguugucaguugcuguag

SEQ ID NO: 904956 - RNA, 22 nt, Human
ugcuuugcagugucuaacagaa

SEQ ID NO: 904957 - RNA, 22 nt, Human
caugacacccaggcauagcacc

SEQ ID NO: 904958 - RNA, 20 nt, Human
ugcccuguggaggggaaagg

SEQ ID NO: 904959 - RNA, 17 nt, Human
ucauuucaguaaaucca

SEQ ID NO: 904960 - RNA, 23 nt, Human
aggaaguuaaggcagacagacag

SEQ ID NO: 904961 - RNA, 22 nt, Human
ccauggcuaaguaucuguagaa

SEQ ID NO: 904962 - RNA, 22 nt, Human
augccuccucaaaucugccaca

SEQ ID NO: 904963 - RNA, 22 nt, Human
cccauuuguauagagccuuaua

SEQ ID NO: 904964 - RNA, 22 nt, Human
acuuuaauuaaugaacuguggc

SEQ ID NO: 904965 - RNA, 23 nt, Human
cuguuauuccaggcugaugggug

SEQ ID NO: 904966 - RNA, 22 nt, Human
cacaggagcuguggggcagugu

SEQ ID NO: 904967 - RNA, 17 nt, Human
ucccaggaacagggaau

SEQ ID NO: 904968 - RNA, 22 nt, Human
uacucaugacugaugaauaccu

SEQ ID NO: 904969 - RNA, 22 nt, Human
guguggcuaggauggcuuugcu

SEQ ID NO: 904970 - RNA, 22 nt, Human
guucuucagcauuagaagucau

SEQ ID NO: 904971 - RNA, 22 nt, Human
uggcuccuaggauggugccugg

SEQ ID NO: 904972 - RNA, 22 nt, Human
uacaugugguagggagggcagu

SEQ ID NO: 904973 - RNA, 22 nt, Human
ggguugaggcggaugucggcgg

SEQ ID NO: 904974 - RNA, 22 nt, Human
caccaggggcagagaccaaagu

SEQ ID NO: 904975 - RNA, 19 nt, Human
uguugccagguaucauguu

SEQ ID NO: 904976 - RNA, 22 nt, Human
cgacgggcucgguccgcuuccu

SEQ ID NO: 904977 - RNA, 22 nt, Human
aagggcuggaucucucugagca

SEQ ID NO: 904978 - RNA, 22 nt, Human
acaguaaaaagccuuagaauuu

SEQ ID NO: 904979 - RNA, 22 nt, Human
ugaaaugagcauuuauucuuua

SEQ ID NO: 904980 - RNA, 18 nt, Human
aaauggcacacagaccug

SEQ ID NO: 904981 - RNA, 21 nt, Human
acaaugcauggaacucauggc

SEQ ID NO: 904982 - RNA, 20 nt, Human
aaugaaugaacgaauggaug

SEQ ID NO: 904983 - RNA, 22 nt, Human
ggagcugcuccuucagccaagu

SEQ ID NO: 904984 - RNA, 22 nt, Human
gcaagaacugcaauuacuuuug

SEQ ID NO: 904985 - RNA, 22 nt, Human
agacaaaccuuguuuuaugaug

SEQ ID NO: 904986 - RNA, 22 nt, Human
augacuucaccucugugaagca

SEQ ID NO: 904987 - RNA, 22 nt, Human
acauuucucauucuccccuaac

SEQ ID NO: 904988 - RNA, 22 nt, Human
uauuucagggagaauaaauuug

SEQ ID NO: 904989 - RNA, 22 nt, Human
auguucccagcacugaguaaca

SEQ ID NO: 904990 - RNA, 22 nt, Human
gugaaggcuugacgucaucagg

SEQ ID NO: 904991 - RNA, 22 nt, Human
acccaggcuagagugcaguggu

SEQ ID NO: 904992 - RNA, 21 nt, Human
gacuuuaauuugagagcaaaa

SEQ ID NO: 904993 - RNA, 22 nt, Human
aguguuucacagcacuuuuucu

SEQ ID NO: 904994 - RNA, 22 nt, Human
agcugccuguguagaaccaucu

SEQ ID NO: 904995 - RNA, 22 nt, Human
auaggcuugagcuaagagagaa

SEQ ID NO: 904996 - RNA, 22 nt, Human
auugggaagauuuagauccacu

SEQ ID NO: 904997 - RNA, 22 nt, Human
cauugaaagagauaaagccuuu

SEQ ID NO: 904998 - RNA, 22 nt, Human
uguuuucaucacagaauguaac

SEQ ID NO: 904999 - RNA, 22 nt, Human
cauucauaaguuuuugugcugg

SEQ ID NO: 905000 - RNA, 22 nt, Human
gcucugggaacugacugccuuc

SEQ ID NO: 905001 - RNA, 22 nt, Human
aaguuucaaauauaaaauuaca

SEQ ID NO: 905002 - RNA, 22 nt, Human
cagcaugaugcucacacaaaac

SEQ ID NO: 905003 - RNA, 22 nt, Human
uaggccaggacagagcuuccag

SEQ ID NO: 905004 - RNA, 21 nt, Human
ugggacagugauggcuccucc

SEQ ID NO: 905005 - RNA, 22 nt, Human
aagcugcacuacuugagggacc

SEQ ID NO: 905006 - RNA, 22 nt, Human
acguugaaugguuaauuuguau

SEQ ID NO: 905007 - RNA, 22 nt, Human
ucacagaauagcacuguaagcg

SEQ ID NO: 905008 - RNA, 22 nt, Human
acgggccuucucuucaggcgag

SEQ ID NO: 905009 - RNA, 22 nt, Human
agaaaucaauaucuauauguug

SEQ ID NO: 905010 - RNA, 22 nt, Human
ggacagcguggcugguggaggg

SEQ ID NO: 905011 - RNA, 22 nt, Human
aaguguuucaauaauuuggacc

SEQ ID NO: 905012 - RNA, 22 nt, Human
cuggcuccaccccaggaggaug

SEQ ID NO: 905013 - RNA, 22 nt, Human
ggaggugggagacauaggcggc

SEQ ID NO: 905014 - RNA, 22 nt, Human
gaaguucaaaagacagauuuga

SEQ ID NO: 905015 - RNA, 22 nt, Human
gcaauaaacucucucaagccac

SEQ ID NO: 905016 - RNA, 22 nt, Human
aaaguacuuggauuacaggcau

SEQ ID NO: 905017 - RNA, 22 nt, Human
acaggggaccuaggacccucgg

SEQ ID NO: 905018 - RNA, 22 nt, Human
gggcacugugcuaggugcugag

SEQ ID NO: 905019 - RNA, 22 nt, Human
uuucaguuuaaguaacugcuau

SEQ ID NO: 905020 - RNA, 22 nt, Human
gagcagagaauccagcuaagug

SEQ ID NO: 905021 - RNA, 22 nt, Human
ccagagggcuugguuugggcca

SEQ ID NO: 905022 - RNA, 22 nt, Human
ucuuaacagugcuacagagcag

SEQ ID NO: 905023 - RNA, 22 nt, Human
uuuaauuaggaaaugggcaggg

SEQ ID NO: 905024 - RNA, 22 nt, Human
uaacaggcugaucauauauccu

SEQ ID NO: 905025 - RNA, 22 nt, Human
cauaugaaguucaacagagaug

SEQ ID NO: 905026 - RNA, 22 nt, Human
ucuacuauguuucuuaaauaga

SEQ ID NO: 905027 - RNA, 22 nt, Human
cucuuuguagccuuugcauauu

SEQ ID NO: 905028 - RNA, 22 nt, Human
agucuuaguaugguuuuagguu

SEQ ID NO: 905029 - RNA, 22 nt, Human
auuguuaauaacuauuacauug

SEQ ID NO: 905030 - RNA, 18 nt, Human
aacuaaagaucuuuaagc

SEQ ID NO: 905031 - RNA, 22 nt, Human
uguaaaagacauuucuaagcaa

SEQ ID NO: 905032 - RNA, 22 nt, Human
uucucuaaagaguuaggccaag

SEQ ID NO: 905033 - RNA, 22 nt, Human
acauugaauuucacuuuuguac

SEQ ID NO: 905034 - RNA, 21 nt, Human
caugcagauucuggagccaga

SEQ ID NO: 905035 - RNA, 22 nt, Human
uuuuaaguuaauauaauugagg

SEQ ID NO: 905036 - RNA, 22 nt, Human
caaggcagcuauugucuccaua

SEQ ID NO: 905037 - RNA, 22 nt, Human
ucugaggcccugcaggcagugu

SEQ ID NO: 905038 - RNA, 22 nt, Human
uuacagaagaguaacuuggcaa

SEQ ID NO: 905039 - RNA, 22 nt, Human
agcaggcaggaaggcagcacug

SEQ ID NO: 905040 - RNA, 22 nt, Human
gggcagcugccccucucugggc

SEQ ID NO: 905041 - RNA, 22 nt, Human
gagaggcucugaggacuggggu

SEQ ID NO: 905042 - RNA, 22 nt, Human
uugaagcaaauucugugcagua

SEQ ID NO: 905043 - RNA, 22 nt, Human
aagcacagcuggaacagcagga

SEQ ID NO: 905044 - RNA, 22 nt, Human
gggcugagccauuugaaccuug

SEQ ID NO: 905045 - RNA, 22 nt, Human
uggcuuuaaaaugguuugguau

SEQ ID NO: 905046 - RNA, 22 nt, Human
uagguuccauuuaaacaaagaa

SEQ ID NO: 905047 - RNA, 18 nt, Human
cuagagaagguuacuaug

SEQ ID NO: 905048 - RNA, 22 nt, Human
guuggcacuuagccccagucua

SEQ ID NO: 905049 - RNA, 22 nt, Human
cugaggcaggggcagcuggaga

SEQ ID NO: 905050 - RNA, 22 nt, Human
augucacagcucccauuccucc

SEQ ID NO: 905051 - RNA, 18 nt, Human
uggcuggcucugucaucu

SEQ ID NO: 905052 - RNA, 20 nt, Human
agcugccuucauuuucuaga

SEQ ID NO: 905053 - RNA, 22 nt, Human
uacuaaacaucuggcauuaaau

SEQ ID NO: 905054 - RNA, 22 nt, Human
agaacagcaacaucagacaaag

SEQ ID NO: 905055 - RNA, 22 nt, Human
gcugggcucuuaucaccuguac

SEQ ID NO: 905056 - RNA, 22 nt, Human
cagaggcucuuccucacugccc

SEQ ID NO: 905057 - RNA, 22 nt, Human
ggggugugaguagagcugggga

SEQ ID NO: 905058 - RNA, 22 nt, Human
uagaaucuuuaaaauucauagu

SEQ ID NO: 905059 - RNA, 20 nt, Human
aacacugaggccuacucuuc

SEQ ID NO: 905060 - RNA, 22 nt, Human
uugacagaauguuacauauaga

SEQ ID NO: 905061 - RNA, 22 nt, Human
ggcaggugaguucauuaucugc

SEQ ID NO: 905062 - RNA, 22 nt, Human
uuauuugugaaucauuuaucua

SEQ ID NO: 905063 - RNA, 22 nt, Human
uggcucagcaagacauugaccu

SEQ ID NO: 905064 - RNA, 22 nt, Human
uggaaggcaggaccugccuugg

SEQ ID NO: 905065 - RNA, 22 nt, Human
cagccuucgacaguuggaguag

SEQ ID NO: 905066 - RNA, 23 nt, Human
gccuggccaccccagggcugcuu

SEQ ID NO: 905067 - RNA, 20 nt, Human
uccaguggccugaaucugga

SEQ ID NO: 905068 - RNA, 22 nt, Human
ccauuuugucugacuucuugcu

SEQ ID NO: 905069 - RNA, 22 nt, Human
agauguggccggcuagggagag

SEQ ID NO: 905070 - RNA, 22 nt, Human
ugucccaguuuaucugggacug

SEQ ID NO: 905071 - RNA, 22 nt, Human
acauuccugaaugggcacauuu

SEQ ID NO: 905072 - RNA, 23 nt, Human
gggaagugaggagccccucagcc

SEQ ID NO: 905073 - RNA, 17 nt, Human
aggugcuggagcaucag

SEQ ID NO: 905074 - RNA, 22 nt, Human
gggcagguggccucuuguacua

SEQ ID NO: 905075 - RNA, 22 nt, Human
uaaaugcuccauacauacacca

SEQ ID NO: 905076 - RNA, 22 nt, Human
agcugcuccuuuccugcaggcg

SEQ ID NO: 905077 - RNA, 22 nt, Human
ccagcauuugcuucuggugggg

SEQ ID NO: 905078 - RNA, 22 nt, Human
uccugaggcccuguuagggucu

SEQ ID NO: 905079 - RNA, 22 nt, Human
aggacccugaggucuccuguga

SEQ ID NO: 905080 - RNA, 19 nt, Human
ggcagcucuugucuucugc

SEQ ID NO: 905081 - RNA, 22 nt, Human
uggcccugcugggucagagcug

SEQ ID NO: 905082 - RNA, 22 nt, Human
cauuucaguguuauucuaauuu

SEQ ID NO: 905083 - RNA, 22 nt, Human
agaggccugugugcuccagugg

SEQ ID NO: 905084 - RNA, 21 nt, Human
ccuccugcccgcaagcuaggg

SEQ ID NO: 905085 - RNA, 22 nt, Human
ugagguaggaauuuguauuggg

SEQ ID NO: 905086 - RNA, 22 nt, Human
gacagcugaacaggugggauaa

SEQ ID NO: 905087 - RNA, 22 nt, Human
agagguagaaaauaauggagag

SEQ ID NO: 905088 - RNA, 22 nt, Human
cccagcugaacuugcauuccaa

SEQ ID NO: 905089 - RNA, 22 nt, Human
gugucugaguuuggaaagucca

SEQ ID NO: 905090 - RNA, 22 nt, Human
cugguaggggugacuguuaucg

SEQ ID NO: 905091 - RNA, 22 nt, Human
gcaaacuggcaaaccugucugu

SEQ ID NO: 905092 - RNA, 22 nt, Human
ugaggccaggacccccagcagg

SEQ ID NO: 905093 - RNA, 22 nt, Human
gucuuuggauguaagauaaagu

SEQ ID NO: 905094 - RNA, 22 nt, Human
uaaguucauuagacuacagaua

SEQ ID NO: 905095 - RNA, 22 nt, Human
ucaggaguuuggccuacagagg

SEQ ID NO: 905096 - RNA, 22 nt, Human
accaugaguuauuugacaggcc

SEQ ID NO: 905097 - RNA, 22 nt, Human
cuccugugguacucccagggcc

SEQ ID NO: 905098 - RNA, 22 nt, Human
agggggugaaugucugucuaca

SEQ ID NO: 905099 - RNA, 22 nt, Human
aggagaggguggcauuaaguuu

SEQ ID NO: 905100 - RNA, 22 nt, Human
uagaggaaccaggcaggcugag

SEQ ID NO: 905101 - RNA, 22 nt, Human
agccagagacuuuaccugugca

SEQ ID NO: 905102 - RNA, 19 nt, Human
agcuaacucacuaacuaug

SEQ ID NO: 905103 - RNA, 22 nt, Human
acugagacugaaucugaaugau

SEQ ID NO: 905104 - RNA, 20 nt, Human
gagggcucguggauggauaa

SEQ ID NO: 905105 - RNA, 22 nt, Human
aaaauauuuuagggccaggaga

SEQ ID NO: 905106 - RNA, 22 nt, Human
aaaaaucuaugacugcuucucc

SEQ ID NO: 905107 - RNA, 22 nt, Human
auugagaaggagauuggcaucu

SEQ ID NO: 905108 - RNA, 23 nt, Human
aggccagcgcagacaccgagcac

SEQ ID NO: 905109 - RNA, 22 nt, Human
guuuagaauggcaaaauuaagu

SEQ ID NO: 905110 - RNA, 22 nt, Human
agcuggccagcaccuccagguc

SEQ ID NO: 905111 - RNA, 22 nt, Human
ugaguaaaaauucuacauuucc

SEQ ID NO: 905112 - RNA, 22 nt, Human
ucuuauaaaaggacucccauuu

SEQ ID NO: 905113 - RNA, 22 nt, Human
gccaguggucagugggagggug

SEQ ID NO: 905114 - RNA, 22 nt, Human
ucugcugcacaaauucaucucu

SEQ ID NO: 905115 - RNA, 17 nt, Human
agaaaagagaccagcag

SEQ ID NO: 905116 - RNA, 22 nt, Human
uucuuuaaaugaauucucugua

SEQ ID NO: 905117 - RNA, 22 nt, Human
aguugcacuuucuagauacugu

SEQ ID NO: 905118 - RNA, 22 nt, Human
ccuuuucccauguuucuggagc

SEQ ID NO: 905119 - RNA, 22 nt, Human
agaauccucuucaguaaauucu

SEQ ID NO: 905120 - RNA, 17 nt, Human
caggucccagggucucu

SEQ ID NO: 905121 - RNA, 22 nt, Human
aacaguuaaugaagaggaagcc

SEQ ID NO: 905122 - RNA, 22 nt, Human
gggugaagcuccugcaggggcc

SEQ ID NO: 905123 - RNA, 22 nt, Human
acugcacaccuccagggcacua

SEQ ID NO: 905124 - RNA, 22 nt, Human
ugugugaacucucugauguaca

SEQ ID NO: 905125 - RNA, 22 nt, Human
uccaggcuagaagucacaggcc

SEQ ID NO: 905126 - RNA, 22 nt, Human
cuacccaggcuggagugcagua

SEQ ID NO: 905127 - RNA, 22 nt, Human
cccagagagcacaggugguggg

SEQ ID NO: 905128 - RNA, 22 nt, Human
ugcccacaggaagacaccagcg

SEQ ID NO: 905129 - RNA, 22 nt, Human
cuuugacauccuuguuccucag

SEQ ID NO: 905130 - RNA, 22 nt, Human
ugagagcugcugagacuguccu

SEQ ID NO: 905131 - RNA, 22 nt, Human
gguucuaggucuggggauaaug

SEQ ID NO: 905132 - RNA, 22 nt, Human
cuggaugcuuccucucugcuag

SEQ ID NO: 905133 - RNA, 22 nt, Human
uggcuucucccuacaacaugcc

SEQ ID NO: 905134 - RNA, 22 nt, Human
agcaauuauggaguuguugacg

SEQ ID NO: 905135 - RNA, 22 nt, Human
augucuguuuucauaucagaua

SEQ ID NO: 905136 - RNA, 22 nt, Human
cuagaacaaauuaggaggcaua

SEQ ID NO: 905137 - RNA, 22 nt, Human
uuagcaguuuccauuuugguca

SEQ ID NO: 905138 - RNA, 22 nt, Human
aagauuucugcuccugagagaa

SEQ ID NO: 905139 - RNA, 22 nt, Human
ugagaagcccacacucuuuccu

SEQ ID NO: 905140 - RNA, 17 nt, Human
gcuccugcaggucagga

SEQ ID NO: 905141 - RNA, 22 nt, Human
ugccucccucucugccacugga

SEQ ID NO: 905142 - RNA, 22 nt, Human
cacaguguuccagagcaguggu

SEQ ID NO: 905143 - RNA, 22 nt, Human
ucaggccacggcucacugagac

SEQ ID NO: 905144 - RNA, 17 nt, Human
aggcauggucuggggug

SEQ ID NO: 905145 - RNA, 22 nt, Human
aggcuggagugcaauggcguga

SEQ ID NO: 905146 - RNA, 22 nt, Human
aagcuguucugaaucaguaagu

SEQ ID NO: 905147 - RNA, 22 nt, Human
cucuguguuccggguugcugcu

SEQ ID NO: 905148 - RNA, 22 nt, Human
auggcaagcaagcugaagagau

SEQ ID NO: 905149 - RNA, 22 nt, Human
uacauacacaaaugcugaaugg

SEQ ID NO: 905150 - RNA, 22 nt, Human
uucaugagcagaagggaggggu

SEQ ID NO: 905151 - RNA, 20 nt, Human
aauuauauaacuccaacauu

SEQ ID NO: 905152 - RNA, 22 nt, Human
aguaguggcuuccuggagugcu

SEQ ID NO: 905153 - RNA, 22 nt, Human
agcuggcuucacaggcagugug

SEQ ID NO: 905154 - RNA, 22 nt, Human
ugaagauuuccaccaaaucaca

SEQ ID NO: 905155 - RNA, 22 nt, Human
agaguuauggacuuaaugcagg

SEQ ID NO: 905156 - RNA, 22 nt, Human
acaaauuuauugaagggcauau

SEQ ID NO: 905157 - RNA, 22 nt, Human
uaagcaaauaaugcaucaaggg

SEQ ID NO: 905158 - RNA, 22 nt, Human
gccuuccuuacaccugcucagc

SEQ ID NO: 905159 - RNA, 18 nt, Human
cuuugcaguuacagggca

SEQ ID NO: 905160 - RNA, 22 nt, Human
uuugacaaauauuuauuggcac

SEQ ID NO: 905161 - RNA, 22 nt, Human
guuuauaugugugccacucuua

SEQ ID NO: 905162 - RNA, 22 nt, Human
gagacacaauuuccccauccua

SEQ ID NO: 905163 - RNA, 22 nt, Human
gaaaaggcugcccacuuauuga

SEQ ID NO: 905164 - RNA, 22 nt, Human
cucccgugauccuggaggagag

SEQ ID NO: 905165 - RNA, 20 nt, Human
aaguaauauuuguguaacug

SEQ ID NO: 905166 - RNA, 22 nt, Human
gugcugaauccacucuuaggaa

SEQ ID NO: 905167 - RNA, 22 nt, Human
agagucugaaugcucagaguug

SEQ ID NO: 905168 - RNA, 22 nt, Human
uucauucugggcucuaaggaac

SEQ ID NO: 905169 - RNA, 23 nt, Human
caggaagcagaugggguagaaga

SEQ ID NO: 905170 - RNA, 22 nt, Human
ugcccuguuccugccuccagcu

SEQ ID NO: 905171 - RNA, 22 nt, Human
ccacugaggccugggcccaggg

SEQ ID NO: 905172 - RNA, 22 nt, Human
uggaggaauaacagcaaccuua

SEQ ID NO: 905173 - RNA, 22 nt, Human
ugccucugggugaccaaggagc

SEQ ID NO: 905174 - RNA, 22 nt, Human
cuugagaagagauuuauauuug

SEQ ID NO: 905175 - RNA, 22 nt, Human
cuaaagaucuacagaggcuuuu

SEQ ID NO: 905176 - RNA, 19 nt, Human
uucccagagccaugaguga

SEQ ID NO: 905177 - RNA, 16 nt, Human
gcaggcagaucacaug

SEQ ID NO: 905178 - RNA, 22 nt, Human
gcaugggcuuucucagaguucu

SEQ ID NO: 905179 - RNA, 23 nt, Human
cagacccucaauccacuuguuuu

SEQ ID NO: 905180 - RNA, 23 nt, Human
agggcuccuuguugauuagcauu

SEQ ID NO: 905181 - RNA, 22 nt, Human
ucauccaguaccauggaaggca

SEQ ID NO: 905182 - RNA, 22 nt, Human
caaaaguaauugugguuuuugc

SEQ ID NO: 905183 - RNA, 22 nt, Human
acauuguaagcauauuagcuga

SEQ ID NO: 905184 - RNA, 22 nt, Human
acacuucaccccugcucccagu

SEQ ID NO: 905185 - RNA, 22 nt, Human
gagaagcaaucgugacaucucc

SEQ ID NO: 905186 - RNA, 22 nt, Human
agaggugaaagaauuuggcucu

SEQ ID NO: 905187 - RNA, 22 nt, Human
caagguuuacuuuaugauccag

SEQ ID NO: 905188 - RNA, 22 nt, Human
uugugaaaucguguuuggaagc

SEQ ID NO: 905189 - RNA, 22 nt, Human
auguaaguauucaaaauauuuc

SEQ ID NO: 905190 - RNA, 22 nt, Human
gcugccuggagcucagccugcc

SEQ ID NO: 905191 - RNA, 22 nt, Human
ccaaacugugucgucugcauag

SEQ ID NO: 905192 - RNA, 22 nt, Human
uucauuguacuuuaagagaugc

SEQ ID NO: 905193 - RNA, 22 nt, Human
auaaucuggucuuuguaugagu

SEQ ID NO: 905194 - RNA, 22 nt, Human
aauagcauguaaguuuaaaaga

SEQ ID NO: 905195 - RNA, 22 nt, Human
aacuuuacuugaaagaacaugu

SEQ ID NO: 905196 - RNA, 22 nt, Human
caagucugaccucugggugaag

SEQ ID NO: 905197 - RNA, 18 nt, Human
cucaggccuuucccugug

SEQ ID NO: 905198 - RNA, 22 nt, Human
gggcuucuagaauuucugauau

SEQ ID NO: 905199 - RNA, 22 nt, Human
ccuccagggcagacggggagca

SEQ ID NO: 905200 - RNA, 22 nt, Human
uagagggccagcuggacagcga

SEQ ID NO: 905201 - RNA, 22 nt, Human
gcugagugagguccagagcuug

SEQ ID NO: 905202 - RNA, 22 nt, Human
gcugggaaccaugggaaggcag

SEQ ID NO: 905203 - RNA, 22 nt, Human
guccuuggcugggcuugccucg

SEQ ID NO: 905204 - RNA, 22 nt, Human
gauauuuaacucucacaggucc

SEQ ID NO: 905205 - RNA, 20 nt, Human
caucagugccugacaggucc

SEQ ID NO: 905206 - RNA, 20 nt, Human
cucaguguggccugaguguu

SEQ ID NO: 905207 - RNA, 23 nt, Human
ugcugguguuuuugggaccaggg

SEQ ID NO: 905208 - RNA, 22 nt, Human
cauuguccucugaugccuuccc

SEQ ID NO: 905209 - RNA, 22 nt, Human
aaaaguguccagauuaugaaga

SEQ ID NO: 905210 - RNA, 19 nt, Human
agaggcugucaccuguagc

SEQ ID NO: 905211 - RNA, 22 nt, Human
aucuccgccaucgcgaacgccu

SEQ ID NO: 905212 - RNA, 22 nt, Human
gagagcuggguucaaguagcug

SEQ ID NO: 905213 - RNA, 22 nt, Human
ggagcugaggaauagcuuugau

SEQ ID NO: 905214 - RNA, 22 nt, Human
aagaggggugugugucaaccca

SEQ ID NO: 905215 - RNA, 22 nt, Human
ccagaggcauguucaaagcaau

SEQ ID NO: 905216 - RNA, 22 nt, Human
ucagagcauucgggugacaaau

SEQ ID NO: 905217 - RNA, 22 nt, Human
cucuucuugucucugguuagaa

SEQ ID NO: 905218 - RNA, 18 nt, Human
aggaaagacgaagagggc

SEQ ID NO: 905219 - RNA, 22 nt, Human
acaguguuuaaaauaauaugcu

SEQ ID NO: 905220 - RNA, 19 nt, Human
ugaggagcagcugguugau

SEQ ID NO: 905221 - RNA, 22 nt, Human
gaauuucaaagagguuaagagg

SEQ ID NO: 905222 - RNA, 21 nt, Human
uucagcuuaugugucacuugc

SEQ ID NO: 905223 - RNA, 21 nt, Human
gggugggguuccagccuuuuc

SEQ ID NO: 905224 - RNA, 22 nt, Human
ugcagagguuugugguguugcu

SEQ ID NO: 905225 - RNA, 22 nt, Human
aagcacuuagaagagugccugc

SEQ ID NO: 905226 - RNA, 22 nt, Human
cuuuuaagggauaauaagaugu

SEQ ID NO: 905227 - RNA, 22 nt, Human
ucaggcagaauuaucaaaagau

SEQ ID NO: 905228 - RNA, 22 nt, Human
uggcaccaccagacaccaggag

SEQ ID NO: 905229 - RNA, 22 nt, Human
caguuucagaaucaaaacauca

SEQ ID NO: 905230 - RNA, 23 nt, Human
uaagugauuagaauuugcuguca

SEQ ID NO: 905231 - RNA, 22 nt, Human
guguguggaaaguuuuccaugg

SEQ ID NO: 905232 - RNA, 22 nt, Human
ugccauuucucaggcuauuuca

SEQ ID NO: 905233 - RNA, 22 nt, Human
uucaacaaauauuuauugagcu

SEQ ID NO: 905234 - RNA, 22 nt, Human
uguaagucuggcuuauagcuuu

SEQ ID NO: 905235 - RNA, 22 nt, Human
cccugcugccuucacccaggac

SEQ ID NO: 905236 - RNA, 22 nt, Human
gccugagcagcuauacacacag

SEQ ID NO: 905237 - RNA, 22 nt, Human
auucaacuguaaacuuguucac

SEQ ID NO: 905238 - RNA, 22 nt, Human
uuucagugcccagagcuuugca

SEQ ID NO: 905239 - RNA, 22 nt, Human
aaaauaguuaacguucagagua

SEQ ID NO: 905240 - RNA, 22 nt, Human
auugcuucccacaaagauguau

SEQ ID NO: 905241 - RNA, 22 nt, Human
aggaagcuuagauuuccagauc

SEQ ID NO: 905242 - RNA, 22 nt, Human
aauuaaaggucauguuaaaggg

SEQ ID NO: 905243 - RNA, 22 nt, Human
uaaaaggcaauacuagaugagu

SEQ ID NO: 905244 - RNA, 22 nt, Human
gugagucugccuagcacaucac

SEQ ID NO: 905245 - RNA, 22 nt, Human
gcuuuagauagauuuagucuuu

SEQ ID NO: 905246 - RNA, 21 nt, Human
ugucagaaauaagcaugugau

SEQ ID NO: 905247 - RNA, 22 nt, Human
guugaaaguagaugcuauuugg

SEQ ID NO: 905248 - RNA, 22 nt, Human
uuagaaccaggaacucuaauau

SEQ ID NO: 905249 - RNA, 22 nt, Human
auguuauuucaaaauucccuug

SEQ ID NO: 905250 - RNA, 22 nt, Human
aauguaugggugagaaaguuga

SEQ ID NO: 905251 - RNA, 20 nt, Human
agucugacauuuuucucuca

SEQ ID NO: 905252 - RNA, 22 nt, Human
cuggagcuuauugggagcagaa

SEQ ID NO: 905253 - RNA, 22 nt, Human
guggaauggccaugggauccuu

SEQ ID NO: 905254 - RNA, 22 nt, Human
gaggaaggagggaaagcgcgcg

SEQ ID NO: 905255 - RNA, 22 nt, Human
gcccaaggucccauggcagcac

SEQ ID NO: 905256 - RNA, 22 nt, Human
auguguaucuaagguguucuau

SEQ ID NO: 905257 - RNA, 17 nt, Human
acccauuuugcacaggc

SEQ ID NO: 905258 - RNA, 22 nt, Human
ucauuuacuguaggcaaaaauu

SEQ ID NO: 905259 - RNA, 22 nt, Human
aggcuccaugguucucccucag

SEQ ID NO: 905260 - RNA, 22 nt, Human
ucucuucccggauaaaguaagu

SEQ ID NO: 905261 - RNA, 20 nt, Human
acaguuuauccaguuagcag

SEQ ID NO: 905262 - RNA, 22 nt, Human
ucuuuggaaaugcuuugagaau

SEQ ID NO: 905263 - RNA, 22 nt, Human
cuaugcagaauuuagugacuua

SEQ ID NO: 905264 - RNA, 22 nt, Human
ugaguggacaccugcuucuuua

SEQ ID NO: 905265 - RNA, 22 nt, Human
aacaugucuggguauucacaag

SEQ ID NO: 905266 - RNA, 22 nt, Human
uugucugucccagcuugugcau

SEQ ID NO: 905267 - RNA, 22 nt, Human
gagaggagaagccugcgcuuca

SEQ ID NO: 905268 - RNA, 22 nt, Human
ggaugggaacuugguagggcau

SEQ ID NO: 905269 - RNA, 21 nt, Human
gcagcuggucucagagcuugc

SEQ ID NO: 905270 - RNA, 22 nt, Human
guguccagccugcacagggugc

SEQ ID NO: 905271 - RNA, 22 nt, Human
gggagggaucugcuaggcaaug

SEQ ID NO: 905272 - RNA, 20 nt, Human
ugauuucucuucuauuccuu

SEQ ID NO: 905273 - RNA, 22 nt, Human
cuguggcuaggaagcuguggga

SEQ ID NO: 905274 - RNA, 22 nt, Human
uagaggccugaaagaaugauca

SEQ ID NO: 905275 - RNA, 22 nt, Human
gccuguccuggaugcucugcaa

SEQ ID NO: 905276 - RNA, 22 nt, Human
cauguuauuuauccauuaaaca

SEQ ID NO: 905277 - RNA, 22 nt, Human
caaucuauagagcuuuagacua

SEQ ID NO: 905278 - RNA, 22 nt, Human
aggagugaguguccucagcaga

SEQ ID NO: 905279 - RNA, 22 nt, Human
gcccaguaguucaagguugcag

SEQ ID NO: 905280 - RNA, 22 nt, Human
gcaggagugacauggaugugga

SEQ ID NO: 905281 - RNA, 22 nt, Human
agccaaaggcaccagagacacu

SEQ ID NO: 905282 - RNA, 17 nt, Human
agaguggcuaaggcuca

SEQ ID NO: 905283 - RNA, 22 nt, Human
agagggcagggcgguaaguccu

SEQ ID NO: 905284 - RNA, 22 nt, Human
aaaugucaaggugauagaugca

SEQ ID NO: 905285 - RNA, 19 nt, Human
gggagcaggaaagcugugg

SEQ ID NO: 905286 - RNA, 22 nt, Human
agcugcugagagucugccgggc

SEQ ID NO: 905287 - RNA, 22 nt, Human
ugagcaggggagagcgaaugug

SEQ ID NO: 905288 - RNA, 22 nt, Human
gaauagcuguaggcuagugucu

SEQ ID NO: 905289 - RNA, 22 nt, Human
aucaagaauugggagcuauuga

SEQ ID NO: 905290 - RNA, 22 nt, Human
gccagcugcaucuccugggcug

SEQ ID NO: 905291 - RNA, 22 nt, Human
guuccacagagucucacuauga

SEQ ID NO: 905292 - RNA, 21 nt, Human
aggugggagaccauguagguc

SEQ ID NO: 905293 - RNA, 22 nt, Human
cagggcuccaugcagggacucc

SEQ ID NO: 905294 - RNA, 22 nt, Human
cacauugggaugaagucuaaaa

SEQ ID NO: 905295 - RNA, 22 nt, Human
gacaguaagaccuuaccagccu

SEQ ID NO: 905296 - RNA, 22 nt, Human
agggcaugugggagaggagccu

SEQ ID NO: 905297 - RNA, 22 nt, Human
ucugggaaccagugcggcuggg

SEQ ID NO: 905298 - RNA, 19 nt, Human
caucuguaaggacagaaac

SEQ ID NO: 905299 - RNA, 22 nt, Human
cccaggagaauauuuuuggguc

SEQ ID NO: 905300 - RNA, 22 nt, Human
uggaauguaaagcgugugauaa

SEQ ID NO: 905301 - RNA, 20 nt, Human
uugcagcagugaggugaagg

SEQ ID NO: 905302 - RNA, 22 nt, Human
ugcugccacauuuaaagagggg

SEQ ID NO: 905303 - RNA, 22 nt, Human
uccaugccaggcagucgaugca

SEQ ID NO: 905304 - RNA, 22 nt, Human
auuauugccagcuauuacaaca

SEQ ID NO: 905305 - RNA, 22 nt, Human
auacuguaauaccuaaaugaac

SEQ ID NO: 905306 - RNA, 22 nt, Human
ucacuggggagcacugacaugu

SEQ ID NO: 905307 - RNA, 17 nt, Human
gaagaaggaaucuagaa

SEQ ID NO: 905308 - RNA, 22 nt, Human
gcccaaggucacacacaggaag

SEQ ID NO: 905309 - RNA, 22 nt, Human
agcacagaaagcacauuugaaa

SEQ ID NO: 905310 - RNA, 22 nt, Human
ugcuucagcacuuugagagccu

SEQ ID NO: 905311 - RNA, 22 nt, Human
agcagcugaaaggcaaacuucu

SEQ ID NO: 905312 - RNA, 22 nt, Human
aagcaugguggaugauacagug

SEQ ID NO: 905313 - RNA, 22 nt, Human
aaaugcagccuagcucaguuuu

SEQ ID NO: 905314 - RNA, 18 nt, Human
ggcuccugugaucacauu

SEQ ID NO: 905315 - RNA, 22 nt, Human
ucuaggcauuguuauuacaacu

SEQ ID NO: 905316 - RNA, 22 nt, Human
gguggccauaggaccagccugg

SEQ ID NO: 905317 - RNA, 22 nt, Human
gaaugcugguguucagaauuuu

SEQ ID NO: 905318 - RNA, 17 nt, Human
uguuuucauucauugcu

SEQ ID NO: 905319 - RNA, 23 nt, Human
uguuuguuucuaugagagauagc

SEQ ID NO: 905320 - RNA, 22 nt, Human
gggcuaggcuuggccagcacug

SEQ ID NO: 905321 - RNA, 22 nt, Human
aaugcuaaaauggcacuaaagu

SEQ ID NO: 905322 - RNA, 19 nt, Human
ucugcuggcagaauucccu

SEQ ID NO: 905323 - RNA, 22 nt, Human
uggcaacaugucgaagugcugu

SEQ ID NO: 905324 - RNA, 22 nt, Human
uuacaacaaaggcacgugcaug

SEQ ID NO: 905325 - RNA, 22 nt, Human
cagcaaggcauucuguggauua

SEQ ID NO: 905326 - RNA, 22 nt, Human
ucucagaguaauucuuuaaggu

SEQ ID NO: 905327 - RNA, 22 nt, Human
gggcaggggucaguggccccaa

SEQ ID NO: 905328 - RNA, 22 nt, Human
gugaagccacagagccacgccg

SEQ ID NO: 905329 - RNA, 22 nt, Human
uagacuauagcucacagugcuu

SEQ ID NO: 905330 - RNA, 22 nt, Human
ugauuuuuaaaauucuccuugc

SEQ ID NO: 905331 - RNA, 22 nt, Human
cucugugugguccucuguauug

SEQ ID NO: 905332 - RNA, 22 nt, Human
ggauggagguucucagaugcuc

SEQ ID NO: 905333 - RNA, 22 nt, Human
auacuacaucacagccaagaag

SEQ ID NO: 905334 - RNA, 22 nt, Human
gccaggagacuccauucauuug

SEQ ID NO: 905335 - RNA, 22 nt, Human
ugcagccucucugcuucaggaa

SEQ ID NO: 905336 - RNA, 22 nt, Human
gacacuuuaggauuuaaaaguc

SEQ ID NO: 905337 - RNA, 22 nt, Human
gagccaagggcgugcuggagag

SEQ ID NO: 905338 - RNA, 22 nt, Human
ugacagaaauaguucuuaauuu

SEQ ID NO: 905339 - RNA, 20 nt, Human
cagugcauugcuucugauuu

SEQ ID NO: 905340 - RNA, 22 nt, Human
acuuagcaaaucuuuuggauuc

SEQ ID NO: 905341 - RNA, 22 nt, Human
gaagcuaaugauuuauuuucug

SEQ ID NO: 905342 - RNA, 22 nt, Human
caggaagucuuugcccaggcca

SEQ ID NO: 905343 - RNA, 22 nt, Human
ccagcagccaccuucucgaaau

SEQ ID NO: 905344 - RNA, 22 nt, Human
uuuacaucucaccagauucaua

SEQ ID NO: 905345 - RNA, 22 nt, Human
agcucaggcucugcagggacua

SEQ ID NO: 905346 - RNA, 22 nt, Human
cagagcagaaaccugggugauu

SEQ ID NO: 905347 - RNA, 22 nt, Human
uacauacaagcauucaauuuua

SEQ ID NO: 905348 - RNA, 22 nt, Human
acaugagaggcuguggaguaca

SEQ ID NO: 905349 - RNA, 22 nt, Human
aacuuguuucuuccauucaaca

SEQ ID NO: 905350 - RNA, 22 nt, Human
uacuuugguaucaaacuaaaac

SEQ ID NO: 905351 - RNA, 20 nt, Human
ggccuuagggagggcuguaa

SEQ ID NO: 905352 - RNA, 22 nt, Human
guauacauuuauuacaggucuu

SEQ ID NO: 905353 - RNA, 22 nt, Human
acagggaaguucugcaacagga

SEQ ID NO: 905354 - RNA, 22 nt, Human
cagcccucugaagaggcgcuug

SEQ ID NO: 905355 - RNA, 22 nt, Human
cuuuaaggugaugagagaugcu

SEQ ID NO: 905356 - RNA, 23 nt, Human
uccagagcucaugcucucaacca

SEQ ID NO: 905357 - RNA, 22 nt, Human
gcagcaagaggugccaucuuga

SEQ ID NO: 905358 - RNA, 22 nt, Human
ucugcagaauucgaggaagaaa

SEQ ID NO: 905359 - RNA, 22 nt, Human
uaggggaacuggcacagggcag

SEQ ID NO: 905360 - RNA, 22 nt, Human
acagguacaagggauuaggaug

SEQ ID NO: 905361 - RNA, 22 nt, Human
uuagcaauguaugauuaaaaua

SEQ ID NO: 905362 - RNA, 22 nt, Human
uuucaggacaccuuuaaaaacg

SEQ ID NO: 905363 - RNA, 22 nt, Human
augaagacuaaugugaauggga

SEQ ID NO: 905364 - RNA, 22 nt, Human
aaagccaggcagccaagccagu

SEQ ID NO: 905365 - RNA, 22 nt, Human
ugcagcugguaucccauggauu

SEQ ID NO: 905366 - RNA, 22 nt, Human
aggagaggaaucauuauuacaa

SEQ ID NO: 905367 - RNA, 22 nt, Human
aauuuggagagaaacaaguagg

SEQ ID NO: 905368 - RNA, 21 nt, Human
agcagccauuucacagagacu

SEQ ID NO: 905369 - RNA, 21 nt, Human
acauuauaauucauauuccac

SEQ ID NO: 905370 - RNA, 22 nt, Human
aaauaauugaguuggucaauau

SEQ ID NO: 905371 - RNA, 22 nt, Human
gggauggggucgggacccugcu

SEQ ID NO: 905372 - RNA, 20 nt, Human
aucaccuguagguucuuugu

SEQ ID NO: 905373 - RNA, 22 nt, Human
gggcagcauuugaaaaacagau

SEQ ID NO: 905374 - RNA, 22 nt, Human
ggaaaucuggugguagauggga

SEQ ID NO: 905375 - RNA, 22 nt, Human
ugugggaggucuggaaggcucc

SEQ ID NO: 905376 - RNA, 22 nt, Human
gugcucuaggugauuccaaaau

SEQ ID NO: 905377 - RNA, 22 nt, Human
uaugaagauauaucugaucucu

SEQ ID NO: 905378 - RNA, 22 nt, Human
aaugacuguagucauauuaagg

SEQ ID NO: 905379 - RNA, 23 nt, Human
caucagugagggggaaucacuaa

SEQ ID NO: 905380 - RNA, 22 nt, Human
cagcacugugauaacugagcca

SEQ ID NO: 905381 - RNA, 22 nt, Human
guuugauucaagaacaaagagu

SEQ ID NO: 905382 - RNA, 22 nt, Human
ccuggaggggaccaggaccagg

SEQ ID NO: 905383 - RNA, 22 nt, Human
cucaacauuuaacagugaaaaa

SEQ ID NO: 905384 - RNA, 22 nt, Human
aacugcaaaauaaucaaguugu

SEQ ID NO: 905385 - RNA, 22 nt, Human
uguauagacuagcuuucacgau

SEQ ID NO: 905386 - RNA, 22 nt, Human
aaauuguauauuccauuuguau

SEQ ID NO: 905387 - RNA, 22 nt, Human
uguguacauauacacaaauaca

SEQ ID NO: 905388 - RNA, 22 nt, Human
auguguuuguaccuuuaaauau

SEQ ID NO: 905389 - RNA, 22 nt, Human
uccacagcuguccuguaacagg

SEQ ID NO: 905390 - RNA, 22 nt, Human
uucuaguccuagaaacuacaug

SEQ ID NO: 905391 - RNA, 22 nt, Human
ugucagaugcgauaaacuagug

SEQ ID NO: 905392 - RNA, 22 nt, Human
gcucugggugaaggguaccauu

SEQ ID NO: 905393 - RNA, 22 nt, Human
caccugcccagcaccugggauc

SEQ ID NO: 905394 - RNA, 22 nt, Human
gguaggggaagacaagugaaaa

SEQ ID NO: 905395 - RNA, 22 nt, Human
aggcugagcuggcccuugaaau

SEQ ID NO: 905396 - RNA, 22 nt, Human
uucuggaagaguaaaauaagcc

SEQ ID NO: 905397 - RNA, 22 nt, Human
ucccagcagucagagcuaugug

SEQ ID NO: 905398 - RNA, 22 nt, Human
cagugauguuucugcaucagag

SEQ ID NO: 905399 - RNA, 22 nt, Human
cagcagaggaaagcaaaucuaa

SEQ ID NO: 905400 - RNA, 22 nt, Human
uuccucaggcuucccuuugucc

SEQ ID NO: 905401 - RNA, 22 nt, Human
gcucuggaagcaucugagagga

SEQ ID NO: 905402 - RNA, 22 nt, Human
cuggagcugucuucacaggccu

SEQ ID NO: 905403 - RNA, 22 nt, Human
uagcaccuuagcauuucuagug

SEQ ID NO: 905404 - RNA, 20 nt, Human
uuuauucacagagaagaguu

SEQ ID NO: 905405 - RNA, 22 nt, Human
gcugccuuagagggagugguuc

SEQ ID NO: 905406 - RNA, 22 nt, Human
uuggagggucuuccacagccau

SEQ ID NO: 905407 - RNA, 22 nt, Human
aagacaugcaauuagcaaggaa

SEQ ID NO: 905408 - RNA, 22 nt, Human
ggugugcuaagagcacuuucaa

SEQ ID NO: 905409 - RNA, 22 nt, Human
uggcagccaucagagcaggggu

SEQ ID NO: 905410 - RNA, 22 nt, Human
guguccuuuuaugugacugguu

SEQ ID NO: 905411 - RNA, 22 nt, Human
acacaagaauaaugaugaaggu

SEQ ID NO: 905412 - RNA, 21 nt, Human
ccagcccagcugugucccagc

SEQ ID NO: 905413 - RNA, 21 nt, Human
caaugucugcucucugccuag

SEQ ID NO: 905414 - RNA, 22 nt, Human
ucccugugucuuccucuugccc

SEQ ID NO: 905415 - RNA, 22 nt, Human
acuuguuaguuuuaucugcaug

SEQ ID NO: 905416 - RNA, 22 nt, Human
aaauagacaggcuuaaauagga

SEQ ID NO: 905417 - RNA, 22 nt, Human
aagggagaggagggucuuguug

SEQ ID NO: 905418 - RNA, 22 nt, Human
caguacuuugcaucauuccacu

SEQ ID NO: 905419 - RNA, 22 nt, Human
caggccuucucccucccucaac

SEQ ID NO: 905420 - RNA, 22 nt, Human
cauauguauuucucauaauuag

SEQ ID NO: 905421 - RNA, 22 nt, Human
cuuagcaauaagagggaauaua

SEQ ID NO: 905422 - RNA, 22 nt, Human
aaguuuguggucauuuauuaua

SEQ ID NO: 905423 - RNA, 22 nt, Human
ggugaggggcgccucugcccag

SEQ ID NO: 905424 - RNA, 22 nt, Human
auacuuaguuuuaauccauuag

SEQ ID NO: 905425 - RNA, 22 nt, Human
uacuccagacauucuguccucg

SEQ ID NO: 905426 - RNA, 22 nt, Human
agggccagcugaugagaaugag

SEQ ID NO: 905427 - RNA, 22 nt, Human
auguccagcucaugauacuauc

SEQ ID NO: 905428 - RNA, 22 nt, Human
ggaaaucucagaucucccagau

SEQ ID NO: 905429 - RNA, 22 nt, Human
ucugggagagcacguggcugac

SEQ ID NO: 905430 - RNA, 22 nt, Human
cugaggaccccacaggaggccc

SEQ ID NO: 905431 - RNA, 23 nt, Human
ggguccagagacaggcaugggug

SEQ ID NO: 905432 - RNA, 22 nt, Human
agcuccuugaagggcucuggga

SEQ ID NO: 905433 - RNA, 22 nt, Human
uccuuugguucucuaagaugcu

SEQ ID NO: 905434 - RNA, 22 nt, Human
acaaauauuuacugaauccacu

SEQ ID NO: 905435 - RNA, 23 nt, Human
aggagacagggaagugccuggcu

SEQ ID NO: 905436 - RNA, 22 nt, Human
acaguggauauauuaaaugaga

SEQ ID NO: 905437 - RNA, 22 nt, Human
cauucaaaaugggcugaccugu

SEQ ID NO: 905438 - RNA, 22 nt, Human
guggcagagagcaagugucuga

SEQ ID NO: 905439 - RNA, 21 nt, Human
acugugccaggcacaaaaaca

SEQ ID NO: 905440 - RNA, 22 nt, Human
uaugaucucugggucuggagcu

SEQ ID NO: 905441 - RNA, 19 nt, Human
gguggcagaacgugggucc

SEQ ID NO: 905442 - RNA, 22 nt, Human
uagggcugugucuccaggacca

SEQ ID NO: 905443 - RNA, 22 nt, Human
uugcaucagguagacaacuaua

SEQ ID NO: 905444 - RNA, 23 nt, Human
ugacaaagucaucucuccuucuu

SEQ ID NO: 905445 - RNA, 22 nt, Human
aaagucaguuggccagaucacu

SEQ ID NO: 905446 - RNA, 22 nt, Human
acaggucaacgagagcaggcaa

SEQ ID NO: 905447 - RNA, 22 nt, Human
gccuggagcagacgugucccgg

SEQ ID NO: 905448 - RNA, 23 nt, Human
acugaaaggauccuagcagagac

SEQ ID NO: 905449 - RNA, 22 nt, Human
caagagggaaccuaagauguau

SEQ ID NO: 905450 - RNA, 22 nt, Human
aucaccaaggcuuuaggaauuu

SEQ ID NO: 905451 - RNA, 18 nt, Human
accacagugcuuaauaug

SEQ ID NO: 905452 - RNA, 22 nt, Human
cuucuuccugaaagcuggcucu

SEQ ID NO: 905453 - RNA, 22 nt, Human
gaaguucucuugggggccugag

SEQ ID NO: 905454 - RNA, 22 nt, Human
augauguaacauaaagaugucu

SEQ ID NO: 905455 - RNA, 22 nt, Human
ccaggcuugguguguggucagg

SEQ ID NO: 905456 - RNA, 22 nt, Human
ucugugcagauguagaccaguu

SEQ ID NO: 905457 - RNA, 22 nt, Human
agcucugggggaaagucugcuc

SEQ ID NO: 905458 - RNA, 22 nt, Human
gucuguccaucagcaaaggcuu

SEQ ID NO: 905459 - RNA, 22 nt, Human
ucucaauauuauaugucauaaa

SEQ ID NO: 905460 - RNA, 22 nt, Human
ugaaccuuuugcuaagaaguua

SEQ ID NO: 905461 - RNA, 22 nt, Human
ggagucacacagagaagauaag

SEQ ID NO: 905462 - RNA, 22 nt, Human
ucagaaagugaacuguugacau

SEQ ID NO: 905463 - RNA, 22 nt, Human
uccaggcugggcugaagggugc

SEQ ID NO: 905464 - RNA, 17 nt, Human
gugccuguuguccugga

SEQ ID NO: 905465 - RNA, 22 nt, Human
aggcugugcaauuaggguaaga

SEQ ID NO: 905466 - RNA, 23 nt, Human
ccuggcucaccccuuauguccag

SEQ ID NO: 905467 - RNA, 21 nt, Human
gucaaacuugcaccagugccc

SEQ ID NO: 905468 - RNA, 22 nt, Human
aggcuccacggucacuggcucu

SEQ ID NO: 905469 - RNA, 22 nt, Human
uagauaacagcacuggccucgc

SEQ ID NO: 905470 - RNA, 22 nt, Human
gcuguggcugaagaugcaggga

SEQ ID NO: 905471 - RNA, 22 nt, Human
cagccacuuccccucuaugggu

SEQ ID NO: 905472 - RNA, 22 nt, Human
guguaaaugccccauucauuga

SEQ ID NO: 905473 - RNA, 22 nt, Human
cuggcugggcagacagaaugcu

SEQ ID NO: 905474 - RNA, 22 nt, Human
gcuggcagccaagugaagaggg

SEQ ID NO: 905475 - RNA, 22 nt, Human
ggcucagcaaugaugagccccu

SEQ ID NO: 905476 - RNA, 22 nt, Human
ugggucccaggaaggaccagca

SEQ ID NO: 905477 - RNA, 22 nt, Human
uuucuagcaugacacaguccuc

SEQ ID NO: 905478 - RNA, 22 nt, Human
agcugagcuaguaguuccagug

SEQ ID NO: 905479 - RNA, 22 nt, Human
ccugcugggccugagcaaugag

SEQ ID NO: 905480 - RNA, 22 nt, Human
augaaacucuaacuuaacaagu

SEQ ID NO: 905481 - RNA, 22 nt, Human
ugcagcugaccagcaaguccug

SEQ ID NO: 905482 - RNA, 22 nt, Human
cucccagguuacaucugagccu

SEQ ID NO: 905483 - RNA, 22 nt, Human
agacccuugcaugaauuaauuc

SEQ ID NO: 905484 - RNA, 22 nt, Human
acuuuauuuccuauugcaucca

SEQ ID NO: 905485 - RNA, 22 nt, Human
uagacuggugaauuagggggaa

SEQ ID NO: 905486 - RNA, 22 nt, Human
uggaauguaaucaugugguggu

SEQ ID NO: 905487 - RNA, 19 nt, Human
cacauacagaaaagaguaa

SEQ ID NO: 905488 - RNA, 22 nt, Human
aaacaucaccauuuuaccuaau

SEQ ID NO: 905489 - RNA, 22 nt, Human
acccucaguaaucgugcaguuu

SEQ ID NO: 905490 - RNA, 22 nt, Human
ucaaaacucauuuuggaaguaa

SEQ ID NO: 905491 - RNA, 22 nt, Human
uuguuucuucaggcuuuuagga

SEQ ID NO: 905492 - RNA, 22 nt, Human
uucaguaagcacuucuagagcu

SEQ ID NO: 905493 - RNA, 22 nt, Human
cagcuucagcgugacaccagug

SEQ ID NO: 905494 - RNA, 22 nt, Human
gaagaaacugaaagggguuggu

SEQ ID NO: 905495 - RNA, 22 nt, Human
gccaagccuguagacacaagcu

SEQ ID NO: 905496 - RNA, 22 nt, Human
ggccccuguaaaauguacaugu

SEQ ID NO: 905497 - RNA, 22 nt, Human
uuugcaaauaaauaagugcucg

SEQ ID NO: 905498 - RNA, 22 nt, Human
cuguguuugacaggcggucucc

SEQ ID NO: 905499 - RNA, 23 nt, Human
uggccaggcauaaaggugggugg

SEQ ID NO: 905500 - RNA, 22 nt, Human
gaggccugcuuuggcacucugg

SEQ ID NO: 905501 - RNA, 22 nt, Human
gagaaggcuggucuuaagucga

SEQ ID NO: 905502 - RNA, 22 nt, Human
ugacccuuucauuauucucauu

SEQ ID NO: 905503 - RNA, 18 nt, Human
uaaguucuuaggcagcuu

SEQ ID NO: 905504 - RNA, 22 nt, Human
uaaugcuaacaucauaucacug

SEQ ID NO: 905505 - RNA, 22 nt, Human
gggucaggccucaaggugggcu

SEQ ID NO: 905506 - RNA, 20 nt, Human
agauuauuccuaagauuucu

SEQ ID NO: 905507 - RNA, 22 nt, Human
ccagugugaaccucaccacccu

SEQ ID NO: 905508 - RNA, 22 nt, Human
aagagagaccaugggggacagg

SEQ ID NO: 905509 - RNA, 22 nt, Human
gcggaggaaacugaggcaagag

SEQ ID NO: 905510 - RNA, 22 nt, Human
uaagaugguuguagauggacug

SEQ ID NO: 905511 - RNA, 22 nt, Human
agaggcggagguugcagugagc

SEQ ID NO: 905512 - RNA, 22 nt, Human
cuaggggcaugaaauagagaau

SEQ ID NO: 905513 - RNA, 18 nt, Human
gggcuaggcaaggaccac

SEQ ID NO: 905514 - RNA, 22 nt, Human
caguuaaaaugugcuauaagaa

SEQ ID NO: 905515 - RNA, 22 nt, Human
acuccagaugauaagggacagu

SEQ ID NO: 905516 - RNA, 22 nt, Human
auaugaauuuggggaggacaca

SEQ ID NO: 905517 - RNA, 22 nt, Human
uaauacauguauuccagagagu

SEQ ID NO: 905518 - RNA, 22 nt, Human
ccugagguuuuuggauaguugu

SEQ ID NO: 905519 - RNA, 22 nt, Human
ccuggagaggcgcugcagagga

SEQ ID NO: 905520 - RNA, 22 nt, Human
gaggaacagcagccacaugucc

SEQ ID NO: 905521 - RNA, 22 nt, Human
acauguguuaaaauucucacca

SEQ ID NO: 905522 - RNA, 22 nt, Human
uaaagcauguacugugugcuag

SEQ ID NO: 905523 - RNA, 22 nt, Human
cagcuguguaugagagcaugcu

SEQ ID NO: 905524 - RNA, 22 nt, Human
uccucuccaugucucacgccac

SEQ ID NO: 905525 - RNA, 22 nt, Human
gccugccugcugugugcaaguu

SEQ ID NO: 905526 - RNA, 22 nt, Human
uugaagaaccaucugugccacu

SEQ ID NO: 905527 - RNA, 22 nt, Human
ucuuuuauuaggcugaaauggg

SEQ ID NO: 905528 - RNA, 22 nt, Human
aaugauaugcaaauuaucauca

SEQ ID NO: 905529 - RNA, 22 nt, Human
augggaggaucacuugaggcca

SEQ ID NO: 905530 - RNA, 22 nt, Human
ucaccaggauuccuaucaguag

SEQ ID NO: 905531 - RNA, 16 nt, Human
caauacauggcauuuc

SEQ ID NO: 905532 - RNA, 22 nt, Human
agugguggagccaggaaaugug

SEQ ID NO: 905533 - RNA, 22 nt, Human
gugaugucuuguacauaugauu

SEQ ID NO: 905534 - RNA, 22 nt, Human
acuccaggaaacuuaggggaaa

SEQ ID NO: 905535 - RNA, 22 nt, Human
cagagcagccuccagggggagc

SEQ ID NO: 905536 - RNA, 22 nt, Human
gaguguggaucccagaagcaga

SEQ ID NO: 905537 - RNA, 20 nt, Human
gcuguugccaguacagaugg

SEQ ID NO: 905538 - RNA, 22 nt, Human
ugcaacaaggccucauuucuug

SEQ ID NO: 905539 - RNA, 22 nt, Human
gcauuuggaacuugguugagau

SEQ ID NO: 905540 - RNA, 22 nt, Human
uugggaaagaaugagaagguga

SEQ ID NO: 905541 - RNA, 22 nt, Human
agcuuauuaauuuuucugcaug

SEQ ID NO: 905542 - RNA, 22 nt, Human
caucaguggauauagauuagcg

SEQ ID NO: 905543 - RNA, 22 nt, Human
ucagaucuaauuggauuauuau

SEQ ID NO: 905544 - RNA, 22 nt, Human
cuuugugauaguguuaagacca

SEQ ID NO: 905545 - RNA, 18 nt, Human
cugaagacaaaaugucca

SEQ ID NO: 905546 - RNA, 22 nt, Human
gaggccagcuaguccaggaagu

SEQ ID NO: 905547 - RNA, 22 nt, Human
aagauucuacaguagguacauu

SEQ ID NO: 905548 - RNA, 22 nt, Human
gaggcugguuugccuuuuggca

SEQ ID NO: 905549 - RNA, 23 nt, Human
gaagugucugagcuguauuuuuc

SEQ ID NO: 905550 - RNA, 22 nt, Human
agcaauaaccacucuaauuuau

SEQ ID NO: 905551 - RNA, 22 nt, Human
aaacagugccuggcauggagga

SEQ ID NO: 905552 - RNA, 22 nt, Human
agaagccaugguaugcaacuac

SEQ ID NO: 905553 - RNA, 22 nt, Human
cuuguuaaauuauauaagcaga

SEQ ID NO: 905554 - RNA, 22 nt, Human
auaguacagauccauuaauuau

SEQ ID NO: 905555 - RNA, 22 nt, Human
ggaagcuggcauauguaauccu

SEQ ID NO: 905556 - RNA, 22 nt, Human
uuacucuuaauggcaacaacug

SEQ ID NO: 905557 - RNA, 22 nt, Human
ucugugcggucuguguuaugaa

SEQ ID NO: 905558 - RNA, 22 nt, Human
aaaguguugggauuauaggcgu

SEQ ID NO: 905559 - RNA, 22 nt, Human
caauuucagaccuuuccuugga

SEQ ID NO: 905560 - RNA, 22 nt, Human
uggcccuguguccugcugccag

SEQ ID NO: 905561 - RNA, 16 nt, Human
cuugucuguugcucau

SEQ ID NO: 905562 - RNA, 22 nt, Human
uuguaugaucaaaagaaaugua

SEQ ID NO: 905563 - RNA, 22 nt, Human
cugcagggguguccuguauugg

SEQ ID NO: 905564 - RNA, 22 nt, Human
cagaggacaugaaaacucgcuc

SEQ ID NO: 905565 - RNA, 22 nt, Human
aggcuccauuccaggagcuaga

SEQ ID NO: 905566 - RNA, 22 nt, Human
cacugucacguucugaaacugu

SEQ ID NO: 905567 - RNA, 22 nt, Human
cagcccugaaacaaccuccucu

SEQ ID NO: 905568 - RNA, 22 nt, Human
cuuguauuccccuaucucuaaa

SEQ ID NO: 905569 - RNA, 22 nt, Human
gcccagcacauugcugaggacc

SEQ ID NO: 905570 - RNA, 22 nt, Human
ccugcuggcugguagaguuccg

SEQ ID NO: 905571 - RNA, 22 nt, Human
agcccugcucaucuggaucccg

SEQ ID NO: 905572 - RNA, 22 nt, Human
ccugccugauuccaggauggcu

SEQ ID NO: 905573 - RNA, 22 nt, Human
ucuuugaugggagaucugagag

SEQ ID NO: 905574 - RNA, 22 nt, Human
uccaaacacccuccaugcugca

SEQ ID NO: 905575 - RNA, 22 nt, Human
caaauacugagcacgcaaucaa

SEQ ID NO: 905576 - RNA, 22 nt, Human
acaaugaauuuaauaccuuauu

SEQ ID NO: 905577 - RNA, 22 nt, Human
auuguacaaugccuggaacauu

SEQ ID NO: 905578 - RNA, 22 nt, Human
aaugagguuuuuuaaagccaga

SEQ ID NO: 905579 - RNA, 22 nt, Human
acagcuguggucuccuuagugu

SEQ ID NO: 905580 - RNA, 22 nt, Human
cugaggccagagugggccucuu

SEQ ID NO: 905581 - RNA, 20 nt, Human
aagaaacuugaaaguacaag

SEQ ID NO: 905582 - RNA, 22 nt, Human
aagauauaauaacuguugucau

SEQ ID NO: 905583 - RNA, 22 nt, Human
cccuccucucccuaagagucac

SEQ ID NO: 905584 - RNA, 22 nt, Human
aguggcugccaagauauaauuc

SEQ ID NO: 905585 - RNA, 22 nt, Human
acugaacuuggugaaugccaca

SEQ ID NO: 905586 - RNA, 22 nt, Human
auguguuuguccugcagaaaua

SEQ ID NO: 905587 - RNA, 22 nt, Human
gggggcuaccgucucuggagcu

SEQ ID NO: 905588 - RNA, 22 nt, Human
caggucuggcaucagcugugug

SEQ ID NO: 905589 - RNA, 22 nt, Human
uguuuuguccuuuucuauauac

SEQ ID NO: 905590 - RNA, 22 nt, Human
uuacaaagaguguucuuuucca

SEQ ID NO: 905591 - RNA, 22 nt, Human
uacuguuuuuuagacucauggu

SEQ ID NO: 905592 - RNA, 22 nt, Human
ucacaggcccaaaccacgcuua

SEQ ID NO: 905593 - RNA, 22 nt, Human
gcaggugguggcgcgcgcccug

SEQ ID NO: 905594 - RNA, 22 nt, Human
agcagcaggugaccucgaugcc

SEQ ID NO: 905595 - RNA, 22 nt, Human
ugggagcaggugugcuagggaa

SEQ ID NO: 905596 - RNA, 23 nt, Human
ugaaacauuuaggguagaauuuc

SEQ ID NO: 905597 - RNA, 22 nt, Human
aaaguuacuaucacaaugaaau

SEQ ID NO: 905598 - RNA, 22 nt, Human
cucugaagggagggccaagccc

SEQ ID NO: 905599 - RNA, 17 nt, Human
ucugcucugccaaucca

SEQ ID NO: 905600 - RNA, 22 nt, Human
ugcucuggaccaugacuaugug

SEQ ID NO: 905601 - RNA, 22 nt, Human
ucucagggagguuccccguucu

SEQ ID NO: 905602 - RNA, 22 nt, Human
gauaaacaugaaguucugugua

SEQ ID NO: 905603 - RNA, 22 nt, Human
uucuccagacaacagaggguga

SEQ ID NO: 905604 - RNA, 22 nt, Human
uucaaacaguguagaauauaug

SEQ ID NO: 905605 - RNA, 20 nt, Human
cacucuaaccauauuuccuc

SEQ ID NO: 905606 - RNA, 22 nt, Human
acauuucagaaucacacagcuu

SEQ ID NO: 905607 - RNA, 22 nt, Human
cuacaggaaggaucuugcucaa

SEQ ID NO: 905608 - RNA, 22 nt, Human
cuucugggagagcuuuugcuuc

SEQ ID NO: 905609 - RNA, 22 nt, Human
ccagcuguaggcaggggguuua

SEQ ID NO: 905610 - RNA, 22 nt, Human
uggcuggcaaggcuggagucag

SEQ ID NO: 905611 - RNA, 22 nt, Human
gggagcugagaaacaacauucu

SEQ ID NO: 905612 - RNA, 22 nt, Human
cgggcagugcccagcggggcag

SEQ ID NO: 905613 - RNA, 22 nt, Human
ucagaggcuuucaauguguuuu

SEQ ID NO: 905614 - RNA, 22 nt, Human
uuccuggccccaccccuggaga

SEQ ID NO: 905615 - RNA, 22 nt, Human
ucuagacaucuuggcugcaauu

SEQ ID NO: 905616 - RNA, 22 nt, Human
aggcccuggggucuguuaaauu

SEQ ID NO: 905617 - RNA, 22 nt, Human
ucugagccagacaagacagcca

SEQ ID NO: 905618 - RNA, 22 nt, Human
auuuuuucccaguuagccagga

SEQ ID NO: 905619 - RNA, 22 nt, Human
aagggaggccagagguuuugca

SEQ ID NO: 905620 - RNA, 22 nt, Human
ucauaaagugaaggaugauggg

SEQ ID NO: 905621 - RNA, 22 nt, Human
auuuccuagccucucuugcagu

SEQ ID NO: 905622 - RNA, 22 nt, Human
ucagaauucuagcucuucccuu

SEQ ID NO: 905623 - RNA, 22 nt, Human
ggccagccuggggcucccagac

SEQ ID NO: 905624 - RNA, 22 nt, Human
agaccuggaguggggccucagg

SEQ ID NO: 905625 - RNA, 22 nt, Human
auaaagcuucugagucuagauc

SEQ ID NO: 905626 - RNA, 22 nt, Human
aaauuucaagcaaaguagcuau

SEQ ID NO: 905627 - RNA, 22 nt, Human
acauuuaaguuaaaaccucagu

SEQ ID NO: 905628 - RNA, 18 nt, Human
aagaggcuguucuguggg

SEQ ID NO: 905629 - RNA, 22 nt, Human
auccaaaguagauuaagucaca

SEQ ID NO: 905630 - RNA, 22 nt, Human
acacacucaauugcauaagcac

SEQ ID NO: 905631 - RNA, 22 nt, Human
gcagaggcaaucagguaugugg

SEQ ID NO: 905632 - RNA, 22 nt, Human
gcaaagcauucuguggagucua

SEQ ID NO: 905633 - RNA, 22 nt, Human
cagagccugcugccuucugaag

SEQ ID NO: 905634 - RNA, 22 nt, Human
gacaaagcagacaagauaauuc

SEQ ID NO: 905635 - RNA, 22 nt, Human
ucucucuggagcuggggcauga

SEQ ID NO: 905636 - RNA, 22 nt, Human
uuucaagacucauugaguauug

SEQ ID NO: 905637 - RNA, 22 nt, Human
guacaggaaggagggaguuuca

SEQ ID NO: 905638 - RNA, 22 nt, Human
auucaguuccuugugauuguag

SEQ ID NO: 905639 - RNA, 22 nt, Human
ggaagacugcauggcauaguga

SEQ ID NO: 905640 - RNA, 22 nt, Human
acacauguucaagaauguucag

SEQ ID NO: 905641 - RNA, 22 nt, Human
acacugugcagauucccuguga

SEQ ID NO: 905642 - RNA, 22 nt, Human
aauugcuuaguugcaacuaugc

SEQ ID NO: 905643 - RNA, 21 nt, Human
ucuggggaagacaucuaggau

SEQ ID NO: 905644 - RNA, 22 nt, Human
cucccugcuuguuucccuucag

SEQ ID NO: 905645 - RNA, 22 nt, Human
agcuugggcaacacagcaagac

SEQ ID NO: 905646 - RNA, 22 nt, Human
aucuacagugcacaggacagcc

SEQ ID NO: 905647 - RNA, 22 nt, Human
agcugcuuguugaaauccaaac

SEQ ID NO: 905648 - RNA, 22 nt, Human
uggcacagagggacccagcagc

SEQ ID NO: 905649 - RNA, 22 nt, Human
uuggggaguuaaugccaaagau

SEQ ID NO: 905650 - RNA, 22 nt, Human
gcugcagagggaggggcucgca

SEQ ID NO: 905651 - RNA, 22 nt, Human
gcucugggaaguccuuuaccau

SEQ ID NO: 905652 - RNA, 22 nt, Human
gagagggcuggaaacuuccugg

SEQ ID NO: 905653 - RNA, 22 nt, Human
aauguguagcagaaccaggauu

SEQ ID NO: 905654 - RNA, 22 nt, Human
cagugcuggcuguuaggacagu

SEQ ID NO: 905655 - RNA, 22 nt, Human
gucccaggucccagcacaucug

SEQ ID NO: 905656 - RNA, 22 nt, Human
aaaugccucauuuucucucacu

SEQ ID NO: 905657 - RNA, 22 nt, Human
uuagaaguucaggucuguaauc

SEQ ID NO: 905658 - RNA, 22 nt, Human
uguacauuuucucagaguuuau

SEQ ID NO: 905659 - RNA, 22 nt, Human
uuacuuuaucuccuagauucca

SEQ ID NO: 905660 - RNA, 22 nt, Human
cugagccagagggagucggguc

SEQ ID NO: 905661 - RNA, 22 nt, Human
aucacaaucuucaaaucgauuc

SEQ ID NO: 905662 - RNA, 22 nt, Human
guuuuggcagccguguucacau

SEQ ID NO: 905663 - RNA, 22 nt, Human
cugagcgacaaguagcuuuuga

SEQ ID NO: 905664 - RNA, 22 nt, Human
aaucacagaguccagcagauga

SEQ ID NO: 905665 - RNA, 22 nt, Human
uggcagagucugggcuugggca

SEQ ID NO: 905666 - RNA, 22 nt, Human
ccuugaaaccacaucuuagaaa

SEQ ID NO: 905667 - RNA, 22 nt, Human
aauuuucugccuagcaaaaacu

SEQ ID NO: 905668 - RNA, 22 nt, Human
ucucuagagcaugugcugggca

SEQ ID NO: 905669 - RNA, 21 nt, Human
uguuuaauacauauuugugga

SEQ ID NO: 905670 - RNA, 17 nt, Human
cagguauuuaggcauug

SEQ ID NO: 905671 - RNA, 22 nt, Human
aggaggaacucagaaagaaggu

SEQ ID NO: 905672 - RNA, 22 nt, Human
gggcccuggggccugauuugca

SEQ ID NO: 905673 - RNA, 22 nt, Human
gcuggcagcauuagacccuggg

SEQ ID NO: 905674 - RNA, 22 nt, Human
aggcauucaacaaauguuugug

SEQ ID NO: 905675 - RNA, 22 nt, Human
aaaagauuguuagggagaaugu

SEQ ID NO: 905676 - RNA, 22 nt, Human
caacauuugugaugagcaaacu

SEQ ID NO: 905677 - RNA, 22 nt, Human
gggcugugcugaguaggaggug

SEQ ID NO: 905678 - RNA, 22 nt, Human
ggcuggagaagggugguugaca

SEQ ID NO: 905679 - RNA, 22 nt, Human
aauacgucugaaugcauucuca

SEQ ID NO: 905680 - RNA, 22 nt, Human
uguuacaguggcuuuuuaaaca

SEQ ID NO: 905681 - RNA, 22 nt, Human
aaaggaagaugccaggacucug

SEQ ID NO: 905682 - RNA, 22 nt, Human
gcagugaaucuggcaagaauuu

SEQ ID NO: 905683 - RNA, 22 nt, Human
auuucaguauuauacaacugcu

SEQ ID NO: 905684 - RNA, 22 nt, Human
ugaggcagauauuuauuggguu

SEQ ID NO: 905685 - RNA, 22 nt, Human
uuuuugaaggcugaugugauua

SEQ ID NO: 905686 - RNA, 22 nt, Human
guucaaagcuccugguacagua

SEQ ID NO: 905687 - RNA, 22 nt, Human
cugcugugagugguucuugccu

SEQ ID NO: 905688 - RNA, 22 nt, Human
acugaacagccuuucaaacuua

SEQ ID NO: 905689 - RNA, 22 nt, Human
aguaaacuguggguacagaugu

SEQ ID NO: 905690 - RNA, 18 nt, Human
uggcagcuagguaaagaa

SEQ ID NO: 905691 - RNA, 22 nt, Human
aaaguccuguuugaaggaccug

SEQ ID NO: 905692 - RNA, 22 nt, Human
uggaaggcugugauuacugugc

SEQ ID NO: 905693 - RNA, 22 nt, Human
ugacagaacagguugggagcaa

SEQ ID NO: 905694 - RNA, 22 nt, Human
gugugugugcauauaacauaua

SEQ ID NO: 905695 - RNA, 22 nt, Human
cucuuucucgccgcccgcaguc

SEQ ID NO: 905696 - RNA, 22 nt, Human
gugcaaugucugugauaugaaa

SEQ ID NO: 905697 - RNA, 19 nt, Human
gaggcaaggaguuuaagcc

SEQ ID NO: 905698 - RNA, 22 nt, Human
ggccuggcccucccggguucaa

SEQ ID NO: 905699 - RNA, 22 nt, Human
ggcuggcucuuaccgacagcgu

SEQ ID NO: 905700 - RNA, 22 nt, Human
uggcagcacauugacccgggcu

SEQ ID NO: 905701 - RNA, 21 nt, Human
uccugggagucugagauccug

SEQ ID NO: 905702 - RNA, 22 nt, Human
gucuccugagccuugacugcaa

SEQ ID NO: 905703 - RNA, 22 nt, Human
ggauuuccucuugacucuaaag

SEQ ID NO: 905704 - RNA, 22 nt, Human
ugucaccagcugcuccucagga

SEQ ID NO: 905705 - RNA, 22 nt, Human
ggggcugcucccaccccugagg

SEQ ID NO: 905706 - RNA, 18 nt, Human
cuuccucuucuggagaaa

SEQ ID NO: 905707 - RNA, 22 nt, Human
ggaguuccagaaucugcuuuuu

SEQ ID NO: 905708 - RNA, 22 nt, Human
ggcagagcuaguggcuucucuu

SEQ ID NO: 905709 - RNA, 23 nt, Human
agagccuuuucacacuucaaugu

SEQ ID NO: 905710 - RNA, 22 nt, Human
ucauacauaaauaagaguuuag

SEQ ID NO: 905711 - RNA, 19 nt, Human
acaugcaaggcaccugcag

SEQ ID NO: 905712 - RNA, 22 nt, Human
ggagagggggcucccugcuugg

SEQ ID NO: 905713 - RNA, 22 nt, Human
aaagaggcucaaggugggccag

SEQ ID NO: 905714 - RNA, 22 nt, Human
cagcugagaagugauagcugca

SEQ ID NO: 905715 - RNA, 22 nt, Human
agcugcagcuuccuaguccagc

SEQ ID NO: 905716 - RNA, 23 nt, Human
cuggcccuggcucugugaucaug

SEQ ID NO: 905717 - RNA, 22 nt, Human
aacauuuuuaagaccaagugcu

SEQ ID NO: 905718 - RNA, 22 nt, Human
acacacaugccuuuccuaagua

SEQ ID NO: 905719 - RNA, 22 nt, Human
augcauauugauuauagauuca

SEQ ID NO: 905720 - RNA, 22 nt, Human
caugccaggacucuggaggcuu

SEQ ID NO: 905721 - RNA, 22 nt, Human
aauucugaaagauuccuuauuc

SEQ ID NO: 905722 - RNA, 22 nt, Human
aauacugcccccacucugccca

SEQ ID NO: 905723 - RNA, 22 nt, Human
auauaguaagcagucuguaaau

SEQ ID NO: 905724 - RNA, 22 nt, Human
ucuguucauacagaguauagua

SEQ ID NO: 905725 - RNA, 22 nt, Human
augacauuuauacagugagcuu

SEQ ID NO: 905726 - RNA, 22 nt, Human
aaccaggaauugcagggcugca

SEQ ID NO: 905727 - RNA, 22 nt, Human
cugggcugucaguuuuguuuua

SEQ ID NO: 905728 - RNA, 22 nt, Human
auucuagccaaccaucugagau

SEQ ID NO: 905729 - RNA, 22 nt, Human
acagaagaaguucaaggugaag

SEQ ID NO: 905730 - RNA, 22 nt, Human
ucaugacaacuugcacaguuuu

SEQ ID NO: 905731 - RNA, 22 nt, Human
aaacaaauuucaagcugugaca

SEQ ID NO: 905732 - RNA, 22 nt, Human
aaauaaagguccacuuuagggc

SEQ ID NO: 905733 - RNA, 22 nt, Human
ugugcgugauggaccgggccug

SEQ ID NO: 905734 - RNA, 21 nt, Human
uggaaugaggcugagcagugc

SEQ ID NO: 905735 - RNA, 22 nt, Human
gcugguccacucccuggaggcu

SEQ ID NO: 905736 - RNA, 22 nt, Human
ugaggcacuccaggaugcuguu

SEQ ID NO: 905737 - RNA, 22 nt, Human
ugauggggaauuaauuaauggg

SEQ ID NO: 905738 - RNA, 22 nt, Human
gcccugcccugagccguagacc

SEQ ID NO: 905739 - RNA, 22 nt, Human
ugcaggggcuugucugggccug

SEQ ID NO: 905740 - RNA, 22 nt, Human
cacugaguucccugacauuuca

SEQ ID NO: 905741 - RNA, 19 nt, Human
ucagcuggcaggccuccuc

SEQ ID NO: 905742 - RNA, 22 nt, Human
uucauucuuugaaucugaggua

SEQ ID NO: 905743 - RNA, 22 nt, Human
gggauaggagauugggaguguu

SEQ ID NO: 905744 - RNA, 20 nt, Human
agaaggcuccuuuugccaag

SEQ ID NO: 905745 - RNA, 22 nt, Human
gugagugccaggugaaguaugu

SEQ ID NO: 905746 - RNA, 22 nt, Human
acagcagcuaaaggugucuccu

SEQ ID NO: 905747 - RNA, 22 nt, Human
gugacaauauuagcucaggggc

SEQ ID NO: 905748 - RNA, 22 nt, Human
cagcuguugacugguacaugaa

SEQ ID NO: 905749 - RNA, 17 nt, Human
uucugcaugugaagaug

SEQ ID NO: 905750 - RNA, 22 nt, Human
caaaguauauuucauagucuca

SEQ ID NO: 905751 - RNA, 22 nt, Human
cucugauuuccuuauucuguca

SEQ ID NO: 905752 - RNA, 22 nt, Human
uccagcuggggacaugggcuuc

SEQ ID NO: 905753 - RNA, 22 nt, Human
ucugugcaagaccaacuuucaa

SEQ ID NO: 905754 - RNA, 22 nt, Human
ggcgccagcacugcagcgccuc

SEQ ID NO: 905755 - RNA, 22 nt, Human
ugaggccagccacagccacccu

SEQ ID NO: 905756 - RNA, 22 nt, Human
uucucucugagagcaucuggaa

SEQ ID NO: 905757 - RNA, 22 nt, Human
gcagggacaccuuugugaagcu

SEQ ID NO: 905758 - RNA, 22 nt, Human
ugggcaggugcuauuuuccaug

SEQ ID NO: 905759 - RNA, 18 nt, Human
acacugcagcagucugcu

SEQ ID NO: 905760 - RNA, 22 nt, Human
caacaaguggguacuuuacagg

SEQ ID NO: 905761 - RNA, 22 nt, Human
ccugagcaucagcgccuccuua

SEQ ID NO: 905762 - RNA, 19 nt, Human
ggcuccuggggcucagccc

SEQ ID NO: 905763 - RNA, 22 nt, Human
ccaugugcuugcucuggcaccu

SEQ ID NO: 905764 - RNA, 22 nt, Human
ccaaggaggccccaggucagcu

SEQ ID NO: 905765 - RNA, 22 nt, Human
acuuaucaguugucucuaaugu

SEQ ID NO: 905766 - RNA, 19 nt, Human
aucuagauuauugagaagg

SEQ ID NO: 905767 - RNA, 22 nt, Human
aacuuaaacaagcucccaaguu

SEQ ID NO: 905768 - RNA, 19 nt, Human
ggacacccuaucaauaccu

SEQ ID NO: 905769 - RNA, 22 nt, Human
gagcuuggugaugccuccuggu

SEQ ID NO: 905770 - RNA, 22 nt, Human
ucaguguaaguuauguagaugu

SEQ ID NO: 905771 - RNA, 22 nt, Human
auacagguggaacuaaauaaau

SEQ ID NO: 905772 - RNA, 22 nt, Human
aguguucagugauugucaaccg

SEQ ID NO: 905773 - RNA, 22 nt, Human
uacauugaaaucaauggaugug

SEQ ID NO: 905774 - RNA, 22 nt, Human
auaaaaucagaguuggauugga

SEQ ID NO: 905775 - RNA, 22 nt, Human
auuuucauuuugcagggugaga

SEQ ID NO: 905776 - RNA, 22 nt, Human
ggggaaggaaaguuauuagcag

SEQ ID NO: 905777 - RNA, 22 nt, Human
ugcagugguugagagcccagac

SEQ ID NO: 905778 - RNA, 22 nt, Human
augugcucacccuauuuaugga

SEQ ID NO: 905779 - RNA, 22 nt, Human
cugaugaccuuggcaagucaca

SEQ ID NO: 905780 - RNA, 22 nt, Human
gaugucuuucugugugccuaga

SEQ ID NO: 905781 - RNA, 22 nt, Human
augagacuugagggccucaagu

SEQ ID NO: 905782 - RNA, 22 nt, Human
ucauuucacuucucuagggaga

SEQ ID NO: 905783 - RNA, 22 nt, Human
guggcagguuauaagcaucuca

SEQ ID NO: 905784 - RNA, 22 nt, Human
augcauggucugaagucaaccu

SEQ ID NO: 905785 - RNA, 22 nt, Human
uaagagcauuguaaaauaaucu

SEQ ID NO: 905786 - RNA, 22 nt, Human
uuggauacagaugaaaggaagg

SEQ ID NO: 905787 - RNA, 22 nt, Human
aggcuggagcaagggggcauau

SEQ ID NO: 905788 - RNA, 22 nt, Human
auugcuucaacuguucaauggg

SEQ ID NO: 905789 - RNA, 22 nt, Human
ugccuccauguuucagcaucua

SEQ ID NO: 905790 - RNA, 22 nt, Human
aggccagccucaggcagggacc

SEQ ID NO: 905791 - RNA, 22 nt, Human
acaguguucacuaagguuagcu

SEQ ID NO: 905792 - RNA, 22 nt, Human
uaagcauaagauacaugagaca

SEQ ID NO: 905793 - RNA, 22 nt, Human
aaggagcgcuuagggggcagaa

SEQ ID NO: 905794 - RNA, 22 nt, Human
ggcagucuuucccuugagcucu

SEQ ID NO: 905795 - RNA, 19 nt, Human
cuucuagaccuuauaccac

SEQ ID NO: 905796 - RNA, 22 nt, Human
uuugggaacucuaucauggaaa

SEQ ID NO: 905797 - RNA, 23 nt, Human
uugcacaguguauacacauauuu

SEQ ID NO: 905798 - RNA, 22 nt, Human
auucaaguaaacacugaaggaa

SEQ ID NO: 905799 - RNA, 19 nt, Human
acauggcaucccaggaggu

SEQ ID NO: 905800 - RNA, 22 nt, Human
uggccuccccuaacagccucuu

SEQ ID NO: 905801 - RNA, 22 nt, Human
guguuauuugagugggagcgug

SEQ ID NO: 905802 - RNA, 23 nt, Human
aagagcagggaauauuuauuugc

SEQ ID NO: 905803 - RNA, 22 nt, Human
acccugucuucccugggcauca

SEQ ID NO: 905804 - RNA, 22 nt, Human
cacagcuucaguuucugacuug

SEQ ID NO: 905805 - RNA, 22 nt, Human
uguuaacuaauggucuaacauu

SEQ ID NO: 905806 - RNA, 17 nt, Human
cccuuagagcaaaagau

SEQ ID NO: 905807 - RNA, 22 nt, Human
cuucauguucuuggugaaaggc

SEQ ID NO: 905808 - RNA, 23 nt, Human
uggucccugagagcuggggaggg

SEQ ID NO: 905809 - RNA, 22 nt, Human
cuuuucuucucacggcugucag

SEQ ID NO: 905810 - RNA, 22 nt, Human
aggugaguuacaggaggagguc

SEQ ID NO: 905811 - RNA, 22 nt, Human
ccacggccacccgcucaugggc

SEQ ID NO: 905812 - RNA, 22 nt, Human
ggcauagauuucuuuagguuua

SEQ ID NO: 905813 - RNA, 22 nt, Human
augguauucucagcaccuagca

SEQ ID NO: 905814 - RNA, 22 nt, Human
aaagaugaccguaugucagagc

SEQ ID NO: 905815 - RNA, 22 nt, Human
uaauacuuugaaugagagcuaa

SEQ ID NO: 905816 - RNA, 22 nt, Human
cauguaucccuaauuguguuaa

SEQ ID NO: 905817 - RNA, 22 nt, Human
gcugccaggggcagcugucuca

SEQ ID NO: 905818 - RNA, 22 nt, Human
aaucuggagagucaucucugac

SEQ ID NO: 905819 - RNA, 22 nt, Human
gugggcaggaggcccugcccug

SEQ ID NO: 905820 - RNA, 22 nt, Human
cuuuagaaggguaacggaauua

SEQ ID NO: 905821 - RNA, 22 nt, Human
uuugcaaacggcccugaguccc

SEQ ID NO: 905822 - RNA, 22 nt, Human
aacaucuguguuugaaucucaa

SEQ ID NO: 905823 - RNA, 22 nt, Human
agugacagcugggaaggugaaa

SEQ ID NO: 905824 - RNA, 22 nt, Human
cuuuuaaugagcauugcugucu

SEQ ID NO: 905825 - RNA, 20 nt, Human
uuugcgaggccaaggcgggc

SEQ ID NO: 905826 - RNA, 22 nt, Human
uuauuauugugaccugagaaug

SEQ ID NO: 905827 - RNA, 22 nt, Human
aaaugauguggagugaaauugu

SEQ ID NO: 905828 - RNA, 22 nt, Human
ugugggaaugcugaugggaucu

SEQ ID NO: 905829 - RNA, 22 nt, Human
aaacauagauaauagauagaug

SEQ ID NO: 905830 - RNA, 22 nt, Human
guggugcaggaagcaucuggcu

SEQ ID NO: 905831 - RNA, 22 nt, Human
agggagcagggcuccuuugggu

SEQ ID NO: 905832 - RNA, 22 nt, Human
ucagagauggaguuagcaguga

SEQ ID NO: 905833 - RNA, 22 nt, Human
uguucuggagauaagagguaga

SEQ ID NO: 905834 - RNA, 22 nt, Human
caucaagucaucaaagaauuca

SEQ ID NO: 905835 - RNA, 22 nt, Human
guacacauagguuacugauuaa

SEQ ID NO: 905836 - RNA, 22 nt, Human
cugcagcuccucucugugcccc

SEQ ID NO: 905837 - RNA, 22 nt, Human
caggcagaggaagucugggucu

SEQ ID NO: 905838 - RNA, 22 nt, Human
aaggacagaaacagauugcugg

SEQ ID NO: 905839 - RNA, 22 nt, Human
uggaaccuggccugagcuacca

SEQ ID NO: 905840 - RNA, 22 nt, Human
ucuuagaaguucauguuccagc

SEQ ID NO: 905841 - RNA, 22 nt, Human
gaggagcacaugaggcugaggg

SEQ ID NO: 905842 - RNA, 22 nt, Human
ugccaggcccucccacagauua

SEQ ID NO: 905843 - RNA, 22 nt, Human
uggccagccauaaaagaaccca

SEQ ID NO: 905844 - RNA, 22 nt, Human
auggacagguggauagguggau

SEQ ID NO: 905845 - RNA, 22 nt, Human
caggaagggggauccuuggaag

SEQ ID NO: 905846 - RNA, 22 nt, Human
aaaugcuguaacugauauucug

SEQ ID NO: 905847 - RNA, 22 nt, Human
uccuggggaggucgaggcugag

SEQ ID NO: 905848 - RNA, 22 nt, Human
aauauauagaaguacccguugu

SEQ ID NO: 905849 - RNA, 22 nt, Human
uugugaguagugccgcaauaaa

SEQ ID NO: 905850 - RNA, 22 nt, Human
gccugggaaagaguagggaaau

SEQ ID NO: 905851 - RNA, 22 nt, Human
cacuguaauggaauuuucuuua

SEQ ID NO: 905852 - RNA, 22 nt, Human
uuccacaauguaugaauaagau

SEQ ID NO: 905853 - RNA, 22 nt, Human
gagagggccgggggccagcucc

SEQ ID NO: 905854 - RNA, 22 nt, Human
agcacagagagcucuagguaaa

SEQ ID NO: 905855 - RNA, 22 nt, Human
acagaguacauucagagacuau

SEQ ID NO: 905856 - RNA, 22 nt, Human
ugggcugcggauaggccucgga

SEQ ID NO: 905857 - RNA, 22 nt, Human
augucacagcaggaguauucuu

SEQ ID NO: 905858 - RNA, 22 nt, Human
uguacacaaccuacagucugcu

SEQ ID NO: 905859 - RNA, 22 nt, Human
acagagucucaaaccuacaaag

SEQ ID NO: 905860 - RNA, 22 nt, Human
agcauuuaguuaguaaauguuu

SEQ ID NO: 905861 - RNA, 22 nt, Human
agcucugggguggagcccagga

SEQ ID NO: 905862 - RNA, 22 nt, Human
guggaagaggcaagauagcucu

SEQ ID NO: 905863 - RNA, 22 nt, Human
gagaggcaggcgcugcaauggu

SEQ ID NO: 905864 - RNA, 22 nt, Human
cccaggaccgcgcggcugagcg

SEQ ID NO: 905865 - RNA, 22 nt, Human
guggcugacaaccacuggagga

SEQ ID NO: 905866 - RNA, 22 nt, Human
ucacagagagguuaagcaguug

SEQ ID NO: 905867 - RNA, 22 nt, Human
ccuuuggcccugagagaugauu

SEQ ID NO: 905868 - RNA, 22 nt, Human
cuggcaggagcuguggccguag

SEQ ID NO: 905869 - RNA, 22 nt, Human
uaaguauuggccuauagcuaga

SEQ ID NO: 905870 - RNA, 22 nt, Human
cacagagagcuacgugcagcgu

SEQ ID NO: 905871 - RNA, 22 nt, Human
aauuauauugaaguugaauguc

SEQ ID NO: 905872 - RNA, 22 nt, Human
ggccucugcuuaugcugaugac

SEQ ID NO: 905873 - RNA, 22 nt, Human
cugagcaggacagugggagacc

SEQ ID NO: 905874 - RNA, 22 nt, Human
aaguacuaaggcuauuaugaug

SEQ ID NO: 905875 - RNA, 22 nt, Human
agcccuccaucugugcucaggc

SEQ ID NO: 905876 - RNA, 22 nt, Human
aaaguguaggcuucaaagaggg

SEQ ID NO: 905877 - RNA, 22 nt, Human
acagaggccccgugggagagcc

SEQ ID NO: 905878 - RNA, 22 nt, Human
cucacaggucaugugguggcuu

SEQ ID NO: 905879 - RNA, 22 nt, Human
ugauuagauugagucaaccuug

SEQ ID NO: 905880 - RNA, 18 nt, Human
ugaacacaguacaauucc

SEQ ID NO: 905881 - RNA, 22 nt, Human
ggaaaguggugguggaaagagg

SEQ ID NO: 905882 - RNA, 17 nt, Human
gcugagaaggggaagag

SEQ ID NO: 905883 - RNA, 22 nt, Human
auacuucuagaaauacuaugca

SEQ ID NO: 905884 - RNA, 22 nt, Human
gcaccugcuggaaucagucugu

SEQ ID NO: 905885 - RNA, 22 nt, Human
cccaguuguugccggcucugga

SEQ ID NO: 905886 - RNA, 22 nt, Human
uauuucagucacuucuucucug

SEQ ID NO: 905887 - RNA, 22 nt, Human
gccugggauuguguaagugaau

SEQ ID NO: 905888 - RNA, 22 nt, Human
gacuccagaaucuggacggucc

SEQ ID NO: 905889 - RNA, 22 nt, Human
uguuccugaaugccuggcuggc

SEQ ID NO: 905890 - RNA, 22 nt, Human
cagggugacaaguggcaaggag

SEQ ID NO: 905891 - RNA, 22 nt, Human
cccccaccguguuccugcucgg

SEQ ID NO: 905892 - RNA, 22 nt, Human
cauuccuauuaugucccuagug

SEQ ID NO: 905893 - RNA, 22 nt, Human
uuugcuaaugccucugaaauca

SEQ ID NO: 905894 - RNA, 22 nt, Human
uucccacacccauauugugauu

SEQ ID NO: 905895 - RNA, 22 nt, Human
gaguugaagaaauaguuuugau

SEQ ID NO: 905896 - RNA, 22 nt, Human
uacaucugauuuaccuacugaa

SEQ ID NO: 905897 - RNA, 22 nt, Human
caugugugaagacugcgggcca

SEQ ID NO: 905898 - RNA, 22 nt, Human
cauguuucugagaaaaguagga

SEQ ID NO: 905899 - RNA, 22 nt, Human
ggaggacaggggcugcagcaca

SEQ ID NO: 905900 - RNA, 22 nt, Human
ugagucacauccauuuuugugu

SEQ ID NO: 905901 - RNA, 22 nt, Human
ucuuuauggaaaaugaauggca

SEQ ID NO: 905902 - RNA, 22 nt, Human
ucugccugccagucugguccuc

SEQ ID NO: 905903 - RNA, 22 nt, Human
gauaccagacagggagggagaa

SEQ ID NO: 905904 - RNA, 22 nt, Human
augcuaaacuaugaucauuuuc

SEQ ID NO: 905905 - RNA, 22 nt, Human
agcaucuguuaagugccuucaa

SEQ ID NO: 905906 - RNA, 22 nt, Human
agucugugcuguuggugaggau

SEQ ID NO: 905907 - RNA, 22 nt, Human
uuacacacaauuagcauaguaa

SEQ ID NO: 905908 - RNA, 22 nt, Human
ugucuucuucauaaggagagug

SEQ ID NO: 905909 - RNA, 22 nt, Human
gucccagaaacauauugcuggu

SEQ ID NO: 905910 - RNA, 22 nt, Human
aaaugucuuugaguauuucugc

SEQ ID NO: 905911 - RNA, 22 nt, Human
gcgggcagggcacugguccccu

SEQ ID NO: 905912 - RNA, 22 nt, Human
ccaagagguugaggcugcagug

SEQ ID NO: 905913 - RNA, 22 nt, Human
acauggcacccagaucucaaaa

SEQ ID NO: 905914 - RNA, 22 nt, Human
gacagacauuuccugauccaau

SEQ ID NO: 905915 - RNA, 22 nt, Human
uucaucuggaauuuauguuaua

SEQ ID NO: 905916 - RNA, 22 nt, Human
uauguagacaggcugcuuuucc

SEQ ID NO: 905917 - RNA, 22 nt, Human
gcuggggagcaagaguagugag

SEQ ID NO: 905918 - RNA, 22 nt, Human
ucccaggaaggauucggcauuu

SEQ ID NO: 905919 - RNA, 22 nt, Human
gcauuacacauagacauucguu

SEQ ID NO: 905920 - RNA, 22 nt, Human
cuuucaugaacagacaaggaac

SEQ ID NO: 905921 - RNA, 22 nt, Human
auucugagacaauugccgucag

SEQ ID NO: 905922 - RNA, 22 nt, Human
aaguugaaucaguaacacaguu

SEQ ID NO: 905923 - RNA, 22 nt, Human
gcagcuguacuggcagcauugu

SEQ ID NO: 905924 - RNA, 22 nt, Human
aauguauuugauguauuagccu

SEQ ID NO: 905925 - RNA, 22 nt, Human
ucauuuuucucuuacacguaga

SEQ ID NO: 905926 - RNA, 22 nt, Human
cuccugggagucuuccuggaug

SEQ ID NO: 905927 - RNA, 22 nt, Human
ccagcugugccggggaccuggg

SEQ ID NO: 905928 - RNA, 21 nt, Human
uccaggggccagcacccaagc

SEQ ID NO: 905929 - RNA, 22 nt, Human
ccugagguggcugcagcacugc

SEQ ID NO: 905930 - RNA, 22 nt, Human
ugcagagugggagaggugcggg

SEQ ID NO: 905931 - RNA, 22 nt, Human
aggaggcaggaagucuauggga

SEQ ID NO: 905932 - RNA, 22 nt, Human
gcaggugggggucggugcaucu

SEQ ID NO: 905933 - RNA, 22 nt, Human
aagugcaggucucagcuacucu

SEQ ID NO: 905934 - RNA, 22 nt, Human
cuaacuuugucaucuucccuuu

SEQ ID NO: 905935 - RNA, 22 nt, Human
ugggccacuugaaaguggaugu

SEQ ID NO: 905936 - RNA, 22 nt, Human
agacagcauuucccggaaccgc

SEQ ID NO: 905937 - RNA, 22 nt, Human
cugccugaguggaggucgaggg

SEQ ID NO: 905938 - RNA, 22 nt, Human
acacagaguccuuacugaggua

SEQ ID NO: 905939 - RNA, 22 nt, Human
caaaauuagaaaugcagcuguu

SEQ ID NO: 905940 - RNA, 22 nt, Human
guuaaauaaccucauguccguu

SEQ ID NO: 905941 - RNA, 22 nt, Human
auuucccaggacuagaaauaua

SEQ ID NO: 905942 - RNA, 22 nt, Human
uggcagagucaucacaucugga

SEQ ID NO: 905943 - RNA, 22 nt, Human
accuggacaccugcugucaucu

SEQ ID NO: 905944 - RNA, 22 nt, Human
guggccagaaccaggagaauga

SEQ ID NO: 905945 - RNA, 23 nt, Human
gcaggaguuccuggacuccagga

SEQ ID NO: 905946 - RNA, 22 nt, Human
agcuaagacuuagugacuuagu

SEQ ID NO: 905947 - RNA, 22 nt, Human
aaggaugucagucauuuuggau

SEQ ID NO: 905948 - RNA, 22 nt, Human
cucuggccugcagauccaugcu

SEQ ID NO: 905949 - RNA, 22 nt, Human
ucagccaggcacaauggcagcu

SEQ ID NO: 905950 - RNA, 22 nt, Human
uggaaggcuuugcuguccuugc

SEQ ID NO: 905951 - RNA, 22 nt, Human
uagaaagacaaugggaagugcu

SEQ ID NO: 905952 - RNA, 22 nt, Human
ggagcugaugacgucaccaugg

SEQ ID NO: 905953 - RNA, 22 nt, Human
cagacagaccugcaagggcaca

SEQ ID NO: 905954 - RNA, 22 nt, Human
gcccaaagccagugugcucucc

SEQ ID NO: 905955 - RNA, 22 nt, Human
uggcaggugccaugggcucaga

SEQ ID NO: 905956 - RNA, 18 nt, Human
cucuagaaugggagauuu

SEQ ID NO: 905957 - RNA, 22 nt, Human
aguagacaugagcaaugauaau

SEQ ID NO: 905958 - RNA, 22 nt, Human
gaggauguaaaauagacaaaau

SEQ ID NO: 905959 - RNA, 22 nt, Human
aggcccuggcacugccugggag

SEQ ID NO: 905960 - RNA, 22 nt, Human
ccaauguuuauuuuccugcugc

SEQ ID NO: 905961 - RNA, 20 nt, Human
ugacaguuucauaugguuca

SEQ ID NO: 905962 - RNA, 22 nt, Human
aaagaucuaugggcauuuagcu

SEQ ID NO: 905963 - RNA, 22 nt, Human
aagagcagauuccuaguggagc

SEQ ID NO: 905964 - RNA, 22 nt, Human
aaguaucucaaaaacaguaauc

SEQ ID NO: 905965 - RNA, 22 nt, Human
ggcugccuccacugcuuguccc

SEQ ID NO: 905966 - RNA, 22 nt, Human
ccuuuccccgcgggaggugcca

SEQ ID NO: 905967 - RNA, 22 nt, Human
gucuagaaauguucucaggggu

SEQ ID NO: 905968 - RNA, 19 nt, Human
ccauuguaaagaaaaaugu

SEQ ID NO: 905969 - RNA, 22 nt, Human
caugcagaggugccacgaggcu

SEQ ID NO: 905970 - RNA, 22 nt, Human
gcauacaguccuuguauucuuc

SEQ ID NO: 905971 - RNA, 22 nt, Human
aguacagcaccaugagcacagg

SEQ ID NO: 905972 - RNA, 22 nt, Human
uaguauuuaaucacuuuugucu

SEQ ID NO: 905973 - RNA, 22 nt, Human
uccuuccugcaggccaaguccu

SEQ ID NO: 905974 - RNA, 22 nt, Human
ugagcagcuacuguguucaggg

SEQ ID NO: 905975 - RNA, 22 nt, Human
ucccagccacaguuuccaccug

SEQ ID NO: 905976 - RNA, 22 nt, Human
cugcucugugcacuuguucagg

SEQ ID NO: 905977 - RNA, 22 nt, Human
aaaacguuaugcauuguuuauc

SEQ ID NO: 905978 - RNA, 22 nt, Human
uuucacuguguuggucaggccg

SEQ ID NO: 905979 - RNA, 22 nt, Human
gguucucuuccuccugacugag

SEQ ID NO: 905980 - RNA, 22 nt, Human
aggcacaaaagcagggugacca

SEQ ID NO: 905981 - RNA, 22 nt, Human
uuucauagucaaguguguauga

SEQ ID NO: 905982 - RNA, 22 nt, Human
gcugggcucagaccuagugaac

SEQ ID NO: 905983 - RNA, 22 nt, Human
ucuucaauauguguuuaauauu

SEQ ID NO: 905984 - RNA, 22 nt, Human
acugccuggccuggccucacug

SEQ ID NO: 905985 - RNA, 22 nt, Human
gauuucuucauucauuagaugg

SEQ ID NO: 905986 - RNA, 22 nt, Human
uccacagaauggaauucuccgc

SEQ ID NO: 905987 - RNA, 22 nt, Human
ggcaggcauuagagauucccag

SEQ ID NO: 905988 - RNA, 22 nt, Human
gagcaaggaugggucuauagua

SEQ ID NO: 905989 - RNA, 22 nt, Human
ucucacugauuugagaccaagg

SEQ ID NO: 905990 - RNA, 22 nt, Human
guuucuuagacagacauuaucu

SEQ ID NO: 905991 - RNA, 23 nt, Human
ggccauggagacuuagaaugggc

SEQ ID NO: 905992 - RNA, 22 nt, Human
gaaggaagcugucuggaugugu

SEQ ID NO: 905993 - RNA, 22 nt, Human
aaugguuuugucucaucaaugu

SEQ ID NO: 905994 - RNA, 22 nt, Human
gggaacagggccugagcugggg

SEQ ID NO: 905995 - RNA, 22 nt, Human
augagcaauuaggaagaaaaca

SEQ ID NO: 905996 - RNA, 22 nt, Human
uauuagcagccaacuuagcugu

SEQ ID NO: 905997 - RNA, 21 nt, Human
agagggagaguggcccuucca

SEQ ID NO: 905998 - RNA, 22 nt, Human
agccaucacuugagaaucuauu

SEQ ID NO: 905999 - RNA, 22 nt, Human
caaggcuuaucagccaggagcc

SEQ ID NO: 906000 - RNA, 22 nt, Human
ugcccugcaugcagggagcugu

SEQ ID NO: 906001 - RNA, 22 nt, Human
aggagcaaaugaugagacagca

SEQ ID NO: 906002 - RNA, 22 nt, Human
ucacaguuacuccuucagauga

SEQ ID NO: 906003 - RNA, 22 nt, Human
gagcaaggaggguggggccuuu

SEQ ID NO: 906004 - RNA, 22 nt, Human
cugggcaguaugaauauucaaa

SEQ ID NO: 906005 - RNA, 22 nt, Human
aggaagugaaagggaaggaguu

SEQ ID NO: 906006 - RNA, 22 nt, Human
gacuuucucuccucccaggugu

SEQ ID NO: 906007 - RNA, 22 nt, Human
uuggcuucuuuagucaguuugg

SEQ ID NO: 906008 - RNA, 22 nt, Human
agauacauugcacgaugcagau

SEQ ID NO: 906009 - RNA, 22 nt, Human
agaagccacuggagguugagau

SEQ ID NO: 906010 - RNA, 22 nt, Human
uggcaauucccuuggucaacag

SEQ ID NO: 906011 - RNA, 22 nt, Human
aggccccaaagcagugcaagua

SEQ ID NO: 906012 - RNA, 22 nt, Human
acaggacagucuaguaacagua

SEQ ID NO: 906013 - RNA, 22 nt, Human
uucauuuauucagcagguauuu

SEQ ID NO: 906014 - RNA, 20 nt, Human
agggaagugcgccaucaggg

SEQ ID NO: 906015 - RNA, 22 nt, Human
uccagccuucucaaggcuggcu

SEQ ID NO: 906016 - RNA, 22 nt, Human
agcagggcuugccgcuuguccu

SEQ ID NO: 906017 - RNA, 22 nt, Human
cucucuggcccauccuguugcc

SEQ ID NO: 906018 - RNA, 22 nt, Human
gagggccauucugaggggguga

SEQ ID NO: 906019 - RNA, 22 nt, Human
auuaguuuggugcaaaaguaau

SEQ ID NO: 906020 - RNA, 22 nt, Human
gggcuccagccaggugucccca

SEQ ID NO: 906021 - RNA, 21 nt, Human
acagagaaagagcagccuccu

SEQ ID NO: 906022 - RNA, 22 nt, Human
gcacugaaugcuuuuacuguaa

SEQ ID NO: 906023 - RNA, 22 nt, Human
aaagaacaaauuagcuguuuua

SEQ ID NO: 906024 - RNA, 22 nt, Human
gagaaagauggaaucuuacagg

SEQ ID NO: 906025 - RNA, 22 nt, Human
agggaaauaaucuauucugagg

SEQ ID NO: 906026 - RNA, 22 nt, Human
ucaggcuuauagguagugguua

SEQ ID NO: 906027 - RNA, 22 nt, Human
aggugucugggcuuuggaguca

SEQ ID NO: 906028 - RNA, 22 nt, Human
gagggcucugucuggaagggaa

SEQ ID NO: 906029 - RNA, 22 nt, Human
aagugaucuaaagaauauugaa

SEQ ID NO: 906030 - RNA, 22 nt, Human
accccucagcucuucgugcccc

SEQ ID NO: 906031 - RNA, 22 nt, Human
uucuguaugcucuggguccaga

SEQ ID NO: 906032 - RNA, 22 nt, Human
ggauuuuagaguaccuaagugu

SEQ ID NO: 906033 - RNA, 22 nt, Human
ugaaucaauaguugcaaguauu

SEQ ID NO: 906034 - RNA, 22 nt, Human
auugauuugaacaaagauauua

SEQ ID NO: 906035 - RNA, 22 nt, Human
cugcaagcaaaucaacucuuug

SEQ ID NO: 906036 - RNA, 22 nt, Human
agggucaccaguucauaggcac

SEQ ID NO: 906037 - RNA, 22 nt, Human
ucucuucuuguguuuuccugcc

SEQ ID NO: 906038 - RNA, 22 nt, Human
gcggucggcagaggggcucugc

SEQ ID NO: 906039 - RNA, 22 nt, Human
ucucuggaagcgcagaucuguu

SEQ ID NO: 906040 - RNA, 22 nt, Human
gagcccuguagcaagucauguc

SEQ ID NO: 906041 - RNA, 22 nt, Human
cugggagauugcuagagaugca

SEQ ID NO: 906042 - RNA, 22 nt, Human
cuguuaaaauguggucuuaaaa

SEQ ID NO: 906043 - RNA, 22 nt, Human
cugggagaucuccugagggcag

SEQ ID NO: 906044 - RNA, 22 nt, Human
uucugcagugaaugacucaaua

SEQ ID NO: 906045 - RNA, 22 nt, Human
ucagggcauggcugcacuuggc

SEQ ID NO: 906046 - RNA, 20 nt, Human
gugccuggagaagaggcugu

SEQ ID NO: 906047 - RNA, 22 nt, Human
gagguuccagacagcuuaggga

SEQ ID NO: 906048 - RNA, 22 nt, Human
gucuauaagcaggggaaaacuu

SEQ ID NO: 906049 - RNA, 22 nt, Human
aacauuuguuucguuaugugaa

SEQ ID NO: 906050 - RNA, 22 nt, Human
aggccagcccugggcugagaga

SEQ ID NO: 906051 - RNA, 22 nt, Human
ggguaaugaacagguggcagag

SEQ ID NO: 906052 - RNA, 22 nt, Human
cugggagaggcugcuccgcucu

SEQ ID NO: 906053 - RNA, 22 nt, Human
aaaggcaguggguauguggauc

SEQ ID NO: 906054 - RNA, 22 nt, Human
gaaggccugugguagugagacg

SEQ ID NO: 906055 - RNA, 22 nt, Human
gugugagggacagagaaagggg

SEQ ID NO: 906056 - RNA, 22 nt, Human
ugcagcugauaauuacauguuc

SEQ ID NO: 906057 - RNA, 22 nt, Human
uugucaucauguuuuccaaagg

SEQ ID NO: 906058 - RNA, 22 nt, Human
ccagcugcugugaggaccacag

SEQ ID NO: 906059 - RNA, 22 nt, Human
uacaguuucccagcagaugcaa

SEQ ID NO: 906060 - RNA, 22 nt, Human
aaagucauuuagccuuaucucc

SEQ ID NO: 906061 - RNA, 22 nt, Human
cacuggauaaaaauuuggaagu

SEQ ID NO: 906062 - RNA, 22 nt, Human
auggacagauuaacacaguaga

SEQ ID NO: 906063 - RNA, 22 nt, Human
guagucuuggauuuuaaaaagu

SEQ ID NO: 906064 - RNA, 22 nt, Human
gcugggcaagugccuuggguuu

SEQ ID NO: 906065 - RNA, 22 nt, Human
ugaggcucagagaagugcuguu

SEQ ID NO: 906066 - RNA, 22 nt, Human
ugucuaaugaauuaauuaauua

SEQ ID NO: 906067 - RNA, 22 nt, Human
uucacaguggcugugccauuug

SEQ ID NO: 906068 - RNA, 22 nt, Human
ggaggccaucuggcuggaggcu

SEQ ID NO: 906069 - RNA, 22 nt, Human
auagauauuugaguuguuucca

SEQ ID NO: 906070 - RNA, 22 nt, Human
cacugccuccccaggcuccaca

SEQ ID NO: 906071 - RNA, 22 nt, Human
uacaguaacauguuguacaagc

SEQ ID NO: 906072 - RNA, 22 nt, Human
ggcagcuugcccuggucucaac

SEQ ID NO: 906073 - RNA, 22 nt, Human
cuucuuuaauguauacaaaaga

SEQ ID NO: 906074 - RNA, 22 nt, Human
guccagagccggaagagugaca

SEQ ID NO: 906075 - RNA, 22 nt, Human
aagcauuugugaaauucagaug

SEQ ID NO: 906076 - RNA, 22 nt, Human
acaugggaucaaugaggcaggc

SEQ ID NO: 906077 - RNA, 22 nt, Human
aaagcuuagcauuuucaaaaug

SEQ ID NO: 906078 - RNA, 22 nt, Human
cagcagcucccauccgcugagc

SEQ ID NO: 906079 - RNA, 22 nt, Human
aaaauuuccaccaucuuugugu

SEQ ID NO: 906080 - RNA, 22 nt, Human
uguaaugaaaaggaggaaauag

SEQ ID NO: 906081 - RNA, 22 nt, Human
uccauuauacuucugauucaaa

SEQ ID NO: 906082 - RNA, 22 nt, Human
gggcaguugauggaggucugga

SEQ ID NO: 906083 - RNA, 22 nt, Human
gccucacugcagccccaggaag

SEQ ID NO: 906084 - RNA, 22 nt, Human
uguugcaguaaaaauggagagg

SEQ ID NO: 906085 - RNA, 22 nt, Human
uccagugaucuagggagcugga

SEQ ID NO: 906086 - RNA, 22 nt, Human
agcagggagaccaucucuuccu

SEQ ID NO: 906087 - RNA, 22 nt, Human
uucugucugauggugccagaac

SEQ ID NO: 906088 - RNA, 22 nt, Human
acccagcccagaaucuggggcc

SEQ ID NO: 906089 - RNA, 22 nt, Human
cagcuagggaguggcagagcuu

SEQ ID NO: 906090 - RNA, 22 nt, Human
uaggaacaaguuuccuugcugu

SEQ ID NO: 906091 - RNA, 22 nt, Human
ucuagcagguggcggccagcga

SEQ ID NO: 906092 - RNA, 22 nt, Human
uguguguagaaagggcccuggu

SEQ ID NO: 906093 - RNA, 22 nt, Human
cauuauugaugcaacagcccuu

SEQ ID NO: 906094 - RNA, 15 nt, Human
gccccaggaaucaaa

SEQ ID NO: 906095 - RNA, 22 nt, Human
ucagagaguuuucacuagggug

SEQ ID NO: 906096 - RNA, 22 nt, Human
ggaugggagcagaggacgacca

SEQ ID NO: 906097 - RNA, 22 nt, Human
agccagagaacagcaggaaaug

SEQ ID NO: 906098 - RNA, 18 nt, Human
gggaggccccagcaggag

SEQ ID NO: 906099 - RNA, 21 nt, Human
uccaggcuggaaggggcguug

SEQ ID NO: 906100 - RNA, 22 nt, Human
agggaggcaggaaaguugucug

SEQ ID NO: 906101 - RNA, 22 nt, Human
cagggcaggaauuugacauugc

SEQ ID NO: 906102 - RNA, 22 nt, Human
acagugucugacacauuguagc

SEQ ID NO: 906103 - RNA, 22 nt, Human
ucagugcagcggcagcagcucu

SEQ ID NO: 906104 - RNA, 22 nt, Human
ugggacagugugccuugcuccu

SEQ ID NO: 906105 - RNA, 22 nt, Human
caggccaggguugagaagagaa

SEQ ID NO: 906106 - RNA, 21 nt, Human
gaaaagcaagggaguagaaca

SEQ ID NO: 906107 - RNA, 22 nt, Human
aaaugucauauuuaaguaggaa

SEQ ID NO: 906108 - RNA, 22 nt, Human
acaguuuggcaaaugucccaca

SEQ ID NO: 906109 - RNA, 22 nt, Human
aauaagauugacacaaguaccu

SEQ ID NO: 906110 - RNA, 22 nt, Human
uuagcaacacccauuugugugc

SEQ ID NO: 906111 - RNA, 20 nt, Human
ucacacauaagugaacgcac

SEQ ID NO: 906112 - RNA, 22 nt, Human
guccugugaccugcauccugag

SEQ ID NO: 906113 - RNA, 22 nt, Human
cagagcauaauugacaugaggu

SEQ ID NO: 906114 - RNA, 22 nt, Human
cggcuucaugagaaaugacaga

SEQ ID NO: 906115 - RNA, 22 nt, Human
aaagcagggaaaucuauuugca

SEQ ID NO: 906116 - RNA, 22 nt, Human
cuaggcugcagaugcauggaau

SEQ ID NO: 906117 - RNA, 22 nt, Human
ucuagaaaguuuguacugauuu

SEQ ID NO: 906118 - RNA, 22 nt, Human
augagguauuagcaguaacuga

SEQ ID NO: 906119 - RNA, 22 nt, Human
uugaagaacauaauagcuacuu

SEQ ID NO: 906120 - RNA, 22 nt, Human
uuucaggaaacauuuaauggca

SEQ ID NO: 906121 - RNA, 22 nt, Human
uggcagcugaauggcuggaugg

SEQ ID NO: 906122 - RNA, 22 nt, Human
cacaugugcaaauacugaggcu

SEQ ID NO: 906123 - RNA, 22 nt, Human
ucagauuuuccagccuuucucu

SEQ ID NO: 906124 - RNA, 20 nt, Human
gccagaggccggcaggggcu

SEQ ID NO: 906125 - RNA, 22 nt, Human
uuuguacauuucacuccauugu

SEQ ID NO: 906126 - RNA, 22 nt, Human
uguucacaacgugcagguuugu

SEQ ID NO: 906127 - RNA, 22 nt, Human
cccugagcuaccuauguaagca

SEQ ID NO: 906128 - RNA, 22 nt, Human
cugugcccggcccagggcccug

SEQ ID NO: 906129 - RNA, 22 nt, Human
gagaacucagacgcaggucaug

SEQ ID NO: 906130 - RNA, 22 nt, Human
acccugcuuggccccacuucua

SEQ ID NO: 906131 - RNA, 18 nt, Human
aguguucucguuuuauaa

SEQ ID NO: 906132 - RNA, 23 nt, Human
cucagggauagaaaggaagacag

SEQ ID NO: 906133 - RNA, 22 nt, Human
agacauaagcgagcaucacagg

SEQ ID NO: 906134 - RNA, 23 nt, Human
gucucccauagcgcucccaggcu

SEQ ID NO: 906135 - RNA, 22 nt, Human
uuugaucuaugcgugguuuccc

SEQ ID NO: 906136 - RNA, 21 nt, Human
guuuacaaggcuuugcuccug

SEQ ID NO: 906137 - RNA, 22 nt, Human
uacagucagagugccuuucuaa

SEQ ID NO: 906138 - RNA, 22 nt, Human
gacagggcauggugcagaguuc

SEQ ID NO: 906139 - RNA, 22 nt, Human
uuguuuuaagccagucugccua

SEQ ID NO: 906140 - RNA, 22 nt, Human
auucagacugucuaaaugguuu

SEQ ID NO: 906141 - RNA, 19 nt, Human
ccauuucauauguauugug

SEQ ID NO: 906142 - RNA, 18 nt, Human
gagcagaggcucaacugg

SEQ ID NO: 906143 - RNA, 22 nt, Human
ugcaagggguuuaugcagauga

SEQ ID NO: 906144 - RNA, 22 nt, Human
ugguuagaugaggcugguuuca

SEQ ID NO: 906145 - RNA, 22 nt, Human
cuucugauuagcaaguuuguau

SEQ ID NO: 906146 - RNA, 21 nt, Human
aacuggcagaccaacuauggc

SEQ ID NO: 906147 - RNA, 22 nt, Human
cagagagagucugucccugaag

SEQ ID NO: 906148 - RNA, 18 nt, Human
ucagagguacagaaaagu

SEQ ID NO: 906149 - RNA, 22 nt, Human
ucugccugcaguguggcagggc

SEQ ID NO: 906150 - RNA, 22 nt, Human
gcuccaggauaauaaaguuguu

SEQ ID NO: 906151 - RNA, 22 nt, Human
ccagcucugcuugcccagucag

SEQ ID NO: 906152 - RNA, 22 nt, Human
gacaagcaggcuccugaagaaa

SEQ ID NO: 906153 - RNA, 17 nt, Human
aaacugaaaaauucacu

SEQ ID NO: 906154 - RNA, 22 nt, Human
gccuagggugcucagggacgag

SEQ ID NO: 906155 - RNA, 22 nt, Human
aagcuugauuguagucuagaca

SEQ ID NO: 906156 - RNA, 22 nt, Human
uccaaggucagcgagagucacu

SEQ ID NO: 906157 - RNA, 19 nt, Human
acacauguaacaguuuuuc

SEQ ID NO: 906158 - RNA, 22 nt, Human
guuaacaaccaaacagaaguuc

SEQ ID NO: 906159 - RNA, 22 nt, Human
uacaucauggcuucaugcugca

SEQ ID NO: 906160 - RNA, 22 nt, Human
ucuggggauaagacccagguau

SEQ ID NO: 906161 - RNA, 22 nt, Human
aguggcagagguugacugcagu

SEQ ID NO: 906162 - RNA, 22 nt, Human
caucugucugcuguuagcugca

SEQ ID NO: 906163 - RNA, 22 nt, Human
cauuuguucugauuucaaaagg

SEQ ID NO: 906164 - RNA, 22 nt, Human
aaagcagcaacagcuguuagaa

SEQ ID NO: 906165 - RNA, 22 nt, Human
aauacugaauuaguugagacaa

SEQ ID NO: 906166 - RNA, 23 nt, Human
ucugggcauaucuagucacaucg

SEQ ID NO: 906167 - RNA, 22 nt, Human
acauuuuuuagagucccacauu

SEQ ID NO: 906168 - RNA, 22 nt, Human
cacauuuaaaaaauccacgauc

SEQ ID NO: 906169 - RNA, 22 nt, Human
agggccaccucucuggguuccc

SEQ ID NO: 906170 - RNA, 22 nt, Human
gcuuuaggaaugaauaaaaauc

SEQ ID NO: 906171 - RNA, 22 nt, Human
uuuccuaaggcucauuuuaaaa

SEQ ID NO: 906172 - RNA, 22 nt, Human
uauaggaaguguagugcuugga

SEQ ID NO: 906173 - RNA, 22 nt, Human
cuggagcuggcccaggcuggcc

SEQ ID NO: 906174 - RNA, 22 nt, Human
gcugcugccgcggccgcuggga

SEQ ID NO: 906175 - RNA, 22 nt, Human
cugcuccacaccuccauuuccu

SEQ ID NO: 906176 - RNA, 22 nt, Human
uuuagugcuuugcuauucaugg

SEQ ID NO: 906177 - RNA, 22 nt, Human
cuaaaauuaccuaccaguuuag

SEQ ID NO: 906178 - RNA, 22 nt, Human
ugauggcugugcugauguuagg

SEQ ID NO: 906179 - RNA, 22 nt, Human
gggcugagggguaucucauggg

SEQ ID NO: 906180 - RNA, 22 nt, Human
ggugucaguugcucaucagagu

SEQ ID NO: 906181 - RNA, 22 nt, Human
acagagacaggcagacagucuu

SEQ ID NO: 906182 - RNA, 19 nt, Human
ccagcagguucauuucagg

SEQ ID NO: 906183 - RNA, 22 nt, Human
gggcaaaauacuuauaaaggcu

SEQ ID NO: 906184 - RNA, 22 nt, Human
gggcagcaucaggaggggcuuu

SEQ ID NO: 906185 - RNA, 22 nt, Human
ggcccugcugaguggaguggag

SEQ ID NO: 906186 - RNA, 22 nt, Human
agccacagagcaggagaccuuu

SEQ ID NO: 906187 - RNA, 22 nt, Human
cucugcugcaggaaggcgugca

SEQ ID NO: 906188 - RNA, 22 nt, Human
uaguucucuauucaaggaucaa

SEQ ID NO: 906189 - RNA, 22 nt, Human
ucuggaugacagaauggucaua

SEQ ID NO: 906190 - RNA, 22 nt, Human
aaucugaauauuuauguguauu

SEQ ID NO: 906191 - RNA, 22 nt, Human
ggacugggauucuggaucugcu

SEQ ID NO: 906192 - RNA, 17 nt, Human
uggcuucaggcugagca

SEQ ID NO: 906193 - RNA, 22 nt, Human
cugcauaucaaauuacuccugg

SEQ ID NO: 906194 - RNA, 22 nt, Human
cccugcagagccagcccugacc

SEQ ID NO: 906195 - RNA, 22 nt, Human
aguauauuuugauuguaugugu

SEQ ID NO: 906196 - RNA, 22 nt, Human
auggcuggcacuggccuggguu

SEQ ID NO: 906197 - RNA, 22 nt, Human
uggaggagugugauugucugcc

SEQ ID NO: 906198 - RNA, 22 nt, Human
ugagauaauuaaaucaaaaccu

SEQ ID NO: 906199 - RNA, 22 nt, Human
gaaaauagcagauagaccaaug

SEQ ID NO: 906200 - RNA, 22 nt, Human
gauguaaaaacuccuuucgaaa

SEQ ID NO: 906201 - RNA, 19 nt, Human
ggccagcacagggcucugu

SEQ ID NO: 906202 - RNA, 22 nt, Human
uuguaauuugcaaauguauugu

SEQ ID NO: 906203 - RNA, 18 nt, Human
ugacauuuccagagugua

SEQ ID NO: 906204 - RNA, 22 nt, Human
gagcagugguugaacagaggca

SEQ ID NO: 906205 - RNA, 22 nt, Human
cagauuucagcucauauauuau

SEQ ID NO: 906206 - RNA, 22 nt, Human
acaaaauagaguucuccccugg

SEQ ID NO: 906207 - RNA, 22 nt, Human
gggggcaggucuggaacuuuga

SEQ ID NO: 906208 - RNA, 23 nt, Human
uccugagaugagacagugcugcc

SEQ ID NO: 906209 - RNA, 22 nt, Human
gaguccaagcuagagccacuca

SEQ ID NO: 906210 - RNA, 22 nt, Human
guuuucuuugaaugcuucuaga

SEQ ID NO: 906211 - RNA, 22 nt, Human
gaggaggucuccuccgcagggg

SEQ ID NO: 906212 - RNA, 22 nt, Human
aucuguagucacugcacagcuc

SEQ ID NO: 906213 - RNA, 19 nt, Human
ucuguaacacucuagccuu

SEQ ID NO: 906214 - RNA, 22 nt, Human
gcugaggauugaagaguugcca

SEQ ID NO: 906215 - RNA, 22 nt, Human
agagcuguagcuuccuagagcc

SEQ ID NO: 906216 - RNA, 22 nt, Human
uuccuaacgccaguauuuucau

SEQ ID NO: 906217 - RNA, 22 nt, Human
aggccucaggaagguaaagaag

SEQ ID NO: 906218 - RNA, 22 nt, Human
agagaccagaauccagcugccu

SEQ ID NO: 906219 - RNA, 22 nt, Human
aguuuauucucuggucuuagua

SEQ ID NO: 906220 - RNA, 22 nt, Human
aaaugcaugagaaaguauucug

SEQ ID NO: 906221 - RNA, 22 nt, Human
uuuucaguaaugucuacauaau

SEQ ID NO: 906222 - RNA, 22 nt, Human
agcuggaugaauuuggaacacu

SEQ ID NO: 906223 - RNA, 22 nt, Human
uccaggcuggccucgcgugaca

SEQ ID NO: 906224 - RNA, 22 nt, Human
aggcuucauguguccuggguga

SEQ ID NO: 906225 - RNA, 22 nt, Human
cacagagauggccagggcacau

SEQ ID NO: 906226 - RNA, 22 nt, Human
cauaaguugcagagggugcauu

SEQ ID NO: 906227 - RNA, 23 nt, Human
uggaaucuucgauauugauucag

SEQ ID NO: 906228 - RNA, 22 nt, Human
aagucugagagaaacucucuca

SEQ ID NO: 906229 - RNA, 22 nt, Human
uauuccaaaaucccaaacugcc

SEQ ID NO: 906230 - RNA, 22 nt, Human
agauuuccucuuuuguaaagug

SEQ ID NO: 906231 - RNA, 22 nt, Human
cagagagggagcaguagucucu

SEQ ID NO: 906232 - RNA, 22 nt, Human
cuggcagcaguuaugaaacaau

SEQ ID NO: 906233 - RNA, 22 nt, Human
ucugggagcagaugaugguaua

SEQ ID NO: 906234 - RNA, 22 nt, Human
aaggggaaaaaguguuaggagu

SEQ ID NO: 906235 - RNA, 22 nt, Human
uuggaauccugccucugcuacu

SEQ ID NO: 906236 - RNA, 22 nt, Human
gaaggcacccuccaucacucac

SEQ ID NO: 906237 - RNA, 22 nt, Human
ugccaggcugaacagggucuua

SEQ ID NO: 906238 - RNA, 22 nt, Human
aaucauucucaugccaguuucc

SEQ ID NO: 906239 - RNA, 22 nt, Human
gaggccaacuuuggagaacagg

SEQ ID NO: 906240 - RNA, 22 nt, Human
uuuggaaacugaugguacauuc

SEQ ID NO: 906241 - RNA, 22 nt, Human
caggccucuuccaugcagcagc

SEQ ID NO: 906242 - RNA, 23 nt, Human
aauguauguuaguaucuuagaga

SEQ ID NO: 906243 - RNA, 22 nt, Human
uaaaucucagccuuucugcuua

SEQ ID NO: 906244 - RNA, 17 nt, Human
agcagggagucaaggga

SEQ ID NO: 906245 - RNA, 22 nt, Human
caguaguggaagggagagaaaa

SEQ ID NO: 906246 - RNA, 22 nt, Human
uguuaauggcugaagacauccu

SEQ ID NO: 906247 - RNA, 22 nt, Human
uauuuauguggaccauaagccu

SEQ ID NO: 906248 - RNA, 22 nt, Human
ggcuguccuuggccaaggcacu

SEQ ID NO: 906249 - RNA, 22 nt, Human
ucuuggccacuaccaccuggag

SEQ ID NO: 906250 - RNA, 17 nt, Human
gcugagugcagggaguc

SEQ ID NO: 906251 - RNA, 22 nt, Human
agcaggcagcaugggacccucc

SEQ ID NO: 906252 - RNA, 22 nt, Human
agaggcuguuacacucccagau

SEQ ID NO: 906253 - RNA, 21 nt, Human
cagugggcugcugcgcuccag

SEQ ID NO: 906254 - RNA, 22 nt, Human
uccuggcaaagauguugguguu

SEQ ID NO: 906255 - RNA, 23 nt, Human
auguuauuauuagcagucuugcc

SEQ ID NO: 906256 - RNA, 22 nt, Human
uuagaaauacaagugagguuga

SEQ ID NO: 906257 - RNA, 22 nt, Human
ucucagcugacugcuuuccucg

SEQ ID NO: 906258 - RNA, 22 nt, Human
gguggcucagggcuccaagcau

SEQ ID NO: 906259 - RNA, 22 nt, Human
gcagcccuagcgacaaauugau

SEQ ID NO: 906260 - RNA, 22 nt, Human
uuugucauaacucugcugcaag

SEQ ID NO: 906261 - RNA, 22 nt, Human
guauuguauugggaugagcucu

SEQ ID NO: 906262 - RNA, 22 nt, Human
uagguaagauguuaacagcuga

SEQ ID NO: 906263 - RNA, 22 nt, Human
agcugcagggcuuggguuuccc

SEQ ID NO: 906264 - RNA, 22 nt, Human
agggagcucgaugccugagugu

SEQ ID NO: 906265 - RNA, 22 nt, Human
guaggcagucucucaggugauc

SEQ ID NO: 906266 - RNA, 22 nt, Human
auagaguuuuauuuuccaauaa

SEQ ID NO: 906267 - RNA, 22 nt, Human
uaggauggucacagagauggac

SEQ ID NO: 906268 - RNA, 22 nt, Human
gggacagaggcaaacuagcaga

SEQ ID NO: 906269 - RNA, 22 nt, Human
ugagaguucucucuucaggugg

SEQ ID NO: 906270 - RNA, 22 nt, Human
cagacagaaggcuccuugaggu

SEQ ID NO: 906271 - RNA, 22 nt, Human
uaucuguucaauggaagaugac

SEQ ID NO: 906272 - RNA, 22 nt, Human
gggcuggaggaccggccucgga

SEQ ID NO: 906273 - RNA, 20 nt, Human
uguguaugugcacaugcgaa

SEQ ID NO: 906274 - RNA, 22 nt, Human
ugugaaaagcaggcuacuuucu

SEQ ID NO: 906275 - RNA, 22 nt, Human
uuggaaaauguauuucuagaag

SEQ ID NO: 906276 - RNA, 22 nt, Human
cagcaguguggaagcugagggg

SEQ ID NO: 906277 - RNA, 22 nt, Human
guguauaacccaaauaugcugc

SEQ ID NO: 906278 - RNA, 22 nt, Human
gggcuggagucuucugaaagcc

SEQ ID NO: 906279 - RNA, 22 nt, Human
uccagccaccaccuugauugcc

SEQ ID NO: 906280 - RNA, 22 nt, Human
auauguggcauuauuucugagg

SEQ ID NO: 906281 - RNA, 22 nt, Human
gacagcugcuuaugaaccaacg

SEQ ID NO: 906282 - RNA, 23 nt, Human
uggagggcagaauaacagacuac

SEQ ID NO: 906283 - RNA, 22 nt, Human
ucaauauucuucuuuaguagga

SEQ ID NO: 906284 - RNA, 22 nt, Human
caggaacaugucuccaauuaga

SEQ ID NO: 906285 - RNA, 22 nt, Human
guuuccuuucuauugccuugau

SEQ ID NO: 906286 - RNA, 22 nt, Human
cuauggugauagaaaucagaau

SEQ ID NO: 906287 - RNA, 22 nt, Human
gaaguuuagguucuuauguuua

SEQ ID NO: 906288 - RNA, 22 nt, Human
ccagcauccaugcucccucggg

SEQ ID NO: 906289 - RNA, 22 nt, Human
aaaggaaaauaaguaguuccau

SEQ ID NO: 906290 - RNA, 22 nt, Human
ggcccagugcuguucacccagu

SEQ ID NO: 906291 - RNA, 22 nt, Human
aaaagccuggauacuaucauua

SEQ ID NO: 906292 - RNA, 22 nt, Human
auaucacaggaaaggaagauac

SEQ ID NO: 906293 - RNA, 22 nt, Human
gagagcagacucucaaagcugg

SEQ ID NO: 906294 - RNA, 22 nt, Human
gaaggcugcgaggggagugccg

SEQ ID NO: 906295 - RNA, 22 nt, Human
ucuaguacuaguuaggaagagu

SEQ ID NO: 906296 - RNA, 22 nt, Human
cuucagugcauguuuauaauca

SEQ ID NO: 906297 - RNA, 22 nt, Human
augaggccacaguuauagauuu

SEQ ID NO: 906298 - RNA, 22 nt, Human
aaaugcauuuuuaauuagaccc

SEQ ID NO: 906299 - RNA, 22 nt, Human
ugagauaacauggaagaguagc

SEQ ID NO: 906300 - RNA, 18 nt, Human
ucccaucauccucuccag

SEQ ID NO: 906301 - RNA, 22 nt, Human
ugaauaaacuaugaggaggaau

SEQ ID NO: 906302 - RNA, 22 nt, Human
aggucaggguauucacgucugu

SEQ ID NO: 906303 - RNA, 22 nt, Human
gcccugagcacacaguagcaaa

SEQ ID NO: 906304 - RNA, 22 nt, Human
ccuuggguuccaagucacugaa

SEQ ID NO: 906305 - RNA, 22 nt, Human
aacuucuaaucuguacaguuuu

SEQ ID NO: 906306 - RNA, 19 nt, Human
ccugaguugggugaagaga

SEQ ID NO: 906307 - RNA, 22 nt, Human
augcuacauagauacaaaaaug

SEQ ID NO: 906308 - RNA, 22 nt, Human
uuuuaucaaucauuaagacauu

SEQ ID NO: 906309 - RNA, 22 nt, Human
aaaggcuaugagauagaagaua

SEQ ID NO: 906310 - RNA, 22 nt, Human
ugccuggcccugacagcccugg

SEQ ID NO: 906311 - RNA, 22 nt, Human
ccauggcuuuugagucucaaga

SEQ ID NO: 906312 - RNA, 22 nt, Human
ugugucacuguuccuccagcua

SEQ ID NO: 906313 - RNA, 22 nt, Human
augaguucaauuguuucaguca

SEQ ID NO: 906314 - RNA, 22 nt, Human
cugccuggcuaaacucaagucg

SEQ ID NO: 906315 - RNA, 22 nt, Human
auauggaagagccugggaauuu

SEQ ID NO: 906316 - RNA, 22 nt, Human
cauagaaaguauuauggaauuu

SEQ ID NO: 906317 - RNA, 22 nt, Human
aaaggcuggauucagagaggug

SEQ ID NO: 906318 - RNA, 22 nt, Human
agaagccaaaggggccagauau

SEQ ID NO: 906319 - RNA, 22 nt, Human
ucccagauuccugcucuuauau

SEQ ID NO: 906320 - RNA, 22 nt, Human
ugacagugcggguacaucauag

SEQ ID NO: 906321 - RNA, 22 nt, Human
cccaggcagugcugaucccuca

SEQ ID NO: 906322 - RNA, 22 nt, Human
cucugcaugccacaugagugac

SEQ ID NO: 906323 - RNA, 22 nt, Human
uuguuuucuccacugcaucuua

SEQ ID NO: 906324 - RNA, 22 nt, Human
gggcacugcuggaggcucccug

SEQ ID NO: 906325 - RNA, 22 nt, Human
aaggccaggagacuuggaguca

SEQ ID NO: 906326 - RNA, 22 nt, Human
gagugggcaccgugggcacacu

SEQ ID NO: 906327 - RNA, 22 nt, Human
aggacagagccugugcagaccg

SEQ ID NO: 906328 - RNA, 22 nt, Human
gaaagagaggggcugagaugca

SEQ ID NO: 906329 - RNA, 20 nt, Human
uagaggugggauuuggguuu

SEQ ID NO: 906330 - RNA, 22 nt, Human
gucugcucaugcuaccgcgggc

SEQ ID NO: 906331 - RNA, 22 nt, Human
gcagccuguuguaccagccugu

SEQ ID NO: 906332 - RNA, 22 nt, Human
cugugcugucuugggagccuua

SEQ ID NO: 906333 - RNA, 22 nt, Human
uauguacaccaaggauugaaaa

SEQ ID NO: 906334 - RNA, 22 nt, Human
aagaaauacaugguuuuugagu

SEQ ID NO: 906335 - RNA, 22 nt, Human
gacagacaaauguuuuuaacuu

SEQ ID NO: 906336 - RNA, 22 nt, Human
auauggcauuacauuguuaaau

SEQ ID NO: 906337 - RNA, 22 nt, Human
ugcaagaauuguauacccucau

SEQ ID NO: 906338 - RNA, 22 nt, Human
cauuaugugcguacauguaucu

SEQ ID NO: 906339 - RNA, 22 nt, Human
ccagcuguuggaguuucacugc

SEQ ID NO: 906340 - RNA, 22 nt, Human
uaucagcaucuccucaaagaua

SEQ ID NO: 906341 - RNA, 22 nt, Human
cucacuuagcagguuaauauca

SEQ ID NO: 906342 - RNA, 22 nt, Human
gggcagagguucaacuucaaca

SEQ ID NO: 906343 - RNA, 22 nt, Human
caggcuggagugcaguugugca

SEQ ID NO: 906344 - RNA, 22 nt, Human
agaggaugauuuuaaggacacu

SEQ ID NO: 906345 - RNA, 22 nt, Human
ggggggugacaaguagagguug

SEQ ID NO: 906346 - RNA, 22 nt, Human
ugagguaggugucgagagaggu

SEQ ID NO: 906347 - RNA, 22 nt, Human
ugccugucuccucugcagggug

SEQ ID NO: 906348 - RNA, 22 nt, Human
cccaggagacauauagaaggac

SEQ ID NO: 906349 - RNA, 22 nt, Human
caaguucuuaacucugagcagc

SEQ ID NO: 906350 - RNA, 22 nt, Human
cauaguaagugcauaauaaaug

SEQ ID NO: 906351 - RNA, 22 nt, Human
uacauacacaaauauacuguuu

SEQ ID NO: 906352 - RNA, 22 nt, Human
agguggcagacuaacagaagga

SEQ ID NO: 906353 - RNA, 22 nt, Human
ugacuaaaauaggacauuaacu

SEQ ID NO: 906354 - RNA, 22 nt, Human
cuuugugucuguuaauaauuau

SEQ ID NO: 906355 - RNA, 22 nt, Human
ggccuuggauccaagcugcggc

SEQ ID NO: 906356 - RNA, 22 nt, Human
acuugcauuuaaauauugaaua

SEQ ID NO: 906357 - RNA, 22 nt, Human
agugagggacuccaugacuccu

SEQ ID NO: 906358 - RNA, 22 nt, Human
augugugcuacaggugugggaa

SEQ ID NO: 906359 - RNA, 22 nt, Human
cugggaggcacuauucaggagg

SEQ ID NO: 906360 - RNA, 22 nt, Human
acccaggagccgugagagguua

SEQ ID NO: 906361 - RNA, 22 nt, Human
agggccagaguggcaaaagccu

SEQ ID NO: 906362 - RNA, 22 nt, Human
gaagaucugcagccucaggcga

SEQ ID NO: 906363 - RNA, 18 nt, Human
aggcaugguggugcgcac

SEQ ID NO: 906364 - RNA, 22 nt, Human
cugggcucaaauccuaucucca

SEQ ID NO: 906365 - RNA, 22 nt, Human
ucugagcuucugccugcugcaa

SEQ ID NO: 906366 - RNA, 22 nt, Human
gggcugaggaacauauuuuguu

SEQ ID NO: 906367 - RNA, 22 nt, Human
cuuccaggacaccaggguagua

SEQ ID NO: 906368 - RNA, 22 nt, Human
cagcugagaaggucugaucagg

SEQ ID NO: 906369 - RNA, 22 nt, Human
cuuuucuguaucaaaaggauua

SEQ ID NO: 906370 - RNA, 22 nt, Human
guuucccaaauuguucacaggg

SEQ ID NO: 906371 - RNA, 22 nt, Human
uggcagcugcaggccuccugag

SEQ ID NO: 906372 - RNA, 22 nt, Human
guggaagcaguaaggcaaguuu

SEQ ID NO: 906373 - RNA, 22 nt, Human
cuuacacagucuggcacuucuu

SEQ ID NO: 906374 - RNA, 22 nt, Human
ccugggaggcagagguugcagu

SEQ ID NO: 906375 - RNA, 23 nt, Human
uggggcucuggcaggccugaggu

SEQ ID NO: 906376 - RNA, 22 nt, Human
agcccuuaguacauuucucaag

SEQ ID NO: 906377 - RNA, 22 nt, Human
aagagguggaacagcaauucgu

SEQ ID NO: 906378 - RNA, 22 nt, Human
caccauuuucuaaaaauaugac

SEQ ID NO: 906379 - RNA, 22 nt, Human
ugcuuuaaauaugaauuagcau

SEQ ID NO: 906380 - RNA, 23 nt, Human
ggagccagccuguggggagcggg

SEQ ID NO: 906381 - RNA, 22 nt, Human
acucugggcuguuaggagcugu

SEQ ID NO: 906382 - RNA, 22 nt, Human
cagccagggucaggcagcuucu

SEQ ID NO: 906383 - RNA, 22 nt, Human
aaguccagcagugcuuguugau

SEQ ID NO: 906384 - RNA, 22 nt, Human
gggggcaguaaccucaaagugu

SEQ ID NO: 906385 - RNA, 22 nt, Human
gcaaagugcuucagugggagcu

SEQ ID NO: 906386 - RNA, 22 nt, Human
uagaggugagauauuuuauuuu

SEQ ID NO: 906387 - RNA, 22 nt, Human
gugggcagguaggcaccagcua

SEQ ID NO: 906388 - RNA, 22 nt, Human
ucuuugcagucugggcuuguuu

SEQ ID NO: 906389 - RNA, 19 nt, Human
ggagccuggagcacgugcc

SEQ ID NO: 906390 - RNA, 22 nt, Human
ugcagcugugggagaaucucug

SEQ ID NO: 906391 - RNA, 23 nt, Human
auguccaguuuacuucaggauga

SEQ ID NO: 906392 - RNA, 22 nt, Human
accagggcggcuugaggaggca

SEQ ID NO: 906393 - RNA, 19 nt, Human
uuucccagucccaggagug

SEQ ID NO: 906394 - RNA, 22 nt, Human
ucuugcuagaaucauuuggaga

SEQ ID NO: 906395 - RNA, 22 nt, Human
cacaugaacaugcuggaaaagc

SEQ ID NO: 906396 - RNA, 22 nt, Human
cagagucuggacugcaggcucc

SEQ ID NO: 906397 - RNA, 22 nt, Human
uggugagauaacuuucggcaag

SEQ ID NO: 906398 - RNA, 22 nt, Human
aaaaugucugcuguugguuuau

SEQ ID NO: 906399 - RNA, 22 nt, Human
gcaaauuaaccaaucaugcucg

SEQ ID NO: 906400 - RNA, 22 nt, Human
ucuuuggaaugcuagcauucua

SEQ ID NO: 906401 - RNA, 19 nt, Human
uugcuucaugucuuuugcu

SEQ ID NO: 906402 - RNA, 22 nt, Human
cuggcuccucaggacugcggga

SEQ ID NO: 906403 - RNA, 17 nt, Human
cucugggucuccugcuu

SEQ ID NO: 906404 - RNA, 22 nt, Human
gcugagguggaggaaggagacc

SEQ ID NO: 906405 - RNA, 22 nt, Human
agcagcucauggaguaggcacu

SEQ ID NO: 906406 - RNA, 22 nt, Human
uuaaaggcugaucuuaauauua

SEQ ID NO: 906407 - RNA, 22 nt, Human
ugaggccacaguaucagaacag

SEQ ID NO: 906408 - RNA, 22 nt, Human
caguuuauagcucuagcagcuu

SEQ ID NO: 906409 - RNA, 22 nt, Human
aaaguagaacauuuucuuaucu

SEQ ID NO: 906410 - RNA, 22 nt, Human
ucucugagaauaucccauaaga

SEQ ID NO: 906411 - RNA, 22 nt, Human
cauacaaauguguccaggcucu

SEQ ID NO: 906412 - RNA, 22 nt, Human
aaggaagagucuagaacaggca

SEQ ID NO: 906413 - RNA, 15 nt, Human
aucucucuagcugcu

SEQ ID NO: 906414 - RNA, 22 nt, Human
ggaaaugguggaggaaggcuua

SEQ ID NO: 906415 - RNA, 22 nt, Human
augucuuuauuaauaucaugcc

SEQ ID NO: 906416 - RNA, 22 nt, Human
gcauacaaagguuuacaacuga

SEQ ID NO: 906417 - RNA, 22 nt, Human
cuggguguagcccaguaugagg

SEQ ID NO: 906418 - RNA, 22 nt, Human
cagcacaggaauaugguggaca

SEQ ID NO: 906419 - RNA, 22 nt, Human
uucuucugccucccaccugaua

SEQ ID NO: 906420 - RNA, 22 nt, Human
cuuggugcauuacucaaucugu

SEQ ID NO: 906421 - RNA, 22 nt, Human
uuuuaucugugacaucuggcag

SEQ ID NO: 906422 - RNA, 22 nt, Human
uauuucugaauccaaaagguca

SEQ ID NO: 906423 - RNA, 22 nt, Human
uggcucugagcugcaaagcugc

SEQ ID NO: 906424 - RNA, 22 nt, Human
aggcagaauguuggaaaggaag

SEQ ID NO: 906425 - RNA, 18 nt, Human
ugucugaguucuuccauu

SEQ ID NO: 906426 - RNA, 22 nt, Human
uuaagagacaggagaaugaugu

SEQ ID NO: 906427 - RNA, 22 nt, Human
auggcagccugagcagaggaau

SEQ ID NO: 906428 - RNA, 22 nt, Human
agugugcucaauucaagucuuu

SEQ ID NO: 906429 - RNA, 22 nt, Human
uauacacaccuccaaagcagga

SEQ ID NO: 906430 - RNA, 22 nt, Human
ugcugcagaaauucugugagga

SEQ ID NO: 906431 - RNA, 22 nt, Human
acauuucaguaaguguuaauuu

SEQ ID NO: 906432 - RNA, 22 nt, Human
guauuuuacuuacgcaugacuu

SEQ ID NO: 906433 - RNA, 22 nt, Human
uguccagggggcuuaccuggag

SEQ ID NO: 906434 - RNA, 22 nt, Human
cagcuggcaaguggagcagggu

SEQ ID NO: 906435 - RNA, 22 nt, Human
uauuagcauauaugauucaguu

SEQ ID NO: 906436 - RNA, 23 nt, Human
uuaagcacuguuaguagaaaagg

SEQ ID NO: 906437 - RNA, 22 nt, Human
ugagcugggaguggugaugagg

SEQ ID NO: 906438 - RNA, 22 nt, Human
aauguacaauaagacaaagagg

SEQ ID NO: 906439 - RNA, 22 nt, Human
uccuggccucgcuguccaccuu

SEQ ID NO: 906440 - RNA, 22 nt, Human
cugugccuaagaugcaugucuc

SEQ ID NO: 906441 - RNA, 22 nt, Human
ccaagcaggauauucuguguca

SEQ ID NO: 906442 - RNA, 18 nt, Human
ucuuccagcuucuggagg

SEQ ID NO: 906443 - RNA, 22 nt, Human
accaaaaccugcuacuaaagga

SEQ ID NO: 906444 - RNA, 22 nt, Human
ucagcuacagcaucucugcuuu

SEQ ID NO: 906445 - RNA, 22 nt, Human
gguggcugaaucaaaucaggcc

SEQ ID NO: 906446 - RNA, 22 nt, Human
ccagcaggagaugccugugucu

SEQ ID NO: 906447 - RNA, 22 nt, Human
gugaccagcccauagagaggcg

SEQ ID NO: 906448 - RNA, 22 nt, Human
ugugaucaggugaucaugugag

SEQ ID NO: 906449 - RNA, 22 nt, Human
auuucaguagaaaaucuugauu

SEQ ID NO: 906450 - RNA, 22 nt, Human
agccagagagccccagguucua

SEQ ID NO: 906451 - RNA, 22 nt, Human
agaggcaaguucagagcuagga

SEQ ID NO: 906452 - RNA, 20 nt, Human
ccacaguggagacuggagac

SEQ ID NO: 906453 - RNA, 19 nt, Human
gucccuucacuccugcugg

SEQ ID NO: 906454 - RNA, 22 nt, Human
cuguuucccuccagggggugga

SEQ ID NO: 906455 - RNA, 22 nt, Human
acucuguguuuugguggcagca

SEQ ID NO: 906456 - RNA, 22 nt, Human
aacagcugucugccuaucucug

SEQ ID NO: 906457 - RNA, 22 nt, Human
gggcuccaggagcccuaagaga

SEQ ID NO: 906458 - RNA, 22 nt, Human
gaaggggaaaguugagcaaaua

SEQ ID NO: 906459 - RNA, 22 nt, Human
caaaugcuacuaauaggcaagu

SEQ ID NO: 906460 - RNA, 22 nt, Human
acucuuuuaugcauuccuucag

SEQ ID NO: 906461 - RNA, 22 nt, Human
augauaagaacacaguaugggg

SEQ ID NO: 906462 - RNA, 22 nt, Human
ggacugggaaucagggagaugc

SEQ ID NO: 906463 - RNA, 22 nt, Human
aggccugagcagaggaguggac

SEQ ID NO: 906464 - RNA, 22 nt, Human
aagaguuucuuuauuaaccuuu

SEQ ID NO: 906465 - RNA, 22 nt, Human
aaucuuuaaggacucagucucu

SEQ ID NO: 906466 - RNA, 22 nt, Human
acaguguguucugggaccucca

SEQ ID NO: 906467 - RNA, 22 nt, Human
uaugugcauaugcauacacaca

SEQ ID NO: 906468 - RNA, 22 nt, Human
ucugucacucccugaugaugaa

SEQ ID NO: 906469 - RNA, 22 nt, Human
gaccacugaugacaugaggaga

SEQ ID NO: 906470 - RNA, 22 nt, Human
accagaaaggaauaauagaauu

SEQ ID NO: 906471 - RNA, 22 nt, Human
augucuuucgcaucaguagcua

SEQ ID NO: 906472 - RNA, 22 nt, Human
gcuucacaacuucuuaauucuu

SEQ ID NO: 906473 - RNA, 22 nt, Human
gcauuacaggaauuuguuacug

SEQ ID NO: 906474 - RNA, 22 nt, Human
ugaugucucucuauacucuaac

SEQ ID NO: 906475 - RNA, 22 nt, Human
agggcccuuacgcaggcccuuc

SEQ ID NO: 906476 - RNA, 22 nt, Human
ucuguuauggaaguuuccuuuu

SEQ ID NO: 906477 - RNA, 22 nt, Human
uggcugcucaagggaggaggcu

SEQ ID NO: 906478 - RNA, 22 nt, Human
ugauuuuauuggugaggaaauu

SEQ ID NO: 906479 - RNA, 22 nt, Human
ugaucuucaccuuguucuuugg

SEQ ID NO: 906480 - RNA, 22 nt, Human
uucuccugaguucccaggucua

SEQ ID NO: 906481 - RNA, 22 nt, Human
acaugacagugcuuagcaaacu

SEQ ID NO: 906482 - RNA, 21 nt, Human
ucucuguguacagucucaccc

SEQ ID NO: 906483 - RNA, 22 nt, Human
agcagccaauuggaggaugaag

SEQ ID NO: 906484 - RNA, 22 nt, Human
aggcgcugugcuuggggcugga

SEQ ID NO: 906485 - RNA, 22 nt, Human
cacugccugugagcugugugcc

SEQ ID NO: 906486 - RNA, 22 nt, Human
uuuggucucauucacucauggg

SEQ ID NO: 906487 - RNA, 22 nt, Human
gagcagcucugggugacccagu

SEQ ID NO: 906488 - RNA, 22 nt, Human
ugggcaggagagaagcuaaaga

SEQ ID NO: 906489 - RNA, 20 nt, Human
cucacagucaaugcagaggu

SEQ ID NO: 906490 - RNA, 19 nt, Human
ugagacagggauucaggug

SEQ ID NO: 906491 - RNA, 22 nt, Human
gaugacacuaagcauguugugg

SEQ ID NO: 906492 - RNA, 20 nt, Human
agauacagugguuucuuuag

SEQ ID NO: 906493 - RNA, 22 nt, Human
gcugguauuugcagccugucau

SEQ ID NO: 906494 - RNA, 22 nt, Human
uccagacugcuucuaggaugag

SEQ ID NO: 906495 - RNA, 22 nt, Human
ucugcuauuuucuaucugugug

SEQ ID NO: 906496 - RNA, 22 nt, Human
auguggcuaguccucugcggca

SEQ ID NO: 906497 - RNA, 21 nt, Human
ucugaugguagaugagaugug

SEQ ID NO: 906498 - RNA, 22 nt, Human
uacagguuacacuuuuaaaagu

SEQ ID NO: 906499 - RNA, 22 nt, Human
acauuucugcuagaauagguga

SEQ ID NO: 906500 - RNA, 22 nt, Human
ggccagagguguccucaguucu

SEQ ID NO: 906501 - RNA, 22 nt, Human
uucucucugugucauuauggac

SEQ ID NO: 906502 - RNA, 22 nt, Human
uuguggcagaccaugagucuaa

SEQ ID NO: 906503 - RNA, 22 nt, Human
agaaguuuucauuaccuauaca

SEQ ID NO: 906504 - RNA, 22 nt, Human
uauuuguauguguguacauaua

SEQ ID NO: 906505 - RNA, 22 nt, Human
uuggcacucauccugguuguuu

SEQ ID NO: 906506 - RNA, 22 nt, Human
cuggcagcugugugaagaacug

SEQ ID NO: 906507 - RNA, 22 nt, Human
acuggcagaauugaauaguugu

SEQ ID NO: 906508 - RNA, 22 nt, Human
cuguuuuauaaaguccaaaagu

SEQ ID NO: 906509 - RNA, 22 nt, Human
gccacagcagggcccucucagg

SEQ ID NO: 906510 - RNA, 22 nt, Human
caggagagauaugaguccccac

SEQ ID NO: 906511 - RNA, 22 nt, Human
uuuuagaaagaucccuggcagg

SEQ ID NO: 906512 - RNA, 22 nt, Human
acaggccuggugcugcugacag

SEQ ID NO: 906513 - RNA, 22 nt, Human
cuaaauaaucccucuggucuua

SEQ ID NO: 906514 - RNA, 22 nt, Human
gaagcuuggauaacuguauggg

SEQ ID NO: 906515 - RNA, 22 nt, Human
ugcaguguuccuguggguuuau

SEQ ID NO: 906516 - RNA, 18 nt, Human
ccugcagcccaggaggcc

SEQ ID NO: 906517 - RNA, 22 nt, Human
gagaaacaacacuugaugccuu

SEQ ID NO: 906518 - RNA, 22 nt, Human
cugcaucacucuuacuggcuuu

SEQ ID NO: 906519 - RNA, 23 nt, Human
ggcuucagugagagucccugcug

SEQ ID NO: 906520 - RNA, 22 nt, Human
gacacaaaguuugucagaaauu

SEQ ID NO: 906521 - RNA, 22 nt, Human
uaggacuuuggcgucagaacug

SEQ ID NO: 906522 - RNA, 22 nt, Human
cagcuauauuguuuucuacugu

SEQ ID NO: 906523 - RNA, 22 nt, Human
ucaagaaaaugacgccaaccuu

SEQ ID NO: 906524 - RNA, 22 nt, Human
aacuuacaaggaugauagcugc

SEQ ID NO: 906525 - RNA, 22 nt, Human
ucaggcuggggugcuaaggugu

SEQ ID NO: 906526 - RNA, 22 nt, Human
cuuuggaauaauuuccuggagu

SEQ ID NO: 906527 - RNA, 22 nt, Human
gagccagccuccgccucucucc

SEQ ID NO: 906528 - RNA, 20 nt, Human
ugcagggccuaaaaagggaa

SEQ ID NO: 906529 - RNA, 22 nt, Human
cagaaauaaaguggacagagua

SEQ ID NO: 906530 - RNA, 18 nt, Human
ccagaggcccgggcaggc

SEQ ID NO: 906531 - RNA, 22 nt, Human
gugcugggcccugagaccaggg

SEQ ID NO: 906532 - RNA, 22 nt, Human
uagaggcucuucauugcaguag

SEQ ID NO: 906533 - RNA, 22 nt, Human
agcuccuggucuuuguccagag

SEQ ID NO: 906534 - RNA, 22 nt, Human
cauguauagacacucauacagu

SEQ ID NO: 906535 - RNA, 22 nt, Human
gcagaggauagcauaugaaccu

SEQ ID NO: 906536 - RNA, 19 nt, Human
ccaggccuccugggagguc

SEQ ID NO: 906537 - RNA, 22 nt, Human
agaggccccaggugagcaugcc

SEQ ID NO: 906538 - RNA, 22 nt, Human
uccaggccccacugaagccccu

SEQ ID NO: 906539 - RNA, 22 nt, Human
aggucgaguuucggggcuacuu

SEQ ID NO: 906540 - RNA, 23 nt, Human
uauuuggaaagagggaagaagac

SEQ ID NO: 906541 - RNA, 22 nt, Human
agauauauuuaagguaauaagu

SEQ ID NO: 906542 - RNA, 23 nt, Human
agucugugcugaagaaguuacaa

SEQ ID NO: 906543 - RNA, 22 nt, Human
aguucuaaguaaauauuuuaua

SEQ ID NO: 906544 - RNA, 22 nt, Human
guggaagccuacucuugugguu

SEQ ID NO: 906545 - RNA, 22 nt, Human
cagcacagugaccagacccacu

SEQ ID NO: 906546 - RNA, 22 nt, Human
cucuccagcagauguagucugu

SEQ ID NO: 906547 - RNA, 22 nt, Human
uucuaucauacuugaauacauu

SEQ ID NO: 906548 - RNA, 22 nt, Human
augugcuuuaaagaagccagcu

SEQ ID NO: 906549 - RNA, 22 nt, Human
cagggccucuccuccaggaacu

SEQ ID NO: 906550 - RNA, 22 nt, Human
gugccugcagcaauccauggca

SEQ ID NO: 906551 - RNA, 22 nt, Human
cugagcugugcuaagugaaaug

SEQ ID NO: 906552 - RNA, 22 nt, Human
cugagcagcaccuucaagaaac

SEQ ID NO: 906553 - RNA, 23 nt, Human
ggacagggcccugcccuauggcc

SEQ ID NO: 906554 - RNA, 22 nt, Human
aaacugcacaagggugcauagc

SEQ ID NO: 906555 - RNA, 20 nt, Human
ucagaggcugccagcugggg

SEQ ID NO: 906556 - RNA, 22 nt, Human
caggcagcucaaccuugggagc

SEQ ID NO: 906557 - RNA, 22 nt, Human
ucuaugucucuggaaggagugu

SEQ ID NO: 906558 - RNA, 22 nt, Human
cucacaggcgguaauucaggga

SEQ ID NO: 906559 - RNA, 22 nt, Human
cucuccuggggagcacacacac

SEQ ID NO: 906560 - RNA, 22 nt, Human
cagauucuucauugccccauuc

SEQ ID NO: 906561 - RNA, 22 nt, Human
acugauuacacgaguucugacu

SEQ ID NO: 906562 - RNA, 22 nt, Human
agcuccagaaagguacacacag

SEQ ID NO: 906563 - RNA, 22 nt, Human
ucagccagcauuaccccugacu

SEQ ID NO: 906564 - RNA, 23 nt, Human
uucuccugaggaagcagggacug

SEQ ID NO: 906565 - RNA, 22 nt, Human
ugaggcacauccaggccagcuc

SEQ ID NO: 906566 - RNA, 22 nt, Human
uuggaagguucuggucaugguu

SEQ ID NO: 906567 - RNA, 22 nt, Human
caggcucccacaagcucccagc

SEQ ID NO: 906568 - RNA, 19 nt, Human
cugaaaaacauucucagga

SEQ ID NO: 906569 - RNA, 22 nt, Human
ucaggaaagaguaauguauaca

SEQ ID NO: 906570 - RNA, 22 nt, Human
acaucucaaauuccaggcucca

SEQ ID NO: 906571 - RNA, 17 nt, Human
uuccacaauaguuuguc

SEQ ID NO: 906572 - RNA, 22 nt, Human
uuugaaagggacaaagucacug

SEQ ID NO: 906573 - RNA, 21 nt, Human
auucagaguaauucaucuuua

SEQ ID NO: 906574 - RNA, 22 nt, Human
ggcuuagaaggcaaaugacuug

SEQ ID NO: 906575 - RNA, 22 nt, Human
ggagucugggaauuggagagaa

SEQ ID NO: 906576 - RNA, 22 nt, Human
auuaaaacuaaaaugccugauu

SEQ ID NO: 906577 - RNA, 19 nt, Human
ggccccagccaggguauca

SEQ ID NO: 906578 - RNA, 22 nt, Human
augucuggaggucaucugguua

SEQ ID NO: 906579 - RNA, 22 nt, Human
caguugaucacuauaggcuuca

SEQ ID NO: 906580 - RNA, 22 nt, Human
cccugagccgcugcuccaaccu

SEQ ID NO: 906581 - RNA, 22 nt, Human
ggucaggauccaagucugugcu

SEQ ID NO: 906582 - RNA, 22 nt, Human
uuugacaauucaugacauuuau

SEQ ID NO: 906583 - RNA, 17 nt, Human
ucagggaaugagguugu

SEQ ID NO: 906584 - RNA, 18 nt, Human
uaguuucuaauggccuuu

SEQ ID NO: 906585 - RNA, 22 nt, Human
cagaagaucucuuaguggaggg

SEQ ID NO: 906586 - RNA, 22 nt, Human
aaagcagggcgauguccuccuc

SEQ ID NO: 906587 - RNA, 22 nt, Human
cagccaggcccccgagucguug

SEQ ID NO: 906588 - RNA, 22 nt, Human
uugugaaacauucauggauuug

SEQ ID NO: 906589 - RNA, 22 nt, Human
ucugggcugcugugcagugacc

SEQ ID NO: 906590 - RNA, 22 nt, Human
agacugggguucuggcaaggag

SEQ ID NO: 906591 - RNA, 22 nt, Human
uauucuacaguguuaguguuag

SEQ ID NO: 906592 - RNA, 22 nt, Human
caucaaauggcaagugaaagcu

SEQ ID NO: 906593 - RNA, 22 nt, Human
uuccaguucccaugaggauuaa

SEQ ID NO: 906594 - RNA, 22 nt, Human
gaugucucugacuaaggcagug

SEQ ID NO: 906595 - RNA, 22 nt, Human
ugagaagagcaaggaacugguu

SEQ ID NO: 906596 - RNA, 22 nt, Human
ccagagagauugcuucuaaaga

SEQ ID NO: 906597 - RNA, 22 nt, Human
ugaaguuuauaacauagccucc

SEQ ID NO: 906598 - RNA, 22 nt, Human
cacauuaugcuacuaccaaaug

SEQ ID NO: 906599 - RNA, 22 nt, Human
ucaaggacuauugcaugacucc

SEQ ID NO: 906600 - RNA, 22 nt, Human
aauguucugggagagaagcugu

SEQ ID NO: 906601 - RNA, 22 nt, Human
gacagcuggacagacacugaug

SEQ ID NO: 906602 - RNA, 22 nt, Human
uuccagaguugggggagugguu

SEQ ID NO: 906603 - RNA, 22 nt, Human
ugggccaguuauuucaccucug

SEQ ID NO: 906604 - RNA, 22 nt, Human
aaggaaauacaacauguauuca

SEQ ID NO: 906605 - RNA, 22 nt, Human
cacagugcuuuaugagagaucu

SEQ ID NO: 906606 - RNA, 23 nt, Human
uuugugaaaguguugagaggaga

SEQ ID NO: 906607 - RNA, 22 nt, Human
acaggccugaugccuuggcugg

SEQ ID NO: 906608 - RNA, 22 nt, Human
ugcaggccucacaccuggcacc

SEQ ID NO: 906609 - RNA, 22 nt, Human
cuacacagagccuacuucugca

SEQ ID NO: 906610 - RNA, 22 nt, Human
uuucacaguuagcaugaggacu

SEQ ID NO: 906611 - RNA, 16 nt, Human
acuuuuccaccuuuuu

SEQ ID NO: 906612 - RNA, 22 nt, Human
gcugucucaugggugcuagucc

SEQ ID NO: 906613 - RNA, 22 nt, Human
ccagcagccagagaaggaccuc

SEQ ID NO: 906614 - RNA, 22 nt, Human
auucuuaaauuuaggucuguga

SEQ ID NO: 906615 - RNA, 22 nt, Human
uccaggcuuuggggcaggagcg

SEQ ID NO: 906616 - RNA, 22 nt, Human
gcucugagagugcaugauagca

SEQ ID NO: 906617 - RNA, 22 nt, Human
uuugcauuuguuuagaaccuga

SEQ ID NO: 906618 - RNA, 22 nt, Human
ccacaguguggcauaaacugua

SEQ ID NO: 906619 - RNA, 22 nt, Human
uuauguacaauguuaauguaaa

SEQ ID NO: 906620 - RNA, 22 nt, Human
augucacuuuugagacuagguu

SEQ ID NO: 906621 - RNA, 23 nt, Human
uucagaagaaaugaguacaggag

SEQ ID NO: 906622 - RNA, 22 nt, Human
agcccagcuccuccacagaaua

SEQ ID NO: 906623 - RNA, 22 nt, Human
ggcaauaaucuacucugccacu

SEQ ID NO: 906624 - RNA, 20 nt, Human
acugccagccuugucuacug

SEQ ID NO: 906625 - RNA, 22 nt, Human
acccaggcuggcagaggcuccu

SEQ ID NO: 906626 - RNA, 21 nt, Human
agagaagggauuccaggcccu

SEQ ID NO: 906627 - RNA, 22 nt, Human
cuggcacaaaagaaaacugcca

SEQ ID NO: 906628 - RNA, 21 nt, Human
agcagcaucagccucaccuga

SEQ ID NO: 906629 - RNA, 22 nt, Human
acaugaucugacuugcuuuuua

SEQ ID NO: 906630 - RNA, 20 nt, Human
ggcagggagggauacugagg

SEQ ID NO: 906631 - RNA, 22 nt, Human
cucugggacuagaaccccaggg

SEQ ID NO: 906632 - RNA, 22 nt, Human
uucaugaagggugaauauaguc

SEQ ID NO: 906633 - RNA, 22 nt, Human
ugagaguuuugacgcuuguaac

SEQ ID NO: 906634 - RNA, 22 nt, Human
uagaacuuccaauucagggcug

SEQ ID NO: 906635 - RNA, 22 nt, Human
uuccugugaagaucugggugcu

SEQ ID NO: 906636 - RNA, 22 nt, Human
gagaagacgugauggccaagaa

SEQ ID NO: 906637 - RNA, 22 nt, Human
cugacaaacuuaauuuucugaa

SEQ ID NO: 906638 - RNA, 22 nt, Human
uggcacugaaaaaggagagguu

SEQ ID NO: 906639 - RNA, 22 nt, Human
aagggggccacaccugguguga

SEQ ID NO: 906640 - RNA, 22 nt, Human
cuccucccaauugccaagugcu

SEQ ID NO: 906641 - RNA, 17 nt, Human
uccuguuuaucauugau

SEQ ID NO: 906642 - RNA, 22 nt, Human
ugcuucagagaagaauggaaag

SEQ ID NO: 906643 - RNA, 22 nt, Human
aauuucaguaugaaguuucaca

SEQ ID NO: 906644 - RNA, 22 nt, Human
gaaguucugaccauauggccaa

SEQ ID NO: 906645 - RNA, 22 nt, Human
aagcuucuuuacaggagagauu

SEQ ID NO: 906646 - RNA, 22 nt, Human
uagaccagguugaccagguagg

SEQ ID NO: 906647 - RNA, 22 nt, Human
cuggacagaucccuuguagcuu

SEQ ID NO: 906648 - RNA, 22 nt, Human
aacuaucacaaacagagugucu

SEQ ID NO: 906649 - RNA, 17 nt, Human
aucugcauuucuaauga

SEQ ID NO: 906650 - RNA, 22 nt, Human
uuggcugaagacuagauguuua

SEQ ID NO: 906651 - RNA, 22 nt, Human
ggagccagaggcugcugcugug

SEQ ID NO: 906652 - RNA, 22 nt, Human
acagaacuuggaacuuuucaca

SEQ ID NO: 906653 - RNA, 22 nt, Human
uucuuauguucacauaauucca

SEQ ID NO: 906654 - RNA, 22 nt, Human
ugcuucaggaagaaacgccagg

SEQ ID NO: 906655 - RNA, 22 nt, Human
aaugaugggaaggagaaaagca

SEQ ID NO: 906656 - RNA, 22 nt, Human
gacaggcuggcaaugcccugcu

SEQ ID NO: 906657 - RNA, 22 nt, Human
caggccagugugcuucccaggc

SEQ ID NO: 906658 - RNA, 22 nt, Human
cagguggggcagcugugggagc

SEQ ID NO: 906659 - RNA, 22 nt, Human
uguuuacagcacugcacacugc

SEQ ID NO: 906660 - RNA, 22 nt, Human
gaggccaagggagaagaucucu

SEQ ID NO: 906661 - RNA, 22 nt, Human
uauuguccaugugucuguuagc

SEQ ID NO: 906662 - RNA, 22 nt, Human
uuacaaagcgcuuuaccucuga

SEQ ID NO: 906663 - RNA, 22 nt, Human
aagaaagguguguuugcagaug

SEQ ID NO: 906664 - RNA, 22 nt, Human
ggcagguggccaagugucuaag

SEQ ID NO: 906665 - RNA, 17 nt, Human
auacauguaaagugcuu

SEQ ID NO: 906666 - RNA, 20 nt, Human
ucuguaggcaaguuagcagg

SEQ ID NO: 906667 - RNA, 22 nt, Human
gcagauggaucaccugaggucg

SEQ ID NO: 906668 - RNA, 22 nt, Human
aaagcuaccuuuguguucauag

SEQ ID NO: 906669 - RNA, 22 nt, Human
uuugcaaaugaagcucugagga

SEQ ID NO: 906670 - RNA, 22 nt, Human
cugcccugauaugauuuagaac

SEQ ID NO: 906671 - RNA, 22 nt, Human
uaaagugcgacccaguccccag

SEQ ID NO: 906672 - RNA, 22 nt, Human
ugccugugcccuucuuggcauu

SEQ ID NO: 906673 - RNA, 22 nt, Human
uucauugaaauuaagcccaacu

SEQ ID NO: 906674 - RNA, 22 nt, Human
acagaggcagugugagauacug

SEQ ID NO: 906675 - RNA, 22 nt, Human
gccagggaacccaagggccuca

SEQ ID NO: 906676 - RNA, 22 nt, Human
cagcugaaagaaggaaguguca

SEQ ID NO: 906677 - RNA, 22 nt, Human
ggugaggaauuggggacugacc

SEQ ID NO: 906678 - RNA, 22 nt, Human
ugccaggcucaggaugucccug

SEQ ID NO: 906679 - RNA, 22 nt, Human
cccagguccccaccugucugcu

SEQ ID NO: 906680 - RNA, 23 nt, Human
uaacaagaaccucaugugacuuu

SEQ ID NO: 906681 - RNA, 22 nt, Human
uuuaagugaaauguaauacagu

SEQ ID NO: 906682 - RNA, 22 nt, Human
ugagcuuuguggguaaagagag

SEQ ID NO: 906683 - RNA, 22 nt, Human
cucugggguuaagcuuccaugg

SEQ ID NO: 906684 - RNA, 22 nt, Human
aaaguucuguagugcacugacu

SEQ ID NO: 906685 - RNA, 22 nt, Human
ccagggugagugucauggguua

SEQ ID NO: 906686 - RNA, 22 nt, Human
ggugcugaaggacuauaacggu

SEQ ID NO: 906687 - RNA, 21 nt, Human
aacauugauucauuuggcuau

SEQ ID NO: 906688 - RNA, 22 nt, Human
ggcugagugcugcuguucacga

SEQ ID NO: 906689 - RNA, 22 nt, Human
agaggccaguggcugugcuguc

SEQ ID NO: 906690 - RNA, 22 nt, Human
guguaucucauguucuucucug

SEQ ID NO: 906691 - RNA, 22 nt, Human
uuuuucugucucuuacauugca

SEQ ID NO: 906692 - RNA, 22 nt, Human
agaguccagaaaacagugugcu

SEQ ID NO: 906693 - RNA, 22 nt, Human
auggcagaauccauaguaggug

SEQ ID NO: 906694 - RNA, 22 nt, Human
guucagugguguauccccagug

SEQ ID NO: 906695 - RNA, 22 nt, Human
uuccugguuggauucugauuaa

SEQ ID NO: 906696 - RNA, 22 nt, Human
acauguacuguuggugaagagg

SEQ ID NO: 906697 - RNA, 22 nt, Human
accuccugaugagaguaaagga

SEQ ID NO: 906698 - RNA, 21 nt, Human
uuucuggguggcugcauagug

SEQ ID NO: 906699 - RNA, 22 nt, Human
ucauaauuguauacauuuaugg

SEQ ID NO: 906700 - RNA, 22 nt, Human
uucuuggcaucaugaaaaauua

SEQ ID NO: 906701 - RNA, 22 nt, Human
aaucuggaauauuugcauugua

SEQ ID NO: 906702 - RNA, 22 nt, Human
gcugugcaaaucgauuuguugg

SEQ ID NO: 906703 - RNA, 20 nt, Human
uuauguguaccugugcuccc

SEQ ID NO: 906704 - RNA, 22 nt, Human
ugcuggcacgaaagggugucca

SEQ ID NO: 906705 - RNA, 22 nt, Human
gcccucagaggacagcugacuu

SEQ ID NO: 906706 - RNA, 22 nt, Human
ucugccaguauucacggcccgu

SEQ ID NO: 906707 - RNA, 22 nt, Human
aaguguuuacuuaaagucaugg

SEQ ID NO: 906708 - RNA, 22 nt, Human
caguauuuccucuucuuaacuu

SEQ ID NO: 906709 - RNA, 18 nt, Human
ugcccagaaaagcaggga

SEQ ID NO: 906710 - RNA, 22 nt, Human
uaaaaguauacuuucaaaggag

SEQ ID NO: 906711 - RNA, 22 nt, Human
ucacugcucugaaaguacaggg

SEQ ID NO: 906712 - RNA, 22 nt, Human
ccaggaggaaagaccagcccau

SEQ ID NO: 906713 - RNA, 22 nt, Human
cacaaugugguuugucaucuuu

SEQ ID NO: 906714 - RNA, 22 nt, Human
ccuggcucagaccccaguucug

SEQ ID NO: 906715 - RNA, 22 nt, Human
aaaugaggccagaucaugcaga

SEQ ID NO: 906716 - RNA, 22 nt, Human
guauauaucggcacuauuuuaa

SEQ ID NO: 906717 - RNA, 22 nt, Human
ucugggaagcugcgugccuguu

SEQ ID NO: 906718 - RNA, 22 nt, Human
gccaggcuguggggaacuugaa

SEQ ID NO: 906719 - RNA, 22 nt, Human
cugugcugagugaugugacuua

SEQ ID NO: 906720 - RNA, 22 nt, Human
guggauuacaagacaguugaga

SEQ ID NO: 906721 - RNA, 20 nt, Human
uccagggcaacuagagugug

SEQ ID NO: 906722 - RNA, 20 nt, Human
cagcaguggaugagaguuuu

SEQ ID NO: 906723 - RNA, 22 nt, Human
ccagcccuuugugguucacuga

SEQ ID NO: 906724 - RNA, 22 nt, Human
ggggaggccaguggaccguccc

SEQ ID NO: 906725 - RNA, 22 nt, Human
aaauguucuacuuugauaauua

SEQ ID NO: 906726 - RNA, 22 nt, Human
agaggcuaggaccauguaucau

SEQ ID NO: 906727 - RNA, 22 nt, Human
gaggcuccgugcugcugcccug

SEQ ID NO: 906728 - RNA, 22 nt, Human
ggcaggcucuuggccuuaugag

SEQ ID NO: 906729 - RNA, 22 nt, Human
cucuccagucauauucucaguc

SEQ ID NO: 906730 - RNA, 22 nt, Human
acacaaauuguaggauaauugc

SEQ ID NO: 906731 - RNA, 22 nt, Human
agaauccuguuuuacuucauca

SEQ ID NO: 906732 - RNA, 21 nt, Human
ucuuccugacauaugcaaggc

SEQ ID NO: 906733 - RNA, 19 nt, Human
gcugagguggaggaaggag

SEQ ID NO: 906734 - RNA, 19 nt, Human
ccauauaaccagcaagugu

SEQ ID NO: 906735 - RNA, 22 nt, Human
uuuaguguaagcauaaagaaca

SEQ ID NO: 906736 - RNA, 22 nt, Human
aggcugucaucuuugcaggcag

SEQ ID NO: 906737 - RNA, 22 nt, Human
ucucucagacuccccaugguuu

SEQ ID NO: 906738 - RNA, 20 nt, Human
ggcacaguuuuugcaccugc

SEQ ID NO: 906739 - RNA, 22 nt, Human
uaacaaugcaaaaugaauuuag

SEQ ID NO: 906740 - RNA, 22 nt, Human
acuaggaaguggcaaaacugga

SEQ ID NO: 906741 - RNA, 22 nt, Human
gcaugagggggguuaggaaguu

SEQ ID NO: 906742 - RNA, 22 nt, Human
cuggacagugcugcuugagaug

SEQ ID NO: 906743 - RNA, 22 nt, Human
ucuucaaacugaaaauuuagaa

SEQ ID NO: 906744 - RNA, 22 nt, Human
guucuuuaaguggagaaggaaa

SEQ ID NO: 906745 - RNA, 22 nt, Human
ucacgagggcccugggcagcug

SEQ ID NO: 906746 - RNA, 22 nt, Human
acaagaagucacaucuaggagu

SEQ ID NO: 906747 - RNA, 22 nt, Human
uaaaauguagcuucuaggcugg

SEQ ID NO: 906748 - RNA, 22 nt, Human
cugagccccaucugaggugccc

SEQ ID NO: 906749 - RNA, 19 nt, Human
ccauucauauagacagcag

SEQ ID NO: 906750 - RNA, 22 nt, Human
caaagagcuguucagugucgcu

SEQ ID NO: 906751 - RNA, 22 nt, Human
cacuggcauuagucacgaggca

SEQ ID NO: 906752 - RNA, 22 nt, Human
accacccaccucacagcauagu

SEQ ID NO: 906753 - RNA, 22 nt, Human
cagucuccaaaucagucugaau

SEQ ID NO: 906754 - RNA, 22 nt, Human
uaauggcauugauuacaugaaa

SEQ ID NO: 906755 - RNA, 22 nt, Human
caggacugauguuccuccagcc

SEQ ID NO: 906756 - RNA, 22 nt, Human
guugauuuagugagugagcagu

SEQ ID NO: 906757 - RNA, 22 nt, Human
ucagcagaggggaaggcaucug

SEQ ID NO: 906758 - RNA, 22 nt, Human
uagauucuuugcuagaucauug

SEQ ID NO: 906759 - RNA, 22 nt, Human
acuugucuuuaauccgaaugua

SEQ ID NO: 906760 - RNA, 19 nt, Human
agaggcagucuccaacagg

SEQ ID NO: 906761 - RNA, 22 nt, Human
caaaggaggugauaggcccucu

SEQ ID NO: 906762 - RNA, 22 nt, Human
ugcuggagcaucugagagcauc

SEQ ID NO: 906763 - RNA, 22 nt, Human
agccagauacuuggaaagaccc

SEQ ID NO: 906764 - RNA, 22 nt, Human
aacacauuggaagccaagaaug

SEQ ID NO: 906765 - RNA, 22 nt, Human
uuucuuaggcucuaaaaugacu

SEQ ID NO: 906766 - RNA, 22 nt, Human
uggcagggaguugcaggauuuc

SEQ ID NO: 906767 - RNA, 22 nt, Human
gauguccauuucaaaccucauu

SEQ ID NO: 906768 - RNA, 22 nt, Human
gggcuggcuaagacuuuucugu

SEQ ID NO: 906769 - RNA, 21 nt, Human
agaugcaguuaugagaugcag

SEQ ID NO: 906770 - RNA, 22 nt, Human
gcuguuccugcuuagaggucgg

SEQ ID NO: 906771 - RNA, 22 nt, Human
cagggcaguaccgcccucuggc

SEQ ID NO: 906772 - RNA, 19 nt, Human
gguuuaucuguuucuucuc

SEQ ID NO: 906773 - RNA, 22 nt, Human
augcuuuagugucaaguuuggg

SEQ ID NO: 906774 - RNA, 22 nt, Human
ucagaaaagaccacauuauucu

SEQ ID NO: 906775 - RNA, 22 nt, Human
uucauugaaauacagucuugac

SEQ ID NO: 906776 - RNA, 22 nt, Human
agggagacacaugaggaaguca

SEQ ID NO: 906777 - RNA, 22 nt, Human
aguuuauguaaaauuaguaaug

SEQ ID NO: 906778 - RNA, 22 nt, Human
uauucuugacugcuuacuaugu

SEQ ID NO: 906779 - RNA, 22 nt, Human
agauguggccuuugggagauua

SEQ ID NO: 906780 - RNA, 19 nt, Human
uuacaauggugauuagguu

SEQ ID NO: 906781 - RNA, 22 nt, Human
agcaaggaguagaacaagagug

SEQ ID NO: 906782 - RNA, 22 nt, Human
agcacacaucacuucugcucau

SEQ ID NO: 906783 - RNA, 22 nt, Human
guuacaaagcacuucaagugaa

SEQ ID NO: 906784 - RNA, 22 nt, Human
caaagugaguuauaaacaucuu

SEQ ID NO: 906785 - RNA, 22 nt, Human
gugagcagaacagguggcuucu

SEQ ID NO: 906786 - RNA, 22 nt, Human
cucuucuguaccucggccucca

SEQ ID NO: 906787 - RNA, 22 nt, Human
uuccagagcuuugcgcuuggaa

SEQ ID NO: 906788 - RNA, 22 nt, Human
ccagcuccaggacugggagcug

SEQ ID NO: 906789 - RNA, 23 nt, Human
ccuggggagcuguauccagagug

SEQ ID NO: 906790 - RNA, 22 nt, Human
gaugcaggauagcuucacccag

SEQ ID NO: 906791 - RNA, 22 nt, Human
aggaaugguuauggggauagua

SEQ ID NO: 906792 - RNA, 22 nt, Human
ucugcaggaggcuggcugcagg

SEQ ID NO: 906793 - RNA, 22 nt, Human
gugggaagucucucggaggaag

SEQ ID NO: 906794 - RNA, 22 nt, Human
agagaagggguaaagaguccug

SEQ ID NO: 906795 - RNA, 22 nt, Human
uauguguggagccagccuggag

SEQ ID NO: 906796 - RNA, 22 nt, Human
guucuauucuccaguuacauau

SEQ ID NO: 906797 - RNA, 22 nt, Human
gagguccagccaagcggcaagg

SEQ ID NO: 906798 - RNA, 22 nt, Human
aaugguaauuugcagaaagucc

SEQ ID NO: 906799 - RNA, 22 nt, Human
augggaggcagcagagcccagc

SEQ ID NO: 906800 - RNA, 22 nt, Human
gguuugacagcuuggggcuguc

SEQ ID NO: 906801 - RNA, 22 nt, Human
acuguucugccaacuuugguua

SEQ ID NO: 906802 - RNA, 22 nt, Human
cccuucccuucugggagaucca

SEQ ID NO: 906803 - RNA, 22 nt, Human
ugaaaccacugaugguaccaag

SEQ ID NO: 906804 - RNA, 22 nt, Human
acaggcacucucauuaaaauag

SEQ ID NO: 906805 - RNA, 22 nt, Human
aggugccaauuuucagugaaca

SEQ ID NO: 906806 - RNA, 21 nt, Human
aaaaguuugacaggaaaggga

SEQ ID NO: 906807 - RNA, 22 nt, Human
aggcuggcauacauuuguucuu

SEQ ID NO: 906808 - RNA, 22 nt, Human
uggcccaggaggccagagggca

SEQ ID NO: 906809 - RNA, 22 nt, Human
aauguacagcugcugcugaagg

SEQ ID NO: 906810 - RNA, 22 nt, Human
ggagcagccacgucucagggca

SEQ ID NO: 906811 - RNA, 22 nt, Human
uggcugcuagccagagcuucag

SEQ ID NO: 906812 - RNA, 22 nt, Human
gaacaggguuugagaggcuuag

SEQ ID NO: 906813 - RNA, 22 nt, Human
uaaguaguuuguagccccauag

SEQ ID NO: 906814 - RNA, 22 nt, Human
ccuggcagcuccuccccggcgg

SEQ ID NO: 906815 - RNA, 22 nt, Human
gggcugacaaccaucugacaag

SEQ ID NO: 906816 - RNA, 22 nt, Human
uguaccagaugucuaaagccau

SEQ ID NO: 906817 - RNA, 22 nt, Human
cacaguacgcacccgauacaug

SEQ ID NO: 906818 - RNA, 16 nt, Human
guggcagccccuucuc

SEQ ID NO: 906819 - RNA, 22 nt, Human
gagcugcccugagcuuugcaug

SEQ ID NO: 906820 - RNA, 22 nt, Human
uuuuuuggauaauaaacgaucu

SEQ ID NO: 906821 - RNA, 22 nt, Human
ugggaguugagacauuuugccc

SEQ ID NO: 906822 - RNA, 22 nt, Human
cuucauaauuaccuugucugcc

SEQ ID NO: 906823 - RNA, 22 nt, Human
ugaaguuguuaagguugccauu

SEQ ID NO: 906824 - RNA, 22 nt, Human
gcugcccuguuuagccaggguu

SEQ ID NO: 906825 - RNA, 22 nt, Human
ucuguccaagacaccauagugg

SEQ ID NO: 906826 - RNA, 22 nt, Human
auacugauugauauucccauga

SEQ ID NO: 906827 - RNA, 22 nt, Human
auuuagagaauaagacauaaau

SEQ ID NO: 906828 - RNA, 22 nt, Human
ugugcucuucuguuacuuguag

SEQ ID NO: 906829 - RNA, 22 nt, Human
uuucucauggacccuucaugau

SEQ ID NO: 906830 - RNA, 22 nt, Human
uuugcuauaaaagggucacacg

SEQ ID NO: 906831 - RNA, 22 nt, Human
ugcaugauagagaugguauuag

SEQ ID NO: 906832 - RNA, 22 nt, Human
gaagcagcuaggaucuucauuu

SEQ ID NO: 906833 - RNA, 22 nt, Human
ugucuacaaacguguacacauu

SEQ ID NO: 906834 - RNA, 22 nt, Human
uucuuacauuagucugugcuuu

SEQ ID NO: 906835 - RNA, 22 nt, Human
aucagugcugggagaugucaga

SEQ ID NO: 906836 - RNA, 22 nt, Human
agagagucuuucucuuccuguu

SEQ ID NO: 906837 - RNA, 17 nt, Human
uccuccccgcaguugca

SEQ ID NO: 906838 - RNA, 22 nt, Human
caggauggucagaugcauuguc

SEQ ID NO: 906839 - RNA, 22 nt, Human
guuauuaaaguauuugauguua

SEQ ID NO: 906840 - RNA, 22 nt, Human
uuaaacagacaguaaaugaaac

SEQ ID NO: 906841 - RNA, 22 nt, Human
auaaagucauuaugaagaucua

SEQ ID NO: 906842 - RNA, 23 nt, Human
aauuaucuauuucaaauuuagca

SEQ ID NO: 906843 - RNA, 22 nt, Human
ucaagcaaucucugugucccug

SEQ ID NO: 906844 - RNA, 22 nt, Human
auguauacgugcaagucacagg

SEQ ID NO: 906845 - RNA, 22 nt, Human
gagcugugauuggugucucacu

SEQ ID NO: 906846 - RNA, 22 nt, Human
ugcuggcuacauuauugcuguc

SEQ ID NO: 906847 - RNA, 22 nt, Human
aaaauguucaagcaugcugguu

SEQ ID NO: 906848 - RNA, 22 nt, Human
ugcuuuaaaauggacuguuuug

SEQ ID NO: 906849 - RNA, 22 nt, Human
uuucugcuaaucuuuuacugag

SEQ ID NO: 906850 - RNA, 22 nt, Human
uugguuuguucaccaucaagca

SEQ ID NO: 906851 - RNA, 22 nt, Human
augucccaagauacagcuagag

SEQ ID NO: 906852 - RNA, 20 nt, Human
aauucugucuuuucugcugc

SEQ ID NO: 906853 - RNA, 22 nt, Human
auacaguauaacuaauaaaccc

SEQ ID NO: 906854 - RNA, 22 nt, Human
auuauauaggacuugcccuucc

SEQ ID NO: 906855 - RNA, 22 nt, Human
uauuuucaucuuguccuuggau

SEQ ID NO: 906856 - RNA, 22 nt, Human
gacaggcuuccuaagugccaga

SEQ ID NO: 906857 - RNA, 22 nt, Human
gcuucuggugaggccucaggaa

SEQ ID NO: 906858 - RNA, 22 nt, Human
ugcggagggagcagucggcugu

SEQ ID NO: 906859 - RNA, 23 nt, Human
uucauaacucaaggugauauaau

SEQ ID NO: 906860 - RNA, 21 nt, Human
gccaaggggguagcuauuccu

SEQ ID NO: 906861 - RNA, 22 nt, Human
uucugcauaggcuauauuuguu

SEQ ID NO: 906862 - RNA, 22 nt, Human
acguggagagaauagggcacca

SEQ ID NO: 906863 - RNA, 22 nt, Human
guuacaaauguaaauucugggg

SEQ ID NO: 906864 - RNA, 22 nt, Human
ugcuuauugcuuucaagacugu

SEQ ID NO: 906865 - RNA, 22 nt, Human
caauuucacuaauaauauuuac

SEQ ID NO: 906866 - RNA, 20 nt, Human
gccuguucacaggcuucuug

SEQ ID NO: 906867 - RNA, 22 nt, Human
ucagggaguguuggcaggauca

SEQ ID NO: 906868 - RNA, 22 nt, Human
aaaguucuuugcaucuuugcuc

SEQ ID NO: 906869 - RNA, 22 nt, Human
aacacauugccagagaucagca

SEQ ID NO: 906870 - RNA, 22 nt, Human
uagaaacucaggauacucuucc

SEQ ID NO: 906871 - RNA, 22 nt, Human
ucuguaaagacuccaaaagcca

SEQ ID NO: 906872 - RNA, 22 nt, Human
uuuggaaauuacucauuguccu

SEQ ID NO: 906873 - RNA, 17 nt, Human
ugcagcugauggggaaa

SEQ ID NO: 906874 - RNA, 22 nt, Human
cugaaggggguuucacugagcu

SEQ ID NO: 906875 - RNA, 22 nt, Human
uggcgagguuucagagagcggc

SEQ ID NO: 906876 - RNA, 22 nt, Human
uagugucugacauuuaagagca

SEQ ID NO: 906877 - RNA, 22 nt, Human
aaguuuguucauucauucaucc

SEQ ID NO: 906878 - RNA, 22 nt, Human
aaccugaauuacuuuugcacca

SEQ ID NO: 906879 - RNA, 22 nt, Human
aaagaguucuaugaucuuucca

SEQ ID NO: 906880 - RNA, 22 nt, Human
agucucuugcacauuguauuaa

SEQ ID NO: 906881 - RNA, 22 nt, Human
uggcagggugccaguugcgagu

SEQ ID NO: 906882 - RNA, 19 nt, Human
uauggcaggccgaggcacu

SEQ ID NO: 906883 - RNA, 22 nt, Human
cuccuguggcuuucugauuuca

SEQ ID NO: 906884 - RNA, 22 nt, Human
ugaaauguacauaaaaacgcac

SEQ ID NO: 906885 - RNA, 22 nt, Human
augcagacaugggagaguugag

SEQ ID NO: 906886 - RNA, 22 nt, Human
gacugggguaaggugaggaggu

SEQ ID NO: 906887 - RNA, 22 nt, Human
agguggagugugcagggagagc

SEQ ID NO: 906888 - RNA, 22 nt, Human
ugagcacauuucacaugacagg

SEQ ID NO: 906889 - RNA, 22 nt, Human
gcuccugaaggcucugcagggu

SEQ ID NO: 906890 - RNA, 22 nt, Human
uaaacuaucuguguuugaaguu

SEQ ID NO: 906891 - RNA, 21 nt, Human
agaagggauugugguaaagau

SEQ ID NO: 906892 - RNA, 19 nt, Human
cuggcaaaugcuuuggcca

SEQ ID NO: 906893 - RNA, 22 nt, Human
ccagagcuccagggcuacagaa

SEQ ID NO: 906894 - RNA, 21 nt, Human
gggcauccuuucccacccugc

SEQ ID NO: 906895 - RNA, 22 nt, Human
cuaaagucauacaaggugggag

SEQ ID NO: 906896 - RNA, 22 nt, Human
uuguuuccauugcagacugugu

SEQ ID NO: 906897 - RNA, 22 nt, Human
uggcaguuuacagaguucugaa

SEQ ID NO: 906898 - RNA, 21 nt, Human
uacagaugaggagaccaaggc

SEQ ID NO: 906899 - RNA, 22 nt, Human
aauguucagggcagcccugcua

SEQ ID NO: 906900 - RNA, 22 nt, Human
ugguuagacucaccuuauaguu

SEQ ID NO: 906901 - RNA, 22 nt, Human
ugccaagcuagaacguucccag

SEQ ID NO: 906902 - RNA, 22 nt, Human
ugucugggauguaauuccugcc

SEQ ID NO: 906903 - RNA, 22 nt, Human
auagaucauuugcauuggucgu

SEQ ID NO: 906904 - RNA, 22 nt, Human
cuggccuaaaauugcuucugca

SEQ ID NO: 906905 - RNA, 22 nt, Human
uuucuuucucguaaacuuaguu

SEQ ID NO: 906906 - RNA, 22 nt, Human
aggccugcagcaggagcaaacc

SEQ ID NO: 906907 - RNA, 22 nt, Human
ucugauucauucaugugcacca

SEQ ID NO: 906908 - RNA, 22 nt, Human
aagccagauagaagaacucauu

SEQ ID NO: 906909 - RNA, 22 nt, Human
ggaagaaagguggacaacaggu

SEQ ID NO: 906910 - RNA, 18 nt, Human
ggguccugugggagacag

SEQ ID NO: 906911 - RNA, 22 nt, Human
agugggagaaugaauaagggcc

SEQ ID NO: 906912 - RNA, 22 nt, Human
uucuggcuguaugauauuuaau

SEQ ID NO: 906913 - RNA, 22 nt, Human
ucuuggcaggcagugggguaag

SEQ ID NO: 906914 - RNA, 22 nt, Human
caggcagcguccugcuuccugu

SEQ ID NO: 906915 - RNA, 22 nt, Human
caaagcagagccagagcuuguc

SEQ ID NO: 906916 - RNA, 22 nt, Human
cagggccagggcuauggugaag

SEQ ID NO: 906917 - RNA, 19 nt, Human
auguuuuaugcugauggga

SEQ ID NO: 906918 - RNA, 22 nt, Human
gaggggucuuuuguugucaggg

SEQ ID NO: 906919 - RNA, 22 nt, Human
cuucuggguguggagugaggac

SEQ ID NO: 906920 - RNA, 22 nt, Human
acagccaggaauucuggagaag

SEQ ID NO: 906921 - RNA, 22 nt, Human
cagcuucuucaguccuggagcu

SEQ ID NO: 906922 - RNA, 20 nt, Human
uccugcuuccaccagagcac

SEQ ID NO: 906923 - RNA, 22 nt, Human
aaagaucuccccuucaaagagu

SEQ ID NO: 906924 - RNA, 22 nt, Human
gcagucuuuucugugacuggcu

SEQ ID NO: 906925 - RNA, 22 nt, Human
acagcugcacacugaacuuggu

SEQ ID NO: 906926 - RNA, 22 nt, Human
guucuucaguaaaauuaaaugu

SEQ ID NO: 906927 - RNA, 22 nt, Human
ucauuuacacuucacaaaugga

SEQ ID NO: 906928 - RNA, 22 nt, Human
ggaaaauuuccuucaaaaugug

SEQ ID NO: 906929 - RNA, 23 nt, Human
ccucucuuuuuaggugguguuug

SEQ ID NO: 906930 - RNA, 17 nt, Human
uuuguucauugaagaga

SEQ ID NO: 906931 - RNA, 21 nt, Human
ggccacaguuagggcucagga

SEQ ID NO: 906932 - RNA, 22 nt, Human
uuuagugccugguuuccuucuu

SEQ ID NO: 906933 - RNA, 22 nt, Human
gcucccagcauugcugcugaau

SEQ ID NO: 906934 - RNA, 22 nt, Human
uuacugcacgugggacauauau

SEQ ID NO: 906935 - RNA, 19 nt, Human
ugggcagugccagggcuua

SEQ ID NO: 906936 - RNA, 22 nt, Human
agugaaauuuguuuagauaggu

SEQ ID NO: 906937 - RNA, 22 nt, Human
ucugguccccauuccagguggg

SEQ ID NO: 906938 - RNA, 22 nt, Human
ucuugcagacagcuuccagccu

SEQ ID NO: 906939 - RNA, 22 nt, Human
agggcugcugcuccgggcccag

SEQ ID NO: 906940 - RNA, 22 nt, Human
uguuuacaagccacuuguuaag

SEQ ID NO: 906941 - RNA, 22 nt, Human
uagaaacucacguuaucauugc

SEQ ID NO: 906942 - RNA, 22 nt, Human
aguuacaaguacaggcuuugga

SEQ ID NO: 906943 - RNA, 22 nt, Human
gcugggaagugcaagaucaagg

SEQ ID NO: 906944 - RNA, 22 nt, Human
cauccugcggggagcagagggc

SEQ ID NO: 906945 - RNA, 22 nt, Human
gcagggcaucccugagcgggug

SEQ ID NO: 906946 - RNA, 22 nt, Human
auuuacagacguggauuagugc

SEQ ID NO: 906947 - RNA, 22 nt, Human
agucugggcauuuaggauguug

SEQ ID NO: 906948 - RNA, 22 nt, Human
uuccacugauuuugguugaccu

SEQ ID NO: 906949 - RNA, 22 nt, Human
cugagggcagugaugaagguga

SEQ ID NO: 906950 - RNA, 22 nt, Human
caacugaucuauuuccuaacug

SEQ ID NO: 906951 - RNA, 22 nt, Human
gggcuccagccagcuccuugug

SEQ ID NO: 906952 - RNA, 22 nt, Human
augcaagagcaauaugguaugc

SEQ ID NO: 906953 - RNA, 22 nt, Human
ucaagaacuggaaauugauaug

SEQ ID NO: 906954 - RNA, 20 nt, Human
ucugagaagcaaacaauguu

SEQ ID NO: 906955 - RNA, 22 nt, Human
agugaacaaagguagugagcau

SEQ ID NO: 906956 - RNA, 22 nt, Human
acaguguuccuuuguugugacu

SEQ ID NO: 906957 - RNA, 19 nt, Human
gggcuggagggauagagcc

SEQ ID NO: 906958 - RNA, 20 nt, Human
gagucacagaagaagcugaa

SEQ ID NO: 906959 - RNA, 22 nt, Human
auguacaaaaugccacugaauu

SEQ ID NO: 906960 - RNA, 22 nt, Human
ucucucagcuuugagaccugcu

SEQ ID NO: 906961 - RNA, 22 nt, Human
cugcuguggaugcaggaccuca

SEQ ID NO: 906962 - RNA, 22 nt, Human
cagcugugauuccugcugucca

SEQ ID NO: 906963 - RNA, 22 nt, Human
gggccuggcaugcagccccguu

SEQ ID NO: 906964 - RNA, 20 nt, Human
caugacacuguuccucugcc

SEQ ID NO: 906965 - RNA, 22 nt, Human
aaagccacaguucuaugucugc

SEQ ID NO: 906966 - RNA, 22 nt, Human
agagggaaugugauugcaccau

SEQ ID NO: 906967 - RNA, 22 nt, Human
cuucagagaacuugaucgcugc

SEQ ID NO: 906968 - RNA, 22 nt, Human
uguucaguuaacacagacacca

SEQ ID NO: 906969 - RNA, 22 nt, Human
cccaggagagggaaccaaaugu

SEQ ID NO: 906970 - RNA, 22 nt, Human
uugcuaaucauauuucaucacu

SEQ ID NO: 906971 - RNA, 22 nt, Human
ucugaagagcuuuggaaguaug

SEQ ID NO: 906972 - RNA, 22 nt, Human
cuggcccagagagcagagcuua

SEQ ID NO: 906973 - RNA, 22 nt, Human
augcugugucaggaauuugaua

SEQ ID NO: 906974 - RNA, 23 nt, Human
uguacaguuguuugacucagcuc

SEQ ID NO: 906975 - RNA, 22 nt, Human
cagcugggagcuccauuagaua

SEQ ID NO: 906976 - RNA, 22 nt, Human
aaagcaugugaauagaauaugg

SEQ ID NO: 906977 - RNA, 22 nt, Human
ucauuagaaaugcagauucuca

SEQ ID NO: 906978 - RNA, 22 nt, Human
ccagaagucaaguaagaugaag

SEQ ID NO: 906979 - RNA, 22 nt, Human
cugggcagaauuuuaggauggc

SEQ ID NO: 906980 - RNA, 19 nt, Human
aaggaauggcuuuaaguag

SEQ ID NO: 906981 - RNA, 18 nt, Human
acaggcugugggaauggu

SEQ ID NO: 906982 - RNA, 22 nt, Human
cuagaauaucauaugaagagac

SEQ ID NO: 906983 - RNA, 22 nt, Human
augaaauguaugagucuggguu

SEQ ID NO: 906984 - RNA, 22 nt, Human
aaguuccuauauccaaauacag

SEQ ID NO: 906985 - RNA, 22 nt, Human
aggaaauugggacacagagaaa

SEQ ID NO: 906986 - RNA, 22 nt, Human
uauggccaaucggguggacgcc

SEQ ID NO: 906987 - RNA, 22 nt, Human
ugaggaaggaauugagguuuua

SEQ ID NO: 906988 - RNA, 22 nt, Human
gcaggugaaugauggacuagga

SEQ ID NO: 906989 - RNA, 22 nt, Human
acaauuacucaacuuugcugcu

SEQ ID NO: 906990 - RNA, 22 nt, Human
uccaugaggcagggaggcuggc

SEQ ID NO: 906991 - RNA, 22 nt, Human
uuaacacauauuuaucaauugc

SEQ ID NO: 906992 - RNA, 22 nt, Human
gcagugauuggaucagagaugg

SEQ ID NO: 906993 - RNA, 22 nt, Human
ggggaagaaccgggauucccau

SEQ ID NO: 906994 - RNA, 22 nt, Human
gucugggcaagggagauggcgc

SEQ ID NO: 906995 - RNA, 22 nt, Human
gcugccugucccaggaugagga

SEQ ID NO: 906996 - RNA, 22 nt, Human
cuggaggacagaggccaugucu

SEQ ID NO: 906997 - RNA, 22 nt, Human
uauugcaucauccugcaggggu

SEQ ID NO: 906998 - RNA, 22 nt, Human
ugcugcuuugauguguaaauca

SEQ ID NO: 906999 - RNA, 22 nt, Human
gguguuggaacauggugagauu

SEQ ID NO: 907000 - RNA, 22 nt, Human
cauguaaagcauccuucuaggg

SEQ ID NO: 907001 - RNA, 21 nt, Human
agugaaauugcaucagaggga

SEQ ID NO: 907002 - RNA, 22 nt, Human
aaacuucuugcugcauuuucug

SEQ ID NO: 907003 - RNA, 22 nt, Human
ggguccagcuacaucagggugg

SEQ ID NO: 907004 - RNA, 22 nt, Human
cuggucugagggcucuugaggc

SEQ ID NO: 907005 - RNA, 22 nt, Human
uuaaagagaaaguguuugucuu

SEQ ID NO: 907006 - RNA, 22 nt, Human
agaugagggguagaaaggacuu

SEQ ID NO: 907007 - RNA, 22 nt, Human
ggcuguggacacugagcucaga

SEQ ID NO: 907008 - RNA, 22 nt, Human
cucuagaacagugcugagccuu

SEQ ID NO: 907009 - RNA, 22 nt, Human
accuggaaugggguugagagcu

SEQ ID NO: 907010 - RNA, 22 nt, Human
uggcccaguagaaaagggaucg

SEQ ID NO: 907011 - RNA, 22 nt, Human
ccugagggucaaggagcccuag

SEQ ID NO: 907012 - RNA, 22 nt, Human
augugucuaauuccaggagcac

SEQ ID NO: 907013 - RNA, 22 nt, Human
ugcaagaggagacuguacucag

SEQ ID NO: 907014 - RNA, 19 nt, Human
cagaggcaccagguauaga

SEQ ID NO: 907015 - RNA, 22 nt, Human
uggcaccuggugcaggguggcc

SEQ ID NO: 907016 - RNA, 22 nt, Human
uccucagggaagaugagccuca

SEQ ID NO: 907017 - RNA, 21 nt, Human
uucauugaacuauuuguggag

SEQ ID NO: 907018 - RNA, 22 nt, Human
uaaauguagucaaaggagccuc

SEQ ID NO: 907019 - RNA, 22 nt, Human
uauguauaaaugcaugugugga

SEQ ID NO: 907020 - RNA, 18 nt, Human
ggcacuggugaugcagag

SEQ ID NO: 907021 - RNA, 22 nt, Human
auguguaaaaagugcuuaauau

SEQ ID NO: 907022 - RNA, 22 nt, Human
caggaggcccaaagggcgcaga

SEQ ID NO: 907023 - RNA, 22 nt, Human
auuuugcugugguacauuagga

SEQ ID NO: 907024 - RNA, 22 nt, Human
cugcacagagcagggcagacac

SEQ ID NO: 907025 - RNA, 22 nt, Human
ucaggcagcuccaggaauggua

SEQ ID NO: 907026 - RNA, 22 nt, Human
acauguaagacuagcuuaaagu

SEQ ID NO: 907027 - RNA, 22 nt, Human
cugcuguuugccgucauugccu

SEQ ID NO: 907028 - RNA, 22 nt, Human
ugcuuuuuccccuucuggcgag

SEQ ID NO: 907029 - RNA, 22 nt, Human
cuucagcugcaguuauguuuag

SEQ ID NO: 907030 - RNA, 22 nt, Human
aaaucagaaaauauggagagga

SEQ ID NO: 907031 - RNA, 22 nt, Human
acagacaugggccgcucuugag

SEQ ID NO: 907032 - RNA, 23 nt, Human
uuccuuaacuguuaagauugucu

SEQ ID NO: 907033 - RNA, 22 nt, Human
ucccaggaucugagggcagaga

SEQ ID NO: 907034 - RNA, 23 nt, Human
ggcuccaggccugacgggcgcgg

SEQ ID NO: 907035 - RNA, 22 nt, Human
ugguauuuccaggcuuauggua

SEQ ID NO: 907036 - RNA, 22 nt, Human
aaaaguuuaagacucauucuag

SEQ ID NO: 907037 - RNA, 22 nt, Human
aacaggggauuagauagcaggc

SEQ ID NO: 907038 - RNA, 22 nt, Human
cuuguguuguacauucuauggg

SEQ ID NO: 907039 - RNA, 22 nt, Human
aauagcaaacagacaugcacaa

SEQ ID NO: 907040 - RNA, 19 nt, Human
gcuguucugaccaucaccc

SEQ ID NO: 907041 - RNA, 22 nt, Human
cauuuggaccaaaauagccaac

SEQ ID NO: 907042 - RNA, 22 nt, Human
uuuaucagaaguuagagaaaga

SEQ ID NO: 907043 - RNA, 22 nt, Human
gccuggucucuuucaugucagu

SEQ ID NO: 907044 - RNA, 22 nt, Human
ugccaggcuuagagcaggggcu

SEQ ID NO: 907045 - RNA, 19 nt, Human
ugcacacagauaaguaucu

SEQ ID NO: 907046 - RNA, 22 nt, Human
aagguacaguuuuaagaauaag

SEQ ID NO: 907047 - RNA, 22 nt, Human
aguguuuuauuagaacacagcc

SEQ ID NO: 907048 - RNA, 22 nt, Human
aguccuuugcugaacugucaca

SEQ ID NO: 907049 - RNA, 22 nt, Human
ucacccagaaaagacagcagau

SEQ ID NO: 907050 - RNA, 22 nt, Human
cagagccagcuguccuuggcau

SEQ ID NO: 907051 - RNA, 22 nt, Human
ccagcucugcagggccuggggu

SEQ ID NO: 907052 - RNA, 22 nt, Human
gucuuuuuauuauagaguggag

SEQ ID NO: 907053 - RNA, 22 nt, Human
uuguacacacaggaacaaacgu

SEQ ID NO: 907054 - RNA, 22 nt, Human
uggucagaugcugaguggaucu

SEQ ID NO: 907055 - RNA, 22 nt, Human
cccacaggacgggcuaaagagu

SEQ ID NO: 907056 - RNA, 22 nt, Human
gucuccuccauggagaugguau

SEQ ID NO: 907057 - RNA, 22 nt, Human
uggugccaucauagcucacugc

SEQ ID NO: 907058 - RNA, 22 nt, Human
cuuucuuugcagugagccagag

SEQ ID NO: 907059 - RNA, 22 nt, Human
agagucagcuuaugacacaguc

SEQ ID NO: 907060 - RNA, 22 nt, Human
augggcugcuucuccagcaccu

SEQ ID NO: 907061 - RNA, 22 nt, Human
augcauauagaacauuugacau

SEQ ID NO: 907062 - RNA, 22 nt, Human
aagcccuuggcagaguucccca

SEQ ID NO: 907063 - RNA, 23 nt, Human
cagcugaagcagccugggcugga

SEQ ID NO: 907064 - RNA, 20 nt, Human
agaaggcauuccucauucuu

SEQ ID NO: 907065 - RNA, 21 nt, Human
gguauucugugucaccuuugg

SEQ ID NO: 907066 - RNA, 22 nt, Human
auuccuuguuucacugaaaagg

SEQ ID NO: 907067 - RNA, 22 nt, Human
uggaaggcuuggaauacuucca

SEQ ID NO: 907068 - RNA, 21 nt, Human
ggggucaagugaaugguguug

SEQ ID NO: 907069 - RNA, 22 nt, Human
ccagagcccagggucaugcagg

SEQ ID NO: 907070 - RNA, 22 nt, Human
aaaugcuaacaaggaaugcugc

SEQ ID NO: 907071 - RNA, 22 nt, Human
cugaggugagaggaggccaugu

SEQ ID NO: 907072 - RNA, 22 nt, Human
ucucugggagccaggaugacac

SEQ ID NO: 907073 - RNA, 22 nt, Human
uuggcccacucucagaaugugg

SEQ ID NO: 907074 - RNA, 22 nt, Human
ugcagcaagaaggcacugucug

SEQ ID NO: 907075 - RNA, 17 nt, Human
aaucucaguggcuuaag

SEQ ID NO: 907076 - RNA, 22 nt, Human
uccagagaacgaugaaagcugg

SEQ ID NO: 907077 - RNA, 22 nt, Human
cucugugcuuaugcuccauggg

SEQ ID NO: 907078 - RNA, 22 nt, Human
agggccuggcuucacuuucuca

SEQ ID NO: 907079 - RNA, 18 nt, Human
gagcugggagaaggaagg

SEQ ID NO: 907080 - RNA, 20 nt, Human
uucugcuugcaaauaucaag

SEQ ID NO: 907081 - RNA, 22 nt, Human
acagggaacaggaauauacaaa

SEQ ID NO: 907082 - RNA, 22 nt, Human
uaaaucuucuacaucaucauaa

SEQ ID NO: 907083 - RNA, 22 nt, Human
gcauggcuuacagaggcugcag

SEQ ID NO: 907084 - RNA, 22 nt, Human
uuguucacuaugaagagguugg

SEQ ID NO: 907085 - RNA, 22 nt, Human
ugcuuccuucccguucuucucc

SEQ ID NO: 907086 - RNA, 22 nt, Human
ugcccagccaauuuguuauguu

SEQ ID NO: 907087 - RNA, 22 nt, Human
ugucauuuaguccucugugugu

SEQ ID NO: 907088 - RNA, 22 nt, Human
augaauaaaacauuuuaaucag

SEQ ID NO: 907089 - RNA, 22 nt, Human
auauuaaugggauuuagucagg

SEQ ID NO: 907090 - RNA, 22 nt, Human
aaaguuguuuccuaaggucuaa

SEQ ID NO: 907091 - RNA, 20 nt, Human
caaauucuguugaauacacc

SEQ ID NO: 907092 - RNA, 22 nt, Human
uuuauccauucaccaguugaac

SEQ ID NO: 907093 - RNA, 22 nt, Human
acauuuguauauaugcagcaua

SEQ ID NO: 907094 - RNA, 22 nt, Human
aguccaaacaaacuucccgagg

SEQ ID NO: 907095 - RNA, 22 nt, Human
uggcuucaccucagcaugaagg

SEQ ID NO: 907096 - RNA, 22 nt, Human
ccauucauuuguugucagccuu

SEQ ID NO: 907097 - RNA, 22 nt, Human
aaggaacuuugcagaggugauu

SEQ ID NO: 907098 - RNA, 22 nt, Human
aagaacaugaaccucuucuaac

SEQ ID NO: 907099 - RNA, 21 nt, Human
acucaagugggcaugcgcaga

SEQ ID NO: 907100 - RNA, 22 nt, Human
aaacaaauagugcaugggaauu

SEQ ID NO: 907101 - RNA, 22 nt, Human
ggcauggacgucucugaggcca

SEQ ID NO: 907102 - RNA, 22 nt, Human
gcgugggguagguagacaugga

SEQ ID NO: 907103 - RNA, 22 nt, Human
ccaggaagaaacagucuuuaua

SEQ ID NO: 907104 - RNA, 22 nt, Human
ucaagaaacugugcuacagagu

SEQ ID NO: 907105 - RNA, 22 nt, Human
aguuuccucaucuguaaaauga

SEQ ID NO: 907106 - RNA, 22 nt, Human
gaacagcuauaaucaucugucc

SEQ ID NO: 907107 - RNA, 22 nt, Human
cugccuguuuccucuugcuccc

SEQ ID NO: 907108 - RNA, 22 nt, Human
ucacuaagugccgaguuuaguu

SEQ ID NO: 907109 - RNA, 22 nt, Human
ggccuggcugguucaguacccu

SEQ ID NO: 907110 - RNA, 22 nt, Human
ugggccuguuucccuucagggc

SEQ ID NO: 907111 - RNA, 22 nt, Human
cugcugaucgaaucagucaccc

SEQ ID NO: 907112 - RNA, 22 nt, Human
gauacacaugcaugugcaugua

SEQ ID NO: 907113 - RNA, 22 nt, Human
caggacuggaagucucaagaga

SEQ ID NO: 907114 - RNA, 22 nt, Human
guuuccuagaucaguguucuua

SEQ ID NO: 907115 - RNA, 22 nt, Human
aagucuuuugcugucauaggug

SEQ ID NO: 907116 - RNA, 22 nt, Human
ggagaaagaaauuuuugauugg

SEQ ID NO: 907117 - RNA, 22 nt, Human
aauucugaugaauaaaucaucc

SEQ ID NO: 907118 - RNA, 22 nt, Human
aaagugcugggauuacaagugu

SEQ ID NO: 907119 - RNA, 22 nt, Human
auuuaugacguguucggucaau

SEQ ID NO: 907120 - RNA, 22 nt, Human
augguguccccagccuuugaag

SEQ ID NO: 907121 - RNA, 22 nt, Human
uagaaaugauugagcuguaaua

SEQ ID NO: 907122 - RNA, 22 nt, Human
auugucaucgauguuagccagu

SEQ ID NO: 907123 - RNA, 22 nt, Human
ucugcauauuuaucaugagucu

SEQ ID NO: 907124 - RNA, 22 nt, Human
gcaggagccaggccgagcuggu

SEQ ID NO: 907125 - RNA, 22 nt, Human
caaggcugcaaaacuacauggg

SEQ ID NO: 907126 - RNA, 22 nt, Human
ugaacuuucacaagaauaugcu

SEQ ID NO: 907127 - RNA, 22 nt, Human
gcugugcugauucauucccugc

SEQ ID NO: 907128 - RNA, 22 nt, Human
aagcagagguagggugugcagu

SEQ ID NO: 907129 - RNA, 22 nt, Human
guccagagaggcaggaggcuac

SEQ ID NO: 907130 - RNA, 22 nt, Human
cagaaacagagaaauauuggcu

SEQ ID NO: 907131 - RNA, 22 nt, Human
ugcugaggcauuuggacagagu

SEQ ID NO: 907132 - RNA, 22 nt, Human
cuggcucccggggaucgagcac

SEQ ID NO: 907133 - RNA, 22 nt, Human
cugggccuccucugcccaagcu

SEQ ID NO: 907134 - RNA, 22 nt, Human
cuguuauuaaaaagcucaggcu

SEQ ID NO: 907135 - RNA, 22 nt, Human
uacugccaaauugcagcaaugu

SEQ ID NO: 907136 - RNA, 22 nt, Human
ugauuuuauugaaacuucacuu

SEQ ID NO: 907137 - RNA, 22 nt, Human
agaccacuuggauaagaaacag

SEQ ID NO: 907138 - RNA, 22 nt, Human
aggcuggcugacuucugaagca

SEQ ID NO: 907139 - RNA, 21 nt, Human
aggugccaaggagaagcaggc

SEQ ID NO: 907140 - RNA, 22 nt, Human
auuuuacuuugugaauauugac

SEQ ID NO: 907141 - RNA, 22 nt, Human
agcaaugauguuuucaaguagg

SEQ ID NO: 907142 - RNA, 21 nt, Human
ucaggaagagcuucucccacu

SEQ ID NO: 907143 - RNA, 22 nt, Human
ggcuggcgggugggugaaagac

SEQ ID NO: 907144 - RNA, 22 nt, Human
uccagaggcuccaaagggagau

SEQ ID NO: 907145 - RNA, 22 nt, Human
ucccccaacucuuagcacugua

SEQ ID NO: 907146 - RNA, 22 nt, Human
aaugucugcucuacucaggagg

SEQ ID NO: 907147 - RNA, 22 nt, Human
uaaagugcaugcggggccagau

SEQ ID NO: 907148 - RNA, 22 nt, Human
auucaagaggaacaaugaagau

SEQ ID NO: 907149 - RNA, 22 nt, Human
aaugguaauggagagaacuacu

SEQ ID NO: 907150 - RNA, 22 nt, Human
ucaggaagauuaguuuccuacc

SEQ ID NO: 907151 - RNA, 23 nt, Human
uuccagagucuucgacgguaggc

SEQ ID NO: 907152 - RNA, 22 nt, Human
ugucuccugagagcuggacaga

SEQ ID NO: 907153 - RNA, 22 nt, Human
ucucuaaagaagccucccuaaa

SEQ ID NO: 907154 - RNA, 22 nt, Human
agcuccugugugaagccucccu

SEQ ID NO: 907155 - RNA, 22 nt, Human
aguuggcauuccugcauccuau

SEQ ID NO: 907156 - RNA, 22 nt, Human
gcauucauauggaaggaaacua

SEQ ID NO: 907157 - RNA, 22 nt, Human
agggccuccagggcagcagugg

SEQ ID NO: 907158 - RNA, 23 nt, Human
uuucacagcuuuuauucugcauc

SEQ ID NO: 907159 - RNA, 22 nt, Human
gggugggacucuuuggccugag

SEQ ID NO: 907160 - RNA, 22 nt, Human
uaguauaauuguucuggaauca

SEQ ID NO: 907161 - RNA, 21 nt, Human
uugcauuuuaaguuuacugcu

SEQ ID NO: 907162 - RNA, 22 nt, Human
guccugggccugcugaggcuga

SEQ ID NO: 907163 - RNA, 18 nt, Human
agccaaggaggaggagga

SEQ ID NO: 907164 - RNA, 22 nt, Human
gcggggggcaggcaguacguug

SEQ ID NO: 907165 - RNA, 22 nt, Human
ucuccugaugaugguacuggca

SEQ ID NO: 907166 - RNA, 22 nt, Human
uggaccugaagaauaggaagua

SEQ ID NO: 907167 - RNA, 23 nt, Human
uccuaacugauucugcagucucu

SEQ ID NO: 907168 - RNA, 22 nt, Human
cagcugccuaugaccuagccuc

SEQ ID NO: 907169 - RNA, 22 nt, Human
gucuuauuagguuaacccugcu

SEQ ID NO: 907170 - RNA, 23 nt, Human
uguccuuuuugaggccuccuccu

SEQ ID NO: 907171 - RNA, 19 nt, Human
gcugggugggguccacagc

SEQ ID NO: 907172 - RNA, 22 nt, Human
uccagagauaacuauuuaggag

SEQ ID NO: 907173 - RNA, 22 nt, Human
acaagaaagguaggauucaggu

SEQ ID NO: 907174 - RNA, 22 nt, Human
ggcugcagaggcgaucugaggu

SEQ ID NO: 907175 - RNA, 22 nt, Human
uccugaacauuaugcaagcuuc

SEQ ID NO: 907176 - RNA, 22 nt, Human
gugccuggggguaauguaggau

SEQ ID NO: 907177 - RNA, 22 nt, Human
uuccugggacuggagcagccca

SEQ ID NO: 907178 - RNA, 22 nt, Human
cugccuggucucaggcaugggg

SEQ ID NO: 907179 - RNA, 22 nt, Human
auggacaggaacucccuuggca

SEQ ID NO: 907180 - RNA, 22 nt, Human
augguuuuguccucuuugguuc

SEQ ID NO: 907181 - RNA, 22 nt, Human
cugggaagaagugggcuacauu

SEQ ID NO: 907182 - RNA, 22 nt, Human
aacagcagggggaccugcuggu

SEQ ID NO: 907183 - RNA, 22 nt, Human
ggcagguuggaugcuguaguga

SEQ ID NO: 907184 - RNA, 22 nt, Human
cugagcauuugugcagcuucuc

SEQ ID NO: 907185 - RNA, 22 nt, Human
uccaagaaguuucguuaaaugu

SEQ ID NO: 907186 - RNA, 23 nt, Human
ugcuguggauggcagguccuugc

SEQ ID NO: 907187 - RNA, 22 nt, Human
ccugggcauaaaucacuccaag

SEQ ID NO: 907188 - RNA, 22 nt, Human
ugucuacuccugugcuagcucc

SEQ ID NO: 907189 - RNA, 22 nt, Human
gcucugguagauccucaggcuc

SEQ ID NO: 907190 - RNA, 22 nt, Human
agagauucugugucaaaacgaa

SEQ ID NO: 907191 - RNA, 22 nt, Human
aggcccuguuguagcauuuugg

SEQ ID NO: 907192 - RNA, 22 nt, Human
cuaggccagagagaccucauga

SEQ ID NO: 907193 - RNA, 21 nt, Human
aggcccuggaggucagagaaa

SEQ ID NO: 907194 - RNA, 22 nt, Human
ccugucugcagauaucucaggu

SEQ ID NO: 907195 - RNA, 22 nt, Human
cuggcagcaggucacacgcaga

SEQ ID NO: 907196 - RNA, 22 nt, Human
gccaggcauuauuccgaucccu

SEQ ID NO: 907197 - RNA, 22 nt, Human
uuuuccuguccaggcaauuauu

SEQ ID NO: 907198 - RNA, 22 nt, Human
ucugccaugcuaacuucaguau

SEQ ID NO: 907199 - RNA, 22 nt, Human
uauuugucaccuauggcugucc

SEQ ID NO: 907200 - RNA, 22 nt, Human
agggagacaaaagcagcugcca

SEQ ID NO: 907201 - RNA, 22 nt, Human
uccugaaaaauuacauguucag

SEQ ID NO: 907202 - RNA, 22 nt, Human
auucugggccccaucccagacc

SEQ ID NO: 907203 - RNA, 22 nt, Human
uacagaaaaacuggcauugaag

SEQ ID NO: 907204 - RNA, 22 nt, Human
aauguaugagcgugaaagcacu

SEQ ID NO: 907205 - RNA, 22 nt, Human
gccuggugguauccuggcaaga

SEQ ID NO: 907206 - RNA, 22 nt, Human
acagacauggaccaagcacugu

SEQ ID NO: 907207 - RNA, 22 nt, Human
aggaagggcuguuucuccaaga

SEQ ID NO: 907208 - RNA, 22 nt, Human
uuucucauuuagaguggcaggg

SEQ ID NO: 907209 - RNA, 22 nt, Human
gaauuuaaauuuaaaucuacca

SEQ ID NO: 907210 - RNA, 22 nt, Human
ugcuggaaagagaguuucaaug

SEQ ID NO: 907211 - RNA, 20 nt, Human
gaugucuuggucacaguggc

SEQ ID NO: 907212 - RNA, 22 nt, Human
cuagccagacucaagggccacc

SEQ ID NO: 907213 - RNA, 22 nt, Human
uuacaacucugaacuacagagg

SEQ ID NO: 907214 - RNA, 22 nt, Human
cugagccccucugaccucagag

SEQ ID NO: 907215 - RNA, 19 nt, Human
cugaggcccauguaccaug

SEQ ID NO: 907216 - RNA, 22 nt, Human
cuguccagcuuggcuccugggg

SEQ ID NO: 907217 - RNA, 22 nt, Human
agcaacuuuauuccacugggca

SEQ ID NO: 907218 - RNA, 22 nt, Human
ugcuacacucaaucagugcuau

SEQ ID NO: 907219 - RNA, 22 nt, Human
aucugcaggauguuaggaugau

SEQ ID NO: 907220 - RNA, 22 nt, Human
gugcagugaaaaaagaaugucc

SEQ ID NO: 907221 - RNA, 22 nt, Human
accuacagaucuuugaaugugu

SEQ ID NO: 907222 - RNA, 22 nt, Human
gggcucuguggaugugagagcu

SEQ ID NO: 907223 - RNA, 22 nt, Human
ggccagcuggaguuccgggugg

SEQ ID NO: 907224 - RNA, 22 nt, Human
uuugggaacaaugaggaucuga

SEQ ID NO: 907225 - RNA, 22 nt, Human
cagucugggacugagcuccacc

SEQ ID NO: 907226 - RNA, 22 nt, Human
gucuuauuuaaccuaaauuucu

SEQ ID NO: 907227 - RNA, 22 nt, Human
uuuuacaagcugagucguuaaa

SEQ ID NO: 907228 - RNA, 22 nt, Human
cugaggccagcugcagagcucu

SEQ ID NO: 907229 - RNA, 22 nt, Human
uacagauauagagauuuauaga

SEQ ID NO: 907230 - RNA, 23 nt, Human
uuguuucuuuguauugucucuau

SEQ ID NO: 907231 - RNA, 21 nt, Human
uggcccuggccacggcugcca

SEQ ID NO: 907232 - RNA, 22 nt, Human
caugaauuuauauuauuaguga

SEQ ID NO: 907233 - RNA, 22 nt, Human
caugcuuauauggaaaggaaga

SEQ ID NO: 907234 - RNA, 22 nt, Human
cauuuguuaauuacuauuaucu

SEQ ID NO: 907235 - RNA, 22 nt, Human
ccacagugguucucaaccaggg

SEQ ID NO: 907236 - RNA, 22 nt, Human
acauuucuuugcuagacagcag

SEQ ID NO: 907237 - RNA, 22 nt, Human
gcuggugagcaaaggagaagga

SEQ ID NO: 907238 - RNA, 22 nt, Human
augccacauaaccaguucacuu

SEQ ID NO: 907239 - RNA, 22 nt, Human
aacuucugcuuuuacaggcagu

SEQ ID NO: 907240 - RNA, 22 nt, Human
gacaggguccaaaggcagggga

SEQ ID NO: 907241 - RNA, 22 nt, Human
uugcugcuuucauuuauacagu

SEQ ID NO: 907242 - RNA, 22 nt, Human
cugugucugaauaacucugugu

SEQ ID NO: 907243 - RNA, 22 nt, Human
acuguacuuuagaaaguguagu

SEQ ID NO: 907244 - RNA, 22 nt, Human
uucaagauccagcacaacagug

SEQ ID NO: 907245 - RNA, 22 nt, Human
uuccaaagcacuugauguaaag

SEQ ID NO: 907246 - RNA, 22 nt, Human
cuggcuggguuccaggauucca

SEQ ID NO: 907247 - RNA, 22 nt, Human
cccuggagggacagcugcucua

SEQ ID NO: 907248 - RNA, 22 nt, Human
ccaggcaauucugaaagcauuu

SEQ ID NO: 907249 - RNA, 22 nt, Human
guagaauuuuaauaauggagau

SEQ ID NO: 907250 - RNA, 22 nt, Human
gugaaggacugaaugaaaaugu

SEQ ID NO: 907251 - RNA, 22 nt, Human
ggagagagaccuccaugcccag

SEQ ID NO: 907252 - RNA, 22 nt, Human
uauagaaguaagcauugugaug

SEQ ID NO: 907253 - RNA, 18 nt, Human
gugcaugcaugcucugcc

SEQ ID NO: 907254 - RNA, 22 nt, Human
ggucugugugcuuugggaagug

SEQ ID NO: 907255 - RNA, 22 nt, Human
ugcuagaauuagguuaaacaaa

SEQ ID NO: 907256 - RNA, 22 nt, Human
gagaaagauguaggcugggagg

SEQ ID NO: 907257 - RNA, 22 nt, Human
cuggagauguccgggugcuguu

SEQ ID NO: 907258 - RNA, 22 nt, Human
gcccaggacucagggugucgcg

SEQ ID NO: 907259 - RNA, 22 nt, Human
gaaaaggccuggggcaaagugu

SEQ ID NO: 907260 - RNA, 22 nt, Human
caaugucugggagaccugugau

SEQ ID NO: 907261 - RNA, 22 nt, Human
ucaguuuauuucuuguuccaca

SEQ ID NO: 907262 - RNA, 22 nt, Human
aucucauaacucauuugaagac

SEQ ID NO: 907263 - RNA, 22 nt, Human
ucagaggauugccucagcgagc
